United States Patent Application Publication US 2005/0255487 A1 - sequence listing, part 67

SEQ ID NO: 1838660 - RNA, 19 nt, Homo sapiens
  misc_RNA (1)...(19): siRNA sense strand
ccaaaggcucuacucuuau

SEQ ID NO: 1838661 - RNA, 19 nt, Homo sapiens
  misc_RNA (1)...(19): siRNA sense strand
gaugcagugagaauaauga

SEQ ID NO: 1838662 - RNA, 19 nt, Homo sapiens
  misc_RNA (1)...(19): siRNA sense strand
gcuguguguucacuuggaa

SEQ ID NO: 1838663 - RNA, 19 nt, Homo sapiens
  misc_RNA (1)...(19): siRNA sense strand
caccgugaguggauacuuc

SEQ ID NO: 1838664 - RNA, 19 nt, Homo sapiens
  misc_RNA (1)...(19): siRNA sense strand
ggagcaguccguuugauac

SEQ ID NO: 1838665 - RNA, 19 nt, Homo sapiens
  misc_RNA (1)...(19): siRNA sense strand
aaaguaagagccucagcaa

SEQ ID NO: 1838666 - RNA, 19 nt, Homo sapiens
  misc_RNA (1)...(19): siRNA sense strand
gauucgaaccaccaccuuu

SEQ ID NO: 1838667 - RNA, 19 nt, Homo sapiens
  misc_RNA (1)...(19): siRNA sense strand
gcauagaccuggacaauua

SEQ ID NO: 1838668 - RNA, 19 nt, Homo sapiens
  misc_RNA (1)...(19): siRNA sense strand
gaagaucccuuucaccaau

SEQ ID NO: 1838669 - RNA, 19 nt, Homo sapiens
  misc_RNA (1)...(19): siRNA sense strand
gcagacauuuccagcauaa

SEQ ID NO: 1838670 - RNA, 19 nt, Homo sapiens
  misc_RNA (1)...(19): siRNA sense strand
gaacagcaguggcaagauc

SEQ ID NO: 1838671 - RNA, 19 nt, Homo sapiens
  misc_RNA (1)...(19): siRNA sense strand
gugaagauuuggaggauuu

SEQ ID NO: 1838672 - RNA, 19 nt, Homo sapiens
  misc_RNA (1)...(19): siRNA sense strand
gggauucggugaagauuug

SEQ ID NO: 1838673 - RNA, 19 nt, Homo sapiens
  misc_RNA (1)...(19): siRNA sense strand
ccaaauaccaguugaguga

SEQ ID NO: 1838674 - RNA, 19 nt, Homo sapiens
  misc_RNA (1)...(19): siRNA sense strand
ggacagagucaccauuuga

SEQ ID NO: 1838675 - RNA, 19 nt, Homo sapiens
  misc_RNA (1)...(19): siRNA sense strand
ucaaugaacugcuguccaa

SEQ ID NO: 1838676 - RNA, 19 nt, Homo sapiens
  misc_RNA (1)...(19): siRNA sense strand
gaacacaucagcaagugaa

SEQ ID NO: 1838677 - RNA, 19 nt, Homo sapiens
  misc_RNA (1)...(19): siRNA sense strand
ggguggacguggauacuua

SEQ ID NO: 1838678 - RNA, 19 nt, Homo sapiens
  misc_RNA (1)...(19): siRNA sense strand
ggacauagaucugauugac

SEQ ID NO: 1838679 - RNA, 19 nt, Homo sapiens
  misc_RNA (1)...(19): siRNA sense strand
gaagugaacacaucagcaa

SEQ ID NO: 1838680 - RNA, 19 nt, Homo sapiens
  misc_RNA (1)...(19): siRNA sense strand
gaagcuauguuggaugaga

SEQ ID NO: 1838681 - RNA, 19 nt, Homo sapiens
  misc_RNA (1)...(19): siRNA sense strand
cagaagcagugccuaguga

SEQ ID NO: 1838682 - RNA, 19 nt, Homo sapiens
  misc_RNA (1)...(19): siRNA sense strand
ugacucaggccuuuccuua

SEQ ID NO: 1838683 - RNA, 19 nt, Homo sapiens
  misc_RNA (1)...(19): siRNA sense strand
ggaccuggccauugaagaa

SEQ ID NO: 1838684 - RNA, 19 nt, Homo sapiens
  misc_RNA (1)...(19): siRNA sense strand
ggcaagaucucauguccau

SEQ ID NO: 1838685 - RNA, 19 nt, Homo sapiens
  misc_RNA (1)...(19): siRNA sense strand
ucaccauucugcugaguuu

SEQ ID NO: 1838686 - RNA, 19 nt, Homo sapiens
  misc_RNA (1)...(19): siRNA sense strand
caagugaaauccuguacag

SEQ ID NO: 1838687 - RNA, 19 nt, Homo sapiens
  misc_RNA (1)...(19): siRNA sense strand
gagcauagaccuggacaau

SEQ ID NO: 1838688 - RNA, 19 nt, Homo sapiens
  misc_RNA (1)...(19): siRNA sense strand
ggaauuugacucugacuca

SEQ ID NO: 1838689 - RNA, 19 nt, Homo sapiens
  misc_RNA (1)...(19): siRNA sense strand
gaugagaucagccuuaugg

SEQ ID NO: 1838690 - RNA, 19 nt, Homo sapiens
  misc_RNA (1)...(19): siRNA sense strand
ccaguggccuccaagaugu

SEQ ID NO: 1838691 - RNA, 19 nt, Homo sapiens
  misc_RNA (1)...(19): siRNA sense strand
ggaaaugcaggccauggaa

SEQ ID NO: 1838692 - RNA, 19 nt, Homo sapiens
  misc_RNA (1)...(19): siRNA sense strand
caagaucucauguccauca

SEQ ID NO: 1838693 - RNA, 19 nt, Homo sapiens
  misc_RNA (1)...(19): siRNA sense strand
ccaaaggaccggagaaagu

SEQ ID NO: 1838694 - RNA, 19 nt, Homo sapiens
  misc_RNA (1)...(19): siRNA sense strand
augaacugcuguccaaaua

SEQ ID NO: 1838695 - RNA, 19 nt, Homo sapiens
  misc_RNA (1)...(19): siRNA sense strand
gagcagggauucggugaag

SEQ ID NO: 1838696 - RNA, 19 nt, Homo sapiens
  misc_RNA (1)...(19): siRNA sense strand
ugacagggcucuucuuucc

SEQ ID NO: 1838697 - RNA, 19 nt, Homo sapiens
  misc_RNA (1)...(19): siRNA sense strand
auacuuaccugaccucaca

SEQ ID NO: 1838698 - RNA, 19 nt, Homo sapiens
  misc_RNA (1)...(19): siRNA sense strand
cagcagacauuuccagcau

SEQ ID NO: 1838699 - RNA, 19 nt, Homo sapiens
  misc_RNA (1)...(19): siRNA sense strand
gcuaccagccugaguauuc

SEQ ID NO: 1838700 - RNA, 19 nt, Homo sapiens
  misc_RNA (1)...(19): siRNA sense strand
cagagucaccauuugauuu

SEQ ID NO: 1838701 - RNA, 19 nt, Homo sapiens
  misc_RNA (1)...(19): siRNA sense strand
ccaaagaggacauagaucu

SEQ ID NO: 1838702 - RNA, 19 nt, Homo sapiens
  misc_RNA (1)...(19): siRNA sense strand
gaacugcuguccaaauacc

SEQ ID NO: 1838703 - RNA, 19 nt, Homo sapiens
  misc_RNA (1)...(19): siRNA sense strand
gggacagagucaccauuug

SEQ ID NO: 1838704 - RNA, 19 nt, Homo sapiens
  misc_RNA (1)...(19): siRNA sense strand
acauagaucugauugacau

SEQ ID NO: 1838705 - RNA, 19 nt, Homo sapiens
  misc_RNA (1)...(19): siRNA sense strand
gagaaggagcugcgagaug

SEQ ID NO: 1838706 - RNA, 19 nt, Homo sapiens
  misc_RNA (1)...(19): siRNA sense strand
acucaggccuuuccuuaga

SEQ ID NO: 1838707 - RNA, 19 nt, Homo sapiens
  misc_RNA (1)...(19): siRNA sense strand
guggagacuuaaccaaaga

SEQ ID NO: 1838708 - RNA, 19 nt, Homo sapiens
  misc_RNA (1)...(19): siRNA sense strand
ccagugcccucaagaaagg

SEQ ID NO: 1838709 - RNA, 19 nt, Homo sapiens
  misc_RNA (1)...(19): siRNA sense strand
ccaacacucccaucaauca

SEQ ID NO: 1838710 - RNA, 19 nt, Homo sapiens
  misc_RNA (1)...(19): siRNA sense strand
ggagaaugcugaguuucca

SEQ ID NO: 1838711 - RNA, 19 nt, Homo sapiens
  misc_RNA (1)...(19): siRNA sense strand
ccauggaagugaacacauc

SEQ ID NO: 1838712 - RNA, 19 nt, Homo sapiens
  misc_RNA (1)...(19): siRNA sense strand
caaaggaccggagaaagug

SEQ ID NO: 1838713 - RNA, 19 nt, Homo sapiens
  misc_RNA (1)...(19): siRNA sense strand
ucuguuagaugaagcuaug

SEQ ID NO: 1838714 - RNA, 19 nt, Homo sapiens
  misc_RNA (1)...(19): siRNA sense strand
gccaaccacugagguaaau

SEQ ID NO: 1838715 - RNA, 19 nt, Homo sapiens
  misc_RNA (1)...(19): siRNA sense strand
caaccacacauacaacaug

SEQ ID NO: 1838716 - RNA, 19 nt, Homo sapiens
  misc_RNA (1)...(19): siRNA sense strand
ccacugagcaccaacuaca

SEQ ID NO: 1838717 - RNA, 19 nt, Homo sapiens
  misc_RNA (1)...(19): siRNA sense strand
gaagcagugccuagugaga

SEQ ID NO: 1838718 - RNA, 19 nt, Homo sapiens
  misc_RNA (1)...(19): siRNA sense strand
gcuaguggauggagagacu

SEQ ID NO: 1838719 - RNA, 19 nt, Homo sapiens
  misc_RNA (1)...(19): siRNA sense strand
gcagggauucggugaagau

SEQ ID NO: 1838720 - RNA, 19 nt, Homo sapiens
  misc_RNA (1)...(19): siRNA sense strand
gaucugauugacauccuuu

SEQ ID NO: 1838721 - RNA, 19 nt, Homo sapiens
  misc_RNA (1)...(19): siRNA sense strand
acacucccaucaaucagaa

SEQ ID NO: 1838722 - RNA, 19 nt, Homo sapiens
  misc_RNA (1)...(19): siRNA sense strand
aggaggaauuugacucuga

SEQ ID NO: 1838723 - RNA, 19 nt, Homo sapiens
  misc_RNA (1)...(19): siRNA sense strand
gcgaaacggagcagggauu

SEQ ID NO: 1838724 - RNA, 19 nt, Homo sapiens
  misc_RNA (1)...(19): siRNA sense strand
augaagcuauguuggauga

SEQ ID NO: 1838725 - RNA, 19 nt, Homo sapiens
  misc_RNA (1)...(19): siRNA sense strand
gugaacacaucagcaagug

SEQ ID NO: 1838726 - RNA, 19 nt, Homo sapiens
  misc_RNA (1)...(19): siRNA sense strand
uaaccaaagaggacauaga

SEQ ID NO: 1838727 - RNA, 19 nt, Homo sapiens
  misc_RNA (1)...(19): siRNA sense strand
gcaguucuuccucuucuuc

SEQ ID NO: 1838728 - RNA, 19 nt, Homo sapiens
  misc_RNA (1)...(19): siRNA sense strand
cauagcccuucuucccuaa

SEQ ID NO: 1838729 - RNA, 19 nt, Homo sapiens
  misc_RNA (1)...(19): siRNA sense strand
uggaugagaucagccuuau

SEQ ID NO: 1838730 - RNA, 19 nt, Homo sapiens
  misc_RNA (1)...(19): siRNA sense strand
aaagaggacauagaucuga

SEQ ID NO: 1838731 - RNA, 19 nt, Homo sapiens
  misc_RNA (1)...(19): siRNA sense strand
gaggacauagaucugauug

SEQ ID NO: 1838732 - RNA, 19 nt, Homo sapiens
  misc_RNA (1)...(19): siRNA sense strand
gguaaaugccuggcugguu

SEQ ID NO: 1838733 - RNA, 19 nt, Homo sapiens
  misc_RNA (1)...(19): siRNA sense strand
uccaaguucugccgcauga

SEQ ID NO: 1838734 - RNA, 19 nt, Homo sapiens
  misc_RNA (1)...(19): siRNA sense strand
gaagccaccugccccuuug

SEQ ID NO: 1838735 - RNA, 19 nt, Homo sapiens
  misc_RNA (1)...(19): siRNA sense strand
caaagaggacauagaucug

SEQ ID NO: 1838736 - RNA, 19 nt, Homo sapiens
  misc_RNA (1)...(19): siRNA sense strand
ggugaagauuuggaggauu

SEQ ID NO: 1838737 - RNA, 19 nt, Homo sapiens
  misc_RNA (1)...(19): siRNA sense strand
gggcccaguucugccuaua

SEQ ID NO: 1838738 - RNA, 19 nt, Homo sapiens
  misc_RNA (1)...(19): siRNA sense strand
caguggagacuuaaccaaa

SEQ ID NO: 1838739 - RNA, 19 nt, Homo sapiens
  misc_RNA (1)...(19): siRNA sense strand
ggaggaggaauuugacucu

SEQ ID NO: 1838740 - RNA, 19 nt, Homo sapiens
  misc_RNA (1)...(19): siRNA sense strand
gcaguggcaagaucucaug

SEQ ID NO: 1838741 - RNA, 19 nt, Homo sapiens
  misc_RNA (1)...(19): siRNA sense strand
ccucuugucuccucuucug

SEQ ID NO: 1838742 - RNA, 19 nt, Homo sapiens
  misc_RNA (1)...(19): siRNA sense strand
ggagcaggauguggagaag

SEQ ID NO: 1838743 - RNA, 19 nt, Homo sapiens
  misc_RNA (1)...(19): siRNA sense strand
gcaagugaaauccuguaca

SEQ ID NO: 1838744 - RNA, 19 nt, Homo sapiens
  misc_RNA (1)...(19): siRNA sense strand
gucaguaugcgcuccagua

SEQ ID NO: 1838745 - RNA, 19 nt, Homo sapiens
  misc_RNA (1)...(19): siRNA sense strand
ugcgacagaugaagcagaa

SEQ ID NO: 1838746 - RNA, 19 nt, Homo sapiens
  misc_RNA (1)...(19): siRNA sense strand
agagucaccauuugauuug

SEQ ID NO: 1838747 - RNA, 19 nt, Homo sapiens
  misc_RNA (1)...(19): siRNA sense strand
ggcaggagaggaagccaaa

SEQ ID NO: 1838748 - RNA, 19 nt, Homo sapiens
  misc_RNA (1)...(19): siRNA sense strand
uagaugaagcuauguugga

SEQ ID NO: 1838749 - RNA, 19 nt, Homo sapiens
  misc_RNA (1)...(19): siRNA sense strand
agagcugccugacccuuug

SEQ ID NO: 1838750 - RNA, 19 nt, Homo sapiens
  misc_RNA (1)...(19): siRNA sense strand
caggacuucuuacucuuca

SEQ ID NO: 1838751 - RNA, 19 nt, Homo sapiens
  misc_RNA (1)...(19): siRNA sense strand
gccaggacuucuuacucuu

SEQ ID NO: 1838752 - RNA, 19 nt, Homo sapiens
  misc_RNA (1)...(19): siRNA sense strand
cugcagccaggacuucuua

SEQ ID NO: 1838753 - RNA, 19 nt, Homo sapiens
  misc_RNA (1)...(19): siRNA sense strand
gcgacaggauauugaucug

SEQ ID NO: 1838754 - RNA, 19 nt, Homo sapiens
  misc_RNA (1)...(19): siRNA sense strand
ccaguucugccuauacuca

SEQ ID NO: 1838755 - RNA, 19 nt, Homo sapiens
  misc_RNA (1)...(19): siRNA sense strand
gcccaguucugccuauacu

SEQ ID NO: 1838756 - RNA, 19 nt, Homo sapiens
  misc_RNA (1)...(19): siRNA sense strand
gggagaaaguggaguuccu

SEQ ID NO: 1838757 - RNA, 19 nt, Homo sapiens
  misc_RNA (1)...(19): siRNA sense strand
aaauaccaguugagugaag

SEQ ID NO: 1838758 - RNA, 19 nt, Homo sapiens
  misc_RNA (1)...(19): siRNA sense strand
gagccaugaagaucccuuu

SEQ ID NO: 1838759 - RNA, 19 nt, Homo sapiens
  misc_RNA (1)...(19): siRNA sense strand
ggccauugaagaaggcuuu

SEQ ID NO: 1838760 - RNA, 19 nt, Homo sapiens
  misc_RNA (1)...(19): siRNA sense strand
agaugaagcuauguuggau

SEQ ID NO: 1838761 - RNA, 19 nt, Homo sapiens
  misc_RNA (1)...(19): siRNA sense strand
gacagagucaccauuugau

SEQ ID NO: 1838762 - RNA, 19 nt, Homo sapiens
  misc_RNA (1)...(19): siRNA sense strand
gccacaaccacacauacaa

SEQ ID NO: 1838763 - RNA, 19 nt, Homo sapiens
  misc_RNA (1)...(19): siRNA sense strand
cagagcugccugacccuuu

SEQ ID NO: 1838764 - RNA, 19 nt, Homo sapiens
  misc_RNA (1)...(19): siRNA sense strand
gagacccacugagcaccaa

SEQ ID NO: 1838765 - RNA, 19 nt, Homo sapiens
  misc_RNA (1)...(19): siRNA sense strand
gccugaguauuccaaguuc

SEQ ID NO: 1838766 - RNA, 19 nt, Homo sapiens
  misc_RNA (1)...(19): siRNA sense strand
agaaaggcagcaaggagaa

SEQ ID NO: 1838767 - RNA, 19 nt, Homo sapiens
  misc_RNA (1)...(19): siRNA sense strand
gcguuucuccgaagcaugu

SEQ ID NO: 1838768 - RNA, 19 nt, Homo sapiens
  misc_RNA (1)...(19): siRNA sense strand
gcguuucuccgaagcaugu

SEQ ID NO: 1838769 - RNA, 19 nt, Homo sapiens
  misc_RNA (1)...(19): siRNA sense strand
gagaagagcaggccaagua

SEQ ID NO: 1838770 - RNA, 19 nt, Homo sapiens
  misc_RNA (1)...(19): siRNA sense strand
gaaaugccgugcucgcuuu

SEQ ID NO: 1838771 - RNA, 19 nt, Homo sapiens
  misc_RNA (1)...(19): siRNA sense strand
ucaaucugcucaugcauua

SEQ ID NO: 1838772 - RNA, 19 nt, Homo sapiens
  misc_RNA (1)...(19): siRNA sense strand
gaugcuagguucuggugua

SEQ ID NO: 1838773 - RNA, 19 nt, Homo sapiens
  misc_RNA (1)...(19): siRNA sense strand
ggagagcgcugccaucaac

SEQ ID NO: 1838774 - RNA, 19 nt, Homo sapiens
  misc_RNA (1)...(19): siRNA sense strand
gacccuggcucgccuaaga

SEQ ID NO: 1838775 - RNA, 19 nt, Homo sapiens
  misc_RNA (1)...(19): siRNA sense strand
ccaacucucucucuacgaa

SEQ ID NO: 1838776 - RNA, 19 nt, Homo sapiens
  misc_RNA (1)...(19): siRNA sense strand
ccaagaagccaaccaucaa

SEQ ID NO: 1838777 - RNA, 19 nt, Homo sapiens
  misc_RNA (1)...(19): siRNA sense strand
ucaaugccuucaugcugua

SEQ ID NO: 1838778 - RNA, 19 nt, Homo sapiens
  misc_RNA (1)...(19): siRNA sense strand
cagagaaggaggccaagaa

SEQ ID NO: 1838779 - RNA, 19 nt, Homo sapiens
  misc_RNA (1)...(19): siRNA sense strand
gccaagaagccaaccauca

SEQ ID NO: 1838780 - RNA, 19 nt, Homo sapiens
  misc_RNA (1)...(19): siRNA sense strand
ggacaucagccagaagcaa

SEQ ID NO: 1838781 - RNA, 19 nt, Homo sapiens
  misc_RNA (1)...(19): siRNA sense strand
aagaggcggucgagggaaa

SEQ ID NO: 1838782 - RNA, 19 nt, Homo sapiens
  misc_RNA (1)...(19): siRNA sense strand
gcgcugccaucaaccagau

SEQ ID NO: 1838783 - RNA, 19 nt, Homo sapiens
  misc_RNA (1)...(19): siRNA sense strand
ugaccucucuggcuucuac

SEQ ID NO: 1838784 - RNA, 19 nt, Homo sapiens
  misc_RNA (1)...(19): siRNA sense strand
ucaaccagcagacggauug

SEQ ID NO: 1838785 - RNA, 19 nt, Homo sapiens
  misc_RNA (1)...(19): siRNA sense strand
ggugugguccgugcagaua

SEQ ID NO: 1838786 - RNA, 19 nt, Homo sapiens
  misc_RNA (1)...(19): siRNA sense strand
gaagccaaccaucaagaag

SEQ ID NO: 1838787 - RNA, 19 nt, Homo sapiens
  misc_RNA (1)...(19): siRNA sense strand
ggacaacuacgggaagaag

SEQ ID NO: 1838788 - RNA, 19 nt, Homo sapiens
  misc_RNA (1)...(19): siRNA sense strand
aagagcaggccaaguacua

SEQ ID NO: 1838789 - RNA, 19 nt, Homo sapiens
  misc_RNA (1)...(19): siRNA sense strand
gagcaggccaaguacuaug

SEQ ID NO: 1838790 - RNA, 19 nt, Homo sapiens
  misc_RNA (1)...(19): siRNA sense strand
guacaugaaggagaugaga

SEQ ID NO: 1838791 - RNA, 19 nt, Homo sapiens
  misc_RNA (1)...(19): siRNA sense strand
caagaagccaaccaucaag

SEQ ID NO: 1838792 - RNA, 19 nt, Homo sapiens
  misc_RNA (1)...(19): siRNA sense strand
acaacuacgggaagaagaa

SEQ ID NO: 1838793 - RNA, 19 nt, Homo sapiens
  misc_RNA (1)...(19): siRNA sense strand
gggaaaagcaccaagaauc

SEQ ID NO: 1838794 - RNA, 19 nt, Homo sapiens
  misc_RNA (1)...(19): siRNA sense strand
gcagagaaggaggccaaga

SEQ ID NO: 1838795 - RNA, 19 nt, Homo sapiens
  misc_RNA (1)...(19): siRNA sense strand
agaagccaaccaucaagaa

SEQ ID NO: 1838796 - RNA, 19 nt, Homo sapiens
  misc_RNA (1)...(19): siRNA sense strand
gaagagcaggccaaguacu

SEQ ID NO: 1838797 - RNA, 19 nt, Homo sapiens
  misc_RNA (1)...(19): siRNA sense strand
cgucuacuccgccuucaau

SEQ ID NO: 1838798 - RNA, 19 nt, Homo sapiens
  misc_RNA (1)...(19): siRNA sense strand
gacaacuacgggaagaaga

SEQ ID NO: 1838799 - RNA, 19 nt, Homo sapiens
  misc_RNA (1)...(19): siRNA sense strand
gcagaccccugaccucucu

SEQ ID NO: 1838800 - RNA, 19 nt, Homo sapiens
  misc_RNA (1)...(19): siRNA sense strand
ggagaggcagcugcacaug

SEQ ID NO: 1838801 - RNA, 19 nt, Homo sapiens
  misc_RNA (1)...(19): siRNA sense strand
cgggacaacuacgggaaga

SEQ ID NO: 1838802 - RNA, 19 nt, Homo sapiens
  misc_RNA (1)...(19): siRNA sense strand
ggaauuugcucguccaucu

SEQ ID NO: 1838803 - RNA, 19 nt, Homo sapiens
  misc_RNA (1)...(19): siRNA sense strand
gaucauggccauuucuaaa

SEQ ID NO: 1838804 - RNA, 19 nt, Homo sapiens
  misc_RNA (1)...(19): siRNA sense strand
guaaggagcuaaacagaac

SEQ ID NO: 1838805 - RNA, 19 nt, Homo sapiens
  misc_RNA (1)...(19): siRNA sense strand
caagaaguguucccugugu

SEQ ID NO: 1838806 - RNA, 19 nt, Homo sapiens
  misc_RNA (1)...(19): siRNA sense strand
cuucagagaugacagcauu

SEQ ID NO: 1838807 - RNA, 19 nt, Homo sapiens
  misc_RNA (1)...(19): siRNA sense strand
acaccuggcugcccaagaa

SEQ ID NO: 1838808 - RNA, 19 nt, Homo sapiens
  misc_RNA (1)...(19): siRNA sense strand
gcaucugccuuucuauaca

SEQ ID NO: 1838809 - RNA, 19 nt, Homo sapiens
  misc_RNA (1)...(19): siRNA sense strand
gcugggccaucaggaauuu

SEQ ID NO: 1838810 - RNA, 19 nt, Homo sapiens
  misc_RNA (1)...(19): siRNA sense strand
gugauggccuugugaugga

SEQ ID NO: 1838811 - RNA, 19 nt, Homo sapiens
  misc_RNA (1)...(19): siRNA sense strand
caucugccuuucuauacaa

SEQ ID NO: 1838812 - RNA, 19 nt, Homo sapiens
  misc_RNA (1)...(19): siRNA sense strand
gcaauucggccucggucuu

SEQ ID NO: 1838813 - RNA, 19 nt, Homo sapiens
  misc_RNA (1)...(19): siRNA sense strand
ggauacagcacaguaagga

SEQ ID NO: 1838814 - RNA, 19 nt, Homo sapiens
  misc_RNA (1)...(19): siRNA sense strand
gcacguacuaccacuuuua

SEQ ID NO: 1838815 - RNA, 19 nt, Homo sapiens
  misc_RNA (1)...(19): siRNA sense strand
gaaguguucccuguguaaa

SEQ ID NO: 1838816 - RNA, 19 nt, Homo sapiens
  misc_RNA (1)...(19): siRNA sense strand
gaacugugagcacgaugug

SEQ ID NO: 1838817 - RNA, 19 nt, Homo sapiens
  misc_RNA (1)...(19): siRNA sense strand
uuccaggacuccagaacua

SEQ ID NO: 1838818 - RNA, 19 nt, Homo sapiens
  misc_RNA (1)...(19): siRNA sense strand
ggaucauggccauuucuaa

SEQ ID NO: 1838819 - RNA, 19 nt, Homo sapiens
  misc_RNA (1)...(19): siRNA sense strand
uaccuggccuucagagaug

SEQ ID NO: 1838820 - RNA, 19 nt, Homo sapiens
  misc_RNA (1)...(19): siRNA sense strand
aagaaguguucccugugua

SEQ ID NO: 1838821 - RNA, 19 nt, Homo sapiens
  misc_RNA (1)...(19): siRNA sense strand
ucauggccauuucuaaagu

SEQ ID NO: 1838822 - RNA, 19 nt, Homo sapiens
  misc_RNA (1)...(19): siRNA sense strand
agaaguguucccuguguaa

SEQ ID NO: 1838823 - RNA, 19 nt, Homo sapiens
  misc_RNA (1)...(19): siRNA sense strand
agaaccugcugccugaaug

SEQ ID NO: 1838824 - RNA, 19 nt, Homo sapiens
  misc_RNA (1)...(19): siRNA sense strand
ggaacugugagcacgaugu

SEQ ID NO: 1838825 - RNA, 19 nt, Homo sapiens
  misc_RNA (1)...(19): siRNA sense strand
ucagagaugacagcauuug

SEQ ID NO: 1838826 - RNA, 19 nt, Homo sapiens
  misc_RNA (1)...(19): siRNA sense strand
cuaccaccgucugcacgua

SEQ ID NO: 1838827 - RNA, 19 nt, Homo sapiens
  misc_RNA (1)...(19): siRNA sense strand
ucucuuacagugugauuug

SEQ ID NO: 1838828 - RNA, 19 nt, Homo sapiens
  misc_RNA (1)...(19): siRNA sense strand
gggcugggccaucaggaau

SEQ ID NO: 1838829 - RNA, 19 nt, Homo sapiens
  misc_RNA (1)...(19): siRNA sense strand
cugcuuuccucaggcauuu

SEQ ID NO: 1838830 - RNA, 19 nt, Homo sapiens
  misc_RNA (1)...(19): siRNA sense strand
gaaccugcugccugaaugg

SEQ ID NO: 1838831 - RNA, 19 nt, Homo sapiens
  misc_RNA (1)...(19): siRNA sense strand
aguguucccuguguaaaug

SEQ ID NO: 1838832 - RNA, 19 nt, Homo sapiens
  misc_RNA (1)...(19): siRNA sense strand
caguaaggagcuaaacaga

SEQ ID NO: 1838833 - RNA, 19 nt, Homo sapiens
  misc_RNA (1)...(19): siRNA sense strand
aguaaggagcuaaacagaa

SEQ ID NO: 1838834 - RNA, 19 nt, Homo sapiens
  misc_RNA (1)...(19): siRNA sense strand
gaccaucugugauuucuga

SEQ ID NO: 1838835 - RNA, 19 nt, Homo sapiens
  misc_RNA (1)...(19): siRNA sense strand
cugcagggcuccauaauga

SEQ ID NO: 1838836 - RNA, 19 nt, Homo sapiens
  misc_RNA (1)...(19): siRNA sense strand
gaaggacguuuguguugga

SEQ ID NO: 1838837 - RNA, 19 nt, Homo sapiens
  misc_RNA (1)...(19): siRNA sense strand
cgggagagauggugucaaa

SEQ ID NO: 1838838 - RNA, 19 nt, Homo sapiens
  misc_RNA (1)...(19): siRNA sense strand
gagagauggugucaaagga

SEQ ID NO: 1838839 - RNA, 19 nt, Homo sapiens
  misc_RNA (1)...(19): siRNA sense strand
ugaagaaguacaacacaua

SEQ ID NO: 1838840 - RNA, 19 nt, Homo sapiens
  misc_RNA (1)...(19): siRNA sense strand
cgacugaccaucugugauu

SEQ ID NO: 1838841 - RNA, 19 nt, Homo sapiens
  misc_RNA (1)...(19): siRNA sense strand
caucaaauccugcagacaa

SEQ ID NO: 1838842 - RNA, 19 nt, Homo sapiens
  misc_RNA (1)...(19): siRNA sense strand
gcauugcugucccaaggaa

SEQ ID NO: 1838843 - RNA, 19 nt, Homo sapiens
  misc_RNA (1)...(19): siRNA sense strand
guggagauguacacagaug

SEQ ID NO: 1838844 - RNA, 19 nt, Homo sapiens
  misc_RNA (1)...(19): siRNA sense strand
gaugggcaguggaaugaca

SEQ ID NO: 1838845 - RNA, 19 nt, Homo sapiens
  misc_RNA (1)...(19): siRNA sense strand
gugaaggacguuuguguug

SEQ ID NO: 1838846 - RNA, 19 nt, Homo sapiens
  misc_RNA (1)...(19): siRNA sense strand
gcuuccagcucaucuagau

SEQ ID NO: 1838847 - RNA, 19 nt, Homo sapiens
  misc_RNA (1)...(19): siRNA sense strand
ggagagauggugucaaagg

SEQ ID NO: 1838848 - RNA, 19 nt, Homo sapiens
  misc_RNA (1)...(19): siRNA sense strand
gugaagaaguacaacacau

SEQ ID NO: 1838849 - RNA, 19 nt, Homo sapiens
  misc_RNA (1)...(19): siRNA sense strand
cagaugggcaguggaauga

SEQ ID NO: 1838850 - RNA, 19 nt, Homo sapiens
  misc_RNA (1)...(19): siRNA sense strand
gacugaccaucugugauuu

SEQ ID NO: 1838851 - RNA, 19 nt, Homo sapiens
  misc_RNA (1)...(19): siRNA sense strand
gcagggcuccauaaugaca

SEQ ID NO: 1838852 - RNA, 19 nt, Homo sapiens
  misc_RNA (1)...(19): siRNA sense strand
cccaaggaauccagaggaa

SEQ ID NO: 1838853 - RNA, 19 nt, Homo sapiens
  misc_RNA (1)...(19): siRNA sense strand
acacagaugggcaguggaa

SEQ ID NO: 1838854 - RNA, 19 nt, Homo sapiens
  misc_RNA (1)...(19): siRNA sense strand
cgacuucagacaucaaauc

SEQ ID NO: 1838855 - RNA, 19 nt, Homo sapiens
  misc_RNA (1)...(19): siRNA sense strand
gacuuccgcuacucagaug

SEQ ID NO: 1838856 - RNA, 19 nt, Homo sapiens
  misc_RNA (1)...(19): siRNA sense strand
caaggaauccagaggaaaa

SEQ ID NO: 1838857 - RNA, 19 nt, Homo sapiens
  misc_RNA (1)...(19): siRNA sense strand
gcgaagugaaggacguuug

SEQ ID NO: 1838858 - RNA, 19 nt, Homo sapiens
  misc_RNA (1)...(19): siRNA sense strand
ccaaggaauccagaggaaa

SEQ ID NO: 1838859 - RNA, 19 nt, Homo sapiens
  misc_RNA (1)...(19): siRNA sense strand
cgaagugaaggacguuugu

SEQ ID NO: 1838860 - RNA, 19 nt, Homo sapiens
  misc_RNA (1)...(19): siRNA sense strand
agcaguguguggagaugua

SEQ ID NO: 1838861 - RNA, 19 nt, Homo sapiens
  misc_RNA (1)...(19): siRNA sense strand
aagccacacuccacgacuu

SEQ ID NO: 1838862 - RNA, 19 nt, Homo sapiens
  misc_RNA (1)...(19): siRNA sense strand
gaagugaaggacguuugug

SEQ ID NO: 1838863 - RNA, 19 nt, Homo sapiens
  misc_RNA (1)...(19): siRNA sense strand
uaaugacaguaggagagaa

SEQ ID NO: 1838864 - RNA, 19 nt, Homo sapiens
  misc_RNA (1)...(19): siRNA sense strand
ugccuguacucccgacuga

SEQ ID NO: 1838865 - RNA, 19 nt, Homo sapiens
  misc_RNA (1)...(19): siRNA sense strand
ggcaguggaaugacaggaa

SEQ ID NO: 1838866 - RNA, 19 nt, Homo sapiens
  misc_RNA (1)...(19): siRNA sense strand
gagacuuccgcuacucaga

SEQ ID NO: 1838867 - RNA, 19 nt, Homo sapiens
  misc_RNA (1)...(19): siRNA sense strand
ggcaguccaucacuuuuga

SEQ ID NO: 1838868 - RNA, 19 nt, Homo sapiens
  misc_RNA (1)...(19): siRNA sense strand
acagaugggcaguggaaug

SEQ ID NO: 1838869 - RNA, 19 nt, Homo sapiens
  misc_RNA (1)...(19): siRNA sense strand
ggaauccagaggaaaauga

SEQ ID NO: 1838870 - RNA, 19 nt, Homo sapiens
  misc_RNA (1)...(19): siRNA sense strand
ggugcugcgugcgaaguga

SEQ ID NO: 1838871 - RNA, 19 nt, Homo sapiens
  misc_RNA (1)...(19): siRNA sense strand
gaacauauuugaucgaaag

SEQ ID NO: 1838872 - RNA, 19 nt, Homo sapiens
  misc_RNA (1)...(19): siRNA sense strand
gcauugaucucuucuuaga

SEQ ID NO: 1838873 - RNA, 19 nt, Homo sapiens
  misc_RNA (1)...(19): siRNA sense strand
gcccugagcuuguugcuuu

SEQ ID NO: 1838874 - RNA, 19 nt, Homo sapiens
  misc_RNA (1)...(19): siRNA sense strand
ccaugaaacugaacagaaa

SEQ ID NO: 1838875 - RNA, 19 nt, Homo sapiens
  misc_RNA (1)...(19): siRNA sense strand
gaacauggagaucaagauu

SEQ ID NO: 1838876 - RNA, 19 nt, Homo sapiens
  misc_RNA (1)...(19): siRNA sense strand
gaagaaagagaagaaauga

SEQ ID NO: 1838877 - RNA, 19 nt, Homo sapiens
  misc_RNA (1)...(19): siRNA sense strand
gcacugcauugaucucuuc

SEQ ID NO: 1838878 - RNA, 19 nt, Homo sapiens
  misc_RNA (1)...(19): siRNA sense strand
cugcauugaucucuucuua

SEQ ID NO: 1838879 - RNA, 19 nt, Homo sapiens
  misc_RNA (1)...(19): siRNA sense strand
uauggucacucauuucauu

SEQ ID NO: 1838880 - RNA, 19 nt, Homo sapiens
  misc_RNA (1)...(19): siRNA sense strand
acauggagaucaagauuau

SEQ ID NO: 1838881 - RNA, 19 nt, Homo sapiens
  misc_RNA (1)...(19): siRNA sense strand
gauacucaacucauuauug

SEQ ID NO: 1838882 - RNA, 19 nt, Homo sapiens
  misc_RNA (1)...(19): siRNA sense strand
gaagaaggucuaugcaagu

SEQ ID NO: 1838883 - RNA, 19 nt, Homo sapiens
  misc_RNA (1)...(19): siRNA sense strand
ucccugauauugaugauuu

SEQ ID NO: 1838884 - RNA, 19 nt, Homo sapiens
  misc_RNA (1)...(19): siRNA sense strand
gaaggucuaugcaaguuuu

SEQ ID NO: 1838885 - RNA, 19 nt, Homo sapiens
  misc_RNA (1)...(19): siRNA sense strand
ucauuacugucuucagaaa

SEQ ID NO: 1838886 - RNA, 19 nt, Homo sapiens
  misc_RNA (1)...(19): siRNA sense strand
caacuuugaugcgcuuuua

SEQ ID NO: 1838887 - RNA, 19 nt, Homo sapiens
  misc_RNA (1)...(19): siRNA sense strand
caacgcagcagcaccugaa

SEQ ID NO: 1838888 - RNA, 19 nt, Homo sapiens
  misc_RNA (1)...(19): siRNA sense strand
ggccgaacauggagaucaa

SEQ ID NO: 1838889 - RNA, 19 nt, Homo sapiens
  misc_RNA (1)...(19): siRNA sense strand
gccuugggcucccugauau

SEQ ID NO: 1838890 - RNA, 19 nt, Homo sapiens
  misc_RNA (1)...(19): siRNA sense strand
aagaaggucuaugcaaguu

SEQ ID NO: 1838891 - RNA, 19 nt, Homo sapiens
  misc_RNA (1)...(19): siRNA sense strand
agaagaaagagaagaaaug

SEQ ID NO: 1838892 - RNA, 19 nt, Homo sapiens
  misc_RNA (1)...(19): siRNA sense strand
ggauuugcauuccuuacag

SEQ ID NO: 1838893 - RNA, 19 nt, Homo sapiens
  misc_RNA (1)...(19): siRNA sense strand
gccaugaaacugaacagaa

SEQ ID NO: 1838894 - RNA, 19 nt, Homo sapiens
  misc_RNA (1)...(19): siRNA sense strand
uccauauggucacucauuu

SEQ ID NO: 1838895 - RNA, 19 nt, Homo sapiens
  misc_RNA (1)...(19): siRNA sense strand
gauaagaagaaagagaaga

SEQ ID NO: 1838896 - RNA, 19 nt, Homo sapiens
  misc_RNA (1)...(19): siRNA sense strand
uuucauuacugucuucaga

SEQ ID NO: 1838897 - RNA, 19 nt, Homo sapiens
  misc_RNA (1)...(19): siRNA sense strand
gggacuucuugcuggauuu

SEQ ID NO: 1838898 - RNA, 19 nt, Homo sapiens
  misc_RNA (1)...(19): siRNA sense strand
cgccguagcuaccucuuuc

SEQ ID NO: 1838899 - RNA, 19 nt, Homo sapiens
  misc_RNA (1)...(19): siRNA sense strand
cauauggucacucauuuca

SEQ ID NO: 1838900 - RNA, 19 nt, Homo sapiens
  misc_RNA (1)...(19): siRNA sense strand
guccauauggucacucauu

SEQ ID NO: 1838901 - RNA, 19 nt, Homo sapiens
  misc_RNA (1)...(19): siRNA sense strand
ucugggagguaucuugaug

SEQ ID NO: 1838902 - RNA, 19 nt, Homo sapiens
  misc_RNA (1)...(19): siRNA sense strand
ugaugauccuggccaugaa

SEQ ID NO: 1838903 - RNA, 19 nt, Homo sapiens
  misc_RNA (1)...(19): siRNA sense strand
aacauggagaucaagauua

SEQ ID NO: 1838904 - RNA, 19 nt, Homo sapiens
  misc_RNA (1)...(19): siRNA sense strand
gauccuggccaugaaugaa

SEQ ID NO: 1838905 - RNA, 19 nt, Homo sapiens
  misc_RNA (1)...(19): siRNA sense strand
ggacuucuugcuggauuug

SEQ ID NO: 1838906 - RNA, 19 nt, Homo sapiens
  misc_RNA (1)...(19): siRNA sense strand
gcccuggaguuuuguauug

SEQ ID NO: 1838907 - RNA, 19 nt, Homo sapiens
  misc_RNA (1)...(19): siRNA sense strand
aggauaagaagaaagagaa

SEQ ID NO: 1838908 - RNA, 19 nt, Homo sapiens
  misc_RNA (1)...(19): siRNA sense strand
cacccucagugcacucuau

SEQ ID NO: 1838909 - RNA, 19 nt, Homo sapiens
  misc_RNA (1)...(19): siRNA sense strand
ugccuugggcucccugaua

SEQ ID NO: 1838910 - RNA, 19 nt, Homo sapiens
  misc_RNA (1)...(19): siRNA sense strand
ugaaaaggccgaacaugga

SEQ ID NO: 1838911 - RNA, 19 nt, Homo sapiens
  misc_RNA (1)...(19): siRNA sense strand
cgcagcagcaccugaagaa

SEQ ID NO: 1838912 - RNA, 19 nt, Homo sapiens
  misc_RNA (1)...(19): siRNA sense strand
gaugauccuggccaugaau

SEQ ID NO: 1838913 - RNA, 19 nt, Homo sapiens
  misc_RNA (1)...(19): siRNA sense strand
gcccugcccuggaguuuug

SEQ ID NO: 1838914 - RNA, 19 nt, Homo sapiens
  misc_RNA (1)...(19): siRNA sense strand
ugggacuucuugcuggauu

SEQ ID NO: 1838915 - RNA, 19 nt, Homo sapiens
  misc_RNA (1)...(19): siRNA sense strand
ggauaagaagaaagagaag

SEQ ID NO: 1838916 - RNA, 19 nt, Homo sapiens
  misc_RNA (1)...(19): siRNA sense strand
gggagaagcuguccaccua

SEQ ID NO: 1838917 - RNA, 19 nt, Homo sapiens
  misc_RNA (1)...(19): siRNA sense strand
ggaaauugacggauaauau

SEQ ID NO: 1838918 - RNA, 19 nt, Homo sapiens
  misc_RNA (1)...(19): siRNA sense strand
guagaagacccggguauua

SEQ ID NO: 1838919 - RNA, 19 nt, Homo sapiens
  misc_RNA (1)...(19): siRNA sense strand
aaacagauaugcaaagagu

SEQ ID NO: 1838920 - RNA, 19 nt, Homo sapiens
  misc_RNA (1)...(19): siRNA sense strand
ccaaagcaguagcugaauu

SEQ ID NO: 1838921 - RNA, 19 nt, Homo sapiens
  misc_RNA (1)...(19): siRNA sense strand
caaagcaguagcugaauuu

SEQ ID NO: 1838922 - RNA, 19 nt, Homo sapiens
  misc_RNA (1)...(19): siRNA sense strand
guauuaacaucccagauca

SEQ ID NO: 1838923 - RNA, 19 nt, Homo sapiens
  misc_RNA (1)...(19): siRNA sense strand
ccagaucaaacuguaauua

SEQ ID NO: 1838924 - RNA, 19 nt, Homo sapiens
  misc_RNA (1)...(19): siRNA sense strand
caucccagaucaaacugua

SEQ ID NO: 1838925 - RNA, 19 nt, Homo sapiens
  misc_RNA (1)...(19): siRNA sense strand
uagaagacccggguauuaa

SEQ ID NO: 1838926 - RNA, 19 nt, Homo sapiens
  misc_RNA (1)...(19): siRNA sense strand
ggagaagcacagaaaguga

SEQ ID NO: 1838927 - RNA, 19 nt, Homo sapiens
  misc_RNA (1)...(19): siRNA sense strand
ggaggucccgcauguagaa

SEQ ID NO: 1838928 - RNA, 19 nt, Homo sapiens
  misc_RNA (1)...(19): siRNA sense strand
uaacaaggacaaccucuuc

SEQ ID NO: 1838929 - RNA, 19 nt, Homo sapiens
  misc_RNA (1)...(19): siRNA sense strand
cgaauuuccugccaaagca

SEQ ID NO: 1838930 - RNA, 19 nt, Homo sapiens
  misc_RNA (1)...(19): siRNA sense strand
aaauguaccucagcaacaa

SEQ ID NO: 1838931 - RNA, 19 nt, Homo sapiens
  misc_RNA (1)...(19): siRNA sense strand
caaaacagauaugcaaaga

SEQ ID NO: 1838932 - RNA, 19 nt, Homo sapiens
  misc_RNA (1)...(19): siRNA sense strand
gguauuaacaucccagauc

SEQ ID NO: 1838933 - RNA, 19 nt, Homo sapiens
  misc_RNA (1)...(19): siRNA sense strand
gaggaggucccgcauguag

SEQ ID NO: 1838934 - RNA, 19 nt, Homo sapiens
  misc_RNA (1)...(19): siRNA sense strand
uaacaucccagaucaaacu

SEQ ID NO: 1838935 - RNA, 19 nt, Homo sapiens
  misc_RNA (1)...(19): siRNA sense strand
gaagacccggguauuaaca

SEQ ID NO: 1838936 - RNA, 19 nt, Homo sapiens
  misc_RNA (1)...(19): siRNA sense strand
ccaccuagccagggacuuu

SEQ ID NO: 1838937 - RNA, 19 nt, Homo sapiens
  misc_RNA (1)...(19): siRNA sense strand
aaauggaggaagaucuuua

SEQ ID NO: 1838938 - RNA, 19 nt, Homo sapiens
  misc_RNA (1)...(19): siRNA sense strand
ucgaggaggucccgcaugu

SEQ ID NO: 1838939 - RNA, 19 nt, Homo sapiens
  misc_RNA (1)...(19): siRNA sense strand
gaggagaagcacagaaagu

SEQ ID NO: 1838940 - RNA, 19 nt, Homo sapiens
  misc_RNA (1)...(19): siRNA sense strand
ccaaugagcaagugacaag

SEQ ID NO: 1838941 - RNA, 19 nt, Homo sapiens
  misc_RNA (1)...(19): siRNA sense strand
gcugggcacuguaggucaa

SEQ ID NO: 1838942 - RNA, 19 nt, Homo sapiens
  misc_RNA (1)...(19): siRNA sense strand
cuuuggaaauugacggaua

SEQ ID NO: 1838943 - RNA, 19 nt, Homo sapiens
  misc_RNA (1)...(19): siRNA sense strand
gcagugacaaagaggagaa

SEQ ID NO: 1838944 - RNA, 19 nt, Homo sapiens
  misc_RNA (1)...(19): siRNA sense strand
uuuggaaauugacggauaa

SEQ ID NO: 1838945 - RNA, 19 nt, Homo sapiens
  misc_RNA (1)...(19): siRNA sense strand
caaaagcagugacaaagag

SEQ ID NO: 1838946 - RNA, 19 nt, Homo sapiens
  misc_RNA (1)...(19): siRNA sense strand
ucuccgccaucccuauuaa

SEQ ID NO: 1838947 - RNA, 19 nt, Homo sapiens
  misc_RNA (1)...(19): siRNA sense strand
aagaggagaagcacagaaa

SEQ ID NO: 1838948 - RNA, 19 nt, Homo sapiens
  misc_RNA (1)...(19): siRNA sense strand
gcucacaucacuaguagag

SEQ ID NO: 1838949 - RNA, 19 nt, Homo sapiens
  misc_RNA (1)...(19): siRNA sense strand
acagauaugcaaagaguuc

SEQ ID NO: 1838950 - RNA, 19 nt, Homo sapiens
  misc_RNA (1)...(19): siRNA sense strand
aauggaggaagaucuuuaa

SEQ ID NO: 1838951 - RNA, 19 nt, Homo sapiens
  misc_RNA (1)...(19): siRNA sense strand
aaccgaauuuccugccaaa

SEQ ID NO: 1838952 - RNA, 19 nt, Homo sapiens
  misc_RNA (1)...(19): siRNA sense strand
cguaaagcugccaacguua

SEQ ID NO: 1838953 - RNA, 19 nt, Homo sapiens
  misc_RNA (1)...(19): siRNA sense strand
cgccaucccuauuaacaag

SEQ ID NO: 1838954 - RNA, 19 nt, Homo sapiens
  misc_RNA (1)...(19): siRNA sense strand
ccucaaggccauggacaaa

SEQ ID NO: 1838955 - RNA, 19 nt, Homo sapiens
  misc_RNA (1)...(19): siRNA sense strand
augagcaagugacaagaaa

SEQ ID NO: 1838956 - RNA, 19 nt, Homo sapiens
  misc_RNA (1)...(19): siRNA sense strand
ucagcuccaccucgaagua

SEQ ID NO: 1838957 - RNA, 19 nt, Homo sapiens
  misc_RNA (1)...(19): siRNA sense strand
cccagucgcaagauccuua

SEQ ID NO: 1838958 - RNA, 19 nt, Homo sapiens
  misc_RNA (1)...(19): siRNA sense strand
ugccaaagcaguagcugaa

SEQ ID NO: 1838959 - RNA, 19 nt, Homo sapiens
  misc_RNA (1)...(19): siRNA sense strand
gcucucaccacccgagugu

SEQ ID NO: 1838960 - RNA, 19 nt, Homo sapiens
  misc_RNA (1)...(19): siRNA sense strand
ucaaggccauggacaaaau

SEQ ID NO: 1838961 - RNA, 19 nt, Homo sapiens
  misc_RNA (1)...(19): siRNA sense strand
cugcucacaucacuaguag

SEQ ID NO: 1838962 - RNA, 19 nt, Homo sapiens
  misc_RNA (1)...(19): siRNA sense strand
caaagaggagaagcacaga

SEQ ID NO: 1838963 - RNA, 19 nt, Homo sapiens
  misc_RNA (1)...(19): siRNA sense strand
ccaucccuauuaacaagga

SEQ ID NO: 1838964 - RNA, 19 nt, Homo sapiens
  misc_RNA (1)...(19): siRNA sense strand
acaugcuccuggcuacaaa

SEQ ID NO: 1838965 - RNA, 19 nt, Homo sapiens
  misc_RNA (1)...(19): siRNA sense strand
ccugcucacaucacuagua

SEQ ID NO: 1838966 - RNA, 19 nt, Homo sapiens
  misc_RNA (1)...(19): siRNA sense strand
cgugugcgaaaccgaauuu

SEQ ID NO: 1838967 - RNA, 19 nt, Homo sapiens
  misc_RNA (1)...(19): siRNA sense strand
gcaaggaugucacaagaaa

SEQ ID NO: 1838968 - RNA, 19 nt, Homo sapiens
  misc_RNA (1)...(19): siRNA sense strand
ucaaugcuguguucuauua

SEQ ID NO: 1838969 - RNA, 19 nt, Homo sapiens
  misc_RNA (1)...(19): siRNA sense strand
caacaggaaucuucaagga

SEQ ID NO: 1838970 - RNA, 19 nt, Homo sapiens
  misc_RNA (1)...(19): siRNA sense strand
gaagaaggacucugcauau

SEQ ID NO: 1838971 - RNA, 19 nt, Homo sapiens
  misc_RNA (1)...(19): siRNA sense strand
gcucaugacuguuucuuug

SEQ ID NO: 1838972 - RNA, 19 nt, Homo sapiens
  misc_RNA (1)...(19): siRNA sense strand
gaaggacucugcauaugau

SEQ ID NO: 1838973 - RNA, 19 nt, Homo sapiens
  misc_RNA (1)...(19): siRNA sense strand
ggaagaaggacucugcaua

SEQ ID NO: 1838974 - RNA, 19 nt, Homo sapiens
  misc_RNA (1)...(19): siRNA sense strand
gggaugagcuuugucugua

SEQ ID NO: 1838975 - RNA, 19 nt, Homo sapiens
  misc_RNA (1)...(19): siRNA sense strand
gaucaaugcuguguucuau

SEQ ID NO: 1838976 - RNA, 19 nt, Homo sapiens
  misc_RNA (1)...(19): siRNA sense strand
aaucggcucuuuccaauuu

SEQ ID NO: 1838977 - RNA, 19 nt, Homo sapiens
  misc_RNA (1)...(19): siRNA sense strand
gggcaucguuguuggaauu

SEQ ID NO: 1838978 - RNA, 19 nt, Homo sapiens
  misc_RNA (1)...(19): siRNA sense strand
gagaagaucauaaaggaau

SEQ ID NO: 1838979 - RNA, 19 nt, Homo sapiens
  misc_RNA (1)...(19): siRNA sense strand
gugcaaggaugucacaaga

SEQ ID NO: 1838980 - RNA, 19 nt, Homo sapiens
  misc_RNA (1)...(19): siRNA sense strand
cgacagcccaucaucauuu

SEQ ID NO: 1838981 - RNA, 19 nt, Homo sapiens
  misc_RNA (1)...(19): siRNA sense strand
caugacuguuucuuuguua

SEQ ID NO: 1838982 - RNA, 19 nt, Homo sapiens
  misc_RNA (1)...(19): siRNA sense strand
gaugagcuuugucuguauu

SEQ ID NO: 1838983 - RNA, 19 nt, Homo sapiens
  misc_RNA (1)...(19): siRNA sense strand
cacuguaguuucucuauuu

SEQ ID NO: 1838984 - RNA, 19 nt, Homo sapiens
  misc_RNA (1)...(19): siRNA sense strand
gauccugggucgcuugguu

SEQ ID NO: 1838985 - RNA, 19 nt, Homo sapiens
  misc_RNA (1)...(19): siRNA sense strand
cugagaagaucauaaagga

SEQ ID NO: 1838986 - RNA, 19 nt, Homo sapiens
  misc_RNA (1)...(19): siRNA sense strand
gaucuuuggucuggaauuc

SEQ ID NO: 1838987 - RNA, 19 nt, Homo sapiens
  misc_RNA (1)...(19): siRNA sense strand
caucaaugcuccugagaag

SEQ ID NO: 1838988 - RNA, 19 nt, Homo sapiens
  misc_RNA (1)...(19): siRNA sense strand
cccauucccugguuuauug

SEQ ID NO: 1838989 - RNA, 19 nt, Homo sapiens
  misc_RNA (1)...(19): siRNA sense strand
uccaggagaugaaagauga

SEQ ID NO: 1838990 - RNA, 19 nt, Homo sapiens
  misc_RNA (1)...(19): siRNA sense strand
aauacuaucuucacuguag

SEQ ID NO: 1838991 - RNA, 19 nt, Homo sapiens
  misc_RNA (1)...(19): siRNA sense strand
ggaugagcuuugucuguau

SEQ ID NO: 1838992 - RNA, 19 nt, Homo sapiens
  misc_RNA (1)...(19): siRNA sense strand
caucacaguugcuacaauc

SEQ ID NO: 1838993 - RNA, 19 nt, Homo sapiens
  misc_RNA (1)...(19): siRNA sense strand
gaaagggcaggaagaagga

SEQ ID NO: 1838994 - RNA, 19 nt, Homo sapiens
  misc_RNA (1)...(19): siRNA sense strand
ggaugcagguguucaagag

SEQ ID NO: 1838995 - RNA, 19 nt, Homo sapiens
  misc_RNA (1)...(19): siRNA sense strand
gcaucgagccugcuaagga

SEQ ID NO: 1838996 - RNA, 19 nt, Homo sapiens
  misc_RNA (1)...(19): siRNA sense strand
guagcuaagucgguugaaa

SEQ ID NO: 1838997 - RNA, 19 nt, Homo sapiens
  misc_RNA (1)...(19): siRNA sense strand
aagaagaggagaaugcuaa

SEQ ID NO: 1838998 - RNA, 19 nt, Homo sapiens
  misc_RNA (1)...(19): siRNA sense strand
acaaucggcucuuuccaau

SEQ ID NO: 1838999 - RNA, 19 nt, Homo sapiens
  misc_RNA (1)...(19): siRNA sense strand
guuccacgcucaugacugu

SEQ ID NO: 1839000 - RNA, 19 nt, Homo sapiens
  misc_RNA (1)...(19): siRNA sense strand
uaucuucacuguaguuucu

SEQ ID NO: 1839001 - RNA, 19 nt, Homo sapiens
  misc_RNA (1)...(19): siRNA sense strand
gauauuugccaucacaguu

SEQ ID NO: 1839002 - RNA, 19 nt, Homo sapiens
  misc_RNA (1)...(19): siRNA sense strand
ucacuguaguuucucuauu

SEQ ID NO: 1839003 - RNA, 19 nt, Homo sapiens
  misc_RNA (1)...(19): siRNA sense strand
gaccaccaccaaugucuaa

SEQ ID NO: 1839004 - RNA, 19 nt, Homo sapiens
  misc_RNA (1)...(19): siRNA sense strand
caucaucauuuccauugug

SEQ ID NO: 1839005 - RNA, 19 nt, Homo sapiens
  misc_RNA (1)...(19): siRNA sense strand
cagcagcucucugggauca

SEQ ID NO: 1839006 - RNA, 19 nt, Homo sapiens
  misc_RNA (1)...(19): siRNA sense strand
gcagcucucugggaucaau

SEQ ID NO: 1839007 - RNA, 19 nt, Homo sapiens
  misc_RNA (1)...(19): siRNA sense strand
agaaggacucugcauauga

SEQ ID NO: 1839008 - RNA, 19 nt, Homo sapiens
  misc_RNA (1)...(19): siRNA sense strand
gaugagagugcaaggaugu

SEQ ID NO: 1839009 - RNA, 19 nt, Homo sapiens
  misc_RNA (1)...(19): siRNA sense strand
gacagcccaucaucauuuc

SEQ ID NO: 1839010 - RNA, 19 nt, Homo sapiens
  misc_RNA (1)...(19): siRNA sense strand
aagaaggacucugcauaug

SEQ ID NO: 1839011 - RNA, 19 nt, Homo sapiens
  misc_RNA (1)...(19): siRNA sense strand
ggaucaaugcuguguucua

SEQ ID NO: 1839012 - RNA, 19 nt, Homo sapiens
  misc_RNA (1)...(19): siRNA sense strand
ucaaugcuccugagaagau

SEQ ID NO: 1839013 - RNA, 19 nt, Homo sapiens
  misc_RNA (1)...(19): siRNA sense strand
cauccuuccugcuauccua

SEQ ID NO: 1839014 - RNA, 19 nt, Homo sapiens
  misc_RNA (1)...(19): siRNA sense strand
uuuguagccuucuuugaaa

SEQ ID NO: 1839015 - RNA, 19 nt, Homo sapiens
  misc_RNA (1)...(19): siRNA sense strand
ucaugacuguuucuuuguu

SEQ ID NO: 1839016 - RNA, 19 nt, Homo sapiens
  misc_RNA (1)...(19): siRNA sense strand
cuccgcugcucacuauuua

SEQ ID NO: 1839017 - RNA, 19 nt, Homo sapiens
  misc_RNA (1)...(19): siRNA sense strand
guccuugucuguggccaua

SEQ ID NO: 1839018 - RNA, 19 nt, Homo sapiens
  misc_RNA (1)...(19): siRNA sense strand
cuucaaggaugcagguguu

SEQ ID NO: 1839019 - RNA, 19 nt, Homo sapiens
  misc_RNA (1)...(19): siRNA sense strand
ucacgucucucugguccuu

SEQ ID NO: 1839020 - RNA, 19 nt, Homo sapiens
  misc_RNA (1)...(19): siRNA sense strand
cuaaggagaccaccaccaa

SEQ ID NO: 1839021 - RNA, 19 nt, Homo sapiens
  misc_RNA (1)...(19): siRNA sense strand
guagccuucuuugaaauug

SEQ ID NO: 1839022 - RNA, 19 nt, Homo sapiens
  misc_RNA (1)...(19): siRNA sense strand
ggagaugaaagaugagagu

SEQ ID NO: 1839023 - RNA, 19 nt, Homo sapiens
  misc_RNA (1)...(19): siRNA sense strand
cugggucgcuugguuauug

SEQ ID NO: 1839024 - RNA, 19 nt, Homo sapiens
  misc_RNA (1)...(19): siRNA sense strand
ucauuaccuucuuggcuuu

SEQ ID NO: 1839025 - RNA, 19 nt, Homo sapiens
  misc_RNA (1)...(19): siRNA sense strand
ccaacuuccuagucggauu

SEQ ID NO: 1839026 - RNA, 19 nt, Homo sapiens
  misc_RNA (1)...(19): siRNA sense strand
gugcagcccuuccauuuug

SEQ ID NO: 1839027 - RNA, 19 nt, Homo sapiens
  misc_RNA (1)...(19): siRNA sense strand
ggauaucacacgggccuuu

SEQ ID NO: 1839028 - RNA, 19 nt, Homo sapiens
  misc_RNA (1)...(19): siRNA sense strand
caacuuccuagucggauug

SEQ ID NO: 1839029 - RNA, 19 nt, Homo sapiens
  misc_RNA (1)...(19): siRNA sense strand
uauaaugggaugagcuuug

SEQ ID NO: 1839030 - RNA, 19 nt, Homo sapiens
  misc_RNA (1)...(19): siRNA sense strand
cccugaaagucccagauuu

SEQ ID NO: 1839031 - RNA, 19 nt, Homo sapiens
  misc_RNA (1)...(19): siRNA sense strand
gaaaugccccacccucuga

SEQ ID NO: 1839032 - RNA, 19 nt, Homo sapiens
  misc_RNA (1)...(19): siRNA sense strand
cgggugugguuaauacuau

SEQ ID NO: 1839033 - RNA, 19 nt, Homo sapiens
  misc_RNA (1)...(19): siRNA sense strand
cccaagacauccaggagau

SEQ ID NO: 1839034 - RNA, 19 nt, Homo sapiens
  misc_RNA (1)...(19): siRNA sense strand
uagcuaagucgguugaaau

SEQ ID NO: 1839035 - RNA, 19 nt, Homo sapiens
  misc_RNA (1)...(19): siRNA sense strand
gaaaagaagaggagaaugc

SEQ ID NO: 1839036 - RNA, 19 nt, Homo sapiens
  misc_RNA (1)...(19): siRNA sense strand
ccuugggucugaagagcua

SEQ ID NO: 1839037 - RNA, 19 nt, Homo sapiens
  misc_RNA (1)...(19): siRNA sense strand
acugguggcugcuuuaugg

SEQ ID NO: 1839038 - RNA, 19 nt, Homo sapiens
  misc_RNA (1)...(19): siRNA sense strand
ugggaucaaugcuguguuc

SEQ ID NO: 1839039 - RNA, 19 nt, Homo sapiens
  misc_RNA (1)...(19): siRNA sense strand
cuaagucgguugaaaugcu

SEQ ID NO: 1839040 - RNA, 19 nt, Homo sapiens
  misc_RNA (1)...(19): siRNA sense strand
ugucacugguggcugcuuu

SEQ ID NO: 1839041 - RNA, 19 nt, Homo sapiens
  misc_RNA (1)...(19): siRNA sense strand
gcaggacuuuugaggauau

SEQ ID NO: 1839042 - RNA, 19 nt, Homo sapiens
  misc_RNA (1)...(19): siRNA sense strand
ggccgcugcuacuggguuu

SEQ ID NO: 1839043 - RNA, 19 nt, Homo sapiens
  misc_RNA (1)...(19): siRNA sense strand
ggucuuuguagccuucuuu

SEQ ID NO: 1839044 - RNA, 19 nt, Homo sapiens
  misc_RNA (1)...(19): siRNA sense strand
auaaugggaugagcuuugu

SEQ ID NO: 1839045 - RNA, 19 nt, Homo sapiens
  misc_RNA (1)...(19): siRNA sense strand
caaggaugcagguguucaa

SEQ ID NO: 1839046 - RNA, 19 nt, Homo sapiens
  misc_RNA (1)...(19): siRNA sense strand
gcccugaaagucccagauu

SEQ ID NO: 1839047 - RNA, 19 nt, Homo sapiens
  misc_RNA (1)...(19): siRNA sense strand
aagugcagcccuuccauuu

SEQ ID NO: 1839048 - RNA, 19 nt, Homo sapiens
  misc_RNA (1)...(19): siRNA sense strand
uaugggacuguguaaagua

SEQ ID NO: 1839049 - RNA, 19 nt, Homo sapiens
  misc_RNA (1)...(19): siRNA sense strand
gggcuaucuuggucuuugu

SEQ ID NO: 1839050 - RNA, 19 nt, Homo sapiens
  misc_RNA (1)...(19): siRNA sense strand
gcgggugugguuaauacua

SEQ ID NO: 1839051 - RNA, 19 nt, Homo sapiens
  misc_RNA (1)...(19): siRNA sense strand
ccauguacauuggagagau

SEQ ID NO: 1839052 - RNA, 19 nt, Homo sapiens
  misc_RNA (1)...(19): siRNA sense strand
ccaucacaguugcuacaau

SEQ ID NO: 1839053 - RNA, 19 nt, Homo sapiens
  misc_RNA (1)...(19): siRNA sense strand
uuacucaacaggaaucuuc

SEQ ID NO: 1839054 - RNA, 19 nt, Homo sapiens
  misc_RNA (1)...(19): siRNA sense strand
gcuguguucuauuacucaa

SEQ ID NO: 1839055 - RNA, 19 nt, Homo sapiens
  misc_RNA (1)...(19): siRNA sense strand
uuaccauccuuccugcuau

SEQ ID NO: 1839056 - RNA, 19 nt, Homo sapiens
  misc_RNA (1)...(19): siRNA sense strand
cuuuguagccuucuuugaa

SEQ ID NO: 1839057 - RNA, 19 nt, Homo sapiens
  misc_RNA (1)...(19): siRNA sense strand
cauguacauuggagagauc

SEQ ID NO: 1839058 - RNA, 19 nt, Homo sapiens
  misc_RNA (1)...(19): siRNA sense strand
gauaucacacgggccuuug

SEQ ID NO: 1839059 - RNA, 19 nt, Homo sapiens
  misc_RNA (1)...(19): siRNA sense strand
ccuccgcugcucacuauuu

SEQ ID NO: 1839060 - RNA, 19 nt, Homo sapiens
  misc_RNA (1)...(19): siRNA sense strand
uguaguuucucuauuucug

SEQ ID NO: 1839061 - RNA, 19 nt, Homo sapiens
  misc_RNA (1)...(19): siRNA sense strand
ccuugucuguggccauauu

SEQ ID NO: 1839062 - RNA, 19 nt, Homo sapiens
  misc_RNA (1)...(19): siRNA sense strand
cagcugggcaucguuguug

SEQ ID NO: 1839063 - RNA, 19 nt, Homo sapiens
  misc_RNA (1)...(19): siRNA sense strand
guucaagagcccaucuaug

SEQ ID NO: 1839064 - RNA, 19 nt, Homo sapiens
  misc_RNA (1)...(19): siRNA sense strand
ccacgcucaugacuguuuc

SEQ ID NO: 1839065 - RNA, 19 nt, Homo sapiens
  misc_RNA (1)...(19): siRNA sense strand
ggacucugcauaugauagg

SEQ ID NO: 1839066 - RNA, 19 nt, Homo sapiens
  misc_RNA (1)...(19): siRNA sense strand
guggaaagggcaggaagaa

SEQ ID NO: 1839067 - RNA, 19 nt, Homo sapiens
  misc_RNA (1)...(19): siRNA sense strand
ggacaucgccuccuucuac

SEQ ID NO: 1839068 - RNA, 19 nt, Homo sapiens
  misc_RNA (1)...(19): siRNA sense strand
acaaguacauggugacuga

SEQ ID NO: 1839069 - RNA, 19 nt, Homo sapiens
  misc_RNA (1)...(19): siRNA sense strand
caacuggucuggcaacuac

SEQ ID NO: 1839070 - RNA, 19 nt, Homo sapiens
  misc_RNA (1)...(19): siRNA sense strand
gacaaugcccggaguuuca

SEQ ID NO: 1839071 - RNA, 19 nt, Homo sapiens
  misc_RNA (1)...(19): siRNA sense strand
cuacgucgcugucaugaac

SEQ ID NO: 1839072 - RNA, 19 nt, Homo sapiens
  misc_RNA (1)...(19): siRNA sense strand
ugaacuaccugcccacucu

SEQ ID NO: 1839073 - RNA, 19 nt, Homo sapiens
  misc_RNA (1)...(19): siRNA sense strand
ggagaucugccucaaugga

SEQ ID NO: 1839074 - RNA, 19 nt, Homo sapiens
  misc_RNA (1)...(19): siRNA sense strand
gagaucugccucaauggaa

SEQ ID NO: 1839075 - RNA, 19 nt, Homo sapiens
  misc_RNA (1)...(19): siRNA sense strand
ugacugaacgcgccaccua

SEQ ID NO: 1839076 - RNA, 19 nt, Homo sapiens
  misc_RNA (1)...(19): siRNA sense strand
ggacaaugcccggaguuuc

SEQ ID NO: 1839077 - RNA, 19 nt, Homo sapiens
  misc_RNA (1)...(19): siRNA sense strand
ggaauacggcgacuugcau

SEQ ID NO: 1839078 - RNA, 19 nt, Homo sapiens
  misc_RNA (1)...(19): siRNA sense strand
gcucgagaccugaccaaga

SEQ ID NO: 1839079 - RNA, 19 nt, Homo sapiens
  misc_RNA (1)...(19): siRNA sense strand
caauggagaucugccucaa

SEQ ID NO: 1839080 - RNA, 19 nt, Homo sapiens
  misc_RNA (1)...(19): siRNA sense strand
ccugaaggcucuacucaac

SEQ ID NO: 1839081 - RNA, 19 nt, Homo sapiens
  misc_RNA (1)...(19): siRNA sense strand
ggaccagacccacuucuac

SEQ ID NO: 1839082 - RNA, 19 nt, Homo sapiens
  misc_RNA (1)...(19): siRNA sense strand
caacauggacuggcguuca

SEQ ID NO: 1839083 - RNA, 19 nt, Homo sapiens
  misc_RNA (1)...(19): siRNA sense strand
caaccaagagacaccaaug

SEQ ID NO: 1839084 - RNA, 19 nt, Homo sapiens
  misc_RNA (1)...(19): siRNA sense strand
auggagaucugccucaaug

SEQ ID NO: 1839085 - RNA, 19 nt, Homo sapiens
  misc_RNA (1)...(19): siRNA sense strand
ugacaaccauacccacucu

SEQ ID NO: 1839086 - RNA, 19 nt, Homo sapiens
  misc_RNA (1)...(19): siRNA sense strand
gaccugaccaagaucuuug

SEQ ID NO: 1839087 - RNA, 19 nt, Homo sapiens
  misc_RNA (1)...(19): siRNA sense strand
ugaaggcucuacucaacgu

SEQ ID NO: 1839088 - RNA, 19 nt, Homo sapiens
  misc_RNA (1)...(19): siRNA sense strand
ggacccucaccaacaauga

SEQ ID NO: 1839089 - RNA, 19 nt, Homo sapiens
  misc_RNA (1)...(19): siRNA sense strand
cucgagaccugaccaagau

SEQ ID NO: 1839090 - RNA, 19 nt, Homo sapiens
  misc_RNA (1)...(19): siRNA sense strand
gcagcuccaucccaucaac

SEQ ID NO: 1839091 - RNA, 19 nt, Homo sapiens
  misc_RNA (1)...(19): siRNA sense strand
gaccugaaggcucuacuca

SEQ ID NO: 1839092 - RNA, 19 nt, Homo sapiens
  misc_RNA (1)...(19): siRNA sense strand
gcacagcagccuggacauc

SEQ ID NO: 1839093 - RNA, 19 nt, Homo sapiens
  misc_RNA (1)...(19): siRNA sense strand
acucugacauccaggugaa

SEQ ID NO: 1839094 - RNA, 19 nt, Homo sapiens
  misc_RNA (1)...(19): siRNA sense strand
gagcugggcguggucaugu

SEQ ID NO: 1839095 - RNA, 19 nt, Homo sapiens
  misc_RNA (1)...(19): siRNA sense strand
ugcagacccuggcaccaaa

SEQ ID NO: 1839096 - RNA, 19 nt, Homo sapiens
  misc_RNA (1)...(19): siRNA sense strand
gugucaaccacaacaagua

SEQ ID NO: 1839097 - RNA, 19 nt, Homo sapiens
  misc_RNA (1)...(19): siRNA sense strand
agacaccaauggagaucug

SEQ ID NO: 1839098 - RNA, 19 nt, Homo sapiens
  misc_RNA (1)...(19): siRNA sense strand
cuaugacccuugcgaagca

SEQ ID NO: 1839099 - RNA, 19 nt, Homo sapiens
  misc_RNA (1)...(19): siRNA sense strand
cuacgagcguggcgucaag

SEQ ID NO: 1839100 - RNA, 19 nt, Homo sapiens
  misc_RNA (1)...(19): siRNA sense strand
acuggacccucaccaacaa

SEQ ID NO: 1839101 - RNA, 19 nt, Homo sapiens
  misc_RNA (1)...(19): siRNA sense strand
caucuacgucgcugucaug

SEQ ID NO: 1839102 - RNA, 19 nt, Homo sapiens
  misc_RNA (1)...(19): siRNA sense strand
ggacuccccuuacauucau

SEQ ID NO: 1839103 - RNA, 19 nt, Homo sapiens
  misc_RNA (1)...(19): siRNA sense strand
ucaacgugguggacaaugc

SEQ ID NO: 1839104 - RNA, 19 nt, Homo sapiens
  misc_RNA (1)...(19): siRNA sense strand
gggaauacggcgacuugca

SEQ ID NO: 1839105 - RNA, 19 nt, Homo sapiens
  misc_RNA (1)...(19): siRNA sense strand
gacaucgccuccuucuacu

SEQ ID NO: 1839106 - RNA, 19 nt, Homo sapiens
  misc_RNA (1)...(19): siRNA sense strand
acaaccauacccacucuga

SEQ ID NO: 1839107 - RNA, 19 nt, Homo sapiens
  misc_RNA (1)...(19): siRNA sense strand
acccauggcguccugcaua

SEQ ID NO: 1839108 - RNA, 19 nt, Homo sapiens
  misc_RNA (1)...(19): siRNA sense strand
gaugaggcccaggcucgaa

SEQ ID NO: 1839109 - RNA, 19 nt, Homo sapiens
  misc_RNA (1)...(19): siRNA sense strand
ccaacuggucuggcaacua

SEQ ID NO: 1839110 - RNA, 19 nt, Homo sapiens
  misc_RNA (1)...(19): siRNA sense strand
ggagugccuugguguuuca

SEQ ID NO: 1839111 - RNA, 19 nt, Homo sapiens
  misc_RNA (1)...(19): siRNA sense strand
ugacuaggaagacagaaug

SEQ ID NO: 1839112 - RNA, 19 nt, Homo sapiens
  misc_RNA (1)...(19): siRNA sense strand
cagcaguggugucccauuu

SEQ ID NO: 1839113 - RNA, 19 nt, Homo sapiens
  misc_RNA (1)...(19): siRNA sense strand
gcaguggugucccauuuua

SEQ ID NO: 1839114 - RNA, 19 nt, Homo sapiens
  misc_RNA (1)...(19): siRNA sense strand
uuuaaugacugcccagauu

SEQ ID NO: 1839115 - RNA, 19 nt, Homo sapiens
  misc_RNA (1)...(19): siRNA sense strand
gcaugugucugccauucug

SEQ ID NO: 1839116 - RNA, 19 nt, Homo sapiens
  misc_RNA (1)...(19): siRNA sense strand
cagcaugugucugccauuc

SEQ ID NO: 1839117 - RNA, 19 nt, Homo sapiens
  misc_RNA (1)...(19): siRNA sense strand
ggcccuggcuguccuuauc

SEQ ID NO: 1839118 - RNA, 19 nt, Homo sapiens
  misc_RNA (1)...(19): siRNA sense strand
ccuguucgcucuggguauu

SEQ ID NO: 1839119 - RNA, 19 nt, Homo sapiens
  misc_RNA (1)...(19): siRNA sense strand
cagauucccacacucaguu

SEQ ID NO: 1839120 - RNA, 19 nt, Homo sapiens
  misc_RNA (1)...(19): siRNA sense strand
ggaggacaagccagcaugu

SEQ ID NO: 1839121 - RNA, 19 nt, Homo sapiens
  misc_RNA (1)...(19): siRNA sense strand
gcccagauucccacacuca

SEQ ID NO: 1839122 - RNA, 19 nt, Homo sapiens
  misc_RNA (1)...(19): siRNA sense strand
guccuuaucaucacaugug

SEQ ID NO: 1839123 - RNA, 19 nt, Homo sapiens
  misc_RNA (1)...(19): siRNA sense strand
gcagcaguggugucccauu

SEQ ID NO: 1839124 - RNA, 19 nt, Homo sapiens
  misc_RNA (1)...(19): siRNA sense strand
gcaguggucuugucaaauu

SEQ ID NO: 1839125 - RNA, 19 nt, Homo sapiens
  misc_RNA (1)...(19): siRNA sense strand
gaaagucugccuagaauuu

SEQ ID NO: 1839126 - RNA, 19 nt, Homo sapiens
  misc_RNA (1)...(19): siRNA sense strand
ucaaacagcugcuuauuuc

SEQ ID NO: 1839127 - RNA, 19 nt, Homo sapiens
  misc_RNA (1)...(19): siRNA sense strand
ggagguugaugccgccuua

SEQ ID NO: 1839128 - RNA, 19 nt, Homo sapiens
  misc_RNA (1)...(19): siRNA sense strand
guagggaacuaguauugga

SEQ ID NO: 1839129 - RNA, 19 nt, Homo sapiens
  misc_RNA (1)...(19): siRNA sense strand
ucagccaucuugagaauau

SEQ ID NO: 1839130 - RNA, 19 nt, Homo sapiens
  misc_RNA (1)...(19): siRNA sense strand
uagcaguggucuugucaaa

SEQ ID NO: 1839131 - RNA, 19 nt, Homo sapiens
  misc_RNA (1)...(19): siRNA sense strand
gauucagguuucuccauuu

SEQ ID NO: 1839132 - RNA, 19 nt, Homo sapiens
  misc_RNA (1)...(19): siRNA sense strand
caugaaagucugccuagaa

SEQ ID NO: 1839133 - RNA, 19 nt, Homo sapiens
  misc_RNA (1)...(19): siRNA sense strand
gccuagaauuucaagauug

SEQ ID NO: 1839134 - RNA, 19 nt, Homo sapiens
  misc_RNA (1)...(19): siRNA sense strand
ugccacauaugaaagagua

SEQ ID NO: 1839135 - RNA, 19 nt, Homo sapiens
  misc_RNA (1)...(19): siRNA sense strand
ugauucagguuucuccauu

SEQ ID NO: 1839136 - RNA, 19 nt, Homo sapiens
  misc_RNA (1)...(19): siRNA sense strand
ccuagaauuucaagauugu

SEQ ID NO: 1839137 - RNA, 19 nt, Homo sapiens
  misc_RNA (1)...(19): siRNA sense strand
cuucuugcauuaucuggua

SEQ ID NO: 1839138 - RNA, 19 nt, Homo sapiens
  misc_RNA (1)...(19): siRNA sense strand
ggaacuaguauuggauuga

SEQ ID NO: 1839139 - RNA, 19 nt, Homo sapiens
  misc_RNA (1)...(19): siRNA sense strand
cgaguaccacuacaugaaa

SEQ ID NO: 1839140 - RNA, 19 nt, Homo sapiens
  misc_RNA (1)...(19): siRNA sense strand
gggaacuaguauuggauug

SEQ ID NO: 1839141 - RNA, 19 nt, Homo sapiens
  misc_RNA (1)...(19): siRNA sense strand
gaccuugucagccaucuug

SEQ ID NO: 1839142 - RNA, 19 nt, Homo sapiens
  misc_RNA (1)...(19): siRNA sense strand
ucagguuucuccauuucuu

SEQ ID NO: 1839143 - RNA, 19 nt, Homo sapiens
  misc_RNA (1)...(19): siRNA sense strand
ugucagccaucuugagaau

SEQ ID NO: 1839144 - RNA, 19 nt, Homo sapiens
  misc_RNA (1)...(19): siRNA sense strand
ugccuagaauuucaagauu

SEQ ID NO: 1839145 - RNA, 19 nt, Homo sapiens
  misc_RNA (1)...(19): siRNA sense strand
gaguaccacuacaugaaag

SEQ ID NO: 1839146 - RNA, 19 nt, Homo sapiens
  misc_RNA (1)...(19): siRNA sense strand
ggacauccuaaccuaugaa

SEQ ID NO: 1839147 - RNA, 19 nt, Homo sapiens
  misc_RNA (1)...(19): siRNA sense strand
augaaagucugccuagaau

SEQ ID NO: 1839148 - RNA, 19 nt, Homo sapiens
  misc_RNA (1)...(19): siRNA sense strand
ucaagauuguggaguugga

SEQ ID NO: 1839149 - RNA, 19 nt, Homo sapiens
  misc_RNA (1)...(19): siRNA sense strand
ggagcucuuugacccuguu

SEQ ID NO: 1839150 - RNA, 19 nt, Homo sapiens
  misc_RNA (1)...(19): siRNA sense strand
uccauuucuucuugcauua

SEQ ID NO: 1839151 - RNA, 19 nt, Homo sapiens
  misc_RNA (1)...(19): siRNA sense strand
ccgaguaccacuacaugaa

SEQ ID NO: 1839152 - RNA, 19 nt, Homo sapiens
  misc_RNA (1)...(19): siRNA sense strand
cauccuaaccuaugaagag

SEQ ID NO: 1839153 - RNA, 19 nt, Homo sapiens
  misc_RNA (1)...(19): siRNA sense strand
guucaaacagcugcuuauu

SEQ ID NO: 1839154 - RNA, 19 nt, Homo sapiens
  misc_RNA (1)...(19): siRNA sense strand
cuccauuucuucuugcauu

SEQ ID NO: 1839155 - RNA, 19 nt, Homo sapiens
  misc_RNA (1)...(19): siRNA sense strand
ccuaaccuaugaagagaag

SEQ ID NO: 1839156 - RNA, 19 nt, Homo sapiens
  misc_RNA (1)...(19): siRNA sense strand
gaugccgccuuaccuuugg

SEQ ID NO: 1839157 - RNA, 19 nt, Homo sapiens
  misc_RNA (1)...(19): siRNA sense strand
gaaugcugcacaguucaaa

SEQ ID NO: 1839158 - RNA, 19 nt, Homo sapiens
  misc_RNA (1)...(19): siRNA sense strand
guuucuccauuucuucuug

SEQ ID NO: 1839159 - RNA, 19 nt, Homo sapiens
  misc_RNA (1)...(19): siRNA sense strand
uggacauccuaaccuauga

SEQ ID NO: 1839160 - RNA, 19 nt, Homo sapiens
  misc_RNA (1)...(19): siRNA sense strand
uucaaacagcugcuuauuu

SEQ ID NO: 1839161 - RNA, 19 nt, Homo sapiens
  misc_RNA (1)...(19): siRNA sense strand
cuuuggacauccuaaccua

SEQ ID NO: 1839162 - RNA, 19 nt, Homo sapiens
  misc_RNA (1)...(19): siRNA sense strand
cgccuuaccuuuggacauc

SEQ ID NO: 1839163 - RNA, 19 nt, Homo sapiens
  misc_RNA (1)...(19): siRNA sense strand
caguggucuugucaaauug

SEQ ID NO: 1839164 - RNA, 19 nt, Homo sapiens
  misc_RNA (1)...(19): siRNA sense strand
ucaaauuguggagcucuuu

SEQ ID NO: 1839165 - RNA, 19 nt, Homo sapiens
  misc_RNA (1)...(19): siRNA sense strand
cugcuuauuucggcuguga

SEQ ID NO: 1839166 - RNA, 19 nt, Homo sapiens
  misc_RNA (1)...(19): siRNA sense strand
ugaaagucugccuagaauu

SEQ ID NO: 1839167 - RNA, 19 nt, Homo sapiens
  misc_RNA (1)...(19): siRNA sense strand
caguucaaacagcugcuua

SEQ ID NO: 1839168 - RNA, 19 nt, Homo sapiens
  misc_RNA (1)...(19): siRNA sense strand
gaacagcuuucuaauauga

SEQ ID NO: 1839169 - RNA, 19 nt, Homo sapiens
  misc_RNA (1)...(19): siRNA sense strand
guccugagcuuauauaaua

SEQ ID NO: 1839170 - RNA, 19 nt, Homo sapiens
  misc_RNA (1)...(19): siRNA sense strand
gauggcaccuccacauaua

SEQ ID NO: 1839171 - RNA, 19 nt, Homo sapiens
  misc_RNA (1)...(19): siRNA sense strand
gaaaugugcaggauaauug

SEQ ID NO: 1839172 - RNA, 19 nt, Homo sapiens
  misc_RNA (1)...(19): siRNA sense strand
uuagaaaugugcaggauaa

SEQ ID NO: 1839173 - RNA, 19 nt, Homo sapiens
  misc_RNA (1)...(19): siRNA sense strand
ggauugagcuauaucagau

SEQ ID NO: 1839174 - RNA, 19 nt, Homo sapiens
  misc_RNA (1)...(19): siRNA sense strand
gaacuagaagcaagauuug

SEQ ID NO: 1839175 - RNA, 19 nt, Homo sapiens
  misc_RNA (1)...(19): siRNA sense strand
gaucuaggguggaaaugga

SEQ ID NO: 1839176 - RNA, 19 nt, Homo sapiens
  misc_RNA (1)...(19): siRNA sense strand
uaacugaugcuguucauga

SEQ ID NO: 1839177 - RNA, 19 nt, Homo sapiens
  misc_RNA (1)...(19): siRNA sense strand
gaugcggccuauugcuuua

SEQ ID NO: 1839178 - RNA, 19 nt, Homo sapiens
  misc_RNA (1)...(19): siRNA sense strand
gagcaugcccguauuuaug

SEQ ID NO: 1839179 - RNA, 19 nt, Homo sapiens
  misc_RNA (1)...(19): siRNA sense strand
caaggagguuuacaaaaua

SEQ ID NO: 1839180 - RNA, 19 nt, Homo sapiens
  misc_RNA (1)...(19): siRNA sense strand
cuucagaauuguucgauuu

SEQ ID NO: 1839181 - RNA, 19 nt, Homo sapiens
  misc_RNA (1)...(19): siRNA sense strand
cuacagacccuacuucaga

SEQ ID NO: 1839182 - RNA, 19 nt, Homo sapiens
  misc_RNA (1)...(19): siRNA sense strand
gcagcacacucgauaugga

SEQ ID NO: 1839183 - RNA, 19 nt, Homo sapiens
  misc_RNA (1)...(19): siRNA sense strand
cgauguaacugaugcuguu

SEQ ID NO: 1839184 - RNA, 19 nt, Homo sapiens
  misc_RNA (1)...(19): siRNA sense strand
gaacaacggauugagcuau

SEQ ID NO: 1839185 - RNA, 19 nt, Homo sapiens
  misc_RNA (1)...(19): siRNA sense strand
ccaaggagguuuacaaaau

SEQ ID NO: 1839186 - RNA, 19 nt, Homo sapiens
  misc_RNA (1)...(19): siRNA sense strand
gccuauugcuuuagaaaug

SEQ ID NO: 1839187 - RNA, 19 nt, Homo sapiens
  misc_RNA (1)...(19): siRNA sense strand
ucucaaguccaaagauuua

SEQ ID NO: 1839188 - RNA, 19 nt, Homo sapiens
  misc_RNA (1)...(19): siRNA sense strand
gcaaaacacccaagauuga

SEQ ID NO: 1839189 - RNA, 19 nt, Homo sapiens
  misc_RNA (1)...(19): siRNA sense strand
uauaucagauucucaaguc

SEQ ID NO: 1839190 - RNA, 19 nt, Homo sapiens
  misc_RNA (1)...(19): siRNA sense strand
ggaugcggccuauugcuuu

SEQ ID NO: 1839191 - RNA, 19 nt, Homo sapiens
  misc_RNA (1)...(19): siRNA sense strand
guacaaugccaacuucugu

SEQ ID NO: 1839192 - RNA, 19 nt, Homo sapiens
  misc_RNA (1)...(19): siRNA sense strand
gauuugacgucucagcaau

SEQ ID NO: 1839193 - RNA, 19 nt, Homo sapiens
  misc_RNA (1)...(19): siRNA sense strand
uguaaagucuugcaaaugc

SEQ ID NO: 1839194 - RNA, 19 nt, Homo sapiens
  misc_RNA (1)...(19): siRNA sense strand
agaacuagaagcaagauuu

SEQ ID NO: 1839195 - RNA, 19 nt, Homo sapiens
  misc_RNA (1)...(19): siRNA sense strand
cgacagcaaaguugugaaa

SEQ ID NO: 1839196 - RNA, 19 nt, Homo sapiens
  misc_RNA (1)...(19): siRNA sense strand
aacaacggauugagcuaua

SEQ ID NO: 1839197 - RNA, 19 nt, Homo sapiens
  misc_RNA (1)...(19): siRNA sense strand
uaccauaaauccagaagca

SEQ ID NO: 1839198 - RNA, 19 nt, Homo sapiens
  misc_RNA (1)...(19): siRNA sense strand
ggaggugauuuccaucuac

SEQ ID NO: 1839199 - RNA, 19 nt, Homo sapiens
  misc_RNA (1)...(19): siRNA sense strand
uaaccauucucuacuacau

SEQ ID NO: 1839200 - RNA, 19 nt, Homo sapiens
  misc_RNA (1)...(19): siRNA sense strand
ggagcaugcccguauuuau

SEQ ID NO: 1839201 - RNA, 19 nt, Homo sapiens
  misc_RNA (1)...(19): siRNA sense strand
guucagagucuuucguuug

SEQ ID NO: 1839202 - RNA, 19 nt, Homo sapiens
  misc_RNA (1)...(19): siRNA sense strand
gaggugauuuccaucuaca

SEQ ID NO: 1839203 - RNA, 19 nt, Homo sapiens
  misc_RNA (1)...(19): siRNA sense strand
cugcgugucccaagauuua

SEQ ID NO: 1839204 - RNA, 19 nt, Homo sapiens
  misc_RNA (1)...(19): siRNA sense strand
acuauaaaguccacuagga

SEQ ID NO: 1839205 - RNA, 19 nt, Homo sapiens
  misc_RNA (1)...(19): siRNA sense strand
cuacaucgacagcaaaguu

SEQ ID NO: 1839206 - RNA, 19 nt, Homo sapiens
  misc_RNA (1)...(19): siRNA sense strand
caacagcaccagggacuug

SEQ ID NO: 1839207 - RNA, 19 nt, Homo sapiens
  misc_RNA (1)...(19): siRNA sense strand
agauugaacagcuuucuaa

SEQ ID NO: 1839208 - RNA, 19 nt, Homo sapiens
  misc_RNA (1)...(19): siRNA sense strand
ucagaauuguucgauuuga

SEQ ID NO: 1839209 - RNA, 19 nt, Homo sapiens
  misc_RNA (1)...(19): siRNA sense strand
gcgggcagauccugagcaa

SEQ ID NO: 1839210 - RNA, 19 nt, Homo sapiens
  misc_RNA (1)...(19): siRNA sense strand
uauaaaguccacuaggaaa

SEQ ID NO: 1839211 - RNA, 19 nt, Homo sapiens
  misc_RNA (1)...(19): siRNA sense strand
gcacuuuuguaccaucuaa

SEQ ID NO: 1839212 - RNA, 19 nt, Homo sapiens
  misc_RNA (1)...(19): siRNA sense strand
agacccuacuucagaauug

SEQ ID NO: 1839213 - RNA, 19 nt, Homo sapiens
  misc_RNA (1)...(19): siRNA sense strand
ugaacagcuuucuaauaug

SEQ ID NO: 1839214 - RNA, 19 nt, Homo sapiens
  misc_RNA (1)...(19): siRNA sense strand
gcuggagcaugcccguauu

SEQ ID NO: 1839215 - RNA, 19 nt, Homo sapiens
  misc_RNA (1)...(19): siRNA sense strand
cggaggugauuuccaucua

SEQ ID NO: 1839216 - RNA, 19 nt, Homo sapiens
  misc_RNA (1)...(19): siRNA sense strand
cuacguccacuuuacauug

SEQ ID NO: 1839217 - RNA, 19 nt, Homo sapiens
  misc_RNA (1)...(19): siRNA sense strand
gauuguaaagucuugcaaa

SEQ ID NO: 1839218 - RNA, 19 nt, Homo sapiens
  misc_RNA (1)...(19): siRNA sense strand
guuauugcccuccuacaga

SEQ ID NO: 1839219 - RNA, 19 nt, Homo sapiens
  misc_RNA (1)...(19): siRNA sense strand
uacguccacuuuacauuga

SEQ ID NO: 1839220 - RNA, 19 nt, Homo sapiens
  misc_RNA (1)...(19): siRNA sense strand
gaggagcgacgaagaguac

SEQ ID NO: 1839221 - RNA, 19 nt, Homo sapiens
  misc_RNA (1)...(19): siRNA sense strand
guacuacgccaaggagguu

SEQ ID NO: 1839222 - RNA, 19 nt, Homo sapiens
  misc_RNA (1)...(19): siRNA sense strand
uacagacccuacuucagaa

SEQ ID NO: 1839223 - RNA, 19 nt, Homo sapiens
  misc_RNA (1)...(19): siRNA sense strand
gcugagcgcuuuucugauc

SEQ ID NO: 1839224 - RNA, 19 nt, Homo sapiens
  misc_RNA (1)...(19): siRNA sense strand
cuauaaaguccacuaggaa

SEQ ID NO: 1839225 - RNA, 19 nt, Homo sapiens
  misc_RNA (1)...(19): siRNA sense strand
ggagcgacgaagaguacua

SEQ ID NO: 1839226 - RNA, 19 nt, Homo sapiens
  misc_RNA (1)...(19): siRNA sense strand
gaaccucuaaccauucucu

SEQ ID NO: 1839227 - RNA, 19 nt, Homo sapiens
  misc_RNA (1)...(19): siRNA sense strand
cugaugcuguucaugaaug

SEQ ID NO: 1839228 - RNA, 19 nt, Homo sapiens
  misc_RNA (1)...(19): siRNA sense strand
agagggaucuaggguggaa

SEQ ID NO: 1839229 - RNA, 19 nt, Homo sapiens
  misc_RNA (1)...(19): siRNA sense strand
gaagaacuagaagcaagau

SEQ ID NO: 1839230 - RNA, 19 nt, Homo sapiens
  misc_RNA (1)...(19): siRNA sense strand
gcaauggagaagaaugcuu

SEQ ID NO: 1839231 - RNA, 19 nt, Homo sapiens
  misc_RNA (1)...(19): siRNA sense strand
accauucucuacuacauug

SEQ ID NO: 1839232 - RNA, 19 nt, Homo sapiens
  misc_RNA (1)...(19): siRNA sense strand
agaaaugugcaggauaauu

SEQ ID NO: 1839233 - RNA, 19 nt, Homo sapiens
  misc_RNA (1)...(19): siRNA sense strand
ugaagaacuagaagcaaga

SEQ ID NO: 1839234 - RNA, 19 nt, Homo sapiens
  misc_RNA (1)...(19): siRNA sense strand
auucucaaguccaaagauu

SEQ ID NO: 1839235 - RNA, 19 nt, Homo sapiens
  misc_RNA (1)...(19): siRNA sense strand
gaguucagagucuuucguu

SEQ ID NO: 1839236 - RNA, 19 nt, Homo sapiens
  misc_RNA (1)...(19): siRNA sense strand
uaauguuauugcccuccua

SEQ ID NO: 1839237 - RNA, 19 nt, Homo sapiens
  misc_RNA (1)...(19): siRNA sense strand
caacccagcgcuacaucga

SEQ ID NO: 1839238 - RNA, 19 nt, Homo sapiens
  misc_RNA (1)...(19): siRNA sense strand
gaccaguucaugcgcaaga

SEQ ID NO: 1839239 - RNA, 19 nt, Homo sapiens
  misc_RNA (1)...(19): siRNA sense strand
gacccuacuucagaauugu

SEQ ID NO: 1839240 - RNA, 19 nt, Homo sapiens
  misc_RNA (1)...(19): siRNA sense strand
gcaugcccguauuuaugga

SEQ ID NO: 1839241 - RNA, 19 nt, Homo sapiens
  misc_RNA (1)...(19): siRNA sense strand
gcgagaggagcgacgaaga

SEQ ID NO: 1839242 - RNA, 19 nt, Homo sapiens
  misc_RNA (1)...(19): siRNA sense strand
ccuauugcuuuagaaaugu

SEQ ID NO: 1839243 - RNA, 19 nt, Homo sapiens
  misc_RNA (1)...(19): siRNA sense strand
aagcagaguucagagucuu

SEQ ID NO: 1839244 - RNA, 19 nt, Homo sapiens
  misc_RNA (1)...(19): siRNA sense strand
ugauggcaccuccacauau

SEQ ID NO: 1839245 - RNA, 19 nt, Homo sapiens
  misc_RNA (1)...(19): siRNA sense strand
acaacggauugagcuauau

SEQ ID NO: 1839246 - RNA, 19 nt, Homo sapiens
  misc_RNA (1)...(19): siRNA sense strand
gguccugagcuuauauaau

SEQ ID NO: 1839247 - RNA, 19 nt, Homo sapiens
  misc_RNA (1)...(19): siRNA sense strand
cgccaaggagguuuacaaa

SEQ ID NO: 1839248 - RNA, 19 nt, Homo sapiens
  misc_RNA (1)...(19): siRNA sense strand
caaguccaaagauuuaaca

SEQ ID NO: 1839249 - RNA, 19 nt, Homo sapiens
  misc_RNA (1)...(19): siRNA sense strand
cagaauuguucgauuugac

SEQ ID NO: 1839250 - RNA, 19 nt, Homo sapiens
  misc_RNA (1)...(19): siRNA sense strand
gagaggagcgacgaagagu

SEQ ID NO: 1839251 - RNA, 19 nt, Homo sapiens
  misc_RNA (1)...(19): siRNA sense strand
gauugaacagcuuucuaau

SEQ ID NO: 1839252 - RNA, 19 nt, Homo sapiens
  misc_RNA (1)...(19): siRNA sense strand
cagcaaaguugugaaaaca

SEQ ID NO: 1839253 - RNA, 19 nt, Homo sapiens
  misc_RNA (1)...(19): siRNA sense strand
aaagcagaguucagagucu

SEQ ID NO: 1839254 - RNA, 19 nt, Homo sapiens
  misc_RNA (1)...(19): siRNA sense strand
caacggauugagcuauauc

SEQ ID NO: 1839255 - RNA, 19 nt, Homo sapiens
  misc_RNA (1)...(19): siRNA sense strand
cucuaaccauucucuacua

SEQ ID NO: 1839256 - RNA, 19 nt, Homo sapiens
  misc_RNA (1)...(19): siRNA sense strand
gcgcuacaucgacagcaaa

SEQ ID NO: 1839257 - RNA, 19 nt, Homo sapiens
  misc_RNA (1)...(19): siRNA sense strand
cggauugagcuauaucaga

SEQ ID NO: 1839258 - RNA, 19 nt, Homo sapiens
  misc_RNA (1)...(19): siRNA sense strand
cgauauggaccaguucaug

SEQ ID NO: 1839259 - RNA, 19 nt, Homo sapiens
  misc_RNA (1)...(19): siRNA sense strand
caagauuugcagguauuga

SEQ ID NO: 1839260 - RNA, 19 nt, Homo sapiens
  misc_RNA (1)...(19): siRNA sense strand
gcagaguucagagucuuuc

SEQ ID NO: 1839261 - RNA, 19 nt, Homo sapiens
  misc_RNA (1)...(19): siRNA sense strand
uggagcaugcccguauuua

SEQ ID NO: 1839262 - RNA, 19 nt, Homo sapiens
  misc_RNA (1)...(19): siRNA sense strand
cguccacuuuacauugauu

SEQ ID NO: 1839263 - RNA, 19 nt, Homo sapiens
  misc_RNA (1)...(19): siRNA sense strand
gauugagcuauaucagauu

SEQ ID NO: 1839264 - RNA, 19 nt, Homo sapiens
  misc_RNA (1)...(19): siRNA sense strand
ugauuuccaucuacaacag

SEQ ID NO: 1839265 - RNA, 19 nt, Homo sapiens
  misc_RNA (1)...(19): siRNA sense strand
gcccguauuuauggaguuc

SEQ ID NO: 1839266 - RNA, 19 nt, Homo sapiens
  misc_RNA (1)...(19): siRNA sense strand
gguacaaugccaacuucug

SEQ ID NO: 1839267 - RNA, 19 nt, Homo sapiens
  misc_RNA (1)...(19): siRNA sense strand
ccacuuuacauugauuuca

SEQ ID NO: 1839268 - RNA, 19 nt, Homo sapiens
  misc_RNA (1)...(19): siRNA sense strand
gagaagagaguccaacuua

SEQ ID NO: 1839269 - RNA, 19 nt, Homo sapiens
  misc_RNA (1)...(19): siRNA sense strand
caacuuaggucuagaaauc

SEQ ID NO: 1839270 - RNA, 19 nt, Homo sapiens
  misc_RNA (1)...(19): siRNA sense strand
ggaauacuaugccaaagaa

SEQ ID NO: 1839271 - RNA, 19 nt, Homo sapiens
  misc_RNA (1)...(19): siRNA sense strand
ccacaacccucaucuaauc

SEQ ID NO: 1839272 - RNA, 19 nt, Homo sapiens
  misc_RNA (1)...(19): siRNA sense strand
ggugaagucuuguaaaugu

SEQ ID NO: 1839273 - RNA, 19 nt, Homo sapiens
  misc_RNA (1)...(19): siRNA sense strand
ucaaaggcguggacaauga

SEQ ID NO: 1839274 - RNA, 19 nt, Homo sapiens
  misc_RNA (1)...(19): siRNA sense strand
ggaucgagcucuuccagau

SEQ ID NO: 1839275 - RNA, 19 nt, Homo sapiens
  misc_RNA (1)...(19): siRNA sense strand
gcagaaggaucaccacaac

SEQ ID NO: 1839276 - RNA, 19 nt, Homo sapiens
  misc_RNA (1)...(19): siRNA sense strand
ccgaguggcuguccuuuga

SEQ ID NO: 1839277 - RNA, 19 nt, Homo sapiens
  misc_RNA (1)...(19): siRNA sense strand
caauggagauauccuggaa

SEQ ID NO: 1839278 - RNA, 19 nt, Homo sapiens
  misc_RNA (1)...(19): siRNA sense strand
cuaaaggaauuaccuccaa

SEQ ID NO: 1839279 - RNA, 19 nt, Homo sapiens
  misc_RNA (1)...(19): siRNA sense strand
gacaggaucugggcuggaa

SEQ ID NO: 1839280 - RNA, 19 nt, Homo sapiens
  misc_RNA (1)...(19): siRNA sense strand
ucaagaagcagaaggauca

SEQ ID NO: 1839281 - RNA, 19 nt, Homo sapiens
  misc_RNA (1)...(19): siRNA sense strand
gaagagaguccaacuuagg

SEQ ID NO: 1839282 - RNA, 19 nt, Homo sapiens
  misc_RNA (1)...(19): siRNA sense strand
guggugaagucuuguaaau

SEQ ID NO: 1839283 - RNA, 19 nt, Homo sapiens
  misc_RNA (1)...(19): siRNA sense strand
caccacaacccucaucuaa

SEQ ID NO: 1839284 - RNA, 19 nt, Homo sapiens
  misc_RNA (1)...(19): siRNA sense strand
gggcuacuaugccaacuuc

SEQ ID NO: 1839285 - RNA, 19 nt, Homo sapiens
  misc_RNA (1)...(19): siRNA sense strand
gaagaggguggaagccauu

SEQ ID NO: 1839286 - RNA, 19 nt, Homo sapiens
  misc_RNA (1)...(19): siRNA sense strand
gugaguggcuguugagaag

SEQ ID NO: 1839287 - RNA, 19 nt, Homo sapiens
  misc_RNA (1)...(19): siRNA sense strand
gugaagucuuguaaaugua

SEQ ID NO: 1839288 - RNA, 19 nt, Homo sapiens
  misc_RNA (1)...(19): siRNA sense strand
ggacuucggccacaucaag

SEQ ID NO: 1839289 - RNA, 19 nt, Homo sapiens
  misc_RNA (1)...(19): siRNA sense strand
gaaccuaagggcuacuaug

SEQ ID NO: 1839290 - RNA, 19 nt, Homo sapiens
  misc_RNA (1)...(19): siRNA sense strand
ugaccauccuguacuaugu

SEQ ID NO: 1839291 - RNA, 19 nt, Homo sapiens
  misc_RNA (1)...(19): siRNA sense strand
ggaaugagcagaggaucga

SEQ ID NO: 1839292 - RNA, 19 nt, Homo sapiens
  misc_RNA (1)...(19): siRNA sense strand
cuauaucgguggcaagaau

SEQ ID NO: 1839293 - RNA, 19 nt, Homo sapiens
  misc_RNA (1)...(19): siRNA sense strand
ugucugcccuaaaggaauu

SEQ ID NO: 1839294 - RNA, 19 nt, Homo sapiens
  misc_RNA (1)...(19): siRNA sense strand
gcucaggcccuugcccaua

SEQ ID NO: 1839295 - RNA, 19 nt, Homo sapiens
  misc_RNA (1)...(19): siRNA sense strand
gaguggcuguccuuugaug

SEQ ID NO: 1839296 - RNA, 19 nt, Homo sapiens
  misc_RNA (1)...(19): siRNA sense strand
ggacuguacaacacucuga

SEQ ID NO: 1839297 - RNA, 19 nt, Homo sapiens
  misc_RNA (1)...(19): siRNA sense strand
gagcagaauuccgggucuu

SEQ ID NO: 1839298 - RNA, 19 nt, Homo sapiens
  misc_RNA (1)...(19): siRNA sense strand
caaccuauuccgagcagaa

SEQ ID NO: 1839299 - RNA, 19 nt, Homo sapiens
  misc_RNA (1)...(19): siRNA sense strand
gugcgugaguggcuguuga

SEQ ID NO: 1839300 - RNA, 19 nt, Homo sapiens
  misc_RNA (1)...(19): siRNA sense strand
gaaggcugcacccaggaaa

SEQ ID NO: 1839301 - RNA, 19 nt, Homo sapiens
  misc_RNA (1)...(19): siRNA sense strand
agaagagaguccaacuuag

SEQ ID NO: 1839302 - RNA, 19 nt, Homo sapiens
  misc_RNA (1)...(19): siRNA sense strand
ggaaggcugcacccaggaa

SEQ ID NO: 1839303 - RNA, 19 nt, Homo sapiens
  misc_RNA (1)...(19): siRNA sense strand
gccaaagaaauccauaaau

SEQ ID NO: 1839304 - RNA, 19 nt, Homo sapiens
  misc_RNA (1)...(19): siRNA sense strand
ccaacaugguggugaaguc

SEQ ID NO: 1839305 - RNA, 19 nt, Homo sapiens
  misc_RNA (1)...(19): siRNA sense strand
gggagcugcuggaggagau

SEQ ID NO: 1839306 - RNA, 19 nt, Homo sapiens
  misc_RNA (1)...(19): siRNA sense strand
ggacaaugaggaugaccau

SEQ ID NO: 1839307 - RNA, 19 nt, Homo sapiens
  misc_RNA (1)...(19): siRNA sense strand
gaguggcuguugagaagag

SEQ ID NO: 1839308 - RNA, 19 nt, Homo sapiens
  misc_RNA (1)...(19): siRNA sense strand
ucugaacccugaagcaucu

SEQ ID NO: 1839309 - RNA, 19 nt, Homo sapiens
  misc_RNA (1)...(19): siRNA sense strand
gaccauggccguggagauc

SEQ ID NO: 1839310 - RNA, 19 nt, Homo sapiens
  misc_RNA (1)...(19): siRNA sense strand
ggagauauccuggaaaaca

SEQ ID NO: 1839311 - RNA, 19 nt, Homo sapiens
  misc_RNA (1)...(19): siRNA sense strand
cggaauacuaugccaaaga

SEQ ID NO: 1839312 - RNA, 19 nt, Homo sapiens
  misc_RNA (1)...(19): siRNA sense strand
acaugguggugaagucuug

SEQ ID NO: 1839313 - RNA, 19 nt, Homo sapiens
  misc_RNA (1)...(19): siRNA sense strand
ggucuagaaaucagcauuc

SEQ ID NO: 1839314 - RNA, 19 nt, Homo sapiens
  misc_RNA (1)...(19): siRNA sense strand
gaauacuaugccaaagaaa

SEQ ID NO: 1839315 - RNA, 19 nt, Homo sapiens
  misc_RNA (1)...(19): siRNA sense strand
gccucucucuguccacuug

SEQ ID NO: 1839316 - RNA, 19 nt, Homo sapiens
  misc_RNA (1)...(19): siRNA sense strand
gaguccaacuuaggucuag

SEQ ID NO: 1839317 - RNA, 19 nt, Homo sapiens
  misc_RNA (1)...(19): siRNA sense strand
ccauaaauucgacaugauc

SEQ ID NO: 1839318 - RNA, 19 nt, Homo sapiens
  misc_RNA (1)...(19): siRNA sense strand
ugccaaagaaauccauaaa

SEQ ID NO: 1839319 - RNA, 19 nt, Homo sapiens
  misc_RNA (1)...(19): siRNA sense strand
ggccacaucaagaagaaga

SEQ ID NO: 1839320 - RNA, 19 nt, Homo sapiens
  misc_RNA (1)...(19): siRNA sense strand
ucuccaacaugguggugaa

SEQ ID NO: 1839321 - RNA, 19 nt, Homo sapiens
  misc_RNA (1)...(19): siRNA sense strand
gaccauccuguacuauguu

SEQ ID NO: 1839322 - RNA, 19 nt, Homo sapiens
  misc_RNA (1)...(19): siRNA sense strand
gagauauccuggaaaacau

SEQ ID NO: 1839323 - RNA, 19 nt, Homo sapiens
  misc_RNA (1)...(19): siRNA sense strand
agaaaucagcauucacugu

SEQ ID NO: 1839324 - RNA, 19 nt, Homo sapiens
  misc_RNA (1)...(19): siRNA sense strand
cuagaaaucagcauucacu

SEQ ID NO: 1839325 - RNA, 19 nt, Homo sapiens
  misc_RNA (1)...(19): siRNA sense strand
gcuucaauguguccucagu

SEQ ID NO: 1839326 - RNA, 19 nt, Homo sapiens
  misc_RNA (1)...(19): siRNA sense strand
auccauaaauucgacauga

SEQ ID NO: 1839327 - RNA, 19 nt, Homo sapiens
  misc_RNA (1)...(19): siRNA sense strand
ggggacagaucuugagcaa

SEQ ID NO: 1839328 - RNA, 19 nt, Homo sapiens
  misc_RNA (1)...(19): siRNA sense strand
gaaguggguccaugaaccu

SEQ ID NO: 1839329 - RNA, 19 nt, Homo sapiens
  misc_RNA (1)...(19): siRNA sense strand
ucaccacaacccucaucua

SEQ ID NO: 1839330 - RNA, 19 nt, Homo sapiens
  misc_RNA (1)...(19): siRNA sense strand
ugagaagagaguccaacuu

SEQ ID NO: 1839331 - RNA, 19 nt, Homo sapiens
  misc_RNA (1)...(19): siRNA sense strand
gcugucugcccuaaaggaa

SEQ ID NO: 1839332 - RNA, 19 nt, Homo sapiens
  misc_RNA (1)...(19): siRNA sense strand
gaucaccacaacccucauc

SEQ ID NO: 1839333 - RNA, 19 nt, Homo sapiens
  misc_RNA (1)...(19): siRNA sense strand
gcguggacaaugaggauga

SEQ ID NO: 1839334 - RNA, 19 nt, Homo sapiens
  misc_RNA (1)...(19): siRNA sense strand
gucuagaaaucagcauuca

SEQ ID NO: 1839335 - RNA, 19 nt, Homo sapiens
  misc_RNA (1)...(19): siRNA sense strand
guccaugucacaccuuuca

SEQ ID NO: 1839336 - RNA, 19 nt, Homo sapiens
  misc_RNA (1)...(19): siRNA sense strand
gguggugaagucuuguaaa

SEQ ID NO: 1839337 - RNA, 19 nt, Homo sapiens
  misc_RNA (1)...(19): siRNA sense strand
gugcugggacuguacaaca

SEQ ID NO: 1839338 - RNA, 19 nt, Homo sapiens
  misc_RNA (1)...(19): siRNA sense strand
gguccuggcccuuuacaac

SEQ ID NO: 1839339 - RNA, 19 nt, Homo sapiens
  misc_RNA (1)...(19): siRNA sense strand
ucggccacaucaagaagaa

SEQ ID NO: 1839340 - RNA, 19 nt, Homo sapiens
  misc_RNA (1)...(19): siRNA sense strand
uccauaaauucgacaugau

SEQ ID NO: 1839341 - RNA, 19 nt, Homo sapiens
  misc_RNA (1)...(19): siRNA sense strand
gcuacuaugccaacuucug

SEQ ID NO: 1839342 - RNA, 19 nt, Homo sapiens
  misc_RNA (1)...(19): siRNA sense strand
gcaacuuggaggagaacug

SEQ ID NO: 1839343 - RNA, 19 nt, Homo sapiens
  misc_RNA (1)...(19): siRNA sense strand
cagcauucacuguccaugu

SEQ ID NO: 1839344 - RNA, 19 nt, Homo sapiens
  misc_RNA (1)...(19): siRNA sense strand
gaaagcagaucuucagugu

SEQ ID NO: 1839345 - RNA, 19 nt, Homo sapiens
  misc_RNA (1)...(19): siRNA sense strand
gaggaaaucucucaggaaa

SEQ ID NO: 1839346 - RNA, 19 nt, Homo sapiens
  misc_RNA (1)...(19): siRNA sense strand
ggaaaucucucaggaaaga

SEQ ID NO: 1839347 - RNA, 19 nt, Homo sapiens
  misc_RNA (1)...(19): siRNA sense strand
caaauuuccuucagucuuu

SEQ ID NO: 1839348 - RNA, 19 nt, Homo sapiens
  misc_RNA (1)...(19): siRNA sense strand
aaacagccauugaacauaa

SEQ ID NO: 1839349 - RNA, 19 nt, Homo sapiens
  misc_RNA (1)...(19): siRNA sense strand
caccggaccuucagauuua

SEQ ID NO: 1839350 - RNA, 19 nt, Homo sapiens
  misc_RNA (1)...(19): siRNA sense strand
aaacuugaaucccuuagua

SEQ ID NO: 1839351 - RNA, 19 nt, Homo sapiens
  misc_RNA (1)...(19): siRNA sense strand
gaagaucucugugccaaug

SEQ ID NO: 1839352 - RNA, 19 nt, Homo sapiens
  misc_RNA (1)...(19): siRNA sense strand
ggaaagccgucugauuuga

SEQ ID NO: 1839353 - RNA, 19 nt, Homo sapiens
  misc_RNA (1)...(19): siRNA sense strand
gccaaugauuccuauguua

SEQ ID NO: 1839354 - RNA, 19 nt, Homo sapiens
  misc_RNA (1)...(19): siRNA sense strand
caaugaaacugacagaaau

SEQ ID NO: 1839355 - RNA, 19 nt, Homo sapiens
  misc_RNA (1)...(19): siRNA sense strand
aaacuuggcugacugucua

SEQ ID NO: 1839356 - RNA, 19 nt, Homo sapiens
  misc_RNA (1)...(19): siRNA sense strand
ggagagauuuccgaguaua

SEQ ID NO: 1839357 - RNA, 19 nt, Homo sapiens
  misc_RNA (1)...(19): siRNA sense strand
caagaaaugugaugaguac

SEQ ID NO: 1839358 - RNA, 19 nt, Homo sapiens
  misc_RNA (1)...(19): siRNA sense strand
gaaccaagggcaagcagua

SEQ ID NO: 1839359 - RNA, 19 nt, Homo sapiens
  misc_RNA (1)...(19): siRNA sense strand
gaaacugacagaaaucauu

SEQ ID NO: 1839360 - RNA, 19 nt, Homo sapiens
  misc_RNA (1)...(19): siRNA sense strand
caaguauggugacaucgua

SEQ ID NO: 1839361 - RNA, 19 nt, Homo sapiens
  misc_RNA (1)...(19): siRNA sense strand
gaagucaccugaggagaug

SEQ ID NO: 1839362 - RNA, 19 nt, Homo sapiens
  misc_RNA (1)...(19): siRNA sense strand
gccaucagcacuccaauua

SEQ ID NO: 1839363 - RNA, 19 nt, Homo sapiens
  misc_RNA (1)...(19): siRNA sense strand
ccugaagacuuuccacuuu

SEQ ID NO: 1839364 - RNA, 19 nt, Homo sapiens
  misc_RNA (1)...(19): siRNA sense strand
cugcacaaauugagcauua

SEQ ID NO: 1839365 - RNA, 19 nt, Homo sapiens
  misc_RNA (1)...(19): siRNA sense strand
aagcagaucuucaguguca

SEQ ID NO: 1839366 - RNA, 19 nt, Homo sapiens
  misc_RNA (1)...(19): siRNA sense strand
gaaccgggcucuucaagcu

SEQ ID NO: 1839367 - RNA, 19 nt, Homo sapiens
  misc_RNA (1)...(19): siRNA sense strand
cgacacggcuguaaagaca

SEQ ID NO: 1839368 - RNA, 19 nt, Homo sapiens
  misc_RNA (1)...(19): siRNA sense strand
gagaaaagauggcucaaga

SEQ ID NO: 1839369 - RNA, 19 nt, Homo sapiens
  misc_RNA (1)...(19): siRNA sense strand
gaagacggcugaccaucuc

SEQ ID NO: 1839370 - RNA, 19 nt, Homo sapiens
  misc_RNA (1)...(19): siRNA sense strand
cagcacagcuagacaagga

SEQ ID NO: 1839371 - RNA, 19 nt, Homo sapiens
  misc_RNA (1)...(19): siRNA sense strand
gaucuuugcucccaguaug

SEQ ID NO: 1839372 - RNA, 19 nt, Homo sapiens
  misc_RNA (1)...(19): siRNA sense strand
ugaaggagcugucugugau

SEQ ID NO: 1839373 - RNA, 19 nt, Homo sapiens
  misc_RNA (1)...(19): siRNA sense strand
caaggacacuuucuuugau

SEQ ID NO: 1839374 - RNA, 19 nt, Homo sapiens
  misc_RNA (1)...(19): siRNA sense strand
gaaacagccauugaacaua

SEQ ID NO: 1839375 - RNA, 19 nt, Homo sapiens
  misc_RNA (1)...(19): siRNA sense strand
ugggagagauuuccgagua

SEQ ID NO: 1839376 - RNA, 19 nt, Homo sapiens
  misc_RNA (1)...(19): siRNA sense strand
gaugaaccuuuggaguuua

SEQ ID NO: 1839377 - RNA, 19 nt, Homo sapiens
  misc_RNA (1)...(19): siRNA sense strand
caucagcacuccaauuauc

SEQ ID NO: 1839378 - RNA, 19 nt, Homo sapiens
  misc_RNA (1)...(19): siRNA sense strand
gaacggauuaggcuucuga

SEQ ID NO: 1839379 - RNA, 19 nt, Homo sapiens
  misc_RNA (1)...(19): siRNA sense strand
ccggaaagccgucugauuu

SEQ ID NO: 1839380 - RNA, 19 nt, Homo sapiens
  misc_RNA (1)...(19): siRNA sense strand
gaaauacaagaccaacaaa

SEQ ID NO: 1839381 - RNA, 19 nt, Homo sapiens
  misc_RNA (1)...(19): siRNA sense strand
ccugaugacugcuuuauuc

SEQ ID NO: 1839382 - RNA, 19 nt, Homo sapiens
  misc_RNA (1)...(19): siRNA sense strand
gcacccagaugacccugaa

SEQ ID NO: 1839383 - RNA, 19 nt, Homo sapiens
  misc_RNA (1)...(19): siRNA sense strand
gaucugacaaugaaacuga

SEQ ID NO: 1839384 - RNA, 19 nt, Homo sapiens
  misc_RNA (1)...(19): siRNA sense strand
gaaauacggaaaucgagaa

SEQ ID NO: 1839385 - RNA, 19 nt, Homo sapiens
  misc_RNA (1)...(19): siRNA sense strand
agacggauguggccaagaa

SEQ ID NO: 1839386 - RNA, 19 nt, Homo sapiens
  misc_RNA (1)...(19): siRNA sense strand
cagaguccaucaugaagaa

SEQ ID NO: 1839387 - RNA, 19 nt, Homo sapiens
  misc_RNA (1)...(19): siRNA sense strand
gagcugucauccacauuga

SEQ ID NO: 1839388 - RNA, 19 nt, Homo sapiens
  misc_RNA (1)...(19): siRNA sense strand
ugagaaggaucguccaugu

SEQ ID NO: 1839389 - RNA, 19 nt, Homo sapiens
  misc_RNA (1)...(19): siRNA sense strand
cgaaccaccuccaauaaca

SEQ ID NO: 1839390 - RNA, 19 nt, Homo sapiens
  misc_RNA (1)...(19): siRNA sense strand
ccacagaguccaucaugaa

SEQ ID NO: 1839391 - RNA, 19 nt, Homo sapiens
  misc_RNA (1)...(19): siRNA sense strand
gcagugugcccucuacauu

SEQ ID NO: 1839392 - RNA, 19 nt, Homo sapiens
  misc_RNA (1)...(19): siRNA sense strand
ugagguagcugugccaguu

SEQ ID NO: 1839393 - RNA, 19 nt, Homo sapiens
  misc_RNA (1)...(19): siRNA sense strand
gaaggagagugugcugaug

SEQ ID NO: 1839394 - RNA, 19 nt, Homo sapiens
  misc_RNA (1)...(19): siRNA sense strand
gaaaggagaaguacaagcu

SEQ ID NO: 1839395 - RNA, 19 nt, Homo sapiens
  misc_RNA (1)...(19): siRNA sense strand
ggauuaggcuucugagacu

SEQ ID NO: 1839396 - RNA, 19 nt, Homo sapiens
  misc_RNA (1)...(19): siRNA sense strand
gaaagggagaauugagaaa

SEQ ID NO: 1839397 - RNA, 19 nt, Homo sapiens
  misc_RNA (1)...(19): siRNA sense strand
gcucaaguauggugacauc

SEQ ID NO: 1839398 - RNA, 19 nt, Homo sapiens
  misc_RNA (1)...(19): siRNA sense strand
gcagagacauacgcagaug

SEQ ID NO: 1839399 - RNA, 19 nt, Homo sapiens
  misc_RNA (1)...(19): siRNA sense strand
gaaggaucguccaugugaa

SEQ ID NO: 1839400 - RNA, 19 nt, Homo sapiens
  misc_RNA (1)...(19): siRNA sense strand
gcaagagcuccauguacua

SEQ ID NO: 1839401 - RNA, 19 nt, Homo sapiens
  misc_RNA (1)...(19): siRNA sense strand
guacuucagagcagucaua

SEQ ID NO: 1839402 - RNA, 19 nt, Homo sapiens
  misc_RNA (1)...(19): siRNA sense strand
agaugacccugaagacuuu

SEQ ID NO: 1839403 - RNA, 19 nt, Homo sapiens
  misc_RNA (1)...(19): siRNA sense strand
gacuaaagcaaaucuugua

SEQ ID NO: 1839404 - RNA, 19 nt, Homo sapiens
  misc_RNA (1)...(19): siRNA sense strand
ugacuuugauggugaugaa

SEQ ID NO: 1839405 - RNA, 19 nt, Homo sapiens
  misc_RNA (1)...(19): siRNA sense strand
cucaagagcucaaguaugg

SEQ ID NO: 1839406 - RNA, 19 nt, Homo sapiens
  misc_RNA (1)...(19): siRNA sense strand
caacauggcacccaagaag

SEQ ID NO: 1839407 - RNA, 19 nt, Homo sapiens
  misc_RNA (1)...(19): siRNA sense strand
agaugaaccuuuggaguuu

SEQ ID NO: 1839408 - RNA, 19 nt, Homo sapiens
  misc_RNA (1)...(19): siRNA sense strand
gaaaauaagccacaucugu

SEQ ID NO: 1839409 - RNA, 19 nt, Homo sapiens
  misc_RNA (1)...(19): siRNA sense strand
gagauguggugcuguucaa

SEQ ID NO: 1839410 - RNA, 19 nt, Homo sapiens
  misc_RNA (1)...(19): siRNA sense strand
acaaugaaacugacagaaa

SEQ ID NO: 1839411 - RNA, 19 nt, Homo sapiens
  misc_RNA (1)...(19): siRNA sense strand
guaaacaaagcaaacauca

SEQ ID NO: 1839412 - RNA, 19 nt, Homo sapiens
  misc_RNA (1)...(19): siRNA sense strand
ggaaaacagggucgauuua

SEQ ID NO: 1839413 - RNA, 19 nt, Homo sapiens
  misc_RNA (1)...(19): siRNA sense strand
gaaugccggcuacaagaaa

SEQ ID NO: 1839414 - RNA, 19 nt, Homo sapiens
  misc_RNA (1)...(19): siRNA sense strand
ggacuaaagcaaaucuugu

SEQ ID NO: 1839415 - RNA, 19 nt, Homo sapiens
  misc_RNA (1)...(19): siRNA sense strand
ccaccggaccuucagauuu

SEQ ID NO: 1839416 - RNA, 19 nt, Homo sapiens
  misc_RNA (1)...(19): siRNA sense strand
gcacaaauugagcauuaug

SEQ ID NO: 1839417 - RNA, 19 nt, Homo sapiens
  misc_RNA (1)...(19): siRNA sense strand
cagggucgauuuagaggaa

SEQ ID NO: 1839418 - RNA, 19 nt, Homo sapiens
  misc_RNA (1)...(19): siRNA sense strand
gaccagaggcuucguccaa

SEQ ID NO: 1839419 - RNA, 19 nt, Homo sapiens
  misc_RNA (1)...(19): siRNA sense strand
gaucuucgacacaaaugaa

SEQ ID NO: 1839420 - RNA, 19 nt, Homo sapiens
  misc_RNA (1)...(19): siRNA sense strand
gggagagauuuccgaguau

SEQ ID NO: 1839421 - RNA, 19 nt, Homo sapiens
  misc_RNA (1)...(19): siRNA sense strand
caacaucaaagcagucuuc

SEQ ID NO: 1839422 - RNA, 19 nt, Homo sapiens
  misc_RNA (1)...(19): siRNA sense strand
ucaaacagaagaagcuaaa

SEQ ID NO: 1839423 - RNA, 19 nt, Homo sapiens
  misc_RNA (1)...(19): siRNA sense strand
gaaccuucaucuuccucaa

SEQ ID NO: 1839424 - RNA, 19 nt, Homo sapiens
  misc_RNA (1)...(19): siRNA sense strand
aaagccgucugauuugauu

SEQ ID NO: 1839425 - RNA, 19 nt, Homo sapiens
  misc_RNA (1)...(19): siRNA sense strand
guacaagcuucugguggaa

SEQ ID NO: 1839426 - RNA, 19 nt, Homo sapiens
  misc_RNA (1)...(19): siRNA sense strand
gcacagauggagccagguu

SEQ ID NO: 1839427 - RNA, 19 nt, Homo sapiens
  misc_RNA (1)...(19): siRNA sense strand
uggaggagauggcuuagau

SEQ ID NO: 1839428 - RNA, 19 nt, Homo sapiens
  misc_RNA (1)...(19): siRNA sense strand
gcgaaggcuugucaaaucu

SEQ ID NO: 1839429 - RNA, 19 nt, Homo sapiens
  misc_RNA (1)...(19): siRNA sense strand
aaauaagccacaucuguuu

SEQ ID NO: 1839430 - RNA, 19 nt, Homo sapiens
  misc_RNA (1)...(19): siRNA sense strand
aaucccagcugaagauguu

SEQ ID NO: 1839431 - RNA, 19 nt, Homo sapiens
  misc_RNA (1)...(19): siRNA sense strand
agaaggaucguccauguga

SEQ ID NO: 1839432 - RNA, 19 nt, Homo sapiens
  misc_RNA (1)...(19): siRNA sense strand
ugucacaccuggccaagga

SEQ ID NO: 1839433 - RNA, 19 nt, Homo sapiens
  misc_RNA (1)...(19): siRNA sense strand
gcaaggaugagaaaauuaa

SEQ ID NO: 1839434 - RNA, 19 nt, Homo sapiens
  misc_RNA (1)...(19): siRNA sense strand
ugaggaaacugguucaaaa

SEQ ID NO: 1839435 - RNA, 19 nt, Homo sapiens
  misc_RNA (1)...(19): siRNA sense strand
gaagcaguuucuggacuau

SEQ ID NO: 1839436 - RNA, 19 nt, Homo sapiens
  misc_RNA (1)...(19): siRNA sense strand
gcugagacagugagauauu

SEQ ID NO: 1839437 - RNA, 19 nt, Homo sapiens
  misc_RNA (1)...(19): siRNA sense strand
ccgaguauauugaagaagu

SEQ ID NO: 1839438 - RNA, 19 nt, Homo sapiens
  misc_RNA (1)...(19): siRNA sense strand
caggaaagagaguggauuu

SEQ ID NO: 1839439 - RNA, 19 nt, Homo sapiens
  misc_RNA (1)...(19): siRNA sense strand
agugugcccucuacauuaa

SEQ ID NO: 1839440 - RNA, 19 nt, Homo sapiens
  misc_RNA (1)...(19): siRNA sense strand
cagugugcccucuacauua

SEQ ID NO: 1839441 - RNA, 19 nt, Homo sapiens
  misc_RNA (1)...(19): siRNA sense strand
ccuuaguaguucugaauuu

SEQ ID NO: 1839442 - RNA, 19 nt, Homo sapiens
  misc_RNA (1)...(19): siRNA sense strand
cauccaagcuccgugugaa

SEQ ID NO: 1839443 - RNA, 19 nt, Homo sapiens
  misc_RNA (1)...(19): siRNA sense strand
ucuccgaccucaugaccua

SEQ ID NO: 1839444 - RNA, 19 nt, Homo sapiens
  misc_RNA (1)...(19): siRNA sense strand
ucaauuaccuugcugagua

SEQ ID NO: 1839445 - RNA, 19 nt, Homo sapiens
  misc_RNA (1)...(19): siRNA sense strand
gaagcagaaucuaaagaaa

SEQ ID NO: 1839446 - RNA, 19 nt, Homo sapiens
  misc_RNA (1)...(19): siRNA sense strand
gagaauauuuguccuaaag

SEQ ID NO: 1839447 - RNA, 19 nt, Homo sapiens
  misc_RNA (1)...(19): siRNA sense strand
gaagugggcuuuggacaau

SEQ ID NO: 1839448 - RNA, 19 nt, Homo sapiens
  misc_RNA (1)...(19): siRNA sense strand
caagauagcaagaaacauu

SEQ ID NO: 1839449 - RNA, 19 nt, Homo sapiens
  misc_RNA (1)...(19): siRNA sense strand
guacgaagauggagaagca

SEQ ID NO: 1839450 - RNA, 19 nt, Homo sapiens
  misc_RNA (1)...(19): siRNA sense strand
auacaacacugaccucuuu

SEQ ID NO: 1839451 - RNA, 19 nt, Homo sapiens
  misc_RNA (1)...(19): siRNA sense strand
gauaggaugucucauuaca

SEQ ID NO: 1839452 - RNA, 19 nt, Homo sapiens
  misc_RNA (1)...(19): siRNA sense strand
gacaaugaccaaaucaaua

SEQ ID NO: 1839453 - RNA, 19 nt, Homo sapiens
  misc_RNA (1)...(19): siRNA sense strand
gacaauggcuauaguccaa

SEQ ID NO: 1839454 - RNA, 19 nt, Homo sapiens
  misc_RNA (1)...(19): siRNA sense strand
guacaucuauucucacaca

SEQ ID NO: 1839455 - RNA, 19 nt, Homo sapiens
  misc_RNA (1)...(19): siRNA sense strand
gaaggaaccaaauccaauu

SEQ ID NO: 1839456 - RNA, 19 nt, Homo sapiens
  misc_RNA (1)...(19): siRNA sense strand
cugauaggaugucucauua

SEQ ID NO: 1839457 - RNA, 19 nt, Homo sapiens
  misc_RNA (1)...(19): siRNA sense strand
ggagucaggugauaaugga

SEQ ID NO: 1839458 - RNA, 19 nt, Homo sapiens
  misc_RNA (1)...(19): siRNA sense strand
uauaagaccuucucaagag

SEQ ID NO: 1839459 - RNA, 19 nt, Homo sapiens
  misc_RNA (1)...(19): siRNA sense strand
gaucuggagucaggugaua

SEQ ID NO: 1839460 - RNA, 19 nt, Homo sapiens
  misc_RNA (1)...(19): siRNA sense strand
gaucaaguguucccuccaa

SEQ ID NO: 1839461 - RNA, 19 nt, Homo sapiens
  misc_RNA (1)...(19): siRNA sense strand
gaacaagaacugggauuug

SEQ ID NO: 1839462 - RNA, 19 nt, Homo sapiens
  misc_RNA (1)...(19): siRNA sense strand
gaaaucgugguguuuaauu

SEQ ID NO: 1839463 - RNA, 19 nt, Homo sapiens
  misc_RNA (1)...(19): siRNA sense strand
ugaaagaucuaugacaaug

SEQ ID NO: 1839464 - RNA, 19 nt, Homo sapiens
  misc_RNA (1)...(19): siRNA sense strand
auggagagcuucacuguuu

SEQ ID NO: 1839465 - RNA, 19 nt, Homo sapiens
  misc_RNA (1)...(19): siRNA sense strand
gggccaugaugcagaauaa

SEQ ID NO: 1839466 - RNA, 19 nt, Homo sapiens
  misc_RNA (1)...(19): siRNA sense strand
ccaauaacuucauacacaa

SEQ ID NO: 1839467 - RNA, 19 nt, Homo sapiens
  misc_RNA (1)...(19): siRNA sense strand
gcagaagggugugugaugu

SEQ ID NO: 1839468 - RNA, 19 nt, Homo sapiens
  misc_RNA (1)...(19): siRNA sense strand
ccagguggauauaacaauu

SEQ ID NO: 1839469 - RNA, 19 nt, Homo sapiens
  misc_RNA (1)...(19): siRNA sense strand
caauggcuauaguccaaua

SEQ ID NO: 1839470 - RNA, 19 nt, Homo sapiens
  misc_RNA (1)...(19): siRNA sense strand
gauauaagaccuucucaag

SEQ ID NO: 1839471 - RNA, 19 nt, Homo sapiens
  misc_RNA (1)...(19): siRNA sense strand
gaauggacacguuuauguu

SEQ ID NO: 1839472 - RNA, 19 nt, Homo sapiens
  misc_RNA (1)...(19): siRNA sense strand
aaacaucaccuucaacaug

SEQ ID NO: 1839473 - RNA, 19 nt, Homo sapiens
  misc_RNA (1)...(19): siRNA sense strand
ggaaacaucaccuucaaca

SEQ ID NO: 1839474 - RNA, 19 nt, Homo sapiens
  misc_RNA (1)...(19): siRNA sense strand
uacuauaacuccauuguga

SEQ ID NO: 1839475 - RNA, 19 nt, Homo sapiens
  misc_RNA (1)...(19): siRNA sense strand
gagaugacauuccuucaac

SEQ ID NO: 1839476 - RNA, 19 nt, Homo sapiens
  misc_RNA (1)...(19): siRNA sense strand
ccaaaucaauaagagauga

SEQ ID NO: 1839477 - RNA, 19 nt, Homo sapiens
  misc_RNA (1)...(19): siRNA sense strand
ggaggugcauguccugaau

SEQ ID NO: 1839478 - RNA, 19 nt, Homo sapiens
  misc_RNA (1)...(19): siRNA sense strand
aagcugacauggauaagaa

SEQ ID NO: 1839479 - RNA, 19 nt, Homo sapiens
  misc_RNA (1)...(19): siRNA sense strand
cugaugagcuucuguuuag

SEQ ID NO: 1839480 - RNA, 19 nt, Homo sapiens
  misc_RNA (1)...(19): siRNA sense strand
ucagcaaacuucuccuuga

SEQ ID NO: 1839481 - RNA, 19 nt, Homo sapiens
  misc_RNA (1)...(19): siRNA sense strand
agagagaggucacacuuca

SEQ ID NO: 1839482 - RNA, 19 nt, Homo sapiens
  misc_RNA (1)...(19): siRNA sense strand
gaccugaaaucgugguguu

SEQ ID NO: 1839483 - RNA, 19 nt, Homo sapiens
  misc_RNA (1)...(19): siRNA sense strand
gagagugaaagaucuauga

SEQ ID NO: 1839484 - RNA, 19 nt, Homo sapiens
  misc_RNA (1)...(19): siRNA sense strand
gaaagaucuaugacaauga

SEQ ID NO: 1839485 - RNA, 19 nt, Homo sapiens
  misc_RNA (1)...(19): siRNA sense strand
gaaugaagagggagaagau

SEQ ID NO: 1839486 - RNA, 19 nt, Homo sapiens
  misc_RNA (1)...(19): siRNA sense strand
gauccaccaugaagcagaa

SEQ ID NO: 1839487 - RNA, 19 nt, Homo sapiens
  misc_RNA (1)...(19): siRNA sense strand
uacuaaggcugaacaagaa

SEQ ID NO: 1839488 - RNA, 19 nt, Homo sapiens
  misc_RNA (1)...(19): siRNA sense strand
gauauugcccugucuguca

SEQ ID NO: 1839489 - RNA, 19 nt, Homo sapiens
  misc_RNA (1)...(19): siRNA sense strand
uccaauaacuucauacaca

SEQ ID NO: 1839490 - RNA, 19 nt, Homo sapiens
  misc_RNA (1)...(19): siRNA sense strand
ggagaugcuucccuguuca

SEQ ID NO: 1839491 - RNA, 19 nt, Homo sapiens
  misc_RNA (1)...(19): siRNA sense strand
gaacucaagauagcaagaa

SEQ ID NO: 1839492 - RNA, 19 nt, Homo sapiens
  misc_RNA (1)...(19): siRNA sense strand
ggauggacgucacccuguu

SEQ ID NO: 1839493 - RNA, 19 nt, Homo sapiens
  misc_RNA (1)...(19): siRNA sense strand
ggagaugggagaugaggaa

SEQ ID NO: 1839494 - RNA, 19 nt, Homo sapiens
  misc_RNA (1)...(19): siRNA sense strand
ucaacugggugaucaaauc

SEQ ID NO: 1839495 - RNA, 19 nt, Homo sapiens
  misc_RNA (1)...(19): siRNA sense strand
gaggaaguccacacuauuc

SEQ ID NO: 1839496 - RNA, 19 nt, Homo sapiens
  misc_RNA (1)...(19): siRNA sense strand
ggucuacuauaacuccauu

SEQ ID NO: 1839497 - RNA, 19 nt, Homo sapiens
  misc_RNA (1)...(19): siRNA sense strand
guacacaucaucgagcuaa

SEQ ID NO: 1839498 - RNA, 19 nt, Homo sapiens
  misc_RNA (1)...(19): siRNA sense strand
gaugggagaugaggaaguc

SEQ ID NO: 1839499 - RNA, 19 nt, Homo sapiens
  misc_RNA (1)...(19): siRNA sense strand
gaaaagagagugaaagauc

SEQ ID NO: 1839500 - RNA, 19 nt, Homo sapiens
  misc_RNA (1)...(19): siRNA sense strand
gcaacauagggaagaauuu

SEQ ID NO: 1839501 - RNA, 19 nt, Homo sapiens
  misc_RNA (1)...(19): siRNA sense strand
agugaaagaucuaugacaa

SEQ ID NO: 1839502 - RNA, 19 nt, Homo sapiens
  misc_RNA (1)...(19): siRNA sense strand
aagggaaucuggugaagug

SEQ ID NO: 1839503 - RNA, 19 nt, Homo sapiens
  misc_RNA (1)...(19): siRNA sense strand
ugaagcagaaucuaaagaa

SEQ ID NO: 1839504 - RNA, 19 nt, Homo sapiens
  misc_RNA (1)...(19): siRNA sense strand
ccaugaagcagaaucuaaa

SEQ ID NO: 1839505 - RNA, 19 nt, Homo sapiens
  misc_RNA (1)...(19): siRNA sense strand
ucgauaaucugggccauga

SEQ ID NO: 1839506 - RNA, 19 nt, Homo sapiens
  misc_RNA (1)...(19): siRNA sense strand
gaauggcacacacuuuguu

SEQ ID NO: 1839507 - RNA, 19 nt, Homo sapiens
  misc_RNA (1)...(19): siRNA sense strand
gaugaauggcacacacuuu

SEQ ID NO: 1839508 - RNA, 19 nt, Homo sapiens
  misc_RNA (1)...(19): siRNA sense strand
uuacuaaggcugaacaaga

SEQ ID NO: 1839509 - RNA, 19 nt, Homo sapiens
  misc_RNA (1)...(19): siRNA sense strand
uaacaguauuggcuuugga

SEQ ID NO: 1839510 - RNA, 19 nt, Homo sapiens
  misc_RNA (1)...(19): siRNA sense strand
caacaccucacugcucuuu

SEQ ID NO: 1839511 - RNA, 19 nt, Homo sapiens
  misc_RNA (1)...(19): siRNA sense strand
gccaaaggacccugucauu

SEQ ID NO: 1839512 - RNA, 19 nt, Homo sapiens
  misc_RNA (1)...(19): siRNA sense strand
gagcuucacuguuuuguca

SEQ ID NO: 1839513 - RNA, 19 nt, Homo sapiens
  misc_RNA (1)...(19): siRNA sense strand
cuauaacuccauugugaua

SEQ ID NO: 1839514 - RNA, 19 nt, Homo sapiens
  misc_RNA (1)...(19): siRNA sense strand
aagggaagccugaaaauua

SEQ ID NO: 1839515 - RNA, 19 nt, Homo sapiens
  misc_RNA (1)...(19): siRNA sense strand
gauaaucugggccaugaug

SEQ ID NO: 1839516 - RNA, 19 nt, Homo sapiens
  misc_RNA (1)...(19): siRNA sense strand
aaaucgugguguuuaauug

SEQ ID NO: 1839517 - RNA, 19 nt, Homo sapiens
  misc_RNA (1)...(19): siRNA sense strand
cugaaaucgugguguuuaa

SEQ ID NO: 1839518 - RNA, 19 nt, Homo sapiens
  misc_RNA (1)...(19): siRNA sense strand
gaccaaaucaauaagagau

SEQ ID NO: 1839519 - RNA, 19 nt, Homo sapiens
  misc_RNA (1)...(19): siRNA sense strand
gaugaucguggcuguagaa

SEQ ID NO: 1839520 - RNA, 19 nt, Homo sapiens
  misc_RNA (1)...(19): siRNA sense strand
gaagaugaucguggcugua

SEQ ID NO: 1839521 - RNA, 19 nt, Homo sapiens
  misc_RNA (1)...(19): siRNA sense strand
gcuauaguccaauaacuuc

SEQ ID NO: 1839522 - RNA, 19 nt, Homo sapiens
  misc_RNA (1)...(19): siRNA sense strand
ugacaaugaccaaaucaau

SEQ ID NO: 1839523 - RNA, 19 nt, Homo sapiens
  misc_RNA (1)...(19): siRNA sense strand
gagcugacgcuguguacga

SEQ ID NO: 1839524 - RNA, 19 nt, Homo sapiens
  misc_RNA (1)...(19): siRNA sense strand
gccagagaauggacacguu

SEQ ID NO: 1839525 - RNA, 19 nt, Homo sapiens
  misc_RNA (1)...(19): siRNA sense strand
caacauggagcuauacaac

SEQ ID NO: 1839526 - RNA, 19 nt, Homo sapiens
  misc_RNA (1)...(19): siRNA sense strand
gugguuggccagaugguua

SEQ ID NO: 1839527 - RNA, 19 nt, Homo sapiens
  misc_RNA (1)...(19): siRNA sense strand
ggaaugaagagggagaaga

SEQ ID NO: 1839528 - RNA, 19 nt, Homo sapiens
  misc_RNA (1)...(19): siRNA sense strand
guauggagcaguuacuuca

SEQ ID NO: 1839529 - RNA, 19 nt, Homo sapiens
  misc_RNA (1)...(19): siRNA sense strand
cgauucagcuuugucuuca

SEQ ID NO: 1839530 - RNA, 19 nt, Homo sapiens
  misc_RNA (1)...(19): siRNA sense strand
cagagaauggacacguuua

SEQ ID NO: 1839531 - RNA, 19 nt, Homo sapiens
  misc_RNA (1)...(19): siRNA sense strand
gccagaugguuaugaagau

SEQ ID NO: 1839532 - RNA, 19 nt, Homo sapiens
  misc_RNA (1)...(19): siRNA sense strand
gaugguguggucuacuaua

SEQ ID NO: 1839533 - RNA, 19 nt, Homo sapiens
  misc_RNA (1)...(19): siRNA sense strand
ucaaaugugacaaugagaa

SEQ ID NO: 1839534 - RNA, 19 nt, Homo sapiens
  misc_RNA (1)...(19): siRNA sense strand
ccaaaggacccugucauuc

SEQ ID NO: 1839535 - RNA, 19 nt, Homo sapiens
  misc_RNA (1)...(19): siRNA sense strand
ccugaugagcuucuguuua

SEQ ID NO: 1839536 - RNA, 19 nt, Homo sapiens
  misc_RNA (1)...(19): siRNA sense strand
gaaugaggaaguacacauc

SEQ ID NO: 1839537 - RNA, 19 nt, Homo sapiens
  misc_RNA (1)...(19): siRNA sense strand
ugugguacaucuauucuca

SEQ ID NO: 1839538 - RNA, 19 nt, Homo sapiens
  misc_RNA (1)...(19): siRNA sense strand
ccugauaggaugucucauu

SEQ ID NO: 1839539 - RNA, 19 nt, Homo sapiens
  misc_RNA (1)...(19): siRNA sense strand
ugcuuuaucucuccauauu

SEQ ID NO: 1839540 - RNA, 19 nt, Homo sapiens
  misc_RNA (1)...(19): siRNA sense strand
ccugaaaucgugguguuua

SEQ ID NO: 1839541 - RNA, 19 nt, Homo sapiens
  misc_RNA (1)...(19): siRNA sense strand
agauauggaugaaggagau

SEQ ID NO: 1839542 - RNA, 19 nt, Homo sapiens
  misc_RNA (1)...(19): siRNA sense strand
gucaggugauaauggauuu

SEQ ID NO: 1839543 - RNA, 19 nt, Homo sapiens
  misc_RNA (1)...(19): siRNA sense strand
gaugaggaaguccacacua

SEQ ID NO: 1839544 - RNA, 19 nt, Homo sapiens
  misc_RNA (1)...(19): siRNA sense strand
gaaggacucugccacaaug

SEQ ID NO: 1839545 - RNA, 19 nt, Homo sapiens
  misc_RNA (1)...(19): siRNA sense strand
gaauguggauagcgucuuu

SEQ ID NO: 1839546 - RNA, 19 nt, Homo sapiens
  misc_RNA (1)...(19): siRNA sense strand
caacucagcucaugacaca

SEQ ID NO: 1839547 - RNA, 19 nt, Homo sapiens
  misc_RNA (1)...(19): siRNA sense strand
acacagcgcugcggucuuu

SEQ ID NO: 1839548 - RNA, 19 nt, Homo sapiens
  misc_RNA (1)...(19): siRNA sense strand
gaacaucccauaaagaucu

SEQ ID NO: 1839549 - RNA, 19 nt, Homo sapiens
  misc_RNA (1)...(19): siRNA sense strand
aaugaaggcugguuuguga

SEQ ID NO: 1839550 - RNA, 19 nt, Homo sapiens
  misc_RNA (1)...(19): siRNA sense strand
acaaaggccuuggcucuaa

SEQ ID NO: 1839551 - RNA, 19 nt, Homo sapiens
  misc_RNA (1)...(19): siRNA sense strand
ggccuuggcucuaacgaaa

SEQ ID NO: 1839552 - RNA, 19 nt, Homo sapiens
  misc_RNA (1)...(19): siRNA sense strand
gcaacaaguucccugcaau

SEQ ID NO: 1839553 - RNA, 19 nt, Homo sapiens
  misc_RNA (1)...(19): siRNA sense strand
gaacaggagcccagcauca

SEQ ID NO: 1839554 - RNA, 19 nt, Homo sapiens
  misc_RNA (1)...(19): siRNA sense strand
gcaaacaguggaagaauuc

SEQ ID NO: 1839555 - RNA, 19 nt, Homo sapiens
  misc_RNA (1)...(19): siRNA sense strand
ggaauuggagcggcacuua

SEQ ID NO: 1839556 - RNA, 19 nt, Homo sapiens
  misc_RNA (1)...(19): siRNA sense strand
ggcaaacaguggaagaauu

SEQ ID NO: 1839557 - RNA, 19 nt, Homo sapiens
  misc_RNA (1)...(19): siRNA sense strand
caauagcaaugaugacaau

SEQ ID NO: 1839558 - RNA, 19 nt, Homo sapiens
  misc_RNA (1)...(19): siRNA sense strand
gaaagacaaguguuccaaa

SEQ ID NO: 1839559 - RNA, 19 nt, Homo sapiens
  misc_RNA (1)...(19): siRNA sense strand
caaguucccugcaaucaag

SEQ ID NO: 1839560 - RNA, 19 nt, Homo sapiens
  misc_RNA (1)...(19): siRNA sense strand
cgacaugcccuuuaucuuc

SEQ ID NO: 1839561 - RNA, 19 nt, Homo sapiens
  misc_RNA (1)...(19): siRNA sense strand
uaaccacgcugagagagaa

SEQ ID NO: 1839562 - RNA, 19 nt, Homo sapiens
  misc_RNA (1)...(19): siRNA sense strand
aaaccgaauuggcaugauu

SEQ ID NO: 1839563 - RNA, 19 nt, Homo sapiens
  misc_RNA (1)...(19): siRNA sense strand
caacaccacuggcaaacag

SEQ ID NO: 1839564 - RNA, 19 nt, Homo sapiens
  misc_RNA (1)...(19): siRNA sense strand
gcagaacaucccauaaaga

SEQ ID NO: 1839565 - RNA, 19 nt, Homo sapiens
  misc_RNA (1)...(19): siRNA sense strand
gaaagacuggaguucauug

SEQ ID NO: 1839566 - RNA, 19 nt, Homo sapiens
  misc_RNA (1)...(19): siRNA sense strand
agaaggcucugaccaggaa

SEQ ID NO: 1839567 - RNA, 19 nt, Homo sapiens
  misc_RNA (1)...(19): siRNA sense strand
gaacuucgacaugcccuuu

SEQ ID NO: 1839568 - RNA, 19 nt, Homo sapiens
  misc_RNA (1)...(19): siRNA sense strand
ggacaaggguagugauagc

SEQ ID NO: 1839569 - RNA, 19 nt, Homo sapiens
  misc_RNA (1)...(19): siRNA sense strand
ucacggacaaguacaagua

SEQ ID NO: 1839570 - RNA, 19 nt, Homo sapiens
  misc_RNA (1)...(19): siRNA sense strand
gcauggacgucacggacaa

SEQ ID NO: 1839571 - RNA, 19 nt, Homo sapiens
  misc_RNA (1)...(19): siRNA sense strand
agaagaguauguucaggaa

SEQ ID NO: 1839572 - RNA, 19 nt, Homo sapiens
  misc_RNA (1)...(19): siRNA sense strand
cagaugcucuucuccaauc

SEQ ID NO: 1839573 - RNA, 19 nt, Homo sapiens
  misc_RNA (1)...(19): siRNA sense strand
cgaagacagugacagugaa

SEQ ID NO: 1839574 - RNA, 19 nt, Homo sapiens
  misc_RNA (1)...(19): siRNA sense strand
gcagguacaucagcaccaa

SEQ ID NO: 1839575 - RNA, 19 nt, Homo sapiens
  misc_RNA (1)...(19): siRNA sense strand
ucaccuggcuguacgacaa

SEQ ID NO: 1839576 - RNA, 19 nt, Homo sapiens
  misc_RNA (1)...(19): siRNA sense strand
aagaguauguucaggaaga

SEQ ID NO: 1839577 - RNA, 19 nt, Homo sapiens
  misc_RNA (1)...(19): siRNA sense strand
ggauaggagucugaauuuc

SEQ ID NO: 1839578 - RNA, 19 nt, Homo sapiens
  misc_RNA (1)...(19): siRNA sense strand
gacaagcgcaucacacaga

SEQ ID NO: 1839579 - RNA, 19 nt, Homo sapiens
  misc_RNA (1)...(19): siRNA sense strand
ggcagaacaucccauaaag

SEQ ID NO: 1839580 - RNA, 19 nt, Homo sapiens
  misc_RNA (1)...(19): siRNA sense strand
gcagaaaugaccccaaaua

SEQ ID NO: 1839581 - RNA, 19 nt, Homo sapiens
  misc_RNA (1)...(19): siRNA sense strand
cagaacaucccauaaagau

SEQ ID NO: 1839582 - RNA, 19 nt, Homo sapiens
  misc_RNA (1)...(19): siRNA sense strand
ugagugccaugaucaauag

SEQ ID NO: 1839583 - RNA, 19 nt, Homo sapiens
  misc_RNA (1)...(19): siRNA sense strand
gaagucagacaacaugauc

SEQ ID NO: 1839584 - RNA, 19 nt, Homo sapiens
  misc_RNA (1)...(19): siRNA sense strand
caauggcccuccagaucuu

SEQ ID NO: 1839585 - RNA, 19 nt, Homo sapiens
  misc_RNA (1)...(19): siRNA sense strand
ggaaggacucugccacaau

SEQ ID NO: 1839586 - RNA, 19 nt, Homo sapiens
  misc_RNA (1)...(19): siRNA sense strand
gcaucugccucucaaucuu

SEQ ID NO: 1839587 - RNA, 19 nt, Homo sapiens
  misc_RNA (1)...(19): siRNA sense strand
ggaagcacaaaccgaauug

SEQ ID NO: 1839588 - RNA, 19 nt, Homo sapiens
  misc_RNA (1)...(19): siRNA sense strand
ggcggcaucuccucuguga

SEQ ID NO: 1839589 - RNA, 19 nt, Homo sapiens
  misc_RNA (1)...(19): siRNA sense strand
agaauuccgugaacaguca

SEQ ID NO: 1839590 - RNA, 19 nt, Homo sapiens
  misc_RNA (1)...(19): siRNA sense strand
cgacaacaccacuggcaaa

SEQ ID NO: 1839591 - RNA, 19 nt, Homo sapiens
  misc_RNA (1)...(19): siRNA sense strand
gugauagcguauggaauuu

SEQ ID NO: 1839592 - RNA, 19 nt, Homo sapiens
  misc_RNA (1)...(19): siRNA sense strand
gagcagggauacgaagaca

SEQ ID NO: 1839593 - RNA, 19 nt, Homo sapiens
  misc_RNA (1)...(19): siRNA sense strand
cggcaucuccucugugaaa

SEQ ID NO: 1839594 - RNA, 19 nt, Homo sapiens
  misc_RNA (1)...(19): siRNA sense strand
gaucaccaacuucaacuca

SEQ ID NO: 1839595 - RNA, 19 nt, Homo sapiens
  misc_RNA (1)...(19): siRNA sense strand
gaagacauucucagcaucu

SEQ ID NO: 1839596 - RNA, 19 nt, Homo sapiens
  misc_RNA (1)...(19): siRNA sense strand
guggauagcgucuuuaugg

SEQ ID NO: 1839597 - RNA, 19 nt, Homo sapiens
  misc_RNA (1)...(19): siRNA sense strand
ggcaauacucugacuauca

SEQ ID NO: 1839598 - RNA, 19 nt, Homo sapiens
  misc_RNA (1)...(19): siRNA sense strand
gcagggauacgaagacagu

SEQ ID NO: 1839599 - RNA, 19 nt, Homo sapiens
  misc_RNA (1)...(19): siRNA sense strand
gggaagcacaaaccgaauu

SEQ ID NO: 1839600 - RNA, 19 nt, Homo sapiens
  misc_RNA (1)...(19): siRNA sense strand
gaaugaaggcugguuugug

SEQ ID NO: 1839601 - RNA, 19 nt, Homo sapiens
  misc_RNA (1)...(19): siRNA sense strand
agugauagcguauggaauu

SEQ ID NO: 1839602 - RNA, 19 nt, Homo sapiens
  misc_RNA (1)...(19): siRNA sense strand
gauguggccagcagaaaug

SEQ ID NO: 1839603 - RNA, 19 nt, Homo sapiens
  misc_RNA (1)...(19): siRNA sense strand
ggacgucacggacaaguac

SEQ ID NO: 1839604 - RNA, 19 nt, Homo sapiens
  misc_RNA (1)...(19): siRNA sense strand
guagugauagcguauggaa

SEQ ID NO: 1839605 - RNA, 19 nt, Homo sapiens
  misc_RNA (1)...(19): siRNA sense strand
uggauaggagucugaauuu

SEQ ID NO: 1839606 - RNA, 19 nt, Homo sapiens
  misc_RNA (1)...(19): siRNA sense strand
gaagaauuccgugaacagu

SEQ ID NO: 1839607 - RNA, 19 nt, Homo sapiens
  misc_RNA (1)...(19): siRNA sense strand
augauuggcuggaacuuug

SEQ ID NO: 1839608 - RNA, 19 nt, Homo sapiens
  misc_RNA (1)...(19): siRNA sense strand
caacaaguucccugcaauc

SEQ ID NO: 1839609 - RNA, 19 nt, Homo sapiens
  misc_RNA (1)...(19): siRNA sense strand
ugugcaaggucccagauga

SEQ ID NO: 1839610 - RNA, 19 nt, Homo sapiens
  misc_RNA (1)...(19): siRNA sense strand
aaagacaaguguuccaaaa

SEQ ID NO: 1839611 - RNA, 19 nt, Homo sapiens
  misc_RNA (1)...(19): siRNA sense strand
gaaaugaccccaaauacgu

SEQ ID NO: 1839612 - RNA, 19 nt, Homo sapiens
  misc_RNA (1)...(19): siRNA sense strand
ggaaugaaggcugguuugu

SEQ ID NO: 1839613 - RNA, 19 nt, Homo sapiens
  misc_RNA (1)...(19): siRNA sense strand
aaacuuccaggucuuaaug

SEQ ID NO: 1839614 - RNA, 19 nt, Homo sapiens
  misc_RNA (1)...(19): siRNA sense strand
ucucguacgcucaguauga

SEQ ID NO: 1839615 - RNA, 19 nt, Homo sapiens
  misc_RNA (1)...(19): siRNA sense strand
caucuccucugugaaacuu

SEQ ID NO: 1839616 - RNA, 19 nt, Homo sapiens
  misc_RNA (1)...(19): siRNA sense strand
cgacuucuccugcaacaag

SEQ ID NO: 1839617 - RNA, 19 nt, Homo sapiens
  misc_RNA (1)...(19): siRNA sense strand
uaugagaaguaccugaagu

SEQ ID NO: 1839618 - RNA, 19 nt, Homo sapiens
  misc_RNA (1)...(19): siRNA sense strand
gaucucguacgcucaguau

SEQ ID NO: 1839619 - RNA, 19 nt, Homo sapiens
  misc_RNA (1)...(19): siRNA sense strand
aggcagaacaucccauaaa

SEQ ID NO: 1839620 - RNA, 19 nt, Homo sapiens
  misc_RNA (1)...(19): siRNA sense strand
gcucugaccaggaaagaca

SEQ ID NO: 1839621 - RNA, 19 nt, Homo sapiens
  misc_RNA (1)...(19): siRNA sense strand
cagcagaaaugaccccaaa

SEQ ID NO: 1839622 - RNA, 19 nt, Homo sapiens
  misc_RNA (1)...(19): siRNA sense strand
gaaacuugggacguucaua

SEQ ID NO: 1839623 - RNA, 19 nt, Homo sapiens
  misc_RNA (1)...(19): siRNA sense strand
uuccaggucuuaaugauca

SEQ ID NO: 1839624 - RNA, 19 nt, Homo sapiens
  misc_RNA (1)...(19): siRNA sense strand
gcaaucaaggccauguugu

SEQ ID NO: 1839625 - RNA, 19 nt, Homo sapiens
  misc_RNA (1)...(19): siRNA sense strand
caacggcacgcuuguacau

SEQ ID NO: 1839626 - RNA, 19 nt, Homo sapiens
  misc_RNA (1)...(19): siRNA sense strand
uagcaaugaugacaauggu

SEQ ID NO: 1839627 - RNA, 19 nt, Homo sapiens
  misc_RNA (1)...(19): siRNA sense strand
cauguuguccaucgaugua

SEQ ID NO: 1839628 - RNA, 19 nt, Homo sapiens
  misc_RNA (1)...(19): siRNA sense strand
gcagaugcucuucuccaau

SEQ ID NO: 1839629 - RNA, 19 nt, Homo sapiens
  misc_RNA (1)...(19): siRNA sense strand
cgaaagacuggaguucauu

SEQ ID NO: 1839630 - RNA, 19 nt, Homo sapiens
  misc_RNA (1)...(19): siRNA sense strand
cacaauggcccuccagauc

SEQ ID NO: 1839631 - RNA, 19 nt, Homo sapiens
  misc_RNA (1)...(19): siRNA sense strand
ucaaggccauguuguccau

SEQ ID NO: 1839632 - RNA, 19 nt, Homo sapiens
  misc_RNA (1)...(19): siRNA sense strand
gcggccugcuguuggguaa

SEQ ID NO: 1839633 - RNA, 19 nt, Homo sapiens
  misc_RNA (1)...(19): siRNA sense strand
acggcacgcuuguacauga

SEQ ID NO: 1839634 - RNA, 19 nt, Homo sapiens
  misc_RNA (1)...(19): siRNA sense strand
gacacagaccgaaaucuca

SEQ ID NO: 1839635 - RNA, 19 nt, Homo sapiens
  misc_RNA (1)...(19): siRNA sense strand
gacgaaggcuguguuucca

SEQ ID NO: 1839636 - RNA, 19 nt, Homo sapiens
  misc_RNA (1)...(19): siRNA sense strand
gagagaagaguauguucag

SEQ ID NO: 1839637 - RNA, 19 nt, Homo sapiens
  misc_RNA (1)...(19): siRNA sense strand
ugagagagaagaguauguu

SEQ ID NO: 1839638 - RNA, 19 nt, Homo sapiens
  misc_RNA (1)...(19): siRNA sense strand
uggguaaccugaagaucga

SEQ ID NO: 1839639 - RNA, 19 nt, Homo sapiens
  misc_RNA (1)...(19): siRNA sense strand
gcuguuggguaaccugaag

SEQ ID NO: 1839640 - RNA, 19 nt, Homo sapiens
  misc_RNA (1)...(19): siRNA sense strand
cagagucggccaugacgaa

SEQ ID NO: 1839641 - RNA, 19 nt, Homo sapiens
  misc_RNA (1)...(19): siRNA sense strand
gcagcugaacuucgacaug

SEQ ID NO: 1839642 - RNA, 19 nt, Homo sapiens
  misc_RNA (1)...(19): siRNA sense strand
gcaguaggcaaagaaguca

SEQ ID NO: 1839643 - RNA, 19 nt, Homo sapiens
  misc_RNA (1)...(19): siRNA sense strand
ccuggaccaucaucuacaa

SEQ ID NO: 1839644 - RNA, 19 nt, Homo sapiens
  misc_RNA (1)...(19): siRNA sense strand
ggagagauaucaccuauga

SEQ ID NO: 1839645 - RNA, 19 nt, Homo sapiens
  misc_RNA (1)...(19): siRNA sense strand
uaucagagguuucaucauu

SEQ ID NO: 1839646 - RNA, 19 nt, Homo sapiens
  misc_RNA (1)...(19): siRNA sense strand
gauccaaggucaaguauca

SEQ ID NO: 1839647 - RNA, 19 nt, Homo sapiens
  misc_RNA (1)...(19): siRNA sense strand
caaguuaaguuccaaacaa

SEQ ID NO: 1839648 - RNA, 19 nt, Homo sapiens
  misc_RNA (1)...(19): siRNA sense strand
gaaugagaauggcaagaaa

SEQ ID NO: 1839649 - RNA, 19 nt, Homo sapiens
  misc_RNA (1)...(19): siRNA sense strand
cuacuugucugcaauugua

SEQ ID NO: 1839650 - RNA, 19 nt, Homo sapiens
  misc_RNA (1)...(19): siRNA sense strand
gcauuucccugcugacuga

SEQ ID NO: 1839651 - RNA, 19 nt, Homo sapiens
  misc_RNA (1)...(19): siRNA sense strand
caagacaggcggagagaua

SEQ ID NO: 1839652 - RNA, 19 nt, Homo sapiens
  misc_RNA (1)...(19): siRNA sense strand
gaaaccacauccuuaaguc

SEQ ID NO: 1839653 - RNA, 19 nt, Homo sapiens
  misc_RNA (1)...(19): siRNA sense strand
aagaguacauccucaauga

SEQ ID NO: 1839654 - RNA, 19 nt, Homo sapiens
  misc_RNA (1)...(19): siRNA sense strand
gaagaccgcugcccuacag

SEQ ID NO: 1839655 - RNA, 19 nt, Homo sapiens
  misc_RNA (1)...(19): siRNA sense strand
aaucauggccucugaagua

SEQ ID NO: 1839656 - RNA, 19 nt, Homo sapiens
  misc_RNA (1)...(19): siRNA sense strand
aaacuggacccaagaaauu

SEQ ID NO: 1839657 - RNA, 19 nt, Homo sapiens
  misc_RNA (1)...(19): siRNA sense strand
gcaagaaaaucaccaguau

SEQ ID NO: 1839658 - RNA, 19 nt, Homo sapiens
  misc_RNA (1)...(19): siRNA sense strand
gauuaaugcucagaagauu

SEQ ID NO: 1839659 - RNA, 19 nt, Homo sapiens
  misc_RNA (1)...(19): siRNA sense strand
ccaaacaagugaaagagau

SEQ ID NO: 1839660 - RNA, 19 nt, Homo sapiens
  misc_RNA (1)...(19): siRNA sense strand
gcagauccaaggucaagua

SEQ ID NO: 1839661 - RNA, 19 nt, Homo sapiens
  misc_RNA (1)...(19): siRNA sense strand
gcggagagauaucaccuau

SEQ ID NO: 1839662 - RNA, 19 nt, Homo sapiens
  misc_RNA (1)...(19): siRNA sense strand
ggucaaguaucagaaguga

SEQ ID NO: 1839663 - RNA, 19 nt, Homo sapiens
  misc_RNA (1)...(19): siRNA sense strand
gaccauccaaucccaaaua

SEQ ID NO: 1839664 - RNA, 19 nt, Homo sapiens
  misc_RNA (1)...(19): siRNA sense strand
ccagaaguaucaaaugcaa

SEQ ID NO: 1839665 - RNA, 19 nt, Homo sapiens
  misc_RNA (1)...(19): siRNA sense strand
caaaagagcugcaaguucu

SEQ ID NO: 1839666 - RNA, 19 nt, Homo sapiens
  misc_RNA (1)...(19): siRNA sense strand
ccacgacucugucuggaau

SEQ ID NO: 1839667 - RNA, 19 nt, Homo sapiens
  misc_RNA (1)...(19): siRNA sense strand
caagaaauuuaucgucaag

SEQ ID NO: 1839668 - RNA, 19 nt, Homo sapiens
  misc_RNA (1)...(19): siRNA sense strand
gcaggaggaguuacacgua

SEQ ID NO: 1839669 - RNA, 19 nt, Homo sapiens
  misc_RNA (1)...(19): siRNA sense strand
ccaagaaauuuaucgucaa

SEQ ID NO: 1839670 - RNA, 19 nt, Homo sapiens
  misc_RNA (1)...(19): siRNA sense strand
ggaaaccacauccuuaagu

SEQ ID NO: 1839671 - RNA, 19 nt, Homo sapiens
  misc_RNA (1)...(19): siRNA sense strand
cggaaauuguggagucuaa

SEQ ID NO: 1839672 - RNA, 19 nt, Homo sapiens
  misc_RNA (1)...(19): siRNA sense strand
gcugcaaguucuccacauu

SEQ ID NO: 1839673 - RNA, 19 nt, Homo sapiens
  misc_RNA (1)...(19): siRNA sense strand
gcaaagaguacauccucaa

SEQ ID NO: 1839674 - RNA, 19 nt, Homo sapiens
  misc_RNA (1)...(19): siRNA sense strand
caaacgagcaguccugugu

SEQ ID NO: 1839675 - RNA, 19 nt, Homo sapiens
  misc_RNA (1)...(19): siRNA sense strand
gcaagaagauggcaaaacu

SEQ ID NO: 1839676 - RNA, 19 nt, Homo sapiens
  misc_RNA (1)...(19): siRNA sense strand
acaccuaugugaaugagaa

SEQ ID NO: 1839677 - RNA, 19 nt, Homo sapiens
  misc_RNA (1)...(19): siRNA sense strand
gugacaggcucaucugguu

SEQ ID NO: 1839678 - RNA, 19 nt, Homo sapiens
  misc_RNA (1)...(19): siRNA sense strand
ucacaugucgguacaauca

SEQ ID NO: 1839679 - RNA, 19 nt, Homo sapiens
  misc_RNA (1)...(19): siRNA sense strand
ggccaugugugcuaugaug

SEQ ID NO: 1839680 - RNA, 19 nt, Homo sapiens
  misc_RNA (1)...(19): siRNA sense strand
cgauucagcucacgacaca

SEQ ID NO: 1839681 - RNA, 19 nt, Homo sapiens
  misc_RNA (1)...(19): siRNA sense strand
gagauaucaccuaugagua

SEQ ID NO: 1839682 - RNA, 19 nt, Homo sapiens
  misc_RNA (1)...(19): siRNA sense strand
cacauugacuucuugaauc

SEQ ID NO: 1839683 - RNA, 19 nt, Homo sapiens
  misc_RNA (1)...(19): siRNA sense strand
gucaaguucucuuuggaaa

SEQ ID NO: 1839684 - RNA, 19 nt, Homo sapiens
  misc_RNA (1)...(19): siRNA sense strand
ccagauucgucuucucaga

SEQ ID NO: 1839685 - RNA, 19 nt, Homo sapiens
  misc_RNA (1)...(19): siRNA sense strand
cauggccucugaaguauuc

SEQ ID NO: 1839686 - RNA, 19 nt, Homo sapiens
  misc_RNA (1)...(19): siRNA sense strand
ccacauugacuucuugaau

SEQ ID NO: 1839687 - RNA, 19 nt, Homo sapiens
  misc_RNA (1)...(19): siRNA sense strand
caagugaaagagauuaaug

SEQ ID NO: 1839688 - RNA, 19 nt, Homo sapiens
  misc_RNA (1)...(19): siRNA sense strand
cugggaaacucuguuaauu

SEQ ID NO: 1839689 - RNA, 19 nt, Homo sapiens
  misc_RNA (1)...(19): siRNA sense strand
ucaccuaugaguacaagua

SEQ ID NO: 1839690 - RNA, 19 nt, Homo sapiens
  misc_RNA (1)...(19): siRNA sense strand
caacaucuugggcuccuuu

SEQ ID NO: 1839691 - RNA, 19 nt, Homo sapiens
  misc_RNA (1)...(19): siRNA sense strand
ggacggaugccuggaugaa

SEQ ID NO: 1839692 - RNA, 19 nt, Homo sapiens
  misc_RNA (1)...(19): siRNA sense strand
gagauuaaugcucagaaga

SEQ ID NO: 1839693 - RNA, 19 nt, Homo sapiens
  misc_RNA (1)...(19): siRNA sense strand
caaacaagugaaagagauu

SEQ ID NO: 1839694 - RNA, 19 nt, Homo sapiens
  misc_RNA (1)...(19): siRNA sense strand
gaaaucauggccucugaag

SEQ ID NO: 1839695 - RNA, 19 nt, Homo sapiens
  misc_RNA (1)...(19): siRNA sense strand
ucaauaagaccucgcagau

SEQ ID NO: 1839696 - RNA, 19 nt, Homo sapiens
  misc_RNA (1)...(19): siRNA sense strand
guaaagaggacaugguuuu

SEQ ID NO: 1839697 - RNA, 19 nt, Homo sapiens
  misc_RNA (1)...(19): siRNA sense strand
agaauuggccagcuacuug

SEQ ID NO: 1839698 - RNA, 19 nt, Homo sapiens
  misc_RNA (1)...(19): siRNA sense strand
ugggaaacucuguuaauuu

SEQ ID NO: 1839699 - RNA, 19 nt, Homo sapiens
  misc_RNA (1)...(19): siRNA sense strand
gaaugggcaggaggaguua

SEQ ID NO: 1839700 - RNA, 19 nt, Homo sapiens
  misc_RNA (1)...(19): siRNA sense strand
gcaaguaccaacuaaacgu

SEQ ID NO: 1839701 - RNA, 19 nt, Homo sapiens
  misc_RNA (1)...(19): siRNA sense strand
acauugacuucuugaauca

SEQ ID NO: 1839702 - RNA, 19 nt, Homo sapiens
  misc_RNA (1)...(19): siRNA sense strand
agaggcaggucauggauca

SEQ ID NO: 1839703 - RNA, 19 nt, Homo sapiens
  misc_RNA (1)...(19): siRNA sense strand
aaggugacaucuuuauugu

SEQ ID NO: 1839704 - RNA, 19 nt, Homo sapiens
  misc_RNA (1)...(19): siRNA sense strand
gcagggccaugugugcuau

SEQ ID NO: 1839705 - RNA, 19 nt, Homo sapiens
  misc_RNA (1)...(19): siRNA sense strand
gcuaugaugagcuuugaga

SEQ ID NO: 1839706 - RNA, 19 nt, Homo sapiens
  misc_RNA (1)...(19): siRNA sense strand
gauaucaccuaugaguaca

SEQ ID NO: 1839707 - RNA, 19 nt, Homo sapiens
  misc_RNA (1)...(19): siRNA sense strand
ugaaugagaauggcaagaa

SEQ ID NO: 1839708 - RNA, 19 nt, Homo sapiens
  misc_RNA (1)...(19): siRNA sense strand
ugcaaguucuccacauuga

SEQ ID NO: 1839709 - RNA, 19 nt, Homo sapiens
  misc_RNA (1)...(19): siRNA sense strand
ugaaugggcaggaggaguu

SEQ ID NO: 1839710 - RNA, 19 nt, Homo sapiens
  misc_RNA (1)...(19): siRNA sense strand
ggacaccuaugugaaugag

SEQ ID NO: 1839711 - RNA, 19 nt, Homo sapiens
  misc_RNA (1)...(19): siRNA sense strand
gaguacauccucaaugaca

SEQ ID NO: 1839712 - RNA, 19 nt, Homo sapiens
  misc_RNA (1)...(19): siRNA sense strand
aaaugagucuggcaaagag

SEQ ID NO: 1839713 - RNA, 19 nt, Homo sapiens
  misc_RNA (1)...(19): siRNA sense strand
ugucugcaauuguaucuuc

SEQ ID NO: 1839714 - RNA, 19 nt, Homo sapiens
  misc_RNA (1)...(19): siRNA sense strand
ggaaaucauggccucugaa

SEQ ID NO: 1839715 - RNA, 19 nt, Homo sapiens
  misc_RNA (1)...(19): siRNA sense strand
caaagaguacauccucaau

SEQ ID NO: 1839716 - RNA, 19 nt, Homo sapiens
  misc_RNA (1)...(19): siRNA sense strand
uaugaugagcuuugagaaa

SEQ ID NO: 1839717 - RNA, 19 nt, Homo sapiens
  misc_RNA (1)...(19): siRNA sense strand
caucuugggcuccuuugaa

SEQ ID NO: 1839718 - RNA, 19 nt, Homo sapiens
  misc_RNA (1)...(19): siRNA sense strand
ccgcugcccuacagaaugu

SEQ ID NO: 1839719 - RNA, 19 nt, Homo sapiens
  misc_RNA (1)...(19): siRNA sense strand
gugcuaugaugagcuuuga

SEQ ID NO: 1839720 - RNA, 19 nt, Homo sapiens
  misc_RNA (1)...(19): siRNA sense strand
aaaaugcaccccaauaaaa

SEQ ID NO: 1839721 - RNA, 19 nt, Homo sapiens
  misc_RNA (1)...(19): siRNA sense strand
aggcagaauuggccagcua

SEQ ID NO: 1839722 - RNA, 19 nt, Homo sapiens
  misc_RNA (1)...(19): siRNA sense strand
ucuauagaguugccuaaca

SEQ ID NO: 1839723 - RNA, 19 nt, Homo sapiens
  misc_RNA (1)...(19): siRNA sense strand
gaaauuguggagucuaagg

SEQ ID NO: 1839724 - RNA, 19 nt, Homo sapiens
  misc_RNA (1)...(19): siRNA sense strand
uccaagaccuacaucaaca

SEQ ID NO: 1839725 - RNA, 19 nt, Homo sapiens
  misc_RNA (1)...(19): siRNA sense strand
guuguacacuggcaagaag

SEQ ID NO: 1839726 - RNA, 19 nt, Homo sapiens
  misc_RNA (1)...(19): siRNA sense strand
ccaaggcagugggccaaga

SEQ ID NO: 1839727 - RNA, 19 nt, Homo sapiens
  misc_RNA (1)...(19): siRNA sense strand
gagaccauccaaucccaaa

SEQ ID NO: 1839728 - RNA, 19 nt, Homo sapiens
  misc_RNA (1)...(19): siRNA sense strand
gaauuggccagcuacuugu

SEQ ID NO: 1839729 - RNA, 19 nt, Homo sapiens
  misc_RNA (1)...(19): siRNA sense strand
gcugggaaacucuguuaau

SEQ ID NO: 1839730 - RNA, 19 nt, Homo sapiens
  misc_RNA (1)...(19): siRNA sense strand
gaguacaaguauccagaag

SEQ ID NO: 1839731 - RNA, 19 nt, Homo sapiens
  misc_RNA (1)...(19): siRNA sense strand
gacgucaaguucucuuugg

SEQ ID NO: 1839732 - RNA, 19 nt, Homo sapiens
  misc_RNA (1)...(19): siRNA sense strand
gagaauggcaagaaaauca

SEQ ID NO: 1839733 - RNA, 19 nt, Homo sapiens
  misc_RNA (1)...(19): siRNA sense strand
ccuaacacaggcagaauug

SEQ ID NO: 1839734 - RNA, 19 nt, Homo sapiens
  misc_RNA (1)...(19): siRNA sense strand
agagauaucaccuaugagu

SEQ ID NO: 1839735 - RNA, 19 nt, Homo sapiens
  misc_RNA (1)...(19): siRNA sense strand
gggcaaguaccaacuaaac

SEQ ID NO: 1839736 - RNA, 19 nt, Homo sapiens
  misc_RNA (1)...(19): siRNA sense strand
uaaaaugcaccccaauaaa

SEQ ID NO: 1839737 - RNA, 19 nt, Homo sapiens
  misc_RNA (1)...(19): siRNA sense strand
accauccaaucccaaauaa

SEQ ID NO: 1839738 - RNA, 19 nt, Homo sapiens
  misc_RNA (1)...(19): siRNA sense strand
caucauugcggaaauugug

SEQ ID NO: 1839739 - RNA, 19 nt, Homo sapiens
  misc_RNA (1)...(19): siRNA sense strand
gaagauggcaaaacugugu

SEQ ID NO: 1839740 - RNA, 19 nt, Homo sapiens
  misc_RNA (1)...(19): siRNA sense strand
aggcaacccuucaaaauga

SEQ ID NO: 1839741 - RNA, 19 nt, Homo sapiens
  misc_RNA (1)...(19): siRNA sense strand
gaauuggacuggggacuau

SEQ ID NO: 1839742 - RNA, 19 nt, Homo sapiens
  misc_RNA (1)...(19): siRNA sense strand
uccuauaccuucucuucaa

SEQ ID NO: 1839743 - RNA, 19 nt, Homo sapiens
  misc_RNA (1)...(19): siRNA sense strand
cauccaaucccaaauaaaa

SEQ ID NO: 1839744 - RNA, 19 nt, Homo sapiens
  misc_RNA (1)...(19): siRNA sense strand
ggaguucaguacagaaaua

SEQ ID NO: 1839745 - RNA, 19 nt, Homo sapiens
  misc_RNA (1)...(19): siRNA sense strand
acaaagaguuggccaauga

SEQ ID NO: 1839746 - RNA, 19 nt, Homo sapiens
  misc_RNA (1)...(19): siRNA sense strand
ggacugcguuggugaugua

SEQ ID NO: 1839747 - RNA, 19 nt, Homo sapiens
  misc_RNA (1)...(19): siRNA sense strand
gaccaaagccugcaagaaa

SEQ ID NO: 1839748 - RNA, 19 nt, Homo sapiens
  misc_RNA (1)...(19): siRNA sense strand
guacagaaauaacgaggaa

SEQ ID NO: 1839749 - RNA, 19 nt, Homo sapiens
  misc_RNA (1)...(19): siRNA sense strand
ccaaagacggguuucauua

SEQ ID NO: 1839750 - RNA, 19 nt, Homo sapiens
  misc_RNA (1)...(19): siRNA sense strand
ggagauaccugugacaaca

SEQ ID NO: 1839751 - RNA, 19 nt, Homo sapiens
  misc_RNA (1)...(19): siRNA sense strand
gcaacuaccugggccacua

SEQ ID NO: 1839752 - RNA, 19 nt, Homo sapiens
  misc_RNA (1)...(19): siRNA sense strand
ggagaucagugugacaauu

SEQ ID NO: 1839753 - RNA, 19 nt, Homo sapiens
  misc_RNA (1)...(19): siRNA sense strand
gagacgguauccucaauga

SEQ ID NO: 1839754 - RNA, 19 nt, Homo sapiens
  misc_RNA (1)...(19): siRNA sense strand
cacauaggcuggaaagauu

SEQ ID NO: 1839755 - RNA, 19 nt, Homo sapiens
  misc_RNA (1)...(19): siRNA sense strand
gagagacacugauauggau

SEQ ID NO: 1839756 - RNA, 19 nt, Homo sapiens
  misc_RNA (1)...(19): siRNA sense strand
gaguggaccuccuguucua

SEQ ID NO: 1839757 - RNA, 19 nt, Homo sapiens
  misc_RNA (1)...(19): siRNA sense strand
ggaagacuaugacaaggau

SEQ ID NO: 1839758 - RNA, 19 nt, Homo sapiens
  misc_RNA (1)...(19): siRNA sense strand
gauggcagcuggaaaugug

SEQ ID NO: 1839759 - RNA, 19 nt, Homo sapiens
  misc_RNA (1)...(19): siRNA sense strand
guucuucucugaccugaaa

SEQ ID NO: 1839760 - RNA, 19 nt, Homo sapiens
  misc_RNA (1)...(19): siRNA sense strand
guugauagcugcacugagu

SEQ ID NO: 1839761 - RNA, 19 nt, Homo sapiens
  misc_RNA (1)...(19): siRNA sense strand
ggaagagcaucacccuguu

SEQ ID NO: 1839762 - RNA, 19 nt, Homo sapiens
  misc_RNA (1)...(19): siRNA sense strand
ggugaugccugcaaagaug

SEQ ID NO: 1839763 - RNA, 19 nt, Homo sapiens
  misc_RNA (1)...(19): siRNA sense strand
caacggaguucaguacaga

SEQ ID NO: 1839764 - RNA, 19 nt, Homo sapiens
  misc_RNA (1)...(19): siRNA sense strand
caaagugacugaagagaac

SEQ ID NO: 1839765 - RNA, 19 nt, Homo sapiens
  misc_RNA (1)...(19): siRNA sense strand
gcaaagugacugaagagaa

SEQ ID NO: 1839766 - RNA, 19 nt, Homo sapiens
  misc_RNA (1)...(19): siRNA sense strand
gauggagaaugcugaguug

SEQ ID NO: 1839767 - RNA, 19 nt, Homo sapiens
  misc_RNA (1)...(19): siRNA sense strand
gaagauggccaccagaaca

SEQ ID NO: 1839768 - RNA, 19 nt, Homo sapiens
  misc_RNA (1)...(19): siRNA sense strand
gaaauacgaauguagagau

SEQ ID NO: 1839769 - RNA, 19 nt, Homo sapiens
  misc_RNA (1)...(19): siRNA sense strand
gaacaaagaguuggccaau

SEQ ID NO: 1839770 - RNA, 19 nt, Homo sapiens
  misc_RNA (1)...(19): siRNA sense strand
gaccagagagacacugaua

SEQ ID NO: 1839771 - RNA, 19 nt, Homo sapiens
  misc_RNA (1)...(19): siRNA sense strand
acacggaccugccacauuc

SEQ ID NO: 1839772 - RNA, 19 nt, Homo sapiens
  misc_RNA (1)...(19): siRNA sense strand
ggaauggacuguugauagc

SEQ ID NO: 1839773 - RNA, 19 nt, Homo sapiens
  misc_RNA (1)...(19): siRNA sense strand
ugacaacaaucaggauauu

SEQ ID NO: 1839774 - RNA, 19 nt, Homo sapiens
  misc_RNA (1)...(19): siRNA sense strand
cgaaagggacgaugacuau

SEQ ID NO: 1839775 - RNA, 19 nt, Homo sapiens
  misc_RNA (1)...(19): siRNA sense strand
gccaguacgucuacaaugu

SEQ ID NO: 1839776 - RNA, 19 nt, Homo sapiens
  misc_RNA (1)...(19): siRNA sense strand
aaagacggguuucauuaga

SEQ ID NO: 1839777 - RNA, 19 nt, Homo sapiens
  misc_RNA (1)...(19): siRNA sense strand
ggagagcaccggugugaga

SEQ ID NO: 1839778 - RNA, 19 nt, Homo sapiens
  misc_RNA (1)...(19): siRNA sense strand
uuagaguggugauguauga

SEQ ID NO: 1839779 - RNA, 19 nt, Homo sapiens
  misc_RNA (1)...(19): siRNA sense strand
gaagagcaucacccuguuu

SEQ ID NO: 1839780 - RNA, 19 nt, Homo sapiens
  misc_RNA (1)...(19): siRNA sense strand
cgaugacuaugcuggauuu

SEQ ID NO: 1839781 - RNA, 19 nt, Homo sapiens
  misc_RNA (1)...(19): siRNA sense strand
caagagauuuaaacaggau

SEQ ID NO: 1839782 - RNA, 19 nt, Homo sapiens
  misc_RNA (1)...(19): siRNA sense strand
gaaugugagguuugucuuu

SEQ ID NO: 1839783 - RNA, 19 nt, Homo sapiens
  misc_RNA (1)...(19): siRNA sense strand
gaccugaaauacgaaugua

SEQ ID NO: 1839784 - RNA, 19 nt, Homo sapiens
  misc_RNA (1)...(19): siRNA sense strand
caggacccaucuaugauaa

SEQ ID NO: 1839785 - RNA, 19 nt, Homo sapiens
  misc_RNA (1)...(19): siRNA sense strand
cagcguguuugacaucuuu

SEQ ID NO: 1839786 - RNA, 19 nt, Homo sapiens
  misc_RNA (1)...(19): siRNA sense strand
gcaggaagacuaugacaag

SEQ ID NO: 1839787 - RNA, 19 nt, Homo sapiens
  misc_RNA (1)...(19): siRNA sense strand
ugacaaggauggaauuggu

SEQ ID NO: 1839788 - RNA, 19 nt, Homo sapiens
  misc_RNA (1)...(19): siRNA sense strand
gagaucagugugacaauug

SEQ ID NO: 1839789 - RNA, 19 nt, Homo sapiens
  misc_RNA (1)...(19): siRNA sense strand
agaacaaucuggacaacug

SEQ ID NO: 1839790 - RNA, 19 nt, Homo sapiens
  misc_RNA (1)...(19): siRNA sense strand
gcaacaagaacgccaagug

SEQ ID NO: 1839791 - RNA, 19 nt, Homo sapiens
  misc_RNA (1)...(19): siRNA sense strand
ucucugaccugaaauacga

SEQ ID NO: 1839792 - RNA, 19 nt, Homo sapiens
  misc_RNA (1)...(19): siRNA sense strand
gacagcauccgcaaaguga

SEQ ID NO: 1839793 - RNA, 19 nt, Homo sapiens
  misc_RNA (1)...(19): siRNA sense strand
ccacgagggcucagggaua

SEQ ID NO: 1839794 - RNA, 19 nt, Homo sapiens
  misc_RNA (1)...(19): siRNA sense strand
ggugaugccugugaugaug

SEQ ID NO: 1839795 - RNA, 19 nt, Homo sapiens
  misc_RNA (1)...(19): siRNA sense strand
ucauuagaguggugaugua

SEQ ID NO: 1839796 - RNA, 19 nt, Homo sapiens
  misc_RNA (1)...(19): siRNA sense strand
gaacucguccagacuguca

SEQ ID NO: 1839797 - RNA, 19 nt, Homo sapiens
  misc_RNA (1)...(19): siRNA sense strand
cauccgcacuaacuacauu

SEQ ID NO: 1839798 - RNA, 19 nt, Homo sapiens
  misc_RNA (1)...(19): siRNA sense strand
ugacuaugcuggauuuguc

SEQ ID NO: 1839799 - RNA, 19 nt, Homo sapiens
  misc_RNA (1)...(19): siRNA sense strand
ggacagcauccgcaaagug

SEQ ID NO: 1839800 - RNA, 19 nt, Homo sapiens
  misc_RNA (1)...(19): siRNA sense strand
caaagacggguuucauuag

SEQ ID NO: 1839801 - RNA, 19 nt, Homo sapiens
  misc_RNA (1)...(19): siRNA sense strand
gcaagggagaugccuguga

SEQ ID NO: 1839802 - RNA, 19 nt, Homo sapiens
  misc_RNA (1)...(19): siRNA sense strand
ccagagagacacugauaug

SEQ ID NO: 1839803 - RNA, 19 nt, Homo sapiens
  misc_RNA (1)...(19): siRNA sense strand
acaacuguccauuccauua

SEQ ID NO: 1839804 - RNA, 19 nt, Homo sapiens
  misc_RNA (1)...(19): siRNA sense strand
gagugugacaagagauuua

SEQ ID NO: 1839805 - RNA, 19 nt, Homo sapiens
  misc_RNA (1)...(19): siRNA sense strand
ugacugaagagaacaaaga

SEQ ID NO: 1839806 - RNA, 19 nt, Homo sapiens
  misc_RNA (1)...(19): siRNA sense strand
ucaggacccaucuaugaua

SEQ ID NO: 1839807 - RNA, 19 nt, Homo sapiens
  misc_RNA (1)...(19): siRNA sense strand
caaccaggcugaccaugac

SEQ ID NO: 1839808 - RNA, 19 nt, Homo sapiens
  misc_RNA (1)...(19): siRNA sense strand
ccacgaugaugacaacgau

SEQ ID NO: 1839809 - RNA, 19 nt, Homo sapiens
  misc_RNA (1)...(19): siRNA sense strand
ucaggagugugacaagaga

SEQ ID NO: 1839810 - RNA, 19 nt, Homo sapiens
  misc_RNA (1)...(19): siRNA sense strand
ucacauaggcuggaaagau

SEQ ID NO: 1839811 - RNA, 19 nt, Homo sapiens
  misc_RNA (1)...(19): siRNA sense strand
ggagaccgcugugacaacu

SEQ ID NO: 1839812 - RNA, 19 nt, Homo sapiens
  misc_RNA (1)...(19): siRNA sense strand
gaacaugccacggccaaca

SEQ ID NO: 1839813 - RNA, 19 nt, Homo sapiens
  misc_RNA (1)...(19): siRNA sense strand
gugcacagauguugaugag

SEQ ID NO: 1839814 - RNA, 19 nt, Homo sapiens
  misc_RNA (1)...(19): siRNA sense strand
gaacgggaaacccugugaa

SEQ ID NO: 1839815 - RNA, 19 nt, Homo sapiens
  misc_RNA (1)...(19): siRNA sense strand
gggcccagcuguacaucga

SEQ ID NO: 1839816 - RNA, 19 nt, Homo sapiens
  misc_RNA (1)...(19): siRNA sense strand
gccaaagacggguuucauu

SEQ ID NO: 1839817 - RNA, 19 nt, Homo sapiens
  misc_RNA (1)...(19): siRNA sense strand
uguagguuaugaugaguuu

SEQ ID NO: 1839818 - RNA, 19 nt, Homo sapiens
  misc_RNA (1)...(19): siRNA sense strand
gaauuggugaugccuguga

SEQ ID NO: 1839819 - RNA, 19 nt, Homo sapiens
  misc_RNA (1)...(19): siRNA sense strand
uguacuagcuacccugaug

SEQ ID NO: 1839820 - RNA, 19 nt, Homo sapiens
  misc_RNA (1)...(19): siRNA sense strand
uaacuacauuggccacaag

SEQ ID NO: 1839821 - RNA, 19 nt, Homo sapiens
  misc_RNA (1)...(19): siRNA sense strand
acaacaacguggugaaugg

SEQ ID NO: 1839822 - RNA, 19 nt, Homo sapiens
  misc_RNA (1)...(19): siRNA sense strand
gagcaccggugugagaaca

SEQ ID NO: 1839823 - RNA, 19 nt, Homo sapiens
  misc_RNA (1)...(19): siRNA sense strand
guagucgucucugcaacaa

SEQ ID NO: 1839824 - RNA, 19 nt, Homo sapiens
  misc_RNA (1)...(19): siRNA sense strand
acucaggacccaucuauga

SEQ ID NO: 1839825 - RNA, 19 nt, Homo sapiens
  misc_RNA (1)...(19): siRNA sense strand
gaacaaucuggacaacugu

SEQ ID NO: 1839826 - RNA, 19 nt, Homo sapiens
  misc_RNA (1)...(19): siRNA sense strand
gcacguggugucuguggaa

SEQ ID NO: 1839827 - RNA, 19 nt, Homo sapiens
  misc_RNA (1)...(19): siRNA sense strand
cuggauggcuggcccaaug

SEQ ID NO: 1839828 - RNA, 19 nt, Homo sapiens
  misc_RNA (1)...(19): siRNA sense strand
ccaaccaggcugaccauga

SEQ ID NO: 1839829 - RNA, 19 nt, Homo sapiens
  misc_RNA (1)...(19): siRNA sense strand
guaugacuaugacagagau

SEQ ID NO: 1839830 - RNA, 19 nt, Homo sapiens
  misc_RNA (1)...(19): siRNA sense strand
gagcaucacccuguuugug

SEQ ID NO: 1839831 - RNA, 19 nt, Homo sapiens
  misc_RNA (1)...(19): siRNA sense strand
ggacccaucuaugauaaaa

SEQ ID NO: 1839832 - RNA, 19 nt, Homo sapiens
  misc_RNA (1)...(19): siRNA sense strand
uggacucgcuguagguuau

SEQ ID NO: 1839833 - RNA, 19 nt, Homo sapiens
  misc_RNA (1)...(19): siRNA sense strand
aaugugagguuugucuuug

SEQ ID NO: 1839834 - RNA, 19 nt, Homo sapiens
  misc_RNA (1)...(19): siRNA sense strand
ucaaugaacgggacaacug

SEQ ID NO: 1839835 - RNA, 19 nt, Homo sapiens
  misc_RNA (1)...(19): siRNA sense strand
cgccugugcugcagacauu

SEQ ID NO: 1839836 - RNA, 19 nt, Homo sapiens
  misc_RNA (1)...(19): siRNA sense strand
cacaguuccugauggagaa

SEQ ID NO: 1839837 - RNA, 19 nt, Homo sapiens
  misc_RNA (1)...(19): siRNA sense strand
gaggaauggacuguugaua

SEQ ID NO: 1839838 - RNA, 19 nt, Homo sapiens
  misc_RNA (1)...(19): siRNA sense strand
guugaugagugcaaagaag

SEQ ID NO: 1839839 - RNA, 19 nt, Homo sapiens
  misc_RNA (1)...(19): siRNA sense strand
aaaugguguucuucucuga

SEQ ID NO: 1839840 - RNA, 19 nt, Homo sapiens
  misc_RNA (1)...(19): siRNA sense strand
gccuacagauggcgucuca

SEQ ID NO: 1839841 - RNA, 19 nt, Homo sapiens
  misc_RNA (1)...(19): siRNA sense strand
cagcucaguaugacuauga

SEQ ID NO: 1839842 - RNA, 19 nt, Homo sapiens
  misc_RNA (1)...(19): siRNA sense strand
uuacaacccagcucaguau

SEQ ID NO: 1839843 - RNA, 19 nt, Homo sapiens
  misc_RNA (1)...(19): siRNA sense strand
ugaugacgaugacaaugau

SEQ ID NO: 1839844 - RNA, 19 nt, Homo sapiens
  misc_RNA (1)...(19): siRNA sense strand
ggaauaagcuaaucagaaa

SEQ ID NO: 1839845 - RNA, 19 nt, Homo sapiens
  misc_RNA (1)...(19): siRNA sense strand
gaugacggcuuuguauaua

SEQ ID NO: 1839846 - RNA, 19 nt, Homo sapiens
  misc_RNA (1)...(19): siRNA sense strand
gaugaaaucucuggucuug

SEQ ID NO: 1839847 - RNA, 19 nt, Homo sapiens
  misc_RNA (1)...(19): siRNA sense strand
gaaucucucuugggucuua

SEQ ID NO: 1839848 - RNA, 19 nt, Homo sapiens
  misc_RNA (1)...(19): siRNA sense strand
gaacaggaccagugcaauu

SEQ ID NO: 1839849 - RNA, 19 nt, Homo sapiens
  misc_RNA (1)...(19): siRNA sense strand
gaucuuagcagucaaauca

SEQ ID NO: 1839850 - RNA, 19 nt, Homo sapiens
  misc_RNA (1)...(19): siRNA sense strand
ggaguucucuucuguucuu

SEQ ID NO: 1839851 - RNA, 19 nt, Homo sapiens
  misc_RNA (1)...(19): siRNA sense strand
ggagauaggccaagucuag

SEQ ID NO: 1839852 - RNA, 19 nt, Homo sapiens
  misc_RNA (1)...(19): siRNA sense strand
acaggacgcuugaugauga

SEQ ID NO: 1839853 - RNA, 19 nt, Homo sapiens
  misc_RNA (1)...(19): siRNA sense strand
ugaaaucucuggucuugau

SEQ ID NO: 1839854 - RNA, 19 nt, Homo sapiens
  misc_RNA (1)...(19): siRNA sense strand
gauauacucuugucugcau

SEQ ID NO: 1839855 - RNA, 19 nt, Homo sapiens
  misc_RNA (1)...(19): siRNA sense strand
gaagaguuccucagcagaa

SEQ ID NO: 1839856 - RNA, 19 nt, Homo sapiens
  misc_RNA (1)...(19): siRNA sense strand
ugacaacacuguaauucug

SEQ ID NO: 1839857 - RNA, 19 nt, Homo sapiens
  misc_RNA (1)...(19): siRNA sense strand
ggagaaauugcaagaagaa

SEQ ID NO: 1839858 - RNA, 19 nt, Homo sapiens
  misc_RNA (1)...(19): siRNA sense strand
auacacccauggagucuua

SEQ ID NO: 1839859 - RNA, 19 nt, Homo sapiens
  misc_RNA (1)...(19): siRNA sense strand
augaugagcuggcugagua

SEQ ID NO: 1839860 - RNA, 19 nt, Homo sapiens
  misc_RNA (1)...(19): siRNA sense strand
cacagucucuucaguaaau

SEQ ID NO: 1839861 - RNA, 19 nt, Homo sapiens
  misc_RNA (1)...(19): siRNA sense strand
guaauucugugggauaugu

SEQ ID NO: 1839862 - RNA, 19 nt, Homo sapiens
  misc_RNA (1)...(19): siRNA sense strand
gauccuagcccagaugauu

SEQ ID NO: 1839863 - RNA, 19 nt, Homo sapiens
  misc_RNA (1)...(19): siRNA sense strand
gcgauucagugggcagaua

SEQ ID NO: 1839864 - RNA, 19 nt, Homo sapiens
  misc_RNA (1)...(19): siRNA sense strand
acaaauacgugaagaucug

SEQ ID NO: 1839865 - RNA, 19 nt, Homo sapiens
  misc_RNA (1)...(19): siRNA sense strand
caaaggagaaauugcaaga

SEQ ID NO: 1839866 - RNA, 19 nt, Homo sapiens
  misc_RNA (1)...(19): siRNA sense strand
ggccaagucuaguucauuc

SEQ ID NO: 1839867 - RNA, 19 nt, Homo sapiens
  misc_RNA (1)...(19): siRNA sense strand
caguacagaugacggcuuu

SEQ ID NO: 1839868 - RNA, 19 nt, Homo sapiens
  misc_RNA (1)...(19): siRNA sense strand
gacaggcaguccuucagaa

SEQ ID NO: 1839869 - RNA, 19 nt, Homo sapiens
  misc_RNA (1)...(19): siRNA sense strand
gcccugauuugccauuuau

SEQ ID NO: 1839870 - RNA, 19 nt, Homo sapiens
  misc_RNA (1)...(19): siRNA sense strand
auuuagaggugcauguuua

SEQ ID NO: 1839871 - RNA, 19 nt, Homo sapiens
  misc_RNA (1)...(19): siRNA sense strand
gaguacgacuuagauaaau

SEQ ID NO: 1839872 - RNA, 19 nt, Homo sapiens
  misc_RNA (1)...(19): siRNA sense strand
ugauuaagcccagugauaa

SEQ ID NO: 1839873 - RNA, 19 nt, Homo sapiens
  misc_RNA (1)...(19): siRNA sense strand
auaagucaguggcuuugua

SEQ ID NO: 1839874 - RNA, 19 nt, Homo sapiens
  misc_RNA (1)...(19): siRNA sense strand
gaagugugggaccuugaua

SEQ ID NO: 1839875 - RNA, 19 nt, Homo sapiens
  misc_RNA (1)...(19): siRNA sense strand
uagaggugcauguuuauaa

SEQ ID NO: 1839876 - RNA, 19 nt, Homo sapiens
  misc_RNA (1)...(19): siRNA sense strand
ccaaagagacaccagacaa

SEQ ID NO: 1839877 - RNA, 19 nt, Homo sapiens
  misc_RNA (1)...(19): siRNA sense strand
gaaauugcaagaagaaggu

SEQ ID NO: 1839878 - RNA, 19 nt, Homo sapiens
  misc_RNA (1)...(19): siRNA sense strand
ugaggaaggugacccagau

SEQ ID NO: 1839879 - RNA, 19 nt, Homo sapiens
  misc_RNA (1)...(19): siRNA sense strand
ugaguacgacuuagauaaa

SEQ ID NO: 1839880 - RNA, 19 nt, Homo sapiens
  misc_RNA (1)...(19): siRNA sense strand
cgagagaggcuuguucuug

SEQ ID NO: 1839881 - RNA, 19 nt, Homo sapiens
  misc_RNA (1)...(19): siRNA sense strand
uaauuuggaugcacguuca

SEQ ID NO: 1839882 - RNA, 19 nt, Homo sapiens
  misc_RNA (1)...(19): siRNA sense strand
gcaagugcaucagcugaca

SEQ ID NO: 1839883 - RNA, 19 nt, Homo sapiens
  misc_RNA (1)...(19): siRNA sense strand
agaacaauaugaacgugaa

SEQ ID NO: 1839884 - RNA, 19 nt, Homo sapiens
  misc_RNA (1)...(19): siRNA sense strand
acacaaugaugaaaucucu

SEQ ID NO: 1839885 - RNA, 19 nt, Homo sapiens
  misc_RNA (1)...(19): siRNA sense strand
ugacggcuuuguauauaau

SEQ ID NO: 1839886 - RNA, 19 nt, Homo sapiens
  misc_RNA (1)...(19): siRNA sense strand
cuucgggucugggauauaa

SEQ ID NO: 1839887 - RNA, 19 nt, Homo sapiens
  misc_RNA (1)...(19): siRNA sense strand
uagagagagugacuuggaa

SEQ ID NO: 1839888 - RNA, 19 nt, Homo sapiens
  misc_RNA (1)...(19): siRNA sense strand
gaaguaaaacgccucauug

SEQ ID NO: 1839889 - RNA, 19 nt, Homo sapiens
  misc_RNA (1)...(19): siRNA sense strand
gcacagucucuucaguaaa

SEQ ID NO: 1839890 - RNA, 19 nt, Homo sapiens
  misc_RNA (1)...(19): siRNA sense strand
gaucugggacaucuuagga

SEQ ID NO: 1839891 - RNA, 19 nt, Homo sapiens
  misc_RNA (1)...(19): siRNA sense strand
ggaugcacguucagauaag

SEQ ID NO: 1839892 - RNA, 19 nt, Homo sapiens
  misc_RNA (1)...(19): siRNA sense strand
cagaugacggcuuuguaua

SEQ ID NO: 1839893 - RNA, 19 nt, Homo sapiens
  misc_RNA (1)...(19): siRNA sense strand
uggaauggcugaauuuuga

SEQ ID NO: 1839894 - RNA, 19 nt, Homo sapiens
  misc_RNA (1)...(19): siRNA sense strand
gaaaaugggaguucucuuc

SEQ ID NO: 1839895 - RNA, 19 nt, Homo sapiens
  misc_RNA (1)...(19): siRNA sense strand
agguagagcugaguaaaga

SEQ ID NO: 1839896 - RNA, 19 nt, Homo sapiens
  misc_RNA (1)...(19): siRNA sense strand
gauauaagcacagucucuu

SEQ ID NO: 1839897 - RNA, 19 nt, Homo sapiens
  misc_RNA (1)...(19): siRNA sense strand
uggaauaagcuaaucagaa

SEQ ID NO: 1839898 - RNA, 19 nt, Homo sapiens
  misc_RNA (1)...(19): siRNA sense strand
gaugacaggacgcuugaug

SEQ ID NO: 1839899 - RNA, 19 nt, Homo sapiens
  misc_RNA (1)...(19): siRNA sense strand
aaggagaaauugcaagaag

SEQ ID NO: 1839900 - RNA, 19 nt, Homo sapiens
  misc_RNA (1)...(19): siRNA sense strand
gggcagauagagagaguga

SEQ ID NO: 1839901 - RNA, 19 nt, Homo sapiens
  misc_RNA (1)...(19): siRNA sense strand
gcucauaugauaagucagu

SEQ ID NO: 1839902 - RNA, 19 nt, Homo sapiens
  misc_RNA (1)...(19): siRNA sense strand
ucugauuucuggcucauau

SEQ ID NO: 1839903 - RNA, 19 nt, Homo sapiens
  misc_RNA (1)...(19): siRNA sense strand
agaggugcauguuuauaau

SEQ ID NO: 1839904 - RNA, 19 nt, Homo sapiens
  misc_RNA (1)...(19): siRNA sense strand
uaaauaugaugaggaaggu

SEQ ID NO: 1839905 - RNA, 19 nt, Homo sapiens
  misc_RNA (1)...(19): siRNA sense strand
uagccucgcuguacacaca

SEQ ID NO: 1839906 - RNA, 19 nt, Homo sapiens
  misc_RNA (1)...(19): siRNA sense strand
gccauuuauuuaugccuuu

SEQ ID NO: 1839907 - RNA, 19 nt, Homo sapiens
  misc_RNA (1)...(19): siRNA sense strand
ccaagucuaguucauucua

SEQ ID NO: 1839908 - RNA, 19 nt, Homo sapiens
  misc_RNA (1)...(19): siRNA sense strand
uuaaugcacacaaugauga

SEQ ID NO: 1839909 - RNA, 19 nt, Homo sapiens
  misc_RNA (1)...(19): siRNA sense strand
gaaggugguggcagugaug

SEQ ID NO: 1839910 - RNA, 19 nt, Homo sapiens
  misc_RNA (1)...(19): siRNA sense strand
ugucauuucuuggccagua

SEQ ID NO: 1839911 - RNA, 19 nt, Homo sapiens
  misc_RNA (1)...(19): siRNA sense strand
ggagacaggcaguccuuca

SEQ ID NO: 1839912 - RNA, 19 nt, Homo sapiens
  misc_RNA (1)...(19): siRNA sense strand
gggcuucgggucugggaua

SEQ ID NO: 1839913 - RNA, 19 nt, Homo sapiens
  misc_RNA (1)...(19): siRNA sense strand
agagacaccagacaaggua

SEQ ID NO: 1839914 - RNA, 19 nt, Homo sapiens
  misc_RNA (1)...(19): siRNA sense strand
caagguagagcugaguaaa

SEQ ID NO: 1839915 - RNA, 19 nt, Homo sapiens
  misc_RNA (1)...(19): siRNA sense strand
caaagagacaccagacaag

SEQ ID NO: 1839916 - RNA, 19 nt, Homo sapiens
  misc_RNA (1)...(19): siRNA sense strand
caauaugaacgugaagauu

SEQ ID NO: 1839917 - RNA, 19 nt, Homo sapiens
  misc_RNA (1)...(19): siRNA sense strand
aagcacagucucuucagua

SEQ ID NO: 1839918 - RNA, 19 nt, Homo sapiens
  misc_RNA (1)...(19): siRNA sense strand
gcugaguaaagaagaagua

SEQ ID NO: 1839919 - RNA, 19 nt, Homo sapiens
  misc_RNA (1)...(19): siRNA sense strand
uggcucauaugauaaguca

SEQ ID NO: 1839920 - RNA, 19 nt, Homo sapiens
  misc_RNA (1)...(19): siRNA sense strand
cagacaagguccaaacacu

SEQ ID NO: 1839921 - RNA, 19 nt, Homo sapiens
  misc_RNA (1)...(19): siRNA sense strand
cagaugauucuacuggaaa

SEQ ID NO: 1839922 - RNA, 19 nt, Homo sapiens
  misc_RNA (1)...(19): siRNA sense strand
ggcagcaggagcucagaua

SEQ ID NO: 1839923 - RNA, 19 nt, Homo sapiens
  misc_RNA (1)...(19): siRNA sense strand
gcauuuggaagacgagaga

SEQ ID NO: 1839924 - RNA, 19 nt, Homo sapiens
  misc_RNA (1)...(19): siRNA sense strand
ccugauuugccauuuauuu

SEQ ID NO: 1839925 - RNA, 19 nt, Homo sapiens
  misc_RNA (1)...(19): siRNA sense strand
aaugggaguucucuucugu

SEQ ID NO: 1839926 - RNA, 19 nt, Homo sapiens
  misc_RNA (1)...(19): siRNA sense strand
gcugaguacgacuuagaua

SEQ ID NO: 1839927 - RNA, 19 nt, Homo sapiens
  misc_RNA (1)...(19): siRNA sense strand
ucucuggucuugaucuuag

SEQ ID NO: 1839928 - RNA, 19 nt, Homo sapiens
  misc_RNA (1)...(19): siRNA sense strand
ucaagauccuuacguuacu

SEQ ID NO: 1839929 - RNA, 19 nt, Homo sapiens
  misc_RNA (1)...(19): siRNA sense strand
gugcaagaaauucaucuau

SEQ ID NO: 1839930 - RNA, 19 nt, Homo sapiens
  misc_RNA (1)...(19): siRNA sense strand
ucucuucuguucuucaugu

SEQ ID NO: 1839931 - RNA, 19 nt, Homo sapiens
  misc_RNA (1)...(19): siRNA sense strand
cugcuucagcugacaaaua

SEQ ID NO: 1839932 - RNA, 19 nt, Homo sapiens
  misc_RNA (1)...(19): siRNA sense strand
gcagauagagagagugacu

SEQ ID NO: 1839933 - RNA, 19 nt, Homo sapiens
  misc_RNA (1)...(19): siRNA sense strand
cugcauauccucugagugu

SEQ ID NO: 1839934 - RNA, 19 nt, Homo sapiens
  misc_RNA (1)...(19): siRNA sense strand
acaggaccagugcaauuua

SEQ ID NO: 1839935 - RNA, 19 nt, Homo sapiens
  misc_RNA (1)...(19): siRNA sense strand
uugauuaagcccagugaua

SEQ ID NO: 1839936 - RNA, 19 nt, Homo sapiens
  misc_RNA (1)...(19): siRNA sense strand
gauccuuacguuacucuga

SEQ ID NO: 1839937 - RNA, 19 nt, Homo sapiens
  misc_RNA (1)...(19): siRNA sense strand
aggagaaauugcaagaaga

SEQ ID NO: 1839938 - RNA, 19 nt, Homo sapiens
  misc_RNA (1)...(19): siRNA sense strand
gcucagauacacccaugga

SEQ ID NO: 1839939 - RNA, 19 nt, Homo sapiens
  misc_RNA (1)...(19): siRNA sense strand
agcacagucucuucaguaa

SEQ ID NO: 1839940 - RNA, 19 nt, Homo sapiens
  misc_RNA (1)...(19): siRNA sense strand
ggauauaagcacagucucu

SEQ ID NO: 1839941 - RNA, 19 nt, Homo sapiens
  misc_RNA (1)...(19): siRNA sense strand
gauaggccaagucuaguuc

SEQ ID NO: 1839942 - RNA, 19 nt, Homo sapiens
  misc_RNA (1)...(19): siRNA sense strand
ugacaaauacgugaagauc

SEQ ID NO: 1839943 - RNA, 19 nt, Homo sapiens
  misc_RNA (1)...(19): siRNA sense strand
gcugacaaauacgugaaga

SEQ ID NO: 1839944 - RNA, 19 nt, Homo sapiens
  misc_RNA (1)...(19): siRNA sense strand
gcacaacccugcccagauc

SEQ ID NO: 1839945 - RNA, 19 nt, Homo sapiens
  misc_RNA (1)...(19): siRNA sense strand
gaacguccaccuaguguuu

SEQ ID NO: 1839946 - RNA, 19 nt, Homo sapiens
  misc_RNA (1)...(19): siRNA sense strand
gaagauauucuaagcaaga

SEQ ID NO: 1839947 - RNA, 19 nt, Homo sapiens
  misc_RNA (1)...(19): siRNA sense strand
gaugauguguguccugaaa

SEQ ID NO: 1839948 - RNA, 19 nt, Homo sapiens
  misc_RNA (1)...(19): siRNA sense strand
gaucucaccuacuggauug

SEQ ID NO: 1839949 - RNA, 19 nt, Homo sapiens
  misc_RNA (1)...(19): siRNA sense strand
ggacuucaguggcacauuc

SEQ ID NO: 1839950 - RNA, 19 nt, Homo sapiens
  misc_RNA (1)...(19): siRNA sense strand
gggacgaugucuucaauga

SEQ ID NO: 1839951 - RNA, 19 nt, Homo sapiens
  misc_RNA (1)...(19): siRNA sense strand
ucaagagagugucgaauga

SEQ ID NO: 1839952 - RNA, 19 nt, Homo sapiens
  misc_RNA (1)...(19): siRNA sense strand
ggugauauuuguaaagaug

SEQ ID NO: 1839953 - RNA, 19 nt, Homo sapiens
  misc_RNA (1)...(19): siRNA sense strand
ggaccuaucuaugaccaaa

SEQ ID NO: 1839954 - RNA, 19 nt, Homo sapiens
  misc_RNA (1)...(19): siRNA sense strand
gcagaugaccucagcaaga

SEQ ID NO: 1839955 - RNA, 19 nt, Homo sapiens
  misc_RNA (1)...(19): siRNA sense strand
gcgagaaccucaagagagu

SEQ ID NO: 1839956 - RNA, 19 nt, Homo sapiens
  misc_RNA (1)...(19): siRNA sense strand
caaagggaccacccaaauu

SEQ ID NO: 1839957 - RNA, 19 nt, Homo sapiens
  misc_RNA (1)...(19): siRNA sense strand
cgucagaugugcaacaaga

SEQ ID NO: 1839958 - RNA, 19 nt, Homo sapiens
  misc_RNA (1)...(19): siRNA sense strand
aagagagugucgaaugaua

SEQ ID NO: 1839959 - RNA, 19 nt, Homo sapiens
  misc_RNA (1)...(19): siRNA sense strand
gcaauggcacccacuguga

SEQ ID NO: 1839960 - RNA, 19 nt, Homo sapiens
  misc_RNA (1)...(19): siRNA sense strand
ucucagaccucaaguacga

SEQ ID NO: 1839961 - RNA, 19 nt, Homo sapiens
  misc_RNA (1)...(19): siRNA sense strand
agaccgacguggacaauga

SEQ ID NO: 1839962 - RNA, 19 nt, Homo sapiens
  misc_RNA (1)...(19): siRNA sense strand
gcaggaagacuuugacaag

SEQ ID NO: 1839963 - RNA, 19 nt, Homo sapiens
  misc_RNA (1)...(19): siRNA sense strand
gacaacaucccagauauug

SEQ ID NO: 1839964 - RNA, 19 nt, Homo sapiens
  misc_RNA (1)...(19): siRNA sense strand
caacaacgaggacauagau

SEQ ID NO: 1839965 - RNA, 19 nt, Homo sapiens
  misc_RNA (1)...(19): siRNA sense strand
uggaagauauucuaagcaa

SEQ ID NO: 1839966 - RNA, 19 nt, Homo sapiens
  misc_RNA (1)...(19): siRNA sense strand
guacgaaugcagagauauu

SEQ ID NO: 1839967 - RNA, 19 nt, Homo sapiens
  misc_RNA (1)...(19): siRNA sense strand
gacacgaccuucgaccuuu

SEQ ID NO: 1839968 - RNA, 19 nt, Homo sapiens
  misc_RNA (1)...(19): siRNA sense strand
gcgaggagcugggaaacau

SEQ ID NO: 1839969 - RNA, 19 nt, Homo sapiens
  misc_RNA (1)...(19): siRNA sense strand
caacaucccagauauugau

SEQ ID NO: 1839970 - RNA, 19 nt, Homo sapiens
  misc_RNA (1)...(19): siRNA sense strand
cgaaugcagagauauuuaa

SEQ ID NO: 1839971 - RNA, 19 nt, Homo sapiens
  misc_RNA (1)...(19): siRNA sense strand
cagaugaccucagcaagau

SEQ ID NO: 1839972 - RNA, 19 nt, Homo sapiens
  misc_RNA (1)...(19): siRNA sense strand
gcccaagacuggcuacauc

SEQ ID NO: 1839973 - RNA, 19 nt, Homo sapiens
  misc_RNA (1)...(19): siRNA sense strand
aaagggaccacccaaauug

SEQ ID NO: 1839974 - RNA, 19 nt, Homo sapiens
  misc_RNA (1)...(19): siRNA sense strand
ggacuuggacggugaugga

SEQ ID NO: 1839975 - RNA, 19 nt, Homo sapiens
  misc_RNA (1)...(19): siRNA sense strand
ucagcaagaucaccaagau

SEQ ID NO: 1839976 - RNA, 19 nt, Homo sapiens
  misc_RNA (1)...(19): siRNA sense strand
ggauguacguggccaaagg

SEQ ID NO: 1839977 - RNA, 19 nt, Homo sapiens
  misc_RNA (1)...(19): siRNA sense strand
ccaaagggaccacccaaau

SEQ ID NO: 1839978 - RNA, 19 nt, Homo sapiens
  misc_RNA (1)...(19): siRNA sense strand
gcaaggacaagacacacaa

SEQ ID NO: 1839979 - RNA, 19 nt, Homo sapiens
  misc_RNA (1)...(19): siRNA sense strand
guaccugcaagaaauuuaa

SEQ ID NO: 1839980 - RNA, 19 nt, Homo sapiens
  misc_RNA (1)...(19): siRNA sense strand
caaccaggcugaccaugac

SEQ ID NO: 1839981 - RNA, 19 nt, Homo sapiens
  misc_RNA (1)...(19): siRNA sense strand
ugacaacaacgaggacaua

SEQ ID NO: 1839982 - RNA, 19 nt, Homo sapiens
  misc_RNA (1)...(19): siRNA sense strand
ugaaccagcucagcgagaa

SEQ ID NO: 1839983 - RNA, 19 nt, Homo sapiens
  misc_RNA (1)...(19): siRNA sense strand
gagacagacuucaggaacu

SEQ ID NO: 1839984 - RNA, 19 nt, Homo sapiens
  misc_RNA (1)...(19): siRNA sense strand
gaucgacacagacaacaau

SEQ ID NO: 1839985 - RNA, 19 nt, Homo sapiens
  misc_RNA (1)...(19): siRNA sense strand
ucccagauauugaugaugu

SEQ ID NO: 1839986 - RNA, 19 nt, Homo sapiens
  misc_RNA (1)...(19): siRNA sense strand
acucaggaccuaucuauga

SEQ ID NO: 1839987 - RNA, 19 nt, Homo sapiens
  misc_RNA (1)...(19): siRNA sense strand
ccagggagcugagaucaac

SEQ ID NO: 1839988 - RNA, 19 nt, Homo sapiens
  misc_RNA (1)...(19): siRNA sense strand
ggaccagugugacaacaac

SEQ ID NO: 1839989 - RNA, 19 nt, Homo sapiens
  misc_RNA (1)...(19): siRNA sense strand
caggauggccgguucuuug

SEQ ID NO: 1839990 - RNA, 19 nt, Homo sapiens
  misc_RNA (1)...(19): siRNA sense strand
ugacaacaucccagauauu

SEQ ID NO: 1839991 - RNA, 19 nt, Homo sapiens
  misc_RNA (1)...(19): siRNA sense strand
agacagacuucaggaacuu

SEQ ID NO: 1839992 - RNA, 19 nt, Homo sapiens
  misc_RNA (1)...(19): siRNA sense strand
aaugacaacaucccagaua

SEQ ID NO: 1839993 - RNA, 19 nt, Homo sapiens
  misc_RNA (1)...(19): siRNA sense strand
cggcaucgcuguagguuuu

SEQ ID NO: 1839994 - RNA, 19 nt, Homo sapiens
  misc_RNA (1)...(19): siRNA sense strand
gucgaaugauaaccaguuu

SEQ ID NO: 1839995 - RNA, 19 nt, Homo sapiens
  misc_RNA (1)...(19): siRNA sense strand
ccaaccaggcugaccauga

SEQ ID NO: 1839996 - RNA, 19 nt, Homo sapiens
  misc_RNA (1)...(19): siRNA sense strand
cgacacagacaacaaugga

SEQ ID NO: 1839997 - RNA, 19 nt, Homo sapiens
  misc_RNA (1)...(19): siRNA sense strand
aggaagacuuugacaagga

SEQ ID NO: 1839998 - RNA, 19 nt, Homo sapiens
  misc_RNA (1)...(19): siRNA sense strand
caaauucugggcaggaaga

SEQ ID NO: 1839999 - RNA, 19 nt, Homo sapiens
  misc_RNA (1)...(19): siRNA sense strand
gcaucuaccugggccacuu

SEQ ID NO: 1840000 - RNA, 19 nt, Homo sapiens
  misc_RNA (1)...(19): siRNA sense strand
ccugugacccugaugauga

SEQ ID NO: 1840001 - RNA, 19 nt, Homo sapiens
  misc_RNA (1)...(19): siRNA sense strand
acacgggcuugcagucuga

SEQ ID NO: 1840002 - RNA, 19 nt, Homo sapiens
  misc_RNA (1)...(19): siRNA sense strand
aaguacgaaugcagagaua

SEQ ID NO: 1840003 - RNA, 19 nt, Homo sapiens
  misc_RNA (1)...(19): siRNA sense strand
agauauugaugaugugugu

SEQ ID NO: 1840004 - RNA, 19 nt, Homo sapiens
  misc_RNA (1)...(19): siRNA sense strand
ggaucucaccuacuggauu

SEQ ID NO: 1840005 - RNA, 19 nt, Homo sapiens
  misc_RNA (1)...(19): siRNA sense strand
acaacgaggacauagauga

SEQ ID NO: 1840006 - RNA, 19 nt, Homo sapiens
  misc_RNA (1)...(19): siRNA sense strand
acaauugucccuacgucua

SEQ ID NO: 1840007 - RNA, 19 nt, Homo sapiens
  misc_RNA (1)...(19): siRNA sense strand
gcaggauggccgguucuuu

SEQ ID NO: 1840008 - RNA, 19 nt, Homo sapiens
  misc_RNA (1)...(19): siRNA sense strand
cuauuugucuucucucaag

SEQ ID NO: 1840009 - RNA, 19 nt, Homo sapiens
  misc_RNA (1)...(19): siRNA sense strand
ggcgaugccugugaugaug

SEQ ID NO: 1840010 - RNA, 19 nt, Homo sapiens
  misc_RNA (1)...(19): siRNA sense strand
gccaaauucugggcaggaa

SEQ ID NO: 1840011 - RNA, 19 nt, Homo sapiens
  misc_RNA (1)...(19): siRNA sense strand
gcaaggugccucgcugugu

SEQ ID NO: 1840012 - RNA, 19 nt, Homo sapiens
  misc_RNA (1)...(19): siRNA sense strand
ucugugaccuguggaguug

SEQ ID NO: 1840013 - RNA, 19 nt, Homo sapiens
  misc_RNA (1)...(19): siRNA sense strand
gaugaccucagcaagauca

SEQ ID NO: 1840014 - RNA, 19 nt, Homo sapiens
  misc_RNA (1)...(19): siRNA sense strand
caagacuggcuacaucaga

SEQ ID NO: 1840015 - RNA, 19 nt, Homo sapiens
  misc_RNA (1)...(19): siRNA sense strand
agagagugucgaaugauaa

SEQ ID NO: 1840016 - RNA, 19 nt, Homo sapiens
  misc_RNA (1)...(19): siRNA sense strand
ggacuacacggccuauagg

SEQ ID NO: 1840017 - RNA, 19 nt, Homo sapiens
  misc_RNA (1)...(19): siRNA sense strand
ucuauguggugauguggaa

SEQ ID NO: 1840018 - RNA, 19 nt, Homo sapiens
  misc_RNA (1)...(19): siRNA sense strand
cauucuacguaaacacuga

SEQ ID NO: 1840019 - RNA, 19 nt, Homo sapiens
  misc_RNA (1)...(19): siRNA sense strand
gauuggcgaugccugugau

SEQ ID NO: 1840020 - RNA, 19 nt, Homo sapiens
  misc_RNA (1)...(19): siRNA sense strand
gaagcagccaagacggaaa

SEQ ID NO: 1840021 - RNA, 19 nt, Homo sapiens
  misc_RNA (1)...(19): siRNA sense strand
acaaggaacaugucagcuu

SEQ ID NO: 1840022 - RNA, 19 nt, Homo sapiens
  misc_RNA (1)...(19): siRNA sense strand
cgaaugauaaccaguuucu

SEQ ID NO: 1840023 - RNA, 19 nt, Homo sapiens
  misc_RNA (1)...(19): siRNA sense strand
caucagagucuuagugcau

SEQ ID NO: 1840024 - RNA, 19 nt, Homo sapiens
  misc_RNA (1)...(19): siRNA sense strand
caacugccggcuuguguuc

SEQ ID NO: 1840025 - RNA, 19 nt, Homo sapiens
  misc_RNA (1)...(19): siRNA sense strand
caacugccagcuccucuuc

SEQ ID NO: 1840026 - RNA, 19 nt, Homo sapiens
  misc_RNA (1)...(19): siRNA sense strand
agacucaggaccuaucuau

SEQ ID NO: 1840027 - RNA, 19 nt, Homo sapiens
  misc_RNA (1)...(19): siRNA sense strand
caaguacgaaugcagagau

SEQ ID NO: 1840028 - RNA, 19 nt, Homo sapiens
  misc_RNA (1)...(19): siRNA sense strand
acaaagacacgaccuucga

SEQ ID NO: 1840029 - RNA, 19 nt, Homo sapiens
  misc_RNA (1)...(19): siRNA sense strand
ucagagucuuagugcauga

SEQ ID NO: 1840030 - RNA, 19 nt, Homo sapiens
  misc_RNA (1)...(19): siRNA sense strand
gagaaccucaagagagugu

SEQ ID NO: 1840031 - RNA, 19 nt, Homo sapiens
  misc_RNA (1)...(19): siRNA sense strand
ccuaagacaaggaacaugu

SEQ ID NO: 1840032 - RNA, 19 nt, Homo sapiens
  misc_RNA (1)...(19): siRNA sense strand
acgaaugcagagauauuua

SEQ ID NO: 1840033 - RNA, 19 nt, Homo sapiens
  misc_RNA (1)...(19): siRNA sense strand
cuacaucagagucuuagug

SEQ ID NO: 1840034 - RNA, 19 nt, Homo sapiens
  misc_RNA (1)...(19): siRNA sense strand
gcuucuauguggugaugug

SEQ ID NO: 1840035 - RNA, 19 nt, Homo sapiens
  misc_RNA (1)...(19): siRNA sense strand
aguggcacauucuacguaa

SEQ ID NO: 1840036 - RNA, 19 nt, Homo sapiens
  misc_RNA (1)...(19): siRNA sense strand
ccaagaucaugcggcagaa

SEQ ID NO: 1840037 - RNA, 19 nt, Homo sapiens
  misc_RNA (1)...(19): siRNA sense strand
gcugugacaacugcccuua

SEQ ID NO: 1840038 - RNA, 19 nt, Homo sapiens
  misc_RNA (1)...(19): siRNA sense strand
gcagucugagcaaguguga

SEQ ID NO: 1840039 - RNA, 19 nt, Homo sapiens
  misc_RNA (1)...(19): siRNA sense strand
ucagaacguccaccuagug

SEQ ID NO: 1840040 - RNA, 19 nt, Homo sapiens
  misc_RNA (1)...(19): siRNA sense strand
ggauuggcgaugccuguga

SEQ ID NO: 1840041 - RNA, 19 nt, Homo sapiens
  misc_RNA (1)...(19): siRNA sense strand
acguguaccugcaagaaau

SEQ ID NO: 1840042 - RNA, 19 nt, Homo sapiens
  misc_RNA (1)...(19): siRNA sense strand
ccacguguaccugcaagaa

SEQ ID NO: 1840043 - RNA, 19 nt, Homo sapiens
  misc_RNA (1)...(19): siRNA sense strand
ugaccgggacgacgacuau

SEQ ID NO: 1840044 - RNA, 19 nt, Homo sapiens
  misc_RNA (1)...(19): siRNA sense strand
gcaccuacgugaaggauuu

SEQ ID NO: 1840045 - RNA, 19 nt, Homo sapiens
  misc_RNA (1)...(19): siRNA sense strand
gcucaaagauuuccucuca

SEQ ID NO: 1840046 - RNA, 19 nt, Homo sapiens
  misc_RNA (1)...(19): siRNA sense strand
ggaagaagaugguauucga

SEQ ID NO: 1840047 - RNA, 19 nt, Homo sapiens
  misc_RNA (1)...(19): siRNA sense strand
gaaaauccaugaagaguuu

SEQ ID NO: 1840048 - RNA, 19 nt, Homo sapiens
  misc_RNA (1)...(19): siRNA sense strand
guauaaagaugguuccaaa

SEQ ID NO: 1840049 - RNA, 19 nt, Homo sapiens
  misc_RNA (1)...(19): siRNA sense strand
ggaauuuggugucugauau

SEQ ID NO: 1840050 - RNA, 19 nt, Homo sapiens
  misc_RNA (1)...(19): siRNA sense strand
ccaggaaacugaacacuga

SEQ ID NO: 1840051 - RNA, 19 nt, Homo sapiens
  misc_RNA (1)...(19): siRNA sense strand
ugagaagguugaucaauuu

SEQ ID NO: 1840052 - RNA, 19 nt, Homo sapiens
  misc_RNA (1)...(19): siRNA sense strand
gggaauauuugaugacauu

SEQ ID NO: 1840053 - RNA, 19 nt, Homo sapiens
  misc_RNA (1)...(19): siRNA sense strand
gagaugagauucuugagau

SEQ ID NO: 1840054 - RNA, 19 nt, Homo sapiens
  misc_RNA (1)...(19): siRNA sense strand
gaagaaacuuguaggaucu

SEQ ID NO: 1840055 - RNA, 19 nt, Homo sapiens
  misc_RNA (1)...(19): siRNA sense strand
uaacggaaaugguagaguu

SEQ ID NO: 1840056 - RNA, 19 nt, Homo sapiens
  misc_RNA (1)...(19): siRNA sense strand
ggaugacgcuacauauuug

SEQ ID NO: 1840057 - RNA, 19 nt, Homo sapiens
  misc_RNA (1)...(19): siRNA sense strand
gaucacagcagcaagagua

SEQ ID NO: 1840058 - RNA, 19 nt, Homo sapiens
  misc_RNA (1)...(19): siRNA sense strand
gaaccgaagcuguaaagaa

SEQ ID NO: 1840059 - RNA, 19 nt, Homo sapiens
  misc_RNA (1)...(19): siRNA sense strand
gcaaaugccgugugugaaa

SEQ ID NO: 1840060 - RNA, 19 nt, Homo sapiens
  misc_RNA (1)...(19): siRNA sense strand
gauuuaaacugucuuaugg

SEQ ID NO: 1840061 - RNA, 19 nt, Homo sapiens
  misc_RNA (1)...(19): siRNA sense strand
gaaagcaggagaugagauu

SEQ ID NO: 1840062 - RNA, 19 nt, Homo sapiens
  misc_RNA (1)...(19): siRNA sense strand
agacagacauccucaguga

SEQ ID NO: 1840063 - RNA, 19 nt, Homo sapiens
  misc_RNA (1)...(19): siRNA sense strand
gaaaggaugcacgcuauuu

SEQ ID NO: 1840064 - RNA, 19 nt, Homo sapiens
  misc_RNA (1)...(19): siRNA sense strand
gaagaaacgcuccaaaucu

SEQ ID NO: 1840065 - RNA, 19 nt, Homo sapiens
  misc_RNA (1)...(19): siRNA sense strand
aaauggaccuguuucguuu

SEQ ID NO: 1840066 - RNA, 19 nt, Homo sapiens
  misc_RNA (1)...(19): siRNA sense strand
gggaugacgcuacauauuu

SEQ ID NO: 1840067 - RNA, 19 nt, Homo sapiens
  misc_RNA (1)...(19): siRNA sense strand
gaagguugaucaauuuaag

SEQ ID NO: 1840068 - RNA, 19 nt, Homo sapiens
  misc_RNA (1)...(19): siRNA sense strand
aaccgaagcuguaaagaaa

SEQ ID NO: 1840069 - RNA, 19 nt, Homo sapiens
  misc_RNA (1)...(19): siRNA sense strand
ggaaggugauccacaggaa

SEQ ID NO: 1840070 - RNA, 19 nt, Homo sapiens
  misc_RNA (1)...(19): siRNA sense strand
gaggaagucauuuggguua

SEQ ID NO: 1840071 - RNA, 19 nt, Homo sapiens
  misc_RNA (1)...(19): siRNA sense strand
ucuaugagcugcuguacaa

SEQ ID NO: 1840072 - RNA, 19 nt, Homo sapiens
  misc_RNA (1)...(19): siRNA sense strand
ccagagagccgaaaggauu

SEQ ID NO: 1840073 - RNA, 19 nt, Homo sapiens
  misc_RNA (1)...(19): siRNA sense strand
gaucauuccuguauuaugc

SEQ ID NO: 1840074 - RNA, 19 nt, Homo sapiens
  misc_RNA (1)...(19): siRNA sense strand
caaauuagccauagcaaca

SEQ ID NO: 1840075 - RNA, 19 nt, Homo sapiens
  misc_RNA (1)...(19): siRNA sense strand
gaaguggucuuaccuaacg

SEQ ID NO: 1840076 - RNA, 19 nt, Homo sapiens
  misc_RNA (1)...(19): siRNA sense strand
ugacuuguaugcucagaaa

SEQ ID NO: 1840077 - RNA, 19 nt, Homo sapiens
  misc_RNA (1)...(19): siRNA sense strand
gagagggucuuucacuugu

SEQ ID NO: 1840078 - RNA, 19 nt, Homo sapiens
  misc_RNA (1)...(19): siRNA sense strand
gagcugcuguacaaagaaa

SEQ ID NO: 1840079 - RNA, 19 nt, Homo sapiens
  misc_RNA (1)...(19): siRNA sense strand
cgguuuagcuuccaagaaa

SEQ ID NO: 1840080 - RNA, 19 nt, Homo sapiens
  misc_RNA (1)...(19): siRNA sense strand
ugaacagacuggugagaaa

SEQ ID NO: 1840081 - RNA, 19 nt, Homo sapiens
  misc_RNA (1)...(19): siRNA sense strand
caaauggaccuguuucguu

SEQ ID NO: 1840082 - RNA, 19 nt, Homo sapiens
  misc_RNA (1)...(19): siRNA sense strand
ggaaaacccuggauaguca

SEQ ID NO: 1840083 - RNA, 19 nt, Homo sapiens
  misc_RNA (1)...(19): siRNA sense strand
uaaaggcugugcauucaau

SEQ ID NO: 1840084 - RNA, 19 nt, Homo sapiens
  misc_RNA (1)...(19): siRNA sense strand
aaagaugguuccaaacaga

SEQ ID NO: 1840085 - RNA, 19 nt, Homo sapiens
  misc_RNA (1)...(19): siRNA sense strand
gaagacagcuccucaaaac

SEQ ID NO: 1840086 - RNA, 19 nt, Homo sapiens
  misc_RNA (1)...(19): siRNA sense strand
gaagaagaaacuuguagga

SEQ ID NO: 1840087 - RNA, 19 nt, Homo sapiens
  misc_RNA (1)...(19): siRNA sense strand
gaucugagccaagaacauu

SEQ ID NO: 1840088 - RNA, 19 nt, Homo sapiens
  misc_RNA (1)...(19): siRNA sense strand
ugaacaagguugccaguca

SEQ ID NO: 1840089 - RNA, 19 nt, Homo sapiens
  misc_RNA (1)...(19): siRNA sense strand
gguagaguuucaaguagaa

SEQ ID NO: 1840090 - RNA, 19 nt, Homo sapiens
  misc_RNA (1)...(19): siRNA sense strand
cagaacagguggccgcauu

SEQ ID NO: 1840091 - RNA, 19 nt, Homo sapiens
  misc_RNA (1)...(19): siRNA sense strand
gaguggagcugcuggaaag

SEQ ID NO: 1840092 - RNA, 19 nt, Homo sapiens
  misc_RNA (1)...(19): siRNA sense strand
cuucuaugcucaaagauuu

SEQ ID NO: 1840093 - RNA, 19 nt, Homo sapiens
  misc_RNA (1)...(19): siRNA sense strand
gaacucuucuaugcucaaa

SEQ ID NO: 1840094 - RNA, 19 nt, Homo sapiens
  misc_RNA (1)...(19): siRNA sense strand
caagacacaucaacuggau

SEQ ID NO: 1840095 - RNA, 19 nt, Homo sapiens
  misc_RNA (1)...(19): siRNA sense strand
caagaacauuuaacaagca

SEQ ID NO: 1840096 - RNA, 19 nt, Homo sapiens
  misc_RNA (1)...(19): siRNA sense strand
gguuaggcgugaagacuuu

SEQ ID NO: 1840097 - RNA, 19 nt, Homo sapiens
  misc_RNA (1)...(19): siRNA sense strand
ggagagggucuuucacuug

SEQ ID NO: 1840098 - RNA, 19 nt, Homo sapiens
  misc_RNA (1)...(19): siRNA sense strand
ucacaggcuuuccauuuau

SEQ ID NO: 1840099 - RNA, 19 nt, Homo sapiens
  misc_RNA (1)...(19): siRNA sense strand
ucaaagauuuccucucaca

SEQ ID NO: 1840100 - RNA, 19 nt, Homo sapiens
  misc_RNA (1)...(19): siRNA sense strand
gguucugucugcccaauaa

SEQ ID NO: 1840101 - RNA, 19 nt, Homo sapiens
  misc_RNA (1)...(19): siRNA sense strand
gcaggcuacugucggaauu

SEQ ID NO: 1840102 - RNA, 19 nt, Homo sapiens
  misc_RNA (1)...(19): siRNA sense strand
gagaagguugaucaauuua

SEQ ID NO: 1840103 - RNA, 19 nt, Homo sapiens
  misc_RNA (1)...(19): siRNA sense strand
gccaccaacccacaaauua

SEQ ID NO: 1840104 - RNA, 19 nt, Homo sapiens
  misc_RNA (1)...(19): siRNA sense strand
gaaauugaaaucuguccaa

SEQ ID NO: 1840105 - RNA, 19 nt, Homo sapiens
  misc_RNA (1)...(19): siRNA sense strand
gaugaugaguucugugagu

SEQ ID NO: 1840106 - RNA, 19 nt, Homo sapiens
  misc_RNA (1)...(19): siRNA sense strand
gaggagcaguuugaucuug

SEQ ID NO: 1840107 - RNA, 19 nt, Homo sapiens
  misc_RNA (1)...(19): siRNA sense strand
ucuagaagauggagugaga

SEQ ID NO: 1840108 - RNA, 19 nt, Homo sapiens
  misc_RNA (1)...(19): siRNA sense strand
cucacaggcuuuccauuua

SEQ ID NO: 1840109 - RNA, 19 nt, Homo sapiens
  misc_RNA (1)...(19): siRNA sense strand
gagaugagcaccaccaaca

SEQ ID NO: 1840110 - RNA, 19 nt, Homo sapiens
  misc_RNA (1)...(19): siRNA sense strand
ggauuuaaacugucuuaug

SEQ ID NO: 1840111 - RNA, 19 nt, Homo sapiens
  misc_RNA (1)...(19): siRNA sense strand
gcagaaagucaacauguag

SEQ ID NO: 1840112 - RNA, 19 nt, Homo sapiens
  misc_RNA (1)...(19): siRNA sense strand
gcccugaacucuucuaugc

SEQ ID NO: 1840113 - RNA, 19 nt, Homo sapiens
  misc_RNA (1)...(19): siRNA sense strand
cgcagaaagucaacaugua

SEQ ID NO: 1840114 - RNA, 19 nt, Homo sapiens
  misc_RNA (1)...(19): siRNA sense strand
aagaaacgcuccaaaucug

SEQ ID NO: 1840115 - RNA, 19 nt, Homo sapiens
  misc_RNA (1)...(19): siRNA sense strand
ccuaaaggcugugcauuca

SEQ ID NO: 1840116 - RNA, 19 nt, Homo sapiens
  misc_RNA (1)...(19): siRNA sense strand
cgugaaggauuuaaacugu

SEQ ID NO: 1840117 - RNA, 19 nt, Homo sapiens
  misc_RNA (1)...(19): siRNA sense strand
ccaagaugguacccuagaa

SEQ ID NO: 1840118 - RNA, 19 nt, Homo sapiens
  misc_RNA (1)...(19): siRNA sense strand
gaagaagaugguauucgaa

SEQ ID NO: 1840119 - RNA, 19 nt, Homo sapiens
  misc_RNA (1)...(19): siRNA sense strand
cacaucaacuggaucauuc

SEQ ID NO: 1840120 - RNA, 19 nt, Homo sapiens
  misc_RNA (1)...(19): siRNA sense strand
cgaaggcuguacgugaaua

SEQ ID NO: 1840121 - RNA, 19 nt, Homo sapiens
  misc_RNA (1)...(19): siRNA sense strand
gguuuaccauugauucuga

SEQ ID NO: 1840122 - RNA, 19 nt, Homo sapiens
  misc_RNA (1)...(19): siRNA sense strand
caaaugccgugugugaaau

SEQ ID NO: 1840123 - RNA, 19 nt, Homo sapiens
  misc_RNA (1)...(19): siRNA sense strand
ucaaugagaugcagaaaau

SEQ ID NO: 1840124 - RNA, 19 nt, Homo sapiens
  misc_RNA (1)...(19): siRNA sense strand
gcucagcaccugucagaga

SEQ ID NO: 1840125 - RNA, 19 nt, Homo sapiens
  misc_RNA (1)...(19): siRNA sense strand
cacaggaacuccgaaguga

SEQ ID NO: 1840126 - RNA, 19 nt, Homo sapiens
  misc_RNA (1)...(19): siRNA sense strand
ggaggcagcauuccuauac

SEQ ID NO: 1840127 - RNA, 19 nt, Homo sapiens
  misc_RNA (1)...(19): siRNA sense strand
uggcacagcucaagaagca

SEQ ID NO: 1840128 - RNA, 19 nt, Homo sapiens
  misc_RNA (1)...(19): siRNA sense strand
gcaagucgaccaacgaaag

SEQ ID NO: 1840129 - RNA, 19 nt, Homo sapiens
  misc_RNA (1)...(19): siRNA sense strand
gaauuuggugucugauauu

SEQ ID NO: 1840130 - RNA, 19 nt, Homo sapiens
  misc_RNA (1)...(19): siRNA sense strand
gagggaauauuugaugaca

SEQ ID NO: 1840131 - RNA, 19 nt, Homo sapiens
  misc_RNA (1)...(19): siRNA sense strand
gugaaauuguccauguaaa

SEQ ID NO: 1840132 - RNA, 19 nt, Homo sapiens
  misc_RNA (1)...(19): siRNA sense strand
aaacagaagaagaaacuug

SEQ ID NO: 1840133 - RNA, 19 nt, Homo sapiens
  misc_RNA (1)...(19): siRNA sense strand
ggggaucauuccuguauua

SEQ ID NO: 1840134 - RNA, 19 nt, Homo sapiens
  misc_RNA (1)...(19): siRNA sense strand
ggagaugagauucuugaga

SEQ ID NO: 1840135 - RNA, 19 nt, Homo sapiens
  misc_RNA (1)...(19): siRNA sense strand
cgccugaaauuucuaauag

SEQ ID NO: 1840136 - RNA, 19 nt, Homo sapiens
  misc_RNA (1)...(19): siRNA sense strand
gagccaagaacauuuaaca

SEQ ID NO: 1840137 - RNA, 19 nt, Homo sapiens
  misc_RNA (1)...(19): siRNA sense strand
gcaguuugcaugagaugaa

SEQ ID NO: 1840138 - RNA, 19 nt, Homo sapiens
  misc_RNA (1)...(19): siRNA sense strand
uagagggaauauuugauga

SEQ ID NO: 1840139 - RNA, 19 nt, Homo sapiens
  misc_RNA (1)...(19): siRNA sense strand
aagcaucaaucagguguuu

SEQ ID NO: 1840140 - RNA, 19 nt, Homo sapiens
  misc_RNA (1)...(19): siRNA sense strand
aaaugcagcugucuucagu

SEQ ID NO: 1840141 - RNA, 19 nt, Homo sapiens
  misc_RNA (1)...(19): siRNA sense strand
gaagugagcacccgaucca

SEQ ID NO: 1840142 - RNA, 19 nt, Homo sapiens
  misc_RNA (1)...(19): siRNA sense strand
ggagagcgcaagcgaggaa

SEQ ID NO: 1840143 - RNA, 19 nt, Homo sapiens
  misc_RNA (1)...(19): siRNA sense strand
aguuugaucuugcucagua

SEQ ID NO: 1840144 - RNA, 19 nt, Homo sapiens
  misc_RNA (1)...(19): siRNA sense strand
ccucacagcugaaacuuua

SEQ ID NO: 1840145 - RNA, 19 nt, Homo sapiens
  misc_RNA (1)...(19): siRNA sense strand
gaacaucugaggaaacuaa

SEQ ID NO: 1840146 - RNA, 19 nt, Homo sapiens
  misc_RNA (1)...(19): siRNA sense strand
ggagacagguggaaaccaa

SEQ ID NO: 1840147 - RNA, 19 nt, Homo sapiens
  misc_RNA (1)...(19): siRNA sense strand
ugaaagaaauacacaccua

SEQ ID NO: 1840148 - RNA, 19 nt, Homo sapiens
  misc_RNA (1)...(19): siRNA sense strand
caaagaacaucugaggaaa

SEQ ID NO: 1840149 - RNA, 19 nt, Homo sapiens
  misc_RNA (1)...(19): siRNA sense strand
ggaaauuggauaugaaaga

SEQ ID NO: 1840150 - RNA, 19 nt, Homo sapiens
  misc_RNA (1)...(19): siRNA sense strand
gcagaggacuacuacagau

SEQ ID NO: 1840151 - RNA, 19 nt, Homo sapiens
  misc_RNA (1)...(19): siRNA sense strand
ccaaagaacaucugaggaa

SEQ ID NO: 1840152 - RNA, 19 nt, Homo sapiens
  misc_RNA (1)...(19): siRNA sense strand
agaugaaggugacaacaaa

SEQ ID NO: 1840153 - RNA, 19 nt, Homo sapiens
  misc_RNA (1)...(19): siRNA sense strand
ggaugauaaucucaagaaa

SEQ ID NO: 1840154 - RNA, 19 nt, Homo sapiens
  misc_RNA (1)...(19): siRNA sense strand
gaggaagaccgccaaagaa

SEQ ID NO: 1840155 - RNA, 19 nt, Homo sapiens
  misc_RNA (1)...(19): siRNA sense strand
gaaacuaagcaugaaagaa

SEQ ID NO: 1840156 - RNA, 19 nt, Homo sapiens
  misc_RNA (1)...(19): siRNA sense strand
aaaccaaaguucgagcuaa

SEQ ID NO: 1840157 - RNA, 19 nt, Homo sapiens
  misc_RNA (1)...(19): siRNA sense strand
gaaaccaaaguucgagcua

SEQ ID NO: 1840158 - RNA, 19 nt, Homo sapiens
  misc_RNA (1)...(19): siRNA sense strand
caacucaacaacauucuau

SEQ ID NO: 1840159 - RNA, 19 nt, Homo sapiens
  misc_RNA (1)...(19): siRNA sense strand
gaagaccgccaaagaacau

SEQ ID NO: 1840160 - RNA, 19 nt, Homo sapiens
  misc_RNA (1)...(19): siRNA sense strand
auacacaccuacauggaaa

SEQ ID NO: 1840161 - RNA, 19 nt, Homo sapiens
  misc_RNA (1)...(19): siRNA sense strand
aaccaaaguucgagcuaaa

SEQ ID NO: 1840162 - RNA, 19 nt, Homo sapiens
  misc_RNA (1)...(19): siRNA sense strand
gcuaaaauccguaagauga

SEQ ID NO: 1840163 - RNA, 19 nt, Homo sapiens
  misc_RNA (1)...(19): siRNA sense strand
ggacuacuacagaugcaaa

SEQ ID NO: 1840164 - RNA, 19 nt, Homo sapiens
  misc_RNA (1)...(19): siRNA sense strand
aaacuaagcaugaaagaac

SEQ ID NO: 1840165 - RNA, 19 nt, Homo sapiens
  misc_RNA (1)...(19): siRNA sense strand
gcacucugcuuggguuauc

SEQ ID NO: 1840166 - RNA, 19 nt, Homo sapiens
  misc_RNA (1)...(19): siRNA sense strand
ugaggaaacuaagcaugaa

SEQ ID NO: 1840167 - RNA, 19 nt, Homo sapiens
  misc_RNA (1)...(19): siRNA sense strand
ggaaacuaagcaugaaaga

SEQ ID NO: 1840168 - RNA, 19 nt, Homo sapiens
  misc_RNA (1)...(19): siRNA sense strand
ugguggaaguccuugguua

SEQ ID NO: 1840169 - RNA, 19 nt, Homo sapiens
  misc_RNA (1)...(19): siRNA sense strand
ggaagaccgccaaagaaca

SEQ ID NO: 1840170 - RNA, 19 nt, Homo sapiens
  misc_RNA (1)...(19): siRNA sense strand
agaggaagaccgccaaaga

SEQ ID NO: 1840171 - RNA, 19 nt, Homo sapiens
  misc_RNA (1)...(19): siRNA sense strand
ggaugauaaucucaagaca

SEQ ID NO: 1840172 - RNA, 19 nt, Homo sapiens
  misc_RNA (1)...(19): siRNA sense strand
ggaugauaaucucaagaca

SEQ ID NO: 1840173 - RNA, 19 nt, Homo sapiens
  misc_RNA (1)...(19): siRNA sense strand
gggacugacuuugguggaa

SEQ ID NO: 1840174 - RNA, 19 nt, Homo sapiens
  misc_RNA (1)...(19): siRNA sense strand
agaaauacacaccuacaug

SEQ ID NO: 1840175 - RNA, 19 nt, Homo sapiens
  misc_RNA (1)...(19): siRNA sense strand
agacaucuuuacuuuaugg

SEQ ID NO: 1840176 - RNA, 19 nt, Homo sapiens
  misc_RNA (1)...(19): siRNA sense strand
gaggaaacuaagcaugaaa

SEQ ID NO: 1840177 - RNA, 19 nt, Homo sapiens
  misc_RNA (1)...(19): siRNA sense strand
guagacaggaaggaauuaa

SEQ ID NO: 1840178 - RNA, 19 nt, Homo sapiens
  misc_RNA (1)...(19): siRNA sense strand
cugcuuggguuaucaauac

SEQ ID NO: 1840179 - RNA, 19 nt, Homo sapiens
  misc_RNA (1)...(19): siRNA sense strand
gaugauaaucucaagaaac

SEQ ID NO: 1840180 - RNA, 19 nt, Homo sapiens
  misc_RNA (1)...(19): siRNA sense strand
ucacagcugaaacuuuaaa

SEQ ID NO: 1840181 - RNA, 19 nt, Homo sapiens
  misc_RNA (1)...(19): siRNA sense strand
guuauaaauuugccaucuc

SEQ ID NO: 1840182 - RNA, 19 nt, Homo sapiens
  misc_RNA (1)...(19): siRNA sense strand
ggcagaggacuacuacaga

SEQ ID NO: 1840183 - RNA, 19 nt, Homo sapiens
  misc_RNA (1)...(19): siRNA sense strand
aagaacaucugaggaaacu

SEQ ID NO: 1840184 - RNA, 19 nt, Homo sapiens
  misc_RNA (1)...(19): siRNA sense strand
gagcuaaaauccguaagau

SEQ ID NO: 1840185 - RNA, 19 nt, Homo sapiens
  misc_RNA (1)...(19): siRNA sense strand
gggcagaggacuacuacag

SEQ ID NO: 1840186 - RNA, 19 nt, Homo sapiens
  misc_RNA (1)...(19): siRNA sense strand
cugaggaaacuaagcauga

SEQ ID NO: 1840187 - RNA, 19 nt, Homo sapiens
  misc_RNA (1)...(19): siRNA sense strand
gcugagcggaggcuguaaa

SEQ ID NO: 1840188 - RNA, 19 nt, Homo sapiens
  misc_RNA (1)...(19): siRNA sense strand
gguuacuuaucauuacugu

SEQ ID NO: 1840189 - RNA, 19 nt, Homo sapiens
  misc_RNA (1)...(19): siRNA sense strand
uaucauuacuguguuucug

SEQ ID NO: 1840190 - RNA, 19 nt, Homo sapiens
  misc_RNA (1)...(19): siRNA sense strand
aaagaaauacacaccuaca

SEQ ID NO: 1840191 - RNA, 19 nt, Homo sapiens
  misc_RNA (1)...(19): siRNA sense strand
ccaacucaacaacauucua

SEQ ID NO: 1840192 - RNA, 19 nt, Homo sapiens
  misc_RNA (1)...(19): siRNA sense strand
uagacaggaaggaauuaaa

SEQ ID NO: 1840193 - RNA, 19 nt, Homo sapiens
  misc_RNA (1)...(19): siRNA sense strand
gaggacuacuacagaugca

SEQ ID NO: 1840194 - RNA, 19 nt, Homo sapiens
  misc_RNA (1)...(19): siRNA sense strand
gagacagguggaaaccaaa

SEQ ID NO: 1840195 - RNA, 19 nt, Homo sapiens
  misc_RNA (1)...(19): siRNA sense strand
gguggaaaccaaaguucga

SEQ ID NO: 1840196 - RNA, 19 nt, Homo sapiens
  misc_RNA (1)...(19): siRNA sense strand
cggagugucugcucuaucc

SEQ ID NO: 1840197 - RNA, 19 nt, Homo sapiens
  misc_RNA (1)...(19): siRNA sense strand
aguccuugguuacuuauca

SEQ ID NO: 1840198 - RNA, 19 nt, Homo sapiens
  misc_RNA (1)...(19): siRNA sense strand
aagaugaaggugacaacaa

SEQ ID NO: 1840199 - RNA, 19 nt, Homo sapiens
  misc_RNA (1)...(19): siRNA sense strand
aauacacaccuacauggaa

SEQ ID NO: 1840200 - RNA, 19 nt, Homo sapiens
  misc_RNA (1)...(19): siRNA sense strand
aaauacacaccuacaugga

SEQ ID NO: 1840201 - RNA, 19 nt, Homo sapiens
  misc_RNA (1)...(19): siRNA sense strand
ggugucagaggcagaggaa

SEQ ID NO: 1840202 - RNA, 19 nt, Homo sapiens
  misc_RNA (1)...(19): siRNA sense strand
ccuugguuacuuaucauua

SEQ ID NO: 1840203 - RNA, 19 nt, Homo sapiens
  misc_RNA (1)...(19): siRNA sense strand
caucugaggaaacuaagca

SEQ ID NO: 1840204 - RNA, 19 nt, Homo sapiens
  misc_RNA (1)...(19): siRNA sense strand
ccagccaccuccuccaacu

SEQ ID NO: 1840205 - RNA, 19 nt, Homo sapiens
  misc_RNA (1)...(19): siRNA sense strand
ccucagcggaugauaaucu

SEQ ID NO: 1840206 - RNA, 19 nt, Homo sapiens
  misc_RNA (1)...(19): siRNA sense strand
ccucagcggaugauaaucu

SEQ ID NO: 1840207 - RNA, 19 nt, Homo sapiens
  misc_RNA (1)...(19): siRNA sense strand
ccucagcggaugauaaucu

SEQ ID NO: 1840208 - RNA, 19 nt, Homo sapiens
  misc_RNA (1)...(19): siRNA sense strand
cguagacaggaaggaauua

SEQ ID NO: 1840209 - RNA, 19 nt, Homo sapiens
  misc_RNA (1)...(19): siRNA sense strand
gcauuaaccugcccacugu

SEQ ID NO: 1840210 - RNA, 19 nt, Homo sapiens
  misc_RNA (1)...(19): siRNA sense strand
gaucaaguaugccaaagac

SEQ ID NO: 1840211 - RNA, 19 nt, Homo sapiens
  misc_RNA (1)...(19): siRNA sense strand
ccaagaggcucggcacaga

SEQ ID NO: 1840212 - RNA, 19 nt, Homo sapiens
  misc_RNA (1)...(19): siRNA sense strand
guccgucgcuuccagauug

SEQ ID NO: 1840213 - RNA, 19 nt, Homo sapiens
  misc_RNA (1)...(19): siRNA sense strand
gaagccgccuauaccaaga

SEQ ID NO: 1840214 - RNA, 19 nt, Homo sapiens
  misc_RNA (1)...(19): siRNA sense strand
gggccgauguucucaggaa

SEQ ID NO: 1840215 - RNA, 19 nt, Homo sapiens
  misc_RNA (1)...(19): siRNA sense strand
acaagugccuggugaucaa

SEQ ID NO: 1840216 - RNA, 19 nt, Homo sapiens
  misc_RNA (1)...(19): siRNA sense strand
gcuuccagauugcucagua

SEQ ID NO: 1840217 - RNA, 19 nt, Homo sapiens
  misc_RNA (1)...(19): siRNA sense strand
agaaggaggucgaggugau

SEQ ID NO: 1840218 - RNA, 19 nt, Homo sapiens
  misc_RNA (1)...(19): siRNA sense strand
gaaggaggucgaggugauu

SEQ ID NO: 1840219 - RNA, 19 nt, Homo sapiens
  misc_RNA (1)...(19): siRNA sense strand
ccagauugcucaguacaag

SEQ ID NO: 1840220 - RNA, 19 nt, Homo sapiens
  misc_RNA (1)...(19): siRNA sense strand
gggcagauccaggugauuc

SEQ ID NO: 1840221 - RNA, 19 nt, Homo sapiens
  misc_RNA (1)...(19): siRNA sense strand
caaguaccacuccgugugu

SEQ ID NO: 1840222 - RNA, 19 nt, Homo sapiens
  misc_RNA (1)...(19): siRNA sense strand
ugucggcucugcuacuuca

SEQ ID NO: 1840223 - RNA, 19 nt, Homo sapiens
  misc_RNA (1)...(19): siRNA sense strand
ggugaucaaguaugccaaa

SEQ ID NO: 1840224 - RNA, 19 nt, Homo sapiens
  misc_RNA (1)...(19): siRNA sense strand
gggaagccgccuauaccaa

SEQ ID NO: 1840225 - RNA, 19 nt, Homo sapiens
  misc_RNA (1)...(19): siRNA sense strand
ggccgauguucucaggaaa

SEQ ID NO: 1840226 - RNA, 19 nt, Homo sapiens
  misc_RNA (1)...(19): siRNA sense strand
ugacggcggugugcaugga

SEQ ID NO: 1840227 - RNA, 19 nt, Homo sapiens
  misc_RNA (1)...(19): siRNA sense strand
guacaagugccuggugauc

SEQ ID NO: 1840228 - RNA, 19 nt, Homo sapiens
  misc_RNA (1)...(19): siRNA sense strand
aauuguggcugcacuggau

SEQ ID NO: 1840229 - RNA, 19 nt, Homo sapiens
  misc_RNA (1)...(19): siRNA sense strand
cggcucugcuacuucaaga

SEQ ID NO: 1840230 - RNA, 19 nt, Homo sapiens
  misc_RNA (1)...(19): siRNA sense strand
ccgggaagaccguaauugu

SEQ ID NO: 1840231 - RNA, 19 nt, Homo sapiens
  misc_RNA (1)...(19): siRNA sense strand
ggccggacaacaaagagaa

SEQ ID NO: 1840232 - RNA, 19 nt, Homo sapiens
  misc_RNA (1)...(19): siRNA sense strand
ccaaagacacucgcuacag

SEQ ID NO: 1840233 - RNA, 19 nt, Homo sapiens
  misc_RNA (1)...(19): siRNA sense strand
cgggaagaccguaauugug

SEQ ID NO: 1840234 - RNA, 19 nt, Homo sapiens
  misc_RNA (1)...(19): siRNA sense strand
gacgagaacuagagaaaua

SEQ ID NO: 1840235 - RNA, 19 nt, Homo sapiens
  misc_RNA (1)...(19): siRNA sense strand
gcagaagcccugaaagaaa

SEQ ID NO: 1840236 - RNA, 19 nt, Homo sapiens
  misc_RNA (1)...(19): siRNA sense strand
caaauucggcuaccacuuu

SEQ ID NO: 1840237 - RNA, 19 nt, Homo sapiens
  misc_RNA (1)...(19): siRNA sense strand
gaaauaccgugaccuggau

SEQ ID NO: 1840238 - RNA, 19 nt, Homo sapiens
  misc_RNA (1)...(19): siRNA sense strand
gcaacaaaguggaaaugga

SEQ ID NO: 1840239 - RNA, 19 nt, Homo sapiens
  misc_RNA (1)...(19): siRNA sense strand
gcucuuggaucacuuggaa

SEQ ID NO: 1840240 - RNA, 19 nt, Homo sapiens
  misc_RNA (1)...(19): siRNA sense strand
acgcaacacuucucaaauu

SEQ ID NO: 1840241 - RNA, 19 nt, Homo sapiens
  misc_RNA (1)...(19): siRNA sense strand
gaggaagccuuggcaaaug

SEQ ID NO: 1840242 - RNA, 19 nt, Homo sapiens
  misc_RNA (1)...(19): siRNA sense strand
ugauuaaacccacacaaua

SEQ ID NO: 1840243 - RNA, 19 nt, Homo sapiens
  misc_RNA (1)...(19): siRNA sense strand
gaagaaguuaaccucaaua

SEQ ID NO: 1840244 - RNA, 19 nt, Homo sapiens
  misc_RNA (1)...(19): siRNA sense strand
uagaagcccucccauacaa

SEQ ID NO: 1840245 - RNA, 19 nt, Homo sapiens
  misc_RNA (1)...(19): siRNA sense strand
acucauaugugaagaaguu

SEQ ID NO: 1840246 - RNA, 19 nt, Homo sapiens
  misc_RNA (1)...(19): siRNA sense strand
aaauucggcuaccacuuua

SEQ ID NO: 1840247 - RNA, 19 nt, Homo sapiens
  misc_RNA (1)...(19): siRNA sense strand
caacagacguagaggaaac

SEQ ID NO: 1840248 - RNA, 19 nt, Homo sapiens
  misc_RNA (1)...(19): siRNA sense strand
ugaagaaguuaaccucaau

SEQ ID NO: 1840249 - RNA, 19 nt, Homo sapiens
  misc_RNA (1)...(19): siRNA sense strand
gaauccaacuucauuucug

SEQ ID NO: 1840250 - RNA, 19 nt, Homo sapiens
  misc_RNA (1)...(19): siRNA sense strand
ggaggaagccuuggcaaau

SEQ ID NO: 1840251 - RNA, 19 nt, Homo sapiens
  misc_RNA (1)...(19): siRNA sense strand
acacuucucugguggaaau

SEQ ID NO: 1840252 - RNA, 19 nt, Homo sapiens
  misc_RNA (1)...(19): siRNA sense strand
gcagcuccaucaugaacaa

SEQ ID NO: 1840253 - RNA, 19 nt, Homo sapiens
  misc_RNA (1)...(19): siRNA sense strand
ugaccuggaugaagaugaa

SEQ ID NO: 1840254 - RNA, 19 nt, Homo sapiens
  misc_RNA (1)...(19): siRNA sense strand
gaacaacgacccaaaacuu

SEQ ID NO: 1840255 - RNA, 19 nt, Homo sapiens
  misc_RNA (1)...(19): siRNA sense strand
gcaaugaugaacaacaaug

SEQ ID NO: 1840256 - RNA, 19 nt, Homo sapiens
  misc_RNA (1)...(19): siRNA sense strand
ccaacgcaaugaugaacaa

SEQ ID NO: 1840257 - RNA, 19 nt, Homo sapiens
  misc_RNA (1)...(19): siRNA sense strand
cgacgaagaaccaaauuca

SEQ ID NO: 1840258 - RNA, 19 nt, Homo sapiens
  misc_RNA (1)...(19): siRNA sense strand
caacacuucucugguggaa

SEQ ID NO: 1840259 - RNA, 19 nt, Homo sapiens
  misc_RNA (1)...(19): siRNA sense strand
gguagaagcccucccauac

SEQ ID NO: 1840260 - RNA, 19 nt, Homo sapiens
  misc_RNA (1)...(19): siRNA sense strand
gagcugaggacccuggaaa

SEQ ID NO: 1840261 - RNA, 19 nt, Homo sapiens
  misc_RNA (1)...(19): siRNA sense strand
aaacgcaacacuucucaaa

SEQ ID NO: 1840262 - RNA, 19 nt, Homo sapiens
  misc_RNA (1)...(19): siRNA sense strand
gaaacgcuggaacggauaa

SEQ ID NO: 1840263 - RNA, 19 nt, Homo sapiens
  misc_RNA (1)...(19): siRNA sense strand
uaaagaacaacgacccaaa

SEQ ID NO: 1840264 - RNA, 19 nt, Homo sapiens
  misc_RNA (1)...(19): siRNA sense strand
ugcacacgcucaugaguaa

SEQ ID NO: 1840265 - RNA, 19 nt, Homo sapiens
  misc_RNA (1)...(19): siRNA sense strand
cagaagcccugaaagaaaa

SEQ ID NO: 1840266 - RNA, 19 nt, Homo sapiens
  misc_RNA (1)...(19): siRNA sense strand
gauuaaacccacacaauac

SEQ ID NO: 1840267 - RNA, 19 nt, Homo sapiens
  misc_RNA (1)...(19): siRNA sense strand
ggcaaaugcuucagaugca

SEQ ID NO: 1840268 - RNA, 19 nt, Homo sapiens
  misc_RNA (1)...(19): siRNA sense strand
gggcucaacagcgugauua

SEQ ID NO: 1840269 - RNA, 19 nt, Homo sapiens
  misc_RNA (1)...(19): siRNA sense strand
gagcuggacccugauaaug

SEQ ID NO: 1840270 - RNA, 19 nt, Homo sapiens
  misc_RNA (1)...(19): siRNA sense strand
gaaagaaaacucauaugug

SEQ ID NO: 1840271 - RNA, 19 nt, Homo sapiens
  misc_RNA (1)...(19): siRNA sense strand
ggaaacgcuggaacggaua

SEQ ID NO: 1840272 - RNA, 19 nt, Homo sapiens
  misc_RNA (1)...(19): siRNA sense strand
aaauggagauugugagcau

SEQ ID NO: 1840273 - RNA, 19 nt, Homo sapiens
  misc_RNA (1)...(19): siRNA sense strand
agcagcagcuccaucauga

SEQ ID NO: 1840274 - RNA, 19 nt, Homo sapiens
  misc_RNA (1)...(19): siRNA sense strand
guacagacgagaacuagag

SEQ ID NO: 1840275 - RNA, 19 nt, Homo sapiens
  misc_RNA (1)...(19): siRNA sense strand
guagaagcccucccauaca

SEQ ID NO: 1840276 - RNA, 19 nt, Homo sapiens
  misc_RNA (1)...(19): siRNA sense strand
aagcaaaggaguuuaagga

SEQ ID NO: 1840277 - RNA, 19 nt, Homo sapiens
  misc_RNA (1)...(19): siRNA sense strand
ccucaaggcauaugcagaa

SEQ ID NO: 1840278 - RNA, 19 nt, Homo sapiens
  misc_RNA (1)...(19): siRNA sense strand
gaaaggucuggguuccuaa

SEQ ID NO: 1840279 - RNA, 19 nt, Homo sapiens
  misc_RNA (1)...(19): siRNA sense strand
gcuggacccugauaaugca

SEQ ID NO: 1840280 - RNA, 19 nt, Homo sapiens
  misc_RNA (1)...(19): siRNA sense strand
caaugaugaacaacaauga

SEQ ID NO: 1840281 - RNA, 19 nt, Homo sapiens
  misc_RNA (1)...(19): siRNA sense strand
gaugagcuggacccugaua

SEQ ID NO: 1840282 - RNA, 19 nt, Homo sapiens
  misc_RNA (1)...(19): siRNA sense strand
gcucaacagcgugauuaaa

SEQ ID NO: 1840283 - RNA, 19 nt, Homo sapiens
  misc_RNA (1)...(19): siRNA sense strand
cagacgagaacuagagaaa

SEQ ID NO: 1840284 - RNA, 19 nt, Homo sapiens
  misc_RNA (1)...(19): siRNA sense strand
gaagacacugaauguggaa

SEQ ID NO: 1840285 - RNA, 19 nt, Homo sapiens
  misc_RNA (1)...(19): siRNA sense strand
cgaagaaccaaauucaaca

SEQ ID NO: 1840286 - RNA, 19 nt, Homo sapiens
  misc_RNA (1)...(19): siRNA sense strand
ugaggacccuggaaaauga

SEQ ID NO: 1840287 - RNA, 19 nt, Homo sapiens
  misc_RNA (1)...(19): siRNA sense strand
acgcaaugaugaacaacaa

SEQ ID NO: 1840288 - RNA, 19 nt, Homo sapiens
  misc_RNA (1)...(19): siRNA sense strand
cgcaacacuucucaaauuc

SEQ ID NO: 1840289 - RNA, 19 nt, Homo sapiens
  misc_RNA (1)...(19): siRNA sense strand
gaggagcucuuggaucacu

SEQ ID NO: 1840290 - RNA, 19 nt, Homo sapiens
  misc_RNA (1)...(19): siRNA sense strand
cguaugcccuugcugagau

SEQ ID NO: 1840291 - RNA, 19 nt, Homo sapiens
  misc_RNA (1)...(19): siRNA sense strand
aaacucauaugugaagaag

SEQ ID NO: 1840292 - RNA, 19 nt, Homo sapiens
  misc_RNA (1)...(19): siRNA sense strand
gugauuaaacccacacaau

SEQ ID NO: 1840293 - RNA, 19 nt, Homo sapiens
  misc_RNA (1)...(19): siRNA sense strand
ggaauccaacuucauuucu

SEQ ID NO: 1840294 - RNA, 19 nt, Homo sapiens
  misc_RNA (1)...(19): siRNA sense strand
caaauucaacagacguaga

SEQ ID NO: 1840295 - RNA, 19 nt, Homo sapiens
  misc_RNA (1)...(19): siRNA sense strand
uggaacggauaaagaacaa

SEQ ID NO: 1840296 - RNA, 19 nt, Homo sapiens
  misc_RNA (1)...(19): siRNA sense strand
caaaguggaaauggagauu

SEQ ID NO: 1840297 - RNA, 19 nt, Homo sapiens
  misc_RNA (1)...(19): siRNA sense strand
gcuccaucaugaacaagga

SEQ ID NO: 1840298 - RNA, 19 nt, Homo sapiens
  misc_RNA (1)...(19): siRNA sense strand
gaagcccucccauacaaca

SEQ ID NO: 1840299 - RNA, 19 nt, Homo sapiens
  misc_RNA (1)...(19): siRNA sense strand
gacgaagaaccaaauucaa

SEQ ID NO: 1840300 - RNA, 19 nt, Homo sapiens
  misc_RNA (1)...(19): siRNA sense strand
gaugaacaacaaugaccuu

SEQ ID NO: 1840301 - RNA, 19 nt, Homo sapiens
  misc_RNA (1)...(19): siRNA sense strand
agaaggaucagaccaccaa

SEQ ID NO: 1840302 - RNA, 19 nt, Homo sapiens
  misc_RNA (1)...(19): siRNA sense strand
aaagcaagcaaaggaguuu

SEQ ID NO: 1840303 - RNA, 19 nt, Homo sapiens
  misc_RNA (1)...(19): siRNA sense strand
gaagaaccaaauucaacag

SEQ ID NO: 1840304 - RNA, 19 nt, Homo sapiens
  misc_RNA (1)...(19): siRNA sense strand
ggagauugugagcauguug

SEQ ID NO: 1840305 - RNA, 19 nt, Homo sapiens
  misc_RNA (1)...(19): siRNA sense strand
guaaccagcaguacuacca

SEQ ID NO: 1840306 - RNA, 19 nt, Homo sapiens
  misc_RNA (1)...(19): siRNA sense strand
aaguggaaauggagauugu

SEQ ID NO: 1840307 - RNA, 19 nt, Homo sapiens
  misc_RNA (1)...(19): siRNA sense strand
gaaauccuuggagcccuaa

SEQ ID NO: 1840308 - RNA, 19 nt, Homo sapiens
  misc_RNA (1)...(19): siRNA sense strand
accgugaccuggaugaaga

SEQ ID NO: 1840309 - RNA, 19 nt, Homo sapiens
  misc_RNA (1)...(19): siRNA sense strand
guggaaauggagauuguga

SEQ ID NO: 1840310 - RNA, 19 nt, Homo sapiens
  misc_RNA (1)...(19): siRNA sense strand
ggaguuuaaggaccgagaa

SEQ ID NO: 1840311 - RNA, 19 nt, Homo sapiens
  misc_RNA (1)...(19): siRNA sense strand
gggcaacaaaguggaaaug

SEQ ID NO: 1840312 - RNA, 19 nt, Homo sapiens
  misc_RNA (1)...(19): siRNA sense strand
ugcagaagcccugaaagaa

SEQ ID NO: 1840313 - RNA, 19 nt, Homo sapiens
  misc_RNA (1)...(19): siRNA sense strand
cucaauaauauccggaaua

SEQ ID NO: 1840314 - RNA, 19 nt, Homo sapiens
  misc_RNA (1)...(19): siRNA sense strand
gcagcagcuccaucaugaa

SEQ ID NO: 1840315 - RNA, 19 nt, Homo sapiens
  misc_RNA (1)...(19): siRNA sense strand
gcaagcaaaggaguuuaag

SEQ ID NO: 1840316 - RNA, 19 nt, Homo sapiens
  misc_RNA (1)...(19): siRNA sense strand
agaacucugugacauugca

SEQ ID NO: 1840317 - RNA, 19 nt, Homo sapiens
  misc_RNA (1)...(19): siRNA sense strand
guuuaaggaccgagaagau

SEQ ID NO: 1840318 - RNA, 19 nt, Homo sapiens
  misc_RNA (1)...(19): siRNA sense strand
gaaaacucauaugugaaga

SEQ ID NO: 1840319 - RNA, 19 nt, Homo sapiens
  misc_RNA (1)...(19): siRNA sense strand
ggagcucuuggaucacuug

SEQ ID NO: 1840320 - RNA, 19 nt, Homo sapiens
  misc_RNA (1)...(19): siRNA sense strand
uggaggaagccuuggcaaa

SEQ ID NO: 1840321 - RNA, 19 nt, Homo sapiens
  misc_RNA (1)...(19): siRNA sense strand
gugccggaguggugucuag

SEQ ID NO: 1840322 - RNA, 19 nt, Homo sapiens
  misc_RNA (1)...(19): siRNA sense strand
ccacuuuacccagcaagga

SEQ ID NO: 1840323 - RNA, 19 nt, Homo sapiens
  misc_RNA (1)...(19): siRNA sense strand
ugguagaagcccucccaua

SEQ ID NO: 1840324 - RNA, 19 nt, Homo sapiens
  misc_RNA (1)...(19): siRNA sense strand
guaugcccuugcugagaug

SEQ ID NO: 1840325 - RNA, 19 nt, Homo sapiens
  misc_RNA (1)...(19): siRNA sense strand
augcagaagcccugaaaga

SEQ ID NO: 1840326 - RNA, 19 nt, Homo sapiens
  misc_RNA (1)...(19): siRNA sense strand
ccucaauaauauccggaau

SEQ ID NO: 1840327 - RNA, 19 nt, Homo sapiens
  misc_RNA (1)...(19): siRNA sense strand
uagaagaacuggaacaauu

SEQ ID NO: 1840328 - RNA, 19 nt, Homo sapiens
  misc_RNA (1)...(19): siRNA sense strand
gaaggaaggcuuuggauug

SEQ ID NO: 1840329 - RNA, 19 nt, Homo sapiens
  misc_RNA (1)...(19): siRNA sense strand
gcagaaagaugaaaagaaa

SEQ ID NO: 1840330 - RNA, 19 nt, Homo sapiens
  misc_RNA (1)...(19): siRNA sense strand
gagauaaacuaacaguaga

SEQ ID NO: 1840331 - RNA, 19 nt, Homo sapiens
  misc_RNA (1)...(19): siRNA sense strand
gaauacaacuagccagaga

SEQ ID NO: 1840332 - RNA, 19 nt, Homo sapiens
  misc_RNA (1)...(19): siRNA sense strand
uaaauucuguccaacguuu

SEQ ID NO: 1840333 - RNA, 19 nt, Homo sapiens
  misc_RNA (1)...(19): siRNA sense strand
gcaguucuguggcugguuu

SEQ ID NO: 1840334 - RNA, 19 nt, Homo sapiens
  misc_RNA (1)...(19): siRNA sense strand
ggaaauagcagcauaucca

SEQ ID NO: 1840335 - RNA, 19 nt, Homo sapiens
  misc_RNA (1)...(19): siRNA sense strand
caggguaaaugaacugaaa

SEQ ID NO: 1840336 - RNA, 19 nt, Homo sapiens
  misc_RNA (1)...(19): siRNA sense strand
ggaggaacaggguaaauga

SEQ ID NO: 1840337 - RNA, 19 nt, Homo sapiens
  misc_RNA (1)...(19): siRNA sense strand
uguaaaggauggaguaaau

SEQ ID NO: 1840338 - RNA, 19 nt, Homo sapiens
  misc_RNA (1)...(19): siRNA sense strand
cacaucggcugcaucauuu

SEQ ID NO: 1840339 - RNA, 19 nt, Homo sapiens
  misc_RNA (1)...(19): siRNA sense strand
gauaaugcucagaacuuua

SEQ ID NO: 1840340 - RNA, 19 nt, Homo sapiens
  misc_RNA (1)...(19): siRNA sense strand
gaacccauuugcuucacuu

SEQ ID NO: 1840341 - RNA, 19 nt, Homo sapiens
  misc_RNA (1)...(19): siRNA sense strand
aauaacagcagcagugaua

SEQ ID NO: 1840342 - RNA, 19 nt, Homo sapiens
  misc_RNA (1)...(19): siRNA sense strand
agacguggauggaauacaa

SEQ ID NO: 1840343 - RNA, 19 nt, Homo sapiens
  misc_RNA (1)...(19): siRNA sense strand
gaacuggaacaauuucaau

SEQ ID NO: 1840344 - RNA, 19 nt, Homo sapiens
  misc_RNA (1)...(19): siRNA sense strand
ugauaaugcucagaacuuu

SEQ ID NO: 1840345 - RNA, 19 nt, Homo sapiens
  misc_RNA (1)...(19): siRNA sense strand
ccagagauauuccaauguc

SEQ ID NO: 1840346 - RNA, 19 nt, Homo sapiens
  misc_RNA (1)...(19): siRNA sense strand
cagcagccuucagguaaua

SEQ ID NO: 1840347 - RNA, 19 nt, Homo sapiens
  misc_RNA (1)...(19): siRNA sense strand
uaaaagauauggagguuug

SEQ ID NO: 1840348 - RNA, 19 nt, Homo sapiens
  misc_RNA (1)...(19): siRNA sense strand
ggaaggaaggcuuuggauu

SEQ ID NO: 1840349 - RNA, 19 nt, Homo sapiens
  misc_RNA (1)...(19): siRNA sense strand
uaauagacguggauggaau

SEQ ID NO: 1840350 - RNA, 19 nt, Homo sapiens
  misc_RNA (1)...(19): siRNA sense strand
ucacaucggcugcaucauu

SEQ ID NO: 1840351 - RNA, 19 nt, Homo sapiens
  misc_RNA (1)...(19): siRNA sense strand
guucagguaucucuacuuc

SEQ ID NO: 1840352 - RNA, 19 nt, Homo sapiens
  misc_RNA (1)...(19): siRNA sense strand
gcaccugcauuuggauuug

SEQ ID NO: 1840353 - RNA, 19 nt, Homo sapiens
  misc_RNA (1)...(19): siRNA sense strand
uaccauaacuucuuaacca

SEQ ID NO: 1840354 - RNA, 19 nt, Homo sapiens
  misc_RNA (1)...(19): siRNA sense strand
ucagguaucucuacuucug

SEQ ID NO: 1840355 - RNA, 19 nt, Homo sapiens
  misc_RNA (1)...(19): siRNA sense strand
gcagcagccuucagguaau

SEQ ID NO: 1840356 - RNA, 19 nt, Homo sapiens
  misc_RNA (1)...(19): siRNA sense strand
gaaauuuacucugggaaaa

SEQ ID NO: 1840357 - RNA, 19 nt, Homo sapiens
  misc_RNA (1)...(19): siRNA sense strand
ggaaggcuuuggauugucu

SEQ ID NO: 1840358 - RNA, 19 nt, Homo sapiens
  misc_RNA (1)...(19): siRNA sense strand
gcuuugcucucugauguaa

SEQ ID NO: 1840359 - RNA, 19 nt, Homo sapiens
  misc_RNA (1)...(19): siRNA sense strand
cauauccacuucucuguca

SEQ ID NO: 1840360 - RNA, 19 nt, Homo sapiens
  misc_RNA (1)...(19): siRNA sense strand
gcagugauaaugcucagaa

SEQ ID NO: 1840361 - RNA, 19 nt, Homo sapiens
  misc_RNA (1)...(19): siRNA sense strand
uaacaggaaggaaggcuuu

SEQ ID NO: 1840362 - RNA, 19 nt, Homo sapiens
  misc_RNA (1)...(19): siRNA sense strand
ggaaggaauuguaaaagau

SEQ ID NO: 1840363 - RNA, 19 nt, Homo sapiens
  misc_RNA (1)...(19): siRNA sense strand
gaacaauuucaauccaaga

SEQ ID NO: 1840364 - RNA, 19 nt, Homo sapiens
  misc_RNA (1)...(19): siRNA sense strand
gaagaacuggaacaauuuc

SEQ ID NO: 1840365 - RNA, 19 nt, Homo sapiens
  misc_RNA (1)...(19): siRNA sense strand
uagcuuugcucucugaugu

SEQ ID NO: 1840366 - RNA, 19 nt, Homo sapiens
  misc_RNA (1)...(19): siRNA sense strand
gagcuucaacuaacaggaa

SEQ ID NO: 1840367 - RNA, 19 nt, Homo sapiens
  misc_RNA (1)...(19): siRNA sense strand
acaacuagccagagauauu

SEQ ID NO: 1840368 - RNA, 19 nt, Homo sapiens
  misc_RNA (1)...(19): siRNA sense strand
agaagaacuggaacaauuu

SEQ ID NO: 1840369 - RNA, 19 nt, Homo sapiens
  misc_RNA (1)...(19): siRNA sense strand
gaacaggguaaaugaacug

SEQ ID NO: 1840370 - RNA, 19 nt, Homo sapiens
  misc_RNA (1)...(19): siRNA sense strand
ggaacaggguaaaugaacu

SEQ ID NO: 1840371 - RNA, 19 nt, Homo sapiens
  misc_RNA (1)...(19): siRNA sense strand
uaaaggauggaguaaauca

SEQ ID NO: 1840372 - RNA, 19 nt, Homo sapiens
  misc_RNA (1)...(19): siRNA sense strand
ggaauugaggcuugaauac

SEQ ID NO: 1840373 - RNA, 19 nt, Homo sapiens
  misc_RNA (1)...(19): siRNA sense strand
cagcagagaucaagaaaag

SEQ ID NO: 1840374 - RNA, 19 nt, Homo sapiens
  misc_RNA (1)...(19): siRNA sense strand
ggccauuugucaauucuuc

SEQ ID NO: 1840375 - RNA, 19 nt, Homo sapiens
  misc_RNA (1)...(19): siRNA sense strand
gcagcaucauugcaacaga

SEQ ID NO: 1840376 - RNA, 19 nt, Homo sapiens
  misc_RNA (1)...(19): siRNA sense strand
caacuagccagagauauuc

SEQ ID NO: 1840377 - RNA, 19 nt, Homo sapiens
  misc_RNA (1)...(19): siRNA sense strand
auaaaucaauggaggaaca

SEQ ID NO: 1840378 - RNA, 19 nt, Homo sapiens
  misc_RNA (1)...(19): siRNA sense strand
gcugcugccucuucuggaa

SEQ ID NO: 1840379 - RNA, 19 nt, Homo sapiens
  misc_RNA (1)...(19): siRNA sense strand
cugaugagcagaaagauga

SEQ ID NO: 1840380 - RNA, 19 nt, Homo sapiens
  misc_RNA (1)...(19): siRNA sense strand
cagcagcagccuucaggua

SEQ ID NO: 1840381 - RNA, 19 nt, Homo sapiens
  misc_RNA (1)...(19): siRNA sense strand
agagauaaacuaacaguag

SEQ ID NO: 1840382 - RNA, 19 nt, Homo sapiens
  misc_RNA (1)...(19): siRNA sense strand
gcugcagccucuaccaguu

SEQ ID NO: 1840383 - RNA, 19 nt, Homo sapiens
  misc_RNA (1)...(19): siRNA sense strand
gcagucaagcagcaacauu

SEQ ID NO: 1840384 - RNA, 19 nt, Homo sapiens
  misc_RNA (1)...(19): siRNA sense strand
aaggaaggcuuuggauugu

SEQ ID NO: 1840385 - RNA, 19 nt, Homo sapiens
  misc_RNA (1)...(19): siRNA sense strand
cagcaucauugcaacagau

SEQ ID NO: 1840386 - RNA, 19 nt, Homo sapiens
  misc_RNA (1)...(19): siRNA sense strand
ucaagcagcaucauugcaa

SEQ ID NO: 1840387 - RNA, 19 nt, Homo sapiens
  misc_RNA (1)...(19): siRNA sense strand
gugauaaugcucagaacuu

SEQ ID NO: 1840388 - RNA, 19 nt, Homo sapiens
  misc_RNA (1)...(19): siRNA sense strand
gggcagcagagaucaagaa

SEQ ID NO: 1840389 - RNA, 19 nt, Homo sapiens
  misc_RNA (1)...(19): siRNA sense strand
gaagucacaucggcugcau

SEQ ID NO: 1840390 - RNA, 19 nt, Homo sapiens
  misc_RNA (1)...(19): siRNA sense strand
uaacagcagcagugauaau

SEQ ID NO: 1840391 - RNA, 19 nt, Homo sapiens
  misc_RNA (1)...(19): siRNA sense strand
gaggaacaggguaaaugaa

SEQ ID NO: 1840392 - RNA, 19 nt, Homo sapiens
  misc_RNA (1)...(19): siRNA sense strand
auacaacuagccagagaua

SEQ ID NO: 1840393 - RNA, 19 nt, Homo sapiens
  misc_RNA (1)...(19): siRNA sense strand
acccagagauaaacuaaca

SEQ ID NO: 1840394 - RNA, 19 nt, Homo sapiens
  misc_RNA (1)...(19): siRNA sense strand
ucaagcagcaacauuuaug

SEQ ID NO: 1840395 - RNA, 19 nt, Homo sapiens
  misc_RNA (1)...(19): siRNA sense strand
cagucaagcagcaacauuu

SEQ ID NO: 1840396 - RNA, 19 nt, Homo sapiens
  misc_RNA (1)...(19): siRNA sense strand
ggcuuuggauugucugaga

SEQ ID NO: 1840397 - RNA, 19 nt, Homo sapiens
  misc_RNA (1)...(19): siRNA sense strand
agccagagauauuccaaug

SEQ ID NO: 1840398 - RNA, 19 nt, Homo sapiens
  misc_RNA (1)...(19): siRNA sense strand
agucaagcagcaacauuua

SEQ ID NO: 1840399 - RNA, 19 nt, Homo sapiens
  misc_RNA (1)...(19): siRNA sense strand
caauggaggaacaggguaa

SEQ ID NO: 1840400 - RNA, 19 nt, Homo sapiens
  misc_RNA (1)...(19): siRNA sense strand
cagaggaauugaggcuuga

SEQ ID NO: 1840401 - RNA, 19 nt, Homo sapiens
  misc_RNA (1)...(19): siRNA sense strand
ucgccaggcuuuccaguca

SEQ ID NO: 1840402 - RNA, 19 nt, Homo sapiens
  misc_RNA (1)...(19): siRNA sense strand
gccauccaguuucuccaaa

SEQ ID NO: 1840403 - RNA, 19 nt, Homo sapiens
  misc_RNA (1)...(19): siRNA sense strand
ugucaauucuuccuucaag

SEQ ID NO: 1840404 - RNA, 19 nt, Homo sapiens
  misc_RNA (1)...(19): siRNA sense strand
gcucucugauguaaaggau

SEQ ID NO: 1840405 - RNA, 19 nt, Homo sapiens
  misc_RNA (1)...(19): siRNA sense strand
cuacuucugcuccagcuuu

SEQ ID NO: 1840406 - RNA, 19 nt, Homo sapiens
  misc_RNA (1)...(19): siRNA sense strand
gcuugaauaccauaacuuc

SEQ ID NO: 1840407 - RNA, 19 nt, Homo sapiens
  misc_RNA (1)...(19): siRNA sense strand
ucuggaacuucuaaauguu

SEQ ID NO: 1840408 - RNA, 19 nt, Homo sapiens
  misc_RNA (1)...(19): siRNA sense strand
uuucuaagccauccaguga

SEQ ID NO: 1840409 - RNA, 19 nt, Homo sapiens
  misc_RNA (1)...(19): siRNA sense strand
ggauuuggcagcagucaag

SEQ ID NO: 1840410 - RNA, 19 nt, Homo sapiens
  misc_RNA (1)...(19): siRNA sense strand
gauguaaaggauggaguaa

SEQ ID NO: 1840411 - RNA, 19 nt, Homo sapiens
  misc_RNA (1)...(19): siRNA sense strand
agccauauuucaguucuuu

SEQ ID NO: 1840412 - RNA, 19 nt, Homo sapiens
  misc_RNA (1)...(19): siRNA sense strand
ugauguaaaggauggagua

SEQ ID NO: 1840413 - RNA, 19 nt, Homo sapiens
  misc_RNA (1)...(19): siRNA sense strand
ucuaagccauccagugaca

SEQ ID NO: 1840414 - RNA, 19 nt, Homo sapiens
  misc_RNA (1)...(19): siRNA sense strand
gggcucacauucucacacu

SEQ ID NO: 1840415 - RNA, 19 nt, Homo sapiens
  misc_RNA (1)...(19): siRNA sense strand
gcccugcagcuuccaguuu

SEQ ID NO: 1840416 - RNA, 19 nt, Homo sapiens
  misc_RNA (1)...(19): siRNA sense strand
ugggaagccugaagucaca

SEQ ID NO: 1840417 - RNA, 19 nt, Homo sapiens
  misc_RNA (1)...(19): siRNA sense strand
gcuuuggauugucugagaa

SEQ ID NO: 1840418 - RNA, 19 nt, Homo sapiens
  misc_RNA (1)...(19): siRNA sense strand
gguaauaauagacguggau

SEQ ID NO: 1840419 - RNA, 19 nt, Homo sapiens
  misc_RNA (1)...(19): siRNA sense strand
agaaauuuacucugggaaa

SEQ ID NO: 1840420 - RNA, 19 nt, Homo sapiens
  misc_RNA (1)...(19): siRNA sense strand
cagagauauuccaauguca

SEQ ID NO: 1840421 - RNA, 19 nt, Homo sapiens
  misc_RNA (1)...(19): siRNA sense strand
gagauauuccaaugucauc

SEQ ID NO: 1840422 - RNA, 19 nt, Homo sapiens
  misc_RNA (1)...(19): siRNA sense strand
gccuucagguaauaauaga

SEQ ID NO: 1840423 - RNA, 19 nt, Homo sapiens
  misc_RNA (1)...(19): siRNA sense strand
aauagacguggauggaaua

SEQ ID NO: 1840424 - RNA, 19 nt, Homo sapiens
  misc_RNA (1)...(19): siRNA sense strand
cucuggaacuucuaaaugu

SEQ ID NO: 1840425 - RNA, 19 nt, Homo sapiens
  misc_RNA (1)...(19): siRNA sense strand
guagaagaacuggaacaau

SEQ ID NO: 1840426 - RNA, 19 nt, Homo sapiens
  misc_RNA (1)...(19): siRNA sense strand
cacauucucacacugcuuu

SEQ ID NO: 1840427 - RNA, 19 nt, Homo sapiens
  misc_RNA (1)...(19): siRNA sense strand
ggaccaaggugcacaugaa

SEQ ID NO: 1840428 - RNA, 19 nt, Homo sapiens
  misc_RNA (1)...(19): siRNA sense strand
caagaaagauguugugaac

SEQ ID NO: 1840429 - RNA, 19 nt, Homo sapiens
  misc_RNA (1)...(19): siRNA sense strand
ccaagaagauuguaaaugc

SEQ ID NO: 1840430 - RNA, 19 nt, Homo sapiens
  misc_RNA (1)...(19): siRNA sense strand
gauuguaaaugccaagaaa

SEQ ID NO: 1840431 - RNA, 19 nt, Homo sapiens
  misc_RNA (1)...(19): siRNA sense strand
gaacugcgcgguccuguca

SEQ ID NO: 1840432 - RNA, 19 nt, Homo sapiens
  misc_RNA (1)...(19): siRNA sense strand
ggagaacgacgcccuguau

SEQ ID NO: 1840433 - RNA, 19 nt, Homo sapiens
  misc_RNA (1)...(19): siRNA sense strand
gcgaucagcugcccuacau

SEQ ID NO: 1840434 - RNA, 19 nt, Homo sapiens
  misc_RNA (1)...(19): siRNA sense strand
guaaaugccaagaaagaug

SEQ ID NO: 1840435 - RNA, 19 nt, Homo sapiens
  misc_RNA (1)...(19): siRNA sense strand
gaacgacgcccuguaugag

SEQ ID NO: 1840436 - RNA, 19 nt, Homo sapiens
  misc_RNA (1)...(19): siRNA sense strand
ccaaggugcacaugaaaug

SEQ ID NO: 1840437 - RNA, 19 nt, Homo sapiens
  misc_RNA (1)...(19): siRNA sense strand
gaacugggagacugagauc

SEQ ID NO: 1840438 - RNA, 19 nt, Homo sapiens
  misc_RNA (1)...(19): siRNA sense strand
gaccaaggugcacaugaaa

SEQ ID NO: 1840439 - RNA, 19 nt, Homo sapiens
  misc_RNA (1)...(19): siRNA sense strand
caacccagaagcccaagaa

SEQ ID NO: 1840440 - RNA, 19 nt, Homo sapiens
  misc_RNA (1)...(19): siRNA sense strand
ccaagaaagauguugugaa

SEQ ID NO: 1840441 - RNA, 19 nt, Homo sapiens
  misc_RNA (1)...(19): siRNA sense strand
gcaacgaggccgagaucug

SEQ ID NO: 1840442 - RNA, 19 nt, Homo sapiens
  misc_RNA (1)...(19): siRNA sense strand
uaaaugccaagaaagaugu

SEQ ID NO: 1840443 - RNA, 19 nt, Homo sapiens
  misc_RNA (1)...(19): siRNA sense strand
agaacgacgcccuguauga

SEQ ID NO: 1840444 - RNA, 19 nt, Homo sapiens
  misc_RNA (1)...(19): siRNA sense strand
acgacgcccuguaugagua

SEQ ID NO: 1840445 - RNA, 19 nt, Homo sapiens
  misc_RNA (1)...(19): siRNA sense strand
cagaagcccaagaagauug

SEQ ID NO: 1840446 - RNA, 19 nt, Homo sapiens
  misc_RNA (1)...(19): siRNA sense strand
cccagaagcccaagaagau

SEQ ID NO: 1840447 - RNA, 19 nt, Homo sapiens
  misc_RNA (1)...(19): siRNA sense strand
ccagaagcccaagaagauu

SEQ ID NO: 1840448 - RNA, 19 nt, Homo sapiens
  misc_RNA (1)...(19): siRNA sense strand
gagaacgacgcccuguaug

SEQ ID NO: 1840449 - RNA, 19 nt, Homo sapiens
  misc_RNA (1)...(19): siRNA sense strand
acaagaacugggagacuga

SEQ ID NO: 1840450 - RNA, 19 nt, Homo sapiens
  misc_RNA (1)...(19): siRNA sense strand
ccgcaucgccuacaagaac

SEQ ID NO: 1840451 - RNA, 19 nt, Homo sapiens
  misc_RNA (1)...(19): siRNA sense strand
gcccaagaagauuguaaau

SEQ ID NO: 1840452 - RNA, 19 nt, Homo sapiens
  misc_RNA (1)...(19): siRNA sense strand
gccaagaaagauguuguga

SEQ ID NO: 1840453 - RNA, 19 nt, Homo sapiens
  misc_RNA (1)...(19): siRNA sense strand
gaaagaagcuuagcccuua

SEQ ID NO: 1840454 - RNA, 19 nt, Homo sapiens
  misc_RNA (1)...(19): siRNA sense strand
gauaauaccugcugcauaa

SEQ ID NO: 1840455 - RNA, 19 nt, Homo sapiens
  misc_RNA (1)...(19): siRNA sense strand
gaacauacauuacggauau

SEQ ID NO: 1840456 - RNA, 19 nt, Homo sapiens
  misc_RNA (1)...(19): siRNA sense strand
gaagagaaguacaguauaa

SEQ ID NO: 1840457 - RNA, 19 nt, Homo sapiens
  misc_RNA (1)...(19): siRNA sense strand
gaacaaaggcuaagagaaa

SEQ ID NO: 1840458 - RNA, 19 nt, Homo sapiens
  misc_RNA (1)...(19): siRNA sense strand
gaacggaacuaucauguau

SEQ ID NO: 1840459 - RNA, 19 nt, Homo sapiens
  misc_RNA (1)...(19): siRNA sense strand
ggauacagcuccaaauauu

SEQ ID NO: 1840460 - RNA, 19 nt, Homo sapiens
  misc_RNA (1)...(19): siRNA sense strand
ggaauuaccuaaaucagaa

SEQ ID NO: 1840461 - RNA, 19 nt, Homo sapiens
  misc_RNA (1)...(19): siRNA sense strand
gcaaagacagcucauaaua

SEQ ID NO: 1840462 - RNA, 19 nt, Homo sapiens
  misc_RNA (1)...(19): siRNA sense strand
gaaguuggauuggugaaua

SEQ ID NO: 1840463 - RNA, 19 nt, Homo sapiens
  misc_RNA (1)...(19): siRNA sense strand
gcacaaacuuucuuauuca

SEQ ID NO: 1840464 - RNA, 19 nt, Homo sapiens
  misc_RNA (1)...(19): siRNA sense strand
caaauagucuaccuacuuu

SEQ ID NO: 1840465 - RNA, 19 nt, Homo sapiens
  misc_RNA (1)...(19): siRNA sense strand
ccaagucucuucuucauuu

SEQ ID NO: 1840466 - RNA, 19 nt, Homo sapiens
  misc_RNA (1)...(19): siRNA sense strand
ggagagagcccauggaauu

SEQ ID NO: 1840467 - RNA, 19 nt, Homo sapiens
  misc_RNA (1)...(19): siRNA sense strand
ugaaugaccuagauaauga

SEQ ID NO: 1840468 - RNA, 19 nt, Homo sapiens
  misc_RNA (1)...(19): siRNA sense strand
aaagaagccuuaaacagua

SEQ ID NO: 1840469 - RNA, 19 nt, Homo sapiens
  misc_RNA (1)...(19): siRNA sense strand
ccuguaaacucucaaauaa

SEQ ID NO: 1840470 - RNA, 19 nt, Homo sapiens
  misc_RNA (1)...(19): siRNA sense strand
gaacaccucuuucugaucu

SEQ ID NO: 1840471 - RNA, 19 nt, Homo sapiens
  misc_RNA (1)...(19): siRNA sense strand
gaggagaccuugacuagug

SEQ ID NO: 1840472 - RNA, 19 nt, Homo sapiens
  misc_RNA (1)...(19): siRNA sense strand
ggaaggaauucaaagagaa

SEQ ID NO: 1840473 - RNA, 19 nt, Homo sapiens
  misc_RNA (1)...(19): siRNA sense strand
gcacauggcugcuauuugc

SEQ ID NO: 1840474 - RNA, 19 nt, Homo sapiens
  misc_RNA (1)...(19): siRNA sense strand
ggaauuugguggagaagaa

SEQ ID NO: 1840475 - RNA, 19 nt, Homo sapiens
  misc_RNA (1)...(19): siRNA sense strand
gcaggaagaugugcuugua

SEQ ID NO: 1840476 - RNA, 19 nt, Homo sapiens
  misc_RNA (1)...(19): siRNA sense strand
gaacucaucucaauacacu

SEQ ID NO: 1840477 - RNA, 19 nt, Homo sapiens
  misc_RNA (1)...(19): siRNA sense strand
gaaaucagaaagaagcuua

SEQ ID NO: 1840478 - RNA, 19 nt, Homo sapiens
  misc_RNA (1)...(19): siRNA sense strand
aagaagagaugcuauuuga

SEQ ID NO: 1840479 - RNA, 19 nt, Homo sapiens
  misc_RNA (1)...(19): siRNA sense strand
gcaaguguauucaaacaau

SEQ ID NO: 1840480 - RNA, 19 nt, Homo sapiens
  misc_RNA (1)...(19): siRNA sense strand
gaaaacaaauucccaacua

SEQ ID NO: 1840481 - RNA, 19 nt, Homo sapiens
  misc_RNA (1)...(19): siRNA sense strand
agacaagcaucuguuauua

SEQ ID NO: 1840482 - RNA, 19 nt, Homo sapiens
  misc_RNA (1)...(19): siRNA sense strand
gaaggagacuugcaguuuc

SEQ ID NO: 1840483 - RNA, 19 nt, Homo sapiens
  misc_RNA (1)...(19): siRNA sense strand
ggaagacacuaaucgaaug

SEQ ID NO: 1840484 - RNA, 19 nt, Homo sapiens
  misc_RNA (1)...(19): siRNA sense strand
cauaagaagugcugucuga

SEQ ID NO: 1840485 - RNA, 19 nt, Homo sapiens
  misc_RNA (1)...(19): siRNA sense strand
gaagacagcaagaaggaua

SEQ ID NO: 1840486 - RNA, 19 nt, Homo sapiens
  misc_RNA (1)...(19): siRNA sense strand
caaagacagcucauaauaa

SEQ ID NO: 1840487 - RNA, 19 nt, Homo sapiens
  misc_RNA (1)...(19): siRNA sense strand
ggaaguccaugccaaucua

SEQ ID NO: 1840488 - RNA, 19 nt, Homo sapiens
  misc_RNA (1)...(19): siRNA sense strand
ggauauggaucucuggaaa

SEQ ID NO: 1840489 - RNA, 19 nt, Homo sapiens
  misc_RNA (1)...(19): siRNA sense strand
cagcauaucuuuaaauugg

SEQ ID NO: 1840490 - RNA, 19 nt, Homo sapiens
  misc_RNA (1)...(19): siRNA sense strand
gaucagcauuccaucuuaa

SEQ ID NO: 1840491 - RNA, 19 nt, Homo sapiens
  misc_RNA (1)...(19): siRNA sense strand
cagcagaaauggagagauu

SEQ ID NO: 1840492 - RNA, 19 nt, Homo sapiens
  misc_RNA (1)...(19): siRNA sense strand
agacagagcugggaugauu

SEQ ID NO: 1840493 - RNA, 19 nt, Homo sapiens
  misc_RNA (1)...(19): siRNA sense strand
aaacauugcuagacaaguu

SEQ ID NO: 1840494 - RNA, 19 nt, Homo sapiens
  misc_RNA (1)...(19): siRNA sense strand
gugauugagucucuuauaa

SEQ ID NO: 1840495 - RNA, 19 nt, Homo sapiens
  misc_RNA (1)...(19): siRNA sense strand
caaagaagccuuaaacagu

SEQ ID NO: 1840496 - RNA, 19 nt, Homo sapiens
  misc_RNA (1)...(19): siRNA sense strand
gcauuuaucucugggauga

SEQ ID NO: 1840497 - RNA, 19 nt, Homo sapiens
  misc_RNA (1)...(19): siRNA sense strand
caacaggacugcuucaucu

SEQ ID NO: 1840498 - RNA, 19 nt, Homo sapiens
  misc_RNA (1)...(19): siRNA sense strand
gagaagauuugagacauga

SEQ ID NO: 1840499 - RNA, 19 nt, Homo sapiens
  misc_RNA (1)...(19): siRNA sense strand
gcucagagaauuugaauau

SEQ ID NO: 1840500 - RNA, 19 nt, Homo sapiens
  misc_RNA (1)...(19): siRNA sense strand
auacaaggcucgucucaaa

SEQ ID NO: 1840501 - RNA, 19 nt, Homo sapiens
  misc_RNA (1)...(19): siRNA sense strand
gaacagauucgccagcaaa

SEQ ID NO: 1840502 - RNA, 19 nt, Homo sapiens
  misc_RNA (1)...(19): siRNA sense strand
ggagccugcuuucauuaua

SEQ ID NO: 1840503 - RNA, 19 nt, Homo sapiens
  misc_RNA (1)...(19): siRNA sense strand
gauggagccugcuuucauu

SEQ ID NO: 1840504 - RNA, 19 nt, Homo sapiens
  misc_RNA (1)...(19): siRNA sense strand
agacgacgcuuugaagaua

SEQ ID NO: 1840505 - RNA, 19 nt, Homo sapiens
  misc_RNA (1)...(19): siRNA sense strand
gaaggaggagcuaacauuu

SEQ ID NO: 1840506 - RNA, 19 nt, Homo sapiens
  misc_RNA (1)...(19): siRNA sense strand
gauuccagcucaucaguuu

SEQ ID NO: 1840507 - RNA, 19 nt, Homo sapiens
  misc_RNA (1)...(19): siRNA sense strand
gcaaagccuucaagacaau

SEQ ID NO: 1840508 - RNA, 19 nt, Homo sapiens
  misc_RNA (1)...(19): siRNA sense strand
uagcagagguaaaggaauu

SEQ ID NO: 1840509 - RNA, 19 nt, Homo sapiens
  misc_RNA (1)...(19): siRNA sense strand
gcccuuagcucccugaaga

SEQ ID NO: 1840510 - RNA, 19 nt, Homo sapiens
  misc_RNA (1)...(19): siRNA sense strand
gaguuugggucaacacuuu

SEQ ID NO: 1840511 - RNA, 19 nt, Homo sapiens
  misc_RNA (1)...(19): siRNA sense strand
cgacagcacuuacaagauc

SEQ ID NO: 1840512 - RNA, 19 nt, Homo sapiens
  misc_RNA (1)...(19): siRNA sense strand
gagccugcuuucauuauaa

SEQ ID NO: 1840513 - RNA, 19 nt, Homo sapiens
  misc_RNA (1)...(19): siRNA sense strand
acacaaguauccaaagaaa

SEQ ID NO: 1840514 - RNA, 19 nt, Homo sapiens
  misc_RNA (1)...(19): siRNA sense strand
gaagguauuuaucgaaagu

SEQ ID NO: 1840515 - RNA, 19 nt, Homo sapiens
  misc_RNA (1)...(19): siRNA sense strand
acacaauggucacaucuuu

SEQ ID NO: 1840516 - RNA, 19 nt, Homo sapiens
  misc_RNA (1)...(19): siRNA sense strand
ccaaagaaacaaacuauug

SEQ ID NO: 1840517 - RNA, 19 nt, Homo sapiens
  misc_RNA (1)...(19): siRNA sense strand
ggaacuaucauguauucua

SEQ ID NO: 1840518 - RNA, 19 nt, Homo sapiens
  misc_RNA (1)...(19): siRNA sense strand
ugaaaugcauggacuguau

SEQ ID NO: 1840519 - RNA, 19 nt, Homo sapiens
  misc_RNA (1)...(19): siRNA sense strand
caagaaggauacacuagug

SEQ ID NO: 1840520 - RNA, 19 nt, Homo sapiens
  misc_RNA (1)...(19): siRNA sense strand
gggaagcucuuacuuugga

SEQ ID NO: 1840521 - RNA, 19 nt, Homo sapiens
  misc_RNA (1)...(19): siRNA sense strand
gcaccuccuugcuugauaa

SEQ ID NO: 1840522 - RNA, 19 nt, Homo sapiens
  misc_RNA (1)...(19): siRNA sense strand
gaauauagaacugaaggua

SEQ ID NO: 1840523 - RNA, 19 nt, Homo sapiens
  misc_RNA (1)...(19): siRNA sense strand
gaacaagaggaauauagaa

SEQ ID NO: 1840524 - RNA, 19 nt, Homo sapiens
  misc_RNA (1)...(19): siRNA sense strand
gaagagaugcuauuugaag

SEQ ID NO: 1840525 - RNA, 19 nt, Homo sapiens
  misc_RNA (1)...(19): siRNA sense strand
cgggaugacuccauugaua

SEQ ID NO: 1840526 - RNA, 19 nt, Homo sapiens
  misc_RNA (1)...(19): siRNA sense strand
ggaaggagaagauuugaga

SEQ ID NO: 1840527 - RNA, 19 nt, Homo sapiens
  misc_RNA (1)...(19): siRNA sense strand
gaagaacgucgcaggauga

SEQ ID NO: 1840528 - RNA, 19 nt, Homo sapiens
  misc_RNA (1)...(19): siRNA sense strand
ggagaagauuugagacaug

SEQ ID NO: 1840529 - RNA, 19 nt, Homo sapiens
  misc_RNA (1)...(19): siRNA sense strand
cagcaucagugcccaguuu

SEQ ID NO: 1840530 - RNA, 19 nt, Homo sapiens
  misc_RNA (1)...(19): siRNA sense strand
cagaagguauuuaucgaaa

SEQ ID NO: 1840531 - RNA, 19 nt, Homo sapiens
  misc_RNA (1)...(19): siRNA sense strand
aaggagagauuaccaaguu

SEQ ID NO: 1840532 - RNA, 19 nt, Homo sapiens
  misc_RNA (1)...(19): siRNA sense strand
gagacaagcaucuguuauu

SEQ ID NO: 1840533 - RNA, 19 nt, Homo sapiens
  misc_RNA (1)...(19): siRNA sense strand
caugaaugcucuaaaugaa

SEQ ID NO: 1840534 - RNA, 19 nt, Homo sapiens
  misc_RNA (1)...(19): siRNA sense strand
gaucaacucucccgaacuc

SEQ ID NO: 1840535 - RNA, 19 nt, Homo sapiens
  misc_RNA (1)...(19): siRNA sense strand
gaauacuguucuucuuuga

SEQ ID NO: 1840536 - RNA, 19 nt, Homo sapiens
  misc_RNA (1)...(19): siRNA sense strand
cagauggucuacagaauug

SEQ ID NO: 1840537 - RNA, 19 nt, Homo sapiens
  misc_RNA (1)...(19): siRNA sense strand
gaaauggagagauuacuau

SEQ ID NO: 1840538 - RNA, 19 nt, Homo sapiens
  misc_RNA (1)...(19): siRNA sense strand
aaagacagcucauaauaac

SEQ ID NO: 1840539 - RNA, 19 nt, Homo sapiens
  misc_RNA (1)...(19): siRNA sense strand
ggauugcucugcaggaaga

SEQ ID NO: 1840540 - RNA, 19 nt, Homo sapiens
  misc_RNA (1)...(19): siRNA sense strand
acuaguggauguuguauuu

SEQ ID NO: 1840541 - RNA, 19 nt, Homo sapiens
  misc_RNA (1)...(19): siRNA sense strand
gcuaaacacugagaaggaa

SEQ ID NO: 1840542 - RNA, 19 nt, Homo sapiens
  misc_RNA (1)...(19): siRNA sense strand
cgaauuagccgugaaaguu

SEQ ID NO: 1840543 - RNA, 19 nt, Homo sapiens
  misc_RNA (1)...(19): siRNA sense strand
caaauauucuuuccaggau

SEQ ID NO: 1840544 - RNA, 19 nt, Homo sapiens
  misc_RNA (1)...(19): siRNA sense strand
cagaggagcuuagagauuc

SEQ ID NO: 1840545 - RNA, 19 nt, Homo sapiens
  misc_RNA (1)...(19): siRNA sense strand
cauuguagcucuucugaga

SEQ ID NO: 1840546 - RNA, 19 nt, Homo sapiens
  misc_RNA (1)...(19): siRNA sense strand
gguaucagcuggcacaaca

SEQ ID NO: 1840547 - RNA, 19 nt, Homo sapiens
  misc_RNA (1)...(19): siRNA sense strand
guucagugaugucuuggua

SEQ ID NO: 1840548 - RNA, 19 nt, Homo sapiens
  misc_RNA (1)...(19): siRNA sense strand
guacaggacaucaguaaga

SEQ ID NO: 1840549 - RNA, 19 nt, Homo sapiens
  misc_RNA (1)...(19): siRNA sense strand
gcucauaaacuacauugaa

SEQ ID NO: 1840550 - RNA, 19 nt, Homo sapiens
  misc_RNA (1)...(19): siRNA sense strand
gaauguagccuguaaacuc

SEQ ID NO: 1840551 - RNA, 19 nt, Homo sapiens
  misc_RNA (1)...(19): siRNA sense strand
gcgcaaagccuucaagaca

SEQ ID NO: 1840552 - RNA, 19 nt, Homo sapiens
  misc_RNA (1)...(19): siRNA sense strand
gcagauggucuacagaauu

SEQ ID NO: 1840553 - RNA, 19 nt, Homo sapiens
  misc_RNA (1)...(19): siRNA sense strand
gaucgaaucucugaugaaa

SEQ ID NO: 1840554 - RNA, 19 nt, Homo sapiens
  misc_RNA (1)...(19): siRNA sense strand
ucgaaucucugaugaaaga

SEQ ID NO: 1840555 - RNA, 19 nt, Homo sapiens
  misc_RNA (1)...(19): siRNA sense strand
gaugaucgcugaguucaag

SEQ ID NO: 1840556 - RNA, 19 nt, Homo sapiens
  misc_RNA (1)...(19): siRNA sense strand
gaugaaagaggacgcgaaa

SEQ ID NO: 1840557 - RNA, 19 nt, Homo sapiens
  misc_RNA (1)...(19): siRNA sense strand
gcauugacuucgacgaguu

SEQ ID NO: 1840558 - RNA, 19 nt, Homo sapiens
  misc_RNA (1)...(19): siRNA sense strand
cggaggagcuggcugagau

SEQ ID NO: 1840559 - RNA, 19 nt, Homo sapiens
  misc_RNA (1)...(19): siRNA sense strand
gaaagacggcgacaagaac

SEQ ID NO: 1840560 - RNA, 19 nt, Homo sapiens
  misc_RNA (1)...(19): siRNA sense strand
gaugaaagacggcgacaag

SEQ ID NO: 1840561 - RNA, 19 nt, Homo sapiens
  misc_RNA (1)...(19): siRNA sense strand
ugaaagacggcgacaagaa

SEQ ID NO: 1840562 - RNA, 19 nt, Homo sapiens
  misc_RNA (1)...(19): siRNA sense strand
gguccuaccucagcgaaga

SEQ ID NO: 1840563 - RNA, 19 nt, Homo sapiens
  misc_RNA (1)...(19): siRNA sense strand
gaaugcagacggcuacauc

SEQ ID NO: 1840564 - RNA, 19 nt, Homo sapiens
  misc_RNA (1)...(19): siRNA sense strand
gacgaguuccugaagauga

SEQ ID NO: 1840565 - RNA, 19 nt, Homo sapiens
  misc_RNA (1)...(19): siRNA sense strand
ugacauguuugaugcugau

SEQ ID NO: 1840566 - RNA, 19 nt, Homo sapiens
  misc_RNA (1)...(19): siRNA sense strand
gauggagggcgugcaguaa

SEQ ID NO: 1840567 - RNA, 19 nt, Homo sapiens
  misc_RNA (1)...(19): siRNA sense strand
gaagagaugaucgcugagu

SEQ ID NO: 1840568 - RNA, 19 nt, Homo sapiens
  misc_RNA (1)...(19): siRNA sense strand
ugaaagaggacgcgaaagg

SEQ ID NO: 1840569 - RNA, 19 nt, Homo sapiens
  misc_RNA (1)...(19): siRNA sense strand
aagagaugaucgcugaguu

SEQ ID NO: 1840570 - RNA, 19 nt, Homo sapiens
  misc_RNA (1)...(19): siRNA sense strand
gagaugaucgcugaguuca

SEQ ID NO: 1840571 - RNA, 19 nt, Homo sapiens
  misc_RNA (1)...(19): siRNA sense strand
gccgagugcuuccgcaucu

SEQ ID NO: 1840572 - RNA, 19 nt, Homo sapiens
  misc_RNA (1)...(19): siRNA sense strand
gaggagcuggcugagauuu

SEQ ID NO: 1840573 - RNA, 19 nt, Homo sapiens
  misc_RNA (1)...(19): siRNA sense strand
cgacuucgaggaguucuug

SEQ ID NO: 1840574 - RNA, 19 nt, Homo sapiens
  misc_RNA (1)...(19): siRNA sense strand
ugauggagggcgugcagua

SEQ ID NO: 1840575 - RNA, 19 nt, Homo sapiens
  misc_RNA (1)...(19): siRNA sense strand
gccagacacccaccaagga

SEQ ID NO: 1840576 - RNA, 19 nt, Homo sapiens
  misc_RNA (1)...(19): siRNA sense strand
ucgacgaguuccugaagau

SEQ ID NO: 1840577 - RNA, 19 nt, Homo sapiens
  misc_RNA (1)...(19): siRNA sense strand
ggaggagcuggcugagauu

SEQ ID NO: 1840578 - RNA, 19 nt, Homo sapiens
  misc_RNA (1)...(19): siRNA sense strand
ggagcuggacgccaucauc

SEQ ID NO: 1840579 - RNA, 19 nt, Homo sapiens
  misc_RNA (1)...(19): siRNA sense strand
ggagcuggcugagauuuuc

SEQ ID NO: 1840580 - RNA, 19 nt, Homo sapiens
  misc_RNA (1)...(19): siRNA sense strand
gaguugggcacggugauga

SEQ ID NO: 1840581 - RNA, 19 nt, Homo sapiens
  misc_RNA (1)...(19): siRNA sense strand
gcacggugaugaggaugcu

SEQ ID NO: 1840582 - RNA, 19 nt, Homo sapiens
  misc_RNA (1)...(19): siRNA sense strand
cauguuugaugcugauggu

SEQ ID NO: 1840583 - RNA, 19 nt, Homo sapiens
  misc_RNA (1)...(19): siRNA sense strand
ggaguugggcacggugaug

SEQ ID NO: 1840584 - RNA, 19 nt, Homo sapiens
  misc_RNA (1)...(19): siRNA sense strand
ggaagaacaucgaggagaa

SEQ ID NO: 1840585 - RNA, 19 nt, Homo sapiens
  misc_RNA (1)...(19): siRNA sense strand
ccacggagcuggagaagga

SEQ ID NO: 1840586 - RNA, 19 nt, Homo sapiens
  misc_RNA (1)...(19): siRNA sense strand
gcaaggagcuggaggacau

SEQ ID NO: 1840587 - RNA, 19 nt, Homo sapiens
  misc_RNA (1)...(19): siRNA sense strand
ugaagcaggucaagaagga

SEQ ID NO: 1840588 - RNA, 19 nt, Homo sapiens
  misc_RNA (1)...(19): siRNA sense strand
caagaucgaugcggcugaa

SEQ ID NO: 1840589 - RNA, 19 nt, Homo sapiens
  misc_RNA (1)...(19): siRNA sense strand
ggacaugaaccagaagcua

SEQ ID NO: 1840590 - RNA, 19 nt, Homo sapiens
  misc_RNA (1)...(19): siRNA sense strand
gacaugaaccagaagcuau

SEQ ID NO: 1840591 - RNA, 19 nt, Homo sapiens
  misc_RNA (1)...(19): siRNA sense strand
gaacaucgaggagaagucu

SEQ ID NO: 1840592 - RNA, 19 nt, Homo sapiens
  misc_RNA (1)...(19): siRNA sense strand
uggaggacaugaaccagaa

SEQ ID NO: 1840593 - RNA, 19 nt, Homo sapiens
  misc_RNA (1)...(19): siRNA sense strand
ucaagaaggaggacacaga

SEQ ID NO: 1840594 - RNA, 19 nt, Homo sapiens
  misc_RNA (1)...(19): siRNA sense strand
gaggugagggugcagaaga

SEQ ID NO: 1840595 - RNA, 19 nt, Homo sapiens
  misc_RNA (1)...(19): siRNA sense strand
gugggugacuggaggaaga

SEQ ID NO: 1840596 - RNA, 19 nt, Homo sapiens
  misc_RNA (1)...(19): siRNA sense strand
gaaggaggacacagagaag

SEQ ID NO: 1840597 - RNA, 19 nt, Homo sapiens
  misc_RNA (1)...(19): siRNA sense strand
gaaccagaagcuauuugau

SEQ ID NO: 1840598 - RNA, 19 nt, Homo sapiens
  misc_RNA (1)...(19): siRNA sense strand
agaaggaggacacagagaa

SEQ ID NO: 1840599 - RNA, 19 nt, Homo sapiens
  misc_RNA (1)...(19): siRNA sense strand
cggcugaagaggagaagua

SEQ ID NO: 1840600 - RNA, 19 nt, Homo sapiens
  misc_RNA (1)...(19): siRNA sense strand
aggcagagaagcagaacua

SEQ ID NO: 1840601 - RNA, 19 nt, Homo sapiens
  misc_RNA (1)...(19): siRNA sense strand
ugaaccagaagcuauuuga

SEQ ID NO: 1840602 - RNA, 19 nt, Homo sapiens
  misc_RNA (1)...(19): siRNA sense strand
gccggaagaagauguuuga

SEQ ID NO: 1840603 - RNA, 19 nt, Homo sapiens
  misc_RNA (1)...(19): siRNA sense strand
accagaagcuauuugaucu

SEQ ID NO: 1840604 - RNA, 19 nt, Homo sapiens
  misc_RNA (1)...(19): siRNA sense strand
gaagaacaucgaggagaag

SEQ ID NO: 1840605 - RNA, 19 nt, Homo sapiens
  misc_RNA (1)...(19): siRNA sense strand
gaucgaugcggcugaagag

SEQ ID NO: 1840606 - RNA, 19 nt, Homo sapiens
  misc_RNA (1)...(19): siRNA sense strand
acaugaaccagaagcuauu

SEQ ID NO: 1840607 - RNA, 19 nt, Homo sapiens
  misc_RNA (1)...(19): siRNA sense strand
cagagaagcagaacuaccu

SEQ ID NO: 1840608 - RNA, 19 nt, Homo sapiens
  misc_RNA (1)...(19): siRNA sense strand
aaccagaagcuauuugauc

SEQ ID NO: 1840609 - RNA, 19 nt, Homo sapiens
  misc_RNA (1)...(19): siRNA sense strand
cggaagaagauguuugagu

SEQ ID NO: 1840610 - RNA, 19 nt, Homo sapiens
  misc_RNA (1)...(19): siRNA sense strand
cugaagaggagaaguacga

SEQ ID NO: 1840611 - RNA, 19 nt, Homo sapiens
  misc_RNA (1)...(19): siRNA sense strand
caugaaccagaagcuauuu

SEQ ID NO: 1840612 - RNA, 19 nt, Homo sapiens
  misc_RNA (1)...(19): siRNA sense strand
ccauugagaucccuaauuu

SEQ ID NO: 1840613 - RNA, 19 nt, Homo sapiens
  misc_RNA (1)...(19): siRNA sense strand
caaaucaccuccucucuau

SEQ ID NO: 1840614 - RNA, 19 nt, Homo sapiens
  misc_RNA (1)...(19): siRNA sense strand
ggcaucaccugcauuguua

SEQ ID NO: 1840615 - RNA, 19 nt, Homo sapiens
  misc_RNA (1)...(19): siRNA sense strand
ggaggcaacugauagacua

SEQ ID NO: 1840616 - RNA, 19 nt, Homo sapiens
  misc_RNA (1)...(19): siRNA sense strand
ucgcguaccugaugaaauu

SEQ ID NO: 1840617 - RNA, 19 nt, Homo sapiens
  misc_RNA (1)...(19): siRNA sense strand
ccauuggacuguacuuuga

SEQ ID NO: 1840618 - RNA, 19 nt, Homo sapiens
  misc_RNA (1)...(19): siRNA sense strand
cccgacaccugaugccuua

SEQ ID NO: 1840619 - RNA, 19 nt, Homo sapiens
  misc_RNA (1)...(19): siRNA sense strand
ucaaaucaccuccucucua

SEQ ID NO: 1840620 - RNA, 19 nt, Homo sapiens
  misc_RNA (1)...(19): siRNA sense strand
uuugggaagucgacaguua

SEQ ID NO: 1840621 - RNA, 19 nt, Homo sapiens
  misc_RNA (1)...(19): siRNA sense strand
caccguggcugacaagauc

SEQ ID NO: 1840622 - RNA, 19 nt, Homo sapiens
  misc_RNA (1)...(19): siRNA sense strand
ggucacagcacgcuaccaa

SEQ ID NO: 1840623 - RNA, 19 nt, Homo sapiens
  misc_RNA (1)...(19): siRNA sense strand
ugagaucccuaauuucaac

SEQ ID NO: 1840624 - RNA, 19 nt, Homo sapiens
  misc_RNA (1)...(19): siRNA sense strand
uaggaggcauugcucaaau

SEQ ID NO: 1840625 - RNA, 19 nt, Homo sapiens
  misc_RNA (1)...(19): siRNA sense strand
gcauaguucccgacgucua

SEQ ID NO: 1840626 - RNA, 19 nt, Homo sapiens
  misc_RNA (1)...(19): siRNA sense strand
ggagacauaggaggcauug

SEQ ID NO: 1840627 - RNA, 19 nt, Homo sapiens
  misc_RNA (1)...(19): siRNA sense strand
cugacaagauccacagugu

SEQ ID NO: 1840628 - RNA, 19 nt, Homo sapiens
  misc_RNA (1)...(19): siRNA sense strand
ggaggcauugcucaaauca

SEQ ID NO: 1840629 - RNA, 19 nt, Homo sapiens
  misc_RNA (1)...(19): siRNA sense strand
gauuuccgagggagacaua

SEQ ID NO: 1840630 - RNA, 19 nt, Homo sapiens
  misc_RNA (1)...(19): siRNA sense strand
aaucaccuccucucuauuc

SEQ ID NO: 1840631 - RNA, 19 nt, Homo sapiens
  misc_RNA (1)...(19): siRNA sense strand
uggcaucaccugcauuguu

SEQ ID NO: 1840632 - RNA, 19 nt, Homo sapiens
  misc_RNA (1)...(19): siRNA sense strand
ggaagucgacaguuaaaau

SEQ ID NO: 1840633 - RNA, 19 nt, Homo sapiens
  misc_RNA (1)...(19): siRNA sense strand
aaaugguacagacaccuua

SEQ ID NO: 1840634 - RNA, 19 nt, Homo sapiens
  misc_RNA (1)...(19): siRNA sense strand
gaagucgacaguuaaaaug

SEQ ID NO: 1840635 - RNA, 19 nt, Homo sapiens
  misc_RNA (1)...(19): siRNA sense strand
auugagaucccuaauuuca

SEQ ID NO: 1840636 - RNA, 19 nt, Homo sapiens
  misc_RNA (1)...(19): siRNA sense strand
cauaggaggcauugcucaa

SEQ ID NO: 1840637 - RNA, 19 nt, Homo sapiens
  misc_RNA (1)...(19): siRNA sense strand
guguaucgcguaccugaug

SEQ ID NO: 1840638 - RNA, 19 nt, Homo sapiens
  misc_RNA (1)...(19): siRNA sense strand
ggcaacugauagacuacga

SEQ ID NO: 1840639 - RNA, 19 nt, Homo sapiens
  misc_RNA (1)...(19): siRNA sense strand
ugaugaaauuccacaacgu

SEQ ID NO: 1840640 - RNA, 19 nt, Homo sapiens
  misc_RNA (1)...(19): siRNA sense strand
gcaguguggccuccaaucg

SEQ ID NO: 1840641 - RNA, 19 nt, Homo sapiens
  misc_RNA (1)...(19): siRNA sense strand
ugucaucaggcccaacgua

SEQ ID NO: 1840642 - RNA, 19 nt, Homo sapiens
  misc_RNA (1)...(19): siRNA sense strand
caccauggcuguccaaguc

SEQ ID NO: 1840643 - RNA, 19 nt, Homo sapiens
  misc_RNA (1)...(19): siRNA sense strand
cggcagcuguggauacaug

SEQ ID NO: 1840644 - RNA, 19 nt, Homo sapiens
  misc_RNA (1)...(19): siRNA sense strand
ggccuuggaugagcagaug

SEQ ID NO: 1840645 - RNA, 19 nt, Homo sapiens
  misc_RNA (1)...(19): siRNA sense strand
guccugaugcugcugauga

SEQ ID NO: 1840646 - RNA, 19 nt, Homo sapiens
  misc_RNA (1)...(19): siRNA sense strand
auccaggccucgcuucuug

SEQ ID NO: 1840647 - RNA, 19 nt, Homo sapiens
  misc_RNA (1)...(19): siRNA sense strand
gccggcagcuguggauaca

SEQ ID NO: 1840648 - RNA, 19 nt, Homo sapiens
  misc_RNA (1)...(19): siRNA sense strand
gcaccauggcuguccaagu

SEQ ID NO: 1840649 - RNA, 19 nt, Homo sapiens
  misc_RNA (1)...(19): siRNA sense strand
gaaaucagcuucauuccaa

SEQ ID NO: 1840650 - RNA, 19 nt, Homo sapiens
  misc_RNA (1)...(19): siRNA sense strand
gcagacagacucauucuua

SEQ ID NO: 1840651 - RNA, 19 nt, Homo sapiens
  misc_RNA (1)...(19): siRNA sense strand
cggaauaugugaucucuua

SEQ ID NO: 1840652 - RNA, 19 nt, Homo sapiens
  misc_RNA (1)...(19): siRNA sense strand
gggcagagauugaaaauua

SEQ ID NO: 1840653 - RNA, 19 nt, Homo sapiens
  misc_RNA (1)...(19): siRNA sense strand
gcagaaaccuguacaaacu

SEQ ID NO: 1840654 - RNA, 19 nt, Homo sapiens
  misc_RNA (1)...(19): siRNA sense strand
gaucaagccuucagagugu

SEQ ID NO: 1840655 - RNA, 19 nt, Homo sapiens
  misc_RNA (1)...(19): siRNA sense strand
gagcgcaucuguacucuug

SEQ ID NO: 1840656 - RNA, 19 nt, Homo sapiens
  misc_RNA (1)...(19): siRNA sense strand
caaagucgauuucauucuu

SEQ ID NO: 1840657 - RNA, 19 nt, Homo sapiens
  misc_RNA (1)...(19): siRNA sense strand
gaacccagcuaccgaauac

SEQ ID NO: 1840658 - RNA, 19 nt, Homo sapiens
  misc_RNA (1)...(19): siRNA sense strand
caauaucacuccaacagaa

SEQ ID NO: 1840659 - RNA, 19 nt, Homo sapiens
  misc_RNA (1)...(19): siRNA sense strand
caggacaacuggacuauau

SEQ ID NO: 1840660 - RNA, 19 nt, Homo sapiens
  misc_RNA (1)...(19): siRNA sense strand
ggagagaccauccuuguug

SEQ ID NO: 1840661 - RNA, 19 nt, Homo sapiens
  misc_RNA (1)...(19): siRNA sense strand
ccucaagggcuacaauuua

SEQ ID NO: 1840662 - RNA, 19 nt, Homo sapiens
  misc_RNA (1)...(19): siRNA sense strand
gagagaccauccuuguuga

SEQ ID NO: 1840663 - RNA, 19 nt, Homo sapiens
  misc_RNA (1)...(19): siRNA sense strand
caaguguacugugauauga

SEQ ID NO: 1840664 - RNA, 19 nt, Homo sapiens
  misc_RNA (1)...(19): siRNA sense strand
uggaauaucugccgucaug

SEQ ID NO: 1840665 - RNA, 19 nt, Homo sapiens
  misc_RNA (1)...(19): siRNA sense strand
cagacagacucauucuuaa

SEQ ID NO: 1840666 - RNA, 19 nt, Homo sapiens
  misc_RNA (1)...(19): siRNA sense strand
ggacaggaccucauacaca

SEQ ID NO: 1840667 - RNA, 19 nt, Homo sapiens
  misc_RNA (1)...(19): siRNA sense strand
ugagcaauaucaugaggua

SEQ ID NO: 1840668 - RNA, 19 nt, Homo sapiens
  misc_RNA (1)...(19): siRNA sense strand
ccacucaguucacaacaga

SEQ ID NO: 1840669 - RNA, 19 nt, Homo sapiens
  misc_RNA (1)...(19): siRNA sense strand
ggagcauggugguauaaga

SEQ ID NO: 1840670 - RNA, 19 nt, Homo sapiens
  misc_RNA (1)...(19): siRNA sense strand
caaaagacaucacaauuag

SEQ ID NO: 1840671 - RNA, 19 nt, Homo sapiens
  misc_RNA (1)...(19): siRNA sense strand
gucaugaacucacagcaaa

SEQ ID NO: 1840672 - RNA, 19 nt, Homo sapiens
  misc_RNA (1)...(19): siRNA sense strand
ccaaaagacaucacaauua

SEQ ID NO: 1840673 - RNA, 19 nt, Homo sapiens
  misc_RNA (1)...(19): siRNA sense strand
ggauagagacaaugauguu

SEQ ID NO: 1840674 - RNA, 19 nt, Homo sapiens
  misc_RNA (1)...(19): siRNA sense strand
ggacaacccuguggaucug

SEQ ID NO: 1840675 - RNA, 19 nt, Homo sapiens
  misc_RNA (1)...(19): siRNA sense strand
gggaaacagugguucugaa

SEQ ID NO: 1840676 - RNA, 19 nt, Homo sapiens
  misc_RNA (1)...(19): siRNA sense strand
cucaagggcuacaauuuaa

SEQ ID NO: 1840677 - RNA, 19 nt, Homo sapiens
  misc_RNA (1)...(19): siRNA sense strand
ggcaucaacugguaccauu

SEQ ID NO: 1840678 - RNA, 19 nt, Homo sapiens
  misc_RNA (1)...(19): siRNA sense strand
cagaauggccaaacugauu

SEQ ID NO: 1840679 - RNA, 19 nt, Homo sapiens
  misc_RNA (1)...(19): siRNA sense strand
gaagucaccagacaaagug

SEQ ID NO: 1840680 - RNA, 19 nt, Homo sapiens
  misc_RNA (1)...(19): siRNA sense strand
ggagaacuacgucauuguu

SEQ ID NO: 1840681 - RNA, 19 nt, Homo sapiens
  misc_RNA (1)...(19): siRNA sense strand
gccaacugcugccaagaaa

SEQ ID NO: 1840682 - RNA, 19 nt, Homo sapiens
  misc_RNA (1)...(19): siRNA sense strand
ccaaggacaggaccucaua

SEQ ID NO: 1840683 - RNA, 19 nt, Homo sapiens
  misc_RNA (1)...(19): siRNA sense strand
gaauaucugccgucaugaa

SEQ ID NO: 1840684 - RNA, 19 nt, Homo sapiens
  misc_RNA (1)...(19): siRNA sense strand
ggucucaccuacaacauca

SEQ ID NO: 1840685 - RNA, 19 nt, Homo sapiens
  misc_RNA (1)...(19): siRNA sense strand
gaacuccggugcccaacag

SEQ ID NO: 1840686 - RNA, 19 nt, Homo sapiens
  misc_RNA (1)...(19): siRNA sense strand
gagcauggugguauaagaa

SEQ ID NO: 1840687 - RNA, 19 nt, Homo sapiens
  misc_RNA (1)...(19): siRNA sense strand
ugaagaacaugcucauugg

SEQ ID NO: 1840688 - RNA, 19 nt, Homo sapiens
  misc_RNA (1)...(19): siRNA sense strand
ggaaagcgagcgcaucugu

SEQ ID NO: 1840689 - RNA, 19 nt, Homo sapiens
  misc_RNA (1)...(19): siRNA sense strand
gcaaccagccacagaguau

SEQ ID NO: 1840690 - RNA, 19 nt, Homo sapiens
  misc_RNA (1)...(19): siRNA sense strand
guauggaguuggaauaucu

SEQ ID NO: 1840691 - RNA, 19 nt, Homo sapiens
  misc_RNA (1)...(19): siRNA sense strand
cagaaaggguccagagaca

SEQ ID NO: 1840692 - RNA, 19 nt, Homo sapiens
  misc_RNA (1)...(19): siRNA sense strand
cgauggcagugacggaaua

SEQ ID NO: 1840693 - RNA, 19 nt, Homo sapiens
  misc_RNA (1)...(19): siRNA sense strand
gaaagcgagcgcaucugua

SEQ ID NO: 1840694 - RNA, 19 nt, Homo sapiens
  misc_RNA (1)...(19): siRNA sense strand
guacaaacuccgcauagga

SEQ ID NO: 1840695 - RNA, 19 nt, Homo sapiens
  misc_RNA (1)...(19): siRNA sense strand
gagcugagccagaaauuac

SEQ ID NO: 1840696 - RNA, 19 nt, Homo sapiens
  misc_RNA (1)...(19): siRNA sense strand
gcagaagacaccuggauuc

SEQ ID NO: 1840697 - RNA, 19 nt, Homo sapiens
  misc_RNA (1)...(19): siRNA sense strand
ggagcugagccagaaauua

SEQ ID NO: 1840698 - RNA, 19 nt, Homo sapiens
  misc_RNA (1)...(19): siRNA sense strand
ugggugagguggagaacua

SEQ ID NO: 1840699 - RNA, 19 nt, Homo sapiens
  misc_RNA (1)...(19): siRNA sense strand
caacugguaccauuggaaa

SEQ ID NO: 1840700 - RNA, 19 nt, Homo sapiens
  misc_RNA (1)...(19): siRNA sense strand
gaaaggguccagagacagu

SEQ ID NO: 1840701 - RNA, 19 nt, Homo sapiens
  misc_RNA (1)...(19): siRNA sense strand
ccucagcuaucaucaagga

SEQ ID NO: 1840702 - RNA, 19 nt, Homo sapiens
  misc_RNA (1)...(19): siRNA sense strand
gagccaaagucgauuucau

SEQ ID NO: 1840703 - RNA, 19 nt, Homo sapiens
  misc_RNA (1)...(19): siRNA sense strand
gaggauagagacaaugaug

SEQ ID NO: 1840704 - RNA, 19 nt, Homo sapiens
  misc_RNA (1)...(19): siRNA sense strand
guggagaacuacgucauug

SEQ ID NO: 1840705 - RNA, 19 nt, Homo sapiens
  misc_RNA (1)...(19): siRNA sense strand
gaaacagugguucugaaga

SEQ ID NO: 1840706 - RNA, 19 nt, Homo sapiens
  misc_RNA (1)...(19): siRNA sense strand
gaccaaggacucagugaug

SEQ ID NO: 1840707 - RNA, 19 nt, Homo sapiens
  misc_RNA (1)...(19): siRNA sense strand
gggauugccucagaaguca

SEQ ID NO: 1840708 - RNA, 19 nt, Homo sapiens
  misc_RNA (1)...(19): siRNA sense strand
ugccaacgguaccuguuua

SEQ ID NO: 1840709 - RNA, 19 nt, Homo sapiens
  misc_RNA (1)...(19): siRNA sense strand
gacaauauacacaggauca

SEQ ID NO: 1840710 - RNA, 19 nt, Homo sapiens
  misc_RNA (1)...(19): siRNA sense strand
gaggcaugcuguccugaug

SEQ ID NO: 1840711 - RNA, 19 nt, Homo sapiens
  misc_RNA (1)...(19): siRNA sense strand
ccacggcaacuuuagcuuu

SEQ ID NO: 1840712 - RNA, 19 nt, Homo sapiens
  misc_RNA (1)...(19): siRNA sense strand
gaauggagacacuuugagu

SEQ ID NO: 1840713 - RNA, 19 nt, Homo sapiens
  misc_RNA (1)...(19): siRNA sense strand
aagccgaaguucaggagua

SEQ ID NO: 1840714 - RNA, 19 nt, Homo sapiens
  misc_RNA (1)...(19): siRNA sense strand
gcagugacggaauauguga

SEQ ID NO: 1840715 - RNA, 19 nt, Homo sapiens
  misc_RNA (1)...(19): siRNA sense strand
uaacagugaagccgaaguu

SEQ ID NO: 1840716 - RNA, 19 nt, Homo sapiens
  misc_RNA (1)...(19): siRNA sense strand
cggagucagugaggaauuu

SEQ ID NO: 1840717 - RNA, 19 nt, Homo sapiens
  misc_RNA (1)...(19): siRNA sense strand
gcccuccuguugcaucuuu

SEQ ID NO: 1840718 - RNA, 19 nt, Homo sapiens
  misc_RNA (1)...(19): siRNA sense strand
guacaucauuuccgucacu

SEQ ID NO: 1840719 - RNA, 19 nt, Homo sapiens
  misc_RNA (1)...(19): siRNA sense strand
cuucugggcuccaugauca

SEQ ID NO: 1840720 - RNA, 19 nt, Homo sapiens
  misc_RNA (1)...(19): siRNA sense strand
gaaggcugguuuggcaaga

SEQ ID NO: 1840721 - RNA, 19 nt, Homo sapiens
  misc_RNA (1)...(19): siRNA sense strand
gggcagaguacaucauuuc

SEQ ID NO: 1840722 - RNA, 19 nt, Homo sapiens
  misc_RNA (1)...(19): siRNA sense strand
ggaaacagugguucugaag

SEQ ID NO: 1840723 - RNA, 19 nt, Homo sapiens
  misc_RNA (1)...(19): siRNA sense strand
gcacagcaaccagccuuga

SEQ ID NO: 1840724 - RNA, 19 nt, Homo sapiens
  misc_RNA (1)...(19): siRNA sense strand
aaacggcaguccuuacagu

SEQ ID NO: 1840725 - RNA, 19 nt, Homo sapiens
  misc_RNA (1)...(19): siRNA sense strand
cagcagaaaccuguacaaa

SEQ ID NO: 1840726 - RNA, 19 nt, Homo sapiens
  misc_RNA (1)...(19): siRNA sense strand
aaccacguguacaacauua

SEQ ID NO: 1840727 - RNA, 19 nt, Homo sapiens
  misc_RNA (1)...(19): siRNA sense strand
gcgcaucuguacucuugug

SEQ ID NO: 1840728 - RNA, 19 nt, Homo sapiens
  misc_RNA (1)...(19): siRNA sense strand
auugaccacuaccgaauua

SEQ ID NO: 1840729 - RNA, 19 nt, Homo sapiens
  misc_RNA (1)...(19): siRNA sense strand
gcaauaucaugagguacug

SEQ ID NO: 1840730 - RNA, 19 nt, Homo sapiens
  misc_RNA (1)...(19): siRNA sense strand
cgagugggauaacagugaa

SEQ ID NO: 1840731 - RNA, 19 nt, Homo sapiens
  misc_RNA (1)...(19): siRNA sense strand
caacugcugccaagaaagu

SEQ ID NO: 1840732 - RNA, 19 nt, Homo sapiens
  misc_RNA (1)...(19): siRNA sense strand
cagcggcagugucugaaug

SEQ ID NO: 1840733 - RNA, 19 nt, Homo sapiens
  misc_RNA (1)...(19): siRNA sense strand
gucagggcaucaacuggua

SEQ ID NO: 1840734 - RNA, 19 nt, Homo sapiens
  misc_RNA (1)...(19): siRNA sense strand
acagacucauucuuaacua

SEQ ID NO: 1840735 - RNA, 19 nt, Homo sapiens
  misc_RNA (1)...(19): siRNA sense strand
ggaggugagugcagaagac

SEQ ID NO: 1840736 - RNA, 19 nt, Homo sapiens
  misc_RNA (1)...(19): siRNA sense strand
ucaaugugguggcucugaa

SEQ ID NO: 1840737 - RNA, 19 nt, Homo sapiens
  misc_RNA (1)...(19): siRNA sense strand
caagggcuacaauuuaaga

SEQ ID NO: 1840738 - RNA, 19 nt, Homo sapiens
  misc_RNA (1)...(19): siRNA sense strand
cacggcaacuuuagcuuug

SEQ ID NO: 1840739 - RNA, 19 nt, Homo sapiens
  misc_RNA (1)...(19): siRNA sense strand
cugaagaacaugcucauug

SEQ ID NO: 1840740 - RNA, 19 nt, Homo sapiens
  misc_RNA (1)...(19): siRNA sense strand
ggaaaggccaugaguucuc

SEQ ID NO: 1840741 - RNA, 19 nt, Homo sapiens
  misc_RNA (1)...(19): siRNA sense strand
caagggagcauggugguau

SEQ ID NO: 1840742 - RNA, 19 nt, Homo sapiens
  misc_RNA (1)...(19): siRNA sense strand
uugcaucuuucgauuacua

SEQ ID NO: 1840743 - RNA, 19 nt, Homo sapiens
  misc_RNA (1)...(19): siRNA sense strand
ccacaggacaacuggacua

SEQ ID NO: 1840744 - RNA, 19 nt, Homo sapiens
  misc_RNA (1)...(19): siRNA sense strand
gcgauguuacguccuuuaa

SEQ ID NO: 1840745 - RNA, 19 nt, Homo sapiens
  misc_RNA (1)...(19): siRNA sense strand
ccagcgauguuacguccuu

SEQ ID NO: 1840746 - RNA, 19 nt, Homo sapiens
  misc_RNA (1)...(19): siRNA sense strand
gggagugugucugugaaga

SEQ ID NO: 1840747 - RNA, 19 nt, Homo sapiens
  misc_RNA (1)...(19): siRNA sense strand
uggagggccuguuggagaa

SEQ ID NO: 1840748 - RNA, 19 nt, Homo sapiens
  misc_RNA (1)...(19): siRNA sense strand
caaccacguguacaacauu

SEQ ID NO: 1840749 - RNA, 19 nt, Homo sapiens
  misc_RNA (1)...(19): siRNA sense strand
ggacaaauaugaagaagaa

SEQ ID NO: 1840750 - RNA, 19 nt, Homo sapiens
  misc_RNA (1)...(19): siRNA sense strand
ggaagaggcugaccgcaaa

SEQ ID NO: 1840751 - RNA, 19 nt, Homo sapiens
  misc_RNA (1)...(19): siRNA sense strand
gaagaacucaagaauguua

SEQ ID NO: 1840752 - RNA, 19 nt, Homo sapiens
  misc_RNA (1)...(19): siRNA sense strand
aagaagaacucaagaaugu

SEQ ID NO: 1840753 - RNA, 19 nt, Homo sapiens
  misc_RNA (1)...(19): siRNA sense strand
ggacagggcucaggaacga

SEQ ID NO: 1840754 - RNA, 19 nt, Homo sapiens
  misc_RNA (1)...(19): siRNA sense strand
cgagaaagcugaaggugau

SEQ ID NO: 1840755 - RNA, 19 nt, Homo sapiens
  misc_RNA (1)...(19): siRNA sense strand
ggaaugaaggugauagaaa

SEQ ID NO: 1840756 - RNA, 19 nt, Homo sapiens
  misc_RNA (1)...(19): siRNA sense strand
gaaugaaggugauagaaaa

SEQ ID NO: 1840757 - RNA, 19 nt, Homo sapiens
  misc_RNA (1)...(19): siRNA sense strand
gaagaagaacucaagaaug

SEQ ID NO: 1840758 - RNA, 19 nt, Homo sapiens
  misc_RNA (1)...(19): siRNA sense strand
ggaagaagaacucaagaau

SEQ ID NO: 1840759 - RNA, 19 nt, Homo sapiens
  misc_RNA (1)...(19): siRNA sense strand
ggaggugucugaacuaaaa

SEQ ID NO: 1840760 - RNA, 19 nt, Homo sapiens
  misc_RNA (1)...(19): siRNA sense strand
gacaauugaugaccuggaa

SEQ ID NO: 1840761 - RNA, 19 nt, Homo sapiens
  misc_RNA (1)...(19): siRNA sense strand
guggugaccuggaagaaga

SEQ ID NO: 1840762 - RNA, 19 nt, Homo sapiens
  misc_RNA (1)...(19): siRNA sense strand
cuaacaaucugaaaucucu

SEQ ID NO: 1840763 - RNA, 19 nt, Homo sapiens
  misc_RNA (1)...(19): siRNA sense strand
gcggaggugucugaacuaa

SEQ ID NO: 1840764 - RNA, 19 nt, Homo sapiens
  misc_RNA (1)...(19): siRNA sense strand
ggaggacaaauaugaagaa

SEQ ID NO: 1840765 - RNA, 19 nt, Homo sapiens
  misc_RNA (1)...(19): siRNA sense strand
gaacucaagaauguuacua

SEQ ID NO: 1840766 - RNA, 19 nt, Homo sapiens
  misc_RNA (1)...(19): siRNA sense strand
aggagaagauggagauuca

SEQ ID NO: 1840767 - RNA, 19 nt, Homo sapiens
  misc_RNA (1)...(19): siRNA sense strand
uugaugaccuggaagagaa

SEQ ID NO: 1840768 - RNA, 19 nt, Homo sapiens
  misc_RNA (1)...(19): siRNA sense strand
gaaacuugcccaggccaaa

SEQ ID NO: 1840769 - RNA, 19 nt, Homo sapiens
  misc_RNA (1)...(19): siRNA sense strand
ucaaagaggccaagcacau

SEQ ID NO: 1840770 - RNA, 19 nt, Homo sapiens
  misc_RNA (1)...(19): siRNA sense strand
gacacuggaucagacacua

SEQ ID NO: 1840771 - RNA, 19 nt, Homo sapiens
  misc_RNA (1)...(19): siRNA sense strand
gcagagagaacgguugcaa

SEQ ID NO: 1840772 - RNA, 19 nt, Homo sapiens
  misc_RNA (1)...(19): siRNA sense strand
agauggagauucaggagau

SEQ ID NO: 1840773 - RNA, 19 nt, Homo sapiens
  misc_RNA (1)...(19): siRNA sense strand
gugcggaggugucugaacu

SEQ ID NO: 1840774 - RNA, 19 nt, Homo sapiens
  misc_RNA (1)...(19): siRNA sense strand
gaugagagugagagaggaa

SEQ ID NO: 1840775 - RNA, 19 nt, Homo sapiens
  misc_RNA (1)...(19): siRNA sense strand
aaaaggaggacaaauauga

SEQ ID NO: 1840776 - RNA, 19 nt, Homo sapiens
  misc_RNA (1)...(19): siRNA sense strand
ucuggaggcugcaucugaa

SEQ ID NO: 1840777 - RNA, 19 nt, Homo sapiens
  misc_RNA (1)...(19): siRNA sense strand
gagagugagagaggaauga

SEQ ID NO: 1840778 - RNA, 19 nt, Homo sapiens
  misc_RNA (1)...(19): siRNA sense strand
gaggacaaauaugaagaag

SEQ ID NO: 1840779 - RNA, 19 nt, Homo sapiens
  misc_RNA (1)...(19): siRNA sense strand
gaggaaugaaggugauaga

SEQ ID NO: 1840780 - RNA, 19 nt, Homo sapiens
  misc_RNA (1)...(19): siRNA sense strand
aaaggaggacaaauaugaa

SEQ ID NO: 1840781 - RNA, 19 nt, Homo sapiens
  misc_RNA (1)...(19): siRNA sense strand
caucagacacuggaucaga

SEQ ID NO: 1840782 - RNA, 19 nt, Homo sapiens
  misc_RNA (1)...(19): siRNA sense strand
caauugaugaccuggaaga

SEQ ID NO: 1840783 - RNA, 19 nt, Homo sapiens
  misc_RNA (1)...(19): siRNA sense strand
caugaaggaugaggagaag

SEQ ID NO: 1840784 - RNA, 19 nt, Homo sapiens
  misc_RNA (1)...(19): siRNA sense strand
gaaagcugaaggugaugug

SEQ ID NO: 1840785 - RNA, 19 nt, Homo sapiens
  misc_RNA (1)...(19): siRNA sense strand
gagaggaaugaaggugaua

SEQ ID NO: 1840786 - RNA, 19 nt, Homo sapiens
  misc_RNA (1)...(19): siRNA sense strand
ccgcaaauacgaggaggua

SEQ ID NO: 1840787 - RNA, 19 nt, Homo sapiens
  misc_RNA (1)...(19): siRNA sense strand
ggagaugcagcucaaagag

SEQ ID NO: 1840788 - RNA, 19 nt, Homo sapiens
  misc_RNA (1)...(19): siRNA sense strand
ccaugaaggaugaggagaa

SEQ ID NO: 1840789 - RNA, 19 nt, Homo sapiens
  misc_RNA (1)...(19): siRNA sense strand
ggaucagacacuaaacgaa

SEQ ID NO: 1840790 - RNA, 19 nt, Homo sapiens
  misc_RNA (1)...(19): siRNA sense strand
gauggagauucaggagaug

SEQ ID NO: 1840791 - RNA, 19 nt, Homo sapiens
  misc_RNA (1)...(19): siRNA sense strand
ugaaggaugaggagaagau

SEQ ID NO: 1840792 - RNA, 19 nt, Homo sapiens
  misc_RNA (1)...(19): siRNA sense strand
gaggagaagauggagauuc

SEQ ID NO: 1840793 - RNA, 19 nt, Homo sapiens
  misc_RNA (1)...(19): siRNA sense strand
agagaggaaugaaggugau

SEQ ID NO: 1840794 - RNA, 19 nt, Homo sapiens
  misc_RNA (1)...(19): siRNA sense strand
cagagagaacgguugcaaa

SEQ ID NO: 1840795 - RNA, 19 nt, Homo sapiens
  misc_RNA (1)...(19): siRNA sense strand
gaaggaugaggagaagaug

SEQ ID NO: 1840796 - RNA, 19 nt, Homo sapiens
  misc_RNA (1)...(19): siRNA sense strand
ugaaaaggaggacaaauau

SEQ ID NO: 1840797 - RNA, 19 nt, Homo sapiens
  misc_RNA (1)...(19): siRNA sense strand
gaagaggcugaccgcaaau

SEQ ID NO: 1840798 - RNA, 19 nt, Homo sapiens
  misc_RNA (1)...(19): siRNA sense strand
cugaaaaggaggacaaaua

SEQ ID NO: 1840799 - RNA, 19 nt, Homo sapiens
  misc_RNA (1)...(19): siRNA sense strand
gaaaaggaggacaaauaug

SEQ ID NO: 1840800 - RNA, 19 nt, Homo sapiens
  misc_RNA (1)...(19): siRNA sense strand
uggaagaagaacucaagaa

SEQ ID NO: 1840801 - RNA, 19 nt, Homo sapiens
  misc_RNA (1)...(19): siRNA sense strand
gaagcuggaggaggcagaa

SEQ ID NO: 1840802 - RNA, 19 nt, Homo sapiens
  misc_RNA (1)...(19): siRNA sense strand
acacuaaacgaacuuaacu

SEQ ID NO: 1840803 - RNA, 19 nt, Homo sapiens
  misc_RNA (1)...(19): siRNA sense strand
aaaauguggugaccuggaa

SEQ ID NO: 1840804 - RNA, 19 nt, Homo sapiens
  misc_RNA (1)...(19): siRNA sense strand
acacuggaucagacacuaa

SEQ ID NO: 1840805 - RNA, 19 nt, Homo sapiens
  misc_RNA (1)...(19): siRNA sense strand
gagaacgguugcaaaacug

SEQ ID NO: 1840806 - RNA, 19 nt, Homo sapiens
  misc_RNA (1)...(19): siRNA sense strand
gaaaaguauucugaaaagg

SEQ ID NO: 1840807 - RNA, 19 nt, Homo sapiens
  misc_RNA (1)...(19): siRNA sense strand
gaccuggaagagaaacuug

SEQ ID NO: 1840808 - RNA, 19 nt, Homo sapiens
  misc_RNA (1)...(19): siRNA sense strand
gacacuaaacgaacuuaac

SEQ ID NO: 1840809 - RNA, 19 nt, Homo sapiens
  misc_RNA (1)...(19): siRNA sense strand
gcagacagaagaauaugua

SEQ ID NO: 1840810 - RNA, 19 nt, Homo sapiens
  misc_RNA (1)...(19): siRNA sense strand
cuggauggcuacaugaaua

SEQ ID NO: 1840811 - RNA, 19 nt, Homo sapiens
  misc_RNA (1)...(19): siRNA sense strand
guaaauggacaacugaaga

SEQ ID NO: 1840812 - RNA, 19 nt, Homo sapiens
  misc_RNA (1)...(19): siRNA sense strand
auggacaacugaagaauaa

SEQ ID NO: 1840813 - RNA, 19 nt, Homo sapiens
  misc_RNA (1)...(19): siRNA sense strand
uaaauucuggaguggauua

SEQ ID NO: 1840814 - RNA, 19 nt, Homo sapiens
  misc_RNA (1)...(19): siRNA sense strand
ggagcagacagaagaauau

SEQ ID NO: 1840815 - RNA, 19 nt, Homo sapiens
  misc_RNA (1)...(19): siRNA sense strand
uaaauggacaacugaagaa

SEQ ID NO: 1840816 - RNA, 19 nt, Homo sapiens
  misc_RNA (1)...(19): siRNA sense strand
gguccuggcuugccuggau

SEQ ID NO: 1840817 - RNA, 19 nt, Homo sapiens
  misc_RNA (1)...(19): siRNA sense strand
gacaacugaagaauaagua

SEQ ID NO: 1840818 - RNA, 19 nt, Homo sapiens
  misc_RNA (1)...(19): siRNA sense strand
ggacaacugaagaauaagu

SEQ ID NO: 1840819 - RNA, 19 nt, Homo sapiens
  misc_RNA (1)...(19): siRNA sense strand
gcauuuauccgaggaaaca

SEQ ID NO: 1840820 - RNA, 19 nt, Homo sapiens
  misc_RNA (1)...(19): siRNA sense strand
caacugaagaauaaguaug

SEQ ID NO: 1840821 - RNA, 19 nt, Homo sapiens
  misc_RNA (1)...(19): siRNA sense strand
gcaaaccccuagugacuuc

SEQ ID NO: 1840822 - RNA, 19 nt, Homo sapiens
  misc_RNA (1)...(19): siRNA sense strand
cuagugacuucuuaaagca

SEQ ID NO: 1840823 - RNA, 19 nt, Homo sapiens
  misc_RNA (1)...(19): siRNA sense strand
ccuagugacuucuuaaagc

SEQ ID NO: 1840824 - RNA, 19 nt, Homo sapiens
  misc_RNA (1)...(19): siRNA sense strand
cagaagaauauguaaaugg

SEQ ID NO: 1840825 - RNA, 19 nt, Homo sapiens
  misc_RNA (1)...(19): siRNA sense strand
ggauggcuacaugaauaua

SEQ ID NO: 1840826 - RNA, 19 nt, Homo sapiens
  misc_RNA (1)...(19): siRNA sense strand
aauggacaacugaagaaua

SEQ ID NO: 1840827 - RNA, 19 nt, Homo sapiens
  misc_RNA (1)...(19): siRNA sense strand
uggagcagacagaagaaua

SEQ ID NO: 1840828 - RNA, 19 nt, Homo sapiens
  misc_RNA (1)...(19): siRNA sense strand
gagcagacagaagaauaug

SEQ ID NO: 1840829 - RNA, 19 nt, Homo sapiens
  misc_RNA (1)...(19): siRNA sense strand
acacagaagagacggaugu

SEQ ID NO: 1840830 - RNA, 19 nt, Homo sapiens
  misc_RNA (1)...(19): siRNA sense strand
ggaagcaaaccccuaguga

SEQ ID NO: 1840831 - RNA, 19 nt, Homo sapiens
  misc_RNA (1)...(19): siRNA sense strand
auauguaaauggacaacug

SEQ ID NO: 1840832 - RNA, 19 nt, Homo sapiens
  misc_RNA (1)...(19): siRNA sense strand
agugacuucuuaaagcaaa

SEQ ID NO: 1840833 - RNA, 19 nt, Homo sapiens
  misc_RNA (1)...(19): siRNA sense strand
gauggcuacaugaauauag

SEQ ID NO: 1840834 - RNA, 19 nt, Homo sapiens
  misc_RNA (1)...(19): siRNA sense strand
aaucaucggacgaccaguu

SEQ ID NO: 1840835 - RNA, 19 nt, Homo sapiens
  misc_RNA (1)...(19): siRNA sense strand
uauguaaauggacaacuga

SEQ ID NO: 1840836 - RNA, 19 nt, Homo sapiens
  misc_RNA (1)...(19): siRNA sense strand
cagacagaagaauauguaa

SEQ ID NO: 1840837 - RNA, 19 nt, Homo sapiens
  misc_RNA (1)...(19): siRNA sense strand
auuaaauucuggaguggau

SEQ ID NO: 1840838 - RNA, 19 nt, Homo sapiens
  misc_RNA (1)...(19): siRNA sense strand
gaaauuaccugcaaaucaa

SEQ ID NO: 1840839 - RNA, 19 nt, Homo sapiens
  misc_RNA (1)...(19): siRNA sense strand
cagcugagauguugaauua

SEQ ID NO: 1840840 - RNA, 19 nt, Homo sapiens
  misc_RNA (1)...(19): siRNA sense strand
caacuaaacuuguggaaga

SEQ ID NO: 1840841 - RNA, 19 nt, Homo sapiens
  misc_RNA (1)...(19): siRNA sense strand
caaagaagcccaagaauau

SEQ ID NO: 1840842 - RNA, 19 nt, Homo sapiens
  misc_RNA (1)...(19): siRNA sense strand
uaaauggacugaucucuuu

SEQ ID NO: 1840843 - RNA, 19 nt, Homo sapiens
  misc_RNA (1)...(19): siRNA sense strand
aaagaaagcugauguaauc

SEQ ID NO: 1840844 - RNA, 19 nt, Homo sapiens
  misc_RNA (1)...(19): siRNA sense strand
ggacugaucucuuugacaa

SEQ ID NO: 1840845 - RNA, 19 nt, Homo sapiens
  misc_RNA (1)...(19): siRNA sense strand
ugacaaagcuggauucuag

SEQ ID NO: 1840846 - RNA, 19 nt, Homo sapiens
  misc_RNA (1)...(19): siRNA sense strand
ccaaauaaccgucaacuuu

SEQ ID NO: 1840847 - RNA, 19 nt, Homo sapiens
  misc_RNA (1)...(19): siRNA sense strand
gcaacucacuggccaaauu

SEQ ID NO: 1840848 - RNA, 19 nt, Homo sapiens
  misc_RNA (1)...(19): siRNA sense strand
caaauaaccgucaacuuua

SEQ ID NO: 1840849 - RNA, 19 nt, Homo sapiens
  misc_RNA (1)...(19): siRNA sense strand
ggaacuacaucaaguguga

SEQ ID NO: 1840850 - RNA, 19 nt, Homo sapiens
  misc_RNA (1)...(19): siRNA sense strand
ggacgcagcugaugaaugg

SEQ ID NO: 1840851 - RNA, 19 nt, Homo sapiens
  misc_RNA (1)...(19): siRNA sense strand
gagcuuagauauucaugaa

SEQ ID NO: 1840852 - RNA, 19 nt, Homo sapiens
  misc_RNA (1)...(19): siRNA sense strand
cuaauuaucuuccucugua

SEQ ID NO: 1840853 - RNA, 19 nt, Homo sapiens
  misc_RNA (1)...(19): siRNA sense strand
cagaauacaucauuugcua

SEQ ID NO: 1840854 - RNA, 19 nt, Homo sapiens
  misc_RNA (1)...(19): siRNA sense strand
agagaaggauugcauuaua

SEQ ID NO: 1840855 - RNA, 19 nt, Homo sapiens
  misc_RNA (1)...(19): siRNA sense strand
ggacacauguagcuaguau

SEQ ID NO: 1840856 - RNA, 19 nt, Homo sapiens
  misc_RNA (1)...(19): siRNA sense strand
caacaaagacuaagaaugg

SEQ ID NO: 1840857 - RNA, 19 nt, Homo sapiens
  misc_RNA (1)...(19): siRNA sense strand
ggaccuggaugcuaucuug

SEQ ID NO: 1840858 - RNA, 19 nt, Homo sapiens
  misc_RNA (1)...(19): siRNA sense strand
ucaaggacaugguauuauu

SEQ ID NO: 1840859 - RNA, 19 nt, Homo sapiens
  misc_RNA (1)...(19): siRNA sense strand
gaccuuccauuuauuguuu

SEQ ID NO: 1840860 - RNA, 19 nt, Homo sapiens
  misc_RNA (1)...(19): siRNA sense strand
gaguaaaucuaccguguug

SEQ ID NO: 1840861 - RNA, 19 nt, Homo sapiens
  misc_RNA (1)...(19): siRNA sense strand
gagaugguccugacauaua

SEQ ID NO: 1840862 - RNA, 19 nt, Homo sapiens
  misc_RNA (1)...(19): siRNA sense strand
gcaugcagguuacaacuga

SEQ ID NO: 1840863 - RNA, 19 nt, Homo sapiens
  misc_RNA (1)...(19): siRNA sense strand
gcuaugacuucuauccuaa

SEQ ID NO: 1840864 - RNA, 19 nt, Homo sapiens
  misc_RNA (1)...(19): siRNA sense strand
gaaagaaagcugauguaau

SEQ ID NO: 1840865 - RNA, 19 nt, Homo sapiens
  misc_RNA (1)...(19): siRNA sense strand
ggaaagaaagcugauguaa

SEQ ID NO: 1840866 - RNA, 19 nt, Homo sapiens
  misc_RNA (1)...(19): siRNA sense strand
caagauuggugauacaaga

SEQ ID NO: 1840867 - RNA, 19 nt, Homo sapiens
  misc_RNA (1)...(19): siRNA sense strand
gagccugcauugauucuaa

SEQ ID NO: 1840868 - RNA, 19 nt, Homo sapiens
  misc_RNA (1)...(19): siRNA sense strand
caauauacuuggucuucua

SEQ ID NO: 1840869 - RNA, 19 nt, Homo sapiens
  misc_RNA (1)...(19): siRNA sense strand
agaguuuacugaagcauua

SEQ ID NO: 1840870 - RNA, 19 nt, Homo sapiens
  misc_RNA (1)...(19): siRNA sense strand
ccacaucaguauucuuuga

SEQ ID NO: 1840871 - RNA, 19 nt, Homo sapiens
  misc_RNA (1)...(19): siRNA sense strand
agugaaggcugacaauaua

SEQ ID NO: 1840872 - RNA, 19 nt, Homo sapiens
  misc_RNA (1)...(19): siRNA sense strand
gccaaaggauggugagauu

SEQ ID NO: 1840873 - RNA, 19 nt, Homo sapiens
  misc_RNA (1)...(19): siRNA sense strand
acaaagaagcccaagaaua

SEQ ID NO: 1840874 - RNA, 19 nt, Homo sapiens
  misc_RNA (1)...(19): siRNA sense strand
ggagaggccuuaaauuugc

SEQ ID NO: 1840875 - RNA, 19 nt, Homo sapiens
  misc_RNA (1)...(19): siRNA sense strand
gaacacugacugaagcuuu

SEQ ID NO: 1840876 - RNA, 19 nt, Homo sapiens
  misc_RNA (1)...(19): siRNA sense strand
gaaauaaccguggcaucua

SEQ ID NO: 1840877 - RNA, 19 nt, Homo sapiens
  misc_RNA (1)...(19): siRNA sense strand
gaagagugcuuaagauucc

SEQ ID NO: 1840878 - RNA, 19 nt, Homo sapiens
  misc_RNA (1)...(19): siRNA sense strand
guauaugacugcuugguau

SEQ ID NO: 1840879 - RNA, 19 nt, Homo sapiens
  misc_RNA (1)...(19): siRNA sense strand
caacggcucuucucaagca

SEQ ID NO: 1840880 - RNA, 19 nt, Homo sapiens
  misc_RNA (1)...(19): siRNA sense strand
gaaaccugcucuccauugu

SEQ ID NO: 1840881 - RNA, 19 nt, Homo sapiens
  misc_RNA (1)...(19): siRNA sense strand
uaagagaaggauugcauua

SEQ ID NO: 1840882 - RNA, 19 nt, Homo sapiens
  misc_RNA (1)...(19): siRNA sense strand
gagaaggauugcauuauac

SEQ ID NO: 1840883 - RNA, 19 nt, Homo sapiens
  misc_RNA (1)...(19): siRNA sense strand
gcaaaucaauauacuuggu

SEQ ID NO: 1840884 - RNA, 19 nt, Homo sapiens
  misc_RNA (1)...(19): siRNA sense strand
gcaggauccuuaacauugu

SEQ ID NO: 1840885 - RNA, 19 nt, Homo sapiens
  misc_RNA (1)...(19): siRNA sense strand
aaccagccauucuuuguua

SEQ ID NO: 1840886 - RNA, 19 nt, Homo sapiens
  misc_RNA (1)...(19): siRNA sense strand
guuccuaacuggacacuga

SEQ ID NO: 1840887 - RNA, 19 nt, Homo sapiens
  misc_RNA (1)...(19): siRNA sense strand
gggagaauuugugaaguaa

SEQ ID NO: 1840888 - RNA, 19 nt, Homo sapiens
  misc_RNA (1)...(19): siRNA sense strand
ucauguauccucccgauua

SEQ ID NO: 1840889 - RNA, 19 nt, Homo sapiens
  misc_RNA (1)...(19): siRNA sense strand
gggagaggccuuaaauuug

SEQ ID NO: 1840890 - RNA, 19 nt, Homo sapiens
  misc_RNA (1)...(19): siRNA sense strand
gaacucaugaaucaaugua

SEQ ID NO: 1840891 - RNA, 19 nt, Homo sapiens
  misc_RNA (1)...(19): siRNA sense strand
gcucaaggacaugguauua

SEQ ID NO: 1840892 - RNA, 19 nt, Homo sapiens
  misc_RNA (1)...(19): siRNA sense strand
gagagaaauuaccugcaaa

SEQ ID NO: 1840893 - RNA, 19 nt, Homo sapiens
  misc_RNA (1)...(19): siRNA sense strand
gacauuaccacccaaauau

SEQ ID NO: 1840894 - RNA, 19 nt, Homo sapiens
  misc_RNA (1)...(19): siRNA sense strand
ggagaaaggagauuauaca

SEQ ID NO: 1840895 - RNA, 19 nt, Homo sapiens
  misc_RNA (1)...(19): siRNA sense strand
gccaugaauucuauaaguu

SEQ ID NO: 1840896 - RNA, 19 nt, Homo sapiens
  misc_RNA (1)...(19): siRNA sense strand
cuuuaaaccuggucaaauu

SEQ ID NO: 1840897 - RNA, 19 nt, Homo sapiens
  misc_RNA (1)...(19): siRNA sense strand
gcuguuauuucucauauag

SEQ ID NO: 1840898 - RNA, 19 nt, Homo sapiens
  misc_RNA (1)...(19): siRNA sense strand
gcagaaacauuuugggaaa

SEQ ID NO: 1840899 - RNA, 19 nt, Homo sapiens
  misc_RNA (1)...(19): siRNA sense strand
ucaaacagcccuagcaguu

SEQ ID NO: 1840900 - RNA, 19 nt, Homo sapiens
  misc_RNA (1)...(19): siRNA sense strand
ggaaguggcgaugugaaua

SEQ ID NO: 1840901 - RNA, 19 nt, Homo sapiens
  misc_RNA (1)...(19): siRNA sense strand
gcuuauguuucuccugaua

SEQ ID NO: 1840902 - RNA, 19 nt, Homo sapiens
  misc_RNA (1)...(19): siRNA sense strand
agaagaaccugaacggaau

SEQ ID NO: 1840903 - RNA, 19 nt, Homo sapiens
  misc_RNA (1)...(19): siRNA sense strand
ugacauuaccacccaaaua

SEQ ID NO: 1840904 - RNA, 19 nt, Homo sapiens
  misc_RNA (1)...(19): siRNA sense strand
aagaauggcagcaaagaua

SEQ ID NO: 1840905 - RNA, 19 nt, Homo sapiens
  misc_RNA (1)...(19): siRNA sense strand
ggaagagugcuuaagauuc

SEQ ID NO: 1840906 - RNA, 19 nt, Homo sapiens
  misc_RNA (1)...(19): siRNA sense strand
ggccuuaaauuugcaacua

SEQ ID NO: 1840907 - RNA, 19 nt, Homo sapiens
  misc_RNA (1)...(19): siRNA sense strand
gucaaagacugaacuagga

SEQ ID NO: 1840908 - RNA, 19 nt, Homo sapiens
  misc_RNA (1)...(19): siRNA sense strand
gaaaggaacacugacugaa

SEQ ID NO: 1840909 - RNA, 19 nt, Homo sapiens
  misc_RNA (1)...(19): siRNA sense strand
ggaaauaaccguggcaucu

SEQ ID NO: 1840910 - RNA, 19 nt, Homo sapiens
  misc_RNA (1)...(19): siRNA sense strand
gaggagccauugcuucugu

SEQ ID NO: 1840911 - RNA, 19 nt, Homo sapiens
  misc_RNA (1)...(19): siRNA sense strand
ugggagaauuugugaagua

SEQ ID NO: 1840912 - RNA, 19 nt, Homo sapiens
  misc_RNA (1)...(19): siRNA sense strand
cuacaaagaagcccaagaa

SEQ ID NO: 1840913 - RNA, 19 nt, Homo sapiens
  misc_RNA (1)...(19): siRNA sense strand
gaacgaaugaaaagacuua

SEQ ID NO: 1840914 - RNA, 19 nt, Homo sapiens
  misc_RNA (1)...(19): siRNA sense strand
gaaaaggaacgaaugaaaa

SEQ ID NO: 1840915 - RNA, 19 nt, Homo sapiens
  misc_RNA (1)...(19): siRNA sense strand
gauguucaguccuccuuga

SEQ ID NO: 1840916 - RNA, 19 nt, Homo sapiens
  misc_RNA (1)...(19): siRNA sense strand
gaaggaaucaaccgcuuug

SEQ ID NO: 1840917 - RNA, 19 nt, Homo sapiens
  misc_RNA (1)...(19): siRNA sense strand
gcauugcccugauccuuuc

SEQ ID NO: 1840918 - RNA, 19 nt, Homo sapiens
  misc_RNA (1)...(19): siRNA sense strand
agugugaucuugucaacua

SEQ ID NO: 1840919 - RNA, 19 nt, Homo sapiens
  misc_RNA (1)...(19): siRNA sense strand
uauagcugcuggacacuuu

SEQ ID NO: 1840920 - RNA, 19 nt, Homo sapiens
  misc_RNA (1)...(19): siRNA sense strand
ugggagaggccuuaaauuu

SEQ ID NO: 1840921 - RNA, 19 nt, Homo sapiens
  misc_RNA (1)...(19): siRNA sense strand
guagaugcccuuuguagga

SEQ ID NO: 1840922 - RNA, 19 nt, Homo sapiens
  misc_RNA (1)...(19): siRNA sense strand
gauguaaucccuguucauu

SEQ ID NO: 1840923 - RNA, 19 nt, Homo sapiens
  misc_RNA (1)...(19): siRNA sense strand
agacugaacuaggaaagaa

SEQ ID NO: 1840924 - RNA, 19 nt, Homo sapiens
  misc_RNA (1)...(19): siRNA sense strand
gguauguggcuaugauaua

SEQ ID NO: 1840925 - RNA, 19 nt, Homo sapiens
  misc_RNA (1)...(19): siRNA sense strand
agagagaaauuaccugcaa

SEQ ID NO: 1840926 - RNA, 19 nt, Homo sapiens
  misc_RNA (1)...(19): siRNA sense strand
gcucuucucaagcaaauaa

SEQ ID NO: 1840927 - RNA, 19 nt, Homo sapiens
  misc_RNA (1)...(19): siRNA sense strand
ccaaauauaaccagccauu

SEQ ID NO: 1840928 - RNA, 19 nt, Homo sapiens
  misc_RNA (1)...(19): siRNA sense strand
ggaagaagaaaucaagcaa

SEQ ID NO: 1840929 - RNA, 19 nt, Homo sapiens
  misc_RNA (1)...(19): siRNA sense strand
gggcaagucucagugaugu

SEQ ID NO: 1840930 - RNA, 19 nt, Homo sapiens
  misc_RNA (1)...(19): siRNA sense strand
gaagccaugaauucuauaa

SEQ ID NO: 1840931 - RNA, 19 nt, Homo sapiens
  misc_RNA (1)...(19): siRNA sense strand
gaucauggcguuggcauug

SEQ ID NO: 1840932 - RNA, 19 nt, Homo sapiens
  misc_RNA (1)...(19): siRNA sense strand
uaacauugacuacacaguu

SEQ ID NO: 1840933 - RNA, 19 nt, Homo sapiens
  misc_RNA (1)...(19): siRNA sense strand
agacuaagcacaauggaaa

SEQ ID NO: 1840934 - RNA, 19 nt, Homo sapiens
  misc_RNA (1)...(19): siRNA sense strand
agaaguauuugcucaagga

SEQ ID NO: 1840935 - RNA, 19 nt, Homo sapiens
  misc_RNA (1)...(19): siRNA sense strand
cuuaauaccuccaccaaca

SEQ ID NO: 1840936 - RNA, 19 nt, Homo sapiens
  misc_RNA (1)...(19): siRNA sense strand
gcauaacuuugaagaacug

SEQ ID NO: 1840937 - RNA, 19 nt, Homo sapiens
  misc_RNA (1)...(19): siRNA sense strand
uccgaucacugcaguuaua

SEQ ID NO: 1840938 - RNA, 19 nt, Homo sapiens
  misc_RNA (1)...(19): siRNA sense strand
gaaguaagcucugcugaua

SEQ ID NO: 1840939 - RNA, 19 nt, Homo sapiens
  misc_RNA (1)...(19): siRNA sense strand
gaacaaaggcauacacuua

SEQ ID NO: 1840940 - RNA, 19 nt, Homo sapiens
  misc_RNA (1)...(19): siRNA sense strand
gaaauaacaucacuucaug

SEQ ID NO: 1840941 - RNA, 19 nt, Homo sapiens
  misc_RNA (1)...(19): siRNA sense strand
gaagagaaauuccacaaug

SEQ ID NO: 1840942 - RNA, 19 nt, Homo sapiens
  misc_RNA (1)...(19): siRNA sense strand
gaacaacaguuaucugaau

SEQ ID NO: 1840943 - RNA, 19 nt, Homo sapiens
  misc_RNA (1)...(19): siRNA sense strand
ggaaagagagagaauguua

SEQ ID NO: 1840944 - RNA, 19 nt, Homo sapiens
  misc_RNA (1)...(19): siRNA sense strand
gaagcuagcugucgcagaa

SEQ ID NO: 1840945 - RNA, 19 nt, Homo sapiens
  misc_RNA (1)...(19): siRNA sense strand
ggacuuagaugccaaaaua

SEQ ID NO: 1840946 - RNA, 19 nt, Homo sapiens
  misc_RNA (1)...(19): siRNA sense strand
guacaagacucaauaugaa

SEQ ID NO: 1840947 - RNA, 19 nt, Homo sapiens
  misc_RNA (1)...(19): siRNA sense strand
cagaauacauggcugaaua

SEQ ID NO: 1840948 - RNA, 19 nt, Homo sapiens
  misc_RNA (1)...(19): siRNA sense strand
gagcuuaaauguaaucuug

SEQ ID NO: 1840949 - RNA, 19 nt, Homo sapiens
  misc_RNA (1)...(19): siRNA sense strand
gaagaaauugguagacuua

SEQ ID NO: 1840950 - RNA, 19 nt, Homo sapiens
  misc_RNA (1)...(19): siRNA sense strand
gcagaaagaugaauuggau

SEQ ID NO: 1840951 - RNA, 19 nt, Homo sapiens
  misc_RNA (1)...(19): siRNA sense strand
ugaauuaaaugcccacaua

SEQ ID NO: 1840952 - RNA, 19 nt, Homo sapiens
  misc_RNA (1)...(19): siRNA sense strand
guagcaaguuuaucuguua

SEQ ID NO: 1840953 - RNA, 19 nt, Homo sapiens
  misc_RNA (1)...(19): siRNA sense strand
gaaacuaacugagcucuau

SEQ ID NO: 1840954 - RNA, 19 nt, Homo sapiens
  misc_RNA (1)...(19): siRNA sense strand
gaacaugccucucaaucug

SEQ ID NO: 1840955 - RNA, 19 nt, Homo sapiens
  misc_RNA (1)...(19): siRNA sense strand
gaaaaggaauugcuacaua

SEQ ID NO: 1840956 - RNA, 19 nt, Homo sapiens
  misc_RNA (1)...(19): siRNA sense strand
gaagaagugcguaagaaua

SEQ ID NO: 1840957 - RNA, 19 nt, Homo sapiens
  misc_RNA (1)...(19): siRNA sense strand
uaacugagcucuauaaugc

SEQ ID NO: 1840958 - RNA, 19 nt, Homo sapiens
  misc_RNA (1)...(19): siRNA sense strand
gaauguaucucucagugaa

SEQ ID NO: 1840959 - RNA, 19 nt, Homo sapiens
  misc_RNA (1)...(19): siRNA sense strand
ggaauaaacagaggaaaua

SEQ ID NO: 1840960 - RNA, 19 nt, Homo sapiens
  misc_RNA (1)...(19): siRNA sense strand
ggaagaggauagcaccaua

SEQ ID NO: 1840961 - RNA, 19 nt, Homo sapiens
  misc_RNA (1)...(19): siRNA sense strand
aaacagcaccucaguaaua

SEQ ID NO: 1840962 - RNA, 19 nt, Homo sapiens
  misc_RNA (1)...(19): siRNA sense strand
caagaaaucuccaggaaca

SEQ ID NO: 1840963 - RNA, 19 nt, Homo sapiens
  misc_RNA (1)...(19): siRNA sense strand
gaaggaagguguacaaggu

SEQ ID NO: 1840964 - RNA, 19 nt, Homo sapiens
  misc_RNA (1)...(19): siRNA sense strand
gaagaaaacugaaacaaug

SEQ ID NO: 1840965 - RNA, 19 nt, Homo sapiens
  misc_RNA (1)...(19): siRNA sense strand
ugauggagaugaaguauuu

SEQ ID NO: 1840966 - RNA, 19 nt, Homo sapiens
  misc_RNA (1)...(19): siRNA sense strand
gaacaaaggaagaauuaga

SEQ ID NO: 1840967 - RNA, 19 nt, Homo sapiens
  misc_RNA (1)...(19): siRNA sense strand
gagcauggaacaacaguua

SEQ ID NO: 1840968 - RNA, 19 nt, Homo sapiens
  misc_RNA (1)...(19): siRNA sense strand
ggaacaauaucaagcaaug

SEQ ID NO: 1840969 - RNA, 19 nt, Homo sapiens
  misc_RNA (1)...(19): siRNA sense strand
gcaaagagcaaugaacuaa

SEQ ID NO: 1840970 - RNA, 19 nt, Homo sapiens
  misc_RNA (1)...(19): siRNA sense strand
gaccaagucucugaugaua

SEQ ID NO: 1840971 - RNA, 19 nt, Homo sapiens
  misc_RNA (1)...(19): siRNA sense strand
gaagauaugccacaaacaa

SEQ ID NO: 1840972 - RNA, 19 nt, Homo sapiens
  misc_RNA (1)...(19): siRNA sense strand
guaccuagaugaaauagug

SEQ ID NO: 1840973 - RNA, 19 nt, Homo sapiens
  misc_RNA (1)...(19): siRNA sense strand
uagagaaacucaacaauca

SEQ ID NO: 1840974 - RNA, 19 nt, Homo sapiens
  misc_RNA (1)...(19): siRNA sense strand
ucacagagcugcugauucu

SEQ ID NO: 1840975 - RNA, 19 nt, Homo sapiens
  misc_RNA (1)...(19): siRNA sense strand
agaaacaacuucauccaaa

SEQ ID NO: 1840976 - RNA, 19 nt, Homo sapiens
  misc_RNA (1)...(19): siRNA sense strand
guuccuagcucaugaagaa

SEQ ID NO: 1840977 - RNA, 19 nt, Homo sapiens
  misc_RNA (1)...(19): siRNA sense strand
ucaguugacuccaggaaua

SEQ ID NO: 1840978 - RNA, 19 nt, Homo sapiens
  misc_RNA (1)...(19): siRNA sense strand
gugaagaucuggagaaaca

SEQ ID NO: 1840979 - RNA, 19 nt, Homo sapiens
  misc_RNA (1)...(19): siRNA sense strand
ggaugaaguuuccaaaugu

SEQ ID NO: 1840980 - RNA, 19 nt, Homo sapiens
  misc_RNA (1)...(19): siRNA sense strand
ucaaggagguuuaggaaug

SEQ ID NO: 1840981 - RNA, 19 nt, Homo sapiens
  misc_RNA (1)...(19): siRNA sense strand
cagaagagcaggugaauga

SEQ ID NO: 1840982 - RNA, 19 nt, Homo sapiens
  misc_RNA (1)...(19): siRNA sense strand
gaaagcagaaucacaguug

SEQ ID NO: 1840983 - RNA, 19 nt, Homo sapiens
  misc_RNA (1)...(19): siRNA sense strand
caacaaagcaauacaagau

SEQ ID NO: 1840984 - RNA, 19 nt, Homo sapiens
  misc_RNA (1)...(19): siRNA sense strand
gcaaucaucuguacuugag

SEQ ID NO: 1840985 - RNA, 19 nt, Homo sapiens
  misc_RNA (1)...(19): siRNA sense strand
caacagaaagauccagaua

SEQ ID NO: 1840986 - RNA, 19 nt, Homo sapiens
  misc_RNA (1)...(19): siRNA sense strand
gagagagaauguuaaagga

SEQ ID NO: 1840987 - RNA, 19 nt, Homo sapiens
  misc_RNA (1)...(19): siRNA sense strand
auacauggcugaauacaga

SEQ ID NO: 1840988 - RNA, 19 nt, Homo sapiens
  misc_RNA (1)...(19): siRNA sense strand
ggacguggccuucaguuga

SEQ ID NO: 1840989 - RNA, 19 nt, Homo sapiens
  misc_RNA (1)...(19): siRNA sense strand
ugacagugaugaugaagaa

SEQ ID NO: 1840990 - RNA, 19 nt, Homo sapiens
  misc_RNA (1)...(19): siRNA sense strand
guucagaguucaccaguug

SEQ ID NO: 1840991 - RNA, 19 nt, Homo sapiens
  misc_RNA (1)...(19): siRNA sense strand
caaccaagcugaaacaaaa

SEQ ID NO: 1840992 - RNA, 19 nt, Homo sapiens
  misc_RNA (1)...(19): siRNA sense strand
gaaagagagagaauguuaa

SEQ ID NO: 1840993 - RNA, 19 nt, Homo sapiens
  misc_RNA (1)...(19): siRNA sense strand
ggaagaaacaacacagaaa

SEQ ID NO: 1840994 - RNA, 19 nt, Homo sapiens
  misc_RNA (1)...(19): siRNA sense strand
ggcauacacuuacuagaaa

SEQ ID NO: 1840995 - RNA, 19 nt, Homo sapiens
  misc_RNA (1)...(19): siRNA sense strand
cacagcaucuaguaucuua

SEQ ID NO: 1840996 - RNA, 19 nt, Homo sapiens
  misc_RNA (1)...(19): siRNA sense strand
gaaagaaguggaagccaaa

SEQ ID NO: 1840997 - RNA, 19 nt, Homo sapiens
  misc_RNA (1)...(19): siRNA sense strand
caauaugaaggucgaauua

SEQ ID NO: 1840998 - RNA, 19 nt, Homo sapiens
  misc_RNA (1)...(19): siRNA sense strand
gaaauugcaagaucaaaug

SEQ ID NO: 1840999 - RNA, 19 nt, Homo sapiens
  misc_RNA (1)...(19): siRNA sense strand
gcacagcuuuaaguaauga

SEQ ID NO: 1841000 - RNA, 19 nt, Homo sapiens
  misc_RNA (1)...(19): siRNA sense strand
aacaagaacuucaggauga

SEQ ID NO: 1841001 - RNA, 19 nt, Homo sapiens
  misc_RNA (1)...(19): siRNA sense strand
ugaaacagcaccucaguaa

SEQ ID NO: 1841002 - RNA, 19 nt, Homo sapiens
  misc_RNA (1)...(19): siRNA sense strand
gagacaaaucuucaucuua

SEQ ID NO: 1841003 - RNA, 19 nt, Homo sapiens
  misc_RNA (1)...(19): siRNA sense strand
gcaagauaauguugaagga

SEQ ID NO: 1841004 - RNA, 19 nt, Homo sapiens
  misc_RNA (1)...(19): siRNA sense strand
aguaagcucugcugauaua

SEQ ID NO: 1841005 - RNA, 19 nt, Homo sapiens
  misc_RNA (1)...(19): siRNA sense strand
ugagagagauaaucgaaga

SEQ ID NO: 1841006 - RNA, 19 nt, Homo sapiens
  misc_RNA (1)...(19): siRNA sense strand
cgaaggagcagguuucaaa

SEQ ID NO: 1841007 - RNA, 19 nt, Homo sapiens
  misc_RNA (1)...(19): siRNA sense strand
gaauaaguaugagagagaa

SEQ ID NO: 1841008 - RNA, 19 nt, Homo sapiens
  misc_RNA (1)...(19): siRNA sense strand
ucaauacgaugacucaaga

SEQ ID NO: 1841009 - RNA, 19 nt, Homo sapiens
  misc_RNA (1)...(19): siRNA sense strand
acaaagaacuugaaauugc

SEQ ID NO: 1841010 - RNA, 19 nt, Homo sapiens
  misc_RNA (1)...(19): siRNA sense strand
ugaauuggauguucgcauu

SEQ ID NO: 1841011 - RNA, 19 nt, Homo sapiens
  misc_RNA (1)...(19): siRNA sense strand
caaagaagauguggaugau

SEQ ID NO: 1841012 - RNA, 19 nt, Homo sapiens
  misc_RNA (1)...(19): siRNA sense strand
gaaaccaaacaaaggcuua

SEQ ID NO: 1841013 - RNA, 19 nt, Homo sapiens
  misc_RNA (1)...(19): siRNA sense strand
cgugauauguaccguauuu

SEQ ID NO: 1841014 - RNA, 19 nt, Homo sapiens
  misc_RNA (1)...(19): siRNA sense strand
ggaagaugaugaugaugau

SEQ ID NO: 1841015 - RNA, 19 nt, Homo sapiens
  misc_RNA (1)...(19): siRNA sense strand
gcacaacaggauaagguua

SEQ ID NO: 1841016 - RNA, 19 nt, Homo sapiens
  misc_RNA (1)...(19): siRNA sense strand
gguacaagacucaauauga

SEQ ID NO: 1841017 - RNA, 19 nt, Homo sapiens
  misc_RNA (1)...(19): siRNA sense strand
gaacaggaucuacagcaaa

SEQ ID NO: 1841018 - RNA, 19 nt, Homo sapiens
  misc_RNA (1)...(19): siRNA sense strand
gggcaaaacuuacugcuaa

SEQ ID NO: 1841019 - RNA, 19 nt, Homo sapiens
  misc_RNA (1)...(19): siRNA sense strand
gaacagauuaucaauacga

SEQ ID NO: 1841020 - RNA, 19 nt, Homo sapiens
  misc_RNA (1)...(19): siRNA sense strand
ugaaggauaucgucgagaa

SEQ ID NO: 1841021 - RNA, 19 nt, Homo sapiens
  misc_RNA (1)...(19): siRNA sense strand
gcaggugaaugacuuaaag

SEQ ID NO: 1841022 - RNA, 19 nt, Homo sapiens
  misc_RNA (1)...(19): siRNA sense strand
caaccaggauucucaagau

SEQ ID NO: 1841023 - RNA, 19 nt, Homo sapiens
  misc_RNA (1)...(19): siRNA sense strand
gcgcuaaagucccaauaug

SEQ ID NO: 1841024 - RNA, 19 nt, Homo sapiens
  misc_RNA (1)...(19): siRNA sense strand
ggaaaugcaggaacucaaa

SEQ ID NO: 1841025 - RNA, 19 nt, Homo sapiens
  misc_RNA (1)...(19): siRNA sense strand
aaccagaacuuaauucaga

SEQ ID NO: 1841026 - RNA, 19 nt, Homo sapiens
  misc_RNA (1)...(19): siRNA sense strand
aaagagagcugcaggaacu

SEQ ID NO: 1841027 - RNA, 19 nt, Homo sapiens
  misc_RNA (1)...(19): siRNA sense strand
caacaguuaucugaauuga

SEQ ID NO: 1841028 - RNA, 19 nt, Homo sapiens
  misc_RNA (1)...(19): siRNA sense strand
gaacuugaauacuuaacag

SEQ ID NO: 1841029 - RNA, 19 nt, Homo sapiens
  misc_RNA (1)...(19): siRNA sense strand
gaagcaggccuagaaauug

SEQ ID NO: 1841030 - RNA, 19 nt, Homo sapiens
  misc_RNA (1)...(19): siRNA sense strand
ggagagacuugugaaugaa

SEQ ID NO: 1841031 - RNA, 19 nt, Homo sapiens
  misc_RNA (1)...(19): siRNA sense strand
ggaagaaguuauggcagaa

SEQ ID NO: 1841032 - RNA, 19 nt, Homo sapiens
  misc_RNA (1)...(19): siRNA sense strand
ccaagucucugaugauaca

SEQ ID NO: 1841033 - RNA, 19 nt, Homo sapiens
  misc_RNA (1)...(19): siRNA sense strand
gaaacucacugccacaacu

SEQ ID NO: 1841034 - RNA, 19 nt, Homo sapiens
  misc_RNA (1)...(19): siRNA sense strand
gagaaggaauuagagaaug

SEQ ID NO: 1841035 - RNA, 19 nt, Homo sapiens
  misc_RNA (1)...(19): siRNA sense strand
gaacaaaugaauggcuuaa

SEQ ID NO: 1841036 - RNA, 19 nt, Homo sapiens
  misc_RNA (1)...(19): siRNA sense strand
gaaugaaacccgagagugu

SEQ ID NO: 1841037 - RNA, 19 nt, Homo sapiens
  misc_RNA (1)...(19): siRNA sense strand
caaaacagauuacuucaug

SEQ ID NO: 1841038 - RNA, 19 nt, Homo sapiens
  misc_RNA (1)...(19): siRNA sense strand
gaacugcuguguuauaagu

SEQ ID NO: 1841039 - RNA, 19 nt, Homo sapiens
  misc_RNA (1)...(19): siRNA sense strand
ccaaggagcugcaguucaa

SEQ ID NO: 1841040 - RNA, 19 nt, Homo sapiens
  misc_RNA (1)...(19): siRNA sense strand
ugacgaaccugaccaguag

SEQ ID NO: 1841041 - RNA, 19 nt, Homo sapiens
  misc_RNA (1)...(19): siRNA sense strand
guacgucaaugucccuauu

SEQ ID NO: 1841042 - RNA, 19 nt, Homo sapiens
  misc_RNA (1)...(19): siRNA sense strand
ggacaggccacuacaagau

SEQ ID NO: 1841043 - RNA, 19 nt, Homo sapiens
  misc_RNA (1)...(19): siRNA sense strand
ccauucaucucuacaagga

SEQ ID NO: 1841044 - RNA, 19 nt, Homo sapiens
  misc_RNA (1)...(19): siRNA sense strand
ggucccaucucccgaguga

SEQ ID NO: 1841045 - RNA, 19 nt, Homo sapiens
  misc_RNA (1)...(19): siRNA sense strand
caucgacacuuucaacaag

SEQ ID NO: 1841046 - RNA, 19 nt, Homo sapiens
  misc_RNA (1)...(19): siRNA sense strand
gagagguucugcagaugug

SEQ ID NO: 1841047 - RNA, 19 nt, Homo sapiens
  misc_RNA (1)...(19): siRNA sense strand
gaacauuuacugcgacuac

SEQ ID NO: 1841048 - RNA, 19 nt, Homo sapiens
  misc_RNA (1)...(19): siRNA sense strand
ggucaccgauguggauuug

SEQ ID NO: 1841049 - RNA, 19 nt, Homo sapiens
  misc_RNA (1)...(19): siRNA sense strand
caggaacugcuguguuaua

SEQ ID NO: 1841050 - RNA, 19 nt, Homo sapiens
  misc_RNA (1)...(19): siRNA sense strand
ccucagagcuggucuugac

SEQ ID NO: 1841051 - RNA, 19 nt, Homo sapiens
  misc_RNA (1)...(19): siRNA sense strand
caacuacauucccguggau

SEQ ID NO: 1841052 - RNA, 19 nt, Homo sapiens
  misc_RNA (1)...(19): siRNA sense strand
ggaucacguucaucaagga

SEQ ID NO: 1841053 - RNA, 19 nt, Homo sapiens
  misc_RNA (1)...(19): siRNA sense strand
ucaccgauguggauuugga

SEQ ID NO: 1841054 - RNA, 19 nt, Homo sapiens
  misc_RNA (1)...(19): siRNA sense strand
aggaacugcuguguuauaa

SEQ ID NO: 1841055 - RNA, 19 nt, Homo sapiens
  misc_RNA (1)...(19): siRNA sense strand
gcucguggccagcauguug

SEQ ID NO: 1841056 - RNA, 19 nt, Homo sapiens
  misc_RNA (1)...(19): siRNA sense strand
ucacguucaucaaggauuc

SEQ ID NO: 1841057 - RNA, 19 nt, Homo sapiens
  misc_RNA (1)...(19): siRNA sense strand
ugagaaugcagccucuuaa

SEQ ID NO: 1841058 - RNA, 19 nt, Homo sapiens
  misc_RNA (1)...(19): siRNA sense strand
gucgagagguucugcagau

SEQ ID NO: 1841059 - RNA, 19 nt, Homo sapiens
  misc_RNA (1)...(19): siRNA sense strand
ggccaccuauggacaggaa

SEQ ID NO: 1841060 - RNA, 19 nt, Homo sapiens
  misc_RNA (1)...(19): siRNA sense strand
acaggccacuacaagauga

SEQ ID NO: 1841061 - RNA, 19 nt, Homo sapiens
  misc_RNA (1)...(19): siRNA sense strand
cugagaaugcagccucuua

SEQ ID NO: 1841062 - RNA, 19 nt, Homo sapiens
  misc_RNA (1)...(19): siRNA sense strand
ccaagaccuccgacagaaa

SEQ ID NO: 1841063 - RNA, 19 nt, Homo sapiens
  misc_RNA (1)...(19): siRNA sense strand
gagaaugcagccucuuaag

SEQ ID NO: 1841064 - RNA, 19 nt, Homo sapiens
  misc_RNA (1)...(19): siRNA sense strand
acgagggccugcaucaguu

SEQ ID NO: 1841065 - RNA, 19 nt, Homo sapiens
  misc_RNA (1)...(19): siRNA sense strand
ggccauucaucucuacaag

SEQ ID NO: 1841066 - RNA, 19 nt, Homo sapiens
  misc_RNA (1)...(19): siRNA sense strand
gacaggccacuacaagaug

SEQ ID NO: 1841067 - RNA, 19 nt, Homo sapiens
  misc_RNA (1)...(19): siRNA sense strand
ccagcggagucgagagguu

SEQ ID NO: 1841068 - RNA, 19 nt, Homo sapiens
  misc_RNA (1)...(19): siRNA sense strand
accaagaccuccgacagaa

SEQ ID NO: 1841069 - RNA, 19 nt, Homo sapiens
  misc_RNA (1)...(19): siRNA sense strand
gcagccuggucaccgaugu

SEQ ID NO: 1841070 - RNA, 19 nt, Homo sapiens
  misc_RNA (1)...(19): siRNA sense strand
ggagccagcagugguguau

SEQ ID NO: 1841071 - RNA, 19 nt, Homo sapiens
  misc_RNA (1)...(19): siRNA sense strand
ggagaacgagggccugcau

SEQ ID NO: 1841072 - RNA, 19 nt, Homo sapiens
  misc_RNA (1)...(19): siRNA sense strand
uaccaagaccuccgacaga

SEQ ID NO: 1841073 - RNA, 19 nt, Homo sapiens
  misc_RNA (1)...(19): siRNA sense strand
cugacgaaccugaccagua

SEQ ID NO: 1841074 - RNA, 19 nt, Homo sapiens
  misc_RNA (1)...(19): siRNA sense strand
ucccagagcugacgaaccu

SEQ ID NO: 1841075 - RNA, 19 nt, Homo sapiens
  misc_RNA (1)...(19): siRNA sense strand
gagaccggcucuguguaca

SEQ ID NO: 1841076 - RNA, 19 nt, Homo sapiens
  misc_RNA (1)...(19): siRNA sense strand
caaggacaggccacuacaa

SEQ ID NO: 1841077 - RNA, 19 nt, Homo sapiens
  misc_RNA (1)...(19): siRNA sense strand
ucucgucgcagaacaaugu

SEQ ID NO: 1841078 - RNA, 19 nt, Homo sapiens
  misc_RNA (1)...(19): siRNA sense strand
gccccuuccugaacauuua

SEQ ID NO: 1841079 - RNA, 19 nt, Homo sapiens
  misc_RNA (1)...(19): siRNA sense strand
gacccggcuucgaacauca

SEQ ID NO: 1841080 - RNA, 19 nt, Homo sapiens
  misc_RNA (1)...(19): siRNA sense strand
gaccggcucuguguacaac

SEQ ID NO: 1841081 - RNA, 19 nt, Homo sapiens
  misc_RNA (1)...(19): siRNA sense strand
ucccaucucccgagugauu

SEQ ID NO: 1841082 - RNA, 19 nt, Homo sapiens
  misc_RNA (1)...(19): siRNA sense strand
cgucgcagaacaaugugua

SEQ ID NO: 1841083 - RNA, 19 nt, Homo sapiens
  misc_RNA (1)...(19): siRNA sense strand
gaccaaggacaggccacua

SEQ ID NO: 1841084 - RNA, 19 nt, Homo sapiens
  misc_RNA (1)...(19): siRNA sense strand
caagaccuccgacagaaaa

SEQ ID NO: 1841085 - RNA, 19 nt, Homo sapiens
  misc_RNA (1)...(19): siRNA sense strand
gaggaacagcccguggaaa

SEQ ID NO: 1841086 - RNA, 19 nt, Homo sapiens
  misc_RNA (1)...(19): siRNA sense strand
gaacgagggccugcaucag

SEQ ID NO: 1841087 - RNA, 19 nt, Homo sapiens
  misc_RNA (1)...(19): siRNA sense strand
ccaucgacacuuucaacaa

SEQ ID NO: 1841088 - RNA, 19 nt, Homo sapiens
  misc_RNA (1)...(19): siRNA sense strand
ugacccggcuucgaacauc

SEQ ID NO: 1841089 - RNA, 19 nt, Homo sapiens
  misc_RNA (1)...(19): siRNA sense strand
cgagagguucugcagaugu

SEQ ID NO: 1841090 - RNA, 19 nt, Homo sapiens
  misc_RNA (1)...(19): siRNA sense strand
cuaacccacuccucucucu

SEQ ID NO: 1841091 - RNA, 19 nt, Homo sapiens
  misc_RNA (1)...(19): siRNA sense strand
gcagagagguaacaacgaa

SEQ ID NO: 1841092 - RNA, 19 nt, Homo sapiens
  misc_RNA (1)...(19): siRNA sense strand
auacucagcuuguuuggua

SEQ ID NO: 1841093 - RNA, 19 nt, Homo sapiens
  misc_RNA (1)...(19): siRNA sense strand
aaaggacuaugcaccaaua

SEQ ID NO: 1841094 - RNA, 19 nt, Homo sapiens
  misc_RNA (1)...(19): siRNA sense strand
ccaguaacaugcuaaagau

SEQ ID NO: 1841095 - RNA, 19 nt, Homo sapiens
  misc_RNA (1)...(19): siRNA sense strand
gcaaagggagauuguaaau

SEQ ID NO: 1841096 - RNA, 19 nt, Homo sapiens
  misc_RNA (1)...(19): siRNA sense strand
gaauggagcagagagguaa

SEQ ID NO: 1841097 - RNA, 19 nt, Homo sapiens
  misc_RNA (1)...(19): siRNA sense strand
aucaagaucuccuaaguaa

SEQ ID NO: 1841098 - RNA, 19 nt, Homo sapiens
  misc_RNA (1)...(19): siRNA sense strand
caaagggagauuguaaaua

SEQ ID NO: 1841099 - RNA, 19 nt, Homo sapiens
  misc_RNA (1)...(19): siRNA sense strand
cagguaggcuguggaauug

SEQ ID NO: 1841100 - RNA, 19 nt, Homo sapiens
  misc_RNA (1)...(19): siRNA sense strand
guaucaagaucuccuaagu

SEQ ID NO: 1841101 - RNA, 19 nt, Homo sapiens
  misc_RNA (1)...(19): siRNA sense strand
ccagguaggcuguggaauu

SEQ ID NO: 1841102 - RNA, 19 nt, Homo sapiens
  misc_RNA (1)...(19): siRNA sense strand
cuacuauguuugccaauau

SEQ ID NO: 1841103 - RNA, 19 nt, Homo sapiens
  misc_RNA (1)...(19): siRNA sense strand
ggaauggagcagagaggua

SEQ ID NO: 1841104 - RNA, 19 nt, Homo sapiens
  misc_RNA (1)...(19): siRNA sense strand
uaacugugauuccuugaag

SEQ ID NO: 1841105 - RNA, 19 nt, Homo sapiens
  misc_RNA (1)...(19): siRNA sense strand
gugcaaagggagauuguaa

SEQ ID NO: 1841106 - RNA, 19 nt, Homo sapiens
  misc_RNA (1)...(19): siRNA sense strand
caagaucuccuaaguaacu

SEQ ID NO: 1841107 - RNA, 19 nt, Homo sapiens
  misc_RNA (1)...(19): siRNA sense strand
gcaguuguuggacauuaua

SEQ ID NO: 1841108 - RNA, 19 nt, Homo sapiens
  misc_RNA (1)...(19): siRNA sense strand
uacaagauguggugagaau

SEQ ID NO: 1841109 - RNA, 19 nt, Homo sapiens
  misc_RNA (1)...(19): siRNA sense strand
guaacaugcuaaagaugga

SEQ ID NO: 1841110 - RNA, 19 nt, Homo sapiens
  misc_RNA (1)...(19): siRNA sense strand
uaaacacaaugaacuaagg

SEQ ID NO: 1841111 - RNA, 19 nt, Homo sapiens
  misc_RNA (1)...(19): siRNA sense strand
gccaguaacaugcuaaaga

SEQ ID NO: 1841112 - RNA, 19 nt, Homo sapiens
  misc_RNA (1)...(19): siRNA sense strand
uaucaagaucuccuaagua

SEQ ID NO: 1841113 - RNA, 19 nt, Homo sapiens
  misc_RNA (1)...(19): siRNA sense strand
augacgagauccuagauuu

SEQ ID NO: 1841114 - RNA, 19 nt, Homo sapiens
  misc_RNA (1)...(19): siRNA sense strand
gcaccaauaguugccagua

SEQ ID NO: 1841115 - RNA, 19 nt, Homo sapiens
  misc_RNA (1)...(19): siRNA sense strand
uaacaacgaaugcccaaag

SEQ ID NO: 1841116 - RNA, 19 nt, Homo sapiens
  misc_RNA (1)...(19): siRNA sense strand
aauauuguccugcugguaa

SEQ ID NO: 1841117 - RNA, 19 nt, Homo sapiens
  misc_RNA (1)...(19): siRNA sense strand
gggagauuguaaauaaaca

SEQ ID NO: 1841118 - RNA, 19 nt, Homo sapiens
  misc_RNA (1)...(19): siRNA sense strand
caccaauaguugccaguau

SEQ ID NO: 1841119 - RNA, 19 nt, Homo sapiens
  misc_RNA (1)...(19): siRNA sense strand
gacauuauacucagcuugu

SEQ ID NO: 1841120 - RNA, 19 nt, Homo sapiens
  misc_RNA (1)...(19): siRNA sense strand
gaccaaagagucccaaugc

SEQ ID NO: 1841121 - RNA, 19 nt, Homo sapiens
  misc_RNA (1)...(19): siRNA sense strand
gaacuaaggaaagcagucu

SEQ ID NO: 1841122 - RNA, 19 nt, Homo sapiens
  misc_RNA (1)...(19): siRNA sense strand
acuacuauguuugccaaua

SEQ ID NO: 1841123 - RNA, 19 nt, Homo sapiens
  misc_RNA (1)...(19): siRNA sense strand
ccgguguuguuucugguua

SEQ ID NO: 1841124 - RNA, 19 nt, Homo sapiens
  misc_RNA (1)...(19): siRNA sense strand
cuacuugccuaugugagaa

SEQ ID NO: 1841125 - RNA, 19 nt, Homo sapiens
  misc_RNA (1)...(19): siRNA sense strand
gcuguggaauugccuacug

SEQ ID NO: 1841126 - RNA, 19 nt, Homo sapiens
  misc_RNA (1)...(19): siRNA sense strand
acaaaggacuaugcaccaa

SEQ ID NO: 1841127 - RNA, 19 nt, Homo sapiens
  misc_RNA (1)...(19): siRNA sense strand
ugaugacugugacaaagga

SEQ ID NO: 1841128 - RNA, 19 nt, Homo sapiens
  misc_RNA (1)...(19): siRNA sense strand
gcuacuugccuaugugaga

SEQ ID NO: 1841129 - RNA, 19 nt, Homo sapiens
  misc_RNA (1)...(19): siRNA sense strand
caaugcaguuguuggacau

SEQ ID NO: 1841130 - RNA, 19 nt, Homo sapiens
  misc_RNA (1)...(19): siRNA sense strand
acacaaugaacuaaggaaa

SEQ ID NO: 1841131 - RNA, 19 nt, Homo sapiens
  misc_RNA (1)...(19): siRNA sense strand
caaaggacuaugcaccaau

SEQ ID NO: 1841132 - RNA, 19 nt, Homo sapiens
  misc_RNA (1)...(19): siRNA sense strand
cauuauacucagcuuguuu

SEQ ID NO: 1841133 - RNA, 19 nt, Homo sapiens
  misc_RNA (1)...(19): siRNA sense strand
acaaugaacuaaggaaagc

SEQ ID NO: 1841134 - RNA, 19 nt, Homo sapiens
  misc_RNA (1)...(19): siRNA sense strand
gguaugacgagauccuaga

SEQ ID NO: 1841135 - RNA, 19 nt, Homo sapiens
  misc_RNA (1)...(19): siRNA sense strand
ccaauaguugccaguauca

SEQ ID NO: 1841136 - RNA, 19 nt, Homo sapiens
  misc_RNA (1)...(19): siRNA sense strand
guaacugugauuccuugaa

SEQ ID NO: 1841137 - RNA, 19 nt, Homo sapiens
  misc_RNA (1)...(19): siRNA sense strand
uggcugugaacaugaguua

SEQ ID NO: 1841138 - RNA, 19 nt, Homo sapiens
  misc_RNA (1)...(19): siRNA sense strand
gaaucucuauaugucaagu

SEQ ID NO: 1841139 - RNA, 19 nt, Homo sapiens
  misc_RNA (1)...(19): siRNA sense strand
augcaguuguuggacauua

SEQ ID NO: 1841140 - RNA, 19 nt, Homo sapiens
  misc_RNA (1)...(19): siRNA sense strand
aagcugguaugacgagauc

SEQ ID NO: 1841141 - RNA, 19 nt, Homo sapiens
  misc_RNA (1)...(19): siRNA sense strand
gcaauccaaagcugguaug

SEQ ID NO: 1841142 - RNA, 19 nt, Homo sapiens
  misc_RNA (1)...(19): siRNA sense strand
gcaaaaccaguacaagaug

SEQ ID NO: 1841143 - RNA, 19 nt, Homo sapiens
  misc_RNA (1)...(19): siRNA sense strand
uaaguaacugugauuccuu

SEQ ID NO: 1841144 - RNA, 19 nt, Homo sapiens
  misc_RNA (1)...(19): siRNA sense strand
cuaaguaacugugauuccu

SEQ ID NO: 1841145 - RNA, 19 nt, Homo sapiens
  misc_RNA (1)...(19): siRNA sense strand
ccugaugacugugacaaag

SEQ ID NO: 1841146 - RNA, 19 nt, Homo sapiens
  misc_RNA (1)...(19): siRNA sense strand
gaaagaauaccccguacca

SEQ ID NO: 1841147 - RNA, 19 nt, Homo sapiens
  misc_RNA (1)...(19): siRNA sense strand
gcaagugcaaagggagauu

SEQ ID NO: 1841148 - RNA, 19 nt, Homo sapiens
  misc_RNA (1)...(19): siRNA sense strand
caaaaccaguacaagaugu

SEQ ID NO: 1841149 - RNA, 19 nt, Homo sapiens
  misc_RNA (1)...(19): siRNA sense strand
ucucuccaccugccaguaa

SEQ ID NO: 1841150 - RNA, 19 nt, Homo sapiens
  misc_RNA (1)...(19): siRNA sense strand
ugacugugacaaaggacua

SEQ ID NO: 1841151 - RNA, 19 nt, Homo sapiens
  misc_RNA (1)...(19): siRNA sense strand
aaagagucccaaugcaguu

SEQ ID NO: 1841152 - RNA, 19 nt, Homo sapiens
  misc_RNA (1)...(19): siRNA sense strand
aguacaagauguggugaga

SEQ ID NO: 1841153 - RNA, 19 nt, Homo sapiens
  misc_RNA (1)...(19): siRNA sense strand
caaaggugggcaaacaagu

SEQ ID NO: 1841154 - RNA, 19 nt, Homo sapiens
  misc_RNA (1)...(19): siRNA sense strand
ccaaaggugggcaaacaag

SEQ ID NO: 1841155 - RNA, 19 nt, Homo sapiens
  misc_RNA (1)...(19): siRNA sense strand
ugugcugcuuccaucuuua

SEQ ID NO: 1841156 - RNA, 19 nt, Homo sapiens
  misc_RNA (1)...(19): siRNA sense strand
aaacacaaugaacuaagga

SEQ ID NO: 1841157 - RNA, 19 nt, Homo sapiens
  misc_RNA (1)...(19): siRNA sense strand
caauauuguccugcuggua

SEQ ID NO: 1841158 - RNA, 19 nt, Homo sapiens
  misc_RNA (1)...(19): siRNA sense strand
ccaaucaagauagucuaaa

SEQ ID NO: 1841159 - RNA, 19 nt, Homo sapiens
  misc_RNA (1)...(19): siRNA sense strand
aaaggugggcaaacaagug

SEQ ID NO: 1841160 - RNA, 19 nt, Homo sapiens
  misc_RNA (1)...(19): siRNA sense strand
guacaagauguggugagaa

SEQ ID NO: 1841161 - RNA, 19 nt, Homo sapiens
  misc_RNA (1)...(19): siRNA sense strand
accaauaguugccaguauc

SEQ ID NO: 1841162 - RNA, 19 nt, Homo sapiens
  misc_RNA (1)...(19): siRNA sense strand
cgguugcccugaugacugu

SEQ ID NO: 1841163 - RNA, 19 nt, Homo sapiens
  misc_RNA (1)...(19): siRNA sense strand
gagucccaaugcaguuguu

SEQ ID NO: 1841164 - RNA, 19 nt, Homo sapiens
  misc_RNA (1)...(19): siRNA sense strand
caagugcaaagggagauug

SEQ ID NO: 1841165 - RNA, 19 nt, Homo sapiens
  misc_RNA (1)...(19): siRNA sense strand
gcugugaacaugaguuacu

SEQ ID NO: 1841166 - RNA, 19 nt, Homo sapiens
  misc_RNA (1)...(19): siRNA sense strand
cacaaugaacuaaggaaag

SEQ ID NO: 1841167 - RNA, 19 nt, Homo sapiens
  misc_RNA (1)...(19): siRNA sense strand
ccuacugucccaaucaaga

SEQ ID NO: 1841168 - RNA, 19 nt, Homo sapiens
  misc_RNA (1)...(19): siRNA sense strand
cugugcugcuuccaucuuu

SEQ ID NO: 1841169 - RNA, 19 nt, Homo sapiens
  misc_RNA (1)...(19): siRNA sense strand
guccugcugguaauaauau

SEQ ID NO: 1841170 - RNA, 19 nt, Homo sapiens
  misc_RNA (1)...(19): siRNA sense strand
uaaccacccaguugcaagu

SEQ ID NO: 1841171 - RNA, 19 nt, Homo sapiens
  misc_RNA (1)...(19): siRNA sense strand
ggaagaagcuuguucguaa

SEQ ID NO: 1841172 - RNA, 19 nt, Homo sapiens
  misc_RNA (1)...(19): siRNA sense strand
gaagauugcugaugauaaa

SEQ ID NO: 1841173 - RNA, 19 nt, Homo sapiens
  misc_RNA (1)...(19): siRNA sense strand
ggaagaagcuauucaguug

SEQ ID NO: 1841174 - RNA, 19 nt, Homo sapiens
  misc_RNA (1)...(19): siRNA sense strand
gcaaggacaucucuacaaa

SEQ ID NO: 1841175 - RNA, 19 nt, Homo sapiens
  misc_RNA (1)...(19): siRNA sense strand
ugagagaacugauuucaaa

SEQ ID NO: 1841176 - RNA, 19 nt, Homo sapiens
  misc_RNA (1)...(19): siRNA sense strand
ucaagaagauugcugauga

SEQ ID NO: 1841177 - RNA, 19 nt, Homo sapiens
  misc_RNA (1)...(19): siRNA sense strand
gaaguuaacagaaugauga

SEQ ID NO: 1841178 - RNA, 19 nt, Homo sapiens
  misc_RNA (1)...(19): siRNA sense strand
gggaacagaugaagaagaa

SEQ ID NO: 1841179 - RNA, 19 nt, Homo sapiens
  misc_RNA (1)...(19): siRNA sense strand
gaacacgucuugcuaaacu

SEQ ID NO: 1841180 - RNA, 19 nt, Homo sapiens
  misc_RNA (1)...(19): siRNA sense strand
gaagaagcuuguucguaaa

SEQ ID NO: 1841181 - RNA, 19 nt, Homo sapiens
  misc_RNA (1)...(19): siRNA sense strand
ccagucaacuucugaauug

SEQ ID NO: 1841182 - RNA, 19 nt, Homo sapiens
  misc_RNA (1)...(19): siRNA sense strand
ggacaucucuacaaauuac

SEQ ID NO: 1841183 - RNA, 19 nt, Homo sapiens
  misc_RNA (1)...(19): siRNA sense strand
agacgaagaugaagaaaug

SEQ ID NO: 1841184 - RNA, 19 nt, Homo sapiens
  misc_RNA (1)...(19): siRNA sense strand
agaagaaucugaugaugaa

SEQ ID NO: 1841185 - RNA, 19 nt, Homo sapiens
  misc_RNA (1)...(19): siRNA sense strand
caauuacccuugucuuaaa

SEQ ID NO: 1841186 - RNA, 19 nt, Homo sapiens
  misc_RNA (1)...(19): siRNA sense strand
gaagaugaauacaaagcuu

SEQ ID NO: 1841187 - RNA, 19 nt, Homo sapiens
  misc_RNA (1)...(19): siRNA sense strand
gaagauggccagucaacuu

SEQ ID NO: 1841188 - RNA, 19 nt, Homo sapiens
  misc_RNA (1)...(19): siRNA sense strand
ggagugaaguucgaugaaa

SEQ ID NO: 1841189 - RNA, 19 nt, Homo sapiens
  misc_RNA (1)...(19): siRNA sense strand
gaaagaagaaucugaugau

SEQ ID NO: 1841190 - RNA, 19 nt, Homo sapiens
  misc_RNA (1)...(19): siRNA sense strand
ugacgaauauggaucuaaa

SEQ ID NO: 1841191 - RNA, 19 nt, Homo sapiens
  misc_RNA (1)...(19): siRNA sense strand
gcgauuacauuaagcucua

SEQ ID NO: 1841192 - RNA, 19 nt, Homo sapiens
  misc_RNA (1)...(19): siRNA sense strand
gaacagaugaagaagaaga

SEQ ID NO: 1841193 - RNA, 19 nt, Homo sapiens
  misc_RNA (1)...(19): siRNA sense strand
uaaagcauauggagauaga

SEQ ID NO: 1841194 - RNA, 19 nt, Homo sapiens
  misc_RNA (1)...(19): siRNA sense strand
uaaggaagaugaagaugau

SEQ ID NO: 1841195 - RNA, 19 nt, Homo sapiens
  misc_RNA (1)...(19): siRNA sense strand
aaggacaucucuacaaauu

SEQ ID NO: 1841196 - RNA, 19 nt, Homo sapiens
  misc_RNA (1)...(19): siRNA sense strand
acagacgacuuccaugaua

SEQ ID NO: 1841197 - RNA, 19 nt, Homo sapiens
  misc_RNA (1)...(19): siRNA sense strand
ggagauagaauagaaagaa

SEQ ID NO: 1841198 - RNA, 19 nt, Homo sapiens
  misc_RNA (1)...(19): siRNA sense strand
cagaaccuguggaugaaua

SEQ ID NO: 1841199 - RNA, 19 nt, Homo sapiens
  misc_RNA (1)...(19): siRNA sense strand
ggaagaagaagcagccaaa

SEQ ID NO: 1841200 - RNA, 19 nt, Homo sapiens
  misc_RNA (1)...(19): siRNA sense strand
caaagaagagaaagaagaa

SEQ ID NO: 1841201 - RNA, 19 nt, Homo sapiens
  misc_RNA (1)...(19): siRNA sense strand
gcaagacgaagaugaagaa

SEQ ID NO: 1841202 - RNA, 19 nt, Homo sapiens
  misc_RNA (1)...(19): siRNA sense strand
ggcugaaucuucuccauuu

SEQ ID NO: 1841203 - RNA, 19 nt, Homo sapiens
  misc_RNA (1)...(19): siRNA sense strand
ucaguuggauggauuaaau

SEQ ID NO: 1841204 - RNA, 19 nt, Homo sapiens
  misc_RNA (1)...(19): siRNA sense strand
cagcaagacugaaacuguu

SEQ ID NO: 1841205 - RNA, 19 nt, Homo sapiens
  misc_RNA (1)...(19): siRNA sense strand
agaagaaccugcugcaugu

SEQ ID NO: 1841206 - RNA, 19 nt, Homo sapiens
  misc_RNA (1)...(19): siRNA sense strand
gacggaugaugaaguagua

SEQ ID NO: 1841207 - RNA, 19 nt, Homo sapiens
  misc_RNA (1)...(19): siRNA sense strand
gugaagcaguugagaaaga

SEQ ID NO: 1841208 - RNA, 19 nt, Homo sapiens
  misc_RNA (1)...(19): siRNA sense strand
ugaauugauuggccaguuu

SEQ ID NO: 1841209 - RNA, 19 nt, Homo sapiens
  misc_RNA (1)...(19): siRNA sense strand
agaagaaccugaagagaca

SEQ ID NO: 1841210 - RNA, 19 nt, Homo sapiens
  misc_RNA (1)...(19): siRNA sense strand
caacauaaacugcuuaagg

SEQ ID NO: 1841211 - RNA, 19 nt, Homo sapiens
  misc_RNA (1)...(19): siRNA sense strand
cgacuuccaugauaugaug

SEQ ID NO: 1841212 - RNA, 19 nt, Homo sapiens
  misc_RNA (1)...(19): siRNA sense strand
acugggaacuuaugaauga

SEQ ID NO: 1841213 - RNA, 19 nt, Homo sapiens
  misc_RNA (1)...(19): siRNA sense strand
gaagaaacagcaaaggaau

SEQ ID NO: 1841214 - RNA, 19 nt, Homo sapiens
  misc_RNA (1)...(19): siRNA sense strand
aaagagcgauuacauuaag

SEQ ID NO: 1841215 - RNA, 19 nt, Homo sapiens
  misc_RNA (1)...(19): siRNA sense strand
aaagggcuaugaaguuauu

SEQ ID NO: 1841216 - RNA, 19 nt, Homo sapiens
  misc_RNA (1)...(19): siRNA sense strand
gaaaugaggaacuaacagu

SEQ ID NO: 1841217 - RNA, 19 nt, Homo sapiens
  misc_RNA (1)...(19): siRNA sense strand
ggagagucgugaagcaguu

SEQ ID NO: 1841218 - RNA, 19 nt, Homo sapiens
  misc_RNA (1)...(19): siRNA sense strand
aagaagaagcaucugauua

SEQ ID NO: 1841219 - RNA, 19 nt, Homo sapiens
  misc_RNA (1)...(19): siRNA sense strand
ggaagaugaagaugauaaa

SEQ ID NO: 1841220 - RNA, 19 nt, Homo sapiens
  misc_RNA (1)...(19): siRNA sense strand
agaagaagcagccaaagaa

SEQ ID NO: 1841221 - RNA, 19 nt, Homo sapiens
  misc_RNA (1)...(19): siRNA sense strand
ugauguggaugguacagua

SEQ ID NO: 1841222 - RNA, 19 nt, Homo sapiens
  misc_RNA (1)...(19): siRNA sense strand
aaaggaaucuacagcugaa

SEQ ID NO: 1841223 - RNA, 19 nt, Homo sapiens
  misc_RNA (1)...(19): siRNA sense strand
agaagcaucugauuaccuu

SEQ ID NO: 1841224 - RNA, 19 nt, Homo sapiens
  misc_RNA (1)...(19): siRNA sense strand
gcgagacucuucagcaaca

SEQ ID NO: 1841225 - RNA, 19 nt, Homo sapiens
  misc_RNA (1)...(19): siRNA sense strand
ccaaagaagagaaagaaga

SEQ ID NO: 1841226 - RNA, 19 nt, Homo sapiens
  misc_RNA (1)...(19): siRNA sense strand
caaaagaaguagaagaaga

SEQ ID NO: 1841227 - RNA, 19 nt, Homo sapiens
  misc_RNA (1)...(19): siRNA sense strand
gaauuaaggaagaugaaga

SEQ ID NO: 1841228 - RNA, 19 nt, Homo sapiens
  misc_RNA (1)...(19): siRNA sense strand
aaggacggaugaugaagua

SEQ ID NO: 1841229 - RNA, 19 nt, Homo sapiens
  misc_RNA (1)...(19): siRNA sense strand
ugaugaagcugcaguagag

SEQ ID NO: 1841230 - RNA, 19 nt, Homo sapiens
  misc_RNA (1)...(19): siRNA sense strand
auaaagcccuuaaggacaa

SEQ ID NO: 1841231 - RNA, 19 nt, Homo sapiens
  misc_RNA (1)...(19): siRNA sense strand
gggaacuuaugaaugauau

SEQ ID NO: 1841232 - RNA, 19 nt, Homo sapiens
  misc_RNA (1)...(19): siRNA sense strand
ggacugggaacuuaugaau

SEQ ID NO: 1841233 - RNA, 19 nt, Homo sapiens
  misc_RNA (1)...(19): siRNA sense strand
acaggaagauggccaguca

SEQ ID NO: 1841234 - RNA, 19 nt, Homo sapiens
  misc_RNA (1)...(19): siRNA sense strand
gaagaagaaccugaagaga

SEQ ID NO: 1841235 - RNA, 19 nt, Homo sapiens
  misc_RNA (1)...(19): siRNA sense strand
gaacauugacccugaugca

SEQ ID NO: 1841236 - RNA, 19 nt, Homo sapiens
  misc_RNA (1)...(19): siRNA sense strand
caagaagauugcugaugau

SEQ ID NO: 1841237 - RNA, 19 nt, Homo sapiens
  misc_RNA (1)...(19): siRNA sense strand
guaaaacgcuggacaugau

SEQ ID NO: 1841238 - RNA, 19 nt, Homo sapiens
  misc_RNA (1)...(19): siRNA sense strand
acaaagcuuucuacaaauc

SEQ ID NO: 1841239 - RNA, 19 nt, Homo sapiens
  misc_RNA (1)...(19): siRNA sense strand
gcagcaagacugaaacugu

SEQ ID NO: 1841240 - RNA, 19 nt, Homo sapiens
  misc_RNA (1)...(19): siRNA sense strand
caaaugcuucugaugcuuu

SEQ ID NO: 1841241 - RNA, 19 nt, Homo sapiens
  misc_RNA (1)...(19): siRNA sense strand
uagaagaggaucuggguaa

SEQ ID NO: 1841242 - RNA, 19 nt, Homo sapiens
  misc_RNA (1)...(19): siRNA sense strand
ggacggggaacgacaauua

SEQ ID NO: 1841243 - RNA, 19 nt, Homo sapiens
  misc_RNA (1)...(19): siRNA sense strand
aaaugcuucugaugcuuua

SEQ ID NO: 1841244 - RNA, 19 nt, Homo sapiens
  misc_RNA (1)...(19): siRNA sense strand
ugaagcaguugagaaagaa

SEQ ID NO: 1841245 - RNA, 19 nt, Homo sapiens
  misc_RNA (1)...(19): siRNA sense strand
gaucuccccuugaauguuu

SEQ ID NO: 1841246 - RNA, 19 nt, Homo sapiens
  misc_RNA (1)...(19): siRNA sense strand
cugauuaccuugaauugga

SEQ ID NO: 1841247 - RNA, 19 nt, Homo sapiens
  misc_RNA (1)...(19): siRNA sense strand
ccagagaagaguugguuaa

SEQ ID NO: 1841248 - RNA, 19 nt, Homo sapiens
  misc_RNA (1)...(19): siRNA sense strand
ucacagacgacuuccauga

SEQ ID NO: 1841249 - RNA, 19 nt, Homo sapiens
  misc_RNA (1)...(19): siRNA sense strand
gacaugaucaagaagauug

SEQ ID NO: 1841250 - RNA, 19 nt, Homo sapiens
  misc_RNA (1)...(19): siRNA sense strand
aaagaagaaucugaugaug

SEQ ID NO: 1841251 - RNA, 19 nt, Homo sapiens
  misc_RNA (1)...(19): siRNA sense strand
gacacccgcugaucagaga

SEQ ID NO: 1841252 - RNA, 19 nt, Homo sapiens
  misc_RNA (1)...(19): siRNA sense strand
gagugaaguucgaugaaag

SEQ ID NO: 1841253 - RNA, 19 nt, Homo sapiens
  misc_RNA (1)...(19): siRNA sense strand
gcuaugaaguuauuuaccu

SEQ ID NO: 1841254 - RNA, 19 nt, Homo sapiens
  misc_RNA (1)...(19): siRNA sense strand
ugaaucuucuccauuuguu

SEQ ID NO: 1841255 - RNA, 19 nt, Homo sapiens
  misc_RNA (1)...(19): siRNA sense strand
ggaacuaacagucaaaauu

SEQ ID NO: 1841256 - RNA, 19 nt, Homo sapiens
  misc_RNA (1)...(19): siRNA sense strand
augcaaagguggaagaaga

SEQ ID NO: 1841257 - RNA, 19 nt, Homo sapiens
  misc_RNA (1)...(19): siRNA sense strand
uaccagacacuaaagcaua

SEQ ID NO: 1841258 - RNA, 19 nt, Homo sapiens
  misc_RNA (1)...(19): siRNA sense strand
ugaaagauaaagcccuuaa

SEQ ID NO: 1841259 - RNA, 19 nt, Homo sapiens
  misc_RNA (1)...(19): siRNA sense strand
ccagaauguugccaaggaa

SEQ ID NO: 1841260 - RNA, 19 nt, Homo sapiens
  misc_RNA (1)...(19): siRNA sense strand
uccaugauaugaugccuaa

SEQ ID NO: 1841261 - RNA, 19 nt, Homo sapiens
  misc_RNA (1)...(19): siRNA sense strand
uggauuaaaugcaucacaa

SEQ ID NO: 1841262 - RNA, 19 nt, Homo sapiens
  misc_RNA (1)...(19): siRNA sense strand
acacagagcaagacgaaga

SEQ ID NO: 1841263 - RNA, 19 nt, Homo sapiens
  misc_RNA (1)...(19): siRNA sense strand
gcagaagacacaacagaag

SEQ ID NO: 1841264 - RNA, 19 nt, Homo sapiens
  misc_RNA (1)...(19): siRNA sense strand
gagagaggaagaagcuauu

SEQ ID NO: 1841265 - RNA, 19 nt, Homo sapiens
  misc_RNA (1)...(19): siRNA sense strand
gagcugacgaugaaguuga

SEQ ID NO: 1841266 - RNA, 19 nt, Homo sapiens
  misc_RNA (1)...(19): siRNA sense strand
gcagagaccaucaaaagaa

SEQ ID NO: 1841267 - RNA, 19 nt, Homo sapiens
  misc_RNA (1)...(19): siRNA sense strand
cagacgacuuccaugauau

SEQ ID NO: 1841268 - RNA, 19 nt, Homo sapiens
  misc_RNA (1)...(19): siRNA sense strand
agaagaaacagcaaaggaa

SEQ ID NO: 1841269 - RNA, 19 nt, Homo sapiens
  misc_RNA (1)...(19): siRNA sense strand
ggauuaaaugcaucacaaa

SEQ ID NO: 1841270 - RNA, 19 nt, Homo sapiens
  misc_RNA (1)...(19): siRNA sense strand
aacauaaacugcuuaaggu

SEQ ID NO: 1841271 - RNA, 19 nt, Homo sapiens
  misc_RNA (1)...(19): siRNA sense strand
gcacagagcuugaugauau

SEQ ID NO: 1841272 - RNA, 19 nt, Homo sapiens
  misc_RNA (1)...(19): siRNA sense strand
gaacacaaaucugaaugua

SEQ ID NO: 1841273 - RNA, 19 nt, Homo sapiens
  misc_RNA (1)...(19): siRNA sense strand
caaagaugcuauugugaua

SEQ ID NO: 1841274 - RNA, 19 nt, Homo sapiens
  misc_RNA (1)...(19): siRNA sense strand
ucacaucucuuuacuguau

SEQ ID NO: 1841275 - RNA, 19 nt, Homo sapiens
  misc_RNA (1)...(19): siRNA sense strand
ggaagcaggucaccaagau

SEQ ID NO: 1841276 - RNA, 19 nt, Homo sapiens
  misc_RNA (1)...(19): siRNA sense strand
ggcaguagcugaucucaug

SEQ ID NO: 1841277 - RNA, 19 nt, Homo sapiens
  misc_RNA (1)...(19): siRNA sense strand
uacaagaucuccaggaauu

SEQ ID NO: 1841278 - RNA, 19 nt, Homo sapiens
  misc_RNA (1)...(19): siRNA sense strand
uaacagccuuuaccauuga

SEQ ID NO: 1841279 - RNA, 19 nt, Homo sapiens
  misc_RNA (1)...(19): siRNA sense strand
cuacaggacucuagugguu

SEQ ID NO: 1841280 - RNA, 19 nt, Homo sapiens
  misc_RNA (1)...(19): siRNA sense strand
caacagagaaaccugcuaa

SEQ ID NO: 1841281 - RNA, 19 nt, Homo sapiens
  misc_RNA (1)...(19): siRNA sense strand
gcuacaagaucuccaggaa

SEQ ID NO: 1841282 - RNA, 19 nt, Homo sapiens
  misc_RNA (1)...(19): siRNA sense strand
caucuuacuuguacucauu

SEQ ID NO: 1841283 - RNA, 19 nt, Homo sapiens
  misc_RNA (1)...(19): siRNA sense strand
cagagaaaccugcuaacua

SEQ ID NO: 1841284 - RNA, 19 nt, Homo sapiens
  misc_RNA (1)...(19): siRNA sense strand
gagcagugguggccuuaga

SEQ ID NO: 1841285 - RNA, 19 nt, Homo sapiens
  misc_RNA (1)...(19): siRNA sense strand
guaauucuguuugcccuuu

SEQ ID NO: 1841286 - RNA, 19 nt, Homo sapiens
  misc_RNA (1)...(19): siRNA sense strand
caacauaacagacaguauc

SEQ ID NO: 1841287 - RNA, 19 nt, Homo sapiens
  misc_RNA (1)...(19): siRNA sense strand
agagaaaccugcuaacuac

SEQ ID NO: 1841288 - RNA, 19 nt, Homo sapiens
  misc_RNA (1)...(19): siRNA sense strand
cuacucaccuauuuaccua

SEQ ID NO: 1841289 - RNA, 19 nt, Homo sapiens
  misc_RNA (1)...(19): siRNA sense strand
gagguauccuuuagccaaa

SEQ ID NO: 1841290 - RNA, 19 nt, Homo sapiens
  misc_RNA (1)...(19): siRNA sense strand
gaauuaaugcauccucuug

SEQ ID NO: 1841291 - RNA, 19 nt, Homo sapiens
  misc_RNA (1)...(19): siRNA sense strand
cugcuuggcuucugaggua

SEQ ID NO: 1841292 - RNA, 19 nt, Homo sapiens
  misc_RNA (1)...(19): siRNA sense strand
uaaaucccauuccuucaga

SEQ ID NO: 1841293 - RNA, 19 nt, Homo sapiens
  misc_RNA (1)...(19): siRNA sense strand
aauaacagccuuuaccauu

SEQ ID NO: 1841294 - RNA, 19 nt, Homo sapiens
  misc_RNA (1)...(19): siRNA sense strand
gcagaagccaacagagaaa

SEQ ID NO: 1841295 - RNA, 19 nt, Homo sapiens
  misc_RNA (1)...(19): siRNA sense strand
gaauuacuacucaccuauu

SEQ ID NO: 1841296 - RNA, 19 nt, Homo sapiens
  misc_RNA (1)...(19): siRNA sense strand
gaaaccugcuaacuacagu

SEQ ID NO: 1841297 - RNA, 19 nt, Homo sapiens
  misc_RNA (1)...(19): siRNA sense strand
gcaagcagaagccaacaga

SEQ ID NO: 1841298 - RNA, 19 nt, Homo sapiens
  misc_RNA (1)...(19): siRNA sense strand
caacagcacaguaucuuca

SEQ ID NO: 1841299 - RNA, 19 nt, Homo sapiens
  misc_RNA (1)...(19): siRNA sense strand
uagcugaucucauggucuu

SEQ ID NO: 1841300 - RNA, 19 nt, Homo sapiens
  misc_RNA (1)...(19): siRNA sense strand
caaggaagcaggucaccaa

SEQ ID NO: 1841301 - RNA, 19 nt, Homo sapiens
  misc_RNA (1)...(19): siRNA sense strand
ggaauuacuacucaccuau

SEQ ID NO: 1841302 - RNA, 19 nt, Homo sapiens
  misc_RNA (1)...(19): siRNA sense strand
caacccaucagaacacaaa

SEQ ID NO: 1841303 - RNA, 19 nt, Homo sapiens
  misc_RNA (1)...(19): siRNA sense strand
auaacagccuuuaccauug

SEQ ID NO: 1841304 - RNA, 19 nt, Homo sapiens
  misc_RNA (1)...(19): siRNA sense strand
ucaaggagucagaccauuu

SEQ ID NO: 1841305 - RNA, 19 nt, Homo sapiens
  misc_RNA (1)...(19): siRNA sense strand
acaguguggcccuaaauua

SEQ ID NO: 1841306 - RNA, 19 nt, Homo sapiens
  misc_RNA (1)...(19): siRNA sense strand
ggacuuuggugucuuuuau

SEQ ID NO: 1841307 - RNA, 19 nt, Homo sapiens
  misc_RNA (1)...(19): siRNA sense strand
ugcauccucuuguucaaua

SEQ ID NO: 1841308 - RNA, 19 nt, Homo sapiens
  misc_RNA (1)...(19): siRNA sense strand
uuucacaucucuuuacugu

SEQ ID NO: 1841309 - RNA, 19 nt, Homo sapiens
  misc_RNA (1)...(19): siRNA sense strand
gcacaguaucuucaaggaa

SEQ ID NO: 1841310 - RNA, 19 nt, Homo sapiens
  misc_RNA (1)...(19): siRNA sense strand
uaaauuacagcgucaucaa

SEQ ID NO: 1841311 - RNA, 19 nt, Homo sapiens
  misc_RNA (1)...(19): siRNA sense strand
gauauccuguggcuacaag

SEQ ID NO: 1841312 - RNA, 19 nt, Homo sapiens
  misc_RNA (1)...(19): siRNA sense strand
ucaacccggugauuuacaa

SEQ ID NO: 1841313 - RNA, 19 nt, Homo sapiens
  misc_RNA (1)...(19): siRNA sense strand
cuauuuaccuaauggacuu

SEQ ID NO: 1841314 - RNA, 19 nt, Homo sapiens
  misc_RNA (1)...(19): siRNA sense strand
ugucugggcuuucacaucu

SEQ ID NO: 1841315 - RNA, 19 nt, Homo sapiens
  misc_RNA (1)...(19): siRNA sense strand
gcauccucuuguucaauaa

SEQ ID NO: 1841316 - RNA, 19 nt, Homo sapiens
  misc_RNA (1)...(19): siRNA sense strand
caaggagucagaccauuuc

SEQ ID NO: 1841317 - RNA, 19 nt, Homo sapiens
  misc_RNA (1)...(19): siRNA sense strand
ucauuucucuccaguccuu

SEQ ID NO: 1841318 - RNA, 19 nt, Homo sapiens
  misc_RNA (1)...(19): siRNA sense strand
ggaauuaaugcauccucuu

SEQ ID NO: 1841319 - RNA, 19 nt, Homo sapiens
  misc_RNA (1)...(19): siRNA sense strand
ggucaccaucuuacuugua

SEQ ID NO: 1841320 - RNA, 19 nt, Homo sapiens
  misc_RNA (1)...(19): siRNA sense strand
ggacucuagugguugucaa

SEQ ID NO: 1841321 - RNA, 19 nt, Homo sapiens
  misc_RNA (1)...(19): siRNA sense strand
aauggacuuuggugucuuu

SEQ ID NO: 1841322 - RNA, 19 nt, Homo sapiens
  misc_RNA (1)...(19): siRNA sense strand
cuucugagguauccuuuag

SEQ ID NO: 1841323 - RNA, 19 nt, Homo sapiens
  misc_RNA (1)...(19): siRNA sense strand
aaucucaugucccagaaau

SEQ ID NO: 1841324 - RNA, 19 nt, Homo sapiens
  misc_RNA (1)...(19): siRNA sense strand
aauauuagcaccuacaaag

SEQ ID NO: 1841325 - RNA, 19 nt, Homo sapiens
  misc_RNA (1)...(19): siRNA sense strand
cuaccguccucuauggauu

SEQ ID NO: 1841326 - RNA, 19 nt, Homo sapiens
  misc_RNA (1)...(19): siRNA sense strand
aagaugcuauugugauauc

SEQ ID NO: 1841327 - RNA, 19 nt, Homo sapiens
  misc_RNA (1)...(19): siRNA sense strand
gcaccuacaaagaugcuau

SEQ ID NO: 1841328 - RNA, 19 nt, Homo sapiens
  misc_RNA (1)...(19): siRNA sense strand
aagcagaagccaacagaga

SEQ ID NO: 1841329 - RNA, 19 nt, Homo sapiens
  misc_RNA (1)...(19): siRNA sense strand
cuaauggacuuuggugucu

SEQ ID NO: 1841330 - RNA, 19 nt, Homo sapiens
  misc_RNA (1)...(19): siRNA sense strand
ucaccuauuuaccuaaugg

SEQ ID NO: 1841331 - RNA, 19 nt, Homo sapiens
  misc_RNA (1)...(19): siRNA sense strand
gggcuuucacaucucuuua

SEQ ID NO: 1841332 - RNA, 19 nt, Homo sapiens
  misc_RNA (1)...(19): siRNA sense strand
aggaauuacuacucaccua

SEQ ID NO: 1841333 - RNA, 19 nt, Homo sapiens
  misc_RNA (1)...(19): siRNA sense strand
uugcuggaucucaauauua

SEQ ID NO: 1841334 - RNA, 19 nt, Homo sapiens
  misc_RNA (1)...(19): siRNA sense strand
cuccaguccuuuccaagaa

SEQ ID NO: 1841335 - RNA, 19 nt, Homo sapiens
  misc_RNA (1)...(19): siRNA sense strand
aaacgagacagucagugaa

SEQ ID NO: 1841336 - RNA, 19 nt, Homo sapiens
  misc_RNA (1)...(19): siRNA sense strand
uccaguauuugggaauuaa

SEQ ID NO: 1841337 - RNA, 19 nt, Homo sapiens
  misc_RNA (1)...(19): siRNA sense strand
gcuggcagugguuguaauu

SEQ ID NO: 1841338 - RNA, 19 nt, Homo sapiens
  misc_RNA (1)...(19): siRNA sense strand
cauaacagacaguaucuac

SEQ ID NO: 1841339 - RNA, 19 nt, Homo sapiens
  misc_RNA (1)...(19): siRNA sense strand
caucaaagcccaguuucuc

SEQ ID NO: 1841340 - RNA, 19 nt, Homo sapiens
  misc_RNA (1)...(19): siRNA sense strand
auuaaugcauccucuuguu

SEQ ID NO: 1841341 - RNA, 19 nt, Homo sapiens
  misc_RNA (1)...(19): siRNA sense strand
uaaugcauccucuuguuca

SEQ ID NO: 1841342 - RNA, 19 nt, Homo sapiens
  misc_RNA (1)...(19): siRNA sense strand
acaccugcuuggcuucuga

SEQ ID NO: 1841343 - RNA, 19 nt, Homo sapiens
  misc_RNA (1)...(19): siRNA sense strand
gcagugguggccuuagaau

SEQ ID NO: 1841344 - RNA, 19 nt, Homo sapiens
  misc_RNA (1)...(19): siRNA sense strand
ggcagugguuguaauucug

SEQ ID NO: 1841345 - RNA, 19 nt, Homo sapiens
  misc_RNA (1)...(19): siRNA sense strand
gaagcaggucaccaagaug

SEQ ID NO: 1841346 - RNA, 19 nt, Homo sapiens
  misc_RNA (1)...(19): siRNA sense strand
caauauuagcaccuacaaa

SEQ ID NO: 1841347 - RNA, 19 nt, Homo sapiens
  misc_RNA (1)...(19): siRNA sense strand
cuugcuggaucucaauauu

SEQ ID NO: 1841348 - RNA, 19 nt, Homo sapiens
  misc_RNA (1)...(19): siRNA sense strand
gaugcuggcagugguugua

SEQ ID NO: 1841349 - RNA, 19 nt, Homo sapiens
  misc_RNA (1)...(19): siRNA sense strand
caguuucucugcacauuuu

SEQ ID NO: 1841350 - RNA, 19 nt, Homo sapiens
  misc_RNA (1)...(19): siRNA sense strand
gcagugguuguaauucugu

SEQ ID NO: 1841351 - RNA, 19 nt, Homo sapiens
  misc_RNA (1)...(19): siRNA sense strand
cuccaggaauuacuacuca

SEQ ID NO: 1841352 - RNA, 19 nt, Homo sapiens
  misc_RNA (1)...(19): siRNA sense strand
uguaugcucugguucuucu

SEQ ID NO: 1841353 - RNA, 19 nt, Homo sapiens
  misc_RNA (1)...(19): siRNA sense strand
ucucaugucccagaaauuc

SEQ ID NO: 1841354 - RNA, 19 nt, Homo sapiens
  misc_RNA (1)...(19): siRNA sense strand
cuccaguauuugggaauua

SEQ ID NO: 1841355 - RNA, 19 nt, Homo sapiens
  misc_RNA (1)...(19): siRNA sense strand
gcagaauuugcauuuaucu

SEQ ID NO: 1841356 - RNA, 19 nt, Homo sapiens
  misc_RNA (1)...(19): siRNA sense strand
acaggacucuagugguugu

SEQ ID NO: 1841357 - RNA, 19 nt, Homo sapiens
  misc_RNA (1)...(19): siRNA sense strand
gucaccaucuuacuuguac

SEQ ID NO: 1841358 - RNA, 19 nt, Homo sapiens
  misc_RNA (1)...(19): siRNA sense strand
uggcagugguuguaauucu

SEQ ID NO: 1841359 - RNA, 19 nt, Homo sapiens
  misc_RNA (1)...(19): siRNA sense strand
caucaugguaguccugguu

SEQ ID NO: 1841360 - RNA, 19 nt, Homo sapiens
  misc_RNA (1)...(19): siRNA sense strand
uauuagcaccuacaaagau

SEQ ID NO: 1841361 - RNA, 19 nt, Homo sapiens
  misc_RNA (1)...(19): siRNA sense strand
ugcuggaucucaauauuag

SEQ ID NO: 1841362 - RNA, 19 nt, Homo sapiens
  misc_RNA (1)...(19): siRNA sense strand
ggucuauggcuauguugga

SEQ ID NO: 1841363 - RNA, 19 nt, Homo sapiens
  misc_RNA (1)...(19): siRNA sense strand
cagcacagagcuugaugau

SEQ ID NO: 1841364 - RNA, 19 nt, Homo sapiens
  misc_RNA (1)...(19): siRNA sense strand
acaaucucaugucccagaa

SEQ ID NO: 1841365 - RNA, 19 nt, Homo sapiens
  misc_RNA (1)...(19): siRNA sense strand
caagaugcuggcagugguu

SEQ ID NO: 1841366 - RNA, 19 nt, Homo sapiens
  misc_RNA (1)...(19): siRNA sense strand
uccuucagauccuaaagaa

SEQ ID NO: 1841367 - RNA, 19 nt, Homo sapiens
  misc_RNA (1)...(19): siRNA sense strand
acaagaucuccaggaauua

SEQ ID NO: 1841368 - RNA, 19 nt, Homo sapiens
  misc_RNA (1)...(19): siRNA sense strand
agagguacauagcaaucug

SEQ ID NO: 1841369 - RNA, 19 nt, Homo sapiens
  misc_RNA (1)...(19): siRNA sense strand
caagaucuccaggaauuac

SEQ ID NO: 1841370 - RNA, 19 nt, Homo sapiens
  misc_RNA (1)...(19): siRNA sense strand
ccaguuucucugcacauuu

SEQ ID NO: 1841371 - RNA, 19 nt, Homo sapiens
  misc_RNA (1)...(19): siRNA sense strand
gaaaauggcugccugcuua

SEQ ID NO: 1841372 - RNA, 19 nt, Homo sapiens
  misc_RNA (1)...(19): siRNA sense strand
gaacaucuauugagacaag

SEQ ID NO: 1841373 - RNA, 19 nt, Homo sapiens
  misc_RNA (1)...(19): siRNA sense strand
ucaaggcacuuuaugauuu

SEQ ID NO: 1841374 - RNA, 19 nt, Homo sapiens
  misc_RNA (1)...(19): siRNA sense strand
ccaaagugaugaugaaauu

SEQ ID NO: 1841375 - RNA, 19 nt, Homo sapiens
  misc_RNA (1)...(19): siRNA sense strand
gagaauaaaggaaagcuua

SEQ ID NO: 1841376 - RNA, 19 nt, Homo sapiens
  misc_RNA (1)...(19): siRNA sense strand
ggagaggaauggcuauauu

SEQ ID NO: 1841377 - RNA, 19 nt, Homo sapiens
  misc_RNA (1)...(19): siRNA sense strand
caaaugagaacacagauaa

SEQ ID NO: 1841378 - RNA, 19 nt, Homo sapiens
  misc_RNA (1)...(19): siRNA sense strand
cagagaacccuguaauuua

SEQ ID NO: 1841379 - RNA, 19 nt, Homo sapiens
  misc_RNA (1)...(19): siRNA sense strand
ggauauaugugaaggaaug

SEQ ID NO: 1841380 - RNA, 19 nt, Homo sapiens
  misc_RNA (1)...(19): siRNA sense strand
gaaggugcauuuauuguca

SEQ ID NO: 1841381 - RNA, 19 nt, Homo sapiens
  misc_RNA (1)...(19): siRNA sense strand
gcaccaauguccauauaug

SEQ ID NO: 1841382 - RNA, 19 nt, Homo sapiens
  misc_RNA (1)...(19): siRNA sense strand
cuacacaauuuccguauuu

SEQ ID NO: 1841383 - RNA, 19 nt, Homo sapiens
  misc_RNA (1)...(19): siRNA sense strand
gagcacagaugaagagcuu

SEQ ID NO: 1841384 - RNA, 19 nt, Homo sapiens
  misc_RNA (1)...(19): siRNA sense strand
gaaaugcuacugaguguau

SEQ ID NO: 1841385 - RNA, 19 nt, Homo sapiens
  misc_RNA (1)...(19): siRNA sense strand
ccagagaacccuguaauuu

SEQ ID NO: 1841386 - RNA, 19 nt, Homo sapiens
  misc_RNA (1)...(19): siRNA sense strand
ggaauuguuuggucaguuc

SEQ ID NO: 1841387 - RNA, 19 nt, Homo sapiens
  misc_RNA (1)...(19): siRNA sense strand
uggaauaucuggagaggaa

SEQ ID NO: 1841388 - RNA, 19 nt, Homo sapiens
  misc_RNA (1)...(19): siRNA sense strand
gaagagaagauccaaguca

SEQ ID NO: 1841389 - RNA, 19 nt, Homo sapiens
  misc_RNA (1)...(19): siRNA sense strand
ggaaugacaagguacguuu

SEQ ID NO: 1841390 - RNA, 19 nt, Homo sapiens
  misc_RNA (1)...(19): siRNA sense strand
guacggaggcugccauaaa

SEQ ID NO: 1841391 - RNA, 19 nt, Homo sapiens
  misc_RNA (1)...(19): siRNA sense strand
ucacagagauugcggaaac

SEQ ID NO: 1841392 - RNA, 19 nt, Homo sapiens
  misc_RNA (1)...(19): siRNA sense strand
caaauaagaagcaauccaa

SEQ ID NO: 1841393 - RNA, 19 nt, Homo sapiens
  misc_RNA (1)...(19): siRNA sense strand
ggcagaacaucuauugaga

SEQ ID NO: 1841394 - RNA, 19 nt, Homo sapiens
  misc_RNA (1)...(19): siRNA sense strand
agagaacccuguaauuuag

SEQ ID NO: 1841395 - RNA, 19 nt, Homo sapiens
  misc_RNA (1)...(19): siRNA sense strand
gugcagaagcgacaaauga

SEQ ID NO: 1841396 - RNA, 19 nt, Homo sapiens
  misc_RNA (1)...(19): siRNA sense strand
ggagccaaguucccaauca

SEQ ID NO: 1841397 - RNA, 19 nt, Homo sapiens
  misc_RNA (1)...(19): siRNA sense strand
gcagaagaauaccugauac

SEQ ID NO: 1841398 - RNA, 19 nt, Homo sapiens
  misc_RNA (1)...(19): siRNA sense strand
gagccaaguucccaaucaa

SEQ ID NO: 1841399 - RNA, 19 nt, Homo sapiens
  misc_RNA (1)...(19): siRNA sense strand
gcaacuaugugacugaaaa

SEQ ID NO: 1841400 - RNA, 19 nt, Homo sapiens
  misc_RNA (1)...(19): siRNA sense strand
cagaacaucuauugagaca

SEQ ID NO: 1841401 - RNA, 19 nt, Homo sapiens
  misc_RNA (1)...(19): siRNA sense strand
aaggaaagcuuaggaagga

SEQ ID NO: 1841402 - RNA, 19 nt, Homo sapiens
  misc_RNA (1)...(19): siRNA sense strand
ucagccaauugucaaauaa

SEQ ID NO: 1841403 - RNA, 19 nt, Homo sapiens
  misc_RNA (1)...(19): siRNA sense strand
ucugaugucuggucauuug

SEQ ID NO: 1841404 - RNA, 19 nt, Homo sapiens
  misc_RNA (1)...(19): siRNA sense strand
ucaaucaaucccugaguua

SEQ ID NO: 1841405 - RNA, 19 nt, Homo sapiens
  misc_RNA (1)...(19): siRNA sense strand
gaaaucaggcagaacaucu

SEQ ID NO: 1841406 - RNA, 19 nt, Homo sapiens
  misc_RNA (1)...(19): siRNA sense strand
gugaaggaauggaauaucu

SEQ ID NO: 1841407 - RNA, 19 nt, Homo sapiens
  misc_RNA (1)...(19): siRNA sense strand
ugacagaguucauggaaaa

SEQ ID NO: 1841408 - RNA, 19 nt, Homo sapiens
  misc_RNA (1)...(19): siRNA sense strand
gcugaugggcaguuguuua

SEQ ID NO: 1841409 - RNA, 19 nt, Homo sapiens
  misc_RNA (1)...(19): siRNA sense strand
cgacaaaugagaacacaga

SEQ ID NO: 1841410 - RNA, 19 nt, Homo sapiens
  misc_RNA (1)...(19): siRNA sense strand
cauagaaacauuaccagaa

SEQ ID NO: 1841411 - RNA, 19 nt, Homo sapiens
  misc_RNA (1)...(19): siRNA sense strand
caggauauaugugaaggaa

SEQ ID NO: 1841412 - RNA, 19 nt, Homo sapiens
  misc_RNA (1)...(19): siRNA sense strand
gcaacuuuauggagucugu

SEQ ID NO: 1841413 - RNA, 19 nt, Homo sapiens
  misc_RNA (1)...(19): siRNA sense strand
agacacgccuuucaaucaa

SEQ ID NO: 1841414 - RNA, 19 nt, Homo sapiens
  misc_RNA (1)...(19): siRNA sense strand
uggcaccaauguccauaua

SEQ ID NO: 1841415 - RNA, 19 nt, Homo sapiens
  misc_RNA (1)...(19): siRNA sense strand
gaauggcggucacauaucc

SEQ ID NO: 1841416 - RNA, 19 nt, Homo sapiens
  misc_RNA (1)...(19): siRNA sense strand
gauuggaagcggucaguuu

SEQ ID NO: 1841417 - RNA, 19 nt, Homo sapiens
  misc_RNA (1)...(19): siRNA sense strand
cguggaagcuauuucugaa

SEQ ID NO: 1841418 - RNA, 19 nt, Homo sapiens
  misc_RNA (1)...(19): siRNA sense strand
guacagcaguaaaucugau

SEQ ID NO: 1841419 - RNA, 19 nt, Homo sapiens
  misc_RNA (1)...(19): siRNA sense strand
caagguacguuuuggauga

SEQ ID NO: 1841420 - RNA, 19 nt, Homo sapiens
  misc_RNA (1)...(19): siRNA sense strand
aaagaaggugcauuuauug

SEQ ID NO: 1841421 - RNA, 19 nt, Homo sapiens
  misc_RNA (1)...(19): siRNA sense strand
ggaaagcuuaggaaggaaa

SEQ ID NO: 1841422 - RNA, 19 nt, Homo sapiens
  misc_RNA (1)...(19): siRNA sense strand
gaagaggccaaagugauga

SEQ ID NO: 1841423 - RNA, 19 nt, Homo sapiens
  misc_RNA (1)...(19): siRNA sense strand
aagagaagauccaagucaa

SEQ ID NO: 1841424 - RNA, 19 nt, Homo sapiens
  misc_RNA (1)...(19): siRNA sense strand
gugcauuuauugucagaga

SEQ ID NO: 1841425 - RNA, 19 nt, Homo sapiens
  misc_RNA (1)...(19): siRNA sense strand
gcagaagcgacaaaugaga

SEQ ID NO: 1841426 - RNA, 19 nt, Homo sapiens
  misc_RNA (1)...(19): siRNA sense strand
uaucaaggccaucaaugaa

SEQ ID NO: 1841427 - RNA, 19 nt, Homo sapiens
  misc_RNA (1)...(19): siRNA sense strand
uaugggagcuagaagaagu

SEQ ID NO: 1841428 - RNA, 19 nt, Homo sapiens
  misc_RNA (1)...(19): siRNA sense strand
uaaggagagcagaagaaua

SEQ ID NO: 1841429 - RNA, 19 nt, Homo sapiens
  misc_RNA (1)...(19): siRNA sense strand
gcaagucguggaagcuauu

SEQ ID NO: 1841430 - RNA, 19 nt, Homo sapiens
  misc_RNA (1)...(19): siRNA sense strand
gaugaugaguaugucaguu

SEQ ID NO: 1841431 - RNA, 19 nt, Homo sapiens
  misc_RNA (1)...(19): siRNA sense strand
gcggucacauauccaggua

SEQ ID NO: 1841432 - RNA, 19 nt, Homo sapiens
  misc_RNA (1)...(19): siRNA sense strand
gcauuuauugucagagauu

SEQ ID NO: 1841433 - RNA, 19 nt, Homo sapiens
  misc_RNA (1)...(19): siRNA sense strand
ucacauauccagguagcua

SEQ ID NO: 1841434 - RNA, 19 nt, Homo sapiens
  misc_RNA (1)...(19): siRNA sense strand
ccagaaaucaggcagaaca

SEQ ID NO: 1841435 - RNA, 19 nt, Homo sapiens
  misc_RNA (1)...(19): siRNA sense strand
aaucugaugucuggucauu

SEQ ID NO: 1841436 - RNA, 19 nt, Homo sapiens
  misc_RNA (1)...(19): siRNA sense strand
caaugcagccggucucaug

SEQ ID NO: 1841437 - RNA, 19 nt, Homo sapiens
  misc_RNA (1)...(19): siRNA sense strand
gaaggcaagagaccguuug

SEQ ID NO: 1841438 - RNA, 19 nt, Homo sapiens
  misc_RNA (1)...(19): siRNA sense strand
ucaauaaguacagcaguaa

SEQ ID NO: 1841439 - RNA, 19 nt, Homo sapiens
  misc_RNA (1)...(19): siRNA sense strand
ugaagaggccaaagugaug

SEQ ID NO: 1841440 - RNA, 19 nt, Homo sapiens
  misc_RNA (1)...(19): siRNA sense strand
acaagagucuaaagaaggu

SEQ ID NO: 1841441 - RNA, 19 nt, Homo sapiens
  misc_RNA (1)...(19): siRNA sense strand
ugagguugcugaagagaag

SEQ ID NO: 1841442 - RNA, 19 nt, Homo sapiens
  misc_RNA (1)...(19): siRNA sense strand
gaguguaugccaggauaua

SEQ ID NO: 1841443 - RNA, 19 nt, Homo sapiens
  misc_RNA (1)...(19): siRNA sense strand
ucagggagaauaaaggaaa

SEQ ID NO: 1841444 - RNA, 19 nt, Homo sapiens
  misc_RNA (1)...(19): siRNA sense strand
cagagauucaagacauuua

SEQ ID NO: 1841445 - RNA, 19 nt, Homo sapiens
  misc_RNA (1)...(19): siRNA sense strand
acaaaugagaacacagaua

SEQ ID NO: 1841446 - RNA, 19 nt, Homo sapiens
  misc_RNA (1)...(19): siRNA sense strand
caaggcacuuuaugauuuu

SEQ ID NO: 1841447 - RNA, 19 nt, Homo sapiens
  misc_RNA (1)...(19): siRNA sense strand
cagaagcgacaaaugagaa

SEQ ID NO: 1841448 - RNA, 19 nt, Homo sapiens
  misc_RNA (1)...(19): siRNA sense strand
uucaauaaguacagcagua

SEQ ID NO: 1841449 - RNA, 19 nt, Homo sapiens
  misc_RNA (1)...(19): siRNA sense strand
cugaguguaugccaggaua

SEQ ID NO: 1841450 - RNA, 19 nt, Homo sapiens
  misc_RNA (1)...(19): siRNA sense strand
gaaggaaaugcuacugagu

SEQ ID NO: 1841451 - RNA, 19 nt, Homo sapiens
  misc_RNA (1)...(19): siRNA sense strand
ggaagccccuuuacauugu

SEQ ID NO: 1841452 - RNA, 19 nt, Homo sapiens
  misc_RNA (1)...(19): siRNA sense strand
gaugggcaguuguuuacca

SEQ ID NO: 1841453 - RNA, 19 nt, Homo sapiens
  misc_RNA (1)...(19): siRNA sense strand
ucaggcagaacaucuauug

SEQ ID NO: 1841454 - RNA, 19 nt, Homo sapiens
  misc_RNA (1)...(19): siRNA sense strand
gaaacauuaccagaaauca

SEQ ID NO: 1841455 - RNA, 19 nt, Homo sapiens
  misc_RNA (1)...(19): siRNA sense strand
ggaaggcaagagaccguuu

SEQ ID NO: 1841456 - RNA, 19 nt, Homo sapiens
  misc_RNA (1)...(19): siRNA sense strand
uaccagaaaucaggcagaa

SEQ ID NO: 1841457 - RNA, 19 nt, Homo sapiens
  misc_RNA (1)...(19): siRNA sense strand
uaagucaaauuugcaaguc

SEQ ID NO: 1841458 - RNA, 19 nt, Homo sapiens
  misc_RNA (1)...(19): siRNA sense strand
caaucaaucccugaguuaa

SEQ ID NO: 1841459 - RNA, 19 nt, Homo sapiens
  misc_RNA (1)...(19): siRNA sense strand
gugguaccauagaaacauu

SEQ ID NO: 1841460 - RNA, 19 nt, Homo sapiens
  misc_RNA (1)...(19): siRNA sense strand
ggucaguucaacaugcaua

SEQ ID NO: 1841461 - RNA, 19 nt, Homo sapiens
  misc_RNA (1)...(19): siRNA sense strand
gugacagaguucauggaaa

SEQ ID NO: 1841462 - RNA, 19 nt, Homo sapiens
  misc_RNA (1)...(19): siRNA sense strand
cucagccaauugucaaaua

SEQ ID NO: 1841463 - RNA, 19 nt, Homo sapiens
  misc_RNA (1)...(19): siRNA sense strand
gucagagauucaagacauu

SEQ ID NO: 1841464 - RNA, 19 nt, Homo sapiens
  misc_RNA (1)...(19): siRNA sense strand
caauguccauauaugaagu

SEQ ID NO: 1841465 - RNA, 19 nt, Homo sapiens
  misc_RNA (1)...(19): siRNA sense strand
gcccucaccuggcaccaau

SEQ ID NO: 1841466 - RNA, 19 nt, Homo sapiens
  misc_RNA (1)...(19): siRNA sense strand
gaauaucuggagaggaaug

SEQ ID NO: 1841467 - RNA, 19 nt, Homo sapiens
  misc_RNA (1)...(19): siRNA sense strand
ggaaaugcuacugagugua

SEQ ID NO: 1841468 - RNA, 19 nt, Homo sapiens
  misc_RNA (1)...(19): siRNA sense strand
ucccugaguuaaucuggua

SEQ ID NO: 1841469 - RNA, 19 nt, Homo sapiens
  misc_RNA (1)...(19): siRNA sense strand
caguucaacaugcauagua

SEQ ID NO: 1841470 - RNA, 19 nt, Homo sapiens
  misc_RNA (1)...(19): siRNA sense strand
caauaaguacagcaguaaa

SEQ ID NO: 1841471 - RNA, 19 nt, Homo sapiens
  misc_RNA (1)...(19): siRNA sense strand
gaaagcuguuugaguuuga

SEQ ID NO: 1841472 - RNA, 19 nt, Homo sapiens
  misc_RNA (1)...(19): siRNA sense strand
gaugggaccuuccacaaau

SEQ ID NO: 1841473 - RNA, 19 nt, Homo sapiens
  misc_RNA (1)...(19): siRNA sense strand
gaacgucaacucugucauu

SEQ ID NO: 1841474 - RNA, 19 nt, Homo sapiens
  misc_RNA (1)...(19): siRNA sense strand
ccaagaacgucaacucugu

SEQ ID NO: 1841475 - RNA, 19 nt, Homo sapiens
  misc_RNA (1)...(19): siRNA sense strand
ccacaaauaugucuucacu

SEQ ID NO: 1841476 - RNA, 19 nt, Homo sapiens
  misc_RNA (1)...(19): siRNA sense strand
cccgaaagcuguuugaguu

SEQ ID NO: 1841477 - RNA, 19 nt, Homo sapiens
  misc_RNA (1)...(19): siRNA sense strand
cgaaagcuguuugaguuug

SEQ ID NO: 1841478 - RNA, 19 nt, Homo sapiens
  misc_RNA (1)...(19): siRNA sense strand
gagaggcuuucgacgugua

SEQ ID NO: 1841479 - RNA, 19 nt, Homo sapiens
  misc_RNA (1)...(19): siRNA sense strand
ugaagaaccgcaucuaugu

SEQ ID NO: 1841480 - RNA, 19 nt, Homo sapiens
  misc_RNA (1)...(19): siRNA sense strand
guccauaucuuugcucuca

SEQ ID NO: 1841481 - RNA, 19 nt, Homo sapiens
  misc_RNA (1)...(19): siRNA sense strand
gcaucuauguguacuccuu

SEQ ID NO: 1841482 - RNA, 19 nt, Homo sapiens
  misc_RNA (1)...(19): siRNA sense strand
ggcaguacguggacucuca

SEQ ID NO: 1841483 - RNA, 19 nt, Homo sapiens
  misc_RNA (1)...(19): siRNA sense strand
gccacccucuacugcauua

SEQ ID NO: 1841484 - RNA, 19 nt, Homo sapiens
  misc_RNA (1)...(19): siRNA sense strand
gaagaaccgcaucuaugug

SEQ ID NO: 1841485 - RNA, 19 nt, Homo sapiens
  misc_RNA (1)...(19): siRNA sense strand
uaucuuugcucucaaggau

SEQ ID NO: 1841486 - RNA, 19 nt, Homo sapiens
  misc_RNA (1)...(19): siRNA sense strand
uaaggguacuguccauauc

SEQ ID NO: 1841487 - RNA, 19 nt, Homo sapiens
  misc_RNA (1)...(19): siRNA sense strand
ucaaugcacaucagaguga

SEQ ID NO: 1841488 - RNA, 19 nt, Homo sapiens
  misc_RNA (1)...(19): siRNA sense strand
gaucaaugcacaucagagu

SEQ ID NO: 1841489 - RNA, 19 nt, Homo sapiens
  misc_RNA (1)...(19): siRNA sense strand
gauaaggguacuguccaua

SEQ ID NO: 1841490 - RNA, 19 nt, Homo sapiens
  misc_RNA (1)...(19): siRNA sense strand
caacguggagcccuugaug

SEQ ID NO: 1841491 - RNA, 19 nt, Homo sapiens
  misc_RNA (1)...(19): siRNA sense strand
ggaccuuccacaaauaugu

SEQ ID NO: 1841492 - RNA, 19 nt, Homo sapiens
  misc_RNA (1)...(19): siRNA sense strand
gcugaagaaccgcaucuau

SEQ ID NO: 1841493 - RNA, 19 nt, Homo sapiens
  misc_RNA (1)...(19): siRNA sense strand
agacaggugugcgcaucua

SEQ ID NO: 1841494 - RNA, 19 nt, Homo sapiens
  misc_RNA (1)...(19): siRNA sense strand
gcaccucgucugcuccauu

SEQ ID NO: 1841495 - RNA, 19 nt, Homo sapiens
  misc_RNA (1)...(19): siRNA sense strand
ugucuucacuccugaugga

SEQ ID NO: 1841496 - RNA, 19 nt, Homo sapiens
  misc_RNA (1)...(19): siRNA sense strand
ccucugcgcuuccagugau

SEQ ID NO: 1841497 - RNA, 19 nt, Homo sapiens
  misc_RNA (1)...(19): siRNA sense strand
gcacaucagagugacauag

SEQ ID NO: 1841498 - RNA, 19 nt, Homo sapiens
  misc_RNA (1)...(19): siRNA sense strand
ggccuaugauugggcagua

SEQ ID NO: 1841499 - RNA, 19 nt, Homo sapiens
  misc_RNA (1)...(19): siRNA sense strand
gugggagucugcaacuugu

SEQ ID NO: 1841500 - RNA, 19 nt, Homo sapiens
  misc_RNA (1)...(19): siRNA sense strand
uagccugugugucucuaaa

SEQ ID NO: 1841501 - RNA, 19 nt, Homo sapiens
  misc_RNA (1)...(19): siRNA sense strand
agagugacauagccugugu

SEQ ID NO: 1841502 - RNA, 19 nt, Homo sapiens
  misc_RNA (1)...(19): siRNA sense strand
gugcuggaguucaccuuca

SEQ ID NO: 1841503 - RNA, 19 nt, Homo sapiens
  misc_RNA (1)...(19): siRNA sense strand
caccucgucugcuccauuc

SEQ ID NO: 1841504 - RNA, 19 nt, Homo sapiens
  misc_RNA (1)...(19): siRNA sense strand
gaaccgcaucuauguguac

SEQ ID NO: 1841505 - RNA, 19 nt, Homo sapiens
  misc_RNA (1)...(19): siRNA sense strand
cugaagaaccgcaucuaug

SEQ ID NO: 1841506 - RNA, 19 nt, Homo sapiens
  misc_RNA (1)...(19): siRNA sense strand
ccauaucuuugcucucaag

SEQ ID NO: 1841507 - RNA, 19 nt, Homo sapiens
  misc_RNA (1)...(19): siRNA sense strand
agaaccgcaucuaugugua

SEQ ID NO: 1841508 - RNA, 19 nt, Homo sapiens
  misc_RNA (1)...(19): siRNA sense strand
gcaauacuuccaagaacgu

SEQ ID NO: 1841509 - RNA, 19 nt, Homo sapiens
  misc_RNA (1)...(19): siRNA sense strand
ggugggcggugguaguagu

SEQ ID NO: 1841510 - RNA, 19 nt, Homo sapiens
  misc_RNA (1)...(19): siRNA sense strand
gguacuguccauaucuuug

SEQ ID NO: 1841511 - RNA, 19 nt, Homo sapiens
  misc_RNA (1)...(19): siRNA sense strand
gcaugggcuugguggagau

SEQ ID NO: 1841512 - RNA, 19 nt, Homo sapiens
  misc_RNA (1)...(19): siRNA sense strand
agaagcuggugcuggaguu

SEQ ID NO: 1841513 - RNA, 19 nt, Homo sapiens
  misc_RNA (1)...(19): siRNA sense strand
cgacguguaccuugacauc

SEQ ID NO: 1841514 - RNA, 19 nt, Homo sapiens
  misc_RNA (1)...(19): siRNA sense strand
acacacaauccaaggagaa

SEQ ID NO: 1841515 - RNA, 19 nt, Homo sapiens
  misc_RNA (1)...(19): siRNA sense strand
cagccugcguuucaaccaa

SEQ ID NO: 1841516 - RNA, 19 nt, Homo sapiens
  misc_RNA (1)...(19): siRNA sense strand
ccgaaagcuguuugaguuu

SEQ ID NO: 1841517 - RNA, 19 nt, Homo sapiens
  misc_RNA (1)...(19): siRNA sense strand
gugaugaugaugacuuuua

SEQ ID NO: 1841518 - RNA, 19 nt, Homo sapiens
  misc_RNA (1)...(19): siRNA sense strand
ugauggaaacugcaacaga

SEQ ID NO: 1841519 - RNA, 19 nt, Homo sapiens
  misc_RNA (1)...(19): siRNA sense strand
ugaccagccugcguuucaa

SEQ ID NO: 1841520 - RNA, 19 nt, Homo sapiens
  misc_RNA (1)...(19): siRNA sense strand
gguaguagucccaaguucu

SEQ ID NO: 1841521 - RNA, 19 nt, Homo sapiens
  misc_RNA (1)...(19): siRNA sense strand
cugugaugaugaugacuuu

SEQ ID NO: 1841522 - RNA, 19 nt, Homo sapiens
  misc_RNA (1)...(19): siRNA sense strand
gugaccagccugcguuuca

SEQ ID NO: 1841523 - RNA, 19 nt, Homo sapiens
  misc_RNA (1)...(19): siRNA sense strand
aaaccagccaggcacugua

SEQ ID NO: 1841524 - RNA, 19 nt, Homo sapiens
  misc_RNA (1)...(19): siRNA sense strand
ggaccuggcgagcacaaag

SEQ ID NO: 1841525 - RNA, 19 nt, Homo sapiens
  misc_RNA (1)...(19): siRNA sense strand
ugauaaggguacuguccau

SEQ ID NO: 1841526 - RNA, 19 nt, Homo sapiens
  misc_RNA (1)...(19): siRNA sense strand
agaugggaccuuccacaaa

SEQ ID NO: 1841527 - RNA, 19 nt, Homo sapiens
  misc_RNA (1)...(19): siRNA sense strand
ucgcaauacuuccaagaac

SEQ ID NO: 1841528 - RNA, 19 nt, Homo sapiens
  misc_RNA (1)...(19): siRNA sense strand
aagaaccgcaucuaugugu

SEQ ID NO: 1841529 - RNA, 19 nt, Homo sapiens
  misc_RNA (1)...(19): siRNA sense strand
guaguagucccaaguucuc

SEQ ID NO: 1841530 - RNA, 19 nt, Homo sapiens
  misc_RNA (1)...(19): siRNA sense strand
augggaccuuccacaaaua

SEQ ID NO: 1841531 - RNA, 19 nt, Homo sapiens
  misc_RNA (1)...(19): siRNA sense strand
uagaugggaccuuccacaa

SEQ ID NO: 1841532 - RNA, 19 nt, Homo sapiens
  misc_RNA (1)...(19): siRNA sense strand
cuuauucgccucuuugaca

SEQ ID NO: 1841533 - RNA, 19 nt, Homo sapiens
  misc_RNA (1)...(19): siRNA sense strand
auaaggguacuguccauau

SEQ ID NO: 1841534 - RNA, 19 nt, Homo sapiens
  misc_RNA (1)...(19): siRNA sense strand
aacgucaacucugucauug

SEQ ID NO: 1841535 - RNA, 19 nt, Homo sapiens
  misc_RNA (1)...(19): siRNA sense strand
cacugugccugcugaguca

SEQ ID NO: 1841536 - RNA, 19 nt, Homo sapiens
  misc_RNA (1)...(19): siRNA sense strand
gcaccgcuccaaccuucug

SEQ ID NO: 1841537 - RNA, 19 nt, Homo sapiens
  misc_RNA (1)...(19): siRNA sense strand
gaucaacccuuucuuucau

SEQ ID NO: 1841538 - RNA, 19 nt, Homo sapiens
  misc_RNA (1)...(19): siRNA sense strand
gcaaaaugaucaacccuuu

SEQ ID NO: 1841539 - RNA, 19 nt, Homo sapiens
  misc_RNA (1)...(19): siRNA sense strand
ggauguugcuucagagugu

SEQ ID NO: 1841540 - RNA, 19 nt, Homo sapiens
  misc_RNA (1)...(19): siRNA sense strand
gauauuccuugaaguagau

SEQ ID NO: 1841541 - RNA, 19 nt, Homo sapiens
  misc_RNA (1)...(19): siRNA sense strand
gugauaaacuuguaguagu

SEQ ID NO: 1841542 - RNA, 19 nt, Homo sapiens
  misc_RNA (1)...(19): siRNA sense strand
ugaagcagaucgagagcaa

SEQ ID NO: 1841543 - RNA, 19 nt, Homo sapiens
  misc_RNA (1)...(19): siRNA sense strand
uguaguaguugacuucuca

SEQ ID NO: 1841544 - RNA, 19 nt, Homo sapiens
  misc_RNA (1)...(19): siRNA sense strand
gaagccaccauuaaugaau

SEQ ID NO: 1841545 - RNA, 19 nt, Homo sapiens
  misc_RNA (1)...(19): siRNA sense strand
ggacgcugcaggugauaaa

SEQ ID NO: 1841546 - RNA, 19 nt, Homo sapiens
  misc_RNA (1)...(19): siRNA sense strand
cgugauauuccuugaagua

SEQ ID NO: 1841547 - RNA, 19 nt, Homo sapiens
  misc_RNA (1)...(19): siRNA sense strand
gacaaaaggugggugaauu

SEQ ID NO: 1841548 - RNA, 19 nt, Homo sapiens
  misc_RNA (1)...(19): siRNA sense strand
gucaggauguugcuucaga

SEQ ID NO: 1841549 - RNA, 19 nt, Homo sapiens
  misc_RNA (1)...(19): siRNA sense strand
ugauauuccuugaaguaga

SEQ ID NO: 1841550 - RNA, 19 nt, Homo sapiens
  misc_RNA (1)...(19): siRNA sense strand
aaaguauuccaacgugaua

SEQ ID NO: 1841551 - RNA, 19 nt, Homo sapiens
  misc_RNA (1)...(19): siRNA sense strand
aagccaccauuaaugaauu

SEQ ID NO: 1841552 - RNA, 19 nt, Homo sapiens
  misc_RNA (1)...(19): siRNA sense strand
ccaacgugauauuccuuga

SEQ ID NO: 1841553 - RNA, 19 nt, Homo sapiens
  misc_RNA (1)...(19): siRNA sense strand
caagacugcuuuucaggaa

SEQ ID NO: 1841554 - RNA, 19 nt, Homo sapiens
  misc_RNA (1)...(19): siRNA sense strand
aaugaucaacccuuucuuu

SEQ ID NO: 1841555 - RNA, 19 nt, Homo sapiens
  misc_RNA (1)...(19): siRNA sense strand
ggugauaaacuuguaguag

SEQ ID NO: 1841556 - RNA, 19 nt, Homo sapiens
  misc_RNA (1)...(19): siRNA sense strand
ugaaguagauguggaugac

SEQ ID NO: 1841557 - RNA, 19 nt, Homo sapiens
  misc_RNA (1)...(19): siRNA sense strand
caacgugauauuccuugaa

SEQ ID NO: 1841558 - RNA, 19 nt, Homo sapiens
  misc_RNA (1)...(19): siRNA sense strand
gcacgccaacauuccaguu

SEQ ID NO: 1841559 - RNA, 19 nt, Homo sapiens
  misc_RNA (1)...(19): siRNA sense strand
uugaagccaccauuaauga

SEQ ID NO: 1841560 - RNA, 19 nt, Homo sapiens
  misc_RNA (1)...(19): siRNA sense strand
ugaucaacccuuucuuuca

SEQ ID NO: 1841561 - RNA, 19 nt, Homo sapiens
  misc_RNA (1)...(19): siRNA sense strand
ugaagccaccauuaaugaa

SEQ ID NO: 1841562 - RNA, 19 nt, Homo sapiens
  misc_RNA (1)...(19): siRNA sense strand
aagcagaucgagagcaaga

SEQ ID NO: 1841563 - RNA, 19 nt, Homo sapiens
  misc_RNA (1)...(19): siRNA sense strand
ucaacccuuucuuucauuc

SEQ ID NO: 1841564 - RNA, 19 nt, Homo sapiens
  misc_RNA (1)...(19): siRNA sense strand
ugcaggugauaaacuugua

SEQ ID NO: 1841565 - RNA, 19 nt, Homo sapiens
  misc_RNA (1)...(19): siRNA sense strand
aacgugauauuccuugaag

SEQ ID NO: 1841566 - RNA, 19 nt, Homo sapiens
  misc_RNA (1)...(19): siRNA sense strand
gcagaucgagagcaagacu

SEQ ID NO: 1841567 - RNA, 19 nt, Homo sapiens
  misc_RNA (1)...(19): siRNA sense strand
gaacaaagcccuggaaguc

SEQ ID NO: 1841568 - RNA, 19 nt, Homo sapiens
  misc_RNA (1)...(19): siRNA sense strand
gagcaggacuuggaaagga

SEQ ID NO: 1841569 - RNA, 19 nt, Homo sapiens
  misc_RNA (1)...(19): siRNA sense strand
ccacagaacuggcaagacu

SEQ ID NO: 1841570 - RNA, 19 nt, Homo sapiens
  misc_RNA (1)...(19): siRNA sense strand
gcacuucccaccuaauaaa

SEQ ID NO: 1841571 - RNA, 19 nt, Homo sapiens
  misc_RNA (1)...(19): siRNA sense strand
gggcagugcuacaguauuc

SEQ ID NO: 1841572 - RNA, 19 nt, Homo sapiens
  misc_RNA (1)...(19): siRNA sense strand
ccacagagcacaucuaugg

SEQ ID NO: 1841573 - RNA, 19 nt, Homo sapiens
  misc_RNA (1)...(19): siRNA sense strand
ugaagccucugauguuuga

SEQ ID NO: 1841574 - RNA, 19 nt, Homo sapiens
  misc_RNA (1)...(19): siRNA sense strand
gugggcaccuugugucaua

SEQ ID NO: 1841575 - RNA, 19 nt, Homo sapiens
  misc_RNA (1)...(19): siRNA sense strand
ccaagacugugagacauaa

SEQ ID NO: 1841576 - RNA, 19 nt, Homo sapiens
  misc_RNA (1)...(19): siRNA sense strand
aaacucugcuuucauuaug

SEQ ID NO: 1841577 - RNA, 19 nt, Homo sapiens
  misc_RNA (1)...(19): siRNA sense strand
caucuuugcuaguaaucua

SEQ ID NO: 1841578 - RNA, 19 nt, Homo sapiens
  misc_RNA (1)...(19): siRNA sense strand
cuucgaagcuacuggauga

SEQ ID NO: 1841579 - RNA, 19 nt, Homo sapiens
  misc_RNA (1)...(19): siRNA sense strand
cgaauugugggccagauua

SEQ ID NO: 1841580 - RNA, 19 nt, Homo sapiens
  misc_RNA (1)...(19): siRNA sense strand
gcucagcccugcucuaugc

SEQ ID NO: 1841581 - RNA, 19 nt, Homo sapiens
  misc_RNA (1)...(19): siRNA sense strand
gcaguuguucugugacuuu

SEQ ID NO: 1841582 - RNA, 19 nt, Homo sapiens
  misc_RNA (1)...(19): siRNA sense strand
caaccuguaugcccagaug

SEQ ID NO: 1841583 - RNA, 19 nt, Homo sapiens
  misc_RNA (1)...(19): siRNA sense strand
auagagcgcuccaaucuca

SEQ ID NO: 1841584 - RNA, 19 nt, Homo sapiens
  misc_RNA (1)...(19): siRNA sense strand
ugaaggcaaucuccaggaa

SEQ ID NO: 1841585 - RNA, 19 nt, Homo sapiens
  misc_RNA (1)...(19): siRNA sense strand
gcccagagcaagcgaauug

SEQ ID NO: 1841586 - RNA, 19 nt, Homo sapiens
  misc_RNA (1)...(19): siRNA sense strand
agaaggaacugaacaaagc

SEQ ID NO: 1841587 - RNA, 19 nt, Homo sapiens
  misc_RNA (1)...(19): siRNA sense strand
gcauggaguuugcuuucug

SEQ ID NO: 1841588 - RNA, 19 nt, Homo sapiens
  misc_RNA (1)...(19): siRNA sense strand
gcagaaggaacugaacaaa

SEQ ID NO: 1841589 - RNA, 19 nt, Homo sapiens
  misc_RNA (1)...(19): siRNA sense strand
ccugaagccucugauguuu

SEQ ID NO: 1841590 - RNA, 19 nt, Homo sapiens
  misc_RNA (1)...(19): siRNA sense strand
gaauugagggaaugguuga

SEQ ID NO: 1841591 - RNA, 19 nt, Homo sapiens
  misc_RNA (1)...(19): siRNA sense strand
ggaccaguggcuuuacuuu

SEQ ID NO: 1841592 - RNA, 19 nt, Homo sapiens
  misc_RNA (1)...(19): siRNA sense strand
uggaagagccacuggauga

SEQ ID NO: 1841593 - RNA, 19 nt, Homo sapiens
  misc_RNA (1)...(19): siRNA sense strand
cugcugcccuggacaguuu

SEQ ID NO: 1841594 - RNA, 19 nt, Homo sapiens
  misc_RNA (1)...(19): siRNA sense strand
accaguggcuuuacuuuga

SEQ ID NO: 1841595 - RNA, 19 nt, Homo sapiens
  misc_RNA (1)...(19): siRNA sense strand
gaagucaagagacccaaga

SEQ ID NO: 1841596 - RNA, 19 nt, Homo sapiens
  misc_RNA (1)...(19): siRNA sense strand
gcagcuagccugagauguc

SEQ ID NO: 1841597 - RNA, 19 nt, Homo sapiens
  misc_RNA (1)...(19): siRNA sense strand
gagccgaggccucucaaga

SEQ ID NO: 1841598 - RNA, 19 nt, Homo sapiens
  misc_RNA (1)...(19): siRNA sense strand
ccacauagagcgcuccaau

SEQ ID NO: 1841599 - RNA, 19 nt, Homo sapiens
  misc_RNA (1)...(19): siRNA sense strand
gauggagacuuggugacuu

SEQ ID NO: 1841600 - RNA, 19 nt, Homo sapiens
  misc_RNA (1)...(19): siRNA sense strand
gggccugaacccagacuua

SEQ ID NO: 1841601 - RNA, 19 nt, Homo sapiens
  misc_RNA (1)...(19): siRNA sense strand
gccuggagcuguauaaggu

SEQ ID NO: 1841602 - RNA, 19 nt, Homo sapiens
  misc_RNA (1)...(19): siRNA sense strand
acacacaccuccucuacgu

SEQ ID NO: 1841603 - RNA, 19 nt, Homo sapiens
  misc_RNA (1)...(19): siRNA sense strand
cagauuaucccagccauug

SEQ ID NO: 1841604 - RNA, 19 nt, Homo sapiens
  misc_RNA (1)...(19): siRNA sense strand
ucccaccucugcacuauga

SEQ ID NO: 1841605 - RNA, 19 nt, Homo sapiens
  misc_RNA (1)...(19): siRNA sense strand
ccauguggacuuuguggua

SEQ ID NO: 1841606 - RNA, 19 nt, Homo sapiens
  misc_RNA (1)...(19): siRNA sense strand
cagcuagccugagauguca

SEQ ID NO: 1841607 - RNA, 19 nt, Homo sapiens
  misc_RNA (1)...(19): siRNA sense strand
ucaagagacccaagacugu

SEQ ID NO: 1841608 - RNA, 19 nt, Homo sapiens
  misc_RNA (1)...(19): siRNA sense strand
gaugaggagcuguauucaa

SEQ ID NO: 1841609 - RNA, 19 nt, Homo sapiens
  misc_RNA (1)...(19): siRNA sense strand
gagagugcguccacagaac

SEQ ID NO: 1841610 - RNA, 19 nt, Homo sapiens
  misc_RNA (1)...(19): siRNA sense strand
gaccaguggcuuuacuuug

SEQ ID NO: 1841611 - RNA, 19 nt, Homo sapiens
  misc_RNA (1)...(19): siRNA sense strand
gcccugagcagcagaagga

SEQ ID NO: 1841612 - RNA, 19 nt, Homo sapiens
  misc_RNA (1)...(19): siRNA sense strand
augaggagcuguauucaag

SEQ ID NO: 1841613 - RNA, 19 nt, Homo sapiens
  misc_RNA (1)...(19): siRNA sense strand
ugaggcacuucccaccuaa

SEQ ID NO: 1841614 - RNA, 19 nt, Homo sapiens
  misc_RNA (1)...(19): siRNA sense strand
gagcacaucuauggggaua

SEQ ID NO: 1841615 - RNA, 19 nt, Homo sapiens
  misc_RNA (1)...(19): siRNA sense strand
ugacauggaccacauagag

SEQ ID NO: 1841616 - RNA, 19 nt, Homo sapiens
  misc_RNA (1)...(19): siRNA sense strand
gggcuugacuguuguugac

SEQ ID NO: 1841617 - RNA, 19 nt, Homo sapiens
  misc_RNA (1)...(19): siRNA sense strand
gagauuggagacacaacaa

SEQ ID NO: 1841618 - RNA, 19 nt, Homo sapiens
  misc_RNA (1)...(19): siRNA sense strand
gaauugugggccagauuau

SEQ ID NO: 1841619 - RNA, 19 nt, Homo sapiens
  misc_RNA (1)...(19): siRNA sense strand
ugucagaacuacgggauuc

SEQ ID NO: 1841620 - RNA, 19 nt, Homo sapiens
  misc_RNA (1)...(19): siRNA sense strand
cugaggcacuucccaccua

SEQ ID NO: 1841621 - RNA, 19 nt, Homo sapiens
  misc_RNA (1)...(19): siRNA sense strand
gcucuuggcucagcucaac

SEQ ID NO: 1841622 - RNA, 19 nt, Homo sapiens
  misc_RNA (1)...(19): siRNA sense strand
ugaggacugugcccugaga

SEQ ID NO: 1841623 - RNA, 19 nt, Homo sapiens
  misc_RNA (1)...(19): siRNA sense strand
cugaggaccugcuguugga

SEQ ID NO: 1841624 - RNA, 19 nt, Homo sapiens
  misc_RNA (1)...(19): siRNA sense strand
gcccugggauccuguugau

SEQ ID NO: 1841625 - RNA, 19 nt, Homo sapiens
  misc_RNA (1)...(19): siRNA sense strand
ccacuggaaacucugcuuu

SEQ ID NO: 1841626 - RNA, 19 nt, Homo sapiens
  misc_RNA (1)...(19): siRNA sense strand
ccacagacacucaccuuac

SEQ ID NO: 1841627 - RNA, 19 nt, Homo sapiens
  misc_RNA (1)...(19): siRNA sense strand
ggcuaucacugaagucaag

SEQ ID NO: 1841628 - RNA, 19 nt, Homo sapiens
  misc_RNA (1)...(19): siRNA sense strand
gaggagcuguauucaagac

SEQ ID NO: 1841629 - RNA, 19 nt, Homo sapiens
  misc_RNA (1)...(19): siRNA sense strand
acacuucccuggcagacau

SEQ ID NO: 1841630 - RNA, 19 nt, Homo sapiens
  misc_RNA (1)...(19): siRNA sense strand
ugacuguuguugacaugga

SEQ ID NO: 1841631 - RNA, 19 nt, Homo sapiens
  misc_RNA (1)...(19): siRNA sense strand
ccagagcucccaggaaguu

SEQ ID NO: 1841632 - RNA, 19 nt, Homo sapiens
  misc_RNA (1)...(19): siRNA sense strand
ggagacacaacaacuuucu

SEQ ID NO: 1841633 - RNA, 19 nt, Homo sapiens
  misc_RNA (1)...(19): siRNA sense strand
gccggauggucaccugaaa

SEQ ID NO: 1841634 - RNA, 19 nt, Homo sapiens
  misc_RNA (1)...(19): siRNA sense strand
cgccacagcuaccuacauc

SEQ ID NO: 1841635 - RNA, 19 nt, Homo sapiens
  misc_RNA (1)...(19): siRNA sense strand
ccgcuaugaugggcaaauu

SEQ ID NO: 1841636 - RNA, 19 nt, Homo sapiens
  misc_RNA (1)...(19): siRNA sense strand
ugacuuuggugaggacuuc

SEQ ID NO: 1841637 - RNA, 19 nt, Homo sapiens
  misc_RNA (1)...(19): siRNA sense strand
ucucagagcaggacuugga

SEQ ID NO: 1841638 - RNA, 19 nt, Homo sapiens
  misc_RNA (1)...(19): siRNA sense strand
aggaagagccacuggaaga

SEQ ID NO: 1841639 - RNA, 19 nt, Homo sapiens
  misc_RNA (1)...(19): siRNA sense strand
ggagauuggagacacaaca

SEQ ID NO: 1841640 - RNA, 19 nt, Homo sapiens
  misc_RNA (1)...(19): siRNA sense strand
auggagacuuggugacuuu

SEQ ID NO: 1841641 - RNA, 19 nt, Homo sapiens
  misc_RNA (1)...(19): siRNA sense strand
ugacagcaacuuccaugug

SEQ ID NO: 1841642 - RNA, 19 nt, Homo sapiens
  misc_RNA (1)...(19): siRNA sense strand
uaaagugcuugaggaugga

SEQ ID NO: 1841643 - RNA, 19 nt, Homo sapiens
  misc_RNA (1)...(19): siRNA sense strand
gccacagacacucaccuua

SEQ ID NO: 1841644 - RNA, 19 nt, Homo sapiens
  misc_RNA (1)...(19): siRNA sense strand
gaccaucaaccaccaccaa

SEQ ID NO: 1841645 - RNA, 19 nt, Homo sapiens
  misc_RNA (1)...(19): siRNA sense strand
ccaguggcuuuacuuugau

SEQ ID NO: 1841646 - RNA, 19 nt, Homo sapiens
  misc_RNA (1)...(19): siRNA sense strand
aggaagugcugaaggcaau

SEQ ID NO: 1841647 - RNA, 19 nt, Homo sapiens
  misc_RNA (1)...(19): siRNA sense strand
ggaugggucccuggagauu

SEQ ID NO: 1841648 - RNA, 19 nt, Homo sapiens
  misc_RNA (1)...(19): siRNA sense strand
gggaauugagggaaugguu

SEQ ID NO: 1841649 - RNA, 19 nt, Homo sapiens
  misc_RNA (1)...(19): siRNA sense strand
gggccaauacccacuacuu

SEQ ID NO: 1841650 - RNA, 19 nt, Homo sapiens
  misc_RNA (1)...(19): siRNA sense strand
gacguuccaucaccugaag

SEQ ID NO: 1841651 - RNA, 19 nt, Homo sapiens
  misc_RNA (1)...(19): siRNA sense strand
ucacugaggaccugcuguu

SEQ ID NO: 1841652 - RNA, 19 nt, Homo sapiens
  misc_RNA (1)...(19): siRNA sense strand
acauagagcgcuccaaucu

SEQ ID NO: 1841653 - RNA, 19 nt, Homo sapiens
  misc_RNA (1)...(19): siRNA sense strand
ggugcugacugcugcaaag

SEQ ID NO: 1841654 - RNA, 19 nt, Homo sapiens
  misc_RNA (1)...(19): siRNA sense strand
agaggcagccgcuaugaug

SEQ ID NO: 1841655 - RNA, 19 nt, Homo sapiens
  misc_RNA (1)...(19): siRNA sense strand
gacccaagacugugagaca

SEQ ID NO: 1841656 - RNA, 19 nt, Homo sapiens
  misc_RNA (1)...(19): siRNA sense strand
gugacuuucucgggaauug

SEQ ID NO: 1841657 - RNA, 19 nt, Homo sapiens
  misc_RNA (1)...(19): siRNA sense strand
caccacagagcacaucuau

SEQ ID NO: 1841658 - RNA, 19 nt, Homo sapiens
  misc_RNA (1)...(19): siRNA sense strand
caccugaaguggaccucuu

SEQ ID NO: 1841659 - RNA, 19 nt, Homo sapiens
  misc_RNA (1)...(19): siRNA sense strand
uaauaaagugcuugaggau

SEQ ID NO: 1841660 - RNA, 19 nt, Homo sapiens
  misc_RNA (1)...(19): siRNA sense strand
ggccaauacccacuacuuc

SEQ ID NO: 1841661 - RNA, 19 nt, Homo sapiens
  misc_RNA (1)...(19): siRNA sense strand
ccacagcuaccuacaucug

SEQ ID NO: 1841662 - RNA, 19 nt, Homo sapiens
  misc_RNA (1)...(19): siRNA sense strand
cagaaggaacugaacaaag

SEQ ID NO: 1841663 - RNA, 19 nt, Homo sapiens
  misc_RNA (1)...(19): siRNA sense strand
ugagagugcguccacagaa

SEQ ID NO: 1841664 - RNA, 19 nt, Homo sapiens
  misc_RNA (1)...(19): siRNA sense strand
uuacuuugaugcccucgau

SEQ ID NO: 1841665 - RNA, 19 nt, Homo sapiens
  misc_RNA (1)...(19): siRNA sense strand
uggaugaggagcuguauuc

SEQ ID NO: 1841666 - RNA, 19 nt, Homo sapiens
  misc_RNA (1)...(19): siRNA sense strand
cagacacucaccuuacuga

SEQ ID NO: 1841667 - RNA, 19 nt, Homo sapiens
  misc_RNA (1)...(19): siRNA sense strand
caacaaacaugaugacaag

SEQ ID NO: 1841668 - RNA, 19 nt, Homo sapiens
  misc_RNA (1)...(19): siRNA sense strand
agaaggaauugcuguauga

SEQ ID NO: 1841669 - RNA, 19 nt, Homo sapiens
  misc_RNA (1)...(19): siRNA sense strand
ucuacaagcugaccaguga

SEQ ID NO: 1841670 - RNA, 19 nt, Homo sapiens
  misc_RNA (1)...(19): siRNA sense strand
ugaaugagcugcgcuaugg

SEQ ID NO: 1841671 - RNA, 19 nt, Homo sapiens
  misc_RNA (1)...(19): siRNA sense strand
gcgagcacuuugugaauga

SEQ ID NO: 1841672 - RNA, 19 nt, Homo sapiens
  misc_RNA (1)...(19): siRNA sense strand
ggcaggaggugcucuacaa

SEQ ID NO: 1841673 - RNA, 19 nt, Homo sapiens
  misc_RNA (1)...(19): siRNA sense strand
gaagaaggaauugcuguau

SEQ ID NO: 1841674 - RNA, 19 nt, Homo sapiens
  misc_RNA (1)...(19): siRNA sense strand
gaacugcgagcacuuugug

SEQ ID NO: 1841675 - RNA, 19 nt, Homo sapiens
  misc_RNA (1)...(19): siRNA sense strand
acaaggccaucgugaagaa

SEQ ID NO: 1841676 - RNA, 19 nt, Homo sapiens
  misc_RNA (1)...(19): siRNA sense strand
acaaacaugaugacaagua

SEQ ID NO: 1841677 - RNA, 19 nt, Homo sapiens
  misc_RNA (1)...(19): siRNA sense strand
caaacaugaugacaaguac

SEQ ID NO: 1841678 - RNA, 19 nt, Homo sapiens
  misc_RNA (1)...(19): siRNA sense strand
ucaagaaacaagcgacaaa

SEQ ID NO: 1841679 - RNA, 19 nt, Homo sapiens
  misc_RNA (1)...(19): siRNA sense strand
aggaauugcuguaugaugu

SEQ ID NO: 1841680 - RNA, 19 nt, Homo sapiens
  misc_RNA (1)...(19): siRNA sense strand
ugaagaaggaauugcugua

SEQ ID NO: 1841681 - RNA, 19 nt, Homo sapiens
  misc_RNA (1)...(19): siRNA sense strand
aagaaggaauugcuguaug

SEQ ID NO: 1841682 - RNA, 19 nt, Homo sapiens
  misc_RNA (1)...(19): siRNA sense strand
acaaguaccaggucaacaa

SEQ ID NO: 1841683 - RNA, 19 nt, Homo sapiens
  misc_RNA (1)...(19): siRNA sense strand
cuggagaccugauugagau

SEQ ID NO: 1841684 - RNA, 19 nt, Homo sapiens
  misc_RNA (1)...(19): siRNA sense strand
ugacaaggccaucgugaag

SEQ ID NO: 1841685 - RNA, 19 nt, Homo sapiens
  misc_RNA (1)...(19): siRNA sense strand
ggagaccugauugagauuu

SEQ ID NO: 1841686 - RNA, 19 nt, Homo sapiens
  misc_RNA (1)...(19): siRNA sense strand
gcagccaugagccuuauug

SEQ ID NO: 1841687 - RNA, 19 nt, Homo sapiens
  misc_RNA (1)...(19): siRNA sense strand
acacugggccaucuauguu

SEQ ID NO: 1841688 - RNA, 19 nt, Homo sapiens
  misc_RNA (1)...(19): siRNA sense strand
ggaauugcuguaugaugug

SEQ ID NO: 1841689 - RNA, 19 nt, Homo sapiens
  misc_RNA (1)...(19): siRNA sense strand
guaccaggucaacaacaaa

SEQ ID NO: 1841690 - RNA, 19 nt, Homo sapiens
  misc_RNA (1)...(19): siRNA sense strand
gacacugggccaucuaugu

SEQ ID NO: 1841691 - RNA, 19 nt, Homo sapiens
  misc_RNA (1)...(19): siRNA sense strand
gagccuuauuggagucaug

SEQ ID NO: 1841692 - RNA, 19 nt, Homo sapiens
  misc_RNA (1)...(19): siRNA sense strand
acaacaaacaugaugacaa

SEQ ID NO: 1841693 - RNA, 19 nt, Homo sapiens
  misc_RNA (1)...(19): siRNA sense strand
ugagaacugcgagcacuuu

SEQ ID NO: 1841694 - RNA, 19 nt, Homo sapiens
  misc_RNA (1)...(19): siRNA sense strand
ucaacaacaaacaugauga

SEQ ID NO: 1841695 - RNA, 19 nt, Homo sapiens
  misc_RNA (1)...(19): siRNA sense strand
aguaccaggucaacaacaa

SEQ ID NO: 1841696 - RNA, 19 nt, Homo sapiens
  misc_RNA (1)...(19): siRNA sense strand
gaaacaagcgacaaaagca

SEQ ID NO: 1841697 - RNA, 19 nt, Homo sapiens
  misc_RNA (1)...(19): siRNA sense strand
gagaacugcgagcacuuug

SEQ ID NO: 1841698 - RNA, 19 nt, Homo sapiens
  misc_RNA (1)...(19): siRNA sense strand
ggucaacaacaaacaugau

SEQ ID NO: 1841699 - RNA, 19 nt, Homo sapiens
  misc_RNA (1)...(19): siRNA sense strand
gacaaggccaucgugaaga

SEQ ID NO: 1841700 - RNA, 19 nt, Homo sapiens
  misc_RNA (1)...(19): siRNA sense strand
caacaacaaacaugaugac

SEQ ID NO: 1841701 - RNA, 19 nt, Homo sapiens
  misc_RNA (1)...(19): siRNA sense strand
gagaccugauugagauuuu

SEQ ID NO: 1841702 - RNA, 19 nt, Homo sapiens
  misc_RNA (1)...(19): siRNA sense strand
gaaggaauugcuguaugau

SEQ ID NO: 1841703 - RNA, 19 nt, Homo sapiens
  misc_RNA (1)...(19): siRNA sense strand
gugaaugagcugcgcuaug

SEQ ID NO: 1841704 - RNA, 19 nt, Homo sapiens
  misc_RNA (1)...(19): siRNA sense strand
ccuggagaccugauugaga

SEQ ID NO: 1841705 - RNA, 19 nt, Homo sapiens
  misc_RNA (1)...(19): siRNA sense strand
gcaggaggugcucuacaag

SEQ ID NO: 1841706 - RNA, 19 nt, Homo sapiens
  misc_RNA (1)...(19): siRNA sense strand
ccagggaucuuuaacagua

SEQ ID NO: 1841707 - RNA, 19 nt, Homo sapiens
  misc_RNA (1)...(19): siRNA sense strand
acacuaaacucauagaaug

SEQ ID NO: 1841708 - RNA, 19 nt, Homo sapiens
  misc_RNA (1)...(19): siRNA sense strand
gauauugccuuugugcuuu

SEQ ID NO: 1841709 - RNA, 19 nt, Homo sapiens
  misc_RNA (1)...(19): siRNA sense strand
cagaagacauugcuaacaa

SEQ ID NO: 1841710 - RNA, 19 nt, Homo sapiens
  misc_RNA (1)...(19): siRNA sense strand
caaagaaucuaggaaacaa

SEQ ID NO: 1841711 - RNA, 19 nt, Homo sapiens
  misc_RNA (1)...(19): siRNA sense strand
gaaauggccauauuaaaca

SEQ ID NO: 1841712 - RNA, 19 nt, Homo sapiens
  misc_RNA (1)...(19): siRNA sense strand
ggaaacaacacuaaacuca

SEQ ID NO: 1841713 - RNA, 19 nt, Homo sapiens
  misc_RNA (1)...(19): siRNA sense strand
ggauauugcuagaauggaa

SEQ ID NO: 1841714 - RNA, 19 nt, Homo sapiens
  misc_RNA (1)...(19): siRNA sense strand
caaaagaaauggccauauu

SEQ ID NO: 1841715 - RNA, 19 nt, Homo sapiens
  misc_RNA (1)...(19): siRNA sense strand
agaaguccauguaugauuu

SEQ ID NO: 1841716 - RNA, 19 nt, Homo sapiens
  misc_RNA (1)...(19): siRNA sense strand
gguaaauggugcuaaugaa

SEQ ID NO: 1841717 - RNA, 19 nt, Homo sapiens
  misc_RNA (1)...(19): siRNA sense strand
gcuuggugcugccuuguua

SEQ ID NO: 1841718 - RNA, 19 nt, Homo sapiens
  misc_RNA (1)...(19): siRNA sense strand
ugugauagcucaucuuuua

SEQ ID NO: 1841719 - RNA, 19 nt, Homo sapiens
  misc_RNA (1)...(19): siRNA sense strand
gaaauaagcauagcacagu

SEQ ID NO: 1841720 - RNA, 19 nt, Homo sapiens
  misc_RNA (1)...(19): siRNA sense strand
uaagaacugugaccugaug

SEQ ID NO: 1841721 - RNA, 19 nt, Homo sapiens
  misc_RNA (1)...(19): siRNA sense strand
ucccaaauaugaaaggaua

SEQ ID NO: 1841722 - RNA, 19 nt, Homo sapiens
  misc_RNA (1)...(19): siRNA sense strand
guggagugcuguugggaua

SEQ ID NO: 1841723 - RNA, 19 nt, Homo sapiens
  misc_RNA (1)...(19): siRNA sense strand
uagcauacgucccagaguu

SEQ ID NO: 1841724 - RNA, 19 nt, Homo sapiens
  misc_RNA (1)...(19): siRNA sense strand
aaaggauaaugcagaagua

SEQ ID NO: 1841725 - RNA, 19 nt, Homo sapiens
  misc_RNA (1)...(19): siRNA sense strand
gaaaggauaaugcagaagu

SEQ ID NO: 1841726 - RNA, 19 nt, Homo sapiens
  misc_RNA (1)...(19): siRNA sense strand
gagcuggugucaaguaucu

SEQ ID NO: 1841727 - RNA, 19 nt, Homo sapiens
  misc_RNA (1)...(19): siRNA sense strand
gaagcacuagugaagguua

SEQ ID NO: 1841728 - RNA, 19 nt, Homo sapiens
  misc_RNA (1)...(19): siRNA sense strand
gaaagccauauguacauuu

SEQ ID NO: 1841729 - RNA, 19 nt, Homo sapiens
  misc_RNA (1)...(19): siRNA sense strand
gauccagggucugaagaaa

SEQ ID NO: 1841730 - RNA, 19 nt, Homo sapiens
  misc_RNA (1)...(19): siRNA sense strand
uuaccucauuuccagauua

SEQ ID NO: 1841731 - RNA, 19 nt, Homo sapiens
  misc_RNA (1)...(19): siRNA sense strand
cauggugguuugaacagua

SEQ ID NO: 1841732 - RNA, 19 nt, Homo sapiens
  misc_RNA (1)...(19): siRNA sense strand
gacccacucugccuaaugu

SEQ ID NO: 1841733 - RNA, 19 nt, Homo sapiens
  misc_RNA (1)...(19): siRNA sense strand
gagaaguccauguaugauu

SEQ ID NO: 1841734 - RNA, 19 nt, Homo sapiens
  misc_RNA (1)...(19): siRNA sense strand
gcacuggaauucccaagac

SEQ ID NO: 1841735 - RNA, 19 nt, Homo sapiens
  misc_RNA (1)...(19): siRNA sense strand
agucuguggucuagaaaua

SEQ ID NO: 1841736 - RNA, 19 nt, Homo sapiens
  misc_RNA (1)...(19): siRNA sense strand
cuaaugauauguguggauu

SEQ ID NO: 1841737 - RNA, 19 nt, Homo sapiens
  misc_RNA (1)...(19): siRNA sense strand
agaagacauugcuaacaaa

SEQ ID NO: 1841738 - RNA, 19 nt, Homo sapiens
  misc_RNA (1)...(19): siRNA sense strand
ucacagaccgcaugaacuu

SEQ ID NO: 1841739 - RNA, 19 nt, Homo sapiens
  misc_RNA (1)...(19): siRNA sense strand
caccucagaugcuuuccua

SEQ ID NO: 1841740 - RNA, 19 nt, Homo sapiens
  misc_RNA (1)...(19): siRNA sense strand
ugaaagccauauguacauu

SEQ ID NO: 1841741 - RNA, 19 nt, Homo sapiens
  misc_RNA (1)...(19): siRNA sense strand
agacauugcuaacaaacug

SEQ ID NO: 1841742 - RNA, 19 nt, Homo sapiens
  misc_RNA (1)...(19): siRNA sense strand
ggauaaugcagaaguacaa

SEQ ID NO: 1841743 - RNA, 19 nt, Homo sapiens
  misc_RNA (1)...(19): siRNA sense strand
caaucgaacuguuugacau

SEQ ID NO: 1841744 - RNA, 19 nt, Homo sapiens
  misc_RNA (1)...(19): siRNA sense strand
ggauauugccuuugugcuu

SEQ ID NO: 1841745 - RNA, 19 nt, Homo sapiens
  misc_RNA (1)...(19): siRNA sense strand
cuagugaagguuaucaaua

SEQ ID NO: 1841746 - RNA, 19 nt, Homo sapiens
  misc_RNA (1)...(19): siRNA sense strand
guccauguaugauuugguu

SEQ ID NO: 1841747 - RNA, 19 nt, Homo sapiens
  misc_RNA (1)...(19): siRNA sense strand
gcauacgucccagaguuua

SEQ ID NO: 1841748 - RNA, 19 nt, Homo sapiens
  misc_RNA (1)...(19): siRNA sense strand
uccaagaugcggaauauuu

SEQ ID NO: 1841749 - RNA, 19 nt, Homo sapiens
  misc_RNA (1)...(19): siRNA sense strand
ucagagggcucagaagcuu

SEQ ID NO: 1841750 - RNA, 19 nt, Homo sapiens
  misc_RNA (1)...(19): siRNA sense strand
gaaacaacacuaaacucau

SEQ ID NO: 1841751 - RNA, 19 nt, Homo sapiens
  misc_RNA (1)...(19): siRNA sense strand
gguggacccuaaugauaug

SEQ ID NO: 1841752 - RNA, 19 nt, Homo sapiens
  misc_RNA (1)...(19): siRNA sense strand
aaugauauguguggauuug

SEQ ID NO: 1841753 - RNA, 19 nt, Homo sapiens
  misc_RNA (1)...(19): siRNA sense strand
uauacuuucucuugucuug

SEQ ID NO: 1841754 - RNA, 19 nt, Homo sapiens
  misc_RNA (1)...(19): siRNA sense strand
agucuuacacuccauauuu

SEQ ID NO: 1841755 - RNA, 19 nt, Homo sapiens
  misc_RNA (1)...(19): siRNA sense strand
ggagaccauuaugauacua

SEQ ID NO: 1841756 - RNA, 19 nt, Homo sapiens
  misc_RNA (1)...(19): siRNA sense strand
gcuugggcauucaaagauu

SEQ ID NO: 1841757 - RNA, 19 nt, Homo sapiens
  misc_RNA (1)...(19): siRNA sense strand
accagaagaucuccaaaga

SEQ ID NO: 1841758 - RNA, 19 nt, Homo sapiens
  misc_RNA (1)...(19): siRNA sense strand
gaugcuguguacugacgua

SEQ ID NO: 1841759 - RNA, 19 nt, Homo sapiens
  misc_RNA (1)...(19): siRNA sense strand
gaacugugaccugaugguu

SEQ ID NO: 1841760 - RNA, 19 nt, Homo sapiens
  misc_RNA (1)...(19): siRNA sense strand
acaauggaauccucaaugg

SEQ ID NO: 1841761 - RNA, 19 nt, Homo sapiens
  misc_RNA (1)...(19): siRNA sense strand
ggguaaauggugcuaauga

SEQ ID NO: 1841762 - RNA, 19 nt, Homo sapiens
  misc_RNA (1)...(19): siRNA sense strand
caaaccagccagcccacua

SEQ ID NO: 1841763 - RNA, 19 nt, Homo sapiens
  misc_RNA (1)...(19): siRNA sense strand
ugccuaauguuguuuaugu

SEQ ID NO: 1841764 - RNA, 19 nt, Homo sapiens
  misc_RNA (1)...(19): siRNA sense strand
ugacguagcacuggaauuc

SEQ ID NO: 1841765 - RNA, 19 nt, Homo sapiens
  misc_RNA (1)...(19): siRNA sense strand
cggagaaguccauguauga

SEQ ID NO: 1841766 - RNA, 19 nt, Homo sapiens
  misc_RNA (1)...(19): siRNA sense strand
uuaacucacuccucacaga

SEQ ID NO: 1841767 - RNA, 19 nt, Homo sapiens
  misc_RNA (1)...(19): siRNA sense strand
gggugcuccugcuccauua

SEQ ID NO: 1841768 - RNA, 19 nt, Homo sapiens
  misc_RNA (1)...(19): siRNA sense strand
cuggaucacuauacuaaga

SEQ ID NO: 1841769 - RNA, 19 nt, Homo sapiens
  misc_RNA (1)...(19): siRNA sense strand
cgagagaggccaccauaca

SEQ ID NO: 1841770 - RNA, 19 nt, Homo sapiens
  misc_RNA (1)...(19): siRNA sense strand
gcauagcacaguuaaugga

SEQ ID NO: 1841771 - RNA, 19 nt, Homo sapiens
  misc_RNA (1)...(19): siRNA sense strand
aagcauagcacaguuaaug

SEQ ID NO: 1841772 - RNA, 19 nt, Homo sapiens
  misc_RNA (1)...(19): siRNA sense strand
uaaugaacauggcuuuguc

SEQ ID NO: 1841773 - RNA, 19 nt, Homo sapiens
  misc_RNA (1)...(19): siRNA sense strand
ugacauacuggaucacuau

SEQ ID NO: 1841774 - RNA, 19 nt, Homo sapiens
  misc_RNA (1)...(19): siRNA sense strand
agaaauggccauauuaaac

SEQ ID NO: 1841775 - RNA, 19 nt, Homo sapiens
  misc_RNA (1)...(19): siRNA sense strand
aaauaagcauagcacaguu

SEQ ID NO: 1841776 - RNA, 19 nt, Homo sapiens
  misc_RNA (1)...(19): siRNA sense strand
cuugggcauucaaagauua

SEQ ID NO: 1841777 - RNA, 19 nt, Homo sapiens
  misc_RNA (1)...(19): siRNA sense strand
gccuaauguuguuuaugua

SEQ ID NO: 1841778 - RNA, 19 nt, Homo sapiens
  misc_RNA (1)...(19): siRNA sense strand
caagacccacucugccuaa

SEQ ID NO: 1841779 - RNA, 19 nt, Homo sapiens
  misc_RNA (1)...(19): siRNA sense strand
uccagggucugaagaaaga

SEQ ID NO: 1841780 - RNA, 19 nt, Homo sapiens
  misc_RNA (1)...(19): siRNA sense strand
uaaauggugcuaaugaaca

SEQ ID NO: 1841781 - RNA, 19 nt, Homo sapiens
  misc_RNA (1)...(19): siRNA sense strand
cuccaaagauggguaaaug

SEQ ID NO: 1841782 - RNA, 19 nt, Homo sapiens
  misc_RNA (1)...(19): siRNA sense strand
caacuggccuuugguaucc

SEQ ID NO: 1841783 - RNA, 19 nt, Homo sapiens
  misc_RNA (1)...(19): siRNA sense strand
ggacccuaaugauaugugu

SEQ ID NO: 1841784 - RNA, 19 nt, Homo sapiens
  misc_RNA (1)...(19): siRNA sense strand
ugauauguguggauuugug

SEQ ID NO: 1841785 - RNA, 19 nt, Homo sapiens
  misc_RNA (1)...(19): siRNA sense strand
caacacuaaacucauagaa

SEQ ID NO: 1841786 - RNA, 19 nt, Homo sapiens
  misc_RNA (1)...(19): siRNA sense strand
ccggagaaguccauguaug

SEQ ID NO: 1841787 - RNA, 19 nt, Homo sapiens
  misc_RNA (1)...(19): siRNA sense strand
gcaaucgaacuguuugaca

SEQ ID NO: 1841788 - RNA, 19 nt, Homo sapiens
  misc_RNA (1)...(19): siRNA sense strand
aauaagcauagcacaguua

SEQ ID NO: 1841789 - RNA, 19 nt, Homo sapiens
  misc_RNA (1)...(19): siRNA sense strand
gaaguccauguaugauuug

SEQ ID NO: 1841790 - RNA, 19 nt, Homo sapiens
  misc_RNA (1)...(19): siRNA sense strand
ucugggagauugacagcaa

SEQ ID NO: 1841791 - RNA, 19 nt, Homo sapiens
  misc_RNA (1)...(19): siRNA sense strand
caaaaggcauggggauauu

SEQ ID NO: 1841792 - RNA, 19 nt, Homo sapiens
  misc_RNA (1)...(19): siRNA sense strand
ccaaagaaucuaggaaaca

SEQ ID NO: 1841793 - RNA, 19 nt, Homo sapiens
  misc_RNA (1)...(19): siRNA sense strand
gauauguguggauuuguga

SEQ ID NO: 1841794 - RNA, 19 nt, Homo sapiens
  misc_RNA (1)...(19): siRNA sense strand
ggacccaaaccaaagaauc

SEQ ID NO: 1841795 - RNA, 19 nt, Homo sapiens
  misc_RNA (1)...(19): siRNA sense strand
gugcugccuuguuauacuu

SEQ ID NO: 1841796 - RNA, 19 nt, Homo sapiens
  misc_RNA (1)...(19): siRNA sense strand
cuagaauggaagacaguua

SEQ ID NO: 1841797 - RNA, 19 nt, Homo sapiens
  misc_RNA (1)...(19): siRNA sense strand
aaaagucuguggucuagaa

SEQ ID NO: 1841798 - RNA, 19 nt, Homo sapiens
  misc_RNA (1)...(19): siRNA sense strand
caucagaucuccuuuuguc

SEQ ID NO: 1841799 - RNA, 19 nt, Homo sapiens
  misc_RNA (1)...(19): siRNA sense strand
aaucgaacuguuugacaua

SEQ ID NO: 1841800 - RNA, 19 nt, Homo sapiens
  misc_RNA (1)...(19): siRNA sense strand
ccaaagauggguaaauggu

SEQ ID NO: 1841801 - RNA, 19 nt, Homo sapiens
  misc_RNA (1)...(19): siRNA sense strand
gcuguguacugacguagca

SEQ ID NO: 1841802 - RNA, 19 nt, Homo sapiens
  misc_RNA (1)...(19): siRNA sense strand
cacgagagaggccaccaua

SEQ ID NO: 1841803 - RNA, 19 nt, Homo sapiens
  misc_RNA (1)...(19): siRNA sense strand
cgaacuguuugacauacug

SEQ ID NO: 1841804 - RNA, 19 nt, Homo sapiens
  misc_RNA (1)...(19): siRNA sense strand
ucagaugcuuuccuacagu

SEQ ID NO: 1841805 - RNA, 19 nt, Homo sapiens
  misc_RNA (1)...(19): siRNA sense strand
agagcucuaugaagcacua

SEQ ID NO: 1841806 - RNA, 19 nt, Homo sapiens
  misc_RNA (1)...(19): siRNA sense strand
aaacaggacuucaacauca

SEQ ID NO: 1841807 - RNA, 19 nt, Homo sapiens
  misc_RNA (1)...(19): siRNA sense strand
ggacaguguugacgaggaa

SEQ ID NO: 1841808 - RNA, 19 nt, Homo sapiens
  misc_RNA (1)...(19): siRNA sense strand
gcaagauggugcucugaau

SEQ ID NO: 1841809 - RNA, 19 nt, Homo sapiens
  misc_RNA (1)...(19): siRNA sense strand
ggucagugcucuaaacauc

SEQ ID NO: 1841810 - RNA, 19 nt, Homo sapiens
  misc_RNA (1)...(19): siRNA sense strand
ucgacaaggucuucaugua

SEQ ID NO: 1841811 - RNA, 19 nt, Homo sapiens
  misc_RNA (1)...(19): siRNA sense strand
gaagugggagugucauaga

SEQ ID NO: 1841812 - RNA, 19 nt, Homo sapiens
  misc_RNA (1)...(19): siRNA sense strand
gcaaacaggacuucaacau

SEQ ID NO: 1841813 - RNA, 19 nt, Homo sapiens
  misc_RNA (1)...(19): siRNA sense strand
gggcagccaucucugacuu

SEQ ID NO: 1841814 - RNA, 19 nt, Homo sapiens
  misc_RNA (1)...(19): siRNA sense strand
agacucaacuauccaagug

SEQ ID NO: 1841815 - RNA, 19 nt, Homo sapiens
  misc_RNA (1)...(19): siRNA sense strand
guccagauguuccgguuug

SEQ ID NO: 1841816 - RNA, 19 nt, Homo sapiens
  misc_RNA (1)...(19): siRNA sense strand
gacgaggacugcaaaucga

SEQ ID NO: 1841817 - RNA, 19 nt, Homo sapiens
  misc_RNA (1)...(19): siRNA sense strand
gggaccagauuccgaagug

SEQ ID NO: 1841818 - RNA, 19 nt, Homo sapiens
  misc_RNA (1)...(19): siRNA sense strand
gacugcaaaucgaauaaug

SEQ ID NO: 1841819 - RNA, 19 nt, Homo sapiens
  misc_RNA (1)...(19): siRNA sense strand
ggacagaugcccacacacu

SEQ ID NO: 1841820 - RNA, 19 nt, Homo sapiens
  misc_RNA (1)...(19): siRNA sense strand
gaggacugcaaaucgaaua

SEQ ID NO: 1841821 - RNA, 19 nt, Homo sapiens
  misc_RNA (1)...(19): siRNA sense strand
gacagaugcccacacacua

SEQ ID NO: 1841822 - RNA, 19 nt, Homo sapiens
  misc_RNA (1)...(19): siRNA sense strand
caggacagaugcccacaca

SEQ ID NO: 1841823 - RNA, 19 nt, Homo sapiens
  misc_RNA (1)...(19): siRNA sense strand
ugacuuggaugcugauggu

SEQ ID NO: 1841824 - RNA, 19 nt, Homo sapiens
  misc_RNA (1)...(19): siRNA sense strand
caaacaggacuucaacauc

SEQ ID NO: 1841825 - RNA, 19 nt, Homo sapiens
  misc_RNA (1)...(19): siRNA sense strand
gcucaugaccaacugcuau

SEQ ID NO: 1841826 - RNA, 19 nt, Homo sapiens
  misc_RNA (1)...(19): siRNA sense strand
ccaauggucagugcucuaa

SEQ ID NO: 1841827 - RNA, 19 nt, Homo sapiens
  misc_RNA (1)...(19): siRNA sense strand
gcaagugccagcugaagag

SEQ ID NO: 1841828 - RNA, 19 nt, Homo sapiens
  misc_RNA (1)...(19): siRNA sense strand
ggacugggugucuguagug

SEQ ID NO: 1841829 - RNA, 19 nt, Homo sapiens
  misc_RNA (1)...(19): siRNA sense strand
caagauggugcucugaaug

SEQ ID NO: 1841830 - RNA, 19 nt, Homo sapiens
  misc_RNA (1)...(19): siRNA sense strand
ggagugucauagaucaauc

SEQ ID NO: 1841831 - RNA, 19 nt, Homo sapiens
  misc_RNA (1)...(19): siRNA sense strand
cgacaaggucuucauguac

SEQ ID NO: 1841832 - RNA, 19 nt, Homo sapiens
  misc_RNA (1)...(19): siRNA sense strand
ugugaggagugcaguauag

SEQ ID NO: 1841833 - RNA, 19 nt, Homo sapiens
  misc_RNA (1)...(19): siRNA sense strand
ccaccuugacccugacuuu

SEQ ID NO: 1841834 - RNA, 19 nt, Homo sapiens
  misc_RNA (1)...(19): siRNA sense strand
caucauccgugaccucaac

SEQ ID NO: 1841835 - RNA, 19 nt, Homo sapiens
  misc_RNA (1)...(19): siRNA sense strand
ucaauguggugggcagcua

SEQ ID NO: 1841836 - RNA, 19 nt, Homo sapiens
  misc_RNA (1)...(19): siRNA sense strand
gugggagugucauagauca

SEQ ID NO: 1841837 - RNA, 19 nt, Homo sapiens
  misc_RNA (1)...(19): siRNA sense strand
ucacaacugcagccacuga

SEQ ID NO: 1841838 - RNA, 19 nt, Homo sapiens
  misc_RNA (1)...(19): siRNA sense strand
augaaacccaugccacuua

SEQ ID NO: 1841839 - RNA, 19 nt, Homo sapiens
  misc_RNA (1)...(19): siRNA sense strand
gcacugcucaugaccaacu

SEQ ID NO: 1841840 - RNA, 19 nt, Homo sapiens
  misc_RNA (1)...(19): siRNA sense strand
ccaaggcuccuccgugaca

SEQ ID NO: 1841841 - RNA, 19 nt, Homo sapiens
  misc_RNA (1)...(19): siRNA sense strand
ugacaccucagaagcaaga

SEQ ID NO: 1841842 - RNA, 19 nt, Homo sapiens
  misc_RNA (1)...(19): siRNA sense strand
ucugugacaccaugaauga

SEQ ID NO: 1841843 - RNA, 19 nt, Homo sapiens
  misc_RNA (1)...(19): siRNA sense strand
gugguggccucuugguuca

SEQ ID NO: 1841844 - RNA, 19 nt, Homo sapiens
  misc_RNA (1)...(19): siRNA sense strand
gcagcuacuugugcguaug

SEQ ID NO: 1841845 - RNA, 19 nt, Homo sapiens
  misc_RNA (1)...(19): siRNA sense strand
gauuugcacugcucaugac

SEQ ID NO: 1841846 - RNA, 19 nt, Homo sapiens
  misc_RNA (1)...(19): siRNA sense strand
ggcgaccugucccgauuug

SEQ ID NO: 1841847 - RNA, 19 nt, Homo sapiens
  misc_RNA (1)...(19): siRNA sense strand
ugaaacccaugccacuuac

SEQ ID NO: 1841848 - RNA, 19 nt, Homo sapiens
  misc_RNA (1)...(19): siRNA sense strand
ggacugcaaaucgaauaau

SEQ ID NO: 1841849 - RNA, 19 nt, Homo sapiens
  misc_RNA (1)...(19): siRNA sense strand
gggacugggugucuguagu

SEQ ID NO: 1841850 - RNA, 19 nt, Homo sapiens
  misc_RNA (1)...(19): siRNA sense strand
gcuacuacgucuacaaccu

SEQ ID NO: 1841851 - RNA, 19 nt, Homo sapiens
  misc_RNA (1)...(19): siRNA sense strand
ugugacaccaugaaugaaa

SEQ ID NO: 1841852 - RNA, 19 nt, Homo sapiens
  misc_RNA (1)...(19): siRNA sense strand
cgauuugcacugcucauga

SEQ ID NO: 1841853 - RNA, 19 nt, Homo sapiens
  misc_RNA (1)...(19): siRNA sense strand
uccgugaccucaacaucaa

SEQ ID NO: 1841854 - RNA, 19 nt, Homo sapiens
  misc_RNA (1)...(19): siRNA sense strand
ggcagcuacuugugcguau

SEQ ID NO: 1841855 - RNA, 19 nt, Homo sapiens
  misc_RNA (1)...(19): siRNA sense strand
ccaccugcacggaggauga

SEQ ID NO: 1841856 - RNA, 19 nt, Homo sapiens
  misc_RNA (1)...(19): siRNA sense strand
guauagacgaggacugcaa

SEQ ID NO: 1841857 - RNA, 19 nt, Homo sapiens
  misc_RNA (1)...(19): siRNA sense strand
uauagacgaggacugcaaa

SEQ ID NO: 1841858 - RNA, 19 nt, Homo sapiens
  misc_RNA (1)...(19): siRNA sense strand
gagacucaacuauccaagu

SEQ ID NO: 1841859 - RNA, 19 nt, Homo sapiens
  misc_RNA (1)...(19): siRNA sense strand
ggugcucgggcuucaauga

SEQ ID NO: 1841860 - RNA, 19 nt, Homo sapiens
  misc_RNA (1)...(19): siRNA sense strand
gacugggugucuguaguga

SEQ ID NO: 1841861 - RNA, 19 nt, Homo sapiens
  misc_RNA (1)...(19): siRNA sense strand
agccaucucugacuuggau

SEQ ID NO: 1841862 - RNA, 19 nt, Homo sapiens
  misc_RNA (1)...(19): siRNA sense strand
acacuagagacucaacuau

SEQ ID NO: 1841863 - RNA, 19 nt, Homo sapiens
  misc_RNA (1)...(19): siRNA sense strand
gauggugcucugaauguca

SEQ ID NO: 1841864 - RNA, 19 nt, Homo sapiens
  misc_RNA (1)...(19): siRNA sense strand
cccucuaccuggcagauga

SEQ ID NO: 1841865 - RNA, 19 nt, Homo sapiens
  misc_RNA (1)...(19): siRNA sense strand
ccacugaggcuuuucucua

SEQ ID NO: 1841866 - RNA, 19 nt, Homo sapiens
  misc_RNA (1)...(19): siRNA sense strand
ccucuugguucaucacaac

SEQ ID NO: 1841867 - RNA, 19 nt, Homo sapiens
  misc_RNA (1)...(19): siRNA sense strand
gggagugucauagaucaau

SEQ ID NO: 1841868 - RNA, 19 nt, Homo sapiens
  misc_RNA (1)...(19): siRNA sense strand
gcucugaaugucacagcaa

SEQ ID NO: 1841869 - RNA, 19 nt, Homo sapiens
  misc_RNA (1)...(19): siRNA sense strand
cacacuagagacucaacua

SEQ ID NO: 1841870 - RNA, 19 nt, Homo sapiens
  misc_RNA (1)...(19): siRNA sense strand
gggcgaccugucccgauuu

SEQ ID NO: 1841871 - RNA, 19 nt, Homo sapiens
  misc_RNA (1)...(19): siRNA sense strand
ucagugcucuaaacaucag

SEQ ID NO: 1841872 - RNA, 19 nt, Homo sapiens
  misc_RNA (1)...(19): siRNA sense strand
aagauggugcucugaaugu

SEQ ID NO: 1841873 - RNA, 19 nt, Homo sapiens
  misc_RNA (1)...(19): siRNA sense strand
ccgaagugggagugucaua

SEQ ID NO: 1841874 - RNA, 19 nt, Homo sapiens
  misc_RNA (1)...(19): siRNA sense strand
acuagagacucaacuaucc

SEQ ID NO: 1841875 - RNA, 19 nt, Homo sapiens
  misc_RNA (1)...(19): siRNA sense strand
cagaugcccacacacuaga

SEQ ID NO: 1841876 - RNA, 19 nt, Homo sapiens
  misc_RNA (1)...(19): siRNA sense strand
uugcacugcucaugaccaa

SEQ ID NO: 1841877 - RNA, 19 nt, Homo sapiens
  misc_RNA (1)...(19): siRNA sense strand
gcagaggaaugcagaauga

SEQ ID NO: 1841878 - RNA, 19 nt, Homo sapiens
  misc_RNA (1)...(19): siRNA sense strand
gauacucagucaaccaaca

SEQ ID NO: 1841879 - RNA, 19 nt, Homo sapiens
  misc_RNA (1)...(19): siRNA sense strand
ucaccgagaugcagaggau

SEQ ID NO: 1841880 - RNA, 19 nt, Homo sapiens
  misc_RNA (1)...(19): siRNA sense strand
gagcauucuuggaucucuu

SEQ ID NO: 1841881 - RNA, 19 nt, Homo sapiens
  misc_RNA (1)...(19): siRNA sense strand
caacauuuacugagcaucu

SEQ ID NO: 1841882 - RNA, 19 nt, Homo sapiens
  misc_RNA (1)...(19): siRNA sense strand
guucggugcauguuauaaa

SEQ ID NO: 1841883 - RNA, 19 nt, Homo sapiens
  misc_RNA (1)...(19): siRNA sense strand
gcacgcaggaugugauguc

SEQ ID NO: 1841884 - RNA, 19 nt, Homo sapiens
  misc_RNA (1)...(19): siRNA sense strand
gagaugcagaggauacuca

SEQ ID NO: 1841885 - RNA, 19 nt, Homo sapiens
  misc_RNA (1)...(19): siRNA sense strand
cucagucaaccaacauuua

SEQ ID NO: 1841886 - RNA, 19 nt, Homo sapiens
  misc_RNA (1)...(19): siRNA sense strand
agagagcauucuuggaucu

SEQ ID NO: 1841887 - RNA, 19 nt, Homo sapiens
  misc_RNA (1)...(19): siRNA sense strand
auucuuggaucucuugcaa

SEQ ID NO: 1841888 - RNA, 19 nt, Homo sapiens
  misc_RNA (1)...(19): siRNA sense strand
gcagaggauacucagucaa

SEQ ID NO: 1841889 - RNA, 19 nt, Homo sapiens
  misc_RNA (1)...(19): siRNA sense strand
cagaggauacucagucaac

SEQ ID NO: 1841890 - RNA, 19 nt, Homo sapiens
  misc_RNA (1)...(19): siRNA sense strand
aacauuuacugagcaucua

SEQ ID NO: 1841891 - RNA, 19 nt, Homo sapiens
  misc_RNA (1)...(19): siRNA sense strand
gcacacagcuuacuacauc

SEQ ID NO: 1841892 - RNA, 19 nt, Homo sapiens
  misc_RNA (1)...(19): siRNA sense strand
gaaaugcccugguaucuca

SEQ ID NO: 1841893 - RNA, 19 nt, Homo sapiens
  misc_RNA (1)...(19): siRNA sense strand
gaaggaacgugaugugauc

SEQ ID NO: 1841894 - RNA, 19 nt, Homo sapiens
  misc_RNA (1)...(19): siRNA sense strand
gagauguggucuuuaacua

SEQ ID NO: 1841895 - RNA, 19 nt, Homo sapiens
  misc_RNA (1)...(19): siRNA sense strand
gaaaaucgaugacaugaug

SEQ ID NO: 1841896 - RNA, 19 nt, Homo sapiens
  misc_RNA (1)...(19): siRNA sense strand
gcacuacuccuguguguga

SEQ ID NO: 1841897 - RNA, 19 nt, Homo sapiens
  misc_RNA (1)...(19): siRNA sense strand
gcagugcccuggagaagga

SEQ ID NO: 1841898 - RNA, 19 nt, Homo sapiens
  misc_RNA (1)...(19): siRNA sense strand
ucaaggcgcuguccaagga

SEQ ID NO: 1841899 - RNA, 19 nt, Homo sapiens
  misc_RNA (1)...(19): siRNA sense strand
ccucagaaaugcccuggua

SEQ ID NO: 1841900 - RNA, 19 nt, Homo sapiens
  misc_RNA (1)...(19): siRNA sense strand
ggagaaugaugcaucuaug

SEQ ID NO: 1841901 - RNA, 19 nt, Homo sapiens
  misc_RNA (1)...(19): siRNA sense strand
gugcagacuugaccgagua

SEQ ID NO: 1841902 - RNA, 19 nt, Homo sapiens
  misc_RNA (1)...(19): siRNA sense strand
ccaaggaucugccgaaagc

SEQ ID NO: 1841903 - RNA, 19 nt, Homo sapiens
  misc_RNA (1)...(19): siRNA sense strand
ccacguggccauugcagua

SEQ ID NO: 1841904 - RNA, 19 nt, Homo sapiens
  misc_RNA (1)...(19): siRNA sense strand
gcaggagaaugaugcaucu

SEQ ID NO: 1841905 - RNA, 19 nt, Homo sapiens
  misc_RNA (1)...(19): siRNA sense strand
ugcgagauguggucuuuaa

SEQ ID NO: 1841906 - RNA, 19 nt, Homo sapiens
  misc_RNA (1)...(19): siRNA sense strand
ggagcaccagcaacuguua

SEQ ID NO: 1841907 - RNA, 19 nt, Homo sapiens
  misc_RNA (1)...(19): siRNA sense strand
cuggaagacucacagauug

SEQ ID NO: 1841908 - RNA, 19 nt, Homo sapiens
  misc_RNA (1)...(19): siRNA sense strand
gagaaggaacgugauguga

SEQ ID NO: 1841909 - RNA, 19 nt, Homo sapiens
  misc_RNA (1)...(19): siRNA sense strand
gggagaugcaggagaauga

SEQ ID NO: 1841910 - RNA, 19 nt, Homo sapiens
  misc_RNA (1)...(19): siRNA sense strand
gugaugaugcucuaccuuu

SEQ ID NO: 1841911 - RNA, 19 nt, Homo sapiens
  misc_RNA (1)...(19): siRNA sense strand
agaaggagguggagagcau

SEQ ID NO: 1841912 - RNA, 19 nt, Homo sapiens
  misc_RNA (1)...(19): siRNA sense strand
gcuccaaguacaucuauga

SEQ ID NO: 1841913 - RNA, 19 nt, Homo sapiens
  misc_RNA (1)...(19): siRNA sense strand
uaugcgagauguggucuuu

SEQ ID NO: 1841914 - RNA, 19 nt, Homo sapiens
  misc_RNA (1)...(19): siRNA sense strand
ccagugagaaugucaggaa

SEQ ID NO: 1841915 - RNA, 19 nt, Homo sapiens
  misc_RNA (1)...(19): siRNA sense strand
uguuagaccucgcccagaa

SEQ ID NO: 1841916 - RNA, 19 nt, Homo sapiens
  misc_RNA (1)...(19): siRNA sense strand
gcuccugggugacauugug

SEQ ID NO: 1841917 - RNA, 19 nt, Homo sapiens
  misc_RNA (1)...(19): siRNA sense strand
gacgcagccuccugaccua

SEQ ID NO: 1841918 - RNA, 19 nt, Homo sapiens
  misc_RNA (1)...(19): siRNA sense strand
cacuaugacugcacuuaug

SEQ ID NO: 1841919 - RNA, 19 nt, Homo sapiens
  misc_RNA (1)...(19): siRNA sense strand
agacugagaagaauaaugg

SEQ ID NO: 1841920 - RNA, 19 nt, Homo sapiens
  misc_RNA (1)...(19): siRNA sense strand
gaaugggaaagccggauug

SEQ ID NO: 1841921 - RNA, 19 nt, Homo sapiens
  misc_RNA (1)...(19): siRNA sense strand
gcccugguaucucaucuag

SEQ ID NO: 1841922 - RNA, 19 nt, Homo sapiens
  misc_RNA (1)...(19): siRNA sense strand
ccaccgugaugaugcucua

SEQ ID NO: 1841923 - RNA, 19 nt, Homo sapiens
  misc_RNA (1)...(19): siRNA sense strand
uggagcaucuggcuuucaa

SEQ ID NO: 1841924 - RNA, 19 nt, Homo sapiens
  misc_RNA (1)...(19): siRNA sense strand
ugggugacauugugcagaa

SEQ ID NO: 1841925 - RNA, 19 nt, Homo sapiens
  misc_RNA (1)...(19): siRNA sense strand
aacaagcuaugccagaguu

SEQ ID NO: 1841926 - RNA, 19 nt, Homo sapiens
  misc_RNA (1)...(19): siRNA sense strand
guccaaggaucugccgaaa

SEQ ID NO: 1841927 - RNA, 19 nt, Homo sapiens
  misc_RNA (1)...(19): siRNA sense strand
gaaugaaaaucgaugacau

SEQ ID NO: 1841928 - RNA, 19 nt, Homo sapiens
  misc_RNA (1)...(19): siRNA sense strand
ccacuaugacugcacuuau

SEQ ID NO: 1841929 - RNA, 19 nt, Homo sapiens
  misc_RNA (1)...(19): siRNA sense strand
gagauccgccaccgugaug

SEQ ID NO: 1841930 - RNA, 19 nt, Homo sapiens
  misc_RNA (1)...(19): siRNA sense strand
gacgcugugcccacucuua

SEQ ID NO: 1841931 - RNA, 19 nt, Homo sapiens
  misc_RNA (1)...(19): siRNA sense strand
caggugcuguggccaacaa

SEQ ID NO: 1841932 - RNA, 19 nt, Homo sapiens
  misc_RNA (1)...(19): siRNA sense strand
cccgggagcacacagcuua

SEQ ID NO: 1841933 - RNA, 19 nt, Homo sapiens
  misc_RNA (1)...(19): siRNA sense strand
ccgaguaccucagcacaca

SEQ ID NO: 1841934 - RNA, 19 nt, Homo sapiens
  misc_RNA (1)...(19): siRNA sense strand
gugggaguguggauugaug

SEQ ID NO: 1841935 - RNA, 19 nt, Homo sapiens
  misc_RNA (1)...(19): siRNA sense strand
gggagcacacagcuuacua

SEQ ID NO: 1841936 - RNA, 19 nt, Homo sapiens
  misc_RNA (1)...(19): siRNA sense strand
gaguaccucagcacacauu

SEQ ID NO: 1841937 - RNA, 19 nt, Homo sapiens
  misc_RNA (1)...(19): siRNA sense strand
gcagccuccugaccuaugg

SEQ ID NO: 1841938 - RNA, 19 nt, Homo sapiens
  misc_RNA (1)...(19): siRNA sense strand
gacauugugcagaacugua

SEQ ID NO: 1841939 - RNA, 19 nt, Homo sapiens
  misc_RNA (1)...(19): siRNA sense strand
gguggaugccaguguggua

SEQ ID NO: 1841940 - RNA, 19 nt, Homo sapiens
  misc_RNA (1)...(19): siRNA sense strand
ggcaucccauggacauaug

SEQ ID NO: 1841941 - RNA, 19 nt, Homo sapiens
  misc_RNA (1)...(19): siRNA sense strand
acgccagccuugcggagua

SEQ ID NO: 1841942 - RNA, 19 nt, Homo sapiens
  misc_RNA (1)...(19): siRNA sense strand
ccagugccacggagaguga

SEQ ID NO: 1841943 - RNA, 19 nt, Homo sapiens
  misc_RNA (1)...(19): siRNA sense strand
cuugcugggugcacacuuu

SEQ ID NO: 1841944 - RNA, 19 nt, Homo sapiens
  misc_RNA (1)...(19): siRNA sense strand
ggacaguguggccuugcaa

SEQ ID NO: 1841945 - RNA, 19 nt, Homo sapiens
  misc_RNA (1)...(19): siRNA sense strand
gagcacacagcuuacuaca

SEQ ID NO: 1841946 - RNA, 19 nt, Homo sapiens
  misc_RNA (1)...(19): siRNA sense strand
uuccagaccuucagcaucu

SEQ ID NO: 1841947 - RNA, 19 nt, Homo sapiens
  misc_RNA (1)...(19): siRNA sense strand
ugcgggagaugcaggagaa

SEQ ID NO: 1841948 - RNA, 19 nt, Homo sapiens
  misc_RNA (1)...(19): siRNA sense strand
ucagaaaugcccugguauc

SEQ ID NO: 1841949 - RNA, 19 nt, Homo sapiens
  misc_RNA (1)...(19): siRNA sense strand
ggaguguggauugauguug

SEQ ID NO: 1841950 - RNA, 19 nt, Homo sapiens
  misc_RNA (1)...(19): siRNA sense strand
caacaagcuaugccagagu

SEQ ID NO: 1841951 - RNA, 19 nt, Homo sapiens
  misc_RNA (1)...(19): siRNA sense strand
gagacugagaagaauaaug

SEQ ID NO: 1841952 - RNA, 19 nt, Homo sapiens
  misc_RNA (1)...(19): siRNA sense strand
gccacuaugacugcacuua

SEQ ID NO: 1841953 - RNA, 19 nt, Homo sapiens
  misc_RNA (1)...(19): siRNA sense strand
gagaugcaggagaaugaug

SEQ ID NO: 1841954 - RNA, 19 nt, Homo sapiens
  misc_RNA (1)...(19): siRNA sense strand
gccagaguuuccagaccuu

SEQ ID NO: 1841955 - RNA, 19 nt, Homo sapiens
  misc_RNA (1)...(19): siRNA sense strand
ugagaaggaacgugaugug

SEQ ID NO: 1841956 - RNA, 19 nt, Homo sapiens
  misc_RNA (1)...(19): siRNA sense strand
cagaaaugcccugguaucu

SEQ ID NO: 1841957 - RNA, 19 nt, Homo sapiens
  misc_RNA (1)...(19): siRNA sense strand
agaaggaacgugaugugau

SEQ ID NO: 1841958 - RNA, 19 nt, Homo sapiens
  misc_RNA (1)...(19): siRNA sense strand
ggagcacacagcuuacuac

SEQ ID NO: 1841959 - RNA, 19 nt, Homo sapiens
  misc_RNA (1)...(19): siRNA sense strand
uggcacuacuccugugugu

SEQ ID NO: 1841960 - RNA, 19 nt, Homo sapiens
  misc_RNA (1)...(19): siRNA sense strand
uggaagacucacagauuga

SEQ ID NO: 1841961 - RNA, 19 nt, Homo sapiens
  misc_RNA (1)...(19): siRNA sense strand
ugaugaugcucuaccuuuu

SEQ ID NO: 1841962 - RNA, 19 nt, Homo sapiens
  misc_RNA (1)...(19): siRNA sense strand
uugagacugagaagaauaa

SEQ ID NO: 1841963 - RNA, 19 nt, Homo sapiens
  misc_RNA (1)...(19): siRNA sense strand
ccuccgagcaguccucuca

SEQ ID NO: 1841964 - RNA, 19 nt, Homo sapiens
  misc_RNA (1)...(19): siRNA sense strand
ugaaugggaaagccggauu

SEQ ID NO: 1841965 - RNA, 19 nt, Homo sapiens
  misc_RNA (1)...(19): siRNA sense strand
gaguggagcaccagcaacu

SEQ ID NO: 1841966 - RNA, 19 nt, Homo sapiens
  misc_RNA (1)...(19): siRNA sense strand
ggaguuacauuacuucguu

SEQ ID NO: 1841967 - RNA, 19 nt, Homo sapiens
  misc_RNA (1)...(19): siRNA sense strand
caagauaacccguggaauu

SEQ ID NO: 1841968 - RNA, 19 nt, Homo sapiens
  misc_RNA (1)...(19): siRNA sense strand
caucagaggaguuacauua

SEQ ID NO: 1841969 - RNA, 19 nt, Homo sapiens
  misc_RNA (1)...(19): siRNA sense strand
aaacuauucuccuguauca

SEQ ID NO: 1841970 - RNA, 19 nt, Homo sapiens
  misc_RNA (1)...(19): siRNA sense strand
ggcuaaugcugauaucaua

SEQ ID NO: 1841971 - RNA, 19 nt, Homo sapiens
  misc_RNA (1)...(19): siRNA sense strand
gcaagaauggcuuugauug

SEQ ID NO: 1841972 - RNA, 19 nt, Homo sapiens
  misc_RNA (1)...(19): siRNA sense strand
caacucagcagccauuuga

SEQ ID NO: 1841973 - RNA, 19 nt, Homo sapiens
  misc_RNA (1)...(19): siRNA sense strand
uaugaggacuucagcaauu

SEQ ID NO: 1841974 - RNA, 19 nt, Homo sapiens
  misc_RNA (1)...(19): siRNA sense strand
caacacagauguccaagcu

SEQ ID NO: 1841975 - RNA, 19 nt, Homo sapiens
  misc_RNA (1)...(19): siRNA sense strand
gauaacccguggaauugaa

SEQ ID NO: 1841976 - RNA, 19 nt, Homo sapiens
  misc_RNA (1)...(19): siRNA sense strand
gcuaaucccuuguauuguc

SEQ ID NO: 1841977 - RNA, 19 nt, Homo sapiens
  misc_RNA (1)...(19): siRNA sense strand
gaacaguuucucaacauga

SEQ ID NO: 1841978 - RNA, 19 nt, Homo sapiens
  misc_RNA (1)...(19): siRNA sense strand
cgucuuacauccagucuga

SEQ ID NO: 1841979 - RNA, 19 nt, Homo sapiens
  misc_RNA (1)...(19): siRNA sense strand
cagcagccauuugauguuu

SEQ ID NO: 1841980 - RNA, 19 nt, Homo sapiens
  misc_RNA (1)...(19): siRNA sense strand
gguggcaaauuaaguguga

SEQ ID NO: 1841981 - RNA, 19 nt, Homo sapiens
  misc_RNA (1)...(19): siRNA sense strand
caccacagcaccagaauuu

SEQ ID NO: 1841982 - RNA, 19 nt, Homo sapiens
  misc_RNA (1)...(19): siRNA sense strand
caacuaccguggaggugaa

SEQ ID NO: 1841983 - RNA, 19 nt, Homo sapiens
  misc_RNA (1)...(19): siRNA sense strand
cauccagucugacgacaaa

SEQ ID NO: 1841984 - RNA, 19 nt, Homo sapiens
  misc_RNA (1)...(19): siRNA sense strand
gcaguugguggcaaauuaa

SEQ ID NO: 1841985 - RNA, 19 nt, Homo sapiens
  misc_RNA (1)...(19): siRNA sense strand
gcagacucaugucauugaa

SEQ ID NO: 1841986 - RNA, 19 nt, Homo sapiens
  misc_RNA (1)...(19): siRNA sense strand
cagaggaguuacauuacuu

SEQ ID NO: 1841987 - RNA, 19 nt, Homo sapiens
  misc_RNA (1)...(19): siRNA sense strand
ugaagcaguugguggcaaa

SEQ ID NO: 1841988 - RNA, 19 nt, Homo sapiens
  misc_RNA (1)...(19): siRNA sense strand
ccacaguccuucagcagau

SEQ ID NO: 1841989 - RNA, 19 nt, Homo sapiens
  misc_RNA (1)...(19): siRNA sense strand
gauaugaggacuucagcaa

SEQ ID NO: 1841990 - RNA, 19 nt, Homo sapiens
  misc_RNA (1)...(19): siRNA sense strand
ggcagcaaguggaaauuug

SEQ ID NO: 1841991 - RNA, 19 nt, Homo sapiens
  misc_RNA (1)...(19): siRNA sense strand
uggcuaaucccuuguauug

SEQ ID NO: 1841992 - RNA, 19 nt, Homo sapiens
  misc_RNA (1)...(19): siRNA sense strand
gcugaacaguuucucaaca

SEQ ID NO: 1841993 - RNA, 19 nt, Homo sapiens
  misc_RNA (1)...(19): siRNA sense strand
aagaauggcuuugauugga

SEQ ID NO: 1841994 - RNA, 19 nt, Homo sapiens
  misc_RNA (1)...(19): siRNA sense strand
cauuugauguuucugcauu

SEQ ID NO: 1841995 - RNA, 19 nt, Homo sapiens
  misc_RNA (1)...(19): siRNA sense strand
uaaagcaggcaguagauau

SEQ ID NO: 1841996 - RNA, 19 nt, Homo sapiens
  misc_RNA (1)...(19): siRNA sense strand
gcuguggccuuucagaauc

SEQ ID NO: 1841997 - RNA, 19 nt, Homo sapiens
  misc_RNA (1)...(19): siRNA sense strand
ggacuucagcaauuuagga

SEQ ID NO: 1841998 - RNA, 19 nt, Homo sapiens
  misc_RNA (1)...(19): siRNA sense strand
agcaguugguggcaaauua

SEQ ID NO: 1841999 - RNA, 19 nt, Homo sapiens
  misc_RNA (1)...(19): siRNA sense strand
ucagaaccauuucacaagu

SEQ ID NO: 1842000 - RNA, 19 nt, Homo sapiens
  misc_RNA (1)...(19): siRNA sense strand
gaaauccgagaacagaaug

SEQ ID NO: 1842001 - RNA, 19 nt, Homo sapiens
  misc_RNA (1)...(19): siRNA sense strand
gugcaagaauggcuuugau

SEQ ID NO: 1842002 - RNA, 19 nt, Homo sapiens
  misc_RNA (1)...(19): siRNA sense strand
uaaugucaguggagucuuc

SEQ ID NO: 1842003 - RNA, 19 nt, Homo sapiens
  misc_RNA (1)...(19): siRNA sense strand
ggugaaauccgagaacaga

SEQ ID NO: 1842004 - RNA, 19 nt, Homo sapiens
  misc_RNA (1)...(19): siRNA sense strand
uuacauuacuucguucaga

SEQ ID NO: 1842005 - RNA, 19 nt, Homo sapiens
  misc_RNA (1)...(19): siRNA sense strand
gaggugaaauccgagaaca

SEQ ID NO: 1842006 - RNA, 19 nt, Homo sapiens
  misc_RNA (1)...(19): siRNA sense strand
gggaaaacauggcuuauac

SEQ ID NO: 1842007 - RNA, 19 nt, Homo sapiens
  misc_RNA (1)...(19): siRNA sense strand
ucuccuguaucaagaauug

SEQ ID NO: 1842008 - RNA, 19 nt, Homo sapiens
  misc_RNA (1)...(19): siRNA sense strand
uacauuacuucguucagaa

SEQ ID NO: 1842009 - RNA, 19 nt, Homo sapiens
  misc_RNA (1)...(19): siRNA sense strand
uaauggaguuccugcucaa

SEQ ID NO: 1842010 - RNA, 19 nt, Homo sapiens
  misc_RNA (1)...(19): siRNA sense strand
ugagucauccuguucuaaa

SEQ ID NO: 1842011 - RNA, 19 nt, Homo sapiens
  misc_RNA (1)...(19): siRNA sense strand
gcuaaagauugacaaagcu

SEQ ID NO: 1842012 - RNA, 19 nt, Homo sapiens
  misc_RNA (1)...(19): siRNA sense strand
cagaaccauuucacaagug

SEQ ID NO: 1842013 - RNA, 19 nt, Homo sapiens
  misc_RNA (1)...(19): siRNA sense strand
gcuaaugcugauaucauaa

SEQ ID NO: 1842014 - RNA, 19 nt, Homo sapiens
  misc_RNA (1)...(19): siRNA sense strand
aagauaacccguggaauug

SEQ ID NO: 1842015 - RNA, 19 nt, Homo sapiens
  misc_RNA (1)...(19): siRNA sense strand
gaccuucagccucagcuaa

SEQ ID NO: 1842016 - RNA, 19 nt, Homo sapiens
  misc_RNA (1)...(19): siRNA sense strand
ugaacaguuucucaacaug

SEQ ID NO: 1842017 - RNA, 19 nt, Homo sapiens
  misc_RNA (1)...(19): siRNA sense strand
ucuggacucuuugggauuu

SEQ ID NO: 1842018 - RNA, 19 nt, Homo sapiens
  misc_RNA (1)...(19): siRNA sense strand
gagauuuuauucccucaaa

SEQ ID NO: 1842019 - RNA, 19 nt, Homo sapiens
  misc_RNA (1)...(19): siRNA sense strand
cauuaaagcaggcaguaga

SEQ ID NO: 1842020 - RNA, 19 nt, Homo sapiens
  misc_RNA (1)...(19): siRNA sense strand
ggacucuuugggauuuaua

SEQ ID NO: 1842021 - RNA, 19 nt, Homo sapiens
  misc_RNA (1)...(19): siRNA sense strand
gcaacucagcagccauuug

SEQ ID NO: 1842022 - RNA, 19 nt, Homo sapiens
  misc_RNA (1)...(19): siRNA sense strand
caguagauaugaggacuuc

SEQ ID NO: 1842023 - RNA, 19 nt, Homo sapiens
  misc_RNA (1)...(19): siRNA sense strand
caagaauggcuuugauugg

SEQ ID NO: 1842024 - RNA, 19 nt, Homo sapiens
  misc_RNA (1)...(19): siRNA sense strand
ucagaggaguuacauuacu

SEQ ID NO: 1842025 - RNA, 19 nt, Homo sapiens
  misc_RNA (1)...(19): siRNA sense strand
agccucagcuaaagauuga

SEQ ID NO: 1842026 - RNA, 19 nt, Homo sapiens
  misc_RNA (1)...(19): siRNA sense strand
uuucacaagugcaagaaug

SEQ ID NO: 1842027 - RNA, 19 nt, Homo sapiens
  misc_RNA (1)...(19): siRNA sense strand
gcagccauuugauguuucu

SEQ ID NO: 1842028 - RNA, 19 nt, Homo sapiens
  misc_RNA (1)...(19): siRNA sense strand
gauuggacuuggugugagu

SEQ ID NO: 1842029 - RNA, 19 nt, Homo sapiens
  misc_RNA (1)...(19): siRNA sense strand
uggaguuccugcucaaugu

SEQ ID NO: 1842030 - RNA, 19 nt, Homo sapiens
  misc_RNA (1)...(19): siRNA sense strand
gggugauguugauauucua

SEQ ID NO: 1842031 - RNA, 19 nt, Homo sapiens
  misc_RNA (1)...(19): siRNA sense strand
uuaguguucuucagcaugu

SEQ ID NO: 1842032 - RNA, 19 nt, Homo sapiens
  misc_RNA (1)...(19): siRNA sense strand
ugaggacuucagcaauuua

SEQ ID NO: 1842033 - RNA, 19 nt, Homo sapiens
  misc_RNA (1)...(19): siRNA sense strand
uguauuguccugacuauag

SEQ ID NO: 1842034 - RNA, 19 nt, Homo sapiens
  misc_RNA (1)...(19): siRNA sense strand
gagucauccuguucuaaag

SEQ ID NO: 1842035 - RNA, 19 nt, Homo sapiens
  misc_RNA (1)...(19): siRNA sense strand
ggagucuucugaguguuuc

SEQ ID NO: 1842036 - RNA, 19 nt, Homo sapiens
  misc_RNA (1)...(19): siRNA sense strand
uguccaagcugccaagaac

SEQ ID NO: 1842037 - RNA, 19 nt, Homo sapiens
  misc_RNA (1)...(19): siRNA sense strand
ugaaauccgagaacagaau

SEQ ID NO: 1842038 - RNA, 19 nt, Homo sapiens
  misc_RNA (1)...(19): siRNA sense strand
uuaccaaguuaccaaaugg

SEQ ID NO: 1842039 - RNA, 19 nt, Homo sapiens
  misc_RNA (1)...(19): siRNA sense strand
ggugauguugauauucuaa

SEQ ID NO: 1842040 - RNA, 19 nt, Homo sapiens
  misc_RNA (1)...(19): siRNA sense strand
gaagugcagaggcaaaugc

SEQ ID NO: 1842041 - RNA, 19 nt, Homo sapiens
  misc_RNA (1)...(19): siRNA sense strand
cugaacaguuucucaacau

SEQ ID NO: 1842042 - RNA, 19 nt, Homo sapiens
  misc_RNA (1)...(19): siRNA sense strand
caagggaaaacauggcuua

SEQ ID NO: 1842043 - RNA, 19 nt, Homo sapiens
  misc_RNA (1)...(19): siRNA sense strand
caagugcaagaauggcuuu

SEQ ID NO: 1842044 - RNA, 19 nt, Homo sapiens
  misc_RNA (1)...(19): siRNA sense strand
agacucaugucauugaaaa

SEQ ID NO: 1842045 - RNA, 19 nt, Homo sapiens
  misc_RNA (1)...(19): siRNA sense strand
gaaaacauggcuuauacug

SEQ ID NO: 1842046 - RNA, 19 nt, Homo sapiens
  misc_RNA (1)...(19): siRNA sense strand
uuaaagcaggcaguagaua

SEQ ID NO: 1842047 - RNA, 19 nt, Homo sapiens
  misc_RNA (1)...(19): siRNA sense strand
guauuguccugacuauagg

SEQ ID NO: 1842048 - RNA, 19 nt, Homo sapiens
  misc_RNA (1)...(19): siRNA sense strand
aguggaaauuugggacaua

SEQ ID NO: 1842049 - RNA, 19 nt, Homo sapiens
  misc_RNA (1)...(19): siRNA sense strand
aaagcaggcaguagauaug

SEQ ID NO: 1842050 - RNA, 19 nt, Homo sapiens
  misc_RNA (1)...(19): siRNA sense strand
gccacaaccucaggaccuu

SEQ ID NO: 1842051 - RNA, 19 nt, Homo sapiens
  misc_RNA (1)...(19): siRNA sense strand
ugguuuaucuggugcaaag

SEQ ID NO: 1842052 - RNA, 19 nt, Homo sapiens
  misc_RNA (1)...(19): siRNA sense strand
gaguuuaccaaguuaccaa

SEQ ID NO: 1842053 - RNA, 19 nt, Homo sapiens
  misc_RNA (1)...(19): siRNA sense strand
gcagcaaguggaaauuugg

SEQ ID NO: 1842054 - RNA, 19 nt, Homo sapiens
  misc_RNA (1)...(19): siRNA sense strand
augaggacuucagcaauuu

SEQ ID NO: 1842055 - RNA, 19 nt, Homo sapiens
  misc_RNA (1)...(19): siRNA sense strand
agaacagaauggagacagu

SEQ ID NO: 1842056 - RNA, 19 nt, Homo sapiens
  misc_RNA (1)...(19): siRNA sense strand
uggcuuauacuguggaaug

SEQ ID NO: 1842057 - RNA, 19 nt, Homo sapiens
  misc_RNA (1)...(19): siRNA sense strand
gaagucaauggcagcaagu

SEQ ID NO: 1842058 - RNA, 19 nt, Homo sapiens
  misc_RNA (1)...(19): siRNA sense strand
ucuaguugcugguucuuac

SEQ ID NO: 1842059 - RNA, 19 nt, Homo sapiens
  misc_RNA (1)...(19): siRNA sense strand
aguggagucuucugagugu

SEQ ID NO: 1842060 - RNA, 19 nt, Homo sapiens
  misc_RNA (1)...(19): siRNA sense strand
ggcugccuauaaucaagua

SEQ ID NO: 1842061 - RNA, 19 nt, Homo sapiens
  misc_RNA (1)...(19): siRNA sense strand
uaaugccaguuacucagau

SEQ ID NO: 1842062 - RNA, 19 nt, Homo sapiens
  misc_RNA (1)...(19): siRNA sense strand
ugugagucauccuguucua

SEQ ID NO: 1842063 - RNA, 19 nt, Homo sapiens
  misc_RNA (1)...(19): siRNA sense strand
uuuaccaaguuaccaaaug

SEQ ID NO: 1842064 - RNA, 19 nt, Homo sapiens
  misc_RNA (1)...(19): siRNA sense strand
caacaccaccagccaucug

SEQ ID NO: 1842065 - RNA, 19 nt, Homo sapiens
  misc_RNA (1)...(19): siRNA sense strand
gccaagaacaagcugaaag

SEQ ID NO: 1842066 - RNA, 19 nt, Homo sapiens
  misc_RNA (1)...(19): siRNA sense strand
ccacugugaugcuuuauga

SEQ ID NO: 1842067 - RNA, 19 nt, Homo sapiens
  misc_RNA (1)...(19): siRNA sense strand
uggaagaggugaagaagga

SEQ ID NO: 1842068 - RNA, 19 nt, Homo sapiens
  misc_RNA (1)...(19): siRNA sense strand
gaaagaggaaaucauugaa

SEQ ID NO: 1842069 - RNA, 19 nt, Homo sapiens
  misc_RNA (1)...(19): siRNA sense strand
gaagaaggaauugcagaaa

SEQ ID NO: 1842070 - RNA, 19 nt, Homo sapiens
  misc_RNA (1)...(19): siRNA sense strand
gggccacugugaugcuuua

SEQ ID NO: 1842071 - RNA, 19 nt, Homo sapiens
  misc_RNA (1)...(19): siRNA sense strand
gcgagacggucaucuguuc

SEQ ID NO: 1842072 - RNA, 19 nt, Homo sapiens
  misc_RNA (1)...(19): siRNA sense strand
gagccaaacucaggaaagu

SEQ ID NO: 1842073 - RNA, 19 nt, Homo sapiens
  misc_RNA (1)...(19): siRNA sense strand
ugaaagaggaaaucauuga

SEQ ID NO: 1842074 - RNA, 19 nt, Homo sapiens
  misc_RNA (1)...(19): siRNA sense strand
gaaacaggagcuucuggaa

SEQ ID NO: 1842075 - RNA, 19 nt, Homo sapiens
  misc_RNA (1)...(19): siRNA sense strand
ggaugaaucugccaaucag

SEQ ID NO: 1842076 - RNA, 19 nt, Homo sapiens
  misc_RNA (1)...(19): siRNA sense strand
gaaggaaagccacgcaagu

SEQ ID NO: 1842077 - RNA, 19 nt, Homo sapiens
  misc_RNA (1)...(19): siRNA sense strand
gcagaaagugaaagaggaa

SEQ ID NO: 1842078 - RNA, 19 nt, Homo sapiens
  misc_RNA (1)...(19): siRNA sense strand
ggaauugcagaaagugaaa

SEQ ID NO: 1842079 - RNA, 19 nt, Homo sapiens
  misc_RNA (1)...(19): siRNA sense strand
agaaggaauugcagaaagu

SEQ ID NO: 1842080 - RNA, 19 nt, Homo sapiens
  misc_RNA (1)...(19): siRNA sense strand
gaaagugaaagaggaaauc

SEQ ID NO: 1842081 - RNA, 19 nt, Homo sapiens
  misc_RNA (1)...(19): siRNA sense strand
ugaagaaggaauugcagaa

SEQ ID NO: 1842082 - RNA, 19 nt, Homo sapiens
  misc_RNA (1)...(19): siRNA sense strand
aagaaggaauugcagaaag

SEQ ID NO: 1842083 - RNA, 19 nt, Homo sapiens
  misc_RNA (1)...(19): siRNA sense strand
gagaagaacagcacaaccu

SEQ ID NO: 1842084 - RNA, 19 nt, Homo sapiens
  misc_RNA (1)...(19): siRNA sense strand
gagcgagacggucaucugu

SEQ ID NO: 1842085 - RNA, 19 nt, Homo sapiens
  misc_RNA (1)...(19): siRNA sense strand
acgcccagcuccagugauu

SEQ ID NO: 1842086 - RNA, 19 nt, Homo sapiens
  misc_RNA (1)...(19): siRNA sense strand
gaagaggugaagaaggaau

SEQ ID NO: 1842087 - RNA, 19 nt, Homo sapiens
  misc_RNA (1)...(19): siRNA sense strand
gaaggaauugcagaaagug

SEQ ID NO: 1842088 - RNA, 19 nt, Homo sapiens
  misc_RNA (1)...(19): siRNA sense strand
gccaaacucaggaaaguca

SEQ ID NO: 1842089 - RNA, 19 nt, Homo sapiens
  misc_RNA (1)...(19): siRNA sense strand
cuucuucggugaccacuuc

SEQ ID NO: 1842090 - RNA, 19 nt, Homo sapiens
  misc_RNA (1)...(19): siRNA sense strand
ggagguggagcagcagaaa

SEQ ID NO: 1842091 - RNA, 19 nt, Homo sapiens
  misc_RNA (1)...(19): siRNA sense strand
agugaaagaggaaaucauu

SEQ ID NO: 1842092 - RNA, 19 nt, Homo sapiens
  misc_RNA (1)...(19): siRNA sense strand
cugugaugcuuuaugauga

SEQ ID NO: 1842093 - RNA, 19 nt, Homo sapiens
  misc_RNA (1)...(19): siRNA sense strand
ucaggaaagucagcaagca

SEQ ID NO: 1842094 - RNA, 19 nt, Homo sapiens
  misc_RNA (1)...(19): siRNA sense strand
gcagguggucaucaacugu

SEQ ID NO: 1842095 - RNA, 19 nt, Homo sapiens
  misc_RNA (1)...(19): siRNA sense strand
cggagacccugggagaaga

SEQ ID NO: 1842096 - RNA, 19 nt, Homo sapiens
  misc_RNA (1)...(19): siRNA sense strand
aaggaaagccacgcaaguu

SEQ ID NO: 1842097 - RNA, 19 nt, Homo sapiens
  misc_RNA (1)...(19): siRNA sense strand
gugaaagaggaaaucauug

SEQ ID NO: 1842098 - RNA, 19 nt, Homo sapiens
  misc_RNA (1)...(19): siRNA sense strand
ggagacccugggagaagaa

SEQ ID NO: 1842099 - RNA, 19 nt, Homo sapiens
  misc_RNA (1)...(19): siRNA sense strand
gcguccagaucuaccacaa

SEQ ID NO: 1842100 - RNA, 19 nt, Homo sapiens
  misc_RNA (1)...(19): siRNA sense strand
ggaccuacagagggugaaa

SEQ ID NO: 1842101 - RNA, 19 nt, Homo sapiens
  misc_RNA (1)...(19): siRNA sense strand
agaagaacagcacaaccuu

SEQ ID NO: 1842102 - RNA, 19 nt, Homo sapiens
  misc_RNA (1)...(19): siRNA sense strand
aaagaggaaaucauugaag

SEQ ID NO: 1842103 - RNA, 19 nt, Homo sapiens
  misc_RNA (1)...(19): siRNA sense strand
ggagccaaacucaggaaag

SEQ ID NO: 1842104 - RNA, 19 nt, Homo sapiens
  misc_RNA (1)...(19): siRNA sense strand
ggaagaggugaagaaggaa

SEQ ID NO: 1842105 - RNA, 19 nt, Homo sapiens
  misc_RNA (1)...(19): siRNA sense strand
aggaaagccacgcaaguug

SEQ ID NO: 1842106 - RNA, 19 nt, Homo sapiens
  misc_RNA (1)...(19): siRNA sense strand
ugugaugcuuuaugaugau

SEQ ID NO: 1842107 - RNA, 19 nt, Homo sapiens
  misc_RNA (1)...(19): siRNA sense strand
gagaauggauuggaauuua

SEQ ID NO: 1842108 - RNA, 19 nt, Homo sapiens
  misc_RNA (1)...(19): siRNA sense strand
gaacaacuccagccugaua

SEQ ID NO: 1842109 - RNA, 19 nt, Homo sapiens
  misc_RNA (1)...(19): siRNA sense strand
cgacauggauuucgacauu

SEQ ID NO: 1842110 - RNA, 19 nt, Homo sapiens
  misc_RNA (1)...(19): siRNA sense strand
cuacaagacugaugaauuc

SEQ ID NO: 1842111 - RNA, 19 nt, Homo sapiens
  misc_RNA (1)...(19): siRNA sense strand
gaaauggaauaccgacaau

SEQ ID NO: 1842112 - RNA, 19 nt, Homo sapiens
  misc_RNA (1)...(19): siRNA sense strand
ggagaccgcugucaaucuu

SEQ ID NO: 1842113 - RNA, 19 nt, Homo sapiens
  misc_RNA (1)...(19): siRNA sense strand
cuauggauuuggcuuaaua

SEQ ID NO: 1842114 - RNA, 19 nt, Homo sapiens
  misc_RNA (1)...(19): siRNA sense strand
gaauagcagccaaguauca

SEQ ID NO: 1842115 - RNA, 19 nt, Homo sapiens
  misc_RNA (1)...(19): siRNA sense strand
ggacuggaauuucaagcau

SEQ ID NO: 1842116 - RNA, 19 nt, Homo sapiens
  misc_RNA (1)...(19): siRNA sense strand
gaaaccaaguacagaugga

SEQ ID NO: 1842117 - RNA, 19 nt, Homo sapiens
  misc_RNA (1)...(19): siRNA sense strand
ggacagcaggaaacaguaa

SEQ ID NO: 1842118 - RNA, 19 nt, Homo sapiens
  misc_RNA (1)...(19): siRNA sense strand
gaguacggccugacguuua

SEQ ID NO: 1842119 - RNA, 19 nt, Homo sapiens
  misc_RNA (1)...(19): siRNA sense strand
gcuacaagacugaugaauu

SEQ ID NO: 1842120 - RNA, 19 nt, Homo sapiens
  misc_RNA (1)...(19): siRNA sense strand
uaacacgcgcuucggaaua

SEQ ID NO: 1842121 - RNA, 19 nt, Homo sapiens
  misc_RNA (1)...(19): siRNA sense strand
ccacaagcuuggucuagga

SEQ ID NO: 1842122 - RNA, 19 nt, Homo sapiens
  misc_RNA (1)...(19): siRNA sense strand
ggccugacguuuacagaga

SEQ ID NO: 1842123 - RNA, 19 nt, Homo sapiens
  misc_RNA (1)...(19): siRNA sense strand
gacuggaauuucaagcaua

SEQ ID NO: 1842124 - RNA, 19 nt, Homo sapiens
  misc_RNA (1)...(19): siRNA sense strand
cggaauagcagccaaguau

SEQ ID NO: 1842125 - RNA, 19 nt, Homo sapiens
  misc_RNA (1)...(19): siRNA sense strand
gcagccaaguaucagauug

SEQ ID NO: 1842126 - RNA, 19 nt, Homo sapiens
  misc_RNA (1)...(19): siRNA sense strand
ccugauagguuuaggauac

SEQ ID NO: 1842127 - RNA, 19 nt, Homo sapiens
  misc_RNA (1)...(19): siRNA sense strand
gaauaccgacaauacacua

SEQ ID NO: 1842128 - RNA, 19 nt, Homo sapiens
  misc_RNA (1)...(19): siRNA sense strand
ccagggaugucuucaccaa

SEQ ID NO: 1842129 - RNA, 19 nt, Homo sapiens
  misc_RNA (1)...(19): siRNA sense strand
gaaagugaacaagaaguug

SEQ ID NO: 1842130 - RNA, 19 nt, Homo sapiens
  misc_RNA (1)...(19): siRNA sense strand
caccaagggcuauggauuu

SEQ ID NO: 1842131 - RNA, 19 nt, Homo sapiens
  misc_RNA (1)...(19): siRNA sense strand
gguauuaaacugacacugu

SEQ ID NO: 1842132 - RNA, 19 nt, Homo sapiens
  misc_RNA (1)...(19): siRNA sense strand
gaaugacgggacagaguuu

SEQ ID NO: 1842133 - RNA, 19 nt, Homo sapiens
  misc_RNA (1)...(19): siRNA sense strand
gaguuuggcggcuccauuu

SEQ ID NO: 1842134 - RNA, 19 nt, Homo sapiens
  misc_RNA (1)...(19): siRNA sense strand
acacuaggcaccgagauua

SEQ ID NO: 1842135 - RNA, 19 nt, Homo sapiens
  misc_RNA (1)...(19): siRNA sense strand
aauuccagcuucacacuaa

SEQ ID NO: 1842136 - RNA, 19 nt, Homo sapiens
  misc_RNA (1)...(19): siRNA sense strand
gugcucuggugcuagguua

SEQ ID NO: 1842137 - RNA, 19 nt, Homo sapiens
  misc_RNA (1)...(19): siRNA sense strand
acuggaauuucaagcauaa

SEQ ID NO: 1842138 - RNA, 19 nt, Homo sapiens
  misc_RNA (1)...(19): siRNA sense strand
ggauuggaauuuacaagcu

SEQ ID NO: 1842139 - RNA, 19 nt, Homo sapiens
  misc_RNA (1)...(19): siRNA sense strand
gggcuauggauuuggcuua

SEQ ID NO: 1842140 - RNA, 19 nt, Homo sapiens
  misc_RNA (1)...(19): siRNA sense strand
gauacacucagacucuaaa

SEQ ID NO: 1842141 - RNA, 19 nt, Homo sapiens
  misc_RNA (1)...(19): siRNA sense strand
ggauacacucagacucuaa

SEQ ID NO: 1842142 - RNA, 19 nt, Homo sapiens
  misc_RNA (1)...(19): siRNA sense strand
gcaaaucugccagggaugu

SEQ ID NO: 1842143 - RNA, 19 nt, Homo sapiens
  misc_RNA (1)...(19): siRNA sense strand
cgagauuacuguggaagau

SEQ ID NO: 1842144 - RNA, 19 nt, Homo sapiens
  misc_RNA (1)...(19): siRNA sense strand
acacugagaccaccaaagu

SEQ ID NO: 1842145 - RNA, 19 nt, Homo sapiens
  misc_RNA (1)...(19): siRNA sense strand
gaauuccagcuucacacua

SEQ ID NO: 1842146 - RNA, 19 nt, Homo sapiens
  misc_RNA (1)...(19): siRNA sense strand
gauucauccuucucaccua

SEQ ID NO: 1842147 - RNA, 19 nt, Homo sapiens
  misc_RNA (1)...(19): siRNA sense strand
gacauggauuucgacauug

SEQ ID NO: 1842148 - RNA, 19 nt, Homo sapiens
  misc_RNA (1)...(19): siRNA sense strand
acucuaaagccagguauua

SEQ ID NO: 1842149 - RNA, 19 nt, Homo sapiens
  misc_RNA (1)...(19): siRNA sense strand
gguuuaggauacacucaga

SEQ ID NO: 1842150 - RNA, 19 nt, Homo sapiens
  misc_RNA (1)...(19): siRNA sense strand
ggcuauggauuuggcuuaa

SEQ ID NO: 1842151 - RNA, 19 nt, Homo sapiens
  misc_RNA (1)...(19): siRNA sense strand
accagaaagugaacaagaa

SEQ ID NO: 1842152 - RNA, 19 nt, Homo sapiens
  misc_RNA (1)...(19): siRNA sense strand
ucuaaagccagguauuaaa

SEQ ID NO: 1842153 - RNA, 19 nt, Homo sapiens
  misc_RNA (1)...(19): siRNA sense strand
gcuaccagaugaauuuuga

SEQ ID NO: 1842154 - RNA, 19 nt, Homo sapiens
  misc_RNA (1)...(19): siRNA sense strand
agaaagugaacaagaaguu

SEQ ID NO: 1842155 - RNA, 19 nt, Homo sapiens
  misc_RNA (1)...(19): siRNA sense strand
gaauggauuggaauuuaca

SEQ ID NO: 1842156 - RNA, 19 nt, Homo sapiens
  misc_RNA (1)...(19): siRNA sense strand
cggcuaaagugaacaacuc

SEQ ID NO: 1842157 - RNA, 19 nt, Homo sapiens
  misc_RNA (1)...(19): siRNA sense strand
gucuaggacuggaauuuca

SEQ ID NO: 1842158 - RNA, 19 nt, Homo sapiens
  misc_RNA (1)...(19): siRNA sense strand
uacaagcgggagcacauua

SEQ ID NO: 1842159 - RNA, 19 nt, Homo sapiens
  misc_RNA (1)...(19): siRNA sense strand
acuccagccugauagguuu

SEQ ID NO: 1842160 - RNA, 19 nt, Homo sapiens
  misc_RNA (1)...(19): siRNA sense strand
gcggcuccauuuaccagaa

SEQ ID NO: 1842161 - RNA, 19 nt, Homo sapiens
  misc_RNA (1)...(19): siRNA sense strand
agaaauggaauaccgacaa

SEQ ID NO: 1842162 - RNA, 19 nt, Homo sapiens
  misc_RNA (1)...(19): siRNA sense strand
ugagaauggauuggaauuu

SEQ ID NO: 1842163 - RNA, 19 nt, Homo sapiens
  misc_RNA (1)...(19): siRNA sense strand
agaauggauuggaauuuac

SEQ ID NO: 1842164 - RNA, 19 nt, Homo sapiens
  misc_RNA (1)...(19): siRNA sense strand
ugaaugacgggacagaguu

SEQ ID NO: 1842165 - RNA, 19 nt, Homo sapiens
  misc_RNA (1)...(19): siRNA sense strand
ccggcuaccagaugaauuu

SEQ ID NO: 1842166 - RNA, 19 nt, Homo sapiens
  misc_RNA (1)...(19): siRNA sense strand
uaaccugggcugcgacaug

SEQ ID NO: 1842167 - RNA, 19 nt, Homo sapiens
  misc_RNA (1)...(19): siRNA sense strand
aaagccagguauuaaacug

SEQ ID NO: 1842168 - RNA, 19 nt, Homo sapiens
  misc_RNA (1)...(19): siRNA sense strand
ucaccaagggcuauggauu

SEQ ID NO: 1842169 - RNA, 19 nt, Homo sapiens
  misc_RNA (1)...(19): siRNA sense strand
ccauuuaccagaaagugaa

SEQ ID NO: 1842170 - RNA, 19 nt, Homo sapiens
  misc_RNA (1)...(19): siRNA sense strand
gcuauggauuuggcuuaau

SEQ ID NO: 1842171 - RNA, 19 nt, Homo sapiens
  misc_RNA (1)...(19): siRNA sense strand
agauuacuguggaagauca

SEQ ID NO: 1842172 - RNA, 19 nt, Homo sapiens
  misc_RNA (1)...(19): siRNA sense strand
ggaauagcagccaaguauc

SEQ ID NO: 1842173 - RNA, 19 nt, Homo sapiens
  misc_RNA (1)...(19): siRNA sense strand
guaacacgcgcuucggaau

SEQ ID NO: 1842174 - RNA, 19 nt, Homo sapiens
  misc_RNA (1)...(19): siRNA sense strand
guacaagcgggagcacauu

SEQ ID NO: 1842175 - RNA, 19 nt, Homo sapiens
  misc_RNA (1)...(19): siRNA sense strand
gcagucuggaaaccaagua

SEQ ID NO: 1842176 - RNA, 19 nt, Homo sapiens
  misc_RNA (1)...(19): siRNA sense strand
gcugcgacauggauuucga

SEQ ID NO: 1842177 - RNA, 19 nt, Homo sapiens
  misc_RNA (1)...(19): siRNA sense strand
cagccaaguaucagauuga

SEQ ID NO: 1842178 - RNA, 19 nt, Homo sapiens
  misc_RNA (1)...(19): siRNA sense strand
ggucuaggacuggaauuuc

SEQ ID NO: 1842179 - RNA, 19 nt, Homo sapiens
  misc_RNA (1)...(19): siRNA sense strand
ggaauaccgacaauacacu

SEQ ID NO: 1842180 - RNA, 19 nt, Homo sapiens
  misc_RNA (1)...(19): siRNA sense strand
uaccagaaagugaacaaga

SEQ ID NO: 1842181 - RNA, 19 nt, Homo sapiens
  misc_RNA (1)...(19): siRNA sense strand
acaagcgggagcacauuaa

SEQ ID NO: 1842182 - RNA, 19 nt, Homo sapiens
  misc_RNA (1)...(19): siRNA sense strand
auucauccuucucaccuaa

SEQ ID NO: 1842183 - RNA, 19 nt, Homo sapiens
  misc_RNA (1)...(19): siRNA sense strand
acugagaccaccaaaguga

SEQ ID NO: 1842184 - RNA, 19 nt, Homo sapiens
  misc_RNA (1)...(19): siRNA sense strand
gccugacguuuacagagaa

SEQ ID NO: 1842185 - RNA, 19 nt, Homo sapiens
  misc_RNA (1)...(19): siRNA sense strand
cggcuccauuuaccagaaa

SEQ ID NO: 1842186 - RNA, 19 nt, Homo sapiens
  misc_RNA (1)...(19): siRNA sense strand
accaagggcuauggauuug

SEQ ID NO: 1842187 - RNA, 19 nt, Homo sapiens
  misc_RNA (1)...(19): siRNA sense strand
aaguacagauggacugagu

SEQ ID NO: 1842188 - RNA, 19 nt, Homo sapiens
  misc_RNA (1)...(19): siRNA sense strand
aagcugaccuucgauucau

SEQ ID NO: 1842189 - RNA, 19 nt, Homo sapiens
  misc_RNA (1)...(19): siRNA sense strand
gguacaagcgggagcacau

SEQ ID NO: 1842190 - RNA, 19 nt, Homo sapiens
  misc_RNA (1)...(19): siRNA sense strand
caacacugagaccaccaaa

SEQ ID NO: 1842191 - RNA, 19 nt, Homo sapiens
  misc_RNA (1)...(19): siRNA sense strand
ccaaguacagauggacuga

SEQ ID NO: 1842192 - RNA, 19 nt, Homo sapiens
  misc_RNA (1)...(19): siRNA sense strand
ccagaaagugaacaagaag

SEQ ID NO: 1842193 - RNA, 19 nt, Homo sapiens
  misc_RNA (1)...(19): siRNA sense strand
aggauacacucagacucua

SEQ ID NO: 1842194 - RNA, 19 nt, Homo sapiens
  misc_RNA (1)...(19): siRNA sense strand
gugaaugacgggacagagu

SEQ ID NO: 1842195 - RNA, 19 nt, Homo sapiens
  misc_RNA (1)...(19): siRNA sense strand
cuaaagccagguauuaaac

SEQ ID NO: 1842196 - RNA, 19 nt, Homo sapiens
  misc_RNA (1)...(19): siRNA sense strand
uaggauacacucagacucu

SEQ ID NO: 1842197 - RNA, 19 nt, Homo sapiens
  misc_RNA (1)...(19): siRNA sense strand
ugaguacggccugacguuu

SEQ ID NO: 1842198 - RNA, 19 nt, Homo sapiens
  misc_RNA (1)...(19): siRNA sense strand
ugacguuuacagagaaaug

SEQ ID NO: 1842199 - RNA, 19 nt, Homo sapiens
  misc_RNA (1)...(19): siRNA sense strand
gcagggugcuggacaguga

SEQ ID NO: 1842200 - RNA, 19 nt, Homo sapiens
  misc_RNA (1)...(19): siRNA sense strand
ugagacagcugcagaguuc

SEQ ID NO: 1842201 - RNA, 19 nt, Homo sapiens
  misc_RNA (1)...(19): siRNA sense strand
ccacagagcaugcuacaga

SEQ ID NO: 1842202 - RNA, 19 nt, Homo sapiens
  misc_RNA (1)...(19): siRNA sense strand
gauggaggcuauuaugauc

SEQ ID NO: 1842203 - RNA, 19 nt, Homo sapiens
  misc_RNA (1)...(19): siRNA sense strand
acagaguccugcucaauga

SEQ ID NO: 1842204 - RNA, 19 nt, Homo sapiens
  misc_RNA (1)...(19): siRNA sense strand
gcucaaugauggaggcuau

SEQ ID NO: 1842205 - RNA, 19 nt, Homo sapiens
  misc_RNA (1)...(19): siRNA sense strand
cugagggccuggagaauaa

SEQ ID NO: 1842206 - RNA, 19 nt, Homo sapiens
  misc_RNA (1)...(19): siRNA sense strand
ccaaggaccguaucauuuc

SEQ ID NO: 1842207 - RNA, 19 nt, Homo sapiens
  misc_RNA (1)...(19): siRNA sense strand
gaccguaucauuucugaga

SEQ ID NO: 1842208 - RNA, 19 nt, Homo sapiens
  misc_RNA (1)...(19): siRNA sense strand
cguaucauuucugagauua

SEQ ID NO: 1842209 - RNA, 19 nt, Homo sapiens
  misc_RNA (1)...(19): siRNA sense strand
gcgagggccuuuccagaca

SEQ ID NO: 1842210 - RNA, 19 nt, Homo sapiens
  misc_RNA (1)...(19): siRNA sense strand
ucaaugauggaggcuauua

SEQ ID NO: 1842211 - RNA, 19 nt, Homo sapiens
  misc_RNA (1)...(19): siRNA sense strand
aggauggaguggagacaua

SEQ ID NO: 1842212 - RNA, 19 nt, Homo sapiens
  misc_RNA (1)...(19): siRNA sense strand
ucaaugacucacugaauga

SEQ ID NO: 1842213 - RNA, 19 nt, Homo sapiens
  misc_RNA (1)...(19): siRNA sense strand
ggacggcuucagcguguuu

SEQ ID NO: 1842214 - RNA, 19 nt, Homo sapiens
  misc_RNA (1)...(19): siRNA sense strand
gacagaguccugcucaaug

SEQ ID NO: 1842215 - RNA, 19 nt, Homo sapiens
  misc_RNA (1)...(19): siRNA sense strand
ggaggugcugucaggguua

SEQ ID NO: 1842216 - RNA, 19 nt, Homo sapiens
  misc_RNA (1)...(19): siRNA sense strand
cucaaugacucacugaaug

SEQ ID NO: 1842217 - RNA, 19 nt, Homo sapiens
  misc_RNA (1)...(19): siRNA sense strand
caacaccaccagccagaug

SEQ ID NO: 1842218 - RNA, 19 nt, Homo sapiens
  misc_RNA (1)...(19): siRNA sense strand
ggagcugggucaccucaac

SEQ ID NO: 1842219 - RNA, 19 nt, Homo sapiens
  misc_RNA (1)...(19): siRNA sense strand
ccugagggccuggagaaua

SEQ ID NO: 1842220 - RNA, 19 nt, Homo sapiens
  misc_RNA (1)...(19): siRNA sense strand
caaggaccguaucauuucu

SEQ ID NO: 1842221 - RNA, 19 nt, Homo sapiens
  misc_RNA (1)...(19): siRNA sense strand
ggagggauuacaagagguu

SEQ ID NO: 1842222 - RNA, 19 nt, Homo sapiens
  misc_RNA (1)...(19): siRNA sense strand
ggcgaugacugugcugaga

SEQ ID NO: 1842223 - RNA, 19 nt, Homo sapiens
  misc_RNA (1)...(19): siRNA sense strand
guggugacccggacaguga

SEQ ID NO: 1842224 - RNA, 19 nt, Homo sapiens
  misc_RNA (1)...(19): siRNA sense strand
gugaacgguuggacacugu

SEQ ID NO: 1842225 - RNA, 19 nt, Homo sapiens
  misc_RNA (1)...(19): siRNA sense strand
cgacagaguccugcucaau

SEQ ID NO: 1842226 - RNA, 19 nt, Homo sapiens
  misc_RNA (1)...(19): siRNA sense strand
gaggugcugucaggguuau

SEQ ID NO: 1842227 - RNA, 19 nt, Homo sapiens
  misc_RNA (1)...(19): siRNA sense strand
acacuacggcugaaucuca

SEQ ID NO: 1842228 - RNA, 19 nt, Homo sapiens
  misc_RNA (1)...(19): siRNA sense strand
accaaggaccguaucauuu

SEQ ID NO: 1842229 - RNA, 19 nt, Homo sapiens
  misc_RNA (1)...(19): siRNA sense strand
ccguaucauuucugagauu

SEQ ID NO: 1842230 - RNA, 19 nt, Homo sapiens
  misc_RNA (1)...(19): siRNA sense strand
gagguuauucucagcuuca

SEQ ID NO: 1842231 - RNA, 19 nt, Homo sapiens
  misc_RNA (1)...(19): siRNA sense strand
aaccaaggaccguaucauu

SEQ ID NO: 1842232 - RNA, 19 nt, Homo sapiens
  misc_RNA (1)...(19): siRNA sense strand
ugcaugaaacccucaauga

SEQ ID NO: 1842233 - RNA, 19 nt, Homo sapiens
  misc_RNA (1)...(19): siRNA sense strand
gcaggaggccacagagcau

SEQ ID NO: 1842234 - RNA, 19 nt, Homo sapiens
  misc_RNA (1)...(19): siRNA sense strand
ugcagagccugaccaagga

SEQ ID NO: 1842235 - RNA, 19 nt, Homo sapiens
  misc_RNA (1)...(19): siRNA sense strand
gcuaccguguggccuacaa

SEQ ID NO: 1842236 - RNA, 19 nt, Homo sapiens
  misc_RNA (1)...(19): siRNA sense strand
aggccacgcuggagggauu

SEQ ID NO: 1842237 - RNA, 19 nt, Homo sapiens
  misc_RNA (1)...(19): siRNA sense strand
ugauggaggcuauuaugau

SEQ ID NO: 1842238 - RNA, 19 nt, Homo sapiens
  misc_RNA (1)...(19): siRNA sense strand
acaagacagugaccgacau

SEQ ID NO: 1842239 - RNA, 19 nt, Homo sapiens
  misc_RNA (1)...(19): siRNA sense strand
gcaaccaaggaccguauca

SEQ ID NO: 1842240 - RNA, 19 nt, Homo sapiens
  misc_RNA (1)...(19): siRNA sense strand
cgaugacugugcugagagu

SEQ ID NO: 1842241 - RNA, 19 nt, Homo sapiens
  misc_RNA (1)...(19): siRNA sense strand
ggauggaguggagacauau

SEQ ID NO: 1842242 - RNA, 19 nt, Homo sapiens
  misc_RNA (1)...(19): siRNA sense strand
gggcugcuggccaauguga

SEQ ID NO: 1842243 - RNA, 19 nt, Homo sapiens
  misc_RNA (1)...(19): siRNA sense strand
caagacagugaccgacaug

SEQ ID NO: 1842244 - RNA, 19 nt, Homo sapiens
  misc_RNA (1)...(19): siRNA sense strand
gggcaaccaaggaccguau

SEQ ID NO: 1842245 - RNA, 19 nt, Homo sapiens
  misc_RNA (1)...(19): siRNA sense strand
ccucaaugacucacugaau

SEQ ID NO: 1842246 - RNA, 19 nt, Homo sapiens
  misc_RNA (1)...(19): siRNA sense strand
caaugauggaggcuauuau

SEQ ID NO: 1842247 - RNA, 19 nt, Homo sapiens
  misc_RNA (1)...(19): siRNA sense strand
gugcaugaaacccucaaug

SEQ ID NO: 1842248 - RNA, 19 nt, Homo sapiens
  misc_RNA (1)...(19): siRNA sense strand
cuauuaugauccagagaca

SEQ ID NO: 1842249 - RNA, 19 nt, Homo sapiens
  misc_RNA (1)...(19): siRNA sense strand
gcugcagaguucacacuac

SEQ ID NO: 1842250 - RNA, 19 nt, Homo sapiens
  misc_RNA (1)...(19): siRNA sense strand
agacagugaccgacaugga

SEQ ID NO: 1842251 - RNA, 19 nt, Homo sapiens
  misc_RNA (1)...(19): siRNA sense strand
aaugauggaggcuauuaug

SEQ ID NO: 1842252 - RNA, 19 nt, Homo sapiens
  misc_RNA (1)...(19): siRNA sense strand
gaacagaaaucgcaauuga

SEQ ID NO: 1842253 - RNA, 19 nt, Homo sapiens
  misc_RNA (1)...(19): siRNA sense strand
caacaacucuagcuuaauu

SEQ ID NO: 1842254 - RNA, 19 nt, Homo sapiens
  misc_RNA (1)...(19): siRNA sense strand
aaucaaagcugacaaggaa

SEQ ID NO: 1842255 - RNA, 19 nt, Homo sapiens
  misc_RNA (1)...(19): siRNA sense strand
guucagcugucuuugguua

SEQ ID NO: 1842256 - RNA, 19 nt, Homo sapiens
  misc_RNA (1)...(19): siRNA sense strand
gaggaucaauuuaucagaa

SEQ ID NO: 1842257 - RNA, 19 nt, Homo sapiens
  misc_RNA (1)...(19): siRNA sense strand
gauacuaccuucucaccaa

SEQ ID NO: 1842258 - RNA, 19 nt, Homo sapiens
  misc_RNA (1)...(19): siRNA sense strand
gaaaguuugugaagaucuu

SEQ ID NO: 1842259 - RNA, 19 nt, Homo sapiens
  misc_RNA (1)...(19): siRNA sense strand
ucagaaaguuugugaagau

SEQ ID NO: 1842260 - RNA, 19 nt, Homo sapiens
  misc_RNA (1)...(19): siRNA sense strand
gucaacaacucuagcuuaa

SEQ ID NO: 1842261 - RNA, 19 nt, Homo sapiens
  misc_RNA (1)...(19): siRNA sense strand
gaucuugacacuucaguaa

SEQ ID NO: 1842262 - RNA, 19 nt, Homo sapiens
  misc_RNA (1)...(19): siRNA sense strand
gaccagauuugucaagguu

SEQ ID NO: 1842263 - RNA, 19 nt, Homo sapiens
  misc_RNA (1)...(19): siRNA sense strand
gcuaccagaugaccuuuga

SEQ ID NO: 1842264 - RNA, 19 nt, Homo sapiens
  misc_RNA (1)...(19): siRNA sense strand
guagaugggaagagcauua

SEQ ID NO: 1842265 - RNA, 19 nt, Homo sapiens
  misc_RNA (1)...(19): siRNA sense strand
guugugauguugacuuuga

SEQ ID NO: 1842266 - RNA, 19 nt, Homo sapiens
  misc_RNA (1)...(19): siRNA sense strand
caaaguugccagagauauu

SEQ ID NO: 1842267 - RNA, 19 nt, Homo sapiens
  misc_RNA (1)...(19): siRNA sense strand
gacagaauuuggaggauca

SEQ ID NO: 1842268 - RNA, 19 nt, Homo sapiens
  misc_RNA (1)...(19): siRNA sense strand
gcaauugaagaccagauuu

SEQ ID NO: 1842269 - RNA, 19 nt, Homo sapiens
  misc_RNA (1)...(19): siRNA sense strand
uacagacacugguaaaguu

SEQ ID NO: 1842270 - RNA, 19 nt, Homo sapiens
  misc_RNA (1)...(19): siRNA sense strand
ucaaagcugacaaggaaua

SEQ ID NO: 1842271 - RNA, 19 nt, Homo sapiens
  misc_RNA (1)...(19): siRNA sense strand
caacguccgguucaucuaa

SEQ ID NO: 1842272 - RNA, 19 nt, Homo sapiens
  misc_RNA (1)...(19): siRNA sense strand
gguaccaacugcacucguu

SEQ ID NO: 1842273 - RNA, 19 nt, Homo sapiens
  misc_RNA (1)...(19): siRNA sense strand
aaucaagucuucuuacaag

SEQ ID NO: 1842274 - RNA, 19 nt, Homo sapiens
  misc_RNA (1)...(19): siRNA sense strand
ccagauuugucaagguuug

SEQ ID NO: 1842275 - RNA, 19 nt, Homo sapiens
  misc_RNA (1)...(19): siRNA sense strand
gcuacacacuaaugucaau

SEQ ID NO: 1842276 - RNA, 19 nt, Homo sapiens
  misc_RNA (1)...(19): siRNA sense strand
ccagagauauuuucaacaa

SEQ ID NO: 1842277 - RNA, 19 nt, Homo sapiens
  misc_RNA (1)...(19): siRNA sense strand
gcauugcagcuaaauauca

SEQ ID NO: 1842278 - RNA, 19 nt, Homo sapiens
  misc_RNA (1)...(19): siRNA sense strand
ucaaugaugggacagaauu

SEQ ID NO: 1842279 - RNA, 19 nt, Homo sapiens
  misc_RNA (1)...(19): siRNA sense strand
gaugggaagagcauuaaug

SEQ ID NO: 1842280 - RNA, 19 nt, Homo sapiens
  misc_RNA (1)...(19): siRNA sense strand
ccaaauacaagugguguga

SEQ ID NO: 1842281 - RNA, 19 nt, Homo sapiens
  misc_RNA (1)...(19): siRNA sense strand
gaaaagugguaaaaucaag

SEQ ID NO: 1842282 - RNA, 19 nt, Homo sapiens
  misc_RNA (1)...(19): siRNA sense strand
ggacaucagguaccaacug

SEQ ID NO: 1842283 - RNA, 19 nt, Homo sapiens
  misc_RNA (1)...(19): siRNA sense strand
gugaguauggucugacuuu

SEQ ID NO: 1842284 - RNA, 19 nt, Homo sapiens
  misc_RNA (1)...(19): siRNA sense strand
uacacucucugcucuggua

SEQ ID NO: 1842285 - RNA, 19 nt, Homo sapiens
  misc_RNA (1)...(19): siRNA sense strand
ggaucccacugcuuccauu

SEQ ID NO: 1842286 - RNA, 19 nt, Homo sapiens
  misc_RNA (1)...(19): siRNA sense strand
gaaacugacauuugauacu

SEQ ID NO: 1842287 - RNA, 19 nt, Homo sapiens
  misc_RNA (1)...(19): siRNA sense strand
gggaacagaaaucgcaauu

SEQ ID NO: 1842288 - RNA, 19 nt, Homo sapiens
  misc_RNA (1)...(19): siRNA sense strand
aaaguugccagagauauuu

SEQ ID NO: 1842289 - RNA, 19 nt, Homo sapiens
  misc_RNA (1)...(19): siRNA sense strand
gacaaggaauaacuuugca

SEQ ID NO: 1842290 - RNA, 19 nt, Homo sapiens
  misc_RNA (1)...(19): siRNA sense strand
guguauuccuccaucauau

SEQ ID NO: 1842291 - RNA, 19 nt, Homo sapiens
  misc_RNA (1)...(19): siRNA sense strand
caauugaagaccagauuug

SEQ ID NO: 1842292 - RNA, 19 nt, Homo sapiens
  misc_RNA (1)...(19): siRNA sense strand
ggaaagaaaagugguaaaa

SEQ ID NO: 1842293 - RNA, 19 nt, Homo sapiens
  misc_RNA (1)...(19): siRNA sense strand
gagggaguguauaaaccuu

SEQ ID NO: 1842294 - RNA, 19 nt, Homo sapiens
  misc_RNA (1)...(19): siRNA sense strand
caagagggaguguauaaac

SEQ ID NO: 1842295 - RNA, 19 nt, Homo sapiens
  misc_RNA (1)...(19): siRNA sense strand
agucaacaacucuagcuua

SEQ ID NO: 1842296 - RNA, 19 nt, Homo sapiens
  misc_RNA (1)...(19): siRNA sense strand
gaaacuggaugugaaaaca

SEQ ID NO: 1842297 - RNA, 19 nt, Homo sapiens
  misc_RNA (1)...(19): siRNA sense strand
ccagaugaccuuugacagu

SEQ ID NO: 1842298 - RNA, 19 nt, Homo sapiens
  misc_RNA (1)...(19): siRNA sense strand
ggugaaacuggaugugaaa

SEQ ID NO: 1842299 - RNA, 19 nt, Homo sapiens
  misc_RNA (1)...(19): siRNA sense strand
aaaccuugcuuggacauca

SEQ ID NO: 1842300 - RNA, 19 nt, Homo sapiens
  misc_RNA (1)...(19): siRNA sense strand
guggaacacugauaacacu

SEQ ID NO: 1842301 - RNA, 19 nt, Homo sapiens
  misc_RNA (1)...(19): siRNA sense strand
aaauacaaguggugugagu

SEQ ID NO: 1842302 - RNA, 19 nt, Homo sapiens
  misc_RNA (1)...(19): siRNA sense strand
acagacacugguaaaguua

SEQ ID NO: 1842303 - RNA, 19 nt, Homo sapiens
  misc_RNA (1)...(19): siRNA sense strand
uaauacagacacugguaaa

SEQ ID NO: 1842304 - RNA, 19 nt, Homo sapiens
  misc_RNA (1)...(19): siRNA sense strand
ggaacagaaaucgcaauug

SEQ ID NO: 1842305 - RNA, 19 nt, Homo sapiens
  misc_RNA (1)...(19): siRNA sense strand
gcugacaaggaauaacuuu

SEQ ID NO: 1842306 - RNA, 19 nt, Homo sapiens
  misc_RNA (1)...(19): siRNA sense strand
gauguugacuuugauuuug

SEQ ID NO: 1842307 - RNA, 19 nt, Homo sapiens
  misc_RNA (1)...(19): siRNA sense strand
gaagaccagauuugucaag

SEQ ID NO: 1842308 - RNA, 19 nt, Homo sapiens
  misc_RNA (1)...(19): siRNA sense strand
uggcauugcagcuaaauau

SEQ ID NO: 1842309 - RNA, 19 nt, Homo sapiens
  misc_RNA (1)...(19): siRNA sense strand
caaagcugacaaggaauaa

SEQ ID NO: 1842310 - RNA, 19 nt, Homo sapiens
  misc_RNA (1)...(19): siRNA sense strand
gaguauggucugacuuuca

SEQ ID NO: 1842311 - RNA, 19 nt, Homo sapiens
  misc_RNA (1)...(19): siRNA sense strand
ggaucaauuuaucagaaag

SEQ ID NO: 1842312 - RNA, 19 nt, Homo sapiens
  misc_RNA (1)...(19): siRNA sense strand
acagaaaucgcaauugaag

SEQ ID NO: 1842313 - RNA, 19 nt, Homo sapiens
  misc_RNA (1)...(19): siRNA sense strand
cccuggaguuggaggcuua

SEQ ID NO: 1842314 - RNA, 19 nt, Homo sapiens
  misc_RNA (1)...(19): siRNA sense strand
cuaauacagacacugguaa

SEQ ID NO: 1842315 - RNA, 19 nt, Homo sapiens
  misc_RNA (1)...(19): siRNA sense strand
cugcuuccauuucugcaaa

SEQ ID NO: 1842316 - RNA, 19 nt, Homo sapiens
  misc_RNA (1)...(19): siRNA sense strand
guaccaacugcacucguuu

SEQ ID NO: 1842317 - RNA, 19 nt, Homo sapiens
  misc_RNA (1)...(19): siRNA sense strand
caaugaugggacagaauuu

SEQ ID NO: 1842318 - RNA, 19 nt, Homo sapiens
  misc_RNA (1)...(19): siRNA sense strand
cagcuacacacuaauguca

SEQ ID NO: 1842319 - RNA, 19 nt, Homo sapiens
  misc_RNA (1)...(19): siRNA sense strand
uggugaaacuggaugugaa

SEQ ID NO: 1842320 - RNA, 19 nt, Homo sapiens
  misc_RNA (1)...(19): siRNA sense strand
ugauaacacucugggaaca

SEQ ID NO: 1842321 - RNA, 19 nt, Homo sapiens
  misc_RNA (1)...(19): siRNA sense strand
auacuaccuucucaccaaa

SEQ ID NO: 1842322 - RNA, 19 nt, Homo sapiens
  misc_RNA (1)...(19): siRNA sense strand
cagaaaguuugugaagauc

SEQ ID NO: 1842323 - RNA, 19 nt, Homo sapiens
  misc_RNA (1)...(19): siRNA sense strand
ggaggaucaauuuaucaga

SEQ ID NO: 1842324 - RNA, 19 nt, Homo sapiens
  misc_RNA (1)...(19): siRNA sense strand
ucagcugucuuugguuaug

SEQ ID NO: 1842325 - RNA, 19 nt, Homo sapiens
  misc_RNA (1)...(19): siRNA sense strand
ggaccugcaauccaugguu

SEQ ID NO: 1842326 - RNA, 19 nt, Homo sapiens
  misc_RNA (1)...(19): siRNA sense strand
gcaguggcguggaauuuuc

SEQ ID NO: 1842327 - RNA, 19 nt, Homo sapiens
  misc_RNA (1)...(19): siRNA sense strand
uaucagaaaguuugugaag

SEQ ID NO: 1842328 - RNA, 19 nt, Homo sapiens
  misc_RNA (1)...(19): siRNA sense strand
ccaaaucaaagcugacaag

SEQ ID NO: 1842329 - RNA, 19 nt, Homo sapiens
  misc_RNA (1)...(19): siRNA sense strand
ugacagugccaaaucaaag

SEQ ID NO: 1842330 - RNA, 19 nt, Homo sapiens
  misc_RNA (1)...(19): siRNA sense strand
ucuaauacagacacuggua

SEQ ID NO: 1842331 - RNA, 19 nt, Homo sapiens
  misc_RNA (1)...(19): siRNA sense strand
ugguugugauguugacuuu

SEQ ID NO: 1842332 - RNA, 19 nt, Homo sapiens
  misc_RNA (1)...(19): siRNA sense strand
ucaccaaacacaggaaaga

SEQ ID NO: 1842333 - RNA, 19 nt, Homo sapiens
  misc_RNA (1)...(19): siRNA sense strand
gaucccacugcuuccauuu

SEQ ID NO: 1842334 - RNA, 19 nt, Homo sapiens
  misc_RNA (1)...(19): siRNA sense strand
gcgcguccaauguguauuc

SEQ ID NO: 1842335 - RNA, 19 nt, Homo sapiens
  misc_RNA (1)...(19): siRNA sense strand
cagcugucuuugguuauga

SEQ ID NO: 1842336 - RNA, 19 nt, Homo sapiens
  misc_RNA (1)...(19): siRNA sense strand
ugacaaggaauaacuuugc

SEQ ID NO: 1842337 - RNA, 19 nt, Homo sapiens
  misc_RNA (1)...(19): siRNA sense strand
acacacuaaugucaaugau

SEQ ID NO: 1842338 - RNA, 19 nt, Homo sapiens
  misc_RNA (1)...(19): siRNA sense strand
uugaagaccagauuuguca

SEQ ID NO: 1842339 - RNA, 19 nt, Homo sapiens
  misc_RNA (1)...(19): siRNA sense strand
ucugaggccuggugugaag

SEQ ID NO: 1842340 - RNA, 19 nt, Homo sapiens
  misc_RNA (1)...(19): siRNA sense strand
ucaguaaaccuugcuugga

SEQ ID NO: 1842341 - RNA, 19 nt, Homo sapiens
  misc_RNA (1)...(19): siRNA sense strand
uguguauuccuccaucaua

SEQ ID NO: 1842342 - RNA, 19 nt, Homo sapiens
  misc_RNA (1)...(19): siRNA sense strand
gcaaaagucaacaacucua

SEQ ID NO: 1842343 - RNA, 19 nt, Homo sapiens
  misc_RNA (1)...(19): siRNA sense strand
uagaugggaagagcauuaa

SEQ ID NO: 1842344 - RNA, 19 nt, Homo sapiens
  misc_RNA (1)...(19): siRNA sense strand
caaguggugugaguauggu

SEQ ID NO: 1842345 - RNA, 19 nt, Homo sapiens
  misc_RNA (1)...(19): siRNA sense strand
uuaauuggaguaggcuaua

SEQ ID NO: 1842346 - RNA, 19 nt, Homo sapiens
  misc_RNA (1)...(19): siRNA sense strand
ggaacacugauaacacucu

SEQ ID NO: 1842347 - RNA, 19 nt, Homo sapiens
  misc_RNA (1)...(19): siRNA sense strand
acuuccagcuacacacuaa

SEQ ID NO: 1842348 - RNA, 19 nt, Homo sapiens
  misc_RNA (1)...(19): siRNA sense strand
gugauguugacuuugauuu

SEQ ID NO: 1842349 - RNA, 19 nt, Homo sapiens
  misc_RNA (1)...(19): siRNA sense strand
caacucuagcuuaauugga

SEQ ID NO: 1842350 - RNA, 19 nt, Homo sapiens
  misc_RNA (1)...(19): siRNA sense strand
ggacuuccagcuacacacu

SEQ ID NO: 1842351 - RNA, 19 nt, Homo sapiens
  misc_RNA (1)...(19): siRNA sense strand
uuuggaggaucaauuuauc

SEQ ID NO: 1842352 - RNA, 19 nt, Homo sapiens
  misc_RNA (1)...(19): siRNA sense strand
gaaaagaacuguguaaaga

SEQ ID NO: 1842353 - RNA, 19 nt, Homo sapiens
  misc_RNA (1)...(19): siRNA sense strand
gaagaaaacuguggcaaua

SEQ ID NO: 1842354 - RNA, 19 nt, Homo sapiens
  misc_RNA (1)...(19): siRNA sense strand
gaaagagugucauauaaac

SEQ ID NO: 1842355 - RNA, 19 nt, Homo sapiens
  misc_RNA (1)...(19): siRNA sense strand
gaacacaacagaaauuuca

SEQ ID NO: 1842356 - RNA, 19 nt, Homo sapiens
  misc_RNA (1)...(19): siRNA sense strand
gaauuacacuugaccuuau

SEQ ID NO: 1842357 - RNA, 19 nt, Homo sapiens
  misc_RNA (1)...(19): siRNA sense strand
ccaggaaucugcagucaaa

SEQ ID NO: 1842358 - RNA, 19 nt, Homo sapiens
  misc_RNA (1)...(19): siRNA sense strand
gaagagacaucaggaagau

SEQ ID NO: 1842359 - RNA, 19 nt, Homo sapiens
  misc_RNA (1)...(19): siRNA sense strand
ucuauuggcuugauucuaa

SEQ ID NO: 1842360 - RNA, 19 nt, Homo sapiens
  misc_RNA (1)...(19): siRNA sense strand
ggacugaugcggcuucuaa

SEQ ID NO: 1842361 - RNA, 19 nt, Homo sapiens
  misc_RNA (1)...(19): siRNA sense strand
ugacauugcugcccagaaa

SEQ ID NO: 1842362 - RNA, 19 nt, Homo sapiens
  misc_RNA (1)...(19): siRNA sense strand
ggaauuacacuugaccuua

SEQ ID NO: 1842363 - RNA, 19 nt, Homo sapiens
  misc_RNA (1)...(19): siRNA sense strand
ccagaacagugccauauga

SEQ ID NO: 1842364 - RNA, 19 nt, Homo sapiens
  misc_RNA (1)...(19): siRNA sense strand
gaacagugccauaugagaa

SEQ ID NO: 1842365 - RNA, 19 nt, Homo sapiens
  misc_RNA (1)...(19): siRNA sense strand
acaaauggucgcuguauua

SEQ ID NO: 1842366 - RNA, 19 nt, Homo sapiens
  misc_RNA (1)...(19): siRNA sense strand
ggccgagacugucaaagua

SEQ ID NO: 1842367 - RNA, 19 nt, Homo sapiens
  misc_RNA (1)...(19): siRNA sense strand
guauuacgcuguuguggaa

SEQ ID NO: 1842368 - RNA, 19 nt, Homo sapiens
  misc_RNA (1)...(19): siRNA sense strand
gcgagagccugccuccaua

SEQ ID NO: 1842369 - RNA, 19 nt, Homo sapiens
  misc_RNA (1)...(19): siRNA sense strand
ggaaucugcagucaaauuu

SEQ ID NO: 1842370 - RNA, 19 nt, Homo sapiens
  misc_RNA (1)...(19): siRNA sense strand
cugaaagagugucauauaa

SEQ ID NO: 1842371 - RNA, 19 nt, Homo sapiens
  misc_RNA (1)...(19): siRNA sense strand
gaagacgugugcugaaucu

SEQ ID NO: 1842372 - RNA, 19 nt, Homo sapiens
  misc_RNA (1)...(19): siRNA sense strand
ggaauuggcaacacaagaa

SEQ ID NO: 1842373 - RNA, 19 nt, Homo sapiens
  misc_RNA (1)...(19): siRNA sense strand
caagucugaucuucacuaa

SEQ ID NO: 1842374 - RNA, 19 nt, Homo sapiens
  misc_RNA (1)...(19): siRNA sense strand
gcgagugcauccauaagaa

SEQ ID NO: 1842375 - RNA, 19 nt, Homo sapiens
  misc_RNA (1)...(19): siRNA sense strand
gcauagauaucagcaaagu

SEQ ID NO: 1842376 - RNA, 19 nt, Homo sapiens
  misc_RNA (1)...(19): siRNA sense strand
gaucgugucuacuggauag

SEQ ID NO: 1842377 - RNA, 19 nt, Homo sapiens
  misc_RNA (1)...(19): siRNA sense strand
gguuugaacugauagauag

SEQ ID NO: 1842378 - RNA, 19 nt, Homo sapiens
  misc_RNA (1)...(19): siRNA sense strand
gaaaaccuguggagauauu

SEQ ID NO: 1842379 - RNA, 19 nt, Homo sapiens
  misc_RNA (1)...(19): siRNA sense strand
caccacagauuaaugauca

SEQ ID NO: 1842380 - RNA, 19 nt, Homo sapiens
  misc_RNA (1)...(19): siRNA sense strand
gaucguaggauaguacuaa

SEQ ID NO: 1842381 - RNA, 19 nt, Homo sapiens
  misc_RNA (1)...(19): siRNA sense strand
gcuuagagaggaaagaaua

SEQ ID NO: 1842382 - RNA, 19 nt, Homo sapiens
  misc_RNA (1)...(19): siRNA sense strand
guggagauauugaugaaug

SEQ ID NO: 1842383 - RNA, 19 nt, Homo sapiens
  misc_RNA (1)...(19): siRNA sense strand
cauaagaaguggcgaugug

SEQ ID NO: 1842384 - RNA, 19 nt, Homo sapiens
  misc_RNA (1)...(19): siRNA sense strand
ggacacacguacccagcaa

SEQ ID NO: 1842385 - RNA, 19 nt, Homo sapiens
  misc_RNA (1)...(19): siRNA sense strand
gauacgaacacaacagaaa

SEQ ID NO: 1842386 - RNA, 19 nt, Homo sapiens
  misc_RNA (1)...(19): siRNA sense strand
gccaauaaauucacuggau

SEQ ID NO: 1842387 - RNA, 19 nt, Homo sapiens
  misc_RNA (1)...(19): siRNA sense strand
cugcaaagaccuaguuaua

SEQ ID NO: 1842388 - RNA, 19 nt, Homo sapiens
  misc_RNA (1)...(19): siRNA sense strand
aaugguggauguucucaua

SEQ ID NO: 1842389 - RNA, 19 nt, Homo sapiens
  misc_RNA (1)...(19): siRNA sense strand
gaggaaagaauauauccaa

SEQ ID NO: 1842390 - RNA, 19 nt, Homo sapiens
  misc_RNA (1)...(19): siRNA sense strand
ccagcaauaucaguuguaa

SEQ ID NO: 1842391 - RNA, 19 nt, Homo sapiens
  misc_RNA (1)...(19): siRNA sense strand
acgaaugcuugguaaauaa

SEQ ID NO: 1842392 - RNA, 19 nt, Homo sapiens
  misc_RNA (1)...(19): siRNA sense strand
gcagcuggguuugaacuga

SEQ ID NO: 1842393 - RNA, 19 nt, Homo sapiens
  misc_RNA (1)...(19): siRNA sense strand
gcgaagaugguucagauga

SEQ ID NO: 1842394 - RNA, 19 nt, Homo sapiens
  misc_RNA (1)...(19): siRNA sense strand
ugacaauccuguguacuug

SEQ ID NO: 1842395 - RNA, 19 nt, Homo sapiens
  misc_RNA (1)...(19): siRNA sense strand
ccaguggccuaacggaauu

SEQ ID NO: 1842396 - RNA, 19 nt, Homo sapiens
  misc_RNA (1)...(19): siRNA sense strand
gguaaauaaugguggaugu

SEQ ID NO: 1842397 - RNA, 19 nt, Homo sapiens
  misc_RNA (1)...(19): siRNA sense strand
ccugaaagagugucauaua

SEQ ID NO: 1842398 - RNA, 19 nt, Homo sapiens
  misc_RNA (1)...(19): siRNA sense strand
gcagucaaauuuguaucaa

SEQ ID NO: 1842399 - RNA, 19 nt, Homo sapiens
  misc_RNA (1)...(19): siRNA sense strand
gaauggaggaugugaauac

SEQ ID NO: 1842400 - RNA, 19 nt, Homo sapiens
  misc_RNA (1)...(19): siRNA sense strand
aagaagacauggagaaugg

SEQ ID NO: 1842401 - RNA, 19 nt, Homo sapiens
  misc_RNA (1)...(19): siRNA sense strand
gaagaagacauggagaaug

SEQ ID NO: 1842402 - RNA, 19 nt, Homo sapiens
  misc_RNA (1)...(19): siRNA sense strand
uggccaagaucguaggaua

SEQ ID NO: 1842403 - RNA, 19 nt, Homo sapiens
  misc_RNA (1)...(19): siRNA sense strand
uaucuucagugccucaauu

SEQ ID NO: 1842404 - RNA, 19 nt, Homo sapiens
  misc_RNA (1)...(19): siRNA sense strand
agucugaucuucacuaauc

SEQ ID NO: 1842405 - RNA, 19 nt, Homo sapiens
  misc_RNA (1)...(19): siRNA sense strand
gcacaaauggucgcuguau

SEQ ID NO: 1842406 - RNA, 19 nt, Homo sapiens
  misc_RNA (1)...(19): siRNA sense strand
gcaaggcaguaggcaaaga

SEQ ID NO: 1842407 - RNA, 19 nt, Homo sapiens
  misc_RNA (1)...(19): siRNA sense strand
aaagaacuguguaaagaag

SEQ ID NO: 1842408 - RNA, 19 nt, Homo sapiens
  misc_RNA (1)...(19): siRNA sense strand
gagaauggaggaugugaau

SEQ ID NO: 1842409 - RNA, 19 nt, Homo sapiens
  misc_RNA (1)...(19): siRNA sense strand
uugccgaccugaccaauuu

SEQ ID NO: 1842410 - RNA, 19 nt, Homo sapiens
  misc_RNA (1)...(19): siRNA sense strand
aacgaaugcuugguaaaua

SEQ ID NO: 1842411 - RNA, 19 nt, Homo sapiens
  misc_RNA (1)...(19): siRNA sense strand
ggaccucuccauagacauu

SEQ ID NO: 1842412 - RNA, 19 nt, Homo sapiens
  misc_RNA (1)...(19): siRNA sense strand
acagaaauuucagcaacua

SEQ ID NO: 1842413 - RNA, 19 nt, Homo sapiens
  misc_RNA (1)...(19): siRNA sense strand
ucaggaagauuggcuuaga

SEQ ID NO: 1842414 - RNA, 19 nt, Homo sapiens
  misc_RNA (1)...(19): siRNA sense strand
gcaaagagccaagucugau

SEQ ID NO: 1842415 - RNA, 19 nt, Homo sapiens
  misc_RNA (1)...(19): siRNA sense strand
gaugaaagcccagaacagu

SEQ ID NO: 1842416 - RNA, 19 nt, Homo sapiens
  misc_RNA (1)...(19): siRNA sense strand
uggaggaugugaauaccua

SEQ ID NO: 1842417 - RNA, 19 nt, Homo sapiens
  misc_RNA (1)...(19): siRNA sense strand
gagcaugccacucuaguca

SEQ ID NO: 1842418 - RNA, 19 nt, Homo sapiens
  misc_RNA (1)...(19): siRNA sense strand
guuccuagcucauccucuu

SEQ ID NO: 1842419 - RNA, 19 nt, Homo sapiens
  misc_RNA (1)...(19): siRNA sense strand
uauaaacgaaugcuuggua

SEQ ID NO: 1842420 - RNA, 19 nt, Homo sapiens
  misc_RNA (1)...(19): siRNA sense strand
gauaucagcaaaguaugua

SEQ ID NO: 1842421 - RNA, 19 nt, Homo sapiens
  misc_RNA (1)...(19): siRNA sense strand
ggagaaugcauagauauca

SEQ ID NO: 1842422 - RNA, 19 nt, Homo sapiens
  misc_RNA (1)...(19): siRNA sense strand
gugcagaaguggagaaugc

SEQ ID NO: 1842423 - RNA, 19 nt, Homo sapiens
  misc_RNA (1)...(19): siRNA sense strand
aagcaggaaugaauggauu

SEQ ID NO: 1842424 - RNA, 19 nt, Homo sapiens
  misc_RNA (1)...(19): siRNA sense strand
auaaacgaaugcuugguaa

SEQ ID NO: 1842425 - RNA, 19 nt, Homo sapiens
  misc_RNA (1)...(19): siRNA sense strand
agaaaacuguggcaauaua

SEQ ID NO: 1842426 - RNA, 19 nt, Homo sapiens
  misc_RNA (1)...(19): siRNA sense strand
gaaauuucagcaacuagug

SEQ ID NO: 1842427 - RNA, 19 nt, Homo sapiens
  misc_RNA (1)...(19): siRNA sense strand
gauucuaaguugcacaugu

SEQ ID NO: 1842428 - RNA, 19 nt, Homo sapiens
  misc_RNA (1)...(19): siRNA sense strand
ucaaauggaucuugcuacu

SEQ ID NO: 1842429 - RNA, 19 nt, Homo sapiens
  misc_RNA (1)...(19): siRNA sense strand
ccaggaacuuuguaugcaa

SEQ ID NO: 1842430 - RNA, 19 nt, Homo sapiens
  misc_RNA (1)...(19): siRNA sense strand
gauccugacugcgaagaug

SEQ ID NO: 1842431 - RNA, 19 nt, Homo sapiens
  misc_RNA (1)...(19): siRNA sense strand
ugacuuacagugagacaaa

SEQ ID NO: 1842432 - RNA, 19 nt, Homo sapiens
  misc_RNA (1)...(19): siRNA sense strand
caagguugguagacauguu

SEQ ID NO: 1842433 - RNA, 19 nt, Homo sapiens
  misc_RNA (1)...(19): siRNA sense strand
caauuccagugcacaaaug

SEQ ID NO: 1842434 - RNA, 19 nt, Homo sapiens
  misc_RNA (1)...(19): siRNA sense strand
gcaaggauggcagugauga

SEQ ID NO: 1842435 - RNA, 19 nt, Homo sapiens
  misc_RNA (1)...(19): siRNA sense strand
gugcaacaauggccagugu

SEQ ID NO: 1842436 - RNA, 19 nt, Homo sapiens
  misc_RNA (1)...(19): siRNA sense strand
cagcaccacagauuaauga

SEQ ID NO: 1842437 - RNA, 19 nt, Homo sapiens
  misc_RNA (1)...(19): siRNA sense strand
ggauaguacuaaagucucu

SEQ ID NO: 1842438 - RNA, 19 nt, Homo sapiens
  misc_RNA (1)...(19): siRNA sense strand
cacaaauggucgcuguauu

SEQ ID NO: 1842439 - RNA, 19 nt, Homo sapiens
  misc_RNA (1)...(19): siRNA sense strand
cugcaacuacugugacuua

SEQ ID NO: 1842440 - RNA, 19 nt, Homo sapiens
  misc_RNA (1)...(19): siRNA sense strand
ugacaagguugguagacau

SEQ ID NO: 1842441 - RNA, 19 nt, Homo sapiens
  misc_RNA (1)...(19): siRNA sense strand
ggagaaaagccaaauguga

SEQ ID NO: 1842442 - RNA, 19 nt, Homo sapiens
  misc_RNA (1)...(19): siRNA sense strand
ccgaugaagucaacugcaa

SEQ ID NO: 1842443 - RNA, 19 nt, Homo sapiens
  misc_RNA (1)...(19): siRNA sense strand
cuaacggaauuacacuuga

SEQ ID NO: 1842444 - RNA, 19 nt, Homo sapiens
  misc_RNA (1)...(19): siRNA sense strand
ggaaagaauauauccaacu

SEQ ID NO: 1842445 - RNA, 19 nt, Homo sapiens
  misc_RNA (1)...(19): siRNA sense strand
gagaaugcauagauaucag

SEQ ID NO: 1842446 - RNA, 19 nt, Homo sapiens
  misc_RNA (1)...(19): siRNA sense strand
uuaaugaucacucuccaaa

SEQ ID NO: 1842447 - RNA, 19 nt, Homo sapiens
  misc_RNA (1)...(19): siRNA sense strand
guucucauaucugcaaaga

SEQ ID NO: 1842448 - RNA, 19 nt, Homo sapiens
  misc_RNA (1)...(19): siRNA sense strand
augcauagauaucagcaaa

SEQ ID NO: 1842449 - RNA, 19 nt, Homo sapiens
  misc_RNA (1)...(19): siRNA sense strand
gagaaaagccaaaugugaa

SEQ ID NO: 1842450 - RNA, 19 nt, Homo sapiens
  misc_RNA (1)...(19): siRNA sense strand
guacagccaucagguaaaa

SEQ ID NO: 1842451 - RNA, 19 nt, Homo sapiens
  misc_RNA (1)...(19): siRNA sense strand
ccaagaucguaggauagua

SEQ ID NO: 1842452 - RNA, 19 nt, Homo sapiens
  misc_RNA (1)...(19): siRNA sense strand
ggagagaagugcuacauua

SEQ ID NO: 1842453 - RNA, 19 nt, Homo sapiens
  misc_RNA (1)...(19): siRNA sense strand
gaagagaagugguaagaaa

SEQ ID NO: 1842454 - RNA, 19 nt, Homo sapiens
  misc_RNA (1)...(19): siRNA sense strand
gaaggaaucuguuguauag

SEQ ID NO: 1842455 - RNA, 19 nt, Homo sapiens
  misc_RNA (1)...(19): siRNA sense strand
gacaacagcuucuugaguu

SEQ ID NO: 1842456 - RNA, 19 nt, Homo sapiens
  misc_RNA (1)...(19): siRNA sense strand
caagaugggucaauggaaa

SEQ ID NO: 1842457 - RNA, 19 nt, Homo sapiens
  misc_RNA (1)...(19): siRNA sense strand
ggaaagaagagaaguggua

SEQ ID NO: 1842458 - RNA, 19 nt, Homo sapiens
  misc_RNA (1)...(19): siRNA sense strand
gagaagugcuacauuaaag

SEQ ID NO: 1842459 - RNA, 19 nt, Homo sapiens
  misc_RNA (1)...(19): siRNA sense strand
gaagaagcaauugcaguua

SEQ ID NO: 1842460 - RNA, 19 nt, Homo sapiens
  misc_RNA (1)...(19): siRNA sense strand
gaucaugccagucaaauau

SEQ ID NO: 1842461 - RNA, 19 nt, Homo sapiens
  misc_RNA (1)...(19): siRNA sense strand
gagagaagugcuacauuaa

SEQ ID NO: 1842462 - RNA, 19 nt, Homo sapiens
  misc_RNA (1)...(19): siRNA sense strand
gaaagaagagaagugguaa

SEQ ID NO: 1842463 - RNA, 19 nt, Homo sapiens
  misc_RNA (1)...(19): siRNA sense strand
acccauggccuuauaauua

SEQ ID NO: 1842464 - RNA, 19 nt, Homo sapiens
  misc_RNA (1)...(19): siRNA sense strand
ggagcgacagucacauuua

SEQ ID NO: 1842465 - RNA, 19 nt, Homo sapiens
  misc_RNA (1)...(19): siRNA sense strand
gcaauugcaguuaaugauu

SEQ ID NO: 1842466 - RNA, 19 nt, Homo sapiens
  misc_RNA (1)...(19): siRNA sense strand
cuggaagacugaauaauga

SEQ ID NO: 1842467 - RNA, 19 nt, Homo sapiens
  misc_RNA (1)...(19): siRNA sense strand
aagaagcaauugcaguuaa

SEQ ID NO: 1842468 - RNA, 19 nt, Homo sapiens
  misc_RNA (1)...(19): siRNA sense strand
gaaaccagacccaguguuc

SEQ ID NO: 1842469 - RNA, 19 nt, Homo sapiens
  misc_RNA (1)...(19): siRNA sense strand
ggaacaacuuggagaccuu

SEQ ID NO: 1842470 - RNA, 19 nt, Homo sapiens
  misc_RNA (1)...(19): siRNA sense strand
gcuggaagacugaauaaug

SEQ ID NO: 1842471 - RNA, 19 nt, Homo sapiens
  misc_RNA (1)...(19): siRNA sense strand
ggaaucuguuguauagaau

SEQ ID NO: 1842472 - RNA, 19 nt, Homo sapiens
  misc_RNA (1)...(19): siRNA sense strand
cgaaggaaucuguuguaua

SEQ ID NO: 1842473 - RNA, 19 nt, Homo sapiens
  misc_RNA (1)...(19): siRNA sense strand
gaguaucaaugggaaacua

SEQ ID NO: 1842474 - RNA, 19 nt, Homo sapiens
  misc_RNA (1)...(19): siRNA sense strand
gagcaucuccuccaaacug

SEQ ID NO: 1842475 - RNA, 19 nt, Homo sapiens
  misc_RNA (1)...(19): siRNA sense strand
gagcgacagucacauuuac

SEQ ID NO: 1842476 - RNA, 19 nt, Homo sapiens
  misc_RNA (1)...(19): siRNA sense strand
aaagaaauccagagggaaa

SEQ ID NO: 1842477 - RNA, 19 nt, Homo sapiens
  misc_RNA (1)...(19): siRNA sense strand
ggacaacagcuucuugagu

SEQ ID NO: 1842478 - RNA, 19 nt, Homo sapiens
  misc_RNA (1)...(19): siRNA sense strand
guuaaugauuuccagaaug

SEQ ID NO: 1842479 - RNA, 19 nt, Homo sapiens
  misc_RNA (1)...(19): siRNA sense strand
ggaagacugaauaaugaaa

SEQ ID NO: 1842480 - RNA, 19 nt, Homo sapiens
  misc_RNA (1)...(19): siRNA sense strand
gcuauuacccauggccuua

SEQ ID NO: 1842481 - RNA, 19 nt, Homo sapiens
  misc_RNA (1)...(19): siRNA sense strand
aggaaucuguuguauagaa

SEQ ID NO: 1842482 - RNA, 19 nt, Homo sapiens
  misc_RNA (1)...(19): siRNA sense strand
caacuuggagaccuuuaaa

SEQ ID NO: 1842483 - RNA, 19 nt, Homo sapiens
  misc_RNA (1)...(19): siRNA sense strand
gggaaagcaugacauucga

SEQ ID NO: 1842484 - RNA, 19 nt, Homo sapiens
  misc_RNA (1)...(19): siRNA sense strand
gcggugaccuuccuauuuu

SEQ ID NO: 1842485 - RNA, 19 nt, Homo sapiens
  misc_RNA (1)...(19): siRNA sense strand
gaacaacuuggagaccuuu

SEQ ID NO: 1842486 - RNA, 19 nt, Homo sapiens
  misc_RNA (1)...(19): siRNA sense strand
cccauggccuuauaauuau

SEQ ID NO: 1842487 - RNA, 19 nt, Homo sapiens
  misc_RNA (1)...(19): siRNA sense strand
cagaauggcaucacaggaa

SEQ ID NO: 1842488 - RNA, 19 nt, Homo sapiens
  misc_RNA (1)...(19): siRNA sense strand
ugaagaagcaauugcaguu

SEQ ID NO: 1842489 - RNA, 19 nt, Homo sapiens
  misc_RNA (1)...(19): siRNA sense strand
gcaagaucaugccagucaa

SEQ ID NO: 1842490 - RNA, 19 nt, Homo sapiens
  misc_RNA (1)...(19): siRNA sense strand
uuaaugauuuccagaaugg

SEQ ID NO: 1842491 - RNA, 19 nt, Homo sapiens
  misc_RNA (1)...(19): siRNA sense strand
caagugaaggcucguauuc

SEQ ID NO: 1842492 - RNA, 19 nt, Homo sapiens
  misc_RNA (1)...(19): siRNA sense strand
gcaagugaaggcucguauu

SEQ ID NO: 1842493 - RNA, 19 nt, Homo sapiens
  misc_RNA (1)...(19): siRNA sense strand
gaaauagacgcugggaaca

SEQ ID NO: 1842494 - RNA, 19 nt, Homo sapiens
  misc_RNA (1)...(19): siRNA sense strand
uauuacccauggccuuaua

SEQ ID NO: 1842495 - RNA, 19 nt, Homo sapiens
  misc_RNA (1)...(19): siRNA sense strand
gagccgugguccucauuuc

SEQ ID NO: 1842496 - RNA, 19 nt, Homo sapiens
  misc_RNA (1)...(19): siRNA sense strand
uagaucagccugugaagga

SEQ ID NO: 1842497 - RNA, 19 nt, Homo sapiens
  misc_RNA (1)...(19): siRNA sense strand
ccagucaaauaugaagaaa

SEQ ID NO: 1842498 - RNA, 19 nt, Homo sapiens
  misc_RNA (1)...(19): siRNA sense strand
acagagaacuccgacaaag

SEQ ID NO: 1842499 - RNA, 19 nt, Homo sapiens
  misc_RNA (1)...(19): siRNA sense strand
gacagagaacuccgacaaa

SEQ ID NO: 1842500 - RNA, 19 nt, Homo sapiens
  misc_RNA (1)...(19): siRNA sense strand
gaccugaugacguggaauu

SEQ ID NO: 1842501 - RNA, 19 nt, Homo sapiens
  misc_RNA (1)...(19): siRNA sense strand
uagacuggaucacgaagga

SEQ ID NO: 1842502 - RNA, 19 nt, Homo sapiens
  misc_RNA (1)...(19): siRNA sense strand
ggacucacaagccuucaau

SEQ ID NO: 1842503 - RNA, 19 nt, Homo sapiens
  misc_RNA (1)...(19): siRNA sense strand
agagaagugcuacauuaaa

SEQ ID NO: 1842504 - RNA, 19 nt, Homo sapiens
  misc_RNA (1)...(19): siRNA sense strand
agaagcaauugcaguuaau

SEQ ID NO: 1842505 - RNA, 19 nt, Homo sapiens
  misc_RNA (1)...(19): siRNA sense strand
ucaauccugauaauccuua

SEQ ID NO: 1842506 - RNA, 19 nt, Homo sapiens
  misc_RNA (1)...(19): siRNA sense strand
caagaucaugccagucaaa

SEQ ID NO: 1842507 - RNA, 19 nt, Homo sapiens
  misc_RNA (1)...(19): siRNA sense strand
aaguggagcugaagaagca

SEQ ID NO: 1842508 - RNA, 19 nt, Homo sapiens
  misc_RNA (1)...(19): siRNA sense strand
gaaauccagagggaaagaa

SEQ ID NO: 1842509 - RNA, 19 nt, Homo sapiens
  misc_RNA (1)...(19): siRNA sense strand
cagagcaucuccuccaaac

SEQ ID NO: 1842510 - RNA, 19 nt, Homo sapiens
  misc_RNA (1)...(19): siRNA sense strand
agaauggcaucacaggaau

SEQ ID NO: 1842511 - RNA, 19 nt, Homo sapiens
  misc_RNA (1)...(19): siRNA sense strand
gcgcuggaagacugaauaa

SEQ ID NO: 1842512 - RNA, 19 nt, Homo sapiens
  misc_RNA (1)...(19): siRNA sense strand
gggagcgacagucacauuu

SEQ ID NO: 1842513 - RNA, 19 nt, Homo sapiens
  misc_RNA (1)...(19): siRNA sense strand
gggaaguggagcugaagaa

SEQ ID NO: 1842514 - RNA, 19 nt, Homo sapiens
  misc_RNA (1)...(19): siRNA sense strand
acgcuacgcugacggugaa

SEQ ID NO: 1842515 - RNA, 19 nt, Homo sapiens
  misc_RNA (1)...(19): siRNA sense strand
guggguggcccguaucuug

SEQ ID NO: 1842516 - RNA, 19 nt, Homo sapiens
  misc_RNA (1)...(19): siRNA sense strand
gaagcaauugcaguuaaug

SEQ ID NO: 1842517 - RNA, 19 nt, Homo sapiens
  misc_RNA (1)...(19): siRNA sense strand
gaauggcaucacaggaauu

SEQ ID NO: 1842518 - RNA, 19 nt, Homo sapiens
  misc_RNA (1)...(19): siRNA sense strand
cuugaguucuaagguguua

SEQ ID NO: 1842519 - RNA, 19 nt, Homo sapiens
  misc_RNA (1)...(19): siRNA sense strand
cauuaaagcgcaagugaag

SEQ ID NO: 1842520 - RNA, 19 nt, Homo sapiens
  misc_RNA (1)...(19): siRNA sense strand
aagaagagaagugguaaga

SEQ ID NO: 1842521 - RNA, 19 nt, Homo sapiens
  misc_RNA (1)...(19): siRNA sense strand
cauuacaccaugaguauca

SEQ ID NO: 1842522 - RNA, 19 nt, Homo sapiens
  misc_RNA (1)...(19): siRNA sense strand
cacgaaggaaucuguugua

SEQ ID NO: 1842523 - RNA, 19 nt, Homo sapiens
  misc_RNA (1)...(19): siRNA sense strand
gaagacugaauaaugaaac

SEQ ID NO: 1842524 - RNA, 19 nt, Homo sapiens
  misc_RNA (1)...(19): siRNA sense strand
aaugggaaguggagcugaa

SEQ ID NO: 1842525 - RNA, 19 nt, Homo sapiens
  misc_RNA (1)...(19): siRNA sense strand
gcgacagucacauuuacaa

SEQ ID NO: 1842526 - RNA, 19 nt, Homo sapiens
  misc_RNA (1)...(19): siRNA sense strand
caaacuggaaggcaagauc

SEQ ID NO: 1842527 - RNA, 19 nt, Homo sapiens
  misc_RNA (1)...(19): siRNA sense strand
acgaaggaaucuguuguau

SEQ ID NO: 1842528 - RNA, 19 nt, Homo sapiens
  misc_RNA (1)...(19): siRNA sense strand
gaucacgaaggaaucuguu

SEQ ID NO: 1842529 - RNA, 19 nt, Homo sapiens
  misc_RNA (1)...(19): siRNA sense strand
ccagagggaaagaagagaa

SEQ ID NO: 1842530 - RNA, 19 nt, Homo sapiens
  misc_RNA (1)...(19): siRNA sense strand
gccagucaaauaugaagaa

SEQ ID NO: 1842531 - RNA, 19 nt, Homo sapiens
  misc_RNA (1)...(19): siRNA sense strand
ucaaugggaaacuacaaga

SEQ ID NO: 1842532 - RNA, 19 nt, Homo sapiens
  misc_RNA (1)...(19): siRNA sense strand
uuaaaccaaccuauccaaa

SEQ ID NO: 1842533 - RNA, 19 nt, Homo sapiens
  misc_RNA (1)...(19): siRNA sense strand
acaacagcuucuugaguuc

SEQ ID NO: 1842534 - RNA, 19 nt, Homo sapiens
  misc_RNA (1)...(19): siRNA sense strand
gaggagagaagugcuacau

SEQ ID NO: 1842535 - RNA, 19 nt, Homo sapiens
  misc_RNA (1)...(19): siRNA sense strand
ggaaguggagcugaagaag

SEQ ID NO: 1842536 - RNA, 19 nt, Homo sapiens
  misc_RNA (1)...(19): siRNA sense strand
aaacuggaaggcaagauca

SEQ ID NO: 1842537 - RNA, 19 nt, Homo sapiens
  misc_RNA (1)...(19): siRNA sense strand
uacauuaaagcgcaaguga

SEQ ID NO: 1842538 - RNA, 19 nt, Homo sapiens
  misc_RNA (1)...(19): siRNA sense strand
guccauuacaccaugagua

SEQ ID NO: 1842539 - RNA, 19 nt, Homo sapiens
  misc_RNA (1)...(19): siRNA sense strand
gagggaaagaagagaagug

SEQ ID NO: 1842540 - RNA, 19 nt, Homo sapiens
  misc_RNA (1)...(19): siRNA sense strand
uaaaccaaccuauccaaaa

SEQ ID NO: 1842541 - RNA, 19 nt, Homo sapiens
  misc_RNA (1)...(19): siRNA sense strand
cgacagucacauuuacaau

SEQ ID NO: 1842542 - RNA, 19 nt, Homo sapiens
  misc_RNA (1)...(19): siRNA sense strand
gggaccugaugacguggaa

SEQ ID NO: 1842543 - RNA, 19 nt, Homo sapiens
  misc_RNA (1)...(19): siRNA sense strand
ugcggugaccuuccuauuu

SEQ ID NO: 1842544 - RNA, 19 nt, Homo sapiens
  misc_RNA (1)...(19): siRNA sense strand
gaaucuguuguauagaaug

SEQ ID NO: 1842545 - RNA, 19 nt, Homo sapiens
  misc_RNA (1)...(19): siRNA sense strand
cagagaacuccgacaaagu

SEQ ID NO: 1842546 - RNA, 19 nt, Homo sapiens
  misc_RNA (1)...(19): siRNA sense strand
aaaccaaccuauccaaaag

SEQ ID NO: 1842547 - RNA, 19 nt, Homo sapiens
  misc_RNA (1)...(19): siRNA sense strand
agaucaugccagucaaaua

SEQ ID NO: 1842548 - RNA, 19 nt, Homo sapiens
  misc_RNA (1)...(19): siRNA sense strand
ggagccgugguccucauuu

SEQ ID NO: 1842549 - RNA, 19 nt, Homo sapiens
  misc_RNA (1)...(19): siRNA sense strand
ucacgaaggaaucuguugu

SEQ ID NO: 1842550 - RNA, 19 nt, Homo sapiens
  misc_RNA (1)...(19): siRNA sense strand
cugaugacguggaauucug

SEQ ID NO: 1842551 - RNA, 19 nt, Homo sapiens
  misc_RNA (1)...(19): siRNA sense strand
acuacaagaugggucaaug

SEQ ID NO: 1842552 - RNA, 19 nt, Homo sapiens
  misc_RNA (1)...(19): siRNA sense strand
gauccgacccugaugaaua

SEQ ID NO: 1842553 - RNA, 19 nt, Homo sapiens
  misc_RNA (1)...(19): siRNA sense strand
agacggaacucugucacaa

SEQ ID NO: 1842554 - RNA, 19 nt, Homo sapiens
  misc_RNA (1)...(19): siRNA sense strand
ccacaacccuagcgaagac

SEQ ID NO: 1842555 - RNA, 19 nt, Homo sapiens
  misc_RNA (1)...(19): siRNA sense strand
ggaucugacugccaucuac

SEQ ID NO: 1842556 - RNA, 19 nt, Homo sapiens
  misc_RNA (1)...(19): siRNA sense strand
cgaagggccacuccuauca

SEQ ID NO: 1842557 - RNA, 19 nt, Homo sapiens
  misc_RNA (1)...(19): siRNA sense strand
caucuucaaucgcaucucu

SEQ ID NO: 1842558 - RNA, 19 nt, Homo sapiens
  misc_RNA (1)...(19): siRNA sense strand
ucaaucgcaucucuguuuc

SEQ ID NO: 1842559 - RNA, 19 nt, Homo sapiens
  misc_RNA (1)...(19): siRNA sense strand
caucucuguuucugaguga

SEQ ID NO: 1842560 - RNA, 19 nt, Homo sapiens
  misc_RNA (1)...(19): siRNA sense strand
ccaaauacaagacggaacu

SEQ ID NO: 1842561 - RNA, 19 nt, Homo sapiens
  misc_RNA (1)...(19): siRNA sense strand
uucaaucgcaucucuguuu

SEQ ID NO: 1842562 - RNA, 19 nt, Homo sapiens
  misc_RNA (1)...(19): siRNA sense strand
gggauccgacccugaugaa

SEQ ID NO: 1842563 - RNA, 19 nt, Homo sapiens
  misc_RNA (1)...(19): siRNA sense strand
auccgacccugaugaauau

SEQ ID NO: 1842564 - RNA, 19 nt, Homo sapiens
  misc_RNA (1)...(19): siRNA sense strand
acggaacucugucacaagu

SEQ ID NO: 1842565 - RNA, 19 nt, Homo sapiens
  misc_RNA (1)...(19): siRNA sense strand
gaccauggagggacugagu

SEQ ID NO: 1842566 - RNA, 19 nt, Homo sapiens
  misc_RNA (1)...(19): siRNA sense strand
auacaagacggaacucugu

SEQ ID NO: 1842567 - RNA, 19 nt, Homo sapiens
  misc_RNA (1)...(19): siRNA sense strand
gaagggccacuccuaucag

SEQ ID NO: 1842568 - RNA, 19 nt, Homo sapiens
  misc_RNA (1)...(19): siRNA sense strand
gccgaagggccacuccuau

SEQ ID NO: 1842569 - RNA, 19 nt, Homo sapiens
  misc_RNA (1)...(19): siRNA sense strand
ggacauagcucaucucuua

SEQ ID NO: 1842570 - RNA, 19 nt, Homo sapiens
  misc_RNA (1)...(19): siRNA sense strand
ggagaaaccuuauaaaugu

SEQ ID NO: 1842571 - RNA, 19 nt, Homo sapiens
  misc_RNA (1)...(19): siRNA sense strand
ggagaaaccuuaugaaugu

SEQ ID NO: 1842572 - RNA, 19 nt, Homo sapiens
  misc_RNA (1)...(19): siRNA sense strand
agacacagcucaaaccuua

SEQ ID NO: 1842573 - RNA, 19 nt, Homo sapiens
  misc_RNA (1)...(19): siRNA sense strand
gagaaacccuuugaaugua

SEQ ID NO: 1842574 - RNA, 19 nt, Homo sapiens
  misc_RNA (1)...(19): siRNA sense strand
gaaagguucucagccauaa

SEQ ID NO: 1842575 - RNA, 19 nt, Homo sapiens
  misc_RNA (1)...(19): siRNA sense strand
gcucaaaccuuauucaaca

SEQ ID NO: 1842576 - RNA, 19 nt, Homo sapiens
  misc_RNA (1)...(19): siRNA sense strand
aaguauagcucaucccuua

SEQ ID NO: 1842577 - RNA, 19 nt, Homo sapiens
  misc_RNA (1)...(19): siRNA sense strand
gagaaauuauccagccaua

SEQ ID NO: 1842578 - RNA, 19 nt, Homo sapiens
  misc_RNA (1)...(19): siRNA sense strand
gaagucacaccucauuaua

SEQ ID NO: 1842579 - RNA, 19 nt, Homo sapiens
  misc_RNA (1)...(19): siRNA sense strand
agccauagcucaucugaua

SEQ ID NO: 1842580 - RNA, 19 nt, Homo sapiens
  misc_RNA (1)...(19): siRNA sense strand
gcucaucccuuacuaaaca

SEQ ID NO: 1842581 - RNA, 19 nt, Homo sapiens
  misc_RNA (1)...(19): siRNA sense strand
ggagaaaccauaugaaugu

SEQ ID NO: 1842582 - RNA, 19 nt, Homo sapiens
  misc_RNA (1)...(19): siRNA sense strand
cauaguucaucccauauua

SEQ ID NO: 1842583 - RNA, 19 nt, Homo sapiens
  misc_RNA (1)...(19): siRNA sense strand
gaaagaugaugaccagcuu

SEQ ID NO: 1842584 - RNA, 19 nt, Homo sapiens
  misc_RNA (1)...(19): siRNA sense strand
gaaaucugaugcagcuaaa

SEQ ID NO: 1842585 - RNA, 19 nt, Homo sapiens
  misc_RNA (1)...(19): siRNA sense strand
aaagcaaacuggaaagaaa

SEQ ID NO: 1842586 - RNA, 19 nt, Homo sapiens
  misc_RNA (1)...(19): siRNA sense strand
ucaaagaacucauacuaag

SEQ ID NO: 1842587 - RNA, 19 nt, Homo sapiens
  misc_RNA (1)...(19): siRNA sense strand
agguauaacucaucucuua

SEQ ID NO: 1842588 - RNA, 19 nt, Homo sapiens
  misc_RNA (1)...(19): siRNA sense strand
gaacucauacuaaggagaa

SEQ ID NO: 1842589 - RNA, 19 nt, Homo sapiens
  misc_RNA (1)...(19): siRNA sense strand
agagcaaccuguauaauga

SEQ ID NO: 1842590 - RNA, 19 nt, Homo sapiens
  misc_RNA (1)...(19): siRNA sense strand
ugucauaguucaucccaua

SEQ ID NO: 1842591 - RNA, 19 nt, Homo sapiens
  misc_RNA (1)...(19): siRNA sense strand
gggauagccuuuagccaaa

SEQ ID NO: 1842592 - RNA, 19 nt, Homo sapiens
  misc_RNA (1)...(19): siRNA sense strand
gagaaaccauaugaaugua

SEQ ID NO: 1842593 - RNA, 19 nt, Homo sapiens
  misc_RNA (1)...(19): siRNA sense strand
caucaaagaacucauacua

SEQ ID NO: 1842594 - RNA, 19 nt, Homo sapiens
  misc_RNA (1)...(19): siRNA sense strand
ccagaaaucucaaaacaaa

SEQ ID NO: 1842595 - RNA, 19 nt, Homo sapiens
  misc_RNA (1)...(19): siRNA sense strand
guacaucagagaacucaua

SEQ ID NO: 1842596 - RNA, 19 nt, Homo sapiens
  misc_RNA (1)...(19): siRNA sense strand
caaagcccauggucauaaa

SEQ ID NO: 1842597 - RNA, 19 nt, Homo sapiens
  misc_RNA (1)...(19): siRNA sense strand
ggaaaucugaugcagcuaa

SEQ ID NO: 1842598 - RNA, 19 nt, Homo sapiens
  misc_RNA (1)...(19): siRNA sense strand
gcaaagcccauggucauaa

SEQ ID NO: 1842599 - RNA, 19 nt, Homo sapiens
  misc_RNA (1)...(19): siRNA sense strand
ggaaagguucucagccaua

SEQ ID NO: 1842600 - RNA, 19 nt, Homo sapiens
  misc_RNA (1)...(19): siRNA sense strand
gagaagccauaugaaugua

SEQ ID NO: 1842601 - RNA, 19 nt, Homo sapiens
  misc_RNA (1)...(19): siRNA sense strand
aaucacagcuuguuauaca

SEQ ID NO: 1842602 - RNA, 19 nt, Homo sapiens
  misc_RNA (1)...(19): siRNA sense strand
gaauguaacgaaugugaaa

SEQ ID NO: 1842603 - RNA, 19 nt, Homo sapiens
  misc_RNA (1)...(19): siRNA sense strand
ugagaaacccuuugaaugu

SEQ ID NO: 1842604 - RNA, 19 nt, Homo sapiens
  misc_RNA (1)...(19): siRNA sense strand
gcucaucucuuacuuacca

SEQ ID NO: 1842605 - RNA, 19 nt, Homo sapiens
  misc_RNA (1)...(19): siRNA sense strand
gaagaaaacucaagcuaag

SEQ ID NO: 1842606 - RNA, 19 nt, Homo sapiens
  misc_RNA (1)...(19): siRNA sense strand
gagagaaacaugagaaauc

SEQ ID NO: 1842607 - RNA, 19 nt, Homo sapiens
  misc_RNA (1)...(19): siRNA sense strand
agccuuagcucaucuacua

SEQ ID NO: 1842608 - RNA, 19 nt, Homo sapiens
  misc_RNA (1)...(19): siRNA sense strand
gggagaaaccuuaugaaug

SEQ ID NO: 1842609 - RNA, 19 nt, Homo sapiens
  misc_RNA (1)...(19): siRNA sense strand
caggugaaauaccauauga

SEQ ID NO: 1842610 - RNA, 19 nt, Homo sapiens
  misc_RNA (1)...(19): siRNA sense strand
gaaacccuaugaauguaau

SEQ ID NO: 1842611 - RNA, 19 nt, Homo sapiens
  misc_RNA (1)...(19): siRNA sense strand
gaccaucuaagaauucaua

SEQ ID NO: 1842612 - RNA, 19 nt, Homo sapiens
  misc_RNA (1)...(19): siRNA sense strand
gagaaaucacccagccuua

SEQ ID NO: 1842613 - RNA, 19 nt, Homo sapiens
  misc_RNA (1)...(19): siRNA sense strand
caagaagucacaccucauu

SEQ ID NO: 1842614 - RNA, 19 nt, Homo sapiens
  misc_RNA (1)...(19): siRNA sense strand
gagaacacauacaggugaa

SEQ ID NO: 1842615 - RNA, 19 nt, Homo sapiens
  misc_RNA (1)...(19): siRNA sense strand
agaaacccuuugaauguaa

SEQ ID NO: 1842616 - RNA, 19 nt, Homo sapiens
  misc_RNA (1)...(19): siRNA sense strand
gagaaaccuuaugaaugua

SEQ ID NO: 1842617 - RNA, 19 nt, Homo sapiens
  misc_RNA (1)...(19): siRNA sense strand
ccaaaagucucaccucauu

SEQ ID NO: 1842618 - RNA, 19 nt, Homo sapiens
  misc_RNA (1)...(19): siRNA sense strand
agucaagguuguccaagua

SEQ ID NO: 1842619 - RNA, 19 nt, Homo sapiens
  misc_RNA (1)...(19): siRNA sense strand
caacaucagagaguucaua

SEQ ID NO: 1842620 - RNA, 19 nt, Homo sapiens
  misc_RNA (1)...(19): siRNA sense strand
gagaaaagcccuaugaaug

SEQ ID NO: 1842621 - RNA, 19 nt, Homo sapiens
  misc_RNA (1)...(19): siRNA sense strand
gugaaacccuaugaaugua

SEQ ID NO: 1842622 - RNA, 19 nt, Homo sapiens
  misc_RNA (1)...(19): siRNA sense strand
agagaaacaugagaaauca

SEQ ID NO: 1842623 - RNA, 19 nt, Homo sapiens
  misc_RNA (1)...(19): siRNA sense strand
gcucaucugauaaguguaa

SEQ ID NO: 1842624 - RNA, 19 nt, Homo sapiens
  misc_RNA (1)...(19): siRNA sense strand
uagcucaucugauaagugu

SEQ ID NO: 1842625 - RNA, 19 nt, Homo sapiens
  misc_RNA (1)...(19): siRNA sense strand
gaacacaagaagucauuca

SEQ ID NO: 1842626 - RNA, 19 nt, Homo sapiens
  misc_RNA (1)...(19): siRNA sense strand
gaugaugaccagcuugaaa

SEQ ID NO: 1842627 - RNA, 19 nt, Homo sapiens
  misc_RNA (1)...(19): siRNA sense strand
ggagagaaaccguaugagu

SEQ ID NO: 1842628 - RNA, 19 nt, Homo sapiens
  misc_RNA (1)...(19): siRNA sense strand
gagaaaccguaugagugua

SEQ ID NO: 1842629 - RNA, 19 nt, Homo sapiens
  misc_RNA (1)...(19): siRNA sense strand
agauuuaccugaucacuca

SEQ ID NO: 1842630 - RNA, 19 nt, Homo sapiens
  misc_RNA (1)...(19): siRNA sense strand
ccauaugaaugcaaugaau

SEQ ID NO: 1842631 - RNA, 19 nt, Homo sapiens
  misc_RNA (1)...(19): siRNA sense strand
ggaaagaaacaugagaaau

SEQ ID NO: 1842632 - RNA, 19 nt, Homo sapiens
  misc_RNA (1)...(19): siRNA sense strand
gaaauuauccagccauagc

SEQ ID NO: 1842633 - RNA, 19 nt, Homo sapiens
  misc_RNA (1)...(19): siRNA sense strand
gaagccauaugaauguaag

SEQ ID NO: 1842634 - RNA, 19 nt, Homo sapiens
  misc_RNA (1)...(19): siRNA sense strand
aagaagucauucaaccaua

SEQ ID NO: 1842635 - RNA, 19 nt, Homo sapiens
  misc_RNA (1)...(19): siRNA sense strand
gaaauaccauaugaaugca

SEQ ID NO: 1842636 - RNA, 19 nt, Homo sapiens
  misc_RNA (1)...(19): siRNA sense strand
ugaaauaccauaugaaugc

SEQ ID NO: 1842637 - RNA, 19 nt, Homo sapiens
  misc_RNA (1)...(19): siRNA sense strand
ggugaaauaccauaugaau

SEQ ID NO: 1842638 - RNA, 19 nt, Homo sapiens
  misc_RNA (1)...(19): siRNA sense strand
gaaguugcagucaagaaga

SEQ ID NO: 1842639 - RNA, 19 nt, Homo sapiens
  misc_RNA (1)...(19): siRNA sense strand
gaaacccuuugaauguaau

SEQ ID NO: 1842640 - RNA, 19 nt, Homo sapiens
  misc_RNA (1)...(19): siRNA sense strand
gaaugugggauagccuuua

SEQ ID NO: 1842641 - RNA, 19 nt, Homo sapiens
  misc_RNA (1)...(19): siRNA sense strand
gggagaaaccauaugaaug

SEQ ID NO: 1842642 - RNA, 19 nt, Homo sapiens
  misc_RNA (1)...(19): siRNA sense strand
uaaucaauguggaaagguu

SEQ ID NO: 1842643 - RNA, 19 nt, Homo sapiens
  misc_RNA (1)...(19): siRNA sense strand
aaacucaagcuaagaagaa

SEQ ID NO: 1842644 - RNA, 19 nt, Homo sapiens
  misc_RNA (1)...(19): siRNA sense strand
aaacauguuccuucaaaga

SEQ ID NO: 1842645 - RNA, 19 nt, Homo sapiens
  misc_RNA (1)...(19): siRNA sense strand
gugagaaacccuuugaaug

SEQ ID NO: 1842646 - RNA, 19 nt, Homo sapiens
  misc_RNA (1)...(19): siRNA sense strand
ggaagucuuuuagguauaa

SEQ ID NO: 1842647 - RNA, 19 nt, Homo sapiens
  misc_RNA (1)...(19): siRNA sense strand
cagagcaaccuguauaaug

SEQ ID NO: 1842648 - RNA, 19 nt, Homo sapiens
  misc_RNA (1)...(19): siRNA sense strand
cuaugaaugugcugaaugu

SEQ ID NO: 1842649 - RNA, 19 nt, Homo sapiens
  misc_RNA (1)...(19): siRNA sense strand
cuaaacacaugagaauuca

SEQ ID NO: 1842650 - RNA, 19 nt, Homo sapiens
  misc_RNA (1)...(19): siRNA sense strand
ggagaacuacugcaaccaa

SEQ ID NO: 1842651 - RNA, 19 nt, Homo sapiens
  misc_RNA (1)...(19): siRNA sense strand
gaacacauacaggugaaau

SEQ ID NO: 1842652 - RNA, 19 nt, Homo sapiens
  misc_RNA (1)...(19): siRNA sense strand
gugagaagccauaugaaug

SEQ ID NO: 1842653 - RNA, 19 nt, Homo sapiens
  misc_RNA (1)...(19): siRNA sense strand
cuaaagaacacaagaaguc

SEQ ID NO: 1842654 - RNA, 19 nt, Homo sapiens
  misc_RNA (1)...(19): siRNA sense strand
ucucuuacuuaccauauga

SEQ ID NO: 1842655 - RNA, 19 nt, Homo sapiens
  misc_RNA (1)...(19): siRNA sense strand
ccauaugaauguaaggaau

SEQ ID NO: 1842656 - RNA, 19 nt, Homo sapiens
  misc_RNA (1)...(19): siRNA sense strand
ucacugaccaucuaagaau

SEQ ID NO: 1842657 - RNA, 19 nt, Homo sapiens
  misc_RNA (1)...(19): siRNA sense strand
guaugaguguaaugaaugu

SEQ ID NO: 1842658 - RNA, 19 nt, Homo sapiens
  misc_RNA (1)...(19): siRNA sense strand
aaagaacucauacuaagga

SEQ ID NO: 1842659 - RNA, 19 nt, Homo sapiens
  misc_RNA (1)...(19): siRNA sense strand
gggaaaaccuucagacaca

SEQ ID NO: 1842660 - RNA, 19 nt, Homo sapiens
  misc_RNA (1)...(19): siRNA sense strand
aaauuugagucauguggaa

SEQ ID NO: 1842661 - RNA, 19 nt, Homo sapiens
  misc_RNA (1)...(19): siRNA sense strand
caaccuguauaaugaugug

SEQ ID NO: 1842662 - RNA, 19 nt, Homo sapiens
  misc_RNA (1)...(19): siRNA sense strand
ggugagaaacccuuugaau

SEQ ID NO: 1842663 - RNA, 19 nt, Homo sapiens
  misc_RNA (1)...(19): siRNA sense strand
ucaagguuguccaaguaaa

SEQ ID NO: 1842664 - RNA, 19 nt, Homo sapiens
  misc_RNA (1)...(19): siRNA sense strand
ggugagaagccauaugaau

SEQ ID NO: 1842665 - RNA, 19 nt, Homo sapiens
  misc_RNA (1)...(19): siRNA sense strand
caggugagaagccauauga

SEQ ID NO: 1842666 - RNA, 19 nt, Homo sapiens
  misc_RNA (1)...(19): siRNA sense strand
gaauguaaucaauguggaa

SEQ ID NO: 1842667 - RNA, 19 nt, Homo sapiens
  misc_RNA (1)...(19): siRNA sense strand
aggagaaaccuuauaaaug

SEQ ID NO: 1842668 - RNA, 19 nt, Homo sapiens
  misc_RNA (1)...(19): siRNA sense strand
caucagagaguucauacug

SEQ ID NO: 1842669 - RNA, 19 nt, Homo sapiens
  misc_RNA (1)...(19): siRNA sense strand
gaacagagcuucuaaucaa

SEQ ID NO: 1842670 - RNA, 19 nt, Homo sapiens
  misc_RNA (1)...(19): siRNA sense strand
gaacacaccucucauugaa

SEQ ID NO: 1842671 - RNA, 19 nt, Homo sapiens
  misc_RNA (1)...(19): siRNA sense strand
gaagauaacugccauuucu

SEQ ID NO: 1842672 - RNA, 19 nt, Homo sapiens
  misc_RNA (1)...(19): siRNA sense strand
ggagaaauaucgacaguau

SEQ ID NO: 1842673 - RNA, 19 nt, Homo sapiens
  misc_RNA (1)...(19): siRNA sense strand
gaaacgggcucuaacaaug

SEQ ID NO: 1842674 - RNA, 19 nt, Homo sapiens
  misc_RNA (1)...(19): siRNA sense strand
gcuaaucuaucacacauuu

SEQ ID NO: 1842675 - RNA, 19 nt, Homo sapiens
  misc_RNA (1)...(19): siRNA sense strand
gcucaaaccuaaugauguu

SEQ ID NO: 1842676 - RNA, 19 nt, Homo sapiens
  misc_RNA (1)...(19): siRNA sense strand
cauaccagaugacaauuua

SEQ ID NO: 1842677 - RNA, 19 nt, Homo sapiens
  misc_RNA (1)...(19): siRNA sense strand
gcaagaggaugacguaucu

SEQ ID NO: 1842678 - RNA, 19 nt, Homo sapiens
  misc_RNA (1)...(19): siRNA sense strand
guacggcaauuaaauguga

SEQ ID NO: 1842679 - RNA, 19 nt, Homo sapiens
  misc_RNA (1)...(19): siRNA sense strand
uuacgacgcucaccauuaa

SEQ ID NO: 1842680 - RNA, 19 nt, Homo sapiens
  misc_RNA (1)...(19): siRNA sense strand
uaacugccauuucuuaaga

SEQ ID NO: 1842681 - RNA, 19 nt, Homo sapiens
  misc_RNA (1)...(19): siRNA sense strand
gaaguucuaugcggaguuu

SEQ ID NO: 1842682 - RNA, 19 nt, Homo sapiens
  misc_RNA (1)...(19): siRNA sense strand
gcgaagauguggauauaau

SEQ ID NO: 1842683 - RNA, 19 nt, Homo sapiens
  misc_RNA (1)...(19): siRNA sense strand
gaugagcuccaaagauuua

SEQ ID NO: 1842684 - RNA, 19 nt, Homo sapiens
  misc_RNA (1)...(19): siRNA sense strand
uaaagaacaugaccaagau

SEQ ID NO: 1842685 - RNA, 19 nt, Homo sapiens
  misc_RNA (1)...(19): siRNA sense strand
cagcgaagauguggauaua

SEQ ID NO: 1842686 - RNA, 19 nt, Homo sapiens
  misc_RNA (1)...(19): siRNA sense strand
gaggagcuucuucauauua

SEQ ID NO: 1842687 - RNA, 19 nt, Homo sapiens
  misc_RNA (1)...(19): siRNA sense strand
gagggacuguguuguuuaa

SEQ ID NO: 1842688 - RNA, 19 nt, Homo sapiens
  misc_RNA (1)...(19): siRNA sense strand
caagcaaguucaagaaguu

SEQ ID NO: 1842689 - RNA, 19 nt, Homo sapiens
  misc_RNA (1)...(19): siRNA sense strand
gauuaugcccucaacaaua

SEQ ID NO: 1842690 - RNA, 19 nt, Homo sapiens
  misc_RNA (1)...(19): siRNA sense strand
cugaugagcuccaaagauu

SEQ ID NO: 1842691 - RNA, 19 nt, Homo sapiens
  misc_RNA (1)...(19): siRNA sense strand
gggagaaacugccaagcaa

SEQ ID NO: 1842692 - RNA, 19 nt, Homo sapiens
  misc_RNA (1)...(19): siRNA sense strand
gcaauucgauucacugacu

SEQ ID NO: 1842693 - RNA, 19 nt, Homo sapiens
  misc_RNA (1)...(19): siRNA sense strand
cugaggagauuuaaugaaa

SEQ ID NO: 1842694 - RNA, 19 nt, Homo sapiens
  misc_RNA (1)...(19): siRNA sense strand
ugaggcaacuuuaaaugaa

SEQ ID NO: 1842695 - RNA, 19 nt, Homo sapiens
  misc_RNA (1)...(19): siRNA sense strand
gagcuaaucuaucacacau

SEQ ID NO: 1842696 - RNA, 19 nt, Homo sapiens
  misc_RNA (1)...(19): siRNA sense strand
ccaaaucuccuucaucaga

SEQ ID NO: 1842697 - RNA, 19 nt, Homo sapiens
  misc_RNA (1)...(19): siRNA sense strand
ucacagaugucacacagau

SEQ ID NO: 1842698 - RNA, 19 nt, Homo sapiens
  misc_RNA (1)...(19): siRNA sense strand
gcaagcguguucagcuauu

SEQ ID NO: 1842699 - RNA, 19 nt, Homo sapiens
  misc_RNA (1)...(19): siRNA sense strand
caaguuagcacuagugaau

SEQ ID NO: 1842700 - RNA, 19 nt, Homo sapiens
  misc_RNA (1)...(19): siRNA sense strand
guuagcagguguucucauu

SEQ ID NO: 1842701 - RNA, 19 nt, Homo sapiens
  misc_RNA (1)...(19): siRNA sense strand
cagauuugcuuaugugguu

SEQ ID NO: 1842702 - RNA, 19 nt, Homo sapiens
  misc_RNA (1)...(19): siRNA sense strand
ucgagcaccucacaugaua

SEQ ID NO: 1842703 - RNA, 19 nt, Homo sapiens
  misc_RNA (1)...(19): siRNA sense strand
cugaugaaguucuguuuaa

SEQ ID NO: 1842704 - RNA, 19 nt, Homo sapiens
  misc_RNA (1)...(19): siRNA sense strand
ggagaagauugucaagcaa

SEQ ID NO: 1842705 - RNA, 19 nt, Homo sapiens
  misc_RNA (1)...(19): siRNA sense strand
cuaaagacauacagacaau

SEQ ID NO: 1842706 - RNA, 19 nt, Homo sapiens
  misc_RNA (1)...(19): siRNA sense strand
ggaguuauguacggcaauu

SEQ ID NO: 1842707 - RNA, 19 nt, Homo sapiens
  misc_RNA (1)...(19): siRNA sense strand
gaugaugcccggaugauug

SEQ ID NO: 1842708 - RNA, 19 nt, Homo sapiens
  misc_RNA (1)...(19): siRNA sense strand
gagaagauaacugccauuu

SEQ ID NO: 1842709 - RNA, 19 nt, Homo sapiens
  misc_RNA (1)...(19): siRNA sense strand
acagaugucacacagauua

SEQ ID NO: 1842710 - RNA, 19 nt, Homo sapiens
  misc_RNA (1)...(19): siRNA sense strand
uaagauagcagcccacugu

SEQ ID NO: 1842711 - RNA, 19 nt, Homo sapiens
  misc_RNA (1)...(19): siRNA sense strand
ucaagcaaaucucagaaga

SEQ ID NO: 1842712 - RNA, 19 nt, Homo sapiens
  misc_RNA (1)...(19): siRNA sense strand
gaugauugcugcccucaag

SEQ ID NO: 1842713 - RNA, 19 nt, Homo sapiens
  misc_RNA (1)...(19): siRNA sense strand
ggaaacgggcucuaacaau

SEQ ID NO: 1842714 - RNA, 19 nt, Homo sapiens
  misc_RNA (1)...(19): siRNA sense strand
ccagaacagugagauacua

SEQ ID NO: 1842715 - RNA, 19 nt, Homo sapiens
  misc_RNA (1)...(19): siRNA sense strand
cagcaagcguguucagcua

SEQ ID NO: 1842716 - RNA, 19 nt, Homo sapiens
  misc_RNA (1)...(19): siRNA sense strand
acagugggcugccauguau

SEQ ID NO: 1842717 - RNA, 19 nt, Homo sapiens
  misc_RNA (1)...(19): siRNA sense strand
caucagauuugcuuaugug

SEQ ID NO: 1842718 - RNA, 19 nt, Homo sapiens
  misc_RNA (1)...(19): siRNA sense strand
cagagaacuuuaucacaga

SEQ ID NO: 1842719 - RNA, 19 nt, Homo sapiens
  misc_RNA (1)...(19): siRNA sense strand
ucacugagaucugccuuug

SEQ ID NO: 1842720 - RNA, 19 nt, Homo sapiens
  misc_RNA (1)...(19): siRNA sense strand
gauaacugccauuucuuaa

SEQ ID NO: 1842721 - RNA, 19 nt, Homo sapiens
  misc_RNA (1)...(19): siRNA sense strand
ggagggacuguguuguuua

SEQ ID NO: 1842722 - RNA, 19 nt, Homo sapiens
  misc_RNA (1)...(19): siRNA sense strand
ggaaaagggaauaacauua

SEQ ID NO: 1842723 - RNA, 19 nt, Homo sapiens
  misc_RNA (1)...(19): siRNA sense strand
gcuggaaccuccucucauc

SEQ ID NO: 1842724 - RNA, 19 nt, Homo sapiens
  misc_RNA (1)...(19): siRNA sense strand
caagcguguucagcuauua

SEQ ID NO: 1842725 - RNA, 19 nt, Homo sapiens
  misc_RNA (1)...(19): siRNA sense strand
gcagggucuuuggauguua

SEQ ID NO: 1842726 - RNA, 19 nt, Homo sapiens
  misc_RNA (1)...(19): siRNA sense strand
ccacagcaaacuuggauuu

SEQ ID NO: 1842727 - RNA, 19 nt, Homo sapiens
  misc_RNA (1)...(19): siRNA sense strand
ggcaaguccuguuagaaga

SEQ ID NO: 1842728 - RNA, 19 nt, Homo sapiens
  misc_RNA (1)...(19): siRNA sense strand
gaacugaugagcuccaaag

SEQ ID NO: 1842729 - RNA, 19 nt, Homo sapiens
  misc_RNA (1)...(19): siRNA sense strand
aauaccaccuaaagacaua

SEQ ID NO: 1842730 - RNA, 19 nt, Homo sapiens
  misc_RNA (1)...(19): siRNA sense strand
gagaagauugucaagcaaa

SEQ ID NO: 1842731 - RNA, 19 nt, Homo sapiens
  misc_RNA (1)...(19): siRNA sense strand
ggaacagagcuucuaauca

SEQ ID NO: 1842732 - RNA, 19 nt, Homo sapiens
  misc_RNA (1)...(19): siRNA sense strand
caaaggagggacuguguug

SEQ ID NO: 1842733 - RNA, 19 nt, Homo sapiens
  misc_RNA (1)...(19): siRNA sense strand
uggaugaccuagagauuau

SEQ ID NO: 1842734 - RNA, 19 nt, Homo sapiens
  misc_RNA (1)...(19): siRNA sense strand
ccugguacauuauucuaaa

SEQ ID NO: 1842735 - RNA, 19 nt, Homo sapiens
  misc_RNA (1)...(19): siRNA sense strand
ccaagcaaguucaagaagu

SEQ ID NO: 1842736 - RNA, 19 nt, Homo sapiens
  misc_RNA (1)...(19): siRNA sense strand
uuaaagaacaugaccaaga

SEQ ID NO: 1842737 - RNA, 19 nt, Homo sapiens
  misc_RNA (1)...(19): siRNA sense strand
gaguagacaaggaggauuu

SEQ ID NO: 1842738 - RNA, 19 nt, Homo sapiens
  misc_RNA (1)...(19): siRNA sense strand
gagaaauaucgacaguaua

SEQ ID NO: 1842739 - RNA, 19 nt, Homo sapiens
  misc_RNA (1)...(19): siRNA sense strand
uaaaugugauugacaacca

SEQ ID NO: 1842740 - RNA, 19 nt, Homo sapiens
  misc_RNA (1)...(19): siRNA sense strand
acugagaucugccuuuguu

SEQ ID NO: 1842741 - RNA, 19 nt, Homo sapiens
  misc_RNA (1)...(19): siRNA sense strand
gcauaccagaugacaauuu

SEQ ID NO: 1842742 - RNA, 19 nt, Homo sapiens
  misc_RNA (1)...(19): siRNA sense strand
gauagaaaauaccaccuaa

SEQ ID NO: 1842743 - RNA, 19 nt, Homo sapiens
  misc_RNA (1)...(19): siRNA sense strand
gaacugguggacuggauga

SEQ ID NO: 1842744 - RNA, 19 nt, Homo sapiens
  misc_RNA (1)...(19): siRNA sense strand
gcacuaacgugggagaaac

SEQ ID NO: 1842745 - RNA, 19 nt, Homo sapiens
  misc_RNA (1)...(19): siRNA sense strand
gauuuagcauaccagauga

SEQ ID NO: 1842746 - RNA, 19 nt, Homo sapiens
  misc_RNA (1)...(19): siRNA sense strand
gaacaggaaggcccaacug

SEQ ID NO: 1842747 - RNA, 19 nt, Homo sapiens
  misc_RNA (1)...(19): siRNA sense strand
gggagggccugaucauagu

SEQ ID NO: 1842748 - RNA, 19 nt, Homo sapiens
  misc_RNA (1)...(19): siRNA sense strand
gaagucaucagugcaguug

SEQ ID NO: 1842749 - RNA, 19 nt, Homo sapiens
  misc_RNA (1)...(19): siRNA sense strand
uaaaugaagcaacagauuc

SEQ ID NO: 1842750 - RNA, 19 nt, Homo sapiens
  misc_RNA (1)...(19): siRNA sense strand
agauaacugccauuucuua

SEQ ID NO: 1842751 - RNA, 19 nt, Homo sapiens
  misc_RNA (1)...(19): siRNA sense strand
ggacuguguuguuuaacca

SEQ ID NO: 1842752 - RNA, 19 nt, Homo sapiens
  misc_RNA (1)...(19): siRNA sense strand
ggagcuucuucauauuaaa

SEQ ID NO: 1842753 - RNA, 19 nt, Homo sapiens
  misc_RNA (1)...(19): siRNA sense strand
guggaugaccuagagauua

SEQ ID NO: 1842754 - RNA, 19 nt, Homo sapiens
  misc_RNA (1)...(19): siRNA sense strand
gauguuaaaguaucugaga

SEQ ID NO: 1842755 - RNA, 19 nt, Homo sapiens
  misc_RNA (1)...(19): siRNA sense strand
gugagccgcuuggcacuaa

SEQ ID NO: 1842756 - RNA, 19 nt, Homo sapiens
  misc_RNA (1)...(19): siRNA sense strand
ccaaagauuuagcauacca

SEQ ID NO: 1842757 - RNA, 19 nt, Homo sapiens
  misc_RNA (1)...(19): siRNA sense strand
gcacaagguucuuuugcaa

SEQ ID NO: 1842758 - RNA, 19 nt, Homo sapiens
  misc_RNA (1)...(19): siRNA sense strand
acccaaaucuccuucauca

SEQ ID NO: 1842759 - RNA, 19 nt, Homo sapiens
  misc_RNA (1)...(19): siRNA sense strand
gauuucaaccggauccuaa

SEQ ID NO: 1842760 - RNA, 19 nt, Homo sapiens
  misc_RNA (1)...(19): siRNA sense strand
gcaaaaguauacugugaug

SEQ ID NO: 1842761 - RNA, 19 nt, Homo sapiens
  misc_RNA (1)...(19): siRNA sense strand
gagaaaagguggugcucaa

SEQ ID NO: 1842762 - RNA, 19 nt, Homo sapiens
  misc_RNA (1)...(19): siRNA sense strand
uggagaagauugucaagca

SEQ ID NO: 1842763 - RNA, 19 nt, Homo sapiens
  misc_RNA (1)...(19): siRNA sense strand
gaagaaggagugugaugag

SEQ ID NO: 1842764 - RNA, 19 nt, Homo sapiens
  misc_RNA (1)...(19): siRNA sense strand
ugaggagcuucuucauauu

SEQ ID NO: 1842765 - RNA, 19 nt, Homo sapiens
  misc_RNA (1)...(19): siRNA sense strand
ugacaaccagagaacuuua

SEQ ID NO: 1842766 - RNA, 19 nt, Homo sapiens
  misc_RNA (1)...(19): siRNA sense strand
acaagacguucauugacaa

SEQ ID NO: 1842767 - RNA, 19 nt, Homo sapiens
  misc_RNA (1)...(19): siRNA sense strand
augcggaguuugaaaguuu

SEQ ID NO: 1842768 - RNA, 19 nt, Homo sapiens
  misc_RNA (1)...(19): siRNA sense strand
ucacucgacugaaagaagu

SEQ ID NO: 1842769 - RNA, 19 nt, Homo sapiens
  misc_RNA (1)...(19): siRNA sense strand
gaaaaucucucaggccuuu

SEQ ID NO: 1842770 - RNA, 19 nt, Homo sapiens
  misc_RNA (1)...(19): siRNA sense strand
ucucaggccuuuccacuaa

SEQ ID NO: 1842771 - RNA, 19 nt, Homo sapiens
  misc_RNA (1)...(19): siRNA sense strand
uacaauggcucaaaucaug

SEQ ID NO: 1842772 - RNA, 19 nt, Homo sapiens
  misc_RNA (1)...(19): siRNA sense strand
ugguaacacucgcgauuua

SEQ ID NO: 1842773 - RNA, 19 nt, Homo sapiens
  misc_RNA (1)...(19): siRNA sense strand
ggacagaucccaguauaag

SEQ ID NO: 1842774 - RNA, 19 nt, Homo sapiens
  misc_RNA (1)...(19): siRNA sense strand
ucacagaacaggccgauau

SEQ ID NO: 1842775 - RNA, 19 nt, Homo sapiens
  misc_RNA (1)...(19): siRNA sense strand
ggagaaaacccacuucaaa

SEQ ID NO: 1842776 - RNA, 19 nt, Homo sapiens
  misc_RNA (1)...(19): siRNA sense strand
gcagccaaauuuauuguac

SEQ ID NO: 1842777 - RNA, 19 nt, Homo sapiens
  misc_RNA (1)...(19): siRNA sense strand
gcaacuacguagaucugau

SEQ ID NO: 1842778 - RNA, 19 nt, Homo sapiens
  misc_RNA (1)...(19): siRNA sense strand
aaucauggcagaacaagaa

SEQ ID NO: 1842779 - RNA, 19 nt, Homo sapiens
  misc_RNA (1)...(19): siRNA sense strand
agucggagcugcaaguguu

SEQ ID NO: 1842780 - RNA, 19 nt, Homo sapiens
  misc_RNA (1)...(19): siRNA sense strand
uauuguaccuuaugaugug

SEQ ID NO: 1842781 - RNA, 19 nt, Homo sapiens
  misc_RNA (1)...(19): siRNA sense strand
gggagcaacuggaagaaac

SEQ ID NO: 1842782 - RNA, 19 nt, Homo sapiens
  misc_RNA (1)...(19): siRNA sense strand
ccauuucacuggccucuag

SEQ ID NO: 1842783 - RNA, 19 nt, Homo sapiens
  misc_RNA (1)...(19): siRNA sense strand
gcugggaaguccuaugagu

SEQ ID NO: 1842784 - RNA, 19 nt, Homo sapiens
  misc_RNA (1)...(19): siRNA sense strand
cagaagacggucaccauga

SEQ ID NO: 1842785 - RNA, 19 nt, Homo sapiens
  misc_RNA (1)...(19): siRNA sense strand
cuccugauguuguuccaua

SEQ ID NO: 1842786 - RNA, 19 nt, Homo sapiens
  misc_RNA (1)...(19): siRNA sense strand
cgacagacuucgaguucuc

SEQ ID NO: 1842787 - RNA, 19 nt, Homo sapiens
  misc_RNA (1)...(19): siRNA sense strand
agaagacggucaccaugau

SEQ ID NO: 1842788 - RNA, 19 nt, Homo sapiens
  misc_RNA (1)...(19): siRNA sense strand
cauccaaccuuuugacauu

SEQ ID NO: 1842789 - RNA, 19 nt, Homo sapiens
  misc_RNA (1)...(19): siRNA sense strand
ucgcgcauaugcacucaaa

SEQ ID NO: 1842790 - RNA, 19 nt, Homo sapiens
  misc_RNA (1)...(19): siRNA sense strand
aaaggaaagccacaacaug

SEQ ID NO: 1842791 - RNA, 19 nt, Homo sapiens
  misc_RNA (1)...(19): siRNA sense strand
gaaguccuaugagugucaa

SEQ ID NO: 1842792 - RNA, 19 nt, Homo sapiens
  misc_RNA (1)...(19): siRNA sense strand
caagcucaacaaaccauuu

SEQ ID NO: 1842793 - RNA, 19 nt, Homo sapiens
  misc_RNA (1)...(19): siRNA sense strand
guaaaggaaagccacaaca

SEQ ID NO: 1842794 - RNA, 19 nt, Homo sapiens
  misc_RNA (1)...(19): siRNA sense strand
ucagugaagagcauaaaug

SEQ ID NO: 1842795 - RNA, 19 nt, Homo sapiens
  misc_RNA (1)...(19): siRNA sense strand
uaaaggaaagccacaacau

SEQ ID NO: 1842796 - RNA, 19 nt, Homo sapiens
  misc_RNA (1)...(19): siRNA sense strand
aaggaaagccacaacaugu

SEQ ID NO: 1842797 - RNA, 19 nt, Homo sapiens
  misc_RNA (1)...(19): siRNA sense strand
gaguucuccugauguuguu

SEQ ID NO: 1842798 - RNA, 19 nt, Homo sapiens
  misc_RNA (1)...(19): siRNA sense strand
ggaaguccuaugaguguca

SEQ ID NO: 1842799 - RNA, 19 nt, Homo sapiens
  misc_RNA (1)...(19): siRNA sense strand
auaaaugcccaguggauga

SEQ ID NO: 1842800 - RNA, 19 nt, Homo sapiens
  misc_RNA (1)...(19): siRNA sense strand
caugguaacacucgcgauu

SEQ ID NO: 1842801 - RNA, 19 nt, Homo sapiens
  misc_RNA (1)...(19): siRNA sense strand
cgaguucuccugauguugu

SEQ ID NO: 1842802 - RNA, 19 nt, Homo sapiens
  misc_RNA (1)...(19): siRNA sense strand
gaagacggucaccaugauc

SEQ ID NO: 1842803 - RNA, 19 nt, Homo sapiens
  misc_RNA (1)...(19): siRNA sense strand
cauacaauggcucaaauca

SEQ ID NO: 1842804 - RNA, 19 nt, Homo sapiens
  misc_RNA (1)...(19): siRNA sense strand
acaggccgauaucgcauug

SEQ ID NO: 1842805 - RNA, 19 nt, Homo sapiens
  misc_RNA (1)...(19): siRNA sense strand
ccgcugggaaguccuauga

SEQ ID NO: 1842806 - RNA, 19 nt, Homo sapiens
  misc_RNA (1)...(19): siRNA sense strand
ucaaaucauggcagaacaa

SEQ ID NO: 1842807 - RNA, 19 nt, Homo sapiens
  misc_RNA (1)...(19): siRNA sense strand
cgacuuggaggcugagcaa

SEQ ID NO: 1842808 - RNA, 19 nt, Homo sapiens
  misc_RNA (1)...(19): siRNA sense strand
ggcagaacaagaaguggaa

SEQ ID NO: 1842809 - RNA, 19 nt, Homo sapiens
  misc_RNA (1)...(19): siRNA sense strand
gagugucaagcucaacaaa

SEQ ID NO: 1842810 - RNA, 19 nt, Homo sapiens
  misc_RNA (1)...(19): siRNA sense strand
ggccagcaacuacguagau

SEQ ID NO: 1842811 - RNA, 19 nt, Homo sapiens
  misc_RNA (1)...(19): siRNA sense strand
cuucaaagacgcagucagu

SEQ ID NO: 1842812 - RNA, 19 nt, Homo sapiens
  misc_RNA (1)...(19): siRNA sense strand
cuggguggaucgcgcauau

SEQ ID NO: 1842813 - RNA, 19 nt, Homo sapiens
  misc_RNA (1)...(19): siRNA sense strand
gcugagcaaagugcaguuu

SEQ ID NO: 1842814 - RNA, 19 nt, Homo sapiens
  misc_RNA (1)...(19): siRNA sense strand
gcagaacaagaaguggaaa

SEQ ID NO: 1842815 - RNA, 19 nt, Homo sapiens
  misc_RNA (1)...(19): siRNA sense strand
gagaaaacccacuucaaag

SEQ ID NO: 1842816 - RNA, 19 nt, Homo sapiens
  misc_RNA (1)...(19): siRNA sense strand
gaucgcgcauaugcacuca

SEQ ID NO: 1842817 - RNA, 19 nt, Homo sapiens
  misc_RNA (1)...(19): siRNA sense strand
caucuugggccucgucauc

SEQ ID NO: 1842818 - RNA, 19 nt, Homo sapiens
  misc_RNA (1)...(19): siRNA sense strand
gcucaaaucauggcagaac

SEQ ID NO: 1842819 - RNA, 19 nt, Homo sapiens
  misc_RNA (1)...(19): siRNA sense strand
ggaagcacacagccaacuc

SEQ ID NO: 1842820 - RNA, 19 nt, Homo sapiens
  misc_RNA (1)...(19): siRNA sense strand
cagcaacuacguagaucug

SEQ ID NO: 1842821 - RNA, 19 nt, Homo sapiens
  misc_RNA (1)...(19): siRNA sense strand
acagaucccaguauaagca

SEQ ID NO: 1842822 - RNA, 19 nt, Homo sapiens
  misc_RNA (1)...(19): siRNA sense strand
ggccucgucaucaugguaa

SEQ ID NO: 1842823 - RNA, 19 nt, Homo sapiens
  misc_RNA (1)...(19): siRNA sense strand
gaacaagaaguggaaaauc

SEQ ID NO: 1842824 - RNA, 19 nt, Homo sapiens
  misc_RNA (1)...(19): siRNA sense strand
gccagcaacuacguagauc

SEQ ID NO: 1842825 - RNA, 19 nt, Homo sapiens
  misc_RNA (1)...(19): siRNA sense strand
ugggaaguccuaugagugu

SEQ ID NO: 1842826 - RNA, 19 nt, Homo sapiens
  misc_RNA (1)...(19): siRNA sense strand
gaacaaggguuauugaauc

SEQ ID NO: 1842827 - RNA, 19 nt, Homo sapiens
  misc_RNA (1)...(19): siRNA sense strand
gcaaauggaugacaaugaa

SEQ ID NO: 1842828 - RNA, 19 nt, Homo sapiens
  misc_RNA (1)...(19): siRNA sense strand
gccagaagaugaagauuua

SEQ ID NO: 1842829 - RNA, 19 nt, Homo sapiens
  misc_RNA (1)...(19): siRNA sense strand
caaaggaucuuccauuuag

SEQ ID NO: 1842830 - RNA, 19 nt, Homo sapiens
  misc_RNA (1)...(19): siRNA sense strand
ugaaaucgcugacgaaguu

SEQ ID NO: 1842831 - RNA, 19 nt, Homo sapiens
  misc_RNA (1)...(19): siRNA sense strand
guaaagagaugccauucaa

SEQ ID NO: 1842832 - RNA, 19 nt, Homo sapiens
  misc_RNA (1)...(19): siRNA sense strand
ggaaauugauccuuguaaa

SEQ ID NO: 1842833 - RNA, 19 nt, Homo sapiens
  misc_RNA (1)...(19): siRNA sense strand
gaacuuuccucauauuugu

SEQ ID NO: 1842834 - RNA, 19 nt, Homo sapiens
  misc_RNA (1)...(19): siRNA sense strand
gaagauaaguuuacacaac

SEQ ID NO: 1842835 - RNA, 19 nt, Homo sapiens
  misc_RNA (1)...(19): siRNA sense strand
gcaagaacuuuccucauau

SEQ ID NO: 1842836 - RNA, 19 nt, Homo sapiens
  misc_RNA (1)...(19): siRNA sense strand
gaagaugacuuagguggaa

SEQ ID NO: 1842837 - RNA, 19 nt, Homo sapiens
  misc_RNA (1)...(19): siRNA sense strand
gcagauccauuuguucuaa

SEQ ID NO: 1842838 - RNA, 19 nt, Homo sapiens
  misc_RNA (1)...(19): siRNA sense strand
cgacguaguuucagaagaa

SEQ ID NO: 1842839 - RNA, 19 nt, Homo sapiens
  misc_RNA (1)...(19): siRNA sense strand
ugacuuagguggaacugua

SEQ ID NO: 1842840 - RNA, 19 nt, Homo sapiens
  misc_RNA (1)...(19): siRNA sense strand
gcacaaguguaaauucugu

SEQ ID NO: 1842841 - RNA, 19 nt, Homo sapiens
  misc_RNA (1)...(19): siRNA sense strand
cacaaaggaucuuccauuu

SEQ ID NO: 1842842 - RNA, 19 nt, Homo sapiens
  misc_RNA (1)...(19): siRNA sense strand
ccaaagaggugcagcaaca

SEQ ID NO: 1842843 - RNA, 19 nt, Homo sapiens
  misc_RNA (1)...(19): siRNA sense strand
gaucagaacagcaguauuc

SEQ ID NO: 1842844 - RNA, 19 nt, Homo sapiens
  misc_RNA (1)...(19): siRNA sense strand
gauguucagugcccagaua

SEQ ID NO: 1842845 - RNA, 19 nt, Homo sapiens
  misc_RNA (1)...(19): siRNA sense strand
ugacgaaguuuauauggaa

SEQ ID NO: 1842846 - RNA, 19 nt, Homo sapiens
  misc_RNA (1)...(19): siRNA sense strand
gaaaagaaccagcacauaa

SEQ ID NO: 1842847 - RNA, 19 nt, Homo sapiens
  misc_RNA (1)...(19): siRNA sense strand
caagaacuuuccucauauu

SEQ ID NO: 1842848 - RNA, 19 nt, Homo sapiens
  misc_RNA (1)...(19): siRNA sense strand
ggaugacaaugaaaucaaa

SEQ ID NO: 1842849 - RNA, 19 nt, Homo sapiens
  misc_RNA (1)...(19): siRNA sense strand
gggaaaagaugguuuauau

SEQ ID NO: 1842850 - RNA, 19 nt, Homo sapiens
  misc_RNA (1)...(19): siRNA sense strand
agcaagaacuuuccucaua

SEQ ID NO: 1842851 - RNA, 19 nt, Homo sapiens
  misc_RNA (1)...(19): siRNA sense strand
aagcagaaauugucacuga

SEQ ID NO: 1842852 - RNA, 19 nt, Homo sapiens
  misc_RNA (1)...(19): siRNA sense strand
guaccaaacagcaauaauu

SEQ ID NO: 1842853 - RNA, 19 nt, Homo sapiens
  misc_RNA (1)...(19): siRNA sense strand
gcccagauaucauggaaga

SEQ ID NO: 1842854 - RNA, 19 nt, Homo sapiens
  misc_RNA (1)...(19): siRNA sense strand
gaaugaccauggacacaga

SEQ ID NO: 1842855 - RNA, 19 nt, Homo sapiens
  misc_RNA (1)...(19): siRNA sense strand
ugacccagauucaguugua

SEQ ID NO: 1842856 - RNA, 19 nt, Homo sapiens
  misc_RNA (1)...(19): siRNA sense strand
guguagacauugugacuuu

SEQ ID NO: 1842857 - RNA, 19 nt, Homo sapiens
  misc_RNA (1)...(19): siRNA sense strand
ggaagaagcagaugugucu

SEQ ID NO: 1842858 - RNA, 19 nt, Homo sapiens
  misc_RNA (1)...(19): siRNA sense strand
agagugagccugagaauga

SEQ ID NO: 1842859 - RNA, 19 nt, Homo sapiens
  misc_RNA (1)...(19): siRNA sense strand
cuucagaacucaagaaaca

SEQ ID NO: 1842860 - RNA, 19 nt, Homo sapiens
  misc_RNA (1)...(19): siRNA sense strand
ggacacagagucggaaauu

SEQ ID NO: 1842861 - RNA, 19 nt, Homo sapiens
  misc_RNA (1)...(19): siRNA sense strand
uaagauugcagauccauuu

SEQ ID NO: 1842862 - RNA, 19 nt, Homo sapiens
  misc_RNA (1)...(19): siRNA sense strand
ccaacaagaagauaaguuu

SEQ ID NO: 1842863 - RNA, 19 nt, Homo sapiens
  misc_RNA (1)...(19): siRNA sense strand
gguaauaauucugauggaa

SEQ ID NO: 1842864 - RNA, 19 nt, Homo sapiens
  misc_RNA (1)...(19): siRNA sense strand
acauuugucuucugacuuu

SEQ ID NO: 1842865 - RNA, 19 nt, Homo sapiens
  misc_RNA (1)...(19): siRNA sense strand
gggagaagccguaccaaug

SEQ ID NO: 1842866 - RNA, 19 nt, Homo sapiens
  misc_RNA (1)...(19): siRNA sense strand
ggaugaagaugggcuugaa

SEQ ID NO: 1842867 - RNA, 19 nt, Homo sapiens
  misc_RNA (1)...(19): siRNA sense strand
ucaaauuguuguggaagua

SEQ ID NO: 1842868 - RNA, 19 nt, Homo sapiens
  misc_RNA (1)...(19): siRNA sense strand
gauugcagauccauuuguu

SEQ ID NO: 1842869 - RNA, 19 nt, Homo sapiens
  misc_RNA (1)...(19): siRNA sense strand
gauuugaaacgacacauaa

SEQ ID NO: 1842870 - RNA, 19 nt, Homo sapiens
  misc_RNA (1)...(19): siRNA sense strand
gaaauugauccuuguaaag

SEQ ID NO: 1842871 - RNA, 19 nt, Homo sapiens
  misc_RNA (1)...(19): siRNA sense strand
gaguauagcacuacagaug

SEQ ID NO: 1842872 - RNA, 19 nt, Homo sapiens
  misc_RNA (1)...(19): siRNA sense strand
gcaacagagugagcuuaaa

SEQ ID NO: 1842873 - RNA, 19 nt, Homo sapiens
  misc_RNA (1)...(19): siRNA sense strand
acacauggauggugaucaa

SEQ ID NO: 1842874 - RNA, 19 nt, Homo sapiens
  misc_RNA (1)...(19): siRNA sense strand
gaaugaucauggaguugaa

SEQ ID NO: 1842875 - RNA, 19 nt, Homo sapiens
  misc_RNA (1)...(19): siRNA sense strand
ugaagaugggcuugaauua

SEQ ID NO: 1842876 - RNA, 19 nt, Homo sapiens
  misc_RNA (1)...(19): siRNA sense strand
acaaaggaucuuccauuua

SEQ ID NO: 1842877 - RNA, 19 nt, Homo sapiens
  misc_RNA (1)...(19): siRNA sense strand
ggauggugaucaaauuguu

SEQ ID NO: 1842878 - RNA, 19 nt, Homo sapiens
  misc_RNA (1)...(19): siRNA sense strand
cauugugacuuuaagauug

SEQ ID NO: 1842879 - RNA, 19 nt, Homo sapiens
  misc_RNA (1)...(19): siRNA sense strand
ugaggacguuguuauagaa

SEQ ID NO: 1842880 - RNA, 19 nt, Homo sapiens
  misc_RNA (1)...(19): siRNA sense strand
ccagcaggaugaugacaaa

SEQ ID NO: 1842881 - RNA, 19 nt, Homo sapiens
  misc_RNA (1)...(19): siRNA sense strand
gugcuggacucagauguaa

SEQ ID NO: 1842882 - RNA, 19 nt, Homo sapiens
  misc_RNA (1)...(19): siRNA sense strand
cauggauggugaucaaauu

SEQ ID NO: 1842883 - RNA, 19 nt, Homo sapiens
  misc_RNA (1)...(19): siRNA sense strand
ggaaguacaagaaacuguu

SEQ ID NO: 1842884 - RNA, 19 nt, Homo sapiens
  misc_RNA (1)...(19): siRNA sense strand
gggaagcauuucucucaug

SEQ ID NO: 1842885 - RNA, 19 nt, Homo sapiens
  misc_RNA (1)...(19): siRNA sense strand
ggcagcagcuuaugguaau

SEQ ID NO: 1842886 - RNA, 19 nt, Homo sapiens
  misc_RNA (1)...(19): siRNA sense strand
ugagaaugaucauggaguu

SEQ ID NO: 1842887 - RNA, 19 nt, Homo sapiens
  misc_RNA (1)...(19): siRNA sense strand
acacagagucggaaauuga

SEQ ID NO: 1842888 - RNA, 19 nt, Homo sapiens
  misc_RNA (1)...(19): siRNA sense strand
ggacguuguuauagaagau

SEQ ID NO: 1842889 - RNA, 19 nt, Homo sapiens
  misc_RNA (1)...(19): siRNA sense strand
gaaagggauuuaggcaaca

SEQ ID NO: 1842890 - RNA, 19 nt, Homo sapiens
  misc_RNA (1)...(19): siRNA sense strand
ucacaggccuucagaacuc

SEQ ID NO: 1842891 - RNA, 19 nt, Homo sapiens
  misc_RNA (1)...(19): siRNA sense strand
aagaagaaauaccgcugua

SEQ ID NO: 1842892 - RNA, 19 nt, Homo sapiens
  misc_RNA (1)...(19): siRNA sense strand
gaaguuucuuuagcacauu

SEQ ID NO: 1842893 - RNA, 19 nt, Homo sapiens
  misc_RNA (1)...(19): siRNA sense strand
gaggacuaccuuaugauuu

SEQ ID NO: 1842894 - RNA, 19 nt, Homo sapiens
  misc_RNA (1)...(19): siRNA sense strand
cacauaaugcgacaucaua

SEQ ID NO: 1842895 - RNA, 19 nt, Homo sapiens
  misc_RNA (1)...(19): siRNA sense strand
ggaaaguguaucaguguga

SEQ ID NO: 1842896 - RNA, 19 nt, Homo sapiens
  misc_RNA (1)...(19): siRNA sense strand
ccauuuaggugcaagagau

SEQ ID NO: 1842897 - RNA, 19 nt, Homo sapiens
  misc_RNA (1)...(19): siRNA sense strand
gcagagaaggccauugaau

SEQ ID NO: 1842898 - RNA, 19 nt, Homo sapiens
  misc_RNA (1)...(19): siRNA sense strand
aagaugggcuugaauuaca

SEQ ID NO: 1842899 - RNA, 19 nt, Homo sapiens
  misc_RNA (1)...(19): siRNA sense strand
ugugaggacuaccuuauga

SEQ ID NO: 1842900 - RNA, 19 nt, Homo sapiens
  misc_RNA (1)...(19): siRNA sense strand
uaauuucaguucacacgaa

SEQ ID NO: 1842901 - RNA, 19 nt, Homo sapiens
  misc_RNA (1)...(19): siRNA sense strand
acacaaaggaucuuccauu

SEQ ID NO: 1842902 - RNA, 19 nt, Homo sapiens
  misc_RNA (1)...(19): siRNA sense strand
gggcagcagcuuaugguaa

SEQ ID NO: 1842903 - RNA, 19 nt, Homo sapiens
  misc_RNA (1)...(19): siRNA sense strand
gcaccaguguagacauugu

SEQ ID NO: 1842904 - RNA, 19 nt, Homo sapiens
  misc_RNA (1)...(19): siRNA sense strand
gaagaugggcuugaauuac

SEQ ID NO: 1842905 - RNA, 19 nt, Homo sapiens
  misc_RNA (1)...(19): siRNA sense strand
gaagaaauaccgcuguacu

SEQ ID NO: 1842906 - RNA, 19 nt, Homo sapiens
  misc_RNA (1)...(19): siRNA sense strand
ggucaucauuccugagcaa

SEQ ID NO: 1842907 - RNA, 19 nt, Homo sapiens
  misc_RNA (1)...(19): siRNA sense strand
guagacauugugacuuuaa

SEQ ID NO: 1842908 - RNA, 19 nt, Homo sapiens
  misc_RNA (1)...(19): siRNA sense strand
ccauaagugugacaugugu

SEQ ID NO: 1842909 - RNA, 19 nt, Homo sapiens
  misc_RNA (1)...(19): siRNA sense strand
gcagcagcuuaugguaaua

SEQ ID NO: 1842910 - RNA, 19 nt, Homo sapiens
  misc_RNA (1)...(19): siRNA sense strand
agacauaacugugcauaac

SEQ ID NO: 1842911 - RNA, 19 nt, Homo sapiens
  misc_RNA (1)...(19): siRNA sense strand
gcccugaggucaucaaggu

SEQ ID NO: 1842912 - RNA, 19 nt, Homo sapiens
  misc_RNA (1)...(19): siRNA sense strand
guuguaauccaagauguua

SEQ ID NO: 1842913 - RNA, 19 nt, Homo sapiens
  misc_RNA (1)...(19): siRNA sense strand
uguuguggauucagacaua

SEQ ID NO: 1842914 - RNA, 19 nt, Homo sapiens
  misc_RNA (1)...(19): siRNA sense strand
gcaguaccaaacagcaaua

SEQ ID NO: 1842915 - RNA, 19 nt, Homo sapiens
  misc_RNA (1)...(19): siRNA sense strand
caaugacucucagccagaa

SEQ ID NO: 1842916 - RNA, 19 nt, Homo sapiens
  misc_RNA (1)...(19): siRNA sense strand
aaacgcaugucaaaacuaa

SEQ ID NO: 1842917 - RNA, 19 nt, Homo sapiens
  misc_RNA (1)...(19): siRNA sense strand
gcagacucuucuaacuuga

SEQ ID NO: 1842918 - RNA, 19 nt, Homo sapiens
  misc_RNA (1)...(19): siRNA sense strand
aacaagagccaaacucauu

SEQ ID NO: 1842919 - RNA, 19 nt, Homo sapiens
  misc_RNA (1)...(19): siRNA sense strand
uuucagauguuguggauuc

SEQ ID NO: 1842920 - RNA, 19 nt, Homo sapiens
  misc_RNA (1)...(19): siRNA sense strand
gcacagucccagaugaugu

SEQ ID NO: 1842921 - RNA, 19 nt, Homo sapiens
  misc_RNA (1)...(19): siRNA sense strand
ccauucaagugugacauuu

SEQ ID NO: 1842922 - RNA, 19 nt, Homo sapiens
  misc_RNA (1)...(19): siRNA sense strand
uggagaagaugacuuaggu

SEQ ID NO: 1842923 - RNA, 19 nt, Homo sapiens
  misc_RNA (1)...(19): siRNA sense strand
cgacacauaauuucaguuc

SEQ ID NO: 1842924 - RNA, 19 nt, Homo sapiens
  misc_RNA (1)...(19): siRNA sense strand
guucuaagucgccauauuc

SEQ ID NO: 1842925 - RNA, 19 nt, Homo sapiens
  misc_RNA (1)...(19): siRNA sense strand
uaacugugcauaacuuugu

SEQ ID NO: 1842926 - RNA, 19 nt, Homo sapiens
  misc_RNA (1)...(19): siRNA sense strand
gaagaacccuauccaugua

SEQ ID NO: 1842927 - RNA, 19 nt, Homo sapiens
  misc_RNA (1)...(19): siRNA sense strand
gguaaaggcuucagauguu

SEQ ID NO: 1842928 - RNA, 19 nt, Homo sapiens
  misc_RNA (1)...(19): siRNA sense strand
gaaaagcccuauaaaugua

SEQ ID NO: 1842929 - RNA, 19 nt, Homo sapiens
  misc_RNA (1)...(19): siRNA sense strand
gcacagaaacccuauguau

SEQ ID NO: 1842930 - RNA, 19 nt, Homo sapiens
  misc_RNA (1)...(19): siRNA sense strand
gagaaacccuaugaaugua

SEQ ID NO: 1842931 - RNA, 19 nt, Homo sapiens
  misc_RNA (1)...(19): siRNA sense strand
gagaaacccuaugaaugua

SEQ ID NO: 1842932 - RNA, 19 nt, Homo sapiens
  misc_RNA (1)...(19): siRNA sense strand
gggaaagccuucagucguu

SEQ ID NO: 1842933 - RNA, 19 nt, Homo sapiens
  misc_RNA (1)...(19): siRNA sense strand
ucacaaggguucacagaga

SEQ ID NO: 1842934 - RNA, 19 nt, Homo sapiens
  misc_RNA (1)...(19): siRNA sense strand
gagagaaacccuaugaaug

SEQ ID NO: 1842935 - RNA, 19 nt, Homo sapiens
  misc_RNA (1)...(19): siRNA sense strand
gagagaaacccuaugaaug

SEQ ID NO: 1842936 - RNA, 19 nt, Homo sapiens
  misc_RNA (1)...(19): siRNA sense strand
gagagaaacccuaugaaug

SEQ ID NO: 1842937 - RNA, 19 nt, Homo sapiens
  misc_RNA (1)...(19): siRNA sense strand
ggaaagaagccauguacau

SEQ ID NO: 1842938 - RNA, 19 nt, Homo sapiens
  misc_RNA (1)...(19): siRNA sense strand
gagaaaagcccuauaaaug

SEQ ID NO: 1842939 - RNA, 19 nt, Homo sapiens
  misc_RNA (1)...(19): siRNA sense strand
uggcaaagcuuucaguugu

SEQ ID NO: 1842940 - RNA, 19 nt, Homo sapiens
  misc_RNA (1)...(19): siRNA sense strand
ggagagaaaccuuaugugu

SEQ ID NO: 1842941 - RNA, 19 nt, Homo sapiens
  misc_RNA (1)...(19): siRNA sense strand
ggagagaaacccuaugaau

SEQ ID NO: 1842942 - RNA, 19 nt, Homo sapiens
  misc_RNA (1)...(19): siRNA sense strand
guucauucaucccuucaua

SEQ ID NO: 1842943 - RNA, 19 nt, Homo sapiens
  misc_RNA (1)...(19): siRNA sense strand
ggagagaaacccuaugaau

SEQ ID NO: 1842944 - RNA, 19 nt, Homo sapiens
  misc_RNA (1)...(19): siRNA sense strand
aaacucauauugcacagaa

SEQ ID NO: 1842945 - RNA, 19 nt, Homo sapiens
  misc_RNA (1)...(19): siRNA sense strand
ggagagaaacccuaugaau

SEQ ID NO: 1842946 - RNA, 19 nt, Homo sapiens
  misc_RNA (1)...(19): siRNA sense strand
gaaacccuaugaauguaug

SEQ ID NO: 1842947 - RNA, 19 nt, Homo sapiens
  misc_RNA (1)...(19): siRNA sense strand
ccaguucccuucagaaaca

SEQ ID NO: 1842948 - RNA, 19 nt, Homo sapiens
  misc_RNA (1)...(19): siRNA sense strand
cagaaacccuauguaugua

SEQ ID NO: 1842949 - RNA, 19 nt, Homo sapiens
  misc_RNA (1)...(19): siRNA sense strand
ucacagagacacaguaaug

SEQ ID NO: 1842950 - RNA, 19 nt, Homo sapiens
  misc_RNA (1)...(19): siRNA sense strand
ccaauugccuucauuacca

SEQ ID NO: 1842951 - RNA, 19 nt, Homo sapiens
  misc_RNA (1)...(19): siRNA sense strand
agagaaacccuaugaaugu

SEQ ID NO: 1842952 - RNA, 19 nt, Homo sapiens
  misc_RNA (1)...(19): siRNA sense strand
agagaaacccuaugaaugu

SEQ ID NO: 1842953 - RNA, 19 nt, Homo sapiens
  misc_RNA (1)...(19): siRNA sense strand
acagaaacccuauguaugu

SEQ ID NO: 1842954 - RNA, 19 nt, Homo sapiens
  misc_RNA (1)...(19): siRNA sense strand
agagaaacccuaugaaugu

SEQ ID NO: 1842955 - RNA, 19 nt, Homo sapiens
  misc_RNA (1)...(19): siRNA sense strand
ugaagaacccuauccaugu

SEQ ID NO: 1842956 - RNA, 19 nt, Homo sapiens
  misc_RNA (1)...(19): siRNA sense strand
ucagauacaucagagaaau

SEQ ID NO: 1842957 - RNA, 19 nt, Homo sapiens
  misc_RNA (1)...(19): siRNA sense strand
gaacucauacuggagagaa

SEQ ID NO: 1842958 - RNA, 19 nt, Homo sapiens
  misc_RNA (1)...(19): siRNA sense strand
gaaaucacacuggagagaa

SEQ ID NO: 1842959 - RNA, 19 nt, Homo sapiens
  misc_RNA (1)...(19): siRNA sense strand
ggaaugugggaaagccuua

SEQ ID NO: 1842960 - RNA, 19 nt, Homo sapiens
  misc_RNA (1)...(19): siRNA sense strand
gaaacccuaugaauguaag

SEQ ID NO: 1842961 - RNA, 19 nt, Homo sapiens
  misc_RNA (1)...(19): siRNA sense strand
guaaaggcuucagauguuc

SEQ ID NO: 1842962 - RNA, 19 nt, Homo sapiens
  misc_RNA (1)...(19): siRNA sense strand
aaaucacacuggagagaaa

SEQ ID NO: 1842963 - RNA, 19 nt, Homo sapiens
  misc_RNA (1)...(19): siRNA sense strand
gcaaagcuuucaguugucu

SEQ ID NO: 1842964 - RNA, 19 nt, Homo sapiens
  misc_RNA (1)...(19): siRNA sense strand
gaacucacacuggagagaa

SEQ ID NO: 1842965 - RNA, 19 nt, Homo sapiens
  misc_RNA (1)...(19): siRNA sense strand
guauguaacaauuguggua

SEQ ID NO: 1842966 - RNA, 19 nt, Homo sapiens
  misc_RNA (1)...(19): siRNA sense strand
gagaaacccuaugaauguc

SEQ ID NO: 1842967 - RNA, 19 nt, Homo sapiens
  misc_RNA (1)...(19): siRNA sense strand
cuucauacguucauucauc

SEQ ID NO: 1842968 - RNA, 19 nt, Homo sapiens
  misc_RNA (1)...(19): siRNA sense strand
gggaaagccuucagauacg

SEQ ID NO: 1842969 - RNA, 19 nt, Homo sapiens
  misc_RNA (1)...(19): siRNA sense strand
gugggaaagccuucagaua

SEQ ID NO: 1842970 - RNA, 19 nt, Homo sapiens
  misc_RNA (1)...(19): siRNA sense strand
gaaacccuauguauguaac

SEQ ID NO: 1842971 - RNA, 19 nt, Homo sapiens
  misc_RNA (1)...(19): siRNA sense strand
ggacauauaaaggcucaug

SEQ ID NO: 1842972 - RNA, 19 nt, Homo sapiens
  misc_RNA (1)...(19): siRNA sense strand
ggagaaaagcccuauaaau

SEQ ID NO: 1842973 - RNA, 19 nt, Homo sapiens
  misc_RNA (1)...(19): siRNA sense strand
guucacagagacacaguaa

SEQ ID NO: 1842974 - RNA, 19 nt, Homo sapiens
  misc_RNA (1)...(19): siRNA sense strand
ggacucauacuggagagaa

SEQ ID NO: 1842975 - RNA, 19 nt, Homo sapiens
  misc_RNA (1)...(19): siRNA sense strand
guaaugcacacuggaaaug

SEQ ID NO: 1842976 - RNA, 19 nt, Homo sapiens
  misc_RNA (1)...(19): siRNA sense strand
cgagaaaacucauauugca

SEQ ID NO: 1842977 - RNA, 19 nt, Homo sapiens
  misc_RNA (1)...(19): siRNA sense strand
gaaugcauugugugugaaa

SEQ ID NO: 1842978 - RNA, 19 nt, Homo sapiens
  misc_RNA (1)...(19): siRNA sense strand
gcuuucaguugucucaguu

SEQ ID NO: 1842979 - RNA, 19 nt, Homo sapiens
  misc_RNA (1)...(19): siRNA sense strand
ggacauuaugguuguacaa

SEQ ID NO: 1842980 - RNA, 19 nt, Homo sapiens
  misc_RNA (1)...(19): siRNA sense strand
ccaguucauuucagauaca

SEQ ID NO: 1842981 - RNA, 19 nt, Homo sapiens
  misc_RNA (1)...(19): siRNA sense strand
acacuggagagaaaccuua

SEQ ID NO: 1842982 - RNA, 19 nt, Homo sapiens
  misc_RNA (1)...(19): siRNA sense strand
gcacaucauaucucauucu

SEQ ID NO: 1842983 - RNA, 19 nt, Homo sapiens
  misc_RNA (1)...(19): siRNA sense strand
cuaugaaugucagaaaugu

SEQ ID NO: 1842984 - RNA, 19 nt, Homo sapiens
  misc_RNA (1)...(19): siRNA sense strand
ucaguugucucaguuccuu

SEQ ID NO: 1842985 - RNA, 19 nt, Homo sapiens
  misc_RNA (1)...(19): siRNA sense strand
cuucauaggcacaucauau

SEQ ID NO: 1842986 - RNA, 19 nt, Homo sapiens
  misc_RNA (1)...(19): siRNA sense strand
ggcuucagauguuccaguu

SEQ ID NO: 1842987 - RNA, 19 nt, Homo sapiens
  misc_RNA (1)...(19): siRNA sense strand
cacagaaacccuauguaug

SEQ ID NO: 1842988 - RNA, 19 nt, Homo sapiens
  misc_RNA (1)...(19): siRNA sense strand
gcuaugaauguaagcaaug

SEQ ID NO: 1842989 - RNA, 19 nt, Homo sapiens
  misc_RNA (1)...(19): siRNA sense strand
cccuauguauguaacaauu

SEQ ID NO: 1842990 - RNA, 19 nt, Homo sapiens
  misc_RNA (1)...(19): siRNA sense strand
gugggaaagccuuagguuu

SEQ ID NO: 1842991 - RNA, 19 nt, Homo sapiens
  misc_RNA (1)...(19): siRNA sense strand
gacucauacuggagagaaa

SEQ ID NO: 1842992 - RNA, 19 nt, Homo sapiens
  misc_RNA (1)...(19): siRNA sense strand
ugggaaagccuucagauac

SEQ ID NO: 1842993 - RNA, 19 nt, Homo sapiens
  misc_RNA (1)...(19): siRNA sense strand
ggaauguggcaaagcuuuc

SEQ ID NO: 1842994 - RNA, 19 nt, Homo sapiens
  misc_RNA (1)...(19): siRNA sense strand
gugcauggaauguggcaaa

SEQ ID NO: 1842995 - RNA, 19 nt, Homo sapiens
  misc_RNA (1)...(19): siRNA sense strand
ucauaucucauucuggaaa

SEQ ID NO: 1842996 - RNA, 19 nt, Homo sapiens
  misc_RNA (1)...(19): siRNA sense strand
ccauaugggugugaggaau

SEQ ID NO: 1842997 - RNA, 19 nt, Homo sapiens
  misc_RNA (1)...(19): siRNA sense strand
gcggaaagaagccauguac

SEQ ID NO: 1842998 - RNA, 19 nt, Homo sapiens
  misc_RNA (1)...(19): siRNA sense strand
gaauguggcaaagcuuuca

SEQ ID NO: 1842999 - RNA, 19 nt, Homo sapiens
  misc_RNA (1)...(19): siRNA sense strand
guucauuucagauacauca

SEQ ID NO: 1843000 - RNA, 19 nt, Homo sapiens
  misc_RNA (1)...(19): siRNA sense strand
cauggaauguggcaaagcu

SEQ ID NO: 1843001 - RNA, 19 nt, Homo sapiens
  misc_RNA (1)...(19): siRNA sense strand
auaggcacaucauaucuca

SEQ ID NO: 1843002 - RNA, 19 nt, Homo sapiens
  misc_RNA (1)...(19): siRNA sense strand
ggcaaagcuuucaguuguc

SEQ ID NO: 1843003 - RNA, 19 nt, Homo sapiens
  misc_RNA (1)...(19): siRNA sense strand
ugucagaaauguggcaaag

SEQ ID NO: 1843004 - RNA, 19 nt, Homo sapiens
  misc_RNA (1)...(19): siRNA sense strand
cacaucauaucucauucug

SEQ ID NO: 1843005 - RNA, 19 nt, Homo sapiens
  misc_RNA (1)...(19): siRNA sense strand
aggcacaucauaucucauu

SEQ ID NO: 1843006 - RNA, 19 nt, Homo sapiens
  misc_RNA (1)...(19): siRNA sense strand
agaaacccuaugaauguaa

SEQ ID NO: 1843007 - RNA, 19 nt, Homo sapiens
  misc_RNA (1)...(19): siRNA sense strand
agaaacccuauguauguaa

SEQ ID NO: 1843008 - RNA, 19 nt, Homo sapiens
  misc_RNA (1)...(19): siRNA sense strand
ggcucaugcuggugaagaa

SEQ ID NO: 1843009 - RNA, 19 nt, Homo sapiens
  misc_RNA (1)...(19): siRNA sense strand
cccguucucuuaauagaca

SEQ ID NO: 1843010 - RNA, 19 nt, Homo sapiens
  misc_RNA (1)...(19): siRNA sense strand
cuaguacccuuuggaagca

SEQ ID NO: 1843011 - RNA, 19 nt, Homo sapiens
  misc_RNA (1)...(19): siRNA sense strand
caauugccuucauuaccau

SEQ ID NO: 1843012 - RNA, 19 nt, Homo sapiens
  misc_RNA (1)...(19): siRNA sense strand
uguaagcacugugggaaag

SEQ ID NO: 1843013 - RNA, 19 nt, Homo sapiens
  misc_RNA (1)...(19): siRNA sense strand
cuaugaauguauggaaugu

SEQ ID NO: 1843014 - RNA, 19 nt, Homo sapiens
  misc_RNA (1)...(19): siRNA sense strand
agaaaagcccuauaaaugu

SEQ ID NO: 1843015 - RNA, 19 nt, Homo sapiens
  misc_RNA (1)...(19): siRNA sense strand
gacauuaugguuguacaau

SEQ ID NO: 1843016 - RNA, 19 nt, Homo sapiens
  misc_RNA (1)...(19): siRNA sense strand
cuaugaauguaagcaaugu

SEQ ID NO: 1843017 - RNA, 19 nt, Homo sapiens
  misc_RNA (1)...(19): siRNA sense strand
guacaauaugugagaaagu

SEQ ID NO: 1843018 - RNA, 19 nt, Homo sapiens
  misc_RNA (1)...(19): siRNA sense strand
agaaaucacacuggagaga

SEQ ID NO: 1843019 - RNA, 19 nt, Homo sapiens
  misc_RNA (1)...(19): siRNA sense strand
aauauucccaguucauuuc

SEQ ID NO: 1843020 - RNA, 19 nt, Homo sapiens
  misc_RNA (1)...(19): siRNA sense strand
gguuguacaauaugugaga

SEQ ID NO: 1843021 - RNA, 19 nt, Homo sapiens
  misc_RNA (1)...(19): siRNA sense strand
gugcuaguacccuuuggaa

SEQ ID NO: 1843022 - RNA, 19 nt, Homo sapiens
  misc_RNA (1)...(19): siRNA sense strand
ccuaugaaugucagaaaug

SEQ ID NO: 1843023 - RNA, 19 nt, Homo sapiens
  misc_RNA (1)...(19): siRNA sense strand
ugugaggaaugcggaaaga

SEQ ID NO: 1843024 - RNA, 19 nt, Homo sapiens
  misc_RNA (1)...(19): siRNA sense strand
aaugcacacuggaaaugga

SEQ ID NO: 1843025 - RNA, 19 nt, Homo sapiens
  misc_RNA (1)...(19): siRNA sense strand
ucccaguucauuucagaua

SEQ ID NO: 1843026 - RNA, 19 nt, Homo sapiens
  misc_RNA (1)...(19): siRNA sense strand
cgacuaaacuuaaucugua

SEQ ID NO: 1843027 - RNA, 19 nt, Homo sapiens
  misc_RNA (1)...(19): siRNA sense strand
gaacgcgacuaaacuuaau

SEQ ID NO: 1843028 - RNA, 19 nt, Homo sapiens
  misc_RNA (1)...(19): siRNA sense strand
ggaacgcgacuaaacuuaa

SEQ ID NO: 1843029 - RNA, 19 nt, Homo sapiens
  misc_RNA (1)...(19): siRNA sense strand
caguugauguucaccauaa

SEQ ID NO: 1843030 - RNA, 19 nt, Homo sapiens
  misc_RNA (1)...(19): siRNA sense strand
uaaaacagcugagacuuaa

SEQ ID NO: 1843031 - RNA, 19 nt, Homo sapiens
  misc_RNA (1)...(19): siRNA sense strand
gauagaugguguuggugaa

SEQ ID NO: 1843032 - RNA, 19 nt, Homo sapiens
  misc_RNA (1)...(19): siRNA sense strand
acagggaacuacacaguga

SEQ ID NO: 1843033 - RNA, 19 nt, Homo sapiens
  misc_RNA (1)...(19): siRNA sense strand
ggaaggaacgcgacuaaac

SEQ ID NO: 1843034 - RNA, 19 nt, Homo sapiens
  misc_RNA (1)...(19): siRNA sense strand
gugacgggauugaaacaaa

SEQ ID NO: 1843035 - RNA, 19 nt, Homo sapiens
  misc_RNA (1)...(19): siRNA sense strand
gaaacaaagacaacaccuu

SEQ ID NO: 1843036 - RNA, 19 nt, Homo sapiens
  misc_RNA (1)...(19): siRNA sense strand
gaaggaacgcgacuaaacu

SEQ ID NO: 1843037 - RNA, 19 nt, Homo sapiens
  misc_RNA (1)...(19): siRNA sense strand
caccuugaguucagccaua

SEQ ID NO: 1843038 - RNA, 19 nt, Homo sapiens
  misc_RNA (1)...(19): siRNA sense strand
gacaacaccuugaguucag

SEQ ID NO: 1843039 - RNA, 19 nt, Homo sapiens
  misc_RNA (1)...(19): siRNA sense strand
gaaaaggucuggguaaugc

SEQ ID NO: 1843040 - RNA, 19 nt, Homo sapiens
  misc_RNA (1)...(19): siRNA sense strand
ucacagagacagggaacua

SEQ ID NO: 1843041 - RNA, 19 nt, Homo sapiens
  misc_RNA (1)...(19): siRNA sense strand
guucaggcuuccuacaaga

SEQ ID NO: 1843042 - RNA, 19 nt, Homo sapiens
  misc_RNA (1)...(19): siRNA sense strand
aaagacaacaccuugaguu

SEQ ID NO: 1843043 - RNA, 19 nt, Homo sapiens
  misc_RNA (1)...(19): siRNA sense strand
gaagccagaagucagguau

SEQ ID NO: 1843044 - RNA, 19 nt, Homo sapiens
  misc_RNA (1)...(19): siRNA sense strand
caggaaggaacgcgacuaa

SEQ ID NO: 1843045 - RNA, 19 nt, Homo sapiens
  misc_RNA (1)...(19): siRNA sense strand
gcgacuaaacuuaaucugu

SEQ ID NO: 1843046 - RNA, 19 nt, Homo sapiens
  misc_RNA (1)...(19): siRNA sense strand
ugggauagaugguguuggu

SEQ ID NO: 1843047 - RNA, 19 nt, Homo sapiens
  misc_RNA (1)...(19): siRNA sense strand
ugacgggauugaaacaaag

SEQ ID NO: 1843048 - RNA, 19 nt, Homo sapiens
  misc_RNA (1)...(19): siRNA sense strand
ucugguggaugcauuaaca

SEQ ID NO: 1843049 - RNA, 19 nt, Homo sapiens
  misc_RNA (1)...(19): siRNA sense strand
gacuaaacuuaaucuguac

SEQ ID NO: 1843050 - RNA, 19 nt, Homo sapiens
  misc_RNA (1)...(19): siRNA sense strand
uuaaaacagcugagacuua

SEQ ID NO: 1843051 - RNA, 19 nt, Homo sapiens
  misc_RNA (1)...(19): siRNA sense strand
cauaaugaaggcacucuca

SEQ ID NO: 1843052 - RNA, 19 nt, Homo sapiens
  misc_RNA (1)...(19): siRNA sense strand
uccauucuauucacagaga

SEQ ID NO: 1843053 - RNA, 19 nt, Homo sapiens
  misc_RNA (1)...(19): siRNA sense strand
caagaaaaggucuggguaa

SEQ ID NO: 1843054 - RNA, 19 nt, Homo sapiens
  misc_RNA (1)...(19): siRNA sense strand
cuuaaucuguacuguaugg

SEQ ID NO: 1843055 - RNA, 19 nt, Homo sapiens
  misc_RNA (1)...(19): siRNA sense strand
aaugaaggcacucucaguu

SEQ ID NO: 1843056 - RNA, 19 nt, Homo sapiens
  misc_RNA (1)...(19): siRNA sense strand
caaagacaacaccuugagu

SEQ ID NO: 1843057 - RNA, 19 nt, Homo sapiens
  misc_RNA (1)...(19): siRNA sense strand
caccauaagccaagucaca

SEQ ID NO: 1843058 - RNA, 19 nt, Homo sapiens
  misc_RNA (1)...(19): siRNA sense strand
cacagugacgggauugaaa

SEQ ID NO: 1843059 - RNA, 19 nt, Homo sapiens
  misc_RNA (1)...(19): siRNA sense strand
gggauugaaacaaagacaa

SEQ ID NO: 1843060 - RNA, 19 nt, Homo sapiens
  misc_RNA (1)...(19): siRNA sense strand
agacaacaccuugaguuca

SEQ ID NO: 1843061 - RNA, 19 nt, Homo sapiens
  misc_RNA (1)...(19): siRNA sense strand
aaacagcugagacuuaaaa

SEQ ID NO: 1843062 - RNA, 19 nt, Homo sapiens
  misc_RNA (1)...(19): siRNA sense strand
agaagaggcugagggguuu

SEQ ID NO: 1843063 - RNA, 19 nt, Homo sapiens
  misc_RNA (1)...(19): siRNA sense strand
ggauugaaacaaagacaac

SEQ ID NO: 1843064 - RNA, 19 nt, Homo sapiens
  misc_RNA (1)...(19): siRNA sense strand
ucaguugauguucaccaua

SEQ ID NO: 1843065 - RNA, 19 nt, Homo sapiens
  misc_RNA (1)...(19): siRNA sense strand
aggaacgcgacuaaacuua

SEQ ID NO: 1843066 - RNA, 19 nt, Homo sapiens
  misc_RNA (1)...(19): siRNA sense strand
uaaugaaggcacucucagu

SEQ ID NO: 1843067 - RNA, 19 nt, Homo sapiens
  misc_RNA (1)...(19): siRNA sense strand
agacagggaacuacacagu

SEQ ID NO: 1843068 - RNA, 19 nt, Homo sapiens
  misc_RNA (1)...(19): siRNA sense strand
ucaggcuuccuacaagaaa

SEQ ID NO: 1843069 - RNA, 19 nt, Homo sapiens
  misc_RNA (1)...(19): siRNA sense strand
uuguggcccuucaagcuuu

SEQ ID NO: 1843070 - RNA, 19 nt, Homo sapiens
  misc_RNA (1)...(19): siRNA sense strand
gguugaagcuuguagauua

SEQ ID NO: 1843071 - RNA, 19 nt, Homo sapiens
  misc_RNA (1)...(19): siRNA sense strand
ggacugugcuucagaacua

SEQ ID NO: 1843072 - RNA, 19 nt, Homo sapiens
  misc_RNA (1)...(19): siRNA sense strand
guacauauuuggcaucgua

SEQ ID NO: 1843073 - RNA, 19 nt, Homo sapiens
  misc_RNA (1)...(19): siRNA sense strand
ccaaggaacuagcuucuaa

SEQ ID NO: 1843074 - RNA, 19 nt, Homo sapiens
  misc_RNA (1)...(19): siRNA sense strand
ggaaggagacagugcauuu

SEQ ID NO: 1843075 - RNA, 19 nt, Homo sapiens
  misc_RNA (1)...(19): siRNA sense strand
gcaggugucuggugcuaaa

SEQ ID NO: 1843076 - RNA, 19 nt, Homo sapiens
  misc_RNA (1)...(19): siRNA sense strand
caacuaaaccuucucuuau

SEQ ID NO: 1843077 - RNA, 19 nt, Homo sapiens
  misc_RNA (1)...(19): siRNA sense strand
gaaagaaaccaagaaacaa

SEQ ID NO: 1843078 - RNA, 19 nt, Homo sapiens
  misc_RNA (1)...(19): siRNA sense strand
gaagagaguaucaagaaau

SEQ ID NO: 1843079 - RNA, 19 nt, Homo sapiens
  misc_RNA (1)...(19): siRNA sense strand
gaaaccaucugcagguaca

SEQ ID NO: 1843080 - RNA, 19 nt, Homo sapiens
  misc_RNA (1)...(19): siRNA sense strand
ccaggagucugccuuguug

SEQ ID NO: 1843081 - RNA, 19 nt, Homo sapiens
  misc_RNA (1)...(19): siRNA sense strand
acagauacuuggaaagaaa

SEQ ID NO: 1843082 - RNA, 19 nt, Homo sapiens
  misc_RNA (1)...(19): siRNA sense strand
caaauacuauggacauugg

SEQ ID NO: 1843083 - RNA, 19 nt, Homo sapiens
  misc_RNA (1)...(19): siRNA sense strand
cagaagagaguaucaagaa

SEQ ID NO: 1843084 - RNA, 19 nt, Homo sapiens
  misc_RNA (1)...(19): siRNA sense strand
gacccgcucuaauauguaa

SEQ ID NO: 1843085 - RNA, 19 nt, Homo sapiens
  misc_RNA (1)...(19): siRNA sense strand
ugacaaccauccauacugu

SEQ ID NO: 1843086 - RNA, 19 nt, Homo sapiens
  misc_RNA (1)...(19): siRNA sense strand
acaacuaaaccuucucuua

SEQ ID NO: 1843087 - RNA, 19 nt, Homo sapiens
  misc_RNA (1)...(19): siRNA sense strand
gaacaaugggaguugguuu

SEQ ID NO: 1843088 - RNA, 19 nt, Homo sapiens
  misc_RNA (1)...(19): siRNA sense strand
caagauaucagccagaugu

SEQ ID NO: 1843089 - RNA, 19 nt, Homo sapiens
  misc_RNA (1)...(19): siRNA sense strand
aaacauacaugcugucacu

SEQ ID NO: 1843090 - RNA, 19 nt, Homo sapiens
  misc_RNA (1)...(19): siRNA sense strand
gaucaucuguguggaagga

SEQ ID NO: 1843091 - RNA, 19 nt, Homo sapiens
  misc_RNA (1)...(19): siRNA sense strand
gcaaugaagcugcauccaa

SEQ ID NO: 1843092 - RNA, 19 nt, Homo sapiens
  misc_RNA (1)...(19): siRNA sense strand
ugaaagaaaccaagaaaca

SEQ ID NO: 1843093 - RNA, 19 nt, Homo sapiens
  misc_RNA (1)...(19): siRNA sense strand
guacaacuugccaaucaua

SEQ ID NO: 1843094 - RNA, 19 nt, Homo sapiens
  misc_RNA (1)...(19): siRNA sense strand
ggaguugguuugggauuug

SEQ ID NO: 1843095 - RNA, 19 nt, Homo sapiens
  misc_RNA (1)...(19): siRNA sense strand
uagagacuguuucguggua

SEQ ID NO: 1843096 - RNA, 19 nt, Homo sapiens
  misc_RNA (1)...(19): siRNA sense strand
uggcugacccgcucuaaua

SEQ ID NO: 1843097 - RNA, 19 nt, Homo sapiens
  misc_RNA (1)...(19): siRNA sense strand
gaacaacuaccuagagacu

SEQ ID NO: 1843098 - RNA, 19 nt, Homo sapiens
  misc_RNA (1)...(19): siRNA sense strand
gagcagagccuagcagaca

SEQ ID NO: 1843099 - RNA, 19 nt, Homo sapiens
  misc_RNA (1)...(19): siRNA sense strand
gcaguggucccuccaaugu

SEQ ID NO: 1843100 - RNA, 19 nt, Homo sapiens
  misc_RNA (1)...(19): siRNA sense strand
gcaaauacuauggacauug

SEQ ID NO: 1843101 - RNA, 19 nt, Homo sapiens
  misc_RNA (1)...(19): siRNA sense strand
gcuguuacuuugcuaggaa

SEQ ID NO: 1843102 - RNA, 19 nt, Homo sapiens
  misc_RNA (1)...(19): siRNA sense strand
gcgauuggauaucugacaa

SEQ ID NO: 1843103 - RNA, 19 nt, Homo sapiens
  misc_RNA (1)...(19): siRNA sense strand
gggaguugguuugggauuu

SEQ ID NO: 1843104 - RNA, 19 nt, Homo sapiens
  misc_RNA (1)...(19): siRNA sense strand
gagcaaauacuauggacau

SEQ ID NO: 1843105 - RNA, 19 nt, Homo sapiens
  misc_RNA (1)...(19): siRNA sense strand
aagaacaacuaccuagaga

SEQ ID NO: 1843106 - RNA, 19 nt, Homo sapiens
  misc_RNA (1)...(19): siRNA sense strand
gauaucagccagaugugaa

SEQ ID NO: 1843107 - RNA, 19 nt, Homo sapiens
  misc_RNA (1)...(19): siRNA sense strand
agaagagaguaucaagaaa

SEQ ID NO: 1843108 - RNA, 19 nt, Homo sapiens
  misc_RNA (1)...(19): siRNA sense strand
ggaguuuccucagguugaa

SEQ ID NO: 1843109 - RNA, 19 nt, Homo sapiens
  misc_RNA (1)...(19): siRNA sense strand
ugauacagauacuuggaaa

SEQ ID NO: 1843110 - RNA, 19 nt, Homo sapiens
  misc_RNA (1)...(19): siRNA sense strand
guaagugaaggagcaaaua

SEQ ID NO: 1843111 - RNA, 19 nt, Homo sapiens
  misc_RNA (1)...(19): siRNA sense strand
gcagugagaagcaguaucu

SEQ ID NO: 1843112 - RNA, 19 nt, Homo sapiens
  misc_RNA (1)...(19): siRNA sense strand
gcuuguagauuauauacca

SEQ ID NO: 1843113 - RNA, 19 nt, Homo sapiens
  misc_RNA (1)...(19): siRNA sense strand
gcagaagagaguaucaaga

SEQ ID NO: 1843114 - RNA, 19 nt, Homo sapiens
  misc_RNA (1)...(19): siRNA sense strand
uagaaaccaucugcaggua

SEQ ID NO: 1843115 - RNA, 19 nt, Homo sapiens
  misc_RNA (1)...(19): siRNA sense strand
gcagaagaauuggggaaua

SEQ ID NO: 1843116 - RNA, 19 nt, Homo sapiens
  misc_RNA (1)...(19): siRNA sense strand
gauccagggcuuugcaauu

SEQ ID NO: 1843117 - RNA, 19 nt, Homo sapiens
  misc_RNA (1)...(19): siRNA sense strand
gaagcuauuccuuuuguua

SEQ ID NO: 1843118 - RNA, 19 nt, Homo sapiens
  misc_RNA (1)...(19): siRNA sense strand
gaaggagacagugcauuug

SEQ ID NO: 1843119 - RNA, 19 nt, Homo sapiens
  misc_RNA (1)...(19): siRNA sense strand
gguuugggauuugcuauug

SEQ ID NO: 1843120 - RNA, 19 nt, Homo sapiens
  misc_RNA (1)...(19): siRNA sense strand
guuauuuggugccagacua

SEQ ID NO: 1843121 - RNA, 19 nt, Homo sapiens
  misc_RNA (1)...(19): siRNA sense strand
gagaagcaguaucuauggu

SEQ ID NO: 1843122 - RNA, 19 nt, Homo sapiens
  misc_RNA (1)...(19): siRNA sense strand
cagcugccgugguggcuaa

SEQ ID NO: 1843123 - RNA, 19 nt, Homo sapiens
  misc_RNA (1)...(19): siRNA sense strand
guugaagcuuguagauuau

SEQ ID NO: 1843124 - RNA, 19 nt, Homo sapiens
  misc_RNA (1)...(19): siRNA sense strand
acaacuaccuagagacugu

SEQ ID NO: 1843125 - RNA, 19 nt, Homo sapiens
  misc_RNA (1)...(19): siRNA sense strand
ugaaguuuauccagguuga

SEQ ID NO: 1843126 - RNA, 19 nt, Homo sapiens
  misc_RNA (1)...(19): siRNA sense strand
ccaggugcuugcuauguug

SEQ ID NO: 1843127 - RNA, 19 nt, Homo sapiens
  misc_RNA (1)...(19): siRNA sense strand
gcugccaaauucacauuau

SEQ ID NO: 1843128 - RNA, 19 nt, Homo sapiens
  misc_RNA (1)...(19): siRNA sense strand
caauggaauuuaccaaggu

SEQ ID NO: 1843129 - RNA, 19 nt, Homo sapiens
  misc_RNA (1)...(19): siRNA sense strand
gguagugaauaacaaugga

SEQ ID NO: 1843130 - RNA, 19 nt, Homo sapiens
  misc_RNA (1)...(19): siRNA sense strand
cggcuucuguuauuaggaa

SEQ ID NO: 1843131 - RNA, 19 nt, Homo sapiens
  misc_RNA (1)...(19): siRNA sense strand
ucagccagaugugaaguuu

SEQ ID NO: 1843132 - RNA, 19 nt, Homo sapiens
  misc_RNA (1)...(19): siRNA sense strand
gcaugucaccuccuauuag

SEQ ID NO: 1843133 - RNA, 19 nt, Homo sapiens
  misc_RNA (1)...(19): siRNA sense strand
ggagucugccuuguuguuu

SEQ ID NO: 1843134 - RNA, 19 nt, Homo sapiens
  misc_RNA (1)...(19): siRNA sense strand
agacagugcauuuggguuu

SEQ ID NO: 1843135 - RNA, 19 nt, Homo sapiens
  misc_RNA (1)...(19): siRNA sense strand
gacggacugugcuucagaa

SEQ ID NO: 1843136 - RNA, 19 nt, Homo sapiens
  misc_RNA (1)...(19): siRNA sense strand
agccagaugugaaguuuau

SEQ ID NO: 1843137 - RNA, 19 nt, Homo sapiens
  misc_RNA (1)...(19): siRNA sense strand
aagaaacaaugggagcuuu

SEQ ID NO: 1843138 - RNA, 19 nt, Homo sapiens
  misc_RNA (1)...(19): siRNA sense strand
cgugguggcuaaagauaga

SEQ ID NO: 1843139 - RNA, 19 nt, Homo sapiens
  misc_RNA (1)...(19): siRNA sense strand
ggacggacugugcuucaga

SEQ ID NO: 1843140 - RNA, 19 nt, Homo sapiens
  misc_RNA (1)...(19): siRNA sense strand
ugaaggagcaaauacuaug

SEQ ID NO: 1843141 - RNA, 19 nt, Homo sapiens
  misc_RNA (1)...(19): siRNA sense strand
auccagggcuuugcaauuu

SEQ ID NO: 1843142 - RNA, 19 nt, Homo sapiens
  misc_RNA (1)...(19): siRNA sense strand
gagaguaucaagaaauugg

SEQ ID NO: 1843143 - RNA, 19 nt, Homo sapiens
  misc_RNA (1)...(19): siRNA sense strand
gugagaagcaguaucuaug

SEQ ID NO: 1843144 - RNA, 19 nt, Homo sapiens
  misc_RNA (1)...(19): siRNA sense strand
gaacugcuggcccuugcuu

SEQ ID NO: 1843145 - RNA, 19 nt, Homo sapiens
  misc_RNA (1)...(19): siRNA sense strand
agacacaacuaaaccuucu

SEQ ID NO: 1843146 - RNA, 19 nt, Homo sapiens
  misc_RNA (1)...(19): siRNA sense strand
gcagacacaacuaaaccuu

SEQ ID NO: 1843147 - RNA, 19 nt, Homo sapiens
  misc_RNA (1)...(19): siRNA sense strand
gcaauauaaacugccauuu

SEQ ID NO: 1843148 - RNA, 19 nt, Homo sapiens
  misc_RNA (1)...(19): siRNA sense strand
ccaagcagcauagaagcua

SEQ ID NO: 1843149 - RNA, 19 nt, Homo sapiens
  misc_RNA (1)...(19): siRNA sense strand
acuaaaccuucucuuauca

SEQ ID NO: 1843150 - RNA, 19 nt, Homo sapiens
  misc_RNA (1)...(19): siRNA sense strand
caagaacaacuaccuagag

SEQ ID NO: 1843151 - RNA, 19 nt, Homo sapiens
  misc_RNA (1)...(19): siRNA sense strand
aaucccugccuaugaauua

SEQ ID NO: 1843152 - RNA, 19 nt, Homo sapiens
  misc_RNA (1)...(19): siRNA sense strand
gagagcaagugguggaaaa

SEQ ID NO: 1843153 - RNA, 19 nt, Homo sapiens
  misc_RNA (1)...(19): siRNA sense strand
ggaaacauacaugcuguca

SEQ ID NO: 1843154 - RNA, 19 nt, Homo sapiens
  misc_RNA (1)...(19): siRNA sense strand
uauuaggaaugccaaacaa

SEQ ID NO: 1843155 - RNA, 19 nt, Homo sapiens
  misc_RNA (1)...(19): siRNA sense strand
ugacauaccagcagauuuu

SEQ ID NO: 1843156 - RNA, 19 nt, Homo sapiens
  misc_RNA (1)...(19): siRNA sense strand
ggugguuccucugaaagaa

SEQ ID NO: 1843157 - RNA, 19 nt, Homo sapiens
  misc_RNA (1)...(19): siRNA sense strand
aaacgcaagauguggagua

SEQ ID NO: 1843158 - RNA, 19 nt, Homo sapiens
  misc_RNA (1)...(19): siRNA sense strand
cagaagaauuggggaauaa

SEQ ID NO: 1843159 - RNA, 19 nt, Homo sapiens
  misc_RNA (1)...(19): siRNA sense strand
uauggcaaaugcaaacaug

SEQ ID NO: 1843160 - RNA, 19 nt, Homo sapiens
  misc_RNA (1)...(19): siRNA sense strand
gagucugccuuguuguuuc

SEQ ID NO: 1843161 - RNA, 19 nt, Homo sapiens
  misc_RNA (1)...(19): siRNA sense strand
ccuauuagcauggcagaaa

SEQ ID NO: 1843162 - RNA, 19 nt, Homo sapiens
  misc_RNA (1)...(19): siRNA sense strand
gcuugaugcugguacuuuc

SEQ ID NO: 1843163 - RNA, 19 nt, Homo sapiens
  misc_RNA (1)...(19): siRNA sense strand
cccugccuaugaauuauua

SEQ ID NO: 1843164 - RNA, 19 nt, Homo sapiens
  misc_RNA (1)...(19): siRNA sense strand
caaaugcaaacaugaacug

SEQ ID NO: 1843165 - RNA, 19 nt, Homo sapiens
  misc_RNA (1)...(19): siRNA sense strand
cacggaaggcccaggauuu

SEQ ID NO: 1843166 - RNA, 19 nt, Homo sapiens
  misc_RNA (1)...(19): siRNA sense strand
aacuaaaccuucucuuauc

SEQ ID NO: 1843167 - RNA, 19 nt, Homo sapiens
  misc_RNA (1)...(19): siRNA sense strand
gcagguacaacuugccaau

SEQ ID NO: 1843168 - RNA, 19 nt, Homo sapiens
  misc_RNA (1)...(19): siRNA sense strand
caaggaacuagcuucuaaa

SEQ ID NO: 1843169 - RNA, 19 nt, Homo sapiens
  misc_RNA (1)...(19): siRNA sense strand
gauuggugguuccucugaa

SEQ ID NO: 1843170 - RNA, 19 nt, Homo sapiens
  misc_RNA (1)...(19): siRNA sense strand
gaaaggagguuauaaugaa

SEQ ID NO: 1843171 - RNA, 19 nt, Homo sapiens
  misc_RNA (1)...(19): siRNA sense strand
gaagauacauaagaucgua

SEQ ID NO: 1843172 - RNA, 19 nt, Homo sapiens
  misc_RNA (1)...(19): siRNA sense strand
uaaagaauguggcaaauca

SEQ ID NO: 1843173 - RNA, 19 nt, Homo sapiens
  misc_RNA (1)...(19): siRNA sense strand
gagaagauaugagaaaugu

SEQ ID NO: 1843174 - RNA, 19 nt, Homo sapiens
  misc_RNA (1)...(19): siRNA sense strand
ccacaacccuuacuaaaca

SEQ ID NO: 1843175 - RNA, 19 nt, Homo sapiens
  misc_RNA (1)...(19): siRNA sense strand
cuacaaaugugaagaaugu

SEQ ID NO: 1843176 - RNA, 19 nt, Homo sapiens
  misc_RNA (1)...(19): siRNA sense strand
cuacaaaugugaagaaugu

SEQ ID NO: 1843177 - RNA, 19 nt, Homo sapiens
  misc_RNA (1)...(19): siRNA sense strand
cuacaaaugugaugaaugu

SEQ ID NO: 1843178 - RNA, 19 nt, Homo sapiens
  misc_RNA (1)...(19): siRNA sense strand
gaaaagagcccuacaaugu

SEQ ID NO: 1843179 - RNA, 19 nt, Homo sapiens
  misc_RNA (1)...(19): siRNA sense strand
gaauguggcagcaucuuua

SEQ ID NO: 1843180 - RNA, 19 nt, Homo sapiens
  misc_RNA (1)...(19): siRNA sense strand
uaaagcaagugucaaaguu

SEQ ID NO: 1843181 - RNA, 19 nt, Homo sapiens
  misc_RNA (1)...(19): siRNA sense strand
gagagaaacccuacaaaug

SEQ ID NO: 1843182 - RNA, 19 nt, Homo sapiens
  misc_RNA (1)...(19): siRNA sense strand
gagagaaacccuacaaaug

SEQ ID NO: 1843183 - RNA, 19 nt, Homo sapiens
  misc_RNA (1)...(19): siRNA sense strand
ucacaacccuuacuaaaca

SEQ ID NO: 1843184 - RNA, 19 nt, Homo sapiens
  misc_RNA (1)...(19): siRNA sense strand
gcaaaauacuucaguguaa

SEQ ID NO: 1843185 - RNA, 19 nt, Homo sapiens
  misc_RNA (1)...(19): siRNA sense strand
gagagaaacacuuuaaaga

SEQ ID NO: 1843186 - RNA, 19 nt, Homo sapiens
  misc_RNA (1)...(19): siRNA sense strand
gagagaaacccuacacuug

SEQ ID NO: 1843187 - RNA, 19 nt, Homo sapiens
  misc_RNA (1)...(19): siRNA sense strand
guauagagaugugauguug

SEQ ID NO: 1843188 - RNA, 19 nt, Homo sapiens
  misc_RNA (1)...(19): siRNA sense strand
gagaaacccuacaaaugug

SEQ ID NO: 1843189 - RNA, 19 nt, Homo sapiens
  misc_RNA (1)...(19): siRNA sense strand
gagaaacccuacaaaugug

SEQ ID NO: 1843190 - RNA, 19 nt, Homo sapiens
  misc_RNA (1)...(19): siRNA sense strand
caacauaagguaauucaug

SEQ ID NO: 1843191 - RNA, 19 nt, Homo sapiens
  misc_RNA (1)...(19): siRNA sense strand
gcagauaaacccuacaaau

SEQ ID NO: 1843192 - RNA, 19 nt, Homo sapiens
  misc_RNA (1)...(19): siRNA sense strand
aaagagcccuacaauguga

SEQ ID NO: 1843193 - RNA, 19 nt, Homo sapiens
  misc_RNA (1)...(19): siRNA sense strand
gagaaacccuacacaugug

SEQ ID NO: 1843194 - RNA, 19 nt, Homo sapiens
  misc_RNA (1)...(19): siRNA sense strand
gagagaaacccuacacaug

SEQ ID NO: 1843195 - RNA, 19 nt, Homo sapiens
  misc_RNA (1)...(19): siRNA sense strand
gagagaaacccaucacaug

SEQ ID NO: 1843196 - RNA, 19 nt, Homo sapiens
  misc_RNA (1)...(19): siRNA sense strand
gagaaacccuacacuugug

SEQ ID NO: 1843197 - RNA, 19 nt, Homo sapiens
  misc_RNA (1)...(19): siRNA sense strand
gcagaaaggagguuauaau

SEQ ID NO: 1843198 - RNA, 19 nt, Homo sapiens
  misc_RNA (1)...(19): siRNA sense strand
gagaugugauguuggagaa

SEQ ID NO: 1843199 - RNA, 19 nt, Homo sapiens
  misc_RNA (1)...(19): siRNA sense strand
ccacaaacuuauacugaga

SEQ ID NO: 1843200 - RNA, 19 nt, Homo sapiens
  misc_RNA (1)...(19): siRNA sense strand
ggagagaaacccuacaaau

SEQ ID NO: 1843201 - RNA, 19 nt, Homo sapiens
  misc_RNA (1)...(19): siRNA sense strand
ggagagaaacccuacaaau

SEQ ID NO: 1843202 - RNA, 19 nt, Homo sapiens
  misc_RNA (1)...(19): siRNA sense strand
aaugaaugcuugucaacua

SEQ ID NO: 1843203 - RNA, 19 nt, Homo sapiens
  misc_RNA (1)...(19): siRNA sense strand
cagauaaacccuacaaaug

SEQ ID NO: 1843204 - RNA, 19 nt, Homo sapiens
  misc_RNA (1)...(19): siRNA sense strand
gcaagugucaaaguuguua

SEQ ID NO: 1843205 - RNA, 19 nt, Homo sapiens
  misc_RNA (1)...(19): siRNA sense strand
aaacguaagacaagacaua

SEQ ID NO: 1843206 - RNA, 19 nt, Homo sapiens
  misc_RNA (1)...(19): siRNA sense strand
ccagcuauguguucucauu

SEQ ID NO: 1843207 - RNA, 19 nt, Homo sapiens
  misc_RNA (1)...(19): siRNA sense strand
gaagauucauuccacaaac

SEQ ID NO: 1843208 - RNA, 19 nt, Homo sapiens
  misc_RNA (1)...(19): siRNA sense strand
uagauaaacccuacaaaug

SEQ ID NO: 1843209 - RNA, 19 nt, Homo sapiens
  misc_RNA (1)...(19): siRNA sense strand
agaaaaggcuguaaaaguu

SEQ ID NO: 1843210 - RNA, 19 nt, Homo sapiens
  misc_RNA (1)...(19): siRNA sense strand
gggcauagaagauucauuc

SEQ ID NO: 1843211 - RNA, 19 nt, Homo sapiens
  misc_RNA (1)...(19): siRNA sense strand
gguccugaaugaacauaaa

SEQ ID NO: 1843212 - RNA, 19 nt, Homo sapiens
  misc_RNA (1)...(19): siRNA sense strand
ggagagaaacccuacacuu

SEQ ID NO: 1843213 - RNA, 19 nt, Homo sapiens
  misc_RNA (1)...(19): siRNA sense strand
aaacaaacguaagacaaga

SEQ ID NO: 1843214 - RNA, 19 nt, Homo sapiens
  misc_RNA (1)...(19): siRNA sense strand
ggagagaaacacuuuaaag

SEQ ID NO: 1843215 - RNA, 19 nt, Homo sapiens
  misc_RNA (1)...(19): siRNA sense strand
ucucacaccugaauaaaca

SEQ ID NO: 1843216 - RNA, 19 nt, Homo sapiens
  misc_RNA (1)...(19): siRNA sense strand
agagaaacccuacaaaugu

SEQ ID NO: 1843217 - RNA, 19 nt, Homo sapiens
  misc_RNA (1)...(19): siRNA sense strand
agagaaacccuacaaaugu

SEQ ID NO: 1843218 - RNA, 19 nt, Homo sapiens
  misc_RNA (1)...(19): siRNA sense strand
gaauuuguauagagaugug

SEQ ID NO: 1843219 - RNA, 19 nt, Homo sapiens
  misc_RNA (1)...(19): siRNA sense strand
gaucggagucaacauaaga

SEQ ID NO: 1843220 - RNA, 19 nt, Homo sapiens
  misc_RNA (1)...(19): siRNA sense strand
cagcagaauuuguauagag

SEQ ID NO: 1843221 - RNA, 19 nt, Homo sapiens
  misc_RNA (1)...(19): siRNA sense strand
ggauguggccauagaauuc

SEQ ID NO: 1843222 - RNA, 19 nt, Homo sapiens
  misc_RNA (1)...(19): siRNA sense strand
gcccuacaaugugaagaua

SEQ ID NO: 1843223 - RNA, 19 nt, Homo sapiens
  misc_RNA (1)...(19): siRNA sense strand
acaccuaacucaacauaag

SEQ ID NO: 1843224 - RNA, 19 nt, Homo sapiens
  misc_RNA (1)...(19): siRNA sense strand
cagaaaggagguuauaaug

SEQ ID NO: 1843225 - RNA, 19 nt, Homo sapiens
  misc_RNA (1)...(19): siRNA sense strand
guucacaacccuuacuaaa

SEQ ID NO: 1843226 - RNA, 19 nt, Homo sapiens
  misc_RNA (1)...(19): siRNA sense strand
ucagggauguggccauaga

SEQ ID NO: 1843227 - RNA, 19 nt, Homo sapiens
  misc_RNA (1)...(19): siRNA sense strand
agaaaggagguuauaauga

SEQ ID NO: 1843228 - RNA, 19 nt, Homo sapiens
  misc_RNA (1)...(19): siRNA sense strand
agauaaacccuacaaaugu

SEQ ID NO: 1843229 - RNA, 19 nt, Homo sapiens
  misc_RNA (1)...(19): siRNA sense strand
agauaaacccuacaaaugu

SEQ ID NO: 1843230 - RNA, 19 nt, Homo sapiens
  misc_RNA (1)...(19): siRNA sense strand
cauaagagaauucauacug

SEQ ID NO: 1843231 - RNA, 19 nt, Homo sapiens
  misc_RNA (1)...(19): siRNA sense strand
cauaagagaauucauacug

SEQ ID NO: 1843232 - RNA, 19 nt, Homo sapiens
  misc_RNA (1)...(19): siRNA sense strand
gugucaaaguuguuaguaa

SEQ ID NO: 1843233 - RNA, 19 nt, Homo sapiens
  misc_RNA (1)...(19): siRNA sense strand
gagagaaaccuuuuacuug

SEQ ID NO: 1843234 - RNA, 19 nt, Homo sapiens
  misc_RNA (1)...(19): siRNA sense strand
gcuauguguucucauuuca

SEQ ID NO: 1843235 - RNA, 19 nt, Homo sapiens
  misc_RNA (1)...(19): siRNA sense strand
agagaaacccuacacaugu

SEQ ID NO: 1843236 - RNA, 19 nt, Homo sapiens
  misc_RNA (1)...(19): siRNA sense strand
ggagagaaacccuacacau

SEQ ID NO: 1843237 - RNA, 19 nt, Homo sapiens
  misc_RNA (1)...(19): siRNA sense strand
gagaaacccaucacaugug

SEQ ID NO: 1843238 - RNA, 19 nt, Homo sapiens
  misc_RNA (1)...(19): siRNA sense strand
ggagagaaacccaucacau

SEQ ID NO: 1843239 - RNA, 19 nt, Homo sapiens
  misc_RNA (1)...(19): siRNA sense strand
uaccacauccucacacuuu

SEQ ID NO: 1843240 - RNA, 19 nt, Homo sapiens
  misc_RNA (1)...(19): siRNA sense strand
caaacaaacguaagacaag

SEQ ID NO: 1843241 - RNA, 19 nt, Homo sapiens
  misc_RNA (1)...(19): siRNA sense strand
acagaucggagucaacaua

SEQ ID NO: 1843242 - RNA, 19 nt, Homo sapiens
  misc_RNA (1)...(19): siRNA sense strand
gaaaaggcuguaaaaguuu

SEQ ID NO: 1843243 - RNA, 19 nt, Homo sapiens
  misc_RNA (1)...(19): siRNA sense strand
ugaagaauguggcaaagcu

SEQ ID NO: 1843244 - RNA, 19 nt, Homo sapiens
  misc_RNA (1)...(19): siRNA sense strand
guaaagcaagugucaaagu

SEQ ID NO: 1843245 - RNA, 19 nt, Homo sapiens
  misc_RNA (1)...(19): siRNA sense strand
ucacaccuaacucaacaua

SEQ ID NO: 1843246 - RNA, 19 nt, Homo sapiens
  misc_RNA (1)...(19): siRNA sense strand
auagagaugugauguugga

SEQ ID NO: 1843247 - RNA, 19 nt, Homo sapiens
  misc_RNA (1)...(19): siRNA sense strand
ucaaacaaacguaagacaa

SEQ ID NO: 1843248 - RNA, 19 nt, Homo sapiens
  misc_RNA (1)...(19): siRNA sense strand
cagaauuuguauagagaug

SEQ ID NO: 1843249 - RNA, 19 nt, Homo sapiens
  misc_RNA (1)...(19): siRNA sense strand
cuacacuugugaagaaugu

SEQ ID NO: 1843250 - RNA, 19 nt, Homo sapiens
  misc_RNA (1)...(19): siRNA sense strand
uaccucauccucaaacuuu

SEQ ID NO: 1843251 - RNA, 19 nt, Homo sapiens
  misc_RNA (1)...(19): siRNA sense strand
agagaaacccuacacuugu

SEQ ID NO: 1843252 - RNA, 19 nt, Homo sapiens
  misc_RNA (1)...(19): siRNA sense strand
gguccacaacccuuacuaa

SEQ ID NO: 1843253 - RNA, 19 nt, Homo sapiens
  misc_RNA (1)...(19): siRNA sense strand
guguaaagcaagugucaaa

SEQ ID NO: 1843254 - RNA, 19 nt, Homo sapiens
  misc_RNA (1)...(19): siRNA sense strand
gggauguggccauagaauu

SEQ ID NO: 1843255 - RNA, 19 nt, Homo sapiens
  misc_RNA (1)...(19): siRNA sense strand
gaccagcagaauuuguaua

SEQ ID NO: 1843256 - RNA, 19 nt, Homo sapiens
  misc_RNA (1)...(19): siRNA sense strand
ggcagcaucuuuaccacau

SEQ ID NO: 1843257 - RNA, 19 nt, Homo sapiens
  misc_RNA (1)...(19): siRNA sense strand
ggagagaaaccuuuuacuu

SEQ ID NO: 1843258 - RNA, 19 nt, Homo sapiens
  misc_RNA (1)...(19): siRNA sense strand
ucaccugucuggagcaaag

SEQ ID NO: 1843259 - RNA, 19 nt, Homo sapiens
  misc_RNA (1)...(19): siRNA sense strand
guucucauuucacccaaga

SEQ ID NO: 1843260 - RNA, 19 nt, Homo sapiens
  misc_RNA (1)...(19): siRNA sense strand
aagcaagugucaaaguugu

SEQ ID NO: 1843261 - RNA, 19 nt, Homo sapiens
  misc_RNA (1)...(19): siRNA sense strand
gauucauuccacaaacuua

SEQ ID NO: 1843262 - RNA, 19 nt, Homo sapiens
  misc_RNA (1)...(19): siRNA sense strand
gaagaauguggcaaagcuu

SEQ ID NO: 1843263 - RNA, 19 nt, Homo sapiens
  misc_RNA (1)...(19): siRNA sense strand
caacccuuacuaaacauaa

SEQ ID NO: 1843264 - RNA, 19 nt, Homo sapiens
  misc_RNA (1)...(19): siRNA sense strand
caacccuuacuaaacauaa

SEQ ID NO: 1843265 - RNA, 19 nt, Homo sapiens
  misc_RNA (1)...(19): siRNA sense strand
acccuacacuugugaagaa

SEQ ID NO: 1843266 - RNA, 19 nt, Homo sapiens
  misc_RNA (1)...(19): siRNA sense strand
gaauucauacuggagagaa

SEQ ID NO: 1843267 - RNA, 19 nt, Homo sapiens
  misc_RNA (1)...(19): siRNA sense strand
ucacaccugaauaaacaua

SEQ ID NO: 1843268 - RNA, 19 nt, Homo sapiens
  misc_RNA (1)...(19): siRNA sense strand
cagaucggagucaacauaa

SEQ ID NO: 1843269 - RNA, 19 nt, Homo sapiens
  misc_RNA (1)...(19): siRNA sense strand
ccucaaaacugaaugaaca

SEQ ID NO: 1843270 - RNA, 19 nt, Homo sapiens
  misc_RNA (1)...(19): siRNA sense strand
gagagaagccuuauaaaug

SEQ ID NO: 1843271 - RNA, 19 nt, Homo sapiens
  misc_RNA (1)...(19): siRNA sense strand
gcacuaaccuuauaaugca

SEQ ID NO: 1843272 - RNA, 19 nt, Homo sapiens
  misc_RNA (1)...(19): siRNA sense strand
gggaaggccuuuaggaauu

SEQ ID NO: 1843273 - RNA, 19 nt, Homo sapiens
  misc_RNA (1)...(19): siRNA sense strand
gcauaaacaugaacugugu

SEQ ID NO: 1843274 - RNA, 19 nt, Homo sapiens
  misc_RNA (1)...(19): siRNA sense strand
ggagagaagccuuauaaau

SEQ ID NO: 1843275 - RNA, 19 nt, Homo sapiens
  misc_RNA (1)...(19): siRNA sense strand
gaucagucaucccuuaaga

SEQ ID NO: 1843276 - RNA, 19 nt, Homo sapiens
  misc_RNA (1)...(19): siRNA sense strand
cacaagcacuaaccuuaua

SEQ ID NO: 1843277 - RNA, 19 nt, Homo sapiens
  misc_RNA (1)...(19): siRNA sense strand
gagagaaacccuaugaaug

SEQ ID NO: 1843278 - RNA, 19 nt, Homo sapiens
  misc_RNA (1)...(19): siRNA sense strand
agagaagccuuauaaaugu

SEQ ID NO: 1843279 - RNA, 19 nt, Homo sapiens
  misc_RNA (1)...(19): siRNA sense strand
aagaacagcugaagacaga

SEQ ID NO: 1843280 - RNA, 19 nt, Homo sapiens
  misc_RNA (1)...(19): siRNA sense strand
gccagaaacuccaugaaug

SEQ ID NO: 1843281 - RNA, 19 nt, Homo sapiens
  misc_RNA (1)...(19): siRNA sense strand
gagaaacccuaugacugua

SEQ ID NO: 1843282 - RNA, 19 nt, Homo sapiens
  misc_RNA (1)...(19): siRNA sense strand
ggagagaaacccuaugaau

SEQ ID NO: 1843283 - RNA, 19 nt, Homo sapiens
  misc_RNA (1)...(19): siRNA sense strand
gcacaagcacuaaccuuau

SEQ ID NO: 1843284 - RNA, 19 nt, Homo sapiens
  misc_RNA (1)...(19): siRNA sense strand
ggagagaugcccuaugaau

SEQ ID NO: 1843285 - RNA, 19 nt, Homo sapiens
  misc_RNA (1)...(19): siRNA sense strand
cuggagagaugcccuauga

SEQ ID NO: 1843286 - RNA, 19 nt, Homo sapiens
  misc_RNA (1)...(19): siRNA sense strand
cacaggcucuuaccuuauu

SEQ ID NO: 1843287 - RNA, 19 nt, Homo sapiens
  misc_RNA (1)...(19): siRNA sense strand
ccagaaacuccaugaauga

SEQ ID NO: 1843288 - RNA, 19 nt, Homo sapiens
  misc_RNA (1)...(19): siRNA sense strand
agagaagccuuaugagugu

SEQ ID NO: 1843289 - RNA, 19 nt, Homo sapiens
  misc_RNA (1)...(19): siRNA sense strand
ggaaggccuuuaggaauuc

SEQ ID NO: 1843290 - RNA, 19 nt, Homo sapiens
  misc_RNA (1)...(19): siRNA sense strand
agagaagccuuaugagugu

SEQ ID NO: 1843291 - RNA, 19 nt, Homo sapiens
  misc_RNA (1)...(19): siRNA sense strand
gaaacucaacuuaaaccaa

SEQ ID NO: 1843292 - RNA, 19 nt, Homo sapiens
  misc_RNA (1)...(19): siRNA sense strand
cugggaaacucaacuuaaa

SEQ ID NO: 1843293 - RNA, 19 nt, Homo sapiens
  misc_RNA (1)...(19): siRNA sense strand
ggagagaagccuuaugagu

SEQ ID NO: 1843294 - RNA, 19 nt, Homo sapiens
  misc_RNA (1)...(19): siRNA sense strand
ggagagaagccuuaugagu

SEQ ID NO: 1843295 - RNA, 19 nt, Homo sapiens
  misc_RNA (1)...(19): siRNA sense strand
ccaauggcauaaacaugaa

SEQ ID NO: 1843296 - RNA, 19 nt, Homo sapiens
  misc_RNA (1)...(19): siRNA sense strand
uaucagcucugcagacaca

SEQ ID NO: 1843297 - RNA, 19 nt, Homo sapiens
  misc_RNA (1)...(19): siRNA sense strand
gagagaugcccuaugaaug

SEQ ID NO: 1843298 - RNA, 19 nt, Homo sapiens
  misc_RNA (1)...(19): siRNA sense strand
gaacagcugaagacagaug

SEQ ID NO: 1843299 - RNA, 19 nt, Homo sapiens
  misc_RNA (1)...(19): siRNA sense strand
gggaaggcuuucacuguuc

SEQ ID NO: 1843300 - RNA, 19 nt, Homo sapiens
  misc_RNA (1)...(19): siRNA sense strand
gguaucagcucugcagaca

SEQ ID NO: 1843301 - RNA, 19 nt, Homo sapiens
  misc_RNA (1)...(19): siRNA sense strand
agucaucccuuaagaaaca

SEQ ID NO: 1843302 - RNA, 19 nt, Homo sapiens
  misc_RNA (1)...(19): siRNA sense strand
caagguggaucaagaacag

SEQ ID NO: 1843303 - RNA, 19 nt, Homo sapiens
  misc_RNA (1)...(19): siRNA sense strand
aaacaugaacugugucaga

SEQ ID NO: 1843304 - RNA, 19 nt, Homo sapiens
  misc_RNA (1)...(19): siRNA sense strand
gaacucacacuggagagaa

SEQ ID NO: 1843305 - RNA, 19 nt, Homo sapiens
  misc_RNA (1)...(19): siRNA sense strand
gcacaggcucuuaccuuau

SEQ ID NO: 1843306 - RNA, 19 nt, Homo sapiens
  misc_RNA (1)...(19): siRNA sense strand
cuucaucccuucagaaaca

SEQ ID NO: 1843307 - RNA, 19 nt, Homo sapiens
  misc_RNA (1)...(19): siRNA sense strand
gaacucacacuggagagaa

SEQ ID NO: 1843308 - RNA, 19 nt, Homo sapiens
  misc_RNA (1)...(19): siRNA sense strand
gacacagucugaucuccaa

SEQ ID NO: 1843309 - RNA, 19 nt, Homo sapiens
  misc_RNA (1)...(19): siRNA sense strand
gagaaaaccuaugagugua

SEQ ID NO: 1843310 - RNA, 19 nt, Homo sapiens
  misc_RNA (1)...(19): siRNA sense strand
ucagucaucccuuaagaaa

SEQ ID NO: 1843311 - RNA, 19 nt, Homo sapiens
  misc_RNA (1)...(19): siRNA sense strand
gcugaagacagaugaaaga

SEQ ID NO: 1843312 - RNA, 19 nt, Homo sapiens
  misc_RNA (1)...(19): siRNA sense strand
agagaaacccuaugacugu

SEQ ID NO: 1843313 - RNA, 19 nt, Homo sapiens
  misc_RNA (1)...(19): siRNA sense strand
gaaacccuaugacuguaag

SEQ ID NO: 1843314 - RNA, 19 nt, Homo sapiens
  misc_RNA (1)...(19): siRNA sense strand
gaucaagaacagcugaaga

SEQ ID NO: 1843315 - RNA, 19 nt, Homo sapiens
  misc_RNA (1)...(19): siRNA sense strand
gagaaacccuaugaaugca

SEQ ID NO: 1843316 - RNA, 19 nt, Homo sapiens
  misc_RNA (1)...(19): siRNA sense strand
ugggaaggcuuucacuguu

SEQ ID NO: 1843317 - RNA, 19 nt, Homo sapiens
  misc_RNA (1)...(19): siRNA sense strand
ggagagaaacccuaugacu

SEQ ID NO: 1843318 - RNA, 19 nt, Homo sapiens
  misc_RNA (1)...(19): siRNA sense strand
agcacaggcucuuaccuua

SEQ ID NO: 1843319 - RNA, 19 nt, Homo sapiens
  misc_RNA (1)...(19): siRNA sense strand
gagaagccuuaugagugua

SEQ ID NO: 1843320 - RNA, 19 nt, Homo sapiens
  misc_RNA (1)...(19): siRNA sense strand
gaaaaccuaugaguguaaa

SEQ ID NO: 1843321 - RNA, 19 nt, Homo sapiens
  misc_RNA (1)...(19): siRNA sense strand
caauugcuaugcagaacau

SEQ ID NO: 1843322 - RNA, 19 nt, Homo sapiens
  misc_RNA (1)...(19): siRNA sense strand
cuggagagaagccuuauaa

SEQ ID NO: 1843323 - RNA, 19 nt, Homo sapiens
  misc_RNA (1)...(19): siRNA sense strand
ucacagaacucaguaaccu

SEQ ID NO: 1843324 - RNA, 19 nt, Homo sapiens
  misc_RNA (1)...(19): siRNA sense strand
uuaggaaccuggccucagu

SEQ ID NO: 1843325 - RNA, 19 nt, Homo sapiens
  misc_RNA (1)...(19): siRNA sense strand
ggccagaaacuccaugaau

SEQ ID NO: 1843326 - RNA, 19 nt, Homo sapiens
  misc_RNA (1)...(19): siRNA sense strand
agagaaacccuaugaaugc

SEQ ID NO: 1843327 - RNA, 19 nt, Homo sapiens
  misc_RNA (1)...(19): siRNA sense strand
aacaugaacugugucagaa

SEQ ID NO: 1843328 - RNA, 19 nt, Homo sapiens
  misc_RNA (1)...(19): siRNA sense strand
gcacaagcgaauccacaau

SEQ ID NO: 1843329 - RNA, 19 nt, Homo sapiens
  misc_RNA (1)...(19): siRNA sense strand
gaguguaaccaguguggaa

SEQ ID NO: 1843330 - RNA, 19 nt, Homo sapiens
  misc_RNA (1)...(19): siRNA sense strand
uccaauggcauaaacauga

SEQ ID NO: 1843331 - RNA, 19 nt, Homo sapiens
  misc_RNA (1)...(19): siRNA sense strand
gaaugugggaaggccuuua

SEQ ID NO: 1843332 - RNA, 19 nt, Homo sapiens
  misc_RNA (1)...(19): siRNA sense strand
aagaugugaugcuggagaa

SEQ ID NO: 1843333 - RNA, 19 nt, Homo sapiens
  misc_RNA (1)...(19): siRNA sense strand
cagcacaggcucuuaccuu

SEQ ID NO: 1843334 - RNA, 19 nt, Homo sapiens
  misc_RNA (1)...(19): siRNA sense strand
gaacccacacuggagagaa

SEQ ID NO: 1843335 - RNA, 19 nt, Homo sapiens
  misc_RNA (1)...(19): siRNA sense strand
gagaugcccuaugaaugca

SEQ ID NO: 1843336 - RNA, 19 nt, Homo sapiens
  misc_RNA (1)...(19): siRNA sense strand
aauccacaauggccagaaa

SEQ ID NO: 1843337 - RNA, 19 nt, Homo sapiens
  misc_RNA (1)...(19): siRNA sense strand
acacuggagagaagccuua

SEQ ID NO: 1843338 - RNA, 19 nt, Homo sapiens
  misc_RNA (1)...(19): siRNA sense strand
acacuggagagaagccuua

SEQ ID NO: 1843339 - RNA, 19 nt, Homo sapiens
  misc_RNA (1)...(19): siRNA sense strand
uuaagaaacacaugagauc

SEQ ID NO: 1843340 - RNA, 19 nt, Homo sapiens
  misc_RNA (1)...(19): siRNA sense strand
gacugggaaacucaacuua

SEQ ID NO: 1843341 - RNA, 19 nt, Homo sapiens
  misc_RNA (1)...(19): siRNA sense strand
gugggaaggccuuuaggaa

SEQ ID NO: 1843342 - RNA, 19 nt, Homo sapiens
  misc_RNA (1)...(19): siRNA sense strand
cuggagagaagccuuauga

SEQ ID NO: 1843343 - RNA, 19 nt, Homo sapiens
  misc_RNA (1)...(19): siRNA sense strand
aaacacacacgcucucaca

SEQ ID NO: 1843344 - RNA, 19 nt, Homo sapiens
  misc_RNA (1)...(19): siRNA sense strand
cuggagagaagccuuauga

SEQ ID NO: 1843345 - RNA, 19 nt, Homo sapiens
  misc_RNA (1)...(19): siRNA sense strand
aaacauccaauggcauaaa

SEQ ID NO: 1843346 - RNA, 19 nt, Homo sapiens
  misc_RNA (1)...(19): siRNA sense strand
caaggugacugugcagacu

SEQ ID NO: 1843347 - RNA, 19 nt, Homo sapiens
  misc_RNA (1)...(19): siRNA sense strand
gccuuuagcacaagcacua

SEQ ID NO: 1843348 - RNA, 19 nt, Homo sapiens
  misc_RNA (1)...(19): siRNA sense strand
aacccacacuggagagaaa

SEQ ID NO: 1843349 - RNA, 19 nt, Homo sapiens
  misc_RNA (1)...(19): siRNA sense strand
caugaacugugucagaacu

SEQ ID NO: 1843350 - RNA, 19 nt, Homo sapiens
  misc_RNA (1)...(19): siRNA sense strand
acaagcgaauccacaaugg

SEQ ID NO: 1843351 - RNA, 19 nt, Homo sapiens
  misc_RNA (1)...(19): siRNA sense strand
gaaagaggaauuuuacaag

SEQ ID NO: 1843352 - RNA, 19 nt, Homo sapiens
  misc_RNA (1)...(19): siRNA sense strand
gcugcaggguggcugacaa

SEQ ID NO: 1843353 - RNA, 19 nt, Homo sapiens
  misc_RNA (1)...(19): siRNA sense strand
acagaugaaagaggaauuu

SEQ ID NO: 1843354 - RNA, 19 nt, Homo sapiens
  misc_RNA (1)...(19): siRNA sense strand
cuaugaguguaaagaaugu

SEQ ID NO: 1843355 - RNA, 19 nt, Homo sapiens
  misc_RNA (1)...(19): siRNA sense strand
gugggaaggcuuucacugu

SEQ ID NO: 1843356 - RNA, 19 nt, Homo sapiens
  misc_RNA (1)...(19): siRNA sense strand
agcacaagcacuaaccuua

SEQ ID NO: 1843357 - RNA, 19 nt, Homo sapiens
  misc_RNA (1)...(19): siRNA sense strand
ggcuuucacuguuccuuca

SEQ ID NO: 1843358 - RNA, 19 nt, Homo sapiens
  misc_RNA (1)...(19): siRNA sense strand
ugaacugugucagaacuca

SEQ ID NO: 1843359 - RNA, 19 nt, Homo sapiens
  misc_RNA (1)...(19): siRNA sense strand
ccuaugaguguaaagaaug

SEQ ID NO: 1843360 - RNA, 19 nt, Homo sapiens
  misc_RNA (1)...(19): siRNA sense strand
agagaugcccuaugaaugc

SEQ ID NO: 1843361 - RNA, 19 nt, Homo sapiens
  misc_RNA (1)...(19): siRNA sense strand
cacaagcgaauccacaaug

SEQ ID NO: 1843362 - RNA, 19 nt, Homo sapiens
  misc_RNA (1)...(19): siRNA sense strand
acaagcacuaaccuuauaa

SEQ ID NO: 1843363 - RNA, 19 nt, Homo sapiens
  misc_RNA (1)...(19): siRNA sense strand
aaaccuaugaguguaaaga

SEQ ID NO: 1843364 - RNA, 19 nt, Homo sapiens
  misc_RNA (1)...(19): siRNA sense strand
gugaugcuggagaacuuua

SEQ ID NO: 1843365 - RNA, 19 nt, Homo sapiens
  misc_RNA (1)...(19): siRNA sense strand
auacuggagagaagccuua

SEQ ID NO: 1843366 - RNA, 19 nt, Homo sapiens
  misc_RNA (1)...(19): siRNA sense strand
agaaacccuaugacuguaa

SEQ ID NO: 1843367 - RNA, 19 nt, Homo sapiens
  misc_RNA (1)...(19): siRNA sense strand
ugagaaaaccuaugagugu

SEQ ID NO: 1843368 - RNA, 19 nt, Homo sapiens
  misc_RNA (1)...(19): siRNA sense strand
cagcugaagacagaugaaa

SEQ ID NO: 1843369 - RNA, 19 nt, Homo sapiens
  misc_RNA (1)...(19): siRNA sense strand
gacagaugaaagaggaauu

SEQ ID NO: 1843370 - RNA, 19 nt, Homo sapiens
  misc_RNA (1)...(19): siRNA sense strand
gcaaagcuuucaaccaaua

SEQ ID NO: 1843371 - RNA, 19 nt, Homo sapiens
  misc_RNA (1)...(19): siRNA sense strand
guacaaaugugaagaaugu

SEQ ID NO: 1843372 - RNA, 19 nt, Homo sapiens
  misc_RNA (1)...(19): siRNA sense strand
gauacaaacucuacaaaug

SEQ ID NO: 1843373 - RNA, 19 nt, Homo sapiens
  misc_RNA (1)...(19): siRNA sense strand
gaggagacaugaaauggua

SEQ ID NO: 1843374 - RNA, 19 nt, Homo sapiens
  misc_RNA (1)...(19): siRNA sense strand
gcaaagcauuuaacuauuc

SEQ ID NO: 1843375 - RNA, 19 nt, Homo sapiens
  misc_RNA (1)...(19): siRNA sense strand
caaagaauguggcaaauca

SEQ ID NO: 1843376 - RNA, 19 nt, Homo sapiens
  misc_RNA (1)...(19): siRNA sense strand
ggagaaacccuacaaaugu

SEQ ID NO: 1843377 - RNA, 19 nt, Homo sapiens
  misc_RNA (1)...(19): siRNA sense strand
agagaaaccuuacaaaugu

SEQ ID NO: 1843378 - RNA, 19 nt, Homo sapiens
  misc_RNA (1)...(19): siRNA sense strand
ggaaugugauguuagagaa

SEQ ID NO: 1843379 - RNA, 19 nt, Homo sapiens
  misc_RNA (1)...(19): siRNA sense strand
cuacaaaugugaagaaugu

SEQ ID NO: 1843380 - RNA, 19 nt, Homo sapiens
  misc_RNA (1)...(19): siRNA sense strand
cuacaaaugugaagaaugu

SEQ ID NO: 1843381 - RNA, 19 nt, Homo sapiens
  misc_RNA (1)...(19): siRNA sense strand
cuacaaaugugaagaaugu

SEQ ID NO: 1843382 - RNA, 19 nt, Homo sapiens
  misc_RNA (1)...(19): siRNA sense strand
cuacaaaugugaagaaugu

SEQ ID NO: 1843383 - RNA, 19 nt, Homo sapiens
  misc_RNA (1)...(19): siRNA sense strand
cuacaaaugugaagaaugu

SEQ ID NO: 1843384 - RNA, 19 nt, Homo sapiens
  misc_RNA (1)...(19): siRNA sense strand
cuacaaaugugaagaaugu

SEQ ID NO: 1843385 - RNA, 19 nt, Homo sapiens
  misc_RNA (1)...(19): siRNA sense strand
cuacaaaugugaagaaugu

SEQ ID NO: 1843386 - RNA, 19 nt, Homo sapiens
  misc_RNA (1)...(19): siRNA sense strand
cuacaaaugugaaguaugu

SEQ ID NO: 1843387 - RNA, 19 nt, Homo sapiens
  misc_RNA (1)...(19): siRNA sense strand
cuacaaaugugaagaaugu

SEQ ID NO: 1843388 - RNA, 19 nt, Homo sapiens
  misc_RNA (1)...(19): siRNA sense strand
cuacaaaugugaagaaugu

SEQ ID NO: 1843389 - RNA, 19 nt, Homo sapiens
  misc_RNA (1)...(19): siRNA sense strand
gagagaaaccuuacaaaug

SEQ ID NO: 1843390 - RNA, 19 nt, Homo sapiens
  misc_RNA (1)...(19): siRNA sense strand
cuacaaaugugaagaaugu

SEQ ID NO: 1843391 - RNA, 19 nt, Homo sapiens
  misc_RNA (1)...(19): siRNA sense strand
gagagaaacccuacaaaug

SEQ ID NO: 1843392 - RNA, 19 nt, Homo sapiens
  misc_RNA (1)...(19): siRNA sense strand
gagagaaacccuacaaaug

SEQ ID NO: 1843393 - RNA, 19 nt, Homo sapiens
  misc_RNA (1)...(19): siRNA sense strand
gagagaaacccuacaaaug

SEQ ID NO: 1843394 - RNA, 19 nt, Homo sapiens
  misc_RNA (1)...(19): siRNA sense strand
gagagaaacccuacaaaug

SEQ ID NO: 1843395 - RNA, 19 nt, Homo sapiens
  misc_RNA (1)...(19): siRNA sense strand
ccucaaaccuuacuaaaca

SEQ ID NO: 1843396 - RNA, 19 nt, Homo sapiens
  misc_RNA (1)...(19): siRNA sense strand
ccucaaagcuuacugaaca

SEQ ID NO: 1843397 - RNA, 19 nt, Homo sapiens
  misc_RNA (1)...(19): siRNA sense strand
ccucaaaccuuacuaaaca

SEQ ID NO: 1843398 - RNA, 19 nt, Homo sapiens
  misc_RNA (1)...(19): siRNA sense strand
ccucaaagcuuacugaaca

SEQ ID NO: 1843399 - RNA, 19 nt, Homo sapiens
  misc_RNA (1)...(19): siRNA sense strand
ccaguuauguguucucauu

SEQ ID NO: 1843400 - RNA, 19 nt, Homo sapiens
  misc_RNA (1)...(19): siRNA sense strand
cuacaaaccugaagaugug

SEQ ID NO: 1843401 - RNA, 19 nt, Homo sapiens
  misc_RNA (1)...(19): siRNA sense strand
gcacagaggagguuauaau

SEQ ID NO: 1843402 - RNA, 19 nt, Homo sapiens
  misc_RNA (1)...(19): siRNA sense strand
ugacaacaccucaaacuuu

SEQ ID NO: 1843403 - RNA, 19 nt, Homo sapiens
  misc_RNA (1)...(19): siRNA sense strand
gagaaacccuacaaaugug

SEQ ID NO: 1843404 - RNA, 19 nt, Homo sapiens
  misc_RNA (1)...(19): siRNA sense strand
caaccaauauucaaaccuu

SEQ ID NO: 1843405 - RNA, 19 nt, Homo sapiens
  misc_RNA (1)...(19): siRNA sense strand
uggcaaagcuuucaaccaa

SEQ ID NO: 1843406 - RNA, 19 nt, Homo sapiens
  misc_RNA (1)...(19): siRNA sense strand
gagaaacccuacaaaugug

SEQ ID NO: 1843407 - RNA, 19 nt, Homo sapiens
  misc_RNA (1)...(19): siRNA sense strand
gagaaacccuacaaaugug

SEQ ID NO: 1843408 - RNA, 19 nt, Homo sapiens
  misc_RNA (1)...(19): siRNA sense strand
gagaaacccuacaaaugug

SEQ ID NO: 1843409 - RNA, 19 nt, Homo sapiens
  misc_RNA (1)...(19): siRNA sense strand
gagaaacccuacaaaugug

SEQ ID NO: 1843410 - RNA, 19 nt, Homo sapiens
  misc_RNA (1)...(19): siRNA sense strand
gcacagcagaauuuauaua

SEQ ID NO: 1843411 - RNA, 19 nt, Homo sapiens
  misc_RNA (1)...(19): siRNA sense strand
cagcagaauuuauauagga

SEQ ID NO: 1843412 - RNA, 19 nt, Homo sapiens
  misc_RNA (1)...(19): siRNA sense strand
aaagaaacccuacaaaugu

SEQ ID NO: 1843413 - RNA, 19 nt, Homo sapiens
  misc_RNA (1)...(19): siRNA sense strand
aaagaaacccuacaaaugu

SEQ ID NO: 1843414 - RNA, 19 nt, Homo sapiens
  misc_RNA (1)...(19): siRNA sense strand
uaacugcccuucaaucauc

SEQ ID NO: 1843415 - RNA, 19 nt, Homo sapiens
  misc_RNA (1)...(19): siRNA sense strand
ggagagaaaccuuacaaau

SEQ ID NO: 1843416 - RNA, 19 nt, Homo sapiens
  misc_RNA (1)...(19): siRNA sense strand
gagagaaacccuacacaug

SEQ ID NO: 1843417 - RNA, 19 nt, Homo sapiens
  misc_RNA (1)...(19): siRNA sense strand
gagcaacccuacaaaugug

SEQ ID NO: 1843418 - RNA, 19 nt, Homo sapiens
  misc_RNA (1)...(19): siRNA sense strand
gagagaaacccuacaagug

SEQ ID NO: 1843419 - RNA, 19 nt, Homo sapiens
  misc_RNA (1)...(19): siRNA sense strand
gagaaacccuacacaugug

SEQ ID NO: 1843420 - RNA, 19 nt, Homo sapiens
  misc_RNA (1)...(19): siRNA sense strand
gagagaaacccuacacaug

SEQ ID NO: 1843421 - RNA, 19 nt, Homo sapiens
  misc_RNA (1)...(19): siRNA sense strand
gagaaacccuacacaugug

SEQ ID NO: 1843422 - RNA, 19 nt, Homo sapiens
  misc_RNA (1)...(19): siRNA sense strand
cagaggagguuauaaugga

SEQ ID NO: 1843423 - RNA, 19 nt, Homo sapiens
  misc_RNA (1)...(19): siRNA sense strand
guucucaacucuuacuaaa

SEQ ID NO: 1843424 - RNA, 19 nt, Homo sapiens
  misc_RNA (1)...(19): siRNA sense strand
ccucaaaccuuacuacaca

SEQ ID NO: 1843425 - RNA, 19 nt, Homo sapiens
  misc_RNA (1)...(19): siRNA sense strand
cuacaagugugaagaaugu

SEQ ID NO: 1843426 - RNA, 19 nt, Homo sapiens
  misc_RNA (1)...(19): siRNA sense strand
gcaaagcuuuuaaccauuu

SEQ ID NO: 1843427 - RNA, 19 nt, Homo sapiens
  misc_RNA (1)...(19): siRNA sense strand
ccucaaaccuuacugaaca

SEQ ID NO: 1843428 - RNA, 19 nt, Homo sapiens
  misc_RNA (1)...(19): siRNA sense strand
ccucaacucuuacuaaaca

SEQ ID NO: 1843429 - RNA, 19 nt, Homo sapiens
  misc_RNA (1)...(19): siRNA sense strand
ggagagaaacccuacaaau

SEQ ID NO: 1843430 - RNA, 19 nt, Homo sapiens
  misc_RNA (1)...(19): siRNA sense strand
ggagagaaacccuacaaau

SEQ ID NO: 1843431 - RNA, 19 nt, Homo sapiens
  misc_RNA (1)...(19): siRNA sense strand
ggagagaaacccuacaaau

SEQ ID NO: 1843432 - RNA, 19 nt, Homo sapiens
  misc_RNA (1)...(19): siRNA sense strand
ggagagaaacccuacaaau

SEQ ID NO: 1843433 - RNA, 19 nt, Homo sapiens
  misc_RNA (1)...(19): siRNA sense strand
acaucuagcucaacauaaa

SEQ ID NO: 1843434 - RNA, 19 nt, Homo sapiens
  misc_RNA (1)...(19): siRNA sense strand
aaacuguccucaacccuuu

SEQ ID NO: 1843435 - RNA, 19 nt, Homo sapiens
  misc_RNA (1)...(19): siRNA sense strand
gcccuucaaucaucacuaa

SEQ ID NO: 1843436 - RNA, 19 nt, Homo sapiens
  misc_RNA (1)...(19): siRNA sense strand
ggccagagcagcauauaaa

SEQ ID NO: 1843437 - RNA, 19 nt, Homo sapiens
  misc_RNA (1)...(19): siRNA sense strand
ggcaaagcauuuaacuauu

SEQ ID NO: 1843438 - RNA, 19 nt, Homo sapiens
  misc_RNA (1)...(19): siRNA sense strand
gagagcaacccuacaaaug

SEQ ID NO: 1843439 - RNA, 19 nt, Homo sapiens
  misc_RNA (1)...(19): siRNA sense strand
ucucaaaccuuacuacaca

SEQ ID NO: 1843440 - RNA, 19 nt, Homo sapiens
  misc_RNA (1)...(19): siRNA sense strand
ccucaacccuuacuaaaca

SEQ ID NO: 1843441 - RNA, 19 nt, Homo sapiens
  misc_RNA (1)...(19): siRNA sense strand
ucucaaaccuuacuacaca

SEQ ID NO: 1843442 - RNA, 19 nt, Homo sapiens
  misc_RNA (1)...(19): siRNA sense strand
ccucaacccuuacuaaaca

SEQ ID NO: 1843443 - RNA, 19 nt, Homo sapiens
  misc_RNA (1)...(19): siRNA sense strand
ccacaucuagcucaacaua

SEQ ID NO: 1843444 - RNA, 19 nt, Homo sapiens
  misc_RNA (1)...(19): siRNA sense strand
ucucaacucuuacuaaaca

SEQ ID NO: 1843445 - RNA, 19 nt, Homo sapiens
  misc_RNA (1)...(19): siRNA sense strand
aaccauuucucaauccuua

SEQ ID NO: 1843446 - RNA, 19 nt, Homo sapiens
  misc_RNA (1)...(19): siRNA sense strand
gcccucaacucuuacuaaa

SEQ ID NO: 1843447 - RNA, 19 nt, Homo sapiens
  misc_RNA (1)...(19): siRNA sense strand
uaacaaguccucaauccuu

SEQ ID NO: 1843448 - RNA, 19 nt, Homo sapiens
  misc_RNA (1)...(19): siRNA sense strand
gaagaugugacagugauuu

SEQ ID NO: 1843449 - RNA, 19 nt, Homo sapiens
  misc_RNA (1)...(19): siRNA sense strand
ugaagaauguggcaaaguc

SEQ ID NO: 1843450 - RNA, 19 nt, Homo sapiens
  misc_RNA (1)...(19): siRNA sense strand
aacaaguccucaauccuua

SEQ ID NO: 1843451 - RNA, 19 nt, Homo sapiens
  misc_RNA (1)...(19): siRNA sense strand
uaaagaauguggcaaagcu

SEQ ID NO: 1843452 - RNA, 19 nt, Homo sapiens
  misc_RNA (1)...(19): siRNA sense strand
ugaagaauguggcaaagca

SEQ ID NO: 1843453 - RNA, 19 nt, Homo sapiens
  misc_RNA (1)...(19): siRNA sense strand
agagaaacccuacaaaugu

SEQ ID NO: 1843454 - RNA, 19 nt, Homo sapiens
  misc_RNA (1)...(19): siRNA sense strand
cuucaaaccuuacuacaca

SEQ ID NO: 1843455 - RNA, 19 nt, Homo sapiens
  misc_RNA (1)...(19): siRNA sense strand
agagaaacccuacaaaugu

SEQ ID NO: 1843456 - RNA, 19 nt, Homo sapiens
  misc_RNA (1)...(19): siRNA sense strand
gagaauucauacugcagaa

SEQ ID NO: 1843457 - RNA, 19 nt, Homo sapiens
  misc_RNA (1)...(19): siRNA sense strand
aaccaguucucaaaccuua

SEQ ID NO: 1843458 - RNA, 19 nt, Homo sapiens
  misc_RNA (1)...(19): siRNA sense strand
agagaaacccuacaaaugu

SEQ ID NO: 1843459 - RNA, 19 nt, Homo sapiens
  misc_RNA (1)...(19): siRNA sense strand
agagaaacccuacaaaugu

SEQ ID NO: 1843460 - RNA, 19 nt, Homo sapiens
  misc_RNA (1)...(19): siRNA sense strand
aaccaguucucaaaccuua

SEQ ID NO: 1843461 - RNA, 19 nt, Homo sapiens
  misc_RNA (1)...(19): siRNA sense strand
aaccaauccucaaaccuua

SEQ ID NO: 1843462 - RNA, 19 nt, Homo sapiens
  misc_RNA (1)...(19): siRNA sense strand
uaaagaaugugccaaagcu

SEQ ID NO: 1843463 - RNA, 19 nt, Homo sapiens
  misc_RNA (1)...(19): siRNA sense strand
agacauaagauaagccaua

SEQ ID NO: 1843464 - RNA, 19 nt, Homo sapiens
  misc_RNA (1)...(19): siRNA sense strand
uggcaaagcauuuaacuau

SEQ ID NO: 1843465 - RNA, 19 nt, Homo sapiens
  misc_RNA (1)...(19): siRNA sense strand
gaaaagaaacccuacaaau

SEQ ID NO: 1843466 - RNA, 19 nt, Homo sapiens
  misc_RNA (1)...(19): siRNA sense strand
gaaaagaaacccuacaaau

SEQ ID NO: 1843467 - RNA, 19 nt, Homo sapiens
  misc_RNA (1)...(19): siRNA sense strand
acacauaagagaauccaua

SEQ ID NO: 1843468 - RNA, 19 nt, Homo sapiens
  misc_RNA (1)...(19): siRNA sense strand
ccucacaccuuaauacaca

SEQ ID NO: 1843469 - RNA, 19 nt, Homo sapiens
  misc_RNA (1)...(19): siRNA sense strand
gacaacaccucaaacuuuu

SEQ ID NO: 1843470 - RNA, 19 nt, Homo sapiens
  misc_RNA (1)...(19): siRNA sense strand
gcacacagcuuacaauaca

SEQ ID NO: 1843471 - RNA, 19 nt, Homo sapiens
  misc_RNA (1)...(19): siRNA sense strand
guucagggcucacaccuua

SEQ ID NO: 1843472 - RNA, 19 nt, Homo sapiens
  misc_RNA (1)...(19): siRNA sense strand
gagagaagccuuauaaaug

SEQ ID NO: 1843473 - RNA, 19 nt, Homo sapiens
  misc_RNA (1)...(19): siRNA sense strand
aaucguagcucaaggcuua

SEQ ID NO: 1843474 - RNA, 19 nt, Homo sapiens
  misc_RNA (1)...(19): siRNA sense strand
caagacagauucuacgauu

SEQ ID NO: 1843475 - RNA, 19 nt, Homo sapiens
  misc_RNA (1)...(19): siRNA sense strand
gggaaagccuucagucaaa

SEQ ID NO: 1843476 - RNA, 19 nt, Homo sapiens
  misc_RNA (1)...(19): siRNA sense strand
ggaaaagccuucaguauga

SEQ ID NO: 1843477 - RNA, 19 nt, Homo sapiens
  misc_RNA (1)...(19): siRNA sense strand
gagagaaacccuuuaaaug

SEQ ID NO: 1843478 - RNA, 19 nt, Homo sapiens
  misc_RNA (1)...(19): siRNA sense strand
ggagaagccuuauaaaugc

SEQ ID NO: 1843479 - RNA, 19 nt, Homo sapiens
  misc_RNA (1)...(19): siRNA sense strand
gagaggcccuauaaaugua

SEQ ID NO: 1843480 - RNA, 19 nt, Homo sapiens
  misc_RNA (1)...(19): siRNA sense strand
ggagagaggcccuauaaau

SEQ ID NO: 1843481 - RNA, 19 nt, Homo sapiens
  misc_RNA (1)...(19): siRNA sense strand
gggagaagccuuauaaaug

SEQ ID NO: 1843482 - RNA, 19 nt, Homo sapiens
  misc_RNA (1)...(19): siRNA sense strand
gagaaacccuuuaaaugca

SEQ ID NO: 1843483 - RNA, 19 nt, Homo sapiens
  misc_RNA (1)...(19): siRNA sense strand
ggagagaaacccuuuaaau

SEQ ID NO: 1843484 - RNA, 19 nt, Homo sapiens
  misc_RNA (1)...(19): siRNA sense strand
ggagagaagccuuauaaau

SEQ ID NO: 1843485 - RNA, 19 nt, Homo sapiens
  misc_RNA (1)...(19): siRNA sense strand
gagagaagccguacgaaug

SEQ ID NO: 1843486 - RNA, 19 nt, Homo sapiens
  misc_RNA (1)...(19): siRNA sense strand
gagagaggcccuauaaaug

SEQ ID NO: 1843487 - RNA, 19 nt, Homo sapiens
  misc_RNA (1)...(19): siRNA sense strand
guacgaaugugcagagugu

SEQ ID NO: 1843488 - RNA, 19 nt, Homo sapiens
  misc_RNA (1)...(19): siRNA sense strand
ggagagaggcccuaugguu

SEQ ID NO: 1843489 - RNA, 19 nt, Homo sapiens
  misc_RNA (1)...(19): siRNA sense strand
gcucugcauugggaaauua

SEQ ID NO: 1843490 - RNA, 19 nt, Homo sapiens
  misc_RNA (1)...(19): siRNA sense strand
gagaaacccuaugugugua

SEQ ID NO: 1843491 - RNA, 19 nt, Homo sapiens
  misc_RNA (1)...(19): siRNA sense strand
gguuguaguucacggcuua

SEQ ID NO: 1843492 - RNA, 19 nt, Homo sapiens
  misc_RNA (1)...(19): siRNA sense strand
gagcacacagcuuacaaua

SEQ ID NO: 1843493 - RNA, 19 nt, Homo sapiens
  misc_RNA (1)...(19): siRNA sense strand
ggaaaagccuucagucaga

SEQ ID NO: 1843494 - RNA, 19 nt, Homo sapiens
  misc_RNA (1)...(19): siRNA sense strand
agucagaguuccagccuua

SEQ ID NO: 1843495 - RNA, 19 nt, Homo sapiens
  misc_RNA (1)...(19): siRNA sense strand
gagaagcccuacagaugug

SEQ ID NO: 1843496 - RNA, 19 nt, Homo sapiens
  misc_RNA (1)...(19): siRNA sense strand
ggagagaaacccuaugugu

SEQ ID NO: 1843497 - RNA, 19 nt, Homo sapiens
  misc_RNA (1)...(19): siRNA sense strand
gggagaagcccuacagaug

SEQ ID NO: 1843498 - RNA, 19 nt, Homo sapiens
  misc_RNA (1)...(19): siRNA sense strand
ugaagacugugagaagaua

SEQ ID NO: 1843499 - RNA, 19 nt, Homo sapiens
  misc_RNA (1)...(19): siRNA sense strand
ggagaagcccuacagaugu

SEQ ID NO: 1843500 - RNA, 19 nt, Homo sapiens
  misc_RNA (1)...(19): siRNA sense strand
ucagagaauucacgcugua

SEQ ID NO: 1843501 - RNA, 19 nt, Homo sapiens
  misc_RNA (1)...(19): siRNA sense strand
gggaagugaugcuggagaa

SEQ ID NO: 1843502 - RNA, 19 nt, Homo sapiens
  misc_RNA (1)...(19): siRNA sense strand
guagagaaaccauuuaagu

SEQ ID NO: 1843503 - RNA, 19 nt, Homo sapiens
  misc_RNA (1)...(19): siRNA sense strand
ggaagcagcggccuggauu

SEQ ID NO: 1843504 - RNA, 19 nt, Homo sapiens
  misc_RNA (1)...(19): siRNA sense strand
cuacagaugugaggaaugu

SEQ ID NO: 1843505 - RNA, 19 nt, Homo sapiens
  misc_RNA (1)...(19): siRNA sense strand
gcagcggccuggauuguca

SEQ ID NO: 1843506 - RNA, 19 nt, Homo sapiens
  misc_RNA (1)...(19): siRNA sense strand
ggaaacauacaaauaacug

SEQ ID NO: 1843507 - RNA, 19 nt, Homo sapiens
  misc_RNA (1)...(19): siRNA sense strand
cgccugagcucaaaacuua

SEQ ID NO: 1843508 - RNA, 19 nt, Homo sapiens
  misc_RNA (1)...(19): siRNA sense strand
guucacaccuaauuauaca

SEQ ID NO: 1843509 - RNA, 19 nt, Homo sapiens
  misc_RNA (1)...(19): siRNA sense strand
uagcagaugucaagaaugc

SEQ ID NO: 1843510 - RNA, 19 nt, Homo sapiens
  misc_RNA (1)...(19): siRNA sense strand
agagaagccuuauaaaugc

SEQ ID NO: 1843511 - RNA, 19 nt, Homo sapiens
  misc_RNA (1)...(19): siRNA sense strand
ggagagaagccguacgaau

SEQ ID NO: 1843512 - RNA, 19 nt, Homo sapiens
  misc_RNA (1)...(19): siRNA sense strand
agaaaccauuuaaguguga

SEQ ID NO: 1843513 - RNA, 19 nt, Homo sapiens
  misc_RNA (1)...(19): siRNA sense strand
aguaugagcacacagcuua

SEQ ID NO: 1843514 - RNA, 19 nt, Homo sapiens
  misc_RNA (1)...(19): siRNA sense strand
uaacugccauggagagaag

SEQ ID NO: 1843515 - RNA, 19 nt, Homo sapiens
  misc_RNA (1)...(19): siRNA sense strand
caucagagaauccauaaag

SEQ ID NO: 1843516 - RNA, 19 nt, Homo sapiens
  misc_RNA (1)...(19): siRNA sense strand
aagacagauucuacgauua

SEQ ID NO: 1843517 - RNA, 19 nt, Homo sapiens
  misc_RNA (1)...(19): siRNA sense strand
gcaccaaggaccuccaaga

SEQ ID NO: 1843518 - RNA, 19 nt, Homo sapiens
  misc_RNA (1)...(19): siRNA sense strand
gaauucacgcuguagagaa

SEQ ID NO: 1843519 - RNA, 19 nt, Homo sapiens
  misc_RNA (1)...(19): siRNA sense strand
ggacauggacauccuaaaa

SEQ ID NO: 1843520 - RNA, 19 nt, Homo sapiens
  misc_RNA (1)...(19): siRNA sense strand
agagaaacccuaugugugu

SEQ ID NO: 1843521 - RNA, 19 nt, Homo sapiens
  misc_RNA (1)...(19): siRNA sense strand
caucagagccacuucagau

SEQ ID NO: 1843522 - RNA, 19 nt, Homo sapiens
  misc_RNA (1)...(19): siRNA sense strand
ggcuuuaccuuccaaaaua

SEQ ID NO: 1843523 - RNA, 19 nt, Homo sapiens
  misc_RNA (1)...(19): siRNA sense strand
cagcuuacaauacaucaaa

SEQ ID NO: 1843524 - RNA, 19 nt, Homo sapiens
  misc_RNA (1)...(19): siRNA sense strand
gaacaccagagaauacaca

SEQ ID NO: 1843525 - RNA, 19 nt, Homo sapiens
  misc_RNA (1)...(19): siRNA sense strand
ucagaauccuggcuuugga

SEQ ID NO: 1843526 - RNA, 19 nt, Homo sapiens
  misc_RNA (1)...(19): siRNA sense strand
caccagagaauacacacua

SEQ ID NO: 1843527 - RNA, 19 nt, Homo sapiens
  misc_RNA (1)...(19): siRNA sense strand
agagaaaccauuuaagugu

SEQ ID NO: 1843528 - RNA, 19 nt, Homo sapiens
  misc_RNA (1)...(19): siRNA sense strand
agagaaacccuuuaaaugc

SEQ ID NO: 1843529 - RNA, 19 nt, Homo sapiens
  misc_RNA (1)...(19): siRNA sense strand
gagaagccuuauaaaugca

SEQ ID NO: 1843530 - RNA, 19 nt, Homo sapiens
  misc_RNA (1)...(19): siRNA sense strand
agagaggcccuauaaaugu

SEQ ID NO: 1843531 - RNA, 19 nt, Homo sapiens
  misc_RNA (1)...(19): siRNA sense strand
gagaagccuuauaaaugca

SEQ ID NO: 1843532 - RNA, 19 nt, Homo sapiens
  misc_RNA (1)...(19): siRNA sense strand
cuggagagaagccuuauaa

SEQ ID NO: 1843533 - RNA, 19 nt, Homo sapiens
  misc_RNA (1)...(19): siRNA sense strand
uagagaaaccauuuaagug

SEQ ID NO: 1843534 - RNA, 19 nt, Homo sapiens
  misc_RNA (1)...(19): siRNA sense strand
caacaccagauaauucaug

SEQ ID NO: 1843535 - RNA, 19 nt, Homo sapiens
  misc_RNA (1)...(19): siRNA sense strand
gaaacccuauguguguaau

SEQ ID NO: 1843536 - RNA, 19 nt, Homo sapiens
  misc_RNA (1)...(19): siRNA sense strand
cagagccacuucagauauc

SEQ ID NO: 1843537 - RNA, 19 nt, Homo sapiens
  misc_RNA (1)...(19): siRNA sense strand
cagaguuccagccuuauuu

SEQ ID NO: 1843538 - RNA, 19 nt, Homo sapiens
  misc_RNA (1)...(19): siRNA sense strand
ggacaguggucagaaucuc

SEQ ID NO: 1843539 - RNA, 19 nt, Homo sapiens
  misc_RNA (1)...(19): siRNA sense strand
gcguucacaccuaauuaua

SEQ ID NO: 1843540 - RNA, 19 nt, Homo sapiens
  misc_RNA (1)...(19): siRNA sense strand
ucagagaauccauaaagga

SEQ ID NO: 1843541 - RNA, 19 nt, Homo sapiens
  misc_RNA (1)...(19): siRNA sense strand
cgauguggcugugcacuuc

SEQ ID NO: 1843542 - RNA, 19 nt, Homo sapiens
  misc_RNA (1)...(19): siRNA sense strand
aauucacgcuguagagaaa

SEQ ID NO: 1843543 - RNA, 19 nt, Homo sapiens
  misc_RNA (1)...(19): siRNA sense strand
gagaggcccuacccuugca

SEQ ID NO: 1843544 - RNA, 19 nt, Homo sapiens
  misc_RNA (1)...(19): siRNA sense strand
guggaucucucgccugagu

SEQ ID NO: 1843545 - RNA, 19 nt, Homo sapiens
  misc_RNA (1)...(19): siRNA sense strand
agucaaaacucaacccuuu

SEQ ID NO: 1843546 - RNA, 19 nt, Homo sapiens
  misc_RNA (1)...(19): siRNA sense strand
agaguuccagccuuauuua

SEQ ID NO: 1843547 - RNA, 19 nt, Homo sapiens
  misc_RNA (1)...(19): siRNA sense strand
ccuuauaaaugcaacaagu

SEQ ID NO: 1843548 - RNA, 19 nt, Homo sapiens
  misc_RNA (1)...(19): siRNA sense strand
ucagagccacuucagauau

SEQ ID NO: 1843549 - RNA, 19 nt, Homo sapiens
  misc_RNA (1)...(19): siRNA sense strand
cuaauuauacaccagagaa

SEQ ID NO: 1843550 - RNA, 19 nt, Homo sapiens
  misc_RNA (1)...(19): siRNA sense strand
ggaaagccuucagucaaaa

SEQ ID NO: 1843551 - RNA, 19 nt, Homo sapiens
  misc_RNA (1)...(19): siRNA sense strand
cuggagagaggcccuauaa

SEQ ID NO: 1843552 - RNA, 19 nt, Homo sapiens
  misc_RNA (1)...(19): siRNA sense strand
gcuguagagaaaccauuua

SEQ ID NO: 1843553 - RNA, 19 nt, Homo sapiens
  misc_RNA (1)...(19): siRNA sense strand
gagaagccguacgaaugug

SEQ ID NO: 1843554 - RNA, 19 nt, Homo sapiens
  misc_RNA (1)...(19): siRNA sense strand
agacagauucuacgauuag

SEQ ID NO: 1843555 - RNA, 19 nt, Homo sapiens
  misc_RNA (1)...(19): siRNA sense strand
uuaaucagcaucagagaau

SEQ ID NO: 1843556 - RNA, 19 nt, Homo sapiens
  misc_RNA (1)...(19): siRNA sense strand
gauugucagccucuugaaa

SEQ ID NO: 1843557 - RNA, 19 nt, Homo sapiens
  misc_RNA (1)...(19): siRNA sense strand
gauucacacuggagagaag

SEQ ID NO: 1843558 - RNA, 19 nt, Homo sapiens
  misc_RNA (1)...(19): siRNA sense strand
caguguggcuggacuagca

SEQ ID NO: 1843559 - RNA, 19 nt, Homo sapiens
  misc_RNA (1)...(19): siRNA sense strand
gggagagaaacccuuuaaa

SEQ ID NO: 1843560 - RNA, 19 nt, Homo sapiens
  misc_RNA (1)...(19): siRNA sense strand
uuggagacguuucugauuc

SEQ ID NO: 1843561 - RNA, 19 nt, Homo sapiens
  misc_RNA (1)...(19): siRNA sense strand
acacuggagagaagccuua

SEQ ID NO: 1843562 - RNA, 19 nt, Homo sapiens
  misc_RNA (1)...(19): siRNA sense strand
gaaugaggagacugugguu

SEQ ID NO: 1843563 - RNA, 19 nt, Homo sapiens
  misc_RNA (1)...(19): siRNA sense strand
gaagcagcggccuggauug

SEQ ID NO: 1843564 - RNA, 19 nt, Homo sapiens
  misc_RNA (1)...(19): siRNA sense strand
ugugaagacugugagaaga

SEQ ID NO: 1843565 - RNA, 19 nt, Homo sapiens
  misc_RNA (1)...(19): siRNA sense strand
cgggagagaaacccuuuaa

SEQ ID NO: 1843566 - RNA, 19 nt, Homo sapiens
  misc_RNA (1)...(19): siRNA sense strand
gucagccucuugaaaguca

SEQ ID NO: 1843567 - RNA, 19 nt, Homo sapiens
  misc_RNA (1)...(19): siRNA sense strand
gggaaauuaauacacagaa

SEQ ID NO: 1843568 - RNA, 19 nt, Homo sapiens
  misc_RNA (1)...(19): siRNA sense strand
guuccagccuuauuuacca

SEQ ID NO: 1843569 - RNA, 19 nt, Homo sapiens
  misc_RNA (1)...(19): siRNA sense strand
aaaaugagcaggccuguga

SEQ ID NO: 1843570 - RNA, 19 nt, Homo sapiens
  misc_RNA (1)...(19): siRNA sense strand
gagcaaaccucgaaacuaa

SEQ ID NO: 1843571 - RNA, 19 nt, Homo sapiens
  misc_RNA (1)...(19): siRNA sense strand
cagaaccacugucucauua

SEQ ID NO: 1843572 - RNA, 19 nt, Homo sapiens
  misc_RNA (1)...(19): siRNA sense strand
gaaccacugucucauuaaa

SEQ ID NO: 1843573 - RNA, 19 nt, Homo sapiens
  misc_RNA (1)...(19): siRNA sense strand
gcagggcauuugcaaagaa

SEQ ID NO: 1843574 - RNA, 19 nt, Homo sapiens
  misc_RNA (1)...(19): siRNA sense strand
agaagucguuuaaguguga

SEQ ID NO: 1843575 - RNA, 19 nt, Homo sapiens
  misc_RNA (1)...(19): siRNA sense strand
ggagaagucguuuaagugu

SEQ ID NO: 1843576 - RNA, 19 nt, Homo sapiens
  misc_RNA (1)...(19): siRNA sense strand
ggagcaaaccucgaaacua

SEQ ID NO: 1843577 - RNA, 19 nt, Homo sapiens
  misc_RNA (1)...(19): siRNA sense strand
gggagaaggcuuacaagug

SEQ ID NO: 1843578 - RNA, 19 nt, Homo sapiens
  misc_RNA (1)...(19): siRNA sense strand
gugagaagcccuacaagug

SEQ ID NO: 1843579 - RNA, 19 nt, Homo sapiens
  misc_RNA (1)...(19): siRNA sense strand
ugaaggcggugcccucuca

SEQ ID NO: 1843580 - RNA, 19 nt, Homo sapiens
  misc_RNA (1)...(19): siRNA sense strand
gggacaagccguucaagug

SEQ ID NO: 1843581 - RNA, 19 nt, Homo sapiens
  misc_RNA (1)...(19): siRNA sense strand
gaaccuucuugcccuagga

SEQ ID NO: 1843582 - RNA, 19 nt, Homo sapiens
  misc_RNA (1)...(19): siRNA sense strand
ugugaucucucaucuggaa

SEQ ID NO: 1843583 - RNA, 19 nt, Homo sapiens
  misc_RNA (1)...(19): siRNA sense strand
gggagaagucguuuaagug

SEQ ID NO: 1843584 - RNA, 19 nt, Homo sapiens
  misc_RNA (1)...(19): siRNA sense strand
ggagcucgcaccucacuga

SEQ ID NO: 1843585 - RNA, 19 nt, Homo sapiens
  misc_RNA (1)...(19): siRNA sense strand
gcagagccuucagccagaa

SEQ ID NO: 1843586 - RNA, 19 nt, Homo sapiens
  misc_RNA (1)...(19): siRNA sense strand
ccagaaccacugucucauu

SEQ ID NO: 1843587 - RNA, 19 nt, Homo sapiens
  misc_RNA (1)...(19): siRNA sense strand
caagugagccagaaaaguu

SEQ ID NO: 1843588 - RNA, 19 nt, Homo sapiens
  misc_RNA (1)...(19): siRNA sense strand
agagggcccuguccagaau

SEQ ID NO: 1843589 - RNA, 19 nt, Homo sapiens
  misc_RNA (1)...(19): siRNA sense strand
cagcagggcauuugcaaag

SEQ ID NO: 1843590 - RNA, 19 nt, Homo sapiens
  misc_RNA (1)...(19): siRNA sense strand
ggucugggacguccuguag

SEQ ID NO: 1843591 - RNA, 19 nt, Homo sapiens
  misc_RNA (1)...(19): siRNA sense strand
ggccauccaguucaacaaa

SEQ ID NO: 1843592 - RNA, 19 nt, Homo sapiens
  misc_RNA (1)...(19): siRNA sense strand
ggagaacuaccagaaccuu

SEQ ID NO: 1843593 - RNA, 19 nt, Homo sapiens
  misc_RNA (1)...(19): siRNA sense strand
ggugagaagcccuacaagu

SEQ ID NO: 1843594 - RNA, 19 nt, Homo sapiens
  misc_RNA (1)...(19): siRNA sense strand
gggcauuugcaaagaagaa

SEQ ID NO: 1843595 - RNA, 19 nt, Homo sapiens
  misc_RNA (1)...(19): siRNA sense strand
guuuaagugugagaaaugu

SEQ ID NO: 1843596 - RNA, 19 nt, Homo sapiens
  misc_RNA (1)...(19): siRNA sense strand
cagagggcccuguccagaa

SEQ ID NO: 1843597 - RNA, 19 nt, Homo sapiens
  misc_RNA (1)...(19): siRNA sense strand
ggggagaagucguuuaagu

SEQ ID NO: 1843598 - RNA, 19 nt, Homo sapiens
  misc_RNA (1)...(19): siRNA sense strand
ccauccaguucaacaaaca

SEQ ID NO: 1843599 - RNA, 19 nt, Homo sapiens
  misc_RNA (1)...(19): siRNA sense strand
gcuuacaagugcgaugaau

SEQ ID NO: 1843600 - RNA, 19 nt, Homo sapiens
  misc_RNA (1)...(19): siRNA sense strand
gugcaacgagugcggcaaa

SEQ ID NO: 1843601 - RNA, 19 nt, Homo sapiens
  misc_RNA (1)...(19): siRNA sense strand
caacagcagggcauuugca

SEQ ID NO: 1843602 - RNA, 19 nt, Homo sapiens
  misc_RNA (1)...(19): siRNA sense strand
ggccuucaccugccacuca

SEQ ID NO: 1843603 - RNA, 19 nt, Homo sapiens
  misc_RNA (1)...(19): siRNA sense strand
ggauguggcaaagcucuug

SEQ ID NO: 1843604 - RNA, 19 nt, Homo sapiens
  misc_RNA (1)...(19): siRNA sense strand
gcccuuggccauccaguuc

SEQ ID NO: 1843605 - RNA, 19 nt, Homo sapiens
  misc_RNA (1)...(19): siRNA sense strand
ccacugcacaagccagaug

SEQ ID NO: 1843606 - RNA, 19 nt, Homo sapiens
  misc_RNA (1)...(19): siRNA sense strand
ccacugagggcagaaccaa

SEQ ID NO: 1843607 - RNA, 19 nt, Homo sapiens
  misc_RNA (1)...(19): siRNA sense strand
ggaagcccuuggccaucca

SEQ ID NO: 1843608 - RNA, 19 nt, Homo sapiens
  misc_RNA (1)...(19): siRNA sense strand
gccgggagaaggcuuacaa

SEQ ID NO: 1843609 - RNA, 19 nt, Homo sapiens
  misc_RNA (1)...(19): siRNA sense strand
accacugucucauuaaaca

SEQ ID NO: 1843610 - RNA, 19 nt, Homo sapiens
  misc_RNA (1)...(19): siRNA sense strand
uuacaagugcgaugaaugc

SEQ ID NO: 1843611 - RNA, 19 nt, Homo sapiens
  misc_RNA (1)...(19): siRNA sense strand
gaaaguagaugguaacaug

SEQ ID NO: 1843612 - RNA, 19 nt, Homo sapiens
  misc_RNA (1)...(19): siRNA sense strand
gguaggagauggagaaauu

SEQ ID NO: 1843613 - RNA, 19 nt, Homo sapiens
  misc_RNA (1)...(19): siRNA sense strand
ucagagaacucauacagua

SEQ ID NO: 1843614 - RNA, 19 nt, Homo sapiens
  misc_RNA (1)...(19): siRNA sense strand
gaaaccaagucucauuaaa

SEQ ID NO: 1843615 - RNA, 19 nt, Homo sapiens
  misc_RNA (1)...(19): siRNA sense strand
ugacuuagauggauugauu

SEQ ID NO: 1843616 - RNA, 19 nt, Homo sapiens
  misc_RNA (1)...(19): siRNA sense strand
caucagagcagacauauaa

SEQ ID NO: 1843617 - RNA, 19 nt, Homo sapiens
  misc_RNA (1)...(19): siRNA sense strand
gaagucacaucucauauca

SEQ ID NO: 1843618 - RNA, 19 nt, Homo sapiens
  misc_RNA (1)...(19): siRNA sense strand
gaagucacaucucauauca

SEQ ID NO: 1843619 - RNA, 19 nt, Homo sapiens
  misc_RNA (1)...(19): siRNA sense strand
gggagaaacucuaugaaug

SEQ ID NO: 1843620 - RNA, 19 nt, Homo sapiens
  misc_RNA (1)...(19): siRNA sense strand
gaagucaagucucaucaau

SEQ ID NO: 1843621 - RNA, 19 nt, Homo sapiens
  misc_RNA (1)...(19): siRNA sense strand
ggucgagucucauuaauca

SEQ ID NO: 1843622 - RNA, 19 nt, Homo sapiens
  misc_RNA (1)...(19): siRNA sense strand
gggagggccuuuagugaaa

SEQ ID NO: 1843623 - RNA, 19 nt, Homo sapiens
  misc_RNA (1)...(19): siRNA sense strand
agagaaaccuuaugagugu

SEQ ID NO: 1843624 - RNA, 19 nt, Homo sapiens
  misc_RNA (1)...(19): siRNA sense strand
gaaauuccaaguucagauu

SEQ ID NO: 1843625 - RNA, 19 nt, Homo sapiens
  misc_RNA (1)...(19): siRNA sense strand
gagagaaacccuaugaaug

SEQ ID NO: 1843626 - RNA, 19 nt, Homo sapiens
  misc_RNA (1)...(19): siRNA sense strand
gagagaaacccuaugaaug

SEQ ID NO: 1843627 - RNA, 19 nt, Homo sapiens
  misc_RNA (1)...(19): siRNA sense strand
ucagaugacuuuaaugugu

SEQ ID NO: 1843628 - RNA, 19 nt, Homo sapiens
  misc_RNA (1)...(19): siRNA sense strand
gcucaucaaucaucagaga

SEQ ID NO: 1843629 - RNA, 19 nt, Homo sapiens
  misc_RNA (1)...(19): siRNA sense strand
ccagaagucucaguuuauu

SEQ ID NO: 1843630 - RNA, 19 nt, Homo sapiens
  misc_RNA (1)...(19): siRNA sense strand
ggagaaacccuaugaaugc

SEQ ID NO: 1843631 - RNA, 19 nt, Homo sapiens
  misc_RNA (1)...(19): siRNA sense strand
gaagucacaucucauaucg

SEQ ID NO: 1843632 - RNA, 19 nt, Homo sapiens
  misc_RNA (1)...(19): siRNA sense strand
gaaggugacuuagauggau

SEQ ID NO: 1843633 - RNA, 19 nt, Homo sapiens
  misc_RNA (1)...(19): siRNA sense strand
agucacagcucaucaauca

SEQ ID NO: 1843634 - RNA, 19 nt, Homo sapiens
  misc_RNA (1)...(19): siRNA sense strand
agucacagcugguuaauca

SEQ ID NO: 1843635 - RNA, 19 nt, Homo sapiens
  misc_RNA (1)...(19): siRNA sense strand
ggagagaaacccuaugaau

SEQ ID NO: 1843636 - RNA, 19 nt, Homo sapiens
  misc_RNA (1)...(19): siRNA sense strand
ggagagaaacccuaugaau

SEQ ID NO: 1843637 - RNA, 19 nt, Homo sapiens
  misc_RNA (1)...(19): siRNA sense strand
agucagagcuuauuagaca

SEQ ID NO: 1843638 - RNA, 19 nt, Homo sapiens
  misc_RNA (1)...(19): siRNA sense strand
ggauacugauaccugguua

SEQ ID NO: 1843639 - RNA, 19 nt, Homo sapiens
  misc_RNA (1)...(19): siRNA sense strand
ucucggaagucacaccuua

SEQ ID NO: 1843640 - RNA, 19 nt, Homo sapiens
  misc_RNA (1)...(19): siRNA sense strand
ccagaagucacaucucaua

SEQ ID NO: 1843641 - RNA, 19 nt, Homo sapiens
  misc_RNA (1)...(19): siRNA sense strand
gaagucagagcuuauuaga

SEQ ID NO: 1843642 - RNA, 19 nt, Homo sapiens
  misc_RNA (1)...(19): siRNA sense strand
aaacagugaaggugacuua

SEQ ID NO: 1843643 - RNA, 19 nt, Homo sapiens
  misc_RNA (1)...(19): siRNA sense strand
acacaucacagaacucaua

SEQ ID NO: 1843644 - RNA, 19 nt, Homo sapiens
  misc_RNA (1)...(19): siRNA sense strand
gagaagucagagcuuauua

SEQ ID NO: 1843645 - RNA, 19 nt, Homo sapiens
  misc_RNA (1)...(19): siRNA sense strand
ccacaucaaaggacacaua

SEQ ID NO: 1843646 - RNA, 19 nt, Homo sapiens
  misc_RNA (1)...(19): siRNA sense strand
aaucacagcucguuagaca

SEQ ID NO: 1843647 - RNA, 19 nt, Homo sapiens
  misc_RNA (1)...(19): siRNA sense strand
uaagaaaccaagucucauu

SEQ ID NO: 1843648 - RNA, 19 nt, Homo sapiens
  misc_RNA (1)...(19): siRNA sense strand
agucaagucucaucaauca

SEQ ID NO: 1843649 - RNA, 19 nt, Homo sapiens
  misc_RNA (1)...(19): siRNA sense strand
gggagaaacccuaugaaug

SEQ ID NO: 1843650 - RNA, 19 nt, Homo sapiens
  misc_RNA (1)...(19): siRNA sense strand
ucagaagucacaucucaua

SEQ ID NO: 1843651 - RNA, 19 nt, Homo sapiens
  misc_RNA (1)...(19): siRNA sense strand
gaaaucacagcucguuaga

SEQ ID NO: 1843652 - RNA, 19 nt, Homo sapiens
  misc_RNA (1)...(19): siRNA sense strand
ggagagaaaccuuaugagu

SEQ ID NO: 1843653 - RNA, 19 nt, Homo sapiens
  misc_RNA (1)...(19): siRNA sense strand
aaacaucagagcagacaua

SEQ ID NO: 1843654 - RNA, 19 nt, Homo sapiens
  misc_RNA (1)...(19): siRNA sense strand
caucaaucaucagagaaua

SEQ ID NO: 1843655 - RNA, 19 nt, Homo sapiens
  misc_RNA (1)...(19): siRNA sense strand
ggaaagccuucagcaggaa

SEQ ID NO: 1843656 - RNA, 19 nt, Homo sapiens
  misc_RNA (1)...(19): siRNA sense strand
ggaaagccuucagcaggaa

SEQ ID NO: 1843657 - RNA, 19 nt, Homo sapiens
  misc_RNA (1)...(19): siRNA sense strand
uauaagagacauagccuuu

SEQ ID NO: 1843658 - RNA, 19 nt, Homo sapiens
  misc_RNA (1)...(19): siRNA sense strand
gagaagucggagcuaauua

SEQ ID NO: 1843659 - RNA, 19 nt, Homo sapiens
  misc_RNA (1)...(19): siRNA sense strand
gggaaggccuuuggugaga

SEQ ID NO: 1843660 - RNA, 19 nt, Homo sapiens
  misc_RNA (1)...(19): siRNA sense strand
caucucauaucacaucaga

SEQ ID NO: 1843661 - RNA, 19 nt, Homo sapiens
  misc_RNA (1)...(19): siRNA sense strand
caucucauaucacaucaga

SEQ ID NO: 1843662 - RNA, 19 nt, Homo sapiens
  misc_RNA (1)...(19): siRNA sense strand
ggagagaaacccuauggau

SEQ ID NO: 1843663 - RNA, 19 nt, Homo sapiens
  misc_RNA (1)...(19): siRNA sense strand
ggagagaagccuuaucgau

SEQ ID NO: 1843664 - RNA, 19 nt, Homo sapiens
  misc_RNA (1)...(19): siRNA sense strand
ugaaugcaaugaauguaga

SEQ ID NO: 1843665 - RNA, 19 nt, Homo sapiens
  misc_RNA (1)...(19): siRNA sense strand
cuaaauacccaucagagaa

SEQ ID NO: 1843666 - RNA, 19 nt, Homo sapiens
  misc_RNA (1)...(19): siRNA sense strand
ggaaaucacagcucguuag

SEQ ID NO: 1843667 - RNA, 19 nt, Homo sapiens
  misc_RNA (1)...(19): siRNA sense strand
ggagagaaaccucauggau

SEQ ID NO: 1843668 - RNA, 19 nt, Homo sapiens
  misc_RNA (1)...(19): siRNA sense strand
gaaacccuauggaugcaau

SEQ ID NO: 1843669 - RNA, 19 nt, Homo sapiens
  misc_RNA (1)...(19): siRNA sense strand
gaaaaguccaaucucauua

SEQ ID NO: 1843670 - RNA, 19 nt, Homo sapiens
  misc_RNA (1)...(19): siRNA sense strand
ugucagaagucacaucuca

SEQ ID NO: 1843671 - RNA, 19 nt, Homo sapiens
  misc_RNA (1)...(19): siRNA sense strand
caaauuggaggaaggagaa

SEQ ID NO: 1843672 - RNA, 19 nt, Homo sapiens
  misc_RNA (1)...(19): siRNA sense strand
ucccagaaaucacagcuaa

SEQ ID NO: 1843673 - RNA, 19 nt, Homo sapiens
  misc_RNA (1)...(19): siRNA sense strand
acaaggaugugauguugga

SEQ ID NO: 1843674 - RNA, 19 nt, Homo sapiens
  misc_RNA (1)...(19): siRNA sense strand
gaaaccucauggaugcauu

SEQ ID NO: 1843675 - RNA, 19 nt, Homo sapiens
  misc_RNA (1)...(19): siRNA sense strand
uaagagacauagccuuugg

SEQ ID NO: 1843676 - RNA, 19 nt, Homo sapiens
  misc_RNA (1)...(19): siRNA sense strand
gaaguuaugaaaccagaug

SEQ ID NO: 1843677 - RNA, 19 nt, Homo sapiens
  misc_RNA (1)...(19): siRNA sense strand
ucacaucagaggacacaua

SEQ ID NO: 1843678 - RNA, 19 nt, Homo sapiens
  misc_RNA (1)...(19): siRNA sense strand
agacaucagacaauucaua

SEQ ID NO: 1843679 - RNA, 19 nt, Homo sapiens
  misc_RNA (1)...(19): siRNA sense strand
ggaagucacaucucauauc

SEQ ID NO: 1843680 - RNA, 19 nt, Homo sapiens
  misc_RNA (1)...(19): siRNA sense strand
aaccaagucucauuaaaca

SEQ ID NO: 1843681 - RNA, 19 nt, Homo sapiens
  misc_RNA (1)...(19): siRNA sense strand
cagaugacuuuaauguguu

SEQ ID NO: 1843682 - RNA, 19 nt, Homo sapiens
  misc_RNA (1)...(19): siRNA sense strand
aaagaggucaugaauguga

SEQ ID NO: 1843683 - RNA, 19 nt, Homo sapiens
  misc_RNA (1)...(19): siRNA sense strand
gagcuaauuagacaucuga

SEQ ID NO: 1843684 - RNA, 19 nt, Homo sapiens
  misc_RNA (1)...(19): siRNA sense strand
cgauuuaucuguggacuuc

SEQ ID NO: 1843685 - RNA, 19 nt, Homo sapiens
  misc_RNA (1)...(19): siRNA sense strand
auacaaggaugugauguug

SEQ ID NO: 1843686 - RNA, 19 nt, Homo sapiens
  misc_RNA (1)...(19): siRNA sense strand
gaacacauacaggagagaa

SEQ ID NO: 1843687 - RNA, 19 nt, Homo sapiens
  misc_RNA (1)...(19): siRNA sense strand
cagaaucagaugacuuuaa

SEQ ID NO: 1843688 - RNA, 19 nt, Homo sapiens
  misc_RNA (1)...(19): siRNA sense strand
gagaaacucuaugaaugca

SEQ ID NO: 1843689 - RNA, 19 nt, Homo sapiens
  misc_RNA (1)...(19): siRNA sense strand
ggaaagccuucucccaaaa

SEQ ID NO: 1843690 - RNA, 19 nt, Homo sapiens
  misc_RNA (1)...(19): siRNA sense strand
gauaaccaagacaagcuua

SEQ ID NO: 1843691 - RNA, 19 nt, Homo sapiens
  misc_RNA (1)...(19): siRNA sense strand
gaagucggagcuaauuaga

SEQ ID NO: 1843692 - RNA, 19 nt, Homo sapiens
  misc_RNA (1)...(19): siRNA sense strand
gaaugcagucuuuguagga

SEQ ID NO: 1843693 - RNA, 19 nt, Homo sapiens
  misc_RNA (1)...(19): siRNA sense strand
ggaaggccuuuggugagaa

SEQ ID NO: 1843694 - RNA, 19 nt, Homo sapiens
  misc_RNA (1)...(19): siRNA sense strand
agacaucagagaacucaua

SEQ ID NO: 1843695 - RNA, 19 nt, Homo sapiens
  misc_RNA (1)...(19): siRNA sense strand
gaacucacacaggaacaaa

SEQ ID NO: 1843696 - RNA, 19 nt, Homo sapiens
  misc_RNA (1)...(19): siRNA sense strand
ucacaucucauaucgcauu

SEQ ID NO: 1843697 - RNA, 19 nt, Homo sapiens
  misc_RNA (1)...(19): siRNA sense strand
aagaaaccaagucucauua

SEQ ID NO: 1843698 - RNA, 19 nt, Homo sapiens
  misc_RNA (1)...(19): siRNA sense strand
ggagaaacucuaugaaugc

SEQ ID NO: 1843699 - RNA, 19 nt, Homo sapiens
  misc_RNA (1)...(19): siRNA sense strand
cagugaaggugacuuagau

SEQ ID NO: 1843700 - RNA, 19 nt, Homo sapiens
  misc_RNA (1)...(19): siRNA sense strand
gaaaucaaacagugaaggu

SEQ ID NO: 1843701 - RNA, 19 nt, Homo sapiens
  misc_RNA (1)...(19): siRNA sense strand
gaacacacacaggagagaa

SEQ ID NO: 1843702 - RNA, 19 nt, Homo sapiens
  misc_RNA (1)...(19): siRNA sense strand
gagagaagccuuuugaaug

SEQ ID NO: 1843703 - RNA, 19 nt, Homo sapiens
  misc_RNA (1)...(19): siRNA sense strand
cuaauuagacaucugagaa

SEQ ID NO: 1843704 - RNA, 19 nt, Homo sapiens
  misc_RNA (1)...(19): siRNA sense strand
uaaauacccaucagagaau

SEQ ID NO: 1843705 - RNA, 19 nt, Homo sapiens
  misc_RNA (1)...(19): siRNA sense strand
gcuaaauacccaucagaga

SEQ ID NO: 1843706 - RNA, 19 nt, Homo sapiens
  misc_RNA (1)...(19): siRNA sense strand
cagaaaucacagcuaaaua

SEQ ID NO: 1843707 - RNA, 19 nt, Homo sapiens
  misc_RNA (1)...(19): siRNA sense strand
ccucauggaugcauucagu

SEQ ID NO: 1843708 - RNA, 19 nt, Homo sapiens
  misc_RNA (1)...(19): siRNA sense strand
gagaaacccuaugaaugca

SEQ ID NO: 1843709 - RNA, 19 nt, Homo sapiens
  misc_RNA (1)...(19): siRNA sense strand
ggacacauacgggugagaa

SEQ ID NO: 1843710 - RNA, 19 nt, Homo sapiens
  misc_RNA (1)...(19): siRNA sense strand
ccucucagaagaauuuaua

SEQ ID NO: 1843711 - RNA, 19 nt, Homo sapiens
  misc_RNA (1)...(19): siRNA sense strand
gcucaaggcugauggcaau

SEQ ID NO: 1843712 - RNA, 19 nt, Homo sapiens
  misc_RNA (1)...(19): siRNA sense strand
ccacauguaugacagagaa

SEQ ID NO: 1843713 - RNA, 19 nt, Homo sapiens
  misc_RNA (1)...(19): siRNA sense strand
gaagugcccagaugaauga

SEQ ID NO: 1843714 - RNA, 19 nt, Homo sapiens
  misc_RNA (1)...(19): siRNA sense strand
gaaagaagaggacgagaag

SEQ ID NO: 1843715 - RNA, 19 nt, Homo sapiens
  misc_RNA (1)...(19): siRNA sense strand
gaaagcacccugggaauca

SEQ ID NO: 1843716 - RNA, 19 nt, Homo sapiens
  misc_RNA (1)...(19): siRNA sense strand
gaaucaaucuuccuaagcu

SEQ ID NO: 1843717 - RNA, 19 nt, Homo sapiens
  misc_RNA (1)...(19): siRNA sense strand
caaagacgcuggccuucag

SEQ ID NO: 1843718 - RNA, 19 nt, Homo sapiens
  misc_RNA (1)...(19): siRNA sense strand
caucugcgcuauguggaua

SEQ ID NO: 1843719 - RNA, 19 nt, Homo sapiens
  misc_RNA (1)...(19): siRNA sense strand
ccagauuacugacacugaa

SEQ ID NO: 1843720 - RNA, 19 nt, Homo sapiens
  misc_RNA (1)...(19): siRNA sense strand
ggcuuucucugcucuguaa

SEQ ID NO: 1843721 - RNA, 19 nt, Homo sapiens
  misc_RNA (1)...(19): siRNA sense strand
gcagccaccacauguauga

SEQ ID NO: 1843722 - RNA, 19 nt, Homo sapiens
  misc_RNA (1)...(19): siRNA sense strand
cggaggacaugaugaagga

SEQ ID NO: 1843723 - RNA, 19 nt, Homo sapiens
  misc_RNA (1)...(19): siRNA sense strand
ugacagacaucuacuugcu

SEQ ID NO: 1843724 - RNA, 19 nt, Homo sapiens
  misc_RNA (1)...(19): siRNA sense strand
ggaaagcacccugggaauc

SEQ ID NO: 1843725 - RNA, 19 nt, Homo sapiens
  misc_RNA (1)...(19): siRNA sense strand
ugaaugaacugcccuaccu

SEQ ID NO: 1843726 - RNA, 19 nt, Homo sapiens
  misc_RNA (1)...(19): siRNA sense strand
ggaacagcauccacauggu

SEQ ID NO: 1843727 - RNA, 19 nt, Homo sapiens
  misc_RNA (1)...(19): siRNA sense strand
ucacggaggacaugaugaa

SEQ ID NO: 1843728 - RNA, 19 nt, Homo sapiens
  misc_RNA (1)...(19): siRNA sense strand
gagagggaccugacagaca

SEQ ID NO: 1843729 - RNA, 19 nt, Homo sapiens
  misc_RNA (1)...(19): siRNA sense strand
gggcagccaccacauguau

SEQ ID NO: 1843730 - RNA, 19 nt, Homo sapiens
  misc_RNA (1)...(19): siRNA sense strand
agaaagaagaggacgagaa

SEQ ID NO: 1843731 - RNA, 19 nt, Homo sapiens
  misc_RNA (1)...(19): siRNA sense strand
cuuauaaccagauuacuga

SEQ ID NO: 1843732 - RNA, 19 nt, Homo sapiens
  misc_RNA (1)...(19): siRNA sense strand
agagggaccugacagacau

SEQ ID NO: 1843733 - RNA, 19 nt, Homo sapiens
  misc_RNA (1)...(19): siRNA sense strand
gcugcgaagugcccagaug

SEQ ID NO: 1843734 - RNA, 19 nt, Homo sapiens
  misc_RNA (1)...(19): siRNA sense strand
gcuauguggauauuucuga

SEQ ID NO: 1843735 - RNA, 19 nt, Homo sapiens
  misc_RNA (1)...(19): siRNA sense strand
cuacauccaucugcgcuau

SEQ ID NO: 1843736 - RNA, 19 nt, Homo sapiens
  misc_RNA (1)...(19): siRNA sense strand
cgaagugcccagaugaaug

SEQ ID NO: 1843737 - RNA, 19 nt, Homo sapiens
  misc_RNA (1)...(19): siRNA sense strand
gcuuauaaccagauuacug

SEQ ID NO: 1843738 - RNA, 19 nt, Homo sapiens
  misc_RNA (1)...(19): siRNA sense strand
ccccaaagcuggaaauuca

SEQ ID NO: 1843739 - RNA, 19 nt, Homo sapiens
  misc_RNA (1)...(19): siRNA sense strand
aagaagaggacgagaagga

SEQ ID NO: 1843740 - RNA, 19 nt, Homo sapiens
  misc_RNA (1)...(19): siRNA sense strand
ggcaaucggcugcgaagug

SEQ ID NO: 1843741 - RNA, 19 nt, Homo sapiens
  misc_RNA (1)...(19): siRNA sense strand
gcuggaaauucaucacaac

SEQ ID NO: 1843742 - RNA, 19 nt, Homo sapiens
  misc_RNA (1)...(19): siRNA sense strand
uggaggaucugagcaaucu

SEQ ID NO: 1843743 - RNA, 19 nt, Homo sapiens
  misc_RNA (1)...(19): siRNA sense strand
ggaccugacagacaucuac

SEQ ID NO: 1843744 - RNA, 19 nt, Homo sapiens
  misc_RNA (1)...(19): siRNA sense strand
cuugaaacccugaaucuca

SEQ ID NO: 1843745 - RNA, 19 nt, Homo sapiens
  misc_RNA (1)...(19): siRNA sense strand
cgagacaaccagauugaca

SEQ ID NO: 1843746 - RNA, 19 nt, Homo sapiens
  misc_RNA (1)...(19): siRNA sense strand
gcgaagugcccagaugaau

SEQ ID NO: 1843747 - RNA, 19 nt, Homo sapiens
  misc_RNA (1)...(19): siRNA sense strand
ugaaaucauugcaguaccu

SEQ ID NO: 1843748 - RNA, 19 nt, Homo sapiens
  misc_RNA (1)...(19): siRNA sense strand
augucaagcuggagguuaa

SEQ ID NO: 1843749 - RNA, 19 nt, Homo sapiens
  misc_RNA (1)...(19): siRNA sense strand
cccaaaacaugcugaagaa

SEQ ID NO: 1843750 - RNA, 19 nt, Homo sapiens
  misc_RNA (1)...(19): siRNA sense strand
ugggcuggcucaugcuuau

SEQ ID NO: 1843751 - RNA, 19 nt, Homo sapiens
  misc_RNA (1)...(19): siRNA sense strand
ccugacagacaucuacuug

SEQ ID NO: 1843752 - RNA, 19 nt, Homo sapiens
  misc_RNA (1)...(19): siRNA sense strand
acacugaaggcaucucuca

SEQ ID NO: 1843753 - RNA, 19 nt, Homo sapiens
  misc_RNA (1)...(19): siRNA sense strand
aaagcacccugggaaucaa

SEQ ID NO: 1843754 - RNA, 19 nt, Homo sapiens
  misc_RNA (1)...(19): siRNA sense strand
ccaaagcuggaaauucauc

SEQ ID NO: 1843755 - RNA, 19 nt, Homo sapiens
  misc_RNA (1)...(19): siRNA sense strand
ucaaagacgcuggccuuca

SEQ ID NO: 1843756 - RNA, 19 nt, Homo sapiens
  misc_RNA (1)...(19): siRNA sense strand
uaaagagagggaccugaca

SEQ ID NO: 1843757 - RNA, 19 nt, Homo sapiens
  misc_RNA (1)...(19): siRNA sense strand
gagccagaccaggaugauu

SEQ ID NO: 1843758 - RNA, 19 nt, Homo sapiens
  misc_RNA (1)...(19): siRNA sense strand
accugcagauugcuaguuu

SEQ ID NO: 1843759 - RNA, 19 nt, Homo sapiens
  misc_RNA (1)...(19): siRNA sense strand
gugcccagaugaaugaacu

SEQ ID NO: 1843760 - RNA, 19 nt, Homo sapiens
  misc_RNA (1)...(19): siRNA sense strand
ucucauccucgucuugaaa

SEQ ID NO: 1843761 - RNA, 19 nt, Homo sapiens
  misc_RNA (1)...(19): siRNA sense strand
ugaaggaagggcuuucucu

SEQ ID NO: 1843762 - RNA, 19 nt, Homo sapiens
  misc_RNA (1)...(19): siRNA sense strand
gcucaaggcugauggcaau

SEQ ID NO: 1843763 - RNA, 19 nt, Homo sapiens
  misc_RNA (1)...(19): siRNA sense strand
gaagugcccagaugaauga

SEQ ID NO: 1843764 - RNA, 19 nt, Homo sapiens
  misc_RNA (1)...(19): siRNA sense strand
gaaagaagaggacgagaag

SEQ ID NO: 1843765 - RNA, 19 nt, Homo sapiens
  misc_RNA (1)...(19): siRNA sense strand
gaaagcacccugggaauca

SEQ ID NO: 1843766 - RNA, 19 nt, Homo sapiens
  misc_RNA (1)...(19): siRNA sense strand
gaaucaaucuuccuaagcu

SEQ ID NO: 1843767 - RNA, 19 nt, Homo sapiens
  misc_RNA (1)...(19): siRNA sense strand
caucugcgcuauguggaua

SEQ ID NO: 1843768 - RNA, 19 nt, Homo sapiens
  misc_RNA (1)...(19): siRNA sense strand
ccagauuacugacacugaa

SEQ ID NO: 1843769 - RNA, 19 nt, Homo sapiens
  misc_RNA (1)...(19): siRNA sense strand
ggcuuucucugcucuguaa

SEQ ID NO: 1843770 - RNA, 19 nt, Homo sapiens
  misc_RNA (1)...(19): siRNA sense strand
cggaggacaugaugaagga

SEQ ID NO: 1843771 - RNA, 19 nt, Homo sapiens
  misc_RNA (1)...(19): siRNA sense strand
ugacagacaucuacuugcu

SEQ ID NO: 1843772 - RNA, 19 nt, Homo sapiens
  misc_RNA (1)...(19): siRNA sense strand
ggaaagcacccugggaauc

SEQ ID NO: 1843773 - RNA, 19 nt, Homo sapiens
  misc_RNA (1)...(19): siRNA sense strand
ugaaugaacugcccuaccu

SEQ ID NO: 1843774 - RNA, 19 nt, Homo sapiens
  misc_RNA (1)...(19): siRNA sense strand
ggaacagcauccacauggu

SEQ ID NO: 1843775 - RNA, 19 nt, Homo sapiens
  misc_RNA (1)...(19): siRNA sense strand
ucacggaggacaugaugaa

SEQ ID NO: 1843776 - RNA, 19 nt, Homo sapiens
  misc_RNA (1)...(19): siRNA sense strand
gagagggaccugacagaca

SEQ ID NO: 1843777 - RNA, 19 nt, Homo sapiens
  misc_RNA (1)...(19): siRNA sense strand
agaaagaagaggacgagaa

SEQ ID NO: 1843778 - RNA, 19 nt, Homo sapiens
  misc_RNA (1)...(19): siRNA sense strand
cuuauaaccagauuacuga

SEQ ID NO: 1843779 - RNA, 19 nt, Homo sapiens
  misc_RNA (1)...(19): siRNA sense strand
agagggaccugacagacau

SEQ ID NO: 1843780 - RNA, 19 nt, Homo sapiens
  misc_RNA (1)...(19): siRNA sense strand
gcugcgaagugcccagaug

SEQ ID NO: 1843781 - RNA, 19 nt, Homo sapiens
  misc_RNA (1)...(19): siRNA sense strand
gcuauguggauauuucuga

SEQ ID NO: 1843782 - RNA, 19 nt, Homo sapiens
  misc_RNA (1)...(19): siRNA sense strand
cuacauccaucugcgcuau

SEQ ID NO: 1843783 - RNA, 19 nt, Homo sapiens
  misc_RNA (1)...(19): siRNA sense strand
cgaagugcccagaugaaug

SEQ ID NO: 1843784 - RNA, 19 nt, Homo sapiens
  misc_RNA (1)...(19): siRNA sense strand
gcuuauaaccagauuacug

SEQ ID NO: 1843785 - RNA, 19 nt, Homo sapiens
  misc_RNA (1)...(19): siRNA sense strand
aagaagaggacgagaagga

SEQ ID NO: 1843786 - RNA, 19 nt, Homo sapiens
  misc_RNA (1)...(19): siRNA sense strand
ggcaaucggcugcgaagug

SEQ ID NO: 1843787 - RNA, 19 nt, Homo sapiens
  misc_RNA (1)...(19): siRNA sense strand
uggaggaucugagcaaucu

SEQ ID NO: 1843788 - RNA, 19 nt, Homo sapiens
  misc_RNA (1)...(19): siRNA sense strand
ggaccugacagacaucuac

SEQ ID NO: 1843789 - RNA, 19 nt, Homo sapiens
  misc_RNA (1)...(19): siRNA sense strand
cuugaaacccugaaucuca

SEQ ID NO: 1843790 - RNA, 19 nt, Homo sapiens
  misc_RNA (1)...(19): siRNA sense strand
cgagacaaccagauugaca

SEQ ID NO: 1843791 - RNA, 19 nt, Homo sapiens
  misc_RNA (1)...(19): siRNA sense strand
gcgaagugcccagaugaau

SEQ ID NO: 1843792 - RNA, 19 nt, Homo sapiens
  misc_RNA (1)...(19): siRNA sense strand
ugaaaucauugcaguaccu

SEQ ID NO: 1843793 - RNA, 19 nt, Homo sapiens
  misc_RNA (1)...(19): siRNA sense strand
ugggcuggcucaugcuuau

SEQ ID NO: 1843794 - RNA, 19 nt, Homo sapiens
  misc_RNA (1)...(19): siRNA sense strand
cccaaaacaugcugaagaa

SEQ ID NO: 1843795 - RNA, 19 nt, Homo sapiens
  misc_RNA (1)...(19): siRNA sense strand
augucaagcuggagguuaa

SEQ ID NO: 1843796 - RNA, 19 nt, Homo sapiens
  misc_RNA (1)...(19): siRNA sense strand
ccugacagacaucuacuug

SEQ ID NO: 1843797 - RNA, 19 nt, Homo sapiens
  misc_RNA (1)...(19): siRNA sense strand
acacugaaggcaucucuca

SEQ ID NO: 1843798 - RNA, 19 nt, Homo sapiens
  misc_RNA (1)...(19): siRNA sense strand
aaagcacccugggaaucaa

SEQ ID NO: 1843799 - RNA, 19 nt, Homo sapiens
  misc_RNA (1)...(19): siRNA sense strand
uaaagagagggaccugaca

SEQ ID NO: 1843800 - RNA, 19 nt, Homo sapiens
  misc_RNA (1)...(19): siRNA sense strand
gagccagaccaggaugauu

SEQ ID NO: 1843801 - RNA, 19 nt, Homo sapiens
  misc_RNA (1)...(19): siRNA sense strand
accugcagauugcuaguuu

SEQ ID NO: 1843802 - RNA, 19 nt, Homo sapiens
  misc_RNA (1)...(19): siRNA sense strand
gugcccagaugaaugaacu

SEQ ID NO: 1843803 - RNA, 19 nt, Homo sapiens
  misc_RNA (1)...(19): siRNA sense strand
ucucauccucgucuugaaa

SEQ ID NO: 1843804 - RNA, 19 nt, Homo sapiens
  misc_RNA (1)...(19): siRNA sense strand
ugaaggaagggcuuucucu

SEQ ID NO: 1843805 - RNA, 19 nt, Homo sapiens
  misc_RNA (1)...(19): siRNA sense strand
ggauagagguuuccaguuu

SEQ ID NO: 1843806 - RNA, 19 nt, Homo sapiens
  misc_RNA (1)...(19): siRNA sense strand
caagugaagucaacuguua

SEQ ID NO: 1843807 - RNA, 19 nt, Homo sapiens
  misc_RNA (1)...(19): siRNA sense strand
gcacgggaaugcacaauug

SEQ ID NO: 1843808 - RNA, 19 nt, Homo sapiens
  misc_RNA (1)...(19): siRNA sense strand
gcaaggagcccaagagaga

SEQ ID NO: 1843809 - RNA, 19 nt, Homo sapiens
  misc_RNA (1)...(19): siRNA sense strand
gauagagguuuccaguuug

SEQ ID NO: 1843810 - RNA, 19 nt, Homo sapiens
  misc_RNA (1)...(19): siRNA sense strand
gaggaugccugcuauaacu

SEQ ID NO: 1843811 - RNA, 19 nt, Homo sapiens
  misc_RNA (1)...(19): siRNA sense strand
gcaaugagugcuucaagug

SEQ ID NO: 1843812 - RNA, 19 nt, Homo sapiens
  misc_RNA (1)...(19): siRNA sense strand
ccucgucucuuccagauau

SEQ ID NO: 1843813 - RNA, 19 nt, Homo sapiens
  misc_RNA (1)...(19): siRNA sense strand
gccaucaacugcagcaaga

SEQ ID NO: 1843814 - RNA, 19 nt, Homo sapiens
  misc_RNA (1)...(19): siRNA sense strand
caagacaagugaagucaac

SEQ ID NO: 1843815 - RNA, 19 nt, Homo sapiens
  misc_RNA (1)...(19): siRNA sense strand
gcaaugcugcuacaacugu

SEQ ID NO: 1843816 - RNA, 19 nt, Homo sapiens
  misc_RNA (1)...(19): siRNA sense strand
aaagugaagugcuauaggu

SEQ ID NO: 1843817 - RNA, 19 nt, Homo sapiens
  misc_RNA (1)...(19): siRNA sense strand
cgguagagguggccacauu

SEQ ID NO: 1843818 - RNA, 19 nt, Homo sapiens
  misc_RNA (1)...(19): siRNA sense strand
uggugaaacuggucaugua

SEQ ID NO: 1843819 - RNA, 19 nt, Homo sapiens
  misc_RNA (1)...(19): siRNA sense strand
caagagagagcgagagcaa

SEQ ID NO: 1843820 - RNA, 19 nt, Homo sapiens
  misc_RNA (1)...(19): siRNA sense strand
ccaugcagaugagcagaaa

SEQ ID NO: 1843821 - RNA, 19 nt, Homo sapiens
  misc_RNA (1)...(19): siRNA sense strand
cuacaacuguggcaaacca

SEQ ID NO: 1843822 - RNA, 19 nt, Homo sapiens
  misc_RNA (1)...(19): siRNA sense strand
gcaagacaagugaagucaa

SEQ ID NO: 1843823 - RNA, 19 nt, Homo sapiens
  misc_RNA (1)...(19): siRNA sense strand
ugccaaggauugugaucuu

SEQ ID NO: 1843824 - RNA, 19 nt, Homo sapiens
  misc_RNA (1)...(19): siRNA sense strand
agagagagcgagagcaaug

SEQ ID NO: 1843825 - RNA, 19 nt, Homo sapiens
  misc_RNA (1)...(19): siRNA sense strand
aaagacugcaccaaaguga

SEQ ID NO: 1843826 - RNA, 19 nt, Homo sapiens
  misc_RNA (1)...(19): siRNA sense strand
ggaggaugccugcuauaac

SEQ ID NO: 1843827 - RNA, 19 nt, Homo sapiens
  misc_RNA (1)...(19): siRNA sense strand
gccaaggauugugaucuuc

SEQ ID NO: 1843828 - RNA, 19 nt, Homo sapiens
  misc_RNA (1)...(19): siRNA sense strand
gacaagugaagucaacugu

SEQ ID NO: 1843829 - RNA, 19 nt, Homo sapiens
  misc_RNA (1)...(19): siRNA sense strand
caaugagugcuucaagugu

SEQ ID NO: 1843830 - RNA, 19 nt, Homo sapiens
  misc_RNA (1)...(19): siRNA sense strand
gguagagguggccacauug

SEQ ID NO: 1843831 - RNA, 19 nt, Homo sapiens
  misc_RNA (1)...(19): siRNA sense strand
ugcuauagguguggugaaa

SEQ ID NO: 1843832 - RNA, 19 nt, Homo sapiens
  misc_RNA (1)...(19): siRNA sense strand
auagagguuuccaguuugu

SEQ ID NO: 1843833 - RNA, 19 nt, Homo sapiens
  misc_RNA (1)...(19): siRNA sense strand
cuauagguguggugaaacu

SEQ ID NO: 1843834 - RNA, 19 nt, Homo sapiens
  misc_RNA (1)...(19): siRNA sense strand
ccaaagugaagugcuauag

SEQ ID NO: 1843835 - RNA, 19 nt, Homo sapiens
  misc_RNA (1)...(19): siRNA sense strand
ccaaggauugugaucuuca

SEQ ID NO: 1843836 - RNA, 19 nt, Homo sapiens
  misc_RNA (1)...(19): siRNA sense strand
agagguuuccaguuuguuu

SEQ ID NO: 1843837 - RNA, 19 nt, Homo sapiens
  misc_RNA (1)...(19): siRNA sense strand
ggugaaacuggucauguag

SEQ ID NO: 1843838 - RNA, 19 nt, Homo sapiens
  misc_RNA (1)...(19): siRNA sense strand
caaggauugugaucuucag

SEQ ID NO: 1843839 - RNA, 19 nt, Homo sapiens
  misc_RNA (1)...(19): siRNA sense strand
caaagugaagugcuauagg

SEQ ID NO: 1843840 - RNA, 19 nt, Homo sapiens
  misc_RNA (1)...(19): siRNA sense strand
cuucaaguguggacgaucu

SEQ ID NO: 1843841 - RNA, 19 nt, Homo sapiens
  misc_RNA (1)...(19): siRNA sense strand
aggaggaugccugcuauaa

SEQ ID NO: 1843842 - RNA, 19 nt, Homo sapiens
  misc_RNA (1)...(19): siRNA sense strand
uggagaauucggacacauu

SEQ ID NO: 1843843 - RNA, 19 nt, Homo sapiens
  misc_RNA (1)...(19): siRNA sense strand
uuaccgcuguggcgaguca

SEQ ID NO: 1843844 - RNA, 19 nt, Homo sapiens
  misc_RNA (1)...(19): siRNA sense strand
gagguuuccaguuuguuuc

SEQ ID NO: 1843845 - RNA, 19 nt, Homo sapiens
  misc_RNA (1)...(19): siRNA sense strand
cagcaagacaagugaaguc

SEQ ID NO: 1843846 - RNA, 19 nt, Homo sapiens
  misc_RNA (1)...(19): siRNA sense strand
gaaagaaacucuacaaaug

SEQ ID NO: 1843847 - RNA, 19 nt, Homo sapiens
  misc_RNA (1)...(19): siRNA sense strand
gagaaacccuucaaaugua

SEQ ID NO: 1843848 - RNA, 19 nt, Homo sapiens
  misc_RNA (1)...(19): siRNA sense strand
gagaaacccuucaaaugua

SEQ ID NO: 1843849 - RNA, 19 nt, Homo sapiens
  misc_RNA (1)...(19): siRNA sense strand
ggaaagaaaugcuucaaau

SEQ ID NO: 1843850 - RNA, 19 nt, Homo sapiens
  misc_RNA (1)...(19): siRNA sense strand
ggacauaagagaauucaua

SEQ ID NO: 1843851 - RNA, 19 nt, Homo sapiens
  misc_RNA (1)...(19): siRNA sense strand
gagaaguccuguaaaugua

SEQ ID NO: 1843852 - RNA, 19 nt, Homo sapiens
  misc_RNA (1)...(19): siRNA sense strand
gagaaacccuacaaauuug

SEQ ID NO: 1843853 - RNA, 19 nt, Homo sapiens
  misc_RNA (1)...(19): siRNA sense strand
gagagaaacccuacaaauu

SEQ ID NO: 1843854 - RNA, 19 nt, Homo sapiens
  misc_RNA (1)...(19): siRNA sense strand
aaagagcccuggaauauga

SEQ ID NO: 1843855 - RNA, 19 nt, Homo sapiens
  misc_RNA (1)...(19): siRNA sense strand
gagagaagcccuacaaaug

SEQ ID NO: 1843856 - RNA, 19 nt, Homo sapiens
  misc_RNA (1)...(19): siRNA sense strand
gagagaagcccuacaaaug

SEQ ID NO: 1843857 - RNA, 19 nt, Homo sapiens
  misc_RNA (1)...(19): siRNA sense strand
ggaaugugauguuagagaa

SEQ ID NO: 1843858 - RNA, 19 nt, Homo sapiens
  misc_RNA (1)...(19): siRNA sense strand
cuacaaaugugaagaaugu

SEQ ID NO: 1843859 - RNA, 19 nt, Homo sapiens
  misc_RNA (1)...(19): siRNA sense strand
cuacaaaugugaagaaugu

SEQ ID NO: 1843860 - RNA, 19 nt, Homo sapiens
  misc_RNA (1)...(19): siRNA sense strand
cuacaaaugugaagaaugu

SEQ ID NO: 1843861 - RNA, 19 nt, Homo sapiens
  misc_RNA (1)...(19): siRNA sense strand
cuacaaaugugaagaaugu

SEQ ID NO: 1843862 - RNA, 19 nt, Homo sapiens
  misc_RNA (1)...(19): siRNA sense strand
cuacaaaugugaagaaugu

SEQ ID NO: 1843863 - RNA, 19 nt, Homo sapiens
  misc_RNA (1)...(19): siRNA sense strand
cuacaaaugugaagaaugu

SEQ ID NO: 1843864 - RNA, 19 nt, Homo sapiens
  misc_RNA (1)...(19): siRNA sense strand
cuacaaaugugaagaaugu

SEQ ID NO: 1843865 - RNA, 19 nt, Homo sapiens
  misc_RNA (1)...(19): siRNA sense strand
ggaaagaaacucuacaaau

SEQ ID NO: 1843866 - RNA, 19 nt, Homo sapiens
  misc_RNA (1)...(19): siRNA sense strand
cuacaaaugugaagaaugu

SEQ ID NO: 1843867 - RNA, 19 nt, Homo sapiens
  misc_RNA (1)...(19): siRNA sense strand
cuacaaaugugaagaaugu

SEQ ID NO: 1843868 - RNA, 19 nt, Homo sapiens
  misc_RNA (1)...(19): siRNA sense strand
cuacaaaugugaagaaugu

SEQ ID NO: 1843869 - RNA, 19 nt, Homo sapiens
  misc_RNA (1)...(19): siRNA sense strand
cuacaaaugugaagaaugu

SEQ ID NO: 1843870 - RNA, 19 nt, Homo sapiens
  misc_RNA (1)...(19): siRNA sense strand
cuacaaaugugaagaaugu

SEQ ID NO: 1843871 - RNA, 19 nt, Homo sapiens
  misc_RNA (1)...(19): siRNA sense strand
gaagauaaacccuacaaau

SEQ ID NO: 1843872 - RNA, 19 nt, Homo sapiens
  misc_RNA (1)...(19): siRNA sense strand
gcacaaagaagguuauaau

SEQ ID NO: 1843873 - RNA, 19 nt, Homo sapiens
  misc_RNA (1)...(19): siRNA sense strand
ggagagaagucuuacaagu

SEQ ID NO: 1843874 - RNA, 19 nt, Homo sapiens
  misc_RNA (1)...(19): siRNA sense strand
agacaauccuuaacccuua

SEQ ID NO: 1843875 - RNA, 19 nt, Homo sapiens
  misc_RNA (1)...(19): siRNA sense strand
uaaagaauguggcaaagga

SEQ ID NO: 1843876 - RNA, 19 nt, Homo sapiens
  misc_RNA (1)...(19): siRNA sense strand
agagaaacccuacaaauuu

SEQ ID NO: 1843877 - RNA, 19 nt, Homo sapiens
  misc_RNA (1)...(19): siRNA sense strand
gauacacacuggagagaaa

SEQ ID NO: 1843878 - RNA, 19 nt, Homo sapiens
  misc_RNA (1)...(19): siRNA sense strand
gagagaaacccuacaaaug

SEQ ID NO: 1843879 - RNA, 19 nt, Homo sapiens
  misc_RNA (1)...(19): siRNA sense strand
cuacaaauguggagaaugu

SEQ ID NO: 1843880 - RNA, 19 nt, Homo sapiens
  misc_RNA (1)...(19): siRNA sense strand
gagagaaacccuacaaaug

SEQ ID NO: 1843881 - RNA, 19 nt, Homo sapiens
  misc_RNA (1)...(19): siRNA sense strand
gagagaaacccuacaaaug

SEQ ID NO: 1843882 - RNA, 19 nt, Homo sapiens
  misc_RNA (1)...(19): siRNA sense strand
gcaaagcauuuauaucauc

SEQ ID NO: 1843883 - RNA, 19 nt, Homo sapiens
  misc_RNA (1)...(19): siRNA sense strand
gagagaaacccuacaaaug

SEQ ID NO: 1843884 - RNA, 19 nt, Homo sapiens
  misc_RNA (1)...(19): siRNA sense strand
gagagaaacccuacaaaug

SEQ ID NO: 1843885 - RNA, 19 nt, Homo sapiens
  misc_RNA (1)...(19): siRNA sense strand
gagagaaacccuacaaaug

SEQ ID NO: 1843886 - RNA, 19 nt, Homo sapiens
  misc_RNA (1)...(19): siRNA sense strand
gagagaaacccuacaaaug

SEQ ID NO: 1843887 - RNA, 19 nt, Homo sapiens
  misc_RNA (1)...(19): siRNA sense strand
gagagaaacccuacaaaug

SEQ ID NO: 1843888 - RNA, 19 nt, Homo sapiens
  misc_RNA (1)...(19): siRNA sense strand
gagagaaacccuucaaaug

SEQ ID NO: 1843889 - RNA, 19 nt, Homo sapiens
  misc_RNA (1)...(19): siRNA sense strand
gaagagaaacccuacaaau

SEQ ID NO: 1843890 - RNA, 19 nt, Homo sapiens
  misc_RNA (1)...(19): siRNA sense strand
gagagaaacccuacaaaug

SEQ ID NO: 1843891 - RNA, 19 nt, Homo sapiens
  misc_RNA (1)...(19): siRNA sense strand
gagagaaacccuacaaaug

SEQ ID NO: 1843892 - RNA, 19 nt, Homo sapiens
  misc_RNA (1)...(19): siRNA sense strand
gauacacacuggagagaaa

SEQ ID NO: 1843893 - RNA, 19 nt, Homo sapiens
  misc_RNA (1)...(19): siRNA sense strand
gagagaaacccuacaaaug

SEQ ID NO: 1843894 - RNA, 19 nt, Homo sapiens
  misc_RNA (1)...(19): siRNA sense strand
gagagaaacccuucaaaug

SEQ ID NO: 1843895 - RNA, 19 nt, Homo sapiens
  misc_RNA (1)...(19): siRNA sense strand
gaagagaaacccuacaaau

SEQ ID NO: 1843896 - RNA, 19 nt, Homo sapiens
  misc_RNA (1)...(19): siRNA sense strand
gagagaaacccuacaaaug

SEQ ID NO: 1843897 - RNA, 19 nt, Homo sapiens
  misc_RNA (1)...(19): siRNA sense strand
gagagaaacccuacaaaug

SEQ ID NO: 1843898 - RNA, 19 nt, Homo sapiens
  misc_RNA (1)...(19): siRNA sense strand
gagagaaacccuacaaaug

SEQ ID NO: 1843899 - RNA, 19 nt, Homo sapiens
  misc_RNA (1)...(19): siRNA sense strand
agccagaccugauuacuua

SEQ ID NO: 1843900 - RNA, 19 nt, Homo sapiens
  misc_RNA (1)...(19): siRNA sense strand
ccucaaagcuuacuacaca

SEQ ID NO: 1843901 - RNA, 19 nt, Homo sapiens
  misc_RNA (1)...(19): siRNA sense strand
aagcagcucucaacccuua

SEQ ID NO: 1843902 - RNA, 19 nt, Homo sapiens
  misc_RNA (1)...(19): siRNA sense strand
gauaaacccuacaaaugug

SEQ ID NO: 1843903 - RNA, 19 nt, Homo sapiens
  misc_RNA (1)...(19): siRNA sense strand
gagaaacucuacaaaugug

SEQ ID NO: 1843904 - RNA, 19 nt, Homo sapiens
  misc_RNA (1)...(19): siRNA sense strand
gagaaacucuacaaaugug

SEQ ID NO: 1843905 - RNA, 19 nt, Homo sapiens
  misc_RNA (1)...(19): siRNA sense strand
gagaaacucuacaaaugug

SEQ ID NO: 1843906 - RNA, 19 nt, Homo sapiens
  misc_RNA (1)...(19): siRNA sense strand
gaaagaaaugcuucaaaug

SEQ ID NO: 1843907 - RNA, 19 nt, Homo sapiens
  misc_RNA (1)...(19): siRNA sense strand
agagaaaccuuacaagugu

SEQ ID NO: 1843908 - RNA, 19 nt, Homo sapiens
  misc_RNA (1)...(19): siRNA sense strand
agagaaaccuuacaagugu

SEQ ID NO: 1843909 - RNA, 19 nt, Homo sapiens
  misc_RNA (1)...(19): siRNA sense strand
agagaaaccuuacaagugu

SEQ ID NO: 1843910 - RNA, 19 nt, Homo sapiens
  misc_RNA (1)...(19): siRNA sense strand
gaaaagagcccuggaauau

SEQ ID NO: 1843911 - RNA, 19 nt, Homo sapiens
  misc_RNA (1)...(19): siRNA sense strand
gagaaacccuacaaaugug

SEQ ID NO: 1843912 - RNA, 19 nt, Homo sapiens
  misc_RNA (1)...(19): siRNA sense strand
gagaaacccuacaaaugug

SEQ ID NO: 1843913 - RNA, 19 nt, Homo sapiens
  misc_RNA (1)...(19): siRNA sense strand
gagaaacccuacaaaugug

SEQ ID NO: 1843914 - RNA, 19 nt, Homo sapiens
  misc_RNA (1)...(19): siRNA sense strand
gagagaaaccuuacaagug

SEQ ID NO: 1843915 - RNA, 19 nt, Homo sapiens
  misc_RNA (1)...(19): siRNA sense strand
gagaaacccuacaaaugug

SEQ ID NO: 1843916 - RNA, 19 nt, Homo sapiens
  misc_RNA (1)...(19): siRNA sense strand
gagaaacccuacaaaugug

SEQ ID NO: 1843917 - RNA, 19 nt, Homo sapiens
  misc_RNA (1)...(19): siRNA sense strand
gagaaacccuacaaaugug

SEQ ID NO: 1843918 - RNA, 19 nt, Homo sapiens
  misc_RNA (1)...(19): siRNA sense strand
gagaaacccuacaaaugug

SEQ ID NO: 1843919 - RNA, 19 nt, Homo sapiens
  misc_RNA (1)...(19): siRNA sense strand
gagagaaaccuuacaagug

SEQ ID NO: 1843920 - RNA, 19 nt, Homo sapiens
  misc_RNA (1)...(19): siRNA sense strand
gagaaacccuacaaaugug

SEQ ID NO: 1843921 - RNA, 19 nt, Homo sapiens
  misc_RNA (1)...(19): siRNA sense strand
ucaagucuuucuacacaua

SEQ ID NO: 1843922 - RNA, 19 nt, Homo sapiens
  misc_RNA (1)...(19): siRNA sense strand
gcacagcagaauuuauaua

SEQ ID NO: 1843923 - RNA, 19 nt, Homo sapiens
  misc_RNA (1)...(19): siRNA sense strand
gagagaaaccuuacaagug

SEQ ID NO: 1843924 - RNA, 19 nt, Homo sapiens
  misc_RNA (1)...(19): siRNA sense strand
gagaaacccuacaaaugug

SEQ ID NO: 1843925 - RNA, 19 nt, Homo sapiens
  misc_RNA (1)...(19): siRNA sense strand
gagaaacccuacaaaugug

SEQ ID NO: 1843926 - RNA, 19 nt, Homo sapiens
  misc_RNA (1)...(19): siRNA sense strand
ccucaacccuuacuaauca

SEQ ID NO: 1843927 - RNA, 19 nt, Homo sapiens
  misc_RNA (1)...(19): siRNA sense strand
cagcagaauuuauauagga

SEQ ID NO: 1843928 - RNA, 19 nt, Homo sapiens
  misc_RNA (1)...(19): siRNA sense strand
gagagaaaccauacaaaug

SEQ ID NO: 1843929 - RNA, 19 nt, Homo sapiens
  misc_RNA (1)...(19): siRNA sense strand
gcauuuauauggucuucaa

SEQ ID NO: 1843930 - RNA, 19 nt, Homo sapiens
  misc_RNA (1)...(19): siRNA sense strand
uaaagaauguggcaaagca

SEQ ID NO: 1843931 - RNA, 19 nt, Homo sapiens
  misc_RNA (1)...(19): siRNA sense strand
ggauuuauauggucuucaa

SEQ ID NO: 1843932 - RNA, 19 nt, Homo sapiens
  misc_RNA (1)...(19): siRNA sense strand
gcauuuaacugguccucaa

SEQ ID NO: 1843933 - RNA, 19 nt, Homo sapiens
  misc_RNA (1)...(19): siRNA sense strand
ggagagaaaccauacaaau

SEQ ID NO: 1843934 - RNA, 19 nt, Homo sapiens
  misc_RNA (1)...(19): siRNA sense strand
gcauuuaacugguccucaa

SEQ ID NO: 1843935 - RNA, 19 nt, Homo sapiens
  misc_RNA (1)...(19): siRNA sense strand
aagcaauucucaacccuua

SEQ ID NO: 1843936 - RNA, 19 nt, Homo sapiens
  misc_RNA (1)...(19): siRNA sense strand
gagcagagcauggaagauu

SEQ ID NO: 1843937 - RNA, 19 nt, Homo sapiens
  misc_RNA (1)...(19): siRNA sense strand
gagaagcccuacaaaugug

SEQ ID NO: 1843938 - RNA, 19 nt, Homo sapiens
  misc_RNA (1)...(19): siRNA sense strand
gagaagcccuacaaaugug

SEQ ID NO: 1843939 - RNA, 19 nt, Homo sapiens
  misc_RNA (1)...(19): siRNA sense strand
gagcaaaguauuucaaugu

SEQ ID NO: 1843940 - RNA, 19 nt, Homo sapiens
  misc_RNA (1)...(19): siRNA sense strand
cuacaagugugaagaaugu

SEQ ID NO: 1843941 - RNA, 19 nt, Homo sapiens
  misc_RNA (1)...(19): siRNA sense strand
aagcgacucucaacccuua

SEQ ID NO: 1843942 - RNA, 19 nt, Homo sapiens
  misc_RNA (1)...(19): siRNA sense strand
ccucaacccuugcuaauca

SEQ ID NO: 1843943 - RNA, 19 nt, Homo sapiens
  misc_RNA (1)...(19): siRNA sense strand
aaucauuccucaagucuuu

SEQ ID NO: 1843944 - RNA, 19 nt, Homo sapiens
  misc_RNA (1)...(19): siRNA sense strand
aagcgacucucaacccuua

SEQ ID NO: 1843945 - RNA, 19 nt, Homo sapiens
  misc_RNA (1)...(19): siRNA sense strand
ccucaacccuugcuaauca

SEQ ID NO: 1843946 - RNA, 19 nt, Homo sapiens
  misc_RNA (1)...(19): siRNA sense strand
ggaaagacaucaagcagua

SEQ ID NO: 1843947 - RNA, 19 nt, Homo sapiens
  misc_RNA (1)...(19): siRNA sense strand
gaucagacaugugcuauua

SEQ ID NO: 1843948 - RNA, 19 nt, Homo sapiens
  misc_RNA (1)...(19): siRNA sense strand
ggaggaagauggucaagaa

SEQ ID NO: 1843949 - RNA, 19 nt, Homo sapiens
  misc_RNA (1)...(19): siRNA sense strand
ugaaagcacugaugaacua

SEQ ID NO: 1843950 - RNA, 19 nt, Homo sapiens
  misc_RNA (1)...(19): siRNA sense strand
ugagaaagguuaugcaauu

SEQ ID NO: 1843951 - RNA, 19 nt, Homo sapiens
  misc_RNA (1)...(19): siRNA sense strand
gcagaaaccuuuagauuuu

SEQ ID NO: 1843952 - RNA, 19 nt, Homo sapiens
  misc_RNA (1)...(19): siRNA sense strand
ucacagagguacaggauuu

SEQ ID NO: 1843953 - RNA, 19 nt, Homo sapiens
  misc_RNA (1)...(19): siRNA sense strand
ucacugcaguuucuaauaa

SEQ ID NO: 1843954 - RNA, 19 nt, Homo sapiens
  misc_RNA (1)...(19): siRNA sense strand
ggaacuugcugaucuaaug

SEQ ID NO: 1843955 - RNA, 19 nt, Homo sapiens
  misc_RNA (1)...(19): siRNA sense strand
caaccaccuugauuauuua

SEQ ID NO: 1843956 - RNA, 19 nt, Homo sapiens
  misc_RNA (1)...(19): siRNA sense strand
gauccuaaguucauuaaug

SEQ ID NO: 1843957 - RNA, 19 nt, Homo sapiens
  misc_RNA (1)...(19): siRNA sense strand
gcaacacacuuaucaaaca

SEQ ID NO: 1843958 - RNA, 19 nt, Homo sapiens
  misc_RNA (1)...(19): siRNA sense strand
gaagucacauccuagaaga

SEQ ID NO: 1843959 - RNA, 19 nt, Homo sapiens
  misc_RNA (1)...(19): siRNA sense strand
gguaauacguggacuccua

SEQ ID NO: 1843960 - RNA, 19 nt, Homo sapiens
  misc_RNA (1)...(19): siRNA sense strand
gagaaagguuaugcaauuu

SEQ ID NO: 1843961 - RNA, 19 nt, Homo sapiens
  misc_RNA (1)...(19): siRNA sense strand
uaacaaagccaaaggagaa

SEQ ID NO: 1843962 - RNA, 19 nt, Homo sapiens
  misc_RNA (1)...(19): siRNA sense strand
gaaagguuaugcaauuugu

SEQ ID NO: 1843963 - RNA, 19 nt, Homo sapiens
  misc_RNA (1)...(19): siRNA sense strand
gaaauccacugcacuuagu

SEQ ID NO: 1843964 - RNA, 19 nt, Homo sapiens
  misc_RNA (1)...(19): siRNA sense strand
acaaccaccuugauuauuu

SEQ ID NO: 1843965 - RNA, 19 nt, Homo sapiens
  misc_RNA (1)...(19): siRNA sense strand
gggaagacuuggaugauga

SEQ ID NO: 1843966 - RNA, 19 nt, Homo sapiens
  misc_RNA (1)...(19): siRNA sense strand
gcaagacaaugccauagau

SEQ ID NO: 1843967 - RNA, 19 nt, Homo sapiens
  misc_RNA (1)...(19): siRNA sense strand
gcaaagaguggauaauaga

SEQ ID NO: 1843968 - RNA, 19 nt, Homo sapiens
  misc_RNA (1)...(19): siRNA sense strand
ggaauuguucgaaugcuua

SEQ ID NO: 1843969 - RNA, 19 nt, Homo sapiens
  misc_RNA (1)...(19): siRNA sense strand
aaagaaaggugugggcuaa

SEQ ID NO: 1843970 - RNA, 19 nt, Homo sapiens
  misc_RNA (1)...(19): siRNA sense strand
uaagugaacuggcuguaga

SEQ ID NO: 1843971 - RNA, 19 nt, Homo sapiens
  misc_RNA (1)...(19): siRNA sense strand
gaaccagccaugucaauga

SEQ ID NO: 1843972 - RNA, 19 nt, Homo sapiens
  misc_RNA (1)...(19): siRNA sense strand
uaaagccucugauuccaaa

SEQ ID NO: 1843973 - RNA, 19 nt, Homo sapiens
  misc_RNA (1)...(19): siRNA sense strand
gcaacgaugugauaaaugc

SEQ ID NO: 1843974 - RNA, 19 nt, Homo sapiens
  misc_RNA (1)...(19): siRNA sense strand
gaaccugaauuugucuaaa

SEQ ID NO: 1843975 - RNA, 19 nt, Homo sapiens
  misc_RNA (1)...(19): siRNA sense strand
ugaaagugaugaaacagaa

SEQ ID NO: 1843976 - RNA, 19 nt, Homo sapiens
  misc_RNA (1)...(19): siRNA sense strand
gggcaaaucauccaagaaa

SEQ ID NO: 1843977 - RNA, 19 nt, Homo sapiens
  misc_RNA (1)...(19): siRNA sense strand
uggagaagcugaugaugaa

SEQ ID NO: 1843978 - RNA, 19 nt, Homo sapiens
  misc_RNA (1)...(19): siRNA sense strand
ggaagaagaagaagaagau

SEQ ID NO: 1843979 - RNA, 19 nt, Homo sapiens
  misc_RNA (1)...(19): siRNA sense strand
caguugagaucccuucuuu

SEQ ID NO: 1843980 - RNA, 19 nt, Homo sapiens
  misc_RNA (1)...(19): siRNA sense strand
ugaaggaacugaagcaaag

SEQ ID NO: 1843981 - RNA, 19 nt, Homo sapiens
  misc_RNA (1)...(19): siRNA sense strand
ugaaaagucucccauuaua

SEQ ID NO: 1843982 - RNA, 19 nt, Homo sapiens
  misc_RNA (1)...(19): siRNA sense strand
gcugugaauuuagccauua

SEQ ID NO: 1843983 - RNA, 19 nt, Homo sapiens
  misc_RNA (1)...(19): siRNA sense strand
ggaagaggaagaagaagaa

SEQ ID NO: 1843984 - RNA, 19 nt, Homo sapiens
  misc_RNA (1)...(19): siRNA sense strand
gagaacagcuuuucauugu

SEQ ID NO: 1843985 - RNA, 19 nt, Homo sapiens
  misc_RNA (1)...(19): siRNA sense strand
caaaagagaaccugaauuu

SEQ ID NO: 1843986 - RNA, 19 nt, Homo sapiens
  misc_RNA (1)...(19): siRNA sense strand
gaaggcagccgaauugaca

SEQ ID NO: 1843987 - RNA, 19 nt, Homo sapiens
  misc_RNA (1)...(19): siRNA sense strand
ucagcacguucaacuaaua

SEQ ID NO: 1843988 - RNA, 19 nt, Homo sapiens
  misc_RNA (1)...(19): siRNA sense strand
uggaaagggugaaacauga

SEQ ID NO: 1843989 - RNA, 19 nt, Homo sapiens
  misc_RNA (1)...(19): siRNA sense strand
agaugaagcagacauaaua

SEQ ID NO: 1843990 - RNA, 19 nt, Homo sapiens
  misc_RNA (1)...(19): siRNA sense strand
gcacguucaacuaauauuu

SEQ ID NO: 1843991 - RNA, 19 nt, Homo sapiens
  misc_RNA (1)...(19): siRNA sense strand
ggucgaauaucguauacug

SEQ ID NO: 1843992 - RNA, 19 nt, Homo sapiens
  misc_RNA (1)...(19): siRNA sense strand
ggaacucuauuggaauuau

SEQ ID NO: 1843993 - RNA, 19 nt, Homo sapiens
  misc_RNA (1)...(19): siRNA sense strand
aaagagaaccugaauuugu

SEQ ID NO: 1843994 - RNA, 19 nt, Homo sapiens
  misc_RNA (1)...(19): siRNA sense strand
gaaaacgugugguugauga

SEQ ID NO: 1843995 - RNA, 19 nt, Homo sapiens
  misc_RNA (1)...(19): siRNA sense strand
acaaauuccucugauguuu

SEQ ID NO: 1843996 - RNA, 19 nt, Homo sapiens
  misc_RNA (1)...(19): siRNA sense strand
ggacauggagaacagcuuu

SEQ ID NO: 1843997 - RNA, 19 nt, Homo sapiens
  misc_RNA (1)...(19): siRNA sense strand
aaaucaaucugcagacuug

SEQ ID NO: 1843998 - RNA, 19 nt, Homo sapiens
  misc_RNA (1)...(19): siRNA sense strand
ugaaacaugagaaagguua

SEQ ID NO: 1843999 - RNA, 19 nt, Homo sapiens
  misc_RNA (1)...(19): siRNA sense strand
gcaaaucauccaagaaauc

SEQ ID NO: 1844000 - RNA, 19 nt, Homo sapiens
  misc_RNA (1)...(19): siRNA sense strand
caaagaaccagccauguca

SEQ ID NO: 1844001 - RNA, 19 nt, Homo sapiens
  misc_RNA (1)...(19): siRNA sense strand
gaaaauccccagcaacuaa

SEQ ID NO: 1844002 - RNA, 19 nt, Homo sapiens
  misc_RNA (1)...(19): siRNA sense strand
ccacgaagcuauuuuguug

SEQ ID NO: 1844003 - RNA, 19 nt, Homo sapiens
  misc_RNA (1)...(19): siRNA sense strand
gaaggcagcauucacaauc

SEQ ID NO: 1844004 - RNA, 19 nt, Homo sapiens
  misc_RNA (1)...(19): siRNA sense strand
uaaaugaugaugaggauga

SEQ ID NO: 1844005 - RNA, 19 nt, Homo sapiens
  misc_RNA (1)...(19): siRNA sense strand
ggacaucuuucuggcauca

SEQ ID NO: 1844006 - RNA, 19 nt, Homo sapiens
  misc_RNA (1)...(19): siRNA sense strand
agagagcacugcaaaggaa

SEQ ID NO: 1844007 - RNA, 19 nt, Homo sapiens
  misc_RNA (1)...(19): siRNA sense strand
cuucuucgauuguuuacua

SEQ ID NO: 1844008 - RNA, 19 nt, Homo sapiens
  misc_RNA (1)...(19): siRNA sense strand
uaauagacuugccucagaa

SEQ ID NO: 1844009 - RNA, 19 nt, Homo sapiens
  misc_RNA (1)...(19): siRNA sense strand
guggaacucuauuggaauu

SEQ ID NO: 1844010 - RNA, 19 nt, Homo sapiens
  misc_RNA (1)...(19): siRNA sense strand
gucagaguguggcaaauuu

SEQ ID NO: 1844011 - RNA, 19 nt, Homo sapiens
  misc_RNA (1)...(19): siRNA sense strand
gagaugauaugaguaaugc

SEQ ID NO: 1844012 - RNA, 19 nt, Homo sapiens
  misc_RNA (1)...(19): siRNA sense strand
gaugaagcagacauaauaa

SEQ ID NO: 1844013 - RNA, 19 nt, Homo sapiens
  misc_RNA (1)...(19): siRNA sense strand
guacaaauuccucugaugu

SEQ ID NO: 1844014 - RNA, 19 nt, Homo sapiens
  misc_RNA (1)...(19): siRNA sense strand
gaacuugcugaucuaauga

SEQ ID NO: 1844015 - RNA, 19 nt, Homo sapiens
  misc_RNA (1)...(19): siRNA sense strand
gaagaagaagauuucagaa

SEQ ID NO: 1844016 - RNA, 19 nt, Homo sapiens
  misc_RNA (1)...(19): siRNA sense strand
caagaaauccacugcacuu

SEQ ID NO: 1844017 - RNA, 19 nt, Homo sapiens
  misc_RNA (1)...(19): siRNA sense strand
ggucuggcauggcauccua

SEQ ID NO: 1844018 - RNA, 19 nt, Homo sapiens
  misc_RNA (1)...(19): siRNA sense strand
gagcgagaauuccguugug

SEQ ID NO: 1844019 - RNA, 19 nt, Homo sapiens
  misc_RNA (1)...(19): siRNA sense strand
uaacagaggacuugguaau

SEQ ID NO: 1844020 - RNA, 19 nt, Homo sapiens
  misc_RNA (1)...(19): siRNA sense strand
uuacguggauucagaagga

SEQ ID NO: 1844021 - RNA, 19 nt, Homo sapiens
  misc_RNA (1)...(19): siRNA sense strand
aagcaaagaguggauaaua

SEQ ID NO: 1844022 - RNA, 19 nt, Homo sapiens
  misc_RNA (1)...(19): siRNA sense strand
gcugcuggaucuagugauu

SEQ ID NO: 1844023 - RNA, 19 nt, Homo sapiens
  misc_RNA (1)...(19): siRNA sense strand
agaaggaauuguucgaaug

SEQ ID NO: 1844024 - RNA, 19 nt, Homo sapiens
  misc_RNA (1)...(19): siRNA sense strand
cagaaggaauuguucgaau

SEQ ID NO: 1844025 - RNA, 19 nt, Homo sapiens
  misc_RNA (1)...(19): siRNA sense strand
auaauagacuugccucaga

SEQ ID NO: 1844026 - RNA, 19 nt, Homo sapiens
  misc_RNA (1)...(19): siRNA sense strand
gauaauuucaucucucaga

SEQ ID NO: 1844027 - RNA, 19 nt, Homo sapiens
  misc_RNA (1)...(19): siRNA sense strand
ggauagcagccaacagaaa

SEQ ID NO: 1844028 - RNA, 19 nt, Homo sapiens
  misc_RNA (1)...(19): siRNA sense strand
gaaagugaugaaacagaaa

SEQ ID NO: 1844029 - RNA, 19 nt, Homo sapiens
  misc_RNA (1)...(19): siRNA sense strand
ugaacuggcuguagagaag

SEQ ID NO: 1844030 - RNA, 19 nt, Homo sapiens
  misc_RNA (1)...(19): siRNA sense strand
guguggaacucuauuggaa

SEQ ID NO: 1844031 - RNA, 19 nt, Homo sapiens
  misc_RNA (1)...(19): siRNA sense strand
ucaaagaggaggaggaaga

SEQ ID NO: 1844032 - RNA, 19 nt, Homo sapiens
  misc_RNA (1)...(19): siRNA sense strand
uaaaugacaaugcaguuga

SEQ ID NO: 1844033 - RNA, 19 nt, Homo sapiens
  misc_RNA (1)...(19): siRNA sense strand
gcaaauuucagaucagaca

SEQ ID NO: 1844034 - RNA, 19 nt, Homo sapiens
  misc_RNA (1)...(19): siRNA sense strand
ugaugaaagugaugaaaca

SEQ ID NO: 1844035 - RNA, 19 nt, Homo sapiens
  misc_RNA (1)...(19): siRNA sense strand
ggacagaacucguuuucca

SEQ ID NO: 1844036 - RNA, 19 nt, Homo sapiens
  misc_RNA (1)...(19): siRNA sense strand
gcauauucaugugcuuuga

SEQ ID NO: 1844037 - RNA, 19 nt, Homo sapiens
  misc_RNA (1)...(19): siRNA sense strand
gcccugcuguugcuauauu

SEQ ID NO: 1844038 - RNA, 19 nt, Homo sapiens
  misc_RNA (1)...(19): siRNA sense strand
guucauuaauguuggagaa

SEQ ID NO: 1844039 - RNA, 19 nt, Homo sapiens
  misc_RNA (1)...(19): siRNA sense strand
caagaaggcagcauucaca

SEQ ID NO: 1844040 - RNA, 19 nt, Homo sapiens
  misc_RNA (1)...(19): siRNA sense strand
ucucagacccucaauauag

SEQ ID NO: 1844041 - RNA, 19 nt, Homo sapiens
  misc_RNA (1)...(19): siRNA sense strand
aagcagaaaccuuuagauu

SEQ ID NO: 1844042 - RNA, 19 nt, Homo sapiens
  misc_RNA (1)...(19): siRNA sense strand
agacuuggaugaugaugau

SEQ ID NO: 1844043 - RNA, 19 nt, Homo sapiens
  misc_RNA (1)...(19): siRNA sense strand
ccagccaugucaaugaauu

SEQ ID NO: 1844044 - RNA, 19 nt, Homo sapiens
  misc_RNA (1)...(19): siRNA sense strand
gaguaaugcuggugauuuu

SEQ ID NO: 1844045 - RNA, 19 nt, Homo sapiens
  misc_RNA (1)...(19): siRNA sense strand
gaaagacaucaagcaguaa

SEQ ID NO: 1844046 - RNA, 19 nt, Homo sapiens
  misc_RNA (1)...(19): siRNA sense strand
gcaagugggucuccaauaa

SEQ ID NO: 1844047 - RNA, 19 nt, Homo sapiens
  misc_RNA (1)...(19): siRNA sense strand
gcacaugacugaccugauu

SEQ ID NO: 1844048 - RNA, 19 nt, Homo sapiens
  misc_RNA (1)...(19): siRNA sense strand
guacagcuguguucuggua

SEQ ID NO: 1844049 - RNA, 19 nt, Homo sapiens
  misc_RNA (1)...(19): siRNA sense strand
gagauacuuucaagcauuu

SEQ ID NO: 1844050 - RNA, 19 nt, Homo sapiens
  misc_RNA (1)...(19): siRNA sense strand
ggaaucguguggcuacuuu

SEQ ID NO: 1844051 - RNA, 19 nt, Homo sapiens
  misc_RNA (1)...(19): siRNA sense strand
gaaggugacuaccgaacaa

SEQ ID NO: 1844052 - RNA, 19 nt, Homo sapiens
  misc_RNA (1)...(19): siRNA sense strand
gccaagcuuuccaagauua

SEQ ID NO: 1844053 - RNA, 19 nt, Homo sapiens
  misc_RNA (1)...(19): siRNA sense strand
uguuacagguugcaaauua

SEQ ID NO: 1844054 - RNA, 19 nt, Homo sapiens
  misc_RNA (1)...(19): siRNA sense strand
gaaggggacuauuaucaua

SEQ ID NO: 1844055 - RNA, 19 nt, Homo sapiens
  misc_RNA (1)...(19): siRNA sense strand
ggacucagcugcagguuuu

SEQ ID NO: 1844056 - RNA, 19 nt, Homo sapiens
  misc_RNA (1)...(19): siRNA sense strand
ugacugaccugauuuaugc

SEQ ID NO: 1844057 - RNA, 19 nt, Homo sapiens
  misc_RNA (1)...(19): siRNA sense strand
cgagauacuuucaagcauu

SEQ ID NO: 1844058 - RNA, 19 nt, Homo sapiens
  misc_RNA (1)...(19): siRNA sense strand
aguaaagacugcagaauug

SEQ ID NO: 1844059 - RNA, 19 nt, Homo sapiens
  misc_RNA (1)...(19): siRNA sense strand
ggaagaugaugacccuguu

SEQ ID NO: 1844060 - RNA, 19 nt, Homo sapiens
  misc_RNA (1)...(19): siRNA sense strand
cgaacgagcuggagggaau

SEQ ID NO: 1844061 - RNA, 19 nt, Homo sapiens
  misc_RNA (1)...(19): siRNA sense strand
guacuacgaugucaugucu

SEQ ID NO: 1844062 - RNA, 19 nt, Homo sapiens
  misc_RNA (1)...(19): siRNA sense strand
gaguguggaugacugcuuu

SEQ ID NO: 1844063 - RNA, 19 nt, Homo sapiens
  misc_RNA (1)...(19): siRNA sense strand
gagggaaucugcgguacuu

SEQ ID NO: 1844064 - RNA, 19 nt, Homo sapiens
  misc_RNA (1)...(19): siRNA sense strand
aaagacugcagaauuguua

SEQ ID NO: 1844065 - RNA, 19 nt, Homo sapiens
  misc_RNA (1)...(19): siRNA sense strand
ccaaagcccugaugagacu

SEQ ID NO: 1844066 - RNA, 19 nt, Homo sapiens
  misc_RNA (1)...(19): siRNA sense strand
ucacaggguuaacaguaaa

SEQ ID NO: 1844067 - RNA, 19 nt, Homo sapiens
  misc_RNA (1)...(19): siRNA sense strand
gcuaugcugucuuccaguu

SEQ ID NO: 1844068 - RNA, 19 nt, Homo sapiens
  misc_RNA (1)...(19): siRNA sense strand
ugaagcggcuaaacacaga

SEQ ID NO: 1844069 - RNA, 19 nt, Homo sapiens
  misc_RNA (1)...(19): siRNA sense strand
ccaauaagugguuccauga

SEQ ID NO: 1844070 - RNA, 19 nt, Homo sapiens
  misc_RNA (1)...(19): siRNA sense strand
ucguguggcuacuuucuua

SEQ ID NO: 1844071 - RNA, 19 nt, Homo sapiens
  misc_RNA (1)...(19): siRNA sense strand
ggaaucugcgguacuuuga

SEQ ID NO: 1844072 - RNA, 19 nt, Homo sapiens
  misc_RNA (1)...(19): siRNA sense strand
ccagaaggcaucuaugaga

SEQ ID NO: 1844073 - RNA, 19 nt, Homo sapiens
  misc_RNA (1)...(19): siRNA sense strand
cuugagaccuuguggauca

SEQ ID NO: 1844074 - RNA, 19 nt, Homo sapiens
  misc_RNA (1)...(19): siRNA sense strand
gaaagaguacauccuugug

SEQ ID NO: 1844075 - RNA, 19 nt, Homo sapiens
  misc_RNA (1)...(19): siRNA sense strand
uaucacaggguuaacagua

SEQ ID NO: 1844076 - RNA, 19 nt, Homo sapiens
  misc_RNA (1)...(19): siRNA sense strand
guuaacaaaucagacagaa

SEQ ID NO: 1844077 - RNA, 19 nt, Homo sapiens
  misc_RNA (1)...(19): siRNA sense strand
gcgguacuuugagcaguua

SEQ ID NO: 1844078 - RNA, 19 nt, Homo sapiens
  misc_RNA (1)...(19): siRNA sense strand
cgagauaggagcugccaaa

SEQ ID NO: 1844079 - RNA, 19 nt, Homo sapiens
  misc_RNA (1)...(19): siRNA sense strand
gcccgcacaucgucaggua

SEQ ID NO: 1844080 - RNA, 19 nt, Homo sapiens
  misc_RNA (1)...(19): siRNA sense strand
gaggaaaucgagaggauca

SEQ ID NO: 1844081 - RNA, 19 nt, Homo sapiens
  misc_RNA (1)...(19): siRNA sense strand
gggcugcaauuuggccuaa

SEQ ID NO: 1844082 - RNA, 19 nt, Homo sapiens
  misc_RNA (1)...(19): siRNA sense strand
cagcauaucacaggguuaa

SEQ ID NO: 1844083 - RNA, 19 nt, Homo sapiens
  misc_RNA (1)...(19): siRNA sense strand
gcugcaauuuggccuaaga

SEQ ID NO: 1844084 - RNA, 19 nt, Homo sapiens
  misc_RNA (1)...(19): siRNA sense strand
guuacagguugcaaauuau

SEQ ID NO: 1844085 - RNA, 19 nt, Homo sapiens
  misc_RNA (1)...(19): siRNA sense strand
gaauucuucaccucuauug

SEQ ID NO: 1844086 - RNA, 19 nt, Homo sapiens
  misc_RNA (1)...(19): siRNA sense strand
uggcuacuuucuuaaacua

SEQ ID NO: 1844087 - RNA, 19 nt, Homo sapiens
  misc_RNA (1)...(19): siRNA sense strand
gaaccaaguaccaggcaau

SEQ ID NO: 1844088 - RNA, 19 nt, Homo sapiens
  misc_RNA (1)...(19): siRNA sense strand
gaugagacuucaggacaca

SEQ ID NO: 1844089 - RNA, 19 nt, Homo sapiens
  misc_RNA (1)...(19): siRNA sense strand
gaagaugaugacccuguug

SEQ ID NO: 1844090 - RNA, 19 nt, Homo sapiens
  misc_RNA (1)...(19): siRNA sense strand
gccgaauucuucaccucua

SEQ ID NO: 1844091 - RNA, 19 nt, Homo sapiens
  misc_RNA (1)...(19): siRNA sense strand
gaaggguacagcuguguuc

SEQ ID NO: 1844092 - RNA, 19 nt, Homo sapiens
  misc_RNA (1)...(19): siRNA sense strand
ccugauuuaugcagagaaa

SEQ ID NO: 1844093 - RNA, 19 nt, Homo sapiens
  misc_RNA (1)...(19): siRNA sense strand
gggaaucugcgguacuuug

SEQ ID NO: 1844094 - RNA, 19 nt, Homo sapiens
  misc_RNA (1)...(19): siRNA sense strand
gcgagauacuuucaagcau

SEQ ID NO: 1844095 - RNA, 19 nt, Homo sapiens
  misc_RNA (1)...(19): siRNA sense strand
caggaguucuugagaccuu

SEQ ID NO: 1844096 - RNA, 19 nt, Homo sapiens
  misc_RNA (1)...(19): siRNA sense strand
ggaaggugacuaccgaaca

SEQ ID NO: 1844097 - RNA, 19 nt, Homo sapiens
  misc_RNA (1)...(19): siRNA sense strand
uaagagcugggccaacaaa

SEQ ID NO: 1844098 - RNA, 19 nt, Homo sapiens
  misc_RNA (1)...(19): siRNA sense strand
acuacgaugucaugucuga

SEQ ID NO: 1844099 - RNA, 19 nt, Homo sapiens
  misc_RNA (1)...(19): siRNA sense strand
gcuacuuucuuaaacuaca

SEQ ID NO: 1844100 - RNA, 19 nt, Homo sapiens
  misc_RNA (1)...(19): siRNA sense strand
uaaagacugcagaauuguu

SEQ ID NO: 1844101 - RNA, 19 nt, Homo sapiens
  misc_RNA (1)...(19): siRNA sense strand
guacuuugagcaguuauug

SEQ ID NO: 1844102 - RNA, 19 nt, Homo sapiens
  misc_RNA (1)...(19): siRNA sense strand
ugaaagaguacauccuugu

SEQ ID NO: 1844103 - RNA, 19 nt, Homo sapiens
  misc_RNA (1)...(19): siRNA sense strand
gagcuggugcagucucuga

SEQ ID NO: 1844104 - RNA, 19 nt, Homo sapiens
  misc_RNA (1)...(19): siRNA sense strand
gaugagcgagauacuuuca

SEQ ID NO: 1844105 - RNA, 19 nt, Homo sapiens
  misc_RNA (1)...(19): siRNA sense strand
ugagcgagauacuuucaag

SEQ ID NO: 1844106 - RNA, 19 nt, Homo sapiens
  misc_RNA (1)...(19): siRNA sense strand
caauaagugguuccaugaa

SEQ ID NO: 1844107 - RNA, 19 nt, Homo sapiens
  misc_RNA (1)...(19): siRNA sense strand
gaccugauuuaugcagaga

SEQ ID NO: 1844108 - RNA, 19 nt, Homo sapiens
  misc_RNA (1)...(19): siRNA sense strand
ggagugggaggacaguaug

SEQ ID NO: 1844109 - RNA, 19 nt, Homo sapiens
  misc_RNA (1)...(19): siRNA sense strand
acaaugaaggggacuauua

SEQ ID NO: 1844110 - RNA, 19 nt, Homo sapiens
  misc_RNA (1)...(19): siRNA sense strand
gcauaucacaggguuaaca

SEQ ID NO: 1844111 - RNA, 19 nt, Homo sapiens
  misc_RNA (1)...(19): siRNA sense strand
ccgaauucuucaccucuau

SEQ ID NO: 1844112 - RNA, 19 nt, Homo sapiens
  misc_RNA (1)...(19): siRNA sense strand
ugagacuucaggacacaua

SEQ ID NO: 1844113 - RNA, 19 nt, Homo sapiens
  misc_RNA (1)...(19): siRNA sense strand
guaaagacugcagaauugu

SEQ ID NO: 1844114 - RNA, 19 nt, Homo sapiens
  misc_RNA (1)...(19): siRNA sense strand
ucgagaggaucaaggagau

SEQ ID NO: 1844115 - RNA, 19 nt, Homo sapiens
  misc_RNA (1)...(19): siRNA sense strand
ugccugagagggauguuua

SEQ ID NO: 1844116 - RNA, 19 nt, Homo sapiens
  misc_RNA (1)...(19): siRNA sense strand
ugagaggccuguggacuac

SEQ ID NO: 1844117 - RNA, 19 nt, Homo sapiens
  misc_RNA (1)...(19): siRNA sense strand
auuaagagcugggccaaca

SEQ ID NO: 1844118 - RNA, 19 nt, Homo sapiens
  misc_RNA (1)...(19): siRNA sense strand
ggaaugaugagcgagauac

SEQ ID NO: 1844119 - RNA, 19 nt, Homo sapiens
  misc_RNA (1)...(19): siRNA sense strand
guuauuggaggaagagaga

SEQ ID NO: 1844120 - RNA, 19 nt, Homo sapiens
  misc_RNA (1)...(19): siRNA sense strand
ugauuuaugcagagaaaga

SEQ ID NO: 1844121 - RNA, 19 nt, Homo sapiens
  misc_RNA (1)...(19): siRNA sense strand
cuauugggcacaugacuga

SEQ ID NO: 1844122 - RNA, 19 nt, Homo sapiens
  misc_RNA (1)...(19): siRNA sense strand
caugagugauguagaagcu

SEQ ID NO: 1844123 - RNA, 19 nt, Homo sapiens
  misc_RNA (1)...(19): siRNA sense strand
ggaaaucgagaggaucaag

SEQ ID NO: 1844124 - RNA, 19 nt, Homo sapiens
  misc_RNA (1)...(19): siRNA sense strand
acaugacugaccugauuua

SEQ ID NO: 1844125 - RNA, 19 nt, Homo sapiens
  misc_RNA (1)...(19): siRNA sense strand
caagugggucuccaauaag

SEQ ID NO: 1844126 - RNA, 19 nt, Homo sapiens
  misc_RNA (1)...(19): siRNA sense strand
augaugagcgagauacuuu

SEQ ID NO: 1844127 - RNA, 19 nt, Homo sapiens
  misc_RNA (1)...(19): siRNA sense strand
ggagaucgcaaaaccuaaa

SEQ ID NO: 1844128 - RNA, 19 nt, Homo sapiens
  misc_RNA (1)...(19): siRNA sense strand
ccacugaugaggacgagau

SEQ ID NO: 1844129 - RNA, 19 nt, Homo sapiens
  misc_RNA (1)...(19): siRNA sense strand
aagugggucuccaauaagu

SEQ ID NO: 1844130 - RNA, 19 nt, Homo sapiens
  misc_RNA (1)...(19): siRNA sense strand
gagcugggccaacaaaaug

SEQ ID NO: 1844131 - RNA, 19 nt, Homo sapiens
  misc_RNA (1)...(19): siRNA sense strand
gcugugugcaggccgaauu

SEQ ID NO: 1844132 - RNA, 19 nt, Homo sapiens
  misc_RNA (1)...(19): siRNA sense strand
ccaagcuuuccaagauuaa

SEQ ID NO: 1844133 - RNA, 19 nt, Homo sapiens
  misc_RNA (1)...(19): siRNA sense strand
ugccaaagcccugaugaga

SEQ ID NO: 1844134 - RNA, 19 nt, Homo sapiens
  misc_RNA (1)...(19): siRNA sense strand
aaauggaagccuugacuag

SEQ ID NO: 1844135 - RNA, 19 nt, Homo sapiens
  misc_RNA (1)...(19): siRNA sense strand
uggaagccuugacuagcaa

SEQ ID NO: 1844136 - RNA, 19 nt, Homo sapiens
  misc_RNA (1)...(19): siRNA sense strand
ccgcucggccuacaaugaa

SEQ ID NO: 1844137 - RNA, 19 nt, Homo sapiens
  misc_RNA (1)...(19): siRNA sense strand
cgaauucuucaccucuauu

SEQ ID NO: 1844138 - RNA, 19 nt, Homo sapiens
  misc_RNA (1)...(19): siRNA sense strand
aucacaggguuaacaguaa

SEQ ID NO: 1844139 - RNA, 19 nt, Homo sapiens
  misc_RNA (1)...(19): siRNA sense strand
gcacaucgucagguacuac

SEQ ID NO: 1844140 - RNA, 19 nt, Homo sapiens
  misc_RNA (1)...(19): siRNA sense strand
agccaagcuuuccaagauu

SEQ ID NO: 1844141 - RNA, 19 nt, Homo sapiens
  misc_RNA (1)...(19): siRNA sense strand
gucgccagcuaccggguuu

SEQ ID NO: 1844142 - RNA, 19 nt, Homo sapiens
  misc_RNA (1)...(19): siRNA sense strand
gaggacaggaguucuugag

SEQ ID NO: 1844143 - RNA, 19 nt, Homo sapiens
  misc_RNA (1)...(19): siRNA sense strand
gcuggugcagucucugaaa

SEQ ID NO: 1844144 - RNA, 19 nt, Homo sapiens
  misc_RNA (1)...(19): siRNA sense strand
ucugaaagaguacauccuu

SEQ ID NO: 1844145 - RNA, 19 nt, Homo sapiens
  misc_RNA (1)...(19): siRNA sense strand
ggcuagaggaagaugauga

SEQ ID NO: 1844146 - RNA, 19 nt, Homo sapiens
  misc_RNA (1)...(19): siRNA sense strand
gaagaagaaugacuggaaa

SEQ ID NO: 1844147 - RNA, 19 nt, Homo sapiens
  misc_RNA (1)...(19): siRNA sense strand
ggacaagauucaccaacaa

SEQ ID NO: 1844148 - RNA, 19 nt, Homo sapiens
  misc_RNA (1)...(19): siRNA sense strand
ggaagggacuuucaucagu

SEQ ID NO: 1844149 - RNA, 19 nt, Homo sapiens
  misc_RNA (1)...(19): siRNA sense strand
ggaagaagaaugacuggaa

SEQ ID NO: 1844150 - RNA, 19 nt, Homo sapiens
  misc_RNA (1)...(19): siRNA sense strand
ggacuuucaucagugacua

SEQ ID NO: 1844151 - RNA, 19 nt, Homo sapiens
  misc_RNA (1)...(19): siRNA sense strand
aagaaugacuggaaacaca

SEQ ID NO: 1844152 - RNA, 19 nt, Homo sapiens
  misc_RNA (1)...(19): siRNA sense strand
ccuguuggaucucaugcua

SEQ ID NO: 1844153 - RNA, 19 nt, Homo sapiens
  misc_RNA (1)...(19): siRNA sense strand
guauugccauggacaagau

SEQ ID NO: 1844154 - RNA, 19 nt, Homo sapiens
  misc_RNA (1)...(19): siRNA sense strand
caucagugacuacaguauu

SEQ ID NO: 1844155 - RNA, 19 nt, Homo sapiens
  misc_RNA (1)...(19): siRNA sense strand
uggacaagauucaccaaca

SEQ ID NO: 1844156 - RNA, 19 nt, Homo sapiens
  misc_RNA (1)...(19): siRNA sense strand
gcagugggacuaggagaga

SEQ ID NO: 1844157 - RNA, 19 nt, Homo sapiens
  misc_RNA (1)...(19): siRNA sense strand
ggacuaggagagaagaaag

SEQ ID NO: 1844158 - RNA, 19 nt, Homo sapiens
  misc_RNA (1)...(19): siRNA sense strand
ccagucaagcuaauaggaa

SEQ ID NO: 1844159 - RNA, 19 nt, Homo sapiens
  misc_RNA (1)...(19): siRNA sense strand
cugcgggacuugcugauuc

SEQ ID NO: 1844160 - RNA, 19 nt, Homo sapiens
  misc_RNA (1)...(19): siRNA sense strand
gcggaagggacuuucauca

SEQ ID NO: 1844161 - RNA, 19 nt, Homo sapiens
  misc_RNA (1)...(19): siRNA sense strand
gggacuaggagagaagaaa

SEQ ID NO: 1844162 - RNA, 19 nt, Homo sapiens
  misc_RNA (1)...(19): siRNA sense strand
aagggacuuucaucaguga

SEQ ID NO: 1844163 - RNA, 19 nt, Homo sapiens
  misc_RNA (1)...(19): siRNA sense strand
uuucaucagugacuacagu

SEQ ID NO: 1844164 - RNA, 19 nt, Homo sapiens
  misc_RNA (1)...(19): siRNA sense strand
gauucaccaacaagacuuu

SEQ ID NO: 1844165 - RNA, 19 nt, Homo sapiens
  misc_RNA (1)...(19): siRNA sense strand
gacaagauucaccaacaag

SEQ ID NO: 1844166 - RNA, 19 nt, Homo sapiens
  misc_RNA (1)...(19): siRNA sense strand
aucagugacuacaguauug

SEQ ID NO: 1844167 - RNA, 19 nt, Homo sapiens
  misc_RNA (1)...(19): siRNA sense strand
gacuaggagagaagaaaga

SEQ ID NO: 1844168 - RNA, 19 nt, Homo sapiens
  misc_RNA (1)...(19): siRNA sense strand
aaaaggggaagaagaauga

SEQ ID NO: 1844169 - RNA, 19 nt, Homo sapiens
  misc_RNA (1)...(19): siRNA sense strand
gaagaaugacuggaaacac

SEQ ID NO: 1844170 - RNA, 19 nt, Homo sapiens
  misc_RNA (1)...(19): siRNA sense strand
acaagauucaccaacaaga

SEQ ID NO: 1844171 - RNA, 19 nt, Homo sapiens
  misc_RNA (1)...(19): siRNA sense strand
gcuggccagucaagcuaau

SEQ ID NO: 1844172 - RNA, 19 nt, Homo sapiens
  misc_RNA (1)...(19): siRNA sense strand
uguuggaucucaugcuaag

SEQ ID NO: 1844173 - RNA, 19 nt, Homo sapiens
  misc_RNA (1)...(19): siRNA sense strand
aagauuugcugcgggacuu

SEQ ID NO: 1844174 - RNA, 19 nt, Homo sapiens
  misc_RNA (1)...(19): siRNA sense strand
caacaaauaccaagucuuu

SEQ ID NO: 1844175 - RNA, 19 nt, Homo sapiens
  misc_RNA (1)...(19): siRNA sense strand
ggaagaggcuaccaaggaa

SEQ ID NO: 1844176 - RNA, 19 nt, Homo sapiens
  misc_RNA (1)...(19): siRNA sense strand
gaacaacccuacugucaag

SEQ ID NO: 1844177 - RNA, 19 nt, Homo sapiens
  misc_RNA (1)...(19): siRNA sense strand
gaaaucaacagccaacaaa

SEQ ID NO: 1844178 - RNA, 19 nt, Homo sapiens
  misc_RNA (1)...(19): siRNA sense strand
aagggaagcuggucauuga

SEQ ID NO: 1844179 - RNA, 19 nt, Homo sapiens
  misc_RNA (1)...(19): siRNA sense strand
gagaacaacccuacuguca

SEQ ID NO: 1844180 - RNA, 19 nt, Homo sapiens
  misc_RNA (1)...(19): siRNA sense strand
aaucaacagccaacaaaua

SEQ ID NO: 1844181 - RNA, 19 nt, Homo sapiens
  misc_RNA (1)...(19): siRNA sense strand
ugucaaggcuuccggcuau

SEQ ID NO: 1844182 - RNA, 19 nt, Homo sapiens
  misc_RNA (1)...(19): siRNA sense strand
gaagggaagcuggucauug

SEQ ID NO: 1844183 - RNA, 19 nt, Homo sapiens
  misc_RNA (1)...(19): siRNA sense strand
gagaaaggagcguugaaga

SEQ ID NO: 1844184 - RNA, 19 nt, Homo sapiens
  misc_RNA (1)...(19): siRNA sense strand
ccaaggagaagaacgagaa

SEQ ID NO: 1844185 - RNA, 19 nt, Homo sapiens
  misc_RNA (1)...(19): siRNA sense strand
agaggaggaugaagaggaa

SEQ ID NO: 1844186 - RNA, 19 nt, Homo sapiens
  misc_RNA (1)...(19): siRNA sense strand
gcagaaggaguacaaaugc

SEQ ID NO: 1844187 - RNA, 19 nt, Homo sapiens
  misc_RNA (1)...(19): siRNA sense strand
ugugggagaucgagaacaa

SEQ ID NO: 1844188 - RNA, 19 nt, Homo sapiens
  misc_RNA (1)...(19): siRNA sense strand
gauccaaccggcagaagga

SEQ ID NO: 1844189 - RNA, 19 nt, Homo sapiens
  misc_RNA (1)...(19): siRNA sense strand
ggcagaaggaguacaaaug

SEQ ID NO: 1844190 - RNA, 19 nt, Homo sapiens
  misc_RNA (1)...(19): siRNA sense strand
ggagaagaacgagaaagga

SEQ ID NO: 1844191 - RNA, 19 nt, Homo sapiens
  misc_RNA (1)...(19): siRNA sense strand
ggaagaagaagaggaggau

SEQ ID NO: 1844192 - RNA, 19 nt, Homo sapiens
  misc_RNA (1)...(19): siRNA sense strand
ggaauccaaggagaaguuu

SEQ ID NO: 1844193 - RNA, 19 nt, Homo sapiens
  misc_RNA (1)...(19): siRNA sense strand
aagaagaggaggaugaaga

SEQ ID NO: 1844194 - RNA, 19 nt, Homo sapiens
  misc_RNA (1)...(19): siRNA sense strand
ugaaaucaacagccaacaa

SEQ ID NO: 1844195 - RNA, 19 nt, Homo sapiens
  misc_RNA (1)...(19): siRNA sense strand
aagaagaagaggaggauga

SEQ ID NO: 1844196 - RNA, 19 nt, Homo sapiens
  misc_RNA (1)...(19): siRNA sense strand
ccaaccggcagaaggagua

SEQ ID NO: 1844197 - RNA, 19 nt, Homo sapiens
  misc_RNA (1)...(19): siRNA sense strand
ggaagggaagcuggucauu

SEQ ID NO: 1844198 - RNA, 19 nt, Homo sapiens
  misc_RNA (1)...(19): siRNA sense strand
caacagccaacaaauacca

SEQ ID NO: 1844199 - RNA, 19 nt, Homo sapiens
  misc_RNA (1)...(19): siRNA sense strand
gcuaucaguccucccagaa

SEQ ID NO: 1844200 - RNA, 19 nt, Homo sapiens
  misc_RNA (1)...(19): siRNA sense strand
gaccugguguucgccaaga

SEQ ID NO: 1844201 - RNA, 19 nt, Homo sapiens
  misc_RNA (1)...(19): siRNA sense strand
gccaacaaauaccaagucu

SEQ ID NO: 1844202 - RNA, 19 nt, Homo sapiens
  misc_RNA (1)...(19): siRNA sense strand
gcaagcccaacaagaggaa

SEQ ID NO: 1844203 - RNA, 19 nt, Homo sapiens
  misc_RNA (1)...(19): siRNA sense strand
aggaagaggcuaccaagga

SEQ ID NO: 1844204 - RNA, 19 nt, Homo sapiens
  misc_RNA (1)...(19): siRNA sense strand
gggaagcuggucauugaug

SEQ ID NO: 1844205 - RNA, 19 nt, Homo sapiens
  misc_RNA (1)...(19): siRNA sense strand
gggugacggugauaagaag

SEQ ID NO: 1844206 - RNA, 19 nt, Homo sapiens
  misc_RNA (1)...(19): siRNA sense strand
gcagagggugacggugaua

SEQ ID NO: 1844207 - RNA, 19 nt, Homo sapiens
  misc_RNA (1)...(19): siRNA sense strand
caaggagaagaacgagaaa

SEQ ID NO: 1844208 - RNA, 19 nt, Homo sapiens
  misc_RNA (1)...(19): siRNA sense strand
aaagagcuguguggaagag

SEQ ID NO: 1844209 - RNA, 19 nt, Homo sapiens
  misc_RNA (1)...(19): siRNA sense strand
ccaagaggaagaagaagag

SEQ ID NO: 1844210 - RNA, 19 nt, Homo sapiens
  misc_RNA (1)...(19): siRNA sense strand
gagggugacggugauaaga

SEQ ID NO: 1844211 - RNA, 19 nt, Homo sapiens
  misc_RNA (1)...(19): siRNA sense strand
uaucaguccucccagaaaa

SEQ ID NO: 1844212 - RNA, 19 nt, Homo sapiens
  misc_RNA (1)...(19): siRNA sense strand
cuauggagguggaaaagaa

SEQ ID NO: 1844213 - RNA, 19 nt, Homo sapiens
  misc_RNA (1)...(19): siRNA sense strand
agaacaacccuacugucaa

SEQ ID NO: 1844214 - RNA, 19 nt, Homo sapiens
  misc_RNA (1)...(19): siRNA sense strand
ggacccacgagacggcauu

SEQ ID NO: 1844215 - RNA, 19 nt, Homo sapiens
  misc_RNA (1)...(19): siRNA sense strand
agaagaagaggaggaugaa

SEQ ID NO: 1844216 - RNA, 19 nt, Homo sapiens
  misc_RNA (1)...(19): siRNA sense strand
gagaucaugagagccugua

SEQ ID NO: 1844217 - RNA, 19 nt, Homo sapiens
  misc_RNA (1)...(19): siRNA sense strand
agaaaggagcguugaagag

SEQ ID NO: 1844218 - RNA, 19 nt, Homo sapiens
  misc_RNA (1)...(19): siRNA sense strand
cgagaaaggagcguugaag

SEQ ID NO: 1844219 - RNA, 19 nt, Homo sapiens
  misc_RNA (1)...(19): siRNA sense strand
uaacagaacucucagaaau

SEQ ID NO: 1844220 - RNA, 19 nt, Homo sapiens
  misc_RNA (1)...(19): siRNA sense strand
gaagaugauuggagaguuu

SEQ ID NO: 1844221 - RNA, 19 nt, Homo sapiens
  misc_RNA (1)...(19): siRNA sense strand
gcacagagcaguucaauca

SEQ ID NO: 1844222 - RNA, 19 nt, Homo sapiens
  misc_RNA (1)...(19): siRNA sense strand
gaugagggcuuccacauug

SEQ ID NO: 1844223 - RNA, 19 nt, Homo sapiens
  misc_RNA (1)...(19): siRNA sense strand
ucacagagcucuacaucaa

SEQ ID NO: 1844224 - RNA, 19 nt, Homo sapiens
  misc_RNA (1)...(19): siRNA sense strand
ucacaaagcugcuguccaa

SEQ ID NO: 1844225 - RNA, 19 nt, Homo sapiens
  misc_RNA (1)...(19): siRNA sense strand
caucacaccugacaacuuu

SEQ ID NO: 1844226 - RNA, 19 nt, Homo sapiens
  misc_RNA (1)...(19): siRNA sense strand
ggaaccaccuuaucaucua

SEQ ID NO: 1844227 - RNA, 19 nt, Homo sapiens
  misc_RNA (1)...(19): siRNA sense strand
ggaggaagcuguugacucu

SEQ ID NO: 1844228 - RNA, 19 nt, Homo sapiens
  misc_RNA (1)...(19): siRNA sense strand
caagaugccuuaugagaug

SEQ ID NO: 1844229 - RNA, 19 nt, Homo sapiens
  misc_RNA (1)...(19): siRNA sense strand
ucacaaauaugacagcaaa

SEQ ID NO: 1844230 - RNA, 19 nt, Homo sapiens
  misc_RNA (1)...(19): siRNA sense strand
guccaucccugaaguguua

SEQ ID NO: 1844231 - RNA, 19 nt, Homo sapiens
  misc_RNA (1)...(19): siRNA sense strand
gcaagagucacaaauauga

SEQ ID NO: 1844232 - RNA, 19 nt, Homo sapiens
  misc_RNA (1)...(19): siRNA sense strand
gcaaggacuuugagcaaga

SEQ ID NO: 1844233 - RNA, 19 nt, Homo sapiens
  misc_RNA (1)...(19): siRNA sense strand
gcacggauccugccaguga

SEQ ID NO: 1844234 - RNA, 19 nt, Homo sapiens
  misc_RNA (1)...(19): siRNA sense strand
caucaucucucuaugcaaa

SEQ ID NO: 1844235 - RNA, 19 nt, Homo sapiens
  misc_RNA (1)...(19): siRNA sense strand
gaaccaccuuaucaucuaa

SEQ ID NO: 1844236 - RNA, 19 nt, Homo sapiens
  misc_RNA (1)...(19): siRNA sense strand
ggaaggaugacguugauaa

SEQ ID NO: 1844237 - RNA, 19 nt, Homo sapiens
  misc_RNA (1)...(19): siRNA sense strand
ugauagagguagaagauuu

SEQ ID NO: 1844238 - RNA, 19 nt, Homo sapiens
  misc_RNA (1)...(19): siRNA sense strand
gaaccugcccaguguauuu

SEQ ID NO: 1844239 - RNA, 19 nt, Homo sapiens
  misc_RNA (1)...(19): siRNA sense strand
caauagcgaugccugcuuu

SEQ ID NO: 1844240 - RNA, 19 nt, Homo sapiens
  misc_RNA (1)...(19): siRNA sense strand
caaagcugcuguccaagaa

SEQ ID NO: 1844241 - RNA, 19 nt, Homo sapiens
  misc_RNA (1)...(19): siRNA sense strand
gagcacuacuuguacauga

SEQ ID NO: 1844242 - RNA, 19 nt, Homo sapiens
  misc_RNA (1)...(19): siRNA sense strand
cgggagggcuggaagaaua

SEQ ID NO: 1844243 - RNA, 19 nt, Homo sapiens
  misc_RNA (1)...(19): siRNA sense strand
gugauucgcucugaagaua

SEQ ID NO: 1844244 - RNA, 19 nt, Homo sapiens
  misc_RNA (1)...(19): siRNA sense strand
ggagaaacguggcaagagu

SEQ ID NO: 1844245 - RNA, 19 nt, Homo sapiens
  misc_RNA (1)...(19): siRNA sense strand
ccaagacaguauuccauuu

SEQ ID NO: 1844246 - RNA, 19 nt, Homo sapiens
  misc_RNA (1)...(19): siRNA sense strand
gguagaagauuucguggau

SEQ ID NO: 1844247 - RNA, 19 nt, Homo sapiens
  misc_RNA (1)...(19): siRNA sense strand
caacacaccuacuaucucu

SEQ ID NO: 1844248 - RNA, 19 nt, Homo sapiens
  misc_RNA (1)...(19): siRNA sense strand
gggaacgcauugacuguuu

SEQ ID NO: 1844249 - RNA, 19 nt, Homo sapiens
  misc_RNA (1)...(19): siRNA sense strand
gaacaugcuucuggugaug

SEQ ID NO: 1844250 - RNA, 19 nt, Homo sapiens
  misc_RNA (1)...(19): siRNA sense strand
gcuaugaucuugaccucuu

SEQ ID NO: 1844251 - RNA, 19 nt, Homo sapiens
  misc_RNA (1)...(19): siRNA sense strand
caacagugcugagcuuugu

SEQ ID NO: 1844252 - RNA, 19 nt, Homo sapiens
  misc_RNA (1)...(19): siRNA sense strand
ccacauugcucucuaaggu

SEQ ID NO: 1844253 - RNA, 19 nt, Homo sapiens
  misc_RNA (1)...(19): siRNA sense strand
gcagcgagcacuacuugua

SEQ ID NO: 1844254 - RNA, 19 nt, Homo sapiens
  misc_RNA (1)...(19): siRNA sense strand
caucaagaaugaggaaauu

SEQ ID NO: 1844255 - RNA, 19 nt, Homo sapiens
  misc_RNA (1)...(19): siRNA sense strand
ggagacagguggccagaag

SEQ ID NO: 1844256 - RNA, 19 nt, Homo sapiens
  misc_RNA (1)...(19): siRNA sense strand
ggaagaaacagaagagauc

SEQ ID NO: 1844257 - RNA, 19 nt, Homo sapiens
  misc_RNA (1)...(19): siRNA sense strand
caaccacaauguucguaaa

SEQ ID NO: 1844258 - RNA, 19 nt, Homo sapiens
  misc_RNA (1)...(19): siRNA sense strand
acagaacucucagaaauug

SEQ ID NO: 1844259 - RNA, 19 nt, Homo sapiens
  misc_RNA (1)...(19): siRNA sense strand
gaugugccgucacuuauuc

SEQ ID NO: 1844260 - RNA, 19 nt, Homo sapiens
  misc_RNA (1)...(19): siRNA sense strand
aagaagaacccaagaacua

SEQ ID NO: 1844261 - RNA, 19 nt, Homo sapiens
  misc_RNA (1)...(19): siRNA sense strand
ggaagaccuuacugaucua

SEQ ID NO: 1844262 - RNA, 19 nt, Homo sapiens
  misc_RNA (1)...(19): siRNA sense strand
auagugagcucccauccua

SEQ ID NO: 1844263 - RNA, 19 nt, Homo sapiens
  misc_RNA (1)...(19): siRNA sense strand
gggaagagacaccaucaaa

SEQ ID NO: 1844264 - RNA, 19 nt, Homo sapiens
  misc_RNA (1)...(19): siRNA sense strand
gcagugagucuauugagaa

SEQ ID NO: 1844265 - RNA, 19 nt, Homo sapiens
  misc_RNA (1)...(19): siRNA sense strand
ggaagggacccauguggaa

SEQ ID NO: 1844266 - RNA, 19 nt, Homo sapiens
  misc_RNA (1)...(19): siRNA sense strand
gcacucaccucugucaaca

SEQ ID NO: 1844267 - RNA, 19 nt, Homo sapiens
  misc_RNA (1)...(19): siRNA sense strand
gaaugggaguccuguuuua

SEQ ID NO: 1844268 - RNA, 19 nt, Homo sapiens
  misc_RNA (1)...(19): siRNA sense strand
gcugucaucaugcuuaaua

SEQ ID NO: 1844269 - RNA, 19 nt, Homo sapiens
  misc_RNA (1)...(19): siRNA sense strand
ggauucaguuucugcaaga

SEQ ID NO: 1844270 - RNA, 19 nt, Homo sapiens
  misc_RNA (1)...(19): siRNA sense strand
gaagcuagcaauacugaga

SEQ ID NO: 1844271 - RNA, 19 nt, Homo sapiens
  misc_RNA (1)...(19): siRNA sense strand
caacuaugauugugacuac

SEQ ID NO: 1844272 - RNA, 19 nt, Homo sapiens
  misc_RNA (1)...(19): siRNA sense strand
ucagugaguuauugagaaa

SEQ ID NO: 1844273 - RNA, 19 nt, Homo sapiens
  misc_RNA (1)...(19): siRNA sense strand
ggaagugauucgcucugaa

SEQ ID NO: 1844274 - RNA, 19 nt, Homo sapiens
  misc_RNA (1)...(19): siRNA sense strand
gagaguggccuuagagugu

SEQ ID NO: 1844275 - RNA, 19 nt, Homo sapiens
  misc_RNA (1)...(19): siRNA sense strand
acucagagguuaugauuca

SEQ ID NO: 1844276 - RNA, 19 nt, Homo sapiens
  misc_RNA (1)...(19): siRNA sense strand
ucaacaaguuccuguccua

SEQ ID NO: 1844277 - RNA, 19 nt, Homo sapiens
  misc_RNA (1)...(19): siRNA sense strand
gaacaucagcccugcagau

SEQ ID NO: 1844278 - RNA, 19 nt, Homo sapiens
  misc_RNA (1)...(19): siRNA sense strand
ugagaugugccgucacuua

SEQ ID NO: 1844279 - RNA, 19 nt, Homo sapiens
  misc_RNA (1)...(19): siRNA sense strand
uggcaagagucacaaauau

SEQ ID NO: 1844280 - RNA, 19 nt, Homo sapiens
  misc_RNA (1)...(19): siRNA sense strand
gagaagcuagcaauacuga

SEQ ID NO: 1844281 - RNA, 19 nt, Homo sapiens
  misc_RNA (1)...(19): siRNA sense strand
aaagcuagaugcccuggaa

SEQ ID NO: 1844282 - RNA, 19 nt, Homo sapiens
  misc_RNA (1)...(19): siRNA sense strand
ugaggaagaugcugcuuuc

SEQ ID NO: 1844283 - RNA, 19 nt, Homo sapiens
  misc_RNA (1)...(19): siRNA sense strand
ccaagagaguggccuuaga

SEQ ID NO: 1844284 - RNA, 19 nt, Homo sapiens
  misc_RNA (1)...(19): siRNA sense strand
caagaaugaggaaauugua

SEQ ID NO: 1844285 - RNA, 19 nt, Homo sapiens
  misc_RNA (1)...(19): siRNA sense strand
ggaccaacaugaagaagcu

SEQ ID NO: 1844286 - RNA, 19 nt, Homo sapiens
  misc_RNA (1)...(19): siRNA sense strand
acagagcguuggaugaauu

SEQ ID NO: 1844287 - RNA, 19 nt, Homo sapiens
  misc_RNA (1)...(19): siRNA sense strand
ccaaauggaagaaacagaa

SEQ ID NO: 1844288 - RNA, 19 nt, Homo sapiens
  misc_RNA (1)...(19): siRNA sense strand
ggcaugcccuucauugaug

SEQ ID NO: 1844289 - RNA, 19 nt, Homo sapiens
  misc_RNA (1)...(19): siRNA sense strand
gcagagugaugaugaugag

SEQ ID NO: 1844290 - RNA, 19 nt, Homo sapiens
  misc_RNA (1)...(19): siRNA sense strand
gaacaugggaaaucaggau

SEQ ID NO: 1844291 - RNA, 19 nt, Homo sapiens
  misc_RNA (1)...(19): siRNA sense strand
cagagcaguucaaucagaa

SEQ ID NO: 1844292 - RNA, 19 nt, Homo sapiens
  misc_RNA (1)...(19): siRNA sense strand
ccacugcugucacucucua

SEQ ID NO: 1844293 - RNA, 19 nt, Homo sapiens
  misc_RNA (1)...(19): siRNA sense strand
agagacauaugaugaggaa

SEQ ID NO: 1844294 - RNA, 19 nt, Homo sapiens
  misc_RNA (1)...(19): siRNA sense strand
ggagaacuauguguggaau

SEQ ID NO: 1844295 - RNA, 19 nt, Homo sapiens
  misc_RNA (1)...(19): siRNA sense strand
gaauggaggcaaggacuuu

SEQ ID NO: 1844296 - RNA, 19 nt, Homo sapiens
  misc_RNA (1)...(19): siRNA sense strand
ccaaugaaucuguguguga

SEQ ID NO: 1844297 - RNA, 19 nt, Homo sapiens
  misc_RNA (1)...(19): siRNA sense strand
gagaugcugcuaaggauug

SEQ ID NO: 1844298 - RNA, 19 nt, Homo sapiens
  misc_RNA (1)...(19): siRNA sense strand
aagaaugccuucccugugu

SEQ ID NO: 1844299 - RNA, 19 nt, Homo sapiens
  misc_RNA (1)...(19): siRNA sense strand
gaucaucacuguggagaac

SEQ ID NO: 1844300 - RNA, 19 nt, Homo sapiens
  misc_RNA (1)...(19): siRNA sense strand
gaugagaugugccgucacu

SEQ ID NO: 1844301 - RNA, 19 nt, Homo sapiens
  misc_RNA (1)...(19): siRNA sense strand
ucaccucugucaacaaguu

SEQ ID NO: 1844302 - RNA, 19 nt, Homo sapiens
  misc_RNA (1)...(19): siRNA sense strand
cagaugaagagacauauga

SEQ ID NO: 1844303 - RNA, 19 nt, Homo sapiens
  misc_RNA (1)...(19): siRNA sense strand
caugaaggcucuggucuca

SEQ ID NO: 1844304 - RNA, 19 nt, Homo sapiens
  misc_RNA (1)...(19): siRNA sense strand
caagacaguauuccauuug

SEQ ID NO: 1844305 - RNA, 19 nt, Homo sapiens
  misc_RNA (1)...(19): siRNA sense strand
ggccuaugcugucaucaug

SEQ ID NO: 1844306 - RNA, 19 nt, Homo sapiens
  misc_RNA (1)...(19): siRNA sense strand
gaagaacccaagaacuaug

SEQ ID NO: 1844307 - RNA, 19 nt, Homo sapiens
  misc_RNA (1)...(19): siRNA sense strand
gaagggacccauguggaaa

SEQ ID NO: 1844308 - RNA, 19 nt, Homo sapiens
  misc_RNA (1)...(19): siRNA sense strand
ccuacgagaugaacucuuc

SEQ ID NO: 1844309 - RNA, 19 nt, Homo sapiens
  misc_RNA (1)...(19): siRNA sense strand
ugaaggcucuggucucagu

SEQ ID NO: 1844310 - RNA, 19 nt, Homo sapiens
  misc_RNA (1)...(19): siRNA sense strand
aaagcaaugugacccagaa

SEQ ID NO: 1844311 - RNA, 19 nt, Homo sapiens
  misc_RNA (1)...(19): siRNA sense strand
gaaugaggaaauuguaaug

SEQ ID NO: 1844312 - RNA, 19 nt, Homo sapiens
  misc_RNA (1)...(19): siRNA sense strand
acagagcaguucaaucaga

SEQ ID NO: 1844313 - RNA, 19 nt, Homo sapiens
  misc_RNA (1)...(19): siRNA sense strand
ccacgggaacuaauugaaa

SEQ ID NO: 1844314 - RNA, 19 nt, Homo sapiens
  misc_RNA (1)...(19): siRNA sense strand
gagagcaccucaaguucca

SEQ ID NO: 1844315 - RNA, 19 nt, Homo sapiens
  misc_RNA (1)...(19): siRNA sense strand
cauccuaccaucagaauga

SEQ ID NO: 1844316 - RNA, 19 nt, Homo sapiens
  misc_RNA (1)...(19): siRNA sense strand
ggaugagggcuuccacauu

SEQ ID NO: 1844317 - RNA, 19 nt, Homo sapiens
  misc_RNA (1)...(19): siRNA sense strand
ucaagaagaaauccaaaga

SEQ ID NO: 1844318 - RNA, 19 nt, Homo sapiens
  misc_RNA (1)...(19): siRNA sense strand
aaagggaaccgcuucaaga

SEQ ID NO: 1844319 - RNA, 19 nt, Homo sapiens
  misc_RNA (1)...(19): siRNA sense strand
gcagggaacuggugagugu

SEQ ID NO: 1844320 - RNA, 19 nt, Homo sapiens
  misc_RNA (1)...(19): siRNA sense strand
gcagagagaucccaauguc

SEQ ID NO: 1844321 - RNA, 19 nt, Homo sapiens
  misc_RNA (1)...(19): siRNA sense strand
gugcugggcuucaucauug

SEQ ID NO: 1844322 - RNA, 19 nt, Homo sapiens
  misc_RNA (1)...(19): siRNA sense strand
gagagccaaugacagcaaa

SEQ ID NO: 1844323 - RNA, 19 nt, Homo sapiens
  misc_RNA (1)...(19): siRNA sense strand
gugcauaccaggugacaaa

SEQ ID NO: 1844324 - RNA, 19 nt, Homo sapiens
  misc_RNA (1)...(19): siRNA sense strand
ggugcuggcuucacaguca

SEQ ID NO: 1844325 - RNA, 19 nt, Homo sapiens
  misc_RNA (1)...(19): siRNA sense strand
ucacggugcugcucucugu

SEQ ID NO: 1844326 - RNA, 19 nt, Homo sapiens
  misc_RNA (1)...(19): siRNA sense strand
guggugacguccagcuuug

SEQ ID NO: 1844327 - RNA, 19 nt, Homo sapiens
  misc_RNA (1)...(19): siRNA sense strand
cuacauuuccuaccuagug

SEQ ID NO: 1844328 - RNA, 19 nt, Homo sapiens
  misc_RNA (1)...(19): siRNA sense strand
gcugcagacuucaacaucu

SEQ ID NO: 1844329 - RNA, 19 nt, Homo sapiens
  misc_RNA (1)...(19): siRNA sense strand
uuuccuaccuagugaagaa

SEQ ID NO: 1844330 - RNA, 19 nt, Homo sapiens
  misc_RNA (1)...(19): siRNA sense strand
ggagagccaaugacagcaa

SEQ ID NO: 1844331 - RNA, 19 nt, Homo sapiens
  misc_RNA (1)...(19): siRNA sense strand
caacaucucaagccucucu

SEQ ID NO: 1844332 - RNA, 19 nt, Homo sapiens
  misc_RNA (1)...(19): siRNA sense strand
cagcagagagaucccaaug

SEQ ID NO: 1844333 - RNA, 19 nt, Homo sapiens
  misc_RNA (1)...(19): siRNA sense strand
uacauuuccuaccuaguga

SEQ ID NO: 1844334 - RNA, 19 nt, Homo sapiens
  misc_RNA (1)...(19): siRNA sense strand
ccacugaguccagcagaga

SEQ ID NO: 1844335 - RNA, 19 nt, Homo sapiens
  misc_RNA (1)...(19): siRNA sense strand
ggugcugggcuucaucauu

SEQ ID NO: 1844336 - RNA, 19 nt, Homo sapiens
  misc_RNA (1)...(19): siRNA sense strand
gccaggaaccaaauucuac

SEQ ID NO: 1844337 - RNA, 19 nt, Homo sapiens
  misc_RNA (1)...(19): siRNA sense strand
acaaaccucgugccaggaa

SEQ ID NO: 1844338 - RNA, 19 nt, Homo sapiens
  misc_RNA (1)...(19): siRNA sense strand
gcaaugccacacugauggu

SEQ ID NO: 1844339 - RNA, 19 nt, Homo sapiens
  misc_RNA (1)...(19): siRNA sense strand
caguggugcuggcuucaca

SEQ ID NO: 1844340 - RNA, 19 nt, Homo sapiens
  misc_RNA (1)...(19): siRNA sense strand
auccggaccuugcccuuga

SEQ ID NO: 1844341 - RNA, 19 nt, Homo sapiens
  misc_RNA (1)...(19): siRNA sense strand
ggucguaacuuccaagaaa

SEQ ID NO: 1844342 - RNA, 19 nt, Homo sapiens
  misc_RNA (1)...(19): siRNA sense strand
gaaaccaacuucuccauuc

SEQ ID NO: 1844343 - RNA, 19 nt, Homo sapiens
  misc_RNA (1)...(19): siRNA sense strand
gaacuaauuggcauucuaa

SEQ ID NO: 1844344 - RNA, 19 nt, Homo sapiens
  misc_RNA (1)...(19): siRNA sense strand
gcaaugggcuugugaucug

SEQ ID NO: 1844345 - RNA, 19 nt, Homo sapiens
  misc_RNA (1)...(19): siRNA sense strand
gaucaucgcugccaaaauu

SEQ ID NO: 1844346 - RNA, 19 nt, Homo sapiens
  misc_RNA (1)...(19): siRNA sense strand
guccuuaccuuaccaaauu

SEQ ID NO: 1844347 - RNA, 19 nt, Homo sapiens
  misc_RNA (1)...(19): siRNA sense strand
ccaauucucuacgucuuua

SEQ ID NO: 1844348 - RNA, 19 nt, Homo sapiens
  misc_RNA (1)...(19): siRNA sense strand
gcucuggaccgcuguauuu

SEQ ID NO: 1844349 - RNA, 19 nt, Homo sapiens
  misc_RNA (1)...(19): siRNA sense strand
ucacagaaaccacaugauu

SEQ ID NO: 1844350 - RNA, 19 nt, Homo sapiens
  misc_RNA (1)...(19): siRNA sense strand
gcucaaagagauguuguua

SEQ ID NO: 1844351 - RNA, 19 nt, Homo sapiens
  misc_RNA (1)...(19): siRNA sense strand
cacagaaaccacaugauua

SEQ ID NO: 1844352 - RNA, 19 nt, Homo sapiens
  misc_RNA (1)...(19): siRNA sense strand
acagaaaccacaugauuaa

SEQ ID NO: 1844353 - RNA, 19 nt, Homo sapiens
  misc_RNA (1)...(19): siRNA sense strand
caccauaguccuuaccuua

SEQ ID NO: 1844354 - RNA, 19 nt, Homo sapiens
  misc_RNA (1)...(19): siRNA sense strand
ggaguuacaagcaauguga

SEQ ID NO: 1844355 - RNA, 19 nt, Homo sapiens
  misc_RNA (1)...(19): siRNA sense strand
gcucuuugcccacuaguuu

SEQ ID NO: 1844356 - RNA, 19 nt, Homo sapiens
  misc_RNA (1)...(19): siRNA sense strand
ggaaaccaacuucuccauu

SEQ ID NO: 1844357 - RNA, 19 nt, Homo sapiens
  misc_RNA (1)...(19): siRNA sense strand
ugaacuaauuggcauucua

SEQ ID NO: 1844358 - RNA, 19 nt, Homo sapiens
  misc_RNA (1)...(19): siRNA sense strand
guuguuaaauggcaaauac

SEQ ID NO: 1844359 - RNA, 19 nt, Homo sapiens
  misc_RNA (1)...(19): siRNA sense strand
gcucauuccuauguaaguu

SEQ ID NO: 1844360 - RNA, 19 nt, Homo sapiens
  misc_RNA (1)...(19): siRNA sense strand
uaaauccagccgucccuua

SEQ ID NO: 1844361 - RNA, 19 nt, Homo sapiens
  misc_RNA (1)...(19): siRNA sense strand
ggcccuagcugacuucucu

SEQ ID NO: 1844362 - RNA, 19 nt, Homo sapiens
  misc_RNA (1)...(19): siRNA sense strand
gagacggaguuacaagcaa

SEQ ID NO: 1844363 - RNA, 19 nt, Homo sapiens
  misc_RNA (1)...(19): siRNA sense strand
agacaccacuucugcuuca

SEQ ID NO: 1844364 - RNA, 19 nt, Homo sapiens
  misc_RNA (1)...(19): siRNA sense strand
ggacuacaauaaguacuac

SEQ ID NO: 1844365 - RNA, 19 nt, Homo sapiens
  misc_RNA (1)...(19): siRNA sense strand
ugugguggcuucuuucuuc

SEQ ID NO: 1844366 - RNA, 19 nt, Homo sapiens
  misc_RNA (1)...(19): siRNA sense strand
gauccuccacuucauuauu

SEQ ID NO: 1844367 - RNA, 19 nt, Homo sapiens
  misc_RNA (1)...(19): siRNA sense strand
gauagacaucaaccuguuu

SEQ ID NO: 1844368 - RNA, 19 nt, Homo sapiens
  misc_RNA (1)...(19): siRNA sense strand
ucagugccauccuaccauu

SEQ ID NO: 1844369 - RNA, 19 nt, Homo sapiens
  misc_RNA (1)...(19): siRNA sense strand
gugccuauguccaucauca

SEQ ID NO: 1844370 - RNA, 19 nt, Homo sapiens
  misc_RNA (1)...(19): siRNA sense strand
ucuguugguucccuuauga

SEQ ID NO: 1844371 - RNA, 19 nt, Homo sapiens
  misc_RNA (1)...(19): siRNA sense strand
cuagcugacuucucuuuca

SEQ ID NO: 1844372 - RNA, 19 nt, Homo sapiens
  misc_RNA (1)...(19): siRNA sense strand
aauuucaucuucuggacua

SEQ ID NO: 1844373 - RNA, 19 nt, Homo sapiens
  misc_RNA (1)...(19): siRNA sense strand
caauaaguacuacgaaugg

SEQ ID NO: 1844374 - RNA, 19 nt, Homo sapiens
  misc_RNA (1)...(19): siRNA sense strand
caucaucacagucugcuau

SEQ ID NO: 1844375 - RNA, 19 nt, Homo sapiens
  misc_RNA (1)...(19): siRNA sense strand
agacggaguuacaagcaau

SEQ ID NO: 1844376 - RNA, 19 nt, Homo sapiens
  misc_RNA (1)...(19): siRNA sense strand
guggcuggauuccggauga

SEQ ID NO: 1844377 - RNA, 19 nt, Homo sapiens
  misc_RNA (1)...(19): siRNA sense strand
uagagagguugaacguguu

SEQ ID NO: 1844378 - RNA, 19 nt, Homo sapiens
  misc_RNA (1)...(19): siRNA sense strand
acaauaaguacuacgaaug

SEQ ID NO: 1844379 - RNA, 19 nt, Homo sapiens
  misc_RNA (1)...(19): siRNA sense strand
cugcugugguggcuucuuu

SEQ ID NO: 1844380 - RNA, 19 nt, Homo sapiens
  misc_RNA (1)...(19): siRNA sense strand
ccaugagucuggccaagag

SEQ ID NO: 1844381 - RNA, 19 nt, Homo sapiens
  misc_RNA (1)...(19): siRNA sense strand
caacacagacaccacuucu

SEQ ID NO: 1844382 - RNA, 19 nt, Homo sapiens
  misc_RNA (1)...(19): siRNA sense strand
acacugcuguagagagguu

SEQ ID NO: 1844383 - RNA, 19 nt, Homo sapiens
  misc_RNA (1)...(19): siRNA sense strand
uaccaaauuucaucuucug

SEQ ID NO: 1844384 - RNA, 19 nt, Homo sapiens
  misc_RNA (1)...(19): siRNA sense strand
cuauguaaguuaguucaug

SEQ ID NO: 1844385 - RNA, 19 nt, Homo sapiens
  misc_RNA (1)...(19): siRNA sense strand
ggagacggaguuacaagca

SEQ ID NO: 1844386 - RNA, 19 nt, Homo sapiens
  misc_RNA (1)...(19): siRNA sense strand
caucuucuggacuacaaua

SEQ ID NO: 1844387 - RNA, 19 nt, Homo sapiens
  misc_RNA (1)...(19): siRNA sense strand
ucauucuuguccugauuaa

SEQ ID NO: 1844388 - RNA, 19 nt, Homo sapiens
  misc_RNA (1)...(19): siRNA sense strand
cuucuggacuacaauaagu

SEQ ID NO: 1844389 - RNA, 19 nt, Homo sapiens
  misc_RNA (1)...(19): siRNA sense strand
gcaacacagacaccacuuc

SEQ ID NO: 1844390 - RNA, 19 nt, Homo sapiens
  misc_RNA (1)...(19): siRNA sense strand
gggugacacugcuguagag

SEQ ID NO: 1844391 - RNA, 19 nt, Homo sapiens
  misc_RNA (1)...(19): siRNA sense strand
gaugacgggacucuggauu

SEQ ID NO: 1844392 - RNA, 19 nt, Homo sapiens
  misc_RNA (1)...(19): siRNA sense strand
cuuuaugggucguaacuuc

SEQ ID NO: 1844393 - RNA, 19 nt, Homo sapiens
  misc_RNA (1)...(19): siRNA sense strand
gcagucuggcucaaagaga

SEQ ID NO: 1844394 - RNA, 19 nt, Homo sapiens
  misc_RNA (1)...(19): siRNA sense strand
ugacgggacucuggauuuu

SEQ ID NO: 1844395 - RNA, 19 nt, Homo sapiens
  misc_RNA (1)...(19): siRNA sense strand
gaucuggguggcuggauuc

SEQ ID NO: 1844396 - RNA, 19 nt, Homo sapiens
  misc_RNA (1)...(19): siRNA sense strand
cagucuggcucaaagagau

SEQ ID NO: 1844397 - RNA, 19 nt, Homo sapiens
  misc_RNA (1)...(19): siRNA sense strand
cggagucaccuuugucuuc

SEQ ID NO: 1844398 - RNA, 19 nt, Homo sapiens
  misc_RNA (1)...(19): siRNA sense strand
caccaucuguuaccugaac

SEQ ID NO: 1844399 - RNA, 19 nt, Homo sapiens
  misc_RNA (1)...(19): siRNA sense strand
aagagauguuguuaaaugg

SEQ ID NO: 1844400 - RNA, 19 nt, Homo sapiens
  misc_RNA (1)...(19): siRNA sense strand
gguggcuucuuucuucauc

SEQ ID NO: 1844401 - RNA, 19 nt, Homo sapiens
  misc_RNA (1)...(19): siRNA sense strand
uaccauggccaaggucuuu

SEQ ID NO: 1844402 - RNA, 19 nt, Homo sapiens
  misc_RNA (1)...(19): siRNA sense strand
ugaucuggguggcuggauu

SEQ ID NO: 1844403 - RNA, 19 nt, Homo sapiens
  misc_RNA (1)...(19): siRNA sense strand
cuggaccgcuguauuugug

SEQ ID NO: 1844404 - RNA, 19 nt, Homo sapiens
  misc_RNA (1)...(19): siRNA sense strand
cuuaccaaauuucaucuuc

SEQ ID NO: 1844405 - RNA, 19 nt, Homo sapiens
  misc_RNA (1)...(19): siRNA sense strand
gaucuucucauugcuaguc

SEQ ID NO: 1844406 - RNA, 19 nt, Homo sapiens
  misc_RNA (1)...(19): siRNA sense strand
cagaaaccacaugauuaaa

SEQ ID NO: 1844407 - RNA, 19 nt, Homo sapiens
  misc_RNA (1)...(19): siRNA sense strand
cugauccuccacuucauua

SEQ ID NO: 1844408 - RNA, 19 nt, Homo sapiens
  misc_RNA (1)...(19): siRNA sense strand
cuacaauaaguacuacgaa

SEQ ID NO: 1844409 - RNA, 19 nt, Homo sapiens
  misc_RNA (1)...(19): siRNA sense strand
auccuccacuucauuauug

SEQ ID NO: 1844410 - RNA, 19 nt, Homo sapiens
  misc_RNA (1)...(19): siRNA sense strand
ucaccauaguccuuaccuu

SEQ ID NO: 1844411 - RNA, 19 nt, Homo sapiens
  misc_RNA (1)...(19): siRNA sense strand
acagcugccucaacccaau

SEQ ID NO: 1844412 - RNA, 19 nt, Homo sapiens
  misc_RNA (1)...(19): siRNA sense strand
gcuucuuucuucaucuguu

SEQ ID NO: 1844413 - RNA, 19 nt, Homo sapiens
  misc_RNA (1)...(19): siRNA sense strand
uggccaaggucuuucugau

SEQ ID NO: 1844414 - RNA, 19 nt, Homo sapiens
  misc_RNA (1)...(19): siRNA sense strand
uggacuacaauaaguacua

SEQ ID NO: 1844415 - RNA, 19 nt, Homo sapiens
  misc_RNA (1)...(19): siRNA sense strand
gcacagucaacaccaucug

SEQ ID NO: 1844416 - RNA, 19 nt, Homo sapiens
  misc_RNA (1)...(19): siRNA sense strand
ggccaaggucuuucugauc

SEQ ID NO: 1844417 - RNA, 19 nt, Homo sapiens
  misc_RNA (1)...(19): siRNA sense strand
cagaaccaucgcaccauga

SEQ ID NO: 1844418 - RNA, 19 nt, Homo sapiens
  misc_RNA (1)...(19): siRNA sense strand
guggaucuucucauugcua

SEQ ID NO: 1844419 - RNA, 19 nt, Homo sapiens
  misc_RNA (1)...(19): siRNA sense strand
gaggagacggaguuacaag

SEQ ID NO: 1844420 - RNA, 19 nt, Homo sapiens
  misc_RNA (1)...(19): siRNA sense strand
ucagucgccaugagagaaa

SEQ ID NO: 1844421 - RNA, 19 nt, Homo sapiens
  misc_RNA (1)...(19): siRNA sense strand
ucauuaccauggccaaggu

SEQ ID NO: 1844422 - RNA, 19 nt, Homo sapiens
  misc_RNA (1)...(19): siRNA sense strand
ucauuccuauguaaguuag

SEQ ID NO: 1844423 - RNA, 19 nt, Homo sapiens
  misc_RNA (1)...(19): siRNA sense strand
uggagagggcccugacuga

SEQ ID NO: 1844424 - RNA, 19 nt, Homo sapiens
  misc_RNA (1)...(19): siRNA sense strand
cuauguccaucaucacagu

SEQ ID NO: 1844425 - RNA, 19 nt, Homo sapiens
  misc_RNA (1)...(19): siRNA sense strand
gcacuucugucccaaugug

SEQ ID NO: 1844426 - RNA, 19 nt, Homo sapiens
  misc_RNA (1)...(19): siRNA sense strand
cagaacggcugcaucaacu

SEQ ID NO: 1844427 - RNA, 19 nt, Homo sapiens
  misc_RNA (1)...(19): siRNA sense strand
cauccaagccuacgacuac

SEQ ID NO: 1844428 - RNA, 19 nt, Homo sapiens
  misc_RNA (1)...(19): siRNA sense strand
guacgugcccaccgucuuc

SEQ ID NO: 1844429 - RNA, 19 nt, Homo sapiens
  misc_RNA (1)...(19): siRNA sense strand
ccaccgucuucgagaacua

SEQ ID NO: 1844430 - RNA, 19 nt, Homo sapiens
  misc_RNA (1)...(19): siRNA sense strand
ggacaccgacgucauucuc

SEQ ID NO: 1844431 - RNA, 19 nt, Homo sapiens
  misc_RNA (1)...(19): siRNA sense strand
cggacucgcuggagaacau

SEQ ID NO: 1844432 - RNA, 19 nt, Homo sapiens
  misc_RNA (1)...(19): siRNA sense strand
aagcacuucugucccaaug

SEQ ID NO: 1844433 - RNA, 19 nt, Homo sapiens
  misc_RNA (1)...(19): siRNA sense strand
gcauccaagccuacgacua

SEQ ID NO: 1844434 - RNA, 19 nt, Homo sapiens
  misc_RNA (1)...(19): siRNA sense strand
agacgugccugcugaucgu

SEQ ID NO: 1844435 - RNA, 19 nt, Homo sapiens
  misc_RNA (1)...(19): siRNA sense strand
ccagaacggcugcaucaac

SEQ ID NO: 1844436 - RNA, 19 nt, Homo sapiens
  misc_RNA (1)...(19): siRNA sense strand
caacugcugcaaggugcua

SEQ ID NO: 1844437 - RNA, 19 nt, Homo sapiens
  misc_RNA (1)...(19): siRNA sense strand
gcaagacgugccugcugau

SEQ ID NO: 1844438 - RNA, 19 nt, Homo sapiens
  misc_RNA (1)...(19): siRNA sense strand
gcucugccaagaccaagga

SEQ ID NO: 1844439 - RNA, 19 nt, Homo sapiens
  misc_RNA (1)...(19): siRNA sense strand
ggaaagcccugugggauug

SEQ ID NO: 1844440 - RNA, 19 nt, Homo sapiens
  misc_RNA (1)...(19): siRNA sense strand
gaaaguuguuugucauguu

SEQ ID NO: 1844441 - RNA, 19 nt, Homo sapiens
  misc_RNA (1)...(19): siRNA sense strand
gaacccaucucugucaaug

SEQ ID NO: 1844442 - RNA, 19 nt, Homo sapiens
  misc_RNA (1)...(19): siRNA sense strand
ucccagagcuuugcaguaa

SEQ ID NO: 1844443 - RNA, 19 nt, Homo sapiens
  misc_RNA (1)...(19): siRNA sense strand
gcacuggauggcaaacuua

SEQ ID NO: 1844444 - RNA, 19 nt, Homo sapiens
  misc_RNA (1)...(19): siRNA sense strand
uguauucacuagacaagua

SEQ ID NO: 1844445 - RNA, 19 nt, Homo sapiens
  misc_RNA (1)...(19): siRNA sense strand
ccaagacuguguucauuca

SEQ ID NO: 1844446 - RNA, 19 nt, Homo sapiens
  misc_RNA (1)...(19): siRNA sense strand
gaccgggaauggacaaaga

SEQ ID NO: 1844447 - RNA, 19 nt, Homo sapiens
  misc_RNA (1)...(19): siRNA sense strand
ugaccaaccugcccuguuc

SEQ ID NO: 1844448 - RNA, 19 nt, Homo sapiens
  misc_RNA (1)...(19): siRNA sense strand
gccucuagcacaauuauua

SEQ ID NO: 1844449 - RNA, 19 nt, Homo sapiens
  misc_RNA (1)...(19): siRNA sense strand
aaaguuguuugucauguug

SEQ ID NO: 1844450 - RNA, 19 nt, Homo sapiens
  misc_RNA (1)...(19): siRNA sense strand
caccaagacuguguucauu

SEQ ID NO: 1844451 - RNA, 19 nt, Homo sapiens
  misc_RNA (1)...(19): siRNA sense strand
gguugauccugaguacuua

SEQ ID NO: 1844452 - RNA, 19 nt, Homo sapiens
  misc_RNA (1)...(19): siRNA sense strand
gacaaugccuaccccuuua

SEQ ID NO: 1844453 - RNA, 19 nt, Homo sapiens
  misc_RNA (1)...(19): siRNA sense strand
ugucgaaaguuguuuguca

SEQ ID NO: 1844454 - RNA, 19 nt, Homo sapiens
  misc_RNA (1)...(19): siRNA sense strand
ccugugggauugacuuuga

SEQ ID NO: 1844455 - RNA, 19 nt, Homo sapiens
  misc_RNA (1)...(19): siRNA sense strand
ggacagggagguucacuac

SEQ ID NO: 1844456 - RNA, 19 nt, Homo sapiens
  misc_RNA (1)...(19): siRNA sense strand
ggaauucacggagacugua

SEQ ID NO: 1844457 - RNA, 19 nt, Homo sapiens
  misc_RNA (1)...(19): siRNA sense strand
gaccagaucacagauguug

SEQ ID NO: 1844458 - RNA, 19 nt, Homo sapiens
  misc_RNA (1)...(19): siRNA sense strand
cagauguuguccuguauuc

SEQ ID NO: 1844459 - RNA, 19 nt, Homo sapiens
  misc_RNA (1)...(19): siRNA sense strand
ggacaaugccuaccccuuu

SEQ ID NO: 1844460 - RNA, 19 nt, Homo sapiens
  misc_RNA (1)...(19): siRNA sense strand
cgaaaguuguuugucaugu

SEQ ID NO: 1844461 - RNA, 19 nt, Homo sapiens
  misc_RNA (1)...(19): siRNA sense strand
gcaaguggucccagcugaa

SEQ ID NO: 1844462 - RNA, 19 nt, Homo sapiens
  misc_RNA (1)...(19): siRNA sense strand
aaccugcccuguucuguga

SEQ ID NO: 1844463 - RNA, 19 nt, Homo sapiens
  misc_RNA (1)...(19): siRNA sense strand
cuagacaaguacaccaaga

SEQ ID NO: 1844464 - RNA, 19 nt, Homo sapiens
  misc_RNA (1)...(19): siRNA sense strand
gauuucaguugaccagauc

SEQ ID NO: 1844465 - RNA, 19 nt, Homo sapiens
  misc_RNA (1)...(19): siRNA sense strand
ggcacuggauggcaaacuu

SEQ ID NO: 1844466 - RNA, 19 nt, Homo sapiens
  misc_RNA (1)...(19): siRNA sense strand
gacaugugccuuucgcuau

SEQ ID NO: 1844467 - RNA, 19 nt, Homo sapiens
  misc_RNA (1)...(19): siRNA sense strand
auaccaaccuggccucuag

SEQ ID NO: 1844468 - RNA, 19 nt, Homo sapiens
  misc_RNA (1)...(19): siRNA sense strand
uccaagguguuuaagaaga

SEQ ID NO: 1844469 - RNA, 19 nt, Homo sapiens
  misc_RNA (1)...(19): siRNA sense strand
gcaaacuuaagcaugaaga

SEQ ID NO: 1844470 - RNA, 19 nt, Homo sapiens
  misc_RNA (1)...(19): siRNA sense strand
gcaccaacaaggucaucaa

SEQ ID NO: 1844471 - RNA, 19 nt, Homo sapiens
  misc_RNA (1)...(19): siRNA sense strand
acccaucucugucaauguu

SEQ ID NO: 1844472 - RNA, 19 nt, Homo sapiens
  misc_RNA (1)...(19): siRNA sense strand
ggacacgguggaacccauu

SEQ ID NO: 1844473 - RNA, 19 nt, Homo sapiens
  misc_RNA (1)...(19): siRNA sense strand
acagggagguucacuacca

SEQ ID NO: 1844474 - RNA, 19 nt, Homo sapiens
  misc_RNA (1)...(19): siRNA sense strand
gaagaguuucugugcugaa

SEQ ID NO: 1844475 - RNA, 19 nt, Homo sapiens
  misc_RNA (1)...(19): siRNA sense strand
ugacgguguuguccugguu

SEQ ID NO: 1844476 - RNA, 19 nt, Homo sapiens
  misc_RNA (1)...(19): siRNA sense strand
acaaguacaccaagacugu

SEQ ID NO: 1844477 - RNA, 19 nt, Homo sapiens
  misc_RNA (1)...(19): siRNA sense strand
aagaagaccagcuccaaug

SEQ ID NO: 1844478 - RNA, 19 nt, Homo sapiens
  misc_RNA (1)...(19): siRNA sense strand
caacaacugcaccaacaag

SEQ ID NO: 1844479 - RNA, 19 nt, Homo sapiens
  misc_RNA (1)...(19): siRNA sense strand
ggaacccauugacgguguu

SEQ ID NO: 1844480 - RNA, 19 nt, Homo sapiens
  misc_RNA (1)...(19): siRNA sense strand
uaagaagaccagcuccaau

SEQ ID NO: 1844481 - RNA, 19 nt, Homo sapiens
  misc_RNA (1)...(19): siRNA sense strand
ggacuucguggaccaugug

SEQ ID NO: 1844482 - RNA, 19 nt, Homo sapiens
  misc_RNA (1)...(19): siRNA sense strand
gauccugguguccuacaaa

SEQ ID NO: 1844483 - RNA, 19 nt, Homo sapiens
  misc_RNA (1)...(19): siRNA sense strand
auggcaaacuuaagcauga

SEQ ID NO: 1844484 - RNA, 19 nt, Homo sapiens
  misc_RNA (1)...(19): siRNA sense strand
cuuaaaaugucgaaaguug

SEQ ID NO: 1844485 - RNA, 19 nt, Homo sapiens
  misc_RNA (1)...(19): siRNA sense strand
cuauggccgugaugacuug

SEQ ID NO: 1844486 - RNA, 19 nt, Homo sapiens
  misc_RNA (1)...(19): siRNA sense strand
ccaagguguuuaagaagac

SEQ ID NO: 1844487 - RNA, 19 nt, Homo sapiens
  misc_RNA (1)...(19): siRNA sense strand
acaugugccuuucgcuaug

SEQ ID NO: 1844488 - RNA, 19 nt, Homo sapiens
  misc_RNA (1)...(19): siRNA sense strand
cgcuagcucugaggacaua

SEQ ID NO: 1844489 - RNA, 19 nt, Homo sapiens
  misc_RNA (1)...(19): siRNA sense strand
gcuauggccgugaugacuu

SEQ ID NO: 1844490 - RNA, 19 nt, Homo sapiens
  misc_RNA (1)...(19): siRNA sense strand
guccugugguggcauccua

SEQ ID NO: 1844491 - RNA, 19 nt, Homo sapiens
  misc_RNA (1)...(19): siRNA sense strand
ggauccugguguccuacaa

SEQ ID NO: 1844492 - RNA, 19 nt, Homo sapiens
  misc_RNA (1)...(19): siRNA sense strand
caccaacaaggucaucaaa

SEQ ID NO: 1844493 - RNA, 19 nt, Homo sapiens
  misc_RNA (1)...(19): siRNA sense strand
gcggcugguuguccggaaa

SEQ ID NO: 1844494 - RNA, 19 nt, Homo sapiens
  misc_RNA (1)...(19): siRNA sense strand
caaguggucccagcugaau

SEQ ID NO: 1844495 - RNA, 19 nt, Homo sapiens
  misc_RNA (1)...(19): siRNA sense strand
ggucugacguuccgaaaag

SEQ ID NO: 1844496 - RNA, 19 nt, Homo sapiens
  misc_RNA (1)...(19): siRNA sense strand
ccagaucacagauguuguc

SEQ ID NO: 1844497 - RNA, 19 nt, Homo sapiens
  misc_RNA (1)...(19): siRNA sense strand
aaccuggccucuagcacaa

SEQ ID NO: 1844498 - RNA, 19 nt, Homo sapiens
  misc_RNA (1)...(19): siRNA sense strand
guccggaaaguacaauuug

SEQ ID NO: 1844499 - RNA, 19 nt, Homo sapiens
  misc_RNA (1)...(19): siRNA sense strand
acauagucaucgaggaguu

SEQ ID NO: 1844500 - RNA, 19 nt, Homo sapiens
  misc_RNA (1)...(19): siRNA sense strand
cauccgaagccaucucaug

SEQ ID NO: 1844501 - RNA, 19 nt, Homo sapiens
  misc_RNA (1)...(19): siRNA sense strand
gucgaaaguuguuugucau

SEQ ID NO: 1844502 - RNA, 19 nt, Homo sapiens
  misc_RNA (1)...(19): siRNA sense strand
ccuggccucuagcacaauu

SEQ ID NO: 1844503 - RNA, 19 nt, Homo sapiens
  misc_RNA (1)...(19): siRNA sense strand
ccaucucugucaauguuuc

SEQ ID NO: 1844504 - RNA, 19 nt, Homo sapiens
  misc_RNA (1)...(19): siRNA sense strand
gaaagcccugugggauuga

SEQ ID NO: 1844505 - RNA, 19 nt, Homo sapiens
  misc_RNA (1)...(19): siRNA sense strand
gauaccaaccuggccucua

SEQ ID NO: 1844506 - RNA, 19 nt, Homo sapiens
  misc_RNA (1)...(19): siRNA sense strand
gauccugaguacuuaaaau

SEQ ID NO: 1844507 - RNA, 19 nt, Homo sapiens
  misc_RNA (1)...(19): siRNA sense strand
gcgaggaggagagccagaa

SEQ ID NO: 1844508 - RNA, 19 nt, Homo sapiens
  misc_RNA (1)...(19): siRNA sense strand
cgauguugguguggagcua

SEQ ID NO: 1844509 - RNA, 19 nt, Homo sapiens
  misc_RNA (1)...(19): siRNA sense strand
ccugacagccagcgauguu

SEQ ID NO: 1844510 - RNA, 19 nt, Homo sapiens
  misc_RNA (1)...(19): siRNA sense strand
uggcaaacuuaagcaugaa

SEQ ID NO: 1844511 - RNA, 19 nt, Homo sapiens
  misc_RNA (1)...(19): siRNA sense strand
gggacuucguggaccaugu

SEQ ID NO: 1844512 - RNA, 19 nt, Homo sapiens
  misc_RNA (1)...(19): siRNA sense strand
caguugaccagaucacaga

SEQ ID NO: 1844513 - RNA, 19 nt, Homo sapiens
  misc_RNA (1)...(19): siRNA sense strand
ggauggacagggagguuca

SEQ ID NO: 1844514 - RNA, 19 nt, Homo sapiens
  misc_RNA (1)...(19): siRNA sense strand
aggaaagcccugugggauu

SEQ ID NO: 1844515 - RNA, 19 nt, Homo sapiens
  misc_RNA (1)...(19): siRNA sense strand
agauuucaguugaccagau

SEQ ID NO: 1844516 - RNA, 19 nt, Homo sapiens
  misc_RNA (1)...(19): siRNA sense strand
guguggagcuacccuuggu

SEQ ID NO: 1844517 - RNA, 19 nt, Homo sapiens
  misc_RNA (1)...(19): siRNA sense strand
uuaagaagaccagcuccaa

SEQ ID NO: 1844518 - RNA, 19 nt, Homo sapiens
  misc_RNA (1)...(19): siRNA sense strand
gaauucacggagacuguag

SEQ ID NO: 1844519 - RNA, 19 nt, Homo sapiens
  misc_RNA (1)...(19): siRNA sense strand
caaacuuaagcaugaagau

SEQ ID NO: 1844520 - RNA, 19 nt, Homo sapiens
  misc_RNA (1)...(19): siRNA sense strand
cauagucaucgaggaguuu

SEQ ID NO: 1844521 - RNA, 19 nt, Homo sapiens
  misc_RNA (1)...(19): siRNA sense strand
gcucugaggacauagucau

SEQ ID NO: 1844522 - RNA, 19 nt, Homo sapiens
  misc_RNA (1)...(19): siRNA sense strand
cuacaaagucagagucaac

SEQ ID NO: 1844523 - RNA, 19 nt, Homo sapiens
  misc_RNA (1)...(19): siRNA sense strand
gaucagcccuuucaucuca

SEQ ID NO: 1844524 - RNA, 19 nt, Homo sapiens
  misc_RNA (1)...(19): siRNA sense strand
ggacgugccugacgaguuc

SEQ ID NO: 1844525 - RNA, 19 nt, Homo sapiens
  misc_RNA (1)...(19): siRNA sense strand
gaacuucucggugguggua

SEQ ID NO: 1844526 - RNA, 19 nt, Homo sapiens
  misc_RNA (1)...(19): siRNA sense strand
uggaggaccuguaugaaga

SEQ ID NO: 1844527 - RNA, 19 nt, Homo sapiens
  misc_RNA (1)...(19): siRNA sense strand
ccacagacccagcacacaa

SEQ ID NO: 1844528 - RNA, 19 nt, Homo sapiens
  misc_RNA (1)...(19): siRNA sense strand
gacaaccucuuugcuaugg

SEQ ID NO: 1844529 - RNA, 19 nt, Homo sapiens
  misc_RNA (1)...(19): siRNA sense strand
gcguaugcauugcugaguu

SEQ ID NO: 1844530 - RNA, 19 nt, Homo sapiens
  misc_RNA (1)...(19): siRNA sense strand
gagcagcgcagccugaagu

SEQ ID NO: 1844531 - RNA, 19 nt, Homo sapiens
  misc_RNA (1)...(19): siRNA sense strand
gagcagacaacuuucaucu

SEQ ID NO: 1844532 - RNA, 19 nt, Homo sapiens
  misc_RNA (1)...(19): siRNA sense strand
uaugacaaccucuuugcua

SEQ ID NO: 1844533 - RNA, 19 nt, Homo sapiens
  misc_RNA (1)...(19): siRNA sense strand
cagaccagcuggccuccaa

SEQ ID NO: 1844534 - RNA, 19 nt, Homo sapiens
  misc_RNA (1)...(19): siRNA sense strand
caagauccaggccaaguau

SEQ ID NO: 1844535 - RNA, 19 nt, Homo sapiens
  misc_RNA (1)...(19): siRNA sense strand
caaggacccugagcagaca

SEQ ID NO: 1844536 - RNA, 19 nt, Homo sapiens
  misc_RNA (1)...(19): siRNA sense strand
ccagauggaggaccuguau

SEQ ID NO: 1844537 - RNA, 19 nt, Homo sapiens
  misc_RNA (1)...(19): siRNA sense strand
ccgcuggagccuacacuua

SEQ ID NO: 1844538 - RNA, 19 nt, Homo sapiens
  misc_RNA (1)...(19): siRNA sense strand
ucucgguggugguauuuga

SEQ ID NO: 1844539 - RNA, 19 nt, Homo sapiens
  misc_RNA (1)...(19): siRNA sense strand
agaaccagaucagcccuuu

SEQ ID NO: 1844540 - RNA, 19 nt, Homo sapiens
  misc_RNA (1)...(19): siRNA sense strand
gaugaggccaugagcuaug

SEQ ID NO: 1844541 - RNA, 19 nt, Homo sapiens
  misc_RNA (1)...(19): siRNA sense strand
caacuuucaucugcguaug

SEQ ID NO: 1844542 - RNA, 19 nt, Homo sapiens
  misc_RNA (1)...(19): siRNA sense strand
gagccuacacuuagcaaca

SEQ ID NO: 1844543 - RNA, 19 nt, Homo sapiens
  misc_RNA (1)...(19): siRNA sense strand
gagcaugggcaagaagaug

SEQ ID NO: 1844544 - RNA, 19 nt, Homo sapiens
  misc_RNA (1)...(19): siRNA sense strand
ucgaugaggccaugagcua

SEQ ID NO: 1844545 - RNA, 19 nt, Homo sapiens
  misc_RNA (1)...(19): siRNA sense strand
ccucuuugcuauggagauu

SEQ ID NO: 1844546 - RNA, 19 nt, Homo sapiens
  misc_RNA (1)...(19): siRNA sense strand
acaagauccaggccaagua

SEQ ID NO: 1844547 - RNA, 19 nt, Homo sapiens
  misc_RNA (1)...(19): siRNA sense strand
gagcuaugccgaggucaug

SEQ ID NO: 1844548 - RNA, 19 nt, Homo sapiens
  misc_RNA (1)...(19): siRNA sense strand
ucgugaagcugccgcuguu

SEQ ID NO: 1844549 - RNA, 19 nt, Homo sapiens
  misc_RNA (1)...(19): siRNA sense strand
agauggaggaccuguauga

SEQ ID NO: 1844550 - RNA, 19 nt, Homo sapiens
  misc_RNA (1)...(19): siRNA sense strand
acccugagcagacaacuuu

SEQ ID NO: 1844551 - RNA, 19 nt, Homo sapiens
  misc_RNA (1)...(19): siRNA sense strand
cguaugcauugcugaguuc

SEQ ID NO: 1844552 - RNA, 19 nt, Homo sapiens
  misc_RNA (1)...(19): siRNA sense strand
gauggaggaccuguaugaa

SEQ ID NO: 1844553 - RNA, 19 nt, Homo sapiens
  misc_RNA (1)...(19): siRNA sense strand
gagcuggccaagugcaaga

SEQ ID NO: 1844554 - RNA, 19 nt, Homo sapiens
  misc_RNA (1)...(19): siRNA sense strand
augacaaccucuuugcuau

SEQ ID NO: 1844555 - RNA, 19 nt, Homo sapiens
  misc_RNA (1)...(19): siRNA sense strand
gcaagauugacacacacaa

SEQ ID NO: 1844556 - RNA, 19 nt, Homo sapiens
  misc_RNA (1)...(19): siRNA sense strand
cagcacacaacaucucaga

SEQ ID NO: 1844557 - RNA, 19 nt, Homo sapiens
  misc_RNA (1)...(19): siRNA sense strand
cugaguuccugucccugua

SEQ ID NO: 1844558 - RNA, 19 nt, Homo sapiens
  misc_RNA (1)...(19): siRNA sense strand
gugagaguguucugaucau

SEQ ID NO: 1844559 - RNA, 19 nt, Homo sapiens
  misc_RNA (1)...(19): siRNA sense strand
ccagaucagcccuuucauc

SEQ ID NO: 1844560 - RNA, 19 nt, Homo sapiens
  misc_RNA (1)...(19): siRNA sense strand
ucuuugcuauggagauuga

SEQ ID NO: 1844561 - RNA, 19 nt, Homo sapiens
  misc_RNA (1)...(19): siRNA sense strand
ugacaaccucuuugcuaug

SEQ ID NO: 1844562 - RNA, 19 nt, Homo sapiens
  misc_RNA (1)...(19): siRNA sense strand
gcgugagaguguucugauc

SEQ ID NO: 1844563 - RNA, 19 nt, Homo sapiens
  misc_RNA (1)...(19): siRNA sense strand
gagaguguucugaucaucu

SEQ ID NO: 1844564 - RNA, 19 nt, Homo sapiens
  misc_RNA (1)...(19): siRNA sense strand
gaguuccugucccuguaug

SEQ ID NO: 1844565 - RNA, 19 nt, Homo sapiens
  misc_RNA (1)...(19): siRNA sense strand
aaccagaucagcccuuuca

SEQ ID NO: 1844566 - RNA, 19 nt, Homo sapiens
  misc_RNA (1)...(19): siRNA sense strand
gaaccagaucagcccuuuc

SEQ ID NO: 1844567 - RNA, 19 nt, Homo sapiens
  misc_RNA (1)...(19): siRNA sense strand
agugcaagauugacacaca

SEQ ID NO: 1844568 - RNA, 19 nt, Homo sapiens
  misc_RNA (1)...(19): siRNA sense strand
cgugagaguguucugauca

SEQ ID NO: 1844569 - RNA, 19 nt, Homo sapiens
  misc_RNA (1)...(19): siRNA sense strand
uuaugcagaucaagaacca

SEQ ID NO: 1844570 - RNA, 19 nt, Homo sapiens
  misc_RNA (1)...(19): siRNA sense strand
cggcuuaugcagaucaaga

SEQ ID NO: 1844571 - RNA, 19 nt, Homo sapiens
  misc_RNA (1)...(19): siRNA sense strand
gcuaugagguuaucaagaa

SEQ ID NO: 1844572 - RNA, 19 nt, Homo sapiens
  misc_RNA (1)...(19): siRNA sense strand
gaaagaaaccagccacauu

SEQ ID NO: 1844573 - RNA, 19 nt, Homo sapiens
  misc_RNA (1)...(19): siRNA sense strand
aaagaaaccagccacauua

SEQ ID NO: 1844574 - RNA, 19 nt, Homo sapiens
  misc_RNA (1)...(19): siRNA sense strand
gaagugaaccuaaacacaa

SEQ ID NO: 1844575 - RNA, 19 nt, Homo sapiens
  misc_RNA (1)...(19): siRNA sense strand
cuaaggaaauggaagaauu

SEQ ID NO: 1844576 - RNA, 19 nt, Homo sapiens
  misc_RNA (1)...(19): siRNA sense strand
uaacauugcucacaugaag

SEQ ID NO: 1844577 - RNA, 19 nt, Homo sapiens
  misc_RNA (1)...(19): siRNA sense strand
ucagauaagucucauagga

SEQ ID NO: 1844578 - RNA, 19 nt, Homo sapiens
  misc_RNA (1)...(19): siRNA sense strand
aaacaauacucagcucuuu

SEQ ID NO: 1844579 - RNA, 19 nt, Homo sapiens
  misc_RNA (1)...(19): siRNA sense strand
auacucagcucuuugauug

SEQ ID NO: 1844580 - RNA, 19 nt, Homo sapiens
  misc_RNA (1)...(19): siRNA sense strand
caaaggagcagcuguggaa

SEQ ID NO: 1844581 - RNA, 19 nt, Homo sapiens
  misc_RNA (1)...(19): siRNA sense strand
uaucaagaauucaccauga

SEQ ID NO: 1844582 - RNA, 19 nt, Homo sapiens
  misc_RNA (1)...(19): siRNA sense strand
gaagguagucauuggcuaa

SEQ ID NO: 1844583 - RNA, 19 nt, Homo sapiens
  misc_RNA (1)...(19): siRNA sense strand
uaacccaucucugacauuu

SEQ ID NO: 1844584 - RNA, 19 nt, Homo sapiens
  misc_RNA (1)...(19): siRNA sense strand
uaaugugacuguccuaguu

SEQ ID NO: 1844585 - RNA, 19 nt, Homo sapiens
  misc_RNA (1)...(19): siRNA sense strand
gaaagaauagaaggaguaa

SEQ ID NO: 1844586 - RNA, 19 nt, Homo sapiens
  misc_RNA (1)...(19): siRNA sense strand
gaaaccagccacauuagga

SEQ ID NO: 1844587 - RNA, 19 nt, Homo sapiens
  misc_RNA (1)...(19): siRNA sense strand
ggagauggccaaaguaauc

SEQ ID NO: 1844588 - RNA, 19 nt, Homo sapiens
  misc_RNA (1)...(19): siRNA sense strand
gagcagcuguggaagugaa

SEQ ID NO: 1844589 - RNA, 19 nt, Homo sapiens
  misc_RNA (1)...(19): siRNA sense strand
guaccacucuuuggaugua

SEQ ID NO: 1844590 - RNA, 19 nt, Homo sapiens
  misc_RNA (1)...(19): siRNA sense strand
guccauacuuaccuaauuu

SEQ ID NO: 1844591 - RNA, 19 nt, Homo sapiens
  misc_RNA (1)...(19): siRNA sense strand
gaacuaaugggaucuacga

SEQ ID NO: 1844592 - RNA, 19 nt, Homo sapiens
  misc_RNA (1)...(19): siRNA sense strand
gaaauuucaucuccuacca

SEQ ID NO: 1844593 - RNA, 19 nt, Homo sapiens
  misc_RNA (1)...(19): siRNA sense strand
cgacauggcuggaaaauag

SEQ ID NO: 1844594 - RNA, 19 nt, Homo sapiens
  misc_RNA (1)...(19): siRNA sense strand
gcaaaccugccaaaccuuu

SEQ ID NO: 1844595 - RNA, 19 nt, Homo sapiens
  misc_RNA (1)...(19): siRNA sense strand
cuacaggacuacauguuug

SEQ ID NO: 1844596 - RNA, 19 nt, Homo sapiens
  misc_RNA (1)...(19): siRNA sense strand
gaaaauagaccaucuccuu

SEQ ID NO: 1844597 - RNA, 19 nt, Homo sapiens
  misc_RNA (1)...(19): siRNA sense strand
gaacucaccgaccaaaugu

SEQ ID NO: 1844598 - RNA, 19 nt, Homo sapiens
  misc_RNA (1)...(19): siRNA sense strand
gaaagcugaaauuugguua

SEQ ID NO: 1844599 - RNA, 19 nt, Homo sapiens
  misc_RNA (1)...(19): siRNA sense strand
ggugucugauccaguauuu

SEQ ID NO: 1844600 - RNA, 19 nt, Homo sapiens
  misc_RNA (1)...(19): siRNA sense strand
gcuguucucccuucagaua

SEQ ID NO: 1844601 - RNA, 19 nt, Homo sapiens
  misc_RNA (1)...(19): siRNA sense strand
ggaauuccauuuauguacu

SEQ ID NO: 1844602 - RNA, 19 nt, Homo sapiens
  misc_RNA (1)...(19): siRNA sense strand
gaaacaauacucagcucuu

SEQ ID NO: 1844603 - RNA, 19 nt, Homo sapiens
  misc_RNA (1)...(19): siRNA sense strand
gaaacucuuuggaaaucau

SEQ ID NO: 1844604 - RNA, 19 nt, Homo sapiens
  misc_RNA (1)...(19): siRNA sense strand
gguaagauaggaaagaaga

SEQ ID NO: 1844605 - RNA, 19 nt, Homo sapiens
  misc_RNA (1)...(19): siRNA sense strand
agagaaugcuaugagguua

SEQ ID NO: 1844606 - RNA, 19 nt, Homo sapiens
  misc_RNA (1)...(19): siRNA sense strand
gagauucuaucaggagaug

SEQ ID NO: 1844607 - RNA, 19 nt, Homo sapiens
  misc_RNA (1)...(19): siRNA sense strand
ggauguaauuggguucuug

SEQ ID NO: 1844608 - RNA, 19 nt, Homo sapiens
  misc_RNA (1)...(19): siRNA sense strand
ggaagacccacuacguuau

SEQ ID NO: 1844609 - RNA, 19 nt, Homo sapiens
  misc_RNA (1)...(19): siRNA sense strand
gaucugugauggcguucuu

SEQ ID NO: 1844610 - RNA, 19 nt, Homo sapiens
  misc_RNA (1)...(19): siRNA sense strand
guaauuaaggacuucguuu

SEQ ID NO: 1844611 - RNA, 19 nt, Homo sapiens
  misc_RNA (1)...(19): siRNA sense strand
gagauacaaaggaaagaaa

SEQ ID NO: 1844612 - RNA, 19 nt, Homo sapiens
  misc_RNA (1)...(19): siRNA sense strand
gaagacccacuacguuaug

SEQ ID NO: 1844613 - RNA, 19 nt, Homo sapiens
  misc_RNA (1)...(19): siRNA sense strand
gucuuucacugacagaaua

SEQ ID NO: 1844614 - RNA, 19 nt, Homo sapiens
  misc_RNA (1)...(19): siRNA sense strand
gaaccuaaacacaaugaca

SEQ ID NO: 1844615 - RNA, 19 nt, Homo sapiens
  misc_RNA (1)...(19): siRNA sense strand
uagaaggaguaauuaagga

SEQ ID NO: 1844616 - RNA, 19 nt, Homo sapiens
  misc_RNA (1)...(19): siRNA sense strand
ggaagugaaccuaaacaca

SEQ ID NO: 1844617 - RNA, 19 nt, Homo sapiens
  misc_RNA (1)...(19): siRNA sense strand
gauaacauugcucacauga

SEQ ID NO: 1844618 - RNA, 19 nt, Homo sapiens
  misc_RNA (1)...(19): siRNA sense strand
gaacauauugggauuuuga

SEQ ID NO: 1844619 - RNA, 19 nt, Homo sapiens
  misc_RNA (1)...(19): siRNA sense strand
ggaaagcugaaauuugguu

SEQ ID NO: 1844620 - RNA, 19 nt, Homo sapiens
  misc_RNA (1)...(19): siRNA sense strand
gauccaguauuuccuugug

SEQ ID NO: 1844621 - RNA, 19 nt, Homo sapiens
  misc_RNA (1)...(19): siRNA sense strand
caaagaaagaauagaagga

SEQ ID NO: 1844622 - RNA, 19 nt, Homo sapiens
  misc_RNA (1)...(19): siRNA sense strand
gcgauauaguagcuuuaaa

SEQ ID NO: 1844623 - RNA, 19 nt, Homo sapiens
  misc_RNA (1)...(19): siRNA sense strand
ccauuuauguacuccuuga

SEQ ID NO: 1844624 - RNA, 19 nt, Homo sapiens
  misc_RNA (1)...(19): siRNA sense strand
cguccauacuuaccuaauu

SEQ ID NO: 1844625 - RNA, 19 nt, Homo sapiens
  misc_RNA (1)...(19): siRNA sense strand
acccaucucugacauuuga

SEQ ID NO: 1844626 - RNA, 19 nt, Homo sapiens
  misc_RNA (1)...(19): siRNA sense strand
cagauaagucucauaggaa

SEQ ID NO: 1844627 - RNA, 19 nt, Homo sapiens
  misc_RNA (1)...(19): siRNA sense strand
ggaucuacgaagcuauuua

SEQ ID NO: 1844628 - RNA, 19 nt, Homo sapiens
  misc_RNA (1)...(19): siRNA sense strand
accaacagcugauggcaaa

SEQ ID NO: 1844629 - RNA, 19 nt, Homo sapiens
  misc_RNA (1)...(19): siRNA sense strand
agaaagaauagaaggagua

SEQ ID NO: 1844630 - RNA, 19 nt, Homo sapiens
  misc_RNA (1)...(19): siRNA sense strand
caggagauggccaaaguaa

SEQ ID NO: 1844631 - RNA, 19 nt, Homo sapiens
  misc_RNA (1)...(19): siRNA sense strand
cccaugaccucaccugguu

SEQ ID NO: 1844632 - RNA, 19 nt, Homo sapiens
  misc_RNA (1)...(19): siRNA sense strand
ucaccaugaucaaccugua

SEQ ID NO: 1844633 - RNA, 19 nt, Homo sapiens
  misc_RNA (1)...(19): siRNA sense strand
caaaccugccaaaccuuua

SEQ ID NO: 1844634 - RNA, 19 nt, Homo sapiens
  misc_RNA (1)...(19): siRNA sense strand
ggggaaagcugaaauuugg

SEQ ID NO: 1844635 - RNA, 19 nt, Homo sapiens
  misc_RNA (1)...(19): siRNA sense strand
aggaagacccacuacguua

SEQ ID NO: 1844636 - RNA, 19 nt, Homo sapiens
  misc_RNA (1)...(19): siRNA sense strand
uaccauacccuccuuccua

SEQ ID NO: 1844637 - RNA, 19 nt, Homo sapiens
  misc_RNA (1)...(19): siRNA sense strand
ggagauacaaaggaaagaa

SEQ ID NO: 1844638 - RNA, 19 nt, Homo sapiens
  misc_RNA (1)...(19): siRNA sense strand
gcuuugagaacagucauua

SEQ ID NO: 1844639 - RNA, 19 nt, Homo sapiens
  misc_RNA (1)...(19): siRNA sense strand
ucaugggauucauacuaua

SEQ ID NO: 1844640 - RNA, 19 nt, Homo sapiens
  misc_RNA (1)...(19): siRNA sense strand
gcuuagcgcuuugagaaca

SEQ ID NO: 1844641 - RNA, 19 nt, Homo sapiens
  misc_RNA (1)...(19): siRNA sense strand
gcacugcaaaccugccaaa

SEQ ID NO: 1844642 - RNA, 19 nt, Homo sapiens
  misc_RNA (1)...(19): siRNA sense strand
ugaauuuccucguccauac

SEQ ID NO: 1844643 - RNA, 19 nt, Homo sapiens
  misc_RNA (1)...(19): siRNA sense strand
gcugaaauuugguuaaucc

SEQ ID NO: 1844644 - RNA, 19 nt, Homo sapiens
  misc_RNA (1)...(19): siRNA sense strand
caagaauucaccaugauca

SEQ ID NO: 1844645 - RNA, 19 nt, Homo sapiens
  misc_RNA (1)...(19): siRNA sense strand
ugugacaacggcuauauuu

SEQ ID NO: 1844646 - RNA, 19 nt, Homo sapiens
  misc_RNA (1)...(19): siRNA sense strand
gauggcaaagcuaaagaaa

SEQ ID NO: 1844647 - RNA, 19 nt, Homo sapiens
  misc_RNA (1)...(19): siRNA sense strand
ucagcucuuugauuggaua

SEQ ID NO: 1844648 - RNA, 19 nt, Homo sapiens
  misc_RNA (1)...(19): siRNA sense strand
acaauacucagcucuuuga

SEQ ID NO: 1844649 - RNA, 19 nt, Homo sapiens
  misc_RNA (1)...(19): siRNA sense strand
ggaaagaaaccagccacau

SEQ ID NO: 1844650 - RNA, 19 nt, Homo sapiens
  misc_RNA (1)...(19): siRNA sense strand
uuauggagauacaaaggaa

SEQ ID NO: 1844651 - RNA, 19 nt, Homo sapiens
  misc_RNA (1)...(19): siRNA sense strand
ugaguuuguuggaggauug

SEQ ID NO: 1844652 - RNA, 19 nt, Homo sapiens
  misc_RNA (1)...(19): siRNA sense strand
ucaccgaccaaaugucuuu

SEQ ID NO: 1844653 - RNA, 19 nt, Homo sapiens
  misc_RNA (1)...(19): siRNA sense strand
caaugacaaguguggauuu

SEQ ID NO: 1844654 - RNA, 19 nt, Homo sapiens
  misc_RNA (1)...(19): siRNA sense strand
ccucagcccuugcccagau

SEQ ID NO: 1844655 - RNA, 19 nt, Homo sapiens
  misc_RNA (1)...(19): siRNA sense strand
ucacugacagaauaagaaa

SEQ ID NO: 1844656 - RNA, 19 nt, Homo sapiens
  misc_RNA (1)...(19): siRNA sense strand
gaauuccauuuauguacuc

SEQ ID NO: 1844657 - RNA, 19 nt, Homo sapiens
  misc_RNA (1)...(19): siRNA sense strand
gaucuacgaagcuauuuac

SEQ ID NO: 1844658 - RNA, 19 nt, Homo sapiens
  misc_RNA (1)...(19): siRNA sense strand
ugccaaaccuuuaccuaag

SEQ ID NO: 1844659 - RNA, 19 nt, Homo sapiens
  misc_RNA (1)...(19): siRNA sense strand
uggcaaagaaagaauagaa

SEQ ID NO: 1844660 - RNA, 19 nt, Homo sapiens
  misc_RNA (1)...(19): siRNA sense strand
ugauaacauugcucacaug

SEQ ID NO: 1844661 - RNA, 19 nt, Homo sapiens
  misc_RNA (1)...(19): siRNA sense strand
ccaucuccuucaaccauuu

SEQ ID NO: 1844662 - RNA, 19 nt, Homo sapiens
  misc_RNA (1)...(19): siRNA sense strand
uggauuugcuuagcgcuuu

SEQ ID NO: 1844663 - RNA, 19 nt, Homo sapiens
  misc_RNA (1)...(19): siRNA sense strand
uugaaguccuggugucuga

SEQ ID NO: 1844664 - RNA, 19 nt, Homo sapiens
  misc_RNA (1)...(19): siRNA sense strand
gaccaucuccuucaaccau

SEQ ID NO: 1844665 - RNA, 19 nt, Homo sapiens
  misc_RNA (1)...(19): siRNA sense strand
gagaaugcuaugagguuau

SEQ ID NO: 1844666 - RNA, 19 nt, Homo sapiens
  misc_RNA (1)...(19): siRNA sense strand
ggauuugcuuagcgcuuug

SEQ ID NO: 1844667 - RNA, 19 nt, Homo sapiens
  misc_RNA (1)...(19): siRNA sense strand
ugacaaguguggauuugcu

SEQ ID NO: 1844668 - RNA, 19 nt, Homo sapiens
  misc_RNA (1)...(19): siRNA sense strand
ccuacaggacuacauguuu

SEQ ID NO: 1844669 - RNA, 19 nt, Homo sapiens
  misc_RNA (1)...(19): siRNA sense strand
guggcgauauaguagcuuu

SEQ ID NO: 1844670 - RNA, 19 nt, Homo sapiens
  misc_RNA (1)...(19): siRNA sense strand
aaucaaggacuuccacaug

SEQ ID NO: 1844671 - RNA, 19 nt, Homo sapiens
  misc_RNA (1)...(19): siRNA sense strand
acaaggaucugcaaaguua

SEQ ID NO: 1844672 - RNA, 19 nt, Homo sapiens
  misc_RNA (1)...(19): siRNA sense strand
gcugaaauauugcaaauga

SEQ ID NO: 1844673 - RNA, 19 nt, Homo sapiens
  misc_RNA (1)...(19): siRNA sense strand
ggagagggauuauagagaa

SEQ ID NO: 1844674 - RNA, 19 nt, Homo sapiens
  misc_RNA (1)...(19): siRNA sense strand
ggacagaaguuggagcuuu

SEQ ID NO: 1844675 - RNA, 19 nt, Homo sapiens
  misc_RNA (1)...(19): siRNA sense strand
aguacuagcucugugauua

SEQ ID NO: 1844676 - RNA, 19 nt, Homo sapiens
  misc_RNA (1)...(19): siRNA sense strand
gcaguggaacaaacaauaa

SEQ ID NO: 1844677 - RNA, 19 nt, Homo sapiens
  misc_RNA (1)...(19): siRNA sense strand
aaacaaggaucugcaaagu

SEQ ID NO: 1844678 - RNA, 19 nt, Homo sapiens
  misc_RNA (1)...(19): siRNA sense strand
gagagggauuauagagaaa

SEQ ID NO: 1844679 - RNA, 19 nt, Homo sapiens
  misc_RNA (1)...(19): siRNA sense strand
gacaguggaucauuugaag

SEQ ID NO: 1844680 - RNA, 19 nt, Homo sapiens
  misc_RNA (1)...(19): siRNA sense strand
gagagugccuaacagaagu

SEQ ID NO: 1844681 - RNA, 19 nt, Homo sapiens
  misc_RNA (1)...(19): siRNA sense strand
gugauuagauugaauucuc

SEQ ID NO: 1844682 - RNA, 19 nt, Homo sapiens
  misc_RNA (1)...(19): siRNA sense strand
gauuauggcaagaaagaaa

SEQ ID NO: 1844683 - RNA, 19 nt, Homo sapiens
  misc_RNA (1)...(19): siRNA sense strand
caaaguacuagcucuguga

SEQ ID NO: 1844684 - RNA, 19 nt, Homo sapiens
  misc_RNA (1)...(19): siRNA sense strand
ggaacaaacaauaaaccuu

SEQ ID NO: 1844685 - RNA, 19 nt, Homo sapiens
  misc_RNA (1)...(19): siRNA sense strand
gcucugugauuagauugaa

SEQ ID NO: 1844686 - RNA, 19 nt, Homo sapiens
  misc_RNA (1)...(19): siRNA sense strand
cagcagaccagcaguggaa

SEQ ID NO: 1844687 - RNA, 19 nt, Homo sapiens
  misc_RNA (1)...(19): siRNA sense strand
caguuuaucugaguugaga

SEQ ID NO: 1844688 - RNA, 19 nt, Homo sapiens
  misc_RNA (1)...(19): siRNA sense strand
gaucggauaaauaacaguu

SEQ ID NO: 1844689 - RNA, 19 nt, Homo sapiens
  misc_RNA (1)...(19): siRNA sense strand
cagauuauggcaagaaaga

SEQ ID NO: 1844690 - RNA, 19 nt, Homo sapiens
  misc_RNA (1)...(19): siRNA sense strand
gucgggaucggauaaauaa

SEQ ID NO: 1844691 - RNA, 19 nt, Homo sapiens
  misc_RNA (1)...(19): siRNA sense strand
uagauugaauucuccaaca

SEQ ID NO: 1844692 - RNA, 19 nt, Homo sapiens
  misc_RNA (1)...(19): siRNA sense strand
gacagaaguuggagcuuuu

SEQ ID NO: 1844693 - RNA, 19 nt, Homo sapiens
  misc_RNA (1)...(19): siRNA sense strand
cuagcucugugauuagauu

SEQ ID NO: 1844694 - RNA, 19 nt, Homo sapiens
  misc_RNA (1)...(19): siRNA sense strand
gaccagcaguggaacaaac

SEQ ID NO: 1844695 - RNA, 19 nt, Homo sapiens
  misc_RNA (1)...(19): siRNA sense strand
gaaaaggagagggauuaua

SEQ ID NO: 1844696 - RNA, 19 nt, Homo sapiens
  misc_RNA (1)...(19): siRNA sense strand
gagaagacuugugccaacu

SEQ ID NO: 1844697 - RNA, 19 nt, Homo sapiens
  misc_RNA (1)...(19): siRNA sense strand
agauugaauucuccaacaa

SEQ ID NO: 1844698 - RNA, 19 nt, Homo sapiens
  misc_RNA (1)...(19): siRNA sense strand
ugucucaucucagcacuug

SEQ ID NO: 1844699 - RNA, 19 nt, Homo sapiens
  misc_RNA (1)...(19): siRNA sense strand
gggugcggcuugugucuca

SEQ ID NO: 1844700 - RNA, 19 nt, Homo sapiens
  misc_RNA (1)...(19): siRNA sense strand
cggcuugugucucaucuca

SEQ ID NO: 1844701 - RNA, 19 nt, Homo sapiens
  misc_RNA (1)...(19): siRNA sense strand
cgucgggaucggauaaaua

SEQ ID NO: 1844702 - RNA, 19 nt, Homo sapiens
  misc_RNA (1)...(19): siRNA sense strand
ccaacaacaacaucucaga

SEQ ID NO: 1844703 - RNA, 19 nt, Homo sapiens
  misc_RNA (1)...(19): siRNA sense strand
cgagagugccuaacagaag

SEQ ID NO: 1844704 - RNA, 19 nt, Homo sapiens
  misc_RNA (1)...(19): siRNA sense strand
ugacaguggaucauuugaa

SEQ ID NO: 1844705 - RNA, 19 nt, Homo sapiens
  misc_RNA (1)...(19): siRNA sense strand
uaacaguuuaucugaguug

SEQ ID NO: 1844706 - RNA, 19 nt, Homo sapiens
  misc_RNA (1)...(19): siRNA sense strand
guacuagcucugugauuag

SEQ ID NO: 1844707 - RNA, 19 nt, Homo sapiens
  misc_RNA (1)...(19): siRNA sense strand
ggagcgagaacaauuacuc

SEQ ID NO: 1844708 - RNA, 19 nt, Homo sapiens
  misc_RNA (1)...(19): siRNA sense strand
gggaucggauaaauaacag

SEQ ID NO: 1844709 - RNA, 19 nt, Homo sapiens
  misc_RNA (1)...(19): siRNA sense strand
ugucgccucuccacaacuu

SEQ ID NO: 1844710 - RNA, 19 nt, Homo sapiens
  misc_RNA (1)...(19): siRNA sense strand
ggacuucaugagcauagga

SEQ ID NO: 1844711 - RNA, 19 nt, Homo sapiens
  misc_RNA (1)...(19): siRNA sense strand
caguggaacaaacaauaaa

SEQ ID NO: 1844712 - RNA, 19 nt, Homo sapiens
  misc_RNA (1)...(19): siRNA sense strand
guaccugagcuccguggaa

SEQ ID NO: 1844713 - RNA, 19 nt, Homo sapiens
  misc_RNA (1)...(19): siRNA sense strand
cacacgcucuugccaugga

SEQ ID NO: 1844714 - RNA, 19 nt, Homo sapiens
  misc_RNA (1)...(19): siRNA sense strand
caguggaucauuugaagau

SEQ ID NO: 1844715 - RNA, 19 nt, Homo sapiens
  misc_RNA (1)...(19): siRNA sense strand
uacuagcucugugauuaga

SEQ ID NO: 1844716 - RNA, 19 nt, Homo sapiens
  misc_RNA (1)...(19): siRNA sense strand
uaucugaguugagaagacu

SEQ ID NO: 1844717 - RNA, 19 nt, Homo sapiens
  misc_RNA (1)...(19): siRNA sense strand
aaaggagagggauuauaga

SEQ ID NO: 1844718 - RNA, 19 nt, Homo sapiens
  misc_RNA (1)...(19): siRNA sense strand
aaaaggagagggauuauag

SEQ ID NO: 1844719 - RNA, 19 nt, Homo sapiens
  misc_RNA (1)...(19): siRNA sense strand
cgggaucggauaaauaaca

SEQ ID NO: 1844720 - RNA, 19 nt, Homo sapiens
  misc_RNA (1)...(19): siRNA sense strand
ugaauucuccaacaacaac

SEQ ID NO: 1844721 - RNA, 19 nt, Homo sapiens
  misc_RNA (1)...(19): siRNA sense strand
ggauuccgagagugccuaa

SEQ ID NO: 1844722 - RNA, 19 nt, Homo sapiens
  misc_RNA (1)...(19): siRNA sense strand
ucaagaaccucaauaagaa

SEQ ID NO: 1844723 - RNA, 19 nt, Homo sapiens
  misc_RNA (1)...(19): siRNA sense strand
ugaaggcgcugaaguuuaa

SEQ ID NO: 1844724 - RNA, 19 nt, Homo sapiens
  misc_RNA (1)...(19): siRNA sense strand
gaagacagcaugauauaug

SEQ ID NO: 1844725 - RNA, 19 nt, Homo sapiens
  misc_RNA (1)...(19): siRNA sense strand
gcaaacacaaccugcauuu

SEQ ID NO: 1844726 - RNA, 19 nt, Homo sapiens
  misc_RNA (1)...(19): siRNA sense strand
gcagaugaauucaacaagu

SEQ ID NO: 1844727 - RNA, 19 nt, Homo sapiens
  misc_RNA (1)...(19): siRNA sense strand
gggcauaaccgcacucauu

SEQ ID NO: 1844728 - RNA, 19 nt, Homo sapiens
  misc_RNA (1)...(19): siRNA sense strand
cagaugaauucaacaaguu

SEQ ID NO: 1844729 - RNA, 19 nt, Homo sapiens
  misc_RNA (1)...(19): siRNA sense strand
gguaaccucugccaaagug

SEQ ID NO: 1844730 - RNA, 19 nt, Homo sapiens
  misc_RNA (1)...(19): siRNA sense strand
ugacgaagacagcaugaua

SEQ ID NO: 1844731 - RNA, 19 nt, Homo sapiens
  misc_RNA (1)...(19): siRNA sense strand
gaaguggagagacugauuu

SEQ ID NO: 1844732 - RNA, 19 nt, Homo sapiens
  misc_RNA (1)...(19): siRNA sense strand
gcucacggcugcauuugau

SEQ ID NO: 1844733 - RNA, 19 nt, Homo sapiens
  misc_RNA (1)...(19): siRNA sense strand
gaacaagaaagccucuaga

SEQ ID NO: 1844734 - RNA, 19 nt, Homo sapiens
  misc_RNA (1)...(19): siRNA sense strand
caaaagaugcuguugauuu

SEQ ID NO: 1844735 - RNA, 19 nt, Homo sapiens
  misc_RNA (1)...(19): siRNA sense strand
ggagugagagaacaagaaa

SEQ ID NO: 1844736 - RNA, 19 nt, Homo sapiens
  misc_RNA (1)...(19): siRNA sense strand
gaugaaggcgcugaaguuu

SEQ ID NO: 1844737 - RNA, 19 nt, Homo sapiens
  misc_RNA (1)...(19): siRNA sense strand
gcuacuuccugggauguua

SEQ ID NO: 1844738 - RNA, 19 nt, Homo sapiens
  misc_RNA (1)...(19): siRNA sense strand
gcauaagacaguuuaaaca

SEQ ID NO: 1844739 - RNA, 19 nt, Homo sapiens
  misc_RNA (1)...(19): siRNA sense strand
ggaaguggagagacugauu

SEQ ID NO: 1844740 - RNA, 19 nt, Homo sapiens
  misc_RNA (1)...(19): siRNA sense strand
caugccgacuucauucaua

SEQ ID NO: 1844741 - RNA, 19 nt, Homo sapiens
  misc_RNA (1)...(19): siRNA sense strand
gauggcauaagacaguuua

SEQ ID NO: 1844742 - RNA, 19 nt, Homo sapiens
  misc_RNA (1)...(19): siRNA sense strand
guggguggauggcauaaga

SEQ ID NO: 1844743 - RNA, 19 nt, Homo sapiens
  misc_RNA (1)...(19): siRNA sense strand
aagacagcaugauauauga

SEQ ID NO: 1844744 - RNA, 19 nt, Homo sapiens
  misc_RNA (1)...(19): siRNA sense strand
ucaacaaguuagcagaaga

SEQ ID NO: 1844745 - RNA, 19 nt, Homo sapiens
  misc_RNA (1)...(19): siRNA sense strand
cuauggguaugacuacuuu

SEQ ID NO: 1844746 - RNA, 19 nt, Homo sapiens
  misc_RNA (1)...(19): siRNA sense strand
caaauggagugagagaaca

SEQ ID NO: 1844747 - RNA, 19 nt, Homo sapiens
  misc_RNA (1)...(19): siRNA sense strand
aaaagaugcuguugauuug

SEQ ID NO: 1844748 - RNA, 19 nt, Homo sapiens
  misc_RNA (1)...(19): siRNA sense strand
gaccucagcucaagaaccu

SEQ ID NO: 1844749 - RNA, 19 nt, Homo sapiens
  misc_RNA (1)...(19): siRNA sense strand
ggcauaaccgcacucauug

SEQ ID NO: 1844750 - RNA, 19 nt, Homo sapiens
  misc_RNA (1)...(19): siRNA sense strand
cucaagaaccucaauaaga

SEQ ID NO: 1844751 - RNA, 19 nt, Homo sapiens
  misc_RNA (1)...(19): siRNA sense strand
uccgagauguuuccaaaug

SEQ ID NO: 1844752 - RNA, 19 nt, Homo sapiens
  misc_RNA (1)...(19): siRNA sense strand
gacgaagacagcaugauau

SEQ ID NO: 1844753 - RNA, 19 nt, Homo sapiens
  misc_RNA (1)...(19): siRNA sense strand
gcccaggaaucugcuuuau

SEQ ID NO: 1844754 - RNA, 19 nt, Homo sapiens
  misc_RNA (1)...(19): siRNA sense strand
ugaaagggaugcaaaagau

SEQ ID NO: 1844755 - RNA, 19 nt, Homo sapiens
  misc_RNA (1)...(19): siRNA sense strand
acgaagacagcaugauaua

SEQ ID NO: 1844756 - RNA, 19 nt, Homo sapiens
  misc_RNA (1)...(19): siRNA sense strand
ccucgaggcuauggacauu

SEQ ID NO: 1844757 - RNA, 19 nt, Homo sapiens
  misc_RNA (1)...(19): siRNA sense strand
aaacacaaccugcauuugc

SEQ ID NO: 1844758 - RNA, 19 nt, Homo sapiens
  misc_RNA (1)...(19): siRNA sense strand
gcguucagcugcauuacca

SEQ ID NO: 1844759 - RNA, 19 nt, Homo sapiens
  misc_RNA (1)...(19): siRNA sense strand
ugaugaaggcgcugaaguu

SEQ ID NO: 1844760 - RNA, 19 nt, Homo sapiens
  misc_RNA (1)...(19): siRNA sense strand
ccaaaguggcugugaaugg

SEQ ID NO: 1844761 - RNA, 19 nt, Homo sapiens
  misc_RNA (1)...(19): siRNA sense strand
gcucaagaaccucaauaag

SEQ ID NO: 1844762 - RNA, 19 nt, Homo sapiens
  misc_RNA (1)...(19): siRNA sense strand
cgauuucccagcagacuuu

SEQ ID NO: 1844763 - RNA, 19 nt, Homo sapiens
  misc_RNA (1)...(19): siRNA sense strand
guuaggaaguggagagacu

SEQ ID NO: 1844764 - RNA, 19 nt, Homo sapiens
  misc_RNA (1)...(19): siRNA sense strand
aagaugcuguugauuugau

SEQ ID NO: 1844765 - RNA, 19 nt, Homo sapiens
  misc_RNA (1)...(19): siRNA sense strand
ccaaauggagugagagaac

SEQ ID NO: 1844766 - RNA, 19 nt, Homo sapiens
  misc_RNA (1)...(19): siRNA sense strand
cgaagacagcaugauauau

SEQ ID NO: 1844767 - RNA, 19 nt, Homo sapiens
  misc_RNA (1)...(19): siRNA sense strand
ggcauaagacaguuuaaac

SEQ ID NO: 1844768 - RNA, 19 nt, Homo sapiens
  misc_RNA (1)...(19): siRNA sense strand
gaagcccucuauggguaug

SEQ ID NO: 1844769 - RNA, 19 nt, Homo sapiens
  misc_RNA (1)...(19): siRNA sense strand
cagcucaagaaccucaaua

SEQ ID NO: 1844770 - RNA, 19 nt, Homo sapiens
  misc_RNA (1)...(19): siRNA sense strand
aacaagaaagccucuagaa

SEQ ID NO: 1844771 - RNA, 19 nt, Homo sapiens
  misc_RNA (1)...(19): siRNA sense strand
gaauggcguucagcugcau

SEQ ID NO: 1844772 - RNA, 19 nt, Homo sapiens
  misc_RNA (1)...(19): siRNA sense strand
aaaguggguggauggcaua

SEQ ID NO: 1844773 - RNA, 19 nt, Homo sapiens
  misc_RNA (1)...(19): siRNA sense strand
acaagaaagccucuagaag

SEQ ID NO: 1844774 - RNA, 19 nt, Homo sapiens
  misc_RNA (1)...(19): siRNA sense strand
gcugaaguuuaagaagguu

SEQ ID NO: 1844775 - RNA, 19 nt, Homo sapiens
  misc_RNA (1)...(19): siRNA sense strand
augccgacuucauucauaa

SEQ ID NO: 1844776 - RNA, 19 nt, Homo sapiens
  misc_RNA (1)...(19): siRNA sense strand
gaaaggcucacggcugcau

SEQ ID NO: 1844777 - RNA, 19 nt, Homo sapiens
  misc_RNA (1)...(19): siRNA sense strand
guggauggcauaagacagu

SEQ ID NO: 1844778 - RNA, 19 nt, Homo sapiens
  misc_RNA (1)...(19): siRNA sense strand
ggcaaacacaaccugcauu

SEQ ID NO: 1844779 - RNA, 19 nt, Homo sapiens
  misc_RNA (1)...(19): siRNA sense strand
augaaggcgcugaaguuua

SEQ ID NO: 1844780 - RNA, 19 nt, Homo sapiens
  misc_RNA (1)...(19): siRNA sense strand
ccugggauguuaggaagug

SEQ ID NO: 1844781 - RNA, 19 nt, Homo sapiens
  misc_RNA (1)...(19): siRNA sense strand
ccgagauguuuccaaaugg

SEQ ID NO: 1844782 - RNA, 19 nt, Homo sapiens
  misc_RNA (1)...(19): siRNA sense strand
ggauggcauaagacaguuu

SEQ ID NO: 1844783 - RNA, 19 nt, Homo sapiens
  misc_RNA (1)...(19): siRNA sense strand
caagaaccucaauaagaag

SEQ ID NO: 1844784 - RNA, 19 nt, Homo sapiens
  misc_RNA (1)...(19): siRNA sense strand
uggcauaagacaguuuaaa

SEQ ID NO: 1844785 - RNA, 19 nt, Homo sapiens
  misc_RNA (1)...(19): siRNA sense strand
uaugacuacuuugccagaa

SEQ ID NO: 1844786 - RNA, 19 nt, Homo sapiens
  misc_RNA (1)...(19): siRNA sense strand
caacaaguuagcagaagac

SEQ ID NO: 1844787 - RNA, 19 nt, Homo sapiens
  misc_RNA (1)...(19): siRNA sense strand
gaugaauucaacaaguuag

SEQ ID NO: 1844788 - RNA, 19 nt, Homo sapiens
  misc_RNA (1)...(19): siRNA sense strand
gaagaagcgucagaacaaa

SEQ ID NO: 1844789 - RNA, 19 nt, Homo sapiens
  misc_RNA (1)...(19): siRNA sense strand
caacaucgaucaccuuggu

SEQ ID NO: 1844790 - RNA, 19 nt, Homo sapiens
  misc_RNA (1)...(19): siRNA sense strand
ggaagaggaaguucaagaa

SEQ ID NO: 1844791 - RNA, 19 nt, Homo sapiens
  misc_RNA (1)...(19): siRNA sense strand
gcaagccgcucaacaucga

SEQ ID NO: 1844792 - RNA, 19 nt, Homo sapiens
  misc_RNA (1)...(19): siRNA sense strand
guacgaagaagaagaggaa

SEQ ID NO: 1844793 - RNA, 19 nt, Homo sapiens
  misc_RNA (1)...(19): siRNA sense strand
ggagaaaccgagacccaaa

SEQ ID NO: 1844794 - RNA, 19 nt, Homo sapiens
  misc_RNA (1)...(19): siRNA sense strand
gaagcgccgugcagagaga

SEQ ID NO: 1844795 - RNA, 19 nt, Homo sapiens
  misc_RNA (1)...(19): siRNA sense strand
ggccaaggcugaccagaag

SEQ ID NO: 1844796 - RNA, 19 nt, Homo sapiens
  misc_RNA (1)...(19): siRNA sense strand
agaaagcgcuguccuccau

SEQ ID NO: 1844797 - RNA, 19 nt, Homo sapiens
  misc_RNA (1)...(19): siRNA sense strand
aagaggaaguucaagaaga

SEQ ID NO: 1844798 - RNA, 19 nt, Homo sapiens
  misc_RNA (1)...(19): siRNA sense strand
ugaaacgccagaaauauga

SEQ ID NO: 1844799 - RNA, 19 nt, Homo sapiens
  misc_RNA (1)...(19): siRNA sense strand
agaagaagcgucagaacaa

SEQ ID NO: 1844800 - RNA, 19 nt, Homo sapiens
  misc_RNA (1)...(19): siRNA sense strand
ggaggaagaggaaguucaa

SEQ ID NO: 1844801 - RNA, 19 nt, Homo sapiens
  misc_RNA (1)...(19): siRNA sense strand
gagaagcgccgugcagaga

SEQ ID NO: 1844802 - RNA, 19 nt, Homo sapiens
  misc_RNA (1)...(19): siRNA sense strand
caaacucacugcuccuaag

SEQ ID NO: 1844803 - RNA, 19 nt, Homo sapiens
  misc_RNA (1)...(19): siRNA sense strand
ucaaagagagaaucgagaa

SEQ ID NO: 1844804 - RNA, 19 nt, Homo sapiens
  misc_RNA (1)...(19): siRNA sense strand
gaagaggaaguucaagaag

SEQ ID NO: 1844805 - RNA, 19 nt, Homo sapiens
  misc_RNA (1)...(19): siRNA sense strand
gagcggagcagcagaggau

SEQ ID NO: 1844806 - RNA, 19 nt, Homo sapiens
  misc_RNA (1)...(19): siRNA sense strand
aggacgaccugaagaagaa

SEQ ID NO: 1844807 - RNA, 19 nt, Homo sapiens
  misc_RNA (1)...(19): siRNA sense strand
gaacagacuggcggaggaa

SEQ ID NO: 1844808 - RNA, 19 nt, Homo sapiens
  misc_RNA (1)...(19): siRNA sense strand
gcugaaacgccagaaauau

SEQ ID NO: 1844809 - RNA, 19 nt, Homo sapiens
  misc_RNA (1)...(19): siRNA sense strand
ggagcaguacgaagaagaa

SEQ ID NO: 1844810 - RNA, 19 nt, Homo sapiens
  misc_RNA (1)...(19): siRNA sense strand
gaggacgaccugaagaaga

SEQ ID NO: 1844811 - RNA, 19 nt, Homo sapiens
  misc_RNA (1)...(19): siRNA sense strand
aaaccgagacccaaacuca

SEQ ID NO: 1844812 - RNA, 19 nt, Homo sapiens
  misc_RNA (1)...(19): siRNA sense strand
ggaggagcaguacgaagaa

SEQ ID NO: 1844813 - RNA, 19 nt, Homo sapiens
  misc_RNA (1)...(19): siRNA sense strand
gaagcugaaacgccagaaa

SEQ ID NO: 1844814 - RNA, 19 nt, Homo sapiens
  misc_RNA (1)...(19): siRNA sense strand
gcagaggacgaccugaaga

SEQ ID NO: 1844815 - RNA, 19 nt, Homo sapiens
  misc_RNA (1)...(19): siRNA sense strand
cagaagaagcgucagaaca

SEQ ID NO: 1844816 - RNA, 19 nt, Homo sapiens
  misc_RNA (1)...(19): siRNA sense strand
gggcagaggacgaccugaa

SEQ ID NO: 1844817 - RNA, 19 nt, Homo sapiens
  misc_RNA (1)...(19): siRNA sense strand
ccucaucgacagccacuuu

SEQ ID NO: 1844818 - RNA, 19 nt, Homo sapiens
  misc_RNA (1)...(19): siRNA sense strand
gcuggagauugacaaguuc

SEQ ID NO: 1844819 - RNA, 19 nt, Homo sapiens
  misc_RNA (1)...(19): siRNA sense strand
gaggauucgugcagagaag

SEQ ID NO: 1844820 - RNA, 19 nt, Homo sapiens
  misc_RNA (1)...(19): siRNA sense strand
ugcaccagcuggagauuga

SEQ ID NO: 1844821 - RNA, 19 nt, Homo sapiens
  misc_RNA (1)...(19): siRNA sense strand
gauugacaaguucgaguuu

SEQ ID NO: 1844822 - RNA, 19 nt, Homo sapiens
  misc_RNA (1)...(19): siRNA sense strand
gcaguacgaagaagaagag

SEQ ID NO: 1844823 - RNA, 19 nt, Homo sapiens
  misc_RNA (1)...(19): siRNA sense strand
ucagaacaaagaccuaaug

SEQ ID NO: 1844824 - RNA, 19 nt, Homo sapiens
  misc_RNA (1)...(19): siRNA sense strand
cagaggacgaccugaagaa

SEQ ID NO: 1844825 - RNA, 19 nt, Homo sapiens
  misc_RNA (1)...(19): siRNA sense strand
gaagauucuggcugagaga

SEQ ID NO: 1844826 - RNA, 19 nt, Homo sapiens
  misc_RNA (1)...(19): siRNA sense strand
ccaaacucacugcuccuaa

SEQ ID NO: 1844827 - RNA, 19 nt, Homo sapiens
  misc_RNA (1)...(19): siRNA sense strand
uggaggagcaguacgaaga

SEQ ID NO: 1844828 - RNA, 19 nt, Homo sapiens
  misc_RNA (1)...(19): siRNA sense strand
agaggaaguucaagaagac

SEQ ID NO: 1844829 - RNA, 19 nt, Homo sapiens
  misc_RNA (1)...(19): siRNA sense strand
ggacgcggaagaggagaaa

SEQ ID NO: 1844830 - RNA, 19 nt, Homo sapiens
  misc_RNA (1)...(19): siRNA sense strand
cagaggaggacgcggaaga

SEQ ID NO: 1844831 - RNA, 19 nt, Homo sapiens
  misc_RNA (1)...(19): siRNA sense strand
cugaaacgccagaaauaug

SEQ ID NO: 1844832 - RNA, 19 nt, Homo sapiens
  misc_RNA (1)...(19): siRNA sense strand
caucgacagccacuuugaa

SEQ ID NO: 1844833 - RNA, 19 nt, Homo sapiens
  misc_RNA (1)...(19): siRNA sense strand
aagacaaacugagggacaa

SEQ ID NO: 1844834 - RNA, 19 nt, Homo sapiens
  misc_RNA (1)...(19): siRNA sense strand
gacgcaagccgcucaacau

SEQ ID NO: 1844835 - RNA, 19 nt, Homo sapiens
  misc_RNA (1)...(19): siRNA sense strand
agaggaagcccaggaggaa

SEQ ID NO: 1844836 - RNA, 19 nt, Homo sapiens
  misc_RNA (1)...(19): siRNA sense strand
agaagcgucagaacaaaga

SEQ ID NO: 1844837 - RNA, 19 nt, Homo sapiens
  misc_RNA (1)...(19): siRNA sense strand
gcucaacaucgaucaccuu

SEQ ID NO: 1844838 - RNA, 19 nt, Homo sapiens
  misc_RNA (1)...(19): siRNA sense strand
cgucagaacaaagaccuaa

SEQ ID NO: 1844839 - RNA, 19 nt, Homo sapiens
  misc_RNA (1)...(19): siRNA sense strand
gagagggagcgccagaaca

SEQ ID NO: 1844840 - RNA, 19 nt, Homo sapiens
  misc_RNA (1)...(19): siRNA sense strand
agcuggagauugacaaguu

SEQ ID NO: 1844841 - RNA, 19 nt, Homo sapiens
  misc_RNA (1)...(19): siRNA sense strand
aaacucacugcuccuaaga

SEQ ID NO: 1844842 - RNA, 19 nt, Homo sapiens
  misc_RNA (1)...(19): siRNA sense strand
gaccagaagagaggcaaga

SEQ ID NO: 1844843 - RNA, 19 nt, Homo sapiens
  misc_RNA (1)...(19): siRNA sense strand
acucacugcuccuaagauc

SEQ ID NO: 1844844 - RNA, 19 nt, Homo sapiens
  misc_RNA (1)...(19): siRNA sense strand
cgccagaaauaugacauca

SEQ ID NO: 1844845 - RNA, 19 nt, Homo sapiens
  misc_RNA (1)...(19): siRNA sense strand
gaggagcaguacgaagaag

SEQ ID NO: 1844846 - RNA, 19 nt, Homo sapiens
  misc_RNA (1)...(19): siRNA sense strand
aagcugaaacgccagaaau

SEQ ID NO: 1844847 - RNA, 19 nt, Homo sapiens
  misc_RNA (1)...(19): siRNA sense strand
gagaaaccgagacccaaac

SEQ ID NO: 1844848 - RNA, 19 nt, Homo sapiens
  misc_RNA (1)...(19): siRNA sense strand
gaucaucucuucuuuguca

SEQ ID NO: 1844849 - RNA, 19 nt, Homo sapiens
  misc_RNA (1)...(19): siRNA sense strand
gaauggcaguguauuagua

SEQ ID NO: 1844850 - RNA, 19 nt, Homo sapiens
  misc_RNA (1)...(19): siRNA sense strand
cuacagcuauggaacauua

SEQ ID NO: 1844851 - RNA, 19 nt, Homo sapiens
  misc_RNA (1)...(19): siRNA sense strand
gaagacagacauuauauga

SEQ ID NO: 1844852 - RNA, 19 nt, Homo sapiens
  misc_RNA (1)...(19): siRNA sense strand
ggaacuaccagaucgauua

SEQ ID NO: 1844853 - RNA, 19 nt, Homo sapiens
  misc_RNA (1)...(19): siRNA sense strand
caacaacacuauacuaaca

SEQ ID NO: 1844854 - RNA, 19 nt, Homo sapiens
  misc_RNA (1)...(19): siRNA sense strand
gaagagugaucacgauuuc

SEQ ID NO: 1844855 - RNA, 19 nt, Homo sapiens
  misc_RNA (1)...(19): siRNA sense strand
guucuaagcuggucuaugu

SEQ ID NO: 1844856 - RNA, 19 nt, Homo sapiens
  misc_RNA (1)...(19): siRNA sense strand
gaaauaacauggccugcau

SEQ ID NO: 1844857 - RNA, 19 nt, Homo sapiens
  misc_RNA (1)...(19): siRNA sense strand
gagaaugcuuuacaugauu

SEQ ID NO: 1844858 - RNA, 19 nt, Homo sapiens
  misc_RNA (1)...(19): siRNA sense strand
gauaaagagucaaauaugg

SEQ ID NO: 1844859 - RNA, 19 nt, Homo sapiens
  misc_RNA (1)...(19): siRNA sense strand
gcuccaaacuucauuguug

SEQ ID NO: 1844860 - RNA, 19 nt, Homo sapiens
  misc_RNA (1)...(19): siRNA sense strand
ggagaaagcaugagcaaug

SEQ ID NO: 1844861 - RNA, 19 nt, Homo sapiens
  misc_RNA (1)...(19): siRNA sense strand
guacugcucuuagaaugua

SEQ ID NO: 1844862 - RNA, 19 nt, Homo sapiens
  misc_RNA (1)...(19): siRNA sense strand
ggaagugccucaugcugaa

SEQ ID NO: 1844863 - RNA, 19 nt, Homo sapiens
  misc_RNA (1)...(19): siRNA sense strand
uaagaguacucaugaauuc

SEQ ID NO: 1844864 - RNA, 19 nt, Homo sapiens
  misc_RNA (1)...(19): siRNA sense strand
ggaacuauauucacagcaa

SEQ ID NO: 1844865 - RNA, 19 nt, Homo sapiens
  misc_RNA (1)...(19): siRNA sense strand
ggagugauaucuucagcuu

SEQ ID NO: 1844866 - RNA, 19 nt, Homo sapiens
  misc_RNA (1)...(19): siRNA sense strand
ggaacaggaugaugaagau

SEQ ID NO: 1844867 - RNA, 19 nt, Homo sapiens
  misc_RNA (1)...(19): siRNA sense strand
gaauaagaguacucaugaa

SEQ ID NO: 1844868 - RNA, 19 nt, Homo sapiens
  misc_RNA (1)...(19): siRNA sense strand
gaacuauauucacagcaaa

SEQ ID NO: 1844869 - RNA, 19 nt, Homo sapiens
  misc_RNA (1)...(19): siRNA sense strand
guucuauucugcccacuua

SEQ ID NO: 1844870 - RNA, 19 nt, Homo sapiens
  misc_RNA (1)...(19): siRNA sense strand
gcaacaacaauacagguua

SEQ ID NO: 1844871 - RNA, 19 nt, Homo sapiens
  misc_RNA (1)...(19): siRNA sense strand
gaauggcaauguaaacuuc

SEQ ID NO: 1844872 - RNA, 19 nt, Homo sapiens
  misc_RNA (1)...(19): siRNA sense strand
gaacagcuauuaaaacaga

SEQ ID NO: 1844873 - RNA, 19 nt, Homo sapiens
  misc_RNA (1)...(19): siRNA sense strand
caacaacaauacagguuau

SEQ ID NO: 1844874 - RNA, 19 nt, Homo sapiens
  misc_RNA (1)...(19): siRNA sense strand
caggaaagguccgagguua

SEQ ID NO: 1844875 - RNA, 19 nt, Homo sapiens
  misc_RNA (1)...(19): siRNA sense strand
gaagauggaaacaaagaaa

SEQ ID NO: 1844876 - RNA, 19 nt, Homo sapiens
  misc_RNA (1)...(19): siRNA sense strand
acagugaccuccaucaauu

SEQ ID NO: 1844877 - RNA, 19 nt, Homo sapiens
  misc_RNA (1)...(19): siRNA sense strand
gcaagugcaugacugugaa

SEQ ID NO: 1844878 - RNA, 19 nt, Homo sapiens
  misc_RNA (1)...(19): siRNA sense strand
gacccaagauucaucaguu

SEQ ID NO: 1844879 - RNA, 19 nt, Homo sapiens
  misc_RNA (1)...(19): siRNA sense strand
ucacacaacuccaaacaca

SEQ ID NO: 1844880 - RNA, 19 nt, Homo sapiens
  misc_RNA (1)...(19): siRNA sense strand
gucaucaucuuccaucuuu

SEQ ID NO: 1844881 - RNA, 19 nt, Homo sapiens
  misc_RNA (1)...(19): siRNA sense strand
caagauucaucaguuauug

SEQ ID NO: 1844882 - RNA, 19 nt, Homo sapiens
  misc_RNA (1)...(19): siRNA sense strand
ccagacaauuucauacuug

SEQ ID NO: 1844883 - RNA, 19 nt, Homo sapiens
  misc_RNA (1)...(19): siRNA sense strand
gugaguuccuauccaaaua

SEQ ID NO: 1844884 - RNA, 19 nt, Homo sapiens
  misc_RNA (1)...(19): siRNA sense strand
gaugcuggaugugugaaua

SEQ ID NO: 1844885 - RNA, 19 nt, Homo sapiens
  misc_RNA (1)...(19): siRNA sense strand
ugaauaagaguacucauga

SEQ ID NO: 1844886 - RNA, 19 nt, Homo sapiens
  misc_RNA (1)...(19): siRNA sense strand
caaagaagggugugaaaca

SEQ ID NO: 1844887 - RNA, 19 nt, Homo sapiens
  misc_RNA (1)...(19): siRNA sense strand
ccagaauggcaguguauua

SEQ ID NO: 1844888 - RNA, 19 nt, Homo sapiens
  misc_RNA (1)...(19): siRNA sense strand
uaacauggccugcauuucu

SEQ ID NO: 1844889 - RNA, 19 nt, Homo sapiens
  misc_RNA (1)...(19): siRNA sense strand
gaauguaagcguucacgaa

SEQ ID NO: 1844890 - RNA, 19 nt, Homo sapiens
  misc_RNA (1)...(19): siRNA sense strand
ccagagaguuccugcaaca

SEQ ID NO: 1844891 - RNA, 19 nt, Homo sapiens
  misc_RNA (1)...(19): siRNA sense strand
gugcaugacugugaaauca

SEQ ID NO: 1844892 - RNA, 19 nt, Homo sapiens
  misc_RNA (1)...(19): siRNA sense strand
ugagaaugcuuuacaugau

SEQ ID NO: 1844893 - RNA, 19 nt, Homo sapiens
  misc_RNA (1)...(19): siRNA sense strand
ggaugaugaagaugauuua

SEQ ID NO: 1844894 - RNA, 19 nt, Homo sapiens
  misc_RNA (1)...(19): siRNA sense strand
gaaucaggguucagagcuu

SEQ ID NO: 1844895 - RNA, 19 nt, Homo sapiens
  misc_RNA (1)...(19): siRNA sense strand
guaauaggcuaauuguacu

SEQ ID NO: 1844896 - RNA, 19 nt, Homo sapiens
  misc_RNA (1)...(19): siRNA sense strand
gguauucgcugcaacaaaa

SEQ ID NO: 1844897 - RNA, 19 nt, Homo sapiens
  misc_RNA (1)...(19): siRNA sense strand
gcaaagaugcuggaugugu

SEQ ID NO: 1844898 - RNA, 19 nt, Homo sapiens
  misc_RNA (1)...(19): siRNA sense strand
gagaguuccugcaacaaca

SEQ ID NO: 1844899 - RNA, 19 nt, Homo sapiens
  misc_RNA (1)...(19): siRNA sense strand
ggauauguggaaugaauuu

SEQ ID NO: 1844900 - RNA, 19 nt, Homo sapiens
  misc_RNA (1)...(19): siRNA sense strand
gcaacaaaccauggaacua

SEQ ID NO: 1844901 - RNA, 19 nt, Homo sapiens
  misc_RNA (1)...(19): siRNA sense strand
gaagaaauaccacaaugac

SEQ ID NO: 1844902 - RNA, 19 nt, Homo sapiens
  misc_RNA (1)...(19): siRNA sense strand
gcacauguuuaugaaguuc

SEQ ID NO: 1844903 - RNA, 19 nt, Homo sapiens
  misc_RNA (1)...(19): siRNA sense strand
ccagugaguuccuauccaa

SEQ ID NO: 1844904 - RNA, 19 nt, Homo sapiens
  misc_RNA (1)...(19): siRNA sense strand
ucagcagacuuccuucaaa

SEQ ID NO: 1844905 - RNA, 19 nt, Homo sapiens
  misc_RNA (1)...(19): siRNA sense strand
ggaaagguccgagguuaau

SEQ ID NO: 1844906 - RNA, 19 nt, Homo sapiens
  misc_RNA (1)...(19): siRNA sense strand
gagaaagcaugagcaaugg

SEQ ID NO: 1844907 - RNA, 19 nt, Homo sapiens
  misc_RNA (1)...(19): siRNA sense strand
gaauugagagcccagaaau

SEQ ID NO: 1844908 - RNA, 19 nt, Homo sapiens
  misc_RNA (1)...(19): siRNA sense strand
guacaacagugaccuccau

SEQ ID NO: 1844909 - RNA, 19 nt, Homo sapiens
  misc_RNA (1)...(19): siRNA sense strand
gggaacccaugggaugaua

SEQ ID NO: 1844910 - RNA, 19 nt, Homo sapiens
  misc_RNA (1)...(19): siRNA sense strand
gcuccuacacuuccugaua

SEQ ID NO: 1844911 - RNA, 19 nt, Homo sapiens
  misc_RNA (1)...(19): siRNA sense strand
gcacacaaaagaagcauua

SEQ ID NO: 1844912 - RNA, 19 nt, Homo sapiens
  misc_RNA (1)...(19): siRNA sense strand
gaacugagagcgccauguc

SEQ ID NO: 1844913 - RNA, 19 nt, Homo sapiens
  misc_RNA (1)...(19): siRNA sense strand
caaugacccucuuggugaa

SEQ ID NO: 1844914 - RNA, 19 nt, Homo sapiens
  misc_RNA (1)...(19): siRNA sense strand
gaagauccaccagaugcua

SEQ ID NO: 1844915 - RNA, 19 nt, Homo sapiens
  misc_RNA (1)...(19): siRNA sense strand
aagaagaaauaccacaaug

SEQ ID NO: 1844916 - RNA, 19 nt, Homo sapiens
  misc_RNA (1)...(19): siRNA sense strand
ggcaaaagcugaagaaagu

SEQ ID NO: 1844917 - RNA, 19 nt, Homo sapiens
  misc_RNA (1)...(19): siRNA sense strand
cagcacauguuuaugaagu

SEQ ID NO: 1844918 - RNA, 19 nt, Homo sapiens
  misc_RNA (1)...(19): siRNA sense strand
gaaagacuaaagccaucua

SEQ ID NO: 1844919 - RNA, 19 nt, Homo sapiens
  misc_RNA (1)...(19): siRNA sense strand
ggucagaguauagauauga

SEQ ID NO: 1844920 - RNA, 19 nt, Homo sapiens
  misc_RNA (1)...(19): siRNA sense strand
gcagaauggaugcagauga

SEQ ID NO: 1844921 - RNA, 19 nt, Homo sapiens
  misc_RNA (1)...(19): siRNA sense strand
ggacccaguugauggaaag

SEQ ID NO: 1844922 - RNA, 19 nt, Homo sapiens
  misc_RNA (1)...(19): siRNA sense strand
guacaaccaugggauugga

SEQ ID NO: 1844923 - RNA, 19 nt, Homo sapiens
  misc_RNA (1)...(19): siRNA sense strand
caacuugcgucuacaccau

SEQ ID NO: 1844924 - RNA, 19 nt, Homo sapiens
  misc_RNA (1)...(19): siRNA sense strand
uaauuguacugcucuuaga

SEQ ID NO: 1844925 - RNA, 19 nt, Homo sapiens
  misc_RNA (1)...(19): siRNA sense strand
ugaaugggaaagauacaua

SEQ ID NO: 1844926 - RNA, 19 nt, Homo sapiens
  misc_RNA (1)...(19): siRNA sense strand
guuccuauccaaauacuuu

SEQ ID NO: 1844927 - RNA, 19 nt, Homo sapiens
  misc_RNA (1)...(19): siRNA sense strand
cagaauggaugcagaugag

SEQ ID NO: 1844928 - RNA, 19 nt, Homo sapiens
  misc_RNA (1)...(19): siRNA sense strand
uugagcagguuguuaugua

SEQ ID NO: 1844929 - RNA, 19 nt, Homo sapiens
  misc_RNA (1)...(19): siRNA sense strand
gaauggaugcagaugaguu

SEQ ID NO: 1844930 - RNA, 19 nt, Homo sapiens
  misc_RNA (1)...(19): siRNA sense strand
agagcuuucuggagugaua

SEQ ID NO: 1844931 - RNA, 19 nt, Homo sapiens
  misc_RNA (1)...(19): siRNA sense strand
acccaagauucaucaguua

SEQ ID NO: 1844932 - RNA, 19 nt, Homo sapiens
  misc_RNA (1)...(19): siRNA sense strand
caacaaaccauggaacuac

SEQ ID NO: 1844933 - RNA, 19 nt, Homo sapiens
  misc_RNA (1)...(19): siRNA sense strand
aaucauucauggagacauu

SEQ ID NO: 1844934 - RNA, 19 nt, Homo sapiens
  misc_RNA (1)...(19): siRNA sense strand
cagcuauggaacauuauua

SEQ ID NO: 1844935 - RNA, 19 nt, Homo sapiens
  misc_RNA (1)...(19): siRNA sense strand
ccaucaagcccaagacuga

SEQ ID NO: 1844936 - RNA, 19 nt, Homo sapiens
  misc_RNA (1)...(19): siRNA sense strand
aaagaagcauuagguuuca

SEQ ID NO: 1844937 - RNA, 19 nt, Homo sapiens
  misc_RNA (1)...(19): siRNA sense strand
cgaagagugaucacgauuu

SEQ ID NO: 1844938 - RNA, 19 nt, Homo sapiens
  misc_RNA (1)...(19): siRNA sense strand
gcaaggagaagcuuauucg

SEQ ID NO: 1844939 - RNA, 19 nt, Homo sapiens
  misc_RNA (1)...(19): siRNA sense strand
gacauuaaaccagacaauu

SEQ ID NO: 1844940 - RNA, 19 nt, Homo sapiens
  misc_RNA (1)...(19): siRNA sense strand
caacagugaccuccaucaa

SEQ ID NO: 1844941 - RNA, 19 nt, Homo sapiens
  misc_RNA (1)...(19): siRNA sense strand
gaucaaagaagggugugaa

SEQ ID NO: 1844942 - RNA, 19 nt, Homo sapiens
  misc_RNA (1)...(19): siRNA sense strand
agugauaucuucagcuugu

SEQ ID NO: 1844943 - RNA, 19 nt, Homo sapiens
  misc_RNA (1)...(19): siRNA sense strand
ccacaaugacccaagauuc

SEQ ID NO: 1844944 - RNA, 19 nt, Homo sapiens
  misc_RNA (1)...(19): siRNA sense strand
cguaauaggcuaauuguac

SEQ ID NO: 1844945 - RNA, 19 nt, Homo sapiens
  misc_RNA (1)...(19): siRNA sense strand
ccagggagaucugaaugau

SEQ ID NO: 1844946 - RNA, 19 nt, Homo sapiens
  misc_RNA (1)...(19): siRNA sense strand
ccaggagacuucacaucug

SEQ ID NO: 1844947 - RNA, 19 nt, Homo sapiens
  misc_RNA (1)...(19): siRNA sense strand
ccaagauucaucaguuauu

SEQ ID NO: 1844948 - RNA, 19 nt, Homo sapiens
  misc_RNA (1)...(19): siRNA sense strand
caaaguggauccaguguua

SEQ ID NO: 1844949 - RNA, 19 nt, Homo sapiens
  misc_RNA (1)...(19): siRNA sense strand
ggaacuaccuggacuuaaa

SEQ ID NO: 1844950 - RNA, 19 nt, Homo sapiens
  misc_RNA (1)...(19): siRNA sense strand
ggaauaugccuuucuuaua

SEQ ID NO: 1844951 - RNA, 19 nt, Homo sapiens
  misc_RNA (1)...(19): siRNA sense strand
uuacauaacuuccguauca

SEQ ID NO: 1844952 - RNA, 19 nt, Homo sapiens
  misc_RNA (1)...(19): siRNA sense strand
aagagaaacugggaaauua

SEQ ID NO: 1844953 - RNA, 19 nt, Homo sapiens
  misc_RNA (1)...(19): siRNA sense strand
caacaaagcauuuacagau

SEQ ID NO: 1844954 - RNA, 19 nt, Homo sapiens
  misc_RNA (1)...(19): siRNA sense strand
gcgaauagcugaugguucu

SEQ ID NO: 1844955 - RNA, 19 nt, Homo sapiens
  misc_RNA (1)...(19): siRNA sense strand
gaagcaauacacccaaaua

SEQ ID NO: 1844956 - RNA, 19 nt, Homo sapiens
  misc_RNA (1)...(19): siRNA sense strand
ccaaagcguuucuggauug

SEQ ID NO: 1844957 - RNA, 19 nt, Homo sapiens
  misc_RNA (1)...(19): siRNA sense strand
gcaauacacccaaauacaa

SEQ ID NO: 1844958 - RNA, 19 nt, Homo sapiens
  misc_RNA (1)...(19): siRNA sense strand
gcaguaguauugauagguu

SEQ ID NO: 1844959 - RNA, 19 nt, Homo sapiens
  misc_RNA (1)...(19): siRNA sense strand
ggaaauggacccucaggaa

SEQ ID NO: 1844960 - RNA, 19 nt, Homo sapiens
  misc_RNA (1)...(19): siRNA sense strand
ucacguaguucuugguaaa

SEQ ID NO: 1844961 - RNA, 19 nt, Homo sapiens
  misc_RNA (1)...(19): siRNA sense strand
ggaaauagauacauauacc

SEQ ID NO: 1844962 - RNA, 19 nt, Homo sapiens
  misc_RNA (1)...(19): siRNA sense strand
gaaauuagagcaacaucau

SEQ ID NO: 1844963 - RNA, 19 nt, Homo sapiens
  misc_RNA (1)...(19): siRNA sense strand
gaggagaugggauagcuua

SEQ ID NO: 1844964 - RNA, 19 nt, Homo sapiens
  misc_RNA (1)...(19): siRNA sense strand
cagagagaauacuuacaua

SEQ ID NO: 1844965 - RNA, 19 nt, Homo sapiens
  misc_RNA (1)...(19): siRNA sense strand
cagaagaauuucagagaga

SEQ ID NO: 1844966 - RNA, 19 nt, Homo sapiens
  misc_RNA (1)...(19): siRNA sense strand
acaaucagcuuuggaaguu

SEQ ID NO: 1844967 - RNA, 19 nt, Homo sapiens
  misc_RNA (1)...(19): siRNA sense strand
agacagagauauuucaaca

SEQ ID NO: 1844968 - RNA, 19 nt, Homo sapiens
  misc_RNA (1)...(19): siRNA sense strand
gaaauggacccucaggaau

SEQ ID NO: 1844969 - RNA, 19 nt, Homo sapiens
  misc_RNA (1)...(19): siRNA sense strand
gcauuuguuuguugaaaga

SEQ ID NO: 1844970 - RNA, 19 nt, Homo sapiens
  misc_RNA (1)...(19): siRNA sense strand
caagagaaacugggaaauu

SEQ ID NO: 1844971 - RNA, 19 nt, Homo sapiens
  misc_RNA (1)...(19): siRNA sense strand
guuacacgcuguuuagcua

SEQ ID NO: 1844972 - RNA, 19 nt, Homo sapiens
  misc_RNA (1)...(19): siRNA sense strand
cuacagaccguauuuauca

SEQ ID NO: 1844973 - RNA, 19 nt, Homo sapiens
  misc_RNA (1)...(19): siRNA sense strand
gauccaagcuuaauuuuca

SEQ ID NO: 1844974 - RNA, 19 nt, Homo sapiens
  misc_RNA (1)...(19): siRNA sense strand
cuaccuggacuuaaauuua

SEQ ID NO: 1844975 - RNA, 19 nt, Homo sapiens
  misc_RNA (1)...(19): siRNA sense strand
acacccaaauacaaucuua

SEQ ID NO: 1844976 - RNA, 19 nt, Homo sapiens
  misc_RNA (1)...(19): siRNA sense strand
guaauccuguggaaauaga

SEQ ID NO: 1844977 - RNA, 19 nt, Homo sapiens
  misc_RNA (1)...(19): siRNA sense strand
gguguuaccuaggccauaa

SEQ ID NO: 1844978 - RNA, 19 nt, Homo sapiens
  misc_RNA (1)...(19): siRNA sense strand
caugaaauguguucuccaa

SEQ ID NO: 1844979 - RNA, 19 nt, Homo sapiens
  misc_RNA (1)...(19): siRNA sense strand
ucuguagacucaaaucuuu

SEQ ID NO: 1844980 - RNA, 19 nt, Homo sapiens
  misc_RNA (1)...(19): siRNA sense strand
ggacuuagaauacuugucu

SEQ ID NO: 1844981 - RNA, 19 nt, Homo sapiens
  misc_RNA (1)...(19): siRNA sense strand
agacaucuuuccauuguug

SEQ ID NO: 1844982 - RNA, 19 nt, Homo sapiens
  misc_RNA (1)...(19): siRNA sense strand
gaauuuggagcugcuauaa

SEQ ID NO: 1844983 - RNA, 19 nt, Homo sapiens
  misc_RNA (1)...(19): siRNA sense strand
aaauggacccucaggaaua

SEQ ID NO: 1844984 - RNA, 19 nt, Homo sapiens
  misc_RNA (1)...(19): siRNA sense strand
caaagcauuuacagauaga

SEQ ID NO: 1844985 - RNA, 19 nt, Homo sapiens
  misc_RNA (1)...(19): siRNA sense strand
ggguaauccuguggaaaua

SEQ ID NO: 1844986 - RNA, 19 nt, Homo sapiens
  misc_RNA (1)...(19): siRNA sense strand
gauccaguguuaauuguag

SEQ ID NO: 1844987 - RNA, 19 nt, Homo sapiens
  misc_RNA (1)...(19): siRNA sense strand
gcugaugguucucauguuc

SEQ ID NO: 1844988 - RNA, 19 nt, Homo sapiens
  misc_RNA (1)...(19): siRNA sense strand
gaaauguguucuccaaagc

SEQ ID NO: 1844989 - RNA, 19 nt, Homo sapiens
  misc_RNA (1)...(19): siRNA sense strand
ugaaauguguucuccaaag

SEQ ID NO: 1844990 - RNA, 19 nt, Homo sapiens
  misc_RNA (1)...(19): siRNA sense strand
gaucaggacuuagaauacu

SEQ ID NO: 1844991 - RNA, 19 nt, Homo sapiens
  misc_RNA (1)...(19): siRNA sense strand
cauauucuguagacucaaa

SEQ ID NO: 1844992 - RNA, 19 nt, Homo sapiens
  misc_RNA (1)...(19): siRNA sense strand
cauaugauguguacucagu

SEQ ID NO: 1844993 - RNA, 19 nt, Homo sapiens
  misc_RNA (1)...(19): siRNA sense strand
uuauaucccucacguaguu

SEQ ID NO: 1844994 - RNA, 19 nt, Homo sapiens
  misc_RNA (1)...(19): siRNA sense strand
aaagcuguauccugaauau

SEQ ID NO: 1844995 - RNA, 19 nt, Homo sapiens
  misc_RNA (1)...(19): siRNA sense strand
gaacuaccuggacuuaaau

SEQ ID NO: 1844996 - RNA, 19 nt, Homo sapiens
  misc_RNA (1)...(19): siRNA sense strand
gauauucaagacagagaua

SEQ ID NO: 1844997 - RNA, 19 nt, Homo sapiens
  misc_RNA (1)...(19): siRNA sense strand
ucaggaauaugccuuucuu

SEQ ID NO: 1844998 - RNA, 19 nt, Homo sapiens
  misc_RNA (1)...(19): siRNA sense strand
gaccguauuuaucaucaga

SEQ ID NO: 1844999 - RNA, 19 nt, Homo sapiens
  misc_RNA (1)...(19): siRNA sense strand
acaaagcauuuacagauag

SEQ ID NO: 1845000 - RNA, 19 nt, Homo sapiens
  misc_RNA (1)...(19): siRNA sense strand
cagaagcaauacacccaaa

SEQ ID NO: 1845001 - RNA, 19 nt, Homo sapiens
  misc_RNA (1)...(19): siRNA sense strand
gauguguacucagucauau

SEQ ID NO: 1845002 - RNA, 19 nt, Homo sapiens
  misc_RNA (1)...(19): siRNA sense strand
gccagccaaucacauguaa

SEQ ID NO: 1845003 - RNA, 19 nt, Homo sapiens
  misc_RNA (1)...(19): siRNA sense strand
ggacuggguaucaaguaaa

SEQ ID NO: 1845004 - RNA, 19 nt, Homo sapiens
  misc_RNA (1)...(19): siRNA sense strand
ccucuuugcugagaaugua

SEQ ID NO: 1845005 - RNA, 19 nt, Homo sapiens
  misc_RNA (1)...(19): siRNA sense strand
ugaaggaucaaggguguua

SEQ ID NO: 1845006 - RNA, 19 nt, Homo sapiens
  misc_RNA (1)...(19): siRNA sense strand
ggaaauuagagcaacauca

SEQ ID NO: 1845007 - RNA, 19 nt, Homo sapiens
  misc_RNA (1)...(19): siRNA sense strand
gaaagaggaggaggagaug

SEQ ID NO: 1845008 - RNA, 19 nt, Homo sapiens
  misc_RNA (1)...(19): siRNA sense strand
aguaacugauccaagcuua

SEQ ID NO: 1845009 - RNA, 19 nt, Homo sapiens
  misc_RNA (1)...(19): siRNA sense strand
guaauaucccugugauuca

SEQ ID NO: 1845010 - RNA, 19 nt, Homo sapiens
  misc_RNA (1)...(19): siRNA sense strand
gagcugcuauaaacaaagg

SEQ ID NO: 1845011 - RNA, 19 nt, Homo sapiens
  misc_RNA (1)...(19): siRNA sense strand
gcucgcuacuauaaacauu

SEQ ID NO: 1845012 - RNA, 19 nt, Homo sapiens
  misc_RNA (1)...(19): siRNA sense strand
gagagaauacuuacauaac

SEQ ID NO: 1845013 - RNA, 19 nt, Homo sapiens
  misc_RNA (1)...(19): siRNA sense strand
caacuggaacgcuggauuc

SEQ ID NO: 1845014 - RNA, 19 nt, Homo sapiens
  misc_RNA (1)...(19): siRNA sense strand
cauuguugaucaggacuua

SEQ ID NO: 1845015 - RNA, 19 nt, Homo sapiens
  misc_RNA (1)...(19): siRNA sense strand
uaaggguaauccuguggaa

SEQ ID NO: 1845016 - RNA, 19 nt, Homo sapiens
  misc_RNA (1)...(19): siRNA sense strand
caauacacccaaauacaau

SEQ ID NO: 1845017 - RNA, 19 nt, Homo sapiens
  misc_RNA (1)...(19): siRNA sense strand
caaagcguuucuggauuga

SEQ ID NO: 1845018 - RNA, 19 nt, Homo sapiens
  misc_RNA (1)...(19): siRNA sense strand
gcaaaguggauccaguguu

SEQ ID NO: 1845019 - RNA, 19 nt, Homo sapiens
  misc_RNA (1)...(19): siRNA sense strand
agaagaauuucagagagaa

SEQ ID NO: 1845020 - RNA, 19 nt, Homo sapiens
  misc_RNA (1)...(19): siRNA sense strand
gcaguacugugugcuuaca

SEQ ID NO: 1845021 - RNA, 19 nt, Homo sapiens
  misc_RNA (1)...(19): siRNA sense strand
gagggccgaucauccaauc

SEQ ID NO: 1845022 - RNA, 19 nt, Homo sapiens
  misc_RNA (1)...(19): siRNA sense strand
ggaucaaggguguuaccua

SEQ ID NO: 1845023 - RNA, 19 nt, Homo sapiens
  misc_RNA (1)...(19): siRNA sense strand
uaacugauccaagcuuaau

SEQ ID NO: 1845024 - RNA, 19 nt, Homo sapiens
  misc_RNA (1)...(19): siRNA sense strand
gcaacuggaacgcuggauu

SEQ ID NO: 1845025 - RNA, 19 nt, Homo sapiens
  misc_RNA (1)...(19): siRNA sense strand
caauccaguugcaguacuu

SEQ ID NO: 1845026 - RNA, 19 nt, Homo sapiens
  misc_RNA (1)...(19): siRNA sense strand
ugaaagaggaggaggagau

SEQ ID NO: 1845027 - RNA, 19 nt, Homo sapiens
  misc_RNA (1)...(19): siRNA sense strand
caagacagagauauuucaa

SEQ ID NO: 1845028 - RNA, 19 nt, Homo sapiens
  misc_RNA (1)...(19): siRNA sense strand
ucagagagaauacuuacau

SEQ ID NO: 1845029 - RNA, 19 nt, Homo sapiens
  misc_RNA (1)...(19): siRNA sense strand
ccuaugaguguauuaaaga

SEQ ID NO: 1845030 - RNA, 19 nt, Homo sapiens
  misc_RNA (1)...(19): siRNA sense strand
gguaauaauaggaaaugga

SEQ ID NO: 1845031 - RNA, 19 nt, Homo sapiens
  misc_RNA (1)...(19): siRNA sense strand
agagcaacaucauuauauc

SEQ ID NO: 1845032 - RNA, 19 nt, Homo sapiens
  misc_RNA (1)...(19): siRNA sense strand
gucauauucuguagacuca

SEQ ID NO: 1845033 - RNA, 19 nt, Homo sapiens
  misc_RNA (1)...(19): siRNA sense strand
acgcaguacugugugcuua

SEQ ID NO: 1845034 - RNA, 19 nt, Homo sapiens
  misc_RNA (1)...(19): siRNA sense strand
agagauauuucaacaaagc

SEQ ID NO: 1845035 - RNA, 19 nt, Homo sapiens
  misc_RNA (1)...(19): siRNA sense strand
guauuuaucaucagaagca

SEQ ID NO: 1845036 - RNA, 19 nt, Homo sapiens
  misc_RNA (1)...(19): siRNA sense strand
cugcccaucuggaaauuga

SEQ ID NO: 1845037 - RNA, 19 nt, Homo sapiens
  misc_RNA (1)...(19): siRNA sense strand
cuguggaaauagauacaua

SEQ ID NO: 1845038 - RNA, 19 nt, Homo sapiens
  misc_RNA (1)...(19): siRNA sense strand
ugauguguacucagucaua

SEQ ID NO: 1845039 - RNA, 19 nt, Homo sapiens
  misc_RNA (1)...(19): siRNA sense strand
guaacugauccaagcuuaa

SEQ ID NO: 1845040 - RNA, 19 nt, Homo sapiens
  misc_RNA (1)...(19): siRNA sense strand
uaauaucccugugauucau

SEQ ID NO: 1845041 - RNA, 19 nt, Homo sapiens
  misc_RNA (1)...(19): siRNA sense strand
uaacuuccguaucaagacu

SEQ ID NO: 1845042 - RNA, 19 nt, Homo sapiens
  misc_RNA (1)...(19): siRNA sense strand
caagccagccaaucacaug

SEQ ID NO: 1845043 - RNA, 19 nt, Homo sapiens
  misc_RNA (1)...(19): siRNA sense strand
caccgugugcuuuccuuua

SEQ ID NO: 1845044 - RNA, 19 nt, Homo sapiens
  misc_RNA (1)...(19): siRNA sense strand
guacucagucauauucugu

SEQ ID NO: 1845045 - RNA, 19 nt, Homo sapiens
  misc_RNA (1)...(19): siRNA sense strand
uaugauguguacucaguca

SEQ ID NO: 1845046 - RNA, 19 nt, Homo sapiens
  misc_RNA (1)...(19): siRNA sense strand
ugaauuuggagcugcuaua

SEQ ID NO: 1845047 - RNA, 19 nt, Homo sapiens
  misc_RNA (1)...(19): siRNA sense strand
aauggacccucaggaauau

SEQ ID NO: 1845048 - RNA, 19 nt, Homo sapiens
  misc_RNA (1)...(19): siRNA sense strand
gagaaagaguguguucaaa

SEQ ID NO: 1845049 - RNA, 19 nt, Homo sapiens
  misc_RNA (1)...(19): siRNA sense strand
aaaauacucuucccucaaa

SEQ ID NO: 1845050 - RNA, 19 nt, Homo sapiens
  misc_RNA (1)...(19): siRNA sense strand
ugucggaaguggagaaguu

SEQ ID NO: 1845051 - RNA, 19 nt, Homo sapiens
  misc_RNA (1)...(19): siRNA sense strand
ggucaaaacugaagaaaac

SEQ ID NO: 1845052 - RNA, 19 nt, Homo sapiens
  misc_RNA (1)...(19): siRNA sense strand
gugauaagccagacuuguc

SEQ ID NO: 1845053 - RNA, 19 nt, Homo sapiens
  misc_RNA (1)...(19): siRNA sense strand
gaaguggagaaguuugaca

SEQ ID NO: 1845054 - RNA, 19 nt, Homo sapiens
  misc_RNA (1)...(19): siRNA sense strand
agaaagaguguguucaaac

SEQ ID NO: 1845055 - RNA, 19 nt, Homo sapiens
  misc_RNA (1)...(19): siRNA sense strand
cggaaguggagaaguuuga

SEQ ID NO: 1845056 - RNA, 19 nt, Homo sapiens
  misc_RNA (1)...(19): siRNA sense strand
caagauagcuacucggaaa

SEQ ID NO: 1845057 - RNA, 19 nt, Homo sapiens
  misc_RNA (1)...(19): siRNA sense strand
gcagaaaguuggcaugcaa

SEQ ID NO: 1845058 - RNA, 19 nt, Homo sapiens
  misc_RNA (1)...(19): siRNA sense strand
gagagcaacaucaacauua

SEQ ID NO: 1845059 - RNA, 19 nt, Homo sapiens
  misc_RNA (1)...(19): siRNA sense strand
ggaauuagugccagacaua

SEQ ID NO: 1845060 - RNA, 19 nt, Homo sapiens
  misc_RNA (1)...(19): siRNA sense strand
gcagucagauccagagaau

SEQ ID NO: 1845061 - RNA, 19 nt, Homo sapiens
  misc_RNA (1)...(19): siRNA sense strand
gagcuggaauuacugugua

SEQ ID NO: 1845062 - RNA, 19 nt, Homo sapiens
  misc_RNA (1)...(19): siRNA sense strand
cagaugccauuaucaaauu

SEQ ID NO: 1845063 - RNA, 19 nt, Homo sapiens
  misc_RNA (1)...(19): siRNA sense strand
cagaguuggugacaagaua

SEQ ID NO: 1845064 - RNA, 19 nt, Homo sapiens
  misc_RNA (1)...(19): siRNA sense strand
gcaguguaauuuccuauca

SEQ ID NO: 1845065 - RNA, 19 nt, Homo sapiens
  misc_RNA (1)...(19): siRNA sense strand
ggauauguauggaauuagu

SEQ ID NO: 1845066 - RNA, 19 nt, Homo sapiens
  misc_RNA (1)...(19): siRNA sense strand
cugaugagcuuucgaaaca

SEQ ID NO: 1845067 - RNA, 19 nt, Homo sapiens
  misc_RNA (1)...(19): siRNA sense strand
aggaauugcuggauaugua

SEQ ID NO: 1845068 - RNA, 19 nt, Homo sapiens
  misc_RNA (1)...(19): siRNA sense strand
ugaaaugcauguugcugaa

SEQ ID NO: 1845069 - RNA, 19 nt, Homo sapiens
  misc_RNA (1)...(19): siRNA sense strand
ggacaaggacugggaguug

SEQ ID NO: 1845070 - RNA, 19 nt, Homo sapiens
  misc_RNA (1)...(19): siRNA sense strand
gcagaugccauuaucaaau

SEQ ID NO: 1845071 - RNA, 19 nt, Homo sapiens
  misc_RNA (1)...(19): siRNA sense strand
gagcagaugccauuaucaa

SEQ ID NO: 1845072 - RNA, 19 nt, Homo sapiens
  misc_RNA (1)...(19): siRNA sense strand
agaaagagcagaugccauu

SEQ ID NO: 1845073 - RNA, 19 nt, Homo sapiens
  misc_RNA (1)...(19): siRNA sense strand
gaaagagcagaugccauua

SEQ ID NO: 1845074 - RNA, 19 nt, Homo sapiens
  misc_RNA (1)...(19): siRNA sense strand
caaagccaaugccgagaga

SEQ ID NO: 1845075 - RNA, 19 nt, Homo sapiens
  misc_RNA (1)...(19): siRNA sense strand
cuggauauguauggaauua

SEQ ID NO: 1845076 - RNA, 19 nt, Homo sapiens
  misc_RNA (1)...(19): siRNA sense strand
ggagcaguguaauuuccua

SEQ ID NO: 1845077 - RNA, 19 nt, Homo sapiens
  misc_RNA (1)...(19): siRNA sense strand
gccgagcacugcauaaaca

SEQ ID NO: 1845078 - RNA, 19 nt, Homo sapiens
  misc_RNA (1)...(19): siRNA sense strand
uuacagaguuggugacaag

SEQ ID NO: 1845079 - RNA, 19 nt, Homo sapiens
  misc_RNA (1)...(19): siRNA sense strand
agagcaacaucaacauuau

SEQ ID NO: 1845080 - RNA, 19 nt, Homo sapiens
  misc_RNA (1)...(19): siRNA sense strand
guuauuggagcuggaauua

SEQ ID NO: 1845081 - RNA, 19 nt, Homo sapiens
  misc_RNA (1)...(19): siRNA sense strand
ccacaagaacgcuuugaga

SEQ ID NO: 1845082 - RNA, 19 nt, Homo sapiens
  misc_RNA (1)...(19): siRNA sense strand
ugaccucuccaccugauua

SEQ ID NO: 1845083 - RNA, 19 nt, Homo sapiens
  misc_RNA (1)...(19): siRNA sense strand
gaugagcuuucgaaacaag

SEQ ID NO: 1845084 - RNA, 19 nt, Homo sapiens
  misc_RNA (1)...(19): siRNA sense strand
gagcaacaucaacauuauu

SEQ ID NO: 1845085 - RNA, 19 nt, Homo sapiens
  misc_RNA (1)...(19): siRNA sense strand
gggacacaguggugcauug

SEQ ID NO: 1845086 - RNA, 19 nt, Homo sapiens
  misc_RNA (1)...(19): siRNA sense strand
ggaauugcuggauauguau

SEQ ID NO: 1845087 - RNA, 19 nt, Homo sapiens
  misc_RNA (1)...(19): siRNA sense strand
gacaaggucacaguuauug

SEQ ID NO: 1845088 - RNA, 19 nt, Homo sapiens
  misc_RNA (1)...(19): siRNA sense strand
ggaguugcauguggaaugg

SEQ ID NO: 1845089 - RNA, 19 nt, Homo sapiens
  misc_RNA (1)...(19): siRNA sense strand
gugcuguucuucuacauca

SEQ ID NO: 1845090 - RNA, 19 nt, Homo sapiens
  misc_RNA (1)...(19): siRNA sense strand
ccagaaacuaugguuauuu

SEQ ID NO: 1845091 - RNA, 19 nt, Homo sapiens
  misc_RNA (1)...(19): siRNA sense strand
guggcaaucuuugauguga

SEQ ID NO: 1845092 - RNA, 19 nt, Homo sapiens
  misc_RNA (1)...(19): siRNA sense strand
ccgaggaauugcuggauau

SEQ ID NO: 1845093 - RNA, 19 nt, Homo sapiens
  misc_RNA (1)...(19): siRNA sense strand
gaugaccucuccaccugau

SEQ ID NO: 1845094 - RNA, 19 nt, Homo sapiens
  misc_RNA (1)...(19): siRNA sense strand
caauggccuuugcuuccua

SEQ ID NO: 1845095 - RNA, 19 nt, Homo sapiens
  misc_RNA (1)...(19): siRNA sense strand
ggaauuacuguguaugaag

SEQ ID NO: 1845096 - RNA, 19 nt, Homo sapiens
  misc_RNA (1)...(19): siRNA sense strand
cgauggugcuucccagaug

SEQ ID NO: 1845097 - RNA, 19 nt, Homo sapiens
  misc_RNA (1)...(19): siRNA sense strand
uaucauaguggccgugaaa

SEQ ID NO: 1845098 - RNA, 19 nt, Homo sapiens
  misc_RNA (1)...(19): siRNA sense strand
cuccauggauccugacauu

SEQ ID NO: 1845099 - RNA, 19 nt, Homo sapiens
  misc_RNA (1)...(19): siRNA sense strand
ccauuaaaccucuggaugu

SEQ ID NO: 1845100 - RNA, 19 nt, Homo sapiens
  misc_RNA (1)...(19): siRNA sense strand
ggacagcuggagcagugua

SEQ ID NO: 1845101 - RNA, 19 nt, Homo sapiens
  misc_RNA (1)...(19): siRNA sense strand
ccaagugcacgaucuucua

SEQ ID NO: 1845102 - RNA, 19 nt, Homo sapiens
  misc_RNA (1)...(19): siRNA sense strand
gcauguggaauggcauaua

SEQ ID NO: 1845103 - RNA, 19 nt, Homo sapiens
  misc_RNA (1)...(19): siRNA sense strand
cagagaauccggacaacga

SEQ ID NO: 1845104 - RNA, 19 nt, Homo sapiens
  misc_RNA (1)...(19): siRNA sense strand
gacaccagguacucuacuu

SEQ ID NO: 1845105 - RNA, 19 nt, Homo sapiens
  misc_RNA (1)...(19): siRNA sense strand
ggccuuugcuuccuacuac

SEQ ID NO: 1845106 - RNA, 19 nt, Homo sapiens
  misc_RNA (1)...(19): siRNA sense strand
ccauggauccugacauuca

SEQ ID NO: 1845107 - RNA, 19 nt, Homo sapiens
  misc_RNA (1)...(19): siRNA sense strand
cauguggaauggcauauac

SEQ ID NO: 1845108 - RNA, 19 nt, Homo sapiens
  misc_RNA (1)...(19): siRNA sense strand
gaauuagugccagacauau

SEQ ID NO: 1845109 - RNA, 19 nt, Homo sapiens
  misc_RNA (1)...(19): siRNA sense strand
uauuggagcuggaauuacu

SEQ ID NO: 1845110 - RNA, 19 nt, Homo sapiens
  misc_RNA (1)...(19): siRNA sense strand
gcugagagcaacaucaaca

SEQ ID NO: 1845111 - RNA, 19 nt, Homo sapiens
  misc_RNA (1)...(19): siRNA sense strand
aagagcagaugccauuauc

SEQ ID NO: 1845112 - RNA, 19 nt, Homo sapiens
  misc_RNA (1)...(19): siRNA sense strand
agauggcccuggaggauau

SEQ ID NO: 1845113 - RNA, 19 nt, Homo sapiens
  misc_RNA (1)...(19): siRNA sense strand
caaggucacaguuauugga

SEQ ID NO: 1845114 - RNA, 19 nt, Homo sapiens
  misc_RNA (1)...(19): siRNA sense strand
gguacucuacuuucucuga

SEQ ID NO: 1845115 - RNA, 19 nt, Homo sapiens
  misc_RNA (1)...(19): siRNA sense strand
uacuguguaugaagccuua

SEQ ID NO: 1845116 - RNA, 19 nt, Homo sapiens
  misc_RNA (1)...(19): siRNA sense strand
caacaucaacauuauuggu

SEQ ID NO: 1845117 - RNA, 19 nt, Homo sapiens
  misc_RNA (1)...(19): siRNA sense strand
ccaccugauuacagaguug

SEQ ID NO: 1845118 - RNA, 19 nt, Homo sapiens
  misc_RNA (1)...(19): siRNA sense strand
gagcuuucgaaacaagaua

SEQ ID NO: 1845119 - RNA, 19 nt, Homo sapiens
  misc_RNA (1)...(19): siRNA sense strand
gcacugcauaaacaucuau

SEQ ID NO: 1845120 - RNA, 19 nt, Homo sapiens
  misc_RNA (1)...(19): siRNA sense strand
ucauuacaguggaggauca

SEQ ID NO: 1845121 - RNA, 19 nt, Homo sapiens
  misc_RNA (1)...(19): siRNA sense strand
uggaauuacuguguaugaa

SEQ ID NO: 1845122 - RNA, 19 nt, Homo sapiens
  misc_RNA (1)...(19): siRNA sense strand
uggaggauauagccauguu

SEQ ID NO: 1845123 - RNA, 19 nt, Homo sapiens
  misc_RNA (1)...(19): siRNA sense strand
cauuauugguucccacugu

SEQ ID NO: 1845124 - RNA, 19 nt, Homo sapiens
  misc_RNA (1)...(19): siRNA sense strand
gcgaagccuuuggguggaa

SEQ ID NO: 1845125 - RNA, 19 nt, Homo sapiens
  misc_RNA (1)...(19): siRNA sense strand
uauugaggaugcagaaagu

SEQ ID NO: 1845126 - RNA, 19 nt, Homo sapiens
  misc_RNA (1)...(19): siRNA sense strand
ugccagacauaucauagug

SEQ ID NO: 1845127 - RNA, 19 nt, Homo sapiens
  misc_RNA (1)...(19): siRNA sense strand
uccgaggaauugcuggaua

SEQ ID NO: 1845128 - RNA, 19 nt, Homo sapiens
  misc_RNA (1)...(19): siRNA sense strand
cauuaaaccucuggauguc

SEQ ID NO: 1845129 - RNA, 19 nt, Homo sapiens
  misc_RNA (1)...(19): siRNA sense strand
ugagagcaacaucaacauu

SEQ ID NO: 1845130 - RNA, 19 nt, Homo sapiens
  misc_RNA (1)...(19): siRNA sense strand
cagaccagcaggaaucuug

SEQ ID NO: 1845131 - RNA, 19 nt, Homo sapiens
  misc_RNA (1)...(19): siRNA sense strand
aaagagcagaugccauuau

SEQ ID NO: 1845132 - RNA, 19 nt, Homo sapiens
  misc_RNA (1)...(19): siRNA sense strand
ggagcuggaauuacugugu

SEQ ID NO: 1845133 - RNA, 19 nt, Homo sapiens
  misc_RNA (1)...(19): siRNA sense strand
caguguaauuuccuaucaa

SEQ ID NO: 1845134 - RNA, 19 nt, Homo sapiens
  misc_RNA (1)...(19): siRNA sense strand
cacaagaacgcuuugagau

SEQ ID NO: 1845135 - RNA, 19 nt, Homo sapiens
  misc_RNA (1)...(19): siRNA sense strand
cggguguucugccucauga

SEQ ID NO: 1845136 - RNA, 19 nt, Homo sapiens
  misc_RNA (1)...(19): siRNA sense strand
gggcuacgcgaacaacaga

SEQ ID NO: 1845137 - RNA, 19 nt, Homo sapiens
  misc_RNA (1)...(19): siRNA sense strand
cuacuacagucuggacaau

SEQ ID NO: 1845138 - RNA, 19 nt, Homo sapiens
  misc_RNA (1)...(19): siRNA sense strand
ucuucuacaucaugaggua

SEQ ID NO: 1845139 - RNA, 19 nt, Homo sapiens
  misc_RNA (1)...(19): siRNA sense strand
gggaguugcauguggaaug

SEQ ID NO: 1845140 - RNA, 19 nt, Homo sapiens
  misc_RNA (1)...(19): siRNA sense strand
acaagaacgcuuugagauc

SEQ ID NO: 1845141 - RNA, 19 nt, Homo sapiens
  misc_RNA (1)...(19): siRNA sense strand
cagguacucuacuuucucu

SEQ ID NO: 1845142 - RNA, 19 nt, Homo sapiens
  misc_RNA (1)...(19): siRNA sense strand
gacugucguuuguggaugu

SEQ ID NO: 1845143 - RNA, 19 nt, Homo sapiens
  misc_RNA (1)...(19): siRNA sense strand
gagcacugcauaaacaucu

SEQ ID NO: 1845144 - RNA, 19 nt, Homo sapiens
  misc_RNA (1)...(19): siRNA sense strand
gccaaugccgagagaaaga

SEQ ID NO: 1845145 - RNA, 19 nt, Homo sapiens
  misc_RNA (1)...(19): siRNA sense strand
cagcuggagcaguguaauu

SEQ ID NO: 1845146 - RNA, 19 nt, Homo sapiens
  misc_RNA (1)...(19): siRNA sense strand
cagauggcccuggaggaua

SEQ ID NO: 1845147 - RNA, 19 nt, Homo sapiens
  misc_RNA (1)...(19): siRNA sense strand
ggcaaucuuugaugugaac

SEQ ID NO: 1845148 - RNA, 19 nt, Homo sapiens
  misc_RNA (1)...(19): siRNA sense strand
gugggaaguccgaggaauu

SEQ ID NO: 1845149 - RNA, 19 nt, Homo sapiens
  misc_RNA (1)...(19): siRNA sense strand
ucaucgaccuguuuaccau

SEQ ID NO: 1845150 - RNA, 19 nt, Homo sapiens
  misc_RNA (1)...(19): siRNA sense strand
gaucuucuacccaacugau

SEQ ID NO: 1845151 - RNA, 19 nt, Homo sapiens
  misc_RNA (1)...(19): siRNA sense strand
gauagcuacucggaaagca

SEQ ID NO: 1845152 - RNA, 19 nt, Homo sapiens
  misc_RNA (1)...(19): siRNA sense strand
uaauugagagccagauaca

SEQ ID NO: 1845153 - RNA, 19 nt, Homo sapiens
  misc_RNA (1)...(19): siRNA sense strand
gauggcgaguccucagaag

SEQ ID NO: 1845154 - RNA, 19 nt, Homo sapiens
  misc_RNA (1)...(19): siRNA sense strand
caccuuugcugccuuucug

SEQ ID NO: 1845155 - RNA, 19 nt, Homo sapiens
  misc_RNA (1)...(19): siRNA sense strand
ggacugggaguugcaugug

SEQ ID NO: 1845156 - RNA, 19 nt, Homo sapiens
  misc_RNA (1)...(19): siRNA sense strand
gugaagagccaccuccuua

SEQ ID NO: 1845157 - RNA, 19 nt, Homo sapiens
  misc_RNA (1)...(19): siRNA sense strand
gcagagagcacaauaguac

SEQ ID NO: 1845158 - RNA, 19 nt, Homo sapiens
  misc_RNA (1)...(19): siRNA sense strand
gaaccauauuugacaguga

SEQ ID NO: 1845159 - RNA, 19 nt, Homo sapiens
  misc_RNA (1)...(19): siRNA sense strand
ggaguucgcccaaaucauc

SEQ ID NO: 1845160 - RNA, 19 nt, Homo sapiens
  misc_RNA (1)...(19): siRNA sense strand
gcacaauaguacccaucaa

SEQ ID NO: 1845161 - RNA, 19 nt, Homo sapiens
  misc_RNA (1)...(19): siRNA sense strand
ugacagugauuuaauagac

SEQ ID NO: 1845162 - RNA, 19 nt, Homo sapiens
  misc_RNA (1)...(19): siRNA sense strand
gaacagcagauggaacuca

SEQ ID NO: 1845163 - RNA, 19 nt, Homo sapiens
  misc_RNA (1)...(19): siRNA sense strand
gacagugauuuaauagaca

SEQ ID NO: 1845164 - RNA, 19 nt, Homo sapiens
  misc_RNA (1)...(19): siRNA sense strand
gagcuggaguucgcccaaa

SEQ ID NO: 1845165 - RNA, 19 nt, Homo sapiens
  misc_RNA (1)...(19): siRNA sense strand
cacaauaguacccaucaaa

SEQ ID NO: 1845166 - RNA, 19 nt, Homo sapiens
  misc_RNA (1)...(19): siRNA sense strand
ccacccaaccgaaccauau

SEQ ID NO: 1845167 - RNA, 19 nt, Homo sapiens
  misc_RNA (1)...(19): siRNA sense strand
caaugcagagagcacaaua

SEQ ID NO: 1845168 - RNA, 19 nt, Homo sapiens
  misc_RNA (1)...(19): siRNA sense strand
ucacagcgccguccuucau

SEQ ID NO: 1845169 - RNA, 19 nt, Homo sapiens
  misc_RNA (1)...(19): siRNA sense strand
caucaaaggcaaagauagg

SEQ ID NO: 1845170 - RNA, 19 nt, Homo sapiens
  misc_RNA (1)...(19): siRNA sense strand
gcugaaccacuacaaaguc

SEQ ID NO: 1845171 - RNA, 19 nt, Homo sapiens
  misc_RNA (1)...(19): siRNA sense strand
caauaguacccaucaaagg

SEQ ID NO: 1845172 - RNA, 19 nt, Homo sapiens
  misc_RNA (1)...(19): siRNA sense strand
gcgccucuuuccuccauca

SEQ ID NO: 1845173 - RNA, 19 nt, Homo sapiens
  misc_RNA (1)...(19): siRNA sense strand
ccacauacagcgaggugau

SEQ ID NO: 1845174 - RNA, 19 nt, Homo sapiens
  misc_RNA (1)...(19): siRNA sense strand
ccaaccgaaccauauuuga

SEQ ID NO: 1845175 - RNA, 19 nt, Homo sapiens
  misc_RNA (1)...(19): siRNA sense strand
ucaaaggcaaagauaggaa

SEQ ID NO: 1845176 - RNA, 19 nt, Homo sapiens
  misc_RNA (1)...(19): siRNA sense strand
caaccgaaccauauuugac

SEQ ID NO: 1845177 - RNA, 19 nt, Homo sapiens
  misc_RNA (1)...(19): siRNA sense strand
aaccauauuugacagugau

SEQ ID NO: 1845178 - RNA, 19 nt, Homo sapiens
  misc_RNA (1)...(19): siRNA sense strand
cagcagaacaaugcagaga

SEQ ID NO: 1845179 - RNA, 19 nt, Homo sapiens
  misc_RNA (1)...(19): siRNA sense strand
aacagcagauggaacucaa

SEQ ID NO: 1845180 - RNA, 19 nt, Homo sapiens
  misc_RNA (1)...(19): siRNA sense strand
cagcaacucgggcaucagu

SEQ ID NO: 1845181 - RNA, 19 nt, Homo sapiens
  misc_RNA (1)...(19): siRNA sense strand
gaagagccaccuccuuacc

SEQ ID NO: 1845182 - RNA, 19 nt, Homo sapiens
  misc_RNA (1)...(19): siRNA sense strand
cccaucaaaggcaaagaua

SEQ ID NO: 1845183 - RNA, 19 nt, Homo sapiens
  misc_RNA (1)...(19): siRNA sense strand
gcaguaacgggaggaugga

SEQ ID NO: 1845184 - RNA, 19 nt, Homo sapiens
  misc_RNA (1)...(19): siRNA sense strand
acaauaguacccaucaaag

SEQ ID NO: 1845185 - RNA, 19 nt, Homo sapiens
  misc_RNA (1)...(19): siRNA sense strand
gaagauuggcaaagaguuu

SEQ ID NO: 1845186 - RNA, 19 nt, Homo sapiens
  misc_RNA (1)...(19): siRNA sense strand
aagagaagauuggcaaaga

SEQ ID NO: 1845187 - RNA, 19 nt, Homo sapiens
  misc_RNA (1)...(19): siRNA sense strand
ugauaaggauaacaagaga

SEQ ID NO: 1845188 - RNA, 19 nt, Homo sapiens
  misc_RNA (1)...(19): siRNA sense strand
uaaaagaauuguccagaga

SEQ ID NO: 1845189 - RNA, 19 nt, Homo sapiens
  misc_RNA (1)...(19): siRNA sense strand
aaagaauuguccagagaau

SEQ ID NO: 1845190 - RNA, 19 nt, Homo sapiens
  misc_RNA (1)...(19): siRNA sense strand
ccggaaaucuaaagagaag

SEQ ID NO: 1845191 - RNA, 19 nt, Homo sapiens
  misc_RNA (1)...(19): siRNA sense strand
ggcaaagaguuuaaaagaa

SEQ ID NO: 1845192 - RNA, 19 nt, Homo sapiens
  misc_RNA (1)...(19): siRNA sense strand
ggacagugacccucaacca

SEQ ID NO: 1845193 - RNA, 19 nt, Homo sapiens
  misc_RNA (1)...(19): siRNA sense strand
agaauuguccagagaauca

SEQ ID NO: 1845194 - RNA, 19 nt, Homo sapiens
  misc_RNA (1)...(19): siRNA sense strand
gagaagauuggcaaagagu

SEQ ID NO: 1845195 - RNA, 19 nt, Homo sapiens
  misc_RNA (1)...(19): siRNA sense strand
ucaguugugauaaggauaa

SEQ ID NO: 1845196 - RNA, 19 nt, Homo sapiens
  misc_RNA (1)...(19): siRNA sense strand
aaggauaacaagagauuug

SEQ ID NO: 1845197 - RNA, 19 nt, Homo sapiens
  misc_RNA (1)...(19): siRNA sense strand
uaaagagaagauuggcaaa

SEQ ID NO: 1845198 - RNA, 19 nt, Homo sapiens
  misc_RNA (1)...(19): siRNA sense strand
gugauaaggauaacaagag

SEQ ID NO: 1845199 - RNA, 19 nt, Homo sapiens
  misc_RNA (1)...(19): siRNA sense strand
ccuuugacaucaguuguga

SEQ ID NO: 1845200 - RNA, 19 nt, Homo sapiens
  misc_RNA (1)...(19): siRNA sense strand
aagauuggcaaagaguuua

SEQ ID NO: 1845201 - RNA, 19 nt, Homo sapiens
  misc_RNA (1)...(19): siRNA sense strand
agagaagauuggcaaagag

SEQ ID NO: 1845202 - RNA, 19 nt, Homo sapiens
  misc_RNA (1)...(19): siRNA sense strand
uuccggaaaucuaaagaga

SEQ ID NO: 1845203 - RNA, 19 nt, Homo sapiens
  misc_RNA (1)...(19): siRNA sense strand
ccugcugggugauuucuuc

SEQ ID NO: 1845204 - RNA, 19 nt, Homo sapiens
  misc_RNA (1)...(19): siRNA sense strand
cagcgguccucggaugcua

SEQ ID NO: 1845205 - RNA, 19 nt, Homo sapiens
  misc_RNA (1)...(19): siRNA sense strand
gcagucaccagaggauugu

SEQ ID NO: 1845206 - RNA, 19 nt, Homo sapiens
  misc_RNA (1)...(19): siRNA sense strand
ccagaggauugugacuuca

SEQ ID NO: 1845207 - RNA, 19 nt, Homo sapiens
  misc_RNA (1)...(19): siRNA sense strand
accagaggauugugacuuc

SEQ ID NO: 1845208 - RNA, 19 nt, Homo sapiens
  misc_RNA (1)...(19): siRNA sense strand
ccucggaugcuaaccucua

SEQ ID NO: 1845209 - RNA, 19 nt, Homo sapiens
  misc_RNA (1)...(19): siRNA sense strand
gggcuccuuugacaucagu

SEQ ID NO: 1845210 - RNA, 19 nt, Homo sapiens
  misc_RNA (1)...(19): siRNA sense strand
gauaaggauaacaagagau

SEQ ID NO: 1845211 - RNA, 19 nt, Homo sapiens
  misc_RNA (1)...(19): siRNA sense strand
gaaggacgggcuggugaag

SEQ ID NO: 1845212 - RNA, 19 nt, Homo sapiens
  misc_RNA (1)...(19): siRNA sense strand
agacauaccuuuguuggaa

SEQ ID NO: 1845213 - RNA, 19 nt, Homo sapiens
  misc_RNA (1)...(19): siRNA sense strand
caaauuauccggaagacuu

SEQ ID NO: 1845214 - RNA, 19 nt, Homo sapiens
  misc_RNA (1)...(19): siRNA sense strand
ggaagacauuaauuugaug

SEQ ID NO: 1845215 - RNA, 19 nt, Homo sapiens
  misc_RNA (1)...(19): siRNA sense strand
agacauggcuuuguuggaa

SEQ ID NO: 1845216 - RNA, 19 nt, Homo sapiens
  misc_RNA (1)...(19): siRNA sense strand
agacauggcuuuguuggaa

SEQ ID NO: 1845217 - RNA, 19 nt, Homo sapiens
  misc_RNA (1)...(19): siRNA sense strand
caaguaggcuggaagacau

SEQ ID NO: 1845218 - RNA, 19 nt, Homo sapiens
  misc_RNA (1)...(19): siRNA sense strand
agacguaccuuuguuggaa

SEQ ID NO: 1845219 - RNA, 19 nt, Homo sapiens
  misc_RNA (1)...(19): siRNA sense strand
agacauauauuggcuggaa

SEQ ID NO: 1845220 - RNA, 19 nt, Homo sapiens
  misc_RNA (1)...(19): siRNA sense strand
cggaagacuuggauuguug

SEQ ID NO: 1845221 - RNA, 19 nt, Homo sapiens
  misc_RNA (1)...(19): siRNA sense strand
agacguaccuuuguuggaa

SEQ ID NO: 1845222 - RNA, 19 nt, Homo sapiens
  misc_RNA (1)...(19): siRNA sense strand
agacguaccuuuguuggaa

SEQ ID NO: 1845223 - RNA, 19 nt, Homo sapiens
  misc_RNA (1)...(19): siRNA sense strand
agacguggaucuucaggaa

SEQ ID NO: 1845224 - RNA, 19 nt, Homo sapiens
  misc_RNA (1)...(19): siRNA sense strand
uggaagacauggcuuuguu

SEQ ID NO: 1845225 - RNA, 19 nt, Homo sapiens
  misc_RNA (1)...(19): siRNA sense strand
uggaagacauggcuuuguu

SEQ ID NO: 1845226 - RNA, 19 nt, Homo sapiens
  misc_RNA (1)...(19): siRNA sense strand
ggaagacguaccuuuguug

SEQ ID NO: 1845227 - RNA, 19 nt, Homo sapiens
  misc_RNA (1)...(19): siRNA sense strand
uaagggaagacaaggauuu

SEQ ID NO: 1845228 - RNA, 19 nt, Homo sapiens
  misc_RNA (1)...(19): siRNA sense strand
ggaagacguaccuuuguug

SEQ ID NO: 1845229 - RNA, 19 nt, Homo sapiens
  misc_RNA (1)...(19): siRNA sense strand
ggaagacguaccuuuguug

SEQ ID NO: 1845230 - RNA, 19 nt, Homo sapiens
  misc_RNA (1)...(19): siRNA sense strand
ucaggaagacccaaauuau

SEQ ID NO: 1845231 - RNA, 19 nt, Homo sapiens
  misc_RNA (1)...(19): siRNA sense strand
gcuggaagacauuaauuug

SEQ ID NO: 1845232 - RNA, 19 nt, Homo sapiens
  misc_RNA (1)...(19): siRNA sense strand
ggagguuacuggaagacau

SEQ ID NO: 1845233 - RNA, 19 nt, Homo sapiens
  misc_RNA (1)...(19): siRNA sense strand
uggaagacauaccuuuguu

SEQ ID NO: 1845234 - RNA, 19 nt, Homo sapiens
  misc_RNA (1)...(19): siRNA sense strand
ggaagacauaccuuuguug

SEQ ID NO: 1845235 - RNA, 19 nt, Homo sapiens
  misc_RNA (1)...(19): siRNA sense strand
uggaagaccugaggccauu

SEQ ID NO: 1845236 - RNA, 19 nt, Homo sapiens
  misc_RNA (1)...(19): siRNA sense strand
uggaagaccuggauuuggu

SEQ ID NO: 1845237 - RNA, 19 nt, Homo sapiens
  misc_RNA (1)...(19): siRNA sense strand
ggaagacauggcuuuguug

SEQ ID NO: 1845238 - RNA, 19 nt, Homo sapiens
  misc_RNA (1)...(19): siRNA sense strand
ggaagacauggcuuuguug

SEQ ID NO: 1845239 - RNA, 19 nt, Homo sapiens
  misc_RNA (1)...(19): siRNA sense strand
uggaagacguaccuuuguu

SEQ ID NO: 1845240 - RNA, 19 nt, Homo sapiens
  misc_RNA (1)...(19): siRNA sense strand
uggaagacguaccuuuguu

SEQ ID NO: 1845241 - RNA, 19 nt, Homo sapiens
  misc_RNA (1)...(19): siRNA sense strand
uggaagacguaccuuuguu

SEQ ID NO: 1845242 - RNA, 19 nt, Homo sapiens
  misc_RNA (1)...(19): siRNA sense strand
agacguggauuugcuggaa

SEQ ID NO: 1845243 - RNA, 19 nt, Homo sapiens
  misc_RNA (1)...(19): siRNA sense strand
agacguagauuuucaggaa

SEQ ID NO: 1845244 - RNA, 19 nt, Homo sapiens
  misc_RNA (1)...(19): siRNA sense strand
ugagggaagacaaggauuu

SEQ ID NO: 1845245 - RNA, 19 nt, Homo sapiens
  misc_RNA (1)...(19): siRNA sense strand
agauguggauugacuggaa

SEQ ID NO: 1845246 - RNA, 19 nt, Homo sapiens
  misc_RNA (1)...(19): siRNA sense strand
agacaaggauuuucuggaa

SEQ ID NO: 1845247 - RNA, 19 nt, Homo sapiens
  misc_RNA (1)...(19): siRNA sense strand
ggauuugguggaagacgua

SEQ ID NO: 1845248 - RNA, 19 nt, Homo sapiens
  misc_RNA (1)...(19): siRNA sense strand
cggaagauguggauugacu

SEQ ID NO: 1845249 - RNA, 19 nt, Homo sapiens
  misc_RNA (1)...(19): siRNA sense strand
agacauggauuuucuggaa

SEQ ID NO: 1845250 - RNA, 19 nt, Homo sapiens
  misc_RNA (1)...(19): siRNA sense strand
agacauggauuuucuggaa

SEQ ID NO: 1845251 - RNA, 19 nt, Homo sapiens
  misc_RNA (1)...(19): siRNA sense strand
agacaaggauuuucuggaa

SEQ ID NO: 1845252 - RNA, 19 nt, Homo sapiens
  misc_RNA (1)...(19): siRNA sense strand
guuggaagacguaccuuug

SEQ ID NO: 1845253 - RNA, 19 nt, Homo sapiens
  misc_RNA (1)...(19): siRNA sense strand
ccggaagacuuggauuguu

SEQ ID NO: 1845254 - RNA, 19 nt, Homo sapiens
  misc_RNA (1)...(19): siRNA sense strand
guuggaagacguaccuuug

SEQ ID NO: 1845255 - RNA, 19 nt, Homo sapiens
  misc_RNA (1)...(19): siRNA sense strand
caggaagacccaaauuauc

SEQ ID NO: 1845256 - RNA, 19 nt, Homo sapiens
  misc_RNA (1)...(19): siRNA sense strand
ggcuggaagacauuaauuu

SEQ ID NO: 1845257 - RNA, 19 nt, Homo sapiens
  misc_RNA (1)...(19): siRNA sense strand
uuucggaagcuauggauuu

SEQ ID NO: 1845258 - RNA, 19 nt, Homo sapiens
  misc_RNA (1)...(19): siRNA sense strand
gguuggaagacguggauuu

SEQ ID NO: 1845259 - RNA, 19 nt, Homo sapiens
  misc_RNA (1)...(19): siRNA sense strand
gauggaagacauggcuuug

SEQ ID NO: 1845260 - RNA, 19 nt, Homo sapiens
  misc_RNA (1)...(19): siRNA sense strand
agaccuggauuugguggaa

SEQ ID NO: 1845261 - RNA, 19 nt, Homo sapiens
  misc_RNA (1)...(19): siRNA sense strand
guugggaagacguggauuu

SEQ ID NO: 1845262 - RNA, 19 nt, Homo sapiens
  misc_RNA (1)...(19): siRNA sense strand
cauuggaagauguggauuu

SEQ ID NO: 1845263 - RNA, 19 nt, Homo sapiens
  misc_RNA (1)...(19): siRNA sense strand
cggaagcuauggauuugag

SEQ ID NO: 1845264 - RNA, 19 nt, Homo sapiens
  misc_RNA (1)...(19): siRNA sense strand
agacacaaguaggcuggaa

SEQ ID NO: 1845265 - RNA, 19 nt, Homo sapiens
  misc_RNA (1)...(19): siRNA sense strand
gacuggaagaccuggauuu

SEQ ID NO: 1845266 - RNA, 19 nt, Homo sapiens
  misc_RNA (1)...(19): siRNA sense strand
gggaagacguggauuuucu

SEQ ID NO: 1845267 - RNA, 19 nt, Homo sapiens
  misc_RNA (1)...(19): siRNA sense strand
uucaggaagacccaaauua

SEQ ID NO: 1845268 - RNA, 19 nt, Homo sapiens
  misc_RNA (1)...(19): siRNA sense strand
uggaagcuauagauuuaag

SEQ ID NO: 1845269 - RNA, 19 nt, Homo sapiens
  misc_RNA (1)...(19): siRNA sense strand
ucaggaagacauauauugg

SEQ ID NO: 1845270 - RNA, 19 nt, Homo sapiens
  misc_RNA (1)...(19): siRNA sense strand
gagguuacuggaagacaug

SEQ ID NO: 1845271 - RNA, 19 nt, Homo sapiens
  misc_RNA (1)...(19): siRNA sense strand
ucuggaagacuggagguua

SEQ ID NO: 1845272 - RNA, 19 nt, Homo sapiens
  misc_RNA (1)...(19): siRNA sense strand
guuggaagacauaccuuug

SEQ ID NO: 1845273 - RNA, 19 nt, Homo sapiens
  misc_RNA (1)...(19): siRNA sense strand
cuggaagacauuaauuuga

SEQ ID NO: 1845274 - RNA, 19 nt, Homo sapiens
  misc_RNA (1)...(19): siRNA sense strand
agacguggauuuucuggaa

SEQ ID NO: 1845275 - RNA, 19 nt, Homo sapiens
  misc_RNA (1)...(19): siRNA sense strand
agacguggauuuucuggaa

SEQ ID NO: 1845276 - RNA, 19 nt, Homo sapiens
  misc_RNA (1)...(19): siRNA sense strand
guuggaagacguggauuug

SEQ ID NO: 1845277 - RNA, 19 nt, Homo sapiens
  misc_RNA (1)...(19): siRNA sense strand
acacaaguaggcuggaaga

SEQ ID NO: 1845278 - RNA, 19 nt, Homo sapiens
  misc_RNA (1)...(19): siRNA sense strand
uccggaagauguggauuga

SEQ ID NO: 1845279 - RNA, 19 nt, Homo sapiens
  misc_RNA (1)...(19): siRNA sense strand
gaagaccugaggccauugg

SEQ ID NO: 1845280 - RNA, 19 nt, Homo sapiens
  misc_RNA (1)...(19): siRNA sense strand
guuggaagacguggacuug

SEQ ID NO: 1845281 - RNA, 19 nt, Homo sapiens
  misc_RNA (1)...(19): siRNA sense strand
ugauggaagacauggcuuu

SEQ ID NO: 1845282 - RNA, 19 nt, Homo sapiens
  misc_RNA (1)...(19): siRNA sense strand
ucuggaagacguaccuuug

SEQ ID NO: 1845283 - RNA, 19 nt, Homo sapiens
  misc_RNA (1)...(19): siRNA sense strand
uggaagacguggauuugcu

SEQ ID NO: 1845284 - RNA, 19 nt, Homo sapiens
  misc_RNA (1)...(19): siRNA sense strand
cuauagauuuaagggaaga

SEQ ID NO: 1845285 - RNA, 19 nt, Homo sapiens
  misc_RNA (1)...(19): siRNA sense strand
acaaggauuuucuggaaga

SEQ ID NO: 1845286 - RNA, 19 nt, Homo sapiens
  misc_RNA (1)...(19): siRNA sense strand
acauaccuuuguuggaaga

SEQ ID NO: 1845287 - RNA, 19 nt, Homo sapiens
  misc_RNA (1)...(19): siRNA sense strand
acaaggauuuucuggaaga

SEQ ID NO: 1845288 - RNA, 19 nt, Homo sapiens
  misc_RNA (1)...(19): siRNA sense strand
acaaguaggcuggaagaca

SEQ ID NO: 1845289 - RNA, 19 nt, Homo sapiens
  misc_RNA (1)...(19): siRNA sense strand
acauggcuuuguuggaaga

SEQ ID NO: 1845290 - RNA, 19 nt, Homo sapiens
  misc_RNA (1)...(19): siRNA sense strand
uggaagacguggacuugcu

SEQ ID NO: 1845291 - RNA, 19 nt, Homo sapiens
  misc_RNA (1)...(19): siRNA sense strand
acauggcuuuguuggaaga

SEQ ID NO: 1845292 - RNA, 19 nt, Homo sapiens
  misc_RNA (1)...(19): siRNA sense strand
aaacaaacgucacacauga

SEQ ID NO: 1845293 - RNA, 19 nt, Homo sapiens
  misc_RNA (1)...(19): siRNA sense strand
ggugacagauggcuugaua

SEQ ID NO: 1845294 - RNA, 19 nt, Homo sapiens
  misc_RNA (1)...(19): siRNA sense strand
gaaaccagaccuuaaacua

SEQ ID NO: 1845295 - RNA, 19 nt, Homo sapiens
  misc_RNA (1)...(19): siRNA sense strand
gagaagacacacaacuuua

SEQ ID NO: 1845296 - RNA, 19 nt, Homo sapiens
  misc_RNA (1)...(19): siRNA sense strand
ucaagaaaguguacuguug

SEQ ID NO: 1845297 - RNA, 19 nt, Homo sapiens
  misc_RNA (1)...(19): siRNA sense strand
gagggugccuacauccuua

SEQ ID NO: 1845298 - RNA, 19 nt, Homo sapiens
  misc_RNA (1)...(19): siRNA sense strand
ccaagcacguucccaauga

SEQ ID NO: 1845299 - RNA, 19 nt, Homo sapiens
  misc_RNA (1)...(19): siRNA sense strand
gacaaccacuucaauuaug

SEQ ID NO: 1845300 - RNA, 19 nt, Homo sapiens
  misc_RNA (1)...(19): siRNA sense strand
ucaagaggaucaagaaagu

SEQ ID NO: 1845301 - RNA, 19 nt, Homo sapiens
  misc_RNA (1)...(19): siRNA sense strand
gaagagguuugagucgauu

SEQ ID NO: 1845302 - RNA, 19 nt, Homo sapiens
  misc_RNA (1)...(19): siRNA sense strand
ugauaacacuguacauaga

SEQ ID NO: 1845303 - RNA, 19 nt, Homo sapiens
  misc_RNA (1)...(19): siRNA sense strand
cgauauaucugccaauguc

SEQ ID NO: 1845304 - RNA, 19 nt, Homo sapiens
  misc_RNA (1)...(19): siRNA sense strand
gaaacccuccgguaccuaa

SEQ ID NO: 1845305 - RNA, 19 nt, Homo sapiens
  misc_RNA (1)...(19): siRNA sense strand
ucacauaugauaccuauuc

SEQ ID NO: 1845306 - RNA, 19 nt, Homo sapiens
  misc_RNA (1)...(19): siRNA sense strand
gaagaauaccagccuccua

SEQ ID NO: 1845307 - RNA, 19 nt, Homo sapiens
  misc_RNA (1)...(19): siRNA sense strand
ugaccacccugcaugauau

SEQ ID NO: 1845308 - RNA, 19 nt, Homo sapiens
  misc_RNA (1)...(19): siRNA sense strand
cgacaaccacuucaauuau

SEQ ID NO: 1845309 - RNA, 19 nt, Homo sapiens
  misc_RNA (1)...(19): siRNA sense strand
caacuaaccccaucuauga

SEQ ID NO: 1845310 - RNA, 19 nt, Homo sapiens
  misc_RNA (1)...(19): siRNA sense strand
gaauaccagccuccuauau

SEQ ID NO: 1845311 - RNA, 19 nt, Homo sapiens
  misc_RNA (1)...(19): siRNA sense strand
ugagaagacacacaacuuu

SEQ ID NO: 1845312 - RNA, 19 nt, Homo sapiens
  misc_RNA (1)...(19): siRNA sense strand
gauaacacuguacauagaa

SEQ ID NO: 1845313 - RNA, 19 nt, Homo sapiens
  misc_RNA (1)...(19): siRNA sense strand
cgaagacguuuuauucuaa

SEQ ID NO: 1845314 - RNA, 19 nt, Homo sapiens
  misc_RNA (1)...(19): siRNA sense strand
ucacugaacacauugaaga

SEQ ID NO: 1845315 - RNA, 19 nt, Homo sapiens
  misc_RNA (1)...(19): siRNA sense strand
agaagacacacaacuuuaa

SEQ ID NO: 1845316 - RNA, 19 nt, Homo sapiens
  misc_RNA (1)...(19): siRNA sense strand
gaaauugaagcaagaggau

SEQ ID NO: 1845317 - RNA, 19 nt, Homo sapiens
  misc_RNA (1)...(19): siRNA sense strand
aaacgucacacaugaagaa

SEQ ID NO: 1845318 - RNA, 19 nt, Homo sapiens
  misc_RNA (1)...(19): siRNA sense strand
gauugaacguacacaaaca

SEQ ID NO: 1845319 - RNA, 19 nt, Homo sapiens
  misc_RNA (1)...(19): siRNA sense strand
acaaccacuucaauuauga

SEQ ID NO: 1845320 - RNA, 19 nt, Homo sapiens
  misc_RNA (1)...(19): siRNA sense strand
gaagacacacaacuuuaag

SEQ ID NO: 1845321 - RNA, 19 nt, Homo sapiens
  misc_RNA (1)...(19): siRNA sense strand
ugacagagauggugaaaag

SEQ ID NO: 1845322 - RNA, 19 nt, Homo sapiens
  misc_RNA (1)...(19): siRNA sense strand
ucuaugaacacauuggaua

SEQ ID NO: 1845323 - RNA, 19 nt, Homo sapiens
  misc_RNA (1)...(19): siRNA sense strand
cggaaggccuuuacagagu

SEQ ID NO: 1845324 - RNA, 19 nt, Homo sapiens
  misc_RNA (1)...(19): siRNA sense strand
acgacaaccacuucaauua

SEQ ID NO: 1845325 - RNA, 19 nt, Homo sapiens
  misc_RNA (1)...(19): siRNA sense strand
caacgacaaccacuucaau

SEQ ID NO: 1845326 - RNA, 19 nt, Homo sapiens
  misc_RNA (1)...(19): siRNA sense strand
gaacacacagcgguggaaa

SEQ ID NO: 1845327 - RNA, 19 nt, Homo sapiens
  misc_RNA (1)...(19): siRNA sense strand
gugccuacauccuuagaga

SEQ ID NO: 1845328 - RNA, 19 nt, Homo sapiens
  misc_RNA (1)...(19): siRNA sense strand
caagaaaguguacuguugu

SEQ ID NO: 1845329 - RNA, 19 nt, Homo sapiens
  misc_RNA (1)...(19): siRNA sense strand
aaagaucuccucccugguu

SEQ ID NO: 1845330 - RNA, 19 nt, Homo sapiens
  misc_RNA (1)...(19): siRNA sense strand
aaccagaccuuaaacuaca

SEQ ID NO: 1845331 - RNA, 19 nt, Homo sapiens
  misc_RNA (1)...(19): siRNA sense strand
acagauggcuugauaacac

SEQ ID NO: 1845332 - RNA, 19 nt, Homo sapiens
  misc_RNA (1)...(19): siRNA sense strand
cuggagcccuuaaacugua

SEQ ID NO: 1845333 - RNA, 19 nt, Homo sapiens
  misc_RNA (1)...(19): siRNA sense strand
cauaugcauucgggaaauu

SEQ ID NO: 1845334 - RNA, 19 nt, Homo sapiens
  misc_RNA (1)...(19): siRNA sense strand
caugauaugcgguaccaaa

SEQ ID NO: 1845335 - RNA, 19 nt, Homo sapiens
  misc_RNA (1)...(19): siRNA sense strand
ggauaugccacccuacuca

SEQ ID NO: 1845336 - RNA, 19 nt, Homo sapiens
  misc_RNA (1)...(19): siRNA sense strand
cauaugauaccuauuccaa

SEQ ID NO: 1845337 - RNA, 19 nt, Homo sapiens
  misc_RNA (1)...(19): siRNA sense strand
aauugaagcaagaggauua

SEQ ID NO: 1845338 - RNA, 19 nt, Homo sapiens
  misc_RNA (1)...(19): siRNA sense strand
ggagggugccuacauccuu

SEQ ID NO: 1845339 - RNA, 19 nt, Homo sapiens
  misc_RNA (1)...(19): siRNA sense strand
gccgauauaucugccaaug

SEQ ID NO: 1845340 - RNA, 19 nt, Homo sapiens
  misc_RNA (1)...(19): siRNA sense strand
ggaaaacagaccaaaauau

SEQ ID NO: 1845341 - RNA, 19 nt, Homo sapiens
  misc_RNA (1)...(19): siRNA sense strand
uauaucaguuacagcaaga

SEQ ID NO: 1845342 - RNA, 19 nt, Homo sapiens
  misc_RNA (1)...(19): siRNA sense strand
cacgcuggcucucagguuu

SEQ ID NO: 1845343 - RNA, 19 nt, Homo sapiens
  misc_RNA (1)...(19): siRNA sense strand
ccacgacgggaaacacuuu

SEQ ID NO: 1845344 - RNA, 19 nt, Homo sapiens
  misc_RNA (1)...(19): siRNA sense strand
gcccuuaaacuguauuuca

SEQ ID NO: 1845345 - RNA, 19 nt, Homo sapiens
  misc_RNA (1)...(19): siRNA sense strand
ggugguagacauaugcauu

SEQ ID NO: 1845346 - RNA, 19 nt, Homo sapiens
  misc_RNA (1)...(19): siRNA sense strand
gguuugagucgauucauga

SEQ ID NO: 1845347 - RNA, 19 nt, Homo sapiens
  misc_RNA (1)...(19): siRNA sense strand
aaccugaucucaagaggau

SEQ ID NO: 1845348 - RNA, 19 nt, Homo sapiens
  misc_RNA (1)...(19): siRNA sense strand
gcaccucgucccaagagaa

SEQ ID NO: 1845349 - RNA, 19 nt, Homo sapiens
  misc_RNA (1)...(19): siRNA sense strand
ccuccgaugcugaagaaua

SEQ ID NO: 1845350 - RNA, 19 nt, Homo sapiens
  misc_RNA (1)...(19): siRNA sense strand
ggaagccguccaugaagug

SEQ ID NO: 1845351 - RNA, 19 nt, Homo sapiens
  misc_RNA (1)...(19): siRNA sense strand
gugcucagacuguggauug

SEQ ID NO: 1845352 - RNA, 19 nt, Homo sapiens
  misc_RNA (1)...(19): siRNA sense strand
agaagagguuugagucgau

SEQ ID NO: 1845353 - RNA, 19 nt, Homo sapiens
  misc_RNA (1)...(19): siRNA sense strand
gccuacauccuuagagaaa

SEQ ID NO: 1845354 - RNA, 19 nt, Homo sapiens
  misc_RNA (1)...(19): siRNA sense strand
ccaucccugucaucacaua

SEQ ID NO: 1845355 - RNA, 19 nt, Homo sapiens
  misc_RNA (1)...(19): siRNA sense strand
gacauaugcauucgggaaa

SEQ ID NO: 1845356 - RNA, 19 nt, Homo sapiens
  misc_RNA (1)...(19): siRNA sense strand
ucagagacccaugguggua

SEQ ID NO: 1845357 - RNA, 19 nt, Homo sapiens
  misc_RNA (1)...(19): siRNA sense strand
guccuccgaugcugaagaa

SEQ ID NO: 1845358 - RNA, 19 nt, Homo sapiens
  misc_RNA (1)...(19): siRNA sense strand
aagaauaccagccuccuau

SEQ ID NO: 1845359 - RNA, 19 nt, Homo sapiens
  misc_RNA (1)...(19): siRNA sense strand
gaagcaagaggauuaaaau

SEQ ID NO: 1845360 - RNA, 19 nt, Homo sapiens
  misc_RNA (1)...(19): siRNA sense strand
aaacaaaagcugccgagua

SEQ ID NO: 1845361 - RNA, 19 nt, Homo sapiens
  misc_RNA (1)...(19): siRNA sense strand
gcaggcggaugagcuucuu

SEQ ID NO: 1845362 - RNA, 19 nt, Homo sapiens
  misc_RNA (1)...(19): siRNA sense strand
cacuguacauagaaacaaa

SEQ ID NO: 1845363 - RNA, 19 nt, Homo sapiens
  misc_RNA (1)...(19): siRNA sense strand
ggauugaacguacacaaac

SEQ ID NO: 1845364 - RNA, 19 nt, Homo sapiens
  misc_RNA (1)...(19): siRNA sense strand
cuugauaacacuguacaua

SEQ ID NO: 1845365 - RNA, 19 nt, Homo sapiens
  misc_RNA (1)...(19): siRNA sense strand
ucaauuaugagaagacaca

SEQ ID NO: 1845366 - RNA, 19 nt, Homo sapiens
  misc_RNA (1)...(19): siRNA sense strand
ggaaaccagaccuuaaacu

SEQ ID NO: 1845367 - RNA, 19 nt, Homo sapiens
  misc_RNA (1)...(19): siRNA sense strand
ugaaggcucacaacacuca

SEQ ID NO: 1845368 - RNA, 19 nt, Homo sapiens
  misc_RNA (1)...(19): siRNA sense strand
acacaacgacaaccacuuc

SEQ ID NO: 1845369 - RNA, 19 nt, Homo sapiens
  misc_RNA (1)...(19): siRNA sense strand
ggagcaggcggaugagcuu

SEQ ID NO: 1845370 - RNA, 19 nt, Homo sapiens
  misc_RNA (1)...(19): siRNA sense strand
auaccagccuccuauaugg

SEQ ID NO: 1845371 - RNA, 19 nt, Homo sapiens
  misc_RNA (1)...(19): siRNA sense strand
gaaggccuuuacagagucu

SEQ ID NO: 1845372 - RNA, 19 nt, Homo sapiens
  misc_RNA (1)...(19): siRNA sense strand
aagaaaguguacuguugug

SEQ ID NO: 1845373 - RNA, 19 nt, Homo sapiens
  misc_RNA (1)...(19): siRNA sense strand
gaucaagaaaguguacugu

SEQ ID NO: 1845374 - RNA, 19 nt, Homo sapiens
  misc_RNA (1)...(19): siRNA sense strand
aaaccagaccuuaaacuac

SEQ ID NO: 1845375 - RNA, 19 nt, Homo sapiens
  misc_RNA (1)...(19): siRNA sense strand
agaauaccagccuccuaua

SEQ ID NO: 1845376 - RNA, 19 nt, Homo sapiens
  misc_RNA (1)...(19): siRNA sense strand
acuuuaagguccacacguu

SEQ ID NO: 1845377 - RNA, 19 nt, Homo sapiens
  misc_RNA (1)...(19): siRNA sense strand
gaaggcugagcaggucuaa

SEQ ID NO: 1845378 - RNA, 19 nt, Homo sapiens
  misc_RNA (1)...(19): siRNA sense strand
ccuaaugauccaccucaaa

SEQ ID NO: 1845379 - RNA, 19 nt, Homo sapiens
  misc_RNA (1)...(19): siRNA sense strand
ugaaaaggccgauauaucu

SEQ ID NO: 1845380 - RNA, 19 nt, Homo sapiens
  misc_RNA (1)...(19): siRNA sense strand
ucgggaaauugaagcaaga

SEQ ID NO: 1845381 - RNA, 19 nt, Homo sapiens
  misc_RNA (1)...(19): siRNA sense strand
acacagcgguggaaaagau

SEQ ID NO: 1845382 - RNA, 19 nt, Homo sapiens
  misc_RNA (1)...(19): siRNA sense strand
aagcugauugugcagauuu

SEQ ID NO: 1845383 - RNA, 19 nt, Homo sapiens
  misc_RNA (1)...(19): siRNA sense strand
aauaccagccuccuauaug

SEQ ID NO: 1845384 - RNA, 19 nt, Homo sapiens
  misc_RNA (1)...(19): siRNA sense strand
ccuccuauauggaaaucau

SEQ ID NO: 1845385 - RNA, 19 nt, Homo sapiens
  misc_RNA (1)...(19): siRNA sense strand
ggugagaagagguuugagu

SEQ ID NO: 1845386 - RNA, 19 nt, Homo sapiens
  misc_RNA (1)...(19): siRNA sense strand
acgaagacguuuuauucua

SEQ ID NO: 1845387 - RNA, 19 nt, Homo sapiens
  misc_RNA (1)...(19): siRNA sense strand
uuggaaaccagaccuuaaa

SEQ ID NO: 1845388 - RNA, 19 nt, Homo sapiens
  misc_RNA (1)...(19): siRNA sense strand
cugccaaccugaucucaag

SEQ ID NO: 1845389 - RNA, 19 nt, Homo sapiens
  misc_RNA (1)...(19): siRNA sense strand
uggauugaacguacacaaa

SEQ ID NO: 1845390 - RNA, 19 nt, Homo sapiens
  misc_RNA (1)...(19): siRNA sense strand
ugacagauggcuugauaac

SEQ ID NO: 1845391 - RNA, 19 nt, Homo sapiens
  misc_RNA (1)...(19): siRNA sense strand
ccauggugguagacauaug

SEQ ID NO: 1845392 - RNA, 19 nt, Homo sapiens
  misc_RNA (1)...(19): siRNA sense strand
ggccaaagaucuacuuaua

SEQ ID NO: 1845393 - RNA, 19 nt, Homo sapiens
  misc_RNA (1)...(19): siRNA sense strand
gaagggacauuacuacuau

SEQ ID NO: 1845394 - RNA, 19 nt, Homo sapiens
  misc_RNA (1)...(19): siRNA sense strand
ggaagaaacuugauauugg

SEQ ID NO: 1845395 - RNA, 19 nt, Homo sapiens
  misc_RNA (1)...(19): siRNA sense strand
gcaaggagccaauauuaaa

SEQ ID NO: 1845396 - RNA, 19 nt, Homo sapiens
  misc_RNA (1)...(19): siRNA sense strand
ccaaagaucuacuuauaug

SEQ ID NO: 1845397 - RNA, 19 nt, Homo sapiens
  misc_RNA (1)...(19): siRNA sense strand
uggauaagcuugucaauga

SEQ ID NO: 1845398 - RNA, 19 nt, Homo sapiens
  misc_RNA (1)...(19): siRNA sense strand
gagaagagcggcugacauu

SEQ ID NO: 1845399 - RNA, 19 nt, Homo sapiens
  misc_RNA (1)...(19): siRNA sense strand
gaugacagcuuucagaagu

SEQ ID NO: 1845400 - RNA, 19 nt, Homo sapiens
  misc_RNA (1)...(19): siRNA sense strand
gaacggacuucuuggacaa

SEQ ID NO: 1845401 - RNA, 19 nt, Homo sapiens
  misc_RNA (1)...(19): siRNA sense strand
gaagagcggcugacauuug

SEQ ID NO: 1845402 - RNA, 19 nt, Homo sapiens
  misc_RNA (1)...(19): siRNA sense strand
uagggaaccuuuacucuuu

SEQ ID NO: 1845403 - RNA, 19 nt, Homo sapiens
  misc_RNA (1)...(19): siRNA sense strand
ccuugaagaugacuacuua

SEQ ID NO: 1845404 - RNA, 19 nt, Homo sapiens
  misc_RNA (1)...(19): siRNA sense strand
gcaaacagccaaucagugu

SEQ ID NO: 1845405 - RNA, 19 nt, Homo sapiens
  misc_RNA (1)...(19): siRNA sense strand
gaagagaagacaugacaga

SEQ ID NO: 1845406 - RNA, 19 nt, Homo sapiens
  misc_RNA (1)...(19): siRNA sense strand
ggacauggccacagaaaca

SEQ ID NO: 1845407 - RNA, 19 nt, Homo sapiens
  misc_RNA (1)...(19): siRNA sense strand
gccaagaucucuagcuaug

SEQ ID NO: 1845408 - RNA, 19 nt, Homo sapiens
  misc_RNA (1)...(19): siRNA sense strand
ggacauuacuacuaucaag

SEQ ID NO: 1845409 - RNA, 19 nt, Homo sapiens
  misc_RNA (1)...(19): siRNA sense strand
cgacauggcugugguagug

SEQ ID NO: 1845410 - RNA, 19 nt, Homo sapiens
  misc_RNA (1)...(19): siRNA sense strand
ggaagaugacauugagaua

SEQ ID NO: 1845411 - RNA, 19 nt, Homo sapiens
  misc_RNA (1)...(19): siRNA sense strand
uaaggcaucuggagccaaa

SEQ ID NO: 1845412 - RNA, 19 nt, Homo sapiens
  misc_RNA (1)...(19): siRNA sense strand
caacuuggccaaagaucua

SEQ ID NO: 1845413 - RNA, 19 nt, Homo sapiens
  misc_RNA (1)...(19): siRNA sense strand
agacugggaucucaacuug

SEQ ID NO: 1845414 - RNA, 19 nt, Homo sapiens
  misc_RNA (1)...(19): siRNA sense strand
cggcaaggagccaauauua

SEQ ID NO: 1845415 - RNA, 19 nt, Homo sapiens
  misc_RNA (1)...(19): siRNA sense strand
ggagaaaccuagugaugac

SEQ ID NO: 1845416 - RNA, 19 nt, Homo sapiens
  misc_RNA (1)...(19): siRNA sense strand
gaugagcgagugcugcuua

SEQ ID NO: 1845417 - RNA, 19 nt, Homo sapiens
  misc_RNA (1)...(19): siRNA sense strand
gaacuuggaccucuauuuu

SEQ ID NO: 1845418 - RNA, 19 nt, Homo sapiens
  misc_RNA (1)...(19): siRNA sense strand
ugaaggacauggccacaga

SEQ ID NO: 1845419 - RNA, 19 nt, Homo sapiens
  misc_RNA (1)...(19): siRNA sense strand
gggaagaaacuugauauug

SEQ ID NO: 1845420 - RNA, 19 nt, Homo sapiens
  misc_RNA (1)...(19): siRNA sense strand
acaauucguucuaucugua

SEQ ID NO: 1845421 - RNA, 19 nt, Homo sapiens
  misc_RNA (1)...(19): siRNA sense strand
gcaaugggaagaaacuuga

SEQ ID NO: 1845422 - RNA, 19 nt, Homo sapiens
  misc_RNA (1)...(19): siRNA sense strand
gagaagagaagacaugaca

SEQ ID NO: 1845423 - RNA, 19 nt, Homo sapiens
  misc_RNA (1)...(19): siRNA sense strand
gaugauaaccuugaagaug

SEQ ID NO: 1845424 - RNA, 19 nt, Homo sapiens
  misc_RNA (1)...(19): siRNA sense strand
gagaugcccauguuugaaa

SEQ ID NO: 1845425 - RNA, 19 nt, Homo sapiens
  misc_RNA (1)...(19): siRNA sense strand
acacaaaggauacgcaauu

SEQ ID NO: 1845426 - RNA, 19 nt, Homo sapiens
  misc_RNA (1)...(19): siRNA sense strand
caagaucucuagcuauguc

SEQ ID NO: 1845427 - RNA, 19 nt, Homo sapiens
  misc_RNA (1)...(19): siRNA sense strand
uuaaacagcugcggaaaca

SEQ ID NO: 1845428 - RNA, 19 nt, Homo sapiens
  misc_RNA (1)...(19): siRNA sense strand
agacuugacugugcaugua

SEQ ID NO: 1845429 - RNA, 19 nt, Homo sapiens
  misc_RNA (1)...(19): siRNA sense strand
aagaugacauugagauaga

SEQ ID NO: 1845430 - RNA, 19 nt, Homo sapiens
  misc_RNA (1)...(19): siRNA sense strand
augauaaccuugaagauga

SEQ ID NO: 1845431 - RNA, 19 nt, Homo sapiens
  misc_RNA (1)...(19): siRNA sense strand
ggaacuuggaccucuauuu

SEQ ID NO: 1845432 - RNA, 19 nt, Homo sapiens
  misc_RNA (1)...(19): siRNA sense strand
gaagaugacauugagauag

SEQ ID NO: 1845433 - RNA, 19 nt, Homo sapiens
  misc_RNA (1)...(19): siRNA sense strand
gacaauucguucuaucugu

SEQ ID NO: 1845434 - RNA, 19 nt, Homo sapiens
  misc_RNA (1)...(19): siRNA sense strand
cuacaaaugguuccuggua

SEQ ID NO: 1845435 - RNA, 19 nt, Homo sapiens
  misc_RNA (1)...(19): siRNA sense strand
cauuguagcagcaccuuua

SEQ ID NO: 1845436 - RNA, 19 nt, Homo sapiens
  misc_RNA (1)...(19): siRNA sense strand
acagacaggugcucggauu

SEQ ID NO: 1845437 - RNA, 19 nt, Homo sapiens
  misc_RNA (1)...(19): siRNA sense strand
gggagaaaccuagugauga

SEQ ID NO: 1845438 - RNA, 19 nt, Homo sapiens
  misc_RNA (1)...(19): siRNA sense strand
caaaggaggaggcgacaug

SEQ ID NO: 1845439 - RNA, 19 nt, Homo sapiens
  misc_RNA (1)...(19): siRNA sense strand
ggcaaggagccaauauuaa

SEQ ID NO: 1845440 - RNA, 19 nt, Homo sapiens
  misc_RNA (1)...(19): siRNA sense strand
ugauauugggcuagaauua

SEQ ID NO: 1845441 - RNA, 19 nt, Homo sapiens
  misc_RNA (1)...(19): siRNA sense strand
gaucucaacuuggccaaag

SEQ ID NO: 1845442 - RNA, 19 nt, Homo sapiens
  misc_RNA (1)...(19): siRNA sense strand
agaauagugugccugaaga

SEQ ID NO: 1845443 - RNA, 19 nt, Homo sapiens
  misc_RNA (1)...(19): siRNA sense strand
gcugugaaacucaucauug

SEQ ID NO: 1845444 - RNA, 19 nt, Homo sapiens
  misc_RNA (1)...(19): siRNA sense strand
cuacugaacggacuucuug

SEQ ID NO: 1845445 - RNA, 19 nt, Homo sapiens
  misc_RNA (1)...(19): siRNA sense strand
gcgagacaauucguucuau

SEQ ID NO: 1845446 - RNA, 19 nt, Homo sapiens
  misc_RNA (1)...(19): siRNA sense strand
cacaaaggauacgcaauug

SEQ ID NO: 1845447 - RNA, 19 nt, Homo sapiens
  misc_RNA (1)...(19): siRNA sense strand
gcaauuggauaagcuuguc

SEQ ID NO: 1845448 - RNA, 19 nt, Homo sapiens
  misc_RNA (1)...(19): siRNA sense strand
gagcgagugcugcuuauca

SEQ ID NO: 1845449 - RNA, 19 nt, Homo sapiens
  misc_RNA (1)...(19): siRNA sense strand
uugauagacucacucauug

SEQ ID NO: 1845450 - RNA, 19 nt, Homo sapiens
  misc_RNA (1)...(19): siRNA sense strand
gcagcaccuuuaccuacaa

SEQ ID NO: 1845451 - RNA, 19 nt, Homo sapiens
  misc_RNA (1)...(19): siRNA sense strand
ccagagaugcccauguuug

SEQ ID NO: 1845452 - RNA, 19 nt, Homo sapiens
  misc_RNA (1)...(19): siRNA sense strand
ucccagagaugcccauguu

SEQ ID NO: 1845453 - RNA, 19 nt, Homo sapiens
  misc_RNA (1)...(19): siRNA sense strand
gagaugacccagcacuaug

SEQ ID NO: 1845454 - RNA, 19 nt, Homo sapiens
  misc_RNA (1)...(19): siRNA sense strand
guagggaaccuuuacucuu

SEQ ID NO: 1845455 - RNA, 19 nt, Homo sapiens
  misc_RNA (1)...(19): siRNA sense strand
caucugcuuugcuguaugu

SEQ ID NO: 1845456 - RNA, 19 nt, Homo sapiens
  misc_RNA (1)...(19): siRNA sense strand
gagccaaaauuaccuguga

SEQ ID NO: 1845457 - RNA, 19 nt, Homo sapiens
  misc_RNA (1)...(19): siRNA sense strand
gcuagaauuaguacacaaa

SEQ ID NO: 1845458 - RNA, 19 nt, Homo sapiens
  misc_RNA (1)...(19): siRNA sense strand
ggaagaggaagcuuuggau

SEQ ID NO: 1845459 - RNA, 19 nt, Homo sapiens
  misc_RNA (1)...(19): siRNA sense strand
gagaauagugugccugaag

SEQ ID NO: 1845460 - RNA, 19 nt, Homo sapiens
  misc_RNA (1)...(19): siRNA sense strand
cagagaugcccauguuuga

SEQ ID NO: 1845461 - RNA, 19 nt, Homo sapiens
  misc_RNA (1)...(19): siRNA sense strand
aaacagccaaucaguguga

SEQ ID NO: 1845462 - RNA, 19 nt, Homo sapiens
  misc_RNA (1)...(19): siRNA sense strand
agaagggacauuacuacua

SEQ ID NO: 1845463 - RNA, 19 nt, Homo sapiens
  misc_RNA (1)...(19): siRNA sense strand
aaacagcugcggaaacaga

SEQ ID NO: 1845464 - RNA, 19 nt, Homo sapiens
  misc_RNA (1)...(19): siRNA sense strand
caaaggauacgcaauugag

SEQ ID NO: 1845465 - RNA, 19 nt, Homo sapiens
  misc_RNA (1)...(19): siRNA sense strand
gccaaagaucuacuuauau

SEQ ID NO: 1845466 - RNA, 19 nt, Homo sapiens
  misc_RNA (1)...(19): siRNA sense strand
gagauugcccacugaagga

SEQ ID NO: 1845467 - RNA, 19 nt, Homo sapiens
  misc_RNA (1)...(19): siRNA sense strand
agaaucagaagggacauua

SEQ ID NO: 1845468 - RNA, 19 nt, Homo sapiens
  misc_RNA (1)...(19): siRNA sense strand
ucccagacauguugaagga

SEQ ID NO: 1845469 - RNA, 19 nt, Homo sapiens
  misc_RNA (1)...(19): siRNA sense strand
gauagacucacucauugug

SEQ ID NO: 1845470 - RNA, 19 nt, Homo sapiens
  misc_RNA (1)...(19): siRNA sense strand
ucagggcucucaggaguga

SEQ ID NO: 1845471 - RNA, 19 nt, Homo sapiens
  misc_RNA (1)...(19): siRNA sense strand
acaaaugguuccugguauc

SEQ ID NO: 1845472 - RNA, 19 nt, Homo sapiens
  misc_RNA (1)...(19): siRNA sense strand
gauaagcuugucaaugaga

SEQ ID NO: 1845473 - RNA, 19 nt, Homo sapiens
  misc_RNA (1)...(19): siRNA sense strand
acaguugccuauauccuau

SEQ ID NO: 1845474 - RNA, 19 nt, Homo sapiens
  misc_RNA (1)...(19): siRNA sense strand
agggaaccuuuacucuuua

SEQ ID NO: 1845475 - RNA, 19 nt, Homo sapiens
  misc_RNA (1)...(19): siRNA sense strand
gauauugggcuagaauuag

SEQ ID NO: 1845476 - RNA, 19 nt, Homo sapiens
  misc_RNA (1)...(19): siRNA sense strand
gcaccuuuaccuacaaaug

SEQ ID NO: 1845477 - RNA, 19 nt, Homo sapiens
  misc_RNA (1)...(19): siRNA sense strand
aagagcggcugacauuugu

SEQ ID NO: 1845478 - RNA, 19 nt, Homo sapiens
  misc_RNA (1)...(19): siRNA sense strand
uagugugccugaagacuug

SEQ ID NO: 1845479 - RNA, 19 nt, Homo sapiens
  misc_RNA (1)...(19): siRNA sense strand
caaaauuaccugugacaaa

SEQ ID NO: 1845480 - RNA, 19 nt, Homo sapiens
  misc_RNA (1)...(19): siRNA sense strand
ggauaagcuugucaaugag

SEQ ID NO: 1845481 - RNA, 19 nt, Homo sapiens
  misc_RNA (1)...(19): siRNA sense strand
gccaaucagugugagaaga

SEQ ID NO: 1845482 - RNA, 19 nt, Homo sapiens
  misc_RNA (1)...(19): siRNA sense strand
cagaggauguaggcgauga

SEQ ID NO: 1845483 - RNA, 19 nt, Homo sapiens
  misc_RNA (1)...(19): siRNA sense strand
gagcggcugacauuuguug

SEQ ID NO: 1845484 - RNA, 19 nt, Homo sapiens
  misc_RNA (1)...(19): siRNA sense strand
uacaaaugguuccugguau

SEQ ID NO: 1845485 - RNA, 19 nt, Homo sapiens
  misc_RNA (1)...(19): siRNA sense strand
cgagacaauucguucuauc

SEQ ID NO: 1845486 - RNA, 19 nt, Homo sapiens
  misc_RNA (1)...(19): siRNA sense strand
gggaagaugacauugagau

SEQ ID NO: 1845487 - RNA, 19 nt, Homo sapiens
  misc_RNA (1)...(19): siRNA sense strand
gaagguuccugggagaaac

SEQ ID NO: 1845488 - RNA, 19 nt, Homo sapiens
  misc_RNA (1)...(19): siRNA sense strand
uuuguugacuuuggagaua

SEQ ID NO: 1845489 - RNA, 19 nt, Homo sapiens
  misc_RNA (1)...(19): siRNA sense strand
agaauuaguacacaaagga

SEQ ID NO: 1845490 - RNA, 19 nt, Homo sapiens
  misc_RNA (1)...(19): siRNA sense strand
uuugauagacucacucauu

SEQ ID NO: 1845491 - RNA, 19 nt, Homo sapiens
  misc_RNA (1)...(19): siRNA sense strand
aagaggaagcuuuggauga

SEQ ID NO: 1845492 - RNA, 19 nt, Homo sapiens
  misc_RNA (1)...(19): siRNA sense strand
gaugagcccugaagagauu

SEQ ID NO: 1845493 - RNA, 19 nt, Homo sapiens
  misc_RNA (1)...(19): siRNA sense strand
ggacagcucucacagaaag

SEQ ID NO: 1845494 - RNA, 19 nt, Homo sapiens
  misc_RNA (1)...(19): siRNA sense strand
gcacaagacucacacuauc

SEQ ID NO: 1845495 - RNA, 19 nt, Homo sapiens
  misc_RNA (1)...(19): siRNA sense strand
gaguggugcugaaagaaua

SEQ ID NO: 1845496 - RNA, 19 nt, Homo sapiens
  misc_RNA (1)...(19): siRNA sense strand
gaaucucccuggcaaguga

SEQ ID NO: 1845497 - RNA, 19 nt, Homo sapiens
  misc_RNA (1)...(19): siRNA sense strand
agaggaagcugcucggauu

SEQ ID NO: 1845498 - RNA, 19 nt, Homo sapiens
  misc_RNA (1)...(19): siRNA sense strand
gagcagacccugauguaug

SEQ ID NO: 1845499 - RNA, 19 nt, Homo sapiens
  misc_RNA (1)...(19): siRNA sense strand
gagaaugaaucccggaaca

SEQ ID NO: 1845500 - RNA, 19 nt, Homo sapiens
  misc_RNA (1)...(19): siRNA sense strand
ucaagaccuuuauagcuaa

SEQ ID NO: 1845501 - RNA, 19 nt, Homo sapiens
  misc_RNA (1)...(19): siRNA sense strand
cucaagaccuuuauagcua

SEQ ID NO: 1845502 - RNA, 19 nt, Homo sapiens
  misc_RNA (1)...(19): siRNA sense strand
gagaugagcccugaagaga

SEQ ID NO: 1845503 - RNA, 19 nt, Homo sapiens
  misc_RNA (1)...(19): siRNA sense strand
guucacaggugguggcauu

SEQ ID NO: 1845504 - RNA, 19 nt, Homo sapiens
  misc_RNA (1)...(19): siRNA sense strand
gaaccgggaugaagagacu

SEQ ID NO: 1845505 - RNA, 19 nt, Homo sapiens
  misc_RNA (1)...(19): siRNA sense strand
aagaauaccucacacucaa

SEQ ID NO: 1845506 - RNA, 19 nt, Homo sapiens
  misc_RNA (1)...(19): siRNA sense strand
gcaaguuccucucccucuu

SEQ ID NO: 1845507 - RNA, 19 nt, Homo sapiens
  misc_RNA (1)...(19): siRNA sense strand
ccagagcucuuggaauaug

SEQ ID NO: 1845508 - RNA, 19 nt, Homo sapiens
  misc_RNA (1)...(19): siRNA sense strand
ccccagagcucuuggaaua

SEQ ID NO: 1845509 - RNA, 19 nt, Homo sapiens
  misc_RNA (1)...(19): siRNA sense strand
agaugaaccugucaacuuc

SEQ ID NO: 1845510 - RNA, 19 nt, Homo sapiens
  misc_RNA (1)...(19): siRNA sense strand
ccagaccucuccacuaucu

SEQ ID NO: 1845511 - RNA, 19 nt, Homo sapiens
  misc_RNA (1)...(19): siRNA sense strand
guggagcccucuuugucua

SEQ ID NO: 1845512 - RNA, 19 nt, Homo sapiens
  misc_RNA (1)...(19): siRNA sense strand
gaauaccucacacucaaga

SEQ ID NO: 1845513 - RNA, 19 nt, Homo sapiens
  misc_RNA (1)...(19): siRNA sense strand
uagaugaaccugucaacuu

SEQ ID NO: 1845514 - RNA, 19 nt, Homo sapiens
  misc_RNA (1)...(19): siRNA sense strand
cuggacagcucucacagaa

SEQ ID NO: 1845515 - RNA, 19 nt, Homo sapiens
  misc_RNA (1)...(19): siRNA sense strand
ucaagaaacugcccuaccu

SEQ ID NO: 1845516 - RNA, 19 nt, Homo sapiens
  misc_RNA (1)...(19): siRNA sense strand
ccuaaagccugcacucaag

SEQ ID NO: 1845517 - RNA, 19 nt, Homo sapiens
  misc_RNA (1)...(19): siRNA sense strand
acccagaccucuccacuau

SEQ ID NO: 1845518 - RNA, 19 nt, Homo sapiens
  misc_RNA (1)...(19): siRNA sense strand
ggucaccuccaccuucuuu

SEQ ID NO: 1845519 - RNA, 19 nt, Homo sapiens
  misc_RNA (1)...(19): siRNA sense strand
gggaggagcagcaacuaga

SEQ ID NO: 1845520 - RNA, 19 nt, Homo sapiens
  misc_RNA (1)...(19): siRNA sense strand
aucaaucgcuuccucauga

SEQ ID NO: 1845521 - RNA, 19 nt, Homo sapiens
  misc_RNA (1)...(19): siRNA sense strand
ggaagauuguccaggugau

SEQ ID NO: 1845522 - RNA, 19 nt, Homo sapiens
  misc_RNA (1)...(19): siRNA sense strand
cgacgacaaaugccaauga

SEQ ID NO: 1845523 - RNA, 19 nt, Homo sapiens
  misc_RNA (1)...(19): siRNA sense strand
gcuuaugucaccaguauug

SEQ ID NO: 1845524 - RNA, 19 nt, Homo sapiens
  misc_RNA (1)...(19): siRNA sense strand
ucagcugggucauggacua

SEQ ID NO: 1845525 - RNA, 19 nt, Homo sapiens
  misc_RNA (1)...(19): siRNA sense strand
gaaugaaucccggaacaca

SEQ ID NO: 1845526 - RNA, 19 nt, Homo sapiens
  misc_RNA (1)...(19): siRNA sense strand
caaguuccucucccucuuu

SEQ ID NO: 1845527 - RNA, 19 nt, Homo sapiens
  misc_RNA (1)...(19): siRNA sense strand
gugcauaucgcaagcaugu

SEQ ID NO: 1845528 - RNA, 19 nt, Homo sapiens
  misc_RNA (1)...(19): siRNA sense strand
ggaguggugcugaaagaau

SEQ ID NO: 1845529 - RNA, 19 nt, Homo sapiens
  misc_RNA (1)...(19): siRNA sense strand
gcugaagcguguccgaauc

SEQ ID NO: 1845530 - RNA, 19 nt, Homo sapiens
  misc_RNA (1)...(19): siRNA sense strand
cagcagcaccuaccggauu

SEQ ID NO: 1845531 - RNA, 19 nt, Homo sapiens
  misc_RNA (1)...(19): siRNA sense strand
gcauaucgcaagcaugugu

SEQ ID NO: 1845532 - RNA, 19 nt, Homo sapiens
  misc_RNA (1)...(19): siRNA sense strand
gcugaaagaauaccucaca

SEQ ID NO: 1845533 - RNA, 19 nt, Homo sapiens
  misc_RNA (1)...(19): siRNA sense strand
gaguggaccaugcuuaugu

SEQ ID NO: 1845534 - RNA, 19 nt, Homo sapiens
  misc_RNA (1)...(19): siRNA sense strand
gacagcaucauccgaauca

SEQ ID NO: 1845535 - RNA, 19 nt, Homo sapiens
  misc_RNA (1)...(19): siRNA sense strand
cuuuauagcuaaggucauu

SEQ ID NO: 1845536 - RNA, 19 nt, Homo sapiens
  misc_RNA (1)...(19): siRNA sense strand
cgacagcgacgacaaaugc

SEQ ID NO: 1845537 - RNA, 19 nt, Homo sapiens
  misc_RNA (1)...(19): siRNA sense strand
uaccugaaccggaagauug

SEQ ID NO: 1845538 - RNA, 19 nt, Homo sapiens
  misc_RNA (1)...(19): siRNA sense strand
gcucuggcaucccugagau

SEQ ID NO: 1845539 - RNA, 19 nt, Homo sapiens
  misc_RNA (1)...(19): siRNA sense strand
cauccugccugucaugauc

SEQ ID NO: 1845540 - RNA, 19 nt, Homo sapiens
  misc_RNA (1)...(19): siRNA sense strand
aaagaauaccucacacuca

SEQ ID NO: 1845541 - RNA, 19 nt, Homo sapiens
  misc_RNA (1)...(19): siRNA sense strand
gggaguggaccaugcuuau

SEQ ID NO: 1845542 - RNA, 19 nt, Homo sapiens
  misc_RNA (1)...(19): siRNA sense strand
gugagaagcgcaagcugaa

SEQ ID NO: 1845543 - RNA, 19 nt, Homo sapiens
  misc_RNA (1)...(19): siRNA sense strand
gcaccucacaggccuggaa

SEQ ID NO: 1845544 - RNA, 19 nt, Homo sapiens
  misc_RNA (1)...(19): siRNA sense strand
ggguaucuaugagaaugaa

SEQ ID NO: 1845545 - RNA, 19 nt, Homo sapiens
  misc_RNA (1)...(19): siRNA sense strand
ggagaccacugaggugcau

SEQ ID NO: 1845546 - RNA, 19 nt, Homo sapiens
  misc_RNA (1)...(19): siRNA sense strand
ggugaacacagaagacuca

SEQ ID NO: 1845547 - RNA, 19 nt, Homo sapiens
  misc_RNA (1)...(19): siRNA sense strand
gagcucacaggccagauug

SEQ ID NO: 1845548 - RNA, 19 nt, Homo sapiens
  misc_RNA (1)...(19): siRNA sense strand
ugccacaaguuccuaguau

SEQ ID NO: 1845549 - RNA, 19 nt, Homo sapiens
  misc_RNA (1)...(19): siRNA sense strand
gaagauuguccaggugaug

SEQ ID NO: 1845550 - RNA, 19 nt, Homo sapiens
  misc_RNA (1)...(19): siRNA sense strand
gcccacauccugccuguca

SEQ ID NO: 1845551 - RNA, 19 nt, Homo sapiens
  misc_RNA (1)...(19): siRNA sense strand
augcuuaugucaccaguau

SEQ ID NO: 1845552 - RNA, 19 nt, Homo sapiens
  misc_RNA (1)...(19): siRNA sense strand
ggaccuggaaggcgagaug

SEQ ID NO: 1845553 - RNA, 19 nt, Homo sapiens
  misc_RNA (1)...(19): siRNA sense strand
gaggaaacgccugcucuuc

SEQ ID NO: 1845554 - RNA, 19 nt, Homo sapiens
  misc_RNA (1)...(19): siRNA sense strand
gcuuccaggugaacacaga

SEQ ID NO: 1845555 - RNA, 19 nt, Homo sapiens
  misc_RNA (1)...(19): siRNA sense strand
cuucaugccugucuuuguc

SEQ ID NO: 1845556 - RNA, 19 nt, Homo sapiens
  misc_RNA (1)...(19): siRNA sense strand
cuggucaucuucauucuca

SEQ ID NO: 1845557 - RNA, 19 nt, Homo sapiens
  misc_RNA (1)...(19): siRNA sense strand
agacucauuggaaucguua

SEQ ID NO: 1845558 - RNA, 19 nt, Homo sapiens
  misc_RNA (1)...(19): siRNA sense strand
uggaaucguuacucuaaag

SEQ ID NO: 1845559 - RNA, 19 nt, Homo sapiens
  misc_RNA (1)...(19): siRNA sense strand
cugcagcccucccucuaug

SEQ ID NO: 1845560 - RNA, 19 nt, Homo sapiens
  misc_RNA (1)...(19): siRNA sense strand
cagacucauuggaaucguu

SEQ ID NO: 1845561 - RNA, 19 nt, Homo sapiens
  misc_RNA (1)...(19): siRNA sense strand
gccacaaguuccuaguauc

SEQ ID NO: 1845562 - RNA, 19 nt, Homo sapiens
  misc_RNA (1)...(19): siRNA sense strand
gaggagcagcaacuagaug

SEQ ID NO: 1845563 - RNA, 19 nt, Homo sapiens
  misc_RNA (1)...(19): siRNA sense strand
ggaggagcagcaacuagau

SEQ ID NO: 1845564 - RNA, 19 nt, Homo sapiens
  misc_RNA (1)...(19): siRNA sense strand
cacaggugguggcauuguu

SEQ ID NO: 1845565 - RNA, 19 nt, Homo sapiens
  misc_RNA (1)...(19): siRNA sense strand
caucauccgaaucaagaaa

SEQ ID NO: 1845566 - RNA, 19 nt, Homo sapiens
  misc_RNA (1)...(19): siRNA sense strand
ucagccggauucacacaga

SEQ ID NO: 1845567 - RNA, 19 nt, Homo sapiens
  misc_RNA (1)...(19): siRNA sense strand
ccucuccacuaucugauca

SEQ ID NO: 1845568 - RNA, 19 nt, Homo sapiens
  misc_RNA (1)...(19): siRNA sense strand
cucaugaaguucuggaugu

SEQ ID NO: 1845569 - RNA, 19 nt, Homo sapiens
  misc_RNA (1)...(19): siRNA sense strand
gaaucguuacucuaaagga

SEQ ID NO: 1845570 - RNA, 19 nt, Homo sapiens
  misc_RNA (1)...(19): siRNA sense strand
aguauuggcagacucauug

SEQ ID NO: 1845571 - RNA, 19 nt, Homo sapiens
  misc_RNA (1)...(19): siRNA sense strand
ggaguggaccaugcuuaug

SEQ ID NO: 1845572 - RNA, 19 nt, Homo sapiens
  misc_RNA (1)...(19): siRNA sense strand
caccuucagugccuucauc

SEQ ID NO: 1845573 - RNA, 19 nt, Homo sapiens
  misc_RNA (1)...(19): siRNA sense strand
gacucacacuaucuucuca

SEQ ID NO: 1845574 - RNA, 19 nt, Homo sapiens
  misc_RNA (1)...(19): siRNA sense strand
guuggaauccugugagaag

SEQ ID NO: 1845575 - RNA, 19 nt, Homo sapiens
  misc_RNA (1)...(19): siRNA sense strand
ggucaucuucauucucaug

SEQ ID NO: 1845576 - RNA, 19 nt, Homo sapiens
  misc_RNA (1)...(19): siRNA sense strand
uauccaggguuggugaaga

SEQ ID NO: 1845577 - RNA, 19 nt, Homo sapiens
  misc_RNA (1)...(19): siRNA sense strand
ucauuggaaucguuacucu

SEQ ID NO: 1845578 - RNA, 19 nt, Homo sapiens
  misc_RNA (1)...(19): siRNA sense strand
ggagcagcaacuagaugaa

SEQ ID NO: 1845579 - RNA, 19 nt, Homo sapiens
  misc_RNA (1)...(19): siRNA sense strand
ggcccagugucaccaggaa

SEQ ID NO: 1845580 - RNA, 19 nt, Homo sapiens
  misc_RNA (1)...(19): siRNA sense strand
gccgaaugcuggcccuagu

SEQ ID NO: 1845581 - RNA, 19 nt, Homo sapiens
  misc_RNA (1)...(19): siRNA sense strand
gcacgagcagacccugaug

SEQ ID NO: 1845582 - RNA, 19 nt, Homo sapiens
  misc_RNA (1)...(19): siRNA sense strand
acacucaagaccuuuauag

SEQ ID NO: 1845583 - RNA, 19 nt, Homo sapiens
  misc_RNA (1)...(19): siRNA sense strand
gcggaccucuuugcacaag

SEQ ID NO: 1845584 - RNA, 19 nt, Homo sapiens
  misc_RNA (1)...(19): siRNA sense strand
ugucauuggagcagcauuu

SEQ ID NO: 1845585 - RNA, 19 nt, Homo sapiens
  misc_RNA (1)...(19): siRNA sense strand
cuucagugccuucaucuuc

SEQ ID NO: 1845586 - RNA, 19 nt, Homo sapiens
  misc_RNA (1)...(19): siRNA sense strand
cuguuguccucaucacuuu

SEQ ID NO: 1845587 - RNA, 19 nt, Homo sapiens
  misc_RNA (1)...(19): siRNA sense strand
caagaccuuuauagcuaag

SEQ ID NO: 1845588 - RNA, 19 nt, Homo sapiens
  misc_RNA (1)...(19): siRNA sense strand
caucaaucgcuuccucaug

SEQ ID NO: 1845589 - RNA, 19 nt, Homo sapiens
  misc_RNA (1)...(19): siRNA sense strand
auuggaaucguuacucuaa

SEQ ID NO: 1845590 - RNA, 19 nt, Homo sapiens
  misc_RNA (1)...(19): siRNA sense strand
ugguggagcggaccucuuu

SEQ ID NO: 1845591 - RNA, 19 nt, Homo sapiens
  misc_RNA (1)...(19): siRNA sense strand
agaccucuccacuaucuga

SEQ ID NO: 1845592 - RNA, 19 nt, Homo sapiens
  misc_RNA (1)...(19): siRNA sense strand
gaaagcaggucuauaaaug

SEQ ID NO: 1845593 - RNA, 19 nt, Homo sapiens
  misc_RNA (1)...(19): siRNA sense strand
gaacgcaccuuaauaaauc

SEQ ID NO: 1845594 - RNA, 19 nt, Homo sapiens
  misc_RNA (1)...(19): siRNA sense strand
gcaaauacaaucacucuaa

SEQ ID NO: 1845595 - RNA, 19 nt, Homo sapiens
  misc_RNA (1)...(19): siRNA sense strand
guaaaccucugaaggaauu

SEQ ID NO: 1845596 - RNA, 19 nt, Homo sapiens
  misc_RNA (1)...(19): siRNA sense strand
ucagaaagauggcauauca

SEQ ID NO: 1845597 - RNA, 19 nt, Homo sapiens
  misc_RNA (1)...(19): siRNA sense strand
gaugaacgcaccuuaauaa

SEQ ID NO: 1845598 - RNA, 19 nt, Homo sapiens
  misc_RNA (1)...(19): siRNA sense strand
ggucacauuugcauuguuu

SEQ ID NO: 1845599 - RNA, 19 nt, Homo sapiens
  misc_RNA (1)...(19): siRNA sense strand
ccaggaaacguaaauauuu

SEQ ID NO: 1845600 - RNA, 19 nt, Homo sapiens
  misc_RNA (1)...(19): siRNA sense strand
guacagaaaugacuacacu

SEQ ID NO: 1845601 - RNA, 19 nt, Homo sapiens
  misc_RNA (1)...(19): siRNA sense strand
ugaauacuaucuuggguuu

SEQ ID NO: 1845602 - RNA, 19 nt, Homo sapiens
  misc_RNA (1)...(19): siRNA sense strand
gaacaagcgcugcaaauac

SEQ ID NO: 1845603 - RNA, 19 nt, Homo sapiens
  misc_RNA (1)...(19): siRNA sense strand
guacuuacgacuucauuaa

SEQ ID NO: 1845604 - RNA, 19 nt, Homo sapiens
  misc_RNA (1)...(19): siRNA sense strand
gaacuuacuguccugauug

SEQ ID NO: 1845605 - RNA, 19 nt, Homo sapiens
  misc_RNA (1)...(19): siRNA sense strand
gaacaucacaguacauugg

SEQ ID NO: 1845606 - RNA, 19 nt, Homo sapiens
  misc_RNA (1)...(19): siRNA sense strand
uagagcaccugaaguuauu

SEQ ID NO: 1845607 - RNA, 19 nt, Homo sapiens
  misc_RNA (1)...(19): siRNA sense strand
ugacaaggauugggauuau

SEQ ID NO: 1845608 - RNA, 19 nt, Homo sapiens
  misc_RNA (1)...(19): siRNA sense strand
cggcagauauguuucaaga

SEQ ID NO: 1845609 - RNA, 19 nt, Homo sapiens
  misc_RNA (1)...(19): siRNA sense strand
ugacuacacucaaggaugu

SEQ ID NO: 1845610 - RNA, 19 nt, Homo sapiens
  misc_RNA (1)...(19): siRNA sense strand
gcaggucuauaaaugagaa

SEQ ID NO: 1845611 - RNA, 19 nt, Homo sapiens
  misc_RNA (1)...(19): siRNA sense strand
ggaaagcaggucuauaaau

SEQ ID NO: 1845612 - RNA, 19 nt, Homo sapiens
  misc_RNA (1)...(19): siRNA sense strand
caugaaagccgguaucaga

SEQ ID NO: 1845613 - RNA, 19 nt, Homo sapiens
  misc_RNA (1)...(19): siRNA sense strand
guaaggagcauuuagcaau

SEQ ID NO: 1845614 - RNA, 19 nt, Homo sapiens
  misc_RNA (1)...(19): siRNA sense strand
gacgcuacauugaugagua

SEQ ID NO: 1845615 - RNA, 19 nt, Homo sapiens
  misc_RNA (1)...(19): siRNA sense strand
gguagaaguggaagaagua

SEQ ID NO: 1845616 - RNA, 19 nt, Homo sapiens
  misc_RNA (1)...(19): siRNA sense strand
guagacauguagcaguaaa

SEQ ID NO: 1845617 - RNA, 19 nt, Homo sapiens
  misc_RNA (1)...(19): siRNA sense strand
uagcaagucuucugguaga

SEQ ID NO: 1845618 - RNA, 19 nt, Homo sapiens
  misc_RNA (1)...(19): siRNA sense strand
gaaggaagagaucacauag

SEQ ID NO: 1845619 - RNA, 19 nt, Homo sapiens
  misc_RNA (1)...(19): siRNA sense strand
gagaaagauuaucauaguc

SEQ ID NO: 1845620 - RNA, 19 nt, Homo sapiens
  misc_RNA (1)...(19): siRNA sense strand
ugaaggaauuuaugcuuuc

SEQ ID NO: 1845621 - RNA, 19 nt, Homo sapiens
  misc_RNA (1)...(19): siRNA sense strand
caacauaugaugacgaaca

SEQ ID NO: 1845622 - RNA, 19 nt, Homo sapiens
  misc_RNA (1)...(19): siRNA sense strand
uauugggacuuaguacuua

SEQ ID NO: 1845623 - RNA, 19 nt, Homo sapiens
  misc_RNA (1)...(19): siRNA sense strand
gaauuuaugcuuucucaag

SEQ ID NO: 1845624 - RNA, 19 nt, Homo sapiens
  misc_RNA (1)...(19): siRNA sense strand
cugaaggaauuuaugcuuu

SEQ ID NO: 1845625 - RNA, 19 nt, Homo sapiens
  misc_RNA (1)...(19): siRNA sense strand
uaucuuggguuuaccguau

SEQ ID NO: 1845626 - RNA, 19 nt, Homo sapiens
  misc_RNA (1)...(19): siRNA sense strand
guacauugguaucuacaag

SEQ ID NO: 1845627 - RNA, 19 nt, Homo sapiens
  misc_RNA (1)...(19): siRNA sense strand
gaaguggaagaaguaguua

SEQ ID NO: 1845628 - RNA, 19 nt, Homo sapiens
  misc_RNA (1)...(19): siRNA sense strand
ugauagccauuauuuggaa

SEQ ID NO: 1845629 - RNA, 19 nt, Homo sapiens
  misc_RNA (1)...(19): siRNA sense strand
gagcaucauggucacauuu

SEQ ID NO: 1845630 - RNA, 19 nt, Homo sapiens
  misc_RNA (1)...(19): siRNA sense strand
gaucauaaagcgggaggua

SEQ ID NO: 1845631 - RNA, 19 nt, Homo sapiens
  misc_RNA (1)...(19): siRNA sense strand
gaagagucaccgaaggaaa

SEQ ID NO: 1845632 - RNA, 19 nt, Homo sapiens
  misc_RNA (1)...(19): siRNA sense strand
agaaggaagagaucacaua

SEQ ID NO: 1845633 - RNA, 19 nt, Homo sapiens
  misc_RNA (1)...(19): siRNA sense strand
uggagugcaucgaucauaa

SEQ ID NO: 1845634 - RNA, 19 nt, Homo sapiens
  misc_RNA (1)...(19): siRNA sense strand
guacuaagugcaagauaug

SEQ ID NO: 1845635 - RNA, 19 nt, Homo sapiens
  misc_RNA (1)...(19): siRNA sense strand
agaaaugacuacacucaag

SEQ ID NO: 1845636 - RNA, 19 nt, Homo sapiens
  misc_RNA (1)...(19): siRNA sense strand
uuggaaagcaggucuauaa

SEQ ID NO: 1845637 - RNA, 19 nt, Homo sapiens
  misc_RNA (1)...(19): siRNA sense strand
agaacaagcgcugcaaaua

SEQ ID NO: 1845638 - RNA, 19 nt, Homo sapiens
  misc_RNA (1)...(19): siRNA sense strand
aggaagagaucacauagca

SEQ ID NO: 1845639 - RNA, 19 nt, Homo sapiens
  misc_RNA (1)...(19): siRNA sense strand
ugacgaacaucacaguaca

SEQ ID NO: 1845640 - RNA, 19 nt, Homo sapiens
  misc_RNA (1)...(19): siRNA sense strand
cguacuaagugcaagauau

SEQ ID NO: 1845641 - RNA, 19 nt, Homo sapiens
  misc_RNA (1)...(19): siRNA sense strand
ccaaagagaccaugaaagc

SEQ ID NO: 1845642 - RNA, 19 nt, Homo sapiens
  misc_RNA (1)...(19): siRNA sense strand
gaaccuggacaucgccaaa

SEQ ID NO: 1845643 - RNA, 19 nt, Homo sapiens
  misc_RNA (1)...(19): siRNA sense strand
gagaacaagcgcugcaaau

SEQ ID NO: 1845644 - RNA, 19 nt, Homo sapiens
  misc_RNA (1)...(19): siRNA sense strand
gagcagcagcagucauaaa

SEQ ID NO: 1845645 - RNA, 19 nt, Homo sapiens
  misc_RNA (1)...(19): siRNA sense strand
aacaagcgcugcaaauaca

SEQ ID NO: 1845646 - RNA, 19 nt, Homo sapiens
  misc_RNA (1)...(19): siRNA sense strand
ggauugggauuauggaaaa

SEQ ID NO: 1845647 - RNA, 19 nt, Homo sapiens
  misc_RNA (1)...(19): siRNA sense strand
ugaagcugcucgcucagaa

SEQ ID NO: 1845648 - RNA, 19 nt, Homo sapiens
  misc_RNA (1)...(19): siRNA sense strand
ggagugcaucgaucauaaa

SEQ ID NO: 1845649 - RNA, 19 nt, Homo sapiens
  misc_RNA (1)...(19): siRNA sense strand
gaaggaauuuaugcuuucu

SEQ ID NO: 1845650 - RNA, 19 nt, Homo sapiens
  misc_RNA (1)...(19): siRNA sense strand
agaacuuacuguccugauu

SEQ ID NO: 1845651 - RNA, 19 nt, Homo sapiens
  misc_RNA (1)...(19): siRNA sense strand
aguaauaaguugacucaca

SEQ ID NO: 1845652 - RNA, 19 nt, Homo sapiens
  misc_RNA (1)...(19): siRNA sense strand
guggauagauacugugaag

SEQ ID NO: 1845653 - RNA, 19 nt, Homo sapiens
  misc_RNA (1)...(19): siRNA sense strand
cauagucgacgcuacauug

SEQ ID NO: 1845654 - RNA, 19 nt, Homo sapiens
  misc_RNA (1)...(19): siRNA sense strand
cagagaagccuuaaagcau

SEQ ID NO: 1845655 - RNA, 19 nt, Homo sapiens
  misc_RNA (1)...(19): siRNA sense strand
caaaagaauuacucucaga

SEQ ID NO: 1845656 - RNA, 19 nt, Homo sapiens
  misc_RNA (1)...(19): siRNA sense strand
gaaagauggcauaucagau

SEQ ID NO: 1845657 - RNA, 19 nt, Homo sapiens
  misc_RNA (1)...(19): siRNA sense strand
ccaggaguguagaggauga

SEQ ID NO: 1845658 - RNA, 19 nt, Homo sapiens
  misc_RNA (1)...(19): siRNA sense strand
cuacauugaugaguacaga

SEQ ID NO: 1845659 - RNA, 19 nt, Homo sapiens
  misc_RNA (1)...(19): siRNA sense strand
gauagccauuauuuggaaa

SEQ ID NO: 1845660 - RNA, 19 nt, Homo sapiens
  misc_RNA (1)...(19): siRNA sense strand
uuauagagcaccugaaguu

SEQ ID NO: 1845661 - RNA, 19 nt, Homo sapiens
  misc_RNA (1)...(19): siRNA sense strand
ugaacgcaccuuaauaaau

SEQ ID NO: 1845662 - RNA, 19 nt, Homo sapiens
  misc_RNA (1)...(19): siRNA sense strand
ggagaacaagcgcugcaaa

SEQ ID NO: 1845663 - RNA, 19 nt, Homo sapiens
  misc_RNA (1)...(19): siRNA sense strand
gaaaagaaccaggagugua

SEQ ID NO: 1845664 - RNA, 19 nt, Homo sapiens
  misc_RNA (1)...(19): siRNA sense strand
uggaaugguuugagcauca

SEQ ID NO: 1845665 - RNA, 19 nt, Homo sapiens
  misc_RNA (1)...(19): siRNA sense strand
ucuuugaccucauucagaa

SEQ ID NO: 1845666 - RNA, 19 nt, Homo sapiens
  misc_RNA (1)...(19): siRNA sense strand
cacaguacauugguaucua

SEQ ID NO: 1845667 - RNA, 19 nt, Homo sapiens
  misc_RNA (1)...(19): siRNA sense strand
ugaugaacgcaccuuaaua

SEQ ID NO: 1845668 - RNA, 19 nt, Homo sapiens
  misc_RNA (1)...(19): siRNA sense strand
agaaagauggcauaucaga

SEQ ID NO: 1845669 - RNA, 19 nt, Homo sapiens
  misc_RNA (1)...(19): siRNA sense strand
uaugcaagucugugaauuu

SEQ ID NO: 1845670 - RNA, 19 nt, Homo sapiens
  misc_RNA (1)...(19): siRNA sense strand
gcagugcccaggagaacaa

SEQ ID NO: 1845671 - RNA, 19 nt, Homo sapiens
  misc_RNA (1)...(19): siRNA sense strand
aguagcaagucuucuggua

SEQ ID NO: 1845672 - RNA, 19 nt, Homo sapiens
  misc_RNA (1)...(19): siRNA sense strand
ugugaugucuggagcauag

SEQ ID NO: 1845673 - RNA, 19 nt, Homo sapiens
  misc_RNA (1)...(19): siRNA sense strand
gacuggaucauaucagaaa

SEQ ID NO: 1845674 - RNA, 19 nt, Homo sapiens
  misc_RNA (1)...(19): siRNA sense strand
uuugaacuauugggacuua

SEQ ID NO: 1845675 - RNA, 19 nt, Homo sapiens
  misc_RNA (1)...(19): siRNA sense strand
uggaacaucugaauacaac

SEQ ID NO: 1845676 - RNA, 19 nt, Homo sapiens
  misc_RNA (1)...(19): siRNA sense strand
agguagacauguagcagua

SEQ ID NO: 1845677 - RNA, 19 nt, Homo sapiens
  misc_RNA (1)...(19): siRNA sense strand
gaguggagacguacuaagu

SEQ ID NO: 1845678 - RNA, 19 nt, Homo sapiens
  misc_RNA (1)...(19): siRNA sense strand
ccacaguacuucacaucgu

SEQ ID NO: 1845679 - RNA, 19 nt, Homo sapiens
  misc_RNA (1)...(19): siRNA sense strand
gaaccauaguagcaagucu

SEQ ID NO: 1845680 - RNA, 19 nt, Homo sapiens
  misc_RNA (1)...(19): siRNA sense strand
cauuucgacuggaucauau

SEQ ID NO: 1845681 - RNA, 19 nt, Homo sapiens
  misc_RNA (1)...(19): siRNA sense strand
gaacaucugaauacaacag

SEQ ID NO: 1845682 - RNA, 19 nt, Homo sapiens
  misc_RNA (1)...(19): siRNA sense strand
aaauguggauagauacugu

SEQ ID NO: 1845683 - RNA, 19 nt, Homo sapiens
  misc_RNA (1)...(19): siRNA sense strand
gacaaggauugggauuaug

SEQ ID NO: 1845684 - RNA, 19 nt, Homo sapiens
  misc_RNA (1)...(19): siRNA sense strand
ggaagagucaccgaaggaa

SEQ ID NO: 1845685 - RNA, 19 nt, Homo sapiens
  misc_RNA (1)...(19): siRNA sense strand
ucacaucgucguucacaug

SEQ ID NO: 1845686 - RNA, 19 nt, Homo sapiens
  misc_RNA (1)...(19): siRNA sense strand
aaagcaggucuauaaauga

SEQ ID NO: 1845687 - RNA, 19 nt, Homo sapiens
  misc_RNA (1)...(19): siRNA sense strand
guagugcaacauaugauga

SEQ ID NO: 1845688 - RNA, 19 nt, Homo sapiens
  misc_RNA (1)...(19): siRNA sense strand
gaagcugcucgcucagaaa

SEQ ID NO: 1845689 - RNA, 19 nt, Homo sapiens
  misc_RNA (1)...(19): siRNA sense strand
ugaggagggucaccugauc

SEQ ID NO: 1845690 - RNA, 19 nt, Homo sapiens
  misc_RNA (1)...(19): siRNA sense strand
gggaagagucaccgaagga

SEQ ID NO: 1845691 - RNA, 19 nt, Homo sapiens
  misc_RNA (1)...(19): siRNA sense strand
uaucagaaccauaguagca

SEQ ID NO: 1845692 - RNA, 19 nt, Homo sapiens
  misc_RNA (1)...(19): siRNA sense strand
cauagaagcuuuaccaaga

SEQ ID NO: 1845693 - RNA, 19 nt, Homo sapiens
  misc_RNA (1)...(19): siRNA sense strand
gguccuggcuuucuucuug

SEQ ID NO: 1845694 - RNA, 19 nt, Homo sapiens
  misc_RNA (1)...(19): siRNA sense strand
ggucaaugcucuaagugaa

SEQ ID NO: 1845695 - RNA, 19 nt, Homo sapiens
  misc_RNA (1)...(19): siRNA sense strand
gagaggacuucuaugaaug

SEQ ID NO: 1845696 - RNA, 19 nt, Homo sapiens
  misc_RNA (1)...(19): siRNA sense strand
gcaauggucuggugaucau

SEQ ID NO: 1845697 - RNA, 19 nt, Homo sapiens
  misc_RNA (1)...(19): siRNA sense strand
ugagaggacuucuaugaau

SEQ ID NO: 1845698 - RNA, 19 nt, Homo sapiens
  misc_RNA (1)...(19): siRNA sense strand
ggaugaagauuacaacacu

SEQ ID NO: 1845699 - RNA, 19 nt, Homo sapiens
  misc_RNA (1)...(19): siRNA sense strand
ggacagccaugugcaagau

SEQ ID NO: 1845700 - RNA, 19 nt, Homo sapiens
  misc_RNA (1)...(19): siRNA sense strand
uuacaacacuuccaucagu

SEQ ID NO: 1845701 - RNA, 19 nt, Homo sapiens
  misc_RNA (1)...(19): siRNA sense strand
ggugaugaauacccugauu

SEQ ID NO: 1845702 - RNA, 19 nt, Homo sapiens
  misc_RNA (1)...(19): siRNA sense strand
gaagaagacagugaacaug

SEQ ID NO: 1845703 - RNA, 19 nt, Homo sapiens
  misc_RNA (1)...(19): siRNA sense strand
ugaaugagaggacuucuau

SEQ ID NO: 1845704 - RNA, 19 nt, Homo sapiens
  misc_RNA (1)...(19): siRNA sense strand
gaaaauauccugcuucaac

SEQ ID NO: 1845705 - RNA, 19 nt, Homo sapiens
  misc_RNA (1)...(19): siRNA sense strand
ucaguuacggugaugaaua

SEQ ID NO: 1845706 - RNA, 19 nt, Homo sapiens
  misc_RNA (1)...(19): siRNA sense strand
ggacacagccaaccugcau

SEQ ID NO: 1845707 - RNA, 19 nt, Homo sapiens
  misc_RNA (1)...(19): siRNA sense strand
gugaugaauacccugauua

SEQ ID NO: 1845708 - RNA, 19 nt, Homo sapiens
  misc_RNA (1)...(19): siRNA sense strand
gaugaagauuacaacacuu

SEQ ID NO: 1845709 - RNA, 19 nt, Homo sapiens
  misc_RNA (1)...(19): siRNA sense strand
aaugagaggacuucuauga

SEQ ID NO: 1845710 - RNA, 19 nt, Homo sapiens
  misc_RNA (1)...(19): siRNA sense strand
ucaaugcucuaagugaaga

SEQ ID NO: 1845711 - RNA, 19 nt, Homo sapiens
  misc_RNA (1)...(19): siRNA sense strand
caucaucauuaccuucuuc

SEQ ID NO: 1845712 - RNA, 19 nt, Homo sapiens
  misc_RNA (1)...(19): siRNA sense strand
ccacugcccuugccauugc

SEQ ID NO: 1845713 - RNA, 19 nt, Homo sapiens
  misc_RNA (1)...(19): siRNA sense strand
caagguggcccucuucucu

SEQ ID NO: 1845714 - RNA, 19 nt, Homo sapiens
  misc_RNA (1)...(19): siRNA sense strand
gauuacaacacuuccauca

SEQ ID NO: 1845715 - RNA, 19 nt, Homo sapiens
  misc_RNA (1)...(19): siRNA sense strand
cagugaacauggucugguu

SEQ ID NO: 1845716 - RNA, 19 nt, Homo sapiens
  misc_RNA (1)...(19): siRNA sense strand
gcaacuuccuucucaucca

SEQ ID NO: 1845717 - RNA, 19 nt, Homo sapiens
  misc_RNA (1)...(19): siRNA sense strand
uggcagauuuccuguucaa

SEQ ID NO: 1845718 - RNA, 19 nt, Homo sapiens
  misc_RNA (1)...(19): siRNA sense strand
gggaaaauauccugcuuca

SEQ ID NO: 1845719 - RNA, 19 nt, Homo sapiens
  misc_RNA (1)...(19): siRNA sense strand
caaccugcaugggaaaaua

SEQ ID NO: 1845720 - RNA, 19 nt, Homo sapiens
  misc_RNA (1)...(19): siRNA sense strand
caguuacggugaugaauac

SEQ ID NO: 1845721 - RNA, 19 nt, Homo sapiens
  misc_RNA (1)...(19): siRNA sense strand
acaacacuuccaucaguua

SEQ ID NO: 1845722 - RNA, 19 nt, Homo sapiens
  misc_RNA (1)...(19): siRNA sense strand
uacaacacuuccaucaguu

SEQ ID NO: 1845723 - RNA, 19 nt, Homo sapiens
  misc_RNA (1)...(19): siRNA sense strand
uagaagcuuuaccaagaug

SEQ ID NO: 1845724 - RNA, 19 nt, Homo sapiens
  misc_RNA (1)...(19): siRNA sense strand
ucaucuggguccuggcuuu

SEQ ID NO: 1845725 - RNA, 19 nt, Homo sapiens
  misc_RNA (1)...(19): siRNA sense strand
gcagcguucgccuggcuua

SEQ ID NO: 1845726 - RNA, 19 nt, Homo sapiens
  misc_RNA (1)...(19): siRNA sense strand
ugaagaagacagugaacau

SEQ ID NO: 1845727 - RNA, 19 nt, Homo sapiens
  misc_RNA (1)...(19): siRNA sense strand
ugaugaauacccugauuau

SEQ ID NO: 1845728 - RNA, 19 nt, Homo sapiens
  misc_RNA (1)...(19): siRNA sense strand
auugugaccaucaucauua

SEQ ID NO: 1845729 - RNA, 19 nt, Homo sapiens
  misc_RNA (1)...(19): siRNA sense strand
gggcaauggucuggugauc

SEQ ID NO: 1845730 - RNA, 19 nt, Homo sapiens
  misc_RNA (1)...(19): siRNA sense strand
caagaucagcaacuuccuu

SEQ ID NO: 1845731 - RNA, 19 nt, Homo sapiens
  misc_RNA (1)...(19): siRNA sense strand
cagauuuccuguucaacgu

SEQ ID NO: 1845732 - RNA, 19 nt, Homo sapiens
  misc_RNA (1)...(19): siRNA sense strand
agaagacagugaacauggu

SEQ ID NO: 1845733 - RNA, 19 nt, Homo sapiens
  misc_RNA (1)...(19): siRNA sense strand
gagggagaccggcaugcuu

SEQ ID NO: 1845734 - RNA, 19 nt, Homo sapiens
  misc_RNA (1)...(19): siRNA sense strand
gcaugaaccccauucugua

SEQ ID NO: 1845735 - RNA, 19 nt, Homo sapiens
  misc_RNA (1)...(19): siRNA sense strand
ucaagauuauugugaccau

SEQ ID NO: 1845736 - RNA, 19 nt, Homo sapiens
  misc_RNA (1)...(19): siRNA sense strand
gaucagcaacuuccuucuc

SEQ ID NO: 1845737 - RNA, 19 nt, Homo sapiens
  misc_RNA (1)...(19): siRNA sense strand
auagaagcuuuaccaagau

SEQ ID NO: 1845738 - RNA, 19 nt, Homo sapiens
  misc_RNA (1)...(19): siRNA sense strand
ggagaccggcaugcuuuga

SEQ ID NO: 1845739 - RNA, 19 nt, Homo sapiens
  misc_RNA (1)...(19): siRNA sense strand
ccacacacucaaccuccua

SEQ ID NO: 1845740 - RNA, 19 nt, Homo sapiens
  misc_RNA (1)...(19): siRNA sense strand
agaggacuucuaugaauga

SEQ ID NO: 1845741 - RNA, 19 nt, Homo sapiens
  misc_RNA (1)...(19): siRNA sense strand
auacaggccacucuuccua

SEQ ID NO: 1845742 - RNA, 19 nt, Homo sapiens
  misc_RNA (1)...(19): siRNA sense strand
aguggcagauuuccuguuc

SEQ ID NO: 1845743 - RNA, 19 nt, Homo sapiens
  misc_RNA (1)...(19): siRNA sense strand
ccuggucaaugcucuaagu

SEQ ID NO: 1845744 - RNA, 19 nt, Homo sapiens
  misc_RNA (1)...(19): siRNA sense strand
ugaccaucaucauuaccuu

SEQ ID NO: 1845745 - RNA, 19 nt, Homo sapiens
  misc_RNA (1)...(19): siRNA sense strand
cccaauccauaucaccuau

SEQ ID NO: 1845746 - RNA, 19 nt, Homo sapiens
  misc_RNA (1)...(19): siRNA sense strand
caacgucuuccucccaauc

SEQ ID NO: 1845747 - RNA, 19 nt, Homo sapiens
  misc_RNA (1)...(19): siRNA sense strand
uauccugcuucaacaacuu

SEQ ID NO: 1845748 - RNA, 19 nt, Homo sapiens
  misc_RNA (1)...(19): siRNA sense strand
acagccaugugcaagauca

SEQ ID NO: 1845749 - RNA, 19 nt, Homo sapiens
  misc_RNA (1)...(19): siRNA sense strand
guccuggcuuucuucuuga

SEQ ID NO: 1845750 - RNA, 19 nt, Homo sapiens
  misc_RNA (1)...(19): siRNA sense strand
caucauugccaccuucaag

SEQ ID NO: 1845751 - RNA, 19 nt, Homo sapiens
  misc_RNA (1)...(19): siRNA sense strand
uuucaugggucaggacuuc

SEQ ID NO: 1845752 - RNA, 19 nt, Homo sapiens
  misc_RNA (1)...(19): siRNA sense strand
uuauuuagacuccauugug

SEQ ID NO: 1845753 - RNA, 19 nt, Homo sapiens
  misc_RNA (1)...(19): siRNA sense strand
gaggaugaagauuacaaca

SEQ ID NO: 1845754 - RNA, 19 nt, Homo sapiens
  misc_RNA (1)...(19): siRNA sense strand
gggacagccaugugcaaga

SEQ ID NO: 1845755 - RNA, 19 nt, Homo sapiens
  misc_RNA (1)...(19): siRNA sense strand
ggccacugcccuugccauu

SEQ ID NO: 1845756 - RNA, 19 nt, Homo sapiens
  misc_RNA (1)...(19): siRNA sense strand
ggcacaugguggugacugu

SEQ ID NO: 1845757 - RNA, 19 nt, Homo sapiens
  misc_RNA (1)...(19): siRNA sense strand
aaaauauccugcuucaaca

SEQ ID NO: 1845758 - RNA, 19 nt, Homo sapiens
  misc_RNA (1)...(19): siRNA sense strand
uggcuuacauggccugcau

SEQ ID NO: 1845759 - RNA, 19 nt, Homo sapiens
  misc_RNA (1)...(19): siRNA sense strand
ugugcaagaucagcaacuu

SEQ ID NO: 1845760 - RNA, 19 nt, Homo sapiens
  misc_RNA (1)...(19): siRNA sense strand
agggagaccggcaugcuuu

SEQ ID NO: 1845761 - RNA, 19 nt, Homo sapiens
  misc_RNA (1)...(19): siRNA sense strand
gaaugagaggacuucuaug

SEQ ID NO: 1845762 - RNA, 19 nt, Homo sapiens
  misc_RNA (1)...(19): siRNA sense strand
cccacucacucccaaaugg

SEQ ID NO: 1845763 - RNA, 19 nt, Homo sapiens
  misc_RNA (1)...(19): siRNA sense strand
gaaggauggaacuaucuua

SEQ ID NO: 1845764 - RNA, 19 nt, Homo sapiens
  misc_RNA (1)...(19): siRNA sense strand
ggauggaacuaucuuaugc

SEQ ID NO: 1845765 - RNA, 19 nt, Homo sapiens
  misc_RNA (1)...(19): siRNA sense strand
gcagaugggcaccaacaaa

SEQ ID NO: 1845766 - RNA, 19 nt, Homo sapiens
  misc_RNA (1)...(19): siRNA sense strand
ucaaggccauggucagcua

SEQ ID NO: 1845767 - RNA, 19 nt, Homo sapiens
  misc_RNA (1)...(19): siRNA sense strand
ggacauuggcgucaaguac

SEQ ID NO: 1845768 - RNA, 19 nt, Homo sapiens
  misc_RNA (1)...(19): siRNA sense strand
uagaaaaccuguccaacuu

SEQ ID NO: 1845769 - RNA, 19 nt, Homo sapiens
  misc_RNA (1)...(19): siRNA sense strand
gaaaaccuguccaacuuca

SEQ ID NO: 1845770 - RNA, 19 nt, Homo sapiens
  misc_RNA (1)...(19): siRNA sense strand
ggagcggaauuucgacgau

SEQ ID NO: 1845771 - RNA, 19 nt, Homo sapiens
  misc_RNA (1)...(19): siRNA sense strand
ugugacaacuccuccaugu

SEQ ID NO: 1845772 - RNA, 19 nt, Homo sapiens
  misc_RNA (1)...(19): siRNA sense strand
uaugcacacucaugaacaa

SEQ ID NO: 1845773 - RNA, 19 nt, Homo sapiens
  misc_RNA (1)...(19): siRNA sense strand
gcugggaaccgacaagugu

SEQ ID NO: 1845774 - RNA, 19 nt, Homo sapiens
  misc_RNA (1)...(19): siRNA sense strand
gcacacucaugaacaagcu

SEQ ID NO: 1845775 - RNA, 19 nt, Homo sapiens
  misc_RNA (1)...(19): siRNA sense strand
gagaagcaggagcggaauu

SEQ ID NO: 1845776 - RNA, 19 nt, Homo sapiens
  misc_RNA (1)...(19): siRNA sense strand
cagaugggcaccaacaaau

SEQ ID NO: 1845777 - RNA, 19 nt, Homo sapiens
  misc_RNA (1)...(19): siRNA sense strand
ccugaaggauggaacuauc

SEQ ID NO: 1845778 - RNA, 19 nt, Homo sapiens
  misc_RNA (1)...(19): siRNA sense strand
gcuccacgcaguucaacaa

SEQ ID NO: 1845779 - RNA, 19 nt, Homo sapiens
  misc_RNA (1)...(19): siRNA sense strand
gccaacgaccuguuugaga

SEQ ID NO: 1845780 - RNA, 19 nt, Homo sapiens
  misc_RNA (1)...(19): siRNA sense strand
gaaccgacaagugugacaa

SEQ ID NO: 1845781 - RNA, 19 nt, Homo sapiens
  misc_RNA (1)...(19): siRNA sense strand
agaaccggcuccuguccaa

SEQ ID NO: 1845782 - RNA, 19 nt, Homo sapiens
  misc_RNA (1)...(19): siRNA sense strand
agaagcaggagcggaauuu

SEQ ID NO: 1845783 - RNA, 19 nt, Homo sapiens
  misc_RNA (1)...(19): siRNA sense strand
uaucuuaugcacacucaug

SEQ ID NO: 1845784 - RNA, 19 nt, Homo sapiens
  misc_RNA (1)...(19): siRNA sense strand
cgaggccaacgaccuguuu

SEQ ID NO: 1845785 - RNA, 19 nt, Homo sapiens
  misc_RNA (1)...(19): siRNA sense strand
gaagcaggagcggaauuuc

SEQ ID NO: 1845786 - RNA, 19 nt, Homo sapiens
  misc_RNA (1)...(19): siRNA sense strand
cagaugggcacgaacaagu

SEQ ID NO: 1845787 - RNA, 19 nt, Homo sapiens
  misc_RNA (1)...(19): siRNA sense strand
cggcuccuguccaaauaug

SEQ ID NO: 1845788 - RNA, 19 nt, Homo sapiens
  misc_RNA (1)...(19): siRNA sense strand
ucaaguacucggagaagca

SEQ ID NO: 1845789 - RNA, 19 nt, Homo sapiens
  misc_RNA (1)...(19): siRNA sense strand
gaugggcaccaacaaaugc

SEQ ID NO: 1845790 - RNA, 19 nt, Homo sapiens
  misc_RNA (1)...(19): siRNA sense strand
gaaccggcuccuguccaaa

SEQ ID NO: 1845791 - RNA, 19 nt, Homo sapiens
  misc_RNA (1)...(19): siRNA sense strand
ggcggcacaucuaugauac

SEQ ID NO: 1845792 - RNA, 19 nt, Homo sapiens
  misc_RNA (1)...(19): siRNA sense strand
gaacuaucuuaugcacacu

SEQ ID NO: 1845793 - RNA, 19 nt, Homo sapiens
  misc_RNA (1)...(19): siRNA sense strand
gguggacauuggcgucaag

SEQ ID NO: 1845794 - RNA, 19 nt, Homo sapiens
  misc_RNA (1)...(19): siRNA sense strand
ugaaggauggaacuaucuu

SEQ ID NO: 1845795 - RNA, 19 nt, Homo sapiens
  misc_RNA (1)...(19): siRNA sense strand
gcaaggagcuucccaaguu

SEQ ID NO: 1845796 - RNA, 19 nt, Homo sapiens
  misc_RNA (1)...(19): siRNA sense strand
ccaaggaacugcccuauuu

SEQ ID NO: 1845797 - RNA, 19 nt, Homo sapiens
  misc_RNA (1)...(19): siRNA sense strand
aaagaaaccugaagugaaa

SEQ ID NO: 1845798 - RNA, 19 nt, Homo sapiens
  misc_RNA (1)...(19): siRNA sense strand
ggccauagcuuaauuaauc

SEQ ID NO: 1845799 - RNA, 19 nt, Homo sapiens
  misc_RNA (1)...(19): siRNA sense strand
gcacagccguuuaccauga

SEQ ID NO: 1845800 - RNA, 19 nt, Homo sapiens
  misc_RNA (1)...(19): siRNA sense strand
gaaugcacguccaagaaua

SEQ ID NO: 1845801 - RNA, 19 nt, Homo sapiens
  misc_RNA (1)...(19): siRNA sense strand
ggacagcccuuuagucaag

SEQ ID NO: 1845802 - RNA, 19 nt, Homo sapiens
  misc_RNA (1)...(19): siRNA sense strand
caaaucaucucucauugga

SEQ ID NO: 1845803 - RNA, 19 nt, Homo sapiens
  misc_RNA (1)...(19): siRNA sense strand
ccaaugaccugucccagaa

SEQ ID NO: 1845804 - RNA, 19 nt, Homo sapiens
  misc_RNA (1)...(19): siRNA sense strand
gaauagguaucauuucugu

SEQ ID NO: 1845805 - RNA, 19 nt, Homo sapiens
  misc_RNA (1)...(19): siRNA sense strand
gggaaagccugccaaguug

SEQ ID NO: 1845806 - RNA, 19 nt, Homo sapiens
  misc_RNA (1)...(19): siRNA sense strand
gaagugaaaguagaaguua

SEQ ID NO: 1845807 - RNA, 19 nt, Homo sapiens
  misc_RNA (1)...(19): siRNA sense strand
gcaagaaugccaagaagaa

SEQ ID NO: 1845808 - RNA, 19 nt, Homo sapiens
  misc_RNA (1)...(19): siRNA sense strand
cagcagggaugaauauuau

SEQ ID NO: 1845809 - RNA, 19 nt, Homo sapiens
  misc_RNA (1)...(19): siRNA sense strand
caaggagcuucccaaguua

SEQ ID NO: 1845810 - RNA, 19 nt, Homo sapiens
  misc_RNA (1)...(19): siRNA sense strand
ggaggucgcguuuacauaa

SEQ ID NO: 1845811 - RNA, 19 nt, Homo sapiens
  misc_RNA (1)...(19): siRNA sense strand
gaaaacaaauucagugcua

SEQ ID NO: 1845812 - RNA, 19 nt, Homo sapiens
  misc_RNA (1)...(19): siRNA sense strand
cgacaaaucaucucucauu

SEQ ID NO: 1845813 - RNA, 19 nt, Homo sapiens
  misc_RNA (1)...(19): siRNA sense strand
gaaauuaggguaugugaca

SEQ ID NO: 1845814 - RNA, 19 nt, Homo sapiens
  misc_RNA (1)...(19): siRNA sense strand
gaaaguagaaguuaaagag

SEQ ID NO: 1845815 - RNA, 19 nt, Homo sapiens
  misc_RNA (1)...(19): siRNA sense strand
cuacagauaucaagaauac

SEQ ID NO: 1845816 - RNA, 19 nt, Homo sapiens
  misc_RNA (1)...(19): siRNA sense strand
ccaaguacguggccaauca

SEQ ID NO: 1845817 - RNA, 19 nt, Homo sapiens
  misc_RNA (1)...(19): siRNA sense strand
ggagccaucuagugcauaa

SEQ ID NO: 1845818 - RNA, 19 nt, Homo sapiens
  misc_RNA (1)...(19): siRNA sense strand
gcagaaaucagaaccaaug

SEQ ID NO: 1845819 - RNA, 19 nt, Homo sapiens
  misc_RNA (1)...(19): siRNA sense strand
gaaaucagaaccaauggaa

SEQ ID NO: 1845820 - RNA, 19 nt, Homo sapiens
  misc_RNA (1)...(19): siRNA sense strand
guacauuucuuaucuggau

SEQ ID NO: 1845821 - RNA, 19 nt, Homo sapiens
  misc_RNA (1)...(19): siRNA sense strand
gccaagcacugccaagaaa

SEQ ID NO: 1845822 - RNA, 19 nt, Homo sapiens
  misc_RNA (1)...(19): siRNA sense strand
gaagaagaacaacaagaaa

SEQ ID NO: 1845823 - RNA, 19 nt, Homo sapiens
  misc_RNA (1)...(19): siRNA sense strand
gaagaagagaguagcagua

SEQ ID NO: 1845824 - RNA, 19 nt, Homo sapiens
  misc_RNA (1)...(19): siRNA sense strand
gaagagccaugcccauaag

SEQ ID NO: 1845825 - RNA, 19 nt, Homo sapiens
  misc_RNA (1)...(19): siRNA sense strand
ggaacuagaacaagaagaa

SEQ ID NO: 1845826 - RNA, 19 nt, Homo sapiens
  misc_RNA (1)...(19): siRNA sense strand
ggaggcagcggcucuagua

SEQ ID NO: 1845827 - RNA, 19 nt, Homo sapiens
  misc_RNA (1)...(19): siRNA sense strand
ggaaguggaugaaaagaaa

SEQ ID NO: 1845828 - RNA, 19 nt, Homo sapiens
  misc_RNA (1)...(19): siRNA sense strand
ggaaauaauccaaugaaca

SEQ ID NO: 1845829 - RNA, 19 nt, Homo sapiens
  misc_RNA (1)...(19): siRNA sense strand
gagcagaaaucagaaccaa

SEQ ID NO: 1845830 - RNA, 19 nt, Homo sapiens
  misc_RNA (1)...(19): siRNA sense strand
ucaccaacgugccaaauau

SEQ ID NO: 1845831 - RNA, 19 nt, Homo sapiens
  misc_RNA (1)...(19): siRNA sense strand
gagaaguguuucacagaga

SEQ ID NO: 1845832 - RNA, 19 nt, Homo sapiens
  misc_RNA (1)...(19): siRNA sense strand
gggaauaacugggaacaca

SEQ ID NO: 1845833 - RNA, 19 nt, Homo sapiens
  misc_RNA (1)...(19): siRNA sense strand
gggaugaagucacgguuug

SEQ ID NO: 1845834 - RNA, 19 nt, Homo sapiens
  misc_RNA (1)...(19): siRNA sense strand
ggaagaugcaucagauuug

SEQ ID NO: 1845835 - RNA, 19 nt, Homo sapiens
  misc_RNA (1)...(19): siRNA sense strand
gcacacaccaacaacauga

SEQ ID NO: 1845836 - RNA, 19 nt, Homo sapiens
  misc_RNA (1)...(19): siRNA sense strand
gacaaaucaucucucauug

SEQ ID NO: 1845837 - RNA, 19 nt, Homo sapiens
  misc_RNA (1)...(19): siRNA sense strand
aaaaugaucuuccugauga

SEQ ID NO: 1845838 - RNA, 19 nt, Homo sapiens
  misc_RNA (1)...(19): siRNA sense strand
uuaaggaacuagaacaaga

SEQ ID NO: 1845839 - RNA, 19 nt, Homo sapiens
  misc_RNA (1)...(19): siRNA sense strand
caagugaaggagaugauua

SEQ ID NO: 1845840 - RNA, 19 nt, Homo sapiens
  misc_RNA (1)...(19): siRNA sense strand
ugaaucacaugacgcauug

SEQ ID NO: 1845841 - RNA, 19 nt, Homo sapiens
  misc_RNA (1)...(19): siRNA sense strand
gugaaucgcaugcaaguuu

SEQ ID NO: 1845842 - RNA, 19 nt, Homo sapiens
  misc_RNA (1)...(19): siRNA sense strand
aauggcagcuuucaucaaa

SEQ ID NO: 1845843 - RNA, 19 nt, Homo sapiens
  misc_RNA (1)...(19): siRNA sense strand
gcacaaggaggucuucuuc

SEQ ID NO: 1845844 - RNA, 19 nt, Homo sapiens
  misc_RNA (1)...(19): siRNA sense strand
aauaguaacucuggccaua

SEQ ID NO: 1845845 - RNA, 19 nt, Homo sapiens
  misc_RNA (1)...(19): siRNA sense strand
ggaagcagcuguguaccau

SEQ ID NO: 1845846 - RNA, 19 nt, Homo sapiens
  misc_RNA (1)...(19): siRNA sense strand
caacagcagggaugaauau

SEQ ID NO: 1845847 - RNA, 19 nt, Homo sapiens
  misc_RNA (1)...(19): siRNA sense strand
gaucauuguuugacuugga

SEQ ID NO: 1845848 - RNA, 19 nt, Homo sapiens
  misc_RNA (1)...(19): siRNA sense strand
gcaaacaucagugggaauu

SEQ ID NO: 1845849 - RNA, 19 nt, Homo sapiens
  misc_RNA (1)...(19): siRNA sense strand
ggaggagaauuaggccuuu

SEQ ID NO: 1845850 - RNA, 19 nt, Homo sapiens
  misc_RNA (1)...(19): siRNA sense strand
gggacacgcuagagaaguu

SEQ ID NO: 1845851 - RNA, 19 nt, Homo sapiens
  misc_RNA (1)...(19): siRNA sense strand
ggaggaggauuugcaagga

SEQ ID NO: 1845852 - RNA, 19 nt, Homo sapiens
  misc_RNA (1)...(19): siRNA sense strand
ccacaaacccacugaugaa

SEQ ID NO: 1845853 - RNA, 19 nt, Homo sapiens
  misc_RNA (1)...(19): siRNA sense strand
aacaaugccuggcucuaua

SEQ ID NO: 1845854 - RNA, 19 nt, Homo sapiens
  misc_RNA (1)...(19): siRNA sense strand
gcugaacauucucaaauca

SEQ ID NO: 1845855 - RNA, 19 nt, Homo sapiens
  misc_RNA (1)...(19): siRNA sense strand
gcucagcugugaccucaug

SEQ ID NO: 1845856 - RNA, 19 nt, Homo sapiens
  misc_RNA (1)...(19): siRNA sense strand
cgaaugacagcacagauuu

SEQ ID NO: 1845857 - RNA, 19 nt, Homo sapiens
  misc_RNA (1)...(19): siRNA sense strand
uacuacagcuaucagaaua

SEQ ID NO: 1845858 - RNA, 19 nt, Homo sapiens
  misc_RNA (1)...(19): siRNA sense strand
gaugcugcuuccaaacaua

SEQ ID NO: 1845859 - RNA, 19 nt, Homo sapiens
  misc_RNA (1)...(19): siRNA sense strand
caacauggcgaguaugaau

SEQ ID NO: 1845860 - RNA, 19 nt, Homo sapiens
  misc_RNA (1)...(19): siRNA sense strand
ugacguaccugugcuggaa

SEQ ID NO: 1845861 - RNA, 19 nt, Homo sapiens
  misc_RNA (1)...(19): siRNA sense strand
uagcagagcagaaaucaga

SEQ ID NO: 1845862 - RNA, 19 nt, Homo sapiens
  misc_RNA (1)...(19): siRNA sense strand
ccaagaagaagaacaacaa

SEQ ID NO: 1845863 - RNA, 19 nt, Homo sapiens
  misc_RNA (1)...(19): siRNA sense strand
ggcagcggcucuaguauca

SEQ ID NO: 1845864 - RNA, 19 nt, Homo sapiens
  misc_RNA (1)...(19): siRNA sense strand
ggacacagggcaauaccaa

SEQ ID NO: 1845865 - RNA, 19 nt, Homo sapiens
  misc_RNA (1)...(19): siRNA sense strand
aaucagcucuuccgacuuc

SEQ ID NO: 1845866 - RNA, 19 nt, Homo sapiens
  misc_RNA (1)...(19): siRNA sense strand
ccugguaucugcaugaaug

SEQ ID NO: 1845867 - RNA, 19 nt, Homo sapiens
  misc_RNA (1)...(19): siRNA sense strand
ggaaugcacguccaagaau

SEQ ID NO: 1845868 - RNA, 19 nt, Homo sapiens
  misc_RNA (1)...(19): siRNA sense strand
gaagaugcaucagauuugc

SEQ ID NO: 1845869 - RNA, 19 nt, Homo sapiens
  misc_RNA (1)...(19): siRNA sense strand
caacuccugugucgucuuc

SEQ ID NO: 1845870 - RNA, 19 nt, Homo sapiens
  misc_RNA (1)...(19): siRNA sense strand
gcgaaugacagcacagauu

SEQ ID NO: 1845871 - RNA, 19 nt, Homo sapiens
  misc_RNA (1)...(19): siRNA sense strand
cgaagagccaugcccauaa

SEQ ID NO: 1845872 - RNA, 19 nt, Homo sapiens
  misc_RNA (1)...(19): siRNA sense strand
agaagaagaacaacaagaa

SEQ ID NO: 1845873 - RNA, 19 nt, Homo sapiens
  misc_RNA (1)...(19): siRNA sense strand
gaagaccgagugaacaaau

SEQ ID NO: 1845874 - RNA, 19 nt, Homo sapiens
  misc_RNA (1)...(19): siRNA sense strand
agacgacaauuucaaagga

SEQ ID NO: 1845875 - RNA, 19 nt, Homo sapiens
  misc_RNA (1)...(19): siRNA sense strand
caacaaugccuggcucuau

SEQ ID NO: 1845876 - RNA, 19 nt, Homo sapiens
  misc_RNA (1)...(19): siRNA sense strand
gcagcagccagcauugaua

SEQ ID NO: 1845877 - RNA, 19 nt, Homo sapiens
  misc_RNA (1)...(19): siRNA sense strand
gcaagcaaacggagagguu

SEQ ID NO: 1845878 - RNA, 19 nt, Homo sapiens
  misc_RNA (1)...(19): siRNA sense strand
ggugauuucuggcccaaug

SEQ ID NO: 1845879 - RNA, 19 nt, Homo sapiens
  misc_RNA (1)...(19): siRNA sense strand
ggauaguauucauuucuuc

SEQ ID NO: 1845880 - RNA, 19 nt, Homo sapiens
  misc_RNA (1)...(19): siRNA sense strand
gggaaaugucugaaucuuu

SEQ ID NO: 1845881 - RNA, 19 nt, Homo sapiens
  misc_RNA (1)...(19): siRNA sense strand
agacauagcagagcagaaa

SEQ ID NO: 1845882 - RNA, 19 nt, Homo sapiens
  misc_RNA (1)...(19): siRNA sense strand
caaacccacugaugaacga

SEQ ID NO: 1845883 - RNA, 19 nt, Homo sapiens
  misc_RNA (1)...(19): siRNA sense strand
gcaaacagagcauggucaa

SEQ ID NO: 1845884 - RNA, 19 nt, Homo sapiens
  misc_RNA (1)...(19): siRNA sense strand
gcacagauuuuggaucauu

SEQ ID NO: 1845885 - RNA, 19 nt, Homo sapiens
  misc_RNA (1)...(19): siRNA sense strand
cggcguggaugucugcuuu

SEQ ID NO: 1845886 - RNA, 19 nt, Homo sapiens
  misc_RNA (1)...(19): siRNA sense strand
gaaaagaaaccugaaguga

SEQ ID NO: 1845887 - RNA, 19 nt, Homo sapiens
  misc_RNA (1)...(19): siRNA sense strand
gagcccaggucugagauga

SEQ ID NO: 1845888 - RNA, 19 nt, Homo sapiens
  misc_RNA (1)...(19): siRNA sense strand
aaacaucagugggaauugu

SEQ ID NO: 1845889 - RNA, 19 nt, Homo sapiens
  misc_RNA (1)...(19): siRNA sense strand
uagcaccgguguaaggaaa

SEQ ID NO: 1845890 - RNA, 19 nt, Homo sapiens
  misc_RNA (1)...(19): siRNA sense strand
gcagggaugaauauuauca

SEQ ID NO: 1845891 - RNA, 19 nt, Homo sapiens
  misc_RNA (1)...(19): siRNA sense strand
gcuaauggcagcuuucauc

SEQ ID NO: 1845892 - RNA, 19 nt, Homo sapiens
  misc_RNA (1)...(19): siRNA sense strand
uagaagagagcauuaagga

SEQ ID NO: 1845893 - RNA, 19 nt, Homo sapiens
  misc_RNA (1)...(19): siRNA sense strand
gcucaccagugccaaggaa

SEQ ID NO: 1845894 - RNA, 19 nt, Homo sapiens
  misc_RNA (1)...(19): siRNA sense strand
gacaggacccagagucauu

SEQ ID NO: 1845895 - RNA, 19 nt, Homo sapiens
  misc_RNA (1)...(19): siRNA sense strand
gcaaugugcuggugucuga

SEQ ID NO: 1845896 - RNA, 19 nt, Homo sapiens
  misc_RNA (1)...(19): siRNA sense strand
cagaauguauugccaagua

SEQ ID NO: 1845897 - RNA, 19 nt, Homo sapiens
  misc_RNA (1)...(19): siRNA sense strand
gaacaaagucgccgucaag

SEQ ID NO: 1845898 - RNA, 19 nt, Homo sapiens
  misc_RNA (1)...(19): siRNA sense strand
gcgagugccuuauccaaga

SEQ ID NO: 1845899 - RNA, 19 nt, Homo sapiens
  misc_RNA (1)...(19): siRNA sense strand
gagagcagcuugagcacau

SEQ ID NO: 1845900 - RNA, 19 nt, Homo sapiens
  misc_RNA (1)...(19): siRNA sense strand
ggagaagggcuacaagaug

SEQ ID NO: 1845901 - RNA, 19 nt, Homo sapiens
  misc_RNA (1)...(19): siRNA sense strand
ggaacaaagucgccgucaa

SEQ ID NO: 1845902 - RNA, 19 nt, Homo sapiens
  misc_RNA (1)...(19): siRNA sense strand
gaaauucuccacuaagucu

SEQ ID NO: 1845903 - RNA, 19 nt, Homo sapiens
  misc_RNA (1)...(19): siRNA sense strand
gagacgugcucaccauugu

SEQ ID NO: 1845904 - RNA, 19 nt, Homo sapiens
  misc_RNA (1)...(19): siRNA sense strand
gaggagguguacuuugaga

SEQ ID NO: 1845905 - RNA, 19 nt, Homo sapiens
  misc_RNA (1)...(19): siRNA sense strand
acgaggagguguacuuuga

SEQ ID NO: 1845906 - RNA, 19 nt, Homo sapiens
  misc_RNA (1)...(19): siRNA sense strand
gcugggcccugaacaugaa

SEQ ID NO: 1845907 - RNA, 19 nt, Homo sapiens
  misc_RNA (1)...(19): siRNA sense strand
ucaagugcauuaagaacga

SEQ ID NO: 1845908 - RNA, 19 nt, Homo sapiens
  misc_RNA (1)...(19): siRNA sense strand
ggaccugcccuucugcaaa

SEQ ID NO: 1845909 - RNA, 19 nt, Homo sapiens
  misc_RNA (1)...(19): siRNA sense strand
gaccugcccuucugcaaag

SEQ ID NO: 1845910 - RNA, 19 nt, Homo sapiens
  misc_RNA (1)...(19): siRNA sense strand
ugggaaaucuacuccuuug

SEQ ID NO: 1845911 - RNA, 19 nt, Homo sapiens
  misc_RNA (1)...(19): siRNA sense strand
gggcaacaauuucgugcau

SEQ ID NO: 1845912 - RNA, 19 nt, Homo sapiens
  misc_RNA (1)...(19): siRNA sense strand
ggagacgugcucaccauug

SEQ ID NO: 1845913 - RNA, 19 nt, Homo sapiens
  misc_RNA (1)...(19): siRNA sense strand
caucgucacugaguacaug

SEQ ID NO: 1845914 - RNA, 19 nt, Homo sapiens
  misc_RNA (1)...(19): siRNA sense strand
gccgucaagugcauuaaga

SEQ ID NO: 1845915 - RNA, 19 nt, Homo sapiens
  misc_RNA (1)...(19): siRNA sense strand
gaaggcggguaccaaacuc

SEQ ID NO: 1845916 - RNA, 19 nt, Homo sapiens
  misc_RNA (1)...(19): siRNA sense strand
caacugguacaaagccaaa

SEQ ID NO: 1845917 - RNA, 19 nt, Homo sapiens
  misc_RNA (1)...(19): siRNA sense strand
ggaguucggagacgugaug

SEQ ID NO: 1845918 - RNA, 19 nt, Homo sapiens
  misc_RNA (1)...(19): siRNA sense strand
guggagcacuaccgcauca

SEQ ID NO: 1845919 - RNA, 19 nt, Homo sapiens
  misc_RNA (1)...(19): siRNA sense strand
cgagugccuuauccaagaa

SEQ ID NO: 1845920 - RNA, 19 nt, Homo sapiens
  misc_RNA (1)...(19): siRNA sense strand
gaacaugaaggagcugaag

SEQ ID NO: 1845921 - RNA, 19 nt, Homo sapiens
  misc_RNA (1)...(19): siRNA sense strand
ccagcaagcucagcaucga

SEQ ID NO: 1845922 - RNA, 19 nt, Homo sapiens
  misc_RNA (1)...(19): siRNA sense strand
cgacgaggagguguacuuu

SEQ ID NO: 1845923 - RNA, 19 nt, Homo sapiens
  misc_RNA (1)...(19): siRNA sense strand
ggaauccuucucugggaaa

SEQ ID NO: 1845924 - RNA, 19 nt, Homo sapiens
  misc_RNA (1)...(19): siRNA sense strand
agucugacguguggaguuu

SEQ ID NO: 1845925 - RNA, 19 nt, Homo sapiens
  misc_RNA (1)...(19): siRNA sense strand
gcaagcugccagucaagug

SEQ ID NO: 1845926 - RNA, 19 nt, Homo sapiens
  misc_RNA (1)...(19): siRNA sense strand
agaccuggcugcccgcaau

SEQ ID NO: 1845927 - RNA, 19 nt, Homo sapiens
  misc_RNA (1)...(19): siRNA sense strand
ccaaggaccccaacuggua

SEQ ID NO: 1845928 - RNA, 19 nt, Homo sapiens
  misc_RNA (1)...(19): siRNA sense strand
gagcacuaccgcaucaugu

SEQ ID NO: 1845929 - RNA, 19 nt, Homo sapiens
  misc_RNA (1)...(19): siRNA sense strand
guaccaaacucagccucau

SEQ ID NO: 1845930 - RNA, 19 nt, Homo sapiens
  misc_RNA (1)...(19): siRNA sense strand
guacgcgccucauuaaacc

SEQ ID NO: 1845931 - RNA, 19 nt, Homo sapiens
  misc_RNA (1)...(19): siRNA sense strand
gccauccgguacagaaugu

SEQ ID NO: 1845932 - RNA, 19 nt, Homo sapiens
  misc_RNA (1)...(19): siRNA sense strand
ggcucuacaucgucacuga

SEQ ID NO: 1845933 - RNA, 19 nt, Homo sapiens
  misc_RNA (1)...(19): siRNA sense strand
gcacuaccgcaucauguac

SEQ ID NO: 1845934 - RNA, 19 nt, Homo sapiens
  misc_RNA (1)...(19): siRNA sense strand
ucugggaaaucuacuccuu

SEQ ID NO: 1845935 - RNA, 19 nt, Homo sapiens
  misc_RNA (1)...(19): siRNA sense strand
ggccaaggucagcgacuuu

SEQ ID NO: 1845936 - RNA, 19 nt, Homo sapiens
  misc_RNA (1)...(19): siRNA sense strand
ucuguacgcgccucauuaa

SEQ ID NO: 1845937 - RNA, 19 nt, Homo sapiens
  misc_RNA (1)...(19): siRNA sense strand
ggagcacuaccgcaucaug

SEQ ID NO: 1845938 - RNA, 19 nt, Homo sapiens
  misc_RNA (1)...(19): siRNA sense strand
ggagguguacuuugagaac

SEQ ID NO: 1845939 - RNA, 19 nt, Homo sapiens
  misc_RNA (1)...(19): siRNA sense strand
ucugcgaggccauggaaua

SEQ ID NO: 1845940 - RNA, 19 nt, Homo sapiens
  misc_RNA (1)...(19): siRNA sense strand
aggcugagcggcuucugua

SEQ ID NO: 1845941 - RNA, 19 nt, Homo sapiens
  misc_RNA (1)...(19): siRNA sense strand
caaguucucgcuagauguc

SEQ ID NO: 1845942 - RNA, 19 nt, Homo sapiens
  misc_RNA (1)...(19): siRNA sense strand
cgugaaggcggguaccaaa

SEQ ID NO: 1845943 - RNA, 19 nt, Homo sapiens
  misc_RNA (1)...(19): siRNA sense strand
gaauccuucucugggaaau

SEQ ID NO: 1845944 - RNA, 19 nt, Homo sapiens
  misc_RNA (1)...(19): siRNA sense strand
acggcaagguggagcacua

SEQ ID NO: 1845945 - RNA, 19 nt, Homo sapiens
  misc_RNA (1)...(19): siRNA sense strand
cucaaguucucgcuagaug

SEQ ID NO: 1845946 - RNA, 19 nt, Homo sapiens
  misc_RNA (1)...(19): siRNA sense strand
caucaucccagccaacuac

SEQ ID NO: 1845947 - RNA, 19 nt, Homo sapiens
  misc_RNA (1)...(19): siRNA sense strand
gcaucgacgaggaggugua

SEQ ID NO: 1845948 - RNA, 19 nt, Homo sapiens
  misc_RNA (1)...(19): siRNA sense strand
guggagaagggcuacaaga

SEQ ID NO: 1845949 - RNA, 19 nt, Homo sapiens
  misc_RNA (1)...(19): siRNA sense strand
ucuacaucgucacugagua

SEQ ID NO: 1845950 - RNA, 19 nt, Homo sapiens
  misc_RNA (1)...(19): siRNA sense strand
aaggagacgugcucaccau

SEQ ID NO: 1845951 - RNA, 19 nt, Homo sapiens
  misc_RNA (1)...(19): siRNA sense strand
acgugaugcugggcgauua

SEQ ID NO: 1845952 - RNA, 19 nt, Homo sapiens
  misc_RNA (1)...(19): siRNA sense strand
gggcgagugccuuauccaa

SEQ ID NO: 1845953 - RNA, 19 nt, Homo sapiens
  misc_RNA (1)...(19): siRNA sense strand
ccugaggcccugagagaga

SEQ ID NO: 1845954 - RNA, 19 nt, Homo sapiens
  misc_RNA (1)...(19): siRNA sense strand
gacgaggagguguacuuug

SEQ ID NO: 1845955 - RNA, 19 nt, Homo sapiens
  misc_RNA (1)...(19): siRNA sense strand
gcccugagagagaagaaau

SEQ ID NO: 1845956 - RNA, 19 nt, Homo sapiens
  misc_RNA (1)...(19): siRNA sense strand
gcgaggccauggaauaccu

SEQ ID NO: 1845957 - RNA, 19 nt, Homo sapiens
  misc_RNA (1)...(19): siRNA sense strand
gcgauuaccgagggaacaa

SEQ ID NO: 1845958 - RNA, 19 nt, Homo sapiens
  misc_RNA (1)...(19): siRNA sense strand
cguguggaguuucggaauc

SEQ ID NO: 1845959 - RNA, 19 nt, Homo sapiens
  misc_RNA (1)...(19): siRNA sense strand
gcaucaucccagccaacua

SEQ ID NO: 1845960 - RNA, 19 nt, Homo sapiens
  misc_RNA (1)...(19): siRNA sense strand
gaauaugacuggauuggua

SEQ ID NO: 1845961 - RNA, 19 nt, Homo sapiens
  misc_RNA (1)...(19): siRNA sense strand
cuuaaaggcugacacauua

SEQ ID NO: 1845962 - RNA, 19 nt, Homo sapiens
  misc_RNA (1)...(19): siRNA sense strand
caauagaaguguuauguga

SEQ ID NO: 1845963 - RNA, 19 nt, Homo sapiens
  misc_RNA (1)...(19): siRNA sense strand
ggucauauguucauguauu

SEQ ID NO: 1845964 - RNA, 19 nt, Homo sapiens
  misc_RNA (1)...(19): siRNA sense strand
gagauaagaugcaacaauc

SEQ ID NO: 1845965 - RNA, 19 nt, Homo sapiens
  misc_RNA (1)...(19): siRNA sense strand
caaagaaacacauaccaua

SEQ ID NO: 1845966 - RNA, 19 nt, Homo sapiens
  misc_RNA (1)...(19): siRNA sense strand
gcaaaggaauauauugauc

SEQ ID NO: 1845967 - RNA, 19 nt, Homo sapiens
  misc_RNA (1)...(19): siRNA sense strand
gcacaucaacacagagaua

SEQ ID NO: 1845968 - RNA, 19 nt, Homo sapiens
  misc_RNA (1)...(19): siRNA sense strand
gcaagauccugcucuguca

SEQ ID NO: 1845969 - RNA, 19 nt, Homo sapiens
  misc_RNA (1)...(19): siRNA sense strand
caugauagcuauacaacug

SEQ ID NO: 1845970 - RNA, 19 nt, Homo sapiens
  misc_RNA (1)...(19): siRNA sense strand
gaugguauaccucaaguuu

SEQ ID NO: 1845971 - RNA, 19 nt, Homo sapiens
  misc_RNA (1)...(19): siRNA sense strand
gaaagacaaggacaaauca

SEQ ID NO: 1845972 - RNA, 19 nt, Homo sapiens
  misc_RNA (1)...(19): siRNA sense strand
uagaagagacgauuuagaa

SEQ ID NO: 1845973 - RNA, 19 nt, Homo sapiens
  misc_RNA (1)...(19): siRNA sense strand
ggacacaacacucgaggaa

SEQ ID NO: 1845974 - RNA, 19 nt, Homo sapiens
  misc_RNA (1)...(19): siRNA sense strand
caaagaacuugauauacag

SEQ ID NO: 1845975 - RNA, 19 nt, Homo sapiens
  misc_RNA (1)...(19): siRNA sense strand
gaaauggcaacauaucuuc

SEQ ID NO: 1845976 - RNA, 19 nt, Homo sapiens
  misc_RNA (1)...(19): siRNA sense strand
ggagacaaagaaacacaua

SEQ ID NO: 1845977 - RNA, 19 nt, Homo sapiens
  misc_RNA (1)...(19): siRNA sense strand
cacaagagccuuacaggaa

SEQ ID NO: 1845978 - RNA, 19 nt, Homo sapiens
  misc_RNA (1)...(19): siRNA sense strand
uaaaggagagguaucagaa

SEQ ID NO: 1845979 - RNA, 19 nt, Homo sapiens
  misc_RNA (1)...(19): siRNA sense strand
gagcaccacagcuacauuu

SEQ ID NO: 1845980 - RNA, 19 nt, Homo sapiens
  misc_RNA (1)...(19): siRNA sense strand
gagacgauuuagaagcuuu

SEQ ID NO: 1845981 - RNA, 19 nt, Homo sapiens
  misc_RNA (1)...(19): siRNA sense strand
cagauucuauaagcaguua

SEQ ID NO: 1845982 - RNA, 19 nt, Homo sapiens
  misc_RNA (1)...(19): siRNA sense strand
gcugggaccuaguuuggaa

SEQ ID NO: 1845983 - RNA, 19 nt, Homo sapiens
  misc_RNA (1)...(19): siRNA sense strand
ggcaacauaucuucguuau

SEQ ID NO: 1845984 - RNA, 19 nt, Homo sapiens
  misc_RNA (1)...(19): siRNA sense strand
gcuuaaaggcugacacauu

SEQ ID NO: 1845985 - RNA, 19 nt, Homo sapiens
  misc_RNA (1)...(19): siRNA sense strand
acacauaccauacagagaa

SEQ ID NO: 1845986 - RNA, 19 nt, Homo sapiens
  misc_RNA (1)...(19): siRNA sense strand
uuccagaaauggcaacaua

SEQ ID NO: 1845987 - RNA, 19 nt, Homo sapiens
  misc_RNA (1)...(19): siRNA sense strand
ccagcaaguuauucacauu

SEQ ID NO: 1845988 - RNA, 19 nt, Homo sapiens
  misc_RNA (1)...(19): siRNA sense strand
uaggucauauguucaugua

SEQ ID NO: 1845989 - RNA, 19 nt, Homo sapiens
  misc_RNA (1)...(19): siRNA sense strand
cagcaaguuauucacauua

SEQ ID NO: 1845990 - RNA, 19 nt, Homo sapiens
  misc_RNA (1)...(19): siRNA sense strand
aaacagagaagcacaucaa

SEQ ID NO: 1845991 - RNA, 19 nt, Homo sapiens
  misc_RNA (1)...(19): siRNA sense strand
caccacagcuacauuugga

SEQ ID NO: 1845992 - RNA, 19 nt, Homo sapiens
  misc_RNA (1)...(19): siRNA sense strand
accagacuaugaauacuua

SEQ ID NO: 1845993 - RNA, 19 nt, Homo sapiens
  misc_RNA (1)...(19): siRNA sense strand
gauagaauggcacgaccua

SEQ ID NO: 1845994 - RNA, 19 nt, Homo sapiens
  misc_RNA (1)...(19): siRNA sense strand
aggaacagcuagauauaug

SEQ ID NO: 1845995 - RNA, 19 nt, Homo sapiens
  misc_RNA (1)...(19): siRNA sense strand
gaauauguggcaauuaagu

SEQ ID NO: 1845996 - RNA, 19 nt, Homo sapiens
  misc_RNA (1)...(19): siRNA sense strand
aaguagaagugauggauga

SEQ ID NO: 1845997 - RNA, 19 nt, Homo sapiens
  misc_RNA (1)...(19): siRNA sense strand
agaagcacaucaacacaga

SEQ ID NO: 1845998 - RNA, 19 nt, Homo sapiens
  misc_RNA (1)...(19): siRNA sense strand
gguaaacaguugccuacuc

SEQ ID NO: 1845999 - RNA, 19 nt, Homo sapiens
  misc_RNA (1)...(19): siRNA sense strand
caaaguagaagagacgauu

SEQ ID NO: 1846000 - RNA, 19 nt, Homo sapiens
  misc_RNA (1)...(19): siRNA sense strand
acacagagauaagaugcaa

SEQ ID NO: 1846001 - RNA, 19 nt, Homo sapiens
  misc_RNA (1)...(19): siRNA sense strand
ggaagacuuguuugacuug

SEQ ID NO: 1846002 - RNA, 19 nt, Homo sapiens
  misc_RNA (1)...(19): siRNA sense strand
ggagagguaucagaaaauu

SEQ ID NO: 1846003 - RNA, 19 nt, Homo sapiens
  misc_RNA (1)...(19): siRNA sense strand
gagaugguauaccucaagu

SEQ ID NO: 1846004 - RNA, 19 nt, Homo sapiens
  misc_RNA (1)...(19): siRNA sense strand
uaaaggcugacacauuaaa

SEQ ID NO: 1846005 - RNA, 19 nt, Homo sapiens
  misc_RNA (1)...(19): siRNA sense strand
ggaacagcuagauauauga

SEQ ID NO: 1846006 - RNA, 19 nt, Homo sapiens
  misc_RNA (1)...(19): siRNA sense strand
ugacuugugugacagaaca

SEQ ID NO: 1846007 - RNA, 19 nt, Homo sapiens
  misc_RNA (1)...(19): siRNA sense strand
acacaacacucgaggaacu

SEQ ID NO: 1846008 - RNA, 19 nt, Homo sapiens
  misc_RNA (1)...(19): siRNA sense strand
aaagaaagacaaggacaaa

SEQ ID NO: 1846009 - RNA, 19 nt, Homo sapiens
  misc_RNA (1)...(19): siRNA sense strand
ggaacugggucuucaucgu

SEQ ID NO: 1846010 - RNA, 19 nt, Homo sapiens
  misc_RNA (1)...(19): siRNA sense strand
gaauuacgauuagggaaaa

SEQ ID NO: 1846011 - RNA, 19 nt, Homo sapiens
  misc_RNA (1)...(19): siRNA sense strand
ccauacagcgccacaaaug

SEQ ID NO: 1846012 - RNA, 19 nt, Homo sapiens
  misc_RNA (1)...(19): siRNA sense strand
cgaaaaggauauauguuug

SEQ ID NO: 1846013 - RNA, 19 nt, Homo sapiens
  misc_RNA (1)...(19): siRNA sense strand
gaacacaagagccuuacag

SEQ ID NO: 1846014 - RNA, 19 nt, Homo sapiens
  misc_RNA (1)...(19): siRNA sense strand
guaaauacaaugcuauggu

SEQ ID NO: 1846015 - RNA, 19 nt, Homo sapiens
  misc_RNA (1)...(19): siRNA sense strand
uaaguuggagcccaugaaa

SEQ ID NO: 1846016 - RNA, 19 nt, Homo sapiens
  misc_RNA (1)...(19): siRNA sense strand
cuacaaauggagaguuaaa

SEQ ID NO: 1846017 - RNA, 19 nt, Homo sapiens
  misc_RNA (1)...(19): siRNA sense strand
aaaacgggcuacaccaaua

SEQ ID NO: 1846018 - RNA, 19 nt, Homo sapiens
  misc_RNA (1)...(19): siRNA sense strand
uuagaagcuuuaggucaua

SEQ ID NO: 1846019 - RNA, 19 nt, Homo sapiens
  misc_RNA (1)...(19): siRNA sense strand
uuaauaggacgaccaagaa

SEQ ID NO: 1846020 - RNA, 19 nt, Homo sapiens
  misc_RNA (1)...(19): siRNA sense strand
gaacuugauauacagagau

SEQ ID NO: 1846021 - RNA, 19 nt, Homo sapiens
  misc_RNA (1)...(19): siRNA sense strand
aaacaguucucaugauagc

SEQ ID NO: 1846022 - RNA, 19 nt, Homo sapiens
  misc_RNA (1)...(19): siRNA sense strand
acaggaacagcuagauaua

SEQ ID NO: 1846023 - RNA, 19 nt, Homo sapiens
  misc_RNA (1)...(19): siRNA sense strand
uuacaggaacagcuagaua

SEQ ID NO: 1846024 - RNA, 19 nt, Homo sapiens
  misc_RNA (1)...(19): siRNA sense strand
uggaagacuuguuugacuu

SEQ ID NO: 1846025 - RNA, 19 nt, Homo sapiens
  misc_RNA (1)...(19): siRNA sense strand
uaagaugcaacaauccaaa

SEQ ID NO: 1846026 - RNA, 19 nt, Homo sapiens
  misc_RNA (1)...(19): siRNA sense strand
gaacagcuagauauaugag

SEQ ID NO: 1846027 - RNA, 19 nt, Homo sapiens
  misc_RNA (1)...(19): siRNA sense strand
gaaacacauaccauacaga

SEQ ID NO: 1846028 - RNA, 19 nt, Homo sapiens
  misc_RNA (1)...(19): siRNA sense strand
gaagacuuguuugacuugu

SEQ ID NO: 1846029 - RNA, 19 nt, Homo sapiens
  misc_RNA (1)...(19): siRNA sense strand
ggaccuaguuuggaagacu

SEQ ID NO: 1846030 - RNA, 19 nt, Homo sapiens
  misc_RNA (1)...(19): siRNA sense strand
agaaagacaaggacaaauc

SEQ ID NO: 1846031 - RNA, 19 nt, Homo sapiens
  misc_RNA (1)...(19): siRNA sense strand
guagaagagacgauuuaga

SEQ ID NO: 1846032 - RNA, 19 nt, Homo sapiens
  misc_RNA (1)...(19): siRNA sense strand
ugauuucucgcauggaaua

SEQ ID NO: 1846033 - RNA, 19 nt, Homo sapiens
  misc_RNA (1)...(19): siRNA sense strand
gaccuaguuuggaagacuu

SEQ ID NO: 1846034 - RNA, 19 nt, Homo sapiens
  misc_RNA (1)...(19): siRNA sense strand
ugguauaccucaaguuuac

SEQ ID NO: 1846035 - RNA, 19 nt, Homo sapiens
  misc_RNA (1)...(19): siRNA sense strand
uauguaagaaggcuagauu

SEQ ID NO: 1846036 - RNA, 19 nt, Homo sapiens
  misc_RNA (1)...(19): siRNA sense strand
aaguagaagagacgauuua

SEQ ID NO: 1846037 - RNA, 19 nt, Homo sapiens
  misc_RNA (1)...(19): siRNA sense strand
caagagccuuacaggaaca

SEQ ID NO: 1846038 - RNA, 19 nt, Homo sapiens
  misc_RNA (1)...(19): siRNA sense strand
agagaacacaagagccuua

SEQ ID NO: 1846039 - RNA, 19 nt, Homo sapiens
  misc_RNA (1)...(19): siRNA sense strand
agacuuguuugacuugugu

SEQ ID NO: 1846040 - RNA, 19 nt, Homo sapiens
  misc_RNA (1)...(19): siRNA sense strand
ugugguaaauacaaugcua

SEQ ID NO: 1846041 - RNA, 19 nt, Homo sapiens
  misc_RNA (1)...(19): siRNA sense strand
caucaacacagagauaaga

SEQ ID NO: 1846042 - RNA, 19 nt, Homo sapiens
  misc_RNA (1)...(19): siRNA sense strand
ggaaaagaacaaaguagaa

SEQ ID NO: 1846043 - RNA, 19 nt, Homo sapiens
  misc_RNA (1)...(19): siRNA sense strand
uggcaaaggaauauauuga

SEQ ID NO: 1846044 - RNA, 19 nt, Homo sapiens
  misc_RNA (1)...(19): siRNA sense strand
caaaugaauauguggcaau

SEQ ID NO: 1846045 - RNA, 19 nt, Homo sapiens
  misc_RNA (1)...(19): siRNA sense strand
agaauuacgauuagggaaa

SEQ ID NO: 1846046 - RNA, 19 nt, Homo sapiens
  misc_RNA (1)...(19): siRNA sense strand
gagaguuaaacacagauga

SEQ ID NO: 1846047 - RNA, 19 nt, Homo sapiens
  misc_RNA (1)...(19): siRNA sense strand
gacaaggacaaaucagaug

SEQ ID NO: 1846048 - RNA, 19 nt, Homo sapiens
  misc_RNA (1)...(19): siRNA sense strand
uuuagaagcuuuaggucau

SEQ ID NO: 1846049 - RNA, 19 nt, Homo sapiens
  misc_RNA (1)...(19): siRNA sense strand
uaauaggacgaccaagaaa

SEQ ID NO: 1846050 - RNA, 19 nt, Homo sapiens
  misc_RNA (1)...(19): siRNA sense strand
gauaagaugcaacaaucca

SEQ ID NO: 1846051 - RNA, 19 nt, Homo sapiens
  misc_RNA (1)...(19): siRNA sense strand
agaaauggcaacauaucuu

SEQ ID NO: 1846052 - RNA, 19 nt, Homo sapiens
  misc_RNA (1)...(19): siRNA sense strand
ccagaaauggcaacauauc

SEQ ID NO: 1846053 - RNA, 19 nt, Homo sapiens
  misc_RNA (1)...(19): siRNA sense strand
ggagaugguauaccucaag

SEQ ID NO: 1846054 - RNA, 19 nt, Homo sapiens
  misc_RNA (1)...(19): siRNA sense strand
uagaagugauggaugaaac

SEQ ID NO: 1846055 - RNA, 19 nt, Homo sapiens
  misc_RNA (1)...(19): siRNA sense strand
uucuacaaauggagaguua

SEQ ID NO: 1846056 - RNA, 19 nt, Homo sapiens
  misc_RNA (1)...(19): siRNA sense strand
guauaccucaaguuuacua

SEQ ID NO: 1846057 - RNA, 19 nt, Homo sapiens
  misc_RNA (1)...(19): siRNA sense strand
gaagcuuuaggucauaugu

SEQ ID NO: 1846058 - RNA, 19 nt, Homo sapiens
  misc_RNA (1)...(19): siRNA sense strand
cauacagcgccacaaauga

SEQ ID NO: 1846059 - RNA, 19 nt, Homo sapiens
  misc_RNA (1)...(19): siRNA sense strand
guagaagugauggaugaaa

SEQ ID NO: 1846060 - RNA, 19 nt, Homo sapiens
  misc_RNA (1)...(19): siRNA sense strand
gaacacagcuucauuaaua

SEQ ID NO: 1846061 - RNA, 19 nt, Homo sapiens
  misc_RNA (1)...(19): siRNA sense strand
gaacagggcacacaggaua

SEQ ID NO: 1846062 - RNA, 19 nt, Homo sapiens
  misc_RNA (1)...(19): siRNA sense strand
gggcugaucugaccaauga

SEQ ID NO: 1846063 - RNA, 19 nt, Homo sapiens
  misc_RNA (1)...(19): siRNA sense strand
ggaggcaccuguauugaug

SEQ ID NO: 1846064 - RNA, 19 nt, Homo sapiens
  misc_RNA (1)...(19): siRNA sense strand
gaggaacacagcuucauua

SEQ ID NO: 1846065 - RNA, 19 nt, Homo sapiens
  misc_RNA (1)...(19): siRNA sense strand
gaagaagaaacccugauuu

SEQ ID NO: 1846066 - RNA, 19 nt, Homo sapiens
  misc_RNA (1)...(19): siRNA sense strand
gcccugcccugucucuuua

SEQ ID NO: 1846067 - RNA, 19 nt, Homo sapiens
  misc_RNA (1)...(19): siRNA sense strand
ccagugcaaugaaggauuu

SEQ ID NO: 1846068 - RNA, 19 nt, Homo sapiens
  misc_RNA (1)...(19): siRNA sense strand
ggaagaagaaacccugauu

SEQ ID NO: 1846069 - RNA, 19 nt, Homo sapiens
  misc_RNA (1)...(19): siRNA sense strand
caaauugucugcaccaaac

SEQ ID NO: 1846070 - RNA, 19 nt, Homo sapiens
  misc_RNA (1)...(19): siRNA sense strand
gaucccagguguuugaaga

SEQ ID NO: 1846071 - RNA, 19 nt, Homo sapiens
  misc_RNA (1)...(19): siRNA sense strand
gaauguggcuguagguuuu

SEQ ID NO: 1846072 - RNA, 19 nt, Homo sapiens
  misc_RNA (1)...(19): siRNA sense strand
ggugacagguguuguguuc

SEQ ID NO: 1846073 - RNA, 19 nt, Homo sapiens
  misc_RNA (1)...(19): siRNA sense strand
ccacugagacugccacuga

SEQ ID NO: 1846074 - RNA, 19 nt, Homo sapiens
  misc_RNA (1)...(19): siRNA sense strand
acaccgggcugcaauuuga

SEQ ID NO: 1846075 - RNA, 19 nt, Homo sapiens
  misc_RNA (1)...(19): siRNA sense strand
ggaauguggcuguagguuu

SEQ ID NO: 1846076 - RNA, 19 nt, Homo sapiens
  misc_RNA (1)...(19): siRNA sense strand
gaugaaggacccacuguga

SEQ ID NO: 1846077 - RNA, 19 nt, Homo sapiens
  misc_RNA (1)...(19): siRNA sense strand
gggcgagucugccucaguu

SEQ ID NO: 1846078 - RNA, 19 nt, Homo sapiens
  misc_RNA (1)...(19): siRNA sense strand
cacaggaacucuacgaugu

SEQ ID NO: 1846079 - RNA, 19 nt, Homo sapiens
  misc_RNA (1)...(19): siRNA sense strand
agaaccagccggacaauuu

SEQ ID NO: 1846080 - RNA, 19 nt, Homo sapiens
  misc_RNA (1)...(19): siRNA sense strand
gagaauggaggcaccugua

SEQ ID NO: 1846081 - RNA, 19 nt, Homo sapiens
  misc_RNA (1)...(19): siRNA sense strand
gggcauagaggacuucgaa

SEQ ID NO: 1846082 - RNA, 19 nt, Homo sapiens
  misc_RNA (1)...(19): siRNA sense strand
gaacugugagauugacauu

SEQ ID NO: 1846083 - RNA, 19 nt, Homo sapiens
  misc_RNA (1)...(19): siRNA sense strand
gaauggaggcaccuguauu

SEQ ID NO: 1846084 - RNA, 19 nt, Homo sapiens
  misc_RNA (1)...(19): siRNA sense strand
caauguccaugccacugua

SEQ ID NO: 1846085 - RNA, 19 nt, Homo sapiens
  misc_RNA (1)...(19): siRNA sense strand
ggagaaugccucacucauc

SEQ ID NO: 1846086 - RNA, 19 nt, Homo sapiens
  misc_RNA (1)...(19): siRNA sense strand
ggaggaacacagcuucauu

SEQ ID NO: 1846087 - RNA, 19 nt, Homo sapiens
  misc_RNA (1)...(19): siRNA sense strand
gcccauggccuucuguaaa

SEQ ID NO: 1846088 - RNA, 19 nt, Homo sapiens
  misc_RNA (1)...(19): siRNA sense strand
gaaccagccggacaauuuc

SEQ ID NO: 1846089 - RNA, 19 nt, Homo sapiens
  misc_RNA (1)...(19): siRNA sense strand
acugugagauugacauuga

SEQ ID NO: 1846090 - RNA, 19 nt, Homo sapiens
  misc_RNA (1)...(19): siRNA sense strand
cggaggaggugcacucaga

SEQ ID NO: 1846091 - RNA, 19 nt, Homo sapiens
  misc_RNA (1)...(19): siRNA sense strand
gaggauggcuuugacaacu

SEQ ID NO: 1846092 - RNA, 19 nt, Homo sapiens
  misc_RNA (1)...(19): siRNA sense strand
ggagaaggacgaagggaau

SEQ ID NO: 1846093 - RNA, 19 nt, Homo sapiens
  misc_RNA (1)...(19): siRNA sense strand
ggacauguaaugccaaugg

SEQ ID NO: 1846094 - RNA, 19 nt, Homo sapiens
  misc_RNA (1)...(19): siRNA sense strand
ggaacucuacgauguguau

SEQ ID NO: 1846095 - RNA, 19 nt, Homo sapiens
  misc_RNA (1)...(19): siRNA sense strand
gggaagaugccgagaagga

SEQ ID NO: 1846096 - RNA, 19 nt, Homo sapiens
  misc_RNA (1)...(19): siRNA sense strand
caacaccgggcugcaauuu

SEQ ID NO: 1846097 - RNA, 19 nt, Homo sapiens
  misc_RNA (1)...(19): siRNA sense strand
caacauggagaccuagaga

SEQ ID NO: 1846098 - RNA, 19 nt, Homo sapiens
  misc_RNA (1)...(19): siRNA sense strand
uaagguaccagugcaauga

SEQ ID NO: 1846099 - RNA, 19 nt, Homo sapiens
  misc_RNA (1)...(19): siRNA sense strand
caacuacaaccuacccuau

SEQ ID NO: 1846100 - RNA, 19 nt, Homo sapiens
  misc_RNA (1)...(19): siRNA sense strand
gaagaaacccugauuuugg

SEQ ID NO: 1846101 - RNA, 19 nt, Homo sapiens
  misc_RNA (1)...(19): siRNA sense strand
ggaacacagcuucauuaau

SEQ ID NO: 1846102 - RNA, 19 nt, Homo sapiens
  misc_RNA (1)...(19): siRNA sense strand
aagcaggagucucaacaga

SEQ ID NO: 1846103 - RNA, 19 nt, Homo sapiens
  misc_RNA (1)...(19): siRNA sense strand
gagagaaccagccggacaa

SEQ ID NO: 1846104 - RNA, 19 nt, Homo sapiens
  misc_RNA (1)...(19): siRNA sense strand
uuugagaacuggcgagaga

SEQ ID NO: 1846105 - RNA, 19 nt, Homo sapiens
  misc_RNA (1)...(19): siRNA sense strand
ggacaacaccgggcugcaa

SEQ ID NO: 1846106 - RNA, 19 nt, Homo sapiens
  misc_RNA (1)...(19): siRNA sense strand
ggauggcuuugacaacugu

SEQ ID NO: 1846107 - RNA, 19 nt, Homo sapiens
  misc_RNA (1)...(19): siRNA sense strand
gcaggccacuguagaugag

SEQ ID NO: 1846108 - RNA, 19 nt, Homo sapiens
  misc_RNA (1)...(19): siRNA sense strand
gcacuguucgguauccuau

SEQ ID NO: 1846109 - RNA, 19 nt, Homo sapiens
  misc_RNA (1)...(19): siRNA sense strand
gaacaucaggagcuucagu

SEQ ID NO: 1846110 - RNA, 19 nt, Homo sapiens
  misc_RNA (1)...(19): siRNA sense strand
gccgaaagcaccaccuuga

SEQ ID NO: 1846111 - RNA, 19 nt, Homo sapiens
  misc_RNA (1)...(19): siRNA sense strand
gcagagaccaagguguauu

SEQ ID NO: 1846112 - RNA, 19 nt, Homo sapiens
  misc_RNA (1)...(19): siRNA sense strand
ggagaggccaugcccacaa

SEQ ID NO: 1846113 - RNA, 19 nt, Homo sapiens
  misc_RNA (1)...(19): siRNA sense strand
acacugggcuccucaagcu

SEQ ID NO: 1846114 - RNA, 19 nt, Homo sapiens
  misc_RNA (1)...(19): siRNA sense strand
gcagaaaacacaagaaaca

SEQ ID NO: 1846115 - RNA, 19 nt, Homo sapiens
  misc_RNA (1)...(19): siRNA sense strand
ucagaucccugugagaaca

SEQ ID NO: 1846116 - RNA, 19 nt, Homo sapiens
  misc_RNA (1)...(19): siRNA sense strand
cgucucagcucagccauca

SEQ ID NO: 1846117 - RNA, 19 nt, Homo sapiens
  misc_RNA (1)...(19): siRNA sense strand
ccaaauugucugcaccaaa

SEQ ID NO: 1846118 - RNA, 19 nt, Homo sapiens
  misc_RNA (1)...(19): siRNA sense strand
ugaaggacccacugugaau

SEQ ID NO: 1846119 - RNA, 19 nt, Homo sapiens
  misc_RNA (1)...(19): siRNA sense strand
gucacaacauggagaccua

SEQ ID NO: 1846120 - RNA, 19 nt, Homo sapiens
  misc_RNA (1)...(19): siRNA sense strand
caacggaggacugggagaa

SEQ ID NO: 1846121 - RNA, 19 nt, Homo sapiens
  misc_RNA (1)...(19): siRNA sense strand
cugcagagaccaaggugua

SEQ ID NO: 1846122 - RNA, 19 nt, Homo sapiens
  misc_RNA (1)...(19): siRNA sense strand
caauagaguugaggcacau

SEQ ID NO: 1846123 - RNA, 19 nt, Homo sapiens
  misc_RNA (1)...(19): siRNA sense strand
ugacagguguuguguucca

SEQ ID NO: 1846124 - RNA, 19 nt, Homo sapiens
  misc_RNA (1)...(19): siRNA sense strand
gagaaggacgaagggaauu

SEQ ID NO: 1846125 - RNA, 19 nt, Homo sapiens
  misc_RNA (1)...(19): siRNA sense strand
cagugaugcuaguggaauu

SEQ ID NO: 1846126 - RNA, 19 nt, Homo sapiens
  misc_RNA (1)...(19): siRNA sense strand
gagaggccaugcccacaac

SEQ ID NO: 1846127 - RNA, 19 nt, Homo sapiens
  misc_RNA (1)...(19): siRNA sense strand
ggauaaaguggaccaaggu

SEQ ID NO: 1846128 - RNA, 19 nt, Homo sapiens
  misc_RNA (1)...(19): siRNA sense strand
gggccacuguuaccgcuau

SEQ ID NO: 1846129 - RNA, 19 nt, Homo sapiens
  misc_RNA (1)...(19): siRNA sense strand
gggagaacugugagauuga

SEQ ID NO: 1846130 - RNA, 19 nt, Homo sapiens
  misc_RNA (1)...(19): siRNA sense strand
ggggagaacugugagauug

SEQ ID NO: 1846131 - RNA, 19 nt, Homo sapiens
  misc_RNA (1)...(19): siRNA sense strand
gggaacaucaggagcuuca

SEQ ID NO: 1846132 - RNA, 19 nt, Homo sapiens
  misc_RNA (1)...(19): siRNA sense strand
ggagaacugugagauugac

SEQ ID NO: 1846133 - RNA, 19 nt, Homo sapiens
  misc_RNA (1)...(19): siRNA sense strand
ggaggugacagguguugug

SEQ ID NO: 1846134 - RNA, 19 nt, Homo sapiens
  misc_RNA (1)...(19): siRNA sense strand
gcauagaggacuucgaacu

SEQ ID NO: 1846135 - RNA, 19 nt, Homo sapiens
  misc_RNA (1)...(19): siRNA sense strand
gaucguggagagagauuuc

SEQ ID NO: 1846136 - RNA, 19 nt, Homo sapiens
  misc_RNA (1)...(19): siRNA sense strand
cagcaucaccaccacaaau

SEQ ID NO: 1846137 - RNA, 19 nt, Homo sapiens
  misc_RNA (1)...(19): siRNA sense strand
acuacaaccuacccuaugu

SEQ ID NO: 1846138 - RNA, 19 nt, Homo sapiens
  misc_RNA (1)...(19): siRNA sense strand
ggucuucgacacagcagaa

SEQ ID NO: 1846139 - RNA, 19 nt, Homo sapiens
  misc_RNA (1)...(19): siRNA sense strand
caggaacucuacgaugugu

SEQ ID NO: 1846140 - RNA, 19 nt, Homo sapiens
  misc_RNA (1)...(19): siRNA sense strand
cagguguuguguuccacua

SEQ ID NO: 1846141 - RNA, 19 nt, Homo sapiens
  misc_RNA (1)...(19): siRNA sense strand
guaagguaccagugcaaug

SEQ ID NO: 1846142 - RNA, 19 nt, Homo sapiens
  misc_RNA (1)...(19): siRNA sense strand
uaauagcuuugggcaugaa

SEQ ID NO: 1846143 - RNA, 19 nt, Homo sapiens
  misc_RNA (1)...(19): siRNA sense strand
aauggaggcaccuguauug

SEQ ID NO: 1846144 - RNA, 19 nt, Homo sapiens
  misc_RNA (1)...(19): siRNA sense strand
ggaguuccagccaugucua

SEQ ID NO: 1846145 - RNA, 19 nt, Homo sapiens
  misc_RNA (1)...(19): siRNA sense strand
gaaggacccacugugaauc

SEQ ID NO: 1846146 - RNA, 19 nt, Homo sapiens
  misc_RNA (1)...(19): siRNA sense strand
ccaccgaggccaauagagu

SEQ ID NO: 1846147 - RNA, 19 nt, Homo sapiens
  misc_RNA (1)...(19): siRNA sense strand
ucuacgauguguauugcuu

SEQ ID NO: 1846148 - RNA, 19 nt, Homo sapiens
  misc_RNA (1)...(19): siRNA sense strand
ggcccuggauacaagcauu

SEQ ID NO: 1846149 - RNA, 19 nt, Homo sapiens
  misc_RNA (1)...(19): siRNA sense strand
ggaacgauguccccugcaa

SEQ ID NO: 1846150 - RNA, 19 nt, Homo sapiens
  misc_RNA (1)...(19): siRNA sense strand
gagaaccagccggacaauu

SEQ ID NO: 1846151 - RNA, 19 nt, Homo sapiens
  misc_RNA (1)...(19): siRNA sense strand
uuaauagcuuugggcauga

SEQ ID NO: 1846152 - RNA, 19 nt, Homo sapiens
  misc_RNA (1)...(19): siRNA sense strand
gggcagcuuuugugagaaa

SEQ ID NO: 1846153 - RNA, 19 nt, Homo sapiens
  misc_RNA (1)...(19): siRNA sense strand
ggcccugcccugucucuuu

SEQ ID NO: 1846154 - RNA, 19 nt, Homo sapiens
  misc_RNA (1)...(19): siRNA sense strand
cauagaggacuucgaacug

SEQ ID NO: 1846155 - RNA, 19 nt, Homo sapiens
  misc_RNA (1)...(19): siRNA sense strand
gcaacccacaggaacucua

SEQ ID NO: 1846156 - RNA, 19 nt, Homo sapiens
  misc_RNA (1)...(19): siRNA sense strand
cgaggacuguguggugaug

SEQ ID NO: 1846157 - RNA, 19 nt, Homo sapiens
  misc_RNA (1)...(19): siRNA sense strand
ucucagcucagccaucauu

SEQ ID NO: 1846158 - RNA, 19 nt, Homo sapiens
  misc_RNA (1)...(19): siRNA sense strand
ugaggucaauggcuuuguc

SEQ ID NO: 1846159 - RNA, 19 nt, Homo sapiens
  misc_RNA (1)...(19): siRNA sense strand
gacaacaccgggcugcaau

SEQ ID NO: 1846160 - RNA, 19 nt, Homo sapiens
  misc_RNA (1)...(19): siRNA sense strand
ucaaagacauccuaaaccu

SEQ ID NO: 1846161 - RNA, 19 nt, Homo sapiens
  misc_RNA (1)...(19): siRNA sense strand
caagugugcgucugccuuu

SEQ ID NO: 1846162 - RNA, 19 nt, Homo sapiens
  misc_RNA (1)...(19): siRNA sense strand
caacaacaacuucgugaac

SEQ ID NO: 1846163 - RNA, 19 nt, Homo sapiens
  misc_RNA (1)...(19): siRNA sense strand
acaacaacuucgugaacuu

SEQ ID NO: 1846164 - RNA, 19 nt, Homo sapiens
  misc_RNA (1)...(19): siRNA sense strand
uguccacgcugcaugguau

SEQ ID NO: 1846165 - RNA, 19 nt, Homo sapiens
  misc_RNA (1)...(19): siRNA sense strand
caacaacuucgugaacuuc

SEQ ID NO: 1846166 - RNA, 19 nt, Homo sapiens
  misc_RNA (1)...(19): siRNA sense strand
gccucaaucccuacgguua

SEQ ID NO: 1846167 - RNA, 19 nt, Homo sapiens
  misc_RNA (1)...(19): siRNA sense strand
cucaaucccuacgguuaua

SEQ ID NO: 1846168 - RNA, 19 nt, Homo sapiens
  misc_RNA (1)...(19): siRNA sense strand
cagcugcacugccgcuuac

SEQ ID NO: 1846169 - RNA, 19 nt, Homo sapiens
  misc_RNA (1)...(19): siRNA sense strand
cgcaggcgcaggucuauga

SEQ ID NO: 1846170 - RNA, 19 nt, Homo sapiens
  misc_RNA (1)...(19): siRNA sense strand
ccaacaacaacuucgugaa

SEQ ID NO: 1846171 - RNA, 19 nt, Homo sapiens
  misc_RNA (1)...(19): siRNA sense strand
cgguggagcuggagaagac

SEQ ID NO: 1846172 - RNA, 19 nt, Homo sapiens
  misc_RNA (1)...(19): siRNA sense strand
gaagacagaggcggacaac

SEQ ID NO: 1846173 - RNA, 19 nt, Homo sapiens
  misc_RNA (1)...(19): siRNA sense strand
ccucaaucccuacgguuau

SEQ ID NO: 1846174 - RNA, 19 nt, Homo sapiens
  misc_RNA (1)...(19): siRNA sense strand
gacagaagaugcuauaauu

SEQ ID NO: 1846175 - RNA, 19 nt, Homo sapiens
  misc_RNA (1)...(19): siRNA sense strand
gagcauuaauccuaagaaa

SEQ ID NO: 1846176 - RNA, 19 nt, Homo sapiens
  misc_RNA (1)...(19): siRNA sense strand
gaucauguuuguaccauug

SEQ ID NO: 1846177 - RNA, 19 nt, Homo sapiens
  misc_RNA (1)...(19): siRNA sense strand
uaugauuggucacagauua

SEQ ID NO: 1846178 - RNA, 19 nt, Homo sapiens
  misc_RNA (1)...(19): siRNA sense strand
caaagaaacuacagacucu

SEQ ID NO: 1846179 - RNA, 19 nt, Homo sapiens
  misc_RNA (1)...(19): siRNA sense strand
gaagaaaugugggaagucu

SEQ ID NO: 1846180 - RNA, 19 nt, Homo sapiens
  misc_RNA (1)...(19): siRNA sense strand
acucagaacuuaugugcua

SEQ ID NO: 1846181 - RNA, 19 nt, Homo sapiens
  misc_RNA (1)...(19): siRNA sense strand
caaagaacauagacagaag

SEQ ID NO: 1846182 - RNA, 19 nt, Homo sapiens
  misc_RNA (1)...(19): siRNA sense strand
uuacaacuguggcaacauu

SEQ ID NO: 1846183 - RNA, 19 nt, Homo sapiens
  misc_RNA (1)...(19): siRNA sense strand
acagcaaacugaagaaaug

SEQ ID NO: 1846184 - RNA, 19 nt, Homo sapiens
  misc_RNA (1)...(19): siRNA sense strand
uaugauaacccucagagua

SEQ ID NO: 1846185 - RNA, 19 nt, Homo sapiens
  misc_RNA (1)...(19): siRNA sense strand
ccaaugcucccuauaauca

SEQ ID NO: 1846186 - RNA, 19 nt, Homo sapiens
  misc_RNA (1)...(19): siRNA sense strand
caaacugucuugacuacuc

SEQ ID NO: 1846187 - RNA, 19 nt, Homo sapiens
  misc_RNA (1)...(19): siRNA sense strand
agaaaugugggaagucuua

SEQ ID NO: 1846188 - RNA, 19 nt, Homo sapiens
  misc_RNA (1)...(19): siRNA sense strand
cacaauauauggauggaau

SEQ ID NO: 1846189 - RNA, 19 nt, Homo sapiens
  misc_RNA (1)...(19): siRNA sense strand
ucagcgggcuccuuauuau

SEQ ID NO: 1846190 - RNA, 19 nt, Homo sapiens
  misc_RNA (1)...(19): siRNA sense strand
uaauggguguuccuuggua

SEQ ID NO: 1846191 - RNA, 19 nt, Homo sapiens
  misc_RNA (1)...(19): siRNA sense strand
gauauagagcaagaaguua

SEQ ID NO: 1846192 - RNA, 19 nt, Homo sapiens
  misc_RNA (1)...(19): siRNA sense strand
gcauuaauccuaagaaacu

SEQ ID NO: 1846193 - RNA, 19 nt, Homo sapiens
  misc_RNA (1)...(19): siRNA sense strand
ugugaugucuuaugaugaa

SEQ ID NO: 1846194 - RNA, 19 nt, Homo sapiens
  misc_RNA (1)...(19): siRNA sense strand
gagcaagaaguuaauuguu

SEQ ID NO: 1846195 - RNA, 19 nt, Homo sapiens
  misc_RNA (1)...(19): siRNA sense strand
ccaaacagcaaacugaaga

SEQ ID NO: 1846196 - RNA, 19 nt, Homo sapiens
  misc_RNA (1)...(19): siRNA sense strand
ccucagaguauuucuuuaa

SEQ ID NO: 1846197 - RNA, 19 nt, Homo sapiens
  misc_RNA (1)...(19): siRNA sense strand
aaucagacauuaacuggau

SEQ ID NO: 1846198 - RNA, 19 nt, Homo sapiens
  misc_RNA (1)...(19): siRNA sense strand
ccaaagaacauagacagaa

SEQ ID NO: 1846199 - RNA, 19 nt, Homo sapiens
  misc_RNA (1)...(19): siRNA sense strand
gagaugcuguagccaaaca

SEQ ID NO: 1846200 - RNA, 19 nt, Homo sapiens
  misc_RNA (1)...(19): siRNA sense strand
aagaugagcauuaauccua

SEQ ID NO: 1846201 - RNA, 19 nt, Homo sapiens
  misc_RNA (1)...(19): siRNA sense strand
guuuaucaccugaauauga

SEQ ID NO: 1846202 - RNA, 19 nt, Homo sapiens
  misc_RNA (1)...(19): siRNA sense strand
cagccaaugcucccuauaa

SEQ ID NO: 1846203 - RNA, 19 nt, Homo sapiens
  misc_RNA (1)...(19): siRNA sense strand
gcuugugacuuccucuuug

SEQ ID NO: 1846204 - RNA, 19 nt, Homo sapiens
  misc_RNA (1)...(19): siRNA sense strand
cagaguauuucuuuaaagg

SEQ ID NO: 1846205 - RNA, 19 nt, Homo sapiens
  misc_RNA (1)...(19): siRNA sense strand
gauaacccucagaguauuu

SEQ ID NO: 1846206 - RNA, 19 nt, Homo sapiens
  misc_RNA (1)...(19): siRNA sense strand
gacgucaggugcccuacaa

SEQ ID NO: 1846207 - RNA, 19 nt, Homo sapiens
  misc_RNA (1)...(19): siRNA sense strand
aaacgaucaugaagcaaau

SEQ ID NO: 1846208 - RNA, 19 nt, Homo sapiens
  misc_RNA (1)...(19): siRNA sense strand
gauuacaacuguggcaaca

SEQ ID NO: 1846209 - RNA, 19 nt, Homo sapiens
  misc_RNA (1)...(19): siRNA sense strand
gugcuacgcucauucaaaa

SEQ ID NO: 1846210 - RNA, 19 nt, Homo sapiens
  misc_RNA (1)...(19): siRNA sense strand
agaugagcauuaauccuaa

SEQ ID NO: 1846211 - RNA, 19 nt, Homo sapiens
  misc_RNA (1)...(19): siRNA sense strand
aaaaggagccagaguagua

SEQ ID NO: 1846212 - RNA, 19 nt, Homo sapiens
  misc_RNA (1)...(19): siRNA sense strand
guacuuaaaggagauguau

SEQ ID NO: 1846213 - RNA, 19 nt, Homo sapiens
  misc_RNA (1)...(19): siRNA sense strand
ugauaacccucagaguauu

SEQ ID NO: 1846214 - RNA, 19 nt, Homo sapiens
  misc_RNA (1)...(19): siRNA sense strand
cuggaaaccuaugggauaa

SEQ ID NO: 1846215 - RNA, 19 nt, Homo sapiens
  misc_RNA (1)...(19): siRNA sense strand
ugcauuaacugcuuuaguc

SEQ ID NO: 1846216 - RNA, 19 nt, Homo sapiens
  misc_RNA (1)...(19): siRNA sense strand
uaugaugcauuaacugcuu

SEQ ID NO: 1846217 - RNA, 19 nt, Homo sapiens
  misc_RNA (1)...(19): siRNA sense strand
agauauagagcaagaaguu

SEQ ID NO: 1846218 - RNA, 19 nt, Homo sapiens
  misc_RNA (1)...(19): siRNA sense strand
uggagaugcuguagccaaa

SEQ ID NO: 1846219 - RNA, 19 nt, Homo sapiens
  misc_RNA (1)...(19): siRNA sense strand
gaugucuuaugaugaacaa

SEQ ID NO: 1846220 - RNA, 19 nt, Homo sapiens
  misc_RNA (1)...(19): siRNA sense strand
accugaauaugaugcauua

SEQ ID NO: 1846221 - RNA, 19 nt, Homo sapiens
  misc_RNA (1)...(19): siRNA sense strand
ucuggaaaccuaugggaua

SEQ ID NO: 1846222 - RNA, 19 nt, Homo sapiens
  misc_RNA (1)...(19): siRNA sense strand
cauguggaaugcaaacugu

SEQ ID NO: 1846223 - RNA, 19 nt, Homo sapiens
  misc_RNA (1)...(19): siRNA sense strand
gaaaugugggaagucuuaa

SEQ ID NO: 1846224 - RNA, 19 nt, Homo sapiens
  misc_RNA (1)...(19): siRNA sense strand
agacagaagaugcuauaau

SEQ ID NO: 1846225 - RNA, 19 nt, Homo sapiens
  misc_RNA (1)...(19): siRNA sense strand
ggaucauguuuguaccauu

SEQ ID NO: 1846226 - RNA, 19 nt, Homo sapiens
  misc_RNA (1)...(19): siRNA sense strand
gguguuccuugguaugguu

SEQ ID NO: 1846227 - RNA, 19 nt, Homo sapiens
  misc_RNA (1)...(19): siRNA sense strand
gaauaugaugcauuaacug

SEQ ID NO: 1846228 - RNA, 19 nt, Homo sapiens
  misc_RNA (1)...(19): siRNA sense strand
cuugguaugguuaugauua

SEQ ID NO: 1846229 - RNA, 19 nt, Homo sapiens
  misc_RNA (1)...(19): siRNA sense strand
auugagggaucacagguaa

SEQ ID NO: 1846230 - RNA, 19 nt, Homo sapiens
  misc_RNA (1)...(19): siRNA sense strand
gggaagucuuaaagccaaa

SEQ ID NO: 1846231 - RNA, 19 nt, Homo sapiens
  misc_RNA (1)...(19): siRNA sense strand
ugacuacucuggagaugcu

SEQ ID NO: 1846232 - RNA, 19 nt, Homo sapiens
  misc_RNA (1)...(19): siRNA sense strand
cagcgggcuccuuauuaua

SEQ ID NO: 1846233 - RNA, 19 nt, Homo sapiens
  misc_RNA (1)...(19): siRNA sense strand
cgcagaugcuugugacuuc

SEQ ID NO: 1846234 - RNA, 19 nt, Homo sapiens
  misc_RNA (1)...(19): siRNA sense strand
ggacagaaaacuuggaaau

SEQ ID NO: 1846235 - RNA, 19 nt, Homo sapiens
  misc_RNA (1)...(19): siRNA sense strand
aaacagcaaacugaagaaa

SEQ ID NO: 1846236 - RNA, 19 nt, Homo sapiens
  misc_RNA (1)...(19): siRNA sense strand
uagccaaacagcaaacuga

SEQ ID NO: 1846237 - RNA, 19 nt, Homo sapiens
  misc_RNA (1)...(19): siRNA sense strand
ggaaugcaaacugucuuga

SEQ ID NO: 1846238 - RNA, 19 nt, Homo sapiens
  misc_RNA (1)...(19): siRNA sense strand
gcuggccacuuucaucaag

SEQ ID NO: 1846239 - RNA, 19 nt, Homo sapiens
  misc_RNA (1)...(19): siRNA sense strand
gaaucugucugaggaucau

SEQ ID NO: 1846240 - RNA, 19 nt, Homo sapiens
  misc_RNA (1)...(19): siRNA sense strand
ggauauaaugacuacauca

SEQ ID NO: 1846241 - RNA, 19 nt, Homo sapiens
  misc_RNA (1)...(19): siRNA sense strand
ucuuugugaugucuuauga

SEQ ID NO: 1846242 - RNA, 19 nt, Homo sapiens
  misc_RNA (1)...(19): siRNA sense strand
gcauuaacugcuuuaguca

SEQ ID NO: 1846243 - RNA, 19 nt, Homo sapiens
  misc_RNA (1)...(19): siRNA sense strand
cauugauccugcuuucaga

SEQ ID NO: 1846244 - RNA, 19 nt, Homo sapiens
  misc_RNA (1)...(19): siRNA sense strand
gaugagcauuaauccuaag

SEQ ID NO: 1846245 - RNA, 19 nt, Homo sapiens
  misc_RNA (1)...(19): siRNA sense strand
uuugugaugucuuaugaug

SEQ ID NO: 1846246 - RNA, 19 nt, Homo sapiens
  misc_RNA (1)...(19): siRNA sense strand
gaaucgcagaugcuuguga

SEQ ID NO: 1846247 - RNA, 19 nt, Homo sapiens
  misc_RNA (1)...(19): siRNA sense strand
agccaaugcucccuauaau

SEQ ID NO: 1846248 - RNA, 19 nt, Homo sapiens
  misc_RNA (1)...(19): siRNA sense strand
uggaaaauaugacucagaa

SEQ ID NO: 1846249 - RNA, 19 nt, Homo sapiens
  misc_RNA (1)...(19): siRNA sense strand
caaacagcaaacugaagaa

SEQ ID NO: 1846250 - RNA, 19 nt, Homo sapiens
  misc_RNA (1)...(19): siRNA sense strand
gaaaauaugacucagaacu

SEQ ID NO: 1846251 - RNA, 19 nt, Homo sapiens
  misc_RNA (1)...(19): siRNA sense strand
acaaaacgaucaugaagca

SEQ ID NO: 1846252 - RNA, 19 nt, Homo sapiens
  misc_RNA (1)...(19): siRNA sense strand
gaugaacaaagucagaucu

SEQ ID NO: 1846253 - RNA, 19 nt, Homo sapiens
  misc_RNA (1)...(19): siRNA sense strand
cagaaaacuuggaaaucuu

SEQ ID NO: 1846254 - RNA, 19 nt, Homo sapiens
  misc_RNA (1)...(19): siRNA sense strand
ccuaagaaacuuguaaugg

SEQ ID NO: 1846255 - RNA, 19 nt, Homo sapiens
  misc_RNA (1)...(19): siRNA sense strand
gguaaccuuugauguagcu

SEQ ID NO: 1846256 - RNA, 19 nt, Homo sapiens
  misc_RNA (1)...(19): siRNA sense strand
ugucugaggaucauguuug

SEQ ID NO: 1846257 - RNA, 19 nt, Homo sapiens
  misc_RNA (1)...(19): siRNA sense strand
guuugauguuggacagaaa

SEQ ID NO: 1846258 - RNA, 19 nt, Homo sapiens
  misc_RNA (1)...(19): siRNA sense strand
augauaacccucagaguau

SEQ ID NO: 1846259 - RNA, 19 nt, Homo sapiens
  misc_RNA (1)...(19): siRNA sense strand
aaagaacauagacagaaga

SEQ ID NO: 1846260 - RNA, 19 nt, Homo sapiens
  misc_RNA (1)...(19): siRNA sense strand
cuuaaagccaaagcuguua

SEQ ID NO: 1846261 - RNA, 19 nt, Homo sapiens
  misc_RNA (1)...(19): siRNA sense strand
cugaagaaaugugggaagu

SEQ ID NO: 1846262 - RNA, 19 nt, Homo sapiens
  misc_RNA (1)...(19): siRNA sense strand
aaacugucuugacuacucu

SEQ ID NO: 1846263 - RNA, 19 nt, Homo sapiens
  misc_RNA (1)...(19): siRNA sense strand
gcagccaaugcucccuaua

SEQ ID NO: 1846264 - RNA, 19 nt, Homo sapiens
  misc_RNA (1)...(19): siRNA sense strand
ugacuuccucuuugugaug

SEQ ID NO: 1846265 - RNA, 19 nt, Homo sapiens
  misc_RNA (1)...(19): siRNA sense strand
uagagcaagaaguuaauug

SEQ ID NO: 1846266 - RNA, 19 nt, Homo sapiens
  misc_RNA (1)...(19): siRNA sense strand
aaugcaaacugucuugacu

SEQ ID NO: 1846267 - RNA, 19 nt, Homo sapiens
  misc_RNA (1)...(19): siRNA sense strand
ucaaguaugguaugauaac

SEQ ID NO: 1846268 - RNA, 19 nt, Homo sapiens
  misc_RNA (1)...(19): siRNA sense strand
agauccugcuggccacuuu

SEQ ID NO: 1846269 - RNA, 19 nt, Homo sapiens
  misc_RNA (1)...(19): siRNA sense strand
aaugcucccuauaaucaga

SEQ ID NO: 1846270 - RNA, 19 nt, Homo sapiens
  misc_RNA (1)...(19): siRNA sense strand
acagaaaacuuggaaaucu

SEQ ID NO: 1846271 - RNA, 19 nt, Homo sapiens
  misc_RNA (1)...(19): siRNA sense strand
caacuguggcaacauuugg

SEQ ID NO: 1846272 - RNA, 19 nt, Homo sapiens
  misc_RNA (1)...(19): siRNA sense strand
ugcaaacugucuugacuac

SEQ ID NO: 1846273 - RNA, 19 nt, Homo sapiens
  misc_RNA (1)...(19): siRNA sense strand
gucugaggaucauguuugu

SEQ ID NO: 1846274 - RNA, 19 nt, Homo sapiens
  misc_RNA (1)...(19): siRNA sense strand
ugaaagaacuguccagauu

SEQ ID NO: 1846275 - RNA, 19 nt, Homo sapiens
  misc_RNA (1)...(19): siRNA sense strand
gcaggaaaguggagaauga

SEQ ID NO: 1846276 - RNA, 19 nt, Homo sapiens
  misc_RNA (1)...(19): siRNA sense strand
ucacuuaccugaugcagaa

SEQ ID NO: 1846277 - RNA, 19 nt, Homo sapiens
  misc_RNA (1)...(19): siRNA sense strand
gcuaucaacugcagagauu

SEQ ID NO: 1846278 - RNA, 19 nt, Homo sapiens
  misc_RNA (1)...(19): siRNA sense strand
gauaauagggugcauuguu

SEQ ID NO: 1846279 - RNA, 19 nt, Homo sapiens
  misc_RNA (1)...(19): siRNA sense strand
aaagaacuguccagauuga

SEQ ID NO: 1846280 - RNA, 19 nt, Homo sapiens
  misc_RNA (1)...(19): siRNA sense strand
gaaagaacuguccagauug

SEQ ID NO: 1846281 - RNA, 19 nt, Homo sapiens
  misc_RNA (1)...(19): siRNA sense strand
agaaugaggacaugaauaa

SEQ ID NO: 1846282 - RNA, 19 nt, Homo sapiens
  misc_RNA (1)...(19): siRNA sense strand
gaacaggcggcacaucauu

SEQ ID NO: 1846283 - RNA, 19 nt, Homo sapiens
  misc_RNA (1)...(19): siRNA sense strand
gaaaaucgacucucauaaa

SEQ ID NO: 1846284 - RNA, 19 nt, Homo sapiens
  misc_RNA (1)...(19): siRNA sense strand
agaaucagaugaagaugaa

SEQ ID NO: 1846285 - RNA, 19 nt, Homo sapiens
  misc_RNA (1)...(19): siRNA sense strand
ccaaucaaguucaccgaaa

SEQ ID NO: 1846286 - RNA, 19 nt, Homo sapiens
  misc_RNA (1)...(19): siRNA sense strand
caagagaggcggcaggaaa

SEQ ID NO: 1846287 - RNA, 19 nt, Homo sapiens
  misc_RNA (1)...(19): siRNA sense strand
auaaacagccuauuccuaa

SEQ ID NO: 1846288 - RNA, 19 nt, Homo sapiens
  misc_RNA (1)...(19): siRNA sense strand
aaacuuccguucugagaga

SEQ ID NO: 1846289 - RNA, 19 nt, Homo sapiens
  misc_RNA (1)...(19): siRNA sense strand
gagaaugaggacaugaaua

SEQ ID NO: 1846290 - RNA, 19 nt, Homo sapiens
  misc_RNA (1)...(19): siRNA sense strand
auaauagggugcauuguug

SEQ ID NO: 1846291 - RNA, 19 nt, Homo sapiens
  misc_RNA (1)...(19): siRNA sense strand
gcccuuagauguggcguuu

SEQ ID NO: 1846292 - RNA, 19 nt, Homo sapiens
  misc_RNA (1)...(19): siRNA sense strand
ggaugaaauugaagaacau

SEQ ID NO: 1846293 - RNA, 19 nt, Homo sapiens
  misc_RNA (1)...(19): siRNA sense strand
gaacgggagcggcugaaga

SEQ ID NO: 1846294 - RNA, 19 nt, Homo sapiens
  misc_RNA (1)...(19): siRNA sense strand
gauucuggaugaaauugaa

SEQ ID NO: 1846295 - RNA, 19 nt, Homo sapiens
  misc_RNA (1)...(19): siRNA sense strand
cagaugaagaugaagauuu

SEQ ID NO: 1846296 - RNA, 19 nt, Homo sapiens
  misc_RNA (1)...(19): siRNA sense strand
gcacaaugacuuucugaag

SEQ ID NO: 1846297 - RNA, 19 nt, Homo sapiens
  misc_RNA (1)...(19): siRNA sense strand
aaaggauucuggaugaaau

SEQ ID NO: 1846298 - RNA, 19 nt, Homo sapiens
  misc_RNA (1)...(19): siRNA sense strand
cauaaacagccuauuccua

SEQ ID NO: 1846299 - RNA, 19 nt, Homo sapiens
  misc_RNA (1)...(19): siRNA sense strand
ugaaggcaauacacaacaa

SEQ ID NO: 1846300 - RNA, 19 nt, Homo sapiens
  misc_RNA (1)...(19): siRNA sense strand
ugacccaggaccuucauua

SEQ ID NO: 1846301 - RNA, 19 nt, Homo sapiens
  misc_RNA (1)...(19): siRNA sense strand
ccuuagauguggcguuuau

SEQ ID NO: 1846302 - RNA, 19 nt, Homo sapiens
  misc_RNA (1)...(19): siRNA sense strand
gaauauugugccugucauu

SEQ ID NO: 1846303 - RNA, 19 nt, Homo sapiens
  misc_RNA (1)...(19): siRNA sense strand
gaaugaggacaugaauaaa

SEQ ID NO: 1846304 - RNA, 19 nt, Homo sapiens
  misc_RNA (1)...(19): siRNA sense strand
uggaugaaauugaagaaca

SEQ ID NO: 1846305 - RNA, 19 nt, Homo sapiens
  misc_RNA (1)...(19): siRNA sense strand
ugaaucaggucuaggaaaa

SEQ ID NO: 1846306 - RNA, 19 nt, Homo sapiens
  misc_RNA (1)...(19): siRNA sense strand
gagcagacuagacuucuca

SEQ ID NO: 1846307 - RNA, 19 nt, Homo sapiens
  misc_RNA (1)...(19): siRNA sense strand
uagggugcauuguugcuuu

SEQ ID NO: 1846308 - RNA, 19 nt, Homo sapiens
  misc_RNA (1)...(19): siRNA sense strand
guacccagaaagagucaua

SEQ ID NO: 1846309 - RNA, 19 nt, Homo sapiens
  misc_RNA (1)...(19): siRNA sense strand
gacgagagcggcuugaaca

SEQ ID NO: 1846310 - RNA, 19 nt, Homo sapiens
  misc_RNA (1)...(19): siRNA sense strand
augaggacaugaauaaaga

SEQ ID NO: 1846311 - RNA, 19 nt, Homo sapiens
  misc_RNA (1)...(19): siRNA sense strand
ggagaaugaggacaugaau

SEQ ID NO: 1846312 - RNA, 19 nt, Homo sapiens
  misc_RNA (1)...(19): siRNA sense strand
cagaaucagaugaagauga

SEQ ID NO: 1846313 - RNA, 19 nt, Homo sapiens
  misc_RNA (1)...(19): siRNA sense strand
gaaaaggauucuggaugaa

SEQ ID NO: 1846314 - RNA, 19 nt, Homo sapiens
  misc_RNA (1)...(19): siRNA sense strand
ucaguugauugaagccaaa

SEQ ID NO: 1846315 - RNA, 19 nt, Homo sapiens
  misc_RNA (1)...(19): siRNA sense strand
gauugaagccaaaggaaag

SEQ ID NO: 1846316 - RNA, 19 nt, Homo sapiens
  misc_RNA (1)...(19): siRNA sense strand
cacaacaaggugaauauug

SEQ ID NO: 1846317 - RNA, 19 nt, Homo sapiens
  misc_RNA (1)...(19): siRNA sense strand
caagagaugauugcaagga

SEQ ID NO: 1846318 - RNA, 19 nt, Homo sapiens
  misc_RNA (1)...(19): siRNA sense strand
gaugguggucggugaauca

SEQ ID NO: 1846319 - RNA, 19 nt, Homo sapiens
  misc_RNA (1)...(19): siRNA sense strand
cagaaacaccuggcuaugu

SEQ ID NO: 1846320 - RNA, 19 nt, Homo sapiens
  misc_RNA (1)...(19): siRNA sense strand
uuaaagagcagacuagacu

SEQ ID NO: 1846321 - RNA, 19 nt, Homo sapiens
  misc_RNA (1)...(19): siRNA sense strand
gagcacaaugacuuucuga

SEQ ID NO: 1846322 - RNA, 19 nt, Homo sapiens
  misc_RNA (1)...(19): siRNA sense strand
aaucgacucucauaaacag

SEQ ID NO: 1846323 - RNA, 19 nt, Homo sapiens
  misc_RNA (1)...(19): siRNA sense strand
gacccaggaccuucauuau

SEQ ID NO: 1846324 - RNA, 19 nt, Homo sapiens
  misc_RNA (1)...(19): siRNA sense strand
ggagaacccagagcacaau

SEQ ID NO: 1846325 - RNA, 19 nt, Homo sapiens
  misc_RNA (1)...(19): siRNA sense strand
ucucauaaacagccuauuc

SEQ ID NO: 1846326 - RNA, 19 nt, Homo sapiens
  misc_RNA (1)...(19): siRNA sense strand
uuagauguggcguuuauga

SEQ ID NO: 1846327 - RNA, 19 nt, Homo sapiens
  misc_RNA (1)...(19): siRNA sense strand
gaaaacuuccguucugaga

SEQ ID NO: 1846328 - RNA, 19 nt, Homo sapiens
  misc_RNA (1)...(19): siRNA sense strand
acaaugacuuucugaagcu

SEQ ID NO: 1846329 - RNA, 19 nt, Homo sapiens
  misc_RNA (1)...(19): siRNA sense strand
uaaacagccuauuccuaac

SEQ ID NO: 1846330 - RNA, 19 nt, Homo sapiens
  misc_RNA (1)...(19): siRNA sense strand
ggaaaaucgacucucauaa

SEQ ID NO: 1846331 - RNA, 19 nt, Homo sapiens
  misc_RNA (1)...(19): siRNA sense strand
ugauugaagccaaaggaaa

SEQ ID NO: 1846332 - RNA, 19 nt, Homo sapiens
  misc_RNA (1)...(19): siRNA sense strand
caaucaaguucaccgaaaa

SEQ ID NO: 1846333 - RNA, 19 nt, Homo sapiens
  misc_RNA (1)...(19): siRNA sense strand
gaaggcaauacacaacaag

SEQ ID NO: 1846334 - RNA, 19 nt, Homo sapiens
  misc_RNA (1)...(19): siRNA sense strand
gugaaucaggucuaggaaa

SEQ ID NO: 1846335 - RNA, 19 nt, Homo sapiens
  misc_RNA (1)...(19): siRNA sense strand
caaaggaaagaaggucaga

SEQ ID NO: 1846336 - RNA, 19 nt, Homo sapiens
  misc_RNA (1)...(19): siRNA sense strand
cuaagcaacagccaacuca

SEQ ID NO: 1846337 - RNA, 19 nt, Homo sapiens
  misc_RNA (1)...(19): siRNA sense strand
caauacacaacaaggugaa

SEQ ID NO: 1846338 - RNA, 19 nt, Homo sapiens
  misc_RNA (1)...(19): siRNA sense strand
aagagaugauugcaaggau

SEQ ID NO: 1846339 - RNA, 19 nt, Homo sapiens
  misc_RNA (1)...(19): siRNA sense strand
aaagagcagacuagacuuc

SEQ ID NO: 1846340 - RNA, 19 nt, Homo sapiens
  misc_RNA (1)...(19): siRNA sense strand
gugaauauugugccuguca

SEQ ID NO: 1846341 - RNA, 19 nt, Homo sapiens
  misc_RNA (1)...(19): siRNA sense strand
auacacaacaaggugaaua

SEQ ID NO: 1846342 - RNA, 19 nt, Homo sapiens
  misc_RNA (1)...(19): siRNA sense strand
caaaaucuaucacuuaccu

SEQ ID NO: 1846343 - RNA, 19 nt, Homo sapiens
  misc_RNA (1)...(19): siRNA sense strand
ggauucuggaugaaauuga

SEQ ID NO: 1846344 - RNA, 19 nt, Homo sapiens
  misc_RNA (1)...(19): siRNA sense strand
acacaacaaggugaauauu

SEQ ID NO: 1846345 - RNA, 19 nt, Homo sapiens
  misc_RNA (1)...(19): siRNA sense strand
ucacccacaugcaggaucu

SEQ ID NO: 1846346 - RNA, 19 nt, Homo sapiens
  misc_RNA (1)...(19): siRNA sense strand
gaacccagagcacaaugac

SEQ ID NO: 1846347 - RNA, 19 nt, Homo sapiens
  misc_RNA (1)...(19): siRNA sense strand
uugcaaaccuccccaauca

SEQ ID NO: 1846348 - RNA, 19 nt, Homo sapiens
  misc_RNA (1)...(19): siRNA sense strand
uagauguggcguuuaugaa

SEQ ID NO: 1846349 - RNA, 19 nt, Homo sapiens
  misc_RNA (1)...(19): siRNA sense strand
aaucagaugaagaugaaga

SEQ ID NO: 1846350 - RNA, 19 nt, Homo sapiens
  misc_RNA (1)...(19): siRNA sense strand
gggagcggcugaagaaaag

SEQ ID NO: 1846351 - RNA, 19 nt, Homo sapiens
  misc_RNA (1)...(19): siRNA sense strand
augagcaauuugagaggua

SEQ ID NO: 1846352 - RNA, 19 nt, Homo sapiens
  misc_RNA (1)...(19): siRNA sense strand
uaugaaaacuuccguucug

SEQ ID NO: 1846353 - RNA, 19 nt, Homo sapiens
  misc_RNA (1)...(19): siRNA sense strand
ucaaggcuagcaucccauu

SEQ ID NO: 1846354 - RNA, 19 nt, Homo sapiens
  misc_RNA (1)...(19): siRNA sense strand
gaugcagaaucagaugaag

SEQ ID NO: 1846355 - RNA, 19 nt, Homo sapiens
  misc_RNA (1)...(19): siRNA sense strand
ucaacugcagagauuguuu

SEQ ID NO: 1846356 - RNA, 19 nt, Homo sapiens
  misc_RNA (1)...(19): siRNA sense strand
aaugaggacaugaauaaag

SEQ ID NO: 1846357 - RNA, 19 nt, Homo sapiens
  misc_RNA (1)...(19): siRNA sense strand
acaggcggcacaucauuga

SEQ ID NO: 1846358 - RNA, 19 nt, Homo sapiens
  misc_RNA (1)...(19): siRNA sense strand
auuccuaacugaucuguac

SEQ ID NO: 1846359 - RNA, 19 nt, Homo sapiens
  misc_RNA (1)...(19): siRNA sense strand
uaucaacugcagagauugu

SEQ ID NO: 1846360 - RNA, 19 nt, Homo sapiens
  misc_RNA (1)...(19): siRNA sense strand
ucucgggcaccacguguaa

SEQ ID NO: 1846361 - RNA, 19 nt, Homo sapiens
  misc_RNA (1)...(19): siRNA sense strand
caaggaugcaggcgcagau

SEQ ID NO: 1846362 - RNA, 19 nt, Homo sapiens
  misc_RNA (1)...(19): siRNA sense strand
aaaaucgacucucauaaac

SEQ ID NO: 1846363 - RNA, 19 nt, Homo sapiens
  misc_RNA (1)...(19): siRNA sense strand
uauugugccugucauugca

SEQ ID NO: 1846364 - RNA, 19 nt, Homo sapiens
  misc_RNA (1)...(19): siRNA sense strand
gcagggaacuugacaauga

SEQ ID NO: 1846365 - RNA, 19 nt, Homo sapiens
  misc_RNA (1)...(19): siRNA sense strand
ggaaagccauucugaggaa

SEQ ID NO: 1846366 - RNA, 19 nt, Homo sapiens
  misc_RNA (1)...(19): siRNA sense strand
gaacagugcaggcaugaaa

SEQ ID NO: 1846367 - RNA, 19 nt, Homo sapiens
  misc_RNA (1)...(19): siRNA sense strand
ucagaaggcaguaaaguua

SEQ ID NO: 1846368 - RNA, 19 nt, Homo sapiens
  misc_RNA (1)...(19): siRNA sense strand
ggacucugaugacaccaua

SEQ ID NO: 1846369 - RNA, 19 nt, Homo sapiens
  misc_RNA (1)...(19): siRNA sense strand
ugauaaagaugacgaugaa

SEQ ID NO: 1846370 - RNA, 19 nt, Homo sapiens
  misc_RNA (1)...(19): siRNA sense strand
gcaagacagugcccaagau

SEQ ID NO: 1846371 - RNA, 19 nt, Homo sapiens
  misc_RNA (1)...(19): siRNA sense strand
ugaggaagauggccaguug

SEQ ID NO: 1846372 - RNA, 19 nt, Homo sapiens
  misc_RNA (1)...(19): siRNA sense strand
gcaguaaaguuagcucaga

SEQ ID NO: 1846373 - RNA, 19 nt, Homo sapiens
  misc_RNA (1)...(19): siRNA sense strand
auagagagccggaaauuaa

SEQ ID NO: 1846374 - RNA, 19 nt, Homo sapiens
  misc_RNA (1)...(19): siRNA sense strand
gaagugaugaggacucuga

SEQ ID NO: 1846375 - RNA, 19 nt, Homo sapiens
  misc_RNA (1)...(19): siRNA sense strand
gauagagagccggaaauua

SEQ ID NO: 1846376 - RNA, 19 nt, Homo sapiens
  misc_RNA (1)...(19): siRNA sense strand
gugcaggcaugaaaucaaa

SEQ ID NO: 1846377 - RNA, 19 nt, Homo sapiens
  misc_RNA (1)...(19): siRNA sense strand
uggaagaagucaagaguga

SEQ ID NO: 1846378 - RNA, 19 nt, Homo sapiens
  misc_RNA (1)...(19): siRNA sense strand
caagauaccaccagugaga

SEQ ID NO: 1846379 - RNA, 19 nt, Homo sapiens
  misc_RNA (1)...(19): siRNA sense strand
gaggagaugauaaagauga

SEQ ID NO: 1846380 - RNA, 19 nt, Homo sapiens
  misc_RNA (1)...(19): siRNA sense strand
aggaagagguggugaguga

SEQ ID NO: 1846381 - RNA, 19 nt, Homo sapiens
  misc_RNA (1)...(19): siRNA sense strand
ggaccaagaugacaaugac

SEQ ID NO: 1846382 - RNA, 19 nt, Homo sapiens
  misc_RNA (1)...(19): siRNA sense strand
gcuccgaguuggacgauga

SEQ ID NO: 1846383 - RNA, 19 nt, Homo sapiens
  misc_RNA (1)...(19): siRNA sense strand
caguggagaugacaccuuu

SEQ ID NO: 1846384 - RNA, 19 nt, Homo sapiens
  misc_RNA (1)...(19): siRNA sense strand
gacagugacucucaagaca

SEQ ID NO: 1846385 - RNA, 19 nt, Homo sapiens
  misc_RNA (1)...(19): siRNA sense strand
caagacagugcccaagaua

SEQ ID NO: 1846386 - RNA, 19 nt, Homo sapiens
  misc_RNA (1)...(19): siRNA sense strand
ggagagcagugagucauca

SEQ ID NO: 1846387 - RNA, 19 nt, Homo sapiens
  misc_RNA (1)...(19): siRNA sense strand
ggaagucucgcaucucaga

SEQ ID NO: 1846388 - RNA, 19 nt, Homo sapiens
  misc_RNA (1)...(19): siRNA sense strand
cagaggaacaggcaaauga

SEQ ID NO: 1846389 - RNA, 19 nt, Homo sapiens
  misc_RNA (1)...(19): siRNA sense strand
gagagcaucaggagugaaa

SEQ ID NO: 1846390 - RNA, 19 nt, Homo sapiens
  misc_RNA (1)...(19): siRNA sense strand
ccaguaaccagguaucaaa

SEQ ID NO: 1846391 - RNA, 19 nt, Homo sapiens
  misc_RNA (1)...(19): siRNA sense strand
guaaccagguaucaaaaua

SEQ ID NO: 1846392 - RNA, 19 nt, Homo sapiens
  misc_RNA (1)...(19): siRNA sense strand
caagcaaacacucaagauu

SEQ ID NO: 1846393 - RNA, 19 nt, Homo sapiens
  misc_RNA (1)...(19): siRNA sense strand
gaugaggacucugaugaca

SEQ ID NO: 1846394 - RNA, 19 nt, Homo sapiens
  misc_RNA (1)...(19): siRNA sense strand
gaagauggccaguugaaaa

SEQ ID NO: 1846395 - RNA, 19 nt, Homo sapiens
  misc_RNA (1)...(19): siRNA sense strand
uaggaagucucgcaucuca

SEQ ID NO: 1846396 - RNA, 19 nt, Homo sapiens
  misc_RNA (1)...(19): siRNA sense strand
gaagaugacaguggagaug

SEQ ID NO: 1846397 - RNA, 19 nt, Homo sapiens
  misc_RNA (1)...(19): siRNA sense strand
gcccaaagacagacaagaa

SEQ ID NO: 1846398 - RNA, 19 nt, Homo sapiens
  misc_RNA (1)...(19): siRNA sense strand
cagcaagggugacucucaa

SEQ ID NO: 1846399 - RNA, 19 nt, Homo sapiens
  misc_RNA (1)...(19): siRNA sense strand
caagagaacagcagugagu

SEQ ID NO: 1846400 - RNA, 19 nt, Homo sapiens
  misc_RNA (1)...(19): siRNA sense strand
aggaggagaugauaaagau

SEQ ID NO: 1846401 - RNA, 19 nt, Homo sapiens
  misc_RNA (1)...(19): siRNA sense strand
gagcagggaacuugacaau

SEQ ID NO: 1846402 - RNA, 19 nt, Homo sapiens
  misc_RNA (1)...(19): siRNA sense strand
cagcagauccaaagaagau

SEQ ID NO: 1846403 - RNA, 19 nt, Homo sapiens
  misc_RNA (1)...(19): siRNA sense strand
caacaacacaauggaagaa

SEQ ID NO: 1846404 - RNA, 19 nt, Homo sapiens
  misc_RNA (1)...(19): siRNA sense strand
gcacacacucucccacuca

SEQ ID NO: 1846405 - RNA, 19 nt, Homo sapiens
  misc_RNA (1)...(19): siRNA sense strand
ggaagauggccaguugaaa

SEQ ID NO: 1846406 - RNA, 19 nt, Homo sapiens
  misc_RNA (1)...(19): siRNA sense strand
gugaugaggacucugauga

SEQ ID NO: 1846407 - RNA, 19 nt, Homo sapiens
  misc_RNA (1)...(19): siRNA sense strand
gcgaggaaagccauucuga

SEQ ID NO: 1846408 - RNA, 19 nt, Homo sapiens
  misc_RNA (1)...(19): siRNA sense strand
caagggugacucucaagaa

SEQ ID NO: 1846409 - RNA, 19 nt, Homo sapiens
  misc_RNA (1)...(19): siRNA sense strand
gcaagggugacucucaaga

SEQ ID NO: 1846410 - RNA, 19 nt, Homo sapiens
  misc_RNA (1)...(19): siRNA sense strand
gcaagcaaacacucaagau

SEQ ID NO: 1846411 - RNA, 19 nt, Homo sapiens
  misc_RNA (1)...(19): siRNA sense strand
gaaaaggaggagaugauaa

SEQ ID NO: 1846412 - RNA, 19 nt, Homo sapiens
  misc_RNA (1)...(19): siRNA sense strand
gagcagugagucaucagaa

SEQ ID NO: 1846413 - RNA, 19 nt, Homo sapiens
  misc_RNA (1)...(19): siRNA sense strand
ccaagaggccaaccuguca

SEQ ID NO: 1846414 - RNA, 19 nt, Homo sapiens
  misc_RNA (1)...(19): siRNA sense strand
gaagacagcaaggagaauc

SEQ ID NO: 1846415 - RNA, 19 nt, Homo sapiens
  misc_RNA (1)...(19): siRNA sense strand
aaaagaaucuggagaaaac

SEQ ID NO: 1846416 - RNA, 19 nt, Homo sapiens
  misc_RNA (1)...(19): siRNA sense strand
gcucagaggaacaggcaaa

SEQ ID NO: 1846417 - RNA, 19 nt, Homo sapiens
  misc_RNA (1)...(19): siRNA sense strand
caaagacagacaagaagga

SEQ ID NO: 1846418 - RNA, 19 nt, Homo sapiens
  misc_RNA (1)...(19): siRNA sense strand
uaaagaugacgaugaagau

SEQ ID NO: 1846419 - RNA, 19 nt, Homo sapiens
  misc_RNA (1)...(19): siRNA sense strand
gaagagguggugagugagu

SEQ ID NO: 1846420 - RNA, 19 nt, Homo sapiens
  misc_RNA (1)...(19): siRNA sense strand
caaaucaagcagugaggaa

SEQ ID NO: 1846421 - RNA, 19 nt, Homo sapiens
  misc_RNA (1)...(19): siRNA sense strand
gacagcgaauccagugaga

SEQ ID NO: 1846422 - RNA, 19 nt, Homo sapiens
  misc_RNA (1)...(19): siRNA sense strand
ggugggagguggcagugau

SEQ ID NO: 1846423 - RNA, 19 nt, Homo sapiens
  misc_RNA (1)...(19): siRNA sense strand
cacaacuaguuauguagaa

SEQ ID NO: 1846424 - RNA, 19 nt, Homo sapiens
  misc_RNA (1)...(19): siRNA sense strand
agcaaacacucaagauuca

SEQ ID NO: 1846425 - RNA, 19 nt, Homo sapiens
  misc_RNA (1)...(19): siRNA sense strand
aagcaaacacucaagauuc

SEQ ID NO: 1846426 - RNA, 19 nt, Homo sapiens
  misc_RNA (1)...(19): siRNA sense strand
ggaaaaggaggagaugaua

SEQ ID NO: 1846427 - RNA, 19 nt, Homo sapiens
  misc_RNA (1)...(19): siRNA sense strand
cacagcagcucagcagaga

SEQ ID NO: 1846428 - RNA, 19 nt, Homo sapiens
  misc_RNA (1)...(19): siRNA sense strand
caacuaguuauguagaaga

SEQ ID NO: 1846429 - RNA, 19 nt, Homo sapiens
  misc_RNA (1)...(19): siRNA sense strand
ccacaacuaguuauguaga

SEQ ID NO: 1846430 - RNA, 19 nt, Homo sapiens
  misc_RNA (1)...(19): siRNA sense strand
cagagagcaucaggaguga

SEQ ID NO: 1846431 - RNA, 19 nt, Homo sapiens
  misc_RNA (1)...(19): siRNA sense strand
ggaagacgacagugacucu

SEQ ID NO: 1846432 - RNA, 19 nt, Homo sapiens
  misc_RNA (1)...(19): siRNA sense strand
ggaaacuccagaaugaaca

SEQ ID NO: 1846433 - RNA, 19 nt, Homo sapiens
  misc_RNA (1)...(19): siRNA sense strand
agccggaaauuaacaguug

SEQ ID NO: 1846434 - RNA, 19 nt, Homo sapiens
  misc_RNA (1)...(19): siRNA sense strand
ccacggagagcaaaucaag

SEQ ID NO: 1846435 - RNA, 19 nt, Homo sapiens
  misc_RNA (1)...(19): siRNA sense strand
gcagugaguccagccaaga

SEQ ID NO: 1846436 - RNA, 19 nt, Homo sapiens
  misc_RNA (1)...(19): siRNA sense strand
ugacaacaacacaauggaa

SEQ ID NO: 1846437 - RNA, 19 nt, Homo sapiens
  misc_RNA (1)...(19): siRNA sense strand
gaugacaacaacacaaugg

SEQ ID NO: 1846438 - RNA, 19 nt, Homo sapiens
  misc_RNA (1)...(19): siRNA sense strand
gaggugacuccacucaaga

SEQ ID NO: 1846439 - RNA, 19 nt, Homo sapiens
  misc_RNA (1)...(19): siRNA sense strand
uaucacaacaaacccauug

SEQ ID NO: 1846440 - RNA, 19 nt, Homo sapiens
  misc_RNA (1)...(19): siRNA sense strand
gcagauccaaagaagauag

SEQ ID NO: 1846441 - RNA, 19 nt, Homo sapiens
  misc_RNA (1)...(19): siRNA sense strand
cagcagcagauccaaagaa

SEQ ID NO: 1846442 - RNA, 19 nt, Homo sapiens
  misc_RNA (1)...(19): siRNA sense strand
ggccugggcucugaugauc

SEQ ID NO: 1846443 - RNA, 19 nt, Homo sapiens
  misc_RNA (1)...(19): siRNA sense strand
uaaaguuagcucagaggaa

SEQ ID NO: 1846444 - RNA, 19 nt, Homo sapiens
  misc_RNA (1)...(19): siRNA sense strand
ggaagagagccaaaacgua

SEQ ID NO: 1846445 - RNA, 19 nt, Homo sapiens
  misc_RNA (1)...(19): siRNA sense strand
auaaagaugacgaugaaga

SEQ ID NO: 1846446 - RNA, 19 nt, Homo sapiens
  misc_RNA (1)...(19): siRNA sense strand
ugagauagagagccggaaa

SEQ ID NO: 1846447 - RNA, 19 nt, Homo sapiens
  misc_RNA (1)...(19): siRNA sense strand
aggccaaccugucaucuca

SEQ ID NO: 1846448 - RNA, 19 nt, Homo sapiens
  misc_RNA (1)...(19): siRNA sense strand
caacacaauggaagaaguc

SEQ ID NO: 1846449 - RNA, 19 nt, Homo sapiens
  misc_RNA (1)...(19): siRNA sense strand
ucaagagagugagagugaa

SEQ ID NO: 1846450 - RNA, 19 nt, Homo sapiens
  misc_RNA (1)...(19): siRNA sense strand
cccaagauaccaccaguga

SEQ ID NO: 1846451 - RNA, 19 nt, Homo sapiens
  misc_RNA (1)...(19): siRNA sense strand
gagggaaugcagagugaug

SEQ ID NO: 1846452 - RNA, 19 nt, Homo sapiens
  misc_RNA (1)...(19): siRNA sense strand
caagacagcagcagaucca

SEQ ID NO: 1846453 - RNA, 19 nt, Homo sapiens
  misc_RNA (1)...(19): siRNA sense strand
agacgacagugacucucaa

SEQ ID NO: 1846454 - RNA, 19 nt, Homo sapiens
  misc_RNA (1)...(19): siRNA sense strand
gccggaaauuaacaguuga

SEQ ID NO: 1846455 - RNA, 19 nt, Homo sapiens
  misc_RNA (1)...(19): siRNA sense strand
gacagcagcagauccaaag

SEQ ID NO: 1846456 - RNA, 19 nt, Homo sapiens
  misc_RNA (1)...(19): siRNA sense strand
gggaagugaugaggacucu

SEQ ID NO: 1846457 - RNA, 19 nt, Homo sapiens
  misc_RNA (1)...(19): siRNA sense strand
gggaccaagaugacaauga

SEQ ID NO: 1846458 - RNA, 19 nt, Homo sapiens
  misc_RNA (1)...(19): siRNA sense strand
aagaugacgaugaagauga

SEQ ID NO: 1846459 - RNA, 19 nt, Homo sapiens
  misc_RNA (1)...(19): siRNA sense strand
gagauagagagccggaaau

SEQ ID NO: 1846460 - RNA, 19 nt, Homo sapiens
  misc_RNA (1)...(19): siRNA sense strand
acaacacaauggaagaagu

SEQ ID NO: 1846461 - RNA, 19 nt, Homo sapiens
  misc_RNA (1)...(19): siRNA sense strand
gagcaucccaguaggaaaa

SEQ ID NO: 1846462 - RNA, 19 nt, Homo sapiens
  misc_RNA (1)...(19): siRNA sense strand
ucaaaagaaucuggagaaa

SEQ ID NO: 1846463 - RNA, 19 nt, Homo sapiens
  misc_RNA (1)...(19): siRNA sense strand
auuaacaguugaugccuau

SEQ ID NO: 1846464 - RNA, 19 nt, Homo sapiens
  misc_RNA (1)...(19): siRNA sense strand
ccaagaagcuccagcagua

SEQ ID NO: 1846465 - RNA, 19 nt, Homo sapiens
  misc_RNA (1)...(19): siRNA sense strand
gcaaccagaugaacaagaa

SEQ ID NO: 1846466 - RNA, 19 nt, Homo sapiens
  misc_RNA (1)...(19): siRNA sense strand
gaaagaaauucaccgacuu

SEQ ID NO: 1846467 - RNA, 19 nt, Homo sapiens
  misc_RNA (1)...(19): siRNA sense strand
agaaggagguggaggaaua

SEQ ID NO: 1846468 - RNA, 19 nt, Homo sapiens
  misc_RNA (1)...(19): siRNA sense strand
gaauauccauggcauuaga

SEQ ID NO: 1846469 - RNA, 19 nt, Homo sapiens
  misc_RNA (1)...(19): siRNA sense strand
gagcuaaucagcaccguua

SEQ ID NO: 1846470 - RNA, 19 nt, Homo sapiens
  misc_RNA (1)...(19): siRNA sense strand
gcuaugcuaucaagaauau

SEQ ID NO: 1846471 - RNA, 19 nt, Homo sapiens
  misc_RNA (1)...(19): siRNA sense strand
ggaaucuuguggacucaua

SEQ ID NO: 1846472 - RNA, 19 nt, Homo sapiens
  misc_RNA (1)...(19): siRNA sense strand
gcauaucuuugcccucuuu

SEQ ID NO: 1846473 - RNA, 19 nt, Homo sapiens
  misc_RNA (1)...(19): siRNA sense strand
ggaccaaccucccgacauc

SEQ ID NO: 1846474 - RNA, 19 nt, Homo sapiens
  misc_RNA (1)...(19): siRNA sense strand
ggacauugauggcaagaag

SEQ ID NO: 1846475 - RNA, 19 nt, Homo sapiens
  misc_RNA (1)...(19): siRNA sense strand
gcaguuugccguagacuuu

SEQ ID NO: 1846476 - RNA, 19 nt, Homo sapiens
  misc_RNA (1)...(19): siRNA sense strand
gagaucagcuaugcuauca

SEQ ID NO: 1846477 - RNA, 19 nt, Homo sapiens
  misc_RNA (1)...(19): siRNA sense strand
agaaauacaugcugucugu

SEQ ID NO: 1846478 - RNA, 19 nt, Homo sapiens
  misc_RNA (1)...(19): siRNA sense strand
ccacuuggcugaccguaug

SEQ ID NO: 1846479 - RNA, 19 nt, Homo sapiens
  misc_RNA (1)...(19): siRNA sense strand
gaagggagaucagcuaugc

SEQ ID NO: 1846480 - RNA, 19 nt, Homo sapiens
  misc_RNA (1)...(19): siRNA sense strand
gagacaugcuuaugcaguu

SEQ ID NO: 1846481 - RNA, 19 nt, Homo sapiens
  misc_RNA (1)...(19): siRNA sense strand
gaucagcuaugcuaucaag

SEQ ID NO: 1846482 - RNA, 19 nt, Homo sapiens
  misc_RNA (1)...(19): siRNA sense strand
gcagaggaaugucuacaag

SEQ ID NO: 1846483 - RNA, 19 nt, Homo sapiens
  misc_RNA (1)...(19): siRNA sense strand
cugagaaucuguccuggua

SEQ ID NO: 1846484 - RNA, 19 nt, Homo sapiens
  misc_RNA (1)...(19): siRNA sense strand
gagaaucuguccugguaca

SEQ ID NO: 1846485 - RNA, 19 nt, Homo sapiens
  misc_RNA (1)...(19): siRNA sense strand
ucaaugcaaccacagaaua

SEQ ID NO: 1846486 - RNA, 19 nt, Homo sapiens
  misc_RNA (1)...(19): siRNA sense strand
aagaauauccauggcauua

SEQ ID NO: 1846487 - RNA, 19 nt, Homo sapiens
  misc_RNA (1)...(19): siRNA sense strand
ggaaugucuacaaggauua

SEQ ID NO: 1846488 - RNA, 19 nt, Homo sapiens
  misc_RNA (1)...(19): siRNA sense strand
gcacugcaagggaaagaaa

SEQ ID NO: 1846489 - RNA, 19 nt, Homo sapiens
  misc_RNA (1)...(19): siRNA sense strand
gaaagagaagaaauacaug

SEQ ID NO: 1846490 - RNA, 19 nt, Homo sapiens
  misc_RNA (1)...(19): siRNA sense strand
cgcaagggcuggcugacua

SEQ ID NO: 1846491 - RNA, 19 nt, Homo sapiens
  misc_RNA (1)...(19): siRNA sense strand
gugaugugcuggagaacaa

SEQ ID NO: 1846492 - RNA, 19 nt, Homo sapiens
  misc_RNA (1)...(19): siRNA sense strand
ggagcuagccugugagaca

SEQ ID NO: 1846493 - RNA, 19 nt, Homo sapiens
  misc_RNA (1)...(19): siRNA sense strand
gaaccaggaugagauucug

SEQ ID NO: 1846494 - RNA, 19 nt, Homo sapiens
  misc_RNA (1)...(19): siRNA sense strand
ggaguuugaugagaaggaa

SEQ ID NO: 1846495 - RNA, 19 nt, Homo sapiens
  misc_RNA (1)...(19): siRNA sense strand
acucugaccuggccaauuc

SEQ ID NO: 1846496 - RNA, 19 nt, Homo sapiens
  misc_RNA (1)...(19): siRNA sense strand
agaggaaugucuacaagga

SEQ ID NO: 1846497 - RNA, 19 nt, Homo sapiens
  misc_RNA (1)...(19): siRNA sense strand
caaggaugaugaggagaaa

SEQ ID NO: 1846498 - RNA, 19 nt, Homo sapiens
  misc_RNA (1)...(19): siRNA sense strand
gcgcagaggcuacauugga

SEQ ID NO: 1846499 - RNA, 19 nt, Homo sapiens
  misc_RNA (1)...(19): siRNA sense strand
ucaccaagcuggaccugau

SEQ ID NO: 1846500 - RNA, 19 nt, Homo sapiens
  misc_RNA (1)...(19): siRNA sense strand
gcagaugguccagcaguuu

SEQ ID NO: 1846501 - RNA, 19 nt, Homo sapiens
  misc_RNA (1)...(19): siRNA sense strand
gcacagaugcccgugaugu

SEQ ID NO: 1846502 - RNA, 19 nt, Homo sapiens
  misc_RNA (1)...(19): siRNA sense strand
gagaccauccggaaucuug

SEQ ID NO: 1846503 - RNA, 19 nt, Homo sapiens
  misc_RNA (1)...(19): siRNA sense strand
cagcuacuguccauugaga

SEQ ID NO: 1846504 - RNA, 19 nt, Homo sapiens
  misc_RNA (1)...(19): siRNA sense strand
cacagaauaugccgaguuc

SEQ ID NO: 1846505 - RNA, 19 nt, Homo sapiens
  misc_RNA (1)...(19): siRNA sense strand
ggagcaaccagaugaacaa

SEQ ID NO: 1846506 - RNA, 19 nt, Homo sapiens
  misc_RNA (1)...(19): siRNA sense strand
cagcuaugcuaucaagaau

SEQ ID NO: 1846507 - RNA, 19 nt, Homo sapiens
  misc_RNA (1)...(19): siRNA sense strand
ugcagaagguccucaauca

SEQ ID NO: 1846508 - RNA, 19 nt, Homo sapiens
  misc_RNA (1)...(19): siRNA sense strand
ccaaggaguucaucuucuc

SEQ ID NO: 1846509 - RNA, 19 nt, Homo sapiens
  misc_RNA (1)...(19): siRNA sense strand
caaugcaaccacagaauau

SEQ ID NO: 1846510 - RNA, 19 nt, Homo sapiens
  misc_RNA (1)...(19): siRNA sense strand
ggcugacuaucaauaauau

SEQ ID NO: 1846511 - RNA, 19 nt, Homo sapiens
  misc_RNA (1)...(19): siRNA sense strand
cagaggagcaaccagauga

SEQ ID NO: 1846512 - RNA, 19 nt, Homo sapiens
  misc_RNA (1)...(19): siRNA sense strand
guuagacagugcaccaaga

SEQ ID NO: 1846513 - RNA, 19 nt, Homo sapiens
  misc_RNA (1)...(19): siRNA sense strand
gaucgacaccuacgaacug

SEQ ID NO: 1846514 - RNA, 19 nt, Homo sapiens
  misc_RNA (1)...(19): siRNA sense strand
agauggaguuugaugagaa

SEQ ID NO: 1846515 - RNA, 19 nt, Homo sapiens
  misc_RNA (1)...(19): siRNA sense strand
acucauacauggccauugu

SEQ ID NO: 1846516 - RNA, 19 nt, Homo sapiens
  misc_RNA (1)...(19): siRNA sense strand
ggucaugcuucucaucgau

SEQ ID NO: 1846517 - RNA, 19 nt, Homo sapiens
  misc_RNA (1)...(19): siRNA sense strand
ggagaaagagaagaaauac

SEQ ID NO: 1846518 - RNA, 19 nt, Homo sapiens
  misc_RNA (1)...(19): siRNA sense strand
uccgacagcuucaugcauu

SEQ ID NO: 1846519 - RNA, 19 nt, Homo sapiens
  misc_RNA (1)...(19): siRNA sense strand
gaagaaauacaugcugucu

SEQ ID NO: 1846520 - RNA, 19 nt, Homo sapiens
  misc_RNA (1)...(19): siRNA sense strand
aggaaugucuacaaggauu

SEQ ID NO: 1846521 - RNA, 19 nt, Homo sapiens
  misc_RNA (1)...(19): siRNA sense strand
aggagaaagagaagaaaua

SEQ ID NO: 1846522 - RNA, 19 nt, Homo sapiens
  misc_RNA (1)...(19): siRNA sense strand
ggagccagaaggacauuga

SEQ ID NO: 1846523 - RNA, 19 nt, Homo sapiens
  misc_RNA (1)...(19): siRNA sense strand
uggcuuacaugaacaccaa

SEQ ID NO: 1846524 - RNA, 19 nt, Homo sapiens
  misc_RNA (1)...(19): siRNA sense strand
cgagcuggcuuacaugaac

SEQ ID NO: 1846525 - RNA, 19 nt, Homo sapiens
  misc_RNA (1)...(19): siRNA sense strand
ggagaucagcuaugcuauc

SEQ ID NO: 1846526 - RNA, 19 nt, Homo sapiens
  misc_RNA (1)...(19): siRNA sense strand
agacaugcuuaugcaguuu

SEQ ID NO: 1846527 - RNA, 19 nt, Homo sapiens
  misc_RNA (1)...(19): siRNA sense strand
gcauguaccacgcacugaa

SEQ ID NO: 1846528 - RNA, 19 nt, Homo sapiens
  misc_RNA (1)...(19): siRNA sense strand
gauggaguuugaugagaag

SEQ ID NO: 1846529 - RNA, 19 nt, Homo sapiens
  misc_RNA (1)...(19): siRNA sense strand
ccacagaauaugccgaguu

SEQ ID NO: 1846530 - RNA, 19 nt, Homo sapiens
  misc_RNA (1)...(19): siRNA sense strand
cgacaucgaguuccagauc

SEQ ID NO: 1846531 - RNA, 19 nt, Homo sapiens
  misc_RNA (1)...(19): siRNA sense strand
gaggagaaagagaagaaau

SEQ ID NO: 1846532 - RNA, 19 nt, Homo sapiens
  misc_RNA (1)...(19): siRNA sense strand
uggcugacuaucaauaaua

SEQ ID NO: 1846533 - RNA, 19 nt, Homo sapiens
  misc_RNA (1)...(19): siRNA sense strand
gcuggcugacuaucaauaa

SEQ ID NO: 1846534 - RNA, 19 nt, Homo sapiens
  misc_RNA (1)...(19): siRNA sense strand
cagaugaacaagaagaaga

SEQ ID NO: 1846535 - RNA, 19 nt, Homo sapiens
  misc_RNA (1)...(19): siRNA sense strand
gcagaggagcaaccagaug

SEQ ID NO: 1846536 - RNA, 19 nt, Homo sapiens
  misc_RNA (1)...(19): siRNA sense strand
gccagcuacuguccauuga

SEQ ID NO: 1846537 - RNA, 19 nt, Homo sapiens
  misc_RNA (1)...(19): siRNA sense strand
ucagcuaugcuaucaagaa

SEQ ID NO: 1846538 - RNA, 19 nt, Homo sapiens
  misc_RNA (1)...(19): siRNA sense strand
ucgaggaucuggcauuguc

SEQ ID NO: 1846539 - RNA, 19 nt, Homo sapiens
  misc_RNA (1)...(19): siRNA sense strand
gcacuaaggagcaggucau

SEQ ID NO: 1846540 - RNA, 19 nt, Homo sapiens
  misc_RNA (1)...(19): siRNA sense strand
ccucgaggaucuggcauug

SEQ ID NO: 1846541 - RNA, 19 nt, Homo sapiens
  misc_RNA (1)...(19): siRNA sense strand
caccucaugauuaacaaua

SEQ ID NO: 1846542 - RNA, 19 nt, Homo sapiens
  misc_RNA (1)...(19): siRNA sense strand
gagcuggcuuacaugaaca

SEQ ID NO: 1846543 - RNA, 19 nt, Homo sapiens
  misc_RNA (1)...(19): siRNA sense strand
gaggaggugcgccuugaga

SEQ ID NO: 1846544 - RNA, 19 nt, Homo sapiens
  misc_RNA (1)...(19): siRNA sense strand
cgccuuggcugcugaacga

SEQ ID NO: 1846545 - RNA, 19 nt, Homo sapiens
  misc_RNA (1)...(19): siRNA sense strand
ggaggaauacaagaacuuc

SEQ ID NO: 1846546 - RNA, 19 nt, Homo sapiens
  misc_RNA (1)...(19): siRNA sense strand
gcaucucgccggugccuau

SEQ ID NO: 1846547 - RNA, 19 nt, Homo sapiens
  misc_RNA (1)...(19): siRNA sense strand
ggucaaugcaaccacagaa

SEQ ID NO: 1846548 - RNA, 19 nt, Homo sapiens
  misc_RNA (1)...(19): siRNA sense strand
gcaagggcuggcugacuau

SEQ ID NO: 1846549 - RNA, 19 nt, Homo sapiens
  misc_RNA (1)...(19): siRNA sense strand
ucaaguguguggacauggu

SEQ ID NO: 1846550 - RNA, 19 nt, Homo sapiens
  misc_RNA (1)...(19): siRNA sense strand
aaaagcaggugaagaagau

SEQ ID NO: 1846551 - RNA, 19 nt, Homo sapiens
  misc_RNA (1)...(19): siRNA sense strand
caagauggaguuugaugag

SEQ ID NO: 1846552 - RNA, 19 nt, Homo sapiens
  misc_RNA (1)...(19): siRNA sense strand
ggagguggaggaauacaag

SEQ ID NO: 1846553 - RNA, 19 nt, Homo sapiens
  misc_RNA (1)...(19): siRNA sense strand
aaccgugucucaagugugu

SEQ ID NO: 1846554 - RNA, 19 nt, Homo sapiens
  misc_RNA (1)...(19): siRNA sense strand
acacggagcagaggaaugu

SEQ ID NO: 1846555 - RNA, 19 nt, Homo sapiens
  misc_RNA (1)...(19): siRNA sense strand
gagaaagagaagaaauaca

SEQ ID NO: 1846556 - RNA, 19 nt, Homo sapiens
  misc_RNA (1)...(19): siRNA sense strand
gaacuuccgcccugaugac

SEQ ID NO: 1846557 - RNA, 19 nt, Homo sapiens
  misc_RNA (1)...(19): siRNA sense strand
ccagcgagaccgaggagaa

SEQ ID NO: 1846558 - RNA, 19 nt, Homo sapiens
  misc_RNA (1)...(19): siRNA sense strand
ggacguggagaagggcuuu

SEQ ID NO: 1846559 - RNA, 19 nt, Homo sapiens
  misc_RNA (1)...(19): siRNA sense strand
caagaauauccauggcauu

SEQ ID NO: 1846560 - RNA, 19 nt, Homo sapiens
  misc_RNA (1)...(19): siRNA sense strand
ucagaucgacaccuacgaa

SEQ ID NO: 1846561 - RNA, 19 nt, Homo sapiens
  misc_RNA (1)...(19): siRNA sense strand
ggaaccaggaugagauucu

SEQ ID NO: 1846562 - RNA, 19 nt, Homo sapiens
  misc_RNA (1)...(19): siRNA sense strand
gaaugucuacaaggauuau

SEQ ID NO: 1846563 - RNA, 19 nt, Homo sapiens
  misc_RNA (1)...(19): siRNA sense strand
acaaggaugaugaggagaa

SEQ ID NO: 1846564 - RNA, 19 nt, Homo sapiens
  misc_RNA (1)...(19): siRNA sense strand
gaauauuccuccugacuua

SEQ ID NO: 1846565 - RNA, 19 nt, Homo sapiens
  misc_RNA (1)...(19): siRNA sense strand
gaaagaaccugcaauuaca

SEQ ID NO: 1846566 - RNA, 19 nt, Homo sapiens
  misc_RNA (1)...(19): siRNA sense strand
gaacgcggcuggagcauug

SEQ ID NO: 1846567 - RNA, 19 nt, Homo sapiens
  misc_RNA (1)...(19): siRNA sense strand
gaagaaagaaccugcaauu

SEQ ID NO: 1846568 - RNA, 19 nt, Homo sapiens
  misc_RNA (1)...(19): siRNA sense strand
caaagucucucaucaaauc

SEQ ID NO: 1846569 - RNA, 19 nt, Homo sapiens
  misc_RNA (1)...(19): siRNA sense strand
gaacagcccugaggcaaga

SEQ ID NO: 1846570 - RNA, 19 nt, Homo sapiens
  misc_RNA (1)...(19): siRNA sense strand
gcaauuacaucgcagaaca

SEQ ID NO: 1846571 - RNA, 19 nt, Homo sapiens
  misc_RNA (1)...(19): siRNA sense strand
ggaauacagacaugaaaua

SEQ ID NO: 1846572 - RNA, 19 nt, Homo sapiens
  misc_RNA (1)...(19): siRNA sense strand
ccaagaagauggacaagau

SEQ ID NO: 1846573 - RNA, 19 nt, Homo sapiens
  misc_RNA (1)...(19): siRNA sense strand
gaaguaggauaucaaaucu

SEQ ID NO: 1846574 - RNA, 19 nt, Homo sapiens
  misc_RNA (1)...(19): siRNA sense strand
ggaaauggcuagugaugag

SEQ ID NO: 1846575 - RNA, 19 nt, Homo sapiens
  misc_RNA (1)...(19): siRNA sense strand
ggaaaucgauggaaguucu

SEQ ID NO: 1846576 - RNA, 19 nt, Homo sapiens
  misc_RNA (1)...(19): siRNA sense strand
gcaccaagcacuucugauu

SEQ ID NO: 1846577 - RNA, 19 nt, Homo sapiens
  misc_RNA (1)...(19): siRNA sense strand
caaaugcucgagauacuua

SEQ ID NO: 1846578 - RNA, 19 nt, Homo sapiens
  misc_RNA (1)...(19): siRNA sense strand
gaaugucaguuaaugcuau

SEQ ID NO: 1846579 - RNA, 19 nt, Homo sapiens
  misc_RNA (1)...(19): siRNA sense strand
gugaugagcugaaagagau

SEQ ID NO: 1846580 - RNA, 19 nt, Homo sapiens
  misc_RNA (1)...(19): siRNA sense strand
gaaucggaaugucaguuaa

SEQ ID NO: 1846581 - RNA, 19 nt, Homo sapiens
  misc_RNA (1)...(19): siRNA sense strand
cagaggaaauggcuaguga

SEQ ID NO: 1846582 - RNA, 19 nt, Homo sapiens
  misc_RNA (1)...(19): siRNA sense strand
gcaagcagaguacagauga

SEQ ID NO: 1846583 - RNA, 19 nt, Homo sapiens
  misc_RNA (1)...(19): siRNA sense strand
gaaauaaggaauacagaca

SEQ ID NO: 1846584 - RNA, 19 nt, Homo sapiens
  misc_RNA (1)...(19): siRNA sense strand
cuaaaggagcuuaagaaua

SEQ ID NO: 1846585 - RNA, 19 nt, Homo sapiens
  misc_RNA (1)...(19): siRNA sense strand
ugacuuauuugcuagaaug

SEQ ID NO: 1846586 - RNA, 19 nt, Homo sapiens
  misc_RNA (1)...(19): siRNA sense strand
gaagaauuaggaucucaaa

SEQ ID NO: 1846587 - RNA, 19 nt, Homo sapiens
  misc_RNA (1)...(19): siRNA sense strand
ccaaagaagccaucagaga

SEQ ID NO: 1846588 - RNA, 19 nt, Homo sapiens
  misc_RNA (1)...(19): siRNA sense strand
gaguacagaugaggaaguu

SEQ ID NO: 1846589 - RNA, 19 nt, Homo sapiens
  misc_RNA (1)...(19): siRNA sense strand
agaaagaccuugacgaaaa

SEQ ID NO: 1846590 - RNA, 19 nt, Homo sapiens
  misc_RNA (1)...(19): siRNA sense strand
gaaaggaugagacaaaugc

SEQ ID NO: 1846591 - RNA, 19 nt, Homo sapiens
  misc_RNA (1)...(19): siRNA sense strand
ugagaaagaccuugacgaa

SEQ ID NO: 1846592 - RNA, 19 nt, Homo sapiens
  misc_RNA (1)...(19): siRNA sense strand
gagcugaugaggaagaauu

SEQ ID NO: 1846593 - RNA, 19 nt, Homo sapiens
  misc_RNA (1)...(19): siRNA sense strand
cgaaguaggauaucaaauc

SEQ ID NO: 1846594 - RNA, 19 nt, Homo sapiens
  misc_RNA (1)...(19): siRNA sense strand
gagaaagaccuugacgaaa

SEQ ID NO: 1846595 - RNA, 19 nt, Homo sapiens
  misc_RNA (1)...(19): siRNA sense strand
gaccaaagaagccaucaga

SEQ ID NO: 1846596 - RNA, 19 nt, Homo sapiens
  misc_RNA (1)...(19): siRNA sense strand
cagaaaggaugagacaaau

SEQ ID NO: 1846597 - RNA, 19 nt, Homo sapiens
  misc_RNA (1)...(19): siRNA sense strand
gacaaaugcucgagauacu

SEQ ID NO: 1846598 - RNA, 19 nt, Homo sapiens
  misc_RNA (1)...(19): siRNA sense strand
acaagauggugcagaagaa

SEQ ID NO: 1846599 - RNA, 19 nt, Homo sapiens
  misc_RNA (1)...(19): siRNA sense strand
caacugagaaagaccuuga

SEQ ID NO: 1846600 - RNA, 19 nt, Homo sapiens
  misc_RNA (1)...(19): siRNA sense strand
gacccagacugacuuguuc

SEQ ID NO: 1846601 - RNA, 19 nt, Homo sapiens
  misc_RNA (1)...(19): siRNA sense strand
aauuggagcugaugaggaa

SEQ ID NO: 1846602 - RNA, 19 nt, Homo sapiens
  misc_RNA (1)...(19): siRNA sense strand
uuacugcaguccacaagaa

SEQ ID NO: 1846603 - RNA, 19 nt, Homo sapiens
  misc_RNA (1)...(19): siRNA sense strand
agaaagaaccugcaauuac

SEQ ID NO: 1846604 - RNA, 19 nt, Homo sapiens
  misc_RNA (1)...(19): siRNA sense strand
ugaggaaguuacaucuuug

SEQ ID NO: 1846605 - RNA, 19 nt, Homo sapiens
  misc_RNA (1)...(19): siRNA sense strand
agacugacuuguucacaug

SEQ ID NO: 1846606 - RNA, 19 nt, Homo sapiens
  misc_RNA (1)...(19): siRNA sense strand
ggacccagacugacuuguu

SEQ ID NO: 1846607 - RNA, 19 nt, Homo sapiens
  misc_RNA (1)...(19): siRNA sense strand
acagaaaggaugagacaaa

SEQ ID NO: 1846608 - RNA, 19 nt, Homo sapiens
  misc_RNA (1)...(19): siRNA sense strand
aagaaagaaccugcaauua

SEQ ID NO: 1846609 - RNA, 19 nt, Homo sapiens
  misc_RNA (1)...(19): siRNA sense strand
gcuauucgcaagcagagua

SEQ ID NO: 1846610 - RNA, 19 nt, Homo sapiens
  misc_RNA (1)...(19): siRNA sense strand
ccuccugacuuauuugcua

SEQ ID NO: 1846611 - RNA, 19 nt, Homo sapiens
  misc_RNA (1)...(19): siRNA sense strand
augaggaaguuacaucuuu

SEQ ID NO: 1846612 - RNA, 19 nt, Homo sapiens
  misc_RNA (1)...(19): siRNA sense strand
gagcuuaagaauauuccua

SEQ ID NO: 1846613 - RNA, 19 nt, Homo sapiens
  misc_RNA (1)...(19): siRNA sense strand
gagacaaaugcucgagaua

SEQ ID NO: 1846614 - RNA, 19 nt, Homo sapiens
  misc_RNA (1)...(19): siRNA sense strand
uaaugaauguggaaaucga

SEQ ID NO: 1846615 - RNA, 19 nt, Homo sapiens
  misc_RNA (1)...(19): siRNA sense strand
gcuaaaggagcuuaagaau

SEQ ID NO: 1846616 - RNA, 19 nt, Homo sapiens
  misc_RNA (1)...(19): siRNA sense strand
agaaucggaaugucaguua

SEQ ID NO: 1846617 - RNA, 19 nt, Homo sapiens
  misc_RNA (1)...(19): siRNA sense strand
gaggaaauggcuagugaug

SEQ ID NO: 1846618 - RNA, 19 nt, Homo sapiens
  misc_RNA (1)...(19): siRNA sense strand
gacaagauggugcagaaga

SEQ ID NO: 1846619 - RNA, 19 nt, Homo sapiens
  misc_RNA (1)...(19): siRNA sense strand
aaagaagaauugcacuuac

SEQ ID NO: 1846620 - RNA, 19 nt, Homo sapiens
  misc_RNA (1)...(19): siRNA sense strand
gcagaguacagaugaggaa

SEQ ID NO: 1846621 - RNA, 19 nt, Homo sapiens
  misc_RNA (1)...(19): siRNA sense strand
ggaaugucaguuaaugcua

SEQ ID NO: 1846622 - RNA, 19 nt, Homo sapiens
  misc_RNA (1)...(19): siRNA sense strand
aagaagaauugcacuuaca

SEQ ID NO: 1846623 - RNA, 19 nt, Homo sapiens
  misc_RNA (1)...(19): siRNA sense strand
ugagacaaaugcucgagau

SEQ ID NO: 1846624 - RNA, 19 nt, Homo sapiens
  misc_RNA (1)...(19): siRNA sense strand
gaagaagcuauauaucaag

SEQ ID NO: 1846625 - RNA, 19 nt, Homo sapiens
  misc_RNA (1)...(19): siRNA sense strand
uggacaagauggugcagaa

SEQ ID NO: 1846626 - RNA, 19 nt, Homo sapiens
  misc_RNA (1)...(19): siRNA sense strand
guacgaaguaggauaucaa

SEQ ID NO: 1846627 - RNA, 19 nt, Homo sapiens
  misc_RNA (1)...(19): siRNA sense strand
ugacuacauugcaauugga

SEQ ID NO: 1846628 - RNA, 19 nt, Homo sapiens
  misc_RNA (1)...(19): siRNA sense strand
gaauacagacaugaaauac

SEQ ID NO: 1846629 - RNA, 19 nt, Homo sapiens
  misc_RNA (1)...(19): siRNA sense strand
aauaaggaauacagacaug

SEQ ID NO: 1846630 - RNA, 19 nt, Homo sapiens
  misc_RNA (1)...(19): siRNA sense strand
ggccaucaacugagaaaga

SEQ ID NO: 1846631 - RNA, 19 nt, Homo sapiens
  misc_RNA (1)...(19): siRNA sense strand
uaaggaauacagacaugaa

SEQ ID NO: 1846632 - RNA, 19 nt, Homo sapiens
  misc_RNA (1)...(19): siRNA sense strand
gcaagagaagaaaguacuu

SEQ ID NO: 1846633 - RNA, 19 nt, Homo sapiens
  misc_RNA (1)...(19): siRNA sense strand
gaaagaccuugacgaaaag

SEQ ID NO: 1846634 - RNA, 19 nt, Homo sapiens
  misc_RNA (1)...(19): siRNA sense strand
caagaaauaaggaauacag

SEQ ID NO: 1846635 - RNA, 19 nt, Homo sapiens
  misc_RNA (1)...(19): siRNA sense strand
ucgagauacuuauguuuca

SEQ ID NO: 1846636 - RNA, 19 nt, Homo sapiens
  misc_RNA (1)...(19): siRNA sense strand
gcacuuacacacagguaca

SEQ ID NO: 1846637 - RNA, 19 nt, Homo sapiens
  misc_RNA (1)...(19): siRNA sense strand
gcauuggauuugcuaaagg

SEQ ID NO: 1846638 - RNA, 19 nt, Homo sapiens
  misc_RNA (1)...(19): siRNA sense strand
ggaagaauuaggaucucaa

SEQ ID NO: 1846639 - RNA, 19 nt, Homo sapiens
  misc_RNA (1)...(19): siRNA sense strand
guacagaugaggaaguuac

SEQ ID NO: 1846640 - RNA, 19 nt, Homo sapiens
  misc_RNA (1)...(19): siRNA sense strand
gaagaauugcacuuacaca

SEQ ID NO: 1846641 - RNA, 19 nt, Homo sapiens
  misc_RNA (1)...(19): siRNA sense strand
ccacaagaaucggaauguc

SEQ ID NO: 1846642 - RNA, 19 nt, Homo sapiens
  misc_RNA (1)...(19): siRNA sense strand
ggaugacuacauugcaauu

SEQ ID NO: 1846643 - RNA, 19 nt, Homo sapiens
  misc_RNA (1)...(19): siRNA sense strand
ucugugcgguugaagugua

SEQ ID NO: 1846644 - RNA, 19 nt, Homo sapiens
  misc_RNA (1)...(19): siRNA sense strand
cauuggauuugcuaaagga

SEQ ID NO: 1846645 - RNA, 19 nt, Homo sapiens
  misc_RNA (1)...(19): siRNA sense strand
gcuuaagaauauuccuaug

SEQ ID NO: 1846646 - RNA, 19 nt, Homo sapiens
  misc_RNA (1)...(19): siRNA sense strand
gcucgagauacuuauguuu

SEQ ID NO: 1846647 - RNA, 19 nt, Homo sapiens
  misc_RNA (1)...(19): siRNA sense strand
gaugcuugcugcagcucuu

SEQ ID NO: 1846648 - RNA, 19 nt, Homo sapiens
  misc_RNA (1)...(19): siRNA sense strand
uagaaugacagcagaggaa

SEQ ID NO: 1846649 - RNA, 19 nt, Homo sapiens
  misc_RNA (1)...(19): siRNA sense strand
cagacugacuuguucacau

SEQ ID NO: 1846650 - RNA, 19 nt, Homo sapiens
  misc_RNA (1)...(19): siRNA sense strand
uguaaugaauguggaaauc

SEQ ID NO: 1846651 - RNA, 19 nt, Homo sapiens
  misc_RNA (1)...(19): siRNA sense strand
aauguccucugugggaaua

SEQ ID NO: 1846652 - RNA, 19 nt, Homo sapiens
  misc_RNA (1)...(19): siRNA sense strand
gaggcaagagaagaaagua

SEQ ID NO: 1846653 - RNA, 19 nt, Homo sapiens
  misc_RNA (1)...(19): siRNA sense strand
gcugaugaaccaaugacaa

SEQ ID NO: 1846654 - RNA, 19 nt, Homo sapiens
  misc_RNA (1)...(19): siRNA sense strand
gaaugacagcagaggaaau

SEQ ID NO: 1846655 - RNA, 19 nt, Homo sapiens
  misc_RNA (1)...(19): siRNA sense strand
caagaagauggacaagaug

SEQ ID NO: 1846656 - RNA, 19 nt, Homo sapiens
  misc_RNA (1)...(19): siRNA sense strand
gaggaagaauuaggaucuc

SEQ ID NO: 1846657 - RNA, 19 nt, Homo sapiens
  misc_RNA (1)...(19): siRNA sense strand
gaauguggaaaucgaugga

SEQ ID NO: 1846658 - RNA, 19 nt, Homo sapiens
  misc_RNA (1)...(19): siRNA sense strand
cuagugaugagcugaaaga

SEQ ID NO: 1846659 - RNA, 19 nt, Homo sapiens
  misc_RNA (1)...(19): siRNA sense strand
gaauuacugcaguccacaa

SEQ ID NO: 1846660 - RNA, 19 nt, Homo sapiens
  misc_RNA (1)...(19): siRNA sense strand
cacaagaaucggaauguca

SEQ ID NO: 1846661 - RNA, 19 nt, Homo sapiens
  misc_RNA (1)...(19): siRNA sense strand
gaugaaccaaugacaacau

SEQ ID NO: 1846662 - RNA, 19 nt, Homo sapiens
  misc_RNA (1)...(19): siRNA sense strand
uauuccuccugacuuauuu

SEQ ID NO: 1846663 - RNA, 19 nt, Homo sapiens
  misc_RNA (1)...(19): siRNA sense strand
uagaguacgaaguaggaua

SEQ ID NO: 1846664 - RNA, 19 nt, Homo sapiens
  misc_RNA (1)...(19): siRNA sense strand
ggaaggcacuguugaguua

SEQ ID NO: 1846665 - RNA, 19 nt, Homo sapiens
  misc_RNA (1)...(19): siRNA sense strand
gaagaagacugcauaaacu

SEQ ID NO: 1846666 - RNA, 19 nt, Homo sapiens
  misc_RNA (1)...(19): siRNA sense strand
gcauggagcugguguacaa

SEQ ID NO: 1846667 - RNA, 19 nt, Homo sapiens
  misc_RNA (1)...(19): siRNA sense strand
gcaaagcauugguaucuca

SEQ ID NO: 1846668 - RNA, 19 nt, Homo sapiens
  misc_RNA (1)...(19): siRNA sense strand
gagccaaucuuucuuucaa

SEQ ID NO: 1846669 - RNA, 19 nt, Homo sapiens
  misc_RNA (1)...(19): siRNA sense strand
ggaaauucgugcuaacaga

SEQ ID NO: 1846670 - RNA, 19 nt, Homo sapiens
  misc_RNA (1)...(19): siRNA sense strand
ggacgacucugaucuggau

SEQ ID NO: 1846671 - RNA, 19 nt, Homo sapiens
  misc_RNA (1)...(19): siRNA sense strand
ggcccaagcuggcaaagaa

SEQ ID NO: 1846672 - RNA, 19 nt, Homo sapiens
  misc_RNA (1)...(19): siRNA sense strand
ggaagaagacugcauaaac

SEQ ID NO: 1846673 - RNA, 19 nt, Homo sapiens
  misc_RNA (1)...(19): siRNA sense strand
gauaagagaagagaagaaa

SEQ ID NO: 1846674 - RNA, 19 nt, Homo sapiens
  misc_RNA (1)...(19): siRNA sense strand
ucuggaaccucaacaauga

SEQ ID NO: 1846675 - RNA, 19 nt, Homo sapiens
  misc_RNA (1)...(19): siRNA sense strand
caagggaaguaguguccua

SEQ ID NO: 1846676 - RNA, 19 nt, Homo sapiens
  misc_RNA (1)...(19): siRNA sense strand
ggaaaugguggaaucuaaa

SEQ ID NO: 1846677 - RNA, 19 nt, Homo sapiens
  misc_RNA (1)...(19): siRNA sense strand
cagcaaguguggccauuga

SEQ ID NO: 1846678 - RNA, 19 nt, Homo sapiens
  misc_RNA (1)...(19): siRNA sense strand
ugaagacaaugcagacuau

SEQ ID NO: 1846679 - RNA, 19 nt, Homo sapiens
  misc_RNA (1)...(19): siRNA sense strand
agaggaauuucucaucuuu

SEQ ID NO: 1846680 - RNA, 19 nt, Homo sapiens
  misc_RNA (1)...(19): siRNA sense strand
gaugguggcuucuuacaac

SEQ ID NO: 1846681 - RNA, 19 nt, Homo sapiens
  misc_RNA (1)...(19): siRNA sense strand
caacgggagacgucaauaa

SEQ ID NO: 1846682 - RNA, 19 nt, Homo sapiens
  misc_RNA (1)...(19): siRNA sense strand
ggacccagaaugcucauaa

SEQ ID NO: 1846683 - RNA, 19 nt, Homo sapiens
  misc_RNA (1)...(19): siRNA sense strand
ugaggaagaugaggaaaug

SEQ ID NO: 1846684 - RNA, 19 nt, Homo sapiens
  misc_RNA (1)...(19): siRNA sense strand
caacaacaaugaagaugcu

SEQ ID NO: 1846685 - RNA, 19 nt, Homo sapiens
  misc_RNA (1)...(19): siRNA sense strand
ccaggacccuuguggaaau

SEQ ID NO: 1846686 - RNA, 19 nt, Homo sapiens
  misc_RNA (1)...(19): siRNA sense strand
gacaaucgcagucaucgaa

SEQ ID NO: 1846687 - RNA, 19 nt, Homo sapiens
  misc_RNA (1)...(19): siRNA sense strand
ggaaggaagaggagaggaa

SEQ ID NO: 1846688 - RNA, 19 nt, Homo sapiens
  misc_RNA (1)...(19): siRNA sense strand
gcacagauaagagaagaga

SEQ ID NO: 1846689 - RNA, 19 nt, Homo sapiens
  misc_RNA (1)...(19): siRNA sense strand
aggaaaugguggaaucuaa

SEQ ID NO: 1846690 - RNA, 19 nt, Homo sapiens
  misc_RNA (1)...(19): siRNA sense strand
gaaggaagaggagaggaaa

SEQ ID NO: 1846691 - RNA, 19 nt, Homo sapiens
  misc_RNA (1)...(19): siRNA sense strand
gagcugguguacaauaagu

SEQ ID NO: 1846692 - RNA, 19 nt, Homo sapiens
  misc_RNA (1)...(19): siRNA sense strand
ggaguggccuugguuugga

SEQ ID NO: 1846693 - RNA, 19 nt, Homo sapiens
  misc_RNA (1)...(19): siRNA sense strand
aaagaaagaggcugauaug

SEQ ID NO: 1846694 - RNA, 19 nt, Homo sapiens
  misc_RNA (1)...(19): siRNA sense strand
gaaggaagccccuccaaga

SEQ ID NO: 1846695 - RNA, 19 nt, Homo sapiens
  misc_RNA (1)...(19): siRNA sense strand
cgggagacgucaauaacuu

SEQ ID NO: 1846696 - RNA, 19 nt, Homo sapiens
  misc_RNA (1)...(19): siRNA sense strand
ggaacaugaaguuuaagaa

SEQ ID NO: 1846697 - RNA, 19 nt, Homo sapiens
  misc_RNA (1)...(19): siRNA sense strand
cagacuauguguacgaugu

SEQ ID NO: 1846698 - RNA, 19 nt, Homo sapiens
  misc_RNA (1)...(19): siRNA sense strand
gacgagagacagaggcuuu

SEQ ID NO: 1846699 - RNA, 19 nt, Homo sapiens
  misc_RNA (1)...(19): siRNA sense strand
cagaggaauuucucaucuu

SEQ ID NO: 1846700 - RNA, 19 nt, Homo sapiens
  misc_RNA (1)...(19): siRNA sense strand
gaaaugguggaaucuaaag

SEQ ID NO: 1846701 - RNA, 19 nt, Homo sapiens
  misc_RNA (1)...(19): siRNA sense strand
ugaagaggaugaggaagau

SEQ ID NO: 1846702 - RNA, 19 nt, Homo sapiens
  misc_RNA (1)...(19): siRNA sense strand
acaagccgcucuacuccuu

SEQ ID NO: 1846703 - RNA, 19 nt, Homo sapiens
  misc_RNA (1)...(19): siRNA sense strand
ggaagcaaagcagguauug

SEQ ID NO: 1846704 - RNA, 19 nt, Homo sapiens
  misc_RNA (1)...(19): siRNA sense strand
guuuggaacaugaaguuua

SEQ ID NO: 1846705 - RNA, 19 nt, Homo sapiens
  misc_RNA (1)...(19): siRNA sense strand
ucagaggaauuucucaucu

SEQ ID NO: 1846706 - RNA, 19 nt, Homo sapiens
  misc_RNA (1)...(19): siRNA sense strand
aaacagcagauccuucauu

SEQ ID NO: 1846707 - RNA, 19 nt, Homo sapiens
  misc_RNA (1)...(19): siRNA sense strand
ucaaucgucaguucuauga

SEQ ID NO: 1846708 - RNA, 19 nt, Homo sapiens
  misc_RNA (1)...(19): siRNA sense strand
gcaaacgacgagagacaga

SEQ ID NO: 1846709 - RNA, 19 nt, Homo sapiens
  misc_RNA (1)...(19): siRNA sense strand
cgacuuuucucaccuguuu

SEQ ID NO: 1846710 - RNA, 19 nt, Homo sapiens
  misc_RNA (1)...(19): siRNA sense strand
uggagcugguguacaauaa

SEQ ID NO: 1846711 - RNA, 19 nt, Homo sapiens
  misc_RNA (1)...(19): siRNA sense strand
agaagaaacggaaggaaga

SEQ ID NO: 1846712 - RNA, 19 nt, Homo sapiens
  misc_RNA (1)...(19): siRNA sense strand
gccaaucuuucuuucaauc

SEQ ID NO: 1846713 - RNA, 19 nt, Homo sapiens
  misc_RNA (1)...(19): siRNA sense strand
gaucgcaaacgacgagaga

SEQ ID NO: 1846714 - RNA, 19 nt, Homo sapiens
  misc_RNA (1)...(19): siRNA sense strand
ugaggaagguacagucuac

SEQ ID NO: 1846715 - RNA, 19 nt, Homo sapiens
  misc_RNA (1)...(19): siRNA sense strand
caugggauaccuguuauuu

SEQ ID NO: 1846716 - RNA, 19 nt, Homo sapiens
  misc_RNA (1)...(19): siRNA sense strand
uagcacagauaagagaaga

SEQ ID NO: 1846717 - RNA, 19 nt, Homo sapiens
  misc_RNA (1)...(19): siRNA sense strand
agaaagaggcugauaugca

SEQ ID NO: 1846718 - RNA, 19 nt, Homo sapiens
  misc_RNA (1)...(19): siRNA sense strand
ccaguacccugagcugaug

SEQ ID NO: 1846719 - RNA, 19 nt, Homo sapiens
  misc_RNA (1)...(19): siRNA sense strand
aaucgucaguucuaugaug

SEQ ID NO: 1846720 - RNA, 19 nt, Homo sapiens
  misc_RNA (1)...(19): siRNA sense strand
gaccggacaauacggguaa

SEQ ID NO: 1846721 - RNA, 19 nt, Homo sapiens
  misc_RNA (1)...(19): siRNA sense strand
guccaagccugucgcuguu

SEQ ID NO: 1846722 - RNA, 19 nt, Homo sapiens
  misc_RNA (1)...(19): siRNA sense strand
cucauaaccucaucacugu

SEQ ID NO: 1846723 - RNA, 19 nt, Homo sapiens
  misc_RNA (1)...(19): siRNA sense strand
gaggaaaugguggaaucua

SEQ ID NO: 1846724 - RNA, 19 nt, Homo sapiens
  misc_RNA (1)...(19): siRNA sense strand
gaugaauggacccgauuug

SEQ ID NO: 1846725 - RNA, 19 nt, Homo sapiens
  misc_RNA (1)...(19): siRNA sense strand
cuacacggcuugucgucau

SEQ ID NO: 1846726 - RNA, 19 nt, Homo sapiens
  misc_RNA (1)...(19): siRNA sense strand
ggaugaggaagaugaggaa

SEQ ID NO: 1846727 - RNA, 19 nt, Homo sapiens
  misc_RNA (1)...(19): siRNA sense strand
gaggaggaaggcacuguug

SEQ ID NO: 1846728 - RNA, 19 nt, Homo sapiens
  misc_RNA (1)...(19): siRNA sense strand
ggacucggaaggccguauu

SEQ ID NO: 1846729 - RNA, 19 nt, Homo sapiens
  misc_RNA (1)...(19): siRNA sense strand
cguguacuguguaaauguu

SEQ ID NO: 1846730 - RNA, 19 nt, Homo sapiens
  misc_RNA (1)...(19): siRNA sense strand
gcagcggacacccuuauca

SEQ ID NO: 1846731 - RNA, 19 nt, Homo sapiens
  misc_RNA (1)...(19): siRNA sense strand
aacagcagauccuucauuc

SEQ ID NO: 1846732 - RNA, 19 nt, Homo sapiens
  misc_RNA (1)...(19): siRNA sense strand
acucagaacuggaaaauca

SEQ ID NO: 1846733 - RNA, 19 nt, Homo sapiens
  misc_RNA (1)...(19): siRNA sense strand
ggcugaagauuccgacauc

SEQ ID NO: 1846734 - RNA, 19 nt, Homo sapiens
  misc_RNA (1)...(19): siRNA sense strand
acucagaacuuggaagaag

SEQ ID NO: 1846735 - RNA, 19 nt, Homo sapiens
  misc_RNA (1)...(19): siRNA sense strand
ugucuccacugauggcaaa

SEQ ID NO: 1846736 - RNA, 19 nt, Homo sapiens
  misc_RNA (1)...(19): siRNA sense strand
cagcagauccuucauucag

SEQ ID NO: 1846737 - RNA, 19 nt, Homo sapiens
  misc_RNA (1)...(19): siRNA sense strand
ucaccuguuugucacauca

SEQ ID NO: 1846738 - RNA, 19 nt, Homo sapiens
  misc_RNA (1)...(19): siRNA sense strand
gaguggccuugguuuggaa

SEQ ID NO: 1846739 - RNA, 19 nt, Homo sapiens
  misc_RNA (1)...(19): siRNA sense strand
cuucuuacaacaacaauga

SEQ ID NO: 1846740 - RNA, 19 nt, Homo sapiens
  misc_RNA (1)...(19): siRNA sense strand
gcauaaacugggcguguca

SEQ ID NO: 1846741 - RNA, 19 nt, Homo sapiens
  misc_RNA (1)...(19): siRNA sense strand
aaacugggcgugucaaagg

SEQ ID NO: 1846742 - RNA, 19 nt, Homo sapiens
  misc_RNA (1)...(19): siRNA sense strand
gagaguugacagaggaaga

SEQ ID NO: 1846743 - RNA, 19 nt, Homo sapiens
  misc_RNA (1)...(19): siRNA sense strand
ggaggaaggcacuguugag

SEQ ID NO: 1846744 - RNA, 19 nt, Homo sapiens
  misc_RNA (1)...(19): siRNA sense strand
ggaccaccaagcacaacaa

SEQ ID NO: 1846745 - RNA, 19 nt, Homo sapiens
  misc_RNA (1)...(19): siRNA sense strand
gcagcgcuuagcacagaua

SEQ ID NO: 1846746 - RNA, 19 nt, Homo sapiens
  misc_RNA (1)...(19): siRNA sense strand
caucccguguacuguguaa

SEQ ID NO: 1846747 - RNA, 19 nt, Homo sapiens
  misc_RNA (1)...(19): siRNA sense strand
gauggaguggccuugguuu

SEQ ID NO: 1846748 - RNA, 19 nt, Homo sapiens
  misc_RNA (1)...(19): siRNA sense strand
gaaaaccacaccagaauac

SEQ ID NO: 1846749 - RNA, 19 nt, Homo sapiens
  misc_RNA (1)...(19): siRNA sense strand
caaugcagacuauguguac

SEQ ID NO: 1846750 - RNA, 19 nt, Homo sapiens
  misc_RNA (1)...(19): siRNA sense strand
guuugucacaucaucauuu

SEQ ID NO: 1846751 - RNA, 19 nt, Homo sapiens
  misc_RNA (1)...(19): siRNA sense strand
aagcaaagcagguauuggu

SEQ ID NO: 1846752 - RNA, 19 nt, Homo sapiens
  misc_RNA (1)...(19): siRNA sense strand
ucaucacugucuccacuga

SEQ ID NO: 1846753 - RNA, 19 nt, Homo sapiens
  misc_RNA (1)...(19): siRNA sense strand
gaagaaacggaaggaagag

SEQ ID NO: 1846754 - RNA, 19 nt, Homo sapiens
  misc_RNA (1)...(19): siRNA sense strand
gcccuaaaccguguucguu

SEQ ID NO: 1846755 - RNA, 19 nt, Homo sapiens
  misc_RNA (1)...(19): siRNA sense strand
cuacuccuuugaagacaau

SEQ ID NO: 1846756 - RNA, 19 nt, Homo sapiens
  misc_RNA (1)...(19): siRNA sense strand
gcucuacuccuuugaagac

SEQ ID NO: 1846757 - RNA, 19 nt, Homo sapiens
  misc_RNA (1)...(19): siRNA sense strand
agacucagaacuuggaaga

SEQ ID NO: 1846758 - RNA, 19 nt, Homo sapiens
  misc_RNA (1)...(19): siRNA sense strand
gggccagugacaggaauua

SEQ ID NO: 1846759 - RNA, 19 nt, Homo sapiens
  misc_RNA (1)...(19): siRNA sense strand
ccguuuccauccuaacuug

SEQ ID NO: 1846760 - RNA, 19 nt, Homo sapiens
  misc_RNA (1)...(19): siRNA sense strand
agacaaugcagacuaugug

SEQ ID NO: 1846761 - RNA, 19 nt, Homo sapiens
  misc_RNA (1)...(19): siRNA sense strand
acaacaagccgcucuacuc

SEQ ID NO: 1846762 - RNA, 19 nt, Homo sapiens
  misc_RNA (1)...(19): siRNA sense strand
uuugucacaucaucauuug

SEQ ID NO: 1846763 - RNA, 19 nt, Homo sapiens
  misc_RNA (1)...(19): siRNA sense strand
cauggaagcaaagcaggua

SEQ ID NO: 1846764 - RNA, 19 nt, Homo sapiens
  misc_RNA (1)...(19): siRNA sense strand
ggaggacgcuggagcagau

SEQ ID NO: 1846765 - RNA, 19 nt, Homo sapiens
  misc_RNA (1)...(19): siRNA sense strand
cgacuuggcucacgugucu

SEQ ID NO: 1846766 - RNA, 19 nt, Homo sapiens
  misc_RNA (1)...(19): siRNA sense strand
gggccaaccugaccaccuu

SEQ ID NO: 1846767 - RNA, 19 nt, Homo sapiens
  misc_RNA (1)...(19): siRNA sense strand
gaacuucuacaacaauuac

SEQ ID NO: 1846768 - RNA, 19 nt, Homo sapiens
  misc_RNA (1)...(19): siRNA sense strand
ccggagaccuuccuguaug

SEQ ID NO: 1846769 - RNA, 19 nt, Homo sapiens
  misc_RNA (1)...(19): siRNA sense strand
ggacuuugaugguguucca

SEQ ID NO: 1846770 - RNA, 19 nt, Homo sapiens
  misc_RNA (1)...(19): siRNA sense strand
gaagguggccagccugauc

SEQ ID NO: 1846771 - RNA, 19 nt, Homo sapiens
  misc_RNA (1)...(19): siRNA sense strand
gaggacgucuccaaguauc

SEQ ID NO: 1846772 - RNA, 19 nt, Homo sapiens
  misc_RNA (1)...(19): siRNA sense strand
gugaacuucuacaacaauu

SEQ ID NO: 1846773 - RNA, 19 nt, Homo sapiens
  misc_RNA (1)...(19): siRNA sense strand
ggauguacccggagaccuu

SEQ ID NO: 1846774 - RNA, 19 nt, Homo sapiens
  misc_RNA (1)...(19): siRNA sense strand
caccagcagugcaggcauu

SEQ ID NO: 1846775 - RNA, 19 nt, Homo sapiens
  misc_RNA (1)...(19): siRNA sense strand
cuacaacaauuacauuucc

SEQ ID NO: 1846776 - RNA, 19 nt, Homo sapiens
  misc_RNA (1)...(19): siRNA sense strand
ccaaguggccgaccaucug

SEQ ID NO: 1846777 - RNA, 19 nt, Homo sapiens
  misc_RNA (1)...(19): siRNA sense strand
ccaaguauccagaccugau

SEQ ID NO: 1846778 - RNA, 19 nt, Homo sapiens
  misc_RNA (1)...(19): siRNA sense strand
gcgacacccagaacaaaga

SEQ ID NO: 1846779 - RNA, 19 nt, Homo sapiens
  misc_RNA (1)...(19): siRNA sense strand
gagccagagccguggguuu

SEQ ID NO: 1846780 - RNA, 19 nt, Homo sapiens
  misc_RNA (1)...(19): siRNA sense strand
cggagaccuuccuguaugu

SEQ ID NO: 1846781 - RNA, 19 nt, Homo sapiens
  misc_RNA (1)...(19): siRNA sense strand
ggacuccccugucauugau

SEQ ID NO: 1846782 - RNA, 19 nt, Homo sapiens
  misc_RNA (1)...(19): siRNA sense strand
ggugaacuucuacaacaau

SEQ ID NO: 1846783 - RNA, 19 nt, Homo sapiens
  misc_RNA (1)...(19): siRNA sense strand
ccaucuggaucacaucaag

SEQ ID NO: 1846784 - RNA, 19 nt, Homo sapiens
  misc_RNA (1)...(19): siRNA sense strand
ggcagcguguggugaagga

SEQ ID NO: 1846785 - RNA, 19 nt, Homo sapiens
  misc_RNA (1)...(19): siRNA sense strand
auggugaacuucuacaaca

SEQ ID NO: 1846786 - RNA, 19 nt, Homo sapiens
  misc_RNA (1)...(19): siRNA sense strand
caccgcaugugccggaugu

SEQ ID NO: 1846787 - RNA, 19 nt, Homo sapiens
  misc_RNA (1)...(19): siRNA sense strand
cagacagccuggugauggu

SEQ ID NO: 1846788 - RNA, 19 nt, Homo sapiens
  misc_RNA (1)...(19): siRNA sense strand
uacauuuccugcaccaaca

SEQ ID NO: 1846789 - RNA, 19 nt, Homo sapiens
  misc_RNA (1)...(19): siRNA sense strand
gcacugcagacuucuuucg

SEQ ID NO: 1846790 - RNA, 19 nt, Homo sapiens
  misc_RNA (1)...(19): siRNA sense strand
gaccaucuggaucacauca

SEQ ID NO: 1846791 - RNA, 19 nt, Homo sapiens
  misc_RNA (1)...(19): siRNA sense strand
gaggcagagaggaucauga

SEQ ID NO: 1846792 - RNA, 19 nt, Homo sapiens
  misc_RNA (1)...(19): siRNA sense strand
caaguauccagaccugauc

SEQ ID NO: 1846793 - RNA, 19 nt, Homo sapiens
  misc_RNA (1)...(19): siRNA sense strand
aggccaaccugucccaagu

SEQ ID NO: 1846794 - RNA, 19 nt, Homo sapiens
  misc_RNA (1)...(19): siRNA sense strand
uggugaacuucuacaacaa

SEQ ID NO: 1846795 - RNA, 19 nt, Homo sapiens
  misc_RNA (1)...(19): siRNA sense strand
gauggugaacuucuacaac

SEQ ID NO: 1846796 - RNA, 19 nt, Homo sapiens
  misc_RNA (1)...(19): siRNA sense strand
gagaccuuccuguauguca

SEQ ID NO: 1846797 - RNA, 19 nt, Homo sapiens
  misc_RNA (1)...(19): siRNA sense strand
gagcuuaucugaagaaaua

SEQ ID NO: 1846798 - RNA, 19 nt, Homo sapiens
  misc_RNA (1)...(19): siRNA sense strand
ggaagaagcuggaggaaga

SEQ ID NO: 1846799 - RNA, 19 nt, Homo sapiens
  misc_RNA (1)...(19): siRNA sense strand
ggaaaugccuggaagauga

SEQ ID NO: 1846800 - RNA, 19 nt, Homo sapiens
  misc_RNA (1)...(19): siRNA sense strand
gaagacauguuaaagguuu

SEQ ID NO: 1846801 - RNA, 19 nt, Homo sapiens
  misc_RNA (1)...(19): siRNA sense strand
gagcaggcauccauuguua

SEQ ID NO: 1846802 - RNA, 19 nt, Homo sapiens
  misc_RNA (1)...(19): siRNA sense strand
ucaauaagcugaaacaaga

SEQ ID NO: 1846803 - RNA, 19 nt, Homo sapiens
  misc_RNA (1)...(19): siRNA sense strand
gcuaguagauucugguaua

SEQ ID NO: 1846804 - RNA, 19 nt, Homo sapiens
  misc_RNA (1)...(19): siRNA sense strand
gcaagaggcugcagauguu

SEQ ID NO: 1846805 - RNA, 19 nt, Homo sapiens
  misc_RNA (1)...(19): siRNA sense strand
gaaauuagagucugagaaa

SEQ ID NO: 1846806 - RNA, 19 nt, Homo sapiens
  misc_RNA (1)...(19): siRNA sense strand
ucaaggagcuggagaaaga

SEQ ID NO: 1846807 - RNA, 19 nt, Homo sapiens
  misc_RNA (1)...(19): siRNA sense strand
acagauggcuacuuaaaua

SEQ ID NO: 1846808 - RNA, 19 nt, Homo sapiens
  misc_RNA (1)...(19): siRNA sense strand
gcagauauaugcagcagaa

SEQ ID NO: 1846809 - RNA, 19 nt, Homo sapiens
  misc_RNA (1)...(19): siRNA sense strand
gaggagagcguaagauaua

SEQ ID NO: 1846810 - RNA, 19 nt, Homo sapiens
  misc_RNA (1)...(19): siRNA sense strand
ggaagaaggugacagcaau

SEQ ID NO: 1846811 - RNA, 19 nt, Homo sapiens
  misc_RNA (1)...(19): siRNA sense strand
caacugaaaucacucauca

SEQ ID NO: 1846812 - RNA, 19 nt, Homo sapiens
  misc_RNA (1)...(19): siRNA sense strand
gaacuugcacagugaaaua

SEQ ID NO: 1846813 - RNA, 19 nt, Homo sapiens
  misc_RNA (1)...(19): siRNA sense strand
guaaacaagucuaagaaga

SEQ ID NO: 1846814 - RNA, 19 nt, Homo sapiens
  misc_RNA (1)...(19): siRNA sense strand
ugaaauaucuggcaaacga

SEQ ID NO: 1846815 - RNA, 19 nt, Homo sapiens
  misc_RNA (1)...(19): siRNA sense strand
gccaagaugucaaccauaa

SEQ ID NO: 1846816 - RNA, 19 nt, Homo sapiens
  misc_RNA (1)...(19): siRNA sense strand
gcaggaagauuacaugaag

SEQ ID NO: 1846817 - RNA, 19 nt, Homo sapiens
  misc_RNA (1)...(19): siRNA sense strand
caggaaacaucaucucuuu

SEQ ID NO: 1846818 - RNA, 19 nt, Homo sapiens
  misc_RNA (1)...(19): siRNA sense strand
gcaaccaucuuggaacuaa

SEQ ID NO: 1846819 - RNA, 19 nt, Homo sapiens
  misc_RNA (1)...(19): siRNA sense strand
ggaaccagcucuacaucaa

SEQ ID NO: 1846820 - RNA, 19 nt, Homo sapiens
  misc_RNA (1)...(19): siRNA sense strand
gaagacagaacuacagaaa

SEQ ID NO: 1846821 - RNA, 19 nt, Homo sapiens
  misc_RNA (1)...(19): siRNA sense strand
cgacaugaaucaguaagua

SEQ ID NO: 1846822 - RNA, 19 nt, Homo sapiens
  misc_RNA (1)...(19): siRNA sense strand
gaaaccagcuugauagacu

SEQ ID NO: 1846823 - RNA, 19 nt, Homo sapiens
  misc_RNA (1)...(19): siRNA sense strand
ggagaaagaacgagagaaa

SEQ ID NO: 1846824 - RNA, 19 nt, Homo sapiens
  misc_RNA (1)...(19): siRNA sense strand
ggaggaagccuacaagaga

SEQ ID NO: 1846825 - RNA, 19 nt, Homo sapiens
  misc_RNA (1)...(19): siRNA sense strand
ucacugagcuaguagauuc

SEQ ID NO: 1846826 - RNA, 19 nt, Homo sapiens
  misc_RNA (1)...(19): siRNA sense strand
ucaaccagcuuaaagauau

SEQ ID NO: 1846827 - RNA, 19 nt, Homo sapiens
  misc_RNA (1)...(19): siRNA sense strand
gcauccagcuucagacaaa

SEQ ID NO: 1846828 - RNA, 19 nt, Homo sapiens
  misc_RNA (1)...(19): siRNA sense strand
gcagagaucaagagaauug

SEQ ID NO: 1846829 - RNA, 19 nt, Homo sapiens
  misc_RNA (1)...(19): siRNA sense strand
gaucagaaccugcagaaau

SEQ ID NO: 1846830 - RNA, 19 nt, Homo sapiens
  misc_RNA (1)...(19): siRNA sense strand
caagaugucaaccauaaua

SEQ ID NO: 1846831 - RNA, 19 nt, Homo sapiens
  misc_RNA (1)...(19): siRNA sense strand
aaagaaagaugcauuaagg

SEQ ID NO: 1846832 - RNA, 19 nt, Homo sapiens
  misc_RNA (1)...(19): siRNA sense strand
gguauucgcuuauuagaag

SEQ ID NO: 1846833 - RNA, 19 nt, Homo sapiens
  misc_RNA (1)...(19): siRNA sense strand
gaagauagaaucggaaaga

SEQ ID NO: 1846834 - RNA, 19 nt, Homo sapiens
  misc_RNA (1)...(19): siRNA sense strand
ugaaaucacucaucaugga

SEQ ID NO: 1846835 - RNA, 19 nt, Homo sapiens
  misc_RNA (1)...(19): siRNA sense strand
aaagaugcauuaaggauga

SEQ ID NO: 1846836 - RNA, 19 nt, Homo sapiens
  misc_RNA (1)...(19): siRNA sense strand
ccacgguauucgcuuauua

SEQ ID NO: 1846837 - RNA, 19 nt, Homo sapiens
  misc_RNA (1)...(19): siRNA sense strand
aacagaagcuuggcauuua

SEQ ID NO: 1846838 - RNA, 19 nt, Homo sapiens
  misc_RNA (1)...(19): siRNA sense strand
ggagacacagucacaguua

SEQ ID NO: 1846839 - RNA, 19 nt, Homo sapiens
  misc_RNA (1)...(19): siRNA sense strand
gaaauaaagaggcugaaga

SEQ ID NO: 1846840 - RNA, 19 nt, Homo sapiens
  misc_RNA (1)...(19): siRNA sense strand
gagagaaaauccuugaaua

SEQ ID NO: 1846841 - RNA, 19 nt, Homo sapiens
  misc_RNA (1)...(19): siRNA sense strand
ggaaguucuuugaucagua

SEQ ID NO: 1846842 - RNA, 19 nt, Homo sapiens
  misc_RNA (1)...(19): siRNA sense strand
gaggagaucauuagcuuaa

SEQ ID NO: 1846843 - RNA, 19 nt, Homo sapiens
  misc_RNA (1)...(19): siRNA sense strand
guaagaaaccacuauaaug

SEQ ID NO: 1846844 - RNA, 19 nt, Homo sapiens
  misc_RNA (1)...(19): siRNA sense strand
gagaagaucacccgacuga

SEQ ID NO: 1846845 - RNA, 19 nt, Homo sapiens
  misc_RNA (1)...(19): siRNA sense strand
uacaagaucuggagacuau

SEQ ID NO: 1846846 - RNA, 19 nt, Homo sapiens
  misc_RNA (1)...(19): siRNA sense strand
caagaguucaucagaaaua

SEQ ID NO: 1846847 - RNA, 19 nt, Homo sapiens
  misc_RNA (1)...(19): siRNA sense strand
acagaucgacuuuagauua

SEQ ID NO: 1846848 - RNA, 19 nt, Homo sapiens
  misc_RNA (1)...(19): siRNA sense strand
ugaggaggcucucuucuga

SEQ ID NO: 1846849 - RNA, 19 nt, Homo sapiens
  misc_RNA (1)...(19): siRNA sense strand
gaagaaggcacccggaaga

SEQ ID NO: 1846850 - RNA, 19 nt, Homo sapiens
  misc_RNA (1)...(19): siRNA sense strand
gugagaugcugaagaguuu

SEQ ID NO: 1846851 - RNA, 19 nt, Homo sapiens
  misc_RNA (1)...(19): siRNA sense strand
caaaugcgagcccuuuaua

SEQ ID NO: 1846852 - RNA, 19 nt, Homo sapiens
  misc_RNA (1)...(19): siRNA sense strand
gcacagaggcugcaagaca

SEQ ID NO: 1846853 - RNA, 19 nt, Homo sapiens
  misc_RNA (1)...(19): siRNA sense strand
ggaagugcaugggaggaua

SEQ ID NO: 1846854 - RNA, 19 nt, Homo sapiens
  misc_RNA (1)...(19): siRNA sense strand
ggagauugauaaacucaga

SEQ ID NO: 1846855 - RNA, 19 nt, Homo sapiens
  misc_RNA (1)...(19): siRNA sense strand
cagagaaccugaccaagga

SEQ ID NO: 1846856 - RNA, 19 nt, Homo sapiens
  misc_RNA (1)...(19): siRNA sense strand
gaagacauccaacagcaaa

SEQ ID NO: 1846857 - RNA, 19 nt, Homo sapiens
  misc_RNA (1)...(19): siRNA sense strand
gaggagaugaguaauuuaa

SEQ ID NO: 1846858 - RNA, 19 nt, Homo sapiens
  misc_RNA (1)...(19): siRNA sense strand
uggauaaaguggaagcuua

SEQ ID NO: 1846859 - RNA, 19 nt, Homo sapiens
  misc_RNA (1)...(19): siRNA sense strand
guacugcuauuuacagaau

SEQ ID NO: 1846860 - RNA, 19 nt, Homo sapiens
  misc_RNA (1)...(19): siRNA sense strand
aaacauggaugcugaugga

SEQ ID NO: 1846861 - RNA, 19 nt, Homo sapiens
  misc_RNA (1)...(19): siRNA sense strand
gauagccgaccuugaguua

SEQ ID NO: 1846862 - RNA, 19 nt, Homo sapiens
  misc_RNA (1)...(19): siRNA sense strand
ggaguuggauucuucagau

SEQ ID NO: 1846863 - RNA, 19 nt, Homo sapiens
  misc_RNA (1)...(19): siRNA sense strand
gagauuaacauuacgaaga

SEQ ID NO: 1846864 - RNA, 19 nt, Homo sapiens
  misc_RNA (1)...(19): siRNA sense strand
ggaaacaucaucucuuugu

SEQ ID NO: 1846865 - RNA, 19 nt, Homo sapiens
  misc_RNA (1)...(19): siRNA sense strand
aaacagaacgcucccgaua

SEQ ID NO: 1846866 - RNA, 19 nt, Homo sapiens
  misc_RNA (1)...(19): siRNA sense strand
ucacagcaguauccacuuu

SEQ ID NO: 1846867 - RNA, 19 nt, Homo sapiens
  misc_RNA (1)...(19): siRNA sense strand
gaaguauggagauggaaua

SEQ ID NO: 1846868 - RNA, 19 nt, Homo sapiens
  misc_RNA (1)...(19): siRNA sense strand
cgucaggaauuuaaccaua

SEQ ID NO: 1846869 - RNA, 19 nt, Homo sapiens
  misc_RNA (1)...(19): siRNA sense strand
caaaggagagccaucguuu

SEQ ID NO: 1846870 - RNA, 19 nt, Homo sapiens
  misc_RNA (1)...(19): siRNA sense strand
ggagugagaucgaaagacu

SEQ ID NO: 1846871 - RNA, 19 nt, Homo sapiens
  misc_RNA (1)...(19): siRNA sense strand
gagagagccuucuggugaa

SEQ ID NO: 1846872 - RNA, 19 nt, Homo sapiens
  misc_RNA (1)...(19): siRNA sense strand
gauauaagcaaucucuuga

SEQ ID NO: 1846873 - RNA, 19 nt, Homo sapiens
  misc_RNA (1)...(19): siRNA sense strand
ggagauggaauacaacuga

SEQ ID NO: 1846874 - RNA, 19 nt, Homo sapiens
  misc_RNA (1)...(19): siRNA sense strand
cuuaugagauugaagauga

SEQ ID NO: 1846875 - RNA, 19 nt, Homo sapiens
  misc_RNA (1)...(19): siRNA sense strand
caagaucuggagacuauua

SEQ ID NO: 1846876 - RNA, 19 nt, Homo sapiens
  misc_RNA (1)...(19): siRNA sense strand
agaaggcgauagaagauaa

SEQ ID NO: 1846877 - RNA, 19 nt, Homo sapiens
  misc_RNA (1)...(19): siRNA sense strand
gaccgucacugagcuagua

SEQ ID NO: 1846878 - RNA, 19 nt, Homo sapiens
  misc_RNA (1)...(19): siRNA sense strand
ccuccaagcugguguuuga

SEQ ID NO: 1846879 - RNA, 19 nt, Homo sapiens
  misc_RNA (1)...(19): siRNA sense strand
aagcagagaucaagagaau

SEQ ID NO: 1846880 - RNA, 19 nt, Homo sapiens
  misc_RNA (1)...(19): siRNA sense strand
gauagaaucggaaagagaa

SEQ ID NO: 1846881 - RNA, 19 nt, Homo sapiens
  misc_RNA (1)...(19): siRNA sense strand
gggaugaguucaccaaaca

SEQ ID NO: 1846882 - RNA, 19 nt, Homo sapiens
  misc_RNA (1)...(19): siRNA sense strand
guagaguggucauaguuga

SEQ ID NO: 1846883 - RNA, 19 nt, Homo sapiens
  misc_RNA (1)...(19): siRNA sense strand
agcagaagcuuaaaugaaa

SEQ ID NO: 1846884 - RNA, 19 nt, Homo sapiens
  misc_RNA (1)...(19): siRNA sense strand
ucagaagacuccugcaaga

SEQ ID NO: 1846885 - RNA, 19 nt, Homo sapiens
  misc_RNA (1)...(19): siRNA sense strand
caacugaucgacaaagaaa

SEQ ID NO: 1846886 - RNA, 19 nt, Homo sapiens
  misc_RNA (1)...(19): siRNA sense strand
uaagugagaugcugaagag

SEQ ID NO: 1846887 - RNA, 19 nt, Homo sapiens
  misc_RNA (1)...(19): siRNA sense strand
ggaccuggauaaaguggaa

SEQ ID NO: 1846888 - RNA, 19 nt, Homo sapiens
  misc_RNA (1)...(19): siRNA sense strand
caacaucgcucagaaacag

SEQ ID NO: 1846889 - RNA, 19 nt, Homo sapiens
  misc_RNA (1)...(19): siRNA sense strand
uguuacagauggcuacuua

SEQ ID NO: 1846890 - RNA, 19 nt, Homo sapiens
  misc_RNA (1)...(19): siRNA sense strand
uaaguaagauuuccaccau

SEQ ID NO: 1846891 - RNA, 19 nt, Homo sapiens
  misc_RNA (1)...(19): siRNA sense strand
gaaugugaaugggaagaaa

SEQ ID NO: 1846892 - RNA, 19 nt, Homo sapiens
  misc_RNA (1)...(19): siRNA sense strand
caagugcuacggccaaaua

SEQ ID NO: 1846893 - RNA, 19 nt, Homo sapiens
  misc_RNA (1)...(19): siRNA sense strand
cagaagacauguuaaaggu

SEQ ID NO: 1846894 - RNA, 19 nt, Homo sapiens
  misc_RNA (1)...(19): siRNA sense strand
ggcguaagcuggaggauuc

SEQ ID NO: 1846895 - RNA, 19 nt, Homo sapiens
  misc_RNA (1)...(19): siRNA sense strand
ggaaucagacaaccuguga

SEQ ID NO: 1846896 - RNA, 19 nt, Homo sapiens
  misc_RNA (1)...(19): siRNA sense strand
ggaaugagaagcugacugu

SEQ ID NO: 1846897 - RNA, 19 nt, Homo sapiens
  misc_RNA (1)...(19): siRNA sense strand
caauauggcuuauggagua

SEQ ID NO: 1846898 - RNA, 19 nt, Homo sapiens
  misc_RNA (1)...(19): siRNA sense strand
gccaaucacuguaaaguuu

SEQ ID NO: 1846899 - RNA, 19 nt, Homo sapiens
  misc_RNA (1)...(19): siRNA sense strand
ggaacagggugguguauau

SEQ ID NO: 1846900 - RNA, 19 nt, Homo sapiens
  misc_RNA (1)...(19): siRNA sense strand
aaacacaacugucuaaugg

SEQ ID NO: 1846901 - RNA, 19 nt, Homo sapiens
  misc_RNA (1)...(19): siRNA sense strand
gggcagagcuugggauaug

SEQ ID NO: 1846902 - RNA, 19 nt, Homo sapiens
  misc_RNA (1)...(19): siRNA sense strand
gauauggcuuugugaacua

SEQ ID NO: 1846903 - RNA, 19 nt, Homo sapiens
  misc_RNA (1)...(19): siRNA sense strand
gcuaauaacccaagccaaa

SEQ ID NO: 1846904 - RNA, 19 nt, Homo sapiens
  misc_RNA (1)...(19): siRNA sense strand
cagcaagaccaacuuaaua

SEQ ID NO: 1846905 - RNA, 19 nt, Homo sapiens
  misc_RNA (1)...(19): siRNA sense strand
gaaauagaguccuguaagc

SEQ ID NO: 1846906 - RNA, 19 nt, Homo sapiens
  misc_RNA (1)...(19): siRNA sense strand
ucaacuaccuuccucagaa

SEQ ID NO: 1846907 - RNA, 19 nt, Homo sapiens
  misc_RNA (1)...(19): siRNA sense strand
gagaguauccuguggcaaa

SEQ ID NO: 1846908 - RNA, 19 nt, Homo sapiens
  misc_RNA (1)...(19): siRNA sense strand
ccuguaagcuuguaagaga

SEQ ID NO: 1846909 - RNA, 19 nt, Homo sapiens
  misc_RNA (1)...(19): siRNA sense strand
gaaacacaacugucuaaug

SEQ ID NO: 1846910 - RNA, 19 nt, Homo sapiens
  misc_RNA (1)...(19): siRNA sense strand
guaccagucuccaaacaga

SEQ ID NO: 1846911 - RNA, 19 nt, Homo sapiens
  misc_RNA (1)...(19): siRNA sense strand
gagcauuggugaaauagag

SEQ ID NO: 1846912 - RNA, 19 nt, Homo sapiens
  misc_RNA (1)...(19): siRNA sense strand
gaacaugacacaggaggaa

SEQ ID NO: 1846913 - RNA, 19 nt, Homo sapiens
  misc_RNA (1)...(19): siRNA sense strand
guaaagagguuuucuccaa

SEQ ID NO: 1846914 - RNA, 19 nt, Homo sapiens
  misc_RNA (1)...(19): siRNA sense strand
uggacaaucugcucaauau

SEQ ID NO: 1846915 - RNA, 19 nt, Homo sapiens
  misc_RNA (1)...(19): siRNA sense strand
gaacagggugguguauauu

SEQ ID NO: 1846916 - RNA, 19 nt, Homo sapiens
  misc_RNA (1)...(19): siRNA sense strand
ucaacacccugaauggauu

SEQ ID NO: 1846917 - RNA, 19 nt, Homo sapiens
  misc_RNA (1)...(19): siRNA sense strand
cugcaggucuccuuuaaga

SEQ ID NO: 1846918 - RNA, 19 nt, Homo sapiens
  misc_RNA (1)...(19): siRNA sense strand
ggauauggcuuugugaacu

SEQ ID NO: 1846919 - RNA, 19 nt, Homo sapiens
  misc_RNA (1)...(19): siRNA sense strand
caaccaccauaaacaacaa

SEQ ID NO: 1846920 - RNA, 19 nt, Homo sapiens
  misc_RNA (1)...(19): siRNA sense strand
guacugcaggucuccuuua

SEQ ID NO: 1846921 - RNA, 19 nt, Homo sapiens
  misc_RNA (1)...(19): siRNA sense strand
gcaauaacacagccaaugg

SEQ ID NO: 1846922 - RNA, 19 nt, Homo sapiens
  misc_RNA (1)...(19): siRNA sense strand
caguuuggcuggaauuaau

SEQ ID NO: 1846923 - RNA, 19 nt, Homo sapiens
  misc_RNA (1)...(19): siRNA sense strand
gcagagaaagcuaucaaca

SEQ ID NO: 1846924 - RNA, 19 nt, Homo sapiens
  misc_RNA (1)...(19): siRNA sense strand
gagcuugggauauggcuuu

SEQ ID NO: 1846925 - RNA, 19 nt, Homo sapiens
  misc_RNA (1)...(19): siRNA sense strand
ugggagcauuggugaaaua

SEQ ID NO: 1846926 - RNA, 19 nt, Homo sapiens
  misc_RNA (1)...(19): siRNA sense strand
ccacggagccaaucacugu

SEQ ID NO: 1846927 - RNA, 19 nt, Homo sapiens
  misc_RNA (1)...(19): siRNA sense strand
cugaauggauugagacuuc

SEQ ID NO: 1846928 - RNA, 19 nt, Homo sapiens
  misc_RNA (1)...(19): siRNA sense strand
gguguaggguuuauucgau

SEQ ID NO: 1846929 - RNA, 19 nt, Homo sapiens
  misc_RNA (1)...(19): siRNA sense strand
ccaauaaaugcaaagguuu

SEQ ID NO: 1846930 - RNA, 19 nt, Homo sapiens
  misc_RNA (1)...(19): siRNA sense strand
uacguagccucaauggaua

SEQ ID NO: 1846931 - RNA, 19 nt, Homo sapiens
  misc_RNA (1)...(19): siRNA sense strand
ggugguguauauuugugua

SEQ ID NO: 1846932 - RNA, 19 nt, Homo sapiens
  misc_RNA (1)...(19): siRNA sense strand
ggcagaagaagcuaucaaa

SEQ ID NO: 1846933 - RNA, 19 nt, Homo sapiens
  misc_RNA (1)...(19): siRNA sense strand
aagaccaacuuaauaguca

SEQ ID NO: 1846934 - RNA, 19 nt, Homo sapiens
  misc_RNA (1)...(19): siRNA sense strand
accaauaaaugcaaagguu

SEQ ID NO: 1846935 - RNA, 19 nt, Homo sapiens
  misc_RNA (1)...(19): siRNA sense strand
gggccaacuugcaauaaca

SEQ ID NO: 1846936 - RNA, 19 nt, Homo sapiens
  misc_RNA (1)...(19): siRNA sense strand
gaagacagcaagaccaacu

SEQ ID NO: 1846937 - RNA, 19 nt, Homo sapiens
  misc_RNA (1)...(19): siRNA sense strand
aaguucagcuucuaucaga

SEQ ID NO: 1846938 - RNA, 19 nt, Homo sapiens
  misc_RNA (1)...(19): siRNA sense strand
ugacacaggaggaacuaaa

SEQ ID NO: 1846939 - RNA, 19 nt, Homo sapiens
  misc_RNA (1)...(19): siRNA sense strand
acagggugguguauauuug

SEQ ID NO: 1846940 - RNA, 19 nt, Homo sapiens
  misc_RNA (1)...(19): siRNA sense strand
agacagcaagaccaacuua

SEQ ID NO: 1846941 - RNA, 19 nt, Homo sapiens
  misc_RNA (1)...(19): siRNA sense strand
gaagcuaucaaaggccuaa

SEQ ID NO: 1846942 - RNA, 19 nt, Homo sapiens
  misc_RNA (1)...(19): siRNA sense strand
aaacaaugacccagaagga

SEQ ID NO: 1846943 - RNA, 19 nt, Homo sapiens
  misc_RNA (1)...(19): siRNA sense strand
gacaaucugcucaauaugg

SEQ ID NO: 1846944 - RNA, 19 nt, Homo sapiens
  misc_RNA (1)...(19): siRNA sense strand
ugacuaugacaaacuauga

SEQ ID NO: 1846945 - RNA, 19 nt, Homo sapiens
  misc_RNA (1)...(19): siRNA sense strand
ucacaauauggacgcauua

SEQ ID NO: 1846946 - RNA, 19 nt, Homo sapiens
  misc_RNA (1)...(19): siRNA sense strand
ugaaauagaguccuguaag

SEQ ID NO: 1846947 - RNA, 19 nt, Homo sapiens
  misc_RNA (1)...(19): siRNA sense strand
gcaagaccaacuuaauagu

SEQ ID NO: 1846948 - RNA, 19 nt, Homo sapiens
  misc_RNA (1)...(19): siRNA sense strand
cagaagaagcuaucaaagg

SEQ ID NO: 1846949 - RNA, 19 nt, Homo sapiens
  misc_RNA (1)...(19): siRNA sense strand
caacuaccuuccucagaac

SEQ ID NO: 1846950 - RNA, 19 nt, Homo sapiens
  misc_RNA (1)...(19): siRNA sense strand
gcgaauugaggcagaagaa

SEQ ID NO: 1846951 - RNA, 19 nt, Homo sapiens
  misc_RNA (1)...(19): siRNA sense strand
guguaggguuuauucgauu

SEQ ID NO: 1846952 - RNA, 19 nt, Homo sapiens
  misc_RNA (1)...(19): siRNA sense strand
gcagaagaagcuaucaaag

SEQ ID NO: 1846953 - RNA, 19 nt, Homo sapiens
  misc_RNA (1)...(19): siRNA sense strand
gcuaucaacacccugaaug

SEQ ID NO: 1846954 - RNA, 19 nt, Homo sapiens
  misc_RNA (1)...(19): siRNA sense strand
uacugcaggucuccuuuaa

SEQ ID NO: 1846955 - RNA, 19 nt, Homo sapiens
  misc_RNA (1)...(19): siRNA sense strand
auacguagccucaauggau

SEQ ID NO: 1846956 - RNA, 19 nt, Homo sapiens
  misc_RNA (1)...(19): siRNA sense strand
ggcgauacguagccucaau

SEQ ID NO: 1846957 - RNA, 19 nt, Homo sapiens
  misc_RNA (1)...(19): siRNA sense strand
ccaaucaggccauccuuuc

SEQ ID NO: 1846958 - RNA, 19 nt, Homo sapiens
  misc_RNA (1)...(19): siRNA sense strand
gcuaucaaaggccuaaaug

SEQ ID NO: 1846959 - RNA, 19 nt, Homo sapiens
  misc_RNA (1)...(19): siRNA sense strand
gguccaaccaccauaaaca

SEQ ID NO: 1846960 - RNA, 19 nt, Homo sapiens
  misc_RNA (1)...(19): siRNA sense strand
caagaccaacuuaauaguc

SEQ ID NO: 1846961 - RNA, 19 nt, Homo sapiens
  misc_RNA (1)...(19): siRNA sense strand
caagcgaauugaggcagaa

SEQ ID NO: 1846962 - RNA, 19 nt, Homo sapiens
  misc_RNA (1)...(19): siRNA sense strand
uguaggguuuauucgauuu

SEQ ID NO: 1846963 - RNA, 19 nt, Homo sapiens
  misc_RNA (1)...(19): siRNA sense strand
ggugaaauagaguccugua

SEQ ID NO: 1846964 - RNA, 19 nt, Homo sapiens
  misc_RNA (1)...(19): siRNA sense strand
ggacaaucugcucaauaug

SEQ ID NO: 1846965 - RNA, 19 nt, Homo sapiens
  misc_RNA (1)...(19): siRNA sense strand
gacagcaagaccaacuuaa

SEQ ID NO: 1846966 - RNA, 19 nt, Homo sapiens
  misc_RNA (1)...(19): siRNA sense strand
caauaaaaguuuccuaugc

SEQ ID NO: 1846967 - RNA, 19 nt, Homo sapiens
  misc_RNA (1)...(19): siRNA sense strand
ggaaacacaacugucuaau

SEQ ID NO: 1846968 - RNA, 19 nt, Homo sapiens
  misc_RNA (1)...(19): siRNA sense strand
uauggacgcauuauuacuu

SEQ ID NO: 1846969 - RNA, 19 nt, Homo sapiens
  misc_RNA (1)...(19): siRNA sense strand
cagaagacagcaagaccaa

SEQ ID NO: 1846970 - RNA, 19 nt, Homo sapiens
  misc_RNA (1)...(19): siRNA sense strand
gugaaauagaguccuguaa

SEQ ID NO: 1846971 - RNA, 19 nt, Homo sapiens
  misc_RNA (1)...(19): siRNA sense strand
ugacgcagaugagaguauc

SEQ ID NO: 1846972 - RNA, 19 nt, Homo sapiens
  misc_RNA (1)...(19): siRNA sense strand
cuaaugggccaacuugcaa

SEQ ID NO: 1846973 - RNA, 19 nt, Homo sapiens
  misc_RNA (1)...(19): siRNA sense strand
caaugacccagaaggaguu

SEQ ID NO: 1846974 - RNA, 19 nt, Homo sapiens
  misc_RNA (1)...(19): siRNA sense strand
gagccaaucacuguaaagu

SEQ ID NO: 1846975 - RNA, 19 nt, Homo sapiens
  misc_RNA (1)...(19): siRNA sense strand
gaaggaguuggaacagcuu

SEQ ID NO: 1846976 - RNA, 19 nt, Homo sapiens
  misc_RNA (1)...(19): siRNA sense strand
cggagccaaucacuguaaa

SEQ ID NO: 1846977 - RNA, 19 nt, Homo sapiens
  misc_RNA (1)...(19): siRNA sense strand
caccauaaacaacaacugu

SEQ ID NO: 1846978 - RNA, 19 nt, Homo sapiens
  misc_RNA (1)...(19): siRNA sense strand
gcauuauuacuucucguau

SEQ ID NO: 1846979 - RNA, 19 nt, Homo sapiens
  misc_RNA (1)...(19): siRNA sense strand
cacccugaauggauugaga

SEQ ID NO: 1846980 - RNA, 19 nt, Homo sapiens
  misc_RNA (1)...(19): siRNA sense strand
aggaggaacuaaagagucu

SEQ ID NO: 1846981 - RNA, 19 nt, Homo sapiens
  misc_RNA (1)...(19): siRNA sense strand
cgauuugacaagcgaauug

SEQ ID NO: 1846982 - RNA, 19 nt, Homo sapiens
  misc_RNA (1)...(19): siRNA sense strand
acagcaagaccaacuuaau

SEQ ID NO: 1846983 - RNA, 19 nt, Homo sapiens
  misc_RNA (1)...(19): siRNA sense strand
uugacggaaugaccaguuu

SEQ ID NO: 1846984 - RNA, 19 nt, Homo sapiens
  misc_RNA (1)...(19): siRNA sense strand
uaaagagguuuucuccaau

SEQ ID NO: 1846985 - RNA, 19 nt, Homo sapiens
  misc_RNA (1)...(19): siRNA sense strand
ucacuguaaaguuugcuaa

SEQ ID NO: 1846986 - RNA, 19 nt, Homo sapiens
  misc_RNA (1)...(19): siRNA sense strand
ccaaucacuguaaaguuug

SEQ ID NO: 1846987 - RNA, 19 nt, Homo sapiens
  misc_RNA (1)...(19): siRNA sense strand
guucagcuucuaucagaga

SEQ ID NO: 1846988 - RNA, 19 nt, Homo sapiens
  misc_RNA (1)...(19): siRNA sense strand
cagggcagagcuugggaua

SEQ ID NO: 1846989 - RNA, 19 nt, Homo sapiens
  misc_RNA (1)...(19): siRNA sense strand
ccaaguucagcuucuauca

SEQ ID NO: 1846990 - RNA, 19 nt, Homo sapiens
  misc_RNA (1)...(19): siRNA sense strand
guccaaccaccauaaacaa

SEQ ID NO: 1846991 - RNA, 19 nt, Homo sapiens
  misc_RNA (1)...(19): siRNA sense strand
ccaaccaccauaaacaaca

SEQ ID NO: 1846992 - RNA, 19 nt, Homo sapiens
  misc_RNA (1)...(19): siRNA sense strand
aauagaguccuguaagcuu

SEQ ID NO: 1846993 - RNA, 19 nt, Homo sapiens
  misc_RNA (1)...(19): siRNA sense strand
gauuugacaagcgaauuga

SEQ ID NO: 1846994 - RNA, 19 nt, Homo sapiens
  misc_RNA (1)...(19): siRNA sense strand
acacaggaggaacuaaaga

SEQ ID NO: 1846995 - RNA, 19 nt, Homo sapiens
  misc_RNA (1)...(19): siRNA sense strand
cuuauggaguaaagagguu

SEQ ID NO: 1846996 - RNA, 19 nt, Homo sapiens
  misc_RNA (1)...(19): siRNA sense strand
caauaacacagccaauggu

SEQ ID NO: 1846997 - RNA, 19 nt, Homo sapiens
  misc_RNA (1)...(19): siRNA sense strand
gcaaauaacccucaacuga

SEQ ID NO: 1846998 - RNA, 19 nt, Homo sapiens
  misc_RNA (1)...(19): siRNA sense strand
gaaagaggguuuacagaau

SEQ ID NO: 1846999 - RNA, 19 nt, Homo sapiens
  misc_RNA (1)...(19): siRNA sense strand
ucaaugagcugaaggagaa

SEQ ID NO: 1847000 - RNA, 19 nt, Homo sapiens
  misc_RNA (1)...(19): siRNA sense strand
caacaugccuaaucuguau

SEQ ID NO: 1847001 - RNA, 19 nt, Homo sapiens
  misc_RNA (1)...(19): siRNA sense strand
cccgaaagaugccaaauua

SEQ ID NO: 1847002 - RNA, 19 nt, Homo sapiens
  misc_RNA (1)...(19): siRNA sense strand
cgaaagaugccaaauuaua

SEQ ID NO: 1847003 - RNA, 19 nt, Homo sapiens
  misc_RNA (1)...(19): siRNA sense strand
aaagaggguuuacagaaua

SEQ ID NO: 1847004 - RNA, 19 nt, Homo sapiens
  misc_RNA (1)...(19): siRNA sense strand
gaacaaaggcaacgagugu

SEQ ID NO: 1847005 - RNA, 19 nt, Homo sapiens
  misc_RNA (1)...(19): siRNA sense strand
ugacuuacauuaccaauca

SEQ ID NO: 1847006 - RNA, 19 nt, Homo sapiens
  misc_RNA (1)...(19): siRNA sense strand
gcaagacugucgaccuaaa

SEQ ID NO: 1847007 - RNA, 19 nt, Homo sapiens
  misc_RNA (1)...(19): siRNA sense strand
gaaaggagacuaccagaag

SEQ ID NO: 1847008 - RNA, 19 nt, Homo sapiens
  misc_RNA (1)...(19): siRNA sense strand
acacagccuugaagcauua

SEQ ID NO: 1847009 - RNA, 19 nt, Homo sapiens
  misc_RNA (1)...(19): siRNA sense strand
aaauaacccucaacugaaa

SEQ ID NO: 1847010 - RNA, 19 nt, Homo sapiens
  misc_RNA (1)...(19): siRNA sense strand
ccaaagccauggaugugua

SEQ ID NO: 1847011 - RNA, 19 nt, Homo sapiens
  misc_RNA (1)...(19): siRNA sense strand
ccagaaggcuuaugaggau

SEQ ID NO: 1847012 - RNA, 19 nt, Homo sapiens
  misc_RNA (1)...(19): siRNA sense strand
caaauaacccucaacugaa

SEQ ID NO: 1847013 - RNA, 19 nt, Homo sapiens
  misc_RNA (1)...(19): siRNA sense strand
cagaugugcucaagaaaug

SEQ ID NO: 1847014 - RNA, 19 nt, Homo sapiens
  misc_RNA (1)...(19): siRNA sense strand
gaaagaugccaaauuauac

SEQ ID NO: 1847015 - RNA, 19 nt, Homo sapiens
  misc_RNA (1)...(19): siRNA sense strand
gagacuaccagaaggcuua

SEQ ID NO: 1847016 - RNA, 19 nt, Homo sapiens
  misc_RNA (1)...(19): siRNA sense strand
gaaaauucaugaacccuuu

SEQ ID NO: 1847017 - RNA, 19 nt, Homo sapiens
  misc_RNA (1)...(19): siRNA sense strand
gcacucagcgaacacuuaa

SEQ ID NO: 1847018 - RNA, 19 nt, Homo sapiens
  misc_RNA (1)...(19): siRNA sense strand
ccacuaacaugacuuacau

SEQ ID NO: 1847019 - RNA, 19 nt, Homo sapiens
  misc_RNA (1)...(19): siRNA sense strand
gaaaagggcgacuacaaua

SEQ ID NO: 1847020 - RNA, 19 nt, Homo sapiens
  misc_RNA (1)...(19): siRNA sense strand
ggcaagggcuauucacgaa

SEQ ID NO: 1847021 - RNA, 19 nt, Homo sapiens
  misc_RNA (1)...(19): siRNA sense strand
ggaacgaugccuacaagaa

SEQ ID NO: 1847022 - RNA, 19 nt, Homo sapiens
  misc_RNA (1)...(19): siRNA sense strand
gaacgaugccuacaagaag

SEQ ID NO: 1847023 - RNA, 19 nt, Homo sapiens
  misc_RNA (1)...(19): siRNA sense strand
cgagaagacuaucgacaga

SEQ ID NO: 1847024 - RNA, 19 nt, Homo sapiens
  misc_RNA (1)...(19): siRNA sense strand
ucaagcagcgguauacuuu

SEQ ID NO: 1847025 - RNA, 19 nt, Homo sapiens
  misc_RNA (1)...(19): siRNA sense strand
ugaaagaggguuuacagaa

SEQ ID NO: 1847026 - RNA, 19 nt, Homo sapiens
  misc_RNA (1)...(19): siRNA sense strand
caugaagcauuauacagaa

SEQ ID NO: 1847027 - RNA, 19 nt, Homo sapiens
  misc_RNA (1)...(19): siRNA sense strand
agaagacuaucgacagauu

SEQ ID NO: 1847028 - RNA, 19 nt, Homo sapiens
  misc_RNA (1)...(19): siRNA sense strand
gaugaaggacuacaccaaa

SEQ ID NO: 1847029 - RNA, 19 nt, Homo sapiens
  misc_RNA (1)...(19): siRNA sense strand
gcagcgguauacuuugaaa

SEQ ID NO: 1847030 - RNA, 19 nt, Homo sapiens
  misc_RNA (1)...(19): siRNA sense strand
gacacagccuugaagcauu

SEQ ID NO: 1847031 - RNA, 19 nt, Homo sapiens
  misc_RNA (1)...(19): siRNA sense strand
uggaagcgaugaaggacua

SEQ ID NO: 1847032 - RNA, 19 nt, Homo sapiens
  misc_RNA (1)...(19): siRNA sense strand
uaacaugacuuacauuacc

SEQ ID NO: 1847033 - RNA, 19 nt, Homo sapiens
  misc_RNA (1)...(19): siRNA sense strand
aaagaauccuguaauagca

SEQ ID NO: 1847034 - RNA, 19 nt, Homo sapiens
  misc_RNA (1)...(19): siRNA sense strand
aagcagcgguauacuuuga

SEQ ID NO: 1847035 - RNA, 19 nt, Homo sapiens
  misc_RNA (1)...(19): siRNA sense strand
gcuguaugauggcgcagua

SEQ ID NO: 1847036 - RNA, 19 nt, Homo sapiens
  misc_RNA (1)...(19): siRNA sense strand
cccaggccaugaagcauua

SEQ ID NO: 1847037 - RNA, 19 nt, Homo sapiens
  misc_RNA (1)...(19): siRNA sense strand
uggaacagaugcagaagga

SEQ ID NO: 1847038 - RNA, 19 nt, Homo sapiens
  misc_RNA (1)...(19): siRNA sense strand
ccauggauguguaccagaa

SEQ ID NO: 1847039 - RNA, 19 nt, Homo sapiens
  misc_RNA (1)...(19): siRNA sense strand
caacuccuacuucaaagaa

SEQ ID NO: 1847040 - RNA, 19 nt, Homo sapiens
  misc_RNA (1)...(19): siRNA sense strand
gagcguggguaacaucgau

SEQ ID NO: 1847041 - RNA, 19 nt, Homo sapiens
  misc_RNA (1)...(19): siRNA sense strand
ccaugaagcauuauacaga

SEQ ID NO: 1847042 - RNA, 19 nt, Homo sapiens
  misc_RNA (1)...(19): siRNA sense strand
caaccguucugcugccuau

SEQ ID NO: 1847043 - RNA, 19 nt, Homo sapiens
  misc_RNA (1)...(19): siRNA sense strand
cagcagcucuagaguucuu

SEQ ID NO: 1847044 - RNA, 19 nt, Homo sapiens
  misc_RNA (1)...(19): siRNA sense strand
cugcaagacugucgaccua

SEQ ID NO: 1847045 - RNA, 19 nt, Homo sapiens
  misc_RNA (1)...(19): siRNA sense strand
gaagcaggcacugaaagaa

SEQ ID NO: 1847046 - RNA, 19 nt, Homo sapiens
  misc_RNA (1)...(19): siRNA sense strand
gccgggagcuuugugagaa

SEQ ID NO: 1847047 - RNA, 19 nt, Homo sapiens
  misc_RNA (1)...(19): siRNA sense strand
ugauagagcagcuacgaaa

SEQ ID NO: 1847048 - RNA, 19 nt, Homo sapiens
  misc_RNA (1)...(19): siRNA sense strand
caaggacugugaggaaugu

SEQ ID NO: 1847049 - RNA, 19 nt, Homo sapiens
  misc_RNA (1)...(19): siRNA sense strand
uaaagaauccuguaauagc

SEQ ID NO: 1847050 - RNA, 19 nt, Homo sapiens
  misc_RNA (1)...(19): siRNA sense strand
gagcggcuggccuacauaa

SEQ ID NO: 1847051 - RNA, 19 nt, Homo sapiens
  misc_RNA (1)...(19): siRNA sense strand
ggaugaggaggaagagauu

SEQ ID NO: 1847052 - RNA, 19 nt, Homo sapiens
  misc_RNA (1)...(19): siRNA sense strand
caaauuauacagcaaucga

SEQ ID NO: 1847053 - RNA, 19 nt, Homo sapiens
  misc_RNA (1)...(19): siRNA sense strand
uggcaacuccuacuucaaa

SEQ ID NO: 1847054 - RNA, 19 nt, Homo sapiens
  misc_RNA (1)...(19): siRNA sense strand
uaagaagcaggcacugaaa

SEQ ID NO: 1847055 - RNA, 19 nt, Homo sapiens
  misc_RNA (1)...(19): siRNA sense strand
gcaaucgagcugccugcua

SEQ ID NO: 1847056 - RNA, 19 nt, Homo sapiens
  misc_RNA (1)...(19): siRNA sense strand
ugagaaggccauugaagug

SEQ ID NO: 1847057 - RNA, 19 nt, Homo sapiens
  misc_RNA (1)...(19): siRNA sense strand
guucuuaaaccgcuuugaa

SEQ ID NO: 1847058 - RNA, 19 nt, Homo sapiens
  misc_RNA (1)...(19): siRNA sense strand
cagcgaacacuuaaagaau

SEQ ID NO: 1847059 - RNA, 19 nt, Homo sapiens
  misc_RNA (1)...(19): siRNA sense strand
acaaaggcaacgaguguuu

SEQ ID NO: 1847060 - RNA, 19 nt, Homo sapiens
  misc_RNA (1)...(19): siRNA sense strand
gaagacuaucgacagauug

SEQ ID NO: 1847061 - RNA, 19 nt, Homo sapiens
  misc_RNA (1)...(19): siRNA sense strand
uuaaaccgcuuugaagaag

SEQ ID NO: 1847062 - RNA, 19 nt, Homo sapiens
  misc_RNA (1)...(19): siRNA sense strand
ugcagcagaucaugaguga

SEQ ID NO: 1847063 - RNA, 19 nt, Homo sapiens
  misc_RNA (1)...(19): siRNA sense strand
caaggguuauacacggaaa

SEQ ID NO: 1847064 - RNA, 19 nt, Homo sapiens
  misc_RNA (1)...(19): siRNA sense strand
uagagcagcuacgaaacaa

SEQ ID NO: 1847065 - RNA, 19 nt, Homo sapiens
  misc_RNA (1)...(19): siRNA sense strand
ucaacaugccuaaucugua

SEQ ID NO: 1847066 - RNA, 19 nt, Homo sapiens
  misc_RNA (1)...(19): siRNA sense strand
ggaggaagagauugcaaca

SEQ ID NO: 1847067 - RNA, 19 nt, Homo sapiens
  misc_RNA (1)...(19): siRNA sense strand
ucagcgaacacuuaaagaa

SEQ ID NO: 1847068 - RNA, 19 nt, Homo sapiens
  misc_RNA (1)...(19): siRNA sense strand
ccaaucaagcagcgguaua

SEQ ID NO: 1847069 - RNA, 19 nt, Homo sapiens
  misc_RNA (1)...(19): siRNA sense strand
cagagccaauggaagaaga

SEQ ID NO: 1847070 - RNA, 19 nt, Homo sapiens
  misc_RNA (1)...(19): siRNA sense strand
caagggcuauucacgaaaa

SEQ ID NO: 1847071 - RNA, 19 nt, Homo sapiens
  misc_RNA (1)...(19): siRNA sense strand
cacagaagauccagaagcu

SEQ ID NO: 1847072 - RNA, 19 nt, Homo sapiens
  misc_RNA (1)...(19): siRNA sense strand
ccagaugugcucaagaaau

SEQ ID NO: 1847073 - RNA, 19 nt, Homo sapiens
  misc_RNA (1)...(19): siRNA sense strand
gcagagagaaaauucauga

SEQ ID NO: 1847074 - RNA, 19 nt, Homo sapiens
  misc_RNA (1)...(19): siRNA sense strand
gcaggucaaugagcugaag

SEQ ID NO: 1847075 - RNA, 19 nt, Homo sapiens
  misc_RNA (1)...(19): siRNA sense strand
uaaaacacgaggcaaauaa

SEQ ID NO: 1847076 - RNA, 19 nt, Homo sapiens
  misc_RNA (1)...(19): siRNA sense strand
gcaagggcuauucacgaaa

SEQ ID NO: 1847077 - RNA, 19 nt, Homo sapiens
  misc_RNA (1)...(19): siRNA sense strand
ggcacucagcgaacacuua

SEQ ID NO: 1847078 - RNA, 19 nt, Homo sapiens
  misc_RNA (1)...(19): siRNA sense strand
gaauuggcaacuccuacuu

SEQ ID NO: 1847079 - RNA, 19 nt, Homo sapiens
  misc_RNA (1)...(19): siRNA sense strand
gacagauugccaaagcaua

SEQ ID NO: 1847080 - RNA, 19 nt, Homo sapiens
  misc_RNA (1)...(19): siRNA sense strand
gcaacuccuacuucaaaga

SEQ ID NO: 1847081 - RNA, 19 nt, Homo sapiens
  misc_RNA (1)...(19): siRNA sense strand
gaaggagaaaggcaacaag

SEQ ID NO: 1847082 - RNA, 19 nt, Homo sapiens
  misc_RNA (1)...(19): siRNA sense strand
gacccagccaugcgccuua

SEQ ID NO: 1847083 - RNA, 19 nt, Homo sapiens
  misc_RNA (1)...(19): siRNA sense strand
gugcuacuccgaagcuauu

SEQ ID NO: 1847084 - RNA, 19 nt, Homo sapiens
  misc_RNA (1)...(19): siRNA sense strand
gaagccaagcgaaccuaug

SEQ ID NO: 1847085 - RNA, 19 nt, Homo sapiens
  misc_RNA (1)...(19): siRNA sense strand
uagcacagaagauccagaa

SEQ ID NO: 1847086 - RNA, 19 nt, Homo sapiens
  misc_RNA (1)...(19): siRNA sense strand
agcagcagcucuagaguuc

SEQ ID NO: 1847087 - RNA, 19 nt, Homo sapiens
  misc_RNA (1)...(19): siRNA sense strand
gaacccgaaagaugccaaa

SEQ ID NO: 1847088 - RNA, 19 nt, Homo sapiens
  misc_RNA (1)...(19): siRNA sense strand
gugagaaggccauugaagu

SEQ ID NO: 1847089 - RNA, 19 nt, Homo sapiens
  misc_RNA (1)...(19): siRNA sense strand
aagcaggcacugaaagaaa

SEQ ID NO: 1847090 - RNA, 19 nt, Homo sapiens
  misc_RNA (1)...(19): siRNA sense strand
caguauggaugaggaggaa

SEQ ID NO: 1847091 - RNA, 19 nt, Homo sapiens
  misc_RNA (1)...(19): siRNA sense strand
gacaaggacacuacucagu

SEQ ID NO: 1847092 - RNA, 19 nt, Homo sapiens
  misc_RNA (1)...(19): siRNA sense strand
aagaggguuuacagaauau

SEQ ID NO: 1847093 - RNA, 19 nt, Homo sapiens
  misc_RNA (1)...(19): siRNA sense strand
auaagaagcaggcacugaa

SEQ ID NO: 1847094 - RNA, 19 nt, Homo sapiens
  misc_RNA (1)...(19): siRNA sense strand
acagauugccaaagcauau

SEQ ID NO: 1847095 - RNA, 19 nt, Homo sapiens
  misc_RNA (1)...(19): siRNA sense strand
gagaaaaccgagaagacua

SEQ ID NO: 1847096 - RNA, 19 nt, Homo sapiens
  misc_RNA (1)...(19): siRNA sense strand
ggaugugggucugauugca

SEQ ID NO: 1847097 - RNA, 19 nt, Homo sapiens
  misc_RNA (1)...(19): siRNA sense strand
gaaagaagaugacaaugca

SEQ ID NO: 1847098 - RNA, 19 nt, Homo sapiens
  misc_RNA (1)...(19): siRNA sense strand
gaaagaagaagaagguaua

SEQ ID NO: 1847099 - RNA, 19 nt, Homo sapiens
  misc_RNA (1)...(19): siRNA sense strand
caaagaacauuaucuggaa

SEQ ID NO: 1847100 - RNA, 19 nt, Homo sapiens
  misc_RNA (1)...(19): siRNA sense strand
gaacaaaggaaccauucua

SEQ ID NO: 1847101 - RNA, 19 nt, Homo sapiens
  misc_RNA (1)...(19): siRNA sense strand
gaaagaggaacaaagauug

SEQ ID NO: 1847102 - RNA, 19 nt, Homo sapiens
  misc_RNA (1)...(19): siRNA sense strand
gauaugcgcuggaacaaag

SEQ ID NO: 1847103 - RNA, 19 nt, Homo sapiens
  misc_RNA (1)...(19): siRNA sense strand
gaaagcaguaggagaagua

SEQ ID NO: 1847104 - RNA, 19 nt, Homo sapiens
  misc_RNA (1)...(19): siRNA sense strand
gacacaaucucuccauuug

SEQ ID NO: 1847105 - RNA, 19 nt, Homo sapiens
  misc_RNA (1)...(19): siRNA sense strand
acacaacucuggacaguga

SEQ ID NO: 1847106 - RNA, 19 nt, Homo sapiens
  misc_RNA (1)...(19): siRNA sense strand
gaacacagacagaagaaau

SEQ ID NO: 1847107 - RNA, 19 nt, Homo sapiens
  misc_RNA (1)...(19): siRNA sense strand
gaacaaggaauuucaccaa

SEQ ID NO: 1847108 - RNA, 19 nt, Homo sapiens
  misc_RNA (1)...(19): siRNA sense strand
acagagagcccgagaauug

SEQ ID NO: 1847109 - RNA, 19 nt, Homo sapiens
  misc_RNA (1)...(19): siRNA sense strand
gcucugugaucaagcuaua

SEQ ID NO: 1847110 - RNA, 19 nt, Homo sapiens
  misc_RNA (1)...(19): siRNA sense strand
ugucauacuucacagauuu

SEQ ID NO: 1847111 - RNA, 19 nt, Homo sapiens
  misc_RNA (1)...(19): siRNA sense strand
gaucaucaauccaacucuu

SEQ ID NO: 1847112 - RNA, 19 nt, Homo sapiens
  misc_RNA (1)...(19): siRNA sense strand
agaugauggugaugaauua

SEQ ID NO: 1847113 - RNA, 19 nt, Homo sapiens
  misc_RNA (1)...(19): siRNA sense strand
guauagcggugaacaagga

SEQ ID NO: 1847114 - RNA, 19 nt, Homo sapiens
  misc_RNA (1)...(19): siRNA sense strand
aaagaaagcaguaggagaa

SEQ ID NO: 1847115 - RNA, 19 nt, Homo sapiens
  misc_RNA (1)...(19): siRNA sense strand
guuacuagcuauugggaaa

SEQ ID NO: 1847116 - RNA, 19 nt, Homo sapiens
  misc_RNA (1)...(19): siRNA sense strand
gagcuuggcacucuuauuc

SEQ ID NO: 1847117 - RNA, 19 nt, Homo sapiens
  misc_RNA (1)...(19): siRNA sense strand
ggacguuauugaggauaua

SEQ ID NO: 1847118 - RNA, 19 nt, Homo sapiens
  misc_RNA (1)...(19): siRNA sense strand
caacagagagcccgagaau

SEQ ID NO: 1847119 - RNA, 19 nt, Homo sapiens
  misc_RNA (1)...(19): siRNA sense strand
ggacaaccacaaccucauu

SEQ ID NO: 1847120 - RNA, 19 nt, Homo sapiens
  misc_RNA (1)...(19): siRNA sense strand
gguauggaaucaaguuuua

SEQ ID NO: 1847121 - RNA, 19 nt, Homo sapiens
  misc_RNA (1)...(19): siRNA sense strand
agaauucaguagacuauug

SEQ ID NO: 1847122 - RNA, 19 nt, Homo sapiens
  misc_RNA (1)...(19): siRNA sense strand
ggaaagaagaugacaaugc

SEQ ID NO: 1847123 - RNA, 19 nt, Homo sapiens
  misc_RNA (1)...(19): siRNA sense strand
ugaucaagcuauagccuuu

SEQ ID NO: 1847124 - RNA, 19 nt, Homo sapiens
  misc_RNA (1)...(19): siRNA sense strand
gauauaaucgguauggaau

SEQ ID NO: 1847125 - RNA, 19 nt, Homo sapiens
  misc_RNA (1)...(19): siRNA sense strand
gaaauuacagaaacugaca

SEQ ID NO: 1847126 - RNA, 19 nt, Homo sapiens
  misc_RNA (1)...(19): siRNA sense strand
ugaaagaggaacaaagauu

SEQ ID NO: 1847127 - RNA, 19 nt, Homo sapiens
  misc_RNA (1)...(19): siRNA sense strand
caaccucauugaaagaaga

SEQ ID NO: 1847128 - RNA, 19 nt, Homo sapiens
  misc_RNA (1)...(19): siRNA sense strand
gcccugagcucugugauca

SEQ ID NO: 1847129 - RNA, 19 nt, Homo sapiens
  misc_RNA (1)...(19): siRNA sense strand
gcauauggaggacguuauu

SEQ ID NO: 1847130 - RNA, 19 nt, Homo sapiens
  misc_RNA (1)...(19): siRNA sense strand
gcagaauucaguagacuau

SEQ ID NO: 1847131 - RNA, 19 nt, Homo sapiens
  misc_RNA (1)...(19): siRNA sense strand
ggauauaaucgguauggaa

SEQ ID NO: 1847132 - RNA, 19 nt, Homo sapiens
  misc_RNA (1)...(19): siRNA sense strand
caauccaacucuuaaaugg

SEQ ID NO: 1847133 - RNA, 19 nt, Homo sapiens
  misc_RNA (1)...(19): siRNA sense strand
uacagaaacugacacuaga

SEQ ID NO: 1847134 - RNA, 19 nt, Homo sapiens
  misc_RNA (1)...(19): siRNA sense strand
acacagacagaagaaauua

SEQ ID NO: 1847135 - RNA, 19 nt, Homo sapiens
  misc_RNA (1)...(19): siRNA sense strand
aagauuggauggcaugcua

SEQ ID NO: 1847136 - RNA, 19 nt, Homo sapiens
  misc_RNA (1)...(19): siRNA sense strand
gaaacugacacuagagcuu

SEQ ID NO: 1847137 - RNA, 19 nt, Homo sapiens
  misc_RNA (1)...(19): siRNA sense strand
ugacacaaucucuccauuu

SEQ ID NO: 1847138 - RNA, 19 nt, Homo sapiens
  misc_RNA (1)...(19): siRNA sense strand
uuucugauccuuugucaua

SEQ ID NO: 1847139 - RNA, 19 nt, Homo sapiens
  misc_RNA (1)...(19): siRNA sense strand
caaaggaaccauucuaaaa

SEQ ID NO: 1847140 - RNA, 19 nt, Homo sapiens
  misc_RNA (1)...(19): siRNA sense strand
gaugcuggccucacagaaa

SEQ ID NO: 1847141 - RNA, 19 nt, Homo sapiens
  misc_RNA (1)...(19): siRNA sense strand
caucagaucaucaauccaa

SEQ ID NO: 1847142 - RNA, 19 nt, Homo sapiens
  misc_RNA (1)...(19): siRNA sense strand
uauaaucgguauggaauca

SEQ ID NO: 1847143 - RNA, 19 nt, Homo sapiens
  misc_RNA (1)...(19): siRNA sense strand
gaacauuaucuggaaguau

SEQ ID NO: 1847144 - RNA, 19 nt, Homo sapiens
  misc_RNA (1)...(19): siRNA sense strand
gcacucuuauuccaaaguc

SEQ ID NO: 1847145 - RNA, 19 nt, Homo sapiens
  misc_RNA (1)...(19): siRNA sense strand
gagaaauuacagaaacuga

SEQ ID NO: 1847146 - RNA, 19 nt, Homo sapiens
  misc_RNA (1)...(19): siRNA sense strand
ggaggacguuauugaggau

SEQ ID NO: 1847147 - RNA, 19 nt, Homo sapiens
  misc_RNA (1)...(19): siRNA sense strand
ucaccaaguuacuagcuau

SEQ ID NO: 1847148 - RNA, 19 nt, Homo sapiens
  misc_RNA (1)...(19): siRNA sense strand
uacaucaaguggcuacaaa

SEQ ID NO: 1847149 - RNA, 19 nt, Homo sapiens
  misc_RNA (1)...(19): siRNA sense strand
aaacugacacuagagcuuu

SEQ ID NO: 1847150 - RNA, 19 nt, Homo sapiens
  misc_RNA (1)...(19): siRNA sense strand
cagaugauggugaugaauu

SEQ ID NO: 1847151 - RNA, 19 nt, Homo sapiens
  misc_RNA (1)...(19): siRNA sense strand
acaaaggaaccauucuaaa

SEQ ID NO: 1847152 - RNA, 19 nt, Homo sapiens
  misc_RNA (1)...(19): siRNA sense strand
gaagaugacaaugcacaau

SEQ ID NO: 1847153 - RNA, 19 nt, Homo sapiens
  misc_RNA (1)...(19): siRNA sense strand
gagcagaauucaguagacu

SEQ ID NO: 1847154 - RNA, 19 nt, Homo sapiens
  misc_RNA (1)...(19): siRNA sense strand
gugcucaugucaccaaaca

SEQ ID NO: 1847155 - RNA, 19 nt, Homo sapiens
  misc_RNA (1)...(19): siRNA sense strand
uuacagaaacugacacuag

SEQ ID NO: 1847156 - RNA, 19 nt, Homo sapiens
  misc_RNA (1)...(19): siRNA sense strand
ggaaucaaguuuuaaagag

SEQ ID NO: 1847157 - RNA, 19 nt, Homo sapiens
  misc_RNA (1)...(19): siRNA sense strand
cacuagagcuuuagcaaaa

SEQ ID NO: 1847158 - RNA, 19 nt, Homo sapiens
  misc_RNA (1)...(19): siRNA sense strand
aguaggagaaguagcuuua

SEQ ID NO: 1847159 - RNA, 19 nt, Homo sapiens
  misc_RNA (1)...(19): siRNA sense strand
ugauuuaggugcucauguc

SEQ ID NO: 1847160 - RNA, 19 nt, Homo sapiens
  misc_RNA (1)...(19): siRNA sense strand
uaacaggcgacuucuacuu

SEQ ID NO: 1847161 - RNA, 19 nt, Homo sapiens
  misc_RNA (1)...(19): siRNA sense strand
caaccacaaccucauugaa

SEQ ID NO: 1847162 - RNA, 19 nt, Homo sapiens
  misc_RNA (1)...(19): siRNA sense strand
acacacaacucuggacagu

SEQ ID NO: 1847163 - RNA, 19 nt, Homo sapiens
  misc_RNA (1)...(19): siRNA sense strand
gaaauucaggcucguacuc

SEQ ID NO: 1847164 - RNA, 19 nt, Homo sapiens
  misc_RNA (1)...(19): siRNA sense strand
gcuaacaggcgacuucuac

SEQ ID NO: 1847165 - RNA, 19 nt, Homo sapiens
  misc_RNA (1)...(19): siRNA sense strand
ggauguguauagcggugaa

SEQ ID NO: 1847166 - RNA, 19 nt, Homo sapiens
  misc_RNA (1)...(19): siRNA sense strand
gcucagaugauggugauga

SEQ ID NO: 1847167 - RNA, 19 nt, Homo sapiens
  misc_RNA (1)...(19): siRNA sense strand
gauccuuugucauacuuca

SEQ ID NO: 1847168 - RNA, 19 nt, Homo sapiens
  misc_RNA (1)...(19): siRNA sense strand
cgacuucuacuucggauuc

SEQ ID NO: 1847169 - RNA, 19 nt, Homo sapiens
  misc_RNA (1)...(19): siRNA sense strand
aaccacaaccucauugaaa

SEQ ID NO: 1847170 - RNA, 19 nt, Homo sapiens
  misc_RNA (1)...(19): siRNA sense strand
gccaagcccugagcucugu

SEQ ID NO: 1847171 - RNA, 19 nt, Homo sapiens
  misc_RNA (1)...(19): siRNA sense strand
gaauuggaacacagacaga

SEQ ID NO: 1847172 - RNA, 19 nt, Homo sapiens
  misc_RNA (1)...(19): siRNA sense strand
ccacaaccucauugaaaga

SEQ ID NO: 1847173 - RNA, 19 nt, Homo sapiens
  misc_RNA (1)...(19): siRNA sense strand
ucaauccaacucuuaaaug

SEQ ID NO: 1847174 - RNA, 19 nt, Homo sapiens
  misc_RNA (1)...(19): siRNA sense strand
gauucaggaacuagaaauu

SEQ ID NO: 1847175 - RNA, 19 nt, Homo sapiens
  misc_RNA (1)...(19): siRNA sense strand
aacaaaggaaccauucuaa

SEQ ID NO: 1847176 - RNA, 19 nt, Homo sapiens
  misc_RNA (1)...(19): siRNA sense strand
ugaaagaagaagaagguau

SEQ ID NO: 1847177 - RNA, 19 nt, Homo sapiens
  misc_RNA (1)...(19): siRNA sense strand
uagcucagaugauggugau

SEQ ID NO: 1847178 - RNA, 19 nt, Homo sapiens
  misc_RNA (1)...(19): siRNA sense strand
agaacauuaucuggaagua

SEQ ID NO: 1847179 - RNA, 19 nt, Homo sapiens
  misc_RNA (1)...(19): siRNA sense strand
ucacuuggcacgguugauu

SEQ ID NO: 1847180 - RNA, 19 nt, Homo sapiens
  misc_RNA (1)...(19): siRNA sense strand
acagacagaagaaauuaga

SEQ ID NO: 1847181 - RNA, 19 nt, Homo sapiens
  misc_RNA (1)...(19): siRNA sense strand
aagcaucaguggaguacau

SEQ ID NO: 1847182 - RNA, 19 nt, Homo sapiens
  misc_RNA (1)...(19): siRNA sense strand
gaaguauuuuggaugugua

SEQ ID NO: 1847183 - RNA, 19 nt, Homo sapiens
  misc_RNA (1)...(19): siRNA sense strand
uuaauuaccgaaucaagga

SEQ ID NO: 1847184 - RNA, 19 nt, Homo sapiens
  misc_RNA (1)...(19): siRNA sense strand
ggaaguauuuuggaugugu

SEQ ID NO: 1847185 - RNA, 19 nt, Homo sapiens
  misc_RNA (1)...(19): siRNA sense strand
gacuauugccaacaacuga

SEQ ID NO: 1847186 - RNA, 19 nt, Homo sapiens
  misc_RNA (1)...(19): siRNA sense strand
aguagacuauugccaacaa

SEQ ID NO: 1847187 - RNA, 19 nt, Homo sapiens
  misc_RNA (1)...(19): siRNA sense strand
acacuagagcuuuagcaaa

SEQ ID NO: 1847188 - RNA, 19 nt, Homo sapiens
  misc_RNA (1)...(19): siRNA sense strand
aacaaggaauuucaccaau

SEQ ID NO: 1847189 - RNA, 19 nt, Homo sapiens
  misc_RNA (1)...(19): siRNA sense strand
aaacccacucaccaaguua

SEQ ID NO: 1847190 - RNA, 19 nt, Homo sapiens
  misc_RNA (1)...(19): siRNA sense strand
gcuauagccuuuucugauc

SEQ ID NO: 1847191 - RNA, 19 nt, Homo sapiens
  misc_RNA (1)...(19): siRNA sense strand
caucaauccaacucuuaaa

SEQ ID NO: 1847192 - RNA, 19 nt, Homo sapiens
  misc_RNA (1)...(19): siRNA sense strand
guacaucaaguggcuacaa

SEQ ID NO: 1847193 - RNA, 19 nt, Homo sapiens
  misc_RNA (1)...(19): siRNA sense strand
gacacuagagcuuuagcaa

SEQ ID NO: 1847194 - RNA, 19 nt, Homo sapiens
  misc_RNA (1)...(19): siRNA sense strand
ggaacacagacagaagaaa

SEQ ID NO: 1847195 - RNA, 19 nt, Homo sapiens
  misc_RNA (1)...(19): siRNA sense strand
gagccauccugagcagaau

SEQ ID NO: 1847196 - RNA, 19 nt, Homo sapiens
  misc_RNA (1)...(19): siRNA sense strand
gaggauauaaucgguaugg

SEQ ID NO: 1847197 - RNA, 19 nt, Homo sapiens
  misc_RNA (1)...(19): siRNA sense strand
cagaagacauaacaagaua

SEQ ID NO: 1847198 - RNA, 19 nt, Homo sapiens
  misc_RNA (1)...(19): siRNA sense strand
ccaaagugcugaagauuuc

SEQ ID NO: 1847199 - RNA, 19 nt, Homo sapiens
  misc_RNA (1)...(19): siRNA sense strand
gaaagucuguguagaacau

SEQ ID NO: 1847200 - RNA, 19 nt, Homo sapiens
  misc_RNA (1)...(19): siRNA sense strand
ccaagaccaucacuuauga

SEQ ID NO: 1847201 - RNA, 19 nt, Homo sapiens
  misc_RNA (1)...(19): siRNA sense strand
ugaaugggauaaacgcuua

SEQ ID NO: 1847202 - RNA, 19 nt, Homo sapiens
  misc_RNA (1)...(19): siRNA sense strand
gcuaagaaauuauggaaag

SEQ ID NO: 1847203 - RNA, 19 nt, Homo sapiens
  misc_RNA (1)...(19): siRNA sense strand
ccaaagacgucccuauugu

SEQ ID NO: 1847204 - RNA, 19 nt, Homo sapiens
  misc_RNA (1)...(19): siRNA sense strand
ugacacaguuuaugaaugu

SEQ ID NO: 1847205 - RNA, 19 nt, Homo sapiens
  misc_RNA (1)...(19): siRNA sense strand
ccgagcagcuaagaaauua

SEQ ID NO: 1847206 - RNA, 19 nt, Homo sapiens
  misc_RNA (1)...(19): siRNA sense strand
ggacaagauuugcuuaaac

SEQ ID NO: 1847207 - RNA, 19 nt, Homo sapiens
  misc_RNA (1)...(19): siRNA sense strand
cuaguggccuucugguuua

SEQ ID NO: 1847208 - RNA, 19 nt, Homo sapiens
  misc_RNA (1)...(19): siRNA sense strand
gcaagcuagugcucuaauu

SEQ ID NO: 1847209 - RNA, 19 nt, Homo sapiens
  misc_RNA (1)...(19): siRNA sense strand
caagagcaguaugaaagua

SEQ ID NO: 1847210 - RNA, 19 nt, Homo sapiens
  misc_RNA (1)...(19): siRNA sense strand
cacaggagaugcugauauu

SEQ ID NO: 1847211 - RNA, 19 nt, Homo sapiens
  misc_RNA (1)...(19): siRNA sense strand
gcgcuaggauccaaauuuc

SEQ ID NO: 1847212 - RNA, 19 nt, Homo sapiens
  misc_RNA (1)...(19): siRNA sense strand
gggacaagauuugcuuaaa

SEQ ID NO: 1847213 - RNA, 19 nt, Homo sapiens
  misc_RNA (1)...(19): siRNA sense strand
agaccaagaccaucacuua

SEQ ID NO: 1847214 - RNA, 19 nt, Homo sapiens
  misc_RNA (1)...(19): siRNA sense strand
gcacagaaggaaacaguga

SEQ ID NO: 1847215 - RNA, 19 nt, Homo sapiens
  misc_RNA (1)...(19): siRNA sense strand
ggauuccgccaaagaaaua

SEQ ID NO: 1847216 - RNA, 19 nt, Homo sapiens
  misc_RNA (1)...(19): siRNA sense strand
gaaaguaccaucggauuca

SEQ ID NO: 1847217 - RNA, 19 nt, Homo sapiens
  misc_RNA (1)...(19): siRNA sense strand
gaaauuauggaaagucugu

SEQ ID NO: 1847218 - RNA, 19 nt, Homo sapiens
  misc_RNA (1)...(19): siRNA sense strand
gaagguggcguccuagaug

SEQ ID NO: 1847219 - RNA, 19 nt, Homo sapiens
  misc_RNA (1)...(19): siRNA sense strand
uaacaucaaugggcaaauc

SEQ ID NO: 1847220 - RNA, 19 nt, Homo sapiens
  misc_RNA (1)...(19): siRNA sense strand
agugaaggcugaagugaaa

SEQ ID NO: 1847221 - RNA, 19 nt, Homo sapiens
  misc_RNA (1)...(19): siRNA sense strand
acaguuaacagaagacaua

SEQ ID NO: 1847222 - RNA, 19 nt, Homo sapiens
  misc_RNA (1)...(19): siRNA sense strand
uguagaacaucacacguuu

SEQ ID NO: 1847223 - RNA, 19 nt, Homo sapiens
  misc_RNA (1)...(19): siRNA sense strand
gaguugaucuucauaaagc

SEQ ID NO: 1847224 - RNA, 19 nt, Homo sapiens
  misc_RNA (1)...(19): siRNA sense strand
ucagagacacguauugaaa

SEQ ID NO: 1847225 - RNA, 19 nt, Homo sapiens
  misc_RNA (1)...(19): siRNA sense strand
aaagugaaaucccaaccaa

SEQ ID NO: 1847226 - RNA, 19 nt, Homo sapiens
  misc_RNA (1)...(19): siRNA sense strand
ucuaagacauggcuggauu

SEQ ID NO: 1847227 - RNA, 19 nt, Homo sapiens
  misc_RNA (1)...(19): siRNA sense strand
gaaccacggccuagugaau

SEQ ID NO: 1847228 - RNA, 19 nt, Homo sapiens
  misc_RNA (1)...(19): siRNA sense strand
gcucagaccaggcaagcua

SEQ ID NO: 1847229 - RNA, 19 nt, Homo sapiens
  misc_RNA (1)...(19): siRNA sense strand
uuacaaagauaagcugaga

SEQ ID NO: 1847230 - RNA, 19 nt, Homo sapiens
  misc_RNA (1)...(19): siRNA sense strand
gaaacaugcuaagggacaa

SEQ ID NO: 1847231 - RNA, 19 nt, Homo sapiens
  misc_RNA (1)...(19): siRNA sense strand
gagcaagagcaguaugaaa

SEQ ID NO: 1847232 - RNA, 19 nt, Homo sapiens
  misc_RNA (1)...(19): siRNA sense strand
ggaaggaguagauaucauc

SEQ ID NO: 1847233 - RNA, 19 nt, Homo sapiens
  misc_RNA (1)...(19): siRNA sense strand
gggauaacgcaaccucuaa

SEQ ID NO: 1847234 - RNA, 19 nt, Homo sapiens
  misc_RNA (1)...(19): siRNA sense strand
ggacuuggaaggaguagau

SEQ ID NO: 1847235 - RNA, 19 nt, Homo sapiens
  misc_RNA (1)...(19): siRNA sense strand
ucauggaacugcauaaguc

SEQ ID NO: 1847236 - RNA, 19 nt, Homo sapiens
  misc_RNA (1)...(19): siRNA sense strand
cagcacaguuaacagaaga

SEQ ID NO: 1847237 - RNA, 19 nt, Homo sapiens
  misc_RNA (1)...(19): siRNA sense strand
gacaagauuugcuuaaacg

SEQ ID NO: 1847238 - RNA, 19 nt, Homo sapiens
  misc_RNA (1)...(19): siRNA sense strand
caggagaugcugauauuga

SEQ ID NO: 1847239 - RNA, 19 nt, Homo sapiens
  misc_RNA (1)...(19): siRNA sense strand
gagagcaagagcaguauga

SEQ ID NO: 1847240 - RNA, 19 nt, Homo sapiens
  misc_RNA (1)...(19): siRNA sense strand
ggucuagccauuugggaua

SEQ ID NO: 1847241 - RNA, 19 nt, Homo sapiens
  misc_RNA (1)...(19): siRNA sense strand
uaacagaagacauaacaag

SEQ ID NO: 1847242 - RNA, 19 nt, Homo sapiens
  misc_RNA (1)...(19): siRNA sense strand
gagcagcuaagaaauuaug

SEQ ID NO: 1847243 - RNA, 19 nt, Homo sapiens
  misc_RNA (1)...(19): siRNA sense strand
caagcuagugcucuaauug

SEQ ID NO: 1847244 - RNA, 19 nt, Homo sapiens
  misc_RNA (1)...(19): siRNA sense strand
cugcaagguuucuuuguug

SEQ ID NO: 1847245 - RNA, 19 nt, Homo sapiens
  misc_RNA (1)...(19): siRNA sense strand
uaacgcaaccucuaagaca

SEQ ID NO: 1847246 - RNA, 19 nt, Homo sapiens
  misc_RNA (1)...(19): siRNA sense strand
gcacugcaagguuucuuug

SEQ ID NO: 1847247 - RNA, 19 nt, Homo sapiens
  misc_RNA (1)...(19): siRNA sense strand
cgucugcccuguuccuuug

SEQ ID NO: 1847248 - RNA, 19 nt, Homo sapiens
  misc_RNA (1)...(19): siRNA sense strand
gcaagagcaguaugaaagu

SEQ ID NO: 1847249 - RNA, 19 nt, Homo sapiens
  misc_RNA (1)...(19): siRNA sense strand
uggaguugaucuucauaaa

SEQ ID NO: 1847250 - RNA, 19 nt, Homo sapiens
  misc_RNA (1)...(19): siRNA sense strand
ggaugacacaguuuaugaa

SEQ ID NO: 1847251 - RNA, 19 nt, Homo sapiens
  misc_RNA (1)...(19): siRNA sense strand
gaaaagagaauugugauca

SEQ ID NO: 1847252 - RNA, 19 nt, Homo sapiens
  misc_RNA (1)...(19): siRNA sense strand
uaaugccaaugcugugaaa

SEQ ID NO: 1847253 - RNA, 19 nt, Homo sapiens
  misc_RNA (1)...(19): siRNA sense strand
caggcaagcuagugcucua

SEQ ID NO: 1847254 - RNA, 19 nt, Homo sapiens
  misc_RNA (1)...(19): siRNA sense strand
gauaacgcaaccucuaaga

SEQ ID NO: 1847255 - RNA, 19 nt, Homo sapiens
  misc_RNA (1)...(19): siRNA sense strand
gaaagacuagauggugaaa

SEQ ID NO: 1847256 - RNA, 19 nt, Homo sapiens
  misc_RNA (1)...(19): siRNA sense strand
guauggaguugaucuucau

SEQ ID NO: 1847257 - RNA, 19 nt, Homo sapiens
  misc_RNA (1)...(19): siRNA sense strand
gaccaagaccaucacuuau

SEQ ID NO: 1847258 - RNA, 19 nt, Homo sapiens
  misc_RNA (1)...(19): siRNA sense strand
ggauccaaauuucgauaca

SEQ ID NO: 1847259 - RNA, 19 nt, Homo sapiens
  misc_RNA (1)...(19): siRNA sense strand
uuaccgagcagcuaagaaa

SEQ ID NO: 1847260 - RNA, 19 nt, Homo sapiens
  misc_RNA (1)...(19): siRNA sense strand
gaugacacaguuuaugaau

SEQ ID NO: 1847261 - RNA, 19 nt, Homo sapiens
  misc_RNA (1)...(19): siRNA sense strand
gauaaugccaaugcuguga

SEQ ID NO: 1847262 - RNA, 19 nt, Homo sapiens
  misc_RNA (1)...(19): siRNA sense strand
aaacaguggucccuaaagc

SEQ ID NO: 1847263 - RNA, 19 nt, Homo sapiens
  misc_RNA (1)...(19): siRNA sense strand
ucuaguggccuucugguuu

SEQ ID NO: 1847264 - RNA, 19 nt, Homo sapiens
  misc_RNA (1)...(19): siRNA sense strand
acaaagauaagcugagaau

SEQ ID NO: 1847265 - RNA, 19 nt, Homo sapiens
  misc_RNA (1)...(19): siRNA sense strand
gagcagcacccagacaugu

SEQ ID NO: 1847266 - RNA, 19 nt, Homo sapiens
  misc_RNA (1)...(19): siRNA sense strand
augcugauauugaccauga

SEQ ID NO: 1847267 - RNA, 19 nt, Homo sapiens
  misc_RNA (1)...(19): siRNA sense strand
ccacagaagcauggaagaa

SEQ ID NO: 1847268 - RNA, 19 nt, Homo sapiens
  misc_RNA (1)...(19): siRNA sense strand
ugcagaagguggcguccua

SEQ ID NO: 1847269 - RNA, 19 nt, Homo sapiens
  misc_RNA (1)...(19): siRNA sense strand
gacuuggaguuucuugaga

SEQ ID NO: 1847270 - RNA, 19 nt, Homo sapiens
  misc_RNA (1)...(19): siRNA sense strand
caagguuucuuuguuggau

SEQ ID NO: 1847271 - RNA, 19 nt, Homo sapiens
  misc_RNA (1)...(19): siRNA sense strand
ccaaugcugugaaaaguga

SEQ ID NO: 1847272 - RNA, 19 nt, Homo sapiens
  misc_RNA (1)...(19): siRNA sense strand
aaagagagaaagacuagau

SEQ ID NO: 1847273 - RNA, 19 nt, Homo sapiens
  misc_RNA (1)...(19): siRNA sense strand
cagcuaagaaauuauggaa

SEQ ID NO: 1847274 - RNA, 19 nt, Homo sapiens
  misc_RNA (1)...(19): siRNA sense strand
ccaguuaccgagcagcuaa

SEQ ID NO: 1847275 - RNA, 19 nt, Homo sapiens
  misc_RNA (1)...(19): siRNA sense strand
uaaagcaaaggacuuggaa

SEQ ID NO: 1847276 - RNA, 19 nt, Homo sapiens
  misc_RNA (1)...(19): siRNA sense strand
ggaguugaucuucauaaag

SEQ ID NO: 1847277 - RNA, 19 nt, Homo sapiens
  misc_RNA (1)...(19): siRNA sense strand
ugaauguguuguggagaaa

SEQ ID NO: 1847278 - RNA, 19 nt, Homo sapiens
  misc_RNA (1)...(19): siRNA sense strand
gaacuucauggagucugua

SEQ ID NO: 1847279 - RNA, 19 nt, Homo sapiens
  misc_RNA (1)...(19): siRNA sense strand
guuggaggauuuagacaag

SEQ ID NO: 1847280 - RNA, 19 nt, Homo sapiens
  misc_RNA (1)...(19): siRNA sense strand
ggcccaaagugcugaagau

SEQ ID NO: 1847281 - RNA, 19 nt, Homo sapiens
  misc_RNA (1)...(19): siRNA sense strand
aagagaaggucauggaacu

SEQ ID NO: 1847282 - RNA, 19 nt, Homo sapiens
  misc_RNA (1)...(19): siRNA sense strand
gcuaggauccaaauuucga

SEQ ID NO: 1847283 - RNA, 19 nt, Homo sapiens
  misc_RNA (1)...(19): siRNA sense strand
ucacaggagaugcugauau

SEQ ID NO: 1847284 - RNA, 19 nt, Homo sapiens
  misc_RNA (1)...(19): siRNA sense strand
cuucugguuuacaaagaua

SEQ ID NO: 1847285 - RNA, 19 nt, Homo sapiens
  misc_RNA (1)...(19): siRNA sense strand
cuuccgaacucuuaacauc

SEQ ID NO: 1847286 - RNA, 19 nt, Homo sapiens
  misc_RNA (1)...(19): siRNA sense strand
cacagaagcauggaagaaa

SEQ ID NO: 1847287 - RNA, 19 nt, Homo sapiens
  misc_RNA (1)...(19): siRNA sense strand
aaaguugucuauguaugga

SEQ ID NO: 1847288 - RNA, 19 nt, Homo sapiens
  misc_RNA (1)...(19): siRNA sense strand
gaggcugcccagacuguaa

SEQ ID NO: 1847289 - RNA, 19 nt, Homo sapiens
  misc_RNA (1)...(19): siRNA sense strand
aaccaaagacgucccuauu

SEQ ID NO: 1847290 - RNA, 19 nt, Homo sapiens
  misc_RNA (1)...(19): siRNA sense strand
caaccaaagacgucccuau

SEQ ID NO: 1847291 - RNA, 19 nt, Homo sapiens
  misc_RNA (1)...(19): siRNA sense strand
ucacccuuccgaacucuua

SEQ ID NO: 1847292 - RNA, 19 nt, Homo sapiens
  misc_RNA (1)...(19): siRNA sense strand
gagcguacagcaaguaaac

SEQ ID NO: 1847293 - RNA, 19 nt, Homo sapiens
  misc_RNA (1)...(19): siRNA sense strand
caaauuucuugcgcuagga

SEQ ID NO: 1847294 - RNA, 19 nt, Homo sapiens
  misc_RNA (1)...(19): siRNA sense strand
cccaaagugcugaagauuu

SEQ ID NO: 1847295 - RNA, 19 nt, Homo sapiens
  misc_RNA (1)...(19): siRNA sense strand
uggaugacacaguuuauga

SEQ ID NO: 1847296 - RNA, 19 nt, Homo sapiens
  misc_RNA (1)...(19): siRNA sense strand
gaacucuuaacaucaaugg

SEQ ID NO: 1847297 - RNA, 19 nt, Homo sapiens
  misc_RNA (1)...(19): siRNA sense strand
uggaagagaucacagguua

SEQ ID NO: 1847298 - RNA, 19 nt, Homo sapiens
  misc_RNA (1)...(19): siRNA sense strand
gcucaucgcucacaaccaa

SEQ ID NO: 1847299 - RNA, 19 nt, Homo sapiens
  misc_RNA (1)...(19): siRNA sense strand
ucacagagaucuugaaagg

SEQ ID NO: 1847300 - RNA, 19 nt, Homo sapiens
  misc_RNA (1)...(19): siRNA sense strand
ggucaaauguuggaugauu

SEQ ID NO: 1847301 - RNA, 19 nt, Homo sapiens
  misc_RNA (1)...(19): siRNA sense strand
ggagagaguucugaggauu

SEQ ID NO: 1847302 - RNA, 19 nt, Homo sapiens
  misc_RNA (1)...(19): siRNA sense strand
ugugggagcugaugacuuu

SEQ ID NO: 1847303 - RNA, 19 nt, Homo sapiens
  misc_RNA (1)...(19): siRNA sense strand
gaacugguguaugcagauu

SEQ ID NO: 1847304 - RNA, 19 nt, Homo sapiens
  misc_RNA (1)...(19): siRNA sense strand
gcaguuaccagugccaaua

SEQ ID NO: 1847305 - RNA, 19 nt, Homo sapiens
  misc_RNA (1)...(19): siRNA sense strand
agagugauguguggaguua

SEQ ID NO: 1847306 - RNA, 19 nt, Homo sapiens
  misc_RNA (1)...(19): siRNA sense strand
ggagacccgcugaacaaua

SEQ ID NO: 1847307 - RNA, 19 nt, Homo sapiens
  misc_RNA (1)...(19): siRNA sense strand
gggaguuggugucugaauu

SEQ ID NO: 1847308 - RNA, 19 nt, Homo sapiens
  misc_RNA (1)...(19): siRNA sense strand
gagacccgcugaacaauac

SEQ ID NO: 1847309 - RNA, 19 nt, Homo sapiens
  misc_RNA (1)...(19): siRNA sense strand
gcaaggugcccaucaagug

SEQ ID NO: 1847310 - RNA, 19 nt, Homo sapiens
  misc_RNA (1)...(19): siRNA sense strand
ggacgaauucugcacaaug

SEQ ID NO: 1847311 - RNA, 19 nt, Homo sapiens
  misc_RNA (1)...(19): siRNA sense strand
ggaacgugcuggucaagag

SEQ ID NO: 1847312 - RNA, 19 nt, Homo sapiens
  misc_RNA (1)...(19): siRNA sense strand
ucaccuaccugcccaccaa

SEQ ID NO: 1847313 - RNA, 19 nt, Homo sapiens
  misc_RNA (1)...(19): siRNA sense strand
gaugauugacucugaaugu

SEQ ID NO: 1847314 - RNA, 19 nt, Homo sapiens
  misc_RNA (1)...(19): siRNA sense strand
gacgaauucugcacaaugg

SEQ ID NO: 1847315 - RNA, 19 nt, Homo sapiens
  misc_RNA (1)...(19): siRNA sense strand
cuacaacacagacacguuu

SEQ ID NO: 1847316 - RNA, 19 nt, Homo sapiens
  misc_RNA (1)...(19): siRNA sense strand
ugagcuaccuggaggaugu

SEQ ID NO: 1847317 - RNA, 19 nt, Homo sapiens
  misc_RNA (1)...(19): siRNA sense strand
agacgaagcauacgugaug

SEQ ID NO: 1847318 - RNA, 19 nt, Homo sapiens
  misc_RNA (1)...(19): siRNA sense strand
ggacaccuacggcagagaa

SEQ ID NO: 1847319 - RNA, 19 nt, Homo sapiens
  misc_RNA (1)...(19): siRNA sense strand
agacggagcugaggaaggu

SEQ ID NO: 1847320 - RNA, 19 nt, Homo sapiens
  misc_RNA (1)...(19): siRNA sense strand
ggaguuauggugugacugu

SEQ ID NO: 1847321 - RNA, 19 nt, Homo sapiens
  misc_RNA (1)...(19): siRNA sense strand
gugccaauauccaggaguu

SEQ ID NO: 1847322 - RNA, 19 nt, Homo sapiens
  misc_RNA (1)...(19): siRNA sense strand
cggcagagaacccagagua

SEQ ID NO: 1847323 - RNA, 19 nt, Homo sapiens
  misc_RNA (1)...(19): siRNA sense strand
ggaguuggugucugaauuc

SEQ ID NO: 1847324 - RNA, 19 nt, Homo sapiens
  misc_RNA (1)...(19): siRNA sense strand
guuggaugauugacucuga

SEQ ID NO: 1847325 - RNA, 19 nt, Homo sapiens
  misc_RNA (1)...(19): siRNA sense strand
ggaggaaugccgaguacug

SEQ ID NO: 1847326 - RNA, 19 nt, Homo sapiens
  misc_RNA (1)...(19): siRNA sense strand
gucaaauguuggaugauug

SEQ ID NO: 1847327 - RNA, 19 nt, Homo sapiens
  misc_RNA (1)...(19): siRNA sense strand
ggucaagagucccaaccau

SEQ ID NO: 1847328 - RNA, 19 nt, Homo sapiens
  misc_RNA (1)...(19): siRNA sense strand
cagaagauccggaaguaca

SEQ ID NO: 1847329 - RNA, 19 nt, Homo sapiens
  misc_RNA (1)...(19): siRNA sense strand
gggagagaguucugaggau

SEQ ID NO: 1847330 - RNA, 19 nt, Homo sapiens
  misc_RNA (1)...(19): siRNA sense strand
gagagaguucugaggauug

SEQ ID NO: 1847331 - RNA, 19 nt, Homo sapiens
  misc_RNA (1)...(19): siRNA sense strand
gcccuauggcugccucuua

SEQ ID NO: 1847332 - RNA, 19 nt, Homo sapiens
  misc_RNA (1)...(19): siRNA sense strand
gguggaugcugaggaguau

SEQ ID NO: 1847333 - RNA, 19 nt, Homo sapiens
  misc_RNA (1)...(19): siRNA sense strand
gcuauggucugggcaugga

SEQ ID NO: 1847334 - RNA, 19 nt, Homo sapiens
  misc_RNA (1)...(19): siRNA sense strand
ucgacaaccucuauuacug

SEQ ID NO: 1847335 - RNA, 19 nt, Homo sapiens
  misc_RNA (1)...(19): siRNA sense strand
ucaagagucccaaccaugu

SEQ ID NO: 1847336 - RNA, 19 nt, Homo sapiens
  misc_RNA (1)...(19): siRNA sense strand
ccaaagccaacaaagaaau

SEQ ID NO: 1847337 - RNA, 19 nt, Homo sapiens
  misc_RNA (1)...(19): siRNA sense strand
gcagaugcggauccugaaa

SEQ ID NO: 1847338 - RNA, 19 nt, Homo sapiens
  misc_RNA (1)...(19): siRNA sense strand
uuccagaaccugcaaguaa

SEQ ID NO: 1847339 - RNA, 19 nt, Homo sapiens
  misc_RNA (1)...(19): siRNA sense strand
gaaagggccaagacucucu

SEQ ID NO: 1847340 - RNA, 19 nt, Homo sapiens
  misc_RNA (1)...(19): siRNA sense strand
agcagaagauccggaagua

SEQ ID NO: 1847341 - RNA, 19 nt, Homo sapiens
  misc_RNA (1)...(19): siRNA sense strand
cuucgaagccucacagaga

SEQ ID NO: 1847342 - RNA, 19 nt, Homo sapiens
  misc_RNA (1)...(19): siRNA sense strand
ugagacugauggcuacguu

SEQ ID NO: 1847343 - RNA, 19 nt, Homo sapiens
  misc_RNA (1)...(19): siRNA sense strand
guguggaccuggaugacaa

SEQ ID NO: 1847344 - RNA, 19 nt, Homo sapiens
  misc_RNA (1)...(19): siRNA sense strand
ccuguucuccgauguguaa

SEQ ID NO: 1847345 - RNA, 19 nt, Homo sapiens
  misc_RNA (1)...(19): siRNA sense strand
gcgaggcacccagcucuuu

SEQ ID NO: 1847346 - RNA, 19 nt, Homo sapiens
  misc_RNA (1)...(19): siRNA sense strand
caccgcagcucaucuacca

SEQ ID NO: 1847347 - RNA, 19 nt, Homo sapiens
  misc_RNA (1)...(19): siRNA sense strand
cugcugaacugguguaugc

SEQ ID NO: 1847348 - RNA, 19 nt, Homo sapiens
  misc_RNA (1)...(19): siRNA sense strand
ggacccagccuccaacacu

SEQ ID NO: 1847349 - RNA, 19 nt, Homo sapiens
  misc_RNA (1)...(19): siRNA sense strand
uccagaaccugcaaguaau

SEQ ID NO: 1847350 - RNA, 19 nt, Homo sapiens
  misc_RNA (1)...(19): siRNA sense strand
aaccugaccucuccuacau

SEQ ID NO: 1847351 - RNA, 19 nt, Homo sapiens
  misc_RNA (1)...(19): siRNA sense strand
ggcuggcuccgauguauuu

SEQ ID NO: 1847352 - RNA, 19 nt, Homo sapiens
  misc_RNA (1)...(19): siRNA sense strand
gcuuuguggucauccagaa

SEQ ID NO: 1847353 - RNA, 19 nt, Homo sapiens
  misc_RNA (1)...(19): siRNA sense strand
cgagaggugagggcaguua

SEQ ID NO: 1847354 - RNA, 19 nt, Homo sapiens
  misc_RNA (1)...(19): siRNA sense strand
gccagguggugcagggaaa

SEQ ID NO: 1847355 - RNA, 19 nt, Homo sapiens
  misc_RNA (1)...(19): siRNA sense strand
gaaaggaggggucuugauc

SEQ ID NO: 1847356 - RNA, 19 nt, Homo sapiens
  misc_RNA (1)...(19): siRNA sense strand
ugaucauggucaaauguug

SEQ ID NO: 1847357 - RNA, 19 nt, Homo sapiens
  misc_RNA (1)...(19): siRNA sense strand
agaugcggauccugaaaga

SEQ ID NO: 1847358 - RNA, 19 nt, Homo sapiens
  misc_RNA (1)...(19): siRNA sense strand
ucacacugauagacaccaa

SEQ ID NO: 1847359 - RNA, 19 nt, Homo sapiens
  misc_RNA (1)...(19): siRNA sense strand
ggccagaggacgagugugu

SEQ ID NO: 1847360 - RNA, 19 nt, Homo sapiens
  misc_RNA (1)...(19): siRNA sense strand
gaacgugcuggucaagagu

SEQ ID NO: 1847361 - RNA, 19 nt, Homo sapiens
  misc_RNA (1)...(19): siRNA sense strand
caaagccaacaaagaaauc

SEQ ID NO: 1847362 - RNA, 19 nt, Homo sapiens
  misc_RNA (1)...(19): siRNA sense strand
gcucuuugaggacaacuau

SEQ ID NO: 1847363 - RNA, 19 nt, Homo sapiens
  misc_RNA (1)...(19): siRNA sense strand
agaauggggucgucaaaga

SEQ ID NO: 1847364 - RNA, 19 nt, Homo sapiens
  misc_RNA (1)...(19): siRNA sense strand
gcuggaggacgaugacaug

SEQ ID NO: 1847365 - RNA, 19 nt, Homo sapiens
  misc_RNA (1)...(19): siRNA sense strand
cauccagaaugaggacuug

SEQ ID NO: 1847366 - RNA, 19 nt, Homo sapiens
  misc_RNA (1)...(19): siRNA sense strand
aaucuuagacgaagcauac

SEQ ID NO: 1847367 - RNA, 19 nt, Homo sapiens
  misc_RNA (1)...(19): siRNA sense strand
gcuuggaucuggcgcuuuu

SEQ ID NO: 1847368 - RNA, 19 nt, Homo sapiens
  misc_RNA (1)...(19): siRNA sense strand
gccaauauccaggaguuug

SEQ ID NO: 1847369 - RNA, 19 nt, Homo sapiens
  misc_RNA (1)...(19): siRNA sense strand
ccucacagagaucuugaaa

SEQ ID NO: 1847370 - RNA, 19 nt, Homo sapiens
  misc_RNA (1)...(19): siRNA sense strand
agagaguucugaggauugu

SEQ ID NO: 1847371 - RNA, 19 nt, Homo sapiens
  misc_RNA (1)...(19): siRNA sense strand
gaggcacccagcucuuuga

SEQ ID NO: 1847372 - RNA, 19 nt, Homo sapiens
  misc_RNA (1)...(19): siRNA sense strand
agugauguguggaguuaug

SEQ ID NO: 1847373 - RNA, 19 nt, Homo sapiens
  misc_RNA (1)...(19): siRNA sense strand
gcucucacacugauagaca

SEQ ID NO: 1847374 - RNA, 19 nt, Homo sapiens
  misc_RNA (1)...(19): siRNA sense strand
gaagaauggggucgucaaa

SEQ ID NO: 1847375 - RNA, 19 nt, Homo sapiens
  misc_RNA (1)...(19): siRNA sense strand
gcaccggcacagacaugaa

SEQ ID NO: 1847376 - RNA, 19 nt, Homo sapiens
  misc_RNA (1)...(19): siRNA sense strand
guggaggaaugccgaguac

SEQ ID NO: 1847377 - RNA, 19 nt, Homo sapiens
  misc_RNA (1)...(19): siRNA sense strand
gggacgaauucugcacaau

SEQ ID NO: 1847378 - RNA, 19 nt, Homo sapiens
  misc_RNA (1)...(19): siRNA sense strand
gcacaaccaagaggugaca

SEQ ID NO: 1847379 - RNA, 19 nt, Homo sapiens
  misc_RNA (1)...(19): siRNA sense strand
cccuacaacuaccuuucua

SEQ ID NO: 1847380 - RNA, 19 nt, Homo sapiens
  misc_RNA (1)...(19): siRNA sense strand
ccuucgacaaccucuauua

SEQ ID NO: 1847381 - RNA, 19 nt, Homo sapiens
  misc_RNA (1)...(19): siRNA sense strand
uccgggaguuggugucuga

SEQ ID NO: 1847382 - RNA, 19 nt, Homo sapiens
  misc_RNA (1)...(19): siRNA sense strand
cugaaugucggccaagauu

SEQ ID NO: 1847383 - RNA, 19 nt, Homo sapiens
  misc_RNA (1)...(19): siRNA sense strand
gcuggacauugacgagaca

SEQ ID NO: 1847384 - RNA, 19 nt, Homo sapiens
  misc_RNA (1)...(19): siRNA sense strand
ccaguggccaucaaagugu

SEQ ID NO: 1847385 - RNA, 19 nt, Homo sapiens
  misc_RNA (1)...(19): siRNA sense strand
gaagagaucacagguuacc

SEQ ID NO: 1847386 - RNA, 19 nt, Homo sapiens
  misc_RNA (1)...(19): siRNA sense strand
ugaaaccugaccucuccua

SEQ ID NO: 1847387 - RNA, 19 nt, Homo sapiens
  misc_RNA (1)...(19): siRNA sense strand
gcuggugccacucuggaaa

SEQ ID NO: 1847388 - RNA, 19 nt, Homo sapiens
  misc_RNA (1)...(19): siRNA sense strand
uaugugaaccagccagaug

SEQ ID NO: 1847389 - RNA, 19 nt, Homo sapiens
  misc_RNA (1)...(19): siRNA sense strand
cggugcagcuggugacaca

SEQ ID NO: 1847390 - RNA, 19 nt, Homo sapiens
  misc_RNA (1)...(19): siRNA sense strand
cagcagaagauccggaagu

SEQ ID NO: 1847391 - RNA, 19 nt, Homo sapiens
  misc_RNA (1)...(19): siRNA sense strand
cccuauggcugccucuuag

SEQ ID NO: 1847392 - RNA, 19 nt, Homo sapiens
  misc_RNA (1)...(19): siRNA sense strand
gauggugaccugggaaugg

SEQ ID NO: 1847393 - RNA, 19 nt, Homo sapiens
  misc_RNA (1)...(19): siRNA sense strand
uggcuccgauguauuugau

SEQ ID NO: 1847394 - RNA, 19 nt, Homo sapiens
  misc_RNA (1)...(19): siRNA sense strand
ggccaagauuccgggaguu

SEQ ID NO: 1847395 - RNA, 19 nt, Homo sapiens
  misc_RNA (1)...(19): siRNA sense strand
gacagaguaccaugcagau

SEQ ID NO: 1847396 - RNA, 19 nt, Homo sapiens
  misc_RNA (1)...(19): siRNA sense strand
gaaaccuggaacucaccua

SEQ ID NO: 1847397 - RNA, 19 nt, Homo sapiens
  misc_RNA (1)...(19): siRNA sense strand
ggacagacuuccaagauga

SEQ ID NO: 1847398 - RNA, 19 nt, Homo sapiens
  misc_RNA (1)...(19): siRNA sense strand
gaacaucgaugggaaggaa

SEQ ID NO: 1847399 - RNA, 19 nt, Homo sapiens
  misc_RNA (1)...(19): siRNA sense strand
ggaaggaacugugcaagau

SEQ ID NO: 1847400 - RNA, 19 nt, Homo sapiens
  misc_RNA (1)...(19): siRNA sense strand
gaaagaauauggccuucca

SEQ ID NO: 1847401 - RNA, 19 nt, Homo sapiens
  misc_RNA (1)...(19): siRNA sense strand
agucaucucuguacaagua

SEQ ID NO: 1847402 - RNA, 19 nt, Homo sapiens
  misc_RNA (1)...(19): siRNA sense strand
gaaagcugcucaaccaucu

SEQ ID NO: 1847403 - RNA, 19 nt, Homo sapiens
  misc_RNA (1)...(19): siRNA sense strand
gcagcuacauggaggagaa

SEQ ID NO: 1847404 - RNA, 19 nt, Homo sapiens
  misc_RNA (1)...(19): siRNA sense strand
agacuccucuuccacauuu

SEQ ID NO: 1847405 - RNA, 19 nt, Homo sapiens
  misc_RNA (1)...(19): siRNA sense strand
gaacucuccugaugaaugc

SEQ ID NO: 1847406 - RNA, 19 nt, Homo sapiens
  misc_RNA (1)...(19): siRNA sense strand
cacagaagaugaacuuugu

SEQ ID NO: 1847407 - RNA, 19 nt, Homo sapiens
  misc_RNA (1)...(19): siRNA sense strand
gaacuacggcagcuacaug

SEQ ID NO: 1847408 - RNA, 19 nt, Homo sapiens
  misc_RNA (1)...(19): siRNA sense strand
guuagauccuuaucagauu

SEQ ID NO: 1847409 - RNA, 19 nt, Homo sapiens
  misc_RNA (1)...(19): siRNA sense strand
agaccagcguccucaguua

SEQ ID NO: 1847410 - RNA, 19 nt, Homo sapiens
  misc_RNA (1)...(19): siRNA sense strand
gcaaacccaacaugaacua

SEQ ID NO: 1847411 - RNA, 19 nt, Homo sapiens
  misc_RNA (1)...(19): siRNA sense strand
ggaacucuccugaugaaug

SEQ ID NO: 1847412 - RNA, 19 nt, Homo sapiens
  misc_RNA (1)...(19): siRNA sense strand
ccaaacccauacuggaauu

SEQ ID NO: 1847413 - RNA, 19 nt, Homo sapiens
  misc_RNA (1)...(19): siRNA sense strand
acaagaacaucaugaccaa

SEQ ID NO: 1847414 - RNA, 19 nt, Homo sapiens
  misc_RNA (1)...(19): siRNA sense strand
acaaaacucuccacgguua

SEQ ID NO: 1847415 - RNA, 19 nt, Homo sapiens
  misc_RNA (1)...(19): siRNA sense strand
gauccuacgcuauggagua

SEQ ID NO: 1847416 - RNA, 19 nt, Homo sapiens
  misc_RNA (1)...(19): siRNA sense strand
gugaauggcucaaggaacu

SEQ ID NO: 1847417 - RNA, 19 nt, Homo sapiens
  misc_RNA (1)...(19): siRNA sense strand
ucugggcacuuacuacuaa

SEQ ID NO: 1847418 - RNA, 19 nt, Homo sapiens
  misc_RNA (1)...(19): siRNA sense strand
gaagagcaaacccaacaug

SEQ ID NO: 1847419 - RNA, 19 nt, Homo sapiens
  misc_RNA (1)...(19): siRNA sense strand
ggagucaucucuguacaag

SEQ ID NO: 1847420 - RNA, 19 nt, Homo sapiens
  misc_RNA (1)...(19): siRNA sense strand
ccucagaccucccguacau

SEQ ID NO: 1847421 - RNA, 19 nt, Homo sapiens
  misc_RNA (1)...(19): siRNA sense strand
ccacagaagaugaacuuug

SEQ ID NO: 1847422 - RNA, 19 nt, Homo sapiens
  misc_RNA (1)...(19): siRNA sense strand
caacaugaacuacgauaag

SEQ ID NO: 1847423 - RNA, 19 nt, Homo sapiens
  misc_RNA (1)...(19): siRNA sense strand
cuucucaucugggcacuua

SEQ ID NO: 1847424 - RNA, 19 nt, Homo sapiens
  misc_RNA (1)...(19): siRNA sense strand
gaggaccagucguuguuug

SEQ ID NO: 1847425 - RNA, 19 nt, Homo sapiens
  misc_RNA (1)...(19): siRNA sense strand
gcgcuacgccuacaaguuc

SEQ ID NO: 1847426 - RNA, 19 nt, Homo sapiens
  misc_RNA (1)...(19): siRNA sense strand
cagcagauccuacgcuaug

SEQ ID NO: 1847427 - RNA, 19 nt, Homo sapiens
  misc_RNA (1)...(19): siRNA sense strand
gauaaagccuuacaaaacu

SEQ ID NO: 1847428 - RNA, 19 nt, Homo sapiens
  misc_RNA (1)...(19): siRNA sense strand
gaaggaacugugcaagaug

SEQ ID NO: 1847429 - RNA, 19 nt, Homo sapiens
  misc_RNA (1)...(19): siRNA sense strand
ugauguugauaaagccuua

SEQ ID NO: 1847430 - RNA, 19 nt, Homo sapiens
  misc_RNA (1)...(19): siRNA sense strand
cagaugauguugauaaagc

SEQ ID NO: 1847431 - RNA, 19 nt, Homo sapiens
  misc_RNA (1)...(19): siRNA sense strand
aaggaacugugcaagauga

SEQ ID NO: 1847432 - RNA, 19 nt, Homo sapiens
  misc_RNA (1)...(19): siRNA sense strand
gagcaaacccaacaugaac

SEQ ID NO: 1847433 - RNA, 19 nt, Homo sapiens
  misc_RNA (1)...(19): siRNA sense strand
gucgaaagcugcucaacca

SEQ ID NO: 1847434 - RNA, 19 nt, Homo sapiens
  misc_RNA (1)...(19): siRNA sense strand
ggagugggcggugaaagaa

SEQ ID NO: 1847435 - RNA, 19 nt, Homo sapiens
  misc_RNA (1)...(19): siRNA sense strand
ccauaugccuucucaucug

SEQ ID NO: 1847436 - RNA, 19 nt, Homo sapiens
  misc_RNA (1)...(19): siRNA sense strand
guccucaguuagauccuua

SEQ ID NO: 1847437 - RNA, 19 nt, Homo sapiens
  misc_RNA (1)...(19): siRNA sense strand
agugggcggugaaagaaua

SEQ ID NO: 1847438 - RNA, 19 nt, Homo sapiens
  misc_RNA (1)...(19): siRNA sense strand
ucaguuagauccuuaucag

SEQ ID NO: 1847439 - RNA, 19 nt, Homo sapiens
  misc_RNA (1)...(19): siRNA sense strand
guugauaaagccuuacaaa

SEQ ID NO: 1847440 - RNA, 19 nt, Homo sapiens
  misc_RNA (1)...(19): siRNA sense strand
gggaaggaacugugcaaga

SEQ ID NO: 1847441 - RNA, 19 nt, Homo sapiens
  misc_RNA (1)...(19): siRNA sense strand
cuucagaugauguugauaa

SEQ ID NO: 1847442 - RNA, 19 nt, Homo sapiens
  misc_RNA (1)...(19): siRNA sense strand
gaacgagcgcagaguuauc

SEQ ID NO: 1847443 - RNA, 19 nt, Homo sapiens
  misc_RNA (1)...(19): siRNA sense strand
ccuuaucaguugugaguga

SEQ ID NO: 1847444 - RNA, 19 nt, Homo sapiens
  misc_RNA (1)...(19): siRNA sense strand
guuaaugcaugcuagaaac

SEQ ID NO: 1847445 - RNA, 19 nt, Homo sapiens
  misc_RNA (1)...(19): siRNA sense strand
cgacauccuucucucacau

SEQ ID NO: 1847446 - RNA, 19 nt, Homo sapiens
  misc_RNA (1)...(19): siRNA sense strand
gacuucagaugauguugau

SEQ ID NO: 1847447 - RNA, 19 nt, Homo sapiens
  misc_RNA (1)...(19): siRNA sense strand
gaccagucguuguuugagu

SEQ ID NO: 1847448 - RNA, 19 nt, Homo sapiens
  misc_RNA (1)...(19): siRNA sense strand
ugaaugcaguguggccaaa

SEQ ID NO: 1847449 - RNA, 19 nt, Homo sapiens
  misc_RNA (1)...(19): siRNA sense strand
gcucaaccaucuccuucca

SEQ ID NO: 1847450 - RNA, 19 nt, Homo sapiens
  misc_RNA (1)...(19): siRNA sense strand
gguuaaugcaugcuagaaa

SEQ ID NO: 1847451 - RNA, 19 nt, Homo sapiens
  misc_RNA (1)...(19): siRNA sense strand
gaagccuuaucaguuguga

SEQ ID NO: 1847452 - RNA, 19 nt, Homo sapiens
  misc_RNA (1)...(19): siRNA sense strand
ccaacaugaacuacgauaa

SEQ ID NO: 1847453 - RNA, 19 nt, Homo sapiens
  misc_RNA (1)...(19): siRNA sense strand
acauuugacuucagaugau

SEQ ID NO: 1847454 - RNA, 19 nt, Homo sapiens
  misc_RNA (1)...(19): siRNA sense strand
ccagccauaugccuucuca

SEQ ID NO: 1847455 - RNA, 19 nt, Homo sapiens
  misc_RNA (1)...(19): siRNA sense strand
gaagaccagcguccucagu

SEQ ID NO: 1847456 - RNA, 19 nt, Homo sapiens
  misc_RNA (1)...(19): siRNA sense strand
ugugcaagaugaccaagga

SEQ ID NO: 1847457 - RNA, 19 nt, Homo sapiens
  misc_RNA (1)...(19): siRNA sense strand
gggaagcgcuacgccuaca

SEQ ID NO: 1847458 - RNA, 19 nt, Homo sapiens
  misc_RNA (1)...(19): siRNA sense strand
cagccagggucaccaucaa

SEQ ID NO: 1847459 - RNA, 19 nt, Homo sapiens
  misc_RNA (1)...(19): siRNA sense strand
gugaggaccagucguuguu

SEQ ID NO: 1847460 - RNA, 19 nt, Homo sapiens
  misc_RNA (1)...(19): siRNA sense strand
agagcaaacccaacaugaa

SEQ ID NO: 1847461 - RNA, 19 nt, Homo sapiens
  misc_RNA (1)...(19): siRNA sense strand
uuacuacuaugacaagaac

SEQ ID NO: 1847462 - RNA, 19 nt, Homo sapiens
  misc_RNA (1)...(19): siRNA sense strand
gagacuccucuuccacauu

SEQ ID NO: 1847463 - RNA, 19 nt, Homo sapiens
  misc_RNA (1)...(19): siRNA sense strand
ugagugaggaccagucguu

SEQ ID NO: 1847464 - RNA, 19 nt, Homo sapiens
  misc_RNA (1)...(19): siRNA sense strand
cgaacgagcgcagaguuau

SEQ ID NO: 1847465 - RNA, 19 nt, Homo sapiens
  misc_RNA (1)...(19): siRNA sense strand
cgugacaucuuccaguuuu

SEQ ID NO: 1847466 - RNA, 19 nt, Homo sapiens
  misc_RNA (1)...(19): siRNA sense strand
ccagacaccguugggauga

SEQ ID NO: 1847467 - RNA, 19 nt, Homo sapiens
  misc_RNA (1)...(19): siRNA sense strand
uuagauccuuaucagauuc

SEQ ID NO: 1847468 - RNA, 19 nt, Homo sapiens
  misc_RNA (1)...(19): siRNA sense strand
ugacuucagaugauguuga

SEQ ID NO: 1847469 - RNA, 19 nt, Homo sapiens
  misc_RNA (1)...(19): siRNA sense strand
cacauuugacuucagauga

SEQ ID NO: 1847470 - RNA, 19 nt, Homo sapiens
  misc_RNA (1)...(19): siRNA sense strand
ggccaaaggcgggaagaug

SEQ ID NO: 1847471 - RNA, 19 nt, Homo sapiens
  misc_RNA (1)...(19): siRNA sense strand
ccacauuugacuucagaug

SEQ ID NO: 1847472 - RNA, 19 nt, Homo sapiens
  misc_RNA (1)...(19): siRNA sense strand
cccgugacaucuuccaguu

SEQ ID NO: 1847473 - RNA, 19 nt, Homo sapiens
  misc_RNA (1)...(19): siRNA sense strand
cggaagagcaaacccaaca

SEQ ID NO: 1847474 - RNA, 19 nt, Homo sapiens
  misc_RNA (1)...(19): siRNA sense strand
guggccagauccagcuuug

SEQ ID NO: 1847475 - RNA, 19 nt, Homo sapiens
  misc_RNA (1)...(19): siRNA sense strand
caaacaugaccacgaacga

SEQ ID NO: 1847476 - RNA, 19 nt, Homo sapiens
  misc_RNA (1)...(19): siRNA sense strand
gaagcgcuacgccuacaag

SEQ ID NO: 1847477 - RNA, 19 nt, Homo sapiens
  misc_RNA (1)...(19): siRNA sense strand
acgaacgagcgcagaguua

SEQ ID NO: 1847478 - RNA, 19 nt, Homo sapiens
  misc_RNA (1)...(19): siRNA sense strand
aagagcaaacccaacauga

SEQ ID NO: 1847479 - RNA, 19 nt, Homo sapiens
  misc_RNA (1)...(19): siRNA sense strand
gauccagcuuuggcaguuc

SEQ ID NO: 1847480 - RNA, 19 nt, Homo sapiens
  misc_RNA (1)...(19): siRNA sense strand
gcagauccuacgcuaugga

SEQ ID NO: 1847481 - RNA, 19 nt, Homo sapiens
  misc_RNA (1)...(19): siRNA sense strand
ucucacaucuccacuaccu

SEQ ID NO: 1847482 - RNA, 19 nt, Homo sapiens
  misc_RNA (1)...(19): siRNA sense strand
cagcgacuauggacagacu

SEQ ID NO: 1847483 - RNA, 19 nt, Homo sapiens
  misc_RNA (1)...(19): siRNA sense strand
guacaugggcuccuaucac

SEQ ID NO: 1847484 - RNA, 19 nt, Homo sapiens
  misc_RNA (1)...(19): siRNA sense strand
gaccagcguccucaguuag

SEQ ID NO: 1847485 - RNA, 19 nt, Homo sapiens
  misc_RNA (1)...(19): siRNA sense strand
uuccagacgucaacaucuu

SEQ ID NO: 1847486 - RNA, 19 nt, Homo sapiens
  misc_RNA (1)...(19): siRNA sense strand
uggagugggcggugaaaga

SEQ ID NO: 1847487 - RNA, 19 nt, Homo sapiens
  misc_RNA (1)...(19): siRNA sense strand
guauauaccccaacacuag

SEQ ID NO: 1847488 - RNA, 19 nt, Homo sapiens
  misc_RNA (1)...(19): siRNA sense strand
ggaagagcaaacccaacau

SEQ ID NO: 1847489 - RNA, 19 nt, Homo sapiens
  misc_RNA (1)...(19): siRNA sense strand
gaugaccaaggacgacuuc

SEQ ID NO: 1847490 - RNA, 19 nt, Homo sapiens
  misc_RNA (1)...(19): siRNA sense strand
guuacuacuaugacaagaa

SEQ ID NO: 1847491 - RNA, 19 nt, Homo sapiens
  misc_RNA (1)...(19): siRNA sense strand
agauccagcuuuggcaguu

SEQ ID NO: 1847492 - RNA, 19 nt, Homo sapiens
  misc_RNA (1)...(19): siRNA sense strand
cauuugacuucagaugaug

SEQ ID NO: 1847493 - RNA, 19 nt, Homo sapiens
  misc_RNA (1)...(19): siRNA sense strand
ucucucacaucuccacuac

SEQ ID NO: 1847494 - RNA, 19 nt, Homo sapiens
  misc_RNA (1)...(19): siRNA sense strand
ccacgguuaaugcaugcua

SEQ ID NO: 1847495 - RNA, 19 nt, Homo sapiens
  misc_RNA (1)...(19): siRNA sense strand
gccauaugccuucucaucu

SEQ ID NO: 1847496 - RNA, 19 nt, Homo sapiens
  misc_RNA (1)...(19): siRNA sense strand
aacccaacaugaacuacga

SEQ ID NO: 1847497 - RNA, 19 nt, Homo sapiens
  misc_RNA (1)...(19): siRNA sense strand
ggacagacuuccaagauga

SEQ ID NO: 1847498 - RNA, 19 nt, Homo sapiens
  misc_RNA (1)...(19): siRNA sense strand
gaacaucgaugggaaggaa

SEQ ID NO: 1847499 - RNA, 19 nt, Homo sapiens
  misc_RNA (1)...(19): siRNA sense strand
ggaaggaacugugcaagau

SEQ ID NO: 1847500 - RNA, 19 nt, Homo sapiens
  misc_RNA (1)...(19): siRNA sense strand
gaaagaauauggccuucca

SEQ ID NO: 1847501 - RNA, 19 nt, Homo sapiens
  misc_RNA (1)...(19): siRNA sense strand
agucaucucuguacaagua

SEQ ID NO: 1847502 - RNA, 19 nt, Homo sapiens
  misc_RNA (1)...(19): siRNA sense strand
gaaagcugcucaaccaucu

SEQ ID NO: 1847503 - RNA, 19 nt, Homo sapiens
  misc_RNA (1)...(19): siRNA sense strand
gcagcuacauggaggagaa

SEQ ID NO: 1847504 - RNA, 19 nt, Homo sapiens
  misc_RNA (1)...(19): siRNA sense strand
agacuccucuuccacauuu

SEQ ID NO: 1847505 - RNA, 19 nt, Homo sapiens
  misc_RNA (1)...(19): siRNA sense strand
gaacucuccugaugaaugc

SEQ ID NO: 1847506 - RNA, 19 nt, Homo sapiens
  misc_RNA (1)...(19): siRNA sense strand
cacagaagaugaacuuugu

SEQ ID NO: 1847507 - RNA, 19 nt, Homo sapiens
  misc_RNA (1)...(19): siRNA sense strand
gaacuacggcagcuacaug

SEQ ID NO: 1847508 - RNA, 19 nt, Homo sapiens
  misc_RNA (1)...(19): siRNA sense strand
guuagauccuuaucagauu

SEQ ID NO: 1847509 - RNA, 19 nt, Homo sapiens
  misc_RNA (1)...(19): siRNA sense strand
agaccagcguccucaguua

SEQ ID NO: 1847510 - RNA, 19 nt, Homo sapiens
  misc_RNA (1)...(19): siRNA sense strand
gcaaacccaacaugaacua

SEQ ID NO: 1847511 - RNA, 19 nt, Homo sapiens
  misc_RNA (1)...(19): siRNA sense strand
ggaacucuccugaugaaug

SEQ ID NO: 1847512 - RNA, 19 nt, Homo sapiens
  misc_RNA (1)...(19): siRNA sense strand
ccaaacccauacuggaauu

SEQ ID NO: 1847513 - RNA, 19 nt, Homo sapiens
  misc_RNA (1)...(19): siRNA sense strand
acaagaacaucaugaccaa

SEQ ID NO: 1847514 - RNA, 19 nt, Homo sapiens
  misc_RNA (1)...(19): siRNA sense strand
acaaaacucuccacgguua

SEQ ID NO: 1847515 - RNA, 19 nt, Homo sapiens
  misc_RNA (1)...(19): siRNA sense strand
gauccuacgcuauggagua

SEQ ID NO: 1847516 - RNA, 19 nt, Homo sapiens
  misc_RNA (1)...(19): siRNA sense strand
gugaauggcucaaggaacu

SEQ ID NO: 1847517 - RNA, 19 nt, Homo sapiens
  misc_RNA (1)...(19): siRNA sense strand
ucugggcacuuacuacuaa

SEQ ID NO: 1847518 - RNA, 19 nt, Homo sapiens
  misc_RNA (1)...(19): siRNA sense strand
gaagagcaaacccaacaug

SEQ ID NO: 1847519 - RNA, 19 nt, Homo sapiens
  misc_RNA (1)...(19): siRNA sense strand
ggagucaucucuguacaag

SEQ ID NO: 1847520 - RNA, 19 nt, Homo sapiens
  misc_RNA (1)...(19): siRNA sense strand
ccucagaccucccguacau

SEQ ID NO: 1847521 - RNA, 19 nt, Homo sapiens
  misc_RNA (1)...(19): siRNA sense strand
ccacagaagaugaacuuug

SEQ ID NO: 1847522 - RNA, 19 nt, Homo sapiens
  misc_RNA (1)...(19): siRNA sense strand
caacaugaacuacgauaag

SEQ ID NO: 1847523 - RNA, 19 nt, Homo sapiens
  misc_RNA (1)...(19): siRNA sense strand
cuucucaucugggcacuua

SEQ ID NO: 1847524 - RNA, 19 nt, Homo sapiens
  misc_RNA (1)...(19): siRNA sense strand
gaggaccagucguuguuug

SEQ ID NO: 1847525 - RNA, 19 nt, Homo sapiens
  misc_RNA (1)...(19): siRNA sense strand
gcgcuacgccuacaaguuc

SEQ ID NO: 1847526 - RNA, 19 nt, Homo sapiens
  misc_RNA (1)...(19): siRNA sense strand
cagcagauccuacgcuaug

SEQ ID NO: 1847527 - RNA, 19 nt, Homo sapiens
  misc_RNA (1)...(19): siRNA sense strand
gauaaagccuuacaaaacu

SEQ ID NO: 1847528 - RNA, 19 nt, Homo sapiens
  misc_RNA (1)...(19): siRNA sense strand
gaaggaacugugcaagaug

SEQ ID NO: 1847529 - RNA, 19 nt, Homo sapiens
  misc_RNA (1)...(19): siRNA sense strand
ugauguugauaaagccuua

SEQ ID NO: 1847530 - RNA, 19 nt, Homo sapiens
  misc_RNA (1)...(19): siRNA sense strand
cagaugauguugauaaagc

SEQ ID NO: 1847531 - RNA, 19 nt, Homo sapiens
  misc_RNA (1)...(19): siRNA sense strand
aaggaacugugcaagauga

SEQ ID NO: 1847532 - RNA, 19 nt, Homo sapiens
  misc_RNA (1)...(19): siRNA sense strand
gagcaaacccaacaugaac

SEQ ID NO: 1847533 - RNA, 19 nt, Homo sapiens
  misc_RNA (1)...(19): siRNA sense strand
gucgaaagcugcucaacca

SEQ ID NO: 1847534 - RNA, 19 nt, Homo sapiens
  misc_RNA (1)...(19): siRNA sense strand
ggagugggcggugaaagaa

SEQ ID NO: 1847535 - RNA, 19 nt, Homo sapiens
  misc_RNA (1)...(19): siRNA sense strand
ccauaugccuucucaucug

SEQ ID NO: 1847536 - RNA, 19 nt, Homo sapiens
  misc_RNA (1)...(19): siRNA sense strand
guccucaguuagauccuua

SEQ ID NO: 1847537 - RNA, 19 nt, Homo sapiens
  misc_RNA (1)...(19): siRNA sense strand
agugggcggugaaagaaua

SEQ ID NO: 1847538 - RNA, 19 nt, Homo sapiens
  misc_RNA (1)...(19): siRNA sense strand
ucaguuagauccuuaucag

SEQ ID NO: 1847539 - RNA, 19 nt, Homo sapiens
  misc_RNA (1)...(19): siRNA sense strand
guugauaaagccuuacaaa

SEQ ID NO: 1847540 - RNA, 19 nt, Homo sapiens
  misc_RNA (1)...(19): siRNA sense strand
gggaaggaacugugcaaga

SEQ ID NO: 1847541 - RNA, 19 nt, Homo sapiens
  misc_RNA (1)...(19): siRNA sense strand
cuucagaugauguugauaa

SEQ ID NO: 1847542 - RNA, 19 nt, Homo sapiens
  misc_RNA (1)...(19): siRNA sense strand
gaacgagcgcagaguuauc

SEQ ID NO: 1847543 - RNA, 19 nt, Homo sapiens
  misc_RNA (1)...(19): siRNA sense strand
ccuuaucaguugugaguga

SEQ ID NO: 1847544 - RNA, 19 nt, Homo sapiens
  misc_RNA (1)...(19): siRNA sense strand
guuaaugcaugcuagaaac

SEQ ID NO: 1847545 - RNA, 19 nt, Homo sapiens
  misc_RNA (1)...(19): siRNA sense strand
cgacauccuucucucacau

SEQ ID NO: 1847546 - RNA, 19 nt, Homo sapiens
  misc_RNA (1)...(19): siRNA sense strand
gacuucagaugauguugau

SEQ ID NO: 1847547 - RNA, 19 nt, Homo sapiens
  misc_RNA (1)...(19): siRNA sense strand
gaccagucguuguuugagu

SEQ ID NO: 1847548 - RNA, 19 nt, Homo sapiens
  misc_RNA (1)...(19): siRNA sense strand
ugaaugcaguguggccaaa

SEQ ID NO: 1847549 - RNA, 19 nt, Homo sapiens
  misc_RNA (1)...(19): siRNA sense strand
gcucaaccaucuccuucca

SEQ ID NO: 1847550 - RNA, 19 nt, Homo sapiens
  misc_RNA (1)...(19): siRNA sense strand
gguuaaugcaugcuagaaa

SEQ ID NO: 1847551 - RNA, 19 nt, Homo sapiens
  misc_RNA (1)...(19): siRNA sense strand
gaagccuuaucaguuguga

SEQ ID NO: 1847552 - RNA, 19 nt, Homo sapiens
  misc_RNA (1)...(19): siRNA sense strand
ccaacaugaacuacgauaa

SEQ ID NO: 1847553 - RNA, 19 nt, Homo sapiens
  misc_RNA (1)...(19): siRNA sense strand
acauuugacuucagaugau

SEQ ID NO: 1847554 - RNA, 19 nt, Homo sapiens
  misc_RNA (1)...(19): siRNA sense strand
ccagccauaugccuucuca

SEQ ID NO: 1847555 - RNA, 19 nt, Homo sapiens
  misc_RNA (1)...(19): siRNA sense strand
gaagaccagcguccucagu

SEQ ID NO: 1847556 - RNA, 19 nt, Homo sapiens
  misc_RNA (1)...(19): siRNA sense strand
ugugcaagaugaccaagga

SEQ ID NO: 1847557 - RNA, 19 nt, Homo sapiens
  misc_RNA (1)...(19): siRNA sense strand
gggaagcgcuacgccuaca

SEQ ID NO: 1847558 - RNA, 19 nt, Homo sapiens
  misc_RNA (1)...(19): siRNA sense strand
cagccagggucaccaucaa

SEQ ID NO: 1847559 - RNA, 19 nt, Homo sapiens
  misc_RNA (1)...(19): siRNA sense strand
gugaggaccagucguuguu

SEQ ID NO: 1847560 - RNA, 19 nt, Homo sapiens
  misc_RNA (1)...(19): siRNA sense strand
agagcaaacccaacaugaa

SEQ ID NO: 1847561 - RNA, 19 nt, Homo sapiens
  misc_RNA (1)...(19): siRNA sense strand
uuacuacuaugacaagaac

SEQ ID NO: 1847562 - RNA, 19 nt, Homo sapiens
  misc_RNA (1)...(19): siRNA sense strand
gagacuccucuuccacauu

SEQ ID NO: 1847563 - RNA, 19 nt, Homo sapiens
  misc_RNA (1)...(19): siRNA sense strand
ugagugaggaccagucguu

SEQ ID NO: 1847564 - RNA, 19 nt, Homo sapiens
  misc_RNA (1)...(19): siRNA sense strand
cgaacgagcgcagaguuau

SEQ ID NO: 1847565 - RNA, 19 nt, Homo sapiens
  misc_RNA (1)...(19): siRNA sense strand
cgugacaucuuccaguuuu

SEQ ID NO: 1847566 - RNA, 19 nt, Homo sapiens
  misc_RNA (1)...(19): siRNA sense strand
ccagacaccguugggauga

SEQ ID NO: 1847567 - RNA, 19 nt, Homo sapiens
  misc_RNA (1)...(19): siRNA sense strand
uuagauccuuaucagauuc

SEQ ID NO: 1847568 - RNA, 19 nt, Homo sapiens
  misc_RNA (1)...(19): siRNA sense strand
ugacuucagaugauguuga

SEQ ID NO: 1847569 - RNA, 19 nt, Homo sapiens
  misc_RNA (1)...(19): siRNA sense strand
cacauuugacuucagauga

SEQ ID NO: 1847570 - RNA, 19 nt, Homo sapiens
  misc_RNA (1)...(19): siRNA sense strand
ggccaaaggcgggaagaug

SEQ ID NO: 1847571 - RNA, 19 nt, Homo sapiens
  misc_RNA (1)...(19): siRNA sense strand
ccacauuugacuucagaug

SEQ ID NO: 1847572 - RNA, 19 nt, Homo sapiens
  misc_RNA (1)...(19): siRNA sense strand
cccgugacaucuuccaguu

SEQ ID NO: 1847573 - RNA, 19 nt, Homo sapiens
  misc_RNA (1)...(19): siRNA sense strand
cggaagagcaaacccaaca

SEQ ID NO: 1847574 - RNA, 19 nt, Homo sapiens
  misc_RNA (1)...(19): siRNA sense strand
guggccagauccagcuuug

SEQ ID NO: 1847575 - RNA, 19 nt, Homo sapiens
  misc_RNA (1)...(19): siRNA sense strand
caaacaugaccacgaacga

SEQ ID NO: 1847576 - RNA, 19 nt, Homo sapiens
  misc_RNA (1)...(19): siRNA sense strand
gaagcgcuacgccuacaag

SEQ ID NO: 1847577 - RNA, 19 nt, Homo sapiens
  misc_RNA (1)...(19): siRNA sense strand
acgaacgagcgcagaguua

SEQ ID NO: 1847578 - RNA, 19 nt, Homo sapiens
  misc_RNA (1)...(19): siRNA sense strand
aagagcaaacccaacauga

SEQ ID NO: 1847579 - RNA, 19 nt, Homo sapiens
  misc_RNA (1)...(19): siRNA sense strand
gauccagcuuuggcaguuc

SEQ ID NO: 1847580 - RNA, 19 nt, Homo sapiens
  misc_RNA (1)...(19): siRNA sense strand
gcagauccuacgcuaugga

SEQ ID NO: 1847581 - RNA, 19 nt, Homo sapiens
  misc_RNA (1)...(19): siRNA sense strand
ucucacaucuccacuaccu

SEQ ID NO: 1847582 - RNA, 19 nt, Homo sapiens
  misc_RNA (1)...(19): siRNA sense strand
cagcgacuauggacagacu

SEQ ID NO: 1847583 - RNA, 19 nt, Homo sapiens
  misc_RNA (1)...(19): siRNA sense strand
guacaugggcuccuaucac

SEQ ID NO: 1847584 - RNA, 19 nt, Homo sapiens
  misc_RNA (1)...(19): siRNA sense strand
gaccagcguccucaguuag

SEQ ID NO: 1847585 - RNA, 19 nt, Homo sapiens
  misc_RNA (1)...(19): siRNA sense strand
uuccagacgucaacaucuu

SEQ ID NO: 1847586 - RNA, 19 nt, Homo sapiens
  misc_RNA (1)...(19): siRNA sense strand
uggagugggcggugaaaga

SEQ ID NO: 1847587 - RNA, 19 nt, Homo sapiens
  misc_RNA (1)...(19): siRNA sense strand
guauauaccccaacacuag

SEQ ID NO: 1847588 - RNA, 19 nt, Homo sapiens
  misc_RNA (1)...(19): siRNA sense strand
ggaagagcaaacccaacau

SEQ ID NO: 1847589 - RNA, 19 nt, Homo sapiens
  misc_RNA (1)...(19): siRNA sense strand
gaugaccaaggacgacuuc

SEQ ID NO: 1847590 - RNA, 19 nt, Homo sapiens
  misc_RNA (1)...(19): siRNA sense strand
guuacuacuaugacaagaa

SEQ ID NO: 1847591 - RNA, 19 nt, Homo sapiens
  misc_RNA (1)...(19): siRNA sense strand
agauccagcuuuggcaguu

SEQ ID NO: 1847592 - RNA, 19 nt, Homo sapiens
  misc_RNA (1)...(19): siRNA sense strand
cauuugacuucagaugaug

SEQ ID NO: 1847593 - RNA, 19 nt, Homo sapiens
  misc_RNA (1)...(19): siRNA sense strand
ucucucacaucuccacuac

SEQ ID NO: 1847594 - RNA, 19 nt, Homo sapiens
  misc_RNA (1)...(19): siRNA sense strand
ccacgguuaaugcaugcua

SEQ ID NO: 1847595 - RNA, 19 nt, Homo sapiens
  misc_RNA (1)...(19): siRNA sense strand
gccauaugccuucucaucu

SEQ ID NO: 1847596 - RNA, 19 nt, Homo sapiens
  misc_RNA (1)...(19): siRNA sense strand
aacccaacaugaacuacga

SEQ ID NO: 1847597 - RNA, 19 nt, Homo sapiens
  misc_RNA (1)...(19): siRNA sense strand
gcgauggccuuaagguauu

SEQ ID NO: 1847598 - RNA, 19 nt, Homo sapiens
  misc_RNA (1)...(19): siRNA sense strand
gaucgcuucuacccauaua

SEQ ID NO: 1847599 - RNA, 19 nt, Homo sapiens
  misc_RNA (1)...(19): siRNA sense strand
gaccaaggcagccaucgua

SEQ ID NO: 1847600 - RNA, 19 nt, Homo sapiens
  misc_RNA (1)...(19): siRNA sense strand
caacugggaaucuugcuuu

SEQ ID NO: 1847601 - RNA, 19 nt, Homo sapiens
  misc_RNA (1)...(19): siRNA sense strand
gaugagaggcucccacuuc

SEQ ID NO: 1847602 - RNA, 19 nt, Homo sapiens
  misc_RNA (1)...(19): siRNA sense strand
ugaggacccuggcagauga

SEQ ID NO: 1847603 - RNA, 19 nt, Homo sapiens
  misc_RNA (1)...(19): siRNA sense strand
ccauauagcaccaucagaa

SEQ ID NO: 1847604 - RNA, 19 nt, Homo sapiens
  misc_RNA (1)...(19): siRNA sense strand
gauccuggcuuccauugag

SEQ ID NO: 1847605 - RNA, 19 nt, Homo sapiens
  misc_RNA (1)...(19): siRNA sense strand
gcagcagucuuuccacaag

SEQ ID NO: 1847606 - RNA, 19 nt, Homo sapiens
  misc_RNA (1)...(19): siRNA sense strand
gaugggcacaggaagguua

SEQ ID NO: 1847607 - RNA, 19 nt, Homo sapiens
  misc_RNA (1)...(19): siRNA sense strand
cagcagacccaguuucuau

SEQ ID NO: 1847608 - RNA, 19 nt, Homo sapiens
  misc_RNA (1)...(19): siRNA sense strand
caacgaauucuccaugguu

SEQ ID NO: 1847609 - RNA, 19 nt, Homo sapiens
  misc_RNA (1)...(19): siRNA sense strand
caaugccucugcaauggaa

SEQ ID NO: 1847610 - RNA, 19 nt, Homo sapiens
  misc_RNA (1)...(19): siRNA sense strand
gcucaaugccucugcaaug

SEQ ID NO: 1847611 - RNA, 19 nt, Homo sapiens
  misc_RNA (1)...(19): siRNA sense strand
gcccagaucuugguucucu

SEQ ID NO: 1847612 - RNA, 19 nt, Homo sapiens
  misc_RNA (1)...(19): siRNA sense strand
cccagaagaugccguuuca

SEQ ID NO: 1847613 - RNA, 19 nt, Homo sapiens
  misc_RNA (1)...(19): siRNA sense strand
uggacguccugaugaauuu

SEQ ID NO: 1847614 - RNA, 19 nt, Homo sapiens
  misc_RNA (1)...(19): siRNA sense strand
gccuuaagguauucgugua

SEQ ID NO: 1847615 - RNA, 19 nt, Homo sapiens
  misc_RNA (1)...(19): siRNA sense strand
gcucucgcuucuacacauu

SEQ ID NO: 1847616 - RNA, 19 nt, Homo sapiens
  misc_RNA (1)...(19): siRNA sense strand
gagguggacuuugccuuuc

SEQ ID NO: 1847617 - RNA, 19 nt, Homo sapiens
  misc_RNA (1)...(19): siRNA sense strand
ucuaugggaugccuacuuc

SEQ ID NO: 1847618 - RNA, 19 nt, Homo sapiens
  misc_RNA (1)...(19): siRNA sense strand
ggcgauggccuuaagguau

SEQ ID NO: 1847619 - RNA, 19 nt, Homo sapiens
  misc_RNA (1)...(19): siRNA sense strand
ugagguggacuuugccuuu

SEQ ID NO: 1847620 - RNA, 19 nt, Homo sapiens
  misc_RNA (1)...(19): siRNA sense strand
gagaaggucauccauacca

SEQ ID NO: 1847621 - RNA, 19 nt, Homo sapiens
  misc_RNA (1)...(19): siRNA sense strand
ugagaggaccaacgaauuc

SEQ ID NO: 1847622 - RNA, 19 nt, Homo sapiens
  misc_RNA (1)...(19): siRNA sense strand
gggcgauggccuuaaggua

SEQ ID NO: 1847623 - RNA, 19 nt, Homo sapiens
  misc_RNA (1)...(19): siRNA sense strand
ugagggcucucgcuucuac

SEQ ID NO: 1847624 - RNA, 19 nt, Homo sapiens
  misc_RNA (1)...(19): siRNA sense strand
ggagagugcagcucaaugc

SEQ ID NO: 1847625 - RNA, 19 nt, Homo sapiens
  misc_RNA (1)...(19): siRNA sense strand
cgacugcaucaaccagaua

SEQ ID NO: 1847626 - RNA, 19 nt, Homo sapiens
  misc_RNA (1)...(19): siRNA sense strand
gcacaggaagguuagugau

SEQ ID NO: 1847627 - RNA, 19 nt, Homo sapiens
  misc_RNA (1)...(19): siRNA sense strand
gugaucgcuucuacccaua

SEQ ID NO: 1847628 - RNA, 19 nt, Homo sapiens
  misc_RNA (1)...(19): siRNA sense strand
acagccgccuucuaccaua

SEQ ID NO: 1847629 - RNA, 19 nt, Homo sapiens
  misc_RNA (1)...(19): siRNA sense strand
ugggaaucuugcuuugaua

SEQ ID NO: 1847630 - RNA, 19 nt, Homo sapiens
  misc_RNA (1)...(19): siRNA sense strand
auaccacucuggagguuau

SEQ ID NO: 1847631 - RNA, 19 nt, Homo sapiens
  misc_RNA (1)...(19): siRNA sense strand
gaugcccgcagcagucuuu

SEQ ID NO: 1847632 - RNA, 19 nt, Homo sapiens
  misc_RNA (1)...(19): siRNA sense strand
cugggaaucuugcuuugau

SEQ ID NO: 1847633 - RNA, 19 nt, Homo sapiens
  misc_RNA (1)...(19): siRNA sense strand
gcugagaggaccaacgaau

SEQ ID NO: 1847634 - RNA, 19 nt, Homo sapiens
  misc_RNA (1)...(19): siRNA sense strand
guguggacguccugaugaa

SEQ ID NO: 1847635 - RNA, 19 nt, Homo sapiens
  misc_RNA (1)...(19): siRNA sense strand
ccauaccacucuggagguu

SEQ ID NO: 1847636 - RNA, 19 nt, Homo sapiens
  misc_RNA (1)...(19): siRNA sense strand
uggacccggugcuguuuaa

SEQ ID NO: 1847637 - RNA, 19 nt, Homo sapiens
  misc_RNA (1)...(19): siRNA sense strand
cuaucaaggugcccuaugg

SEQ ID NO: 1847638 - RNA, 19 nt, Homo sapiens
  misc_RNA (1)...(19): siRNA sense strand
guggacguccugaugaauu

SEQ ID NO: 1847639 - RNA, 19 nt, Homo sapiens
  misc_RNA (1)...(19): siRNA sense strand
ccaacgaauucuccauggu

SEQ ID NO: 1847640 - RNA, 19 nt, Homo sapiens
  misc_RNA (1)...(19): siRNA sense strand
gguuagugaucgcuucuac

SEQ ID NO: 1847641 - RNA, 19 nt, Homo sapiens
  misc_RNA (1)...(19): siRNA sense strand
ccuccuggcuccugcuugu

SEQ ID NO: 1847642 - RNA, 19 nt, Homo sapiens
  misc_RNA (1)...(19): siRNA sense strand
caggagacgcugcccaaug

SEQ ID NO: 1847643 - RNA, 19 nt, Homo sapiens
  misc_RNA (1)...(19): siRNA sense strand
gcagacccaguuucuaugg

SEQ ID NO: 1847644 - RNA, 19 nt, Homo sapiens
  misc_RNA (1)...(19): siRNA sense strand
aggagacgcugcccaaugc

SEQ ID NO: 1847645 - RNA, 19 nt, Homo sapiens
  misc_RNA (1)...(19): siRNA sense strand
caccacagccgccuucuac

SEQ ID NO: 1847646 - RNA, 19 nt, Homo sapiens
  misc_RNA (1)...(19): siRNA sense strand
gaaucuugcuuugauaccu

SEQ ID NO: 1847647 - RNA, 19 nt, Homo sapiens
  misc_RNA (1)...(19): siRNA sense strand
uagcagcagucaccaagcu

SEQ ID NO: 1847648 - RNA, 19 nt, Homo sapiens
  misc_RNA (1)...(19): siRNA sense strand
uccuggcccugucuacuuu

SEQ ID NO: 1847649 - RNA, 19 nt, Homo sapiens
  misc_RNA (1)...(19): siRNA sense strand
ccgugcagcgcaagaagua

SEQ ID NO: 1847650 - RNA, 19 nt, Homo sapiens
  misc_RNA (1)...(19): siRNA sense strand
augagaggcucccacuuca

SEQ ID NO: 1847651 - RNA, 19 nt, Homo sapiens
  misc_RNA (1)...(19): siRNA sense strand
cugagaggaccaacgaauu

SEQ ID NO: 1847652 - RNA, 19 nt, Homo sapiens
  misc_RNA (1)...(19): siRNA sense strand
cagcagucuuuccacaagu

SEQ ID NO: 1847653 - RNA, 19 nt, Homo sapiens
  misc_RNA (1)...(19): siRNA sense strand
uugguucucuggagcaaug

SEQ ID NO: 1847654 - RNA, 19 nt, Homo sapiens
  misc_RNA (1)...(19): siRNA sense strand
caaggcagccaucguagcu

SEQ ID NO: 1847655 - RNA, 19 nt, Homo sapiens
  misc_RNA (1)...(19): siRNA sense strand
gcacuccuggcccugucua

SEQ ID NO: 1847656 - RNA, 19 nt, Homo sapiens
  misc_RNA (1)...(19): siRNA sense strand
guuauucaggaccggauuu

SEQ ID NO: 1847657 - RNA, 19 nt, Homo sapiens
  misc_RNA (1)...(19): siRNA sense strand
acccggugcuguuuaagga

SEQ ID NO: 1847658 - RNA, 19 nt, Homo sapiens
  misc_RNA (1)...(19): siRNA sense strand
ccacagccgccuucuacca

SEQ ID NO: 1847659 - RNA, 19 nt, Homo sapiens
  misc_RNA (1)...(19): siRNA sense strand
gcagucuuuccacaaguga

SEQ ID NO: 1847660 - RNA, 19 nt, Homo sapiens
  misc_RNA (1)...(19): siRNA sense strand
agacagcugugcccuugac

SEQ ID NO: 1847661 - RNA, 19 nt, Homo sapiens
  misc_RNA (1)...(19): siRNA sense strand
ggacuuccccuucuacuac

SEQ ID NO: 1847662 - RNA, 19 nt, Homo sapiens
  misc_RNA (1)...(19): siRNA sense strand
uaaacaggcuggugaauua

SEQ ID NO: 1847663 - RNA, 19 nt, Homo sapiens
  misc_RNA (1)...(19): siRNA sense strand
gauaggagcaacccuguaa

SEQ ID NO: 1847664 - RNA, 19 nt, Homo sapiens
  misc_RNA (1)...(19): siRNA sense strand
gcaguaaccaguucaaguu

SEQ ID NO: 1847665 - RNA, 19 nt, Homo sapiens
  misc_RNA (1)...(19): siRNA sense strand
gugaacagcuacuacucuu

SEQ ID NO: 1847666 - RNA, 19 nt, Homo sapiens
  misc_RNA (1)...(19): siRNA sense strand
guaaccaguucaaguugga

SEQ ID NO: 1847667 - RNA, 19 nt, Homo sapiens
  misc_RNA (1)...(19): siRNA sense strand
caagugcaguaaccaguuc

SEQ ID NO: 1847668 - RNA, 19 nt, Homo sapiens
  misc_RNA (1)...(19): siRNA sense strand
aaaccagccuuagacuauu

SEQ ID NO: 1847669 - RNA, 19 nt, Homo sapiens
  misc_RNA (1)...(19): siRNA sense strand
ggaagugugucuuuugaau

SEQ ID NO: 1847670 - RNA, 19 nt, Homo sapiens
  misc_RNA (1)...(19): siRNA sense strand
aaccagccuuagacuauuu

SEQ ID NO: 1847671 - RNA, 19 nt, Homo sapiens
  misc_RNA (1)...(19): siRNA sense strand
gagcaacccuguaaaacca

SEQ ID NO: 1847672 - RNA, 19 nt, Homo sapiens
  misc_RNA (1)...(19): siRNA sense strand
uuaaacaggcuggugaauu

SEQ ID NO: 1847673 - RNA, 19 nt, Homo sapiens
  misc_RNA (1)...(19): siRNA sense strand
uaccagaucuccgucaagu

SEQ ID NO: 1847674 - RNA, 19 nt, Homo sapiens
  misc_RNA (1)...(19): siRNA sense strand
ggauaggagcaacccugua

SEQ ID NO: 1847675 - RNA, 19 nt, Homo sapiens
  misc_RNA (1)...(19): siRNA sense strand
gaugugauccgugugaaca

SEQ ID NO: 1847676 - RNA, 19 nt, Homo sapiens
  misc_RNA (1)...(19): siRNA sense strand
cagcuacuacucuugguau

SEQ ID NO: 1847677 - RNA, 19 nt, Homo sapiens
  misc_RNA (1)...(19): siRNA sense strand
ucaagugcaguaaccaguu

SEQ ID NO: 1847678 - RNA, 19 nt, Homo sapiens
  misc_RNA (1)...(19): siRNA sense strand
acaaagucguggacaacca

SEQ ID NO: 1847679 - RNA, 19 nt, Homo sapiens
  misc_RNA (1)...(19): siRNA sense strand
aaacaaagucguggacaac

SEQ ID NO: 1847680 - RNA, 19 nt, Homo sapiens
  misc_RNA (1)...(19): siRNA sense strand
aaaaccagccuuagacuau

SEQ ID NO: 1847681 - RNA, 19 nt, Homo sapiens
  misc_RNA (1)...(19): siRNA sense strand
aaaacaaagucguggacaa

SEQ ID NO: 1847682 - RNA, 19 nt, Homo sapiens
  misc_RNA (1)...(19): siRNA sense strand
gugggaggauggugauugc

SEQ ID NO: 1847683 - RNA, 19 nt, Homo sapiens
  misc_RNA (1)...(19): siRNA sense strand
gcaaguauguguccuuuga

SEQ ID NO: 1847684 - RNA, 19 nt, Homo sapiens
  misc_RNA (1)...(19): siRNA sense strand
cgagggagcuguucuauga

SEQ ID NO: 1847685 - RNA, 19 nt, Homo sapiens
  misc_RNA (1)...(19): siRNA sense strand
gcaaguacauccagacaga

SEQ ID NO: 1847686 - RNA, 19 nt, Homo sapiens
  misc_RNA (1)...(19): siRNA sense strand
ggagaacucuuugcaccua

SEQ ID NO: 1847687 - RNA, 19 nt, Homo sapiens
  misc_RNA (1)...(19): siRNA sense strand
gacaauaccuuugccaaca

SEQ ID NO: 1847688 - RNA, 19 nt, Homo sapiens
  misc_RNA (1)...(19): siRNA sense strand
cgacaagggugcucacuac

SEQ ID NO: 1847689 - RNA, 19 nt, Homo sapiens
  misc_RNA (1)...(19): siRNA sense strand
gagaacucuuugcaccuaa

SEQ ID NO: 1847690 - RNA, 19 nt, Homo sapiens
  misc_RNA (1)...(19): siRNA sense strand
ggauugacauaccgugauc

SEQ ID NO: 1847691 - RNA, 19 nt, Homo sapiens
  misc_RNA (1)...(19): siRNA sense strand
caaaaugucuggucuguac

SEQ ID NO: 1847692 - RNA, 19 nt, Homo sapiens
  misc_RNA (1)...(19): siRNA sense strand
gaauauggaggccaaacau

SEQ ID NO: 1847693 - RNA, 19 nt, Homo sapiens
  misc_RNA (1)...(19): siRNA sense strand
gcaacgagucccuguaugg

SEQ ID NO: 1847694 - RNA, 19 nt, Homo sapiens
  misc_RNA (1)...(19): siRNA sense strand
cccggaagcuggaauaugg

SEQ ID NO: 1847695 - RNA, 19 nt, Homo sapiens
  misc_RNA (1)...(19): siRNA sense strand
ggaauauggaggccaaaca

SEQ ID NO: 1847696 - RNA, 19 nt, Homo sapiens
  misc_RNA (1)...(19): siRNA sense strand
ccuacuguguggccuguuu

SEQ ID NO: 1847697 - RNA, 19 nt, Homo sapiens
  misc_RNA (1)...(19): siRNA sense strand
caacgagucccuguaugga

SEQ ID NO: 1847698 - RNA, 19 nt, Homo sapiens
  misc_RNA (1)...(19): siRNA sense strand
gccaacaccugugcugagu

SEQ ID NO: 1847699 - RNA, 19 nt, Homo sapiens
  misc_RNA (1)...(19): siRNA sense strand
gggagcuguucuaugaaga

SEQ ID NO: 1847700 - RNA, 19 nt, Homo sapiens
  misc_RNA (1)...(19): siRNA sense strand
aggcaaguauguguccuuu

SEQ ID NO: 1847701 - RNA, 19 nt, Homo sapiens
  misc_RNA (1)...(19): siRNA sense strand
ugcgugcccugcuaugaaa

SEQ ID NO: 1847702 - RNA, 19 nt, Homo sapiens
  misc_RNA (1)...(19): siRNA sense strand
cuaugaagaccgccauuuc

SEQ ID NO: 1847703 - RNA, 19 nt, Homo sapiens
  misc_RNA (1)...(19): siRNA sense strand
ccuacugugugcccugcua

SEQ ID NO: 1847704 - RNA, 19 nt, Homo sapiens
  misc_RNA (1)...(19): siRNA sense strand
ggucccggaagcuggaaua

SEQ ID NO: 1847705 - RNA, 19 nt, Homo sapiens
  misc_RNA (1)...(19): siRNA sense strand
augaagaucccuacugugu

SEQ ID NO: 1847706 - RNA, 19 nt, Homo sapiens
  misc_RNA (1)...(19): siRNA sense strand
gugcccugcuaugacaaua

SEQ ID NO: 1847707 - RNA, 19 nt, Homo sapiens
  misc_RNA (1)...(19): siRNA sense strand
caaguauguguccuuugaa

SEQ ID NO: 1847708 - RNA, 19 nt, Homo sapiens
  misc_RNA (1)...(19): siRNA sense strand
ugugugcccugcuaugaca

SEQ ID NO: 1847709 - RNA, 19 nt, Homo sapiens
  misc_RNA (1)...(19): siRNA sense strand
gcuaugacaauaccuuugc

SEQ ID NO: 1847710 - RNA, 19 nt, Homo sapiens
  misc_RNA (1)...(19): siRNA sense strand
gguggaggcaaguaugugu

SEQ ID NO: 1847711 - RNA, 19 nt, Homo sapiens
  misc_RNA (1)...(19): siRNA sense strand
gcuuacacaggguggauug

SEQ ID NO: 1847712 - RNA, 19 nt, Homo sapiens
  misc_RNA (1)...(19): siRNA sense strand
gacacuggcaccacaacug

SEQ ID NO: 1847713 - RNA, 19 nt, Homo sapiens
  misc_RNA (1)...(19): siRNA sense strand
guauguguccuuugaagac

SEQ ID NO: 1847714 - RNA, 19 nt, Homo sapiens
  misc_RNA (1)...(19): siRNA sense strand
gaacucuuugcaccuaagu

SEQ ID NO: 1847715 - RNA, 19 nt, Homo sapiens
  misc_RNA (1)...(19): siRNA sense strand
uacacaggguggauugaca

SEQ ID NO: 1847716 - RNA, 19 nt, Homo sapiens
  misc_RNA (1)...(19): siRNA sense strand
gaaggcaucuacaccauua

SEQ ID NO: 1847717 - RNA, 19 nt, Homo sapiens
  misc_RNA (1)...(19): siRNA sense strand
gaaggagucuggaauagaa

SEQ ID NO: 1847718 - RNA, 19 nt, Homo sapiens
  misc_RNA (1)...(19): siRNA sense strand
gaagauaugugacuuugga

SEQ ID NO: 1847719 - RNA, 19 nt, Homo sapiens
  misc_RNA (1)...(19): siRNA sense strand
ggaaagcuguaaagaagaa

SEQ ID NO: 1847720 - RNA, 19 nt, Homo sapiens
  misc_RNA (1)...(19): siRNA sense strand
ggaaaguggugaagauaug

SEQ ID NO: 1847721 - RNA, 19 nt, Homo sapiens
  misc_RNA (1)...(19): siRNA sense strand
gaauuuaagucguguguuc

SEQ ID NO: 1847722 - RNA, 19 nt, Homo sapiens
  misc_RNA (1)...(19): siRNA sense strand
gcaaugauauuugggacua

SEQ ID NO: 1847723 - RNA, 19 nt, Homo sapiens
  misc_RNA (1)...(19): siRNA sense strand
aaacaugagugaagccaua

SEQ ID NO: 1847724 - RNA, 19 nt, Homo sapiens
  misc_RNA (1)...(19): siRNA sense strand
ggaauucauuucacucuga

SEQ ID NO: 1847725 - RNA, 19 nt, Homo sapiens
  misc_RNA (1)...(19): siRNA sense strand
uaagaaauacccugcuuua

SEQ ID NO: 1847726 - RNA, 19 nt, Homo sapiens
  misc_RNA (1)...(19): siRNA sense strand
ggaccaauuuacuugauuu

SEQ ID NO: 1847727 - RNA, 19 nt, Homo sapiens
  misc_RNA (1)...(19): siRNA sense strand
gcaccaggcuguucacaau

SEQ ID NO: 1847728 - RNA, 19 nt, Homo sapiens
  misc_RNA (1)...(19): siRNA sense strand
gugcaaagcuguucaugug

SEQ ID NO: 1847729 - RNA, 19 nt, Homo sapiens
  misc_RNA (1)...(19): siRNA sense strand
gaagaaguguucagacaag

SEQ ID NO: 1847730 - RNA, 19 nt, Homo sapiens
  misc_RNA (1)...(19): siRNA sense strand
ggacagagauuuucaagga

SEQ ID NO: 1847731 - RNA, 19 nt, Homo sapiens
  misc_RNA (1)...(19): siRNA sense strand
aagaagaccuuacuuuaga

SEQ ID NO: 1847732 - RNA, 19 nt, Homo sapiens
  misc_RNA (1)...(19): siRNA sense strand
caagagaaguucagauaca

SEQ ID NO: 1847733 - RNA, 19 nt, Homo sapiens
  misc_RNA (1)...(19): siRNA sense strand
gagcaguacucuaaacaug

SEQ ID NO: 1847734 - RNA, 19 nt, Homo sapiens
  misc_RNA (1)...(19): siRNA sense strand
ugaccaauaugaagaguuu

SEQ ID NO: 1847735 - RNA, 19 nt, Homo sapiens
  misc_RNA (1)...(19): siRNA sense strand
gagaggcacucaugucaga

SEQ ID NO: 1847736 - RNA, 19 nt, Homo sapiens
  misc_RNA (1)...(19): siRNA sense strand
gaaauacccugcuuuacac

SEQ ID NO: 1847737 - RNA, 19 nt, Homo sapiens
  misc_RNA (1)...(19): siRNA sense strand
ggacucggaucaaaucuca

SEQ ID NO: 1847738 - RNA, 19 nt, Homo sapiens
  misc_RNA (1)...(19): siRNA sense strand
gacaacaucucauucuaug

SEQ ID NO: 1847739 - RNA, 19 nt, Homo sapiens
  misc_RNA (1)...(19): siRNA sense strand
aagcacagcucccugaauu

SEQ ID NO: 1847740 - RNA, 19 nt, Homo sapiens
  misc_RNA (1)...(19): siRNA sense strand
ggaauggaauuucuggaau

SEQ ID NO: 1847741 - RNA, 19 nt, Homo sapiens
  misc_RNA (1)...(19): siRNA sense strand
gauaacggauacagcauau

SEQ ID NO: 1847742 - RNA, 19 nt, Homo sapiens
  misc_RNA (1)...(19): siRNA sense strand
gaaaguccagcuguuguua

SEQ ID NO: 1847743 - RNA, 19 nt, Homo sapiens
  misc_RNA (1)...(19): siRNA sense strand
cgcaacagcuuauggaauu

SEQ ID NO: 1847744 - RNA, 19 nt, Homo sapiens
  misc_RNA (1)...(19): siRNA sense strand
guaggaaagggauuuauaa

SEQ ID NO: 1847745 - RNA, 19 nt, Homo sapiens
  misc_RNA (1)...(19): siRNA sense strand
gaagcgauguaucagaaug

SEQ ID NO: 1847746 - RNA, 19 nt, Homo sapiens
  misc_RNA (1)...(19): siRNA sense strand
gcaacagcuuauggaauua

SEQ ID NO: 1847747 - RNA, 19 nt, Homo sapiens
  misc_RNA (1)...(19): siRNA sense strand
gaagaaaguccagcuguug

SEQ ID NO: 1847748 - RNA, 19 nt, Homo sapiens
  misc_RNA (1)...(19): siRNA sense strand
cagcaugccugguucaaga

SEQ ID NO: 1847749 - RNA, 19 nt, Homo sapiens
  misc_RNA (1)...(19): siRNA sense strand
agagugaagcuaccaauua

SEQ ID NO: 1847750 - RNA, 19 nt, Homo sapiens
  misc_RNA (1)...(19): siRNA sense strand
ugggaaaucuucucacuug

SEQ ID NO: 1847751 - RNA, 19 nt, Homo sapiens
  misc_RNA (1)...(19): siRNA sense strand
gcacagaagagaucacaga

SEQ ID NO: 1847752 - RNA, 19 nt, Homo sapiens
  misc_RNA (1)...(19): siRNA sense strand
ggccauccuucccuaauuu

SEQ ID NO: 1847753 - RNA, 19 nt, Homo sapiens
  misc_RNA (1)...(19): siRNA sense strand
uaucaucaguggcaagaaa

SEQ ID NO: 1847754 - RNA, 19 nt, Homo sapiens
  misc_RNA (1)...(19): siRNA sense strand
gaauguggauggccguguu

SEQ ID NO: 1847755 - RNA, 19 nt, Homo sapiens
  misc_RNA (1)...(19): siRNA sense strand
gaauagaaaggcuaacaga

SEQ ID NO: 1847756 - RNA, 19 nt, Homo sapiens
  misc_RNA (1)...(19): siRNA sense strand
gaauauuacugugggaaau

SEQ ID NO: 1847757 - RNA, 19 nt, Homo sapiens
  misc_RNA (1)...(19): siRNA sense strand
gcuggcagaugcagaagaa

SEQ ID NO: 1847758 - RNA, 19 nt, Homo sapiens
  misc_RNA (1)...(19): siRNA sense strand
caagaaacgacaccggaua

SEQ ID NO: 1847759 - RNA, 19 nt, Homo sapiens
  misc_RNA (1)...(19): siRNA sense strand
aagaagcgauguaucagaa

SEQ ID NO: 1847760 - RNA, 19 nt, Homo sapiens
  misc_RNA (1)...(19): siRNA sense strand
ccaaaggaauggaauuucu

SEQ ID NO: 1847761 - RNA, 19 nt, Homo sapiens
  misc_RNA (1)...(19): siRNA sense strand
gaucuucucaacuaucuaa

SEQ ID NO: 1847762 - RNA, 19 nt, Homo sapiens
  misc_RNA (1)...(19): siRNA sense strand
gaaacgacaccggauacua

SEQ ID NO: 1847763 - RNA, 19 nt, Homo sapiens
  misc_RNA (1)...(19): siRNA sense strand
gcacucaugucagaacuca

SEQ ID NO: 1847764 - RNA, 19 nt, Homo sapiens
  misc_RNA (1)...(19): siRNA sense strand
gaacgcaacagcuuaugga

SEQ ID NO: 1847765 - RNA, 19 nt, Homo sapiens
  misc_RNA (1)...(19): siRNA sense strand
gagugaagcuaccaauuac

SEQ ID NO: 1847766 - RNA, 19 nt, Homo sapiens
  misc_RNA (1)...(19): siRNA sense strand
gaagaagcgauguaucaga

SEQ ID NO: 1847767 - RNA, 19 nt, Homo sapiens
  misc_RNA (1)...(19): siRNA sense strand
ugucagaacucaagaugau

SEQ ID NO: 1847768 - RNA, 19 nt, Homo sapiens
  misc_RNA (1)...(19): siRNA sense strand
caagugcugugcauacaau

SEQ ID NO: 1847769 - RNA, 19 nt, Homo sapiens
  misc_RNA (1)...(19): siRNA sense strand
ucaacaaacagaacuauga

SEQ ID NO: 1847770 - RNA, 19 nt, Homo sapiens
  misc_RNA (1)...(19): siRNA sense strand
gagggcaacuacuuugaga

SEQ ID NO: 1847771 - RNA, 19 nt, Homo sapiens
  misc_RNA (1)...(19): siRNA sense strand
gcuaacuucuacaaacuga

SEQ ID NO: 1847772 - RNA, 19 nt, Homo sapiens
  misc_RNA (1)...(19): siRNA sense strand
gugaccggcuccucagaua

SEQ ID NO: 1847773 - RNA, 19 nt, Homo sapiens
  misc_RNA (1)...(19): siRNA sense strand
cagaagaagcgauguauca

SEQ ID NO: 1847774 - RNA, 19 nt, Homo sapiens
  misc_RNA (1)...(19): siRNA sense strand
gaugcuaacuucuacaaac

SEQ ID NO: 1847775 - RNA, 19 nt, Homo sapiens
  misc_RNA (1)...(19): siRNA sense strand
ggaagaagaggaggacuug

SEQ ID NO: 1847776 - RNA, 19 nt, Homo sapiens
  misc_RNA (1)...(19): siRNA sense strand
ugaauaugaucucaaaugg

SEQ ID NO: 1847777 - RNA, 19 nt, Homo sapiens
  misc_RNA (1)...(19): siRNA sense strand
caugagugauuccaacuau

SEQ ID NO: 1847778 - RNA, 19 nt, Homo sapiens
  misc_RNA (1)...(19): siRNA sense strand
gauaugugacuuuggauug

SEQ ID NO: 1847779 - RNA, 19 nt, Homo sapiens
  misc_RNA (1)...(19): siRNA sense strand
gugaagauaugugacuuug

SEQ ID NO: 1847780 - RNA, 19 nt, Homo sapiens
  misc_RNA (1)...(19): siRNA sense strand
gcuggagaauaccuacuuu

SEQ ID NO: 1847781 - RNA, 19 nt, Homo sapiens
  misc_RNA (1)...(19): siRNA sense strand
agagugaugucuggucaua

SEQ ID NO: 1847782 - RNA, 19 nt, Homo sapiens
  misc_RNA (1)...(19): siRNA sense strand
ggacuugaaugugcuuaca

SEQ ID NO: 1847783 - RNA, 19 nt, Homo sapiens
  misc_RNA (1)...(19): siRNA sense strand
ggaagaaguguucagacaa

SEQ ID NO: 1847784 - RNA, 19 nt, Homo sapiens
  misc_RNA (1)...(19): siRNA sense strand
agaaauacccugcuuuaca

SEQ ID NO: 1847785 - RNA, 19 nt, Homo sapiens
  misc_RNA (1)...(19): siRNA sense strand
caaaugggaguuuccaaga

SEQ ID NO: 1847786 - RNA, 19 nt, Homo sapiens
  misc_RNA (1)...(19): siRNA sense strand
gcaguacucuaaacaugag

SEQ ID NO: 1847787 - RNA, 19 nt, Homo sapiens
  misc_RNA (1)...(19): siRNA sense strand
gcaccagccaggagaauau

SEQ ID NO: 1847788 - RNA, 19 nt, Homo sapiens
  misc_RNA (1)...(19): siRNA sense strand
uauaagaaauacccugcuu

SEQ ID NO: 1847789 - RNA, 19 nt, Homo sapiens
  misc_RNA (1)...(19): siRNA sense strand
gaucagccauuuuaugcua

SEQ ID NO: 1847790 - RNA, 19 nt, Homo sapiens
  misc_RNA (1)...(19): siRNA sense strand
gaaagagaggcacucaugu

SEQ ID NO: 1847791 - RNA, 19 nt, Homo sapiens
  misc_RNA (1)...(19): siRNA sense strand
ugaaagagaggcacucaug

SEQ ID NO: 1847792 - RNA, 19 nt, Homo sapiens
  misc_RNA (1)...(19): siRNA sense strand
cuacguugauuucagagaa

SEQ ID NO: 1847793 - RNA, 19 nt, Homo sapiens
  misc_RNA (1)...(19): siRNA sense strand
agaagaaaguccagcuguu

SEQ ID NO: 1847794 - RNA, 19 nt, Homo sapiens
  misc_RNA (1)...(19): siRNA sense strand
ugaauugccagccacauuu

SEQ ID NO: 1847795 - RNA, 19 nt, Homo sapiens
  misc_RNA (1)...(19): siRNA sense strand
ggaagccacgagaauauug

SEQ ID NO: 1847796 - RNA, 19 nt, Homo sapiens
  misc_RNA (1)...(19): siRNA sense strand
guacuaggaucaggugcuu

SEQ ID NO: 1847797 - RNA, 19 nt, Homo sapiens
  misc_RNA (1)...(19): siRNA sense strand
auagaaaggcuaacagaaa

SEQ ID NO: 1847798 - RNA, 19 nt, Homo sapiens
  misc_RNA (1)...(19): siRNA sense strand
gcaacuacuuugagaugag

SEQ ID NO: 1847799 - RNA, 19 nt, Homo sapiens
  misc_RNA (1)...(19): siRNA sense strand
gaagaccuuacuuuagaaa

SEQ ID NO: 1847800 - RNA, 19 nt, Homo sapiens
  misc_RNA (1)...(19): siRNA sense strand
gaucaaguguguuuuaauc

SEQ ID NO: 1847801 - RNA, 19 nt, Homo sapiens
  misc_RNA (1)...(19): siRNA sense strand
ggaauauuacugugggaaa

SEQ ID NO: 1847802 - RNA, 19 nt, Homo sapiens
  misc_RNA (1)...(19): siRNA sense strand
ggauacccauuaccaucuu

SEQ ID NO: 1847803 - RNA, 19 nt, Homo sapiens
  misc_RNA (1)...(19): siRNA sense strand
ggaacacaauuucaguuuu

SEQ ID NO: 1847804 - RNA, 19 nt, Homo sapiens
  misc_RNA (1)...(19): siRNA sense strand
guacuucuacguugauuuc

SEQ ID NO: 1847805 - RNA, 19 nt, Homo sapiens
  misc_RNA (1)...(19): siRNA sense strand
caacaucucauucuaugca

SEQ ID NO: 1847806 - RNA, 19 nt, Homo sapiens
  misc_RNA (1)...(19): siRNA sense strand
gaacuaugauacggauucu

SEQ ID NO: 1847807 - RNA, 19 nt, Homo sapiens
  misc_RNA (1)...(19): siRNA sense strand
caucauaucccaugguauc

SEQ ID NO: 1847808 - RNA, 19 nt, Homo sapiens
  misc_RNA (1)...(19): siRNA sense strand
aagacaacaucucauucua

SEQ ID NO: 1847809 - RNA, 19 nt, Homo sapiens
  misc_RNA (1)...(19): siRNA sense strand
gaagcuaccaauuacacaa

SEQ ID NO: 1847810 - RNA, 19 nt, Homo sapiens
  misc_RNA (1)...(19): siRNA sense strand
gaugucuggucauauggaa

SEQ ID NO: 1847811 - RNA, 19 nt, Homo sapiens
  misc_RNA (1)...(19): siRNA sense strand
uaugaaagccagcuacaga

SEQ ID NO: 1847812 - RNA, 19 nt, Homo sapiens
  misc_RNA (1)...(19): siRNA sense strand
gggaagucaucaucauauc

SEQ ID NO: 1847813 - RNA, 19 nt, Homo sapiens
  misc_RNA (1)...(19): siRNA sense strand
uggaagaaguguucagaca

SEQ ID NO: 1847814 - RNA, 19 nt, Homo sapiens
  misc_RNA (1)...(19): siRNA sense strand
gcagaagcaucggcaaguc

SEQ ID NO: 1847815 - RNA, 19 nt, Homo sapiens
  misc_RNA (1)...(19): siRNA sense strand
uggauuggcucgagauauc

SEQ ID NO: 1847816 - RNA, 19 nt, Homo sapiens
  misc_RNA (1)...(19): siRNA sense strand
gcacuggucgagagaguua

SEQ ID NO: 1847817 - RNA, 19 nt, Homo sapiens
  misc_RNA (1)...(19): siRNA sense strand
gacaacaccuccuuugauc

SEQ ID NO: 1847818 - RNA, 19 nt, Homo sapiens
  misc_RNA (1)...(19): siRNA sense strand
acaggcagguaaagcauua

SEQ ID NO: 1847819 - RNA, 19 nt, Homo sapiens
  misc_RNA (1)...(19): siRNA sense strand
ggacaacaccuccuuugau

SEQ ID NO: 1847820 - RNA, 19 nt, Homo sapiens
  misc_RNA (1)...(19): siRNA sense strand
gaauauguguggccagagu

SEQ ID NO: 1847821 - RNA, 19 nt, Homo sapiens
  misc_RNA (1)...(19): siRNA sense strand
uaccauggcuggcuguuug

SEQ ID NO: 1847822 - RNA, 19 nt, Homo sapiens
  misc_RNA (1)...(19): siRNA sense strand
gagaaacugcgugugauuu

SEQ ID NO: 1847823 - RNA, 19 nt, Homo sapiens
  misc_RNA (1)...(19): siRNA sense strand
ggaaacagcaugaaaucca

SEQ ID NO: 1847824 - RNA, 19 nt, Homo sapiens
  misc_RNA (1)...(19): siRNA sense strand
ggagaaacugcgugugauu

SEQ ID NO: 1847825 - RNA, 19 nt, Homo sapiens
  misc_RNA (1)...(19): siRNA sense strand
caucaccaccuuacuuuga

SEQ ID NO: 1847826 - RNA, 19 nt, Homo sapiens
  misc_RNA (1)...(19): siRNA sense strand
cgacuuccuugccgugcua

SEQ ID NO: 1847827 - RNA, 19 nt, Homo sapiens
  misc_RNA (1)...(19): siRNA sense strand
caccuuacuuugaggacua

SEQ ID NO: 1847828 - RNA, 19 nt, Homo sapiens
  misc_RNA (1)...(19): siRNA sense strand
caacaccuccuuugaucga

SEQ ID NO: 1847829 - RNA, 19 nt, Homo sapiens
  misc_RNA (1)...(19): siRNA sense strand
gggagaaacugcgugugau

SEQ ID NO: 1847830 - RNA, 19 nt, Homo sapiens
  misc_RNA (1)...(19): siRNA sense strand
caagagaaagagcucauuc

SEQ ID NO: 1847831 - RNA, 19 nt, Homo sapiens
  misc_RNA (1)...(19): siRNA sense strand
gagagagugagaccaagaa

SEQ ID NO: 1847832 - RNA, 19 nt, Homo sapiens
  misc_RNA (1)...(19): siRNA sense strand
agaguuacaucccuggaau

SEQ ID NO: 1847833 - RNA, 19 nt, Homo sapiens
  misc_RNA (1)...(19): siRNA sense strand
gcaagagaaagagcucauu

SEQ ID NO: 1847834 - RNA, 19 nt, Homo sapiens
  misc_RNA (1)...(19): siRNA sense strand
ggaggagaguguccagacu

SEQ ID NO: 1847835 - RNA, 19 nt, Homo sapiens
  misc_RNA (1)...(19): siRNA sense strand
ccugucaccuugcgucaga

SEQ ID NO: 1847836 - RNA, 19 nt, Homo sapiens
  misc_RNA (1)...(19): siRNA sense strand
gggacuggauagcgacuuc

SEQ ID NO: 1847837 - RNA, 19 nt, Homo sapiens
  misc_RNA (1)...(19): siRNA sense strand
gaguuacaucccuggaaua

SEQ ID NO: 1847838 - RNA, 19 nt, Homo sapiens
  misc_RNA (1)...(19): siRNA sense strand
gagcucauucuucucauca

SEQ ID NO: 1847839 - RNA, 19 nt, Homo sapiens
  misc_RNA (1)...(19): siRNA sense strand
ucagagagagugagaccaa

SEQ ID NO: 1847840 - RNA, 19 nt, Homo sapiens
  misc_RNA (1)...(19): siRNA sense strand
gagaguuacaucccuggaa

SEQ ID NO: 1847841 - RNA, 19 nt, Homo sapiens
  misc_RNA (1)...(19): siRNA sense strand
ggucggcuccuucaugauc

SEQ ID NO: 1847842 - RNA, 19 nt, Homo sapiens
  misc_RNA (1)...(19): siRNA sense strand
gcuccuucaugaucagaga

SEQ ID NO: 1847843 - RNA, 19 nt, Homo sapiens
  misc_RNA (1)...(19): siRNA sense strand
caagaaaggguuuuacuca

SEQ ID NO: 1847844 - RNA, 19 nt, Homo sapiens
  misc_RNA (1)...(19): siRNA sense strand
gguggcagcaagagaaaga

SEQ ID NO: 1847845 - RNA, 19 nt, Homo sapiens
  misc_RNA (1)...(19): siRNA sense strand
gugagacacaggcagguaa

SEQ ID NO: 1847846 - RNA, 19 nt, Homo sapiens
  misc_RNA (1)...(19): siRNA sense strand
aacaacugguacuacauuu

SEQ ID NO: 1847847 - RNA, 19 nt, Homo sapiens
  misc_RNA (1)...(19): siRNA sense strand
gcgugugauuucugaugaa

SEQ ID NO: 1847848 - RNA, 19 nt, Homo sapiens
  misc_RNA (1)...(19): siRNA sense strand
acaccuccuuugaucgaaa

SEQ ID NO: 1847849 - RNA, 19 nt, Homo sapiens
  misc_RNA (1)...(19): siRNA sense strand
agagugagaccaagaaagg

SEQ ID NO: 1847850 - RNA, 19 nt, Homo sapiens
  misc_RNA (1)...(19): siRNA sense strand
gccuccagcucaccuguca

SEQ ID NO: 1847851 - RNA, 19 nt, Homo sapiens
  misc_RNA (1)...(19): siRNA sense strand
ggugagacacaggcaggua

SEQ ID NO: 1847852 - RNA, 19 nt, Homo sapiens
  misc_RNA (1)...(19): siRNA sense strand
uaugguggcagcaagagaa

SEQ ID NO: 1847853 - RNA, 19 nt, Homo sapiens
  misc_RNA (1)...(19): siRNA sense strand
gagagugagaccaagaaag

SEQ ID NO: 1847854 - RNA, 19 nt, Homo sapiens
  misc_RNA (1)...(19): siRNA sense strand
ucucaucaccaccuuacuu

SEQ ID NO: 1847855 - RNA, 19 nt, Homo sapiens
  misc_RNA (1)...(19): siRNA sense strand
cuacccgucuccugacauc

SEQ ID NO: 1847856 - RNA, 19 nt, Homo sapiens
  misc_RNA (1)...(19): siRNA sense strand
ugagacacaggcagguaaa

SEQ ID NO: 1847857 - RNA, 19 nt, Homo sapiens
  misc_RNA (1)...(19): siRNA sense strand
caacugguacuacauuucc

SEQ ID NO: 1847858 - RNA, 19 nt, Homo sapiens
  misc_RNA (1)...(19): siRNA sense strand
gacacaggcagguaaagca

SEQ ID NO: 1847859 - RNA, 19 nt, Homo sapiens
  misc_RNA (1)...(19): siRNA sense strand
ugcgugugauuucugauga

SEQ ID NO: 1847860 - RNA, 19 nt, Homo sapiens
  misc_RNA (1)...(19): siRNA sense strand
uagcacuggucgagagagu

SEQ ID NO: 1847861 - RNA, 19 nt, Homo sapiens
  misc_RNA (1)...(19): siRNA sense strand
gcagcugccagacacaaag

SEQ ID NO: 1847862 - RNA, 19 nt, Homo sapiens
  misc_RNA (1)...(19): siRNA sense strand
ggaaauauccuaaaucuga

SEQ ID NO: 1847863 - RNA, 19 nt, Homo sapiens
  misc_RNA (1)...(19): siRNA sense strand
gaaggaaacuacacucuga

SEQ ID NO: 1847864 - RNA, 19 nt, Homo sapiens
  misc_RNA (1)...(19): siRNA sense strand
gaaagagcauuuauugauc

SEQ ID NO: 1847865 - RNA, 19 nt, Homo sapiens
  misc_RNA (1)...(19): siRNA sense strand
gauagcagcuggagaggaa

SEQ ID NO: 1847866 - RNA, 19 nt, Homo sapiens
  misc_RNA (1)...(19): siRNA sense strand
ggaaagagcauuuauugau

SEQ ID NO: 1847867 - RNA, 19 nt, Homo sapiens
  misc_RNA (1)...(19): siRNA sense strand
ggaccuggcuuuacuggaa

SEQ ID NO: 1847868 - RNA, 19 nt, Homo sapiens
  misc_RNA (1)...(19): siRNA sense strand
gcacagaagcuccuagaaa

SEQ ID NO: 1847869 - RNA, 19 nt, Homo sapiens
  misc_RNA (1)...(19): siRNA sense strand
gagcagcuguuguucauga

SEQ ID NO: 1847870 - RNA, 19 nt, Homo sapiens
  misc_RNA (1)...(19): siRNA sense strand
gaaggcaaaucucuuuaug

SEQ ID NO: 1847871 - RNA, 19 nt, Homo sapiens
  misc_RNA (1)...(19): siRNA sense strand
gaggagggaugguguuuga

SEQ ID NO: 1847872 - RNA, 19 nt, Homo sapiens
  misc_RNA (1)...(19): siRNA sense strand
gaaagaauuuggccuggau

SEQ ID NO: 1847873 - RNA, 19 nt, Homo sapiens
  misc_RNA (1)...(19): siRNA sense strand
gaagugaagagacagauuu

SEQ ID NO: 1847874 - RNA, 19 nt, Homo sapiens
  misc_RNA (1)...(19): siRNA sense strand
gcagagcacgguauacuaa

SEQ ID NO: 1847875 - RNA, 19 nt, Homo sapiens
  misc_RNA (1)...(19): siRNA sense strand
cacaggaaaugaagacaua

SEQ ID NO: 1847876 - RNA, 19 nt, Homo sapiens
  misc_RNA (1)...(19): siRNA sense strand
ccaaugaagugacaagaau

SEQ ID NO: 1847877 - RNA, 19 nt, Homo sapiens
  misc_RNA (1)...(19): siRNA sense strand
gaaauugcuuccaaguuca

SEQ ID NO: 1847878 - RNA, 19 nt, Homo sapiens
  misc_RNA (1)...(19): siRNA sense strand
uuacacagauaccacauuu

SEQ ID NO: 1847879 - RNA, 19 nt, Homo sapiens
  misc_RNA (1)...(19): siRNA sense strand
gagcauuuauugauccauu

SEQ ID NO: 1847880 - RNA, 19 nt, Homo sapiens
  misc_RNA (1)...(19): siRNA sense strand
cuacuaacauuacuccaaa

SEQ ID NO: 1847881 - RNA, 19 nt, Homo sapiens
  misc_RNA (1)...(19): siRNA sense strand
agaaauugcuuccaaguuc

SEQ ID NO: 1847882 - RNA, 19 nt, Homo sapiens
  misc_RNA (1)...(19): siRNA sense strand
ccaaaggagucauucucua

SEQ ID NO: 1847883 - RNA, 19 nt, Homo sapiens
  misc_RNA (1)...(19): siRNA sense strand
aggcaaaucucuuuaugaa

SEQ ID NO: 1847884 - RNA, 19 nt, Homo sapiens
  misc_RNA (1)...(19): siRNA sense strand
gacaagaauuuacaaugug

SEQ ID NO: 1847885 - RNA, 19 nt, Homo sapiens
  misc_RNA (1)...(19): siRNA sense strand
gcagagacuuugagugaag

SEQ ID NO: 1847886 - RNA, 19 nt, Homo sapiens
  misc_RNA (1)...(19): siRNA sense strand
ccaauuggauacuaugaug

SEQ ID NO: 1847887 - RNA, 19 nt, Homo sapiens
  misc_RNA (1)...(19): siRNA sense strand
ccaacuacaucucaauaau

SEQ ID NO: 1847888 - RNA, 19 nt, Homo sapiens
  misc_RNA (1)...(19): siRNA sense strand
gaagagacagauuuauguu

SEQ ID NO: 1847889 - RNA, 19 nt, Homo sapiens
  misc_RNA (1)...(19): siRNA sense strand
uuacagaaauugcuuccaa

SEQ ID NO: 1847890 - RNA, 19 nt, Homo sapiens
  misc_RNA (1)...(19): siRNA sense strand
caaagugcccuacaauguu

SEQ ID NO: 1847891 - RNA, 19 nt, Homo sapiens
  misc_RNA (1)...(19): siRNA sense strand
ugacucaucuauagaagga

SEQ ID NO: 1847892 - RNA, 19 nt, Homo sapiens
  misc_RNA (1)...(19): siRNA sense strand
aagaaaguaugcugacaaa

SEQ ID NO: 1847893 - RNA, 19 nt, Homo sapiens
  misc_RNA (1)...(19): siRNA sense strand
uaacauuacuccaaagcau

SEQ ID NO: 1847894 - RNA, 19 nt, Homo sapiens
  misc_RNA (1)...(19): siRNA sense strand
uaugaaacauccacaggaa

SEQ ID NO: 1847895 - RNA, 19 nt, Homo sapiens
  misc_RNA (1)...(19): siRNA sense strand
guggaaauauccuaaaucu

SEQ ID NO: 1847896 - RNA, 19 nt, Homo sapiens
  misc_RNA (1)...(19): siRNA sense strand
cgacccugcugacuacuuu

SEQ ID NO: 1847897 - RNA, 19 nt, Homo sapiens
  misc_RNA (1)...(19): siRNA sense strand
gaaauugugaggagcuuug

SEQ ID NO: 1847898 - RNA, 19 nt, Homo sapiens
  misc_RNA (1)...(19): siRNA sense strand
aaagugcccuacaauguug

SEQ ID NO: 1847899 - RNA, 19 nt, Homo sapiens
  misc_RNA (1)...(19): siRNA sense strand
gaagugacaagaauuuaca

SEQ ID NO: 1847900 - RNA, 19 nt, Homo sapiens
  misc_RNA (1)...(19): siRNA sense strand
ucaaagugcccuacaaugu

SEQ ID NO: 1847901 - RNA, 19 nt, Homo sapiens
  misc_RNA (1)...(19): siRNA sense strand
uggcguggcuuauauuaau

SEQ ID NO: 1847902 - RNA, 19 nt, Homo sapiens
  misc_RNA (1)...(19): siRNA sense strand
agaccuagaagaacaauuu

SEQ ID NO: 1847903 - RNA, 19 nt, Homo sapiens
  misc_RNA (1)...(19): siRNA sense strand
gaaaguaugcugacaaaau

SEQ ID NO: 1847904 - RNA, 19 nt, Homo sapiens
  misc_RNA (1)...(19): siRNA sense strand
uaaugaagauggaaaugag

SEQ ID NO: 1847905 - RNA, 19 nt, Homo sapiens
  misc_RNA (1)...(19): siRNA sense strand
gagcguggcguggcuuaua

SEQ ID NO: 1847906 - RNA, 19 nt, Homo sapiens
  misc_RNA (1)...(19): siRNA sense strand
gcacauccacucuaccaau

SEQ ID NO: 1847907 - RNA, 19 nt, Homo sapiens
  misc_RNA (1)...(19): siRNA sense strand
cugagaacaucaagaaguu

SEQ ID NO: 1847908 - RNA, 19 nt, Homo sapiens
  misc_RNA (1)...(19): siRNA sense strand
aagcugggaugcagaagaa

SEQ ID NO: 1847909 - RNA, 19 nt, Homo sapiens
  misc_RNA (1)...(19): siRNA sense strand
uggcuuuacuggaaacuuu

SEQ ID NO: 1847910 - RNA, 19 nt, Homo sapiens
  misc_RNA (1)...(19): siRNA sense strand
gcuggcggguggcuucuuu

SEQ ID NO: 1847911 - RNA, 19 nt, Homo sapiens
  misc_RNA (1)...(19): siRNA sense strand
gaugcucuguuugauauug

SEQ ID NO: 1847912 - RNA, 19 nt, Homo sapiens
  misc_RNA (1)...(19): siRNA sense strand
gaauuuggucuucuugguu

SEQ ID NO: 1847913 - RNA, 19 nt, Homo sapiens
  misc_RNA (1)...(19): siRNA sense strand
gaacagaacaaaacuuuca

SEQ ID NO: 1847914 - RNA, 19 nt, Homo sapiens
  misc_RNA (1)...(19): siRNA sense strand
caaauugggaucuggaaau

SEQ ID NO: 1847915 - RNA, 19 nt, Homo sapiens
  misc_RNA (1)...(19): siRNA sense strand
cagaggaaauaagguuaaa

SEQ ID NO: 1847916 - RNA, 19 nt, Homo sapiens
  misc_RNA (1)...(19): siRNA sense strand
agagggcgaucuaguguau

SEQ ID NO: 1847917 - RNA, 19 nt, Homo sapiens
  misc_RNA (1)...(19): siRNA sense strand
gauauuguaccaccuuuca

SEQ ID NO: 1847918 - RNA, 19 nt, Homo sapiens
  misc_RNA (1)...(19): siRNA sense strand
caagcagccacaacaagua

SEQ ID NO: 1847919 - RNA, 19 nt, Homo sapiens
  misc_RNA (1)...(19): siRNA sense strand
caaaagcaacccaauagua

SEQ ID NO: 1847920 - RNA, 19 nt, Homo sapiens
  misc_RNA (1)...(19): siRNA sense strand
ugagcuagccaauuccaua

SEQ ID NO: 1847921 - RNA, 19 nt, Homo sapiens
  misc_RNA (1)...(19): siRNA sense strand
cagcggcuauccacuguau

SEQ ID NO: 1847922 - RNA, 19 nt, Homo sapiens
  misc_RNA (1)...(19): siRNA sense strand
cacagaagcuccuagaaaa

SEQ ID NO: 1847923 - RNA, 19 nt, Homo sapiens
  misc_RNA (1)...(19): siRNA sense strand
guggagaccuagaagaaca

SEQ ID NO: 1847924 - RNA, 19 nt, Homo sapiens
  misc_RNA (1)...(19): siRNA sense strand
gugaagagacagauuuaug

SEQ ID NO: 1847925 - RNA, 19 nt, Homo sapiens
  misc_RNA (1)...(19): siRNA sense strand
gaauuuaugaugcucuguu

SEQ ID NO: 1847926 - RNA, 19 nt, Homo sapiens
  misc_RNA (1)...(19): siRNA sense strand
uuaaauaucaccucacugu

SEQ ID NO: 1847927 - RNA, 19 nt, Homo sapiens
  misc_RNA (1)...(19): siRNA sense strand
gcgaucuaguguauguuaa

SEQ ID NO: 1847928 - RNA, 19 nt, Homo sapiens
  misc_RNA (1)...(19): siRNA sense strand
ugaagagacagauuuaugu

SEQ ID NO: 1847929 - RNA, 19 nt, Homo sapiens
  misc_RNA (1)...(19): siRNA sense strand
acacagauaccacauuuag

SEQ ID NO: 1847930 - RNA, 19 nt, Homo sapiens
  misc_RNA (1)...(19): siRNA sense strand
gaaggguggagaccuagaa

SEQ ID NO: 1847931 - RNA, 19 nt, Homo sapiens
  misc_RNA (1)...(19): siRNA sense strand
ugugauagguacucucaga

SEQ ID NO: 1847932 - RNA, 19 nt, Homo sapiens
  misc_RNA (1)...(19): siRNA sense strand
cagguuacccagcaaauga

SEQ ID NO: 1847933 - RNA, 19 nt, Homo sapiens
  misc_RNA (1)...(19): siRNA sense strand
ggcgaucuaguguauguua

SEQ ID NO: 1847934 - RNA, 19 nt, Homo sapiens
  misc_RNA (1)...(19): siRNA sense strand
cugcagagacuuugaguga

SEQ ID NO: 1847935 - RNA, 19 nt, Homo sapiens
  misc_RNA (1)...(19): siRNA sense strand
ggaaucuccuucacgaaac

SEQ ID NO: 1847936 - RNA, 19 nt, Homo sapiens
  misc_RNA (1)...(19): siRNA sense strand
gugagagacuccaggacuu

SEQ ID NO: 1847937 - RNA, 19 nt, Homo sapiens
  misc_RNA (1)...(19): siRNA sense strand
gcuagccaauuccauagug

SEQ ID NO: 1847938 - RNA, 19 nt, Homo sapiens
  misc_RNA (1)...(19): siRNA sense strand
gcaaauugggaucuggaaa

SEQ ID NO: 1847939 - RNA, 19 nt, Homo sapiens
  misc_RNA (1)...(19): siRNA sense strand
aaggaaggguggagaccua

SEQ ID NO: 1847940 - RNA, 19 nt, Homo sapiens
  misc_RNA (1)...(19): siRNA sense strand
gaccuggcuuuacuggaaa

SEQ ID NO: 1847941 - RNA, 19 nt, Homo sapiens
  misc_RNA (1)...(19): siRNA sense strand
gcguggaaauauccuaaau

SEQ ID NO: 1847942 - RNA, 19 nt, Homo sapiens
  misc_RNA (1)...(19): siRNA sense strand
ccaaugaagcuacuaacau

SEQ ID NO: 1847943 - RNA, 19 nt, Homo sapiens
  misc_RNA (1)...(19): siRNA sense strand
uaagaaaguaugcugacaa

SEQ ID NO: 1847944 - RNA, 19 nt, Homo sapiens
  misc_RNA (1)...(19): siRNA sense strand
uguuugagcuagccaauuc

SEQ ID NO: 1847945 - RNA, 19 nt, Homo sapiens
  misc_RNA (1)...(19): siRNA sense strand
gcuuauaggcguggaauug

SEQ ID NO: 1847946 - RNA, 19 nt, Homo sapiens
  misc_RNA (1)...(19): siRNA sense strand
gaguggagcagcuguuguu

SEQ ID NO: 1847947 - RNA, 19 nt, Homo sapiens
  misc_RNA (1)...(19): siRNA sense strand
ugaaacauccacaggaaau

SEQ ID NO: 1847948 - RNA, 19 nt, Homo sapiens
  misc_RNA (1)...(19): siRNA sense strand
gaacgggacaugaaaauca

SEQ ID NO: 1847949 - RNA, 19 nt, Homo sapiens
  misc_RNA (1)...(19): siRNA sense strand
aaauugggaucuggaaaug

SEQ ID NO: 1847950 - RNA, 19 nt, Homo sapiens
  misc_RNA (1)...(19): siRNA sense strand
auucaagacuccuucaaga

SEQ ID NO: 1847951 - RNA, 19 nt, Homo sapiens
  misc_RNA (1)...(19): siRNA sense strand
cauccacucuaccaaugaa

SEQ ID NO: 1847952 - RNA, 19 nt, Homo sapiens
  misc_RNA (1)...(19): siRNA sense strand
gauacuaugaugcacagaa

SEQ ID NO: 1847953 - RNA, 19 nt, Homo sapiens
  misc_RNA (1)...(19): siRNA sense strand
gcugagaacaucaagaagu

SEQ ID NO: 1847954 - RNA, 19 nt, Homo sapiens
  misc_RNA (1)...(19): siRNA sense strand
ccauuaggguuaccagaca

SEQ ID NO: 1847955 - RNA, 19 nt, Homo sapiens
  misc_RNA (1)...(19): siRNA sense strand
cauaugaguugguggaaaa

SEQ ID NO: 1847956 - RNA, 19 nt, Homo sapiens
  misc_RNA (1)...(19): siRNA sense strand
gggcagaggagaauucaag

SEQ ID NO: 1847957 - RNA, 19 nt, Homo sapiens
  misc_RNA (1)...(19): siRNA sense strand
ggguggagaccuagaagaa

SEQ ID NO: 1847958 - RNA, 19 nt, Homo sapiens
  misc_RNA (1)...(19): siRNA sense strand
caaaggagucauucucuac

SEQ ID NO: 1847959 - RNA, 19 nt, Homo sapiens
  misc_RNA (1)...(19): siRNA sense strand
cuggaaagagcauuuauug

SEQ ID NO: 1847960 - RNA, 19 nt, Homo sapiens
  misc_RNA (1)...(19): siRNA sense strand
ggaaaugaagacauacagu

SEQ ID NO: 1847961 - RNA, 19 nt, Homo sapiens
  misc_RNA (1)...(19): siRNA sense strand
guaucacagugucuaugaa

SEQ ID NO: 1847962 - RNA, 19 nt, Homo sapiens
  misc_RNA (1)...(19): siRNA sense strand
gcgacuacauuacggagaa

SEQ ID NO: 1847963 - RNA, 19 nt, Homo sapiens
  misc_RNA (1)...(19): siRNA sense strand
ggacaucuuugugcccuau

SEQ ID NO: 1847964 - RNA, 19 nt, Homo sapiens
  misc_RNA (1)...(19): siRNA sense strand
gcuucuaccuguccuuuga

SEQ ID NO: 1847965 - RNA, 19 nt, Homo sapiens
  misc_RNA (1)...(19): siRNA sense strand
gaacguuucugugccaucu

SEQ ID NO: 1847966 - RNA, 19 nt, Homo sapiens
  misc_RNA (1)...(19): siRNA sense strand
ucaacugggugcugagcua

SEQ ID NO: 1847967 - RNA, 19 nt, Homo sapiens
  misc_RNA (1)...(19): siRNA sense strand
cagcaccgcgacuacauua

SEQ ID NO: 1847968 - RNA, 19 nt, Homo sapiens
  misc_RNA (1)...(19): siRNA sense strand
gcgcgacucggacaucuuu

SEQ ID NO: 1847969 - RNA, 19 nt, Homo sapiens
  misc_RNA (1)...(19): siRNA sense strand
gaaugagagccgauaccaa

SEQ ID NO: 1847970 - RNA, 19 nt, Homo sapiens
  misc_RNA (1)...(19): siRNA sense strand
ccaagucuaugaggaccuu

SEQ ID NO: 1847971 - RNA, 19 nt, Homo sapiens
  misc_RNA (1)...(19): siRNA sense strand
ggaccuugaggguugguuu

SEQ ID NO: 1847972 - RNA, 19 nt, Homo sapiens
  misc_RNA (1)...(19): siRNA sense strand
cgacuacauuacggagaaa

SEQ ID NO: 1847973 - RNA, 19 nt, Homo sapiens
  misc_RNA (1)...(19): siRNA sense strand
ggcacuggcccuucacuga

SEQ ID NO: 1847974 - RNA, 19 nt, Homo sapiens
  misc_RNA (1)...(19): siRNA sense strand
gcaugaaugagagccgaua

SEQ ID NO: 1847975 - RNA, 19 nt, Homo sapiens
  misc_RNA (1)...(19): siRNA sense strand
gccaauggacggccacugu

SEQ ID NO: 1847976 - RNA, 19 nt, Homo sapiens
  misc_RNA (1)...(19): siRNA sense strand
gcuggcggcuuuccucacu

SEQ ID NO: 1847977 - RNA, 19 nt, Homo sapiens
  misc_RNA (1)...(19): siRNA sense strand
cuacauuacggagaaauuc

SEQ ID NO: 1847978 - RNA, 19 nt, Homo sapiens
  misc_RNA (1)...(19): siRNA sense strand
ccgauaccaacgcuucuuu

SEQ ID NO: 1847979 - RNA, 19 nt, Homo sapiens
  misc_RNA (1)...(19): siRNA sense strand
uuuccucacuggcaugaau

SEQ ID NO: 1847980 - RNA, 19 nt, Homo sapiens
  misc_RNA (1)...(19): siRNA sense strand
gaccagaaccacaagcaaa

SEQ ID NO: 1847981 - RNA, 19 nt, Homo sapiens
  misc_RNA (1)...(19): siRNA sense strand
ucuccgaucugcucaucuu

SEQ ID NO: 1847982 - RNA, 19 nt, Homo sapiens
  misc_RNA (1)...(19): siRNA sense strand
gcaccaccaccaaccucua

SEQ ID NO: 1847983 - RNA, 19 nt, Homo sapiens
  misc_RNA (1)...(19): siRNA sense strand
ccacaagcaaaccgugaaa

SEQ ID NO: 1847984 - RNA, 19 nt, Homo sapiens
  misc_RNA (1)...(19): siRNA sense strand
ggaccagaaccacaagcaa

SEQ ID NO: 1847985 - RNA, 19 nt, Homo sapiens
  misc_RNA (1)...(19): siRNA sense strand
ucacgguccucuacagucu

SEQ ID NO: 1847986 - RNA, 19 nt, Homo sapiens
  misc_RNA (1)...(19): siRNA sense strand
cuuccugucuucugucuca

SEQ ID NO: 1847987 - RNA, 19 nt, Homo sapiens
  misc_RNA (1)...(19): siRNA sense strand
gcaaccugcucaccaugcu

SEQ ID NO: 1847988 - RNA, 19 nt, Homo sapiens
  misc_RNA (1)...(19): siRNA sense strand
gcauggccuucuccgaucu

SEQ ID NO: 1847989 - RNA, 19 nt, Homo sapiens
  misc_RNA (1)...(19): siRNA sense strand
ucagggaccagaaccacaa

SEQ ID NO: 1847990 - RNA, 19 nt, Homo sapiens
  misc_RNA (1)...(19): siRNA sense strand
cagcaucuucuucuuccuu

SEQ ID NO: 1847991 - RNA, 19 nt, Homo sapiens
  misc_RNA (1)...(19): siRNA sense strand
ucagugagagcugcaccua

SEQ ID NO: 1847992 - RNA, 19 nt, Homo sapiens
  misc_RNA (1)...(19): siRNA sense strand
gggugaagcuggucaucuu

SEQ ID NO: 1847993 - RNA, 19 nt, Homo sapiens
  misc_RNA (1)...(19): siRNA sense strand
gaccagaaccacaagcaaa

SEQ ID NO: 1847994 - RNA, 19 nt, Homo sapiens
  misc_RNA (1)...(19): siRNA sense strand
ucugcaaacucuuccaauu

SEQ ID NO: 1847995 - RNA, 19 nt, Homo sapiens
  misc_RNA (1)...(19): siRNA sense strand
gaccuccucugcaaacucu

SEQ ID NO: 1847996 - RNA, 19 nt, Homo sapiens
  misc_RNA (1)...(19): siRNA sense strand
gaccuggacugggaugcuu

SEQ ID NO: 1847997 - RNA, 19 nt, Homo sapiens
  misc_RNA (1)...(19): siRNA sense strand
ucuccgaucugcucaucuu

SEQ ID NO: 1847998 - RNA, 19 nt, Homo sapiens
  misc_RNA (1)...(19): siRNA sense strand
gcaccaccaccaaccucua

SEQ ID NO: 1847999 - RNA, 19 nt, Homo sapiens
  misc_RNA (1)...(19): siRNA sense strand
ccacaagcaaaccgugaaa

SEQ ID NO: 1848000 - RNA, 19 nt, Homo sapiens
  misc_RNA (1)...(19): siRNA sense strand
ggaccagaaccacaagcaa

SEQ ID NO: 1848001 - RNA, 19 nt, Homo sapiens
  misc_RNA (1)...(19): siRNA sense strand
ucacgguccucuacagucu

SEQ ID NO: 1848002 - RNA, 19 nt, Homo sapiens
  misc_RNA (1)...(19): siRNA sense strand
gcaaccugcucaccaugcu

SEQ ID NO: 1848003 - RNA, 19 nt, Homo sapiens
  misc_RNA (1)...(19): siRNA sense strand
cuuccugucuucugucuca

SEQ ID NO: 1848004 - RNA, 19 nt, Homo sapiens
  misc_RNA (1)...(19): siRNA sense strand
gcaaacucuuccaauucgu

SEQ ID NO: 1848005 - RNA, 19 nt, Homo sapiens
  misc_RNA (1)...(19): siRNA sense strand
gcauggccuucuccgaucu

SEQ ID NO: 1848006 - RNA, 19 nt, Homo sapiens
  misc_RNA (1)...(19): siRNA sense strand
cugcaaacucuuccaauuc

SEQ ID NO: 1848007 - RNA, 19 nt, Homo sapiens
  misc_RNA (1)...(19): siRNA sense strand
ucagggaccagaaccacaa

SEQ ID NO: 1848008 - RNA, 19 nt, Homo sapiens
  misc_RNA (1)...(19): siRNA sense strand
ugcaaacucuuccaauucg

SEQ ID NO: 1848009 - RNA, 19 nt, Homo sapiens
  misc_RNA (1)...(19): siRNA sense strand
cagcaucuucuucuuccuu

SEQ ID NO: 1848010 - RNA, 19 nt, Homo sapiens
  misc_RNA (1)...(19): siRNA sense strand
ucagugagagcugcaccua

SEQ ID NO: 1848011 - RNA, 19 nt, Homo sapiens
  misc_RNA (1)...(19): siRNA sense strand
cgucugaccucaugagcua

SEQ ID NO: 1848012 - RNA, 19 nt, Homo sapiens
  misc_RNA (1)...(19): siRNA sense strand
gaacagcuacgcauagaag

SEQ ID NO: 1848013 - RNA, 19 nt, Homo sapiens
  misc_RNA (1)...(19): siRNA sense strand
gucagccacuaacaacaua

SEQ ID NO: 1848014 - RNA, 19 nt, Homo sapiens
  misc_RNA (1)...(19): siRNA sense strand
gcauagaagccgggauuga

SEQ ID NO: 1848015 - RNA, 19 nt, Homo sapiens
  misc_RNA (1)...(19): siRNA sense strand
gcaucaaggucuccaaagc

SEQ ID NO: 1848016 - RNA, 19 nt, Homo sapiens
  misc_RNA (1)...(19): siRNA sense strand
gguggaacagcuacgcaua

SEQ ID NO: 1848017 - RNA, 19 nt, Homo sapiens
  misc_RNA (1)...(19): siRNA sense strand
gagcuacugugagcaacau

SEQ ID NO: 1848018 - RNA, 19 nt, Homo sapiens
  misc_RNA (1)...(19): siRNA sense strand
uggaacagcuacgcauaga

SEQ ID NO: 1848019 - RNA, 19 nt, Homo sapiens
  misc_RNA (1)...(19): siRNA sense strand
cccggaagcugguggaaca

SEQ ID NO: 1848020 - RNA, 19 nt, Homo sapiens
  misc_RNA (1)...(19): siRNA sense strand
gcgcaucaaggucuccaaa

SEQ ID NO: 1848021 - RNA, 19 nt, Homo sapiens
  misc_RNA (1)...(19): siRNA sense strand
ggaacagcuacgcauagaa

SEQ ID NO: 1848022 - RNA, 19 nt, Homo sapiens
  misc_RNA (1)...(19): siRNA sense strand
cauagaagccgggauugag

SEQ ID NO: 1848023 - RNA, 19 nt, Homo sapiens
  misc_RNA (1)...(19): siRNA sense strand
acgcauagaagccgggauu

SEQ ID NO: 1848024 - RNA, 19 nt, Homo sapiens
  misc_RNA (1)...(19): siRNA sense strand
caugagcuacugugagcaa

SEQ ID NO: 1848025 - RNA, 19 nt, Homo sapiens
  misc_RNA (1)...(19): siRNA sense strand
ggaagaauaugaagacuca

SEQ ID NO: 1848026 - RNA, 19 nt, Homo sapiens
  misc_RNA (1)...(19): siRNA sense strand
gaagagaacgagaucauuu

SEQ ID NO: 1848027 - RNA, 19 nt, Homo sapiens
  misc_RNA (1)...(19): siRNA sense strand
ccaaugaguuugcugaauu

SEQ ID NO: 1848028 - RNA, 19 nt, Homo sapiens
  misc_RNA (1)...(19): siRNA sense strand
ggaagaaugcagaguauaa

SEQ ID NO: 1848029 - RNA, 19 nt, Homo sapiens
  misc_RNA (1)...(19): siRNA sense strand
ccagaucuaugaauaugua

SEQ ID NO: 1848030 - RNA, 19 nt, Homo sapiens
  misc_RNA (1)...(19): siRNA sense strand
ggaauguugugaauaagaa

SEQ ID NO: 1848031 - RNA, 19 nt, Homo sapiens
  misc_RNA (1)...(19): siRNA sense strand
ucacauaccuguccaucuu

SEQ ID NO: 1848032 - RNA, 19 nt, Homo sapiens
  misc_RNA (1)...(19): siRNA sense strand
cugagaagcuggauuauau

SEQ ID NO: 1848033 - RNA, 19 nt, Homo sapiens
  misc_RNA (1)...(19): siRNA sense strand
uugaguaccuucaggauua

SEQ ID NO: 1848034 - RNA, 19 nt, Homo sapiens
  misc_RNA (1)...(19): siRNA sense strand
gugggaauguugugaauaa

SEQ ID NO: 1848035 - RNA, 19 nt, Homo sapiens
  misc_RNA (1)...(19): siRNA sense strand
cuaaagagaugcucaccaa

SEQ ID NO: 1848036 - RNA, 19 nt, Homo sapiens
  misc_RNA (1)...(19): siRNA sense strand
ggagggauauggucguuau

SEQ ID NO: 1848037 - RNA, 19 nt, Homo sapiens
  misc_RNA (1)...(19): siRNA sense strand
gaagcuggauuauaucaca

SEQ ID NO: 1848038 - RNA, 19 nt, Homo sapiens
  misc_RNA (1)...(19): siRNA sense strand
gaaagucccuggagucacu

SEQ ID NO: 1848039 - RNA, 19 nt, Homo sapiens
  misc_RNA (1)...(19): siRNA sense strand
auugaaaucugcucucuua

SEQ ID NO: 1848040 - RNA, 19 nt, Homo sapiens
  misc_RNA (1)...(19): siRNA sense strand
gagaagaaaugggagaaug

SEQ ID NO: 1848041 - RNA, 19 nt, Homo sapiens
  misc_RNA (1)...(19): siRNA sense strand
guccaucuuugaccaauua

SEQ ID NO: 1848042 - RNA, 19 nt, Homo sapiens
  misc_RNA (1)...(19): siRNA sense strand
uauaagagauaccuagaga

SEQ ID NO: 1848043 - RNA, 19 nt, Homo sapiens
  misc_RNA (1)...(19): siRNA sense strand
caucugagaagcuggauua

SEQ ID NO: 1848044 - RNA, 19 nt, Homo sapiens
  misc_RNA (1)...(19): siRNA sense strand
gagaagagcgagaagaaga

SEQ ID NO: 1848045 - RNA, 19 nt, Homo sapiens
  misc_RNA (1)...(19): siRNA sense strand
ucaaguacauuaaccugaa

SEQ ID NO: 1848046 - RNA, 19 nt, Homo sapiens
  misc_RNA (1)...(19): siRNA sense strand
gcaaaccuauucccuacug

SEQ ID NO: 1848047 - RNA, 19 nt, Homo sapiens
  misc_RNA (1)...(19): siRNA sense strand
gcccagagacuauucagua

SEQ ID NO: 1848048 - RNA, 19 nt, Homo sapiens
  misc_RNA (1)...(19): siRNA sense strand
ugaguuugcugaauucuau

SEQ ID NO: 1848049 - RNA, 19 nt, Homo sapiens
  misc_RNA (1)...(19): siRNA sense strand
agaacgagaucauuuacaa

SEQ ID NO: 1848050 - RNA, 19 nt, Homo sapiens
  misc_RNA (1)...(19): siRNA sense strand
gaaaggaacaaagacauug

SEQ ID NO: 1848051 - RNA, 19 nt, Homo sapiens
  misc_RNA (1)...(19): siRNA sense strand
gaaaucugcucucuuagcu

SEQ ID NO: 1848052 - RNA, 19 nt, Homo sapiens
  misc_RNA (1)...(19): siRNA sense strand
uagagaugcugcuugagua

SEQ ID NO: 1848053 - RNA, 19 nt, Homo sapiens
  misc_RNA (1)...(19): siRNA sense strand
caaugucaguggaauuuga

SEQ ID NO: 1848054 - RNA, 19 nt, Homo sapiens
  misc_RNA (1)...(19): siRNA sense strand
gaaaggaggagcucaaugc

SEQ ID NO: 1848055 - RNA, 19 nt, Homo sapiens
  misc_RNA (1)...(19): siRNA sense strand
caacuacaacugugagauu

SEQ ID NO: 1848056 - RNA, 19 nt, Homo sapiens
  misc_RNA (1)...(19): siRNA sense strand
cgacaucucacucaugaaa

SEQ ID NO: 1848057 - RNA, 19 nt, Homo sapiens
  misc_RNA (1)...(19): siRNA sense strand
aaucugcucucuuagcuuu

SEQ ID NO: 1848058 - RNA, 19 nt, Homo sapiens
  misc_RNA (1)...(19): siRNA sense strand
ugagggauuuguaugauga

SEQ ID NO: 1848059 - RNA, 19 nt, Homo sapiens
  misc_RNA (1)...(19): siRNA sense strand
gauggcagccugacacuga

SEQ ID NO: 1848060 - RNA, 19 nt, Homo sapiens
  misc_RNA (1)...(19): siRNA sense strand
gcaccaagcgagacacuga

SEQ ID NO: 1848061 - RNA, 19 nt, Homo sapiens
  misc_RNA (1)...(19): siRNA sense strand
cgucauggcuaaagagaug

SEQ ID NO: 1848062 - RNA, 19 nt, Homo sapiens
  misc_RNA (1)...(19): siRNA sense strand
aagcccagaucuaugaaua

SEQ ID NO: 1848063 - RNA, 19 nt, Homo sapiens
  misc_RNA (1)...(19): siRNA sense strand
gagaagaagaggaagaaga

SEQ ID NO: 1848064 - RNA, 19 nt, Homo sapiens
  misc_RNA (1)...(19): siRNA sense strand
uaagagauaccuagagaug

SEQ ID NO: 1848065 - RNA, 19 nt, Homo sapiens
  misc_RNA (1)...(19): siRNA sense strand
aagaagagcagaucaguga

SEQ ID NO: 1848066 - RNA, 19 nt, Homo sapiens
  misc_RNA (1)...(19): siRNA sense strand
cuugauaccucuuuguuug

SEQ ID NO: 1848067 - RNA, 19 nt, Homo sapiens
  misc_RNA (1)...(19): siRNA sense strand
gagugaagccucuccaaga

SEQ ID NO: 1848068 - RNA, 19 nt, Homo sapiens
  misc_RNA (1)...(19): siRNA sense strand
gccuaaauaucaacuacaa

SEQ ID NO: 1848069 - RNA, 19 nt, Homo sapiens
  misc_RNA (1)...(19): siRNA sense strand
gaagagcagaucagugaga

SEQ ID NO: 1848070 - RNA, 19 nt, Homo sapiens
  misc_RNA (1)...(19): siRNA sense strand
ggauuuguaugaugauaag

SEQ ID NO: 1848071 - RNA, 19 nt, Homo sapiens
  misc_RNA (1)...(19): siRNA sense strand
cccaaauacugcucacuuu

SEQ ID NO: 1848072 - RNA, 19 nt, Homo sapiens
  misc_RNA (1)...(19): siRNA sense strand
gugggaaccugagggauuu

SEQ ID NO: 1848073 - RNA, 19 nt, Homo sapiens
  misc_RNA (1)...(19): siRNA sense strand
gcuuuaggcuugaaaugug

SEQ ID NO: 1848074 - RNA, 19 nt, Homo sapiens
  misc_RNA (1)...(19): siRNA sense strand
aagagaugcucaccaagaa

SEQ ID NO: 1848075 - RNA, 19 nt, Homo sapiens
  misc_RNA (1)...(19): siRNA sense strand
aaaggaagaaugcagagua

SEQ ID NO: 1848076 - RNA, 19 nt, Homo sapiens
  misc_RNA (1)...(19): siRNA sense strand
ccugaaggcucgagagaau

SEQ ID NO: 1848077 - RNA, 19 nt, Homo sapiens
  misc_RNA (1)...(19): siRNA sense strand
ucacagaugaggagggaua

SEQ ID NO: 1848078 - RNA, 19 nt, Homo sapiens
  misc_RNA (1)...(19): siRNA sense strand
gcccagaucuaugaauaug

SEQ ID NO: 1848079 - RNA, 19 nt, Homo sapiens
  misc_RNA (1)...(19): siRNA sense strand
gaaugcagaguauaagaga

SEQ ID NO: 1848080 - RNA, 19 nt, Homo sapiens
  misc_RNA (1)...(19): siRNA sense strand
caaugaguuugcugaauuc

SEQ ID NO: 1848081 - RNA, 19 nt, Homo sapiens
  misc_RNA (1)...(19): siRNA sense strand
gggccaaacugaaauugca

SEQ ID NO: 1848082 - RNA, 19 nt, Homo sapiens
  misc_RNA (1)...(19): siRNA sense strand
ugaagccucuccaagauca

SEQ ID NO: 1848083 - RNA, 19 nt, Homo sapiens
  misc_RNA (1)...(19): siRNA sense strand
ugauaaggauggauuacga

SEQ ID NO: 1848084 - RNA, 19 nt, Homo sapiens
  misc_RNA (1)...(19): siRNA sense strand
gaaccugagggauuuguau

SEQ ID NO: 1848085 - RNA, 19 nt, Homo sapiens
  misc_RNA (1)...(19): siRNA sense strand
gagugaagaugaagagaac

SEQ ID NO: 1848086 - RNA, 19 nt, Homo sapiens
  misc_RNA (1)...(19): siRNA sense strand
aagagaacgagaucauuua

SEQ ID NO: 1848087 - RNA, 19 nt, Homo sapiens
  misc_RNA (1)...(19): siRNA sense strand
cuucauggccuaaauauca

SEQ ID NO: 1848088 - RNA, 19 nt, Homo sapiens
  misc_RNA (1)...(19): siRNA sense strand
aaagagaugcucaccaaga

SEQ ID NO: 1848089 - RNA, 19 nt, Homo sapiens
  misc_RNA (1)...(19): siRNA sense strand
gagugagagugaagaugaa

SEQ ID NO: 1848090 - RNA, 19 nt, Homo sapiens
  misc_RNA (1)...(19): siRNA sense strand
aggcugaguuugagaagaa

SEQ ID NO: 1848091 - RNA, 19 nt, Homo sapiens
  misc_RNA (1)...(19): siRNA sense strand
agacauugcuuuucuagaa

SEQ ID NO: 1848092 - RNA, 19 nt, Homo sapiens
  misc_RNA (1)...(19): siRNA sense strand
gggaggaguuggcuucucu

SEQ ID NO: 1848093 - RNA, 19 nt, Homo sapiens
  misc_RNA (1)...(19): siRNA sense strand
gcacccaaaugagaucugu

SEQ ID NO: 1848094 - RNA, 19 nt, Homo sapiens
  misc_RNA (1)...(19): siRNA sense strand
acacugaggaagaauauga

SEQ ID NO: 1848095 - RNA, 19 nt, Homo sapiens
  misc_RNA (1)...(19): siRNA sense strand
gcacucgggccaugcaaga

SEQ ID NO: 1848096 - RNA, 19 nt, Homo sapiens
  misc_RNA (1)...(19): siRNA sense strand
ugaaaggaacaaagacauu

SEQ ID NO: 1848097 - RNA, 19 nt, Homo sapiens
  misc_RNA (1)...(19): siRNA sense strand
gagaagcuggauuauauca

SEQ ID NO: 1848098 - RNA, 19 nt, Homo sapiens
  misc_RNA (1)...(19): siRNA sense strand
gaggagggauauggucguu

SEQ ID NO: 1848099 - RNA, 19 nt, Homo sapiens
  misc_RNA (1)...(19): siRNA sense strand
gagagaauccaagugaaga

SEQ ID NO: 1848100 - RNA, 19 nt, Homo sapiens
  misc_RNA (1)...(19): siRNA sense strand
ggaagcacccaaaugagau

SEQ ID NO: 1848101 - RNA, 19 nt, Homo sapiens
  misc_RNA (1)...(19): siRNA sense strand
gccaaugucaguggaauuu

SEQ ID NO: 1848102 - RNA, 19 nt, Homo sapiens
  misc_RNA (1)...(19): siRNA sense strand
aaggaagaaugcagaguau

SEQ ID NO: 1848103 - RNA, 19 nt, Homo sapiens
  misc_RNA (1)...(19): siRNA sense strand
ugacauuccuaaagaaagg

SEQ ID NO: 1848104 - RNA, 19 nt, Homo sapiens
  misc_RNA (1)...(19): siRNA sense strand
gaccaauuauuugacauuc

SEQ ID NO: 1848105 - RNA, 19 nt, Homo sapiens
  misc_RNA (1)...(19): siRNA sense strand
uuacacagauagagugaag

SEQ ID NO: 1848106 - RNA, 19 nt, Homo sapiens
  misc_RNA (1)...(19): siRNA sense strand
ucagugagagugagaguga

SEQ ID NO: 1848107 - RNA, 19 nt, Homo sapiens
  misc_RNA (1)...(19): siRNA sense strand
gauaaggauggauuacgaa

SEQ ID NO: 1848108 - RNA, 19 nt, Homo sapiens
  misc_RNA (1)...(19): siRNA sense strand
gagcgagcccagagacuau

SEQ ID NO: 1848109 - RNA, 19 nt, Homo sapiens
  misc_RNA (1)...(19): siRNA sense strand
gaagaaugcagaguauaag

SEQ ID NO: 1848110 - RNA, 19 nt, Homo sapiens
  misc_RNA (1)...(19): siRNA sense strand
cuucaggauuacacagaua

SEQ ID NO: 1848111 - RNA, 19 nt, Homo sapiens
  misc_RNA (1)...(19): siRNA sense strand
ggaagaagagcagaucagu

SEQ ID NO: 1848112 - RNA, 19 nt, Homo sapiens
  misc_RNA (1)...(19): siRNA sense strand
acacugaaaggaacaaaga

SEQ ID NO: 1848113 - RNA, 19 nt, Homo sapiens
  misc_RNA (1)...(19): siRNA sense strand
ucccuggagucacuugaua

SEQ ID NO: 1848114 - RNA, 19 nt, Homo sapiens
  misc_RNA (1)...(19): siRNA sense strand
gggaauguugugaauaaga

SEQ ID NO: 1848115 - RNA, 19 nt, Homo sapiens
  misc_RNA (1)...(19): siRNA sense strand
gaauaugaagacucaagug

SEQ ID NO: 1848116 - RNA, 19 nt, Homo sapiens
  misc_RNA (1)...(19): siRNA sense strand
agagugagagugaagauga

SEQ ID NO: 1848117 - RNA, 19 nt, Homo sapiens
  misc_RNA (1)...(19): siRNA sense strand
gcgagaagaagaggaagaa

SEQ ID NO: 1848118 - RNA, 19 nt, Homo sapiens
  misc_RNA (1)...(19): siRNA sense strand
cggaagcacccaaaugaga

SEQ ID NO: 1848119 - RNA, 19 nt, Homo sapiens
  misc_RNA (1)...(19): siRNA sense strand
aaugggaccuuuccuggau

SEQ ID NO: 1848120 - RNA, 19 nt, Homo sapiens
  misc_RNA (1)...(19): siRNA sense strand
gggauuuguaugaugauaa

SEQ ID NO: 1848121 - RNA, 19 nt, Homo sapiens
  misc_RNA (1)...(19): siRNA sense strand
ugagaucugugugccaaug

SEQ ID NO: 1848122 - RNA, 19 nt, Homo sapiens
  misc_RNA (1)...(19): siRNA sense strand
uaagcuucauggccuaaau

SEQ ID NO: 1848123 - RNA, 19 nt, Homo sapiens
  misc_RNA (1)...(19): siRNA sense strand
aaggauggauuacgaaagg

SEQ ID NO: 1848124 - RNA, 19 nt, Homo sapiens
  misc_RNA (1)...(19): siRNA sense strand
caagugggaauguugugaa

SEQ ID NO: 1848125 - RNA, 19 nt, Homo sapiens
  misc_RNA (1)...(19): siRNA sense strand
gaaaucagcuuuaguauga

SEQ ID NO: 1848126 - RNA, 19 nt, Homo sapiens
  misc_RNA (1)...(19): siRNA sense strand
ggaaugagcuggagaaauu

SEQ ID NO: 1848127 - RNA, 19 nt, Homo sapiens
  misc_RNA (1)...(19): siRNA sense strand
gaaagaagcucaagaggaa

SEQ ID NO: 1848128 - RNA, 19 nt, Homo sapiens
  misc_RNA (1)...(19): siRNA sense strand
gggaauagcuccaauuaaa

SEQ ID NO: 1848129 - RNA, 19 nt, Homo sapiens
  misc_RNA (1)...(19): siRNA sense strand
gaaaggagcuucugcaaag

SEQ ID NO: 1848130 - RNA, 19 nt, Homo sapiens
  misc_RNA (1)...(19): siRNA sense strand
gaagguaggugaaauugaa

SEQ ID NO: 1848131 - RNA, 19 nt, Homo sapiens
  misc_RNA (1)...(19): siRNA sense strand
ggaagaagauaaugaaguu

SEQ ID NO: 1848132 - RNA, 19 nt, Homo sapiens
  misc_RNA (1)...(19): siRNA sense strand
ggacaggucuuuauuggaa

SEQ ID NO: 1848133 - RNA, 19 nt, Homo sapiens
  misc_RNA (1)...(19): siRNA sense strand
cuaaagagauugagaguuu

SEQ ID NO: 1848134 - RNA, 19 nt, Homo sapiens
  misc_RNA (1)...(19): siRNA sense strand
gaaaguagaguuagaauug

SEQ ID NO: 1848135 - RNA, 19 nt, Homo sapiens
  misc_RNA (1)...(19): siRNA sense strand
gaaagaacccggaaauaaa

SEQ ID NO: 1848136 - RNA, 19 nt, Homo sapiens
  misc_RNA (1)...(19): siRNA sense strand
gaacuagagucucgguaua

SEQ ID NO: 1848137 - RNA, 19 nt, Homo sapiens
  misc_RNA (1)...(19): siRNA sense strand
gcagaaagaugaagcucua

SEQ ID NO: 1848138 - RNA, 19 nt, Homo sapiens
  misc_RNA (1)...(19): siRNA sense strand
gaaagacucucuaagugaa

SEQ ID NO: 1848139 - RNA, 19 nt, Homo sapiens
  misc_RNA (1)...(19): siRNA sense strand
gcacagaguucuacagaga

SEQ ID NO: 1848140 - RNA, 19 nt, Homo sapiens
  misc_RNA (1)...(19): siRNA sense strand
gcaagaggcugauauucaa

SEQ ID NO: 1848141 - RNA, 19 nt, Homo sapiens
  misc_RNA (1)...(19): siRNA sense strand
gaagauaauugcaguguuc

SEQ ID NO: 1848142 - RNA, 19 nt, Homo sapiens
  misc_RNA (1)...(19): siRNA sense strand
cagcaauacuuacagauua

SEQ ID NO: 1848143 - RNA, 19 nt, Homo sapiens
  misc_RNA (1)...(19): siRNA sense strand
aaacagagaugcaacagaa

SEQ ID NO: 1848144 - RNA, 19 nt, Homo sapiens
  misc_RNA (1)...(19): siRNA sense strand
gcaagaagaagguacuuua

SEQ ID NO: 1848145 - RNA, 19 nt, Homo sapiens
  misc_RNA (1)...(19): siRNA sense strand
agaaagaauugcuggauua

SEQ ID NO: 1848146 - RNA, 19 nt, Homo sapiens
  misc_RNA (1)...(19): siRNA sense strand
gaaagagacaaacucauua

SEQ ID NO: 1848147 - RNA, 19 nt, Homo sapiens
  misc_RNA (1)...(19): siRNA sense strand
aaucagaccuugcaagaua

SEQ ID NO: 1848148 - RNA, 19 nt, Homo sapiens
  misc_RNA (1)...(19): siRNA sense strand
gcacaaagcagaaauggaa

SEQ ID NO: 1848149 - RNA, 19 nt, Homo sapiens
  misc_RNA (1)...(19): siRNA sense strand
cuacagagauggaagaauu

SEQ ID NO: 1848150 - RNA, 19 nt, Homo sapiens
  misc_RNA (1)...(19): siRNA sense strand
gaacuucagucaaauaaag

SEQ ID NO: 1848151 - RNA, 19 nt, Homo sapiens
  misc_RNA (1)...(19): siRNA sense strand
gcaggaagcugagcaagaa

SEQ ID NO: 1848152 - RNA, 19 nt, Homo sapiens
  misc_RNA (1)...(19): siRNA sense strand
gagaugcucuucuuucuga

SEQ ID NO: 1848153 - RNA, 19 nt, Homo sapiens
  misc_RNA (1)...(19): siRNA sense strand
gacaauaucugagaaagaa

SEQ ID NO: 1848154 - RNA, 19 nt, Homo sapiens
  misc_RNA (1)...(19): siRNA sense strand
ccaagaaucugacauggaa

SEQ ID NO: 1848155 - RNA, 19 nt, Homo sapiens
  misc_RNA (1)...(19): siRNA sense strand
gaaggaaauugaaucuuug

SEQ ID NO: 1848156 - RNA, 19 nt, Homo sapiens
  misc_RNA (1)...(19): siRNA sense strand
ggaaauagaggcugagaaa

SEQ ID NO: 1848157 - RNA, 19 nt, Homo sapiens
  misc_RNA (1)...(19): siRNA sense strand
gaacagauccauagucuca

SEQ ID NO: 1848158 - RNA, 19 nt, Homo sapiens
  misc_RNA (1)...(19): siRNA sense strand
ggaagaauuuguaaugaug

SEQ ID NO: 1848159 - RNA, 19 nt, Homo sapiens
  misc_RNA (1)...(19): siRNA sense strand
gaaaccagauucucucuca

SEQ ID NO: 1848160 - RNA, 19 nt, Homo sapiens
  misc_RNA (1)...(19): siRNA sense strand
uaaggaagcugcuggaaga

SEQ ID NO: 1848161 - RNA, 19 nt, Homo sapiens
  misc_RNA (1)...(19): siRNA sense strand
gagaagaccugaaccaagu

SEQ ID NO: 1848162 - RNA, 19 nt, Homo sapiens
  misc_RNA (1)...(19): siRNA sense strand
gaaagcagccaacuacaaa

SEQ ID NO: 1848163 - RNA, 19 nt, Homo sapiens
  misc_RNA (1)...(19): siRNA sense strand
ggagaaggaucaacaagug

SEQ ID NO: 1848164 - RNA, 19 nt, Homo sapiens
  misc_RNA (1)...(19): siRNA sense strand
gaaggaacuugaaauaaca

SEQ ID NO: 1848165 - RNA, 19 nt, Homo sapiens
  misc_RNA (1)...(19): siRNA sense strand
gaacaugacaagcagauuu

SEQ ID NO: 1848166 - RNA, 19 nt, Homo sapiens
  misc_RNA (1)...(19): siRNA sense strand
agaauuagcuagcuucaaa

SEQ ID NO: 1848167 - RNA, 19 nt, Homo sapiens
  misc_RNA (1)...(19): siRNA sense strand
gagacaaacucauuacaga

SEQ ID NO: 1848168 - RNA, 19 nt, Homo sapiens
  misc_RNA (1)...(19): siRNA sense strand
gcaauuauccagaaguuaa

SEQ ID NO: 1848169 - RNA, 19 nt, Homo sapiens
  misc_RNA (1)...(19): siRNA sense strand
gaaauuagacucaaagaag

SEQ ID NO: 1848170 - RNA, 19 nt, Homo sapiens
  misc_RNA (1)...(19): siRNA sense strand
gaacagggacucuuaaaca

SEQ ID NO: 1848171 - RNA, 19 nt, Homo sapiens
  misc_RNA (1)...(19): siRNA sense strand
uaaagcaacuggaaaugaa

SEQ ID NO: 1848172 - RNA, 19 nt, Homo sapiens
  misc_RNA (1)...(19): siRNA sense strand
ggagaaauuucgaaaguca

SEQ ID NO: 1848173 - RNA, 19 nt, Homo sapiens
  misc_RNA (1)...(19): siRNA sense strand
aaacuaagguggaaucaga

SEQ ID NO: 1848174 - RNA, 19 nt, Homo sapiens
  misc_RNA (1)...(19): siRNA sense strand
uagaacaucugaggaaaua

SEQ ID NO: 1848175 - RNA, 19 nt, Homo sapiens
  misc_RNA (1)...(19): siRNA sense strand
ggagagaacuguuaaagcu

SEQ ID NO: 1848176 - RNA, 19 nt, Homo sapiens
  misc_RNA (1)...(19): siRNA sense strand
gcacagaggcaaacaagaa

SEQ ID NO: 1848177 - RNA, 19 nt, Homo sapiens
  misc_RNA (1)...(19): siRNA sense strand
gaaggaacuuagcauggua

SEQ ID NO: 1848178 - RNA, 19 nt, Homo sapiens
  misc_RNA (1)...(19): siRNA sense strand
ugagaaagcuaaggaaauu

SEQ ID NO: 1848179 - RNA, 19 nt, Homo sapiens
  misc_RNA (1)...(19): siRNA sense strand
gaagagagugguagaacua

SEQ ID NO: 1848180 - RNA, 19 nt, Homo sapiens
  misc_RNA (1)...(19): siRNA sense strand
cgacaucucucuauaaucu

SEQ ID NO: 1848181 - RNA, 19 nt, Homo sapiens
  misc_RNA (1)...(19): siRNA sense strand
gaagagaggcuuaugaauc

SEQ ID NO: 1848182 - RNA, 19 nt, Homo sapiens
  misc_RNA (1)...(19): siRNA sense strand
uaagagaauugcaaccuaa

SEQ ID NO: 1848183 - RNA, 19 nt, Homo sapiens
  misc_RNA (1)...(19): siRNA sense strand
gagaggaaguuuagugaug

SEQ ID NO: 1848184 - RNA, 19 nt, Homo sapiens
  misc_RNA (1)...(19): siRNA sense strand
ggagauggaacagaaauua

SEQ ID NO: 1848185 - RNA, 19 nt, Homo sapiens
  misc_RNA (1)...(19): siRNA sense strand
caaagcuucuccaagauaa

SEQ ID NO: 1848186 - RNA, 19 nt, Homo sapiens
  misc_RNA (1)...(19): siRNA sense strand
gacaggaagugaaugaauu

SEQ ID NO: 1848187 - RNA, 19 nt, Homo sapiens
  misc_RNA (1)...(19): siRNA sense strand
cagcacaaauucagucuuu

SEQ ID NO: 1848188 - RNA, 19 nt, Homo sapiens
  misc_RNA (1)...(19): siRNA sense strand
guacacagguuaagugcuu

SEQ ID NO: 1848189 - RNA, 19 nt, Homo sapiens
  misc_RNA (1)...(19): siRNA sense strand
ccaaguagcuauugcugaa

SEQ ID NO: 1848190 - RNA, 19 nt, Homo sapiens
  misc_RNA (1)...(19): siRNA sense strand
gcugaaagcugagaaugaa

SEQ ID NO: 1848191 - RNA, 19 nt, Homo sapiens
  misc_RNA (1)...(19): siRNA sense strand
gagaucaccuguggaauga

SEQ ID NO: 1848192 - RNA, 19 nt, Homo sapiens
  misc_RNA (1)...(19): siRNA sense strand
agagaaagaugauuuggaa

SEQ ID NO: 1848193 - RNA, 19 nt, Homo sapiens
  misc_RNA (1)...(19): siRNA sense strand
uaaggcauaucucaaguaa

SEQ ID NO: 1848194 - RNA, 19 nt, Homo sapiens
  misc_RNA (1)...(19): siRNA sense strand
gcaaagaagacuugauuau

SEQ ID NO: 1848195 - RNA, 19 nt, Homo sapiens
  misc_RNA (1)...(19): siRNA sense strand
gaagauacagggcaagauu

SEQ ID NO: 1848196 - RNA, 19 nt, Homo sapiens
  misc_RNA (1)...(19): siRNA sense strand
gcagccaucuacuuucuaa

SEQ ID NO: 1848197 - RNA, 19 nt, Homo sapiens
  misc_RNA (1)...(19): siRNA sense strand
ggaacuugaugaacugaaa

SEQ ID NO: 1848198 - RNA, 19 nt, Homo sapiens
  misc_RNA (1)...(19): siRNA sense strand
gaaggucugugauacucua

SEQ ID NO: 1848199 - RNA, 19 nt, Homo sapiens
  misc_RNA (1)...(19): siRNA sense strand
uaaagcagcuacagaagga

SEQ ID NO: 1848200 - RNA, 19 nt, Homo sapiens
  misc_RNA (1)...(19): siRNA sense strand
gcacaagaccuacauguuc

SEQ ID NO: 1848201 - RNA, 19 nt, Homo sapiens
  misc_RNA (1)...(19): siRNA sense strand
gcaaagagucaguagauug

SEQ ID NO: 1848202 - RNA, 19 nt, Homo sapiens
  misc_RNA (1)...(19): siRNA sense strand
gaaggaaucugaggaagca

SEQ ID NO: 1848203 - RNA, 19 nt, Homo sapiens
  misc_RNA (1)...(19): siRNA sense strand
ggaagaggcaauccaagua

SEQ ID NO: 1848204 - RNA, 19 nt, Homo sapiens
  misc_RNA (1)...(19): siRNA sense strand
gaaauggacaggucuuuau

SEQ ID NO: 1848205 - RNA, 19 nt, Homo sapiens
  misc_RNA (1)...(19): siRNA sense strand
gagggaauagcuccaauua

SEQ ID NO: 1848206 - RNA, 19 nt, Homo sapiens
  misc_RNA (1)...(19): siRNA sense strand
gaagauaaacugaagaaag

SEQ ID NO: 1848207 - RNA, 19 nt, Homo sapiens
  misc_RNA (1)...(19): siRNA sense strand
caaaggaacuucaggaacu

SEQ ID NO: 1848208 - RNA, 19 nt, Homo sapiens
  misc_RNA (1)...(19): siRNA sense strand
acaaauugcuggccuagaa

SEQ ID NO: 1848209 - RNA, 19 nt, Homo sapiens
  misc_RNA (1)...(19): siRNA sense strand
cagaagagguauuucaguu

SEQ ID NO: 1848210 - RNA, 19 nt, Homo sapiens
  misc_RNA (1)...(19): siRNA sense strand
gaagagauggaaauagaaa

SEQ ID NO: 1848211 - RNA, 19 nt, Homo sapiens
  misc_RNA (1)...(19): siRNA sense strand
gaaccaagugauaacaaua

SEQ ID NO: 1848212 - RNA, 19 nt, Homo sapiens
  misc_RNA (1)...(19): siRNA sense strand
aaacgaaugucacugaaga

SEQ ID NO: 1848213 - RNA, 19 nt, Homo sapiens
  misc_RNA (1)...(19): siRNA sense strand
gcuaaagaguguauggaaa

SEQ ID NO: 1848214 - RNA, 19 nt, Homo sapiens
  misc_RNA (1)...(19): siRNA sense strand
gaagagguauuucaguuac

SEQ ID NO: 1848215 - RNA, 19 nt, Homo sapiens
  misc_RNA (1)...(19): siRNA sense strand
gaaaguuaguucuacaaca

SEQ ID NO: 1848216 - RNA, 19 nt, Homo sapiens
  misc_RNA (1)...(19): siRNA sense strand
aaaggaagcuugaggaaca

SEQ ID NO: 1848217 - RNA, 19 nt, Homo sapiens
  misc_RNA (1)...(19): siRNA sense strand
ugagaaaguuugcuaaauc

SEQ ID NO: 1848218 - RNA, 19 nt, Homo sapiens
  misc_RNA (1)...(19): siRNA sense strand
ggaagcugcuggaagaaga

SEQ ID NO: 1848219 - RNA, 19 nt, Homo sapiens
  misc_RNA (1)...(19): siRNA sense strand
ggaagugaaugaauuaagg

SEQ ID NO: 1848220 - RNA, 19 nt, Homo sapiens
  misc_RNA (1)...(19): siRNA sense strand
cagguuaagugcuuuguuu

SEQ ID NO: 1848221 - RNA, 19 nt, Homo sapiens
  misc_RNA (1)...(19): siRNA sense strand
gaacugauccaauauagag

SEQ ID NO: 1848222 - RNA, 19 nt, Homo sapiens
  misc_RNA (1)...(19): siRNA sense strand
aagagaaacuggaugcuuu

SEQ ID NO: 1848223 - RNA, 19 nt, Homo sapiens
  misc_RNA (1)...(19): siRNA sense strand
ucaaaguccugcuagauga

SEQ ID NO: 1848224 - RNA, 19 nt, Homo sapiens
  misc_RNA (1)...(19): siRNA sense strand
caucagguaucaagagaaa

SEQ ID NO: 1848225 - RNA, 19 nt, Homo sapiens
  misc_RNA (1)...(19): siRNA sense strand
ucacauagguguagaaaga

SEQ ID NO: 1848226 - RNA, 19 nt, Homo sapiens
  misc_RNA (1)...(19): siRNA sense strand
cagcagggcuuuagaugua

SEQ ID NO: 1848227 - RNA, 19 nt, Homo sapiens
  misc_RNA (1)...(19): siRNA sense strand
gaccacagcuggacccuuu

SEQ ID NO: 1848228 - RNA, 19 nt, Homo sapiens
  misc_RNA (1)...(19): siRNA sense strand
gaaaugccaucuauuccaa

SEQ ID NO: 1848229 - RNA, 19 nt, Homo sapiens
  misc_RNA (1)...(19): siRNA sense strand
gcucagcgauugauuauuc

SEQ ID NO: 1848230 - RNA, 19 nt, Homo sapiens
  misc_RNA (1)...(19): siRNA sense strand
caaagcaaauucaaggaaa

SEQ ID NO: 1848231 - RNA, 19 nt, Homo sapiens
  misc_RNA (1)...(19): siRNA sense strand
gcgauuagauugcuuaagu

SEQ ID NO: 1848232 - RNA, 19 nt, Homo sapiens
  misc_RNA (1)...(19): siRNA sense strand
gcaugcagcuguaccagaa

SEQ ID NO: 1848233 - RNA, 19 nt, Homo sapiens
  misc_RNA (1)...(19): siRNA sense strand
uaauacagcugguggaguu

SEQ ID NO: 1848234 - RNA, 19 nt, Homo sapiens
  misc_RNA (1)...(19): siRNA sense strand
gaauuuggcaauagugaua

SEQ ID NO: 1848235 - RNA, 19 nt, Homo sapiens
  misc_RNA (1)...(19): siRNA sense strand
ucacagagcauaucaccua

SEQ ID NO: 1848236 - RNA, 19 nt, Homo sapiens
  misc_RNA (1)...(19): siRNA sense strand
cagagcauaugguaucuuu

SEQ ID NO: 1848237 - RNA, 19 nt, Homo sapiens
  misc_RNA (1)...(19): siRNA sense strand
gagcuaugcuguucuccaa

SEQ ID NO: 1848238 - RNA, 19 nt, Homo sapiens
  misc_RNA (1)...(19): siRNA sense strand
cauaacggcucgagauguu

SEQ ID NO: 1848239 - RNA, 19 nt, Homo sapiens
  misc_RNA (1)...(19): siRNA sense strand
gcuaugcuguucuccaauu

SEQ ID NO: 1848240 - RNA, 19 nt, Homo sapiens
  misc_RNA (1)...(19): siRNA sense strand
aagcacauauccugaaauu

SEQ ID NO: 1848241 - RNA, 19 nt, Homo sapiens
  misc_RNA (1)...(19): siRNA sense strand
cuaagaagaucugguuuau

SEQ ID NO: 1848242 - RNA, 19 nt, Homo sapiens
  misc_RNA (1)...(19): siRNA sense strand
uaaaggaacaucaaaggaa

SEQ ID NO: 1848243 - RNA, 19 nt, Homo sapiens
  misc_RNA (1)...(19): siRNA sense strand
gaaagaacagggaaagaag

SEQ ID NO: 1848244 - RNA, 19 nt, Homo sapiens
  misc_RNA (1)...(19): siRNA sense strand
gaagaugacggugaaaugu

SEQ ID NO: 1848245 - RNA, 19 nt, Homo sapiens
  misc_RNA (1)...(19): siRNA sense strand
cgauuagauugcuuaagua

SEQ ID NO: 1848246 - RNA, 19 nt, Homo sapiens
  misc_RNA (1)...(19): siRNA sense strand
ccugaagaaucauuacauu

SEQ ID NO: 1848247 - RNA, 19 nt, Homo sapiens
  misc_RNA (1)...(19): siRNA sense strand
cgaaagaacagggaaagaa

SEQ ID NO: 1848248 - RNA, 19 nt, Homo sapiens
  misc_RNA (1)...(19): siRNA sense strand
ucaagcacauauccugaaa

SEQ ID NO: 1848249 - RNA, 19 nt, Homo sapiens
  misc_RNA (1)...(19): siRNA sense strand
gcaaguugaaacauuauug

SEQ ID NO: 1848250 - RNA, 19 nt, Homo sapiens
  misc_RNA (1)...(19): siRNA sense strand
cuugcaaguugaaacauua

SEQ ID NO: 1848251 - RNA, 19 nt, Homo sapiens
  misc_RNA (1)...(19): siRNA sense strand
gauggccacacaagauuua

SEQ ID NO: 1848252 - RNA, 19 nt, Homo sapiens
  misc_RNA (1)...(19): siRNA sense strand
ccacaaacauggcuaucca

SEQ ID NO: 1848253 - RNA, 19 nt, Homo sapiens
  misc_RNA (1)...(19): siRNA sense strand
uuagauugcuuaaguaugg

SEQ ID NO: 1848254 - RNA, 19 nt, Homo sapiens
  misc_RNA (1)...(19): siRNA sense strand
gcagaccuauuucccaaag

SEQ ID NO: 1848255 - RNA, 19 nt, Homo sapiens
  misc_RNA (1)...(19): siRNA sense strand
gaagaagagcagaguagga

SEQ ID NO: 1848256 - RNA, 19 nt, Homo sapiens
  misc_RNA (1)...(19): siRNA sense strand
guagaaagaacaauagaag

SEQ ID NO: 1848257 - RNA, 19 nt, Homo sapiens
  misc_RNA (1)...(19): siRNA sense strand
ugagaaguauaucagagaa

SEQ ID NO: 1848258 - RNA, 19 nt, Homo sapiens
  misc_RNA (1)...(19): siRNA sense strand
ccaauuacaucuguguugu

SEQ ID NO: 1848259 - RNA, 19 nt, Homo sapiens
  misc_RNA (1)...(19): siRNA sense strand
gugcuaggauugcucucua

SEQ ID NO: 1848260 - RNA, 19 nt, Homo sapiens
  misc_RNA (1)...(19): siRNA sense strand
gaugauggccacacaagau

SEQ ID NO: 1848261 - RNA, 19 nt, Homo sapiens
  misc_RNA (1)...(19): siRNA sense strand
gaggcucagcgauugauua

SEQ ID NO: 1848262 - RNA, 19 nt, Homo sapiens
  misc_RNA (1)...(19): siRNA sense strand
aacuauggauucugcuuua

SEQ ID NO: 1848263 - RNA, 19 nt, Homo sapiens
  misc_RNA (1)...(19): siRNA sense strand
guugucagcagaccuauuu

SEQ ID NO: 1848264 - RNA, 19 nt, Homo sapiens
  misc_RNA (1)...(19): siRNA sense strand
ugccaaauaugaguucuuu

SEQ ID NO: 1848265 - RNA, 19 nt, Homo sapiens
  misc_RNA (1)...(19): siRNA sense strand
ggauggaguuuucuuggua

SEQ ID NO: 1848266 - RNA, 19 nt, Homo sapiens
  misc_RNA (1)...(19): siRNA sense strand
agaauucccugguagcaau

SEQ ID NO: 1848267 - RNA, 19 nt, Homo sapiens
  misc_RNA (1)...(19): siRNA sense strand
ucuaagaagaucugguuua

SEQ ID NO: 1848268 - RNA, 19 nt, Homo sapiens
  misc_RNA (1)...(19): siRNA sense strand
gaagaaggacucgcuugga

SEQ ID NO: 1848269 - RNA, 19 nt, Homo sapiens
  misc_RNA (1)...(19): siRNA sense strand
aaacauggagcaccgacua

SEQ ID NO: 1848270 - RNA, 19 nt, Homo sapiens
  misc_RNA (1)...(19): siRNA sense strand
gaaaagcagaguuauagaa

SEQ ID NO: 1848271 - RNA, 19 nt, Homo sapiens
  misc_RNA (1)...(19): siRNA sense strand
gcagaagaagagcagagua

SEQ ID NO: 1848272 - RNA, 19 nt, Homo sapiens
  misc_RNA (1)...(19): siRNA sense strand
cacacaagauuuacagauc

SEQ ID NO: 1848273 - RNA, 19 nt, Homo sapiens
  misc_RNA (1)...(19): siRNA sense strand
ccaaagcaaauucaaggaa

SEQ ID NO: 1848274 - RNA, 19 nt, Homo sapiens
  misc_RNA (1)...(19): siRNA sense strand
gagcaccgacuaacuaugg

SEQ ID NO: 1848275 - RNA, 19 nt, Homo sapiens
  misc_RNA (1)...(19): siRNA sense strand
uaacuauggauucugcuuu

SEQ ID NO: 1848276 - RNA, 19 nt, Homo sapiens
  misc_RNA (1)...(19): siRNA sense strand
guaccagaauuauaugcau

SEQ ID NO: 1848277 - RNA, 19 nt, Homo sapiens
  misc_RNA (1)...(19): siRNA sense strand
ugacauaacggcucgagau

SEQ ID NO: 1848278 - RNA, 19 nt, Homo sapiens
  misc_RNA (1)...(19): siRNA sense strand
aguagaagaugacggugaa

SEQ ID NO: 1848279 - RNA, 19 nt, Homo sapiens
  misc_RNA (1)...(19): siRNA sense strand
cuaugcuguucuccaauua

SEQ ID NO: 1848280 - RNA, 19 nt, Homo sapiens
  misc_RNA (1)...(19): siRNA sense strand
ugauugaagugcuauccaa

SEQ ID NO: 1848281 - RNA, 19 nt, Homo sapiens
  misc_RNA (1)...(19): siRNA sense strand
gaaaccagcagggcuuuag

SEQ ID NO: 1848282 - RNA, 19 nt, Homo sapiens
  misc_RNA (1)...(19): siRNA sense strand
caaauuauaccaguagaag

SEQ ID NO: 1848283 - RNA, 19 nt, Homo sapiens
  misc_RNA (1)...(19): siRNA sense strand
gcauccauaucaagguaga

SEQ ID NO: 1848284 - RNA, 19 nt, Homo sapiens
  misc_RNA (1)...(19): siRNA sense strand
cagcgaauuuggcaauagu

SEQ ID NO: 1848285 - RNA, 19 nt, Homo sapiens
  misc_RNA (1)...(19): siRNA sense strand
ucaccuaugagaaguauau

SEQ ID NO: 1848286 - RNA, 19 nt, Homo sapiens
  misc_RNA (1)...(19): siRNA sense strand
cagcuguaccagaauuaua

SEQ ID NO: 1848287 - RNA, 19 nt, Homo sapiens
  misc_RNA (1)...(19): siRNA sense strand
agaugacggugaaauguuc

SEQ ID NO: 1848288 - RNA, 19 nt, Homo sapiens
  misc_RNA (1)...(19): siRNA sense strand
guucuuccuugcaaguuga

SEQ ID NO: 1848289 - RNA, 19 nt, Homo sapiens
  misc_RNA (1)...(19): siRNA sense strand
ccacacagauuuugcagau

SEQ ID NO: 1848290 - RNA, 19 nt, Homo sapiens
  misc_RNA (1)...(19): siRNA sense strand
gaaguauaucagagaauuc

SEQ ID NO: 1848291 - RNA, 19 nt, Homo sapiens
  misc_RNA (1)...(19): siRNA sense strand
guucuccaauuacaucugu

SEQ ID NO: 1848292 - RNA, 19 nt, Homo sapiens
  misc_RNA (1)...(19): siRNA sense strand
ccggaaaugccaucuauuc

SEQ ID NO: 1848293 - RNA, 19 nt, Homo sapiens
  misc_RNA (1)...(19): siRNA sense strand
uaucaccuaugagaaguau

SEQ ID NO: 1848294 - RNA, 19 nt, Homo sapiens
  misc_RNA (1)...(19): siRNA sense strand
gagcauaugguaucuuuug

SEQ ID NO: 1848295 - RNA, 19 nt, Homo sapiens
  misc_RNA (1)...(19): siRNA sense strand
aaacauuauugugcuagga

SEQ ID NO: 1848296 - RNA, 19 nt, Homo sapiens
  misc_RNA (1)...(19): siRNA sense strand
aaacuuucguacugucaau

SEQ ID NO: 1848297 - RNA, 19 nt, Homo sapiens
  misc_RNA (1)...(19): siRNA sense strand
guacgggauagucagagua

SEQ ID NO: 1848298 - RNA, 19 nt, Homo sapiens
  misc_RNA (1)...(19): siRNA sense strand
gcgauugauuauucagcaa

SEQ ID NO: 1848299 - RNA, 19 nt, Homo sapiens
  misc_RNA (1)...(19): siRNA sense strand
aguauacagugaagaugaa

SEQ ID NO: 1848300 - RNA, 19 nt, Homo sapiens
  misc_RNA (1)...(19): siRNA sense strand
ccacaaaauuucuagagau

SEQ ID NO: 1848301 - RNA, 19 nt, Homo sapiens
  misc_RNA (1)...(19): siRNA sense strand
cuacuaaaggaacaucaaa

SEQ ID NO: 1848302 - RNA, 19 nt, Homo sapiens
  misc_RNA (1)...(19): siRNA sense strand
gcgaauuuggcaauaguga

SEQ ID NO: 1848303 - RNA, 19 nt, Homo sapiens
  misc_RNA (1)...(19): siRNA sense strand
ggacuuguggauggaguuu

SEQ ID NO: 1848304 - RNA, 19 nt, Homo sapiens
  misc_RNA (1)...(19): siRNA sense strand
gguagaaguggcugcaguu

SEQ ID NO: 1848305 - RNA, 19 nt, Homo sapiens
  misc_RNA (1)...(19): siRNA sense strand
cagaagaagagcagaguag

SEQ ID NO: 1848306 - RNA, 19 nt, Homo sapiens
  misc_RNA (1)...(19): siRNA sense strand
ccacacaagauuuacagau

SEQ ID NO: 1848307 - RNA, 19 nt, Homo sapiens
  misc_RNA (1)...(19): siRNA sense strand
ccuugcaaguugaaacauu

SEQ ID NO: 1848308 - RNA, 19 nt, Homo sapiens
  misc_RNA (1)...(19): siRNA sense strand
gacauaacggcucgagaug

SEQ ID NO: 1848309 - RNA, 19 nt, Homo sapiens
  misc_RNA (1)...(19): siRNA sense strand
cuaaaggaacaucaaagga

SEQ ID NO: 1848310 - RNA, 19 nt, Homo sapiens
  misc_RNA (1)...(19): siRNA sense strand
gagcaccugccucacauag

SEQ ID NO: 1848311 - RNA, 19 nt, Homo sapiens
  misc_RNA (1)...(19): siRNA sense strand
uaacggcucgagauguuug

SEQ ID NO: 1848312 - RNA, 19 nt, Homo sapiens
  misc_RNA (1)...(19): siRNA sense strand
ggugaccgcgauuagauug

SEQ ID NO: 1848313 - RNA, 19 nt, Homo sapiens
  misc_RNA (1)...(19): siRNA sense strand
agaagaugacggugaaaug

SEQ ID NO: 1848314 - RNA, 19 nt, Homo sapiens
  misc_RNA (1)...(19): siRNA sense strand
aauagaagaccacgaacug

SEQ ID NO: 1848315 - RNA, 19 nt, Homo sapiens
  misc_RNA (1)...(19): siRNA sense strand
ggaugauggccacacaaga

SEQ ID NO: 1848316 - RNA, 19 nt, Homo sapiens
  misc_RNA (1)...(19): siRNA sense strand
caucuauuccaaacccuuu

SEQ ID NO: 1848317 - RNA, 19 nt, Homo sapiens
  misc_RNA (1)...(19): siRNA sense strand
gguacgggauagucagagu

SEQ ID NO: 1848318 - RNA, 19 nt, Homo sapiens
  misc_RNA (1)...(19): siRNA sense strand
ccagaaaagcagaguuaua

SEQ ID NO: 1848319 - RNA, 19 nt, Homo sapiens
  misc_RNA (1)...(19): siRNA sense strand
gagaauucccugguagcaa

SEQ ID NO: 1848320 - RNA, 19 nt, Homo sapiens
  misc_RNA (1)...(19): siRNA sense strand
agaaguggcugcaguucac

SEQ ID NO: 1848321 - RNA, 19 nt, Homo sapiens
  misc_RNA (1)...(19): siRNA sense strand
augcauccauaucaaggua

SEQ ID NO: 1848322 - RNA, 19 nt, Homo sapiens
  misc_RNA (1)...(19): siRNA sense strand
aguauggcaugcagcugua

SEQ ID NO: 1848323 - RNA, 19 nt, Homo sapiens
  misc_RNA (1)...(19): siRNA sense strand
gaucuugauguuccggaaa

SEQ ID NO: 1848324 - RNA, 19 nt, Homo sapiens
  misc_RNA (1)...(19): siRNA sense strand
agaccuauuucccaaagca

SEQ ID NO: 1848325 - RNA, 19 nt, Homo sapiens
  misc_RNA (1)...(19): siRNA sense strand
caaguuaccuucaacauuu

SEQ ID NO: 1848326 - RNA, 19 nt, Homo sapiens
  misc_RNA (1)...(19): siRNA sense strand
gaaggagcauguuguguuu

SEQ ID NO: 1848327 - RNA, 19 nt, Homo sapiens
  misc_RNA (1)...(19): siRNA sense strand
gaggaaaucucauggaguu

SEQ ID NO: 1848328 - RNA, 19 nt, Homo sapiens
  misc_RNA (1)...(19): siRNA sense strand
aaacagagaccuuacuuua

SEQ ID NO: 1848329 - RNA, 19 nt, Homo sapiens
  misc_RNA (1)...(19): siRNA sense strand
ggacuacacucaaacuuca

SEQ ID NO: 1848330 - RNA, 19 nt, Homo sapiens
  misc_RNA (1)...(19): siRNA sense strand
gcacgcagucuauaaagua

SEQ ID NO: 1848331 - RNA, 19 nt, Homo sapiens
  misc_RNA (1)...(19): siRNA sense strand
gaaauugaagugaaaggua

SEQ ID NO: 1848332 - RNA, 19 nt, Homo sapiens
  misc_RNA (1)...(19): siRNA sense strand
ggaaaucucauggaguuua

SEQ ID NO: 1848333 - RNA, 19 nt, Homo sapiens
  misc_RNA (1)...(19): siRNA sense strand
gaagugacgaauccuguua

SEQ ID NO: 1848334 - RNA, 19 nt, Homo sapiens
  misc_RNA (1)...(19): siRNA sense strand
gagaaugaccacauacuuu

SEQ ID NO: 1848335 - RNA, 19 nt, Homo sapiens
  misc_RNA (1)...(19): siRNA sense strand
acagagaccuuacuuuaug

SEQ ID NO: 1848336 - RNA, 19 nt, Homo sapiens
  misc_RNA (1)...(19): siRNA sense strand
gaaaucucauggaguuuau

SEQ ID NO: 1848337 - RNA, 19 nt, Homo sapiens
  misc_RNA (1)...(19): siRNA sense strand
gcagauuuaucaacaguca

SEQ ID NO: 1848338 - RNA, 19 nt, Homo sapiens
  misc_RNA (1)...(19): siRNA sense strand
ccaaccagcuggaaaggaa

SEQ ID NO: 1848339 - RNA, 19 nt, Homo sapiens
  misc_RNA (1)...(19): siRNA sense strand
gaacucaauaugcaucuuu

SEQ ID NO: 1848340 - RNA, 19 nt, Homo sapiens
  misc_RNA (1)...(19): siRNA sense strand
ugacaugaaugaagaagug

SEQ ID NO: 1848341 - RNA, 19 nt, Homo sapiens
  misc_RNA (1)...(19): siRNA sense strand
gaacaccuuugagccaauu

SEQ ID NO: 1848342 - RNA, 19 nt, Homo sapiens
  misc_RNA (1)...(19): siRNA sense strand
ccacugggauguugugaga

SEQ ID NO: 1848343 - RNA, 19 nt, Homo sapiens
  misc_RNA (1)...(19): siRNA sense strand
ggagaaauauuugaauguc

SEQ ID NO: 1848344 - RNA, 19 nt, Homo sapiens
  misc_RNA (1)...(19): siRNA sense strand
gagaggagcagaugggaaa

SEQ ID NO: 1848345 - RNA, 19 nt, Homo sapiens
  misc_RNA (1)...(19): siRNA sense strand
aaagguggcugcaggagaa

SEQ ID NO: 1848346 - RNA, 19 nt, Homo sapiens
  misc_RNA (1)...(19): siRNA sense strand
aauaggagaugcuuauaug

SEQ ID NO: 1848347 - RNA, 19 nt, Homo sapiens
  misc_RNA (1)...(19): siRNA sense strand
gcauagucauguuuggaaa

SEQ ID NO: 1848348 - RNA, 19 nt, Homo sapiens
  misc_RNA (1)...(19): siRNA sense strand
ccugaacacucuucucuug

SEQ ID NO: 1848349 - RNA, 19 nt, Homo sapiens
  misc_RNA (1)...(19): siRNA sense strand
gaguauuucuccaucauuc

SEQ ID NO: 1848350 - RNA, 19 nt, Homo sapiens
  misc_RNA (1)...(19): siRNA sense strand
caaaggaagugacgaaucc

SEQ ID NO: 1848351 - RNA, 19 nt, Homo sapiens
  misc_RNA (1)...(19): siRNA sense strand
ggaccagucuuagcagaug

SEQ ID NO: 1848352 - RNA, 19 nt, Homo sapiens
  misc_RNA (1)...(19): siRNA sense strand
gaagaaggagcauguugug

SEQ ID NO: 1848353 - RNA, 19 nt, Homo sapiens
  misc_RNA (1)...(19): siRNA sense strand
gcucaaagaguggcuaauu

SEQ ID NO: 1848354 - RNA, 19 nt, Homo sapiens
  misc_RNA (1)...(19): siRNA sense strand
caucauucauccucaaguu

SEQ ID NO: 1848355 - RNA, 19 nt, Homo sapiens
  misc_RNA (1)...(19): siRNA sense strand
ggaagaaggagcauguugu

SEQ ID NO: 1848356 - RNA, 19 nt, Homo sapiens
  misc_RNA (1)...(19): siRNA sense strand
ccacgguacugcuuguuug

SEQ ID NO: 1848357 - RNA, 19 nt, Homo sapiens
  misc_RNA (1)...(19): siRNA sense strand
cugugaaccuauacaaaua

SEQ ID NO: 1848358 - RNA, 19 nt, Homo sapiens
  misc_RNA (1)...(19): siRNA sense strand
gaagaaaacagagaccuua

SEQ ID NO: 1848359 - RNA, 19 nt, Homo sapiens
  misc_RNA (1)...(19): siRNA sense strand
gaaaagggcaucucaugaa

SEQ ID NO: 1848360 - RNA, 19 nt, Homo sapiens
  misc_RNA (1)...(19): siRNA sense strand
ccaggcagcuuuccucaag

SEQ ID NO: 1848361 - RNA, 19 nt, Homo sapiens
  misc_RNA (1)...(19): siRNA sense strand
cauguuguguuucugauug

SEQ ID NO: 1848362 - RNA, 19 nt, Homo sapiens
  misc_RNA (1)...(19): siRNA sense strand
ggagaaugaccacauacuu

SEQ ID NO: 1848363 - RNA, 19 nt, Homo sapiens
  misc_RNA (1)...(19): siRNA sense strand
uggaagaacucaauaugca

SEQ ID NO: 1848364 - RNA, 19 nt, Homo sapiens
  misc_RNA (1)...(19): siRNA sense strand
gagaagcauagucauguuu

SEQ ID NO: 1848365 - RNA, 19 nt, Homo sapiens
  misc_RNA (1)...(19): siRNA sense strand
ucaagaugaaggagaaaua

SEQ ID NO: 1848366 - RNA, 19 nt, Homo sapiens
  misc_RNA (1)...(19): siRNA sense strand
cucaaagaguggcuaauuu

SEQ ID NO: 1848367 - RNA, 19 nt, Homo sapiens
  misc_RNA (1)...(19): siRNA sense strand
gaagacacgaagagaaaug

SEQ ID NO: 1848368 - RNA, 19 nt, Homo sapiens
  misc_RNA (1)...(19): siRNA sense strand
ggacuccaaacccagaaua

SEQ ID NO: 1848369 - RNA, 19 nt, Homo sapiens
  misc_RNA (1)...(19): siRNA sense strand
ugaauuccauguacuccaa

SEQ ID NO: 1848370 - RNA, 19 nt, Homo sapiens
  misc_RNA (1)...(19): siRNA sense strand
gggugaaauugaagugaaa

SEQ ID NO: 1848371 - RNA, 19 nt, Homo sapiens
  misc_RNA (1)...(19): siRNA sense strand
uggaaaccaugcucaaaga

SEQ ID NO: 1848372 - RNA, 19 nt, Homo sapiens
  misc_RNA (1)...(19): siRNA sense strand
cagcuuuccucaagaugaa

SEQ ID NO: 1848373 - RNA, 19 nt, Homo sapiens
  misc_RNA (1)...(19): siRNA sense strand
agauagagcuguccaacca

SEQ ID NO: 1848374 - RNA, 19 nt, Homo sapiens
  misc_RNA (1)...(19): siRNA sense strand
gaugaaggagaaauauuug

SEQ ID NO: 1848375 - RNA, 19 nt, Homo sapiens
  misc_RNA (1)...(19): siRNA sense strand
ggauugaagagaagacauu

SEQ ID NO: 1848376 - RNA, 19 nt, Homo sapiens
  misc_RNA (1)...(19): siRNA sense strand
gagccaauuuauccugaga

SEQ ID NO: 1848377 - RNA, 19 nt, Homo sapiens
  misc_RNA (1)...(19): siRNA sense strand
aaagguaaagggagaauga

SEQ ID NO: 1848378 - RNA, 19 nt, Homo sapiens
  misc_RNA (1)...(19): siRNA sense strand
cuccaaguuugacagauua

SEQ ID NO: 1848379 - RNA, 19 nt, Homo sapiens
  misc_RNA (1)...(19): siRNA sense strand
gacauuuacuaacaucugu

SEQ ID NO: 1848380 - RNA, 19 nt, Homo sapiens
  misc_RNA (1)...(19): siRNA sense strand
ucaauaugcaucuuucuga

SEQ ID NO: 1848381 - RNA, 19 nt, Homo sapiens
  misc_RNA (1)...(19): siRNA sense strand
auauucaacuggaugagua

SEQ ID NO: 1848382 - RNA, 19 nt, Homo sapiens
  misc_RNA (1)...(19): siRNA sense strand
aagggagaaugaccacaua

SEQ ID NO: 1848383 - RNA, 19 nt, Homo sapiens
  misc_RNA (1)...(19): siRNA sense strand
caacaaagugcaccucagu

SEQ ID NO: 1848384 - RNA, 19 nt, Homo sapiens
  misc_RNA (1)...(19): siRNA sense strand
gcaaaggaagugacgaauc

SEQ ID NO: 1848385 - RNA, 19 nt, Homo sapiens
  misc_RNA (1)...(19): siRNA sense strand
gagcauguuguguuucuga

SEQ ID NO: 1848386 - RNA, 19 nt, Homo sapiens
  misc_RNA (1)...(19): siRNA sense strand
ucaaccaucuugcccugaa

SEQ ID NO: 1848387 - RNA, 19 nt, Homo sapiens
  misc_RNA (1)...(19): siRNA sense strand
caauaggagaugcuuauau

SEQ ID NO: 1848388 - RNA, 19 nt, Homo sapiens
  misc_RNA (1)...(19): siRNA sense strand
ggaagaaggaggagcuaca

SEQ ID NO: 1848389 - RNA, 19 nt, Homo sapiens
  misc_RNA (1)...(19): siRNA sense strand
gagcuggaagaacucaaua

SEQ ID NO: 1848390 - RNA, 19 nt, Homo sapiens
  misc_RNA (1)...(19): siRNA sense strand
ucaaguuaccuucaacauu

SEQ ID NO: 1848391 - RNA, 19 nt, Homo sapiens
  misc_RNA (1)...(19): siRNA sense strand
guacguaccaggacuccaa

SEQ ID NO: 1848392 - RNA, 19 nt, Homo sapiens
  misc_RNA (1)...(19): siRNA sense strand
ugagaagcauagucauguu

SEQ ID NO: 1848393 - RNA, 19 nt, Homo sapiens
  misc_RNA (1)...(19): siRNA sense strand
gccaauuuauccugagaga

SEQ ID NO: 1848394 - RNA, 19 nt, Homo sapiens
  misc_RNA (1)...(19): siRNA sense strand
agucuuagcagauguugua

SEQ ID NO: 1848395 - RNA, 19 nt, Homo sapiens
  misc_RNA (1)...(19): siRNA sense strand
gaaaccaugcucaaagagu

SEQ ID NO: 1848396 - RNA, 19 nt, Homo sapiens
  misc_RNA (1)...(19): siRNA sense strand
ccaaacacguggccaacca

SEQ ID NO: 1848397 - RNA, 19 nt, Homo sapiens
  misc_RNA (1)...(19): siRNA sense strand
gaagcauagucauguuugg

SEQ ID NO: 1848398 - RNA, 19 nt, Homo sapiens
  misc_RNA (1)...(19): siRNA sense strand
gaacacucuucucuugcau

SEQ ID NO: 1848399 - RNA, 19 nt, Homo sapiens
  misc_RNA (1)...(19): siRNA sense strand
uaucaacagucaauuuguc

SEQ ID NO: 1848400 - RNA, 19 nt, Homo sapiens
  misc_RNA (1)...(19): siRNA sense strand
gaagcaagccagagugaac

SEQ ID NO: 1848401 - RNA, 19 nt, Homo sapiens
  misc_RNA (1)...(19): siRNA sense strand
agaaggagcauguuguguu

SEQ ID NO: 1848402 - RNA, 19 nt, Homo sapiens
  misc_RNA (1)...(19): siRNA sense strand
gaacauucagaaguacgua

SEQ ID NO: 1848403 - RNA, 19 nt, Homo sapiens
  misc_RNA (1)...(19): siRNA sense strand
caagaugaaggagaaauau

SEQ ID NO: 1848404 - RNA, 19 nt, Homo sapiens
  misc_RNA (1)...(19): siRNA sense strand
gcagcuuuccucaagauga

SEQ ID NO: 1848405 - RNA, 19 nt, Homo sapiens
  misc_RNA (1)...(19): siRNA sense strand
ugcaagagcuggaagaacu

SEQ ID NO: 1848406 - RNA, 19 nt, Homo sapiens
  misc_RNA (1)...(19): siRNA sense strand
cuuagcagauguuguagga

SEQ ID NO: 1848407 - RNA, 19 nt, Homo sapiens
  misc_RNA (1)...(19): siRNA sense strand
uagugaacgugcugaauuc

SEQ ID NO: 1848408 - RNA, 19 nt, Homo sapiens
  misc_RNA (1)...(19): siRNA sense strand
ucaacuggaugaguauuuc

SEQ ID NO: 1848409 - RNA, 19 nt, Homo sapiens
  misc_RNA (1)...(19): siRNA sense strand
caacacagaaagcauccuu

SEQ ID NO: 1848410 - RNA, 19 nt, Homo sapiens
  misc_RNA (1)...(19): siRNA sense strand
caucuguacugccugugaa

SEQ ID NO: 1848411 - RNA, 19 nt, Homo sapiens
  misc_RNA (1)...(19): siRNA sense strand
gaaaagaagaaaacagaga

SEQ ID NO: 1848412 - RNA, 19 nt, Homo sapiens
  misc_RNA (1)...(19): siRNA sense strand
gcuggaagaacucaauaug

SEQ ID NO: 1848413 - RNA, 19 nt, Homo sapiens
  misc_RNA (1)...(19): siRNA sense strand
ugaacacucuucucuugca

SEQ ID NO: 1848414 - RNA, 19 nt, Homo sapiens
  misc_RNA (1)...(19): siRNA sense strand
gggaagaaggagcauguug

SEQ ID NO: 1848415 - RNA, 19 nt, Homo sapiens
  misc_RNA (1)...(19): siRNA sense strand
gggcucaguucaaccaucu

SEQ ID NO: 1848416 - RNA, 19 nt, Homo sapiens
  misc_RNA (1)...(19): siRNA sense strand
cuucuaggauggaaaguca

SEQ ID NO: 1848417 - RNA, 19 nt, Homo sapiens
  misc_RNA (1)...(19): siRNA sense strand
ggaagugacgaauccuguu

SEQ ID NO: 1848418 - RNA, 19 nt, Homo sapiens
  misc_RNA (1)...(19): siRNA sense strand
ggaaaagggcaucucauga

SEQ ID NO: 1848419 - RNA, 19 nt, Homo sapiens
  misc_RNA (1)...(19): siRNA sense strand
aaacaauaggagaugcuua

SEQ ID NO: 1848420 - RNA, 19 nt, Homo sapiens
  misc_RNA (1)...(19): siRNA sense strand
gaaacaauaggagaugcuu

SEQ ID NO: 1848421 - RNA, 19 nt, Homo sapiens
  misc_RNA (1)...(19): siRNA sense strand
acuccaaguuugacagauu

SEQ ID NO: 1848422 - RNA, 19 nt, Homo sapiens
  misc_RNA (1)...(19): siRNA sense strand
cugaagacacgaagagaaa

SEQ ID NO: 1848423 - RNA, 19 nt, Homo sapiens
  misc_RNA (1)...(19): siRNA sense strand
guaaucauggacauucuug

SEQ ID NO: 1848424 - RNA, 19 nt, Homo sapiens
  misc_RNA (1)...(19): siRNA sense strand
aaacuucaaggccagauga

SEQ ID NO: 1848425 - RNA, 19 nt, Homo sapiens
  misc_RNA (1)...(19): siRNA sense strand
ggauguagcugucaacugu

SEQ ID NO: 1848426 - RNA, 19 nt, Homo sapiens
  misc_RNA (1)...(19): siRNA sense strand
gcaaacagcucuggcucua

SEQ ID NO: 1848427 - RNA, 19 nt, Homo sapiens
  misc_RNA (1)...(19): siRNA sense strand
uagcaagacguacaacuua

SEQ ID NO: 1848428 - RNA, 19 nt, Homo sapiens
  misc_RNA (1)...(19): siRNA sense strand
gcaagacguacaacuuaaa

SEQ ID NO: 1848429 - RNA, 19 nt, Homo sapiens
  misc_RNA (1)...(19): siRNA sense strand
gccaagaaguuaggaaaca

SEQ ID NO: 1848430 - RNA, 19 nt, Homo sapiens
  misc_RNA (1)...(19): siRNA sense strand
ccaagaaguuaggaaacaa

SEQ ID NO: 1848431 - RNA, 19 nt, Homo sapiens
  misc_RNA (1)...(19): siRNA sense strand
ggaucuggcucccauaggu

SEQ ID NO: 1848432 - RNA, 19 nt, Homo sapiens
  misc_RNA (1)...(19): siRNA sense strand
cagccgacgugaccucuga

SEQ ID NO: 1848433 - RNA, 19 nt, Homo sapiens
  misc_RNA (1)...(19): siRNA sense strand
ugaccagccucccagagaa

SEQ ID NO: 1848434 - RNA, 19 nt, Homo sapiens
  misc_RNA (1)...(19): siRNA sense strand
ugagaaggaugugcaaaca

SEQ ID NO: 1848435 - RNA, 19 nt, Homo sapiens
  misc_RNA (1)...(19): siRNA sense strand
ggcccaagccaagaaguua

SEQ ID NO: 1848436 - RNA, 19 nt, Homo sapiens
  misc_RNA (1)...(19): siRNA sense strand
gaucuggcucccauaggua

SEQ ID NO: 1848437 - RNA, 19 nt, Homo sapiens
  misc_RNA (1)...(19): siRNA sense strand
gcaugacacugcccauugc

SEQ ID NO: 1848438 - RNA, 19 nt, Homo sapiens
  misc_RNA (1)...(19): siRNA sense strand
ccugguggcuggugagaug

SEQ ID NO: 1848439 - RNA, 19 nt, Homo sapiens
  misc_RNA (1)...(19): siRNA sense strand
agacguacaacuuaaagaa

SEQ ID NO: 1848440 - RNA, 19 nt, Homo sapiens
  misc_RNA (1)...(19): siRNA sense strand
aagaagggccagacccaua

SEQ ID NO: 1848441 - RNA, 19 nt, Homo sapiens
  misc_RNA (1)...(19): siRNA sense strand
uggacaagcugcauacucu

SEQ ID NO: 1848442 - RNA, 19 nt, Homo sapiens
  misc_RNA (1)...(19): siRNA sense strand
gggagccucugcugugcuu

SEQ ID NO: 1848443 - RNA, 19 nt, Homo sapiens
  misc_RNA (1)...(19): siRNA sense strand
ccagcgaguucuugaugug

SEQ ID NO: 1848444 - RNA, 19 nt, Homo sapiens
  misc_RNA (1)...(19): siRNA sense strand
gcaucgcgguggcuagcaa

SEQ ID NO: 1848445 - RNA, 19 nt, Homo sapiens
  misc_RNA (1)...(19): siRNA sense strand
agcaagacguacaacuuaa

SEQ ID NO: 1848446 - RNA, 19 nt, Homo sapiens
  misc_RNA (1)...(19): siRNA sense strand
cgagaacccauuccucaau

SEQ ID NO: 1848447 - RNA, 19 nt, Homo sapiens
  misc_RNA (1)...(19): siRNA sense strand
ccagacccauaccuuggaa

SEQ ID NO: 1848448 - RNA, 19 nt, Homo sapiens
  misc_RNA (1)...(19): siRNA sense strand
gggaauagugggcaugaca

SEQ ID NO: 1848449 - RNA, 19 nt, Homo sapiens
  misc_RNA (1)...(19): siRNA sense strand
cgacgugaccucugagaag

SEQ ID NO: 1848450 - RNA, 19 nt, Homo sapiens
  misc_RNA (1)...(19): siRNA sense strand
gaccagccucccagagaaa

SEQ ID NO: 1848451 - RNA, 19 nt, Homo sapiens
  misc_RNA (1)...(19): siRNA sense strand
gagaugggccagaaugaac

SEQ ID NO: 1848452 - RNA, 19 nt, Homo sapiens
  misc_RNA (1)...(19): siRNA sense strand
gcgaguucuugaugugaau

SEQ ID NO: 1848453 - RNA, 19 nt, Homo sapiens
  misc_RNA (1)...(19): siRNA sense strand
ggugagaugggccagaaug

SEQ ID NO: 1848454 - RNA, 19 nt, Homo sapiens
  misc_RNA (1)...(19): siRNA sense strand
uacaggccaucaucgagaa

SEQ ID NO: 1848455 - RNA, 19 nt, Homo sapiens
  misc_RNA (1)...(19): siRNA sense strand
cuagcaagacguacaacuu

SEQ ID NO: 1848456 - RNA, 19 nt, Homo sapiens
  misc_RNA (1)...(19): siRNA sense strand
caagacguacaacuuaaag

SEQ ID NO: 1848457 - RNA, 19 nt, Homo sapiens
  misc_RNA (1)...(19): siRNA sense strand
caucaucgagaacccauuc

SEQ ID NO: 1848458 - RNA, 19 nt, Homo sapiens
  misc_RNA (1)...(19): siRNA sense strand
augggcaccuucaauguga

SEQ ID NO: 1848459 - RNA, 19 nt, Homo sapiens
  misc_RNA (1)...(19): siRNA sense strand
ugagaugggccagaaugaa

SEQ ID NO: 1848460 - RNA, 19 nt, Homo sapiens
  misc_RNA (1)...(19): siRNA sense strand
gggaggcccaagccaagaa

SEQ ID NO: 1848461 - RNA, 19 nt, Homo sapiens
  misc_RNA (1)...(19): siRNA sense strand
gugagaugggccagaauga

SEQ ID NO: 1848462 - RNA, 19 nt, Homo sapiens
  misc_RNA (1)...(19): siRNA sense strand
gcccauugcucgggaucug

SEQ ID NO: 1848463 - RNA, 19 nt, Homo sapiens
  misc_RNA (1)...(19): siRNA sense strand
aagccaagaaguuaggaaa

SEQ ID NO: 1848464 - RNA, 19 nt, Homo sapiens
  misc_RNA (1)...(19): siRNA sense strand
gacguacaacuuaaagaag

SEQ ID NO: 1848465 - RNA, 19 nt, Homo sapiens
  misc_RNA (1)...(19): siRNA sense strand
ccagagaaagugugcaacu

SEQ ID NO: 1848466 - RNA, 19 nt, Homo sapiens
  misc_RNA (1)...(19): siRNA sense strand
auagguauccgggugauga

SEQ ID NO: 1848467 - RNA, 19 nt, Homo sapiens
  misc_RNA (1)...(19): siRNA sense strand
caugggcaccuucaaugug

SEQ ID NO: 1848468 - RNA, 19 nt, Homo sapiens
  misc_RNA (1)...(19): siRNA sense strand
ggaaugggcuaaauauauu

SEQ ID NO: 1848469 - RNA, 19 nt, Homo sapiens
  misc_RNA (1)...(19): siRNA sense strand
gcaaaugauugagcaaaua

SEQ ID NO: 1848470 - RNA, 19 nt, Homo sapiens
  misc_RNA (1)...(19): siRNA sense strand
gcacugacauaaacguuaa

SEQ ID NO: 1848471 - RNA, 19 nt, Homo sapiens
  misc_RNA (1)...(19): siRNA sense strand
cagcaucucuccaaacaaa

SEQ ID NO: 1848472 - RNA, 19 nt, Homo sapiens
  misc_RNA (1)...(19): siRNA sense strand
acaaagagauccaugaugu

SEQ ID NO: 1848473 - RNA, 19 nt, Homo sapiens
  misc_RNA (1)...(19): siRNA sense strand
agagauccaugauguauaa

SEQ ID NO: 1848474 - RNA, 19 nt, Homo sapiens
  misc_RNA (1)...(19): siRNA sense strand
caaaauagcugcaaaccaa

SEQ ID NO: 1848475 - RNA, 19 nt, Homo sapiens
  misc_RNA (1)...(19): siRNA sense strand
caaugaguaugcuuguuua

SEQ ID NO: 1848476 - RNA, 19 nt, Homo sapiens
  misc_RNA (1)...(19): siRNA sense strand
aaaugaacgugacagaaua

SEQ ID NO: 1848477 - RNA, 19 nt, Homo sapiens
  misc_RNA (1)...(19): siRNA sense strand
gauccaugauguauaaaga

SEQ ID NO: 1848478 - RNA, 19 nt, Homo sapiens
  misc_RNA (1)...(19): siRNA sense strand
gugcaaggguuucuucaga

SEQ ID NO: 1848479 - RNA, 19 nt, Homo sapiens
  misc_RNA (1)...(19): siRNA sense strand
ucaaugaucggcaguauga

SEQ ID NO: 1848480 - RNA, 19 nt, Homo sapiens
  misc_RNA (1)...(19): siRNA sense strand
agaauaagcaccagaagaa

SEQ ID NO: 1848481 - RNA, 19 nt, Homo sapiens
  misc_RNA (1)...(19): siRNA sense strand
gaacgugacagaauaagca

SEQ ID NO: 1848482 - RNA, 19 nt, Homo sapiens
  misc_RNA (1)...(19): siRNA sense strand
gggcuaagcgauccaguaa

SEQ ID NO: 1848483 - RNA, 19 nt, Homo sapiens
  misc_RNA (1)...(19): siRNA sense strand
ccaaucguguucuagauga

SEQ ID NO: 1848484 - RNA, 19 nt, Homo sapiens
  misc_RNA (1)...(19): siRNA sense strand
ggugaugucugugaaucua

SEQ ID NO: 1848485 - RNA, 19 nt, Homo sapiens
  misc_RNA (1)...(19): siRNA sense strand
gcaagaacaguacaaaaua

SEQ ID NO: 1848486 - RNA, 19 nt, Homo sapiens
  misc_RNA (1)...(19): siRNA sense strand
gcuaagcgauccaguaaaa

SEQ ID NO: 1848487 - RNA, 19 nt, Homo sapiens
  misc_RNA (1)...(19): siRNA sense strand
gcuuggagcuacaaagaga

SEQ ID NO: 1848488 - RNA, 19 nt, Homo sapiens
  misc_RNA (1)...(19): siRNA sense strand
guaagagucacguuuauuc

SEQ ID NO: 1848489 - RNA, 19 nt, Homo sapiens
  misc_RNA (1)...(19): siRNA sense strand
aaaccaagcaucagucauu

SEQ ID NO: 1848490 - RNA, 19 nt, Homo sapiens
  misc_RNA (1)...(19): siRNA sense strand
gcugugaaguugagauuag

SEQ ID NO: 1848491 - RNA, 19 nt, Homo sapiens
  misc_RNA (1)...(19): siRNA sense strand
ugaguaugcuuguuuaaag

SEQ ID NO: 1848492 - RNA, 19 nt, Homo sapiens
  misc_RNA (1)...(19): siRNA sense strand
caaagagauccaugaugua

SEQ ID NO: 1848493 - RNA, 19 nt, Homo sapiens
  misc_RNA (1)...(19): siRNA sense strand
agaagaagcacauuugaug

SEQ ID NO: 1848494 - RNA, 19 nt, Homo sapiens
  misc_RNA (1)...(19): siRNA sense strand
ggcaaaugauugagcaaau

SEQ ID NO: 1848495 - RNA, 19 nt, Homo sapiens
  misc_RNA (1)...(19): siRNA sense strand
gguuagaccauuucaagaa

SEQ ID NO: 1848496 - RNA, 19 nt, Homo sapiens
  misc_RNA (1)...(19): siRNA sense strand
agagucacguuuauucuug

SEQ ID NO: 1848497 - RNA, 19 nt, Homo sapiens
  misc_RNA (1)...(19): siRNA sense strand
ggacagagcaacaggaaaa

SEQ ID NO: 1848498 - RNA, 19 nt, Homo sapiens
  misc_RNA (1)...(19): siRNA sense strand
uggaaugggcuaaauauau

SEQ ID NO: 1848499 - RNA, 19 nt, Homo sapiens
  misc_RNA (1)...(19): siRNA sense strand
gacaaucuacuucaggaaa

SEQ ID NO: 1848500 - RNA, 19 nt, Homo sapiens
  misc_RNA (1)...(19): siRNA sense strand
gaauuaccauuggaugauc

SEQ ID NO: 1848501 - RNA, 19 nt, Homo sapiens
  misc_RNA (1)...(19): siRNA sense strand
gaucucaacuccugaaacc

SEQ ID NO: 1848502 - RNA, 19 nt, Homo sapiens
  misc_RNA (1)...(19): siRNA sense strand
caaaaggaaucaauguaga

SEQ ID NO: 1848503 - RNA, 19 nt, Homo sapiens
  misc_RNA (1)...(19): siRNA sense strand
acaaggcucugggcaagaa

SEQ ID NO: 1848504 - RNA, 19 nt, Homo sapiens
  misc_RNA (1)...(19): siRNA sense strand
gcucugggcaagaacagua

SEQ ID NO: 1848505 - RNA, 19 nt, Homo sapiens
  misc_RNA (1)...(19): siRNA sense strand
agacgcagcauucguaaga

SEQ ID NO: 1848506 - RNA, 19 nt, Homo sapiens
  misc_RNA (1)...(19): siRNA sense strand
gagcaucacguggcaaaug

SEQ ID NO: 1848507 - RNA, 19 nt, Homo sapiens
  misc_RNA (1)...(19): siRNA sense strand
ugaaacagcagcucuuagu

SEQ ID NO: 1848508 - RNA, 19 nt, Homo sapiens
  misc_RNA (1)...(19): siRNA sense strand
gcaaaccaagcaucaguca

SEQ ID NO: 1848509 - RNA, 19 nt, Homo sapiens
  misc_RNA (1)...(19): siRNA sense strand
ucacguggcaaaugauuga

SEQ ID NO: 1848510 - RNA, 19 nt, Homo sapiens
  misc_RNA (1)...(19): siRNA sense strand
aaagagauccaugauguau

SEQ ID NO: 1848511 - RNA, 19 nt, Homo sapiens
  misc_RNA (1)...(19): siRNA sense strand
gguggaaugggcuaaauau

SEQ ID NO: 1848512 - RNA, 19 nt, Homo sapiens
  misc_RNA (1)...(19): siRNA sense strand
ccaagcaucagucauuuca

SEQ ID NO: 1848513 - RNA, 19 nt, Homo sapiens
  misc_RNA (1)...(19): siRNA sense strand
gaucagguggcacuguuga

SEQ ID NO: 1848514 - RNA, 19 nt, Homo sapiens
  misc_RNA (1)...(19): siRNA sense strand
cagaauaagcaccagaaga

SEQ ID NO: 1848515 - RNA, 19 nt, Homo sapiens
  misc_RNA (1)...(19): siRNA sense strand
aagcaucagucauuucaca

SEQ ID NO: 1848516 - RNA, 19 nt, Homo sapiens
  misc_RNA (1)...(19): siRNA sense strand
cccauuaacuggacaaacu

SEQ ID NO: 1848517 - RNA, 19 nt, Homo sapiens
  misc_RNA (1)...(19): siRNA sense strand
ccagaagaagcacauuuga

SEQ ID NO: 1848518 - RNA, 19 nt, Homo sapiens
  misc_RNA (1)...(19): siRNA sense strand
uaugaaacagcagcucuua

SEQ ID NO: 1848519 - RNA, 19 nt, Homo sapiens
  misc_RNA (1)...(19): siRNA sense strand
gaguaugcuuguuuaaagg

SEQ ID NO: 1848520 - RNA, 19 nt, Homo sapiens
  misc_RNA (1)...(19): siRNA sense strand
gacagaauaagcaccagaa

SEQ ID NO: 1848521 - RNA, 19 nt, Homo sapiens
  misc_RNA (1)...(19): siRNA sense strand
acaaucuacuucaggaaau

SEQ ID NO: 1848522 - RNA, 19 nt, Homo sapiens
  misc_RNA (1)...(19): siRNA sense strand
gcuacaaagagauccauga

SEQ ID NO: 1848523 - RNA, 19 nt, Homo sapiens
  misc_RNA (1)...(19): siRNA sense strand
aaccaagcaucagucauuu

SEQ ID NO: 1848524 - RNA, 19 nt, Homo sapiens
  misc_RNA (1)...(19): siRNA sense strand
caagaacaguacaaaauag

SEQ ID NO: 1848525 - RNA, 19 nt, Homo sapiens
  misc_RNA (1)...(19): siRNA sense strand
ucaacugucugugugcuau

SEQ ID NO: 1848526 - RNA, 19 nt, Homo sapiens
  misc_RNA (1)...(19): siRNA sense strand
gaaacagcagcucuuaguc

SEQ ID NO: 1848527 - RNA, 19 nt, Homo sapiens
  misc_RNA (1)...(19): siRNA sense strand
caaucuacuucaggaaaug

SEQ ID NO: 1848528 - RNA, 19 nt, Homo sapiens
  misc_RNA (1)...(19): siRNA sense strand
ggccaaucguguucuagau

SEQ ID NO: 1848529 - RNA, 19 nt, Homo sapiens
  misc_RNA (1)...(19): siRNA sense strand
guggaaugggcuaaauaua

SEQ ID NO: 1848530 - RNA, 19 nt, Homo sapiens
  misc_RNA (1)...(19): siRNA sense strand
acaccagcaucucuccaaa

SEQ ID NO: 1848531 - RNA, 19 nt, Homo sapiens
  misc_RNA (1)...(19): siRNA sense strand
gugaauuaccauuggauga

SEQ ID NO: 1848532 - RNA, 19 nt, Homo sapiens
  misc_RNA (1)...(19): siRNA sense strand
caaaugauugagcaaauac

SEQ ID NO: 1848533 - RNA, 19 nt, Homo sapiens
  misc_RNA (1)...(19): siRNA sense strand
caccagaagaagcacauuu

SEQ ID NO: 1848534 - RNA, 19 nt, Homo sapiens
  misc_RNA (1)...(19): siRNA sense strand
ugauugagcaaauacaguu

SEQ ID NO: 1848535 - RNA, 19 nt, Homo sapiens
  misc_RNA (1)...(19): siRNA sense strand
aacagcagcucuuagucuu

SEQ ID NO: 1848536 - RNA, 19 nt, Homo sapiens
  misc_RNA (1)...(19): siRNA sense strand
ggacaaaaggaaucaaugu

SEQ ID NO: 1848537 - RNA, 19 nt, Homo sapiens
  misc_RNA (1)...(19): siRNA sense strand
gcucuuagucuugguggaa

SEQ ID NO: 1848538 - RNA, 19 nt, Homo sapiens
  misc_RNA (1)...(19): siRNA sense strand
aaacagcagcucuuagucu

SEQ ID NO: 1848539 - RNA, 19 nt, Homo sapiens
  misc_RNA (1)...(19): siRNA sense strand
cagaagaagcacauuugau

SEQ ID NO: 1848540 - RNA, 19 nt, Homo sapiens
  misc_RNA (1)...(19): siRNA sense strand
ccgcaacagcugugaaguu

SEQ ID NO: 1848541 - RNA, 19 nt, Homo sapiens
  misc_RNA (1)...(19): siRNA sense strand
cuacaaagagauccaugau

SEQ ID NO: 1848542 - RNA, 19 nt, Homo sapiens
  misc_RNA (1)...(19): siRNA sense strand
ugaugucugugaaucuaug

SEQ ID NO: 1848543 - RNA, 19 nt, Homo sapiens
  misc_RNA (1)...(19): siRNA sense strand
gacaaaaggaaucaaugua

SEQ ID NO: 1848544 - RNA, 19 nt, Homo sapiens
  misc_RNA (1)...(19): siRNA sense strand
agcaucacguggcaaauga

SEQ ID NO: 1848545 - RNA, 19 nt, Homo sapiens
  misc_RNA (1)...(19): siRNA sense strand
ucguaagagucacguuuau

SEQ ID NO: 1848546 - RNA, 19 nt, Homo sapiens
  misc_RNA (1)...(19): siRNA sense strand
gaauaagcaccagaagaag

SEQ ID NO: 1848547 - RNA, 19 nt, Homo sapiens
  misc_RNA (1)...(19): siRNA sense strand
ccauuaacuggacaaacua

SEQ ID NO: 1848548 - RNA, 19 nt, Homo sapiens
  misc_RNA (1)...(19): siRNA sense strand
cgccagaucucagucucaa

SEQ ID NO: 1848549 - RNA, 19 nt, Homo sapiens
  misc_RNA (1)...(19): siRNA sense strand
ggacaaacuauacuuuuag

SEQ ID NO: 1848550 - RNA, 19 nt, Homo sapiens
  misc_RNA (1)...(19): siRNA sense strand
ucucaagacccauuaacug

SEQ ID NO: 1848551 - RNA, 19 nt, Homo sapiens
  misc_RNA (1)...(19): siRNA sense strand
gauugagcaaauacaguuu

SEQ ID NO: 1848552 - RNA, 19 nt, Homo sapiens
  misc_RNA (1)...(19): siRNA sense strand
cagagcaucacguggcaaa

SEQ ID NO: 1848553 - RNA, 19 nt, Homo sapiens
  misc_RNA (1)...(19): siRNA sense strand
ugaauuaccauuggaugau

SEQ ID NO: 1848554 - RNA, 19 nt, Homo sapiens
  misc_RNA (1)...(19): siRNA sense strand
aaugaacgugacagaauaa

SEQ ID NO: 1848555 - RNA, 19 nt, Homo sapiens
  misc_RNA (1)...(19): siRNA sense strand
guauuggugaugucuguga

SEQ ID NO: 1848556 - RNA, 19 nt, Homo sapiens
  misc_RNA (1)...(19): siRNA sense strand
cguaagagucacguuuauu

SEQ ID NO: 1848557 - RNA, 19 nt, Homo sapiens
  misc_RNA (1)...(19): siRNA sense strand
accagcaucucuccaaaca

SEQ ID NO: 1848558 - RNA, 19 nt, Homo sapiens
  misc_RNA (1)...(19): siRNA sense strand
ucaucuccaucauccaaug

SEQ ID NO: 1848559 - RNA, 19 nt, Homo sapiens
  misc_RNA (1)...(19): siRNA sense strand
uuggaggacuacaucaaug

SEQ ID NO: 1848560 - RNA, 19 nt, Homo sapiens
  misc_RNA (1)...(19): siRNA sense strand
gccaaucguguucuagaug

SEQ ID NO: 1848561 - RNA, 19 nt, Homo sapiens
  misc_RNA (1)...(19): siRNA sense strand
gauuagccguguggccaau

SEQ ID NO: 1848562 - RNA, 19 nt, Homo sapiens
  misc_RNA (1)...(19): siRNA sense strand
cagcugugaaguugagauu

SEQ ID NO: 1848563 - RNA, 19 nt, Homo sapiens
  misc_RNA (1)...(19): siRNA sense strand
gcagcauucguaagaguca

SEQ ID NO: 1848564 - RNA, 19 nt, Homo sapiens
  misc_RNA (1)...(19): siRNA sense strand
auauauuccugccuucugu

SEQ ID NO: 1848565 - RNA, 19 nt, Homo sapiens
  misc_RNA (1)...(19): siRNA sense strand
cagguucagucggcaaugu

SEQ ID NO: 1848566 - RNA, 19 nt, Homo sapiens
  misc_RNA (1)...(19): siRNA sense strand
aagaagcuguacaaaauga

SEQ ID NO: 1848567 - RNA, 19 nt, Homo sapiens
  misc_RNA (1)...(19): siRNA sense strand
gcaacauccccuccauuaa

SEQ ID NO: 1848568 - RNA, 19 nt, Homo sapiens
  misc_RNA (1)...(19): siRNA sense strand
caaauagggucaaagaauu

SEQ ID NO: 1848569 - RNA, 19 nt, Homo sapiens
  misc_RNA (1)...(19): siRNA sense strand
gaaaugguuuacagguuua

SEQ ID NO: 1848570 - RNA, 19 nt, Homo sapiens
  misc_RNA (1)...(19): siRNA sense strand
uaacugaacugcgggauaa

SEQ ID NO: 1848571 - RNA, 19 nt, Homo sapiens
  misc_RNA (1)...(19): siRNA sense strand
gaagaagucucuccacagu

SEQ ID NO: 1848572 - RNA, 19 nt, Homo sapiens
  misc_RNA (1)...(19): siRNA sense strand
ccacgaagcuguuucacaa

SEQ ID NO: 1848573 - RNA, 19 nt, Homo sapiens
  misc_RNA (1)...(19): siRNA sense strand
gggaauggcuacaugcuuu

SEQ ID NO: 1848574 - RNA, 19 nt, Homo sapiens
  misc_RNA (1)...(19): siRNA sense strand
ggaauggcauccugugaaa

SEQ ID NO: 1848575 - RNA, 19 nt, Homo sapiens
  misc_RNA (1)...(19): siRNA sense strand
agagaugacugaagaagua

SEQ ID NO: 1848576 - RNA, 19 nt, Homo sapiens
  misc_RNA (1)...(19): siRNA sense strand
uaaacucacucagguguua

SEQ ID NO: 1848577 - RNA, 19 nt, Homo sapiens
  misc_RNA (1)...(19): siRNA sense strand
gaaugacccuccuucaaga

SEQ ID NO: 1848578 - RNA, 19 nt, Homo sapiens
  misc_RNA (1)...(19): siRNA sense strand
gcaaauagggucaaagaau

SEQ ID NO: 1848579 - RNA, 19 nt, Homo sapiens
  misc_RNA (1)...(19): siRNA sense strand
ugaaaugguuuacagguuu

SEQ ID NO: 1848580 - RNA, 19 nt, Homo sapiens
  misc_RNA (1)...(19): siRNA sense strand
gagagcaucuuuucacuua

SEQ ID NO: 1848581 - RNA, 19 nt, Homo sapiens
  misc_RNA (1)...(19): siRNA sense strand
ugacucagcuccuaaugaa

SEQ ID NO: 1848582 - RNA, 19 nt, Homo sapiens
  misc_RNA (1)...(19): siRNA sense strand
caaauguguugaagaugua

SEQ ID NO: 1848583 - RNA, 19 nt, Homo sapiens
  misc_RNA (1)...(19): siRNA sense strand
gaacaagccagcaagcaaa

SEQ ID NO: 1848584 - RNA, 19 nt, Homo sapiens
  misc_RNA (1)...(19): siRNA sense strand
gcuugaaggugcugaaauu

SEQ ID NO: 1848585 - RNA, 19 nt, Homo sapiens
  misc_RNA (1)...(19): siRNA sense strand
cuacaaacccaaauuauga

SEQ ID NO: 1848586 - RNA, 19 nt, Homo sapiens
  misc_RNA (1)...(19): siRNA sense strand
cagcagauccuauugauga

SEQ ID NO: 1848587 - RNA, 19 nt, Homo sapiens
  misc_RNA (1)...(19): siRNA sense strand
cuacacaacuugaagcuau

SEQ ID NO: 1848588 - RNA, 19 nt, Homo sapiens
  misc_RNA (1)...(19): siRNA sense strand
guaaagauguugugauggu

SEQ ID NO: 1848589 - RNA, 19 nt, Homo sapiens
  misc_RNA (1)...(19): siRNA sense strand
gaaagaucuugauguaauc

SEQ ID NO: 1848590 - RNA, 19 nt, Homo sapiens
  misc_RNA (1)...(19): siRNA sense strand
ggucaaacaucugcaaaug

SEQ ID NO: 1848591 - RNA, 19 nt, Homo sapiens
  misc_RNA (1)...(19): siRNA sense strand
gaagauguacugaaacuca

SEQ ID NO: 1848592 - RNA, 19 nt, Homo sapiens
  misc_RNA (1)...(19): siRNA sense strand
aaaccagauugaugacuua

SEQ ID NO: 1848593 - RNA, 19 nt, Homo sapiens
  misc_RNA (1)...(19): siRNA sense strand
gcaaccuucuuugaaauuu

SEQ ID NO: 1848594 - RNA, 19 nt, Homo sapiens
  misc_RNA (1)...(19): siRNA sense strand
cuaaagaagccaaacuaua

SEQ ID NO: 1848595 - RNA, 19 nt, Homo sapiens
  misc_RNA (1)...(19): siRNA sense strand
ggaaagaaccaagauuguu

SEQ ID NO: 1848596 - RNA, 19 nt, Homo sapiens
  misc_RNA (1)...(19): siRNA sense strand
caaaccagauugaugacuu

SEQ ID NO: 1848597 - RNA, 19 nt, Homo sapiens
  misc_RNA (1)...(19): siRNA sense strand
ucacucagguguuaagaga

SEQ ID NO: 1848598 - RNA, 19 nt, Homo sapiens
  misc_RNA (1)...(19): siRNA sense strand
caagauuguucuaaaggaa

SEQ ID NO: 1848599 - RNA, 19 nt, Homo sapiens
  misc_RNA (1)...(19): siRNA sense strand
gaggaaguuuggauuauag

SEQ ID NO: 1848600 - RNA, 19 nt, Homo sapiens
  misc_RNA (1)...(19): siRNA sense strand
agaagucucuccacaguug

SEQ ID NO: 1848601 - RNA, 19 nt, Homo sapiens
  misc_RNA (1)...(19): siRNA sense strand
ugaaggugcugaaauuaau

SEQ ID NO: 1848602 - RNA, 19 nt, Homo sapiens
  misc_RNA (1)...(19): siRNA sense strand
ggacuguagcuucuauuaa

SEQ ID NO: 1848603 - RNA, 19 nt, Homo sapiens
  misc_RNA (1)...(19): siRNA sense strand
gaacugcgggauaaaguga

SEQ ID NO: 1848604 - RNA, 19 nt, Homo sapiens
  misc_RNA (1)...(19): siRNA sense strand
ucucguaccugcaugauug

SEQ ID NO: 1848605 - RNA, 19 nt, Homo sapiens
  misc_RNA (1)...(19): siRNA sense strand
caucagagccuuagguaga

SEQ ID NO: 1848606 - RNA, 19 nt, Homo sapiens
  misc_RNA (1)...(19): siRNA sense strand
gauguaaucacaauuccua

SEQ ID NO: 1848607 - RNA, 19 nt, Homo sapiens
  misc_RNA (1)...(19): siRNA sense strand
gacuguagcuucuauuaag

SEQ ID NO: 1848608 - RNA, 19 nt, Homo sapiens
  misc_RNA (1)...(19): siRNA sense strand
cugaagaaguagauuauga

SEQ ID NO: 1848609 - RNA, 19 nt, Homo sapiens
  misc_RNA (1)...(19): siRNA sense strand
caugcaguguuucagauua

SEQ ID NO: 1848610 - RNA, 19 nt, Homo sapiens
  misc_RNA (1)...(19): siRNA sense strand
uaugcaaccuucuuugaaa

SEQ ID NO: 1848611 - RNA, 19 nt, Homo sapiens
  misc_RNA (1)...(19): siRNA sense strand
guaaucacaauuccuagua

SEQ ID NO: 1848612 - RNA, 19 nt, Homo sapiens
  misc_RNA (1)...(19): siRNA sense strand
uaguaaagauguugugaug

SEQ ID NO: 1848613 - RNA, 19 nt, Homo sapiens
  misc_RNA (1)...(19): siRNA sense strand
agaaguagauuaugauguc

SEQ ID NO: 1848614 - RNA, 19 nt, Homo sapiens
  misc_RNA (1)...(19): siRNA sense strand
gaaggugcugaaauuaaua

SEQ ID NO: 1848615 - RNA, 19 nt, Homo sapiens
  misc_RNA (1)...(19): siRNA sense strand
guggaaagguguuugacuu

SEQ ID NO: 1848616 - RNA, 19 nt, Homo sapiens
  misc_RNA (1)...(19): siRNA sense strand
agaggaaguuuggauuaua

SEQ ID NO: 1848617 - RNA, 19 nt, Homo sapiens
  misc_RNA (1)...(19): siRNA sense strand
gaaaacgaccacucaauaa

SEQ ID NO: 1848618 - RNA, 19 nt, Homo sapiens
  misc_RNA (1)...(19): siRNA sense strand
gaaauggaagaacaaguug

SEQ ID NO: 1848619 - RNA, 19 nt, Homo sapiens
  misc_RNA (1)...(19): siRNA sense strand
cacaaucucuccaggaaug

SEQ ID NO: 1848620 - RNA, 19 nt, Homo sapiens
  misc_RNA (1)...(19): siRNA sense strand
caacagcagauccuauuga

SEQ ID NO: 1848621 - RNA, 19 nt, Homo sapiens
  misc_RNA (1)...(19): siRNA sense strand
ugacugaagaaguagauua

SEQ ID NO: 1848622 - RNA, 19 nt, Homo sapiens
  misc_RNA (1)...(19): siRNA sense strand
gauaauagagugguugguu

SEQ ID NO: 1848623 - RNA, 19 nt, Homo sapiens
  misc_RNA (1)...(19): siRNA sense strand
ggaacaagccagcaagcaa

SEQ ID NO: 1848624 - RNA, 19 nt, Homo sapiens
  misc_RNA (1)...(19): siRNA sense strand
gaacauccggucaaacauc

SEQ ID NO: 1848625 - RNA, 19 nt, Homo sapiens
  misc_RNA (1)...(19): siRNA sense strand
uuaacaagguaccuagaaa

SEQ ID NO: 1848626 - RNA, 19 nt, Homo sapiens
  misc_RNA (1)...(19): siRNA sense strand
gccacaaucucuccaggaa

SEQ ID NO: 1848627 - RNA, 19 nt, Homo sapiens
  misc_RNA (1)...(19): siRNA sense strand
gaagcuguuucacaaaugg

SEQ ID NO: 1848628 - RNA, 19 nt, Homo sapiens
  misc_RNA (1)...(19): siRNA sense strand
ggacguugaugcuacaaac

SEQ ID NO: 1848629 - RNA, 19 nt, Homo sapiens
  misc_RNA (1)...(19): siRNA sense strand
gaagaaguagauuaugaug

SEQ ID NO: 1848630 - RNA, 19 nt, Homo sapiens
  misc_RNA (1)...(19): siRNA sense strand
ccaagauuguucuaaagga

SEQ ID NO: 1848631 - RNA, 19 nt, Homo sapiens
  misc_RNA (1)...(19): siRNA sense strand
guuuacagguuuacugcua

SEQ ID NO: 1848632 - RNA, 19 nt, Homo sapiens
  misc_RNA (1)...(19): siRNA sense strand
uaaagauguugugauggua

SEQ ID NO: 1848633 - RNA, 19 nt, Homo sapiens
  misc_RNA (1)...(19): siRNA sense strand
gcuacaaacccaaauuaug

SEQ ID NO: 1848634 - RNA, 19 nt, Homo sapiens
  misc_RNA (1)...(19): siRNA sense strand
caacuugaagcuauucuug

SEQ ID NO: 1848635 - RNA, 19 nt, Homo sapiens
  misc_RNA (1)...(19): siRNA sense strand
gacccuccuucaagagaua

SEQ ID NO: 1848636 - RNA, 19 nt, Homo sapiens
  misc_RNA (1)...(19): siRNA sense strand
gaaagaggagcugauacuu

SEQ ID NO: 1848637 - RNA, 19 nt, Homo sapiens
  misc_RNA (1)...(19): siRNA sense strand
guacugaaacucauugaca

SEQ ID NO: 1848638 - RNA, 19 nt, Homo sapiens
  misc_RNA (1)...(19): siRNA sense strand
gguaguguuucagauauau

SEQ ID NO: 1848639 - RNA, 19 nt, Homo sapiens
  misc_RNA (1)...(19): siRNA sense strand
caccaaaccagauugauga

SEQ ID NO: 1848640 - RNA, 19 nt, Homo sapiens
  misc_RNA (1)...(19): siRNA sense strand
ggugauguucguccaauaa

SEQ ID NO: 1848641 - RNA, 19 nt, Homo sapiens
  misc_RNA (1)...(19): siRNA sense strand
uguugaagauguacugaaa

SEQ ID NO: 1848642 - RNA, 19 nt, Homo sapiens
  misc_RNA (1)...(19): siRNA sense strand
cagcaagaacuuagagaaa

SEQ ID NO: 1848643 - RNA, 19 nt, Homo sapiens
  misc_RNA (1)...(19): siRNA sense strand
gcacggcccagucaauuuc

SEQ ID NO: 1848644 - RNA, 19 nt, Homo sapiens
  misc_RNA (1)...(19): siRNA sense strand
gcaaaucaacccgaagaga

SEQ ID NO: 1848645 - RNA, 19 nt, Homo sapiens
  misc_RNA (1)...(19): siRNA sense strand
agaaauggaagaacaaguu

SEQ ID NO: 1848646 - RNA, 19 nt, Homo sapiens
  misc_RNA (1)...(19): siRNA sense strand
caggaaagaaccaagauug

SEQ ID NO: 1848647 - RNA, 19 nt, Homo sapiens
  misc_RNA (1)...(19): siRNA sense strand
cuaaugaaaugguuuacag

SEQ ID NO: 1848648 - RNA, 19 nt, Homo sapiens
  misc_RNA (1)...(19): siRNA sense strand
uagaggaaguuuggauuau

SEQ ID NO: 1848649 - RNA, 19 nt, Homo sapiens
  misc_RNA (1)...(19): siRNA sense strand
ccagauugaugacuuagag

SEQ ID NO: 1848650 - RNA, 19 nt, Homo sapiens
  misc_RNA (1)...(19): siRNA sense strand
caaaugaaagaucuugaug

SEQ ID NO: 1848651 - RNA, 19 nt, Homo sapiens
  misc_RNA (1)...(19): siRNA sense strand
gaaugguaguguuucagau

SEQ ID NO: 1848652 - RNA, 19 nt, Homo sapiens
  misc_RNA (1)...(19): siRNA sense strand
acucagguguuaagagauu

SEQ ID NO: 1848653 - RNA, 19 nt, Homo sapiens
  misc_RNA (1)...(19): siRNA sense strand
uaggauaugugugugugua

SEQ ID NO: 1848654 - RNA, 19 nt, Homo sapiens
  misc_RNA (1)...(19): siRNA sense strand
cuaauugugugaaagaagu

SEQ ID NO: 1848655 - RNA, 19 nt, Homo sapiens
  misc_RNA (1)...(19): siRNA sense strand
gaugucgauucauaugcua

SEQ ID NO: 1848656 - RNA, 19 nt, Homo sapiens
  misc_RNA (1)...(19): siRNA sense strand
cuccacaguuguuuacuuu

SEQ ID NO: 1848657 - RNA, 19 nt, Homo sapiens
  misc_RNA (1)...(19): siRNA sense strand
cagaacauccggucaaaca

SEQ ID NO: 1848658 - RNA, 19 nt, Homo sapiens
  misc_RNA (1)...(19): siRNA sense strand
aaagguguuugacuugcua

SEQ ID NO: 1848659 - RNA, 19 nt, Homo sapiens
  misc_RNA (1)...(19): siRNA sense strand
gaaagguguuugacuugcu

SEQ ID NO: 1848660 - RNA, 19 nt, Homo sapiens
  misc_RNA (1)...(19): siRNA sense strand
uacuauggguggugacuuu

SEQ ID NO: 1848661 - RNA, 19 nt, Homo sapiens
  misc_RNA (1)...(19): siRNA sense strand
cuacaugcuuugcuuaugg

SEQ ID NO: 1848662 - RNA, 19 nt, Homo sapiens
  misc_RNA (1)...(19): siRNA sense strand
uuagaggaaguuuggauua

SEQ ID NO: 1848663 - RNA, 19 nt, Homo sapiens
  misc_RNA (1)...(19): siRNA sense strand
gaaacucaaaugaaagauc

SEQ ID NO: 1848664 - RNA, 19 nt, Homo sapiens
  misc_RNA (1)...(19): siRNA sense strand
cgaagcuguuucacaaaug

SEQ ID NO: 1848665 - RNA, 19 nt, Homo sapiens
  misc_RNA (1)...(19): siRNA sense strand
ggaacgggaggucaaaugu

SEQ ID NO: 1848666 - RNA, 19 nt, Homo sapiens
  misc_RNA (1)...(19): siRNA sense strand
gcuaaagaagccaaacuau

SEQ ID NO: 1848667 - RNA, 19 nt, Homo sapiens
  misc_RNA (1)...(19): siRNA sense strand
gaagaucacagggcagugu

SEQ ID NO: 1848668 - RNA, 19 nt, Homo sapiens
  misc_RNA (1)...(19): siRNA sense strand
gcagucaggucaaagaaua

SEQ ID NO: 1848669 - RNA, 19 nt, Homo sapiens
  misc_RNA (1)...(19): siRNA sense strand
gaacuggcaugauagauga

SEQ ID NO: 1848670 - RNA, 19 nt, Homo sapiens
  misc_RNA (1)...(19): siRNA sense strand
ugacaaggaugaagaaauu

SEQ ID NO: 1848671 - RNA, 19 nt, Homo sapiens
  misc_RNA (1)...(19): siRNA sense strand
caacagacauguagcaguu

SEQ ID NO: 1848672 - RNA, 19 nt, Homo sapiens
  misc_RNA (1)...(19): siRNA sense strand
gaaccacuauuguaauuug

SEQ ID NO: 1848673 - RNA, 19 nt, Homo sapiens
  misc_RNA (1)...(19): siRNA sense strand
gcaggaacgucuaagagua

SEQ ID NO: 1848674 - RNA, 19 nt, Homo sapiens
  misc_RNA (1)...(19): siRNA sense strand
ugagggaacuggcaugaua

SEQ ID NO: 1848675 - RNA, 19 nt, Homo sapiens
  misc_RNA (1)...(19): siRNA sense strand
gaauaugaauugcuuagug

SEQ ID NO: 1848676 - RNA, 19 nt, Homo sapiens
  misc_RNA (1)...(19): siRNA sense strand
gaauugcugugggaaauaa

SEQ ID NO: 1848677 - RNA, 19 nt, Homo sapiens
  misc_RNA (1)...(19): siRNA sense strand
gugcugagauugauucuga

SEQ ID NO: 1848678 - RNA, 19 nt, Homo sapiens
  misc_RNA (1)...(19): siRNA sense strand
acaaacagcuugaugacaa

SEQ ID NO: 1848679 - RNA, 19 nt, Homo sapiens
  misc_RNA (1)...(19): siRNA sense strand
caugauagaugaagaguuc

SEQ ID NO: 1848680 - RNA, 19 nt, Homo sapiens
  misc_RNA (1)...(19): siRNA sense strand
uaagauaagggaccuguua

SEQ ID NO: 1848681 - RNA, 19 nt, Homo sapiens
  misc_RNA (1)...(19): siRNA sense strand
gaaauuaaccagcaaaguc

SEQ ID NO: 1848682 - RNA, 19 nt, Homo sapiens
  misc_RNA (1)...(19): siRNA sense strand
uaagggaccuguuagaugu

SEQ ID NO: 1848683 - RNA, 19 nt, Homo sapiens
  misc_RNA (1)...(19): siRNA sense strand
gaagaaagugugaagaaga

SEQ ID NO: 1848684 - RNA, 19 nt, Homo sapiens
  misc_RNA (1)...(19): siRNA sense strand
gaagggaucaagacaauau

SEQ ID NO: 1848685 - RNA, 19 nt, Homo sapiens
  misc_RNA (1)...(19): siRNA sense strand
gagaugaaguagaagcaaa

SEQ ID NO: 1848686 - RNA, 19 nt, Homo sapiens
  misc_RNA (1)...(19): siRNA sense strand
ggaccuggcuacaagaguu

SEQ ID NO: 1848687 - RNA, 19 nt, Homo sapiens
  misc_RNA (1)...(19): siRNA sense strand
guccaagccuuaugcauuu

SEQ ID NO: 1848688 - RNA, 19 nt, Homo sapiens
  misc_RNA (1)...(19): siRNA sense strand
caaagaauauggccagaag

SEQ ID NO: 1848689 - RNA, 19 nt, Homo sapiens
  misc_RNA (1)...(19): siRNA sense strand
gcaagaaguagaucgcaua

SEQ ID NO: 1848690 - RNA, 19 nt, Homo sapiens
  misc_RNA (1)...(19): siRNA sense strand
gcaagacucuacauuagca

SEQ ID NO: 1848691 - RNA, 19 nt, Homo sapiens
  misc_RNA (1)...(19): siRNA sense strand
ggaguuaacugcagaacag

SEQ ID NO: 1848692 - RNA, 19 nt, Homo sapiens
  misc_RNA (1)...(19): siRNA sense strand
ucagaaaucggcaacuuua

SEQ ID NO: 1848693 - RNA, 19 nt, Homo sapiens
  misc_RNA (1)...(19): siRNA sense strand
gaguauagaugcugagcuu

SEQ ID NO: 1848694 - RNA, 19 nt, Homo sapiens
  misc_RNA (1)...(19): siRNA sense strand
gcaaguguauaaugacugu

SEQ ID NO: 1848695 - RNA, 19 nt, Homo sapiens
  misc_RNA (1)...(19): siRNA sense strand
agaaguagaucgcauaaag

SEQ ID NO: 1848696 - RNA, 19 nt, Homo sapiens
  misc_RNA (1)...(19): siRNA sense strand
ucaggaaguugaagacaaa

SEQ ID NO: 1848697 - RNA, 19 nt, Homo sapiens
  misc_RNA (1)...(19): siRNA sense strand
ugacaagaauccuucaaga

SEQ ID NO: 1848698 - RNA, 19 nt, Homo sapiens
  misc_RNA (1)...(19): siRNA sense strand
aaaccgaguucccuaugua

SEQ ID NO: 1848699 - RNA, 19 nt, Homo sapiens
  misc_RNA (1)...(19): siRNA sense strand
caagaauagugcaagauau

SEQ ID NO: 1848700 - RNA, 19 nt, Homo sapiens
  misc_RNA (1)...(19): siRNA sense strand
ccagaaggcaugggaauua

SEQ ID NO: 1848701 - RNA, 19 nt, Homo sapiens
  misc_RNA (1)...(19): siRNA sense strand
gggagacggugccuauuga

SEQ ID NO: 1848702 - RNA, 19 nt, Homo sapiens
  misc_RNA (1)...(19): siRNA sense strand
ccaagaauagugcaagaua

SEQ ID NO: 1848703 - RNA, 19 nt, Homo sapiens
  misc_RNA (1)...(19): siRNA sense strand
acaaguacaucgccaaguu

SEQ ID NO: 1848704 - RNA, 19 nt, Homo sapiens
  misc_RNA (1)...(19): siRNA sense strand
cagaagggaucaagacaau

SEQ ID NO: 1848705 - RNA, 19 nt, Homo sapiens
  misc_RNA (1)...(19): siRNA sense strand
ugauuuagcugguagugaa

SEQ ID NO: 1848706 - RNA, 19 nt, Homo sapiens
  misc_RNA (1)...(19): siRNA sense strand
uaaaagaccuugcagaaau

SEQ ID NO: 1848707 - RNA, 19 nt, Homo sapiens
  misc_RNA (1)...(19): siRNA sense strand
uagaagaacuugcugucaa

SEQ ID NO: 1848708 - RNA, 19 nt, Homo sapiens
  misc_RNA (1)...(19): siRNA sense strand
aaagucaacugguagagaa

SEQ ID NO: 1848709 - RNA, 19 nt, Homo sapiens
  misc_RNA (1)...(19): siRNA sense strand
uauaaugacugugcaaaga

SEQ ID NO: 1848710 - RNA, 19 nt, Homo sapiens
  misc_RNA (1)...(19): siRNA sense strand
gcacagauugcuaaaccua

SEQ ID NO: 1848711 - RNA, 19 nt, Homo sapiens
  misc_RNA (1)...(19): siRNA sense strand
gaaaaggagcacuuaaaua

SEQ ID NO: 1848712 - RNA, 19 nt, Homo sapiens
  misc_RNA (1)...(19): siRNA sense strand
caagagaaaguccaugaaa

SEQ ID NO: 1848713 - RNA, 19 nt, Homo sapiens
  misc_RNA (1)...(19): siRNA sense strand
gcaauuggaguuauaggaa

SEQ ID NO: 1848714 - RNA, 19 nt, Homo sapiens
  misc_RNA (1)...(19): siRNA sense strand
caacgagucugaagugaac

SEQ ID NO: 1848715 - RNA, 19 nt, Homo sapiens
  misc_RNA (1)...(19): siRNA sense strand
cuacaugaacuuacgguua

SEQ ID NO: 1848716 - RNA, 19 nt, Homo sapiens
  misc_RNA (1)...(19): siRNA sense strand
gugcaaagaagauuguuaa

SEQ ID NO: 1848717 - RNA, 19 nt, Homo sapiens
  misc_RNA (1)...(19): siRNA sense strand
aagaaagugugaagaagaa

SEQ ID NO: 1848718 - RNA, 19 nt, Homo sapiens
  misc_RNA (1)...(19): siRNA sense strand
aaaaugagcucaacagaug

SEQ ID NO: 1848719 - RNA, 19 nt, Homo sapiens
  misc_RNA (1)...(19): siRNA sense strand
aagagcaaguguauaauga

SEQ ID NO: 1848720 - RNA, 19 nt, Homo sapiens
  misc_RNA (1)...(19): siRNA sense strand
gaguagaacaugagaaguu

SEQ ID NO: 1848721 - RNA, 19 nt, Homo sapiens
  misc_RNA (1)...(19): siRNA sense strand
gaaagaagaaagugugaag

SEQ ID NO: 1848722 - RNA, 19 nt, Homo sapiens
  misc_RNA (1)...(19): siRNA sense strand
caauuggaguuauaggaaa

SEQ ID NO: 1848723 - RNA, 19 nt, Homo sapiens
  misc_RNA (1)...(19): siRNA sense strand
ucagaagucucaggaaguu

SEQ ID NO: 1848724 - RNA, 19 nt, Homo sapiens
  misc_RNA (1)...(19): siRNA sense strand
uacaugaacuuacgguuau

SEQ ID NO: 1848725 - RNA, 19 nt, Homo sapiens
  misc_RNA (1)...(19): siRNA sense strand
gaaaagagcagaaaacuac

SEQ ID NO: 1848726 - RNA, 19 nt, Homo sapiens
  misc_RNA (1)...(19): siRNA sense strand
uuugagagaugaaguagaa

SEQ ID NO: 1848727 - RNA, 19 nt, Homo sapiens
  misc_RNA (1)...(19): siRNA sense strand
guaauuugcugcucuccau

SEQ ID NO: 1848728 - RNA, 19 nt, Homo sapiens
  misc_RNA (1)...(19): siRNA sense strand
gaucuccgcugugaacuuc

SEQ ID NO: 1848729 - RNA, 19 nt, Homo sapiens
  misc_RNA (1)...(19): siRNA sense strand
cagcagauccagagccaua

SEQ ID NO: 1848730 - RNA, 19 nt, Homo sapiens
  misc_RNA (1)...(19): siRNA sense strand
gcacacaaacugagagcaa

SEQ ID NO: 1848731 - RNA, 19 nt, Homo sapiens
  misc_RNA (1)...(19): siRNA sense strand
gaaagcacacaaacugaga

SEQ ID NO: 1848732 - RNA, 19 nt, Homo sapiens
  misc_RNA (1)...(19): siRNA sense strand
guugcaagacucuacauua

SEQ ID NO: 1848733 - RNA, 19 nt, Homo sapiens
  misc_RNA (1)...(19): siRNA sense strand
gggaaauaaugauguaaag

SEQ ID NO: 1848734 - RNA, 19 nt, Homo sapiens
  misc_RNA (1)...(19): siRNA sense strand
ggaacuggcaugauagaug

SEQ ID NO: 1848735 - RNA, 19 nt, Homo sapiens
  misc_RNA (1)...(19): siRNA sense strand
gaaaaugcaucucgugauc

SEQ ID NO: 1848736 - RNA, 19 nt, Homo sapiens
  misc_RNA (1)...(19): siRNA sense strand
gaaagccacagaucaggaa

SEQ ID NO: 1848737 - RNA, 19 nt, Homo sapiens
  misc_RNA (1)...(19): siRNA sense strand
gcaaagaagauuguuaaag

SEQ ID NO: 1848738 - RNA, 19 nt, Homo sapiens
  misc_RNA (1)...(19): siRNA sense strand
agugaaagcuuuggaauca

SEQ ID NO: 1848739 - RNA, 19 nt, Homo sapiens
  misc_RNA (1)...(19): siRNA sense strand
agaacuugcugucaauuau

SEQ ID NO: 1848740 - RNA, 19 nt, Homo sapiens
  misc_RNA (1)...(19): siRNA sense strand
gaagaaauuaaccagcaaa

SEQ ID NO: 1848741 - RNA, 19 nt, Homo sapiens
  misc_RNA (1)...(19): siRNA sense strand
gauauuacucuuaccaaug

SEQ ID NO: 1848742 - RNA, 19 nt, Homo sapiens
  misc_RNA (1)...(19): siRNA sense strand
gaacaaaagcugaguggaa

SEQ ID NO: 1848743 - RNA, 19 nt, Homo sapiens
  misc_RNA (1)...(19): siRNA sense strand
cagaugaaguuauggauac

SEQ ID NO: 1848744 - RNA, 19 nt, Homo sapiens
  misc_RNA (1)...(19): siRNA sense strand
aagauguacuugaaggaua

SEQ ID NO: 1848745 - RNA, 19 nt, Homo sapiens
  misc_RNA (1)...(19): siRNA sense strand
cuucguaucucucaacaug

SEQ ID NO: 1848746 - RNA, 19 nt, Homo sapiens
  misc_RNA (1)...(19): siRNA sense strand
gaagcagucaggucaaaga

SEQ ID NO: 1848747 - RNA, 19 nt, Homo sapiens
  misc_RNA (1)...(19): siRNA sense strand
gaaaagcgacuucgagcua

SEQ ID NO: 1848748 - RNA, 19 nt, Homo sapiens
  misc_RNA (1)...(19): siRNA sense strand
ugaaggauauaauggaaca

SEQ ID NO: 1848749 - RNA, 19 nt, Homo sapiens
  misc_RNA (1)...(19): siRNA sense strand
ggaggugcauuuguucaga

SEQ ID NO: 1848750 - RNA, 19 nt, Homo sapiens
  misc_RNA (1)...(19): siRNA sense strand
caaacgcuaucagcaagaa

SEQ ID NO: 1848751 - RNA, 19 nt, Homo sapiens
  misc_RNA (1)...(19): siRNA sense strand
uugaacagcucacuaaagu

SEQ ID NO: 1848752 - RNA, 19 nt, Homo sapiens
  misc_RNA (1)...(19): siRNA sense strand
agaguucacuguugcaaga

SEQ ID NO: 1848753 - RNA, 19 nt, Homo sapiens
  misc_RNA (1)...(19): siRNA sense strand
aagaagaagugaaagaagu

SEQ ID NO: 1848754 - RNA, 19 nt, Homo sapiens
  misc_RNA (1)...(19): siRNA sense strand
acaaugagucugaaacaaa

SEQ ID NO: 1848755 - RNA, 19 nt, Homo sapiens
  misc_RNA (1)...(19): siRNA sense strand
agaccaaccuuucaguuca

SEQ ID NO: 1848756 - RNA, 19 nt, Homo sapiens
  misc_RNA (1)...(19): siRNA sense strand
uggaggaggugcauuuguu

SEQ ID NO: 1848757 - RNA, 19 nt, Homo sapiens
  misc_RNA (1)...(19): siRNA sense strand
acagauugcuaaaccuauu

SEQ ID NO: 1848758 - RNA, 19 nt, Homo sapiens
  misc_RNA (1)...(19): siRNA sense strand
gaacuucagacuuuacaca

SEQ ID NO: 1848759 - RNA, 19 nt, Homo sapiens
  misc_RNA (1)...(19): siRNA sense strand
gaagaagugaaagaaguuu

SEQ ID NO: 1848760 - RNA, 19 nt, Homo sapiens
  misc_RNA (1)...(19): siRNA sense strand
cacaguggauaaagauauu

SEQ ID NO: 1848761 - RNA, 19 nt, Homo sapiens
  misc_RNA (1)...(19): siRNA sense strand
gccuauugaugaacaguuu

SEQ ID NO: 1848762 - RNA, 19 nt, Homo sapiens
  misc_RNA (1)...(19): siRNA sense strand
aagcacaucucaagagcaa

SEQ ID NO: 1848763 - RNA, 19 nt, Homo sapiens
  misc_RNA (1)...(19): siRNA sense strand
caagagcaaguguauaaug

SEQ ID NO: 1848764 - RNA, 19 nt, Homo sapiens
  misc_RNA (1)...(19): siRNA sense strand
aaagugaugugucgcuuca

SEQ ID NO: 1848765 - RNA, 19 nt, Homo sapiens
  misc_RNA (1)...(19): siRNA sense strand
gaggugcauuuguucagaa

SEQ ID NO: 1848766 - RNA, 19 nt, Homo sapiens
  misc_RNA (1)...(19): siRNA sense strand
gaaguuaagcaagcuguug

SEQ ID NO: 1848767 - RNA, 19 nt, Homo sapiens
  misc_RNA (1)...(19): siRNA sense strand
aagagaaaguccaugaaau

SEQ ID NO: 1848768 - RNA, 19 nt, Homo sapiens
  misc_RNA (1)...(19): siRNA sense strand
caacugagauccugaauuu

SEQ ID NO: 1848769 - RNA, 19 nt, Homo sapiens
  misc_RNA (1)...(19): siRNA sense strand
ggagauagguggaauuauu

SEQ ID NO: 1848770 - RNA, 19 nt, Homo sapiens
  misc_RNA (1)...(19): siRNA sense strand
gaacacagcucuagaaguc

SEQ ID NO: 1848771 - RNA, 19 nt, Homo sapiens
  misc_RNA (1)...(19): siRNA sense strand
ggaggcagcucuucaaauu

SEQ ID NO: 1848772 - RNA, 19 nt, Homo sapiens
  misc_RNA (1)...(19): siRNA sense strand
gaaaugugaucucugcuuu

SEQ ID NO: 1848773 - RNA, 19 nt, Homo sapiens
  misc_RNA (1)...(19): siRNA sense strand
caacuuggcuguucaugaa

SEQ ID NO: 1848774 - RNA, 19 nt, Homo sapiens
  misc_RNA (1)...(19): siRNA sense strand
ugacaaggaugaugaaauu

SEQ ID NO: 1848775 - RNA, 19 nt, Homo sapiens
  misc_RNA (1)...(19): siRNA sense strand
gcuaagaccaucaagaaua

SEQ ID NO: 1848776 - RNA, 19 nt, Homo sapiens
  misc_RNA (1)...(19): siRNA sense strand
gcaggaugcugaagaaaug

SEQ ID NO: 1848777 - RNA, 19 nt, Homo sapiens
  misc_RNA (1)...(19): siRNA sense strand
gaaccaccaucgucauuug

SEQ ID NO: 1848778 - RNA, 19 nt, Homo sapiens
  misc_RNA (1)...(19): siRNA sense strand
gaucugaccacccgaguua

SEQ ID NO: 1848779 - RNA, 19 nt, Homo sapiens
  misc_RNA (1)...(19): siRNA sense strand
ggagcuggcugucaauuau

SEQ ID NO: 1848780 - RNA, 19 nt, Homo sapiens
  misc_RNA (1)...(19): siRNA sense strand
gcagaagaauggaagaaga

SEQ ID NO: 1848781 - RNA, 19 nt, Homo sapiens
  misc_RNA (1)...(19): siRNA sense strand
caugauaucuuugaccaua

SEQ ID NO: 1848782 - RNA, 19 nt, Homo sapiens
  misc_RNA (1)...(19): siRNA sense strand
ugaauuugcuguugaaaga

SEQ ID NO: 1848783 - RNA, 19 nt, Homo sapiens
  misc_RNA (1)...(19): siRNA sense strand
gaaccuggaguuucacaua

SEQ ID NO: 1848784 - RNA, 19 nt, Homo sapiens
  misc_RNA (1)...(19): siRNA sense strand
gagcuaagaccaucaagaa

SEQ ID NO: 1848785 - RNA, 19 nt, Homo sapiens
  misc_RNA (1)...(19): siRNA sense strand
cgaagcaaauugucaaaga

SEQ ID NO: 1848786 - RNA, 19 nt, Homo sapiens
  misc_RNA (1)...(19): siRNA sense strand
uguaauagaugaaggcaaa

SEQ ID NO: 1848787 - RNA, 19 nt, Homo sapiens
  misc_RNA (1)...(19): siRNA sense strand
ugacaaacaugaaugaaca

SEQ ID NO: 1848788 - RNA, 19 nt, Homo sapiens
  misc_RNA (1)...(19): siRNA sense strand
gaagcaaauugucaaagau

SEQ ID NO: 1848789 - RNA, 19 nt, Homo sapiens
  misc_RNA (1)...(19): siRNA sense strand
caauauugcuccuguuguu

SEQ ID NO: 1848790 - RNA, 19 nt, Homo sapiens
  misc_RNA (1)...(19): siRNA sense strand
ugacacgucuccagauuga

SEQ ID NO: 1848791 - RNA, 19 nt, Homo sapiens
  misc_RNA (1)...(19): siRNA sense strand
gagacgaaauugaggagaa

SEQ ID NO: 1848792 - RNA, 19 nt, Homo sapiens
  misc_RNA (1)...(19): siRNA sense strand
ggaagucauggauguaaua

SEQ ID NO: 1848793 - RNA, 19 nt, Homo sapiens
  misc_RNA (1)...(19): siRNA sense strand
cuaaacagguggaggaaug

SEQ ID NO: 1848794 - RNA, 19 nt, Homo sapiens
  misc_RNA (1)...(19): siRNA sense strand
gggcagacuucaucaggaa

SEQ ID NO: 1848795 - RNA, 19 nt, Homo sapiens
  misc_RNA (1)...(19): siRNA sense strand
gaagcuuaguucugauuau

SEQ ID NO: 1848796 - RNA, 19 nt, Homo sapiens
  misc_RNA (1)...(19): siRNA sense strand
cacaggaaguggaggauaa

SEQ ID NO: 1848797 - RNA, 19 nt, Homo sapiens
  misc_RNA (1)...(19): siRNA sense strand
gaaguacgaugaggagauc

SEQ ID NO: 1848798 - RNA, 19 nt, Homo sapiens
  misc_RNA (1)...(19): siRNA sense strand
ggagguggaucguaucaag

SEQ ID NO: 1848799 - RNA, 19 nt, Homo sapiens
  misc_RNA (1)...(19): siRNA sense strand
ccaaugaugugaaaacuuu

SEQ ID NO: 1848800 - RNA, 19 nt, Homo sapiens
  misc_RNA (1)...(19): siRNA sense strand
gaacaggagaagcuuaguu

SEQ ID NO: 1848801 - RNA, 19 nt, Homo sapiens
  misc_RNA (1)...(19): siRNA sense strand
ggacuuacuugauguaucc

SEQ ID NO: 1848802 - RNA, 19 nt, Homo sapiens
  misc_RNA (1)...(19): siRNA sense strand
ccaaugagcagcugacaga

SEQ ID NO: 1848803 - RNA, 19 nt, Homo sapiens
  misc_RNA (1)...(19): siRNA sense strand
gcugacacgucuccagauu

SEQ ID NO: 1848804 - RNA, 19 nt, Homo sapiens
  misc_RNA (1)...(19): siRNA sense strand
agaaagagaaguacgauga

SEQ ID NO: 1848805 - RNA, 19 nt, Homo sapiens
  misc_RNA (1)...(19): siRNA sense strand
gagaccaaguccacacuga

SEQ ID NO: 1848806 - RNA, 19 nt, Homo sapiens
  misc_RNA (1)...(19): siRNA sense strand
gaagagacuaugagaagau

SEQ ID NO: 1848807 - RNA, 19 nt, Homo sapiens
  misc_RNA (1)...(19): siRNA sense strand
ucagcaagaugaagucaga

SEQ ID NO: 1848808 - RNA, 19 nt, Homo sapiens
  misc_RNA (1)...(19): siRNA sense strand
gguuauaacgggacgauuu

SEQ ID NO: 1848809 - RNA, 19 nt, Homo sapiens
  misc_RNA (1)...(19): siRNA sense strand
ccaagaacauggccagaag

SEQ ID NO: 1848810 - RNA, 19 nt, Homo sapiens
  misc_RNA (1)...(19): siRNA sense strand
gaaacucuuuguccaggau

SEQ ID NO: 1848811 - RNA, 19 nt, Homo sapiens
  misc_RNA (1)...(19): siRNA sense strand
gagauagguggaauuauug

SEQ ID NO: 1848812 - RNA, 19 nt, Homo sapiens
  misc_RNA (1)...(19): siRNA sense strand
gaucuccagucucuacaga

SEQ ID NO: 1848813 - RNA, 19 nt, Homo sapiens
  misc_RNA (1)...(19): siRNA sense strand
acagacaacuggaugacaa

SEQ ID NO: 1848814 - RNA, 19 nt, Homo sapiens
  misc_RNA (1)...(19): siRNA sense strand
aaacagagucccguaugua

SEQ ID NO: 1848815 - RNA, 19 nt, Homo sapiens
  misc_RNA (1)...(19): siRNA sense strand
ggaccaagagagagaaaug

SEQ ID NO: 1848816 - RNA, 19 nt, Homo sapiens
  misc_RNA (1)...(19): siRNA sense strand
cgagggagcuguucuugac

SEQ ID NO: 1848817 - RNA, 19 nt, Homo sapiens
  misc_RNA (1)...(19): siRNA sense strand
cuacagaggagaaagagaa

SEQ ID NO: 1848818 - RNA, 19 nt, Homo sapiens
  misc_RNA (1)...(19): siRNA sense strand
ccacgaauugcccaugaua

SEQ ID NO: 1848819 - RNA, 19 nt, Homo sapiens
  misc_RNA (1)...(19): siRNA sense strand
ugaaggaggccaaggagaa

SEQ ID NO: 1848820 - RNA, 19 nt, Homo sapiens
  misc_RNA (1)...(19): siRNA sense strand
gauccugaauuugcuguug

SEQ ID NO: 1848821 - RNA, 19 nt, Homo sapiens
  misc_RNA (1)...(19): siRNA sense strand
cagaggagaaagagaagua

SEQ ID NO: 1848822 - RNA, 19 nt, Homo sapiens
  misc_RNA (1)...(19): siRNA sense strand
gaacugacagcagaagaau

SEQ ID NO: 1848823 - RNA, 19 nt, Homo sapiens
  misc_RNA (1)...(19): siRNA sense strand
cuaagaccaucaagaauac

SEQ ID NO: 1848824 - RNA, 19 nt, Homo sapiens
  misc_RNA (1)...(19): siRNA sense strand
ggaaaugugaucucugcuu

SEQ ID NO: 1848825 - RNA, 19 nt, Homo sapiens
  misc_RNA (1)...(19): siRNA sense strand
aagagaauguagagacuga

SEQ ID NO: 1848826 - RNA, 19 nt, Homo sapiens
  misc_RNA (1)...(19): siRNA sense strand
agucauggauguaauagau

SEQ ID NO: 1848827 - RNA, 19 nt, Homo sapiens
  misc_RNA (1)...(19): siRNA sense strand
gaggaagucauggauguaa

SEQ ID NO: 1848828 - RNA, 19 nt, Homo sapiens
  misc_RNA (1)...(19): siRNA sense strand
ucacauaaagguuuccuau

SEQ ID NO: 1848829 - RNA, 19 nt, Homo sapiens
  misc_RNA (1)...(19): siRNA sense strand
gaaaacgacuacauugaca

SEQ ID NO: 1848830 - RNA, 19 nt, Homo sapiens
  misc_RNA (1)...(19): siRNA sense strand
gaagaauguuauccagcau

SEQ ID NO: 1848831 - RNA, 19 nt, Homo sapiens
  misc_RNA (1)...(19): siRNA sense strand
acaagacuuugaagaaugu

SEQ ID NO: 1848832 - RNA, 19 nt, Homo sapiens
  misc_RNA (1)...(19): siRNA sense strand
gagaauguagagacugaaa

SEQ ID NO: 1848833 - RNA, 19 nt, Homo sapiens
  misc_RNA (1)...(19): siRNA sense strand
ccacucacuaccagaaaua

SEQ ID NO: 1848834 - RNA, 19 nt, Homo sapiens
  misc_RNA (1)...(19): siRNA sense strand
gcacgaagccaagaucaag

SEQ ID NO: 1848835 - RNA, 19 nt, Homo sapiens
  misc_RNA (1)...(19): siRNA sense strand
ccaaggaugaggugaaaga

SEQ ID NO: 1848836 - RNA, 19 nt, Homo sapiens
  misc_RNA (1)...(19): siRNA sense strand
aagagacuaugagaagaua

SEQ ID NO: 1848837 - RNA, 19 nt, Homo sapiens
  misc_RNA (1)...(19): siRNA sense strand
ggugggaacugcagaacca

SEQ ID NO: 1848838 - RNA, 19 nt, Homo sapiens
  misc_RNA (1)...(19): siRNA sense strand
gugggaaacuuuauuuggu

SEQ ID NO: 1848839 - RNA, 19 nt, Homo sapiens
  misc_RNA (1)...(19): siRNA sense strand
ucaccaaaguucacaagca

SEQ ID NO: 1848840 - RNA, 19 nt, Homo sapiens
  misc_RNA (1)...(19): siRNA sense strand
uugaugagauucgggauuu

SEQ ID NO: 1848841 - RNA, 19 nt, Homo sapiens
  misc_RNA (1)...(19): siRNA sense strand
ccacaagaagagacuauga

SEQ ID NO: 1848842 - RNA, 19 nt, Homo sapiens
  misc_RNA (1)...(19): siRNA sense strand
caaggaugaugaaauuaac

SEQ ID NO: 1848843 - RNA, 19 nt, Homo sapiens
  misc_RNA (1)...(19): siRNA sense strand
aaccuggaguuucacauaa

SEQ ID NO: 1848844 - RNA, 19 nt, Homo sapiens
  misc_RNA (1)...(19): siRNA sense strand
caagaagagacuaugagaa

SEQ ID NO: 1848845 - RNA, 19 nt, Homo sapiens
  misc_RNA (1)...(19): siRNA sense strand
gacaauauugcuccuguug

SEQ ID NO: 1848846 - RNA, 19 nt, Homo sapiens
  misc_RNA (1)...(19): siRNA sense strand
gaagaauggaagaagaaau

SEQ ID NO: 1848847 - RNA, 19 nt, Homo sapiens
  misc_RNA (1)...(19): siRNA sense strand
ucaaugaggcugagaccaa

SEQ ID NO: 1848848 - RNA, 19 nt, Homo sapiens
  misc_RNA (1)...(19): siRNA sense strand
aaacucagugggaaacuuu

SEQ ID NO: 1848849 - RNA, 19 nt, Homo sapiens
  misc_RNA (1)...(19): siRNA sense strand
gaugagaaccuggaguuuc

SEQ ID NO: 1848850 - RNA, 19 nt, Homo sapiens
  misc_RNA (1)...(19): siRNA sense strand
ggaggaggcagcucuucaa

SEQ ID NO: 1848851 - RNA, 19 nt, Homo sapiens
  misc_RNA (1)...(19): siRNA sense strand
gaauugcccaugauaucuu

SEQ ID NO: 1848852 - RNA, 19 nt, Homo sapiens
  misc_RNA (1)...(19): siRNA sense strand
ggaacaagccagagaagac

SEQ ID NO: 1848853 - RNA, 19 nt, Homo sapiens
  misc_RNA (1)...(19): siRNA sense strand
gaaaauagaggaccaagag

SEQ ID NO: 1848854 - RNA, 19 nt, Homo sapiens
  misc_RNA (1)...(19): siRNA sense strand
gaagaggaggcagcuagaa

SEQ ID NO: 1848855 - RNA, 19 nt, Homo sapiens
  misc_RNA (1)...(19): siRNA sense strand
gccaagaucaagucucuga

SEQ ID NO: 1848856 - RNA, 19 nt, Homo sapiens
  misc_RNA (1)...(19): siRNA sense strand
gcaacugagauccugaauu

SEQ ID NO: 1848857 - RNA, 19 nt, Homo sapiens
  misc_RNA (1)...(19): siRNA sense strand
uggaggagcuggcugucaa

SEQ ID NO: 1848858 - RNA, 19 nt, Homo sapiens
  misc_RNA (1)...(19): siRNA sense strand
gaguuucacauaaagguuu

SEQ ID NO: 1848859 - RNA, 19 nt, Homo sapiens
  misc_RNA (1)...(19): siRNA sense strand
ugggaaacuuuauuugguu

SEQ ID NO: 1848860 - RNA, 19 nt, Homo sapiens
  misc_RNA (1)...(19): siRNA sense strand
gcugugaacugcccaagcu

SEQ ID NO: 1848861 - RNA, 19 nt, Homo sapiens
  misc_RNA (1)...(19): siRNA sense strand
agaagcagcuguccagacu

SEQ ID NO: 1848862 - RNA, 19 nt, Homo sapiens
  misc_RNA (1)...(19): siRNA sense strand
ccgggaagcucaccagaag

SEQ ID NO: 1848863 - RNA, 19 nt, Homo sapiens
  misc_RNA (1)...(19): siRNA sense strand
uacaagagcuuagcaacca

SEQ ID NO: 1848864 - RNA, 19 nt, Homo sapiens
  misc_RNA (1)...(19): siRNA sense strand
aacaagacuuugaagaaug

SEQ ID NO: 1848865 - RNA, 19 nt, Homo sapiens
  misc_RNA (1)...(19): siRNA sense strand
gaauggaagaagaaauaug

SEQ ID NO: 1848866 - RNA, 19 nt, Homo sapiens
  misc_RNA (1)...(19): siRNA sense strand
cagaagaauggaagaagaa

SEQ ID NO: 1848867 - RNA, 19 nt, Homo sapiens
  misc_RNA (1)...(19): siRNA sense strand
caagagcagguuuacaaug

SEQ ID NO: 1848868 - RNA, 19 nt, Homo sapiens
  misc_RNA (1)...(19): siRNA sense strand
gcaaagcgauuaccagaau

SEQ ID NO: 1848869 - RNA, 19 nt, Homo sapiens
  misc_RNA (1)...(19): siRNA sense strand
gacaacagccugcaccuuu

SEQ ID NO: 1848870 - RNA, 19 nt, Homo sapiens
  misc_RNA (1)...(19): siRNA sense strand
gugccaagcugaaguugaa

SEQ ID NO: 1848871 - RNA, 19 nt, Homo sapiens
  misc_RNA (1)...(19): siRNA sense strand
ccaaggagauccagcugau

SEQ ID NO: 1848872 - RNA, 19 nt, Homo sapiens
  misc_RNA (1)...(19): siRNA sense strand
gcagacggccuucgacuuc

SEQ ID NO: 1848873 - RNA, 19 nt, Homo sapiens
  misc_RNA (1)...(19): siRNA sense strand
ucaagucccucaagaaguc

SEQ ID NO: 1848874 - RNA, 19 nt, Homo sapiens
  misc_RNA (1)...(19): siRNA sense strand
gaucucacccucggaguuu

SEQ ID NO: 1848875 - RNA, 19 nt, Homo sapiens
  misc_RNA (1)...(19): siRNA sense strand
ggcggcaggucuuuguuaa

SEQ ID NO: 1848876 - RNA, 19 nt, Homo sapiens
  misc_RNA (1)...(19): siRNA sense strand
caacuggcguucacaucga

SEQ ID NO: 1848877 - RNA, 19 nt, Homo sapiens
  misc_RNA (1)...(19): siRNA sense strand
gcugugggcuggcaccaau

SEQ ID NO: 1848878 - RNA, 19 nt, Homo sapiens
  misc_RNA (1)...(19): siRNA sense strand
cgggaccuguuccaguuua

SEQ ID NO: 1848879 - RNA, 19 nt, Homo sapiens
  misc_RNA (1)...(19): siRNA sense strand
acaacagccugcaccuuug

SEQ ID NO: 1848880 - RNA, 19 nt, Homo sapiens
  misc_RNA (1)...(19): siRNA sense strand
uggcuucucugcacuguuc

SEQ ID NO: 1848881 - RNA, 19 nt, Homo sapiens
  misc_RNA (1)...(19): siRNA sense strand
gcgcucugcucagugauga

SEQ ID NO: 1848882 - RNA, 19 nt, Homo sapiens
  misc_RNA (1)...(19): siRNA sense strand
cggcaggucuuuguuaagu

SEQ ID NO: 1848883 - RNA, 19 nt, Homo sapiens
  misc_RNA (1)...(19): siRNA sense strand
ccauggcuuuggccucuuu

SEQ ID NO: 1848884 - RNA, 19 nt, Homo sapiens
  misc_RNA (1)...(19): siRNA sense strand
gacuucaccucccguguca

SEQ ID NO: 1848885 - RNA, 19 nt, Homo sapiens
  misc_RNA (1)...(19): siRNA sense strand
cgaaguggcccaugaucug

SEQ ID NO: 1848886 - RNA, 19 nt, Homo sapiens
  misc_RNA (1)...(19): siRNA sense strand
gugaccagcuggccuugga

SEQ ID NO: 1848887 - RNA, 19 nt, Homo sapiens
  misc_RNA (1)...(19): siRNA sense strand
cccaugaucugucgaagag

SEQ ID NO: 1848888 - RNA, 19 nt, Homo sapiens
  misc_RNA (1)...(19): siRNA sense strand
cggcuucacuguccucaca

SEQ ID NO: 1848889 - RNA, 19 nt, Homo sapiens
  misc_RNA (1)...(19): siRNA sense strand
cagaggagcaguucaaggu

SEQ ID NO: 1848890 - RNA, 19 nt, Homo sapiens
  misc_RNA (1)...(19): siRNA sense strand
cggcugcucuacaaacuca

SEQ ID NO: 1848891 - RNA, 19 nt, Homo sapiens
  misc_RNA (1)...(19): siRNA sense strand
cgagaguggcaacguguuu

SEQ ID NO: 1848892 - RNA, 19 nt, Homo sapiens
  misc_RNA (1)...(19): siRNA sense strand
uaucagaggagcaguucaa

SEQ ID NO: 1848893 - RNA, 19 nt, Homo sapiens
  misc_RNA (1)...(19): siRNA sense strand
gggaccuguuccaguuuaa

SEQ ID NO: 1848894 - RNA, 19 nt, Homo sapiens
  misc_RNA (1)...(19): siRNA sense strand
gaaguggcccaugaucugu

SEQ ID NO: 1848895 - RNA, 19 nt, Homo sapiens
  misc_RNA (1)...(19): siRNA sense strand
ggaccgccacugcaucuca

SEQ ID NO: 1848896 - RNA, 19 nt, Homo sapiens
  misc_RNA (1)...(19): siRNA sense strand
aggaggagcugguggugau

SEQ ID NO: 1848897 - RNA, 19 nt, Homo sapiens
  misc_RNA (1)...(19): siRNA sense strand
ccuuggcccugcacucuga

SEQ ID NO: 1848898 - RNA, 19 nt, Homo sapiens
  misc_RNA (1)...(19): siRNA sense strand
cagcagaaaccaagaacca

SEQ ID NO: 1848899 - RNA, 19 nt, Homo sapiens
  misc_RNA (1)...(19): siRNA sense strand
aagaaguccuugcgucagu

SEQ ID NO: 1848900 - RNA, 19 nt, Homo sapiens
  misc_RNA (1)...(19): siRNA sense strand
caauggcggagcagaguga

SEQ ID NO: 1848901 - RNA, 19 nt, Homo sapiens
  misc_RNA (1)...(19): siRNA sense strand
ggguugcccuucaccaucu

SEQ ID NO: 1848902 - RNA, 19 nt, Homo sapiens
  misc_RNA (1)...(19): siRNA sense strand
gagccgagccaggaacuca

SEQ ID NO: 1848903 - RNA, 19 nt, Homo sapiens
  misc_RNA (1)...(19): siRNA sense strand
uuugagcgcuucucucucu

SEQ ID NO: 1848904 - RNA, 19 nt, Homo sapiens
  misc_RNA (1)...(19): siRNA sense strand
guccggacccuguacuuug

SEQ ID NO: 1848905 - RNA, 19 nt, Homo sapiens
  misc_RNA (1)...(19): siRNA sense strand
ucuacaaacucagcacugu

SEQ ID NO: 1848906 - RNA, 19 nt, Homo sapiens
  misc_RNA (1)...(19): siRNA sense strand
ucacccugcuggaugacaa

SEQ ID NO: 1848907 - RNA, 19 nt, Homo sapiens
  misc_RNA (1)...(19): siRNA sense strand
cgaagagcccugacaugca

SEQ ID NO: 1848908 - RNA, 19 nt, Homo sapiens
  misc_RNA (1)...(19): siRNA sense strand
gggugcagccucagcaaug

SEQ ID NO: 1848909 - RNA, 19 nt, Homo sapiens
  misc_RNA (1)...(19): siRNA sense strand
gcuucucucucuccaccaa

SEQ ID NO: 1848910 - RNA, 19 nt, Homo sapiens
  misc_RNA (1)...(19): siRNA sense strand
gagaguggcaacguguuug

SEQ ID NO: 1848911 - RNA, 19 nt, Homo sapiens
  misc_RNA (1)...(19): siRNA sense strand
gaugagagagcggcaacug

SEQ ID NO: 1848912 - RNA, 19 nt, Homo sapiens
  misc_RNA (1)...(19): siRNA sense strand
gcuuucagcccuucguguu

SEQ ID NO: 1848913 - RNA, 19 nt, Homo sapiens
  misc_RNA (1)...(19): siRNA sense strand
gccugcggcugcucuacaa

SEQ ID NO: 1848914 - RNA, 19 nt, Homo sapiens
  misc_RNA (1)...(19): siRNA sense strand
accauggaguggccaauug

SEQ ID NO: 1848915 - RNA, 19 nt, Homo sapiens
  misc_RNA (1)...(19): siRNA sense strand
gcucaagcgggaccuguuc

SEQ ID NO: 1848916 - RNA, 19 nt, Homo sapiens
  misc_RNA (1)...(19): siRNA sense strand
cgucaagucccucaagaag

SEQ ID NO: 1848917 - RNA, 19 nt, Homo sapiens
  misc_RNA (1)...(19): siRNA sense strand
ccauggaguggccaauuga

SEQ ID NO: 1848918 - RNA, 19 nt, Homo sapiens
  misc_RNA (1)...(19): siRNA sense strand
gcucucaccacgucuccaa

SEQ ID NO: 1848919 - RNA, 19 nt, Homo sapiens
  misc_RNA (1)...(19): siRNA sense strand
uccgcagccucgugccuua

SEQ ID NO: 1848920 - RNA, 19 nt, Homo sapiens
  misc_RNA (1)...(19): siRNA sense strand
caaggcuucuaccugaucu

SEQ ID NO: 1848921 - RNA, 19 nt, Homo sapiens
  misc_RNA (1)...(19): siRNA sense strand
gaucuuccucugcaaguac

SEQ ID NO: 1848922 - RNA, 19 nt, Homo sapiens
  misc_RNA (1)...(19): siRNA sense strand
agcgggaccuguuccaguu

SEQ ID NO: 1848923 - RNA, 19 nt, Homo sapiens
  misc_RNA (1)...(19): siRNA sense strand
cccggugucugguggauuc

SEQ ID NO: 1848924 - RNA, 19 nt, Homo sapiens
  misc_RNA (1)...(19): siRNA sense strand
gccaaggcuucuaccugau

SEQ ID NO: 1848925 - RNA, 19 nt, Homo sapiens
  misc_RNA (1)...(19): siRNA sense strand
ccugcgucuucaccaaaua

SEQ ID NO: 1848926 - RNA, 19 nt, Homo sapiens
  misc_RNA (1)...(19): siRNA sense strand
ggcaggucuuuguuaagug

SEQ ID NO: 1848927 - RNA, 19 nt, Homo sapiens
  misc_RNA (1)...(19): siRNA sense strand
gcaggugcugguacuggaa

SEQ ID NO: 1848928 - RNA, 19 nt, Homo sapiens
  misc_RNA (1)...(19): siRNA sense strand
ucuccaacaucccgcugaa

SEQ ID NO: 1848929 - RNA, 19 nt, Homo sapiens
  misc_RNA (1)...(19): siRNA sense strand
gaggagcugguggugauug

SEQ ID NO: 1848930 - RNA, 19 nt, Homo sapiens
  misc_RNA (1)...(19): siRNA sense strand
gcccaugaucugucgaaga

SEQ ID NO: 1848931 - RNA, 19 nt, Homo sapiens
  misc_RNA (1)...(19): siRNA sense strand
gaaguccuugcgucaguca

SEQ ID NO: 1848932 - RNA, 19 nt, Homo sapiens
  misc_RNA (1)...(19): siRNA sense strand
caggagaacaacgcuguga

SEQ ID NO: 1848933 - RNA, 19 nt, Homo sapiens
  misc_RNA (1)...(19): siRNA sense strand
ggugcagccucagcaaugg

SEQ ID NO: 1848934 - RNA, 19 nt, Homo sapiens
  misc_RNA (1)...(19): siRNA sense strand
acaacgcugugacgcagau

SEQ ID NO: 1848935 - RNA, 19 nt, Homo sapiens
  misc_RNA (1)...(19): siRNA sense strand
cagagcaggccaaggagau

SEQ ID NO: 1848936 - RNA, 19 nt, Homo sapiens
  misc_RNA (1)...(19): siRNA sense strand
caacagccugcaccuuugg

SEQ ID NO: 1848937 - RNA, 19 nt, Homo sapiens
  misc_RNA (1)...(19): siRNA sense strand
gcgucaagucccucaagaa

SEQ ID NO: 1848938 - RNA, 19 nt, Homo sapiens
  misc_RNA (1)...(19): siRNA sense strand
agaucuuccucugcaagua

SEQ ID NO: 1848939 - RNA, 19 nt, Homo sapiens
  misc_RNA (1)...(19): siRNA sense strand
ugaaagaucugcauucuga

SEQ ID NO: 1848940 - RNA, 19 nt, Homo sapiens
  misc_RNA (1)...(19): siRNA sense strand
uaagaaggcuccuaguaaa

SEQ ID NO: 1848941 - RNA, 19 nt, Homo sapiens
  misc_RNA (1)...(19): siRNA sense strand
agaagaaacuggacacuuu

SEQ ID NO: 1848942 - RNA, 19 nt, Homo sapiens
  misc_RNA (1)...(19): siRNA sense strand
caaagaauccucuaagaaa

SEQ ID NO: 1848943 - RNA, 19 nt, Homo sapiens
  misc_RNA (1)...(19): siRNA sense strand
ggagaggccuguaaauaga

SEQ ID NO: 1848944 - RNA, 19 nt, Homo sapiens
  misc_RNA (1)...(19): siRNA sense strand
gcucagaggcuuuauuuaa

SEQ ID NO: 1848945 - RNA, 19 nt, Homo sapiens
  misc_RNA (1)...(19): siRNA sense strand
gaagaagaaaucaacguua

SEQ ID NO: 1848946 - RNA, 19 nt, Homo sapiens
  misc_RNA (1)...(19): siRNA sense strand
gaaaauaguuccuaagaug

SEQ ID NO: 1848947 - RNA, 19 nt, Homo sapiens
  misc_RNA (1)...(19): siRNA sense strand
gcaaagauccaccuuacaa

SEQ ID NO: 1848948 - RNA, 19 nt, Homo sapiens
  misc_RNA (1)...(19): siRNA sense strand
cagaugaaguggaggauaa

SEQ ID NO: 1848949 - RNA, 19 nt, Homo sapiens
  misc_RNA (1)...(19): siRNA sense strand
gauaagaaggcuccuagua

SEQ ID NO: 1848950 - RNA, 19 nt, Homo sapiens
  misc_RNA (1)...(19): siRNA sense strand
agaguuagcuuaagugaug

SEQ ID NO: 1848951 - RNA, 19 nt, Homo sapiens
  misc_RNA (1)...(19): siRNA sense strand
uucaaagccucacaaauua

SEQ ID NO: 1848952 - RNA, 19 nt, Homo sapiens
  misc_RNA (1)...(19): siRNA sense strand
cagcagaucgugaaccuua

SEQ ID NO: 1848953 - RNA, 19 nt, Homo sapiens
  misc_RNA (1)...(19): siRNA sense strand
ccgcuuugauuaugacuua

SEQ ID NO: 1848954 - RNA, 19 nt, Homo sapiens
  misc_RNA (1)...(19): siRNA sense strand
gaaauggagaggccuguaa

SEQ ID NO: 1848955 - RNA, 19 nt, Homo sapiens
  misc_RNA (1)...(19): siRNA sense strand
ggaagaaccuaggaaaguc

SEQ ID NO: 1848956 - RNA, 19 nt, Homo sapiens
  misc_RNA (1)...(19): siRNA sense strand
uuucaaagccucacaaauu

SEQ ID NO: 1848957 - RNA, 19 nt, Homo sapiens
  misc_RNA (1)...(19): siRNA sense strand
ccaaagaauccucuaagaa

SEQ ID NO: 1848958 - RNA, 19 nt, Homo sapiens
  misc_RNA (1)...(19): siRNA sense strand
aagcaaagcaaaucagaua

SEQ ID NO: 1848959 - RNA, 19 nt, Homo sapiens
  misc_RNA (1)...(19): siRNA sense strand
ccuuugaggucuauaauga

SEQ ID NO: 1848960 - RNA, 19 nt, Homo sapiens
  misc_RNA (1)...(19): siRNA sense strand
acagaggacuuuaggagaa

SEQ ID NO: 1848961 - RNA, 19 nt, Homo sapiens
  misc_RNA (1)...(19): siRNA sense strand
uaacgacaaugacucugaa

SEQ ID NO: 1848962 - RNA, 19 nt, Homo sapiens
  misc_RNA (1)...(19): siRNA sense strand
cuacagaguuaccuggaaa

SEQ ID NO: 1848963 - RNA, 19 nt, Homo sapiens
  misc_RNA (1)...(19): siRNA sense strand
uaaagaauggugaauguga

SEQ ID NO: 1848964 - RNA, 19 nt, Homo sapiens
  misc_RNA (1)...(19): siRNA sense strand
gaagaacucucagccaaaa

SEQ ID NO: 1848965 - RNA, 19 nt, Homo sapiens
  misc_RNA (1)...(19): siRNA sense strand
gcaaaucagauaagcaaau

SEQ ID NO: 1848966 - RNA, 19 nt, Homo sapiens
  misc_RNA (1)...(19): siRNA sense strand
gacaaugacucugaaaugg

SEQ ID NO: 1848967 - RNA, 19 nt, Homo sapiens
  misc_RNA (1)...(19): siRNA sense strand
ggaggaaucagaugaagug

SEQ ID NO: 1848968 - RNA, 19 nt, Homo sapiens
  misc_RNA (1)...(19): siRNA sense strand
gaaagugagacaucagaga

SEQ ID NO: 1848969 - RNA, 19 nt, Homo sapiens
  misc_RNA (1)...(19): siRNA sense strand
gaucgugaaccuuauagaa

SEQ ID NO: 1848970 - RNA, 19 nt, Homo sapiens
  misc_RNA (1)...(19): siRNA sense strand
gcaaauaaagaauggugaa

SEQ ID NO: 1848971 - RNA, 19 nt, Homo sapiens
  misc_RNA (1)...(19): siRNA sense strand
gcagaucgugaaccuuaua

SEQ ID NO: 1848972 - RNA, 19 nt, Homo sapiens
  misc_RNA (1)...(19): siRNA sense strand
gugcaaagauccaccuuac

SEQ ID NO: 1848973 - RNA, 19 nt, Homo sapiens
  misc_RNA (1)...(19): siRNA sense strand
agaguuaccuggaaacauc

SEQ ID NO: 1848974 - RNA, 19 nt, Homo sapiens
  misc_RNA (1)...(19): siRNA sense strand
gaagugaaaaguccaauaa

SEQ ID NO: 1848975 - RNA, 19 nt, Homo sapiens
  misc_RNA (1)...(19): siRNA sense strand
auaagaaggcuccuaguaa

SEQ ID NO: 1848976 - RNA, 19 nt, Homo sapiens
  misc_RNA (1)...(19): siRNA sense strand
caaggaagaaccuaggaaa

SEQ ID NO: 1848977 - RNA, 19 nt, Homo sapiens
  misc_RNA (1)...(19): siRNA sense strand
cgacaaugacucugaaaug

SEQ ID NO: 1848978 - RNA, 19 nt, Homo sapiens
  misc_RNA (1)...(19): siRNA sense strand
caacguuaccgccauuuga

SEQ ID NO: 1848979 - RNA, 19 nt, Homo sapiens
  misc_RNA (1)...(19): siRNA sense strand
auaaaccacugaaagaaga

SEQ ID NO: 1848980 - RNA, 19 nt, Homo sapiens
  misc_RNA (1)...(19): siRNA sense strand
gaaccuaaacccaugucaa

SEQ ID NO: 1848981 - RNA, 19 nt, Homo sapiens
  misc_RNA (1)...(19): siRNA sense strand
caucagagaagaagaaauc

SEQ ID NO: 1848982 - RNA, 19 nt, Homo sapiens
  misc_RNA (1)...(19): siRNA sense strand
agauccaccuuacaaagua

SEQ ID NO: 1848983 - RNA, 19 nt, Homo sapiens
  misc_RNA (1)...(19): siRNA sense strand
gacaaggcauaccuagaug

SEQ ID NO: 1848984 - RNA, 19 nt, Homo sapiens
  misc_RNA (1)...(19): siRNA sense strand
ccacugauacucacuuguu

SEQ ID NO: 1848985 - RNA, 19 nt, Homo sapiens
  misc_RNA (1)...(19): siRNA sense strand
caaagauccaccuuacaaa

SEQ ID NO: 1848986 - RNA, 19 nt, Homo sapiens
  misc_RNA (1)...(19): siRNA sense strand
ugacaaggcauaccuagau

SEQ ID NO: 1848987 - RNA, 19 nt, Homo sapiens
  misc_RNA (1)...(19): siRNA sense strand
ccagauucuugaagugaaa

SEQ ID NO: 1848988 - RNA, 19 nt, Homo sapiens
  misc_RNA (1)...(19): siRNA sense strand
caaccagauucuugaagug

SEQ ID NO: 1848989 - RNA, 19 nt, Homo sapiens
  misc_RNA (1)...(19): siRNA sense strand
uaacauacagcacuuugug

SEQ ID NO: 1848990 - RNA, 19 nt, Homo sapiens
  misc_RNA (1)...(19): siRNA sense strand
ugaggucuauaaugaaaga

SEQ ID NO: 1848991 - RNA, 19 nt, Homo sapiens
  misc_RNA (1)...(19): siRNA sense strand
gaaaauaaaccacugaaag

SEQ ID NO: 1848992 - RNA, 19 nt, Homo sapiens
  misc_RNA (1)...(19): siRNA sense strand
ucuaagaaacccaaagaaa

SEQ ID NO: 1848993 - RNA, 19 nt, Homo sapiens
  misc_RNA (1)...(19): siRNA sense strand
aaacuggacacuuucauau

SEQ ID NO: 1848994 - RNA, 19 nt, Homo sapiens
  misc_RNA (1)...(19): siRNA sense strand
gcaaagcaaaucagauaag

SEQ ID NO: 1848995 - RNA, 19 nt, Homo sapiens
  misc_RNA (1)...(19): siRNA sense strand
uagcucagaggcuuuauuu

SEQ ID NO: 1848996 - RNA, 19 nt, Homo sapiens
  misc_RNA (1)...(19): siRNA sense strand
ccacuugcacgaaagcuuu

SEQ ID NO: 1848997 - RNA, 19 nt, Homo sapiens
  misc_RNA (1)...(19): siRNA sense strand
cacagaagguuaaugacau

SEQ ID NO: 1848998 - RNA, 19 nt, Homo sapiens
  misc_RNA (1)...(19): siRNA sense strand
cagaggacuuuaggagaaa

SEQ ID NO: 1848999 - RNA, 19 nt, Homo sapiens
  misc_RNA (1)...(19): siRNA sense strand
gauggcagcgauagugaaa

SEQ ID NO: 1849000 - RNA, 19 nt, Homo sapiens
  misc_RNA (1)...(19): siRNA sense strand
gcagaguuagcuuaaguga

SEQ ID NO: 1849001 - RNA, 19 nt, Homo sapiens
  misc_RNA (1)...(19): siRNA sense strand
aagaagaaaucaacguuac

SEQ ID NO: 1849002 - RNA, 19 nt, Homo sapiens
  misc_RNA (1)...(19): siRNA sense strand
uccaaagaauccucuaaga

SEQ ID NO: 1849003 - RNA, 19 nt, Homo sapiens
  misc_RNA (1)...(19): siRNA sense strand
ccaauaaagcaaagcaaau

SEQ ID NO: 1849004 - RNA, 19 nt, Homo sapiens
  misc_RNA (1)...(19): siRNA sense strand
guagaagaaucuggguaug

SEQ ID NO: 1849005 - RNA, 19 nt, Homo sapiens
  misc_RNA (1)...(19): siRNA sense strand
aaagaauccucuaagaaac

SEQ ID NO: 1849006 - RNA, 19 nt, Homo sapiens
  misc_RNA (1)...(19): siRNA sense strand
ucaaagccucacaaauuaa

SEQ ID NO: 1849007 - RNA, 19 nt, Homo sapiens
  misc_RNA (1)...(19): siRNA sense strand
ucgugaaccuuauagaaga

SEQ ID NO: 1849008 - RNA, 19 nt, Homo sapiens
  misc_RNA (1)...(19): siRNA sense strand
caacaaccagauucuugaa

SEQ ID NO: 1849009 - RNA, 19 nt, Homo sapiens
  misc_RNA (1)...(19): siRNA sense strand
caaagccucacaaauuaau

SEQ ID NO: 1849010 - RNA, 19 nt, Homo sapiens
  misc_RNA (1)...(19): siRNA sense strand
uaaaagugccuucaaagaa

SEQ ID NO: 1849011 - RNA, 19 nt, Homo sapiens
  misc_RNA (1)...(19): siRNA sense strand
caaggcauaccuagaugaa

SEQ ID NO: 1849012 - RNA, 19 nt, Homo sapiens
  misc_RNA (1)...(19): siRNA sense strand
uaaagcaaagcaaaucaga

SEQ ID NO: 1849013 - RNA, 19 nt, Homo sapiens
  misc_RNA (1)...(19): siRNA sense strand
caauaaagcaaagcaaauc

SEQ ID NO: 1849014 - RNA, 19 nt, Homo sapiens
  misc_RNA (1)...(19): siRNA sense strand
uggguaugcugguuucauu

SEQ ID NO: 1849015 - RNA, 19 nt, Homo sapiens
  misc_RNA (1)...(19): siRNA sense strand
cagccgaagucgcagaguu

SEQ ID NO: 1849016 - RNA, 19 nt, Homo sapiens
  misc_RNA (1)...(19): siRNA sense strand
aaagugagacaucagagaa

SEQ ID NO: 1849017 - RNA, 19 nt, Homo sapiens
  misc_RNA (1)...(19): siRNA sense strand
caucaccaguggacaagau

SEQ ID NO: 1849018 - RNA, 19 nt, Homo sapiens
  misc_RNA (1)...(19): siRNA sense strand
cacaacaaaucuuccaaag

SEQ ID NO: 1849019 - RNA, 19 nt, Homo sapiens
  misc_RNA (1)...(19): siRNA sense strand
ccagggaucacaacaaauc

SEQ ID NO: 1849020 - RNA, 19 nt, Homo sapiens
  misc_RNA (1)...(19): siRNA sense strand
gcagcaguaguaccaguuu

SEQ ID NO: 1849021 - RNA, 19 nt, Homo sapiens
  misc_RNA (1)...(19): siRNA sense strand
acuggacacuuucauauca

SEQ ID NO: 1849022 - RNA, 19 nt, Homo sapiens
  misc_RNA (1)...(19): siRNA sense strand
caaagcaaaucagauaagc

SEQ ID NO: 1849023 - RNA, 19 nt, Homo sapiens
  misc_RNA (1)...(19): siRNA sense strand
gccauuugaugauauugug

SEQ ID NO: 1849024 - RNA, 19 nt, Homo sapiens
  misc_RNA (1)...(19): siRNA sense strand
ucacaacaaaucuuccaaa

SEQ ID NO: 1849025 - RNA, 19 nt, Homo sapiens
  misc_RNA (1)...(19): siRNA sense strand
gagaaaauaguuccuaaga

SEQ ID NO: 1849026 - RNA, 19 nt, Homo sapiens
  misc_RNA (1)...(19): siRNA sense strand
ucacagaagguuaaugaca

SEQ ID NO: 1849027 - RNA, 19 nt, Homo sapiens
  misc_RNA (1)...(19): siRNA sense strand
acaaccagauucuugaagu

SEQ ID NO: 1849028 - RNA, 19 nt, Homo sapiens
  misc_RNA (1)...(19): siRNA sense strand
ucgcagaguuagcuuaagu

SEQ ID NO: 1849029 - RNA, 19 nt, Homo sapiens
  misc_RNA (1)...(19): siRNA sense strand
acaaugaggaggaaucaga

SEQ ID NO: 1849030 - RNA, 19 nt, Homo sapiens
  misc_RNA (1)...(19): siRNA sense strand
ggucuauaaugaaagaucu

SEQ ID NO: 1849031 - RNA, 19 nt, Homo sapiens
  misc_RNA (1)...(19): siRNA sense strand
gcaccaccacugauacuca

SEQ ID NO: 1849032 - RNA, 19 nt, Homo sapiens
  misc_RNA (1)...(19): siRNA sense strand
aaccuaaacccaugucaaa

SEQ ID NO: 1849033 - RNA, 19 nt, Homo sapiens
  misc_RNA (1)...(19): siRNA sense strand
uuccagggaucacaacaaa

SEQ ID NO: 1849034 - RNA, 19 nt, Homo sapiens
  misc_RNA (1)...(19): siRNA sense strand
aagcaaaucagauaagcaa

SEQ ID NO: 1849035 - RNA, 19 nt, Homo sapiens
  misc_RNA (1)...(19): siRNA sense strand
caacaacaaccagauucuu

SEQ ID NO: 1849036 - RNA, 19 nt, Homo sapiens
  misc_RNA (1)...(19): siRNA sense strand
gaggaggaaucagaugaag

SEQ ID NO: 1849037 - RNA, 19 nt, Homo sapiens
  misc_RNA (1)...(19): siRNA sense strand
uuaccgccauuugaugaua

SEQ ID NO: 1849038 - RNA, 19 nt, Homo sapiens
  misc_RNA (1)...(19): siRNA sense strand
gaguagcucagaggcuuua

SEQ ID NO: 1849039 - RNA, 19 nt, Homo sapiens
  misc_RNA (1)...(19): siRNA sense strand
ggaugaagcugaacuuuga

SEQ ID NO: 1849040 - RNA, 19 nt, Homo sapiens
  misc_RNA (1)...(19): siRNA sense strand
ggaaggagcucccagacaa

SEQ ID NO: 1849041 - RNA, 19 nt, Homo sapiens
  misc_RNA (1)...(19): siRNA sense strand
caaagaaccuccaguccua

SEQ ID NO: 1849042 - RNA, 19 nt, Homo sapiens
  misc_RNA (1)...(19): siRNA sense strand
gcaaguacguguuugagaa

SEQ ID NO: 1849043 - RNA, 19 nt, Homo sapiens
  misc_RNA (1)...(19): siRNA sense strand
ggacguggcuuccaucuuc

SEQ ID NO: 1849044 - RNA, 19 nt, Homo sapiens
  misc_RNA (1)...(19): siRNA sense strand
gaugaaagaugguguggaa

SEQ ID NO: 1849045 - RNA, 19 nt, Homo sapiens
  misc_RNA (1)...(19): siRNA sense strand
gaagggagaugagguauuc

SEQ ID NO: 1849046 - RNA, 19 nt, Homo sapiens
  misc_RNA (1)...(19): siRNA sense strand
gcaagaggaucaccauuuc

SEQ ID NO: 1849047 - RNA, 19 nt, Homo sapiens
  misc_RNA (1)...(19): siRNA sense strand
gaacguaacaggcacacua

SEQ ID NO: 1849048 - RNA, 19 nt, Homo sapiens
  misc_RNA (1)...(19): siRNA sense strand
ucaaaccguucgaguauaa

SEQ ID NO: 1849049 - RNA, 19 nt, Homo sapiens
  misc_RNA (1)...(19): siRNA sense strand
ugaaguagcugucaaggau

SEQ ID NO: 1849050 - RNA, 19 nt, Homo sapiens
  misc_RNA (1)...(19): siRNA sense strand
ucacagagaccaccuauga

SEQ ID NO: 1849051 - RNA, 19 nt, Homo sapiens
  misc_RNA (1)...(19): siRNA sense strand
ggaugacgcugccuaugaa

SEQ ID NO: 1849052 - RNA, 19 nt, Homo sapiens
  misc_RNA (1)...(19): siRNA sense strand
gaagagcgaguacgagaaa

SEQ ID NO: 1849053 - RNA, 19 nt, Homo sapiens
  misc_RNA (1)...(19): siRNA sense strand
gaucccaaguuccugauaa

SEQ ID NO: 1849054 - RNA, 19 nt, Homo sapiens
  misc_RNA (1)...(19): siRNA sense strand
cgaggugucugaugagaaa

SEQ ID NO: 1849055 - RNA, 19 nt, Homo sapiens
  misc_RNA (1)...(19): siRNA sense strand
gauaaccaauuaccaagga

SEQ ID NO: 1849056 - RNA, 19 nt, Homo sapiens
  misc_RNA (1)...(19): siRNA sense strand
gggaagaccucagagaaug

SEQ ID NO: 1849057 - RNA, 19 nt, Homo sapiens
  misc_RNA (1)...(19): siRNA sense strand
gaaagaugacgaugaccua

SEQ ID NO: 1849058 - RNA, 19 nt, Homo sapiens
  misc_RNA (1)...(19): siRNA sense strand
caagaagagugcagcauuc

SEQ ID NO: 1849059 - RNA, 19 nt, Homo sapiens
  misc_RNA (1)...(19): siRNA sense strand
gaaaaucgccuuccaguau

SEQ ID NO: 1849060 - RNA, 19 nt, Homo sapiens
  misc_RNA (1)...(19): siRNA sense strand
gaucaccauuucccaugua

SEQ ID NO: 1849061 - RNA, 19 nt, Homo sapiens
  misc_RNA (1)...(19): siRNA sense strand
gaacaucugugggcucagu

SEQ ID NO: 1849062 - RNA, 19 nt, Homo sapiens
  misc_RNA (1)...(19): siRNA sense strand
ucaguggccuguugaagaa

SEQ ID NO: 1849063 - RNA, 19 nt, Homo sapiens
  misc_RNA (1)...(19): siRNA sense strand
gcuaucaggucauaaccaa

SEQ ID NO: 1849064 - RNA, 19 nt, Homo sapiens
  misc_RNA (1)...(19): siRNA sense strand
ggacagaggcaacaagauc

SEQ ID NO: 1849065 - RNA, 19 nt, Homo sapiens
  misc_RNA (1)...(19): siRNA sense strand
ggauuucaguggccuguug

SEQ ID NO: 1849066 - RNA, 19 nt, Homo sapiens
  misc_RNA (1)...(19): siRNA sense strand
gaaccuccaguccuaauug

SEQ ID NO: 1849067 - RNA, 19 nt, Homo sapiens
  misc_RNA (1)...(19): siRNA sense strand
gaaagaugguguggaacug

SEQ ID NO: 1849068 - RNA, 19 nt, Homo sapiens
  misc_RNA (1)...(19): siRNA sense strand
ggaguacguucccaagcaa

SEQ ID NO: 1849069 - RNA, 19 nt, Homo sapiens
  misc_RNA (1)...(19): siRNA sense strand
ucaccgagcucuucgucaa

SEQ ID NO: 1849070 - RNA, 19 nt, Homo sapiens
  misc_RNA (1)...(19): siRNA sense strand
aaagaaagaugacgaugac

SEQ ID NO: 1849071 - RNA, 19 nt, Homo sapiens
  misc_RNA (1)...(19): siRNA sense strand
ccaaguuccugauaaccaa

SEQ ID NO: 1849072 - RNA, 19 nt, Homo sapiens
  misc_RNA (1)...(19): siRNA sense strand
gaagagugcagcauucaca

SEQ ID NO: 1849073 - RNA, 19 nt, Homo sapiens
  misc_RNA (1)...(19): siRNA sense strand
gcaugaacaccaagccuuu

SEQ ID NO: 1849074 - RNA, 19 nt, Homo sapiens
  misc_RNA (1)...(19): siRNA sense strand
gcagcagcuuugugauuga

SEQ ID NO: 1849075 - RNA, 19 nt, Homo sapiens
  misc_RNA (1)...(19): siRNA sense strand
gagggagacuacacguuug

SEQ ID NO: 1849076 - RNA, 19 nt, Homo sapiens
  misc_RNA (1)...(19): siRNA sense strand
ggugaaggccucagaacaa

SEQ ID NO: 1849077 - RNA, 19 nt, Homo sapiens
  misc_RNA (1)...(19): siRNA sense strand
gugcagcauucacaaagaa

SEQ ID NO: 1849078 - RNA, 19 nt, Homo sapiens
  misc_RNA (1)...(19): siRNA sense strand
caaagaagagcgaguacga

SEQ ID NO: 1849079 - RNA, 19 nt, Homo sapiens
  misc_RNA (1)...(19): siRNA sense strand
ucaaggaugagaaguguuu

SEQ ID NO: 1849080 - RNA, 19 nt, Homo sapiens
  misc_RNA (1)...(19): siRNA sense strand
gaaaagaagucggauacug

SEQ ID NO: 1849081 - RNA, 19 nt, Homo sapiens
  misc_RNA (1)...(19): siRNA sense strand
ccggauggcucccaaguuc

SEQ ID NO: 1849082 - RNA, 19 nt, Homo sapiens
  misc_RNA (1)...(19): siRNA sense strand
ugagggagacuacacguuu

SEQ ID NO: 1849083 - RNA, 19 nt, Homo sapiens
  misc_RNA (1)...(19): siRNA sense strand
uaaacgugauggugaagga

SEQ ID NO: 1849084 - RNA, 19 nt, Homo sapiens
  misc_RNA (1)...(19): siRNA sense strand
gaaggagcucccagacaaa

SEQ ID NO: 1849085 - RNA, 19 nt, Homo sapiens
  misc_RNA (1)...(19): siRNA sense strand
agacaggaaucaccuucaa

SEQ ID NO: 1849086 - RNA, 19 nt, Homo sapiens
  misc_RNA (1)...(19): siRNA sense strand
gggcaaagaagagcgagua

SEQ ID NO: 1849087 - RNA, 19 nt, Homo sapiens
  misc_RNA (1)...(19): siRNA sense strand
ugacgcugccuaugaagua

SEQ ID NO: 1849088 - RNA, 19 nt, Homo sapiens
  misc_RNA (1)...(19): siRNA sense strand
agaaugcgauugugguugu

SEQ ID NO: 1849089 - RNA, 19 nt, Homo sapiens
  misc_RNA (1)...(19): siRNA sense strand
caguggaggugucagaaga

SEQ ID NO: 1849090 - RNA, 19 nt, Homo sapiens
  misc_RNA (1)...(19): siRNA sense strand
ucaagaagagugcagcauu

SEQ ID NO: 1849091 - RNA, 19 nt, Homo sapiens
  misc_RNA (1)...(19): siRNA sense strand
gaacuuugaggucuucaca

SEQ ID NO: 1849092 - RNA, 19 nt, Homo sapiens
  misc_RNA (1)...(19): siRNA sense strand
ggaagaagaagggcucuca

SEQ ID NO: 1849093 - RNA, 19 nt, Homo sapiens
  misc_RNA (1)...(19): siRNA sense strand
gcaagagccaccaaagauc

SEQ ID NO: 1849094 - RNA, 19 nt, Homo sapiens
  misc_RNA (1)...(19): siRNA sense strand
gaacugacucgggaggauu

SEQ ID NO: 1849095 - RNA, 19 nt, Homo sapiens
  misc_RNA (1)...(19): siRNA sense strand
gcaagugguauaagaaugg

SEQ ID NO: 1849096 - RNA, 19 nt, Homo sapiens
  misc_RNA (1)...(19): siRNA sense strand
gaacggccaggagaucaaa

SEQ ID NO: 1849097 - RNA, 19 nt, Homo sapiens
  misc_RNA (1)...(19): siRNA sense strand
gugcagaucgagaacauga

SEQ ID NO: 1849098 - RNA, 19 nt, Homo sapiens
  misc_RNA (1)...(19): siRNA sense strand
gcugaagggagaugaggua

SEQ ID NO: 1849099 - RNA, 19 nt, Homo sapiens
  misc_RNA (1)...(19): siRNA sense strand
ggaacugacucgggaggau

SEQ ID NO: 1849100 - RNA, 19 nt, Homo sapiens
  misc_RNA (1)...(19): siRNA sense strand
ugagaacguugguaagaag

SEQ ID NO: 1849101 - RNA, 19 nt, Homo sapiens
  misc_RNA (1)...(19): siRNA sense strand
gcagcaaguacguguuuga

SEQ ID NO: 1849102 - RNA, 19 nt, Homo sapiens
  misc_RNA (1)...(19): siRNA sense strand
caggugagcuggauuucag

SEQ ID NO: 1849103 - RNA, 19 nt, Homo sapiens
  misc_RNA (1)...(19): siRNA sense strand
ggaugaagaacaagaugga

SEQ ID NO: 1849104 - RNA, 19 nt, Homo sapiens
  misc_RNA (1)...(19): siRNA sense strand
agaauccucuuccgaguag

SEQ ID NO: 1849105 - RNA, 19 nt, Homo sapiens
  misc_RNA (1)...(19): siRNA sense strand
ggcaagugguauaagaaug

SEQ ID NO: 1849106 - RNA, 19 nt, Homo sapiens
  misc_RNA (1)...(19): siRNA sense strand
ucgcggaucugacggugaa

SEQ ID NO: 1849107 - RNA, 19 nt, Homo sapiens
  misc_RNA (1)...(19): siRNA sense strand
caaagaugaugggaacagu

SEQ ID NO: 1849108 - RNA, 19 nt, Homo sapiens
  misc_RNA (1)...(19): siRNA sense strand
ccacaacuccgccagcaau

SEQ ID NO: 1849109 - RNA, 19 nt, Homo sapiens
  misc_RNA (1)...(19): siRNA sense strand
ggaucaccauuucccaugu

SEQ ID NO: 1849110 - RNA, 19 nt, Homo sapiens
  misc_RNA (1)...(19): siRNA sense strand
gcaggacccgcaucgagaa

SEQ ID NO: 1849111 - RNA, 19 nt, Homo sapiens
  misc_RNA (1)...(19): siRNA sense strand
ggauccagccuaccaagug

SEQ ID NO: 1849112 - RNA, 19 nt, Homo sapiens
  misc_RNA (1)...(19): siRNA sense strand
acaagcuggugaucgauga

SEQ ID NO: 1849113 - RNA, 19 nt, Homo sapiens
  misc_RNA (1)...(19): siRNA sense strand
caggugauguggaugaaag

SEQ ID NO: 1849114 - RNA, 19 nt, Homo sapiens
  misc_RNA (1)...(19): siRNA sense strand
cuaauugucacaccucuug

SEQ ID NO: 1849115 - RNA, 19 nt, Homo sapiens
  misc_RNA (1)...(19): siRNA sense strand
ugacagcuguggcuucaac

SEQ ID NO: 1849116 - RNA, 19 nt, Homo sapiens
  misc_RNA (1)...(19): siRNA sense strand
aagguggucuggaugaaga

SEQ ID NO: 1849117 - RNA, 19 nt, Homo sapiens
  misc_RNA (1)...(19): siRNA sense strand
cagaauccucuuccgagua

SEQ ID NO: 1849118 - RNA, 19 nt, Homo sapiens
  misc_RNA (1)...(19): siRNA sense strand
ggaaggcuccgaggaaugg

SEQ ID NO: 1849119 - RNA, 19 nt, Homo sapiens
  misc_RNA (1)...(19): siRNA sense strand
gcgaggacguggcuuccau

SEQ ID NO: 1849120 - RNA, 19 nt, Homo sapiens
  misc_RNA (1)...(19): siRNA sense strand
ggcagagucuagaaagcuu

SEQ ID NO: 1849121 - RNA, 19 nt, Homo sapiens
  misc_RNA (1)...(19): siRNA sense strand
cggaugacgcugccuauga

SEQ ID NO: 1849122 - RNA, 19 nt, Homo sapiens
  misc_RNA (1)...(19): siRNA sense strand
uaucaggucauaaccaaug

SEQ ID NO: 1849123 - RNA, 19 nt, Homo sapiens
  misc_RNA (1)...(19): siRNA sense strand
ugaagaacaagauggaaau

SEQ ID NO: 1849124 - RNA, 19 nt, Homo sapiens
  misc_RNA (1)...(19): siRNA sense strand
cgaagguggucuggaugaa

SEQ ID NO: 1849125 - RNA, 19 nt, Homo sapiens
  misc_RNA (1)...(19): siRNA sense strand
cgugggcaaugaauacuau

SEQ ID NO: 1849126 - RNA, 19 nt, Homo sapiens
  misc_RNA (1)...(19): siRNA sense strand
uuugaggucuucacagaga

SEQ ID NO: 1849127 - RNA, 19 nt, Homo sapiens
  misc_RNA (1)...(19): siRNA sense strand
guauaaggagcaugacuuc

SEQ ID NO: 1849128 - RNA, 19 nt, Homo sapiens
  misc_RNA (1)...(19): siRNA sense strand
cuucaaaccguucgaguau

SEQ ID NO: 1849129 - RNA, 19 nt, Homo sapiens
  misc_RNA (1)...(19): siRNA sense strand
auggguaccugguggagua

SEQ ID NO: 1849130 - RNA, 19 nt, Homo sapiens
  misc_RNA (1)...(19): siRNA sense strand
gauaguggaggaugugaca

SEQ ID NO: 1849131 - RNA, 19 nt, Homo sapiens
  misc_RNA (1)...(19): siRNA sense strand
gaggcaacaagaucaaguu

SEQ ID NO: 1849132 - RNA, 19 nt, Homo sapiens
  misc_RNA (1)...(19): siRNA sense strand
ugcagcagcuuugugauug

SEQ ID NO: 1849133 - RNA, 19 nt, Homo sapiens
  misc_RNA (1)...(19): siRNA sense strand
gugaaggccucagaacaag

SEQ ID NO: 1849134 - RNA, 19 nt, Homo sapiens
  misc_RNA (1)...(19): siRNA sense strand
ugucaaggaugagaagugu

SEQ ID NO: 1849135 - RNA, 19 nt, Homo sapiens
  misc_RNA (1)...(19): siRNA sense strand
aaguagcugucaaggauga

SEQ ID NO: 1849136 - RNA, 19 nt, Homo sapiens
  misc_RNA (1)...(19): siRNA sense strand
gaugaugggaacagugaga

SEQ ID NO: 1849137 - RNA, 19 nt, Homo sapiens
  misc_RNA (1)...(19): siRNA sense strand
gaagaacaagauggaaauc

SEQ ID NO: 1849138 - RNA, 19 nt, Homo sapiens
  misc_RNA (1)...(19): siRNA sense strand
gacaggaaucaccuucaaa

SEQ ID NO: 1849139 - RNA, 19 nt, Homo sapiens
  misc_RNA (1)...(19): siRNA sense strand
gaaggauccugacagauua

SEQ ID NO: 1849140 - RNA, 19 nt, Homo sapiens
  misc_RNA (1)...(19): siRNA sense strand
guauguggcugaaaucuug

SEQ ID NO: 1849141 - RNA, 19 nt, Homo sapiens
  misc_RNA (1)...(19): siRNA sense strand
gcagccaacugguaugaaa

SEQ ID NO: 1849142 - RNA, 19 nt, Homo sapiens
  misc_RNA (1)...(19): siRNA sense strand
gagaguauguggcugaaau

SEQ ID NO: 1849143 - RNA, 19 nt, Homo sapiens
  misc_RNA (1)...(19): siRNA sense strand
uaagaaggauccugacaga

SEQ ID NO: 1849144 - RNA, 19 nt, Homo sapiens
  misc_RNA (1)...(19): siRNA sense strand
uaaccacccugaucuaaga

SEQ ID NO: 1849145 - RNA, 19 nt, Homo sapiens
  misc_RNA (1)...(19): siRNA sense strand
gugaagaccuacacagaug

SEQ ID NO: 1849146 - RNA, 19 nt, Homo sapiens
  misc_RNA (1)...(19): siRNA sense strand
ccaaguauguccaacaagu

SEQ ID NO: 1849147 - RNA, 19 nt, Homo sapiens
  misc_RNA (1)...(19): siRNA sense strand
agaaggauccugacagauu

SEQ ID NO: 1849148 - RNA, 19 nt, Homo sapiens
  misc_RNA (1)...(19): siRNA sense strand
caagaguuccgcaaauuug

SEQ ID NO: 1849149 - RNA, 19 nt, Homo sapiens
  misc_RNA (1)...(19): siRNA sense strand
gcccaaguauguccaacaa

SEQ ID NO: 1849150 - RNA, 19 nt, Homo sapiens
  misc_RNA (1)...(19): siRNA sense strand
ccaagaguuccgcaaauuu

SEQ ID NO: 1849151 - RNA, 19 nt, Homo sapiens
  misc_RNA (1)...(19): siRNA sense strand
ugaguuacguuaugaugau

SEQ ID NO: 1849152 - RNA, 19 nt, Homo sapiens
  misc_RNA (1)...(19): siRNA sense strand
ucacaccaaugcacaguuc

SEQ ID NO: 1849153 - RNA, 19 nt, Homo sapiens
  misc_RNA (1)...(19): siRNA sense strand
gcccaagaguuccgcaaau

SEQ ID NO: 1849154 - RNA, 19 nt, Homo sapiens
  misc_RNA (1)...(19): siRNA sense strand
cccaagaguuccgcaaauu

SEQ ID NO: 1849155 - RNA, 19 nt, Homo sapiens
  misc_RNA (1)...(19): siRNA sense strand
gcuaaccacccugaucuaa

SEQ ID NO: 1849156 - RNA, 19 nt, Homo sapiens
  misc_RNA (1)...(19): siRNA sense strand
ccucagggaucacaccaau

SEQ ID NO: 1849157 - RNA, 19 nt, Homo sapiens
  misc_RNA (1)...(19): siRNA sense strand
gaagccugaugccaaguag

SEQ ID NO: 1849158 - RNA, 19 nt, Homo sapiens
  misc_RNA (1)...(19): siRNA sense strand
ccaaugcacaguucaaauc

SEQ ID NO: 1849159 - RNA, 19 nt, Homo sapiens
  misc_RNA (1)...(19): siRNA sense strand
uggcagagccgguggaguu

SEQ ID NO: 1849160 - RNA, 19 nt, Homo sapiens
  misc_RNA (1)...(19): siRNA sense strand
caaggcagccaacugguau

SEQ ID NO: 1849161 - RNA, 19 nt, Homo sapiens
  misc_RNA (1)...(19): siRNA sense strand
uauguugaguuacguuaug

SEQ ID NO: 1849162 - RNA, 19 nt, Homo sapiens
  misc_RNA (1)...(19): siRNA sense strand
ucaaggcagccaacuggua

SEQ ID NO: 1849163 - RNA, 19 nt, Homo sapiens
  misc_RNA (1)...(19): siRNA sense strand
caaguauguccaacaaguu

SEQ ID NO: 1849164 - RNA, 19 nt, Homo sapiens
  misc_RNA (1)...(19): siRNA sense strand
gcuauguugaguuacguua

SEQ ID NO: 1849165 - RNA, 19 nt, Homo sapiens
  misc_RNA (1)...(19): siRNA sense strand
gagcugacgcccauugagu

SEQ ID NO: 1849166 - RNA, 19 nt, Homo sapiens
  misc_RNA (1)...(19): siRNA sense strand
ggauccgugugaagaccua

SEQ ID NO: 1849167 - RNA, 19 nt, Homo sapiens
  misc_RNA (1)...(19): siRNA sense strand
gaugagcugacgcccauug

SEQ ID NO: 1849168 - RNA, 19 nt, Homo sapiens
  misc_RNA (1)...(19): siRNA sense strand
ugacuuuccucagggauca

SEQ ID NO: 1849169 - RNA, 19 nt, Homo sapiens
  misc_RNA (1)...(19): siRNA sense strand
uuuggagucuucuuugcua

SEQ ID NO: 1849170 - RNA, 19 nt, Homo sapiens
  misc_RNA (1)...(19): siRNA sense strand
ccgcaaauuugaccugaac

SEQ ID NO: 1849171 - RNA, 19 nt, Homo sapiens
  misc_RNA (1)...(19): siRNA sense strand
ggagacaagaagccugaug

SEQ ID NO: 1849172 - RNA, 19 nt, Homo sapiens
  misc_RNA (1)...(19): siRNA sense strand
guuacguuaugaugaugaa

SEQ ID NO: 1849173 - RNA, 19 nt, Homo sapiens
  misc_RNA (1)...(19): siRNA sense strand
cauugagucugcugucucu

SEQ ID NO: 1849174 - RNA, 19 nt, Homo sapiens
  misc_RNA (1)...(19): siRNA sense strand
guuaugaugaugaagugaa

SEQ ID NO: 1849175 - RNA, 19 nt, Homo sapiens
  misc_RNA (1)...(19): siRNA sense strand
cauguuuggagucuucuuu

SEQ ID NO: 1849176 - RNA, 19 nt, Homo sapiens
  misc_RNA (1)...(19): siRNA sense strand
gaguuacguuaugaugaug

SEQ ID NO: 1849177 - RNA, 19 nt, Homo sapiens
  misc_RNA (1)...(19): siRNA sense strand
gcaaauuugaccugaacag

SEQ ID NO: 1849178 - RNA, 19 nt, Homo sapiens
  misc_RNA (1)...(19): siRNA sense strand
ucaucccagugcugacuuu

SEQ ID NO: 1849179 - RNA, 19 nt, Homo sapiens
  misc_RNA (1)...(19): siRNA sense strand
gcaguggacgucccaacuc

SEQ ID NO: 1849180 - RNA, 19 nt, Homo sapiens
  misc_RNA (1)...(19): siRNA sense strand
gcgacccuccguucuguug

SEQ ID NO: 1849181 - RNA, 19 nt, Homo sapiens
  misc_RNA (1)...(19): siRNA sense strand
gaagaccuacacagaugag

SEQ ID NO: 1849182 - RNA, 19 nt, Homo sapiens
  misc_RNA (1)...(19): siRNA sense strand
ugaagaccuacacagauga

SEQ ID NO: 1849183 - RNA, 19 nt, Homo sapiens
  misc_RNA (1)...(19): siRNA sense strand
ugaguuagaggucuguauc

SEQ ID NO: 1849184 - RNA, 19 nt, Homo sapiens
  misc_RNA (1)...(19): siRNA sense strand
agaagccugaugccaagua

SEQ ID NO: 1849185 - RNA, 19 nt, Homo sapiens
  misc_RNA (1)...(19): siRNA sense strand
gguaugaaagggagaucug

SEQ ID NO: 1849186 - RNA, 19 nt, Homo sapiens
  misc_RNA (1)...(19): siRNA sense strand
ucagggaucacaccaaugc

SEQ ID NO: 1849187 - RNA, 19 nt, Homo sapiens
  misc_RNA (1)...(19): siRNA sense strand
guccugcuucaaugaguua

SEQ ID NO: 1849188 - RNA, 19 nt, Homo sapiens
  misc_RNA (1)...(19): siRNA sense strand
caccaaugcacaguucaaa

SEQ ID NO: 1849189 - RNA, 19 nt, Homo sapiens
  misc_RNA (1)...(19): siRNA sense strand
ggcccaagaguuccgcaaa

SEQ ID NO: 1849190 - RNA, 19 nt, Homo sapiens
  misc_RNA (1)...(19): siRNA sense strand
ucagaccacggaaugaugu

SEQ ID NO: 1849191 - RNA, 19 nt, Homo sapiens
  misc_RNA (1)...(19): siRNA sense strand
gggauaagcugauaaagga

SEQ ID NO: 1849192 - RNA, 19 nt, Homo sapiens
  misc_RNA (1)...(19): siRNA sense strand
gagaaagagugcaagauag

SEQ ID NO: 1849193 - RNA, 19 nt, Homo sapiens
  misc_RNA (1)...(19): siRNA sense strand
gcacauggaaucgguuaua

SEQ ID NO: 1849194 - RNA, 19 nt, Homo sapiens
  misc_RNA (1)...(19): siRNA sense strand
agagaaagagugcaagaua

SEQ ID NO: 1849195 - RNA, 19 nt, Homo sapiens
  misc_RNA (1)...(19): siRNA sense strand
gaaagagugcaagauagaa

SEQ ID NO: 1849196 - RNA, 19 nt, Homo sapiens
  misc_RNA (1)...(19): siRNA sense strand
gugaacagcccuacaagau

SEQ ID NO: 1849197 - RNA, 19 nt, Homo sapiens
  misc_RNA (1)...(19): siRNA sense strand
gauaaaggaaggaaaguac

SEQ ID NO: 1849198 - RNA, 19 nt, Homo sapiens
  misc_RNA (1)...(19): siRNA sense strand
gcagagaaagagugcaaga

SEQ ID NO: 1849199 - RNA, 19 nt, Homo sapiens
  misc_RNA (1)...(19): siRNA sense strand
auagaucgaugguugacaa

SEQ ID NO: 1849200 - RNA, 19 nt, Homo sapiens
  misc_RNA (1)...(19): siRNA sense strand
gcuggucgaugccaugcuu

SEQ ID NO: 1849201 - RNA, 19 nt, Homo sapiens
  misc_RNA (1)...(19): siRNA sense strand
agaaagagugcaagauaga

SEQ ID NO: 1849202 - RNA, 19 nt, Homo sapiens
  misc_RNA (1)...(19): siRNA sense strand
ucaggaagcagcgggauaa

SEQ ID NO: 1849203 - RNA, 19 nt, Homo sapiens
  misc_RNA (1)...(19): siRNA sense strand
gaucgaugguugacaaucc

SEQ ID NO: 1849204 - RNA, 19 nt, Homo sapiens
  misc_RNA (1)...(19): siRNA sense strand
ggaagcagcgggauaagcu

SEQ ID NO: 1849205 - RNA, 19 nt, Homo sapiens
  misc_RNA (1)...(19): siRNA sense strand
agugcaagauagaauauga

SEQ ID NO: 1849206 - RNA, 19 nt, Homo sapiens
  misc_RNA (1)...(19): siRNA sense strand
gcaagauagaauaugauga

SEQ ID NO: 1849207 - RNA, 19 nt, Homo sapiens
  misc_RNA (1)...(19): siRNA sense strand
gguucggccuuaacauaga

SEQ ID NO: 1849208 - RNA, 19 nt, Homo sapiens
  misc_RNA (1)...(19): siRNA sense strand
gggcagagaaagagugcaa

SEQ ID NO: 1849209 - RNA, 19 nt, Homo sapiens
  misc_RNA (1)...(19): siRNA sense strand
ggugaacagcccuacaaga

SEQ ID NO: 1849210 - RNA, 19 nt, Homo sapiens
  misc_RNA (1)...(19): siRNA sense strand
ugauaaaggaaggaaagua

SEQ ID NO: 1849211 - RNA, 19 nt, Homo sapiens
  misc_RNA (1)...(19): siRNA sense strand
ugaacagcccuacaagaug

SEQ ID NO: 1849212 - RNA, 19 nt, Homo sapiens
  misc_RNA (1)...(19): siRNA sense strand
aagagugcaagauagaaua

SEQ ID NO: 1849213 - RNA, 19 nt, Homo sapiens
  misc_RNA (1)...(19): siRNA sense strand
gugcacauggaaucgguua

SEQ ID NO: 1849214 - RNA, 19 nt, Homo sapiens
  misc_RNA (1)...(19): siRNA sense strand
gugcagguaccaucaggaa

SEQ ID NO: 1849215 - RNA, 19 nt, Homo sapiens
  misc_RNA (1)...(19): siRNA sense strand
gcugauaaaggaaggaaag

SEQ ID NO: 1849216 - RNA, 19 nt, Homo sapiens
  misc_RNA (1)...(19): siRNA sense strand
guuauacucgggcagagaa

SEQ ID NO: 1849217 - RNA, 19 nt, Homo sapiens
  misc_RNA (1)...(19): siRNA sense strand
aaagagugcaagauagaau

SEQ ID NO: 1849218 - RNA, 19 nt, Homo sapiens
  misc_RNA (1)...(19): siRNA sense strand
guggugaacagcccuacaa

SEQ ID NO: 1849219 - RNA, 19 nt, Homo sapiens
  misc_RNA (1)...(19): siRNA sense strand
guucggccuuaacauagau

SEQ ID NO: 1849220 - RNA, 19 nt, Homo sapiens
  misc_RNA (1)...(19): siRNA sense strand
ggauaagcugauaaaggaa

SEQ ID NO: 1849221 - RNA, 19 nt, Homo sapiens
  misc_RNA (1)...(19): siRNA sense strand
cacauggaaucgguuauac

SEQ ID NO: 1849222 - RNA, 19 nt, Homo sapiens
  misc_RNA (1)...(19): siRNA sense strand
cauggaaucgguuauacuc

SEQ ID NO: 1849223 - RNA, 19 nt, Homo sapiens
  misc_RNA (1)...(19): siRNA sense strand
gauaaagacuacaggagaa

SEQ ID NO: 1849224 - RNA, 19 nt, Homo sapiens
  misc_RNA (1)...(19): siRNA sense strand
agaaagaggugaaugaaaa

SEQ ID NO: 1849225 - RNA, 19 nt, Homo sapiens
  misc_RNA (1)...(19): siRNA sense strand
guuuguaggucgucagaaa

SEQ ID NO: 1849226 - RNA, 19 nt, Homo sapiens
  misc_RNA (1)...(19): siRNA sense strand
gguggagacucgggugaua

SEQ ID NO: 1849227 - RNA, 19 nt, Homo sapiens
  misc_RNA (1)...(19): siRNA sense strand
caggagaauucgguuugua

SEQ ID NO: 1849228 - RNA, 19 nt, Homo sapiens
  misc_RNA (1)...(19): siRNA sense strand
aaacuuugccauugauuug

SEQ ID NO: 1849229 - RNA, 19 nt, Homo sapiens
  misc_RNA (1)...(19): siRNA sense strand
ucagacagcaccaccacua

SEQ ID NO: 1849230 - RNA, 19 nt, Homo sapiens
  misc_RNA (1)...(19): siRNA sense strand
acacuggccagguuuauga

SEQ ID NO: 1849231 - RNA, 19 nt, Homo sapiens
  misc_RNA (1)...(19): siRNA sense strand
cagaaagaggugaaugaaa

SEQ ID NO: 1849232 - RNA, 19 nt, Homo sapiens
  misc_RNA (1)...(19): siRNA sense strand
ggccagguuuaugaugaua

SEQ ID NO: 1849233 - RNA, 19 nt, Homo sapiens
  misc_RNA (1)...(19): siRNA sense strand
aaacuuggacaaagaaaca

SEQ ID NO: 1849234 - RNA, 19 nt, Homo sapiens
  misc_RNA (1)...(19): siRNA sense strand
ucagaaagaggugaaugaa

SEQ ID NO: 1849235 - RNA, 19 nt, Homo sapiens
  misc_RNA (1)...(19): siRNA sense strand
gcacacuggccagguuuau

SEQ ID NO: 1849236 - RNA, 19 nt, Homo sapiens
  misc_RNA (1)...(19): siRNA sense strand
gucagaaagaggugaauga

SEQ ID NO: 1849237 - RNA, 19 nt, Homo sapiens
  misc_RNA (1)...(19): siRNA sense strand
uaaagacuacaggagaauu

SEQ ID NO: 1849238 - RNA, 19 nt, Homo sapiens
  misc_RNA (1)...(19): siRNA sense strand
agaggugaaugaaaacuuu

SEQ ID NO: 1849239 - RNA, 19 nt, Homo sapiens
  misc_RNA (1)...(19): siRNA sense strand
cuggccagguuuaugauga

SEQ ID NO: 1849240 - RNA, 19 nt, Homo sapiens
  misc_RNA (1)...(19): siRNA sense strand
cuacaggagaauucgguuu

SEQ ID NO: 1849241 - RNA, 19 nt, Homo sapiens
  misc_RNA (1)...(19): siRNA sense strand
aaagacuacaggagaauuc

SEQ ID NO: 1849242 - RNA, 19 nt, Homo sapiens
  misc_RNA (1)...(19): siRNA sense strand
uacaggagaauucgguuug

SEQ ID NO: 1849243 - RNA, 19 nt, Homo sapiens
  misc_RNA (1)...(19): siRNA sense strand
gagaauucgguuuguaggu

SEQ ID NO: 1849244 - RNA, 19 nt, Homo sapiens
  misc_RNA (1)...(19): siRNA sense strand
acaggagaauucgguuugu

SEQ ID NO: 1849245 - RNA, 19 nt, Homo sapiens
  misc_RNA (1)...(19): siRNA sense strand
cacgcacacuggccagguu

SEQ ID NO: 1849246 - RNA, 19 nt, Homo sapiens
  misc_RNA (1)...(19): siRNA sense strand
ggaauuggauaucaucuau

SEQ ID NO: 1849247 - RNA, 19 nt, Homo sapiens
  misc_RNA (1)...(19): siRNA sense strand
gaaacacaauccucagaaa

SEQ ID NO: 1849248 - RNA, 19 nt, Homo sapiens
  misc_RNA (1)...(19): siRNA sense strand
ggacauaagaagauaauug

SEQ ID NO: 1849249 - RNA, 19 nt, Homo sapiens
  misc_RNA (1)...(19): siRNA sense strand
gaauuggauuuguugguuu

SEQ ID NO: 1849250 - RNA, 19 nt, Homo sapiens
  misc_RNA (1)...(19): siRNA sense strand
agucaacacugcuuaguaa

SEQ ID NO: 1849251 - RNA, 19 nt, Homo sapiens
  misc_RNA (1)...(19): siRNA sense strand
gaaaguggguaaagaccau

SEQ ID NO: 1849252 - RNA, 19 nt, Homo sapiens
  misc_RNA (1)...(19): siRNA sense strand
gaggauuucugcaugaaga

SEQ ID NO: 1849253 - RNA, 19 nt, Homo sapiens
  misc_RNA (1)...(19): siRNA sense strand
uaaggugccucacugugua

SEQ ID NO: 1849254 - RNA, 19 nt, Homo sapiens
  misc_RNA (1)...(19): siRNA sense strand
gaggaugucauucaaauug

SEQ ID NO: 1849255 - RNA, 19 nt, Homo sapiens
  misc_RNA (1)...(19): siRNA sense strand
ggagauagaagcagagaug

SEQ ID NO: 1849256 - RNA, 19 nt, Homo sapiens
  misc_RNA (1)...(19): siRNA sense strand
gcccgaaccuguaacuuga

SEQ ID NO: 1849257 - RNA, 19 nt, Homo sapiens
  misc_RNA (1)...(19): siRNA sense strand
ggccacagcacaccacuua

SEQ ID NO: 1849258 - RNA, 19 nt, Homo sapiens
  misc_RNA (1)...(19): siRNA sense strand
gaucugggacuaucugaaa

SEQ ID NO: 1849259 - RNA, 19 nt, Homo sapiens
  misc_RNA (1)...(19): siRNA sense strand
guaaagaccauacguugga

SEQ ID NO: 1849260 - RNA, 19 nt, Homo sapiens
  misc_RNA (1)...(19): siRNA sense strand
cgaauuggauuuguugguu

SEQ ID NO: 1849261 - RNA, 19 nt, Homo sapiens
  misc_RNA (1)...(19): siRNA sense strand
ucacuacucugaccacugu

SEQ ID NO: 1849262 - RNA, 19 nt, Homo sapiens
  misc_RNA (1)...(19): siRNA sense strand
auacaaaggugccaagauc

SEQ ID NO: 1849263 - RNA, 19 nt, Homo sapiens
  misc_RNA (1)...(19): siRNA sense strand
ggacaagggaggcauuaau

SEQ ID NO: 1849264 - RNA, 19 nt, Homo sapiens
  misc_RNA (1)...(19): siRNA sense strand
gagaacucauuacuccaaa

SEQ ID NO: 1849265 - RNA, 19 nt, Homo sapiens
  misc_RNA (1)...(19): siRNA sense strand
gacaggugaugcucgaauu

SEQ ID NO: 1849266 - RNA, 19 nt, Homo sapiens
  misc_RNA (1)...(19): siRNA sense strand
aacauuggcuuuaagaaga

SEQ ID NO: 1849267 - RNA, 19 nt, Homo sapiens
  misc_RNA (1)...(19): siRNA sense strand
gaaaagaucugggacuauc

SEQ ID NO: 1849268 - RNA, 19 nt, Homo sapiens
  misc_RNA (1)...(19): siRNA sense strand
guaacuugaucuugauugu

SEQ ID NO: 1849269 - RNA, 19 nt, Homo sapiens
  misc_RNA (1)...(19): siRNA sense strand
gcaguggcccgaaccugua

SEQ ID NO: 1849270 - RNA, 19 nt, Homo sapiens
  misc_RNA (1)...(19): siRNA sense strand
gaauuuugaugaccuauug

SEQ ID NO: 1849271 - RNA, 19 nt, Homo sapiens
  misc_RNA (1)...(19): siRNA sense strand
ccaaaucuccauugaggaa

SEQ ID NO: 1849272 - RNA, 19 nt, Homo sapiens
  misc_RNA (1)...(19): siRNA sense strand
gaagagcauucuggcugaa

SEQ ID NO: 1849273 - RNA, 19 nt, Homo sapiens
  misc_RNA (1)...(19): siRNA sense strand
gguggcagccuaugaauuc

SEQ ID NO: 1849274 - RNA, 19 nt, Homo sapiens
  misc_RNA (1)...(19): siRNA sense strand
gaucuugauuguucuggau

SEQ ID NO: 1849275 - RNA, 19 nt, Homo sapiens
  misc_RNA (1)...(19): siRNA sense strand
uagcuaagaucgcggagau

SEQ ID NO: 1849276 - RNA, 19 nt, Homo sapiens
  misc_RNA (1)...(19): siRNA sense strand
caacauuggcuuuaagaag

SEQ ID NO: 1849277 - RNA, 19 nt, Homo sapiens
  misc_RNA (1)...(19): siRNA sense strand
uaagaucgcggagauagaa

SEQ ID NO: 1849278 - RNA, 19 nt, Homo sapiens
  misc_RNA (1)...(19): siRNA sense strand
ugaaaccuuugggacauaa

SEQ ID NO: 1849279 - RNA, 19 nt, Homo sapiens
  misc_RNA (1)...(19): siRNA sense strand
gcccaucaccgcuggaauu

SEQ ID NO: 1849280 - RNA, 19 nt, Homo sapiens
  misc_RNA (1)...(19): siRNA sense strand
ggaugucauucaaauugug

SEQ ID NO: 1849281 - RNA, 19 nt, Homo sapiens
  misc_RNA (1)...(19): siRNA sense strand
gcuggaaggcuuuggcauu

SEQ ID NO: 1849282 - RNA, 19 nt, Homo sapiens
  misc_RNA (1)...(19): siRNA sense strand
aaaggccaguuaccagauu

SEQ ID NO: 1849283 - RNA, 19 nt, Homo sapiens
  misc_RNA (1)...(19): siRNA sense strand
gaaggacaagggaggcauu

SEQ ID NO: 1849284 - RNA, 19 nt, Homo sapiens
  misc_RNA (1)...(19): siRNA sense strand
guggaggauuucugcauga

SEQ ID NO: 1849285 - RNA, 19 nt, Homo sapiens
  misc_RNA (1)...(19): siRNA sense strand
uggauguccugaaaccuuu

SEQ ID NO: 1849286 - RNA, 19 nt, Homo sapiens
  misc_RNA (1)...(19): siRNA sense strand
caaacccaaaggccaguua

SEQ ID NO: 1849287 - RNA, 19 nt, Homo sapiens
  misc_RNA (1)...(19): siRNA sense strand
gaaacuagugagaauuuac

SEQ ID NO: 1849288 - RNA, 19 nt, Homo sapiens
  misc_RNA (1)...(19): siRNA sense strand
caucaccgcuggaauuuug

SEQ ID NO: 1849289 - RNA, 19 nt, Homo sapiens
  misc_RNA (1)...(19): siRNA sense strand
gacaagggaggcauuaauc

SEQ ID NO: 1849290 - RNA, 19 nt, Homo sapiens
  misc_RNA (1)...(19): siRNA sense strand
gggaagucaacacugcuua

SEQ ID NO: 1849291 - RNA, 19 nt, Homo sapiens
  misc_RNA (1)...(19): siRNA sense strand
acacaauccucagaaagug

SEQ ID NO: 1849292 - RNA, 19 nt, Homo sapiens
  misc_RNA (1)...(19): siRNA sense strand
gaaccuguaacuugaucuu

SEQ ID NO: 1849293 - RNA, 19 nt, Homo sapiens
  misc_RNA (1)...(19): siRNA sense strand
ugccuggugucaucagaua

SEQ ID NO: 1849294 - RNA, 19 nt, Homo sapiens
  misc_RNA (1)...(19): siRNA sense strand
aaaucuccauugaggaauu

SEQ ID NO: 1849295 - RNA, 19 nt, Homo sapiens
  misc_RNA (1)...(19): siRNA sense strand
gcucgaauuggauuuguug

SEQ ID NO: 1849296 - RNA, 19 nt, Homo sapiens
  misc_RNA (1)...(19): siRNA sense strand
gagauggcucggacucaaa

SEQ ID NO: 1849297 - RNA, 19 nt, Homo sapiens
  misc_RNA (1)...(19): siRNA sense strand
cauugaaggugccaaggau

SEQ ID NO: 1849298 - RNA, 19 nt, Homo sapiens
  misc_RNA (1)...(19): siRNA sense strand
uagaggucgucaagucauu

SEQ ID NO: 1849299 - RNA, 19 nt, Homo sapiens
  misc_RNA (1)...(19): siRNA sense strand
ugaaacacaauccucagaa

SEQ ID NO: 1849300 - RNA, 19 nt, Homo sapiens
  misc_RNA (1)...(19): siRNA sense strand
ccaguuaccagauuacaca

SEQ ID NO: 1849301 - RNA, 19 nt, Homo sapiens
  misc_RNA (1)...(19): siRNA sense strand
agugagaauuuacaccaaa

SEQ ID NO: 1849302 - RNA, 19 nt, Homo sapiens
  misc_RNA (1)...(19): siRNA sense strand
cugaaacuagugagaauuu

SEQ ID NO: 1849303 - RNA, 19 nt, Homo sapiens
  misc_RNA (1)...(19): siRNA sense strand
cgagaacucauuacuccaa

SEQ ID NO: 1849304 - RNA, 19 nt, Homo sapiens
  misc_RNA (1)...(19): siRNA sense strand
ggcccgaaccuguaacuug

SEQ ID NO: 1849305 - RNA, 19 nt, Homo sapiens
  misc_RNA (1)...(19): siRNA sense strand
aacuugaucuugauuguuc

SEQ ID NO: 1849306 - RNA, 19 nt, Homo sapiens
  misc_RNA (1)...(19): siRNA sense strand
gaacucauuacuccaaagg

SEQ ID NO: 1849307 - RNA, 19 nt, Homo sapiens
  misc_RNA (1)...(19): siRNA sense strand
gaugugacucuacguagug

SEQ ID NO: 1849308 - RNA, 19 nt, Homo sapiens
  misc_RNA (1)...(19): siRNA sense strand
gcuaagaucgcggagauag

SEQ ID NO: 1849309 - RNA, 19 nt, Homo sapiens
  misc_RNA (1)...(19): siRNA sense strand
gaaacugugaagagcauuc

SEQ ID NO: 1849310 - RNA, 19 nt, Homo sapiens
  misc_RNA (1)...(19): siRNA sense strand
gcuuaaggcucgucuugcu

SEQ ID NO: 1849311 - RNA, 19 nt, Homo sapiens
  misc_RNA (1)...(19): siRNA sense strand
caacacugcuuaguaaccu

SEQ ID NO: 1849312 - RNA, 19 nt, Homo sapiens
  misc_RNA (1)...(19): siRNA sense strand
agagauggcucggacucaa

SEQ ID NO: 1849313 - RNA, 19 nt, Homo sapiens
  misc_RNA (1)...(19): siRNA sense strand
uuaaggcucgucuugcuaa

SEQ ID NO: 1849314 - RNA, 19 nt, Homo sapiens
  misc_RNA (1)...(19): siRNA sense strand
gauacaaaggugccaagau

SEQ ID NO: 1849315 - RNA, 19 nt, Homo sapiens
  misc_RNA (1)...(19): siRNA sense strand
ccuaugaauucacuacucu

SEQ ID NO: 1849316 - RNA, 19 nt, Homo sapiens
  misc_RNA (1)...(19): siRNA sense strand
ggaagucaacacugcuuag

SEQ ID NO: 1849317 - RNA, 19 nt, Homo sapiens
  misc_RNA (1)...(19): siRNA sense strand
gaugucauucaaauuguga

SEQ ID NO: 1849318 - RNA, 19 nt, Homo sapiens
  misc_RNA (1)...(19): siRNA sense strand
aaggccaguuaccagauua

SEQ ID NO: 1849319 - RNA, 19 nt, Homo sapiens
  misc_RNA (1)...(19): siRNA sense strand
gaguuuauauccccuguau

SEQ ID NO: 1849320 - RNA, 19 nt, Homo sapiens
  misc_RNA (1)...(19): siRNA sense strand
cgaugugacucuacguagu

SEQ ID NO: 1849321 - RNA, 19 nt, Homo sapiens
  misc_RNA (1)...(19): siRNA sense strand
acauuggcuuuaagaagaa

SEQ ID NO: 1849322 - RNA, 19 nt, Homo sapiens
  misc_RNA (1)...(19): siRNA sense strand
cugaaaccuuugggacaua

SEQ ID NO: 1849323 - RNA, 19 nt, Homo sapiens
  misc_RNA (1)...(19): siRNA sense strand
ggaucucccagguaucauu

SEQ ID NO: 1849324 - RNA, 19 nt, Homo sapiens
  misc_RNA (1)...(19): siRNA sense strand
gaagucaacacugcuuagu

SEQ ID NO: 1849325 - RNA, 19 nt, Homo sapiens
  misc_RNA (1)...(19): siRNA sense strand
gaucucccagguaucauug

SEQ ID NO: 1849326 - RNA, 19 nt, Homo sapiens
  misc_RNA (1)...(19): siRNA sense strand
ugagguggcagccuaugaa

SEQ ID NO: 1849327 - RNA, 19 nt, Homo sapiens
  misc_RNA (1)...(19): siRNA sense strand
ccucauugaugugguggaa

SEQ ID NO: 1849328 - RNA, 19 nt, Homo sapiens
  misc_RNA (1)...(19): siRNA sense strand
cuggaaggcuuuggcauuc

SEQ ID NO: 1849329 - RNA, 19 nt, Homo sapiens
  misc_RNA (1)...(19): siRNA sense strand
gguagaggucgucaaguca

SEQ ID NO: 1849330 - RNA, 19 nt, Homo sapiens
  misc_RNA (1)...(19): siRNA sense strand
ccugaaaccuuugggacau

SEQ ID NO: 1849331 - RNA, 19 nt, Homo sapiens
  misc_RNA (1)...(19): siRNA sense strand
ccauugaggaauuggauau

SEQ ID NO: 1849332 - RNA, 19 nt, Homo sapiens
  misc_RNA (1)...(19): siRNA sense strand
gugaugcuacggcugauga

SEQ ID NO: 1849333 - RNA, 19 nt, Homo sapiens
  misc_RNA (1)...(19): siRNA sense strand
gcauucgcuugaacagcaa

SEQ ID NO: 1849334 - RNA, 19 nt, Homo sapiens
  misc_RNA (1)...(19): siRNA sense strand
uaugaauucacuacucuga

SEQ ID NO: 1849335 - RNA, 19 nt, Homo sapiens
  misc_RNA (1)...(19): siRNA sense strand
aaacacaauccucagaaag

SEQ ID NO: 1849336 - RNA, 19 nt, Homo sapiens
  misc_RNA (1)...(19): siRNA sense strand
gugaaacacaauccucaga

SEQ ID NO: 1849337 - RNA, 19 nt, Homo sapiens
  misc_RNA (1)...(19): siRNA sense strand
caaaggccaguuaccagau

SEQ ID NO: 1849338 - RNA, 19 nt, Homo sapiens
  misc_RNA (1)...(19): siRNA sense strand
ugagcuggaugcugaaacu

SEQ ID NO: 1849339 - RNA, 19 nt, Homo sapiens
  misc_RNA (1)...(19): siRNA sense strand
gaaagguagaggucgucaa

SEQ ID NO: 1849340 - RNA, 19 nt, Homo sapiens
  misc_RNA (1)...(19): siRNA sense strand
uaucugaaacuagugagaa

SEQ ID NO: 1849341 - RNA, 19 nt, Homo sapiens
  misc_RNA (1)...(19): siRNA sense strand
gguggaaggaaacagaguu

SEQ ID NO: 1849342 - RNA, 19 nt, Homo sapiens
  misc_RNA (1)...(19): siRNA sense strand
gggaggcauuaaucucaca

SEQ ID NO: 1849343 - RNA, 19 nt, Homo sapiens
  misc_RNA (1)...(19): siRNA sense strand
gcuuuaagaagaaggacaa

SEQ ID NO: 1849344 - RNA, 19 nt, Homo sapiens
  misc_RNA (1)...(19): siRNA sense strand
ccuguaacuugaucuugau

SEQ ID NO: 1849345 - RNA, 19 nt, Homo sapiens
  misc_RNA (1)...(19): siRNA sense strand
cuucgucgagaacucauua

SEQ ID NO: 1849346 - RNA, 19 nt, Homo sapiens
  misc_RNA (1)...(19): siRNA sense strand
ggaaacugcugcuguguac

SEQ ID NO: 1849347 - RNA, 19 nt, Homo sapiens
  misc_RNA (1)...(19): siRNA sense strand
gaaccaaccacucauggaa

SEQ ID NO: 1849348 - RNA, 19 nt, Homo sapiens
  misc_RNA (1)...(19): siRNA sense strand
guacgacucuggcauugag

SEQ ID NO: 1849349 - RNA, 19 nt, Homo sapiens
  misc_RNA (1)...(19): siRNA sense strand
gaagaaccaaccacucaug

SEQ ID NO: 1849350 - RNA, 19 nt, Homo sapiens
  misc_RNA (1)...(19): siRNA sense strand
cagaagaaccaaccacuca

SEQ ID NO: 1849351 - RNA, 19 nt, Homo sapiens
  misc_RNA (1)...(19): siRNA sense strand
ggaccggcauggagacaca

SEQ ID NO: 1849352 - RNA, 19 nt, Homo sapiens
  misc_RNA (1)...(19): siRNA sense strand
gggaaacugcugcugugua

SEQ ID NO: 1849353 - RNA, 19 nt, Homo sapiens
  misc_RNA (1)...(19): siRNA sense strand
uggaagcacucacuuacau

SEQ ID NO: 1849354 - RNA, 19 nt, Homo sapiens
  misc_RNA (1)...(19): siRNA sense strand
gaauugcugcuucggaaug

SEQ ID NO: 1849355 - RNA, 19 nt, Homo sapiens
  misc_RNA (1)...(19): siRNA sense strand
gaagaucucagggaaacug

SEQ ID NO: 1849356 - RNA, 19 nt, Homo sapiens
  misc_RNA (1)...(19): siRNA sense strand
ggagacacagcccuucaug

SEQ ID NO: 1849357 - RNA, 19 nt, Homo sapiens
  misc_RNA (1)...(19): siRNA sense strand
gaagcacucacuuacaucu

SEQ ID NO: 1849358 - RNA, 19 nt, Homo sapiens
  misc_RNA (1)...(19): siRNA sense strand
aaauaaccuuuaccagaca

SEQ ID NO: 1849359 - RNA, 19 nt, Homo sapiens
  misc_RNA (1)...(19): siRNA sense strand
ggaccugacugaggaaucc

SEQ ID NO: 1849360 - RNA, 19 nt, Homo sapiens
  misc_RNA (1)...(19): siRNA sense strand
accaaccacucauggaauu

SEQ ID NO: 1849361 - RNA, 19 nt, Homo sapiens
  misc_RNA (1)...(19): siRNA sense strand
gcaccuggcuguggaaacc

SEQ ID NO: 1849362 - RNA, 19 nt, Homo sapiens
  misc_RNA (1)...(19): siRNA sense strand
ccaucuggcuguacaucug

SEQ ID NO: 1849363 - RNA, 19 nt, Homo sapiens
  misc_RNA (1)...(19): siRNA sense strand
guucggcugcccacaguaa

SEQ ID NO: 1849364 - RNA, 19 nt, Homo sapiens
  misc_RNA (1)...(19): siRNA sense strand
gggcuccagugguaagaca

SEQ ID NO: 1849365 - RNA, 19 nt, Homo sapiens
  misc_RNA (1)...(19): siRNA sense strand
caacgaaggagugagucaa

SEQ ID NO: 1849366 - RNA, 19 nt, Homo sapiens
  misc_RNA (1)...(19): siRNA sense strand
ggaaucccuuguccuuuug

SEQ ID NO: 1849367 - RNA, 19 nt, Homo sapiens
  misc_RNA (1)...(19): siRNA sense strand
ugcggaauguggaggauga

SEQ ID NO: 1849368 - RNA, 19 nt, Homo sapiens
  misc_RNA (1)...(19): siRNA sense strand
gcuggaagcacucacuuac

SEQ ID NO: 1849369 - RNA, 19 nt, Homo sapiens
  misc_RNA (1)...(19): siRNA sense strand
gcugcuguguaccgacuga

SEQ ID NO: 1849370 - RNA, 19 nt, Homo sapiens
  misc_RNA (1)...(19): siRNA sense strand
gcccuuugaugaccugaag

SEQ ID NO: 1849371 - RNA, 19 nt, Homo sapiens
  misc_RNA (1)...(19): siRNA sense strand
caguacgacucuggcauug

SEQ ID NO: 1849372 - RNA, 19 nt, Homo sapiens
  misc_RNA (1)...(19): siRNA sense strand
gggcugauuccaccuaugg

SEQ ID NO: 1849373 - RNA, 19 nt, Homo sapiens
  misc_RNA (1)...(19): siRNA sense strand
gagacacagcccuucaugu

SEQ ID NO: 1849374 - RNA, 19 nt, Homo sapiens
  misc_RNA (1)...(19): siRNA sense strand
ggaagcacucacuuacauc

SEQ ID NO: 1849375 - RNA, 19 nt, Homo sapiens
  misc_RNA (1)...(19): siRNA sense strand
ggaauugcugcuucggaau

SEQ ID NO: 1849376 - RNA, 19 nt, Homo sapiens
  misc_RNA (1)...(19): siRNA sense strand
gcgggcugauuccaccuau

SEQ ID NO: 1849377 - RNA, 19 nt, Homo sapiens
  misc_RNA (1)...(19): siRNA sense strand
uugaugaccugaagaucuc

SEQ ID NO: 1849378 - RNA, 19 nt, Homo sapiens
  misc_RNA (1)...(19): siRNA sense strand
uggcuugucuccacauugc

SEQ ID NO: 1849379 - RNA, 19 nt, Homo sapiens
  misc_RNA (1)...(19): siRNA sense strand
caaggaaccacaggagaag

SEQ ID NO: 1849380 - RNA, 19 nt, Homo sapiens
  misc_RNA (1)...(19): siRNA sense strand
ccagagccaggcagaggaa

SEQ ID NO: 1849381 - RNA, 19 nt, Homo sapiens
  misc_RNA (1)...(19): siRNA sense strand
gaggaacaucucacucucu

SEQ ID NO: 1849382 - RNA, 19 nt, Homo sapiens
  misc_RNA (1)...(19): siRNA sense strand
ucaccuacacccuguccuu

SEQ ID NO: 1849383 - RNA, 19 nt, Homo sapiens
  misc_RNA (1)...(19): siRNA sense strand
ugacugaggaaucccuugu

SEQ ID NO: 1849384 - RNA, 19 nt, Homo sapiens
  misc_RNA (1)...(19): siRNA sense strand
gcagauaguuacaaaguug

SEQ ID NO: 1849385 - RNA, 19 nt, Homo sapiens
  misc_RNA (1)...(19): siRNA sense strand
cagauacacuucucucuuu

SEQ ID NO: 1849386 - RNA, 19 nt, Homo sapiens
  misc_RNA (1)...(19): siRNA sense strand
gagaccaagugaaacguua

SEQ ID NO: 1849387 - RNA, 19 nt, Homo sapiens
  misc_RNA (1)...(19): siRNA sense strand
gcucaaguacccuaauuua

SEQ ID NO: 1849388 - RNA, 19 nt, Homo sapiens
  misc_RNA (1)...(19): siRNA sense strand
acaauagccuggaugguuu

SEQ ID NO: 1849389 - RNA, 19 nt, Homo sapiens
  misc_RNA (1)...(19): siRNA sense strand
ggccagcaauugccaguuu

SEQ ID NO: 1849390 - RNA, 19 nt, Homo sapiens
  misc_RNA (1)...(19): siRNA sense strand
ccaauaaugacaaguguuu

SEQ ID NO: 1849391 - RNA, 19 nt, Homo sapiens
  misc_RNA (1)...(19): siRNA sense strand
ucacacacagcaaauauuu

SEQ ID NO: 1849392 - RNA, 19 nt, Homo sapiens
  misc_RNA (1)...(19): siRNA sense strand
aaacugguaugacgaaauc

SEQ ID NO: 1849393 - RNA, 19 nt, Homo sapiens
  misc_RNA (1)...(19): siRNA sense strand
uagccuggaugguuucuuu

SEQ ID NO: 1849394 - RNA, 19 nt, Homo sapiens
  misc_RNA (1)...(19): siRNA sense strand
ccagugauaugcuauacau

SEQ ID NO: 1849395 - RNA, 19 nt, Homo sapiens
  misc_RNA (1)...(19): siRNA sense strand
aaacguuacuacucuguug

SEQ ID NO: 1849396 - RNA, 19 nt, Homo sapiens
  misc_RNA (1)...(19): siRNA sense strand
ggagggaauuacccaacuu

SEQ ID NO: 1849397 - RNA, 19 nt, Homo sapiens
  misc_RNA (1)...(19): siRNA sense strand
ugucacacuugcuacaaua

SEQ ID NO: 1849398 - RNA, 19 nt, Homo sapiens
  misc_RNA (1)...(19): siRNA sense strand
gauaugcuauacaugacuu

SEQ ID NO: 1849399 - RNA, 19 nt, Homo sapiens
  misc_RNA (1)...(19): siRNA sense strand
ccacuacacucagguuguu

SEQ ID NO: 1849400 - RNA, 19 nt, Homo sapiens
  misc_RNA (1)...(19): siRNA sense strand
cagcucaaguacccuaauu

SEQ ID NO: 1849401 - RNA, 19 nt, Homo sapiens
  misc_RNA (1)...(19): siRNA sense strand
caacuuggccauauaagag

SEQ ID NO: 1849402 - RNA, 19 nt, Homo sapiens
  misc_RNA (1)...(19): siRNA sense strand
gcacuagcccaaauugcaa

SEQ ID NO: 1849403 - RNA, 19 nt, Homo sapiens
  misc_RNA (1)...(19): siRNA sense strand
ucacuucacugggagagaa

SEQ ID NO: 1849404 - RNA, 19 nt, Homo sapiens
  misc_RNA (1)...(19): siRNA sense strand
aaaguuggcugcgcaguuc

SEQ ID NO: 1849405 - RNA, 19 nt, Homo sapiens
  misc_RNA (1)...(19): siRNA sense strand
ugacaaguguuuggacaau

SEQ ID NO: 1849406 - RNA, 19 nt, Homo sapiens
  misc_RNA (1)...(19): siRNA sense strand
ccacguaacagauacacuu

SEQ ID NO: 1849407 - RNA, 19 nt, Homo sapiens
  misc_RNA (1)...(19): siRNA sense strand
aaaccaacagccagugaua

SEQ ID NO: 1849408 - RNA, 19 nt, Homo sapiens
  misc_RNA (1)...(19): siRNA sense strand
cccacaagcugcacccaaa

SEQ ID NO: 1849409 - RNA, 19 nt, Homo sapiens
  misc_RNA (1)...(19): siRNA sense strand
ggcagauaguuacaaaguu

SEQ ID NO: 1849410 - RNA, 19 nt, Homo sapiens
  misc_RNA (1)...(19): siRNA sense strand
gggcagauaguuacaaagu

SEQ ID NO: 1849411 - RNA, 19 nt, Homo sapiens
  misc_RNA (1)...(19): siRNA sense strand
uggcugcgcaguucaauuu

SEQ ID NO: 1849412 - RNA, 19 nt, Homo sapiens
  misc_RNA (1)...(19): siRNA sense strand
caucaaagacugcguucga

SEQ ID NO: 1849413 - RNA, 19 nt, Homo sapiens
  misc_RNA (1)...(19): siRNA sense strand
uggacaaucucuguguuaa

SEQ ID NO: 1849414 - RNA, 19 nt, Homo sapiens
  misc_RNA (1)...(19): siRNA sense strand
gaagauuucaucaaagacu

SEQ ID NO: 1849415 - RNA, 19 nt, Homo sapiens
  misc_RNA (1)...(19): siRNA sense strand
caaaguuggcugcgcaguu

SEQ ID NO: 1849416 - RNA, 19 nt, Homo sapiens
  misc_RNA (1)...(19): siRNA sense strand
caaagacugcguucgaauc

SEQ ID NO: 1849417 - RNA, 19 nt, Homo sapiens
  misc_RNA (1)...(19): siRNA sense strand
cgacagcgagaccaaguga

SEQ ID NO: 1849418 - RNA, 19 nt, Homo sapiens
  misc_RNA (1)...(19): siRNA sense strand
ccaggacuaugacuucaag

SEQ ID NO: 1849419 - RNA, 19 nt, Homo sapiens
  misc_RNA (1)...(19): siRNA sense strand
gaaacguuacuacucuguu

SEQ ID NO: 1849420 - RNA, 19 nt, Homo sapiens
  misc_RNA (1)...(19): siRNA sense strand
uacaauagccuggaugguu

SEQ ID NO: 1849421 - RNA, 19 nt, Homo sapiens
  misc_RNA (1)...(19): siRNA sense strand
gcccauauauccacguaac

SEQ ID NO: 1849422 - RNA, 19 nt, Homo sapiens
  misc_RNA (1)...(19): siRNA sense strand
acacuucucucuuucucau

SEQ ID NO: 1849423 - RNA, 19 nt, Homo sapiens
  misc_RNA (1)...(19): siRNA sense strand
ucgaauccauaacaaguuc

SEQ ID NO: 1849424 - RNA, 19 nt, Homo sapiens
  misc_RNA (1)...(19): siRNA sense strand
gaaaccaacagccagugau

SEQ ID NO: 1849425 - RNA, 19 nt, Homo sapiens
  misc_RNA (1)...(19): siRNA sense strand
gcacccaaacuucacuuca

SEQ ID NO: 1849426 - RNA, 19 nt, Homo sapiens
  misc_RNA (1)...(19): siRNA sense strand
acaaguguuuggacaaucu

SEQ ID NO: 1849427 - RNA, 19 nt, Homo sapiens
  misc_RNA (1)...(19): siRNA sense strand
cauaacaaguuccgaucag

SEQ ID NO: 1849428 - RNA, 19 nt, Homo sapiens
  misc_RNA (1)...(19): siRNA sense strand
guuacuacucuguuguaua

SEQ ID NO: 1849429 - RNA, 19 nt, Homo sapiens
  misc_RNA (1)...(19): siRNA sense strand
gacaaucucuguguuaacc

SEQ ID NO: 1849430 - RNA, 19 nt, Homo sapiens
  misc_RNA (1)...(19): siRNA sense strand
gagggaauuacccaacuug

SEQ ID NO: 1849431 - RNA, 19 nt, Homo sapiens
  misc_RNA (1)...(19): siRNA sense strand
gagcacauuuuauaugcaa

SEQ ID NO: 1849432 - RNA, 19 nt, Homo sapiens
  misc_RNA (1)...(19): siRNA sense strand
ggacuaugacuucaagacu

SEQ ID NO: 1849433 - RNA, 19 nt, Homo sapiens
  misc_RNA (1)...(19): siRNA sense strand
agugauaugcuauacauga

SEQ ID NO: 1849434 - RNA, 19 nt, Homo sapiens
  misc_RNA (1)...(19): siRNA sense strand
cagguuguuugggcagaua

SEQ ID NO: 1849435 - RNA, 19 nt, Homo sapiens
  misc_RNA (1)...(19): siRNA sense strand
acagcgagaccaagugaaa

SEQ ID NO: 1849436 - RNA, 19 nt, Homo sapiens
  misc_RNA (1)...(19): siRNA sense strand
ucaagacucggauaugcaa

SEQ ID NO: 1849437 - RNA, 19 nt, Homo sapiens
  misc_RNA (1)...(19): siRNA sense strand
guucgaauccauaacaagu

SEQ ID NO: 1849438 - RNA, 19 nt, Homo sapiens
  misc_RNA (1)...(19): siRNA sense strand
ugccagauaucgaaaauga

SEQ ID NO: 1849439 - RNA, 19 nt, Homo sapiens
  misc_RNA (1)...(19): siRNA sense strand
agugaaacguuacuacucu

SEQ ID NO: 1849440 - RNA, 19 nt, Homo sapiens
  misc_RNA (1)...(19): siRNA sense strand
gacaaguguuuggacaauc

SEQ ID NO: 1849441 - RNA, 19 nt, Homo sapiens
  misc_RNA (1)...(19): siRNA sense strand
caaacugguaugacgaaau

SEQ ID NO: 1849442 - RNA, 19 nt, Homo sapiens
  misc_RNA (1)...(19): siRNA sense strand
gcguucgaauccauaacaa

SEQ ID NO: 1849443 - RNA, 19 nt, Homo sapiens
  misc_RNA (1)...(19): siRNA sense strand
aagcaugggccagcaauug

SEQ ID NO: 1849444 - RNA, 19 nt, Homo sapiens
  misc_RNA (1)...(19): siRNA sense strand
cguaacagauacacuucuc

SEQ ID NO: 1849445 - RNA, 19 nt, Homo sapiens
  misc_RNA (1)...(19): siRNA sense strand
caagugaaacguuacuacu

SEQ ID NO: 1849446 - RNA, 19 nt, Homo sapiens
  misc_RNA (1)...(19): siRNA sense strand
caauuuugcccuaaaguuu

SEQ ID NO: 1849447 - RNA, 19 nt, Homo sapiens
  misc_RNA (1)...(19): siRNA sense strand
ugaaaccaacagccaguga

SEQ ID NO: 1849448 - RNA, 19 nt, Homo sapiens
  misc_RNA (1)...(19): siRNA sense strand
acagauacacuucucucuu

SEQ ID NO: 1849449 - RNA, 19 nt, Homo sapiens
  misc_RNA (1)...(19): siRNA sense strand
agacugcguucgaauccau

SEQ ID NO: 1849450 - RNA, 19 nt, Homo sapiens
  misc_RNA (1)...(19): siRNA sense strand
ugacuucaagacucggaua

SEQ ID NO: 1849451 - RNA, 19 nt, Homo sapiens
  misc_RNA (1)...(19): siRNA sense strand
auaacaaguuccgaucaga

SEQ ID NO: 1849452 - RNA, 19 nt, Homo sapiens
  misc_RNA (1)...(19): siRNA sense strand
caagcugcacccaaacuuc

SEQ ID NO: 1849453 - RNA, 19 nt, Homo sapiens
  misc_RNA (1)...(19): siRNA sense strand
cauauauccacguaacaga

SEQ ID NO: 1849454 - RNA, 19 nt, Homo sapiens
  misc_RNA (1)...(19): siRNA sense strand
ggacaaucucuguguuaac

SEQ ID NO: 1849455 - RNA, 19 nt, Homo sapiens
  misc_RNA (1)...(19): siRNA sense strand
uugggcagauaguuacaaa

SEQ ID NO: 1849456 - RNA, 19 nt, Homo sapiens
  misc_RNA (1)...(19): siRNA sense strand
ucaaagacugcguucgaau

SEQ ID NO: 1849457 - RNA, 19 nt, Homo sapiens
  misc_RNA (1)...(19): siRNA sense strand
ugacgaaauccaggacuau

SEQ ID NO: 1849458 - RNA, 19 nt, Homo sapiens
  misc_RNA (1)...(19): siRNA sense strand
agauacacuucucucuuuc

SEQ ID NO: 1849459 - RNA, 19 nt, Homo sapiens
  misc_RNA (1)...(19): siRNA sense strand
gugauaugcuauacaugac

SEQ ID NO: 1849460 - RNA, 19 nt, Homo sapiens
  misc_RNA (1)...(19): siRNA sense strand
uggcccauauauccacgua

SEQ ID NO: 1849461 - RNA, 19 nt, Homo sapiens
  misc_RNA (1)...(19): siRNA sense strand
uuggacaaucucuguguua

SEQ ID NO: 1849462 - RNA, 19 nt, Homo sapiens
  misc_RNA (1)...(19): siRNA sense strand
cuacggaccaggagggaau

SEQ ID NO: 1849463 - RNA, 19 nt, Homo sapiens
  misc_RNA (1)...(19): siRNA sense strand
cuuugacgcucuuuccaau

SEQ ID NO: 1849464 - RNA, 19 nt, Homo sapiens
  misc_RNA (1)...(19): siRNA sense strand
cuucaagacucggauaugc

SEQ ID NO: 1849465 - RNA, 19 nt, Homo sapiens
  misc_RNA (1)...(19): siRNA sense strand
gacgaaauccaggacuaug

SEQ ID NO: 1849466 - RNA, 19 nt, Homo sapiens
  misc_RNA (1)...(19): siRNA sense strand
cacaaacugguaugacgaa

SEQ ID NO: 1849467 - RNA, 19 nt, Homo sapiens
  misc_RNA (1)...(19): siRNA sense strand
acuucucucuuucucauug

SEQ ID NO: 1849468 - RNA, 19 nt, Homo sapiens
  misc_RNA (1)...(19): siRNA sense strand
ccauaacaaguuccgauca

SEQ ID NO: 1849469 - RNA, 19 nt, Homo sapiens
  misc_RNA (1)...(19): siRNA sense strand
ccaagugaaacguuacuac

SEQ ID NO: 1849470 - RNA, 19 nt, Homo sapiens
  misc_RNA (1)...(19): siRNA sense strand
uaaccgacagcgagaccaa

SEQ ID NO: 1849471 - RNA, 19 nt, Homo sapiens
  misc_RNA (1)...(19): siRNA sense strand
acgaaauccaggacuauga

SEQ ID NO: 1849472 - RNA, 19 nt, Homo sapiens
  misc_RNA (1)...(19): siRNA sense strand
cagccagugauaugcuaua

SEQ ID NO: 1849473 - RNA, 19 nt, Homo sapiens
  misc_RNA (1)...(19): siRNA sense strand
ccagcacuagcccaaauug

SEQ ID NO: 1849474 - RNA, 19 nt, Homo sapiens
  misc_RNA (1)...(19): siRNA sense strand
augacgaaauccaggacua

SEQ ID NO: 1849475 - RNA, 19 nt, Homo sapiens
  misc_RNA (1)...(19): siRNA sense strand
acaaacugguaugacgaaa

SEQ ID NO: 1849476 - RNA, 19 nt, Homo sapiens
  misc_RNA (1)...(19): siRNA sense strand
aacagccagugauaugcua

SEQ ID NO: 1849477 - RNA, 19 nt, Homo sapiens
  misc_RNA (1)...(19): siRNA sense strand
gcuuugacgcucuuuccaa

SEQ ID NO: 1849478 - RNA, 19 nt, Homo sapiens
  misc_RNA (1)...(19): siRNA sense strand
uaccggaacuuaaggaaua

SEQ ID NO: 1849479 - RNA, 19 nt, Homo sapiens
  misc_RNA (1)...(19): siRNA sense strand
agaauaggaucaagaugua

SEQ ID NO: 1849480 - RNA, 19 nt, Homo sapiens
  misc_RNA (1)...(19): siRNA sense strand
uagcaagacugaaugauau

SEQ ID NO: 1849481 - RNA, 19 nt, Homo sapiens
  misc_RNA (1)...(19): siRNA sense strand
caagauguauaaacuguug

SEQ ID NO: 1849482 - RNA, 19 nt, Homo sapiens
  misc_RNA (1)...(19): siRNA sense strand
gaacaaggacagaaacuag

SEQ ID NO: 1849483 - RNA, 19 nt, Homo sapiens
  misc_RNA (1)...(19): siRNA sense strand
caaagaaacacacuguaaa

SEQ ID NO: 1849484 - RNA, 19 nt, Homo sapiens
  misc_RNA (1)...(19): siRNA sense strand
ccaaagaaacacacuguaa

SEQ ID NO: 1849485 - RNA, 19 nt, Homo sapiens
  misc_RNA (1)...(19): siRNA sense strand
ggaucaagauguauaaacu

SEQ ID NO: 1849486 - RNA, 19 nt, Homo sapiens
  misc_RNA (1)...(19): siRNA sense strand
gaaacuagcaaaagagaua

SEQ ID NO: 1849487 - RNA, 19 nt, Homo sapiens
  misc_RNA (1)...(19): siRNA sense strand
uguggaauguucagcuuua

SEQ ID NO: 1849488 - RNA, 19 nt, Homo sapiens
  misc_RNA (1)...(19): siRNA sense strand
ggaacaaggacagaaacua

SEQ ID NO: 1849489 - RNA, 19 nt, Homo sapiens
  misc_RNA (1)...(19): siRNA sense strand
gccuuuaucuuacccaaug

SEQ ID NO: 1849490 - RNA, 19 nt, Homo sapiens
  misc_RNA (1)...(19): siRNA sense strand
gagaugaccccaaaacuuu

SEQ ID NO: 1849491 - RNA, 19 nt, Homo sapiens
  misc_RNA (1)...(19): siRNA sense strand
ugaccgaugucuuccuuau

SEQ ID NO: 1849492 - RNA, 19 nt, Homo sapiens
  misc_RNA (1)...(19): siRNA sense strand
aauccagccucauuucaaa

SEQ ID NO: 1849493 - RNA, 19 nt, Homo sapiens
  misc_RNA (1)...(19): siRNA sense strand
uuagcaagacugaaugaua

SEQ ID NO: 1849494 - RNA, 19 nt, Homo sapiens
  misc_RNA (1)...(19): siRNA sense strand
gacagaaacuagcaaaaga

SEQ ID NO: 1849495 - RNA, 19 nt, Homo sapiens
  misc_RNA (1)...(19): siRNA sense strand
gcugcuauguggaauguuc

SEQ ID NO: 1849496 - RNA, 19 nt, Homo sapiens
  misc_RNA (1)...(19): siRNA sense strand
uaauaggaacucagauuga

SEQ ID NO: 1849497 - RNA, 19 nt, Homo sapiens
  misc_RNA (1)...(19): siRNA sense strand
gucugaggccuuuaucuua

SEQ ID NO: 1849498 - RNA, 19 nt, Homo sapiens
  misc_RNA (1)...(19): siRNA sense strand
accgaugucuuccuuauau

SEQ ID NO: 1849499 - RNA, 19 nt, Homo sapiens
  misc_RNA (1)...(19): siRNA sense strand
gaccgaugucuuccuuaua

SEQ ID NO: 1849500 - RNA, 19 nt, Homo sapiens
  misc_RNA (1)...(19): siRNA sense strand
gcaagacugaaugauauga

SEQ ID NO: 1849501 - RNA, 19 nt, Homo sapiens
  misc_RNA (1)...(19): siRNA sense strand
aauaggaacucagauugau

SEQ ID NO: 1849502 - RNA, 19 nt, Homo sapiens
  misc_RNA (1)...(19): siRNA sense strand
aagaauaggaucaagaugu

SEQ ID NO: 1849503 - RNA, 19 nt, Homo sapiens
  misc_RNA (1)...(19): siRNA sense strand
uuaauaggaacucagauug

SEQ ID NO: 1849504 - RNA, 19 nt, Homo sapiens
  misc_RNA (1)...(19): siRNA sense strand
gaucaagauguauaaacug

SEQ ID NO: 1849505 - RNA, 19 nt, Homo sapiens
  misc_RNA (1)...(19): siRNA sense strand
guucagcuuuaacccagaa

SEQ ID NO: 1849506 - RNA, 19 nt, Homo sapiens
  misc_RNA (1)...(19): siRNA sense strand
guggaauguucagcuuuaa

SEQ ID NO: 1849507 - RNA, 19 nt, Homo sapiens
  misc_RNA (1)...(19): siRNA sense strand
agaagggauugaagacugu

SEQ ID NO: 1849508 - RNA, 19 nt, Homo sapiens
  misc_RNA (1)...(19): siRNA sense strand
guacgugcccaccgucuuc

SEQ ID NO: 1849509 - RNA, 19 nt, Homo sapiens
  misc_RNA (1)...(19): siRNA sense strand
gggcaagcaguaccuccua

SEQ ID NO: 1849510 - RNA, 19 nt, Homo sapiens
  misc_RNA (1)...(19): siRNA sense strand
caagacgugccuacucaug

SEQ ID NO: 1849511 - RNA, 19 nt, Homo sapiens
  misc_RNA (1)...(19): siRNA sense strand
caagacugaaugauaugaa

SEQ ID NO: 1849512 - RNA, 19 nt, Homo sapiens
  misc_RNA (1)...(19): siRNA sense strand
gaguggguaccggaacuua

SEQ ID NO: 1849513 - RNA, 19 nt, Homo sapiens
  misc_RNA (1)...(19): siRNA sense strand
gacugaaugauaugaaaga

SEQ ID NO: 1849514 - RNA, 19 nt, Homo sapiens
  misc_RNA (1)...(19): siRNA sense strand
ccccaaaacuuuagcaaga

SEQ ID NO: 1849515 - RNA, 19 nt, Homo sapiens
  misc_RNA (1)...(19): siRNA sense strand
gcgcgcugaugcucaagug

SEQ ID NO: 1849516 - RNA, 19 nt, Homo sapiens
  misc_RNA (1)...(19): siRNA sense strand
cgucugaggccuuuaucuu

SEQ ID NO: 1849517 - RNA, 19 nt, Homo sapiens
  misc_RNA (1)...(19): siRNA sense strand
uauguggaauguucagcuu

SEQ ID NO: 1849518 - RNA, 19 nt, Homo sapiens
  misc_RNA (1)...(19): siRNA sense strand
gaauaggaucaagauguau

SEQ ID NO: 1849519 - RNA, 19 nt, Homo sapiens
  misc_RNA (1)...(19): siRNA sense strand
aaugaccgaugucuuccuu

SEQ ID NO: 1849520 - RNA, 19 nt, Homo sapiens
  misc_RNA (1)...(19): siRNA sense strand
ucugaggccuuuaucuuac

SEQ ID NO: 1849521 - RNA, 19 nt, Homo sapiens
  misc_RNA (1)...(19): siRNA sense strand
cccaaugaccgaugucuuc

SEQ ID NO: 1849522 - RNA, 19 nt, Homo sapiens
  misc_RNA (1)...(19): siRNA sense strand
ggacagaaacuagcaaaag

SEQ ID NO: 1849523 - RNA, 19 nt, Homo sapiens
  misc_RNA (1)...(19): siRNA sense strand
caagcaguaccuccuagga

SEQ ID NO: 1849524 - RNA, 19 nt, Homo sapiens
  misc_RNA (1)...(19): siRNA sense strand
guaccggaacuuaaggaau

SEQ ID NO: 1849525 - RNA, 19 nt, Homo sapiens
  misc_RNA (1)...(19): siRNA sense strand
agacgugccuacucaugag

SEQ ID NO: 1849526 - RNA, 19 nt, Homo sapiens
  misc_RNA (1)...(19): siRNA sense strand
ccaccgucuucgaccacua

SEQ ID NO: 1849527 - RNA, 19 nt, Homo sapiens
  misc_RNA (1)...(19): siRNA sense strand
ggccggacaggaagacuau

SEQ ID NO: 1849528 - RNA, 19 nt, Homo sapiens
  misc_RNA (1)...(19): siRNA sense strand
ugguaaauccagccucauu

SEQ ID NO: 1849529 - RNA, 19 nt, Homo sapiens
  misc_RNA (1)...(19): siRNA sense strand
gaccgucugaggccuuuau

SEQ ID NO: 1849530 - RNA, 19 nt, Homo sapiens
  misc_RNA (1)...(19): siRNA sense strand
aagacgugccuacucauga

SEQ ID NO: 1849531 - RNA, 19 nt, Homo sapiens
  misc_RNA (1)...(19): siRNA sense strand
ccggacaggaagacuauga

SEQ ID NO: 1849532 - RNA, 19 nt, Homo sapiens
  misc_RNA (1)...(19): siRNA sense strand
gauccuaacuguugucuug

SEQ ID NO: 1849533 - RNA, 19 nt, Homo sapiens
  misc_RNA (1)...(19): siRNA sense strand
agaaagagaucuaagagaa

SEQ ID NO: 1849534 - RNA, 19 nt, Homo sapiens
  misc_RNA (1)...(19): siRNA sense strand
gaaguguucucuaaauaug

SEQ ID NO: 1849535 - RNA, 19 nt, Homo sapiens
  misc_RNA (1)...(19): siRNA sense strand
gggcaaauccugauccuaa

SEQ ID NO: 1849536 - RNA, 19 nt, Homo sapiens
  misc_RNA (1)...(19): siRNA sense strand
ggauuugccuuuguauauu

SEQ ID NO: 1849537 - RNA, 19 nt, Homo sapiens
  misc_RNA (1)...(19): siRNA sense strand
uaaagaacgugccaaugga

SEQ ID NO: 1849538 - RNA, 19 nt, Homo sapiens
  misc_RNA (1)...(19): siRNA sense strand
ggacuacuauagcagauca

SEQ ID NO: 1849539 - RNA, 19 nt, Homo sapiens
  misc_RNA (1)...(19): siRNA sense strand
uaacuguugucuuggagua

SEQ ID NO: 1849540 - RNA, 19 nt, Homo sapiens
  misc_RNA (1)...(19): siRNA sense strand
caaggaagcuaaagaacgu

SEQ ID NO: 1849541 - RNA, 19 nt, Homo sapiens
  misc_RNA (1)...(19): siRNA sense strand
gggaucagauuuauagaag

SEQ ID NO: 1849542 - RNA, 19 nt, Homo sapiens
  misc_RNA (1)...(19): siRNA sense strand
cgaugugucuauuguauau

SEQ ID NO: 1849543 - RNA, 19 nt, Homo sapiens
  misc_RNA (1)...(19): siRNA sense strand
ccaauggaauggagcuuga

SEQ ID NO: 1849544 - RNA, 19 nt, Homo sapiens
  misc_RNA (1)...(19): siRNA sense strand
caagaggauuugccuuugu

SEQ ID NO: 1849545 - RNA, 19 nt, Homo sapiens
  misc_RNA (1)...(19): siRNA sense strand
agacagggaucagauuuau

SEQ ID NO: 1849546 - RNA, 19 nt, Homo sapiens
  misc_RNA (1)...(19): siRNA sense strand
gaucgggacuacuauagca

SEQ ID NO: 1849547 - RNA, 19 nt, Homo sapiens
  misc_RNA (1)...(19): siRNA sense strand
caagacagggaucagauuu

SEQ ID NO: 1849548 - RNA, 19 nt, Homo sapiens
  misc_RNA (1)...(19): siRNA sense strand
aagaggauuugccuuugua

SEQ ID NO: 1849549 - RNA, 19 nt, Homo sapiens
  misc_RNA (1)...(19): siRNA sense strand
ggucuuacagucgagauua

SEQ ID NO: 1849550 - RNA, 19 nt, Homo sapiens
  misc_RNA (1)...(19): siRNA sense strand
gccgaugugucuauuguau

SEQ ID NO: 1849551 - RNA, 19 nt, Homo sapiens
  misc_RNA (1)...(19): siRNA sense strand
ggauacagaucacguucca

SEQ ID NO: 1849552 - RNA, 19 nt, Homo sapiens
  misc_RNA (1)...(19): siRNA sense strand
cauagacgaucacguagca

SEQ ID NO: 1849553 - RNA, 19 nt, Homo sapiens
  misc_RNA (1)...(19): siRNA sense strand
ucaagaggauuugccuuug

SEQ ID NO: 1849554 - RNA, 19 nt, Homo sapiens
  misc_RNA (1)...(19): siRNA sense strand
aaagagaucuaagagaagu

SEQ ID NO: 1849555 - RNA, 19 nt, Homo sapiens
  misc_RNA (1)...(19): siRNA sense strand
gaaagagaucuaagagaag

SEQ ID NO: 1849556 - RNA, 19 nt, Homo sapiens
  misc_RNA (1)...(19): siRNA sense strand
gaggauuugccuuuguaua

SEQ ID NO: 1849557 - RNA, 19 nt, Homo sapiens
  misc_RNA (1)...(19): siRNA sense strand
gaugaucgggacuacuaua

SEQ ID NO: 1849558 - RNA, 19 nt, Homo sapiens
  misc_RNA (1)...(19): siRNA sense strand
gggcguaggaucagaguug

SEQ ID NO: 1849559 - RNA, 19 nt, Homo sapiens
  misc_RNA (1)...(19): siRNA sense strand
cuaaagaacgugccaaugg

SEQ ID NO: 1849560 - RNA, 19 nt, Homo sapiens
  misc_RNA (1)...(19): siRNA sense strand
gaagcucccgaaggcauua

SEQ ID NO: 1849561 - RNA, 19 nt, Homo sapiens
  misc_RNA (1)...(19): siRNA sense strand
ucacguagcaggucuuaca

SEQ ID NO: 1849562 - RNA, 19 nt, Homo sapiens
  misc_RNA (1)...(19): siRNA sense strand
gaucacguagcaggucuua

SEQ ID NO: 1849563 - RNA, 19 nt, Homo sapiens
  misc_RNA (1)...(19): siRNA sense strand
ucccauagacgaucacgua

SEQ ID NO: 1849564 - RNA, 19 nt, Homo sapiens
  misc_RNA (1)...(19): siRNA sense strand
auacucaccucgucgcuau

SEQ ID NO: 1849565 - RNA, 19 nt, Homo sapiens
  misc_RNA (1)...(19): siRNA sense strand
uauuugggcugagcuugua

SEQ ID NO: 1849566 - RNA, 19 nt, Homo sapiens
  misc_RNA (1)...(19): siRNA sense strand
ggcggucaccuucuccuua

SEQ ID NO: 1849567 - RNA, 19 nt, Homo sapiens
  misc_RNA (1)...(19): siRNA sense strand
acagggaucagauuuauag

SEQ ID NO: 1849568 - RNA, 19 nt, Homo sapiens
  misc_RNA (1)...(19): siRNA sense strand
caaggucucgcuccaagga

SEQ ID NO: 1849569 - RNA, 19 nt, Homo sapiens
  misc_RNA (1)...(19): siRNA sense strand
gacagggaucagauuuaua

SEQ ID NO: 1849570 - RNA, 19 nt, Homo sapiens
  misc_RNA (1)...(19): siRNA sense strand
ccaagacagggaucagauu

SEQ ID NO: 1849571 - RNA, 19 nt, Homo sapiens
  misc_RNA (1)...(19): siRNA sense strand
gaguugauuucucuauaac

SEQ ID NO: 1849572 - RNA, 19 nt, Homo sapiens
  misc_RNA (1)...(19): siRNA sense strand
cagucgagauuaucguaga

SEQ ID NO: 1849573 - RNA, 19 nt, Homo sapiens
  misc_RNA (1)...(19): siRNA sense strand
ggaggauacagaucacguu

SEQ ID NO: 1849574 - RNA, 19 nt, Homo sapiens
  misc_RNA (1)...(19): siRNA sense strand
caccuucuccuuacuauag

SEQ ID NO: 1849575 - RNA, 19 nt, Homo sapiens
  misc_RNA (1)...(19): siRNA sense strand
guacaccacagaaagagau

SEQ ID NO: 1849576 - RNA, 19 nt, Homo sapiens
  misc_RNA (1)...(19): siRNA sense strand
gagcuuguacaccacagaa

SEQ ID NO: 1849577 - RNA, 19 nt, Homo sapiens
  misc_RNA (1)...(19): siRNA sense strand
ggucaccuucuccuuacua

SEQ ID NO: 1849578 - RNA, 19 nt, Homo sapiens
  misc_RNA (1)...(19): siRNA sense strand
gcggucaccuucuccuuac

SEQ ID NO: 1849579 - RNA, 19 nt, Homo sapiens
  misc_RNA (1)...(19): siRNA sense strand
aagacagggaucagauuua

SEQ ID NO: 1849580 - RNA, 19 nt, Homo sapiens
  misc_RNA (1)...(19): siRNA sense strand
cagaaagagaucuaagaga

SEQ ID NO: 1849581 - RNA, 19 nt, Homo sapiens
  misc_RNA (1)...(19): siRNA sense strand
guauaugaccagcagucua

SEQ ID NO: 1849582 - RNA, 19 nt, Homo sapiens
  misc_RNA (1)...(19): siRNA sense strand
gaacgugccaauggaaugg

SEQ ID NO: 1849583 - RNA, 19 nt, Homo sapiens
  misc_RNA (1)...(19): siRNA sense strand
uguagaugaugccaaggaa

SEQ ID NO: 1849584 - RNA, 19 nt, Homo sapiens
  misc_RNA (1)...(19): siRNA sense strand
aggauuugccuuuguauau

SEQ ID NO: 1849585 - RNA, 19 nt, Homo sapiens
  misc_RNA (1)...(19): siRNA sense strand
uauaugaccagcagucuag

SEQ ID NO: 1849586 - RNA, 19 nt, Homo sapiens
  misc_RNA (1)...(19): siRNA sense strand
gcacagccacagccauucu

SEQ ID NO: 1849587 - RNA, 19 nt, Homo sapiens
  misc_RNA (1)...(19): siRNA sense strand
cacagaaagagaucuaaga

SEQ ID NO: 1849588 - RNA, 19 nt, Homo sapiens
  misc_RNA (1)...(19): siRNA sense strand
gauggagagcugcccaaga

SEQ ID NO: 1849589 - RNA, 19 nt, Homo sapiens
  misc_RNA (1)...(19): siRNA sense strand
cgaucugaaucuaggucua

SEQ ID NO: 1849590 - RNA, 19 nt, Homo sapiens
  misc_RNA (1)...(19): siRNA sense strand
gcucucgccgucgggauua

SEQ ID NO: 1849591 - RNA, 19 nt, Homo sapiens
  misc_RNA (1)...(19): siRNA sense strand
ggcguaggaucagaguuga

SEQ ID NO: 1849592 - RNA, 19 nt, Homo sapiens
  misc_RNA (1)...(19): siRNA sense strand
aaagaacgugccaauggaa

SEQ ID NO: 1849593 - RNA, 19 nt, Homo sapiens
  misc_RNA (1)...(19): siRNA sense strand
gcuaaagaacgugccaaug

SEQ ID NO: 1849594 - RNA, 19 nt, Homo sapiens
  misc_RNA (1)...(19): siRNA sense strand
cggcacagccacagccauu

SEQ ID NO: 1849595 - RNA, 19 nt, Homo sapiens
  misc_RNA (1)...(19): siRNA sense strand
cgccaacaccaggaauuua

SEQ ID NO: 1849596 - RNA, 19 nt, Homo sapiens
  misc_RNA (1)...(19): siRNA sense strand
ggcaaauccugauccuaac

SEQ ID NO: 1849597 - RNA, 19 nt, Homo sapiens
  misc_RNA (1)...(19): siRNA sense strand
aggucuagauccagaagaa

SEQ ID NO: 1849598 - RNA, 19 nt, Homo sapiens
  misc_RNA (1)...(19): siRNA sense strand
ggaaaucugcaaggcauac

SEQ ID NO: 1849599 - RNA, 19 nt, Homo sapiens
  misc_RNA (1)...(19): siRNA sense strand
gauaugaucggggcuauga

SEQ ID NO: 1849600 - RNA, 19 nt, Homo sapiens
  misc_RNA (1)...(19): siRNA sense strand
gaagauuccaggcguucca

SEQ ID NO: 1849601 - RNA, 19 nt, Homo sapiens
  misc_RNA (1)...(19): siRNA sense strand
gcuaugaugaucgggacua

SEQ ID NO: 1849602 - RNA, 19 nt, Homo sapiens
  misc_RNA (1)...(19): siRNA sense strand
gaugaugccaaggaagcua

SEQ ID NO: 1849603 - RNA, 19 nt, Homo sapiens
  misc_RNA (1)...(19): siRNA sense strand
gggaaaucugcaaggcaua

SEQ ID NO: 1849604 - RNA, 19 nt, Homo sapiens
  misc_RNA (1)...(19): siRNA sense strand
gcaaauccugauccuaacu

SEQ ID NO: 1849605 - RNA, 19 nt, Homo sapiens
  misc_RNA (1)...(19): siRNA sense strand
acucaccucgucgcuauua

SEQ ID NO: 1849606 - RNA, 19 nt, Homo sapiens
  misc_RNA (1)...(19): siRNA sense strand
gccaacaccaggaauuuac

SEQ ID NO: 1849607 - RNA, 19 nt, Homo sapiens
  misc_RNA (1)...(19): siRNA sense strand
ccgaugugucuauuguaua

SEQ ID NO: 1849608 - RNA, 19 nt, Homo sapiens
  misc_RNA (1)...(19): siRNA sense strand
ccacagaaagagaucuaag

SEQ ID NO: 1849609 - RNA, 19 nt, Homo sapiens
  misc_RNA (1)...(19): siRNA sense strand
gccauucucccaugucuac

SEQ ID NO: 1849610 - RNA, 19 nt, Homo sapiens
  misc_RNA (1)...(19): siRNA sense strand
gucuuacagucgagauuau

SEQ ID NO: 1849611 - RNA, 19 nt, Homo sapiens
  misc_RNA (1)...(19): siRNA sense strand
uucaagaggauuugccuuu

SEQ ID NO: 1849612 - RNA, 19 nt, Homo sapiens
  misc_RNA (1)...(19): siRNA sense strand
guauuugggcugagcuugu

SEQ ID NO: 1849613 - RNA, 19 nt, Homo sapiens
  misc_RNA (1)...(19): siRNA sense strand
caaauccugauccuaacug

SEQ ID NO: 1849614 - RNA, 19 nt, Homo sapiens
  misc_RNA (1)...(19): siRNA sense strand
caccacagaaagagaucua

SEQ ID NO: 1849615 - RNA, 19 nt, Homo sapiens
  misc_RNA (1)...(19): siRNA sense strand
auggagagcugcccaagac

SEQ ID NO: 1849616 - RNA, 19 nt, Homo sapiens
  misc_RNA (1)...(19): siRNA sense strand
uacuauagcagaucauaca

SEQ ID NO: 1849617 - RNA, 19 nt, Homo sapiens
  misc_RNA (1)...(19): siRNA sense strand
augaugaucgggacuacua

SEQ ID NO: 1849618 - RNA, 19 nt, Homo sapiens
  misc_RNA (1)...(19): siRNA sense strand
ucuaggcguucaagaggau

SEQ ID NO: 1849619 - RNA, 19 nt, Homo sapiens
  misc_RNA (1)...(19): siRNA sense strand
acagaaagagaucuaagag

SEQ ID NO: 1849620 - RNA, 19 nt, Homo sapiens
  misc_RNA (1)...(19): siRNA sense strand
ugccaaggaagcuaaagaa

SEQ ID NO: 1849621 - RNA, 19 nt, Homo sapiens
  misc_RNA (1)...(19): siRNA sense strand
guccaggucccgaucugaa

SEQ ID NO: 1849622 - RNA, 19 nt, Homo sapiens
  misc_RNA (1)...(19): siRNA sense strand
cagccauucucccaugucu

SEQ ID NO: 1849623 - RNA, 19 nt, Homo sapiens
  misc_RNA (1)...(19): siRNA sense strand
uaugacagaggauaugauc

SEQ ID NO: 1849624 - RNA, 19 nt, Homo sapiens
  misc_RNA (1)...(19): siRNA sense strand
caacaccaggaauuuacau

SEQ ID NO: 1849625 - RNA, 19 nt, Homo sapiens
  misc_RNA (1)...(19): siRNA sense strand
gagcuugaugggcguagga

SEQ ID NO: 1849626 - RNA, 19 nt, Homo sapiens
  misc_RNA (1)...(19): siRNA sense strand
gaacugaggcugagaauac

SEQ ID NO: 1849627 - RNA, 19 nt, Homo sapiens
  misc_RNA (1)...(19): siRNA sense strand
ggagagacgugugcacaaa

SEQ ID NO: 1849628 - RNA, 19 nt, Homo sapiens
  misc_RNA (1)...(19): siRNA sense strand
gcaagcaugcguauuauga

SEQ ID NO: 1849629 - RNA, 19 nt, Homo sapiens
  misc_RNA (1)...(19): siRNA sense strand
ggagaaugcucgggugcua

SEQ ID NO: 1849630 - RNA, 19 nt, Homo sapiens
  misc_RNA (1)...(19): siRNA sense strand
gaacacaaagggaagauca

SEQ ID NO: 1849631 - RNA, 19 nt, Homo sapiens
  misc_RNA (1)...(19): siRNA sense strand
ggaugagguuugacaguga

SEQ ID NO: 1849632 - RNA, 19 nt, Homo sapiens
  misc_RNA (1)...(19): siRNA sense strand
ccugggagauggugacuuu

SEQ ID NO: 1849633 - RNA, 19 nt, Homo sapiens
  misc_RNA (1)...(19): siRNA sense strand
gcaagacggugauuguaac

SEQ ID NO: 1849634 - RNA, 19 nt, Homo sapiens
  misc_RNA (1)...(19): siRNA sense strand
gggaugauauugcuuggau

SEQ ID NO: 1849635 - RNA, 19 nt, Homo sapiens
  misc_RNA (1)...(19): siRNA sense strand
guggcaagcaugcguauua

SEQ ID NO: 1849636 - RNA, 19 nt, Homo sapiens
  misc_RNA (1)...(19): siRNA sense strand
ccacuggcauucgagauuu

SEQ ID NO: 1849637 - RNA, 19 nt, Homo sapiens
  misc_RNA (1)...(19): siRNA sense strand
gagaauacugccacacuga

SEQ ID NO: 1849638 - RNA, 19 nt, Homo sapiens
  misc_RNA (1)...(19): siRNA sense strand
ggacagugcccgagagaca

SEQ ID NO: 1849639 - RNA, 19 nt, Homo sapiens
  misc_RNA (1)...(19): siRNA sense strand
ccauguaugugcuuccauu

SEQ ID NO: 1849640 - RNA, 19 nt, Homo sapiens
  misc_RNA (1)...(19): siRNA sense strand
gagcaagacggugauugua

SEQ ID NO: 1849641 - RNA, 19 nt, Homo sapiens
  misc_RNA (1)...(19): siRNA sense strand
gaugagguuugacagugaa

SEQ ID NO: 1849642 - RNA, 19 nt, Homo sapiens
  misc_RNA (1)...(19): siRNA sense strand
gaugauauugcuuggauga

SEQ ID NO: 1849643 - RNA, 19 nt, Homo sapiens
  misc_RNA (1)...(19): siRNA sense strand
gcuggaaaguggagugugu

SEQ ID NO: 1849644 - RNA, 19 nt, Homo sapiens
  misc_RNA (1)...(19): siRNA sense strand
uggcuacaauccagaguaa

SEQ ID NO: 1849645 - RNA, 19 nt, Homo sapiens
  misc_RNA (1)...(19): siRNA sense strand
caucaugcacgacccauuu

SEQ ID NO: 1849646 - RNA, 19 nt, Homo sapiens
  misc_RNA (1)...(19): siRNA sense strand
caaccaggaucugcccaaa

SEQ ID NO: 1849647 - RNA, 19 nt, Homo sapiens
  misc_RNA (1)...(19): siRNA sense strand
agaccaaccuggcuaugau

SEQ ID NO: 1849648 - RNA, 19 nt, Homo sapiens
  misc_RNA (1)...(19): siRNA sense strand
gcacagaccccaaggaugu

SEQ ID NO: 1849649 - RNA, 19 nt, Homo sapiens
  misc_RNA (1)...(19): siRNA sense strand
acaggagguucgugacauu

SEQ ID NO: 1849650 - RNA, 19 nt, Homo sapiens
  misc_RNA (1)...(19): siRNA sense strand
ggaaaccuggugacaagga

SEQ ID NO: 1849651 - RNA, 19 nt, Homo sapiens
  misc_RNA (1)...(19): siRNA sense strand
accaggaucugcccaaaga

SEQ ID NO: 1849652 - RNA, 19 nt, Homo sapiens
  misc_RNA (1)...(19): siRNA sense strand
ccaacgccauggcuacaau

SEQ ID NO: 1849653 - RNA, 19 nt, Homo sapiens
  misc_RNA (1)...(19): siRNA sense strand
gcacaucccaacucucgau

SEQ ID NO: 1849654 - RNA, 19 nt, Homo sapiens
  misc_RNA (1)...(19): siRNA sense strand
ggaacugaggcugagaaua

SEQ ID NO: 1849655 - RNA, 19 nt, Homo sapiens
  misc_RNA (1)...(19): siRNA sense strand
gcaagaccaaccuggcuau

SEQ ID NO: 1849656 - RNA, 19 nt, Homo sapiens
  misc_RNA (1)...(19): siRNA sense strand
gcuacaauccagaguaaca

SEQ ID NO: 1849657 - RNA, 19 nt, Homo sapiens
  misc_RNA (1)...(19): siRNA sense strand
uccgaaagcuccccaagua

SEQ ID NO: 1849658 - RNA, 19 nt, Homo sapiens
  misc_RNA (1)...(19): siRNA sense strand
agacaccacucagcuguuc

SEQ ID NO: 1849659 - RNA, 19 nt, Homo sapiens
  misc_RNA (1)...(19): siRNA sense strand
cauugacgccaucaucuuu

SEQ ID NO: 1849660 - RNA, 19 nt, Homo sapiens
  misc_RNA (1)...(19): siRNA sense strand
cuggaaaccuggugacaag

SEQ ID NO: 1849661 - RNA, 19 nt, Homo sapiens
  misc_RNA (1)...(19): siRNA sense strand
gggagauggugacuuuguc

SEQ ID NO: 1849662 - RNA, 19 nt, Homo sapiens
  misc_RNA (1)...(19): siRNA sense strand
gcacgaguagagagcaaga

SEQ ID NO: 1849663 - RNA, 19 nt, Homo sapiens
  misc_RNA (1)...(19): siRNA sense strand
ccaaggacuucugggaaca

SEQ ID NO: 1849664 - RNA, 19 nt, Homo sapiens
  misc_RNA (1)...(19): siRNA sense strand
aagggaagaucaucaugca

SEQ ID NO: 1849665 - RNA, 19 nt, Homo sapiens
  misc_RNA (1)...(19): siRNA sense strand
caucccaacucucgauuuu

SEQ ID NO: 1849666 - RNA, 19 nt, Homo sapiens
  misc_RNA (1)...(19): siRNA sense strand
gggaagaaggcgcuaugug

SEQ ID NO: 1849667 - RNA, 19 nt, Homo sapiens
  misc_RNA (1)...(19): siRNA sense strand
gcuacaacuucgggcacua

SEQ ID NO: 1849668 - RNA, 19 nt, Homo sapiens
  misc_RNA (1)...(19): siRNA sense strand
gcagaacacaaagggaaga

SEQ ID NO: 1849669 - RNA, 19 nt, Homo sapiens
  misc_RNA (1)...(19): siRNA sense strand
uggcaagcaugcguauuau

SEQ ID NO: 1849670 - RNA, 19 nt, Homo sapiens
  misc_RNA (1)...(19): siRNA sense strand
ccagagggcauccacaucu

SEQ ID NO: 1849671 - RNA, 19 nt, Homo sapiens
  misc_RNA (1)...(19): siRNA sense strand
caaagggaagaucaucaug

SEQ ID NO: 1849672 - RNA, 19 nt, Homo sapiens
  misc_RNA (1)...(19): siRNA sense strand
gccuucaacuggcgucaug

SEQ ID NO: 1849673 - RNA, 19 nt, Homo sapiens
  misc_RNA (1)...(19): siRNA sense strand
ggauguggcacgaguagag

SEQ ID NO: 1849674 - RNA, 19 nt, Homo sapiens
  misc_RNA (1)...(19): siRNA sense strand
gguguuggcugagcuugag

SEQ ID NO: 1849675 - RNA, 19 nt, Homo sapiens
  misc_RNA (1)...(19): siRNA sense strand
gagcuguggaugagagguu

SEQ ID NO: 1849676 - RNA, 19 nt, Homo sapiens
  misc_RNA (1)...(19): siRNA sense strand
caauccagaguaacacuau

SEQ ID NO: 1849677 - RNA, 19 nt, Homo sapiens
  misc_RNA (1)...(19): siRNA sense strand
gaggacagugcccgagaga

SEQ ID NO: 1849678 - RNA, 19 nt, Homo sapiens
  misc_RNA (1)...(19): siRNA sense strand
uugcuuggaugagguuuga

SEQ ID NO: 1849679 - RNA, 19 nt, Homo sapiens
  misc_RNA (1)...(19): siRNA sense strand
caaggagcccugugcacau

SEQ ID NO: 1849680 - RNA, 19 nt, Homo sapiens
  misc_RNA (1)...(19): siRNA sense strand
caaggauguggcacgagua

SEQ ID NO: 1849681 - RNA, 19 nt, Homo sapiens
  misc_RNA (1)...(19): siRNA sense strand
gagagcaagacggugauug

SEQ ID NO: 1849682 - RNA, 19 nt, Homo sapiens
  misc_RNA (1)...(19): siRNA sense strand
agcaagacggugauuguaa

SEQ ID NO: 1849683 - RNA, 19 nt, Homo sapiens
  misc_RNA (1)...(19): siRNA sense strand
uauacgaggccuucaacug

SEQ ID NO: 1849684 - RNA, 19 nt, Homo sapiens
  misc_RNA (1)...(19): siRNA sense strand
agagcaagacggugauugu

SEQ ID NO: 1849685 - RNA, 19 nt, Homo sapiens
  misc_RNA (1)...(19): siRNA sense strand
ccauugacgccaucaucuu

SEQ ID NO: 1849686 - RNA, 19 nt, Homo sapiens
  misc_RNA (1)...(19): siRNA sense strand
aauccagaguaacacuauu

SEQ ID NO: 1849687 - RNA, 19 nt, Homo sapiens
  misc_RNA (1)...(19): siRNA sense strand
agcagggccucauccgaaa

SEQ ID NO: 1849688 - RNA, 19 nt, Homo sapiens
  misc_RNA (1)...(19): siRNA sense strand
ggacaaggggagccaguga

SEQ ID NO: 1849689 - RNA, 19 nt, Homo sapiens
  misc_RNA (1)...(19): siRNA sense strand
gagcuauagacaccacuca

SEQ ID NO: 1849690 - RNA, 19 nt, Homo sapiens
  misc_RNA (1)...(19): siRNA sense strand
acaaagggaagaucaucau

SEQ ID NO: 1849691 - RNA, 19 nt, Homo sapiens
  misc_RNA (1)...(19): siRNA sense strand
gaccaaccuggcuaugaug

SEQ ID NO: 1849692 - RNA, 19 nt, Homo sapiens
  misc_RNA (1)...(19): siRNA sense strand
caaaugggcugcuguggua

SEQ ID NO: 1849693 - RNA, 19 nt, Homo sapiens
  misc_RNA (1)...(19): siRNA sense strand
gaggaaaggugaacacaaa

SEQ ID NO: 1849694 - RNA, 19 nt, Homo sapiens
  misc_RNA (1)...(19): siRNA sense strand
gaacacagcuucacuuugc

SEQ ID NO: 1849695 - RNA, 19 nt, Homo sapiens
  misc_RNA (1)...(19): siRNA sense strand
gagaguggaugccaauaua

SEQ ID NO: 1849696 - RNA, 19 nt, Homo sapiens
  misc_RNA (1)...(19): siRNA sense strand
gcucugaacugccacauaa

SEQ ID NO: 1849697 - RNA, 19 nt, Homo sapiens
  misc_RNA (1)...(19): siRNA sense strand
gaacgaaacacgcucauuu

SEQ ID NO: 1849698 - RNA, 19 nt, Homo sapiens
  misc_RNA (1)...(19): siRNA sense strand
gaacggaagugaagaaucu

SEQ ID NO: 1849699 - RNA, 19 nt, Homo sapiens
  misc_RNA (1)...(19): siRNA sense strand
gagagaagcuuguccaaca

SEQ ID NO: 1849700 - RNA, 19 nt, Homo sapiens
  misc_RNA (1)...(19): siRNA sense strand
ggaaauucaugcccagauu

SEQ ID NO: 1849701 - RNA, 19 nt, Homo sapiens
  misc_RNA (1)...(19): siRNA sense strand
agaagaagcugucauugug

SEQ ID NO: 1849702 - RNA, 19 nt, Homo sapiens
  misc_RNA (1)...(19): siRNA sense strand
gaaauucagaggcaaauca

SEQ ID NO: 1849703 - RNA, 19 nt, Homo sapiens
  misc_RNA (1)...(19): siRNA sense strand
cagcagaggcucccaauug

SEQ ID NO: 1849704 - RNA, 19 nt, Homo sapiens
  misc_RNA (1)...(19): siRNA sense strand
gcagauccagucaugauaa

SEQ ID NO: 1849705 - RNA, 19 nt, Homo sapiens
  misc_RNA (1)...(19): siRNA sense strand
ccugcaggcuaccaaauua

SEQ ID NO: 1849706 - RNA, 19 nt, Homo sapiens
  misc_RNA (1)...(19): siRNA sense strand
gaggugaaauucugaacga

SEQ ID NO: 1849707 - RNA, 19 nt, Homo sapiens
  misc_RNA (1)...(19): siRNA sense strand
aaugggagcuugauauaug

SEQ ID NO: 1849708 - RNA, 19 nt, Homo sapiens
  misc_RNA (1)...(19): siRNA sense strand
ugaagaaucucaacagcau

SEQ ID NO: 1849709 - RNA, 19 nt, Homo sapiens
  misc_RNA (1)...(19): siRNA sense strand
gagaagaagcugucauugu

SEQ ID NO: 1849710 - RNA, 19 nt, Homo sapiens
  misc_RNA (1)...(19): siRNA sense strand
ccacagcaagugaucaaua

SEQ ID NO: 1849711 - RNA, 19 nt, Homo sapiens
  misc_RNA (1)...(19): siRNA sense strand
gaacgaagucggccuacug

SEQ ID NO: 1849712 - RNA, 19 nt, Homo sapiens
  misc_RNA (1)...(19): siRNA sense strand
ugacaggccuggcucugaa

SEQ ID NO: 1849713 - RNA, 19 nt, Homo sapiens
  misc_RNA (1)...(19): siRNA sense strand
aaacaggacuacagguuca

SEQ ID NO: 1849714 - RNA, 19 nt, Homo sapiens
  misc_RNA (1)...(19): siRNA sense strand
gggcugcugugguagguuu

SEQ ID NO: 1849715 - RNA, 19 nt, Homo sapiens
  misc_RNA (1)...(19): siRNA sense strand
gaagaagcugucauuguga

SEQ ID NO: 1849716 - RNA, 19 nt, Homo sapiens
  misc_RNA (1)...(19): siRNA sense strand
cgacauguccuguggagaa

SEQ ID NO: 1849717 - RNA, 19 nt, Homo sapiens
  misc_RNA (1)...(19): siRNA sense strand
ugaaugggagcuugauaua

SEQ ID NO: 1849718 - RNA, 19 nt, Homo sapiens
  misc_RNA (1)...(19): siRNA sense strand
cucagacgcucauugauuu

SEQ ID NO: 1849719 - RNA, 19 nt, Homo sapiens
  misc_RNA (1)...(19): siRNA sense strand
caacaggagguguguagaa

SEQ ID NO: 1849720 - RNA, 19 nt, Homo sapiens
  misc_RNA (1)...(19): siRNA sense strand
gcaaaagccuccacgacaa

SEQ ID NO: 1849721 - RNA, 19 nt, Homo sapiens
  misc_RNA (1)...(19): siRNA sense strand
cacagcaagugaucaauau

SEQ ID NO: 1849722 - RNA, 19 nt, Homo sapiens
  misc_RNA (1)...(19): siRNA sense strand
ggaaaggugaacacaaaug

SEQ ID NO: 1849723 - RNA, 19 nt, Homo sapiens
  misc_RNA (1)...(19): siRNA sense strand
gagcagauccagucaugau

SEQ ID NO: 1849724 - RNA, 19 nt, Homo sapiens
  misc_RNA (1)...(19): siRNA sense strand
gaaaggugaacacaaaugg

SEQ ID NO: 1849725 - RNA, 19 nt, Homo sapiens
  misc_RNA (1)...(19): siRNA sense strand
cagauccagucaugauaaa

SEQ ID NO: 1849726 - RNA, 19 nt, Homo sapiens
  misc_RNA (1)...(19): siRNA sense strand
cagggcagauuguuucaga

SEQ ID NO: 1849727 - RNA, 19 nt, Homo sapiens
  misc_RNA (1)...(19): siRNA sense strand
ugugguagguuuggaaauu

SEQ ID NO: 1849728 - RNA, 19 nt, Homo sapiens
  misc_RNA (1)...(19): siRNA sense strand
ucuaaacucuucucuggau

SEQ ID NO: 1849729 - RNA, 19 nt, Homo sapiens
  misc_RNA (1)...(19): siRNA sense strand
cagauuuccuccaacucua

SEQ ID NO: 1849730 - RNA, 19 nt, Homo sapiens
  misc_RNA (1)...(19): siRNA sense strand
cagcaagugaucaauauug

SEQ ID NO: 1849731 - RNA, 19 nt, Homo sapiens
  misc_RNA (1)...(19): siRNA sense strand
gaacugccacauaaacaag

SEQ ID NO: 1849732 - RNA, 19 nt, Homo sapiens
  misc_RNA (1)...(19): siRNA sense strand
gaaugggagcuugauauau

SEQ ID NO: 1849733 - RNA, 19 nt, Homo sapiens
  misc_RNA (1)...(19): siRNA sense strand
cagcaccuccaaauucuuu

SEQ ID NO: 1849734 - RNA, 19 nt, Homo sapiens
  misc_RNA (1)...(19): siRNA sense strand
ccagagcuauaaauaaacu

SEQ ID NO: 1849735 - RNA, 19 nt, Homo sapiens
  misc_RNA (1)...(19): siRNA sense strand
gguaauggaugugaagaac

SEQ ID NO: 1849736 - RNA, 19 nt, Homo sapiens
  misc_RNA (1)...(19): siRNA sense strand
ggaacacagcuucacuuug

SEQ ID NO: 1849737 - RNA, 19 nt, Homo sapiens
  misc_RNA (1)...(19): siRNA sense strand
ggugaaauucugaacgaaa

SEQ ID NO: 1849738 - RNA, 19 nt, Homo sapiens
  misc_RNA (1)...(19): siRNA sense strand
ccaagacggugaggaucaa

SEQ ID NO: 1849739 - RNA, 19 nt, Homo sapiens
  misc_RNA (1)...(19): siRNA sense strand
ccgagcagauccagucaug

SEQ ID NO: 1849740 - RNA, 19 nt, Homo sapiens
  misc_RNA (1)...(19): siRNA sense strand
cuggacagcagaacaauuu

SEQ ID NO: 1849741 - RNA, 19 nt, Homo sapiens
  misc_RNA (1)...(19): siRNA sense strand
gaaaacaggacuacagguu

SEQ ID NO: 1849742 - RNA, 19 nt, Homo sapiens
  misc_RNA (1)...(19): siRNA sense strand
gaagugaagaaucucaaca

SEQ ID NO: 1849743 - RNA, 19 nt, Homo sapiens
  misc_RNA (1)...(19): siRNA sense strand
ggagcaagacaguggcaaa

SEQ ID NO: 1849744 - RNA, 19 nt, Homo sapiens
  misc_RNA (1)...(19): siRNA sense strand
ucucagacgcucauugauu

SEQ ID NO: 1849745 - RNA, 19 nt, Homo sapiens
  misc_RNA (1)...(19): siRNA sense strand
aagaaguccuuguuugaca

SEQ ID NO: 1849746 - RNA, 19 nt, Homo sapiens
  misc_RNA (1)...(19): siRNA sense strand
ccccagagcuauaaauaaa

SEQ ID NO: 1849747 - RNA, 19 nt, Homo sapiens
  misc_RNA (1)...(19): siRNA sense strand
uaauggaugugaagaacag

SEQ ID NO: 1849748 - RNA, 19 nt, Homo sapiens
  misc_RNA (1)...(19): siRNA sense strand
gaagagggaaggcaagacu

SEQ ID NO: 1849749 - RNA, 19 nt, Homo sapiens
  misc_RNA (1)...(19): siRNA sense strand
gugaaauucugaacgaaac

SEQ ID NO: 1849750 - RNA, 19 nt, Homo sapiens
  misc_RNA (1)...(19): siRNA sense strand
gugaaugggagcuugauau

SEQ ID NO: 1849751 - RNA, 19 nt, Homo sapiens
  misc_RNA (1)...(19): siRNA sense strand
ggagaagaagcugucauug

SEQ ID NO: 1849752 - RNA, 19 nt, Homo sapiens
  misc_RNA (1)...(19): siRNA sense strand
ggcccauccucaaguggua

SEQ ID NO: 1849753 - RNA, 19 nt, Homo sapiens
  misc_RNA (1)...(19): siRNA sense strand
gaagcagagucaggugauc

SEQ ID NO: 1849754 - RNA, 19 nt, Homo sapiens
  misc_RNA (1)...(19): siRNA sense strand
cuugauauauggcgucugu

SEQ ID NO: 1849755 - RNA, 19 nt, Homo sapiens
  misc_RNA (1)...(19): siRNA sense strand
ugagaauggaggugaaauu

SEQ ID NO: 1849756 - RNA, 19 nt, Homo sapiens
  misc_RNA (1)...(19): siRNA sense strand
gaagcuuguccaacaguau

SEQ ID NO: 1849757 - RNA, 19 nt, Homo sapiens
  misc_RNA (1)...(19): siRNA sense strand
agaagcuuguccaacagua

SEQ ID NO: 1849758 - RNA, 19 nt, Homo sapiens
  misc_RNA (1)...(19): siRNA sense strand
gcagacccacagcaaguga

SEQ ID NO: 1849759 - RNA, 19 nt, Homo sapiens
  misc_RNA (1)...(19): siRNA sense strand
caaugaacuugagaaugga

SEQ ID NO: 1849760 - RNA, 19 nt, Homo sapiens
  misc_RNA (1)...(19): siRNA sense strand
ccacauccaaccagauuag

SEQ ID NO: 1849761 - RNA, 19 nt, Homo sapiens
  misc_RNA (1)...(19): siRNA sense strand
ggaagacguugggcuuucg

SEQ ID NO: 1849762 - RNA, 19 nt, Homo sapiens
  misc_RNA (1)...(19): siRNA sense strand
uggagaagaagcugucauu

SEQ ID NO: 1849763 - RNA, 19 nt, Homo sapiens
  misc_RNA (1)...(19): siRNA sense strand
gcucccaauugcugugaau

SEQ ID NO: 1849764 - RNA, 19 nt, Homo sapiens
  misc_RNA (1)...(19): siRNA sense strand
aaugagagacaaagaagga

SEQ ID NO: 1849765 - RNA, 19 nt, Homo sapiens
  misc_RNA (1)...(19): siRNA sense strand
gcccagauuuccuccaacu

SEQ ID NO: 1849766 - RNA, 19 nt, Homo sapiens
  misc_RNA (1)...(19): siRNA sense strand
ugagaguggaugccaauau

SEQ ID NO: 1849767 - RNA, 19 nt, Homo sapiens
  misc_RNA (1)...(19): siRNA sense strand
uuucagcaccuccaaauuc

SEQ ID NO: 1849768 - RNA, 19 nt, Homo sapiens
  misc_RNA (1)...(19): siRNA sense strand
gugguagguuuggaaauuc

SEQ ID NO: 1849769 - RNA, 19 nt, Homo sapiens
  misc_RNA (1)...(19): siRNA sense strand
gggugcaccaugucaauga

SEQ ID NO: 1849770 - RNA, 19 nt, Homo sapiens
  misc_RNA (1)...(19): siRNA sense strand
cuccaacucuaaacucuuc

SEQ ID NO: 1849771 - RNA, 19 nt, Homo sapiens
  misc_RNA (1)...(19): siRNA sense strand
gaguggaugccaauauauc

SEQ ID NO: 1849772 - RNA, 19 nt, Homo sapiens
  misc_RNA (1)...(19): siRNA sense strand
ugaacugccacauaaacaa

SEQ ID NO: 1849773 - RNA, 19 nt, Homo sapiens
  misc_RNA (1)...(19): siRNA sense strand
gcucugccacucugugaug

SEQ ID NO: 1849774 - RNA, 19 nt, Homo sapiens
  misc_RNA (1)...(19): siRNA sense strand
uggaacacagcuucacuuu

SEQ ID NO: 1849775 - RNA, 19 nt, Homo sapiens
  misc_RNA (1)...(19): siRNA sense strand
ugagagacaaagaaggaaa

SEQ ID NO: 1849776 - RNA, 19 nt, Homo sapiens
  misc_RNA (1)...(19): siRNA sense strand
guccacauccaaccagauu

SEQ ID NO: 1849777 - RNA, 19 nt, Homo sapiens
  misc_RNA (1)...(19): siRNA sense strand
agacgcucauugauuugaa

SEQ ID NO: 1849778 - RNA, 19 nt, Homo sapiens
  misc_RNA (1)...(19): siRNA sense strand
gauccagucaugauaaagg

SEQ ID NO: 1849779 - RNA, 19 nt, Homo sapiens
  misc_RNA (1)...(19): siRNA sense strand
ucaaugagagacaaagaag

SEQ ID NO: 1849780 - RNA, 19 nt, Homo sapiens
  misc_RNA (1)...(19): siRNA sense strand
gaagacgaggaaaggugaa

SEQ ID NO: 1849781 - RNA, 19 nt, Homo sapiens
  misc_RNA (1)...(19): siRNA sense strand
acucuucucuggaucucaa

SEQ ID NO: 1849782 - RNA, 19 nt, Homo sapiens
  misc_RNA (1)...(19): siRNA sense strand
gugcagacccacagcaagu

SEQ ID NO: 1849783 - RNA, 19 nt, Homo sapiens
  misc_RNA (1)...(19): siRNA sense strand
cagggaagaagcagaguca

SEQ ID NO: 1849784 - RNA, 19 nt, Homo sapiens
  misc_RNA (1)...(19): siRNA sense strand
uggaagacguugggcuuuc

SEQ ID NO: 1849785 - RNA, 19 nt, Homo sapiens
  misc_RNA (1)...(19): siRNA sense strand
caagugguaauggauguga

SEQ ID NO: 1849786 - RNA, 19 nt, Homo sapiens
  misc_RNA (1)...(19): siRNA sense strand
gcucuacgacgccacaucu

SEQ ID NO: 1849787 - RNA, 19 nt, Homo sapiens
  misc_RNA (1)...(19): siRNA sense strand
cgaggaaaggugaacacaa

SEQ ID NO: 1849788 - RNA, 19 nt, Homo sapiens
  misc_RNA (1)...(19): siRNA sense strand
gucaaugagagacaaagaa

SEQ ID NO: 1849789 - RNA, 19 nt, Homo sapiens
  misc_RNA (1)...(19): siRNA sense strand
cgacuggguccacauccaa

SEQ ID NO: 1849790 - RNA, 19 nt, Homo sapiens
  misc_RNA (1)...(19): siRNA sense strand
ggaccagccaggcgaacau

SEQ ID NO: 1849791 - RNA, 19 nt, Homo sapiens
  misc_RNA (1)...(19): siRNA sense strand
ccagauuuccuccaacucu

SEQ ID NO: 1849792 - RNA, 19 nt, Homo sapiens
  misc_RNA (1)...(19): siRNA sense strand
ggagaugcccuaccugaaa

SEQ ID NO: 1849793 - RNA, 19 nt, Homo sapiens
  misc_RNA (1)...(19): siRNA sense strand
ggaccuaacccgcucauga

SEQ ID NO: 1849794 - RNA, 19 nt, Homo sapiens
  misc_RNA (1)...(19): siRNA sense strand
gaggaucaguugcuaugaa

SEQ ID NO: 1849795 - RNA, 19 nt, Homo sapiens
  misc_RNA (1)...(19): siRNA sense strand
ggagacacaugauccuuca

SEQ ID NO: 1849796 - RNA, 19 nt, Homo sapiens
  misc_RNA (1)...(19): siRNA sense strand
ggccaaagcugaccaacuc

SEQ ID NO: 1849797 - RNA, 19 nt, Homo sapiens
  misc_RNA (1)...(19): siRNA sense strand
aaagcuaccuggcgaaaga

SEQ ID NO: 1849798 - RNA, 19 nt, Homo sapiens
  misc_RNA (1)...(19): siRNA sense strand
guacagcuccuacaacuuc

SEQ ID NO: 1849799 - RNA, 19 nt, Homo sapiens
  misc_RNA (1)...(19): siRNA sense strand
gugaggagcugaccuacga

SEQ ID NO: 1849800 - RNA, 19 nt, Homo sapiens
  misc_RNA (1)...(19): siRNA sense strand
ccaauaucauggaaguuaa

SEQ ID NO: 1849801 - RNA, 19 nt, Homo sapiens
  misc_RNA (1)...(19): siRNA sense strand
ggucagaggaugcaaagaa

SEQ ID NO: 1849802 - RNA, 19 nt, Homo sapiens
  misc_RNA (1)...(19): siRNA sense strand
gggaggcugugaagcagua

SEQ ID NO: 1849803 - RNA, 19 nt, Homo sapiens
  misc_RNA (1)...(19): siRNA sense strand
gagaugcccuaccugaaau

SEQ ID NO: 1849804 - RNA, 19 nt, Homo sapiens
  misc_RNA (1)...(19): siRNA sense strand
agaccuacaucuccaagaa

SEQ ID NO: 1849805 - RNA, 19 nt, Homo sapiens
  misc_RNA (1)...(19): siRNA sense strand
gaagcaaugugccuuagcu

SEQ ID NO: 1849806 - RNA, 19 nt, Homo sapiens
  misc_RNA (1)...(19): siRNA sense strand
ugaagaggaucaguugcua

SEQ ID NO: 1849807 - RNA, 19 nt, Homo sapiens
  misc_RNA (1)...(19): siRNA sense strand
guuguggccuccaauauca

SEQ ID NO: 1849808 - RNA, 19 nt, Homo sapiens
  misc_RNA (1)...(19): siRNA sense strand
ugccuuagcugccuugaga

SEQ ID NO: 1849809 - RNA, 19 nt, Homo sapiens
  misc_RNA (1)...(19): siRNA sense strand
cgacgacccuacaguugug

SEQ ID NO: 1849810 - RNA, 19 nt, Homo sapiens
  misc_RNA (1)...(19): siRNA sense strand
gagcaggacaaguacuauu

SEQ ID NO: 1849811 - RNA, 19 nt, Homo sapiens
  misc_RNA (1)...(19): siRNA sense strand
cagaagccauggacgacuu

SEQ ID NO: 1849812 - RNA, 19 nt, Homo sapiens
  misc_RNA (1)...(19): siRNA sense strand
acaccuacccugaggagua

SEQ ID NO: 1849813 - RNA, 19 nt, Homo sapiens
  misc_RNA (1)...(19): siRNA sense strand
agagagaggagacacauga

SEQ ID NO: 1849814 - RNA, 19 nt, Homo sapiens
  misc_RNA (1)...(19): siRNA sense strand
ccaccaauacuacuagaga

SEQ ID NO: 1849815 - RNA, 19 nt, Homo sapiens
  misc_RNA (1)...(19): siRNA sense strand
gggagcaggacaaguacua

SEQ ID NO: 1849816 - RNA, 19 nt, Homo sapiens
  misc_RNA (1)...(19): siRNA sense strand
gaagaggaucaguugcuau

SEQ ID NO: 1849817 - RNA, 19 nt, Homo sapiens
  misc_RNA (1)...(19): siRNA sense strand
ugagagaugucaaaagcua

SEQ ID NO: 1849818 - RNA, 19 nt, Homo sapiens
  misc_RNA (1)...(19): siRNA sense strand
uaccugaaaugcccucuuc

SEQ ID NO: 1849819 - RNA, 19 nt, Homo sapiens
  misc_RNA (1)...(19): siRNA sense strand
caguacagcuccuacaacu

SEQ ID NO: 1849820 - RNA, 19 nt, Homo sapiens
  misc_RNA (1)...(19): siRNA sense strand
uguacuaccugaugaacau

SEQ ID NO: 1849821 - RNA, 19 nt, Homo sapiens
  misc_RNA (1)...(19): siRNA sense strand
caaugaggaagccaugaaa

SEQ ID NO: 1849822 - RNA, 19 nt, Homo sapiens
  misc_RNA (1)...(19): siRNA sense strand
caaaugcgacagggacuug

SEQ ID NO: 1849823 - RNA, 19 nt, Homo sapiens
  misc_RNA (1)...(19): siRNA sense strand
ucaugaagaggaucaguug

SEQ ID NO: 1849824 - RNA, 19 nt, Homo sapiens
  misc_RNA (1)...(19): siRNA sense strand
gcaaagaagggaccuaacc

SEQ ID NO: 1849825 - RNA, 19 nt, Homo sapiens
  misc_RNA (1)...(19): siRNA sense strand
cagaggagaugcccuaccu

SEQ ID NO: 1849826 - RNA, 19 nt, Homo sapiens
  misc_RNA (1)...(19): siRNA sense strand
agcaggacaaguacuauua

SEQ ID NO: 1849827 - RNA, 19 nt, Homo sapiens
  misc_RNA (1)...(19): siRNA sense strand
caccuacccugaggaguau

SEQ ID NO: 1849828 - RNA, 19 nt, Homo sapiens
  misc_RNA (1)...(19): siRNA sense strand
cuacaguuguggccuccaa

SEQ ID NO: 1849829 - RNA, 19 nt, Homo sapiens
  misc_RNA (1)...(19): siRNA sense strand
caacagcuuugaggagcau

SEQ ID NO: 1849830 - RNA, 19 nt, Homo sapiens
  misc_RNA (1)...(19): siRNA sense strand
gaaaguccggaagcaaugu

SEQ ID NO: 1849831 - RNA, 19 nt, Homo sapiens
  misc_RNA (1)...(19): siRNA sense strand
gucagaggaugcaaagaag

SEQ ID NO: 1849832 - RNA, 19 nt, Homo sapiens
  misc_RNA (1)...(19): siRNA sense strand
uuagcugccuugagagaug

SEQ ID NO: 1849833 - RNA, 19 nt, Homo sapiens
  misc_RNA (1)...(19): siRNA sense strand
ccacaaaaguguucaacgu

SEQ ID NO: 1849834 - RNA, 19 nt, Homo sapiens
  misc_RNA (1)...(19): siRNA sense strand
gaccuaacccgcucaugag

SEQ ID NO: 1849835 - RNA, 19 nt, Homo sapiens
  misc_RNA (1)...(19): siRNA sense strand
ugacgccugucgcuuaugg

SEQ ID NO: 1849836 - RNA, 19 nt, Homo sapiens
  misc_RNA (1)...(19): siRNA sense strand
ugaaaguccggaagcaaug

SEQ ID NO: 1849837 - RNA, 19 nt, Homo sapiens
  misc_RNA (1)...(19): siRNA sense strand
gcgacgacccuacaguugu

SEQ ID NO: 1849838 - RNA, 19 nt, Homo sapiens
  misc_RNA (1)...(19): siRNA sense strand
gaugccaccaauacuacua

SEQ ID NO: 1849839 - RNA, 19 nt, Homo sapiens
  misc_RNA (1)...(19): siRNA sense strand
ggggacaaauugcgguuuu

SEQ ID NO: 1849840 - RNA, 19 nt, Homo sapiens
  misc_RNA (1)...(19): siRNA sense strand
aguggaaggcgcucaauga

SEQ ID NO: 1849841 - RNA, 19 nt, Homo sapiens
  misc_RNA (1)...(19): siRNA sense strand
uugccuacuuccuggauaa

SEQ ID NO: 1849842 - RNA, 19 nt, Homo sapiens
  misc_RNA (1)...(19): siRNA sense strand
gcaggacaaguacuauuac

SEQ ID NO: 1849843 - RNA, 19 nt, Homo sapiens
  misc_RNA (1)...(19): siRNA sense strand
gcaagaccuacaucuccaa

SEQ ID NO: 1849844 - RNA, 19 nt, Homo sapiens
  misc_RNA (1)...(19): siRNA sense strand
acaaugaggaagccaugaa

SEQ ID NO: 1849845 - RNA, 19 nt, Homo sapiens
  misc_RNA (1)...(19): siRNA sense strand
gugcgacgacccuacaguu

SEQ ID NO: 1849846 - RNA, 19 nt, Homo sapiens
  misc_RNA (1)...(19): siRNA sense strand
gcugccugcuugccuacuu

SEQ ID NO: 1849847 - RNA, 19 nt, Homo sapiens
  misc_RNA (1)...(19): siRNA sense strand
ugcgggagcaggacaagua

SEQ ID NO: 1849848 - RNA, 19 nt, Homo sapiens
  misc_RNA (1)...(19): siRNA sense strand
ccggaagcaaugugccuua

SEQ ID NO: 1849849 - RNA, 19 nt, Homo sapiens
  misc_RNA (1)...(19): siRNA sense strand
acaguuguggccuccaaua

SEQ ID NO: 1849850 - RNA, 19 nt, Homo sapiens
  misc_RNA (1)...(19): siRNA sense strand
uggaggagcagaaccugaa

SEQ ID NO: 1849851 - RNA, 19 nt, Homo sapiens
  misc_RNA (1)...(19): siRNA sense strand
ggauuggcguccccacaaa

SEQ ID NO: 1849852 - RNA, 19 nt, Homo sapiens
  misc_RNA (1)...(19): siRNA sense strand
gcaguacagcuccuacaac

SEQ ID NO: 1849853 - RNA, 19 nt, Homo sapiens
  misc_RNA (1)...(19): siRNA sense strand
ccgcucaugagacgcaaua

SEQ ID NO: 1849854 - RNA, 19 nt, Homo sapiens
  misc_RNA (1)...(19): siRNA sense strand
ccaugaaaguccggaagca

SEQ ID NO: 1849855 - RNA, 19 nt, Homo sapiens
  misc_RNA (1)...(19): siRNA sense strand
uaagagugcagaggagaug

SEQ ID NO: 1849856 - RNA, 19 nt, Homo sapiens
  misc_RNA (1)...(19): siRNA sense strand
gagagaggagacacaugau

SEQ ID NO: 1849857 - RNA, 19 nt, Homo sapiens
  misc_RNA (1)...(19): siRNA sense strand
gcucaugagacgcaauagu

SEQ ID NO: 1849858 - RNA, 19 nt, Homo sapiens
  misc_RNA (1)...(19): siRNA sense strand
gaggucagaggaugcaaag

SEQ ID NO: 1849859 - RNA, 19 nt, Homo sapiens
  misc_RNA (1)...(19): siRNA sense strand
ggagcaggacaaguacuau

SEQ ID NO: 1849860 - RNA, 19 nt, Homo sapiens
  misc_RNA (1)...(19): siRNA sense strand
aagaggaucaguugcuaug

SEQ ID NO: 1849861 - RNA, 19 nt, Homo sapiens
  misc_RNA (1)...(19): siRNA sense strand
ugaggaagccaugaaaguc

SEQ ID NO: 1849862 - RNA, 19 nt, Homo sapiens
  misc_RNA (1)...(19): siRNA sense strand
aacugacgccugucgcuua

SEQ ID NO: 1849863 - RNA, 19 nt, Homo sapiens
  misc_RNA (1)...(19): siRNA sense strand
gccggagguuccuggugaa

SEQ ID NO: 1849864 - RNA, 19 nt, Homo sapiens
  misc_RNA (1)...(19): siRNA sense strand
ucacagagcucaaggcaua

SEQ ID NO: 1849865 - RNA, 19 nt, Homo sapiens
  misc_RNA (1)...(19): siRNA sense strand
gaugagaucuucacuucuu

SEQ ID NO: 1849866 - RNA, 19 nt, Homo sapiens
  misc_RNA (1)...(19): siRNA sense strand
gagcaaaucuccaaaauga

SEQ ID NO: 1849867 - RNA, 19 nt, Homo sapiens
  misc_RNA (1)...(19): siRNA sense strand
gcaagauccucaucaagaa

SEQ ID NO: 1849868 - RNA, 19 nt, Homo sapiens
  misc_RNA (1)...(19): siRNA sense strand
ggaagaggcuaugaaagaa

SEQ ID NO: 1849869 - RNA, 19 nt, Homo sapiens
  misc_RNA (1)...(19): siRNA sense strand
gagauggaguuucuggaua

SEQ ID NO: 1849870 - RNA, 19 nt, Homo sapiens
  misc_RNA (1)...(19): siRNA sense strand
gaaccgaaguuaugucauc

SEQ ID NO: 1849871 - RNA, 19 nt, Homo sapiens
  misc_RNA (1)...(19): siRNA sense strand
gaaccugucuacaagaguu

SEQ ID NO: 1849872 - RNA, 19 nt, Homo sapiens
  misc_RNA (1)...(19): siRNA sense strand
acaguugccucuccaguua

SEQ ID NO: 1849873 - RNA, 19 nt, Homo sapiens
  misc_RNA (1)...(19): siRNA sense strand
ccacagacaucuucuucaa

SEQ ID NO: 1849874 - RNA, 19 nt, Homo sapiens
  misc_RNA (1)...(19): siRNA sense strand
guaaggagauggaguuucu

SEQ ID NO: 1849875 - RNA, 19 nt, Homo sapiens
  misc_RNA (1)...(19): siRNA sense strand
gaacaagaagaaccaguuu

SEQ ID NO: 1849876 - RNA, 19 nt, Homo sapiens
  misc_RNA (1)...(19): siRNA sense strand
gggaagaggcuaugaaaga

SEQ ID NO: 1849877 - RNA, 19 nt, Homo sapiens
  misc_RNA (1)...(19): siRNA sense strand
caaaugggaugaugaaacu

SEQ ID NO: 1849878 - RNA, 19 nt, Homo sapiens
  misc_RNA (1)...(19): siRNA sense strand
ggaggaaggcaacaaguuu

SEQ ID NO: 1849879 - RNA, 19 nt, Homo sapiens
  misc_RNA (1)...(19): siRNA sense strand
gaacauggcaguauuugag

SEQ ID NO: 1849880 - RNA, 19 nt, Homo sapiens
  misc_RNA (1)...(19): siRNA sense strand
ggaggagcccuuugucuuu

SEQ ID NO: 1849881 - RNA, 19 nt, Homo sapiens
  misc_RNA (1)...(19): siRNA sense strand
ggagaugaaggacuacaua

SEQ ID NO: 1849882 - RNA, 19 nt, Homo sapiens
  misc_RNA (1)...(19): siRNA sense strand
ggacuuuccugauaacagu

SEQ ID NO: 1849883 - RNA, 19 nt, Homo sapiens
  misc_RNA (1)...(19): siRNA sense strand
ggcaagggcucucgcaaga

SEQ ID NO: 1849884 - RNA, 19 nt, Homo sapiens
  misc_RNA (1)...(19): siRNA sense strand
uacaagaguuuccucauga

SEQ ID NO: 1849885 - RNA, 19 nt, Homo sapiens
  misc_RNA (1)...(19): siRNA sense strand
gaacgacaccaaagagaug

SEQ ID NO: 1849886 - RNA, 19 nt, Homo sapiens
  misc_RNA (1)...(19): siRNA sense strand
cauaugaccugcucuccaa

SEQ ID NO: 1849887 - RNA, 19 nt, Homo sapiens
  misc_RNA (1)...(19): siRNA sense strand
gaagaagagauuaagaaga

SEQ ID NO: 1849888 - RNA, 19 nt, Homo sapiens
  misc_RNA (1)...(19): siRNA sense strand
gaucuucacuucuuaccau

SEQ ID NO: 1849889 - RNA, 19 nt, Homo sapiens
  misc_RNA (1)...(19): siRNA sense strand
gguggaagcugcucucagu

SEQ ID NO: 1849890 - RNA, 19 nt, Homo sapiens
  misc_RNA (1)...(19): siRNA sense strand
ucaagcagaugacggagaa

SEQ ID NO: 1849891 - RNA, 19 nt, Homo sapiens
  misc_RNA (1)...(19): siRNA sense strand
gggauaugcugcucacaga

SEQ ID NO: 1849892 - RNA, 19 nt, Homo sapiens
  misc_RNA (1)...(19): siRNA sense strand
ccaaauucaucaaccagaa

SEQ ID NO: 1849893 - RNA, 19 nt, Homo sapiens
  misc_RNA (1)...(19): siRNA sense strand
aacauggacuuuccugaua

SEQ ID NO: 1849894 - RNA, 19 nt, Homo sapiens
  misc_RNA (1)...(19): siRNA sense strand
gcagaacauggcaguauuu

SEQ ID NO: 1849895 - RNA, 19 nt, Homo sapiens
  misc_RNA (1)...(19): siRNA sense strand
cuacaagaguuuccucaug

SEQ ID NO: 1849896 - RNA, 19 nt, Homo sapiens
  misc_RNA (1)...(19): siRNA sense strand
ugauggagcuggccagaga

SEQ ID NO: 1849897 - RNA, 19 nt, Homo sapiens
  misc_RNA (1)...(19): siRNA sense strand
agaaggagcugcgagaguu

SEQ ID NO: 1849898 - RNA, 19 nt, Homo sapiens
  misc_RNA (1)...(19): siRNA sense strand
aggcuaagauggcugagua

SEQ ID NO: 1849899 - RNA, 19 nt, Homo sapiens
  misc_RNA (1)...(19): siRNA sense strand
gaggagcccuuugucuuug

SEQ ID NO: 1849900 - RNA, 19 nt, Homo sapiens
  misc_RNA (1)...(19): siRNA sense strand
uguccagccuagucaauua

SEQ ID NO: 1849901 - RNA, 19 nt, Homo sapiens
  misc_RNA (1)...(19): siRNA sense strand
ggcaagauccucaucaaga

SEQ ID NO: 1849902 - RNA, 19 nt, Homo sapiens
  misc_RNA (1)...(19): siRNA sense strand
agagagagauuaacaacuc

SEQ ID NO: 1849903 - RNA, 19 nt, Homo sapiens
  misc_RNA (1)...(19): siRNA sense strand
gcaccuuccuggacaagau

SEQ ID NO: 1849904 - RNA, 19 nt, Homo sapiens
  misc_RNA (1)...(19): siRNA sense strand
aggagaagcuggaggagaa

SEQ ID NO: 1849905 - RNA, 19 nt, Homo sapiens
  misc_RNA (1)...(19): siRNA sense strand
aagaggcgcuaucgaacua

SEQ ID NO: 1849906 - RNA, 19 nt, Homo sapiens
  misc_RNA (1)...(19): siRNA sense strand
cgcagccacucaaucauua

SEQ ID NO: 1849907 - RNA, 19 nt, Homo sapiens
  misc_RNA (1)...(19): siRNA sense strand
agaugcagcucaacucuga

SEQ ID NO: 1849908 - RNA, 19 nt, Homo sapiens
  misc_RNA (1)...(19): siRNA sense strand
gagcaggacccacucauag

SEQ ID NO: 1849909 - RNA, 19 nt, Homo sapiens
  misc_RNA (1)...(19): siRNA sense strand
ccaaguucgucuccuuuga

SEQ ID NO: 1849910 - RNA, 19 nt, Homo sapiens
  misc_RNA (1)...(19): siRNA sense strand
caagggcucucgcaagaag

SEQ ID NO: 1849911 - RNA, 19 nt, Homo sapiens
  misc_RNA (1)...(19): siRNA sense strand
acagacaucuucuucaaag

SEQ ID NO: 1849912 - RNA, 19 nt, Homo sapiens
  misc_RNA (1)...(19): siRNA sense strand
gaagagagagauuaacaac

SEQ ID NO: 1849913 - RNA, 19 nt, Homo sapiens
  misc_RNA (1)...(19): siRNA sense strand
uaagauggcugaguauugc

SEQ ID NO: 1849914 - RNA, 19 nt, Homo sapiens
  misc_RNA (1)...(19): siRNA sense strand
caaaagaaccgaaguuaug

SEQ ID NO: 1849915 - RNA, 19 nt, Homo sapiens
  misc_RNA (1)...(19): siRNA sense strand
caacauggacuuuccugau

SEQ ID NO: 1849916 - RNA, 19 nt, Homo sapiens
  misc_RNA (1)...(19): siRNA sense strand
gcacguggccgagcaaauc

SEQ ID NO: 1849917 - RNA, 19 nt, Homo sapiens
  misc_RNA (1)...(19): siRNA sense strand
gcgcaccuauguagaagug

SEQ ID NO: 1849918 - RNA, 19 nt, Homo sapiens
  misc_RNA (1)...(19): siRNA sense strand
aggagcaccugaccaaauu

SEQ ID NO: 1849919 - RNA, 19 nt, Homo sapiens
  misc_RNA (1)...(19): siRNA sense strand
gauacucgcuuugggaagu

SEQ ID NO: 1849920 - RNA, 19 nt, Homo sapiens
  misc_RNA (1)...(19): siRNA sense strand
aggaggcgcuggcagagua

SEQ ID NO: 1849921 - RNA, 19 nt, Homo sapiens
  misc_RNA (1)...(19): siRNA sense strand
ugaaggagacgucggagaa

SEQ ID NO: 1849922 - RNA, 19 nt, Homo sapiens
  misc_RNA (1)...(19): siRNA sense strand
gccuggaagugacggcuua

SEQ ID NO: 1849923 - RNA, 19 nt, Homo sapiens
  misc_RNA (1)...(19): siRNA sense strand
acauggacuuuccugauaa

SEQ ID NO: 1849924 - RNA, 19 nt, Homo sapiens
  misc_RNA (1)...(19): siRNA sense strand
gccaccacccuuuccauua

SEQ ID NO: 1849925 - RNA, 19 nt, Homo sapiens
  misc_RNA (1)...(19): siRNA sense strand
ccaccaaguucgucuccuu

SEQ ID NO: 1849926 - RNA, 19 nt, Homo sapiens
  misc_RNA (1)...(19): siRNA sense strand
cgaaggagcaccugaccaa

SEQ ID NO: 1849927 - RNA, 19 nt, Homo sapiens
  misc_RNA (1)...(19): siRNA sense strand
ccacaacaccuaccugaca

SEQ ID NO: 1849928 - RNA, 19 nt, Homo sapiens
  misc_RNA (1)...(19): siRNA sense strand
gcagaugacggagaacuug

SEQ ID NO: 1849929 - RNA, 19 nt, Homo sapiens
  misc_RNA (1)...(19): siRNA sense strand
ggagcuggccagagagaaa

SEQ ID NO: 1849930 - RNA, 19 nt, Homo sapiens
  misc_RNA (1)...(19): siRNA sense strand
ggccagaaauagaugagau

SEQ ID NO: 1849931 - RNA, 19 nt, Homo sapiens
  misc_RNA (1)...(19): siRNA sense strand
acuaagcugucacccagua

SEQ ID NO: 1849932 - RNA, 19 nt, Homo sapiens
  misc_RNA (1)...(19): siRNA sense strand
agauggaguuucuggauau

SEQ ID NO: 1849933 - RNA, 19 nt, Homo sapiens
  misc_RNA (1)...(19): siRNA sense strand
ggugaucucugggcaguuc

SEQ ID NO: 1849934 - RNA, 19 nt, Homo sapiens
  misc_RNA (1)...(19): siRNA sense strand
aagaagcaauugaggcuau

SEQ ID NO: 1849935 - RNA, 19 nt, Homo sapiens
  misc_RNA (1)...(19): siRNA sense strand
ggacguaucaaaguaagga

SEQ ID NO: 1849936 - RNA, 19 nt, Homo sapiens
  misc_RNA (1)...(19): siRNA sense strand
ggagauggaguuucuggau

SEQ ID NO: 1849937 - RNA, 19 nt, Homo sapiens
  misc_RNA (1)...(19): siRNA sense strand
gagaacgacaccaaagaga

SEQ ID NO: 1849938 - RNA, 19 nt, Homo sapiens
  misc_RNA (1)...(19): siRNA sense strand
cgaagucugugaagcucaa

SEQ ID NO: 1849939 - RNA, 19 nt, Homo sapiens
  misc_RNA (1)...(19): siRNA sense strand
ccaccacccuuuccauuac

SEQ ID NO: 1849940 - RNA, 19 nt, Homo sapiens
  misc_RNA (1)...(19): siRNA sense strand
aaaccuggaugaagaagag

SEQ ID NO: 1849941 - RNA, 19 nt, Homo sapiens
  misc_RNA (1)...(19): siRNA sense strand
caaauucaucaaccagaaa

SEQ ID NO: 1849942 - RNA, 19 nt, Homo sapiens
  misc_RNA (1)...(19): siRNA sense strand
ucacagagccccuggaaaa

SEQ ID NO: 1849943 - RNA, 19 nt, Homo sapiens
  misc_RNA (1)...(19): siRNA sense strand
ugacgcagccacucaauca

SEQ ID NO: 1849944 - RNA, 19 nt, Homo sapiens
  misc_RNA (1)...(19): siRNA sense strand
gaccucaccuuccacaacu

SEQ ID NO: 1849945 - RNA, 19 nt, Homo sapiens
  misc_RNA (1)...(19): siRNA sense strand
aaaguaaggagauggaguu

SEQ ID NO: 1849946 - RNA, 19 nt, Homo sapiens
  misc_RNA (1)...(19): siRNA sense strand
ggacuccuccaacuacaug

SEQ ID NO: 1849947 - RNA, 19 nt, Homo sapiens
  misc_RNA (1)...(19): siRNA sense strand
ggagauguccagccuaguc

SEQ ID NO: 1849948 - RNA, 19 nt, Homo sapiens
  misc_RNA (1)...(19): siRNA sense strand
gaugaagaagagauuaaga

SEQ ID NO: 1849949 - RNA, 19 nt, Homo sapiens
  misc_RNA (1)...(19): siRNA sense strand
ggcauggucugguuucucu

SEQ ID NO: 1849950 - RNA, 19 nt, Homo sapiens
  misc_RNA (1)...(19): siRNA sense strand
gcggcuaccuccucaagca

SEQ ID NO: 1849951 - RNA, 19 nt, Homo sapiens
  misc_RNA (1)...(19): siRNA sense strand
cuaagauggcugaguauug

SEQ ID NO: 1849952 - RNA, 19 nt, Homo sapiens
  misc_RNA (1)...(19): siRNA sense strand
gaccacagacaucuucuuc

SEQ ID NO: 1849953 - RNA, 19 nt, Homo sapiens
  misc_RNA (1)...(19): siRNA sense strand
ggagaacgacaccaaagag

SEQ ID NO: 1849954 - RNA, 19 nt, Homo sapiens
  misc_RNA (1)...(19): siRNA sense strand
gagcggauccagggcauga

SEQ ID NO: 1849955 - RNA, 19 nt, Homo sapiens
  misc_RNA (1)...(19): siRNA sense strand
uaugucaucucguccuuca

SEQ ID NO: 1849956 - RNA, 19 nt, Homo sapiens
  misc_RNA (1)...(19): siRNA sense strand
gcaaaucuccaaaaugaug

SEQ ID NO: 1849957 - RNA, 19 nt, Homo sapiens
  misc_RNA (1)...(19): siRNA sense strand
gggagcgcuucaucaaaug

SEQ ID NO: 1849958 - RNA, 19 nt, Homo sapiens
  misc_RNA (1)...(19): siRNA sense strand
cagggaagaggcuaugaaa

SEQ ID NO: 1849959 - RNA, 19 nt, Homo sapiens
  misc_RNA (1)...(19): siRNA sense strand
ugggaggucugccugagaa

SEQ ID NO: 1849960 - RNA, 19 nt, Homo sapiens
  misc_RNA (1)...(19): siRNA sense strand
gcuaccuccucaagcauga

SEQ ID NO: 1849961 - RNA, 19 nt, Homo sapiens
  misc_RNA (1)...(19): siRNA sense strand
gaaggagcugcgagaguug

SEQ ID NO: 1849962 - RNA, 19 nt, Homo sapiens
  misc_RNA (1)...(19): siRNA sense strand
gguugaagagagagauuaa

SEQ ID NO: 1849963 - RNA, 19 nt, Homo sapiens
  misc_RNA (1)...(19): siRNA sense strand
caaagucaccacagacaag

SEQ ID NO: 1849964 - RNA, 19 nt, Homo sapiens
  misc_RNA (1)...(19): siRNA sense strand
cggagaagcuggaccugaa

SEQ ID NO: 1849965 - RNA, 19 nt, Homo sapiens
  misc_RNA (1)...(19): siRNA sense strand
caccaagccugaacucuuc

SEQ ID NO: 1849966 - RNA, 19 nt, Homo sapiens
  misc_RNA (1)...(19): siRNA sense strand
gaacagcaagcaggcguuu

SEQ ID NO: 1849967 - RNA, 19 nt, Homo sapiens
  misc_RNA (1)...(19): siRNA sense strand
ccucggcccuccucugaaa

SEQ ID NO: 1849968 - RNA, 19 nt, Homo sapiens
  misc_RNA (1)...(19): siRNA sense strand
gaagcuggaccugaagaaa

SEQ ID NO: 1849969 - RNA, 19 nt, Homo sapiens
  misc_RNA (1)...(19): siRNA sense strand
gcaagcaggcguuuagcau

SEQ ID NO: 1849970 - RNA, 19 nt, Homo sapiens
  misc_RNA (1)...(19): siRNA sense strand
ccaccuaccacacuaugaa

SEQ ID NO: 1849971 - RNA, 19 nt, Homo sapiens
  misc_RNA (1)...(19): siRNA sense strand
gcaaccagaggcagaaaca

SEQ ID NO: 1849972 - RNA, 19 nt, Homo sapiens
  misc_RNA (1)...(19): siRNA sense strand
cggagagccugucuuccaa

SEQ ID NO: 1849973 - RNA, 19 nt, Homo sapiens
  misc_RNA (1)...(19): siRNA sense strand
ucaccaagccugaacucuu

SEQ ID NO: 1849974 - RNA, 19 nt, Homo sapiens
  misc_RNA (1)...(19): siRNA sense strand
ugaugucccugaacagcaa

SEQ ID NO: 1849975 - RNA, 19 nt, Homo sapiens
  misc_RNA (1)...(19): siRNA sense strand
gaagccuacuuugccauuc

SEQ ID NO: 1849976 - RNA, 19 nt, Homo sapiens
  misc_RNA (1)...(19): siRNA sense strand
gcacguggagcccaaguac

SEQ ID NO: 1849977 - RNA, 19 nt, Homo sapiens
  misc_RNA (1)...(19): siRNA sense strand
gcggagagccugucuucca

SEQ ID NO: 1849978 - RNA, 19 nt, Homo sapiens
  misc_RNA (1)...(19): siRNA sense strand
gacgccaccuaccacacua

SEQ ID NO: 1849979 - RNA, 19 nt, Homo sapiens
  misc_RNA (1)...(19): siRNA sense strand
gagaagcuggaccugaaga

SEQ ID NO: 1849980 - RNA, 19 nt, Homo sapiens
  misc_RNA (1)...(19): siRNA sense strand
cgaagccuacuuugccauu

SEQ ID NO: 1849981 - RNA, 19 nt, Homo sapiens
  misc_RNA (1)...(19): siRNA sense strand
ucaaaccggacgccaccua

SEQ ID NO: 1849982 - RNA, 19 nt, Homo sapiens
  misc_RNA (1)...(19): siRNA sense strand
ccagaggcagaaacagaaa

SEQ ID NO: 1849983 - RNA, 19 nt, Homo sapiens
  misc_RNA (1)...(19): siRNA sense strand
ggacgccaccuaccacacu

SEQ ID NO: 1849984 - RNA, 19 nt, Homo sapiens
  misc_RNA (1)...(19): siRNA sense strand
aagccuacuuugccauuca

SEQ ID NO: 1849985 - RNA, 19 nt, Homo sapiens
  misc_RNA (1)...(19): siRNA sense strand
gaagucccaccgcgagaag

SEQ ID NO: 1849986 - RNA, 19 nt, Homo sapiens
  misc_RNA (1)...(19): siRNA sense strand
caagagccaccaccaccau

SEQ ID NO: 1849987 - RNA, 19 nt, Homo sapiens
  misc_RNA (1)...(19): siRNA sense strand
aaccagaggcagaaacaga

SEQ ID NO: 1849988 - RNA, 19 nt, Homo sapiens
  misc_RNA (1)...(19): siRNA sense strand
auaauaugaucgcgcucaa

SEQ ID NO: 1849989 - RNA, 19 nt, Homo sapiens
  misc_RNA (1)...(19): siRNA sense strand
gaagcucaccaagccugaa

SEQ ID NO: 1849990 - RNA, 19 nt, Homo sapiens
  misc_RNA (1)...(19): siRNA sense strand
gcagaaacagaaaagaaug

SEQ ID NO: 1849991 - RNA, 19 nt, Homo sapiens
  misc_RNA (1)...(19): siRNA sense strand
acagcaagcaggcguuuag

SEQ ID NO: 1849992 - RNA, 19 nt, Homo sapiens
  misc_RNA (1)...(19): siRNA sense strand
ggaauuagaugacacuuua

SEQ ID NO: 1849993 - RNA, 19 nt, Homo sapiens
  misc_RNA (1)...(19): siRNA sense strand
gaaccaggcugcuaucaug

SEQ ID NO: 1849994 - RNA, 19 nt, Homo sapiens
  misc_RNA (1)...(19): siRNA sense strand
guaagcagcugaacgagaa

SEQ ID NO: 1849995 - RNA, 19 nt, Homo sapiens
  misc_RNA (1)...(19): siRNA sense strand
cacgaaagccgacaaauua

SEQ ID NO: 1849996 - RNA, 19 nt, Homo sapiens
  misc_RNA (1)...(19): siRNA sense strand
uaagagcccuggaucguuu

SEQ ID NO: 1849997 - RNA, 19 nt, Homo sapiens
  misc_RNA (1)...(19): siRNA sense strand
gagguucguugcccuguua

SEQ ID NO: 1849998 - RNA, 19 nt, Homo sapiens
  misc_RNA (1)...(19): siRNA sense strand
uuuaguagauggacagaua

SEQ ID NO: 1849999 - RNA, 19 nt, Homo sapiens
  misc_RNA (1)...(19): siRNA sense strand
ccagaacgcauuacaauau

SEQ ID NO: 1850000 - RNA, 19 nt, Homo sapiens
  misc_RNA (1)...(19): siRNA sense strand
cccaaugugugaucuguua

SEQ ID NO: 1850001 - RNA, 19 nt, Homo sapiens
  misc_RNA (1)...(19): siRNA sense strand
gaaaaucaccggauacaaa

SEQ ID NO: 1850002 - RNA, 19 nt, Homo sapiens
  misc_RNA (1)...(19): siRNA sense strand
gaucuuauggaacucuuua

SEQ ID NO: 1850003 - RNA, 19 nt, Homo sapiens
  misc_RNA (1)...(19): siRNA sense strand
cagaacgcauuacaauauu

SEQ ID NO: 1850004 - RNA, 19 nt, Homo sapiens
  misc_RNA (1)...(19): siRNA sense strand
gaacgcauuacaauauuga

SEQ ID NO: 1850005 - RNA, 19 nt, Homo sapiens
  misc_RNA (1)...(19): siRNA sense strand
ggauacaaacuacuuauuc

SEQ ID NO: 1850006 - RNA, 19 nt, Homo sapiens
  misc_RNA (1)...(19): siRNA sense strand
gacugugacucuucuugua

SEQ ID NO: 1850007 - RNA, 19 nt, Homo sapiens
  misc_RNA (1)...(19): siRNA sense strand
guagacagaggauauuauu

SEQ ID NO: 1850008 - RNA, 19 nt, Homo sapiens
  misc_RNA (1)...(19): siRNA sense strand
ucacgaaagccgacaaauu

SEQ ID NO: 1850009 - RNA, 19 nt, Homo sapiens
  misc_RNA (1)...(19): siRNA sense strand
ggauacaauuggugucaug

SEQ ID NO: 1850010 - RNA, 19 nt, Homo sapiens
  misc_RNA (1)...(19): siRNA sense strand
gagaggaaaucacgaaagc

SEQ ID NO: 1850011 - RNA, 19 nt, Homo sapiens
  misc_RNA (1)...(19): siRNA sense strand
agaugugcauggucaauuu

SEQ ID NO: 1850012 - RNA, 19 nt, Homo sapiens
  misc_RNA (1)...(19): siRNA sense strand
caaauuacccaaguauaug

SEQ ID NO: 1850013 - RNA, 19 nt, Homo sapiens
  misc_RNA (1)...(19): siRNA sense strand
agacagaggauauuauuca

SEQ ID NO: 1850014 - RNA, 19 nt, Homo sapiens
  misc_RNA (1)...(19): siRNA sense strand
uagacacacuggaucauau

SEQ ID NO: 1850015 - RNA, 19 nt, Homo sapiens
  misc_RNA (1)...(19): siRNA sense strand
guauauggcuuuuaugaug

SEQ ID NO: 1850016 - RNA, 19 nt, Homo sapiens
  misc_RNA (1)...(19): siRNA sense strand
cacacuggaucauauaaga

SEQ ID NO: 1850017 - RNA, 19 nt, Homo sapiens
  misc_RNA (1)...(19): siRNA sense strand
ggugcuggcuacacauuug

SEQ ID NO: 1850018 - RNA, 19 nt, Homo sapiens
  misc_RNA (1)...(19): siRNA sense strand
auggaacucuuuagaauug

SEQ ID NO: 1850019 - RNA, 19 nt, Homo sapiens
  misc_RNA (1)...(19): siRNA sense strand
ccaaguauauggcuuuuau

SEQ ID NO: 1850020 - RNA, 19 nt, Homo sapiens
  misc_RNA (1)...(19): siRNA sense strand
gacaaauuacccaaguaua

SEQ ID NO: 1850021 - RNA, 19 nt, Homo sapiens
  misc_RNA (1)...(19): siRNA sense strand
aaaggugcguuauccagaa

SEQ ID NO: 1850022 - RNA, 19 nt, Homo sapiens
  misc_RNA (1)...(19): siRNA sense strand
auucaugggugacuaugua

SEQ ID NO: 1850023 - RNA, 19 nt, Homo sapiens
  misc_RNA (1)...(19): siRNA sense strand
gaaggcaaaggaaauuuua

SEQ ID NO: 1850024 - RNA, 19 nt, Homo sapiens
  misc_RNA (1)...(19): siRNA sense strand
cgacaaauuacccaaguau

SEQ ID NO: 1850025 - RNA, 19 nt, Homo sapiens
  misc_RNA (1)...(19): siRNA sense strand
guaauggagggauacaauu

SEQ ID NO: 1850026 - RNA, 19 nt, Homo sapiens
  misc_RNA (1)...(19): siRNA sense strand
caauuacuguuaucguugu

SEQ ID NO: 1850027 - RNA, 19 nt, Homo sapiens
  misc_RNA (1)...(19): siRNA sense strand
ugacucuucuuguagcauu

SEQ ID NO: 1850028 - RNA, 19 nt, Homo sapiens
  misc_RNA (1)...(19): siRNA sense strand
gagaaggcaaaggaaauuu

SEQ ID NO: 1850029 - RNA, 19 nt, Homo sapiens
  misc_RNA (1)...(19): siRNA sense strand
guaugggaaugccaacguu

SEQ ID NO: 1850030 - RNA, 19 nt, Homo sapiens
  misc_RNA (1)...(19): siRNA sense strand
augaaugucugcgaaagua

SEQ ID NO: 1850031 - RNA, 19 nt, Homo sapiens
  misc_RNA (1)...(19): siRNA sense strand
acagaucucuuugauuauc

SEQ ID NO: 1850032 - RNA, 19 nt, Homo sapiens
  misc_RNA (1)...(19): siRNA sense strand
acaaggcguucaccaagga

SEQ ID NO: 1850033 - RNA, 19 nt, Homo sapiens
  misc_RNA (1)...(19): siRNA sense strand
cccaauuacuguuaucguu

SEQ ID NO: 1850034 - RNA, 19 nt, Homo sapiens
  misc_RNA (1)...(19): siRNA sense strand
acuuacagcuuuaguagau

SEQ ID NO: 1850035 - RNA, 19 nt, Homo sapiens
  misc_RNA (1)...(19): siRNA sense strand
uaauggagggauacaauug

SEQ ID NO: 1850036 - RNA, 19 nt, Homo sapiens
  misc_RNA (1)...(19): siRNA sense strand
uggccucucuccauccaua

SEQ ID NO: 1850037 - RNA, 19 nt, Homo sapiens
  misc_RNA (1)...(19): siRNA sense strand
cgagaaggcaaaggaaauu

SEQ ID NO: 1850038 - RNA, 19 nt, Homo sapiens
  misc_RNA (1)...(19): siRNA sense strand
gugcacccaauuacuguua

SEQ ID NO: 1850039 - RNA, 19 nt, Homo sapiens
  misc_RNA (1)...(19): siRNA sense strand
ccacuuacagcuuuaguag

SEQ ID NO: 1850040 - RNA, 19 nt, Homo sapiens
  misc_RNA (1)...(19): siRNA sense strand
gcgagaaggcaaaggaaau

SEQ ID NO: 1850041 - RNA, 19 nt, Homo sapiens
  misc_RNA (1)...(19): siRNA sense strand
ccgacaaauuacccaagua

SEQ ID NO: 1850042 - RNA, 19 nt, Homo sapiens
  misc_RNA (1)...(19): siRNA sense strand
gaaugucugcgaaaguaug

SEQ ID NO: 1850043 - RNA, 19 nt, Homo sapiens
  misc_RNA (1)...(19): siRNA sense strand
agacacacuggaucauaua

SEQ ID NO: 1850044 - RNA, 19 nt, Homo sapiens
  misc_RNA (1)...(19): siRNA sense strand
gcacccaauuacuguuauc

SEQ ID NO: 1850045 - RNA, 19 nt, Homo sapiens
  misc_RNA (1)...(19): siRNA sense strand
gagaugugcauggucaauu

SEQ ID NO: 1850046 - RNA, 19 nt, Homo sapiens
  misc_RNA (1)...(19): siRNA sense strand
agaacgcauuacaauauug

SEQ ID NO: 1850047 - RNA, 19 nt, Homo sapiens
  misc_RNA (1)...(19): siRNA sense strand
gggugacuauguagacaga

SEQ ID NO: 1850048 - RNA, 19 nt, Homo sapiens
  misc_RNA (1)...(19): siRNA sense strand
ccaggcugcuaucauggaa

SEQ ID NO: 1850049 - RNA, 19 nt, Homo sapiens
  misc_RNA (1)...(19): siRNA sense strand
aggcugcuaucauggaauu

SEQ ID NO: 1850050 - RNA, 19 nt, Homo sapiens
  misc_RNA (1)...(19): siRNA sense strand
gccgacaaauuacccaagu

SEQ ID NO: 1850051 - RNA, 19 nt, Homo sapiens
  misc_RNA (1)...(19): siRNA sense strand
uacaauuggugucaugauc

SEQ ID NO: 1850052 - RNA, 19 nt, Homo sapiens
  misc_RNA (1)...(19): siRNA sense strand
guagauggacagauauucu

SEQ ID NO: 1850053 - RNA, 19 nt, Homo sapiens
  misc_RNA (1)...(19): siRNA sense strand
uugauuaucuuccacuuac

SEQ ID NO: 1850054 - RNA, 19 nt, Homo sapiens
  misc_RNA (1)...(19): siRNA sense strand
gacagaggauauuauucag

SEQ ID NO: 1850055 - RNA, 19 nt, Homo sapiens
  misc_RNA (1)...(19): siRNA sense strand
cccagacuacuuccuauaa

SEQ ID NO: 1850056 - RNA, 19 nt, Homo sapiens
  misc_RNA (1)...(19): siRNA sense strand
gacucuucuuguagcauua

SEQ ID NO: 1850057 - RNA, 19 nt, Homo sapiens
  misc_RNA (1)...(19): siRNA sense strand
ggaacucuuuagaauuggu

SEQ ID NO: 1850058 - RNA, 19 nt, Homo sapiens
  misc_RNA (1)...(19): siRNA sense strand
gcauuaaaggugcguuauc

SEQ ID NO: 1850059 - RNA, 19 nt, Homo sapiens
  misc_RNA (1)...(19): siRNA sense strand
uagcauuaaaggugcguua

SEQ ID NO: 1850060 - RNA, 19 nt, Homo sapiens
  misc_RNA (1)...(19): siRNA sense strand
gagacugugacucuucuug

SEQ ID NO: 1850061 - RNA, 19 nt, Homo sapiens
  misc_RNA (1)...(19): siRNA sense strand
ggucaauuucaugaucuua

SEQ ID NO: 1850062 - RNA, 19 nt, Homo sapiens
  misc_RNA (1)...(19): siRNA sense strand
ggaaccaggcugcuaucau

SEQ ID NO: 1850063 - RNA, 19 nt, Homo sapiens
  misc_RNA (1)...(19): siRNA sense strand
cuacacauuuggacaagac

SEQ ID NO: 1850064 - RNA, 19 nt, Homo sapiens
  misc_RNA (1)...(19): siRNA sense strand
gacacacuggaucauauaa

SEQ ID NO: 1850065 - RNA, 19 nt, Homo sapiens
  misc_RNA (1)...(19): siRNA sense strand
guuacugucuguggagaug

SEQ ID NO: 1850066 - RNA, 19 nt, Homo sapiens
  misc_RNA (1)...(19): siRNA sense strand
cccaccagcuuguaaugga

SEQ ID NO: 1850067 - RNA, 19 nt, Homo sapiens
  misc_RNA (1)...(19): siRNA sense strand
gaugaaugucugcgaaagu

SEQ ID NO: 1850068 - RNA, 19 nt, Homo sapiens
  misc_RNA (1)...(19): siRNA sense strand
uagaauugguggaaaauca

SEQ ID NO: 1850069 - RNA, 19 nt, Homo sapiens
  misc_RNA (1)...(19): siRNA sense strand
aaucaccggauacaaacua

SEQ ID NO: 1850070 - RNA, 19 nt, Homo sapiens
  misc_RNA (1)...(19): siRNA sense strand
cuauguagacagaggauau

SEQ ID NO: 1850071 - RNA, 19 nt, Homo sapiens
  misc_RNA (1)...(19): siRNA sense strand
ccauagacacacuggauca

SEQ ID NO: 1850072 - RNA, 19 nt, Homo sapiens
  misc_RNA (1)...(19): siRNA sense strand
agaaucaaaugugcaagag

SEQ ID NO: 1850073 - RNA, 19 nt, Homo sapiens
  misc_RNA (1)...(19): siRNA sense strand
gauacaauuggugucauga

SEQ ID NO: 1850074 - RNA, 19 nt, Homo sapiens
  misc_RNA (1)...(19): siRNA sense strand
gauauucugccuccauggu

SEQ ID NO: 1850075 - RNA, 19 nt, Homo sapiens
  misc_RNA (1)...(19): siRNA sense strand
uccagaacgcauuacaaua

SEQ ID NO: 1850076 - RNA, 19 nt, Homo sapiens
  misc_RNA (1)...(19): siRNA sense strand
cauuaaaggugcguuaucc

SEQ ID NO: 1850077 - RNA, 19 nt, Homo sapiens
  misc_RNA (1)...(19): siRNA sense strand
cggauacaaacuacuuauu

SEQ ID NO: 1850078 - RNA, 19 nt, Homo sapiens
  misc_RNA (1)...(19): siRNA sense strand
caugaucggaaugugguua

SEQ ID NO: 1850079 - RNA, 19 nt, Homo sapiens
  misc_RNA (1)...(19): siRNA sense strand
gcuacacauuuggacaaga

SEQ ID NO: 1850080 - RNA, 19 nt, Homo sapiens
  misc_RNA (1)...(19): siRNA sense strand
cuuauggaacucuuuagaa

SEQ ID NO: 1850081 - RNA, 19 nt, Homo sapiens
  misc_RNA (1)...(19): siRNA sense strand
ggagaugugcauggucaau

SEQ ID NO: 1850082 - RNA, 19 nt, Homo sapiens
  misc_RNA (1)...(19): siRNA sense strand
ggcccaaugugugaucugu

SEQ ID NO: 1850083 - RNA, 19 nt, Homo sapiens
  misc_RNA (1)...(19): siRNA sense strand
aagaaucaaaugugcaaga

SEQ ID NO: 1850084 - RNA, 19 nt, Homo sapiens
  misc_RNA (1)...(19): siRNA sense strand
caaugugugaucuguuaug

SEQ ID NO: 1850085 - RNA, 19 nt, Homo sapiens
  misc_RNA (1)...(19): siRNA sense strand
gcugaacgagaaccaagug

SEQ ID NO: 1850086 - RNA, 19 nt, Homo sapiens
  misc_RNA (1)...(19): siRNA sense strand
gcuaucauggaauuagaug

SEQ ID NO: 1850087 - RNA, 19 nt, Homo sapiens
  misc_RNA (1)...(19): siRNA sense strand
auagacacacuggaucaua

SEQ ID NO: 1850088 - RNA, 19 nt, Homo sapiens
  misc_RNA (1)...(19): siRNA sense strand
uucaugaucuuauggaacu

SEQ ID NO: 1850089 - RNA, 19 nt, Homo sapiens
  misc_RNA (1)...(19): siRNA sense strand
uggaauuagaugacacuuu

SEQ ID NO: 1850090 - RNA, 19 nt, Homo sapiens
  misc_RNA (1)...(19): siRNA sense strand
cugcuaucauggaauuaga

SEQ ID NO: 1850091 - RNA, 19 nt, Homo sapiens
  misc_RNA (1)...(19): siRNA sense strand
uauaagagcccuggaucgu

SEQ ID NO: 1850092 - RNA, 19 nt, Homo sapiens
  misc_RNA (1)...(19): siRNA sense strand
gaacagagaugcagacuuc

SEQ ID NO: 1850093 - RNA, 19 nt, Homo sapiens
  misc_RNA (1)...(19): siRNA sense strand
gaagugagcaucuugauua

SEQ ID NO: 1850094 - RNA, 19 nt, Homo sapiens
  misc_RNA (1)...(19): siRNA sense strand
gaugucaaaugcuuaguua

SEQ ID NO: 1850095 - RNA, 19 nt, Homo sapiens
  misc_RNA (1)...(19): siRNA sense strand
gaaugaagauuguggaugu

SEQ ID NO: 1850096 - RNA, 19 nt, Homo sapiens
  misc_RNA (1)...(19): siRNA sense strand
ggaagauguuugaaucauu

SEQ ID NO: 1850097 - RNA, 19 nt, Homo sapiens
  misc_RNA (1)...(19): siRNA sense strand
gaagauuguggauguaaua

SEQ ID NO: 1850098 - RNA, 19 nt, Homo sapiens
  misc_RNA (1)...(19): siRNA sense strand
ucaggaagcuugcaaagau

SEQ ID NO: 1850099 - RNA, 19 nt, Homo sapiens
  misc_RNA (1)...(19): siRNA sense strand
guuccuagcagauuuaaua

SEQ ID NO: 1850100 - RNA, 19 nt, Homo sapiens
  misc_RNA (1)...(19): siRNA sense strand
gugagcaucuugauuagaa

SEQ ID NO: 1850101 - RNA, 19 nt, Homo sapiens
  misc_RNA (1)...(19): siRNA sense strand
caagggugauucauccuaa

SEQ ID NO: 1850102 - RNA, 19 nt, Homo sapiens
  misc_RNA (1)...(19): siRNA sense strand
gaagcaggacuaaaucaaa

SEQ ID NO: 1850103 - RNA, 19 nt, Homo sapiens
  misc_RNA (1)...(19): siRNA sense strand
ggaacagcuuucucaaguu

SEQ ID NO: 1850104 - RNA, 19 nt, Homo sapiens
  misc_RNA (1)...(19): siRNA sense strand
caaagaagaggaagauguu

SEQ ID NO: 1850105 - RNA, 19 nt, Homo sapiens
  misc_RNA (1)...(19): siRNA sense strand
gcaaagaagaggaagaugu

SEQ ID NO: 1850106 - RNA, 19 nt, Homo sapiens
  misc_RNA (1)...(19): siRNA sense strand
gauuguggauguaauagga

SEQ ID NO: 1850107 - RNA, 19 nt, Homo sapiens
  misc_RNA (1)...(19): siRNA sense strand
gagauugcccgcugccaua

SEQ ID NO: 1850108 - RNA, 19 nt, Homo sapiens
  misc_RNA (1)...(19): siRNA sense strand
caggaagcuugcaaagaua

SEQ ID NO: 1850109 - RNA, 19 nt, Homo sapiens
  misc_RNA (1)...(19): siRNA sense strand
gaacagcuggugaagaugu

SEQ ID NO: 1850110 - RNA, 19 nt, Homo sapiens
  misc_RNA (1)...(19): siRNA sense strand
cauagagucuggcgaagug

SEQ ID NO: 1850111 - RNA, 19 nt, Homo sapiens
  misc_RNA (1)...(19): siRNA sense strand
gaaccaggaggucgagauu

SEQ ID NO: 1850112 - RNA, 19 nt, Homo sapiens
  misc_RNA (1)...(19): siRNA sense strand
agaggaagauguuugaauc

SEQ ID NO: 1850113 - RNA, 19 nt, Homo sapiens
  misc_RNA (1)...(19): siRNA sense strand
cccgagagcugcuaccauu

SEQ ID NO: 1850114 - RNA, 19 nt, Homo sapiens
  misc_RNA (1)...(19): siRNA sense strand
agaggaacaucucacacua

SEQ ID NO: 1850115 - RNA, 19 nt, Homo sapiens
  misc_RNA (1)...(19): siRNA sense strand
gagaacgcauaaucacuca

SEQ ID NO: 1850116 - RNA, 19 nt, Homo sapiens
  misc_RNA (1)...(19): siRNA sense strand
cuauaacccugaugaggaa

SEQ ID NO: 1850117 - RNA, 19 nt, Homo sapiens
  misc_RNA (1)...(19): siRNA sense strand
ggacuaaaucaaacaagga

SEQ ID NO: 1850118 - RNA, 19 nt, Homo sapiens
  misc_RNA (1)...(19): siRNA sense strand
aaucaaacccgcucuguug

SEQ ID NO: 1850119 - RNA, 19 nt, Homo sapiens
  misc_RNA (1)...(19): siRNA sense strand
agucaaagcugaugagcau

SEQ ID NO: 1850120 - RNA, 19 nt, Homo sapiens
  misc_RNA (1)...(19): siRNA sense strand
aggaacagcuggugaagau

SEQ ID NO: 1850121 - RNA, 19 nt, Homo sapiens
  misc_RNA (1)...(19): siRNA sense strand
cgccugaccucgucgaauu

SEQ ID NO: 1850122 - RNA, 19 nt, Homo sapiens
  misc_RNA (1)...(19): siRNA sense strand
gagagcugcuaccauuguu

SEQ ID NO: 1850123 - RNA, 19 nt, Homo sapiens
  misc_RNA (1)...(19): siRNA sense strand
gcaguacuuuggagagcuu

SEQ ID NO: 1850124 - RNA, 19 nt, Homo sapiens
  misc_RNA (1)...(19): siRNA sense strand
aggaacagcuuucucaagu

SEQ ID NO: 1850125 - RNA, 19 nt, Homo sapiens
  misc_RNA (1)...(19): siRNA sense strand
cagaacgaaugaagauugu

SEQ ID NO: 1850126 - RNA, 19 nt, Homo sapiens
  misc_RNA (1)...(19): siRNA sense strand
ggaagaggaagauacagau

SEQ ID NO: 1850127 - RNA, 19 nt, Homo sapiens
  misc_RNA (1)...(19): siRNA sense strand
cagauuuaauagacgagua

SEQ ID NO: 1850128 - RNA, 19 nt, Homo sapiens
  misc_RNA (1)...(19): siRNA sense strand
ucagaacgaaugaagauug

SEQ ID NO: 1850129 - RNA, 19 nt, Homo sapiens
  misc_RNA (1)...(19): siRNA sense strand
ggauggagaacgcauaauc

SEQ ID NO: 1850130 - RNA, 19 nt, Homo sapiens
  misc_RNA (1)...(19): siRNA sense strand
agaacuagcucugauguac

SEQ ID NO: 1850131 - RNA, 19 nt, Homo sapiens
  misc_RNA (1)...(19): siRNA sense strand
gauggagaacgcauaauca

SEQ ID NO: 1850132 - RNA, 19 nt, Homo sapiens
  misc_RNA (1)...(19): siRNA sense strand
gggaacuuaugacauuuua

SEQ ID NO: 1850133 - RNA, 19 nt, Homo sapiens
  misc_RNA (1)...(19): siRNA sense strand
ucaaaugcuuaguuaugga

SEQ ID NO: 1850134 - RNA, 19 nt, Homo sapiens
  misc_RNA (1)...(19): siRNA sense strand
ugccucagcuuaugcaguu

SEQ ID NO: 1850135 - RNA, 19 nt, Homo sapiens
  misc_RNA (1)...(19): siRNA sense strand
gagaacuagcucugaugua

SEQ ID NO: 1850136 - RNA, 19 nt, Homo sapiens
  misc_RNA (1)...(19): siRNA sense strand
ggagaacuagcucugaugu

SEQ ID NO: 1850137 - RNA, 19 nt, Homo sapiens
  misc_RNA (1)...(19): siRNA sense strand
ggaggacgaggacuuggaa

SEQ ID NO: 1850138 - RNA, 19 nt, Homo sapiens
  misc_RNA (1)...(19): siRNA sense strand
aggaacaucucacacuaug

SEQ ID NO: 1850139 - RNA, 19 nt, Homo sapiens
  misc_RNA (1)...(19): siRNA sense strand
uugcaaagauauucuccuu

SEQ ID NO: 1850140 - RNA, 19 nt, Homo sapiens
  misc_RNA (1)...(19): siRNA sense strand
gaggaacaucucacacuau

SEQ ID NO: 1850141 - RNA, 19 nt, Homo sapiens
  misc_RNA (1)...(19): siRNA sense strand
gaacuagcucugauguaca

SEQ ID NO: 1850142 - RNA, 19 nt, Homo sapiens
  misc_RNA (1)...(19): siRNA sense strand
gaagaggaagauacagauc

SEQ ID NO: 1850143 - RNA, 19 nt, Homo sapiens
  misc_RNA (1)...(19): siRNA sense strand
ugucaaaugcuuaguuaug

SEQ ID NO: 1850144 - RNA, 19 nt, Homo sapiens
  misc_RNA (1)...(19): siRNA sense strand
ugccauguuugaaaggaua

SEQ ID NO: 1850145 - RNA, 19 nt, Homo sapiens
  misc_RNA (1)...(19): siRNA sense strand
gucaaaugcuuaguuaugg

SEQ ID NO: 1850146 - RNA, 19 nt, Homo sapiens
  misc_RNA (1)...(19): siRNA sense strand
ggagaugucaaaugcuuag

SEQ ID NO: 1850147 - RNA, 19 nt, Homo sapiens
  misc_RNA (1)...(19): siRNA sense strand
ccaguuccuagcagauuua

SEQ ID NO: 1850148 - RNA, 19 nt, Homo sapiens
  misc_RNA (1)...(19): siRNA sense strand
agaagaggaagauguuuga

SEQ ID NO: 1850149 - RNA, 19 nt, Homo sapiens
  misc_RNA (1)...(19): siRNA sense strand
ggaggaggacgaggacuug

SEQ ID NO: 1850150 - RNA, 19 nt, Homo sapiens
  misc_RNA (1)...(19): siRNA sense strand
gauccaagggugauucauc

SEQ ID NO: 1850151 - RNA, 19 nt, Homo sapiens
  misc_RNA (1)...(19): siRNA sense strand
gaaguuccaguuccuagca

SEQ ID NO: 1850152 - RNA, 19 nt, Homo sapiens
  misc_RNA (1)...(19): siRNA sense strand
cgaagugagcaucuugauu

SEQ ID NO: 1850153 - RNA, 19 nt, Homo sapiens
  misc_RNA (1)...(19): siRNA sense strand
gaggaagauguuugaauca

SEQ ID NO: 1850154 - RNA, 19 nt, Homo sapiens
  misc_RNA (1)...(19): siRNA sense strand
ccuagcagauuuaauagac

SEQ ID NO: 1850155 - RNA, 19 nt, Homo sapiens
  misc_RNA (1)...(19): siRNA sense strand
gagaugauggagacaacuu

SEQ ID NO: 1850156 - RNA, 19 nt, Homo sapiens
  misc_RNA (1)...(19): siRNA sense strand
ugaagauuguggauguaau

SEQ ID NO: 1850157 - RNA, 19 nt, Homo sapiens
  misc_RNA (1)...(19): siRNA sense strand
gagaugcagacuucaggaa

SEQ ID NO: 1850158 - RNA, 19 nt, Homo sapiens
  misc_RNA (1)...(19): siRNA sense strand
gaagaggaagauguuugaa

SEQ ID NO: 1850159 - RNA, 19 nt, Homo sapiens
  misc_RNA (1)...(19): siRNA sense strand
gacuggaccgggugacuuu

SEQ ID NO: 1850160 - RNA, 19 nt, Homo sapiens
  misc_RNA (1)...(19): siRNA sense strand
gaugccauguuugaaagga

SEQ ID NO: 1850161 - RNA, 19 nt, Homo sapiens
  misc_RNA (1)...(19): siRNA sense strand
ggacuggaccgggugacuu

SEQ ID NO: 1850162 - RNA, 19 nt, Homo sapiens
  misc_RNA (1)...(19): siRNA sense strand
ugacaaccguggcaguuuu

SEQ ID NO: 1850163 - RNA, 19 nt, Homo sapiens
  misc_RNA (1)...(19): siRNA sense strand
cuagaggugucagaacgaa

SEQ ID NO: 1850164 - RNA, 19 nt, Homo sapiens
  misc_RNA (1)...(19): siRNA sense strand
ccaagggugauucauccua

SEQ ID NO: 1850165 - RNA, 19 nt, Homo sapiens
  misc_RNA (1)...(19): siRNA sense strand
uaaaacugaugaacagaga

SEQ ID NO: 1850166 - RNA, 19 nt, Homo sapiens
  misc_RNA (1)...(19): siRNA sense strand
uaaggauggagaacgcaua

SEQ ID NO: 1850167 - RNA, 19 nt, Homo sapiens
  misc_RNA (1)...(19): siRNA sense strand
ggaagcuugcaaagauauu

SEQ ID NO: 1850168 - RNA, 19 nt, Homo sapiens
  misc_RNA (1)...(19): siRNA sense strand
gcaggacuaaaucaaacaa

SEQ ID NO: 1850169 - RNA, 19 nt, Homo sapiens
  misc_RNA (1)...(19): siRNA sense strand
aagcaggacuaaaucaaac

SEQ ID NO: 1850170 - RNA, 19 nt, Homo sapiens
  misc_RNA (1)...(19): siRNA sense strand
gcucuguuggucaauauga

SEQ ID NO: 1850171 - RNA, 19 nt, Homo sapiens
  misc_RNA (1)...(19): siRNA sense strand
gaugaggaagaggaagaua

SEQ ID NO: 1850172 - RNA, 19 nt, Homo sapiens
  misc_RNA (1)...(19): siRNA sense strand
cauuguugcuaccucagaa

SEQ ID NO: 1850173 - RNA, 19 nt, Homo sapiens
  misc_RNA (1)...(19): siRNA sense strand
cgagagcugcuaccauugu

SEQ ID NO: 1850174 - RNA, 19 nt, Homo sapiens
  misc_RNA (1)...(19): siRNA sense strand
aacuagcucugauguacaa

SEQ ID NO: 1850175 - RNA, 19 nt, Homo sapiens
  misc_RNA (1)...(19): siRNA sense strand
ucaaagcugaugagcaugu

SEQ ID NO: 1850176 - RNA, 19 nt, Homo sapiens
  misc_RNA (1)...(19): siRNA sense strand
uuauggauguacaagcauu

SEQ ID NO: 1850177 - RNA, 19 nt, Homo sapiens
  misc_RNA (1)...(19): siRNA sense strand
uuggagaugucaaaugcuu

SEQ ID NO: 1850178 - RNA, 19 nt, Homo sapiens
  misc_RNA (1)...(19): siRNA sense strand
aaacugaugaacagagaug

SEQ ID NO: 1850179 - RNA, 19 nt, Homo sapiens
  misc_RNA (1)...(19): siRNA sense strand
gauguaauaggagagaaga

SEQ ID NO: 1850180 - RNA, 19 nt, Homo sapiens
  misc_RNA (1)...(19): siRNA sense strand
gaagcuugcaaagauauuc

SEQ ID NO: 1850181 - RNA, 19 nt, Homo sapiens
  misc_RNA (1)...(19): siRNA sense strand
aaugaagauuguggaugua

SEQ ID NO: 1850182 - RNA, 19 nt, Homo sapiens
  misc_RNA (1)...(19): siRNA sense strand
aagaagaggaagauguuug

SEQ ID NO: 1850183 - RNA, 19 nt, Homo sapiens
  misc_RNA (1)...(19): siRNA sense strand
ggaacaucucacacuauga

SEQ ID NO: 1850184 - RNA, 19 nt, Homo sapiens
  misc_RNA (1)...(19): siRNA sense strand
uaaucaaacccgcucuguu

SEQ ID NO: 1850185 - RNA, 19 nt, Homo sapiens
  misc_RNA (1)...(19): siRNA sense strand
ugaggaagaggaagauaca

SEQ ID NO: 1850186 - RNA, 19 nt, Homo sapiens
  misc_RNA (1)...(19): siRNA sense strand
agaccuauaacccugauga

SEQ ID NO: 1850187 - RNA, 19 nt, Homo sapiens
  misc_RNA (1)...(19): siRNA sense strand
gaggaacagcuggugaaga

SEQ ID NO: 1850188 - RNA, 19 nt, Homo sapiens
  misc_RNA (1)...(19): siRNA sense strand
caaaugcuuaguuauggau

SEQ ID NO: 1850189 - RNA, 19 nt, Homo sapiens
  misc_RNA (1)...(19): siRNA sense strand
uccaguuccuagcagauuu

SEQ ID NO: 1850190 - RNA, 19 nt, Homo sapiens
  misc_RNA (1)...(19): siRNA sense strand
ggaaccaggaggucgagau

SEQ ID NO: 1850191 - RNA, 19 nt, Homo sapiens
  misc_RNA (1)...(19): siRNA sense strand
guaauaggagagaagaucu

SEQ ID NO: 1850192 - RNA, 19 nt, Homo sapiens
  misc_RNA (1)...(19): siRNA sense strand
ggacaggcuucuuuccaaa

SEQ ID NO: 1850193 - RNA, 19 nt, Homo sapiens
  misc_RNA (1)...(19): siRNA sense strand
cggacaggcuucuuuccaa

SEQ ID NO: 1850194 - RNA, 19 nt, Homo sapiens
  misc_RNA (1)...(19): siRNA sense strand
gaacaagaucugucaauuu

SEQ ID NO: 1850195 - RNA, 19 nt, Homo sapiens
  misc_RNA (1)...(19): siRNA sense strand
cuaagaagcuucccaagaa

SEQ ID NO: 1850196 - RNA, 19 nt, Homo sapiens
  misc_RNA (1)...(19): siRNA sense strand
ggaacaagaucugucaauu

SEQ ID NO: 1850197 - RNA, 19 nt, Homo sapiens
  misc_RNA (1)...(19): siRNA sense strand
gcaaugaacgugaacgaaa

SEQ ID NO: 1850198 - RNA, 19 nt, Homo sapiens
  misc_RNA (1)...(19): siRNA sense strand
gaacgugaacgaaaucuuc

SEQ ID NO: 1850199 - RNA, 19 nt, Homo sapiens
  misc_RNA (1)...(19): siRNA sense strand
caagaucugucaauuuaag

SEQ ID NO: 1850200 - RNA, 19 nt, Homo sapiens
  misc_RNA (1)...(19): siRNA sense strand
caacacagauacauuugca

SEQ ID NO: 1850201 - RNA, 19 nt, Homo sapiens
  misc_RNA (1)...(19): siRNA sense strand
caaugaacgugaacgaaau

SEQ ID NO: 1850202 - RNA, 19 nt, Homo sapiens
  misc_RNA (1)...(19): siRNA sense strand
cagcaaagacugcaaugaa

SEQ ID NO: 1850203 - RNA, 19 nt, Homo sapiens
  misc_RNA (1)...(19): siRNA sense strand
gcuaagaagcuucccaaga

SEQ ID NO: 1850204 - RNA, 19 nt, Homo sapiens
  misc_RNA (1)...(19): siRNA sense strand
ucauugcacucgcggguaa

SEQ ID NO: 1850205 - RNA, 19 nt, Homo sapiens
  misc_RNA (1)...(19): siRNA sense strand
ggacaggagcgguaucaca

SEQ ID NO: 1850206 - RNA, 19 nt, Homo sapiens
  misc_RNA (1)...(19): siRNA sense strand
caccaacacagauacauuu

SEQ ID NO: 1850207 - RNA, 19 nt, Homo sapiens
  misc_RNA (1)...(19): siRNA sense strand
gacaucaccaacacagaua

SEQ ID NO: 1850208 - RNA, 19 nt, Homo sapiens
  misc_RNA (1)...(19): siRNA sense strand
ccaggaagcacaagccuau

SEQ ID NO: 1850209 - RNA, 19 nt, Homo sapiens
  misc_RNA (1)...(19): siRNA sense strand
agacugcaaugaacgugaa

SEQ ID NO: 1850210 - RNA, 19 nt, Homo sapiens
  misc_RNA (1)...(19): siRNA sense strand
aggcagaccuggccagcaa

SEQ ID NO: 1850211 - RNA, 19 nt, Homo sapiens
  misc_RNA (1)...(19): siRNA sense strand
agggacaguuucacgagua

SEQ ID NO: 1850212 - RNA, 19 nt, Homo sapiens
  misc_RNA (1)...(19): siRNA sense strand
gagcggccuuccucacaca

SEQ ID NO: 1850213 - RNA, 19 nt, Homo sapiens
  misc_RNA (1)...(19): siRNA sense strand
gaaaucuucauggcaauag

SEQ ID NO: 1850214 - RNA, 19 nt, Homo sapiens
  misc_RNA (1)...(19): siRNA sense strand
cgaaaucuucauggcaaua

SEQ ID NO: 1850215 - RNA, 19 nt, Homo sapiens
  misc_RNA (1)...(19): siRNA sense strand
ggagacaucagcaaagacu

SEQ ID NO: 1850216 - RNA, 19 nt, Homo sapiens
  misc_RNA (1)...(19): siRNA sense strand
ucauggcaauagcuaagaa

SEQ ID NO: 1850217 - RNA, 19 nt, Homo sapiens
  misc_RNA (1)...(19): siRNA sense strand
uaagaagcuucccaagaac

SEQ ID NO: 1850218 - RNA, 19 nt, Homo sapiens
  misc_RNA (1)...(19): siRNA sense strand
ugacaucaccaacacagau

SEQ ID NO: 1850219 - RNA, 19 nt, Homo sapiens
  misc_RNA (1)...(19): siRNA sense strand
gggaacaagaucugucaau

SEQ ID NO: 1850220 - RNA, 19 nt, Homo sapiens
  misc_RNA (1)...(19): siRNA sense strand
ucaccaacacagauacauu

SEQ ID NO: 1850221 - RNA, 19 nt, Homo sapiens
  misc_RNA (1)...(19): siRNA sense strand
ggagucugcgguaggcaaa

SEQ ID NO: 1850222 - RNA, 19 nt, Homo sapiens
  misc_RNA (1)...(19): siRNA sense strand
gaacugggugaaggagcua

SEQ ID NO: 1850223 - RNA, 19 nt, Homo sapiens
  misc_RNA (1)...(19): siRNA sense strand
guaccaggagagcacaauu

SEQ ID NO: 1850224 - RNA, 19 nt, Homo sapiens
  misc_RNA (1)...(19): siRNA sense strand
ccaagaacugggugaagga

SEQ ID NO: 1850225 - RNA, 19 nt, Homo sapiens
  misc_RNA (1)...(19): siRNA sense strand
gacacaacagucaaguuug

SEQ ID NO: 1850226 - RNA, 19 nt, Homo sapiens
  misc_RNA (1)...(19): siRNA sense strand
gcagaccuggccagcaaga

SEQ ID NO: 1850227 - RNA, 19 nt, Homo sapiens
  misc_RNA (1)...(19): siRNA sense strand
ggaagcacaagccuaugca

SEQ ID NO: 1850228 - RNA, 19 nt, Homo sapiens
  misc_RNA (1)...(19): siRNA sense strand
ucauggagacaucagcaaa

SEQ ID NO: 1850229 - RNA, 19 nt, Homo sapiens
  misc_RNA (1)...(19): siRNA sense strand
uaccaggagagcacaauug

SEQ ID NO: 1850230 - RNA, 19 nt, Homo sapiens
  misc_RNA (1)...(19): siRNA sense strand
gggacaguuucacgaguac

SEQ ID NO: 1850231 - RNA, 19 nt, Homo sapiens
  misc_RNA (1)...(19): siRNA sense strand
caaagacugcaaugaacgu

SEQ ID NO: 1850232 - RNA, 19 nt, Homo sapiens
  misc_RNA (1)...(19): siRNA sense strand
caucguggucuaugacauc

SEQ ID NO: 1850233 - RNA, 19 nt, Homo sapiens
  misc_RNA (1)...(19): siRNA sense strand
agcaaagacugcaaugaac

SEQ ID NO: 1850234 - RNA, 19 nt, Homo sapiens
  misc_RNA (1)...(19): siRNA sense strand
auggagacaucagcaaaga

SEQ ID NO: 1850235 - RNA, 19 nt, Homo sapiens
  misc_RNA (1)...(19): siRNA sense strand
augcagacgacaacaguuu

SEQ ID NO: 1850236 - RNA, 19 nt, Homo sapiens
  misc_RNA (1)...(19): siRNA sense strand
ucuaugacaucaccaacac

SEQ ID NO: 1850237 - RNA, 19 nt, Homo sapiens
  misc_RNA (1)...(19): siRNA sense strand
ccagagaccucaacuuuca

SEQ ID NO: 1850238 - RNA, 19 nt, Homo sapiens
  misc_RNA (1)...(19): siRNA sense strand
gacaacaacuacuugacua

SEQ ID NO: 1850239 - RNA, 19 nt, Homo sapiens
  misc_RNA (1)...(19): siRNA sense strand
gcaagaaggcccuaaagau

SEQ ID NO: 1850240 - RNA, 19 nt, Homo sapiens
  misc_RNA (1)...(19): siRNA sense strand
ccacaggguugguauaauc

SEQ ID NO: 1850241 - RNA, 19 nt, Homo sapiens
  misc_RNA (1)...(19): siRNA sense strand
gagcagcaauaggagauuu

SEQ ID NO: 1850242 - RNA, 19 nt, Homo sapiens
  misc_RNA (1)...(19): siRNA sense strand
ugacuaaauucauggagaa

SEQ ID NO: 1850243 - RNA, 19 nt, Homo sapiens
  misc_RNA (1)...(19): siRNA sense strand
caagaaggcccuaaagauc

SEQ ID NO: 1850244 - RNA, 19 nt, Homo sapiens
  misc_RNA (1)...(19): siRNA sense strand
ggagccaaauccaguaaca

SEQ ID NO: 1850245 - RNA, 19 nt, Homo sapiens
  misc_RNA (1)...(19): siRNA sense strand
caacugccuugcccacaug

SEQ ID NO: 1850246 - RNA, 19 nt, Homo sapiens
  misc_RNA (1)...(19): siRNA sense strand
gaacuguuuguuaacguaa

SEQ ID NO: 1850247 - RNA, 19 nt, Homo sapiens
  misc_RNA (1)...(19): siRNA sense strand
caggguugguauaaucaua

SEQ ID NO: 1850248 - RNA, 19 nt, Homo sapiens
  misc_RNA (1)...(19): siRNA sense strand
ggagacaacaacuacuuga

SEQ ID NO: 1850249 - RNA, 19 nt, Homo sapiens
  misc_RNA (1)...(19): siRNA sense strand
gaccgcucguuaacauaua

SEQ ID NO: 1850250 - RNA, 19 nt, Homo sapiens
  misc_RNA (1)...(19): siRNA sense strand
aaccagcacucucguaaug

SEQ ID NO: 1850251 - RNA, 19 nt, Homo sapiens
  misc_RNA (1)...(19): siRNA sense strand
gcugcugucuccacgguaa

SEQ ID NO: 1850252 - RNA, 19 nt, Homo sapiens
  misc_RNA (1)...(19): siRNA sense strand
ccagugacgucuacagcuu

SEQ ID NO: 1850253 - RNA, 19 nt, Homo sapiens
  misc_RNA (1)...(19): siRNA sense strand
gaaauggauggcuuuagga

SEQ ID NO: 1850254 - RNA, 19 nt, Homo sapiens
  misc_RNA (1)...(19): siRNA sense strand
agaaauggauggcuuuagg

SEQ ID NO: 1850255 - RNA, 19 nt, Homo sapiens
  misc_RNA (1)...(19): siRNA sense strand
ggacagcaggcacaucuuc

SEQ ID NO: 1850256 - RNA, 19 nt, Homo sapiens
  misc_RNA (1)...(19): siRNA sense strand
gcagaaccggccuucauug

SEQ ID NO: 1850257 - RNA, 19 nt, Homo sapiens
  misc_RNA (1)...(19): siRNA sense strand
gccugagacucccggcuua

SEQ ID NO: 1850258 - RNA, 19 nt, Homo sapiens
  misc_RNA (1)...(19): siRNA sense strand
uggcaagucuggauaacga

SEQ ID NO: 1850259 - RNA, 19 nt, Homo sapiens
  misc_RNA (1)...(19): siRNA sense strand
agaacuguuuguuaacgua

SEQ ID NO: 1850260 - RNA, 19 nt, Homo sapiens
  misc_RNA (1)...(19): siRNA sense strand
ccaaggagggacagaaaug

SEQ ID NO: 1850261 - RNA, 19 nt, Homo sapiens
  misc_RNA (1)...(19): siRNA sense strand
acgucaagcuggcagauuu

SEQ ID NO: 1850262 - RNA, 19 nt, Homo sapiens
  misc_RNA (1)...(19): siRNA sense strand
ucccagcucuguuccuaaa

SEQ ID NO: 1850263 - RNA, 19 nt, Homo sapiens
  misc_RNA (1)...(19): siRNA sense strand
cuaaacaaacugaaucuag

SEQ ID NO: 1850264 - RNA, 19 nt, Homo sapiens
  misc_RNA (1)...(19): siRNA sense strand
uggaagagaaguugaguug

SEQ ID NO: 1850265 - RNA, 19 nt, Homo sapiens
  misc_RNA (1)...(19): siRNA sense strand
auggauggcuuuaggagaa

SEQ ID NO: 1850266 - RNA, 19 nt, Homo sapiens
  misc_RNA (1)...(19): siRNA sense strand
caacaacuacuugacuaug

SEQ ID NO: 1850267 - RNA, 19 nt, Homo sapiens
  misc_RNA (1)...(19): siRNA sense strand
cuccagagaccucaacuuu

SEQ ID NO: 1850268 - RNA, 19 nt, Homo sapiens
  misc_RNA (1)...(19): siRNA sense strand
ccagcacucucguaaugau

SEQ ID NO: 1850269 - RNA, 19 nt, Homo sapiens
  misc_RNA (1)...(19): siRNA sense strand
cggcucuggugacuaaauu

SEQ ID NO: 1850270 - RNA, 19 nt, Homo sapiens
  misc_RNA (1)...(19): siRNA sense strand
ggcagaaccggccuucauu

SEQ ID NO: 1850271 - RNA, 19 nt, Homo sapiens
  misc_RNA (1)...(19): siRNA sense strand
ccccagaacuguuuguuaa

SEQ ID NO: 1850272 - RNA, 19 nt, Homo sapiens
  misc_RNA (1)...(19): siRNA sense strand
ucuccacgguaaaggauuu

SEQ ID NO: 1850273 - RNA, 19 nt, Homo sapiens
  misc_RNA (1)...(19): siRNA sense strand
ggccacaggguugguauaa

SEQ ID NO: 1850274 - RNA, 19 nt, Homo sapiens
  misc_RNA (1)...(19): siRNA sense strand
ggcgaccgcucguuaacau

SEQ ID NO: 1850275 - RNA, 19 nt, Homo sapiens
  misc_RNA (1)...(19): siRNA sense strand
gacagaaauggauggcuuu

SEQ ID NO: 1850276 - RNA, 19 nt, Homo sapiens
  misc_RNA (1)...(19): siRNA sense strand
guauaaucauagcgggaaa

SEQ ID NO: 1850277 - RNA, 19 nt, Homo sapiens
  misc_RNA (1)...(19): siRNA sense strand
ccaguagguucgcaagaag

SEQ ID NO: 1850278 - RNA, 19 nt, Homo sapiens
  misc_RNA (1)...(19): siRNA sense strand
gcccgagccuuaccaagag

SEQ ID NO: 1850279 - RNA, 19 nt, Homo sapiens
  misc_RNA (1)...(19): siRNA sense strand
agccggcucuggugacuaa

SEQ ID NO: 1850280 - RNA, 19 nt, Homo sapiens
  misc_RNA (1)...(19): siRNA sense strand
ucgaggaacuggagaacca

SEQ ID NO: 1850281 - RNA, 19 nt, Homo sapiens
  misc_RNA (1)...(19): siRNA sense strand
acagggcgaccgcucguua

SEQ ID NO: 1850282 - RNA, 19 nt, Homo sapiens
  misc_RNA (1)...(19): siRNA sense strand
gcugagagacaaggcauga

SEQ ID NO: 1850283 - RNA, 19 nt, Homo sapiens
  misc_RNA (1)...(19): siRNA sense strand
ucaaggccauggcaagucu

SEQ ID NO: 1850284 - RNA, 19 nt, Homo sapiens
  misc_RNA (1)...(19): siRNA sense strand
ucaagaucguaaacucgaa

SEQ ID NO: 1850285 - RNA, 19 nt, Homo sapiens
  misc_RNA (1)...(19): siRNA sense strand
gcuacgauguggcggucaa

SEQ ID NO: 1850286 - RNA, 19 nt, Homo sapiens
  misc_RNA (1)...(19): siRNA sense strand
ggccaaggagggacagaaa

SEQ ID NO: 1850287 - RNA, 19 nt, Homo sapiens
  misc_RNA (1)...(19): siRNA sense strand
ucagggaggcucacaguca

SEQ ID NO: 1850288 - RNA, 19 nt, Homo sapiens
  misc_RNA (1)...(19): siRNA sense strand
acccagagcugcacgucaa

SEQ ID NO: 1850289 - RNA, 19 nt, Homo sapiens
  misc_RNA (1)...(19): siRNA sense strand
cgaccgcucguuaacauau

SEQ ID NO: 1850290 - RNA, 19 nt, Homo sapiens
  misc_RNA (1)...(19): siRNA sense strand
gaaguggugcuugggaugu

SEQ ID NO: 1850291 - RNA, 19 nt, Homo sapiens
  misc_RNA (1)...(19): siRNA sense strand
ccucccagcucuguuccua

SEQ ID NO: 1850292 - RNA, 19 nt, Homo sapiens
  misc_RNA (1)...(19): siRNA sense strand
ggacugaaggagcuaaugc

SEQ ID NO: 1850293 - RNA, 19 nt, Homo sapiens
  misc_RNA (1)...(19): siRNA sense strand
gcuaaacaaacugaaucua

SEQ ID NO: 1850294 - RNA, 19 nt, Homo sapiens
  misc_RNA (1)...(19): siRNA sense strand
guggagaacaauaugaaug

SEQ ID NO: 1850295 - RNA, 19 nt, Homo sapiens
  misc_RNA (1)...(19): siRNA sense strand
uagaagggguuaucgagaa

SEQ ID NO: 1850296 - RNA, 19 nt, Homo sapiens
  misc_RNA (1)...(19): siRNA sense strand
ucuggugacuaaauucaug

SEQ ID NO: 1850297 - RNA, 19 nt, Homo sapiens
  misc_RNA (1)...(19): siRNA sense strand
gaaggugaacugggaccaa

SEQ ID NO: 1850298 - RNA, 19 nt, Homo sapiens
  misc_RNA (1)...(19): siRNA sense strand
gaaaaccagcacucucgua

SEQ ID NO: 1850299 - RNA, 19 nt, Homo sapiens
  misc_RNA (1)...(19): siRNA sense strand
cagaugguggagaacaaua

SEQ ID NO: 1850300 - RNA, 19 nt, Homo sapiens
  misc_RNA (1)...(19): siRNA sense strand
ggcagugcuugcuggaaga

SEQ ID NO: 1850301 - RNA, 19 nt, Homo sapiens
  misc_RNA (1)...(19): siRNA sense strand
ccacagccagugacgucua

SEQ ID NO: 1850302 - RNA, 19 nt, Homo sapiens
  misc_RNA (1)...(19): siRNA sense strand
caagucuggauaacgaauu

SEQ ID NO: 1850303 - RNA, 19 nt, Homo sapiens
  misc_RNA (1)...(19): siRNA sense strand
accaguagguucgcaagaa

SEQ ID NO: 1850304 - RNA, 19 nt, Homo sapiens
  misc_RNA (1)...(19): siRNA sense strand
cugaguggcuaaacaaacu

SEQ ID NO: 1850305 - RNA, 19 nt, Homo sapiens
  misc_RNA (1)...(19): siRNA sense strand
uuuaggagaaccauagaaa

SEQ ID NO: 1850306 - RNA, 19 nt, Homo sapiens
  misc_RNA (1)...(19): siRNA sense strand
gcaagucuggauaacgaau

SEQ ID NO: 1850307 - RNA, 19 nt, Homo sapiens
  misc_RNA (1)...(19): siRNA sense strand
ggagaacaauaugaaugcu

SEQ ID NO: 1850308 - RNA, 19 nt, Homo sapiens
  misc_RNA (1)...(19): siRNA sense strand
gaugguggagaacaauaug

SEQ ID NO: 1850309 - RNA, 19 nt, Homo sapiens
  misc_RNA (1)...(19): siRNA sense strand
gaaggacugaaggagcuaa

SEQ ID NO: 1850310 - RNA, 19 nt, Homo sapiens
  misc_RNA (1)...(19): siRNA sense strand
gcucuggugacuaaauuca

SEQ ID NO: 1850311 - RNA, 19 nt, Homo sapiens
  misc_RNA (1)...(19): siRNA sense strand
ccagaacuguuuguuaacg

SEQ ID NO: 1850312 - RNA, 19 nt, Homo sapiens
  misc_RNA (1)...(19): siRNA sense strand
acagaaauggauggcuuua

SEQ ID NO: 1850313 - RNA, 19 nt, Homo sapiens
  misc_RNA (1)...(19): siRNA sense strand
acaacuacuugacuaugca

SEQ ID NO: 1850314 - RNA, 19 nt, Homo sapiens
  misc_RNA (1)...(19): siRNA sense strand
ccauggcaagucuggauaa

SEQ ID NO: 1850315 - RNA, 19 nt, Homo sapiens
  misc_RNA (1)...(19): siRNA sense strand
gcacucucguaaugauguc

SEQ ID NO: 1850316 - RNA, 19 nt, Homo sapiens
  misc_RNA (1)...(19): siRNA sense strand
gcuucgggauccuaaugug

SEQ ID NO: 1850317 - RNA, 19 nt, Homo sapiens
  misc_RNA (1)...(19): siRNA sense strand
gcaggccacaggguuggua

SEQ ID NO: 1850318 - RNA, 19 nt, Homo sapiens
  misc_RNA (1)...(19): siRNA sense strand
acaacugccuugcccacau

SEQ ID NO: 1850319 - RNA, 19 nt, Homo sapiens
  misc_RNA (1)...(19): siRNA sense strand
agcccuaccucaacuggaa

SEQ ID NO: 1850320 - RNA, 19 nt, Homo sapiens
  misc_RNA (1)...(19): siRNA sense strand
gcccagcccuaccucaacu

SEQ ID NO: 1850321 - RNA, 19 nt, Homo sapiens
  misc_RNA (1)...(19): siRNA sense strand
gcugaaagaaguggugcuu

SEQ ID NO: 1850322 - RNA, 19 nt, Homo sapiens
  misc_RNA (1)...(19): siRNA sense strand
auaaucauagcgggaaaua

SEQ ID NO: 1850323 - RNA, 19 nt, Homo sapiens
  misc_RNA (1)...(19): siRNA sense strand
gccacaggguugguauaau

SEQ ID NO: 1850324 - RNA, 19 nt, Homo sapiens
  misc_RNA (1)...(19): siRNA sense strand
gccauggcaagucuggaua

SEQ ID NO: 1850325 - RNA, 19 nt, Homo sapiens
  misc_RNA (1)...(19): siRNA sense strand
cgcaagaaggcccuaaaga

SEQ ID NO: 1850326 - RNA, 19 nt, Homo sapiens
  misc_RNA (1)...(19): siRNA sense strand
cagcaggcacaucuucaga

SEQ ID NO: 1850327 - RNA, 19 nt, Homo sapiens
  misc_RNA (1)...(19): siRNA sense strand
ugagacucccggcuuagaa

SEQ ID NO: 1850328 - RNA, 19 nt, Homo sapiens
  misc_RNA (1)...(19): siRNA sense strand
uaaacucgaaggcgauauc

SEQ ID NO: 1850329 - RNA, 19 nt, Homo sapiens
  misc_RNA (1)...(19): siRNA sense strand
aaacaaacugaaucuagag

SEQ ID NO: 1850330 - RNA, 19 nt, Homo sapiens
  misc_RNA (1)...(19): siRNA sense strand
ggucaaggccauggcaagu

SEQ ID NO: 1850331 - RNA, 19 nt, Homo sapiens
  misc_RNA (1)...(19): siRNA sense strand
cagaacuguuuguuaacgu

SEQ ID NO: 1850332 - RNA, 19 nt, Homo sapiens
  misc_RNA (1)...(19): siRNA sense strand
cagcuucgggauccuaaug

SEQ ID NO: 1850333 - RNA, 19 nt, Homo sapiens
  misc_RNA (1)...(19): siRNA sense strand
gacagcaggcacaucuuca

SEQ ID NO: 1850334 - RNA, 19 nt, Homo sapiens
  misc_RNA (1)...(19): siRNA sense strand
caacauugaucuccuauuu

SEQ ID NO: 1850335 - RNA, 19 nt, Homo sapiens
  misc_RNA (1)...(19): siRNA sense strand
gaacugguaucaaagaaug

SEQ ID NO: 1850336 - RNA, 19 nt, Homo sapiens
  misc_RNA (1)...(19): siRNA sense strand
gacagcaaauguagucuaa

SEQ ID NO: 1850337 - RNA, 19 nt, Homo sapiens
  misc_RNA (1)...(19): siRNA sense strand
cgacugaccuggauaguag

SEQ ID NO: 1850338 - RNA, 19 nt, Homo sapiens
  misc_RNA (1)...(19): siRNA sense strand
agaaggaccucguuaucua

SEQ ID NO: 1850339 - RNA, 19 nt, Homo sapiens
  misc_RNA (1)...(19): siRNA sense strand
cagcaaauguagucuaaga

SEQ ID NO: 1850340 - RNA, 19 nt, Homo sapiens
  misc_RNA (1)...(19): siRNA sense strand
gaaaucccacuaaagcaua

SEQ ID NO: 1850341 - RNA, 19 nt, Homo sapiens
  misc_RNA (1)...(19): siRNA sense strand
gaaauauucagcuugguuu

SEQ ID NO: 1850342 - RNA, 19 nt, Homo sapiens
  misc_RNA (1)...(19): siRNA sense strand
gaucuauacucuucagaau

SEQ ID NO: 1850343 - RNA, 19 nt, Homo sapiens
  misc_RNA (1)...(19): siRNA sense strand
uagcugcuguuauuaagua

SEQ ID NO: 1850344 - RNA, 19 nt, Homo sapiens
  misc_RNA (1)...(19): siRNA sense strand
gcacuuggaggccuuguaa

SEQ ID NO: 1850345 - RNA, 19 nt, Homo sapiens
  misc_RNA (1)...(19): siRNA sense strand
gaagaaggaccucguuauc

SEQ ID NO: 1850346 - RNA, 19 nt, Homo sapiens
  misc_RNA (1)...(19): siRNA sense strand
gagaacugguaucaaagaa

SEQ ID NO: 1850347 - RNA, 19 nt, Homo sapiens
  misc_RNA (1)...(19): siRNA sense strand
auucucagcuugauucuaa

SEQ ID NO: 1850348 - RNA, 19 nt, Homo sapiens
  misc_RNA (1)...(19): siRNA sense strand
ucagggaucuauacucuuc

SEQ ID NO: 1850349 - RNA, 19 nt, Homo sapiens
  misc_RNA (1)...(19): siRNA sense strand
caucagggaucuauacucu

SEQ ID NO: 1850350 - RNA, 19 nt, Homo sapiens
  misc_RNA (1)...(19): siRNA sense strand
ggagccauccuuguaauaa

SEQ ID NO: 1850351 - RNA, 19 nt, Homo sapiens
  misc_RNA (1)...(19): siRNA sense strand
ggagaacugguaucaaaga

SEQ ID NO: 1850352 - RNA, 19 nt, Homo sapiens
  misc_RNA (1)...(19): siRNA sense strand
uaaacuugcuauuccauca

SEQ ID NO: 1850353 - RNA, 19 nt, Homo sapiens
  misc_RNA (1)...(19): siRNA sense strand
gauaguaguuguucuucag

SEQ ID NO: 1850354 - RNA, 19 nt, Homo sapiens
  misc_RNA (1)...(19): siRNA sense strand
cuacaaagacagcaaaugu

SEQ ID NO: 1850355 - RNA, 19 nt, Homo sapiens
  misc_RNA (1)...(19): siRNA sense strand
ucaggucacguaucaguua

SEQ ID NO: 1850356 - RNA, 19 nt, Homo sapiens
  misc_RNA (1)...(19): siRNA sense strand
cuacuuaucaggucacgua

SEQ ID NO: 1850357 - RNA, 19 nt, Homo sapiens
  misc_RNA (1)...(19): siRNA sense strand
cagcuugguuucuuuggaa

SEQ ID NO: 1850358 - RNA, 19 nt, Homo sapiens
  misc_RNA (1)...(19): siRNA sense strand
gaaggaccucguuaucuau

SEQ ID NO: 1850359 - RNA, 19 nt, Homo sapiens
  misc_RNA (1)...(19): siRNA sense strand
caaucaguguggauaagaa

SEQ ID NO: 1850360 - RNA, 19 nt, Homo sapiens
  misc_RNA (1)...(19): siRNA sense strand
guacaguggcccucagauu

SEQ ID NO: 1850361 - RNA, 19 nt, Homo sapiens
  misc_RNA (1)...(19): siRNA sense strand
auggagaacugguaucaaa

SEQ ID NO: 1850362 - RNA, 19 nt, Homo sapiens
  misc_RNA (1)...(19): siRNA sense strand
ggaaaucccacuaaagcau

SEQ ID NO: 1850363 - RNA, 19 nt, Homo sapiens
  misc_RNA (1)...(19): siRNA sense strand
aaaccuauggaaacacuua

SEQ ID NO: 1850364 - RNA, 19 nt, Homo sapiens
  misc_RNA (1)...(19): siRNA sense strand
ugcaaccucuuuaucgaua

SEQ ID NO: 1850365 - RNA, 19 nt, Homo sapiens
  misc_RNA (1)...(19): siRNA sense strand
ggauaguaguuguucuuca

SEQ ID NO: 1850366 - RNA, 19 nt, Homo sapiens
  misc_RNA (1)...(19): siRNA sense strand
ccaguuugguucuaacaau

SEQ ID NO: 1850367 - RNA, 19 nt, Homo sapiens
  misc_RNA (1)...(19): siRNA sense strand
ggaccucguuaucuaucuu

SEQ ID NO: 1850368 - RNA, 19 nt, Homo sapiens
  misc_RNA (1)...(19): siRNA sense strand
ucccaaaccugcaggaaau

SEQ ID NO: 1850369 - RNA, 19 nt, Homo sapiens
  misc_RNA (1)...(19): siRNA sense strand
cuuaucaggucacguauca

SEQ ID NO: 1850370 - RNA, 19 nt, Homo sapiens
  misc_RNA (1)...(19): siRNA sense strand
gacaggaguugcuuuugua

SEQ ID NO: 1850371 - RNA, 19 nt, Homo sapiens
  misc_RNA (1)...(19): siRNA sense strand
ugaaucgaguacuacauga

SEQ ID NO: 1850372 - RNA, 19 nt, Homo sapiens
  misc_RNA (1)...(19): siRNA sense strand
aaacaaucaguguggauaa

SEQ ID NO: 1850373 - RNA, 19 nt, Homo sapiens
  misc_RNA (1)...(19): siRNA sense strand
gcccucagauucucagcuu

SEQ ID NO: 1850374 - RNA, 19 nt, Homo sapiens
  misc_RNA (1)...(19): siRNA sense strand
ucaguguggauaagaaaua

SEQ ID NO: 1850375 - RNA, 19 nt, Homo sapiens
  misc_RNA (1)...(19): siRNA sense strand
ggaucuauacucuucagaa

SEQ ID NO: 1850376 - RNA, 19 nt, Homo sapiens
  misc_RNA (1)...(19): siRNA sense strand
gcaggaaaucccacuaaag

SEQ ID NO: 1850377 - RNA, 19 nt, Homo sapiens
  misc_RNA (1)...(19): siRNA sense strand
ggaaacacuuaaacuugcu

SEQ ID NO: 1850378 - RNA, 19 nt, Homo sapiens
  misc_RNA (1)...(19): siRNA sense strand
ucagcugguucucaauuug

SEQ ID NO: 1850379 - RNA, 19 nt, Homo sapiens
  misc_RNA (1)...(19): siRNA sense strand
acaaugcguuauuccagaa

SEQ ID NO: 1850380 - RNA, 19 nt, Homo sapiens
  misc_RNA (1)...(19): siRNA sense strand
caguggcugucccuaguaa

SEQ ID NO: 1850381 - RNA, 19 nt, Homo sapiens
  misc_RNA (1)...(19): siRNA sense strand
caggucacguaucaguuaa

SEQ ID NO: 1850382 - RNA, 19 nt, Homo sapiens
  misc_RNA (1)...(19): siRNA sense strand
gguaucaaagaauggauuu

SEQ ID NO: 1850383 - RNA, 19 nt, Homo sapiens
  misc_RNA (1)...(19): siRNA sense strand
gcugaacuuuugaagauaa

SEQ ID NO: 1850384 - RNA, 19 nt, Homo sapiens
  misc_RNA (1)...(19): siRNA sense strand
guaugguuaugaucccaaa

SEQ ID NO: 1850385 - RNA, 19 nt, Homo sapiens
  misc_RNA (1)...(19): siRNA sense strand
acaaagacagcaaauguag

SEQ ID NO: 1850386 - RNA, 19 nt, Homo sapiens
  misc_RNA (1)...(19): siRNA sense strand
guauguggcacuaucaaau

SEQ ID NO: 1850387 - RNA, 19 nt, Homo sapiens
  misc_RNA (1)...(19): siRNA sense strand
gaaacacuuaaacuugcua

SEQ ID NO: 1850388 - RNA, 19 nt, Homo sapiens
  misc_RNA (1)...(19): siRNA sense strand
aagaagaaggaccucguua

SEQ ID NO: 1850389 - RNA, 19 nt, Homo sapiens
  misc_RNA (1)...(19): siRNA sense strand
gagccauccuuguaauaac

SEQ ID NO: 1850390 - RNA, 19 nt, Homo sapiens
  misc_RNA (1)...(19): siRNA sense strand
ucagcuugauucuaaggaa

SEQ ID NO: 1850391 - RNA, 19 nt, Homo sapiens
  misc_RNA (1)...(19): siRNA sense strand
acacuuaaacuugcuauuc

SEQ ID NO: 1850392 - RNA, 19 nt, Homo sapiens
  misc_RNA (1)...(19): siRNA sense strand
caguuugguucuaacaaug

SEQ ID NO: 1850393 - RNA, 19 nt, Homo sapiens
  misc_RNA (1)...(19): siRNA sense strand
ugcaggaaaucccacuaaa

SEQ ID NO: 1850394 - RNA, 19 nt, Homo sapiens
  misc_RNA (1)...(19): siRNA sense strand
agaagaaggaccucguuau

SEQ ID NO: 1850395 - RNA, 19 nt, Homo sapiens
  misc_RNA (1)...(19): siRNA sense strand
ggauuugcaaccucuuuau

SEQ ID NO: 1850396 - RNA, 19 nt, Homo sapiens
  misc_RNA (1)...(19): siRNA sense strand
acuuggaggccuuguaaua

SEQ ID NO: 1850397 - RNA, 19 nt, Homo sapiens
  misc_RNA (1)...(19): siRNA sense strand
aaagacagcaaauguaguc

SEQ ID NO: 1850398 - RNA, 19 nt, Homo sapiens
  misc_RNA (1)...(19): siRNA sense strand
agaaauauucagcuugguu

SEQ ID NO: 1850399 - RNA, 19 nt, Homo sapiens
  misc_RNA (1)...(19): siRNA sense strand
cagauucucagcuugauuc

SEQ ID NO: 1850400 - RNA, 19 nt, Homo sapiens
  misc_RNA (1)...(19): siRNA sense strand
uagaugcagcuacuuauca

SEQ ID NO: 1850401 - RNA, 19 nt, Homo sapiens
  misc_RNA (1)...(19): siRNA sense strand
caggaaaucccacuaaagc

SEQ ID NO: 1850402 - RNA, 19 nt, Homo sapiens
  misc_RNA (1)...(19): siRNA sense strand
ugaccuggauaguaguugu

SEQ ID NO: 1850403 - RNA, 19 nt, Homo sapiens
  misc_RNA (1)...(19): siRNA sense strand
caguguggauaagaaauau

SEQ ID NO: 1850404 - RNA, 19 nt, Homo sapiens
  misc_RNA (1)...(19): siRNA sense strand
gcaguucucacagcauguu

SEQ ID NO: 1850405 - RNA, 19 nt, Homo sapiens
  misc_RNA (1)...(19): siRNA sense strand
gcacugaaucgaguacuac

SEQ ID NO: 1850406 - RNA, 19 nt, Homo sapiens
  misc_RNA (1)...(19): siRNA sense strand
ccucagauucucagcuuga

SEQ ID NO: 1850407 - RNA, 19 nt, Homo sapiens
  misc_RNA (1)...(19): siRNA sense strand
cugugucuaugcuuaguaa

SEQ ID NO: 1850408 - RNA, 19 nt, Homo sapiens
  misc_RNA (1)...(19): siRNA sense strand
gaaucgaguacuacaugau

SEQ ID NO: 1850409 - RNA, 19 nt, Homo sapiens
  misc_RNA (1)...(19): siRNA sense strand
ccuuggagccauccuugua

SEQ ID NO: 1850410 - RNA, 19 nt, Homo sapiens
  misc_RNA (1)...(19): siRNA sense strand
gcguuauuccagaacuuua

SEQ ID NO: 1850411 - RNA, 19 nt, Homo sapiens
  misc_RNA (1)...(19): siRNA sense strand
guggcugucccuaguaauu

SEQ ID NO: 1850412 - RNA, 19 nt, Homo sapiens
  misc_RNA (1)...(19): siRNA sense strand
aaagaagaaggaccucguu

SEQ ID NO: 1850413 - RNA, 19 nt, Homo sapiens
  misc_RNA (1)...(19): siRNA sense strand
cuugguuucuuuggaagua

SEQ ID NO: 1850414 - RNA, 19 nt, Homo sapiens
  misc_RNA (1)...(19): siRNA sense strand
uacaguggcccucagauuc

SEQ ID NO: 1850415 - RNA, 19 nt, Homo sapiens
  misc_RNA (1)...(19): siRNA sense strand
gcacuaucaaaucuagaug

SEQ ID NO: 1850416 - RNA, 19 nt, Homo sapiens
  misc_RNA (1)...(19): siRNA sense strand
gcuauuccaucagggaucu

SEQ ID NO: 1850417 - RNA, 19 nt, Homo sapiens
  misc_RNA (1)...(19): siRNA sense strand
ggucacguaucaguuaaaa

SEQ ID NO: 1850418 - RNA, 19 nt, Homo sapiens
  misc_RNA (1)...(19): siRNA sense strand
gaaacaaaacaaucagugu

SEQ ID NO: 1850419 - RNA, 19 nt, Homo sapiens
  misc_RNA (1)...(19): siRNA sense strand
ggacucauggcaguucuca

SEQ ID NO: 1850420 - RNA, 19 nt, Homo sapiens
  misc_RNA (1)...(19): siRNA sense strand
ugacaggaguugcuuuugu

SEQ ID NO: 1850421 - RNA, 19 nt, Homo sapiens
  misc_RNA (1)...(19): siRNA sense strand
ucagcuugguuucuuugga

SEQ ID NO: 1850422 - RNA, 19 nt, Homo sapiens
  misc_RNA (1)...(19): siRNA sense strand
gguguauacauuuaugaug

SEQ ID NO: 1850423 - RNA, 19 nt, Homo sapiens
  misc_RNA (1)...(19): siRNA sense strand
guggcacuaucaaaucuag

SEQ ID NO: 1850424 - RNA, 19 nt, Homo sapiens
  misc_RNA (1)...(19): siRNA sense strand
cauuuaugauggagaacug

SEQ ID NO: 1850425 - RNA, 19 nt, Homo sapiens
  misc_RNA (1)...(19): siRNA sense strand
uauucagcuugguuucuuu

SEQ ID NO: 1850426 - RNA, 19 nt, Homo sapiens
  misc_RNA (1)...(19): siRNA sense strand
caaagacagcaaauguagu

SEQ ID NO: 1850427 - RNA, 19 nt, Homo sapiens
  misc_RNA (1)...(19): siRNA sense strand
uaucaggucacguaucagu

SEQ ID NO: 1850428 - RNA, 19 nt, Homo sapiens
  misc_RNA (1)...(19): siRNA sense strand
ugaagauaauggccugcau

SEQ ID NO: 1850429 - RNA, 19 nt, Homo sapiens
  misc_RNA (1)...(19): siRNA sense strand
ugguuucuuuggaaguaua

SEQ ID NO: 1850430 - RNA, 19 nt, Homo sapiens
  misc_RNA (1)...(19): siRNA sense strand
ccaguggcugucccuagua

SEQ ID NO: 1850431 - RNA, 19 nt, Homo sapiens
  misc_RNA (1)...(19): siRNA sense strand
uaaccgacugaccuggaua

SEQ ID NO: 1850432 - RNA, 19 nt, Homo sapiens
  misc_RNA (1)...(19): siRNA sense strand
gguuguugcugaacuuuug

SEQ ID NO: 1850433 - RNA, 19 nt, Homo sapiens
  misc_RNA (1)...(19): siRNA sense strand
gauuugcaaccucuuuauc

SEQ ID NO: 1850434 - RNA, 19 nt, Homo sapiens
  misc_RNA (1)...(19): siRNA sense strand
gaagggaaguuguaucuua

SEQ ID NO: 1850435 - RNA, 19 nt, Homo sapiens
  misc_RNA (1)...(19): siRNA sense strand
caaaggaccuggugucaaa

SEQ ID NO: 1850436 - RNA, 19 nt, Homo sapiens
  misc_RNA (1)...(19): siRNA sense strand
ggaauaaacuguauagaag

SEQ ID NO: 1850437 - RNA, 19 nt, Homo sapiens
  misc_RNA (1)...(19): siRNA sense strand
guauauggcuccagaagua

SEQ ID NO: 1850438 - RNA, 19 nt, Homo sapiens
  misc_RNA (1)...(19): siRNA sense strand
gagaauggacagcaaauua

SEQ ID NO: 1850439 - RNA, 19 nt, Homo sapiens
  misc_RNA (1)...(19): siRNA sense strand
uaacagaacuuaugaaagg

SEQ ID NO: 1850440 - RNA, 19 nt, Homo sapiens
  misc_RNA (1)...(19): siRNA sense strand
gaaaguauguguauguagu

SEQ ID NO: 1850441 - RNA, 19 nt, Homo sapiens
  misc_RNA (1)...(19): siRNA sense strand
ggacagcauccaaacauua

SEQ ID NO: 1850442 - RNA, 19 nt, Homo sapiens
  misc_RNA (1)...(19): siRNA sense strand
gaagaaggccacacugaaa

SEQ ID NO: 1850443 - RNA, 19 nt, Homo sapiens
  misc_RNA (1)...(19): siRNA sense strand
agaagaagaugucaaauuc

SEQ ID NO: 1850444 - RNA, 19 nt, Homo sapiens
  misc_RNA (1)...(19): siRNA sense strand
ggaggugaauugcuggaua

SEQ ID NO: 1850445 - RNA, 19 nt, Homo sapiens
  misc_RNA (1)...(19): siRNA sense strand
cuacauagccugggaauaa

SEQ ID NO: 1850446 - RNA, 19 nt, Homo sapiens
  misc_RNA (1)...(19): siRNA sense strand
auacaaugcuuaccgguua

SEQ ID NO: 1850447 - RNA, 19 nt, Homo sapiens
  misc_RNA (1)...(19): siRNA sense strand
caaagaugcuucauguaga

SEQ ID NO: 1850448 - RNA, 19 nt, Homo sapiens
  misc_RNA (1)...(19): siRNA sense strand
gcagugaagauuauugaua

SEQ ID NO: 1850449 - RNA, 19 nt, Homo sapiens
  misc_RNA (1)...(19): siRNA sense strand
gaggugaauugcuggauaa

SEQ ID NO: 1850450 - RNA, 19 nt, Homo sapiens
  misc_RNA (1)...(19): siRNA sense strand
gggcagggaucauuuggaa

SEQ ID NO: 1850451 - RNA, 19 nt, Homo sapiens
  misc_RNA (1)...(19): siRNA sense strand
gggaccaacugccacaaua

SEQ ID NO: 1850452 - RNA, 19 nt, Homo sapiens
  misc_RNA (1)...(19): siRNA sense strand
gggaaguuguaucuuauuu

SEQ ID NO: 1850453 - RNA, 19 nt, Homo sapiens
  misc_RNA (1)...(19): siRNA sense strand
gaaggucacaucaaguuaa

SEQ ID NO: 1850454 - RNA, 19 nt, Homo sapiens
  misc_RNA (1)...(19): siRNA sense strand
caaagaaauugcaaucaca

SEQ ID NO: 1850455 - RNA, 19 nt, Homo sapiens
  misc_RNA (1)...(19): siRNA sense strand
gcaaaugguccugaugaua

SEQ ID NO: 1850456 - RNA, 19 nt, Homo sapiens
  misc_RNA (1)...(19): siRNA sense strand
gacagcaaauuauggauga

SEQ ID NO: 1850457 - RNA, 19 nt, Homo sapiens
  misc_RNA (1)...(19): siRNA sense strand
caagagagacccaacagaa

SEQ ID NO: 1850458 - RNA, 19 nt, Homo sapiens
  misc_RNA (1)...(19): siRNA sense strand
caucgagacuugaaaccua

SEQ ID NO: 1850459 - RNA, 19 nt, Homo sapiens
  misc_RNA (1)...(19): siRNA sense strand
gcuauuaccucagaugaug

SEQ ID NO: 1850460 - RNA, 19 nt, Homo sapiens
  misc_RNA (1)...(19): siRNA sense strand
ggauguauaugaugaugga

SEQ ID NO: 1850461 - RNA, 19 nt, Homo sapiens
  misc_RNA (1)...(19): siRNA sense strand
ggaacgugauaucuuggua

SEQ ID NO: 1850462 - RNA, 19 nt, Homo sapiens
  misc_RNA (1)...(19): siRNA sense strand
cguaaucagucaccaguuu

SEQ ID NO: 1850463 - RNA, 19 nt, Homo sapiens
  misc_RNA (1)...(19): siRNA sense strand
acauaaagcuacaaacaug

SEQ ID NO: 1850464 - RNA, 19 nt, Homo sapiens
  misc_RNA (1)...(19): siRNA sense strand
ugaagaaggucacaucaag

SEQ ID NO: 1850465 - RNA, 19 nt, Homo sapiens
  misc_RNA (1)...(19): siRNA sense strand
ugucaaagaugcuucaugu

SEQ ID NO: 1850466 - RNA, 19 nt, Homo sapiens
  misc_RNA (1)...(19): siRNA sense strand
gaggaaauauuggcacgaa

SEQ ID NO: 1850467 - RNA, 19 nt, Homo sapiens
  misc_RNA (1)...(19): siRNA sense strand
gcgaaauccugcaaacaga

SEQ ID NO: 1850468 - RNA, 19 nt, Homo sapiens
  misc_RNA (1)...(19): siRNA sense strand
ccaugaagguauugaagaa

SEQ ID NO: 1850469 - RNA, 19 nt, Homo sapiens
  misc_RNA (1)...(19): siRNA sense strand
gcagacaguugguguacau

SEQ ID NO: 1850470 - RNA, 19 nt, Homo sapiens
  misc_RNA (1)...(19): siRNA sense strand
gaaacaaugacuaugauuc

SEQ ID NO: 1850471 - RNA, 19 nt, Homo sapiens
  misc_RNA (1)...(19): siRNA sense strand
gaagucaguaucaaagaaa

SEQ ID NO: 1850472 - RNA, 19 nt, Homo sapiens
  misc_RNA (1)...(19): siRNA sense strand
gaaauucuucuucguuaug

SEQ ID NO: 1850473 - RNA, 19 nt, Homo sapiens
  misc_RNA (1)...(19): siRNA sense strand
gagauuaacccacaaacug

SEQ ID NO: 1850474 - RNA, 19 nt, Homo sapiens
  misc_RNA (1)...(19): siRNA sense strand
gcagauccuucccaguuug

SEQ ID NO: 1850475 - RNA, 19 nt, Homo sapiens
  misc_RNA (1)...(19): siRNA sense strand
gaagaagucaguaucaaag

SEQ ID NO: 1850476 - RNA, 19 nt, Homo sapiens
  misc_RNA (1)...(19): siRNA sense strand
gcuguccuguucacuauaa

SEQ ID NO: 1850477 - RNA, 19 nt, Homo sapiens
  misc_RNA (1)...(19): siRNA sense strand
cgacagcgcugagaaugga

SEQ ID NO: 1850478 - RNA, 19 nt, Homo sapiens
  misc_RNA (1)...(19): siRNA sense strand
cagaagaagaugucaaauu

SEQ ID NO: 1850479 - RNA, 19 nt, Homo sapiens
  misc_RNA (1)...(19): siRNA sense strand
gggcaggccugaagauaca

SEQ ID NO: 1850480 - RNA, 19 nt, Homo sapiens
  misc_RNA (1)...(19): siRNA sense strand
agauggaguugaagaaauu

SEQ ID NO: 1850481 - RNA, 19 nt, Homo sapiens
  misc_RNA (1)...(19): siRNA sense strand
ggaacaguauucaguuuac

SEQ ID NO: 1850482 - RNA, 19 nt, Homo sapiens
  misc_RNA (1)...(19): siRNA sense strand
caggaacaguauucaguuu

SEQ ID NO: 1850483 - RNA, 19 nt, Homo sapiens
  misc_RNA (1)...(19): siRNA sense strand
gcucagcggagagguauua

SEQ ID NO: 1850484 - RNA, 19 nt, Homo sapiens
  misc_RNA (1)...(19): siRNA sense strand
aaaccuagcaacauucuuu

SEQ ID NO: 1850485 - RNA, 19 nt, Homo sapiens
  misc_RNA (1)...(19): siRNA sense strand
guaaaggaaggacaugaaa

SEQ ID NO: 1850486 - RNA, 19 nt, Homo sapiens
  misc_RNA (1)...(19): siRNA sense strand
ugugauauauggagucuug

SEQ ID NO: 1850487 - RNA, 19 nt, Homo sapiens
  misc_RNA (1)...(19): siRNA sense strand
guggaacuguggaguauau

SEQ ID NO: 1850488 - RNA, 19 nt, Homo sapiens
  misc_RNA (1)...(19): siRNA sense strand
ggcagauccuucccaguuu

SEQ ID NO: 1850489 - RNA, 19 nt, Homo sapiens
  misc_RNA (1)...(19): siRNA sense strand
gcuaugaugcugcuuguga

SEQ ID NO: 1850490 - RNA, 19 nt, Homo sapiens
  misc_RNA (1)...(19): siRNA sense strand
gaaaauggucuucucauga

SEQ ID NO: 1850491 - RNA, 19 nt, Homo sapiens
  misc_RNA (1)...(19): siRNA sense strand
gggaggagauuuguuuaca

SEQ ID NO: 1850492 - RNA, 19 nt, Homo sapiens
  misc_RNA (1)...(19): siRNA sense strand
cacaucaaguuaacagauu

SEQ ID NO: 1850493 - RNA, 19 nt, Homo sapiens
  misc_RNA (1)...(19): siRNA sense strand
ucaaagaugcuucauguag

SEQ ID NO: 1850494 - RNA, 19 nt, Homo sapiens
  misc_RNA (1)...(19): siRNA sense strand
ugaugcugcuugugauaua

SEQ ID NO: 1850495 - RNA, 19 nt, Homo sapiens
  misc_RNA (1)...(19): siRNA sense strand
cuacuuggcugaacuugca

SEQ ID NO: 1850496 - RNA, 19 nt, Homo sapiens
  misc_RNA (1)...(19): siRNA sense strand
gaaauugcaaucacacauc

SEQ ID NO: 1850497 - RNA, 19 nt, Homo sapiens
  misc_RNA (1)...(19): siRNA sense strand
cuugaaaccuagcaacauu

SEQ ID NO: 1850498 - RNA, 19 nt, Homo sapiens
  misc_RNA (1)...(19): siRNA sense strand
ggccagugcuguccuguuc

SEQ ID NO: 1850499 - RNA, 19 nt, Homo sapiens
  misc_RNA (1)...(19): siRNA sense strand
ccaaacauuaucacucuaa

SEQ ID NO: 1850500 - RNA, 19 nt, Homo sapiens
  misc_RNA (1)...(19): siRNA sense strand
uaaagagucuauugaccau

SEQ ID NO: 1850501 - RNA, 19 nt, Homo sapiens
  misc_RNA (1)...(19): siRNA sense strand
agaagucaguaucaaagaa

SEQ ID NO: 1850502 - RNA, 19 nt, Homo sapiens
  misc_RNA (1)...(19): siRNA sense strand
caaaugguccugaugauac

SEQ ID NO: 1850503 - RNA, 19 nt, Homo sapiens
  misc_RNA (1)...(19): siRNA sense strand
ggaaaauggucuucucaug

SEQ ID NO: 1850504 - RNA, 19 nt, Homo sapiens
  misc_RNA (1)...(19): siRNA sense strand
uaugaaaggaggugaauug

SEQ ID NO: 1850505 - RNA, 19 nt, Homo sapiens
  misc_RNA (1)...(19): siRNA sense strand
guauguguauguaguaaca

SEQ ID NO: 1850506 - RNA, 19 nt, Homo sapiens
  misc_RNA (1)...(19): siRNA sense strand
gacaguugguguacauuca

SEQ ID NO: 1850507 - RNA, 19 nt, Homo sapiens
  misc_RNA (1)...(19): siRNA sense strand
gaauggacagcaaauuaug

SEQ ID NO: 1850508 - RNA, 19 nt, Homo sapiens
  misc_RNA (1)...(19): siRNA sense strand
aauggaacgugauaucuug

SEQ ID NO: 1850509 - RNA, 19 nt, Homo sapiens
  misc_RNA (1)...(19): siRNA sense strand
guaguaacagaacuuauga

SEQ ID NO: 1850510 - RNA, 19 nt, Homo sapiens
  misc_RNA (1)...(19): siRNA sense strand
gauccugaguuuacugcaa

SEQ ID NO: 1850511 - RNA, 19 nt, Homo sapiens
  misc_RNA (1)...(19): siRNA sense strand
cagauggaguugaagaaau

SEQ ID NO: 1850512 - RNA, 19 nt, Homo sapiens
  misc_RNA (1)...(19): siRNA sense strand
gggaucauuuggaaagguu

SEQ ID NO: 1850513 - RNA, 19 nt, Homo sapiens
  misc_RNA (1)...(19): siRNA sense strand
aagagucuauugaccauga

SEQ ID NO: 1850514 - RNA, 19 nt, Homo sapiens
  misc_RNA (1)...(19): siRNA sense strand
gaguuugcagugaagauua

SEQ ID NO: 1850515 - RNA, 19 nt, Homo sapiens
  misc_RNA (1)...(19): siRNA sense strand
ugaagaagucaguaucaaa

SEQ ID NO: 1850516 - RNA, 19 nt, Homo sapiens
  misc_RNA (1)...(19): siRNA sense strand
cauuaucacucuaaaggau

SEQ ID NO: 1850517 - RNA, 19 nt, Homo sapiens
  misc_RNA (1)...(19): siRNA sense strand
gcagggaucauuuggaaag

SEQ ID NO: 1850518 - RNA, 19 nt, Homo sapiens
  misc_RNA (1)...(19): siRNA sense strand
gaacuugcacuugcuuuag

SEQ ID NO: 1850519 - RNA, 19 nt, Homo sapiens
  misc_RNA (1)...(19): siRNA sense strand
gagacugacugcugcucuu

SEQ ID NO: 1850520 - RNA, 19 nt, Homo sapiens
  misc_RNA (1)...(19): siRNA sense strand
uuacuggaauucuguuuca

SEQ ID NO: 1850521 - RNA, 19 nt, Homo sapiens
  misc_RNA (1)...(19): siRNA sense strand
ucaaagaaauugcaaucac

SEQ ID NO: 1850522 - RNA, 19 nt, Homo sapiens
  misc_RNA (1)...(19): siRNA sense strand
agacuggaauaaacuguau

SEQ ID NO: 1850523 - RNA, 19 nt, Homo sapiens
  misc_RNA (1)...(19): siRNA sense strand
uggaaaguauguguaugua

SEQ ID NO: 1850524 - RNA, 19 nt, Homo sapiens
  misc_RNA (1)...(19): siRNA sense strand
cuacauauucugcuuugaa

SEQ ID NO: 1850525 - RNA, 19 nt, Homo sapiens
  misc_RNA (1)...(19): siRNA sense strand
gugcuguccuguucacuau

SEQ ID NO: 1850526 - RNA, 19 nt, Homo sapiens
  misc_RNA (1)...(19): siRNA sense strand
ugaagaaggccacacugaa

SEQ ID NO: 1850527 - RNA, 19 nt, Homo sapiens
  misc_RNA (1)...(19): siRNA sense strand
uguagacccucaucagaga

SEQ ID NO: 1850528 - RNA, 19 nt, Homo sapiens
  misc_RNA (1)...(19): siRNA sense strand
gccugaagauacauucuau

SEQ ID NO: 1850529 - RNA, 19 nt, Homo sapiens
  misc_RNA (1)...(19): siRNA sense strand
gagaaauucauccgccauu

SEQ ID NO: 1850530 - RNA, 19 nt, Homo sapiens
  misc_RNA (1)...(19): siRNA sense strand
gaagaaggucacaucaagu

SEQ ID NO: 1850531 - RNA, 19 nt, Homo sapiens
  misc_RNA (1)...(19): siRNA sense strand
gcuaaugcacaucagcuuu

SEQ ID NO: 1850532 - RNA, 19 nt, Homo sapiens
  misc_RNA (1)...(19): siRNA sense strand
gaugauacaccagaggaaa

SEQ ID NO: 1850533 - RNA, 19 nt, Homo sapiens
  misc_RNA (1)...(19): siRNA sense strand
gguguacauucaauuguuc

SEQ ID NO: 1850534 - RNA, 19 nt, Homo sapiens
  misc_RNA (1)...(19): siRNA sense strand
uaugaucgcuccauuguag

SEQ ID NO: 1850535 - RNA, 19 nt, Homo sapiens
  misc_RNA (1)...(19): siRNA sense strand
gcaaguucauugagacauc

SEQ ID NO: 1850536 - RNA, 19 nt, Homo sapiens
  misc_RNA (1)...(19): siRNA sense strand
cagcagggcacaccuauga

SEQ ID NO: 1850537 - RNA, 19 nt, Homo sapiens
  misc_RNA (1)...(19): siRNA sense strand
cgagaaggccucagaacug

SEQ ID NO: 1850538 - RNA, 19 nt, Homo sapiens
  misc_RNA (1)...(19): siRNA sense strand
gcgcagggacagcaaagaa

SEQ ID NO: 1850539 - RNA, 19 nt, Homo sapiens
  misc_RNA (1)...(19): siRNA sense strand
ggacggagaagaggcauca

SEQ ID NO: 1850540 - RNA, 19 nt, Homo sapiens
  misc_RNA (1)...(19): siRNA sense strand
gcucguaacagccgcaaga

SEQ ID NO: 1850541 - RNA, 19 nt, Homo sapiens
  misc_RNA (1)...(19): siRNA sense strand
aggcaucacucauggucua

SEQ ID NO: 1850542 - RNA, 19 nt, Homo sapiens
  misc_RNA (1)...(19): siRNA sense strand
ggagaagaggcaucacuca

SEQ ID NO: 1850543 - RNA, 19 nt, Homo sapiens
  misc_RNA (1)...(19): siRNA sense strand
caaguucauugagacauca

SEQ ID NO: 1850544 - RNA, 19 nt, Homo sapiens
  misc_RNA (1)...(19): siRNA sense strand
gacugcaaguucauugaga

SEQ ID NO: 1850545 - RNA, 19 nt, Homo sapiens
  misc_RNA (1)...(19): siRNA sense strand
ggaugccuaugucauugug

SEQ ID NO: 1850546 - RNA, 19 nt, Homo sapiens
  misc_RNA (1)...(19): siRNA sense strand
gagaagaggcaucacucau

SEQ ID NO: 1850547 - RNA, 19 nt, Homo sapiens
  misc_RNA (1)...(19): siRNA sense strand
agaagaggcaucacucaug

SEQ ID NO: 1850548 - RNA, 19 nt, Homo sapiens
  misc_RNA (1)...(19): siRNA sense strand
caccuaugaucgcuccauu

SEQ ID NO: 1850549 - RNA, 19 nt, Homo sapiens
  misc_RNA (1)...(19): siRNA sense strand
gucauuguguacucaguga

SEQ ID NO: 1850550 - RNA, 19 nt, Homo sapiens
  misc_RNA (1)...(19): siRNA sense strand
gcagggcacaccuaugauc

SEQ ID NO: 1850551 - RNA, 19 nt, Homo sapiens
  misc_RNA (1)...(19): siRNA sense strand
ggucuuugacugcaaguuc

SEQ ID NO: 1850552 - RNA, 19 nt, Homo sapiens
  misc_RNA (1)...(19): siRNA sense strand
gcgagagagccuuggcaaa

SEQ ID NO: 1850553 - RNA, 19 nt, Homo sapiens
  misc_RNA (1)...(19): siRNA sense strand
ccuaugaucgcuccauugu

SEQ ID NO: 1850554 - RNA, 19 nt, Homo sapiens
  misc_RNA (1)...(19): siRNA sense strand
cagacgagagcguuuacaa

SEQ ID NO: 1850555 - RNA, 19 nt, Homo sapiens
  misc_RNA (1)...(19): siRNA sense strand
gugcacggcaaacagauga

SEQ ID NO: 1850556 - RNA, 19 nt, Homo sapiens
  misc_RNA (1)...(19): siRNA sense strand
cgagagagccuuggcaaaa

SEQ ID NO: 1850557 - RNA, 19 nt, Homo sapiens
  misc_RNA (1)...(19): siRNA sense strand
ccugcgcgguggucuuuga

SEQ ID NO: 1850558 - RNA, 19 nt, Homo sapiens
  misc_RNA (1)...(19): siRNA sense strand
caucacucauggucuacga

SEQ ID NO: 1850559 - RNA, 19 nt, Homo sapiens
  misc_RNA (1)...(19): siRNA sense strand
gccacgaccucucgguucu

SEQ ID NO: 1850560 - RNA, 19 nt, Homo sapiens
  misc_RNA (1)...(19): siRNA sense strand
gcacggcaaacagaugaug

SEQ ID NO: 1850561 - RNA, 19 nt, Homo sapiens
  misc_RNA (1)...(19): siRNA sense strand
cagcggcauugcaccacaa

SEQ ID NO: 1850562 - RNA, 19 nt, Homo sapiens
  misc_RNA (1)...(19): siRNA sense strand
augccuaugucauugugua

SEQ ID NO: 1850563 - RNA, 19 nt, Homo sapiens
  misc_RNA (1)...(19): siRNA sense strand
acucauggucuacgacauu

SEQ ID NO: 1850564 - RNA, 19 nt, Homo sapiens
  misc_RNA (1)...(19): siRNA sense strand
ugagacaucagcggcauug

SEQ ID NO: 1850565 - RNA, 19 nt, Homo sapiens
  misc_RNA (1)...(19): siRNA sense strand
cgaccucucgguucucuag

SEQ ID NO: 1850566 - RNA, 19 nt, Homo sapiens
  misc_RNA (1)...(19): siRNA sense strand
cucauggucuacgacauuu

SEQ ID NO: 1850567 - RNA, 19 nt, Homo sapiens
  misc_RNA (1)...(19): siRNA sense strand
gucuuugacugcaaguuca

SEQ ID NO: 1850568 - RNA, 19 nt, Homo sapiens
  misc_RNA (1)...(19): siRNA sense strand
caucaaugcuaucaucuuu

SEQ ID NO: 1850569 - RNA, 19 nt, Homo sapiens
  misc_RNA (1)...(19): siRNA sense strand
agacuugggugaaauauau

SEQ ID NO: 1850570 - RNA, 19 nt, Homo sapiens
  misc_RNA (1)...(19): siRNA sense strand
gcuaucaucuuucacacaa

SEQ ID NO: 1850571 - RNA, 19 nt, Homo sapiens
  misc_RNA (1)...(19): siRNA sense strand
gcuccuggcugcuuugaug

SEQ ID NO: 1850572 - RNA, 19 nt, Homo sapiens
  misc_RNA (1)...(19): siRNA sense strand
ugacaucaaugcuaucauc

SEQ ID NO: 1850573 - RNA, 19 nt, Homo sapiens
  misc_RNA (1)...(19): siRNA sense strand
ucaaugcuaucaucuuuca

SEQ ID NO: 1850574 - RNA, 19 nt, Homo sapiens
  misc_RNA (1)...(19): siRNA sense strand
gcugugacaucaaugcuau

SEQ ID NO: 1850575 - RNA, 19 nt, Homo sapiens
  misc_RNA (1)...(19): siRNA sense strand
cacggcagcuggccaauga

SEQ ID NO: 1850576 - RNA, 19 nt, Homo sapiens
  misc_RNA (1)...(19): siRNA sense strand
ugaaggcugugacaucaau

SEQ ID NO: 1850577 - RNA, 19 nt, Homo sapiens
  misc_RNA (1)...(19): siRNA sense strand
aaacagacuugggugaaau

SEQ ID NO: 1850578 - RNA, 19 nt, Homo sapiens
  misc_RNA (1)...(19): siRNA sense strand
agaagcagcaagcaacuuu

SEQ ID NO: 1850579 - RNA, 19 nt, Homo sapiens
  misc_RNA (1)...(19): siRNA sense strand
aaugaaggcugugacauca

SEQ ID NO: 1850580 - RNA, 19 nt, Homo sapiens
  misc_RNA (1)...(19): siRNA sense strand
acacagaccguauucuuca

SEQ ID NO: 1850581 - RNA, 19 nt, Homo sapiens
  misc_RNA (1)...(19): siRNA sense strand
gaccguauucuucauccua

SEQ ID NO: 1850582 - RNA, 19 nt, Homo sapiens
  misc_RNA (1)...(19): siRNA sense strand
ugacugcugucuuggauac

SEQ ID NO: 1850583 - RNA, 19 nt, Homo sapiens
  misc_RNA (1)...(19): siRNA sense strand
caaugaaggcugugacauc

SEQ ID NO: 1850584 - RNA, 19 nt, Homo sapiens
  misc_RNA (1)...(19): siRNA sense strand
gaagcagcaagcaacuuug

SEQ ID NO: 1850585 - RNA, 19 nt, Homo sapiens
  misc_RNA (1)...(19): siRNA sense strand
caacuuugacugcugucuu

SEQ ID NO: 1850586 - RNA, 19 nt, Homo sapiens
  misc_RNA (1)...(19): siRNA sense strand
cagacuugggugaaauaua

SEQ ID NO: 1850587 - RNA, 19 nt, Homo sapiens
  misc_RNA (1)...(19): siRNA sense strand
gcagcaagcaacuuugacu

SEQ ID NO: 1850588 - RNA, 19 nt, Homo sapiens
  misc_RNA (1)...(19): siRNA sense strand
aacuuugacugcugucuug

SEQ ID NO: 1850589 - RNA, 19 nt, Homo sapiens
  misc_RNA (1)...(19): siRNA sense strand
aagcagcaagcaacuuuga

SEQ ID NO: 1850590 - RNA, 19 nt, Homo sapiens
  misc_RNA (1)...(19): siRNA sense strand
ccaccucugcggcgaauca

SEQ ID NO: 1850591 - RNA, 19 nt, Homo sapiens
  misc_RNA (1)...(19): siRNA sense strand
aaaacagacuugggugaaa

SEQ ID NO: 1850592 - RNA, 19 nt, Homo sapiens
  misc_RNA (1)...(19): siRNA sense strand
accguauucuucauccuaa

SEQ ID NO: 1850593 - RNA, 19 nt, Homo sapiens
  misc_RNA (1)...(19): siRNA sense strand
gaaagcaacucuaaucaau

SEQ ID NO: 1850594 - RNA, 19 nt, Homo sapiens
  misc_RNA (1)...(19): siRNA sense strand
cgagagccaugguguauua

SEQ ID NO: 1850595 - RNA, 19 nt, Homo sapiens
  misc_RNA (1)...(19): siRNA sense strand
gaagaagaaugaugaagug

SEQ ID NO: 1850596 - RNA, 19 nt, Homo sapiens
  misc_RNA (1)...(19): siRNA sense strand
acacaacucugucauagua

SEQ ID NO: 1850597 - RNA, 19 nt, Homo sapiens
  misc_RNA (1)...(19): siRNA sense strand
cgaaaucucuucccugaaa

SEQ ID NO: 1850598 - RNA, 19 nt, Homo sapiens
  misc_RNA (1)...(19): siRNA sense strand
gaugagaacuucagucaau

SEQ ID NO: 1850599 - RNA, 19 nt, Homo sapiens
  misc_RNA (1)...(19): siRNA sense strand
gcaugaagauauugaaaug

SEQ ID NO: 1850600 - RNA, 19 nt, Homo sapiens
  misc_RNA (1)...(19): siRNA sense strand
gaacuucagucaauguugu

SEQ ID NO: 1850601 - RNA, 19 nt, Homo sapiens
  misc_RNA (1)...(19): siRNA sense strand
guagaugaaugcaagguaa

SEQ ID NO: 1850602 - RNA, 19 nt, Homo sapiens
  misc_RNA (1)...(19): siRNA sense strand
gaccaagacucaauccauu

SEQ ID NO: 1850603 - RNA, 19 nt, Homo sapiens
  misc_RNA (1)...(19): siRNA sense strand
gcacacaacucugucauag

SEQ ID NO: 1850604 - RNA, 19 nt, Homo sapiens
  misc_RNA (1)...(19): siRNA sense strand
cuaaucaucuccagcuuaa

SEQ ID NO: 1850605 - RNA, 19 nt, Homo sapiens
  misc_RNA (1)...(19): siRNA sense strand
gaaagaucauugcaaucaa

SEQ ID NO: 1850606 - RNA, 19 nt, Homo sapiens
  misc_RNA (1)...(19): siRNA sense strand
ggaaagaucauugcaauca

SEQ ID NO: 1850607 - RNA, 19 nt, Homo sapiens
  misc_RNA (1)...(19): siRNA sense strand
agacuaagaugguuaucaa

SEQ ID NO: 1850608 - RNA, 19 nt, Homo sapiens
  misc_RNA (1)...(19): siRNA sense strand
gaaaugaccaagacucaau

SEQ ID NO: 1850609 - RNA, 19 nt, Homo sapiens
  misc_RNA (1)...(19): siRNA sense strand
guaaugaaguuagugauca

SEQ ID NO: 1850610 - RNA, 19 nt, Homo sapiens
  misc_RNA (1)...(19): siRNA sense strand
guggauuucuucaacauuu

SEQ ID NO: 1850611 - RNA, 19 nt, Homo sapiens
  misc_RNA (1)...(19): siRNA sense strand
gaacgucuuaggucugaua

SEQ ID NO: 1850612 - RNA, 19 nt, Homo sapiens
  misc_RNA (1)...(19): siRNA sense strand
gaucauaggccucaucauc

SEQ ID NO: 1850613 - RNA, 19 nt, Homo sapiens
  misc_RNA (1)...(19): siRNA sense strand
gaccaucauugcugcagua

SEQ ID NO: 1850614 - RNA, 19 nt, Homo sapiens
  misc_RNA (1)...(19): siRNA sense strand
ggaagaaccuuggaaacgu

SEQ ID NO: 1850615 - RNA, 19 nt, Homo sapiens
  misc_RNA (1)...(19): siRNA sense strand
gaacuuugccugucaccuu

SEQ ID NO: 1850616 - RNA, 19 nt, Homo sapiens
  misc_RNA (1)...(19): siRNA sense strand
ggaaagcaacucuaaucaa

SEQ ID NO: 1850617 - RNA, 19 nt, Homo sapiens
  misc_RNA (1)...(19): siRNA sense strand
ggaagaagaaugaugaagu

SEQ ID NO: 1850618 - RNA, 19 nt, Homo sapiens
  misc_RNA (1)...(19): siRNA sense strand
ccaagacucaauccauuua

SEQ ID NO: 1850619 - RNA, 19 nt, Homo sapiens
  misc_RNA (1)...(19): siRNA sense strand
cuaagaugguuaucaagaa

SEQ ID NO: 1850620 - RNA, 19 nt, Homo sapiens
  misc_RNA (1)...(19): siRNA sense strand
caacagauucaaacaguga

SEQ ID NO: 1850621 - RNA, 19 nt, Homo sapiens
  misc_RNA (1)...(19): siRNA sense strand
gcuguugucucucuguuga

SEQ ID NO: 1850622 - RNA, 19 nt, Homo sapiens
  misc_RNA (1)...(19): siRNA sense strand
guggaaagaucauugcaau

SEQ ID NO: 1850623 - RNA, 19 nt, Homo sapiens
  misc_RNA (1)...(19): siRNA sense strand
ccaagcugaugguggauuu

SEQ ID NO: 1850624 - RNA, 19 nt, Homo sapiens
  misc_RNA (1)...(19): siRNA sense strand
ggauguacaugguaacagu

SEQ ID NO: 1850625 - RNA, 19 nt, Homo sapiens
  misc_RNA (1)...(19): siRNA sense strand
ugucaggccuggaugcuaa

SEQ ID NO: 1850626 - RNA, 19 nt, Homo sapiens
  misc_RNA (1)...(19): siRNA sense strand
caucauugcugcaguacug

SEQ ID NO: 1850627 - RNA, 19 nt, Homo sapiens
  misc_RNA (1)...(19): siRNA sense strand
aagcaacucuaaucaaugu

SEQ ID NO: 1850628 - RNA, 19 nt, Homo sapiens
  misc_RNA (1)...(19): siRNA sense strand
cgacugcaguguugaggaa

SEQ ID NO: 1850629 - RNA, 19 nt, Homo sapiens
  misc_RNA (1)...(19): siRNA sense strand
ccaaaugaaugguguuguc

SEQ ID NO: 1850630 - RNA, 19 nt, Homo sapiens
  misc_RNA (1)...(19): siRNA sense strand
gaaugagauuguaaugaag

SEQ ID NO: 1850631 - RNA, 19 nt, Homo sapiens
  misc_RNA (1)...(19): siRNA sense strand
gcacgagagccauggugua

SEQ ID NO: 1850632 - RNA, 19 nt, Homo sapiens
  misc_RNA (1)...(19): siRNA sense strand
ggaggagacuaagaugguu

SEQ ID NO: 1850633 - RNA, 19 nt, Homo sapiens
  misc_RNA (1)...(19): siRNA sense strand
ggaaggugccaacaauaug

SEQ ID NO: 1850634 - RNA, 19 nt, Homo sapiens
  misc_RNA (1)...(19): siRNA sense strand
gaugguggauuucuucaac

SEQ ID NO: 1850635 - RNA, 19 nt, Homo sapiens
  misc_RNA (1)...(19): siRNA sense strand
ccaacaauaugcccaagca

SEQ ID NO: 1850636 - RNA, 19 nt, Homo sapiens
  misc_RNA (1)...(19): siRNA sense strand
ugaacgagacugugacuga

SEQ ID NO: 1850637 - RNA, 19 nt, Homo sapiens
  misc_RNA (1)...(19): siRNA sense strand
uaagaugguuaucaagaag

SEQ ID NO: 1850638 - RNA, 19 nt, Homo sapiens
  misc_RNA (1)...(19): siRNA sense strand
gggauauacucaugaggau

SEQ ID NO: 1850639 - RNA, 19 nt, Homo sapiens
  misc_RNA (1)...(19): siRNA sense strand
uuggaaacgugagaaauaa

SEQ ID NO: 1850640 - RNA, 19 nt, Homo sapiens
  misc_RNA (1)...(19): siRNA sense strand
gaggagacuaagaugguua

SEQ ID NO: 1850641 - RNA, 19 nt, Homo sapiens
  misc_RNA (1)...(19): siRNA sense strand
agaagggccuggaguucaa

SEQ ID NO: 1850642 - RNA, 19 nt, Homo sapiens
  misc_RNA (1)...(19): siRNA sense strand
gauauugaaaugaccaaga

SEQ ID NO: 1850643 - RNA, 19 nt, Homo sapiens
  misc_RNA (1)...(19): siRNA sense strand
gcuggaacuuugccuguca

SEQ ID NO: 1850644 - RNA, 19 nt, Homo sapiens
  misc_RNA (1)...(19): siRNA sense strand
cuuggaaacgugagaaaua

SEQ ID NO: 1850645 - RNA, 19 nt, Homo sapiens
  misc_RNA (1)...(19): siRNA sense strand
cucaauccauuuaugauga

SEQ ID NO: 1850646 - RNA, 19 nt, Homo sapiens
  misc_RNA (1)...(19): siRNA sense strand
ucgagugcaugaagauauu

SEQ ID NO: 1850647 - RNA, 19 nt, Homo sapiens
  misc_RNA (1)...(19): siRNA sense strand
gaagaaaguccugguugca

SEQ ID NO: 1850648 - RNA, 19 nt, Homo sapiens
  misc_RNA (1)...(19): siRNA sense strand
gggaaagcaacucuaauca

SEQ ID NO: 1850649 - RNA, 19 nt, Homo sapiens
  misc_RNA (1)...(19): siRNA sense strand
gauggaggacagauuguga

SEQ ID NO: 1850650 - RNA, 19 nt, Homo sapiens
  misc_RNA (1)...(19): siRNA sense strand
gauaagcgugugacuagau

SEQ ID NO: 1850651 - RNA, 19 nt, Homo sapiens
  misc_RNA (1)...(19): siRNA sense strand
aaagaucauugcaaucaag

SEQ ID NO: 1850652 - RNA, 19 nt, Homo sapiens
  misc_RNA (1)...(19): siRNA sense strand
gcaaucccaagcucaagaa

SEQ ID NO: 1850653 - RNA, 19 nt, Homo sapiens
  misc_RNA (1)...(19): siRNA sense strand
caugguaacagugaucaua

SEQ ID NO: 1850654 - RNA, 19 nt, Homo sapiens
  misc_RNA (1)...(19): siRNA sense strand
aaacagugacgaagaaagu

SEQ ID NO: 1850655 - RNA, 19 nt, Homo sapiens
  misc_RNA (1)...(19): siRNA sense strand
gaaugguguuguccuggau

SEQ ID NO: 1850656 - RNA, 19 nt, Homo sapiens
  misc_RNA (1)...(19): siRNA sense strand
ggucuuggcuauccaucca

SEQ ID NO: 1850657 - RNA, 19 nt, Homo sapiens
  misc_RNA (1)...(19): siRNA sense strand
agacucaauccauuuauga

SEQ ID NO: 1850658 - RNA, 19 nt, Homo sapiens
  misc_RNA (1)...(19): siRNA sense strand
agucugagcuggauaccau

SEQ ID NO: 1850659 - RNA, 19 nt, Homo sapiens
  misc_RNA (1)...(19): siRNA sense strand
ucaagaagggccuggaguu

SEQ ID NO: 1850660 - RNA, 19 nt, Homo sapiens
  misc_RNA (1)...(19): siRNA sense strand
cggaaggugccaacaauau

SEQ ID NO: 1850661 - RNA, 19 nt, Homo sapiens
  misc_RNA (1)...(19): siRNA sense strand
ugaggaagaaccuuggaaa

SEQ ID NO: 1850662 - RNA, 19 nt, Homo sapiens
  misc_RNA (1)...(19): siRNA sense strand
uacggaaggugccaacaau

SEQ ID NO: 1850663 - RNA, 19 nt, Homo sapiens
  misc_RNA (1)...(19): siRNA sense strand
gcaacucuaaucaaugugu

SEQ ID NO: 1850664 - RNA, 19 nt, Homo sapiens
  misc_RNA (1)...(19): siRNA sense strand
gguaucgccugccugaucu

SEQ ID NO: 1850665 - RNA, 19 nt, Homo sapiens
  misc_RNA (1)...(19): siRNA sense strand
aaccagcgcuguugucucu

SEQ ID NO: 1850666 - RNA, 19 nt, Homo sapiens
  misc_RNA (1)...(19): siRNA sense strand
ggccugggaagaagaauga

SEQ ID NO: 1850667 - RNA, 19 nt, Homo sapiens
  misc_RNA (1)...(19): siRNA sense strand
ucuaaucaucuccagcuua

SEQ ID NO: 1850668 - RNA, 19 nt, Homo sapiens
  misc_RNA (1)...(19): siRNA sense strand
acagggaaagcaacucuaa

SEQ ID NO: 1850669 - RNA, 19 nt, Homo sapiens
  misc_RNA (1)...(19): siRNA sense strand
ucuaucaccucuccaaguc

SEQ ID NO: 1850670 - RNA, 19 nt, Homo sapiens
  misc_RNA (1)...(19): siRNA sense strand
gagaacuucagucaauguu

SEQ ID NO: 1850671 - RNA, 19 nt, Homo sapiens
  misc_RNA (1)...(19): siRNA sense strand
gaugguacagcccuuuaug

SEQ ID NO: 1850672 - RNA, 19 nt, Homo sapiens
  misc_RNA (1)...(19): siRNA sense strand
ugccugaucuguggaaaga

SEQ ID NO: 1850673 - RNA, 19 nt, Homo sapiens
  misc_RNA (1)...(19): siRNA sense strand
ugaaguuagugaucaugau

SEQ ID NO: 1850674 - RNA, 19 nt, Homo sapiens
  misc_RNA (1)...(19): siRNA sense strand
caagaagggccuggaguuc

SEQ ID NO: 1850675 - RNA, 19 nt, Homo sapiens
  misc_RNA (1)...(19): siRNA sense strand
gaaggugccaacaauaugc

SEQ ID NO: 1850676 - RNA, 19 nt, Homo sapiens
  misc_RNA (1)...(19): siRNA sense strand
ucaccaugcuccucauucu

SEQ ID NO: 1850677 - RNA, 19 nt, Homo sapiens
  misc_RNA (1)...(19): siRNA sense strand
auaagcgugugacuagauu

SEQ ID NO: 1850678 - RNA, 19 nt, Homo sapiens
  misc_RNA (1)...(19): siRNA sense strand
caacgcaaccagcgcuguu

SEQ ID NO: 1850679 - RNA, 19 nt, Homo sapiens
  misc_RNA (1)...(19): siRNA sense strand
ucagccgacugcaguguug

SEQ ID NO: 1850680 - RNA, 19 nt, Homo sapiens
  misc_RNA (1)...(19): siRNA sense strand
acaacucugucauaguaga

SEQ ID NO: 1850681 - RNA, 19 nt, Homo sapiens
  misc_RNA (1)...(19): siRNA sense strand
cuuuauagcccaaaugaau

SEQ ID NO: 1850682 - RNA, 19 nt, Homo sapiens
  misc_RNA (1)...(19): siRNA sense strand
acagucaucuuggcucaga

SEQ ID NO: 1850683 - RNA, 19 nt, Homo sapiens
  misc_RNA (1)...(19): siRNA sense strand
gagauuguaaugaaguuag

SEQ ID NO: 1850684 - RNA, 19 nt, Homo sapiens
  misc_RNA (1)...(19): siRNA sense strand
gaaaucucuucccugaaaa

SEQ ID NO: 1850685 - RNA, 19 nt, Homo sapiens
  misc_RNA (1)...(19): siRNA sense strand
aagacucaauccauuuaug

SEQ ID NO: 1850686 - RNA, 19 nt, Homo sapiens
  misc_RNA (1)...(19): siRNA sense strand
ggaugggaugaacgucuua

SEQ ID NO: 1850687 - RNA, 19 nt, Homo sapiens
  misc_RNA (1)...(19): siRNA sense strand
gcgcuguugucucucuguu

SEQ ID NO: 1850688 - RNA, 19 nt, Homo sapiens
  misc_RNA (1)...(19): siRNA sense strand
uucaaacagugacgaagaa

SEQ ID NO: 1850689 - RNA, 19 nt, Homo sapiens
  misc_RNA (1)...(19): siRNA sense strand
gagacuaagaugguuauca

SEQ ID NO: 1850690 - RNA, 19 nt, Homo sapiens
  misc_RNA (1)...(19): siRNA sense strand
ucauugcaaucaaggacuu

SEQ ID NO: 1850691 - RNA, 19 nt, Homo sapiens
  misc_RNA (1)...(19): siRNA sense strand
ggcagccaauggaaaguca

SEQ ID NO: 1850692 - RNA, 19 nt, Homo sapiens
  misc_RNA (1)...(19): siRNA sense strand
gaaccuuggaaacgugaga

SEQ ID NO: 1850693 - RNA, 19 nt, Homo sapiens
  misc_RNA (1)...(19): siRNA sense strand
ggaauguucuccucgaaua

SEQ ID NO: 1850694 - RNA, 19 nt, Homo sapiens
  misc_RNA (1)...(19): siRNA sense strand
gcucaccagugucauguuu

SEQ ID NO: 1850695 - RNA, 19 nt, Homo sapiens
  misc_RNA (1)...(19): siRNA sense strand
ccuaugcuaugcagaauuu

SEQ ID NO: 1850696 - RNA, 19 nt, Homo sapiens
  misc_RNA (1)...(19): siRNA sense strand
gaugggacuugcaguguau

SEQ ID NO: 1850697 - RNA, 19 nt, Homo sapiens
  misc_RNA (1)...(19): siRNA sense strand
cgggaagacuuauuucaga

SEQ ID NO: 1850698 - RNA, 19 nt, Homo sapiens
  misc_RNA (1)...(19): siRNA sense strand
gggcugaacuccacacacu

SEQ ID NO: 1850699 - RNA, 19 nt, Homo sapiens
  misc_RNA (1)...(19): siRNA sense strand
gucauucucuucauuguca

SEQ ID NO: 1850700 - RNA, 19 nt, Homo sapiens
  misc_RNA (1)...(19): siRNA sense strand
gggaagacuuauuucagau

SEQ ID NO: 1850701 - RNA, 19 nt, Homo sapiens
  misc_RNA (1)...(19): siRNA sense strand
uggagucgcugguucaguu

SEQ ID NO: 1850702 - RNA, 19 nt, Homo sapiens
  misc_RNA (1)...(19): siRNA sense strand
ugaugggacuugcagugua

SEQ ID NO: 1850703 - RNA, 19 nt, Homo sapiens
  misc_RNA (1)...(19): siRNA sense strand
guggcuaccuggacucuau

SEQ ID NO: 1850704 - RNA, 19 nt, Homo sapiens
  misc_RNA (1)...(19): siRNA sense strand
caggugggcuggcuucauc

SEQ ID NO: 1850705 - RNA, 19 nt, Homo sapiens
  misc_RNA (1)...(19): siRNA sense strand
gggcucaccagcaacagua

SEQ ID NO: 1850706 - RNA, 19 nt, Homo sapiens
  misc_RNA (1)...(19): siRNA sense strand
caacuggagcgcugacgaa

SEQ ID NO: 1850707 - RNA, 19 nt, Homo sapiens
  misc_RNA (1)...(19): siRNA sense strand
gagcaucguccucaacauc

SEQ ID NO: 1850708 - RNA, 19 nt, Homo sapiens
  misc_RNA (1)...(19): siRNA sense strand
cugccuaccuguucaccua

SEQ ID NO: 1850709 - RNA, 19 nt, Homo sapiens
  misc_RNA (1)...(19): siRNA sense strand
ggccucagccaucaccaua

SEQ ID NO: 1850710 - RNA, 19 nt, Homo sapiens
  misc_RNA (1)...(19): siRNA sense strand
gcuugucauucucuucauu

SEQ ID NO: 1850711 - RNA, 19 nt, Homo sapiens
  misc_RNA (1)...(19): siRNA sense strand
guaucgggaagacuuauuu

SEQ ID NO: 1850712 - RNA, 19 nt, Homo sapiens
  misc_RNA (1)...(19): siRNA sense strand
gccaucagccugcuuguca

SEQ ID NO: 1850713 - RNA, 19 nt, Homo sapiens
  misc_RNA (1)...(19): siRNA sense strand
uaccuggacucuauguuca

SEQ ID NO: 1850714 - RNA, 19 nt, Homo sapiens
  misc_RNA (1)...(19): siRNA sense strand
gcacacuccuggccuacac

SEQ ID NO: 1850715 - RNA, 19 nt, Homo sapiens
  misc_RNA (1)...(19): siRNA sense strand
cgacucagcgcuugcagau

SEQ ID NO: 1850716 - RNA, 19 nt, Homo sapiens
  misc_RNA (1)...(19): siRNA sense strand
gcugaaacuuagcuaucug

SEQ ID NO: 1850717 - RNA, 19 nt, Homo sapiens
  misc_RNA (1)...(19): siRNA sense strand
ggaagacuuauuucagauc

SEQ ID NO: 1850718 - RNA, 19 nt, Homo sapiens
  misc_RNA (1)...(19): siRNA sense strand
ccagugaggaggcccagaa

SEQ ID NO: 1850719 - RNA, 19 nt, Homo sapiens
  misc_RNA (1)...(19): siRNA sense strand
caccauaggcugcgugcuu

SEQ ID NO: 1850720 - RNA, 19 nt, Homo sapiens
  misc_RNA (1)...(19): siRNA sense strand
gcuugcagaugccuucuac

SEQ ID NO: 1850721 - RNA, 19 nt, Homo sapiens
  misc_RNA (1)...(19): siRNA sense strand
gcugugggccuuccucauc

SEQ ID NO: 1850722 - RNA, 19 nt, Homo sapiens
  misc_RNA (1)...(19): siRNA sense strand
ccgaugggcucuucuucca

SEQ ID NO: 1850723 - RNA, 19 nt, Homo sapiens
  misc_RNA (1)...(19): siRNA sense strand
ccacagcauccgcaacuuc

SEQ ID NO: 1850724 - RNA, 19 nt, Homo sapiens
  misc_RNA (1)...(19): siRNA sense strand
ucaccagugucauguuucu

SEQ ID NO: 1850725 - RNA, 19 nt, Homo sapiens
  misc_RNA (1)...(19): siRNA sense strand
ugccucaugcugaaacuua

SEQ ID NO: 1850726 - RNA, 19 nt, Homo sapiens
  misc_RNA (1)...(19): siRNA sense strand
ugacgaaggcggcuuugca

SEQ ID NO: 1850727 - RNA, 19 nt, Homo sapiens
  misc_RNA (1)...(19): siRNA sense strand
cuggagcaguggugacuug

SEQ ID NO: 1850728 - RNA, 19 nt, Homo sapiens
  misc_RNA (1)...(19): siRNA sense strand
gcagcagagcuccuucuca

SEQ ID NO: 1850729 - RNA, 19 nt, Homo sapiens
  misc_RNA (1)...(19): siRNA sense strand
gcaacaguaucgggaagac

SEQ ID NO: 1850730 - RNA, 19 nt, Homo sapiens
  misc_RNA (1)...(19): siRNA sense strand
gcugcgugcuugucuuugg

SEQ ID NO: 1850731 - RNA, 19 nt, Homo sapiens
  misc_RNA (1)...(19): siRNA sense strand
gcacugccuccugcuucua

SEQ ID NO: 1850732 - RNA, 19 nt, Homo sapiens
  misc_RNA (1)...(19): siRNA sense strand
gaagcugaaccgccugaag

SEQ ID NO: 1850733 - RNA, 19 nt, Homo sapiens
  misc_RNA (1)...(19): siRNA sense strand
ccagguguuugcccaugug

SEQ ID NO: 1850734 - RNA, 19 nt, Homo sapiens
  misc_RNA (1)...(19): siRNA sense strand
ccuccugcuucuaugcuuu

SEQ ID NO: 1850735 - RNA, 19 nt, Homo sapiens
  misc_RNA (1)...(19): siRNA sense strand
cuaccuggacucuauguuc

SEQ ID NO: 1850736 - RNA, 19 nt, Homo sapiens
  misc_RNA (1)...(19): siRNA sense strand
ggacuugcaguguauuucg

SEQ ID NO: 1850737 - RNA, 19 nt, Homo sapiens
  misc_RNA (1)...(19): siRNA sense strand
ugggugcgcuucuccaucu

SEQ ID NO: 1850738 - RNA, 19 nt, Homo sapiens
  misc_RNA (1)...(19): siRNA sense strand
gcaucguccucaacaucug

SEQ ID NO: 1850739 - RNA, 19 nt, Homo sapiens
  misc_RNA (1)...(19): siRNA sense strand
ccaucucgcuugccauugc

SEQ ID NO: 1850740 - RNA, 19 nt, Homo sapiens
  misc_RNA (1)...(19): siRNA sense strand
cugcugugcucuuguccuu

SEQ ID NO: 1850741 - RNA, 19 nt, Homo sapiens
  misc_RNA (1)...(19): siRNA sense strand
cucaucggcuggaauguuc

SEQ ID NO: 1850742 - RNA, 19 nt, Homo sapiens
  misc_RNA (1)...(19): siRNA sense strand
gcucuucuuccagguguuu

SEQ ID NO: 1850743 - RNA, 19 nt, Homo sapiens
  misc_RNA (1)...(19): siRNA sense strand
caucagccugcuugucauu

SEQ ID NO: 1850744 - RNA, 19 nt, Homo sapiens
  misc_RNA (1)...(19): siRNA sense strand
gcccuaugcuaugcagaau

SEQ ID NO: 1850745 - RNA, 19 nt, Homo sapiens
  misc_RNA (1)...(19): siRNA sense strand
acaguaucgggaagacuua

SEQ ID NO: 1850746 - RNA, 19 nt, Homo sapiens
  misc_RNA (1)...(19): siRNA sense strand
gggcucugccuaccuguuc

SEQ ID NO: 1850747 - RNA, 19 nt, Homo sapiens
  misc_RNA (1)...(19): siRNA sense strand
ccucagccaucaccauagg

SEQ ID NO: 1850748 - RNA, 19 nt, Homo sapiens
  misc_RNA (1)...(19): siRNA sense strand
gcugaacuccacacacuac

SEQ ID NO: 1850749 - RNA, 19 nt, Homo sapiens
  misc_RNA (1)...(19): siRNA sense strand
ggccaccaguaucauugug

SEQ ID NO: 1850750 - RNA, 19 nt, Homo sapiens
  misc_RNA (1)...(19): siRNA sense strand
gcaguguauuucggcuaug

SEQ ID NO: 1850751 - RNA, 19 nt, Homo sapiens
  misc_RNA (1)...(19): siRNA sense strand
ugcaguguauuucggcuau

SEQ ID NO: 1850752 - RNA, 19 nt, Homo sapiens
  misc_RNA (1)...(19): siRNA sense strand
ccaagcagcagagcuccuu

SEQ ID NO: 1850753 - RNA, 19 nt, Homo sapiens
  misc_RNA (1)...(19): siRNA sense strand
ggaccuggagucgcugguu

SEQ ID NO: 1850754 - RNA, 19 nt, Homo sapiens
  misc_RNA (1)...(19): siRNA sense strand
acaucugccucaugcugaa

SEQ ID NO: 1850755 - RNA, 19 nt, Homo sapiens
  misc_RNA (1)...(19): siRNA sense strand
gugcuugucuuugggaacu

SEQ ID NO: 1850756 - RNA, 19 nt, Homo sapiens
  misc_RNA (1)...(19): siRNA sense strand
gaauguucuccucgaauac

SEQ ID NO: 1850757 - RNA, 19 nt, Homo sapiens
  misc_RNA (1)...(19): siRNA sense strand
gcccugcugugcucuuguc

SEQ ID NO: 1850758 - RNA, 19 nt, Homo sapiens
  misc_RNA (1)...(19): siRNA sense strand
gcacaacugucaaauauac

SEQ ID NO: 1850759 - RNA, 19 nt, Homo sapiens
  misc_RNA (1)...(19): siRNA sense strand
ucaaauggcugaaggugaa

SEQ ID NO: 1850760 - RNA, 19 nt, Homo sapiens
  misc_RNA (1)...(19): siRNA sense strand
ggacaagauugaccaagug

SEQ ID NO: 1850761 - RNA, 19 nt, Homo sapiens
  misc_RNA (1)...(19): siRNA sense strand
caacaucucccauaaguca

SEQ ID NO: 1850762 - RNA, 19 nt, Homo sapiens
  misc_RNA (1)...(19): siRNA sense strand
gcaggugauugacacagua

SEQ ID NO: 1850763 - RNA, 19 nt, Homo sapiens
  misc_RNA (1)...(19): siRNA sense strand
ccagugagguucuccaaga

SEQ ID NO: 1850764 - RNA, 19 nt, Homo sapiens
  misc_RNA (1)...(19): siRNA sense strand
gugcagggcuugaccauca

SEQ ID NO: 1850765 - RNA, 19 nt, Homo sapiens
  misc_RNA (1)...(19): siRNA sense strand
ggacucaggcuauuucaug

SEQ ID NO: 1850766 - RNA, 19 nt, Homo sapiens
  misc_RNA (1)...(19): siRNA sense strand
gagaugggcucugccaaug

SEQ ID NO: 1850767 - RNA, 19 nt, Homo sapiens
  misc_RNA (1)...(19): siRNA sense strand
gggagcaguuugacaagaa

SEQ ID NO: 1850768 - RNA, 19 nt, Homo sapiens
  misc_RNA (1)...(19): siRNA sense strand
acgcacaacugucaaauau

SEQ ID NO: 1850769 - RNA, 19 nt, Homo sapiens
  misc_RNA (1)...(19): siRNA sense strand
gccaacaucucccauaagu

SEQ ID NO: 1850770 - RNA, 19 nt, Homo sapiens
  misc_RNA (1)...(19): siRNA sense strand
ucaagccacuggucaaaug

SEQ ID NO: 1850771 - RNA, 19 nt, Homo sapiens
  misc_RNA (1)...(19): siRNA sense strand
cuagcaggcuguucuuuga

SEQ ID NO: 1850772 - RNA, 19 nt, Homo sapiens
  misc_RNA (1)...(19): siRNA sense strand
ggagcaguuugacaagaaa

SEQ ID NO: 1850773 - RNA, 19 nt, Homo sapiens
  misc_RNA (1)...(19): siRNA sense strand
ucaccugucucggaaagua

SEQ ID NO: 1850774 - RNA, 19 nt, Homo sapiens
  misc_RNA (1)...(19): siRNA sense strand
cuaccucacugcugaaaug

SEQ ID NO: 1850775 - RNA, 19 nt, Homo sapiens
  misc_RNA (1)...(19): siRNA sense strand
gaugggcucugccaaugug

SEQ ID NO: 1850776 - RNA, 19 nt, Homo sapiens
  misc_RNA (1)...(19): siRNA sense strand
gagagcugccugcugauuu

SEQ ID NO: 1850777 - RNA, 19 nt, Homo sapiens
  misc_RNA (1)...(19): siRNA sense strand
gagcgacaguucagagaca

SEQ ID NO: 1850778 - RNA, 19 nt, Homo sapiens
  misc_RNA (1)...(19): siRNA sense strand
gcgagucccugcucaacga

SEQ ID NO: 1850779 - RNA, 19 nt, Homo sapiens
  misc_RNA (1)...(19): siRNA sense strand
aaaaggagcuccccuggaa

SEQ ID NO: 1850780 - RNA, 19 nt, Homo sapiens
  misc_RNA (1)...(19): siRNA sense strand
ccgaagagcccacccagaa

SEQ ID NO: 1850781 - RNA, 19 nt, Homo sapiens
  misc_RNA (1)...(19): siRNA sense strand
ggccugggcuguaagaagu

SEQ ID NO: 1850782 - RNA, 19 nt, Homo sapiens
  misc_RNA (1)...(19): siRNA sense strand
gcuguucuuugacaacuug

SEQ ID NO: 1850783 - RNA, 19 nt, Homo sapiens
  misc_RNA (1)...(19): siRNA sense strand
gaucugggauguguacuac

SEQ ID NO: 1850784 - RNA, 19 nt, Homo sapiens
  misc_RNA (1)...(19): siRNA sense strand
ggagaugggcucugccaau

SEQ ID NO: 1850785 - RNA, 19 nt, Homo sapiens
  misc_RNA (1)...(19): siRNA sense strand
ggacaggugggagcaguuu

SEQ ID NO: 1850786 - RNA, 19 nt, Homo sapiens
  misc_RNA (1)...(19): siRNA sense strand
agaccugggugcugaauca

SEQ ID NO: 1850787 - RNA, 19 nt, Homo sapiens
  misc_RNA (1)...(19): siRNA sense strand
cagagaaggaggacgauga

SEQ ID NO: 1850788 - RNA, 19 nt, Homo sapiens
  misc_RNA (1)...(19): siRNA sense strand
ccucaccuaugccguggua

SEQ ID NO: 1850789 - RNA, 19 nt, Homo sapiens
  misc_RNA (1)...(19): siRNA sense strand
guucagagacagagaagga

SEQ ID NO: 1850790 - RNA, 19 nt, Homo sapiens
  misc_RNA (1)...(19): siRNA sense strand
gaaggaugguguggcgaau

SEQ ID NO: 1850791 - RNA, 19 nt, Homo sapiens
  misc_RNA (1)...(19): siRNA sense strand
gauauuaaccguggagucu

SEQ ID NO: 1850792 - RNA, 19 nt, Homo sapiens
  misc_RNA (1)...(19): siRNA sense strand
uauuaaccguggagucuga

SEQ ID NO: 1850793 - RNA, 19 nt, Homo sapiens
  misc_RNA (1)...(19): siRNA sense strand
ggugcaggcuggcuuacug

SEQ ID NO: 1850794 - RNA, 19 nt, Homo sapiens
  misc_RNA (1)...(19): siRNA sense strand
gccguggacucuucuaagu

SEQ ID NO: 1850795 - RNA, 19 nt, Homo sapiens
  misc_RNA (1)...(19): siRNA sense strand
aggccaacaucucccauaa

SEQ ID NO: 1850796 - RNA, 19 nt, Homo sapiens
  misc_RNA (1)...(19): siRNA sense strand
ccaaugugcaggccacuga

SEQ ID NO: 1850797 - RNA, 19 nt, Homo sapiens
  misc_RNA (1)...(19): siRNA sense strand
ggugggagcaguuugacaa

SEQ ID NO: 1850798 - RNA, 19 nt, Homo sapiens
  misc_RNA (1)...(19): siRNA sense strand
ggccuuugcucucgucauc

SEQ ID NO: 1850799 - RNA, 19 nt, Homo sapiens
  misc_RNA (1)...(19): siRNA sense strand
gaggccacgucuugucuuc

SEQ ID NO: 1850800 - RNA, 19 nt, Homo sapiens
  misc_RNA (1)...(19): siRNA sense strand
gauugugccuguggacaug

SEQ ID NO: 1850801 - RNA, 19 nt, Homo sapiens
  misc_RNA (1)...(19): siRNA sense strand
cagcugcagucgccacuuc

SEQ ID NO: 1850802 - RNA, 19 nt, Homo sapiens
  misc_RNA (1)...(19): siRNA sense strand
gcugagaccgugaucuuca

SEQ ID NO: 1850803 - RNA, 19 nt, Homo sapiens
  misc_RNA (1)...(19): siRNA sense strand
gcaggcuguucuuugacaa

SEQ ID NO: 1850804 - RNA, 19 nt, Homo sapiens
  misc_RNA (1)...(19): siRNA sense strand
cgaaugcugaggcuacaaa

SEQ ID NO: 1850805 - RNA, 19 nt, Homo sapiens
  misc_RNA (1)...(19): siRNA sense strand
gccgugggcuuagucuuug

SEQ ID NO: 1850806 - RNA, 19 nt, Homo sapiens
  misc_RNA (1)...(19): siRNA sense strand
gaggugcacgucaaugaga

SEQ ID NO: 1850807 - RNA, 19 nt, Homo sapiens
  misc_RNA (1)...(19): siRNA sense strand
gaggccaacaucucccaua

SEQ ID NO: 1850808 - RNA, 19 nt, Homo sapiens
  misc_RNA (1)...(19): siRNA sense strand
accaggagcugcaugaaca

SEQ ID NO: 1850809 - RNA, 19 nt, Homo sapiens
  misc_RNA (1)...(19): siRNA sense strand
gaaccaggagcugcaugaa

SEQ ID NO: 1850810 - RNA, 19 nt, Homo sapiens
  misc_RNA (1)...(19): siRNA sense strand
uggaaugccuucacaacag

SEQ ID NO: 1850811 - RNA, 19 nt, Homo sapiens
  misc_RNA (1)...(19): siRNA sense strand
ggaaccagagcaucucauc

SEQ ID NO: 1850812 - RNA, 19 nt, Homo sapiens
  misc_RNA (1)...(19): siRNA sense strand
uggacaagauugaccaagu

SEQ ID NO: 1850813 - RNA, 19 nt, Homo sapiens
  misc_RNA (1)...(19): siRNA sense strand
ucucagccguggacucuuc

SEQ ID NO: 1850814 - RNA, 19 nt, Homo sapiens
  misc_RNA (1)...(19): siRNA sense strand
ucccauaagucacgcacaa

SEQ ID NO: 1850815 - RNA, 19 nt, Homo sapiens
  misc_RNA (1)...(19): siRNA sense strand
ccaagaaagcugaguacca

SEQ ID NO: 1850816 - RNA, 19 nt, Homo sapiens
  misc_RNA (1)...(19): siRNA sense strand
gagagcgacaguucagaga

SEQ ID NO: 1850817 - RNA, 19 nt, Homo sapiens
  misc_RNA (1)...(19): siRNA sense strand
ugccaaggacuacuuugua

SEQ ID NO: 1850818 - RNA, 19 nt, Homo sapiens
  misc_RNA (1)...(19): siRNA sense strand
gugcugagaccgugaucuu

SEQ ID NO: 1850819 - RNA, 19 nt, Homo sapiens
  misc_RNA (1)...(19): siRNA sense strand
ucggaaaccaccaagauug

SEQ ID NO: 1850820 - RNA, 19 nt, Homo sapiens
  misc_RNA (1)...(19): siRNA sense strand
ccaccaagcacaacaucug

SEQ ID NO: 1850821 - RNA, 19 nt, Homo sapiens
  misc_RNA (1)...(19): siRNA sense strand
cggcuggaguccuuuaagu

SEQ ID NO: 1850822 - RNA, 19 nt, Homo sapiens
  misc_RNA (1)...(19): siRNA sense strand
ggagcugcaugaacacacu

SEQ ID NO: 1850823 - RNA, 19 nt, Homo sapiens
  misc_RNA (1)...(19): siRNA sense strand
guaggcacacucuggaaug

SEQ ID NO: 1850824 - RNA, 19 nt, Homo sapiens
  misc_RNA (1)...(19): siRNA sense strand
ggaaaccaccaagauugug

SEQ ID NO: 1850825 - RNA, 19 nt, Homo sapiens
  misc_RNA (1)...(19): siRNA sense strand
ggaggagagcgacaguuca

SEQ ID NO: 1850826 - RNA, 19 nt, Homo sapiens
  misc_RNA (1)...(19): siRNA sense strand
ugaagaggagugagcauca

SEQ ID NO: 1850827 - RNA, 19 nt, Homo sapiens
  misc_RNA (1)...(19): siRNA sense strand
caucaagccacuggucaaa

SEQ ID NO: 1850828 - RNA, 19 nt, Homo sapiens
  misc_RNA (1)...(19): siRNA sense strand
cgugcuagcugucuuugag

SEQ ID NO: 1850829 - RNA, 19 nt, Homo sapiens
  misc_RNA (1)...(19): siRNA sense strand
guacguggaggccaacauc

SEQ ID NO: 1850830 - RNA, 19 nt, Homo sapiens
  misc_RNA (1)...(19): siRNA sense strand
guacuacaggcuuaacauc

SEQ ID NO: 1850831 - RNA, 19 nt, Homo sapiens
  misc_RNA (1)...(19): siRNA sense strand
ucacaaacccacccugaac

SEQ ID NO: 1850832 - RNA, 19 nt, Homo sapiens
  misc_RNA (1)...(19): siRNA sense strand
uguguggccugggcuguaa

SEQ ID NO: 1850833 - RNA, 19 nt, Homo sapiens
  misc_RNA (1)...(19): siRNA sense strand
aaacuucugucaccaaccu

SEQ ID NO: 1850834 - RNA, 19 nt, Homo sapiens
  misc_RNA (1)...(19): siRNA sense strand
ccaaggucccugccaagga

SEQ ID NO: 1850835 - RNA, 19 nt, Homo sapiens
  misc_RNA (1)...(19): siRNA sense strand
gcugggcacccucaucuuc

SEQ ID NO: 1850836 - RNA, 19 nt, Homo sapiens
  misc_RNA (1)...(19): siRNA sense strand
gaucugcaggugauugaca

SEQ ID NO: 1850837 - RNA, 19 nt, Homo sapiens
  misc_RNA (1)...(19): siRNA sense strand
cacgcacaacugucaaaua

SEQ ID NO: 1850838 - RNA, 19 nt, Homo sapiens
  misc_RNA (1)...(19): siRNA sense strand
ccuagcaggcuguucuuug

SEQ ID NO: 1850839 - RNA, 19 nt, Homo sapiens
  misc_RNA (1)...(19): siRNA sense strand
aacaucugcuucaccaaga

SEQ ID NO: 1850840 - RNA, 19 nt, Homo sapiens
  misc_RNA (1)...(19): siRNA sense strand
ggucucacucugccuucua

SEQ ID NO: 1850841 - RNA, 19 nt, Homo sapiens
  misc_RNA (1)...(19): siRNA sense strand
ugacaagaaauaccugagu

SEQ ID NO: 1850842 - RNA, 19 nt, Homo sapiens
  misc_RNA (1)...(19): siRNA sense strand
caccauggcuaccacuacu

SEQ ID NO: 1850843 - RNA, 19 nt, Homo sapiens
  misc_RNA (1)...(19): siRNA sense strand
ugaaccaggagcugcauga

SEQ ID NO: 1850844 - RNA, 19 nt, Homo sapiens
  misc_RNA (1)...(19): siRNA sense strand
ggucugcaacuccuuugug

SEQ ID NO: 1850845 - RNA, 19 nt, Homo sapiens
  misc_RNA (1)...(19): siRNA sense strand
gugcauccaguucaacaga

SEQ ID NO: 1850846 - RNA, 19 nt, Homo sapiens
  misc_RNA (1)...(19): siRNA sense strand
gaggagagcgacaguucag

SEQ ID NO: 1850847 - RNA, 19 nt, Homo sapiens
  misc_RNA (1)...(19): siRNA sense strand
ggagccaggcaccuucuuc

SEQ ID NO: 1850848 - RNA, 19 nt, Homo sapiens
  misc_RNA (1)...(19): siRNA sense strand
ggccacgucuugucuucca

SEQ ID NO: 1850849 - RNA, 19 nt, Homo sapiens
  misc_RNA (1)...(19): siRNA sense strand
gcaccauggcuaccacuac

SEQ ID NO: 1850850 - RNA, 19 nt, Homo sapiens
  misc_RNA (1)...(19): siRNA sense strand
cggaaaccaccaagauugu

SEQ ID NO: 1850851 - RNA, 19 nt, Homo sapiens
  misc_RNA (1)...(19): siRNA sense strand
gguaggcacacucuggaau

SEQ ID NO: 1850852 - RNA, 19 nt, Homo sapiens
  misc_RNA (1)...(19): siRNA sense strand
guagccaccacuauuguag

SEQ ID NO: 1850853 - RNA, 19 nt, Homo sapiens
  misc_RNA (1)...(19): siRNA sense strand
ccucggaaaccaccaagau

SEQ ID NO: 1850854 - RNA, 19 nt, Homo sapiens
  misc_RNA (1)...(19): siRNA sense strand
cccaagcccacgaaucauu

SEQ ID NO: 1850855 - RNA, 19 nt, Homo sapiens
  misc_RNA (1)...(19): siRNA sense strand
gcaagacuggccgcaggaa

SEQ ID NO: 1850856 - RNA, 19 nt, Homo sapiens
  misc_RNA (1)...(19): siRNA sense strand
guggucuucuucacaguca

SEQ ID NO: 1850857 - RNA, 19 nt, Homo sapiens
  misc_RNA (1)...(19): siRNA sense strand
acaaggaccacacccaucu

SEQ ID NO: 1850858 - RNA, 19 nt, Homo sapiens
  misc_RNA (1)...(19): siRNA sense strand
gaccgcaagcuguccaaga

SEQ ID NO: 1850859 - RNA, 19 nt, Homo sapiens
  misc_RNA (1)...(19): siRNA sense strand
gcacucagagcgugaacac

SEQ ID NO: 1850860 - RNA, 19 nt, Homo sapiens
  misc_RNA (1)...(19): siRNA sense strand
accgcaagcuguccaagau

SEQ ID NO: 1850861 - RNA, 19 nt, Homo sapiens
  misc_RNA (1)...(19): siRNA sense strand
gggcugauauucacagaaa

SEQ ID NO: 1850862 - RNA, 19 nt, Homo sapiens
  misc_RNA (1)...(19): siRNA sense strand
ccacuuagcuccuccaaag

SEQ ID NO: 1850863 - RNA, 19 nt, Homo sapiens
  misc_RNA (1)...(19): siRNA sense strand
gacagaagcucaucagucu

SEQ ID NO: 1850864 - RNA, 19 nt, Homo sapiens
  misc_RNA (1)...(19): siRNA sense strand
ggguuaagaucaaagauga

SEQ ID NO: 1850865 - RNA, 19 nt, Homo sapiens
  misc_RNA (1)...(19): siRNA sense strand
cagaagcucaucagucuua

SEQ ID NO: 1850866 - RNA, 19 nt, Homo sapiens
  misc_RNA (1)...(19): siRNA sense strand
ggaaaggaacggcgacaaa

SEQ ID NO: 1850867 - RNA, 19 nt, Homo sapiens
  misc_RNA (1)...(19): siRNA sense strand
cccaauggcuccaaagaaa

SEQ ID NO: 1850868 - RNA, 19 nt, Homo sapiens
  misc_RNA (1)...(19): siRNA sense strand
gaagagacaacacccaaau

SEQ ID NO: 1850869 - RNA, 19 nt, Homo sapiens
  misc_RNA (1)...(19): siRNA sense strand
acaggaagauagagagaaa

SEQ ID NO: 1850870 - RNA, 19 nt, Homo sapiens
  misc_RNA (1)...(19): siRNA sense strand
gacgggaggugucugaaga

SEQ ID NO: 1850871 - RNA, 19 nt, Homo sapiens
  misc_RNA (1)...(19): siRNA sense strand
ccaaagccaaugaguuuaa

SEQ ID NO: 1850872 - RNA, 19 nt, Homo sapiens
  misc_RNA (1)...(19): siRNA sense strand
caaagccaaugaguuuaaa

SEQ ID NO: 1850873 - RNA, 19 nt, Homo sapiens
  misc_RNA (1)...(19): siRNA sense strand
gccaaugaguuuaaagaca

SEQ ID NO: 1850874 - RNA, 19 nt, Homo sapiens
  misc_RNA (1)...(19): siRNA sense strand
gaaaugccaauugcagauu

SEQ ID NO: 1850875 - RNA, 19 nt, Homo sapiens
  misc_RNA (1)...(19): siRNA sense strand
gcaacgggcagaaagaaau

SEQ ID NO: 1850876 - RNA, 19 nt, Homo sapiens
  misc_RNA (1)...(19): siRNA sense strand
ucucaaggauggacaggaa

SEQ ID NO: 1850877 - RNA, 19 nt, Homo sapiens
  misc_RNA (1)...(19): siRNA sense strand
gcagaaagaaauccacaca

SEQ ID NO: 1850878 - RNA, 19 nt, Homo sapiens
  misc_RNA (1)...(19): siRNA sense strand
ucaccagccuccaccaaga

SEQ ID NO: 1850879 - RNA, 19 nt, Homo sapiens
  misc_RNA (1)...(19): siRNA sense strand
ggaaaugccaauugcagau

SEQ ID NO: 1850880 - RNA, 19 nt, Homo sapiens
  misc_RNA (1)...(19): siRNA sense strand
gguggaacaucucaaggau

SEQ ID NO: 1850881 - RNA, 19 nt, Homo sapiens
  misc_RNA (1)...(19): siRNA sense strand
ucugaagacggaaagauua

SEQ ID NO: 1850882 - RNA, 19 nt, Homo sapiens
  misc_RNA (1)...(19): siRNA sense strand
agaugaagcuggaaauguc

SEQ ID NO: 1850883 - RNA, 19 nt, Homo sapiens
  misc_RNA (1)...(19): siRNA sense strand
gaaccgggagcuccgagaa

SEQ ID NO: 1850884 - RNA, 19 nt, Homo sapiens
  misc_RNA (1)...(19): siRNA sense strand
cgggagacgucaagacaga

SEQ ID NO: 1850885 - RNA, 19 nt, Homo sapiens
  misc_RNA (1)...(19): siRNA sense strand
cuccaaagccaaugaguuu

SEQ ID NO: 1850886 - RNA, 19 nt, Homo sapiens
  misc_RNA (1)...(19): siRNA sense strand
acaggaagagaccuuauuu

SEQ ID NO: 1850887 - RNA, 19 nt, Homo sapiens
  misc_RNA (1)...(19): siRNA sense strand
gaaaacaccaccacaggaa

SEQ ID NO: 1850888 - RNA, 19 nt, Homo sapiens
  misc_RNA (1)...(19): siRNA sense strand
gacaggaagagaccuuauu

SEQ ID NO: 1850889 - RNA, 19 nt, Homo sapiens
  misc_RNA (1)...(19): siRNA sense strand
ggaaagauuaugcauccau

SEQ ID NO: 1850890 - RNA, 19 nt, Homo sapiens
  misc_RNA (1)...(19): siRNA sense strand
ggacaggaagagaccuuau

SEQ ID NO: 1850891 - RNA, 19 nt, Homo sapiens
  misc_RNA (1)...(19): siRNA sense strand
caaugaguuuaaagacaga

SEQ ID NO: 1850892 - RNA, 19 nt, Homo sapiens
  misc_RNA (1)...(19): siRNA sense strand
cguucaagcugacgaguuc

SEQ ID NO: 1850893 - RNA, 19 nt, Homo sapiens
  misc_RNA (1)...(19): siRNA sense strand
gaaaggaacggcgacaaaa

SEQ ID NO: 1850894 - RNA, 19 nt, Homo sapiens
  misc_RNA (1)...(19): siRNA sense strand
ucaaagaugaagcuggaaa

SEQ ID NO: 1850895 - RNA, 19 nt, Homo sapiens
  misc_RNA (1)...(19): siRNA sense strand
ggagaugccgucauuacag

SEQ ID NO: 1850896 - RNA, 19 nt, Homo sapiens
  misc_RNA (1)...(19): siRNA sense strand
caaagaugaagcuggaaau

SEQ ID NO: 1850897 - RNA, 19 nt, Homo sapiens
  misc_RNA (1)...(19): siRNA sense strand
ucugucagcugaugaagag

SEQ ID NO: 1850898 - RNA, 19 nt, Homo sapiens
  misc_RNA (1)...(19): siRNA sense strand
ggaggguuaagaucaaaga

SEQ ID NO: 1850899 - RNA, 19 nt, Homo sapiens
  misc_RNA (1)...(19): siRNA sense strand
gcugucaggaaaccaagua

SEQ ID NO: 1850900 - RNA, 19 nt, Homo sapiens
  misc_RNA (1)...(19): siRNA sense strand
gaagacggaaagauuaugc

SEQ ID NO: 1850901 - RNA, 19 nt, Homo sapiens
  misc_RNA (1)...(19): siRNA sense strand
agaauuaacucggggaaaa

SEQ ID NO: 1850902 - RNA, 19 nt, Homo sapiens
  misc_RNA (1)...(19): siRNA sense strand
aagagacaacacccaaaua

SEQ ID NO: 1850903 - RNA, 19 nt, Homo sapiens
  misc_RNA (1)...(19): siRNA sense strand
gugggaagccgggaagaaa

SEQ ID NO: 1850904 - RNA, 19 nt, Homo sapiens
  misc_RNA (1)...(19): siRNA sense strand
caacacgcagcaucacaug

SEQ ID NO: 1850905 - RNA, 19 nt, Homo sapiens
  misc_RNA (1)...(19): siRNA sense strand
ccacacagcccgguucaag

SEQ ID NO: 1850906 - RNA, 19 nt, Homo sapiens
  misc_RNA (1)...(19): siRNA sense strand
gagaccuuauuuccugaug

SEQ ID NO: 1850907 - RNA, 19 nt, Homo sapiens
  misc_RNA (1)...(19): siRNA sense strand
aaacaccaccacaggaaga

SEQ ID NO: 1850908 - RNA, 19 nt, Homo sapiens
  misc_RNA (1)...(19): siRNA sense strand
gaguuuaaagacagaaaga

SEQ ID NO: 1850909 - RNA, 19 nt, Homo sapiens
  misc_RNA (1)...(19): siRNA sense strand
gcugugggcugauauucac

SEQ ID NO: 1850910 - RNA, 19 nt, Homo sapiens
  misc_RNA (1)...(19): siRNA sense strand
caugggaaaugccaauugc

SEQ ID NO: 1850911 - RNA, 19 nt, Homo sapiens
  misc_RNA (1)...(19): siRNA sense strand
ucguaaggguggaaaggaa

SEQ ID NO: 1850912 - RNA, 19 nt, Homo sapiens
  misc_RNA (1)...(19): siRNA sense strand
gaagauagagagaaaaguc

SEQ ID NO: 1850913 - RNA, 19 nt, Homo sapiens
  misc_RNA (1)...(19): siRNA sense strand
gggagaugccgucauuaca

SEQ ID NO: 1850914 - RNA, 19 nt, Homo sapiens
  misc_RNA (1)...(19): siRNA sense strand
caauggcuccaaagaaauc

SEQ ID NO: 1850915 - RNA, 19 nt, Homo sapiens
  misc_RNA (1)...(19): siRNA sense strand
gaacggcgacaaaaccauu

SEQ ID NO: 1850916 - RNA, 19 nt, Homo sapiens
  misc_RNA (1)...(19): siRNA sense strand
cagcaucacaugggaaaug

SEQ ID NO: 1850917 - RNA, 19 nt, Homo sapiens
  misc_RNA (1)...(19): siRNA sense strand
ccgggaggguuaagaucaa

SEQ ID NO: 1850918 - RNA, 19 nt, Homo sapiens
  misc_RNA (1)...(19): siRNA sense strand
gcucagcaacgggcagaaa

SEQ ID NO: 1850919 - RNA, 19 nt, Homo sapiens
  misc_RNA (1)...(19): siRNA sense strand
ccacaggaagauagagaga

SEQ ID NO: 1850920 - RNA, 19 nt, Homo sapiens
  misc_RNA (1)...(19): siRNA sense strand
cacacacucuggcauugga

SEQ ID NO: 1850921 - RNA, 19 nt, Homo sapiens
  misc_RNA (1)...(19): siRNA sense strand
gaucaccagccuccaccaa

SEQ ID NO: 1850922 - RNA, 19 nt, Homo sapiens
  misc_RNA (1)...(19): siRNA sense strand
aaacuccgguggcagaaaa

SEQ ID NO: 1850923 - RNA, 19 nt, Homo sapiens
  misc_RNA (1)...(19): siRNA sense strand
gggcugccauggagaagac

SEQ ID NO: 1850924 - RNA, 19 nt, Homo sapiens
  misc_RNA (1)...(19): siRNA sense strand
ccugaugggacaaucguaa

SEQ ID NO: 1850925 - RNA, 19 nt, Homo sapiens
  misc_RNA (1)...(19): siRNA sense strand
ccaauggcuccaaagaaau

SEQ ID NO: 1850926 - RNA, 19 nt, Homo sapiens
  misc_RNA (1)...(19): siRNA sense strand
ugaagagacaacacccaaa

SEQ ID NO: 1850927 - RNA, 19 nt, Homo sapiens
  misc_RNA (1)...(19): siRNA sense strand
cgucaagacuguguauugc

SEQ ID NO: 1850928 - RNA, 19 nt, Homo sapiens
  misc_RNA (1)...(19): siRNA sense strand
caacgggcagaaagaaauc

SEQ ID NO: 1850929 - RNA, 19 nt, Homo sapiens
  misc_RNA (1)...(19): siRNA sense strand
cagcaacgggcagaaagaa

SEQ ID NO: 1850930 - RNA, 19 nt, Homo sapiens
  misc_RNA (1)...(19): siRNA sense strand
agagacaacacccaaauac

SEQ ID NO: 1850931 - RNA, 19 nt, Homo sapiens
  misc_RNA (1)...(19): siRNA sense strand
accaagagcucgggagaca

SEQ ID NO: 1850932 - RNA, 19 nt, Homo sapiens
  misc_RNA (1)...(19): siRNA sense strand
cuccaaagaaaucguguuu

SEQ ID NO: 1850933 - RNA, 19 nt, Homo sapiens
  misc_RNA (1)...(19): siRNA sense strand
aaucacacacucuggcauu

SEQ ID NO: 1850934 - RNA, 19 nt, Homo sapiens
  misc_RNA (1)...(19): siRNA sense strand
gugcagagcggcaggaaaa

SEQ ID NO: 1850935 - RNA, 19 nt, Homo sapiens
  misc_RNA (1)...(19): siRNA sense strand
gacucccggugcagaaaga

SEQ ID NO: 1850936 - RNA, 19 nt, Homo sapiens
  misc_RNA (1)...(19): siRNA sense strand
ccgucaagacuguguauug

SEQ ID NO: 1850937 - RNA, 19 nt, Homo sapiens
  misc_RNA (1)...(19): siRNA sense strand
ucaaggauggacaggaaga

SEQ ID NO: 1850938 - RNA, 19 nt, Homo sapiens
  misc_RNA (1)...(19): siRNA sense strand
gcugacgaguucgccaguu

SEQ ID NO: 1850939 - RNA, 19 nt, Homo sapiens
  misc_RNA (1)...(19): siRNA sense strand
ucugaaggcggauuucuca

SEQ ID NO: 1850940 - RNA, 19 nt, Homo sapiens
  misc_RNA (1)...(19): siRNA sense strand
ucaccucugucagcugaug

SEQ ID NO: 1850941 - RNA, 19 nt, Homo sapiens
  misc_RNA (1)...(19): siRNA sense strand
aaagaugaagcuggaaaug

SEQ ID NO: 1850942 - RNA, 19 nt, Homo sapiens
  misc_RNA (1)...(19): siRNA sense strand
gcaccgucaagacugugua

SEQ ID NO: 1850943 - RNA, 19 nt, Homo sapiens
  misc_RNA (1)...(19): siRNA sense strand
aagccaaugaguuuaaaga

SEQ ID NO: 1850944 - RNA, 19 nt, Homo sapiens
  misc_RNA (1)...(19): siRNA sense strand
ucacaugggaaaugccaau

SEQ ID NO: 1850945 - RNA, 19 nt, Homo sapiens
  misc_RNA (1)...(19): siRNA sense strand
cgggaggguuaagaucaaa

SEQ ID NO: 1850946 - RNA, 19 nt, Homo sapiens
  misc_RNA (1)...(19): siRNA sense strand
cugacgaguucgccaguuc

SEQ ID NO: 1850947 - RNA, 19 nt, Homo sapiens
  misc_RNA (1)...(19): siRNA sense strand
ucaucagucuuagggaguu

SEQ ID NO: 1850948 - RNA, 19 nt, Homo sapiens
  misc_RNA (1)...(19): siRNA sense strand
ccagaggagcugacagaag

SEQ ID NO: 1850949 - RNA, 19 nt, Homo sapiens
  misc_RNA (1)...(19): siRNA sense strand
ggagacgucaagacagaag

SEQ ID NO: 1850950 - RNA, 19 nt, Homo sapiens
  misc_RNA (1)...(19): siRNA sense strand
caggaagagaccuuauuuc

SEQ ID NO: 1850951 - RNA, 19 nt, Homo sapiens
  misc_RNA (1)...(19): siRNA sense strand
ggauggcaccgucaagacu

SEQ ID NO: 1850952 - RNA, 19 nt, Homo sapiens
  misc_RNA (1)...(19): siRNA sense strand
gagaagaaguugcuguuaa

SEQ ID NO: 1850953 - RNA, 19 nt, Homo sapiens
  misc_RNA (1)...(19): siRNA sense strand
gaauggaacuugcuguauu

SEQ ID NO: 1850954 - RNA, 19 nt, Homo sapiens
  misc_RNA (1)...(19): siRNA sense strand
ggaaauugcucgacgaugu

SEQ ID NO: 1850955 - RNA, 19 nt, Homo sapiens
  misc_RNA (1)...(19): siRNA sense strand
agaaguugcuguuaagaua

SEQ ID NO: 1850956 - RNA, 19 nt, Homo sapiens
  misc_RNA (1)...(19): siRNA sense strand
gaacuuccaacuacuguaa

SEQ ID NO: 1850957 - RNA, 19 nt, Homo sapiens
  misc_RNA (1)...(19): siRNA sense strand
caaacgugcugacaucuau

SEQ ID NO: 1850958 - RNA, 19 nt, Homo sapiens
  misc_RNA (1)...(19): siRNA sense strand
gcaaugggcuuaguauucu

SEQ ID NO: 1850959 - RNA, 19 nt, Homo sapiens
  misc_RNA (1)...(19): siRNA sense strand
guuaagauauucuccucua

SEQ ID NO: 1850960 - RNA, 19 nt, Homo sapiens
  misc_RNA (1)...(19): siRNA sense strand
cagcuaggcuuacagcauu

SEQ ID NO: 1850961 - RNA, 19 nt, Homo sapiens
  misc_RNA (1)...(19): siRNA sense strand
gcucgacgauguuccauug

SEQ ID NO: 1850962 - RNA, 19 nt, Homo sapiens
  misc_RNA (1)...(19): siRNA sense strand
ccacagauaccauugauau

SEQ ID NO: 1850963 - RNA, 19 nt, Homo sapiens
  misc_RNA (1)...(19): siRNA sense strand
ggagaaguuuggagaggaa

SEQ ID NO: 1850964 - RNA, 19 nt, Homo sapiens
  misc_RNA (1)...(19): siRNA sense strand
gagaagaacguucgugguu

SEQ ID NO: 1850965 - RNA, 19 nt, Homo sapiens
  misc_RNA (1)...(19): siRNA sense strand
ugcgagaacuauuguguua

SEQ ID NO: 1850966 - RNA, 19 nt, Homo sapiens
  misc_RNA (1)...(19): siRNA sense strand
gcaacucagucaacaggaa

SEQ ID NO: 1850967 - RNA, 19 nt, Homo sapiens
  misc_RNA (1)...(19): siRNA sense strand
ccaaauaucccaaacagau

SEQ ID NO: 1850968 - RNA, 19 nt, Homo sapiens
  misc_RNA (1)...(19): siRNA sense strand
gaccacagacaaaguuaua

SEQ ID NO: 1850969 - RNA, 19 nt, Homo sapiens
  misc_RNA (1)...(19): siRNA sense strand
gcagagauuuaucaaacug

SEQ ID NO: 1850970 - RNA, 19 nt, Homo sapiens
  misc_RNA (1)...(19): siRNA sense strand
aaauagaacuuccaacuac

SEQ ID NO: 1850971 - RNA, 19 nt, Homo sapiens
  misc_RNA (1)...(19): siRNA sense strand
cgagauaggccguuuguau

SEQ ID NO: 1850972 - RNA, 19 nt, Homo sapiens
  misc_RNA (1)...(19): siRNA sense strand
ugugaagccuugagaguaa

SEQ ID NO: 1850973 - RNA, 19 nt, Homo sapiens
  misc_RNA (1)...(19): siRNA sense strand
guacuacguugaaagacuu

SEQ ID NO: 1850974 - RNA, 19 nt, Homo sapiens
  misc_RNA (1)...(19): siRNA sense strand
ggagaagaaguugcuguua

SEQ ID NO: 1850975 - RNA, 19 nt, Homo sapiens
  misc_RNA (1)...(19): siRNA sense strand
ggaacuggcagcugucauu

SEQ ID NO: 1850976 - RNA, 19 nt, Homo sapiens
  misc_RNA (1)...(19): siRNA sense strand
cgacggcguuacaguguuu

SEQ ID NO: 1850977 - RNA, 19 nt, Homo sapiens
  misc_RNA (1)...(19): siRNA sense strand
gagauaggccguuuguaug

SEQ ID NO: 1850978 - RNA, 19 nt, Homo sapiens
  misc_RNA (1)...(19): siRNA sense strand
ccauugauauugcuccaaa

SEQ ID NO: 1850979 - RNA, 19 nt, Homo sapiens
  misc_RNA (1)...(19): siRNA sense strand
ggacucagcucugguuggu

SEQ ID NO: 1850980 - RNA, 19 nt, Homo sapiens
  misc_RNA (1)...(19): siRNA sense strand
auuaccaacugccuuauua

SEQ ID NO: 1850981 - RNA, 19 nt, Homo sapiens
  misc_RNA (1)...(19): siRNA sense strand
ucaggaccauugcaauaaa

SEQ ID NO: 1850982 - RNA, 19 nt, Homo sapiens
  misc_RNA (1)...(19): siRNA sense strand
gaaauugcucgacgauguu

SEQ ID NO: 1850983 - RNA, 19 nt, Homo sapiens
  misc_RNA (1)...(19): siRNA sense strand
cgagaacuauuguguuaca

SEQ ID NO: 1850984 - RNA, 19 nt, Homo sapiens
  misc_RNA (1)...(19): siRNA sense strand
caacuacuguaaagucauc

SEQ ID NO: 1850985 - RNA, 19 nt, Homo sapiens
  misc_RNA (1)...(19): siRNA sense strand
gacaauaaagacaauggua

SEQ ID NO: 1850986 - RNA, 19 nt, Homo sapiens
  misc_RNA (1)...(19): siRNA sense strand
gaaguuaaggccaaauauc

SEQ ID NO: 1850987 - RNA, 19 nt, Homo sapiens
  misc_RNA (1)...(19): siRNA sense strand
gagaaaaguuguuugugaa

SEQ ID NO: 1850988 - RNA, 19 nt, Homo sapiens
  misc_RNA (1)...(19): siRNA sense strand
ccaacugccuuauuaugau

SEQ ID NO: 1850989 - RNA, 19 nt, Homo sapiens
  misc_RNA (1)...(19): siRNA sense strand
ggucugugacuacaacaua

SEQ ID NO: 1850990 - RNA, 19 nt, Homo sapiens
  misc_RNA (1)...(19): siRNA sense strand
gaacaauugcgagaacuau

SEQ ID NO: 1850991 - RNA, 19 nt, Homo sapiens
  misc_RNA (1)...(19): siRNA sense strand
ucacagagaccacagacaa

SEQ ID NO: 1850992 - RNA, 19 nt, Homo sapiens
  misc_RNA (1)...(19): siRNA sense strand
uaaagaagaauggaacuug

SEQ ID NO: 1850993 - RNA, 19 nt, Homo sapiens
  misc_RNA (1)...(19): siRNA sense strand
cagacaaaguuauacacaa

SEQ ID NO: 1850994 - RNA, 19 nt, Homo sapiens
  misc_RNA (1)...(19): siRNA sense strand
ucaugaagauuaccaacug

SEQ ID NO: 1850995 - RNA, 19 nt, Homo sapiens
  misc_RNA (1)...(19): siRNA sense strand
gaugggcucugcuuugucu

SEQ ID NO: 1850996 - RNA, 19 nt, Homo sapiens
  misc_RNA (1)...(19): siRNA sense strand
agaagaaguugcuguuaag

SEQ ID NO: 1850997 - RNA, 19 nt, Homo sapiens
  misc_RNA (1)...(19): siRNA sense strand
uggcucagguuuaccauug

SEQ ID NO: 1850998 - RNA, 19 nt, Homo sapiens
  misc_RNA (1)...(19): siRNA sense strand
gaagaaaugagaaaaguug

SEQ ID NO: 1850999 - RNA, 19 nt, Homo sapiens
  misc_RNA (1)...(19): siRNA sense strand
gaaguugcuguuaagauau

SEQ ID NO: 1851000 - RNA, 19 nt, Homo sapiens
  misc_RNA (1)...(19): siRNA sense strand
ugacuuaauuccucgagau

SEQ ID NO: 1851001 - RNA, 19 nt, Homo sapiens
  misc_RNA (1)...(19): siRNA sense strand
ugagaaaaguuguuuguga

SEQ ID NO: 1851002 - RNA, 19 nt, Homo sapiens
  misc_RNA (1)...(19): siRNA sense strand
guggaauucaugaagauua

SEQ ID NO: 1851003 - RNA, 19 nt, Homo sapiens
  misc_RNA (1)...(19): siRNA sense strand
uauagcagcagacaauaaa

SEQ ID NO: 1851004 - RNA, 19 nt, Homo sapiens
  misc_RNA (1)...(19): siRNA sense strand
ucauguugauggucuauau

SEQ ID NO: 1851005 - RNA, 19 nt, Homo sapiens
  misc_RNA (1)...(19): siRNA sense strand
gcaucucacucauguugau

SEQ ID NO: 1851006 - RNA, 19 nt, Homo sapiens
  misc_RNA (1)...(19): siRNA sense strand
aaucaggaccauugcaaua

SEQ ID NO: 1851007 - RNA, 19 nt, Homo sapiens
  misc_RNA (1)...(19): siRNA sense strand
gcauguguauagcugaaau

SEQ ID NO: 1851008 - RNA, 19 nt, Homo sapiens
  misc_RNA (1)...(19): siRNA sense strand
cagcauugcggauuaagaa

SEQ ID NO: 1851009 - RNA, 19 nt, Homo sapiens
  misc_RNA (1)...(19): siRNA sense strand
gugcugacaucuaugcaau

SEQ ID NO: 1851010 - RNA, 19 nt, Homo sapiens
  misc_RNA (1)...(19): siRNA sense strand
aauggaacuugcuguauug

SEQ ID NO: 1851011 - RNA, 19 nt, Homo sapiens
  misc_RNA (1)...(19): siRNA sense strand
caagaaagcauuggcaaag

SEQ ID NO: 1851012 - RNA, 19 nt, Homo sapiens
  misc_RNA (1)...(19): siRNA sense strand
agaggacccuucauuagau

SEQ ID NO: 1851013 - RNA, 19 nt, Homo sapiens
  misc_RNA (1)...(19): siRNA sense strand
acagauaccauugauauug

SEQ ID NO: 1851014 - RNA, 19 nt, Homo sapiens
  misc_RNA (1)...(19): siRNA sense strand
cuuacagcauugcggauua

SEQ ID NO: 1851015 - RNA, 19 nt, Homo sapiens
  misc_RNA (1)...(19): siRNA sense strand
ggccaaauaucccaaacag

SEQ ID NO: 1851016 - RNA, 19 nt, Homo sapiens
  misc_RNA (1)...(19): siRNA sense strand
caacugccuuauuaugauc

SEQ ID NO: 1851017 - RNA, 19 nt, Homo sapiens
  misc_RNA (1)...(19): siRNA sense strand
guguauagcugaaauugac

SEQ ID NO: 1851018 - RNA, 19 nt, Homo sapiens
  misc_RNA (1)...(19): siRNA sense strand
agacaaaguuauacacaac

SEQ ID NO: 1851019 - RNA, 19 nt, Homo sapiens
  misc_RNA (1)...(19): siRNA sense strand
cagaaguuaaggccaaaua

SEQ ID NO: 1851020 - RNA, 19 nt, Homo sapiens
  misc_RNA (1)...(19): siRNA sense strand
gaacuggcagcugucauug

SEQ ID NO: 1851021 - RNA, 19 nt, Homo sapiens
  misc_RNA (1)...(19): siRNA sense strand
uuacagcauugcggauuaa

SEQ ID NO: 1851022 - RNA, 19 nt, Homo sapiens
  misc_RNA (1)...(19): siRNA sense strand
guacauggccccugaaguu

SEQ ID NO: 1851023 - RNA, 19 nt, Homo sapiens
  misc_RNA (1)...(19): siRNA sense strand
uaagauauucuccucuaga

SEQ ID NO: 1851024 - RNA, 19 nt, Homo sapiens
  misc_RNA (1)...(19): siRNA sense strand
gaagaaguugcuguuaaga

SEQ ID NO: 1851025 - RNA, 19 nt, Homo sapiens
  misc_RNA (1)...(19): siRNA sense strand
aggcagagauuuaucaaac

SEQ ID NO: 1851026 - RNA, 19 nt, Homo sapiens
  misc_RNA (1)...(19): siRNA sense strand
gagaccacagacaaaguua

SEQ ID NO: 1851027 - RNA, 19 nt, Homo sapiens
  misc_RNA (1)...(19): siRNA sense strand
gauaggccguuuguaugug

SEQ ID NO: 1851028 - RNA, 19 nt, Homo sapiens
  misc_RNA (1)...(19): siRNA sense strand
caaauaucccaaacagaug

SEQ ID NO: 1851029 - RNA, 19 nt, Homo sapiens
  misc_RNA (1)...(19): siRNA sense strand
aagauuaccaacugccuua

SEQ ID NO: 1851030 - RNA, 19 nt, Homo sapiens
  misc_RNA (1)...(19): siRNA sense strand
cucgaugauuccauaaaua

SEQ ID NO: 1851031 - RNA, 19 nt, Homo sapiens
  misc_RNA (1)...(19): siRNA sense strand
ggugucagauuaucaugag

SEQ ID NO: 1851032 - RNA, 19 nt, Homo sapiens
  misc_RNA (1)...(19): siRNA sense strand
gaaggaaugauaaaacuug

SEQ ID NO: 1851033 - RNA, 19 nt, Homo sapiens
  misc_RNA (1)...(19): siRNA sense strand
ucucgaugauuccauaaau

SEQ ID NO: 1851034 - RNA, 19 nt, Homo sapiens
  misc_RNA (1)...(19): siRNA sense strand
gacuuaauuccucgagaua

SEQ ID NO: 1851035 - RNA, 19 nt, Homo sapiens
  misc_RNA (1)...(19): siRNA sense strand
cuucaaacgugcugacauc

SEQ ID NO: 1851036 - RNA, 19 nt, Homo sapiens
  misc_RNA (1)...(19): siRNA sense strand
gguuuaccauugcuuguuc

SEQ ID NO: 1851037 - RNA, 19 nt, Homo sapiens
  misc_RNA (1)...(19): siRNA sense strand
aagaggacccuucauuaga

SEQ ID NO: 1851038 - RNA, 19 nt, Homo sapiens
  misc_RNA (1)...(19): siRNA sense strand
ccacaaccgcacugucauu

SEQ ID NO: 1851039 - RNA, 19 nt, Homo sapiens
  misc_RNA (1)...(19): siRNA sense strand
uuagaucgcccuuuuauuu

SEQ ID NO: 1851040 - RNA, 19 nt, Homo sapiens
  misc_RNA (1)...(19): siRNA sense strand
cccaucaguugaagaaaug

SEQ ID NO: 1851041 - RNA, 19 nt, Homo sapiens
  misc_RNA (1)...(19): siRNA sense strand
uuaguauucugggaaauug

SEQ ID NO: 1851042 - RNA, 19 nt, Homo sapiens
  misc_RNA (1)...(19): siRNA sense strand
gcugacaucuaugcaaugg

SEQ ID NO: 1851043 - RNA, 19 nt, Homo sapiens
  misc_RNA (1)...(19): siRNA sense strand
cugaaguucucgaugauuc

SEQ ID NO: 1851044 - RNA, 19 nt, Homo sapiens
  misc_RNA (1)...(19): siRNA sense strand
caaggaaagccagccauug

SEQ ID NO: 1851045 - RNA, 19 nt, Homo sapiens
  misc_RNA (1)...(19): siRNA sense strand
gggagaagaaguugcuguu

SEQ ID NO: 1851046 - RNA, 19 nt, Homo sapiens
  misc_RNA (1)...(19): siRNA sense strand
gguacuacguugaaagacu

SEQ ID NO: 1851047 - RNA, 19 nt, Homo sapiens
  misc_RNA (1)...(19): siRNA sense strand
cagcagacaauaaagacaa

SEQ ID NO: 1851048 - RNA, 19 nt, Homo sapiens
  misc_RNA (1)...(19): siRNA sense strand
uaugagagaauguugguau

SEQ ID NO: 1851049 - RNA, 19 nt, Homo sapiens
  misc_RNA (1)...(19): siRNA sense strand
ccaaggaaagccagccauu

SEQ ID NO: 1851050 - RNA, 19 nt, Homo sapiens
  misc_RNA (1)...(19): siRNA sense strand
agaaagcauuggcaaaggu

SEQ ID NO: 1851051 - RNA, 19 nt, Homo sapiens
  misc_RNA (1)...(19): siRNA sense strand
cagauaccauugauauugc

SEQ ID NO: 1851052 - RNA, 19 nt, Homo sapiens
  misc_RNA (1)...(19): siRNA sense strand
gaacauaccuuggaauuuu

SEQ ID NO: 1851053 - RNA, 19 nt, Homo sapiens
  misc_RNA (1)...(19): siRNA sense strand
gaacaugggcagugacuuu

SEQ ID NO: 1851054 - RNA, 19 nt, Homo sapiens
  misc_RNA (1)...(19): siRNA sense strand
ccgaggagcuggucuuaga

SEQ ID NO: 1851055 - RNA, 19 nt, Homo sapiens
  misc_RNA (1)...(19): siRNA sense strand
gaacagcaaccuucucauc

SEQ ID NO: 1851056 - RNA, 19 nt, Homo sapiens
  misc_RNA (1)...(19): siRNA sense strand
ugaacaaacuggccgagaa

SEQ ID NO: 1851057 - RNA, 19 nt, Homo sapiens
  misc_RNA (1)...(19): siRNA sense strand
gcaaccuucucaucgagua

SEQ ID NO: 1851058 - RNA, 19 nt, Homo sapiens
  misc_RNA (1)...(19): siRNA sense strand
caaguacgaugcgcccuuu

SEQ ID NO: 1851059 - RNA, 19 nt, Homo sapiens
  misc_RNA (1)...(19): siRNA sense strand
ggucaaugccgacguggua

SEQ ID NO: 1851060 - RNA, 19 nt, Homo sapiens
  misc_RNA (1)...(19): siRNA sense strand
gaagaugggauccuagaca

SEQ ID NO: 1851061 - RNA, 19 nt, Homo sapiens
  misc_RNA (1)...(19): siRNA sense strand
caacaccgcugaggaguac

SEQ ID NO: 1851062 - RNA, 19 nt, Homo sapiens
  misc_RNA (1)...(19): siRNA sense strand
gagacgagcgggaggauau

SEQ ID NO: 1851063 - RNA, 19 nt, Homo sapiens
  misc_RNA (1)...(19): siRNA sense strand
gcagugacuuugacgucuu

SEQ ID NO: 1851064 - RNA, 19 nt, Homo sapiens
  misc_RNA (1)...(19): siRNA sense strand
gaacaaacuggccgagaag

SEQ ID NO: 1851065 - RNA, 19 nt, Homo sapiens
  misc_RNA (1)...(19): siRNA sense strand
ccaaguaccugcucaaccu

SEQ ID NO: 1851066 - RNA, 19 nt, Homo sapiens
  misc_RNA (1)...(19): siRNA sense strand
caacuacgaggccagugua

SEQ ID NO: 1851067 - RNA, 19 nt, Homo sapiens
  misc_RNA (1)...(19): siRNA sense strand
guacuuccgcaaugaguuu

SEQ ID NO: 1851068 - RNA, 19 nt, Homo sapiens
  misc_RNA (1)...(19): siRNA sense strand
ucacccacaccuacaaaua

SEQ ID NO: 1851069 - RNA, 19 nt, Homo sapiens
  misc_RNA (1)...(19): siRNA sense strand
cggccaaguucaucaagaa

SEQ ID NO: 1851070 - RNA, 19 nt, Homo sapiens
  misc_RNA (1)...(19): siRNA sense strand
cgaaccaccugaacaaacu

SEQ ID NO: 1851071 - RNA, 19 nt, Homo sapiens
  misc_RNA (1)...(19): siRNA sense strand
uaccagggauccagcuuug

SEQ ID NO: 1851072 - RNA, 19 nt, Homo sapiens
  misc_RNA (1)...(19): siRNA sense strand
gugcugggccacuucauuu

SEQ ID NO: 1851073 - RNA, 19 nt, Homo sapiens
  misc_RNA (1)...(19): siRNA sense strand
aagaggagcggcaggagua

SEQ ID NO: 1851074 - RNA, 19 nt, Homo sapiens
  misc_RNA (1)...(19): siRNA sense strand
gggcgaaccaccugaacaa

SEQ ID NO: 1851075 - RNA, 19 nt, Homo sapiens
  misc_RNA (1)...(19): siRNA sense strand
cgaugggucugugcacaaa

SEQ ID NO: 1851076 - RNA, 19 nt, Homo sapiens
  misc_RNA (1)...(19): siRNA sense strand
cagcuacaaugggaucuug

SEQ ID NO: 1851077 - RNA, 19 nt, Homo sapiens
  misc_RNA (1)...(19): siRNA sense strand
aagaacauaccuuggaauu

SEQ ID NO: 1851078 - RNA, 19 nt, Homo sapiens
  misc_RNA (1)...(19): siRNA sense strand
ggcugacccugcacuuuga

SEQ ID NO: 1851079 - RNA, 19 nt, Homo sapiens
  misc_RNA (1)...(19): siRNA sense strand
gaugcgcccuuugucuuug

SEQ ID NO: 1851080 - RNA, 19 nt, Homo sapiens
  misc_RNA (1)...(19): siRNA sense strand
guuugaagaugggauccua

SEQ ID NO: 1851081 - RNA, 19 nt, Homo sapiens
  misc_RNA (1)...(19): siRNA sense strand
ggagagggaggccuucaca

SEQ ID NO: 1851082 - RNA, 19 nt, Homo sapiens
  misc_RNA (1)...(19): siRNA sense strand
cagugacuuugacgucuuu

SEQ ID NO: 1851083 - RNA, 19 nt, Homo sapiens
  misc_RNA (1)...(19): siRNA sense strand
gcaacuacgaggccagugu

SEQ ID NO: 1851084 - RNA, 19 nt, Homo sapiens
  misc_RNA (1)...(19): siRNA sense strand
acagcaaccuucucaucga

SEQ ID NO: 1851085 - RNA, 19 nt, Homo sapiens
  misc_RNA (1)...(19): siRNA sense strand
gaggagcuggucuuagaga

SEQ ID NO: 1851086 - RNA, 19 nt, Homo sapiens
  misc_RNA (1)...(19): siRNA sense strand
ucgaguacuuccgcaauga

SEQ ID NO: 1851087 - RNA, 19 nt, Homo sapiens
  misc_RNA (1)...(19): siRNA sense strand
ugaguggcauggucaacug

SEQ ID NO: 1851088 - RNA, 19 nt, Homo sapiens
  misc_RNA (1)...(19): siRNA sense strand
cgaugcgcccuuugucuuu

SEQ ID NO: 1851089 - RNA, 19 nt, Homo sapiens
  misc_RNA (1)...(19): siRNA sense strand
ugacgucuuugcccacauc

SEQ ID NO: 1851090 - RNA, 19 nt, Homo sapiens
  misc_RNA (1)...(19): siRNA sense strand
aagaugggauccuagacau

SEQ ID NO: 1851091 - RNA, 19 nt, Homo sapiens
  misc_RNA (1)...(19): siRNA sense strand
gauaucacccacaccuaca

SEQ ID NO: 1851092 - RNA, 19 nt, Homo sapiens
  misc_RNA (1)...(19): siRNA sense strand
ggagauccagggugacaag

SEQ ID NO: 1851093 - RNA, 19 nt, Homo sapiens
  misc_RNA (1)...(19): siRNA sense strand
uggcugacccugcacuuug

SEQ ID NO: 1851094 - RNA, 19 nt, Homo sapiens
  misc_RNA (1)...(19): siRNA sense strand
gcaccaaguaccugcucaa

SEQ ID NO: 1851095 - RNA, 19 nt, Homo sapiens
  misc_RNA (1)...(19): siRNA sense strand
gcaaugaguuuggggagau

SEQ ID NO: 1851096 - RNA, 19 nt, Homo sapiens
  misc_RNA (1)...(19): siRNA sense strand
agaacauaccuuggaauuu

SEQ ID NO: 1851097 - RNA, 19 nt, Homo sapiens
  misc_RNA (1)...(19): siRNA sense strand
ccagggauccagcuuugug

SEQ ID NO: 1851098 - RNA, 19 nt, Homo sapiens
  misc_RNA (1)...(19): siRNA sense strand
ggccgaggagcuggucuua

SEQ ID NO: 1851099 - RNA, 19 nt, Homo sapiens
  misc_RNA (1)...(19): siRNA sense strand
uggguggagucguggauga

SEQ ID NO: 1851100 - RNA, 19 nt, Homo sapiens
  misc_RNA (1)...(19): siRNA sense strand
caagggcgaaccaccugaa

SEQ ID NO: 1851101 - RNA, 19 nt, Homo sapiens
  misc_RNA (1)...(19): siRNA sense strand
uaccagggcucggccaagu

SEQ ID NO: 1851102 - RNA, 19 nt, Homo sapiens
  misc_RNA (1)...(19): siRNA sense strand
ugccugauccuucuagaug

SEQ ID NO: 1851103 - RNA, 19 nt, Homo sapiens
  misc_RNA (1)...(19): siRNA sense strand
gcccacaucaccaacaaca

SEQ ID NO: 1851104 - RNA, 19 nt, Homo sapiens
  misc_RNA (1)...(19): siRNA sense strand
gcgaaccaccugaacaaac

SEQ ID NO: 1851105 - RNA, 19 nt, Homo sapiens
  misc_RNA (1)...(19): siRNA sense strand
gagagggaggccuucacaa

SEQ ID NO: 1851106 - RNA, 19 nt, Homo sapiens
  misc_RNA (1)...(19): siRNA sense strand
ccgaguguggcaccaagua

SEQ ID NO: 1851107 - RNA, 19 nt, Homo sapiens
  misc_RNA (1)...(19): siRNA sense strand
cgaggccaguguagacagu

SEQ ID NO: 1851108 - RNA, 19 nt, Homo sapiens
  misc_RNA (1)...(19): siRNA sense strand
acaacaccgcugaggagua

SEQ ID NO: 1851109 - RNA, 19 nt, Homo sapiens
  misc_RNA (1)...(19): siRNA sense strand
gccugauccuucuagaugu

SEQ ID NO: 1851110 - RNA, 19 nt, Homo sapiens
  misc_RNA (1)...(19): siRNA sense strand
caaccuggagccuuucucu

SEQ ID NO: 1851111 - RNA, 19 nt, Homo sapiens
  misc_RNA (1)...(19): siRNA sense strand
guacgaugcgcccuuuguc

SEQ ID NO: 1851112 - RNA, 19 nt, Homo sapiens
  misc_RNA (1)...(19): siRNA sense strand
gccagcgcgucaaguaugg

SEQ ID NO: 1851113 - RNA, 19 nt, Homo sapiens
  misc_RNA (1)...(19): siRNA sense strand
gacgcugggacaacaacua

SEQ ID NO: 1851114 - RNA, 19 nt, Homo sapiens
  misc_RNA (1)...(19): siRNA sense strand
cuaccagggauccagcuuu

SEQ ID NO: 1851115 - RNA, 19 nt, Homo sapiens
  misc_RNA (1)...(19): siRNA sense strand
cgugugggccagagcauga

SEQ ID NO: 1851116 - RNA, 19 nt, Homo sapiens
  misc_RNA (1)...(19): siRNA sense strand
gaacauaccuuggaauuuu

SEQ ID NO: 1851117 - RNA, 19 nt, Homo sapiens
  misc_RNA (1)...(19): siRNA sense strand
gaacaugggcagugacuuu

SEQ ID NO: 1851118 - RNA, 19 nt, Homo sapiens
  misc_RNA (1)...(19): siRNA sense strand
ccgaggagcuggucuuaga

SEQ ID NO: 1851119 - RNA, 19 nt, Homo sapiens
  misc_RNA (1)...(19): siRNA sense strand
gaacagcaaccuucucauc

SEQ ID NO: 1851120 - RNA, 19 nt, Homo sapiens
  misc_RNA (1)...(19): siRNA sense strand
ugaacaaacuggccgagaa

SEQ ID NO: 1851121 - RNA, 19 nt, Homo sapiens
  misc_RNA (1)...(19): siRNA sense strand
gcaaccuucucaucgagua

SEQ ID NO: 1851122 - RNA, 19 nt, Homo sapiens
  misc_RNA (1)...(19): siRNA sense strand
caaguacgaugcgcccuuu

SEQ ID NO: 1851123 - RNA, 19 nt, Homo sapiens
  misc_RNA (1)...(19): siRNA sense strand
ggucaaugccgacguggua

SEQ ID NO: 1851124 - RNA, 19 nt, Homo sapiens
  misc_RNA (1)...(19): siRNA sense strand
gaagaugggauccuagaca

SEQ ID NO: 1851125 - RNA, 19 nt, Homo sapiens
  misc_RNA (1)...(19): siRNA sense strand
caacaccgcugaggaguac

SEQ ID NO: 1851126 - RNA, 19 nt, Homo sapiens
  misc_RNA (1)...(19): siRNA sense strand
gagacgagcgggaggauau

SEQ ID NO: 1851127 - RNA, 19 nt, Homo sapiens
  misc_RNA (1)...(19): siRNA sense strand
gcagugacuuugacgucuu

SEQ ID NO: 1851128 - RNA, 19 nt, Homo sapiens
  misc_RNA (1)...(19): siRNA sense strand
gaacaaacuggccgagaag

SEQ ID NO: 1851129 - RNA, 19 nt, Homo sapiens
  misc_RNA (1)...(19): siRNA sense strand
ccaaguaccugcucaaccu

SEQ ID NO: 1851130 - RNA, 19 nt, Homo sapiens
  misc_RNA (1)...(19): siRNA sense strand
caacuacgaggccagugua

SEQ ID NO: 1851131 - RNA, 19 nt, Homo sapiens
  misc_RNA (1)...(19): siRNA sense strand
guacuuccgcaaugaguuu

SEQ ID NO: 1851132 - RNA, 19 nt, Homo sapiens
  misc_RNA (1)...(19): siRNA sense strand
ucacccacaccuacaaaua

SEQ ID NO: 1851133 - RNA, 19 nt, Homo sapiens
  misc_RNA (1)...(19): siRNA sense strand
cggccaaguucaucaagaa

SEQ ID NO: 1851134 - RNA, 19 nt, Homo sapiens
  misc_RNA (1)...(19): siRNA sense strand
cgaaccaccugaacaaacu

SEQ ID NO: 1851135 - RNA, 19 nt, Homo sapiens
  misc_RNA (1)...(19): siRNA sense strand
uaccagggauccagcuuug

SEQ ID NO: 1851136 - RNA, 19 nt, Homo sapiens
  misc_RNA (1)...(19): siRNA sense strand
gugcugggccacuucauuu

SEQ ID NO: 1851137 - RNA, 19 nt, Homo sapiens
  misc_RNA (1)...(19): siRNA sense strand
aagaggagcggcaggagua

SEQ ID NO: 1851138 - RNA, 19 nt, Homo sapiens
  misc_RNA (1)...(19): siRNA sense strand
gggcgaaccaccugaacaa

SEQ ID NO: 1851139 - RNA, 19 nt, Homo sapiens
  misc_RNA (1)...(19): siRNA sense strand
cgaugggucugugcacaaa

SEQ ID NO: 1851140 - RNA, 19 nt, Homo sapiens
  misc_RNA (1)...(19): siRNA sense strand
cagcuacaaugggaucuug

SEQ ID NO: 1851141 - RNA, 19 nt, Homo sapiens
  misc_RNA (1)...(19): siRNA sense strand
aagaacauaccuuggaauu

SEQ ID NO: 1851142 - RNA, 19 nt, Homo sapiens
  misc_RNA (1)...(19): siRNA sense strand
ggcugacccugcacuuuga

SEQ ID NO: 1851143 - RNA, 19 nt, Homo sapiens
  misc_RNA (1)...(19): siRNA sense strand
gaugcgcccuuugucuuug

SEQ ID NO: 1851144 - RNA, 19 nt, Homo sapiens
  misc_RNA (1)...(19): siRNA sense strand
guuugaagaugggauccua

SEQ ID NO: 1851145 - RNA, 19 nt, Homo sapiens
  misc_RNA (1)...(19): siRNA sense strand
ggagagggaggccuucaca

SEQ ID NO: 1851146 - RNA, 19 nt, Homo sapiens
  misc_RNA (1)...(19): siRNA sense strand
cagugacuuugacgucuuu

SEQ ID NO: 1851147 - RNA, 19 nt, Homo sapiens
  misc_RNA (1)...(19): siRNA sense strand
gcaacuacgaggccagugu

SEQ ID NO: 1851148 - RNA, 19 nt, Homo sapiens
  misc_RNA (1)...(19): siRNA sense strand
acagcaaccuucucaucga

SEQ ID NO: 1851149 - RNA, 19 nt, Homo sapiens
  misc_RNA (1)...(19): siRNA sense strand
gaggagcuggucuuagaga

SEQ ID NO: 1851150 - RNA, 19 nt, Homo sapiens
  misc_RNA (1)...(19): siRNA sense strand
ucgaguacuuccgcaauga

SEQ ID NO: 1851151 - RNA, 19 nt, Homo sapiens
  misc_RNA (1)...(19): siRNA sense strand
ugaguggcauggucaacug

SEQ ID NO: 1851152 - RNA, 19 nt, Homo sapiens
  misc_RNA (1)...(19): siRNA sense strand
cgaugcgcccuuugucuuu

SEQ ID NO: 1851153 - RNA, 19 nt, Homo sapiens
  misc_RNA (1)...(19): siRNA sense strand
ugacgucuuugcccacauc

SEQ ID NO: 1851154 - RNA, 19 nt, Homo sapiens
  misc_RNA (1)...(19): siRNA sense strand
aagaugggauccuagacau

SEQ ID NO: 1851155 - RNA, 19 nt, Homo sapiens
  misc_RNA (1)...(19): siRNA sense strand
gauaucacccacaccuaca

SEQ ID NO: 1851156 - RNA, 19 nt, Homo sapiens
  misc_RNA (1)...(19): siRNA sense strand
ggagauccagggugacaag

SEQ ID NO: 1851157 - RNA, 19 nt, Homo sapiens
  misc_RNA (1)...(19): siRNA sense strand
uggcugacccugcacuuug

SEQ ID NO: 1851158 - RNA, 19 nt, Homo sapiens
  misc_RNA (1)...(19): siRNA sense strand
gcaccaaguaccugcucaa

SEQ ID NO: 1851159 - RNA, 19 nt, Homo sapiens
  misc_RNA (1)...(19): siRNA sense strand
gcaaugaguuuggggagau

SEQ ID NO: 1851160 - RNA, 19 nt, Homo sapiens
  misc_RNA (1)...(19): siRNA sense strand
agaacauaccuuggaauuu

SEQ ID NO: 1851161 - RNA, 19 nt, Homo sapiens
  misc_RNA (1)...(19): siRNA sense strand
ccagggauccagcuuugug

SEQ ID NO: 1851162 - RNA, 19 nt, Homo sapiens
  misc_RNA (1)...(19): siRNA sense strand
ggccgaggagcuggucuua

SEQ ID NO: 1851163 - RNA, 19 nt, Homo sapiens
  misc_RNA (1)...(19): siRNA sense strand
uggguggagucguggauga

SEQ ID NO: 1851164 - RNA, 19 nt, Homo sapiens
  misc_RNA (1)...(19): siRNA sense strand
caagggcgaaccaccugaa

SEQ ID NO: 1851165 - RNA, 19 nt, Homo sapiens
  misc_RNA (1)...(19): siRNA sense strand
uaccagggcucggccaagu

SEQ ID NO: 1851166 - RNA, 19 nt, Homo sapiens
  misc_RNA (1)...(19): siRNA sense strand
ugccugauccuucuagaug

SEQ ID NO: 1851167 - RNA, 19 nt, Homo sapiens
  misc_RNA (1)...(19): siRNA sense strand
gcccacaucaccaacaaca

SEQ ID NO: 1851168 - RNA, 19 nt, Homo sapiens
  misc_RNA (1)...(19): siRNA sense strand
gcgaaccaccugaacaaac

SEQ ID NO: 1851169 - RNA, 19 nt, Homo sapiens
  misc_RNA (1)...(19): siRNA sense strand
gagagggaggccuucacaa

SEQ ID NO: 1851170 - RNA, 19 nt, Homo sapiens
  misc_RNA (1)...(19): siRNA sense strand
ccgaguguggcaccaagua

SEQ ID NO: 1851171 - RNA, 19 nt, Homo sapiens
  misc_RNA (1)...(19): siRNA sense strand
cgaggccaguguagacagu

SEQ ID NO: 1851172 - RNA, 19 nt, Homo sapiens
  misc_RNA (1)...(19): siRNA sense strand
acaacaccgcugaggagua

SEQ ID NO: 1851173 - RNA, 19 nt, Homo sapiens
  misc_RNA (1)...(19): siRNA sense strand
gccugauccuucuagaugu

SEQ ID NO: 1851174 - RNA, 19 nt, Homo sapiens
  misc_RNA (1)...(19): siRNA sense strand
caaccuggagccuuucucu

SEQ ID NO: 1851175 - RNA, 19 nt, Homo sapiens
  misc_RNA (1)...(19): siRNA sense strand
guacgaugcgcccuuuguc

SEQ ID NO: 1851176 - RNA, 19 nt, Homo sapiens
  misc_RNA (1)...(19): siRNA sense strand
gccagcgcgucaaguaugg

SEQ ID NO: 1851177 - RNA, 19 nt, Homo sapiens
  misc_RNA (1)...(19): siRNA sense strand
gacgcugggacaacaacua

SEQ ID NO: 1851178 - RNA, 19 nt, Homo sapiens
  misc_RNA (1)...(19): siRNA sense strand
cuaccagggauccagcuuu

SEQ ID NO: 1851179 - RNA, 19 nt, Homo sapiens
  misc_RNA (1)...(19): siRNA sense strand
cgugugggccagagcauga

SEQ ID NO: 1851180 - RNA, 19 nt, Homo sapiens
  misc_RNA (1)...(19): siRNA sense strand
gaacaaagaccauuccuua

SEQ ID NO: 1851181 - RNA, 19 nt, Homo sapiens
  misc_RNA (1)...(19): siRNA sense strand
gaaggaagaugguauggaa

SEQ ID NO: 1851182 - RNA, 19 nt, Homo sapiens
  misc_RNA (1)...(19): siRNA sense strand
ugaaugagcugcagcauga

SEQ ID NO: 1851183 - RNA, 19 nt, Homo sapiens
  misc_RNA (1)...(19): siRNA sense strand
caaagaccauuccuuagaa

SEQ ID NO: 1851184 - RNA, 19 nt, Homo sapiens
  misc_RNA (1)...(19): siRNA sense strand
caagaugucuacuuuguau

SEQ ID NO: 1851185 - RNA, 19 nt, Homo sapiens
  misc_RNA (1)...(19): siRNA sense strand
uaaacaagauggacagcua

SEQ ID NO: 1851186 - RNA, 19 nt, Homo sapiens
  misc_RNA (1)...(19): siRNA sense strand
ggacuuggcuaugaacuau

SEQ ID NO: 1851187 - RNA, 19 nt, Homo sapiens
  misc_RNA (1)...(19): siRNA sense strand
aaacaggaaugucuuauca

SEQ ID NO: 1851188 - RNA, 19 nt, Homo sapiens
  misc_RNA (1)...(19): siRNA sense strand
gcuaugaacuauaaacaug

SEQ ID NO: 1851189 - RNA, 19 nt, Homo sapiens
  misc_RNA (1)...(19): siRNA sense strand
gaagaugucuccaacuuuu

SEQ ID NO: 1851190 - RNA, 19 nt, Homo sapiens
  misc_RNA (1)...(19): siRNA sense strand
gagaagaugagagaauuua

SEQ ID NO: 1851191 - RNA, 19 nt, Homo sapiens
  misc_RNA (1)...(19): siRNA sense strand
caacagagaacaauugaau

SEQ ID NO: 1851192 - RNA, 19 nt, Homo sapiens
  misc_RNA (1)...(19): siRNA sense strand
gaagaaacucagaauuuga

SEQ ID NO: 1851193 - RNA, 19 nt, Homo sapiens
  misc_RNA (1)...(19): siRNA sense strand
ggaguuuggucuauguaaa

SEQ ID NO: 1851194 - RNA, 19 nt, Homo sapiens
  misc_RNA (1)...(19): siRNA sense strand
agaagaaacucagaauuug

SEQ ID NO: 1851195 - RNA, 19 nt, Homo sapiens
  misc_RNA (1)...(19): siRNA sense strand
gaaauuggcuuggcuucuc

SEQ ID NO: 1851196 - RNA, 19 nt, Homo sapiens
  misc_RNA (1)...(19): siRNA sense strand
gguuuagccuuucgaguuu

SEQ ID NO: 1851197 - RNA, 19 nt, Homo sapiens
  misc_RNA (1)...(19): siRNA sense strand
gaugagagaauuuaccaaa

SEQ ID NO: 1851198 - RNA, 19 nt, Homo sapiens
  misc_RNA (1)...(19): siRNA sense strand
gaaagacaccaagagcaua

SEQ ID NO: 1851199 - RNA, 19 nt, Homo sapiens
  misc_RNA (1)...(19): siRNA sense strand
guaaacgucgaaaguauuu

SEQ ID NO: 1851200 - RNA, 19 nt, Homo sapiens
  misc_RNA (1)...(19): siRNA sense strand
gcaggaagccgaguaucua

SEQ ID NO: 1851201 - RNA, 19 nt, Homo sapiens
  misc_RNA (1)...(19): siRNA sense strand
gggaagagcaagucucauu

SEQ ID NO: 1851202 - RNA, 19 nt, Homo sapiens
  misc_RNA (1)...(19): siRNA sense strand
caaaggagaagaugagaga

SEQ ID NO: 1851203 - RNA, 19 nt, Homo sapiens
  misc_RNA (1)...(19): siRNA sense strand
ggaagagcaagucucauuu

SEQ ID NO: 1851204 - RNA, 19 nt, Homo sapiens
  misc_RNA (1)...(19): siRNA sense strand
gcugaagucucauaccaau

SEQ ID NO: 1851205 - RNA, 19 nt, Homo sapiens
  misc_RNA (1)...(19): siRNA sense strand
cauuuggagugaaguauaa

SEQ ID NO: 1851206 - RNA, 19 nt, Homo sapiens
  misc_RNA (1)...(19): siRNA sense strand
ccagauaccugccaugaac

SEQ ID NO: 1851207 - RNA, 19 nt, Homo sapiens
  misc_RNA (1)...(19): siRNA sense strand
ggaagaugucuccaacuuu

SEQ ID NO: 1851208 - RNA, 19 nt, Homo sapiens
  misc_RNA (1)...(19): siRNA sense strand
uaccugccaugaacucuua

SEQ ID NO: 1851209 - RNA, 19 nt, Homo sapiens
  misc_RNA (1)...(19): siRNA sense strand
ucacugcacucaauaugug

SEQ ID NO: 1851210 - RNA, 19 nt, Homo sapiens
  misc_RNA (1)...(19): siRNA sense strand
gaacucaaacaugcacuuu

SEQ ID NO: 1851211 - RNA, 19 nt, Homo sapiens
  misc_RNA (1)...(19): siRNA sense strand
aaacuuaccuuugcuuucu

SEQ ID NO: 1851212 - RNA, 19 nt, Homo sapiens
  misc_RNA (1)...(19): siRNA sense strand
ccaauguucucucugugaa

SEQ ID NO: 1851213 - RNA, 19 nt, Homo sapiens
  misc_RNA (1)...(19): siRNA sense strand
ggagugaaguauaauccau

SEQ ID NO: 1851214 - RNA, 19 nt, Homo sapiens
  misc_RNA (1)...(19): siRNA sense strand
uaaaagagcguacagguuu

SEQ ID NO: 1851215 - RNA, 19 nt, Homo sapiens
  misc_RNA (1)...(19): siRNA sense strand
ucacugaagaggagauuaa

SEQ ID NO: 1851216 - RNA, 19 nt, Homo sapiens
  misc_RNA (1)...(19): siRNA sense strand
acaaagaccauuccuuaga

SEQ ID NO: 1851217 - RNA, 19 nt, Homo sapiens
  misc_RNA (1)...(19): siRNA sense strand
ggagaagaugagagaauuu

SEQ ID NO: 1851218 - RNA, 19 nt, Homo sapiens
  misc_RNA (1)...(19): siRNA sense strand
acaauaaggagaacaaaga

SEQ ID NO: 1851219 - RNA, 19 nt, Homo sapiens
  misc_RNA (1)...(19): siRNA sense strand
acagagaacaauugaauga

SEQ ID NO: 1851220 - RNA, 19 nt, Homo sapiens
  misc_RNA (1)...(19): siRNA sense strand
gcagcaugaucucgauguu

SEQ ID NO: 1851221 - RNA, 19 nt, Homo sapiens
  misc_RNA (1)...(19): siRNA sense strand
uccaagagcucaacaaacu

SEQ ID NO: 1851222 - RNA, 19 nt, Homo sapiens
  misc_RNA (1)...(19): siRNA sense strand
uuucugaccuggaccauug

SEQ ID NO: 1851223 - RNA, 19 nt, Homo sapiens
  misc_RNA (1)...(19): siRNA sense strand
aaagaccauuccuuagaaa

SEQ ID NO: 1851224 - RNA, 19 nt, Homo sapiens
  misc_RNA (1)...(19): siRNA sense strand
cauccuggcuucaaagaca

SEQ ID NO: 1851225 - RNA, 19 nt, Homo sapiens
  misc_RNA (1)...(19): siRNA sense strand
ggaccauugugccaacaga

SEQ ID NO: 1851226 - RNA, 19 nt, Homo sapiens
  misc_RNA (1)...(19): siRNA sense strand
uaaaagcccugaaaaucuu

SEQ ID NO: 1851227 - RNA, 19 nt, Homo sapiens
  misc_RNA (1)...(19): siRNA sense strand
ggugcuggcuuacuuucuu

SEQ ID NO: 1851228 - RNA, 19 nt, Homo sapiens
  misc_RNA (1)...(19): siRNA sense strand
uccuguggcugguuacuua

SEQ ID NO: 1851229 - RNA, 19 nt, Homo sapiens
  misc_RNA (1)...(19): siRNA sense strand
gcccuuugaucccaagauu

SEQ ID NO: 1851230 - RNA, 19 nt, Homo sapiens
  misc_RNA (1)...(19): siRNA sense strand
acaauuaagcguccauuug

SEQ ID NO: 1851231 - RNA, 19 nt, Homo sapiens
  misc_RNA (1)...(19): siRNA sense strand
caucaacagagaacaauug

SEQ ID NO: 1851232 - RNA, 19 nt, Homo sapiens
  misc_RNA (1)...(19): siRNA sense strand
uaaccagugccaugaauga

SEQ ID NO: 1851233 - RNA, 19 nt, Homo sapiens
  misc_RNA (1)...(19): siRNA sense strand
gagugaaguauaauccaua

SEQ ID NO: 1851234 - RNA, 19 nt, Homo sapiens
  misc_RNA (1)...(19): siRNA sense strand
gaagucucauaccaauguu

SEQ ID NO: 1851235 - RNA, 19 nt, Homo sapiens
  misc_RNA (1)...(19): siRNA sense strand
aaagacaccaagagcauaa

SEQ ID NO: 1851236 - RNA, 19 nt, Homo sapiens
  misc_RNA (1)...(19): siRNA sense strand
ccguaaacgucgaaaguau

SEQ ID NO: 1851237 - RNA, 19 nt, Homo sapiens
  misc_RNA (1)...(19): siRNA sense strand
gugaaucuguuacauaucg

SEQ ID NO: 1851238 - RNA, 19 nt, Homo sapiens
  misc_RNA (1)...(19): siRNA sense strand
ugaacuagaugcagaccau

SEQ ID NO: 1851239 - RNA, 19 nt, Homo sapiens
  misc_RNA (1)...(19): siRNA sense strand
ggagaagcaugugaaucug

SEQ ID NO: 1851240 - RNA, 19 nt, Homo sapiens
  misc_RNA (1)...(19): siRNA sense strand
cauaaccagugccaugaau

SEQ ID NO: 1851241 - RNA, 19 nt, Homo sapiens
  misc_RNA (1)...(19): siRNA sense strand
acaggaaugucuuaucaca

SEQ ID NO: 1851242 - RNA, 19 nt, Homo sapiens
  misc_RNA (1)...(19): siRNA sense strand
agaagcaugugaaucuguu

SEQ ID NO: 1851243 - RNA, 19 nt, Homo sapiens
  misc_RNA (1)...(19): siRNA sense strand
gaagcaugugaaucuguua

SEQ ID NO: 1851244 - RNA, 19 nt, Homo sapiens
  misc_RNA (1)...(19): siRNA sense strand
caauuaagcguccauuugg

SEQ ID NO: 1851245 - RNA, 19 nt, Homo sapiens
  misc_RNA (1)...(19): siRNA sense strand
aggagaagaugagagaauu

SEQ ID NO: 1851246 - RNA, 19 nt, Homo sapiens
  misc_RNA (1)...(19): siRNA sense strand
ugaagucucauaccaaugu

SEQ ID NO: 1851247 - RNA, 19 nt, Homo sapiens
  misc_RNA (1)...(19): siRNA sense strand
uaauaucccacaauuggaa

SEQ ID NO: 1851248 - RNA, 19 nt, Homo sapiens
  misc_RNA (1)...(19): siRNA sense strand
ucagugaugcccuugcuaa

SEQ ID NO: 1851249 - RNA, 19 nt, Homo sapiens
  misc_RNA (1)...(19): siRNA sense strand
agucuuuggugcuggcuua

SEQ ID NO: 1851250 - RNA, 19 nt, Homo sapiens
  misc_RNA (1)...(19): siRNA sense strand
gaagagcaagucucauuuu

SEQ ID NO: 1851251 - RNA, 19 nt, Homo sapiens
  misc_RNA (1)...(19): siRNA sense strand
agaccauccuggcuucaaa

SEQ ID NO: 1851252 - RNA, 19 nt, Homo sapiens
  misc_RNA (1)...(19): siRNA sense strand
gauguauggaucugaacua

SEQ ID NO: 1851253 - RNA, 19 nt, Homo sapiens
  misc_RNA (1)...(19): siRNA sense strand
gcaaacaggaaugucuuau

SEQ ID NO: 1851254 - RNA, 19 nt, Homo sapiens
  misc_RNA (1)...(19): siRNA sense strand
cuuaaagaaugaaguugga

SEQ ID NO: 1851255 - RNA, 19 nt, Homo sapiens
  misc_RNA (1)...(19): siRNA sense strand
aaacaagauggacagcuaa

SEQ ID NO: 1851256 - RNA, 19 nt, Homo sapiens
  misc_RNA (1)...(19): siRNA sense strand
ucaagaugucuacuuugua

SEQ ID NO: 1851257 - RNA, 19 nt, Homo sapiens
  misc_RNA (1)...(19): siRNA sense strand
aagaugguauggaaacugu

SEQ ID NO: 1851258 - RNA, 19 nt, Homo sapiens
  misc_RNA (1)...(19): siRNA sense strand
ccauuuggagugaaguaua

SEQ ID NO: 1851259 - RNA, 19 nt, Homo sapiens
  misc_RNA (1)...(19): siRNA sense strand
acucaaacaugcacuuucu

SEQ ID NO: 1851260 - RNA, 19 nt, Homo sapiens
  misc_RNA (1)...(19): siRNA sense strand
acuuggcuaugaacuauaa

SEQ ID NO: 1851261 - RNA, 19 nt, Homo sapiens
  misc_RNA (1)...(19): siRNA sense strand
auaccaauguucucucugu

SEQ ID NO: 1851262 - RNA, 19 nt, Homo sapiens
  misc_RNA (1)...(19): siRNA sense strand
ggaagaugguauggaaacu

SEQ ID NO: 1851263 - RNA, 19 nt, Homo sapiens
  misc_RNA (1)...(19): siRNA sense strand
caggaagccgaguaucuaa

SEQ ID NO: 1851264 - RNA, 19 nt, Homo sapiens
  misc_RNA (1)...(19): siRNA sense strand
gcauaaccagugccaugaa

SEQ ID NO: 1851265 - RNA, 19 nt, Homo sapiens
  misc_RNA (1)...(19): siRNA sense strand
ugaaagacaccaagagcau

SEQ ID NO: 1851266 - RNA, 19 nt, Homo sapiens
  misc_RNA (1)...(19): siRNA sense strand
caagauggacagcuaagag

SEQ ID NO: 1851267 - RNA, 19 nt, Homo sapiens
  misc_RNA (1)...(19): siRNA sense strand
ugacaucaacagagaacaa

SEQ ID NO: 1851268 - RNA, 19 nt, Homo sapiens
  misc_RNA (1)...(19): siRNA sense strand
gaagaugguauggaaacug

SEQ ID NO: 1851269 - RNA, 19 nt, Homo sapiens
  misc_RNA (1)...(19): siRNA sense strand
gagaagcaugugaaucugu

SEQ ID NO: 1851270 - RNA, 19 nt, Homo sapiens
  misc_RNA (1)...(19): siRNA sense strand
uucaagaugucuacuuugu

SEQ ID NO: 1851271 - RNA, 19 nt, Homo sapiens
  misc_RNA (1)...(19): siRNA sense strand
aggaaugucuuaucacaac

SEQ ID NO: 1851272 - RNA, 19 nt, Homo sapiens
  misc_RNA (1)...(19): siRNA sense strand
caaacaggaaugucuuauc

SEQ ID NO: 1851273 - RNA, 19 nt, Homo sapiens
  misc_RNA (1)...(19): siRNA sense strand
cguaaacgucgaaaguauu

SEQ ID NO: 1851274 - RNA, 19 nt, Homo sapiens
  misc_RNA (1)...(19): siRNA sense strand
gaaugucuuaucacaacuu

SEQ ID NO: 1851275 - RNA, 19 nt, Homo sapiens
  misc_RNA (1)...(19): siRNA sense strand
ucugauguauggaucugaa

SEQ ID NO: 1851276 - RNA, 19 nt, Homo sapiens
  misc_RNA (1)...(19): siRNA sense strand
gaagaugcaaaggagaaga

SEQ ID NO: 1851277 - RNA, 19 nt, Homo sapiens
  misc_RNA (1)...(19): siRNA sense strand
uuacuuaucaccaagagau

SEQ ID NO: 1851278 - RNA, 19 nt, Homo sapiens
  misc_RNA (1)...(19): siRNA sense strand
caagauuaccugcaaacag

SEQ ID NO: 1851279 - RNA, 19 nt, Homo sapiens
  misc_RNA (1)...(19): siRNA sense strand
agcaugaucucgauguugu

SEQ ID NO: 1851280 - RNA, 19 nt, Homo sapiens
  misc_RNA (1)...(19): siRNA sense strand
gcaaauagaugccaaagag

SEQ ID NO: 1851281 - RNA, 19 nt, Homo sapiens
  misc_RNA (1)...(19): siRNA sense strand
ggagaaagguguaccagau

SEQ ID NO: 1851282 - RNA, 19 nt, Homo sapiens
  misc_RNA (1)...(19): siRNA sense strand
caugaggacuccagguuua

SEQ ID NO: 1851283 - RNA, 19 nt, Homo sapiens
  misc_RNA (1)...(19): siRNA sense strand
gggcaaugauuacuuuaaa

SEQ ID NO: 1851284 - RNA, 19 nt, Homo sapiens
  misc_RNA (1)...(19): siRNA sense strand
gaggaaagccaacuugaaa

SEQ ID NO: 1851285 - RNA, 19 nt, Homo sapiens
  misc_RNA (1)...(19): siRNA sense strand
gaacaggccaagaccuaua

SEQ ID NO: 1851286 - RNA, 19 nt, Homo sapiens
  misc_RNA (1)...(19): siRNA sense strand
caccagagguacuuuguaa

SEQ ID NO: 1851287 - RNA, 19 nt, Homo sapiens
  misc_RNA (1)...(19): siRNA sense strand
gccaagaccuauaaagaug

SEQ ID NO: 1851288 - RNA, 19 nt, Homo sapiens
  misc_RNA (1)...(19): siRNA sense strand
ggacagggcagaacuauac

SEQ ID NO: 1851289 - RNA, 19 nt, Homo sapiens
  misc_RNA (1)...(19): siRNA sense strand
ggaaucagaaugaggcuuu

SEQ ID NO: 1851290 - RNA, 19 nt, Homo sapiens
  misc_RNA (1)...(19): siRNA sense strand
gagaaagguguaccagaua

SEQ ID NO: 1851291 - RNA, 19 nt, Homo sapiens
  misc_RNA (1)...(19): siRNA sense strand
ggaaagccaacuugaaaga

SEQ ID NO: 1851292 - RNA, 19 nt, Homo sapiens
  misc_RNA (1)...(19): siRNA sense strand
ugagggcaaugauuacuuu

SEQ ID NO: 1851293 - RNA, 19 nt, Homo sapiens
  misc_RNA (1)...(19): siRNA sense strand
gaaucagaaugaggcuuua

SEQ ID NO: 1851294 - RNA, 19 nt, Homo sapiens
  misc_RNA (1)...(19): siRNA sense strand
aaagccaacuugaaagaaa

SEQ ID NO: 1851295 - RNA, 19 nt, Homo sapiens
  misc_RNA (1)...(19): siRNA sense strand
gaagaaaugugcagauccu

SEQ ID NO: 1851296 - RNA, 19 nt, Homo sapiens
  misc_RNA (1)...(19): siRNA sense strand
cagacaagcugaagcgaau

SEQ ID NO: 1851297 - RNA, 19 nt, Homo sapiens
  misc_RNA (1)...(19): siRNA sense strand
aagaugagggcaaugauua

SEQ ID NO: 1851298 - RNA, 19 nt, Homo sapiens
  misc_RNA (1)...(19): siRNA sense strand
gugcagauccugauuugaa

SEQ ID NO: 1851299 - RNA, 19 nt, Homo sapiens
  misc_RNA (1)...(19): siRNA sense strand
ccucaaagcaauaauaaga

SEQ ID NO: 1851300 - RNA, 19 nt, Homo sapiens
  misc_RNA (1)...(19): siRNA sense strand
gaugagggacugcaaauag

SEQ ID NO: 1851301 - RNA, 19 nt, Homo sapiens
  misc_RNA (1)...(19): siRNA sense strand
guucugcucucaaugaugu

SEQ ID NO: 1851302 - RNA, 19 nt, Homo sapiens
  misc_RNA (1)...(19): siRNA sense strand
acugaaggcuuaaagaaga

SEQ ID NO: 1851303 - RNA, 19 nt, Homo sapiens
  misc_RNA (1)...(19): siRNA sense strand
ggccugugcucuuucugua

SEQ ID NO: 1851304 - RNA, 19 nt, Homo sapiens
  misc_RNA (1)...(19): siRNA sense strand
ugaaugcuguccuuuauac

SEQ ID NO: 1851305 - RNA, 19 nt, Homo sapiens
  misc_RNA (1)...(19): siRNA sense strand
gcuugucuccagucaauua

SEQ ID NO: 1851306 - RNA, 19 nt, Homo sapiens
  misc_RNA (1)...(19): siRNA sense strand
gccgugaacuggugugaug

SEQ ID NO: 1851307 - RNA, 19 nt, Homo sapiens
  misc_RNA (1)...(19): siRNA sense strand
gacgagagcgccaucagaa

SEQ ID NO: 1851308 - RNA, 19 nt, Homo sapiens
  misc_RNA (1)...(19): siRNA sense strand
gaaagccaacuugaaagaa

SEQ ID NO: 1851309 - RNA, 19 nt, Homo sapiens
  misc_RNA (1)...(19): siRNA sense strand
ugucuccagucaauuauuu

SEQ ID NO: 1851310 - RNA, 19 nt, Homo sapiens
  misc_RNA (1)...(19): siRNA sense strand
aguacuaucugggcaauuu

SEQ ID NO: 1851311 - RNA, 19 nt, Homo sapiens
  misc_RNA (1)...(19): siRNA sense strand
ccaccucaaagcaauaaua

SEQ ID NO: 1851312 - RNA, 19 nt, Homo sapiens
  misc_RNA (1)...(19): siRNA sense strand
gagagcgccaucagaaauu

SEQ ID NO: 1851313 - RNA, 19 nt, Homo sapiens
  misc_RNA (1)...(19): siRNA sense strand
gaauaucaggcucucagaa

SEQ ID NO: 1851314 - RNA, 19 nt, Homo sapiens
  misc_RNA (1)...(19): siRNA sense strand
gaaaugugcagauccugau

SEQ ID NO: 1851315 - RNA, 19 nt, Homo sapiens
  misc_RNA (1)...(19): siRNA sense strand
caucaaggcuaggaauauc

SEQ ID NO: 1851316 - RNA, 19 nt, Homo sapiens
  misc_RNA (1)...(19): siRNA sense strand
ggaaaugagggcuaaagca

SEQ ID NO: 1851317 - RNA, 19 nt, Homo sapiens
  misc_RNA (1)...(19): siRNA sense strand
gcaccagagguacuuugua

SEQ ID NO: 1851318 - RNA, 19 nt, Homo sapiens
  misc_RNA (1)...(19): siRNA sense strand
uaauuuggaggucuacuuu

SEQ ID NO: 1851319 - RNA, 19 nt, Homo sapiens
  misc_RNA (1)...(19): siRNA sense strand
ggccaagaccuauaaagau

SEQ ID NO: 1851320 - RNA, 19 nt, Homo sapiens
  misc_RNA (1)...(19): siRNA sense strand
aaauagaugccaaagagaa

SEQ ID NO: 1851321 - RNA, 19 nt, Homo sapiens
  misc_RNA (1)...(19): siRNA sense strand
gaauugaacagagggaugu

SEQ ID NO: 1851322 - RNA, 19 nt, Homo sapiens
  misc_RNA (1)...(19): siRNA sense strand
auauugcccugauaauuug

SEQ ID NO: 1851323 - RNA, 19 nt, Homo sapiens
  misc_RNA (1)...(19): siRNA sense strand
cgagagcgccaucagaaau

SEQ ID NO: 1851324 - RNA, 19 nt, Homo sapiens
  misc_RNA (1)...(19): siRNA sense strand
ggagaggaaucagaaugag

SEQ ID NO: 1851325 - RNA, 19 nt, Homo sapiens
  misc_RNA (1)...(19): siRNA sense strand
acacugaaggcuuaaagaa

SEQ ID NO: 1851326 - RNA, 19 nt, Homo sapiens
  misc_RNA (1)...(19): siRNA sense strand
agaaggagaggaaucagaa

SEQ ID NO: 1851327 - RNA, 19 nt, Homo sapiens
  misc_RNA (1)...(19): siRNA sense strand
acagagggaugugaggaaa

SEQ ID NO: 1851328 - RNA, 19 nt, Homo sapiens
  misc_RNA (1)...(19): siRNA sense strand
uuugaaugcuguccuuuau

SEQ ID NO: 1851329 - RNA, 19 nt, Homo sapiens
  misc_RNA (1)...(19): siRNA sense strand
ugugacagcugccagaaag

SEQ ID NO: 1851330 - RNA, 19 nt, Homo sapiens
  misc_RNA (1)...(19): siRNA sense strand
uggcuugucuccagucaau

SEQ ID NO: 1851331 - RNA, 19 nt, Homo sapiens
  misc_RNA (1)...(19): siRNA sense strand
caccucaaagcaauaauaa

SEQ ID NO: 1851332 - RNA, 19 nt, Homo sapiens
  misc_RNA (1)...(19): siRNA sense strand
ggcaaugauuacuuuaaag

SEQ ID NO: 1851333 - RNA, 19 nt, Homo sapiens
  misc_RNA (1)...(19): siRNA sense strand
gaaggucuaggugagcuuu

SEQ ID NO: 1851334 - RNA, 19 nt, Homo sapiens
  misc_RNA (1)...(19): siRNA sense strand
ggcaggaucccaccucaga

SEQ ID NO: 1851335 - RNA, 19 nt, Homo sapiens
  misc_RNA (1)...(19): siRNA sense strand
cuauaaagaugagggcaau

SEQ ID NO: 1851336 - RNA, 19 nt, Homo sapiens
  misc_RNA (1)...(19): siRNA sense strand
gggcagcagcacaguacua

SEQ ID NO: 1851337 - RNA, 19 nt, Homo sapiens
  misc_RNA (1)...(19): siRNA sense strand
aagaagaaaugugcagauc

SEQ ID NO: 1851338 - RNA, 19 nt, Homo sapiens
  misc_RNA (1)...(19): siRNA sense strand
aaagaugagggcaaugauu

SEQ ID NO: 1851339 - RNA, 19 nt, Homo sapiens
  misc_RNA (1)...(19): siRNA sense strand
caaauagaugccaaagaga

SEQ ID NO: 1851340 - RNA, 19 nt, Homo sapiens
  misc_RNA (1)...(19): siRNA sense strand
gaggacuccagguuuauug

SEQ ID NO: 1851341 - RNA, 19 nt, Homo sapiens
  misc_RNA (1)...(19): siRNA sense strand
aagaacaggccaagaccua

SEQ ID NO: 1851342 - RNA, 19 nt, Homo sapiens
  misc_RNA (1)...(19): siRNA sense strand
ucucagaagcugccuguga

SEQ ID NO: 1851343 - RNA, 19 nt, Homo sapiens
  misc_RNA (1)...(19): siRNA sense strand
ugaggaaagccaacuugaa

SEQ ID NO: 1851344 - RNA, 19 nt, Homo sapiens
  misc_RNA (1)...(19): siRNA sense strand
gacaagcugaagcgaauug

SEQ ID NO: 1851345 - RNA, 19 nt, Homo sapiens
  misc_RNA (1)...(19): siRNA sense strand
agaaagguguaccagauac

SEQ ID NO: 1851346 - RNA, 19 nt, Homo sapiens
  misc_RNA (1)...(19): siRNA sense strand
ggaggucuacuuugaggau

SEQ ID NO: 1851347 - RNA, 19 nt, Homo sapiens
  misc_RNA (1)...(19): siRNA sense strand
caagaccuauaaagaugag

SEQ ID NO: 1851348 - RNA, 19 nt, Homo sapiens
  misc_RNA (1)...(19): siRNA sense strand
ccaagaccuauaaagauga

SEQ ID NO: 1851349 - RNA, 19 nt, Homo sapiens
  misc_RNA (1)...(19): siRNA sense strand
ggaauaucaggcucucaga

SEQ ID NO: 1851350 - RNA, 19 nt, Homo sapiens
  misc_RNA (1)...(19): siRNA sense strand
gccaucaaggcuaggaaua

SEQ ID NO: 1851351 - RNA, 19 nt, Homo sapiens
  misc_RNA (1)...(19): siRNA sense strand
gaaggagaggaaucagaau

SEQ ID NO: 1851352 - RNA, 19 nt, Homo sapiens
  misc_RNA (1)...(19): siRNA sense strand
cagcagcacaguacuaucu

SEQ ID NO: 1851353 - RNA, 19 nt, Homo sapiens
  misc_RNA (1)...(19): siRNA sense strand
cugauaauuuggaggucua

SEQ ID NO: 1851354 - RNA, 19 nt, Homo sapiens
  misc_RNA (1)...(19): siRNA sense strand
ugauuugaaugcuguccuu

SEQ ID NO: 1851355 - RNA, 19 nt, Homo sapiens
  misc_RNA (1)...(19): siRNA sense strand
ccagguuuauugaucaucu

SEQ ID NO: 1851356 - RNA, 19 nt, Homo sapiens
  misc_RNA (1)...(19): siRNA sense strand
gaagauucagccucagaag

SEQ ID NO: 1851357 - RNA, 19 nt, Homo sapiens
  misc_RNA (1)...(19): siRNA sense strand
gagggcaaugauuacuuua

SEQ ID NO: 1851358 - RNA, 19 nt, Homo sapiens
  misc_RNA (1)...(19): siRNA sense strand
cugaaggcuuaaagaagaa

SEQ ID NO: 1851359 - RNA, 19 nt, Homo sapiens
  misc_RNA (1)...(19): siRNA sense strand
gaggacagggcagaacuau

SEQ ID NO: 1851360 - RNA, 19 nt, Homo sapiens
  misc_RNA (1)...(19): siRNA sense strand
cagguuuauugaucaucua

SEQ ID NO: 1851361 - RNA, 19 nt, Homo sapiens
  misc_RNA (1)...(19): siRNA sense strand
uaugccaucuggaacugaa

SEQ ID NO: 1851362 - RNA, 19 nt, Homo sapiens
  misc_RNA (1)...(19): siRNA sense strand
gcagauccugauuugaaug

SEQ ID NO: 1851363 - RNA, 19 nt, Homo sapiens
  misc_RNA (1)...(19): siRNA sense strand
auaaagaugagggcaauga

SEQ ID NO: 1851364 - RNA, 19 nt, Homo sapiens
  misc_RNA (1)...(19): siRNA sense strand
auuuggaggucuacuuuga

SEQ ID NO: 1851365 - RNA, 19 nt, Homo sapiens
  misc_RNA (1)...(19): siRNA sense strand
gacuccagguuuauugauc

SEQ ID NO: 1851366 - RNA, 19 nt, Homo sapiens
  misc_RNA (1)...(19): siRNA sense strand
ucaugaggacuccagguuu

SEQ ID NO: 1851367 - RNA, 19 nt, Homo sapiens
  misc_RNA (1)...(19): siRNA sense strand
augagggacugcaaauaga

SEQ ID NO: 1851368 - RNA, 19 nt, Homo sapiens
  misc_RNA (1)...(19): siRNA sense strand
cagaagaacaggccaagac

SEQ ID NO: 1851369 - RNA, 19 nt, Homo sapiens
  misc_RNA (1)...(19): siRNA sense strand
gugaggaaagccaacuuga

SEQ ID NO: 1851370 - RNA, 19 nt, Homo sapiens
  misc_RNA (1)...(19): siRNA sense strand
ccagagguacuuuguaaaa

SEQ ID NO: 1851371 - RNA, 19 nt, Homo sapiens
  misc_RNA (1)...(19): siRNA sense strand
ggacuccagguuuauugau

SEQ ID NO: 1851372 - RNA, 19 nt, Homo sapiens
  misc_RNA (1)...(19): siRNA sense strand
ccaucaaggcuaggaauau

SEQ ID NO: 1851373 - RNA, 19 nt, Homo sapiens
  misc_RNA (1)...(19): siRNA sense strand
gaaaagaaggagaggaauc

SEQ ID NO: 1851374 - RNA, 19 nt, Homo sapiens
  misc_RNA (1)...(19): siRNA sense strand
ugacgagagcgccaucaga

SEQ ID NO: 1851375 - RNA, 19 nt, Homo sapiens
  misc_RNA (1)...(19): siRNA sense strand
ccagugggagaaggaauuu

SEQ ID NO: 1851376 - RNA, 19 nt, Homo sapiens
  misc_RNA (1)...(19): siRNA sense strand
aggccaagaccuauaaaga

SEQ ID NO: 1851377 - RNA, 19 nt, Homo sapiens
  misc_RNA (1)...(19): siRNA sense strand
ugaugagggacugcaaaua

SEQ ID NO: 1851378 - RNA, 19 nt, Homo sapiens
  misc_RNA (1)...(19): siRNA sense strand
agagcgccaucagaaauug

SEQ ID NO: 1851379 - RNA, 19 nt, Homo sapiens
  misc_RNA (1)...(19): siRNA sense strand
gagggacugcaaauagaug

SEQ ID NO: 1851380 - RNA, 19 nt, Homo sapiens
  misc_RNA (1)...(19): siRNA sense strand
gugccaaacucauugauuu

SEQ ID NO: 1851381 - RNA, 19 nt, Homo sapiens
  misc_RNA (1)...(19): siRNA sense strand
caggaucucuuugacuaua

SEQ ID NO: 1851382 - RNA, 19 nt, Homo sapiens
  misc_RNA (1)...(19): siRNA sense strand
ggacaccgccucacagauc

SEQ ID NO: 1851383 - RNA, 19 nt, Homo sapiens
  misc_RNA (1)...(19): siRNA sense strand
cccaggaucucuuugacua

SEQ ID NO: 1851384 - RNA, 19 nt, Homo sapiens
  misc_RNA (1)...(19): siRNA sense strand
gaacauccugauagaccua

SEQ ID NO: 1851385 - RNA, 19 nt, Homo sapiens
  misc_RNA (1)...(19): siRNA sense strand
gcaaacaccagccgaggau

SEQ ID NO: 1851386 - RNA, 19 nt, Homo sapiens
  misc_RNA (1)...(19): siRNA sense strand
gaugaacccuacacugacu

SEQ ID NO: 1851387 - RNA, 19 nt, Homo sapiens
  misc_RNA (1)...(19): siRNA sense strand
ccagacugcugugcccuaa

SEQ ID NO: 1851388 - RNA, 19 nt, Homo sapiens
  misc_RNA (1)...(19): siRNA sense strand
cugcuugacugguuugaga

SEQ ID NO: 1851389 - RNA, 19 nt, Homo sapiens
  misc_RNA (1)...(19): siRNA sense strand
gacccucacuggaagagau

SEQ ID NO: 1851390 - RNA, 19 nt, Homo sapiens
  misc_RNA (1)...(19): siRNA sense strand
agacugcugugcccuaauc

SEQ ID NO: 1851391 - RNA, 19 nt, Homo sapiens
  misc_RNA (1)...(19): siRNA sense strand
cugcuucuuuggccaagua

SEQ ID NO: 1851392 - RNA, 19 nt, Homo sapiens
  misc_RNA (1)...(19): siRNA sense strand
ccagguggccaucaaagug

SEQ ID NO: 1851393 - RNA, 19 nt, Homo sapiens
  misc_RNA (1)...(19): siRNA sense strand
gaagucgcacugcuaugga

SEQ ID NO: 1851394 - RNA, 19 nt, Homo sapiens
  misc_RNA (1)...(19): siRNA sense strand
ggaucucuuugacuauauc

SEQ ID NO: 1851395 - RNA, 19 nt, Homo sapiens
  misc_RNA (1)...(19): siRNA sense strand
cuggugcccugcuucauga

SEQ ID NO: 1851396 - RNA, 19 nt, Homo sapiens
  misc_RNA (1)...(19): siRNA sense strand
uugacuauaucacagagaa

SEQ ID NO: 1851397 - RNA, 19 nt, Homo sapiens
  misc_RNA (1)...(19): siRNA sense strand
augagaacauccugauaga

SEQ ID NO: 1851398 - RNA, 19 nt, Homo sapiens
  misc_RNA (1)...(19): siRNA sense strand
ugagagggaccaggagauu

SEQ ID NO: 1851399 - RNA, 19 nt, Homo sapiens
  misc_RNA (1)...(19): siRNA sense strand
augaugaacccuacacuga

SEQ ID NO: 1851400 - RNA, 19 nt, Homo sapiens
  misc_RNA (1)...(19): siRNA sense strand
ucacaugcccacucgaagu

SEQ ID NO: 1851401 - RNA, 19 nt, Homo sapiens
  misc_RNA (1)...(19): siRNA sense strand
cagguggccaucaaaguga

SEQ ID NO: 1851402 - RNA, 19 nt, Homo sapiens
  misc_RNA (1)...(19): siRNA sense strand
cgaagucgcacugcuaugg

SEQ ID NO: 1851403 - RNA, 19 nt, Homo sapiens
  misc_RNA (1)...(19): siRNA sense strand
ggaucucucgacaccagua

SEQ ID NO: 1851404 - RNA, 19 nt, Homo sapiens
  misc_RNA (1)...(19): siRNA sense strand
aaacaccagccgaggaugu

SEQ ID NO: 1851405 - RNA, 19 nt, Homo sapiens
  misc_RNA (1)...(19): siRNA sense strand
ugggcauccuccucuauga

SEQ ID NO: 1851406 - RNA, 19 nt, Homo sapiens
  misc_RNA (1)...(19): siRNA sense strand
gagagggaccaggagauuc

SEQ ID NO: 1851407 - RNA, 19 nt, Homo sapiens
  misc_RNA (1)...(19): siRNA sense strand
caggacaccgccucacaga

SEQ ID NO: 1851408 - RNA, 19 nt, Homo sapiens
  misc_RNA (1)...(19): siRNA sense strand
ccgccugcuugacugguuu

SEQ ID NO: 1851409 - RNA, 19 nt, Homo sapiens
  misc_RNA (1)...(19): siRNA sense strand
cgucaaagcuucacagugu

SEQ ID NO: 1851410 - RNA, 19 nt, Homo sapiens
  misc_RNA (1)...(19): siRNA sense strand
ggauggagccggacaugua

SEQ ID NO: 1851411 - RNA, 19 nt, Homo sapiens
  misc_RNA (1)...(19): siRNA sense strand
ccagaaguaucucaaguga

SEQ ID NO: 1851412 - RNA, 19 nt, Homo sapiens
  misc_RNA (1)...(19): siRNA sense strand
ggaugaagcacauuccuaa

SEQ ID NO: 1851413 - RNA, 19 nt, Homo sapiens
  misc_RNA (1)...(19): siRNA sense strand
aacaaggccuggaagcuua

SEQ ID NO: 1851414 - RNA, 19 nt, Homo sapiens
  misc_RNA (1)...(19): siRNA sense strand
gaguuuaaccugacggaua

SEQ ID NO: 1851415 - RNA, 19 nt, Homo sapiens
  misc_RNA (1)...(19): siRNA sense strand
ucacauggauccuuauugg

SEQ ID NO: 1851416 - RNA, 19 nt, Homo sapiens
  misc_RNA (1)...(19): siRNA sense strand
acacuacacucaaagauca

SEQ ID NO: 1851417 - RNA, 19 nt, Homo sapiens
  misc_RNA (1)...(19): siRNA sense strand
aaacugagccuaccacaca

SEQ ID NO: 1851418 - RNA, 19 nt, Homo sapiens
  misc_RNA (1)...(19): siRNA sense strand
aaacagggaugaagcacau

SEQ ID NO: 1851419 - RNA, 19 nt, Homo sapiens
  misc_RNA (1)...(19): siRNA sense strand
ugaacgagaugaacaccuu

SEQ ID NO: 1851420 - RNA, 19 nt, Homo sapiens
  misc_RNA (1)...(19): siRNA sense strand
aaacuacuguggcccaaga

SEQ ID NO: 1851421 - RNA, 19 nt, Homo sapiens
  misc_RNA (1)...(19): siRNA sense strand
gccuacgacuggauuagua

SEQ ID NO: 1851422 - RNA, 19 nt, Homo sapiens
  misc_RNA (1)...(19): siRNA sense strand
ucuacaagcugcuauaugg

SEQ ID NO: 1851423 - RNA, 19 nt, Homo sapiens
  misc_RNA (1)...(19): siRNA sense strand
gaacaaucaccaaccaaca

SEQ ID NO: 1851424 - RNA, 19 nt, Homo sapiens
  misc_RNA (1)...(19): siRNA sense strand
gaagaacaacagcugaugu

SEQ ID NO: 1851425 - RNA, 19 nt, Homo sapiens
  misc_RNA (1)...(19): siRNA sense strand
cauacacacuacacucaaa

SEQ ID NO: 1851426 - RNA, 19 nt, Homo sapiens
  misc_RNA (1)...(19): siRNA sense strand
uacaucauccgcuuuauuu

SEQ ID NO: 1851427 - RNA, 19 nt, Homo sapiens
  misc_RNA (1)...(19): siRNA sense strand
ugacggauaugccagagau

SEQ ID NO: 1851428 - RNA, 19 nt, Homo sapiens
  misc_RNA (1)...(19): siRNA sense strand
gcauagacaccaaagacaa

SEQ ID NO: 1851429 - RNA, 19 nt, Homo sapiens
  misc_RNA (1)...(19): siRNA sense strand
caacaaggccuggaagcuu

SEQ ID NO: 1851430 - RNA, 19 nt, Homo sapiens
  misc_RNA (1)...(19): siRNA sense strand
gauggagcacccagaagua

SEQ ID NO: 1851431 - RNA, 19 nt, Homo sapiens
  misc_RNA (1)...(19): siRNA sense strand
acucaaagaucacauggau

SEQ ID NO: 1851432 - RNA, 19 nt, Homo sapiens
  misc_RNA (1)...(19): siRNA sense strand
caaccaacauacacacuac

SEQ ID NO: 1851433 - RNA, 19 nt, Homo sapiens
  misc_RNA (1)...(19): siRNA sense strand
caucauccgcuuuauuuau

SEQ ID NO: 1851434 - RNA, 19 nt, Homo sapiens
  misc_RNA (1)...(19): siRNA sense strand
gcuuaaagacugugaguuc

SEQ ID NO: 1851435 - RNA, 19 nt, Homo sapiens
  misc_RNA (1)...(19): siRNA sense strand
ccggacauguacuggaaua

SEQ ID NO: 1851436 - RNA, 19 nt, Homo sapiens
  misc_RNA (1)...(19): siRNA sense strand
acaaagaggagauggaguu

SEQ ID NO: 1851437 - RNA, 19 nt, Homo sapiens
  misc_RNA (1)...(19): siRNA sense strand
gcuauauggcgaguucuua

SEQ ID NO: 1851438 - RNA, 19 nt, Homo sapiens
  misc_RNA (1)...(19): siRNA sense strand
gcugcuauauggcgaguuc

SEQ ID NO: 1851439 - RNA, 19 nt, Homo sapiens
  misc_RNA (1)...(19): siRNA sense strand
gcagccaaacagaacguua

SEQ ID NO: 1851440 - RNA, 19 nt, Homo sapiens
  misc_RNA (1)...(19): siRNA sense strand
gagccuaccacacaacaug

SEQ ID NO: 1851441 - RNA, 19 nt, Homo sapiens
  misc_RNA (1)...(19): siRNA sense strand
cauagacaccaaagacaaa

SEQ ID NO: 1851442 - RNA, 19 nt, Homo sapiens
  misc_RNA (1)...(19): siRNA sense strand
ucacaggcauagacaccaa

SEQ ID NO: 1851443 - RNA, 19 nt, Homo sapiens
  misc_RNA (1)...(19): siRNA sense strand
ucacguuccugcaguucuu

SEQ ID NO: 1851444 - RNA, 19 nt, Homo sapiens
  misc_RNA (1)...(19): siRNA sense strand
cgucgagccuccuuuaugg

SEQ ID NO: 1851445 - RNA, 19 nt, Homo sapiens
  misc_RNA (1)...(19): siRNA sense strand
gcaguucuucuucuauguu

SEQ ID NO: 1851446 - RNA, 19 nt, Homo sapiens
  misc_RNA (1)...(19): siRNA sense strand
ggaagaacaacagcugaug

SEQ ID NO: 1851447 - RNA, 19 nt, Homo sapiens
  misc_RNA (1)...(19): siRNA sense strand
acaaucaccaaccaacaua

SEQ ID NO: 1851448 - RNA, 19 nt, Homo sapiens
  misc_RNA (1)...(19): siRNA sense strand
ggacauguacuggaauaag

SEQ ID NO: 1851449 - RNA, 19 nt, Homo sapiens
  misc_RNA (1)...(19): siRNA sense strand
gggaugaagcacauuccua

SEQ ID NO: 1851450 - RNA, 19 nt, Homo sapiens
  misc_RNA (1)...(19): siRNA sense strand
gcaucuacaagcugcuaua

SEQ ID NO: 1851451 - RNA, 19 nt, Homo sapiens
  misc_RNA (1)...(19): siRNA sense strand
gaaaaucaccucaaagaac

SEQ ID NO: 1851452 - RNA, 19 nt, Homo sapiens
  misc_RNA (1)...(19): siRNA sense strand
cuuccugacuugucuaguu

SEQ ID NO: 1851453 - RNA, 19 nt, Homo sapiens
  misc_RNA (1)...(19): siRNA sense strand
aguuuaaccugacggauau

SEQ ID NO: 1851454 - RNA, 19 nt, Homo sapiens
  misc_RNA (1)...(19): siRNA sense strand
gguggaaccaguacgagaa

SEQ ID NO: 1851455 - RNA, 19 nt, Homo sapiens
  misc_RNA (1)...(19): siRNA sense strand
ccaaccaacauacacacua

SEQ ID NO: 1851456 - RNA, 19 nt, Homo sapiens
  misc_RNA (1)...(19): siRNA sense strand
cuacaucauccgcuuuauu

SEQ ID NO: 1851457 - RNA, 19 nt, Homo sapiens
  misc_RNA (1)...(19): siRNA sense strand
gacauguacuggaauaagc

SEQ ID NO: 1851458 - RNA, 19 nt, Homo sapiens
  misc_RNA (1)...(19): siRNA sense strand
cggcagaacacaagcaguu

SEQ ID NO: 1851459 - RNA, 19 nt, Homo sapiens
  misc_RNA (1)...(19): siRNA sense strand
uaaucuuccugcucugcua

SEQ ID NO: 1851460 - RNA, 19 nt, Homo sapiens
  misc_RNA (1)...(19): siRNA sense strand
uugccaaccugucaaugaa

SEQ ID NO: 1851461 - RNA, 19 nt, Homo sapiens
  misc_RNA (1)...(19): siRNA sense strand
caucauuggccgcuuccua

SEQ ID NO: 1851462 - RNA, 19 nt, Homo sapiens
  misc_RNA (1)...(19): siRNA sense strand
ccacaaggcagccaaacag

SEQ ID NO: 1851463 - RNA, 19 nt, Homo sapiens
  misc_RNA (1)...(19): siRNA sense strand
gcagucccaugaucaccau

SEQ ID NO: 1851464 - RNA, 19 nt, Homo sapiens
  misc_RNA (1)...(19): siRNA sense strand
uuuaugggcuccaccuuca

SEQ ID NO: 1851465 - RNA, 19 nt, Homo sapiens
  misc_RNA (1)...(19): siRNA sense strand
ucaaggaccaaacuacugu

SEQ ID NO: 1851466 - RNA, 19 nt, Homo sapiens
  misc_RNA (1)...(19): siRNA sense strand
cuauauggcgaguucuuaa

SEQ ID NO: 1851467 - RNA, 19 nt, Homo sapiens
  misc_RNA (1)...(19): siRNA sense strand
cugcaguucuucuucuaug

SEQ ID NO: 1851468 - RNA, 19 nt, Homo sapiens
  misc_RNA (1)...(19): siRNA sense strand
caucagcgccgucaaagcu

SEQ ID NO: 1851469 - RNA, 19 nt, Homo sapiens
  misc_RNA (1)...(19): siRNA sense strand
aaacucaaggaccaaacua

SEQ ID NO: 1851470 - RNA, 19 nt, Homo sapiens
  misc_RNA (1)...(19): siRNA sense strand
caguucuucuucuauguug

SEQ ID NO: 1851471 - RNA, 19 nt, Homo sapiens
  misc_RNA (1)...(19): siRNA sense strand
gcacccagaaguaucucaa

SEQ ID NO: 1851472 - RNA, 19 nt, Homo sapiens
  misc_RNA (1)...(19): siRNA sense strand
caccaaagacaaaagcuua

SEQ ID NO: 1851473 - RNA, 19 nt, Homo sapiens
  misc_RNA (1)...(19): siRNA sense strand
gcucugcuacuacaucauc

SEQ ID NO: 1851474 - RNA, 19 nt, Homo sapiens
  misc_RNA (1)...(19): siRNA sense strand
ggagcacccagaaguaucu

SEQ ID NO: 1851475 - RNA, 19 nt, Homo sapiens
  misc_RNA (1)...(19): siRNA sense strand
ucacagugucacaggcaua

SEQ ID NO: 1851476 - RNA, 19 nt, Homo sapiens
  misc_RNA (1)...(19): siRNA sense strand
caaggcagccaaacagaac

SEQ ID NO: 1851477 - RNA, 19 nt, Homo sapiens
  misc_RNA (1)...(19): siRNA sense strand
ggccugcagucccaugauc

SEQ ID NO: 1851478 - RNA, 19 nt, Homo sapiens
  misc_RNA (1)...(19): siRNA sense strand
acaaggcagccaaacagaa

SEQ ID NO: 1851479 - RNA, 19 nt, Homo sapiens
  misc_RNA (1)...(19): siRNA sense strand
uacuacaucauccgcuuua

SEQ ID NO: 1851480 - RNA, 19 nt, Homo sapiens
  misc_RNA (1)...(19): siRNA sense strand
agccggacauguacuggaa

SEQ ID NO: 1851481 - RNA, 19 nt, Homo sapiens
  misc_RNA (1)...(19): siRNA sense strand
gggcuccaccuucaacauc

SEQ ID NO: 1851482 - RNA, 19 nt, Homo sapiens
  misc_RNA (1)...(19): siRNA sense strand
ugccagagauccccgaaaa

SEQ ID NO: 1851483 - RNA, 19 nt, Homo sapiens
  misc_RNA (1)...(19): siRNA sense strand
caaagaggagauggaguuc

SEQ ID NO: 1851484 - RNA, 19 nt, Homo sapiens
  misc_RNA (1)...(19): siRNA sense strand
ggcuccaccuucaacauca

SEQ ID NO: 1851485 - RNA, 19 nt, Homo sapiens
  misc_RNA (1)...(19): siRNA sense strand
guacagcuucuuccugacu

SEQ ID NO: 1851486 - RNA, 19 nt, Homo sapiens
  misc_RNA (1)...(19): siRNA sense strand
aagaaccuuuggaacaauc

SEQ ID NO: 1851487 - RNA, 19 nt, Homo sapiens
  misc_RNA (1)...(19): siRNA sense strand
uauggcgaguucuuaaucu

SEQ ID NO: 1851488 - RNA, 19 nt, Homo sapiens
  misc_RNA (1)...(19): siRNA sense strand
ucaaagcuucacaguguca

SEQ ID NO: 1851489 - RNA, 19 nt, Homo sapiens
  misc_RNA (1)...(19): siRNA sense strand
gauggagccggacauguac

SEQ ID NO: 1851490 - RNA, 19 nt, Homo sapiens
  misc_RNA (1)...(19): siRNA sense strand
ggauugucgacaggaauuu

SEQ ID NO: 1851491 - RNA, 19 nt, Homo sapiens
  misc_RNA (1)...(19): siRNA sense strand
uuccugacuugucuaguug

SEQ ID NO: 1851492 - RNA, 19 nt, Homo sapiens
  misc_RNA (1)...(19): siRNA sense strand
uccagagccugcugaacga

SEQ ID NO: 1851493 - RNA, 19 nt, Homo sapiens
  misc_RNA (1)...(19): siRNA sense strand
caucuacaagcugcuauau

SEQ ID NO: 1851494 - RNA, 19 nt, Homo sapiens
  misc_RNA (1)...(19): siRNA sense strand
cagaacacaagcaguugga

SEQ ID NO: 1851495 - RNA, 19 nt, Homo sapiens
  misc_RNA (1)...(19): siRNA sense strand
ugauggagcacccagaagu

SEQ ID NO: 1851496 - RNA, 19 nt, Homo sapiens
  misc_RNA (1)...(19): siRNA sense strand
acacaagcaguuggagaaa

SEQ ID NO: 1851497 - RNA, 19 nt, Homo sapiens
  misc_RNA (1)...(19): siRNA sense strand
caccuugcguacucagugu

SEQ ID NO: 1851498 - RNA, 19 nt, Homo sapiens
  misc_RNA (1)...(19): siRNA sense strand
ggaaggacauugguacuga

SEQ ID NO: 1851499 - RNA, 19 nt, Homo sapiens
  misc_RNA (1)...(19): siRNA sense strand
ggacgagacuuuaccaucu

SEQ ID NO: 1851500 - RNA, 19 nt, Homo sapiens
  misc_RNA (1)...(19): siRNA sense strand
gaacccagacgacgacaaa

SEQ ID NO: 1851501 - RNA, 19 nt, Homo sapiens
  misc_RNA (1)...(19): siRNA sense strand
ucaaugagcccaaguuugu

SEQ ID NO: 1851502 - RNA, 19 nt, Homo sapiens
  misc_RNA (1)...(19): siRNA sense strand
gcccaaguuugucaaggua

SEQ ID NO: 1851503 - RNA, 19 nt, Homo sapiens
  misc_RNA (1)...(19): siRNA sense strand
gcaugcaaauuucuuccaa

SEQ ID NO: 1851504 - RNA, 19 nt, Homo sapiens
  misc_RNA (1)...(19): siRNA sense strand
aauuacaccuucacucaaa

SEQ ID NO: 1851505 - RNA, 19 nt, Homo sapiens
  misc_RNA (1)...(19): siRNA sense strand
ccaaguuugucaagguauu

SEQ ID NO: 1851506 - RNA, 19 nt, Homo sapiens
  misc_RNA (1)...(19): siRNA sense strand
ccaauuacaccuucacuca

SEQ ID NO: 1851507 - RNA, 19 nt, Homo sapiens
  misc_RNA (1)...(19): siRNA sense strand
uggaggagcugcacguguu

SEQ ID NO: 1851508 - RNA, 19 nt, Homo sapiens
  misc_RNA (1)...(19): siRNA sense strand
gacgagacuuuaccaucuu

SEQ ID NO: 1851509 - RNA, 19 nt, Homo sapiens
  misc_RNA (1)...(19): siRNA sense strand
ccaagaggcaccagcugua

SEQ ID NO: 1851510 - RNA, 19 nt, Homo sapiens
  misc_RNA (1)...(19): siRNA sense strand
guacugagugcaugaacuu

SEQ ID NO: 1851511 - RNA, 19 nt, Homo sapiens
  misc_RNA (1)...(19): siRNA sense strand
ucgaucagcuccaggaugu

SEQ ID NO: 1851512 - RNA, 19 nt, Homo sapiens
  misc_RNA (1)...(19): siRNA sense strand
gcagggaaggacauuggua

SEQ ID NO: 1851513 - RNA, 19 nt, Homo sapiens
  misc_RNA (1)...(19): siRNA sense strand
gcgccuuucuggaguguga

SEQ ID NO: 1851514 - RNA, 19 nt, Homo sapiens
  misc_RNA (1)...(19): siRNA sense strand
gcucugcggugugcgugua

SEQ ID NO: 1851515 - RNA, 19 nt, Homo sapiens
  misc_RNA (1)...(19): siRNA sense strand
ucaccagcaugcaaauuuc

SEQ ID NO: 1851516 - RNA, 19 nt, Homo sapiens
  misc_RNA (1)...(19): siRNA sense strand
ccacccaaccugugccuuu

SEQ ID NO: 1851517 - RNA, 19 nt, Homo sapiens
  misc_RNA (1)...(19): siRNA sense strand
caggauguguuucuguugu

SEQ ID NO: 1851518 - RNA, 19 nt, Homo sapiens
  misc_RNA (1)...(19): siRNA sense strand
gcaagaccuuuggcaccuu

SEQ ID NO: 1851519 - RNA, 19 nt, Homo sapiens
  misc_RNA (1)...(19): siRNA sense strand
ccucaugggacgagacuuu

SEQ ID NO: 1851520 - RNA, 19 nt, Homo sapiens
  misc_RNA (1)...(19): siRNA sense strand
gucaccagcaugcaaauuu

SEQ ID NO: 1851521 - RNA, 19 nt, Homo sapiens
  misc_RNA (1)...(19): siRNA sense strand
guccaagucuccgaacaga

SEQ ID NO: 1851522 - RNA, 19 nt, Homo sapiens
  misc_RNA (1)...(19): siRNA sense strand
ggacucgggcguguacuug

SEQ ID NO: 1851523 - RNA, 19 nt, Homo sapiens
  misc_RNA (1)...(19): siRNA sense strand
gcagccuggucaacaagug

SEQ ID NO: 1851524 - RNA, 19 nt, Homo sapiens
  misc_RNA (1)...(19): siRNA sense strand
ggaggagcugcacguguuu

SEQ ID NO: 1851525 - RNA, 19 nt, Homo sapiens
  misc_RNA (1)...(19): siRNA sense strand
ggacuucccagacgauguc

SEQ ID NO: 1851526 - RNA, 19 nt, Homo sapiens
  misc_RNA (1)...(19): siRNA sense strand
ccuacaaccgcacccauuu

SEQ ID NO: 1851527 - RNA, 19 nt, Homo sapiens
  misc_RNA (1)...(19): siRNA sense strand
gaucagcuccaggaugugu

SEQ ID NO: 1851528 - RNA, 19 nt, Homo sapiens
  misc_RNA (1)...(19): siRNA sense strand
ggcaagacguaaggaaugg

SEQ ID NO: 1851529 - RNA, 19 nt, Homo sapiens
  misc_RNA (1)...(19): siRNA sense strand
caauuacaccuucacucaa

SEQ ID NO: 1851530 - RNA, 19 nt, Homo sapiens
  misc_RNA (1)...(19): siRNA sense strand
gacaaaaucuacuucuucu

SEQ ID NO: 1851531 - RNA, 19 nt, Homo sapiens
  misc_RNA (1)...(19): siRNA sense strand
caaguuugucaagguauuu

SEQ ID NO: 1851532 - RNA, 19 nt, Homo sapiens
  misc_RNA (1)...(19): siRNA sense strand
gccugucgcugcacguguu

SEQ ID NO: 1851533 - RNA, 19 nt, Homo sapiens
  misc_RNA (1)...(19): siRNA sense strand
gcugcucuaugccgucuuc

SEQ ID NO: 1851534 - RNA, 19 nt, Homo sapiens
  misc_RNA (1)...(19): siRNA sense strand
gguggcagcagaccucaug

SEQ ID NO: 1851535 - RNA, 19 nt, Homo sapiens
  misc_RNA (1)...(19): siRNA sense strand
cuacaaccgcacccauuug

SEQ ID NO: 1851536 - RNA, 19 nt, Homo sapiens
  misc_RNA (1)...(19): siRNA sense strand
cgaacucccugcgcaugug

SEQ ID NO: 1851537 - RNA, 19 nt, Homo sapiens
  misc_RNA (1)...(19): siRNA sense strand
cggcaagacguaaggaaug

SEQ ID NO: 1851538 - RNA, 19 nt, Homo sapiens
  misc_RNA (1)...(19): siRNA sense strand
uccaggauguguuucuguu

SEQ ID NO: 1851539 - RNA, 19 nt, Homo sapiens
  misc_RNA (1)...(19): siRNA sense strand
cacccaaccugugccuuug

SEQ ID NO: 1851540 - RNA, 19 nt, Homo sapiens
  misc_RNA (1)...(19): siRNA sense strand
gggcgacacccacuucgau

SEQ ID NO: 1851541 - RNA, 19 nt, Homo sapiens
  misc_RNA (1)...(19): siRNA sense strand
ggagccaauuacaccuuca

SEQ ID NO: 1851542 - RNA, 19 nt, Homo sapiens
  misc_RNA (1)...(19): siRNA sense strand
acgagacuuuaccaucuuu

SEQ ID NO: 1851543 - RNA, 19 nt, Homo sapiens
  misc_RNA (1)...(19): siRNA sense strand
aggccuugcugguggauga

SEQ ID NO: 1851544 - RNA, 19 nt, Homo sapiens
  misc_RNA (1)...(19): siRNA sense strand
gguacugagugcaugaacu

SEQ ID NO: 1851545 - RNA, 19 nt, Homo sapiens
  misc_RNA (1)...(19): siRNA sense strand
gacucccgcuggcucaaug

SEQ ID NO: 1851546 - RNA, 19 nt, Homo sapiens
  misc_RNA (1)...(19): siRNA sense strand
gggcagggaaggacauugg

SEQ ID NO: 1851547 - RNA, 19 nt, Homo sapiens
  misc_RNA (1)...(19): siRNA sense strand
cgacaaaaucuacuucuuc

SEQ ID NO: 1851548 - RNA, 19 nt, Homo sapiens
  misc_RNA (1)...(19): siRNA sense strand
gcggcaagacguaaggaau

SEQ ID NO: 1851549 - RNA, 19 nt, Homo sapiens
  misc_RNA (1)...(19): siRNA sense strand
ucaacaaguggacgacguu

SEQ ID NO: 1851550 - RNA, 19 nt, Homo sapiens
  misc_RNA (1)...(19): siRNA sense strand
gcuccaggauguguuucug

SEQ ID NO: 1851551 - RNA, 19 nt, Homo sapiens
  misc_RNA (1)...(19): siRNA sense strand
ccgcgcugcuggaacacaa

SEQ ID NO: 1851552 - RNA, 19 nt, Homo sapiens
  misc_RNA (1)...(19): siRNA sense strand
acacuaugacguccucuuc

SEQ ID NO: 1851553 - RNA, 19 nt, Homo sapiens
  misc_RNA (1)...(19): siRNA sense strand
gggaaggacauugguacug

SEQ ID NO: 1851554 - RNA, 19 nt, Homo sapiens
  misc_RNA (1)...(19): siRNA sense strand
gcaagaagaugaaaguuga

SEQ ID NO: 1851555 - RNA, 19 nt, Homo sapiens
  misc_RNA (1)...(19): siRNA sense strand
uaaccgagcugugacauuu

SEQ ID NO: 1851556 - RNA, 19 nt, Homo sapiens
  misc_RNA (1)...(19): siRNA sense strand
gaauauaaccgagcuguga

SEQ ID NO: 1851557 - RNA, 19 nt, Homo sapiens
  misc_RNA (1)...(19): siRNA sense strand
gggagacccugaagaagaa

SEQ ID NO: 1851558 - RNA, 19 nt, Homo sapiens
  misc_RNA (1)...(19): siRNA sense strand
ggaagauccuggagccaaa

SEQ ID NO: 1851559 - RNA, 19 nt, Homo sapiens
  misc_RNA (1)...(19): siRNA sense strand
ggagggagaccaugaaaga

SEQ ID NO: 1851560 - RNA, 19 nt, Homo sapiens
  misc_RNA (1)...(19): siRNA sense strand
gcugaugccuucaaagaug

SEQ ID NO: 1851561 - RNA, 19 nt, Homo sapiens
  misc_RNA (1)...(19): siRNA sense strand
gaaaggacgguucuuguuc

SEQ ID NO: 1851562 - RNA, 19 nt, Homo sapiens
  misc_RNA (1)...(19): siRNA sense strand
gaaggucauuccgcacuuu

SEQ ID NO: 1851563 - RNA, 19 nt, Homo sapiens
  misc_RNA (1)...(19): siRNA sense strand
ugaagacuuugaccaguuu

SEQ ID NO: 1851564 - RNA, 19 nt, Homo sapiens
  misc_RNA (1)...(19): siRNA sense strand
gcacagaauugggauuuac

SEQ ID NO: 1851565 - RNA, 19 nt, Homo sapiens
  misc_RNA (1)...(19): siRNA sense strand
auaauguacuggugcuuua

SEQ ID NO: 1851566 - RNA, 19 nt, Homo sapiens
  misc_RNA (1)...(19): siRNA sense strand
gggagaccaugaaagacua

SEQ ID NO: 1851567 - RNA, 19 nt, Homo sapiens
  misc_RNA (1)...(19): siRNA sense strand
aaacacaccuuggucaugu

SEQ ID NO: 1851568 - RNA, 19 nt, Homo sapiens
  misc_RNA (1)...(19): siRNA sense strand
aaagaugaccgaaagauug

SEQ ID NO: 1851569 - RNA, 19 nt, Homo sapiens
  misc_RNA (1)...(19): siRNA sense strand
aaaugaagccggaguuuga

SEQ ID NO: 1851570 - RNA, 19 nt, Homo sapiens
  misc_RNA (1)...(19): siRNA sense strand
caaagaugaccgaaagauu

SEQ ID NO: 1851571 - RNA, 19 nt, Homo sapiens
  misc_RNA (1)...(19): siRNA sense strand
caacaaggcccuggcagaa

SEQ ID NO: 1851572 - RNA, 19 nt, Homo sapiens
  misc_RNA (1)...(19): siRNA sense strand
cuacuccucugaauuugaa

SEQ ID NO: 1851573 - RNA, 19 nt, Homo sapiens
  misc_RNA (1)...(19): siRNA sense strand
ucucagaguuuccuacguu

SEQ ID NO: 1851574 - RNA, 19 nt, Homo sapiens
  misc_RNA (1)...(19): siRNA sense strand
ccugaccgaugaagacuuu

SEQ ID NO: 1851575 - RNA, 19 nt, Homo sapiens
  misc_RNA (1)...(19): siRNA sense strand
gauggugcauuucauacug

SEQ ID NO: 1851576 - RNA, 19 nt, Homo sapiens
  misc_RNA (1)...(19): siRNA sense strand
caaagauguuguccaccuu

SEQ ID NO: 1851577 - RNA, 19 nt, Homo sapiens
  misc_RNA (1)...(19): siRNA sense strand
ugucuacuccucugaauuu

SEQ ID NO: 1851578 - RNA, 19 nt, Homo sapiens
  misc_RNA (1)...(19): siRNA sense strand
gggaagagcagcagacaag

SEQ ID NO: 1851579 - RNA, 19 nt, Homo sapiens
  misc_RNA (1)...(19): siRNA sense strand
cuucaaagaugaccgaaag

SEQ ID NO: 1851580 - RNA, 19 nt, Homo sapiens
  misc_RNA (1)...(19): siRNA sense strand
gaaacacaccuuggucaug

SEQ ID NO: 1851581 - RNA, 19 nt, Homo sapiens
  misc_RNA (1)...(19): siRNA sense strand
ucaaagacaagaaccaaga

SEQ ID NO: 1851582 - RNA, 19 nt, Homo sapiens
  misc_RNA (1)...(19): siRNA sense strand
gcucagaacccggaauaau

SEQ ID NO: 1851583 - RNA, 19 nt, Homo sapiens
  misc_RNA (1)...(19): siRNA sense strand
gagaagccgcuccugauca

SEQ ID NO: 1851584 - RNA, 19 nt, Homo sapiens
  misc_RNA (1)...(19): siRNA sense strand
ugaaaaucaucucagguua

SEQ ID NO: 1851585 - RNA, 19 nt, Homo sapiens
  misc_RNA (1)...(19): siRNA sense strand
ugacagcgaccgcacagaa

SEQ ID NO: 1851586 - RNA, 19 nt, Homo sapiens
  misc_RNA (1)...(19): siRNA sense strand
gaaguucgcagaaaaguau

SEQ ID NO: 1851587 - RNA, 19 nt, Homo sapiens
  misc_RNA (1)...(19): siRNA sense strand
uuuaucaccugaccgauga

SEQ ID NO: 1851588 - RNA, 19 nt, Homo sapiens
  misc_RNA (1)...(19): siRNA sense strand
guuccaguaugacaacuau

SEQ ID NO: 1851589 - RNA, 19 nt, Homo sapiens
  misc_RNA (1)...(19): siRNA sense strand
caggauggugcauuucaua

SEQ ID NO: 1851590 - RNA, 19 nt, Homo sapiens
  misc_RNA (1)...(19): siRNA sense strand
gagacucccugggcagaug

SEQ ID NO: 1851591 - RNA, 19 nt, Homo sapiens
  misc_RNA (1)...(19): siRNA sense strand
gaaugucuacuccucugaa

SEQ ID NO: 1851592 - RNA, 19 nt, Homo sapiens
  misc_RNA (1)...(19): siRNA sense strand
ucagaacccggaauaaugu

SEQ ID NO: 1851593 - RNA, 19 nt, Homo sapiens
  misc_RNA (1)...(19): siRNA sense strand
acaaggcccuggcagaaag

SEQ ID NO: 1851594 - RNA, 19 nt, Homo sapiens
  misc_RNA (1)...(19): siRNA sense strand
uuccuacguugaaguauuu

SEQ ID NO: 1851595 - RNA, 19 nt, Homo sapiens
  misc_RNA (1)...(19): siRNA sense strand
uaugggaaguucgcagaaa

SEQ ID NO: 1851596 - RNA, 19 nt, Homo sapiens
  misc_RNA (1)...(19): siRNA sense strand
gauuccacaucucagaguu

SEQ ID NO: 1851597 - RNA, 19 nt, Homo sapiens
  misc_RNA (1)...(19): siRNA sense strand
acaccuuggucauguucua

SEQ ID NO: 1851598 - RNA, 19 nt, Homo sapiens
  misc_RNA (1)...(19): siRNA sense strand
cgggagacccugaagaaga

SEQ ID NO: 1851599 - RNA, 19 nt, Homo sapiens
  misc_RNA (1)...(19): siRNA sense strand
guagaaaauugugcaagaa

SEQ ID NO: 1851600 - RNA, 19 nt, Homo sapiens
  misc_RNA (1)...(19): siRNA sense strand
ccucuguccucgucauguu

SEQ ID NO: 1851601 - RNA, 19 nt, Homo sapiens
  misc_RNA (1)...(19): siRNA sense strand
gacgguucuuguuccagua

SEQ ID NO: 1851602 - RNA, 19 nt, Homo sapiens
  misc_RNA (1)...(19): siRNA sense strand
agaagccgcuccugaucau

SEQ ID NO: 1851603 - RNA, 19 nt, Homo sapiens
  misc_RNA (1)...(19): siRNA sense strand
gaaaaugaagccggaguuu

SEQ ID NO: 1851604 - RNA, 19 nt, Homo sapiens
  misc_RNA (1)...(19): siRNA sense strand
caucugcuauuuugagaaa

SEQ ID NO: 1851605 - RNA, 19 nt, Homo sapiens
  misc_RNA (1)...(19): siRNA sense strand
accgagcugugacauuuaa

SEQ ID NO: 1851606 - RNA, 19 nt, Homo sapiens
  misc_RNA (1)...(19): siRNA sense strand
gauccuggagccaaagaug

SEQ ID NO: 1851607 - RNA, 19 nt, Homo sapiens
  misc_RNA (1)...(19): siRNA sense strand
cgcacagaauugggauuua

SEQ ID NO: 1851608 - RNA, 19 nt, Homo sapiens
  misc_RNA (1)...(19): siRNA sense strand
gugcuuuacuccaaaucug

SEQ ID NO: 1851609 - RNA, 19 nt, Homo sapiens
  misc_RNA (1)...(19): siRNA sense strand
gguucuuguuccaguauga

SEQ ID NO: 1851610 - RNA, 19 nt, Homo sapiens
  misc_RNA (1)...(19): siRNA sense strand
ccacagcugaggacauugu

SEQ ID NO: 1851611 - RNA, 19 nt, Homo sapiens
  misc_RNA (1)...(19): siRNA sense strand
cugaugccuucaaagauga

SEQ ID NO: 1851612 - RNA, 19 nt, Homo sapiens
  misc_RNA (1)...(19): siRNA sense strand
cagaguuuccuacguugaa

SEQ ID NO: 1851613 - RNA, 19 nt, Homo sapiens
  misc_RNA (1)...(19): siRNA sense strand
augaagacuuugaccaguu

SEQ ID NO: 1851614 - RNA, 19 nt, Homo sapiens
  misc_RNA (1)...(19): siRNA sense strand
uggaguggcugaagaaucc

SEQ ID NO: 1851615 - RNA, 19 nt, Homo sapiens
  misc_RNA (1)...(19): siRNA sense strand
uuuccuacguugaaguauu

SEQ ID NO: 1851616 - RNA, 19 nt, Homo sapiens
  misc_RNA (1)...(19): siRNA sense strand
ccaggauggugcauuucau

SEQ ID NO: 1851617 - RNA, 19 nt, Homo sapiens
  misc_RNA (1)...(19): siRNA sense strand
aaaggucuccucgcucauu

SEQ ID NO: 1851618 - RNA, 19 nt, Homo sapiens
  misc_RNA (1)...(19): siRNA sense strand
ucaaagaugaccgaaagau

SEQ ID NO: 1851619 - RNA, 19 nt, Homo sapiens
  misc_RNA (1)...(19): siRNA sense strand
aaucaucucagguuacugu

SEQ ID NO: 1851620 - RNA, 19 nt, Homo sapiens
  misc_RNA (1)...(19): siRNA sense strand
gcagcagacaagcguguug

SEQ ID NO: 1851621 - RNA, 19 nt, Homo sapiens
  misc_RNA (1)...(19): siRNA sense strand
gacuuugaccaguuuguga

SEQ ID NO: 1851622 - RNA, 19 nt, Homo sapiens
  misc_RNA (1)...(19): siRNA sense strand
ccgcacagaauugggauuu

SEQ ID NO: 1851623 - RNA, 19 nt, Homo sapiens
  misc_RNA (1)...(19): siRNA sense strand
cgaugccacugucaacaag

SEQ ID NO: 1851624 - RNA, 19 nt, Homo sapiens
  misc_RNA (1)...(19): siRNA sense strand
gcagagaguagaaaauugu

SEQ ID NO: 1851625 - RNA, 19 nt, Homo sapiens
  misc_RNA (1)...(19): siRNA sense strand
gggugguccugccaucaug

SEQ ID NO: 1851626 - RNA, 19 nt, Homo sapiens
  misc_RNA (1)...(19): siRNA sense strand
cugcugaugccuucaaaga

SEQ ID NO: 1851627 - RNA, 19 nt, Homo sapiens
  misc_RNA (1)...(19): siRNA sense strand
ucaggacaaagaagaaguu

SEQ ID NO: 1851628 - RNA, 19 nt, Homo sapiens
  misc_RNA (1)...(19): siRNA sense strand
cucagaacccggaauaaug

SEQ ID NO: 1851629 - RNA, 19 nt, Homo sapiens
  misc_RNA (1)...(19): siRNA sense strand
aagauguuguccaccuuga

SEQ ID NO: 1851630 - RNA, 19 nt, Homo sapiens
  misc_RNA (1)...(19): siRNA sense strand
gagcugugacauuuaaguc

SEQ ID NO: 1851631 - RNA, 19 nt, Homo sapiens
  misc_RNA (1)...(19): siRNA sense strand
ugcaagaagaugaaaguug

SEQ ID NO: 1851632 - RNA, 19 nt, Homo sapiens
  misc_RNA (1)...(19): siRNA sense strand
ccaugaaagacuagggaaa

SEQ ID NO: 1851633 - RNA, 19 nt, Homo sapiens
  misc_RNA (1)...(19): siRNA sense strand
cagcgaccgcacagaauug

SEQ ID NO: 1851634 - RNA, 19 nt, Homo sapiens
  misc_RNA (1)...(19): siRNA sense strand
agaaggucauuccgcacuu

SEQ ID NO: 1851635 - RNA, 19 nt, Homo sapiens
  misc_RNA (1)...(19): siRNA sense strand
gugcucaggacaaagaaga

SEQ ID NO: 1851636 - RNA, 19 nt, Homo sapiens
  misc_RNA (1)...(19): siRNA sense strand
aauaauguacuggugcuuu

SEQ ID NO: 1851637 - RNA, 19 nt, Homo sapiens
  misc_RNA (1)...(19): siRNA sense strand
aagagaagccgcuccugau

SEQ ID NO: 1851638 - RNA, 19 nt, Homo sapiens
  misc_RNA (1)...(19): siRNA sense strand
gguggacuguggugaugca

SEQ ID NO: 1851639 - RNA, 19 nt, Homo sapiens
  misc_RNA (1)...(19): siRNA sense strand
ggugaugcagagaguagaa

SEQ ID NO: 1851640 - RNA, 19 nt, Homo sapiens
  misc_RNA (1)...(19): siRNA sense strand
gacagcgaccgcacagaau

SEQ ID NO: 1851641 - RNA, 19 nt, Homo sapiens
  misc_RNA (1)...(19): siRNA sense strand
gaaaauugugcaagaagau

SEQ ID NO: 1851642 - RNA, 19 nt, Homo sapiens
  misc_RNA (1)...(19): siRNA sense strand
agaagaagaaacacaccuu

SEQ ID NO: 1851643 - RNA, 19 nt, Homo sapiens
  misc_RNA (1)...(19): siRNA sense strand
cugcucagaacccggaaua

SEQ ID NO: 1851644 - RNA, 19 nt, Homo sapiens
  misc_RNA (1)...(19): siRNA sense strand
acagcgaccgcacagaauu

SEQ ID NO: 1851645 - RNA, 19 nt, Homo sapiens
  misc_RNA (1)...(19): siRNA sense strand
auuccgcacuuuacugcua

SEQ ID NO: 1851646 - RNA, 19 nt, Homo sapiens
  misc_RNA (1)...(19): siRNA sense strand
agaagaaacacaccuuggu

SEQ ID NO: 1851647 - RNA, 19 nt, Homo sapiens
  misc_RNA (1)...(19): siRNA sense strand
caugguguggccacuguaa

SEQ ID NO: 1851648 - RNA, 19 nt, Homo sapiens
  misc_RNA (1)...(19): siRNA sense strand
ucauggcuguccucugcaa

SEQ ID NO: 1851649 - RNA, 19 nt, Homo sapiens
  misc_RNA (1)...(19): siRNA sense strand
ugaccgaugaagacuuuga

SEQ ID NO: 1851650 - RNA, 19 nt, Homo sapiens
  misc_RNA (1)...(19): siRNA sense strand
ugaagccggaguuugagaa

SEQ ID NO: 1851651 - RNA, 19 nt, Homo sapiens
  misc_RNA (1)...(19): siRNA sense strand
cagaacccggaauaaugua

SEQ ID NO: 1851652 - RNA, 19 nt, Homo sapiens
  misc_RNA (1)...(19): siRNA sense strand
ggaaguucgcagaaaagua

SEQ ID NO: 1851653 - RNA, 19 nt, Homo sapiens
  misc_RNA (1)...(19): siRNA sense strand
gauugccugugccgcuguu

SEQ ID NO: 1851654 - RNA, 19 nt, Homo sapiens
  misc_RNA (1)...(19): siRNA sense strand
gcagaaaucuccuacauug

SEQ ID NO: 1851655 - RNA, 19 nt, Homo sapiens
  misc_RNA (1)...(19): siRNA sense strand
gcacacaccucuaguggaa

SEQ ID NO: 1851656 - RNA, 19 nt, Homo sapiens
  misc_RNA (1)...(19): siRNA sense strand
ggauaaacaucaugagaaa

SEQ ID NO: 1851657 - RNA, 19 nt, Homo sapiens
  misc_RNA (1)...(19): siRNA sense strand
caacaaggcucaggaguga

SEQ ID NO: 1851658 - RNA, 19 nt, Homo sapiens
  misc_RNA (1)...(19): siRNA sense strand
gcucaggaauggaaguuua

SEQ ID NO: 1851659 - RNA, 19 nt, Homo sapiens
  misc_RNA (1)...(19): siRNA sense strand
guaaccaacuggcaauuaa

SEQ ID NO: 1851660 - RNA, 19 nt, Homo sapiens
  misc_RNA (1)...(19): siRNA sense strand
gacgaggucucccauagua

SEQ ID NO: 1851661 - RNA, 19 nt, Homo sapiens
  misc_RNA (1)...(19): siRNA sense strand
agaagaaacuguaaaggaa

SEQ ID NO: 1851662 - RNA, 19 nt, Homo sapiens
  misc_RNA (1)...(19): siRNA sense strand
ggacaaacacaaacagaaa

SEQ ID NO: 1851663 - RNA, 19 nt, Homo sapiens
  misc_RNA (1)...(19): siRNA sense strand
uaagagcccucauauagga

SEQ ID NO: 1851664 - RNA, 19 nt, Homo sapiens
  misc_RNA (1)...(19): siRNA sense strand
gcucacagcucaggucaaa

SEQ ID NO: 1851665 - RNA, 19 nt, Homo sapiens
  misc_RNA (1)...(19): siRNA sense strand
ggugacaguucuacacuaa

SEQ ID NO: 1851666 - RNA, 19 nt, Homo sapiens
  misc_RNA (1)...(19): siRNA sense strand
cgacaggcuuuccauguaa

SEQ ID NO: 1851667 - RNA, 19 nt, Homo sapiens
  misc_RNA (1)...(19): siRNA sense strand
ggacuaggauuacuuucug

SEQ ID NO: 1851668 - RNA, 19 nt, Homo sapiens
  misc_RNA (1)...(19): siRNA sense strand
gaucuaauaggucauauga

SEQ ID NO: 1851669 - RNA, 19 nt, Homo sapiens
  misc_RNA (1)...(19): siRNA sense strand
ggaagucucucgccacgau

SEQ ID NO: 1851670 - RNA, 19 nt, Homo sapiens
  misc_RNA (1)...(19): siRNA sense strand
ggucauaugaucaaaguuu

SEQ ID NO: 1851671 - RNA, 19 nt, Homo sapiens
  misc_RNA (1)...(19): siRNA sense strand
cagcaaugauguagcagua

SEQ ID NO: 1851672 - RNA, 19 nt, Homo sapiens
  misc_RNA (1)...(19): siRNA sense strand
gaauguuucucaucucuca

SEQ ID NO: 1851673 - RNA, 19 nt, Homo sapiens
  misc_RNA (1)...(19): siRNA sense strand
uuacagagccucaguguug

SEQ ID NO: 1851674 - RNA, 19 nt, Homo sapiens
  misc_RNA (1)...(19): siRNA sense strand
cagcaacgacaaauacuua

SEQ ID NO: 1851675 - RNA, 19 nt, Homo sapiens
  misc_RNA (1)...(19): siRNA sense strand
guaaagucaucuucuggaa

SEQ ID NO: 1851676 - RNA, 19 nt, Homo sapiens
  misc_RNA (1)...(19): siRNA sense strand
uaacagcaaugauguagca

SEQ ID NO: 1851677 - RNA, 19 nt, Homo sapiens
  misc_RNA (1)...(19): siRNA sense strand
gcucuagucugcagaaauc

SEQ ID NO: 1851678 - RNA, 19 nt, Homo sapiens
  misc_RNA (1)...(19): siRNA sense strand
gaagaaacuguaaaggaaa

SEQ ID NO: 1851679 - RNA, 19 nt, Homo sapiens
  misc_RNA (1)...(19): siRNA sense strand
gaaugcagccuguaacuuc

SEQ ID NO: 1851680 - RNA, 19 nt, Homo sapiens
  misc_RNA (1)...(19): siRNA sense strand
cgacagaggugacaguucu

SEQ ID NO: 1851681 - RNA, 19 nt, Homo sapiens
  misc_RNA (1)...(19): siRNA sense strand
ggcaauagaucaaauucau

SEQ ID NO: 1851682 - RNA, 19 nt, Homo sapiens
  misc_RNA (1)...(19): siRNA sense strand
ucuaauaggucauaugauc

SEQ ID NO: 1851683 - RNA, 19 nt, Homo sapiens
  misc_RNA (1)...(19): siRNA sense strand
gcacagacugcuccuacua

SEQ ID NO: 1851684 - RNA, 19 nt, Homo sapiens
  misc_RNA (1)...(19): siRNA sense strand
gcaguaucguuuccaaaug

SEQ ID NO: 1851685 - RNA, 19 nt, Homo sapiens
  misc_RNA (1)...(19): siRNA sense strand
gcaaugauguagcaguauc

SEQ ID NO: 1851686 - RNA, 19 nt, Homo sapiens
  misc_RNA (1)...(19): siRNA sense strand
ccaaagauguacauaaagg

SEQ ID NO: 1851687 - RNA, 19 nt, Homo sapiens
  misc_RNA (1)...(19): siRNA sense strand
agagugagaugugaacuuu

SEQ ID NO: 1851688 - RNA, 19 nt, Homo sapiens
  misc_RNA (1)...(19): siRNA sense strand
ccaguugguucagaaauuu

SEQ ID NO: 1851689 - RNA, 19 nt, Homo sapiens
  misc_RNA (1)...(19): siRNA sense strand
caaccaaagauguacauaa

SEQ ID NO: 1851690 - RNA, 19 nt, Homo sapiens
  misc_RNA (1)...(19): siRNA sense strand
guuccauccuugacuguua

SEQ ID NO: 1851691 - RNA, 19 nt, Homo sapiens
  misc_RNA (1)...(19): siRNA sense strand
uaacagugccucaggacua

SEQ ID NO: 1851692 - RNA, 19 nt, Homo sapiens
  misc_RNA (1)...(19): siRNA sense strand
gcaguaagagcccucauau

SEQ ID NO: 1851693 - RNA, 19 nt, Homo sapiens
  misc_RNA (1)...(19): siRNA sense strand
acucagaucugcguaauga

SEQ ID NO: 1851694 - RNA, 19 nt, Homo sapiens
  misc_RNA (1)...(19): siRNA sense strand
gcagacuccugucacaaug

SEQ ID NO: 1851695 - RNA, 19 nt, Homo sapiens
  misc_RNA (1)...(19): siRNA sense strand
gcaaauacucuaucuggau

SEQ ID NO: 1851696 - RNA, 19 nt, Homo sapiens
  misc_RNA (1)...(19): siRNA sense strand
caacaacuacguucucaga

SEQ ID NO: 1851697 - RNA, 19 nt, Homo sapiens
  misc_RNA (1)...(19): siRNA sense strand
gaacaggguacuccuagug

SEQ ID NO: 1851698 - RNA, 19 nt, Homo sapiens
  misc_RNA (1)...(19): siRNA sense strand
gcuuacagauucgcuauga

SEQ ID NO: 1851699 - RNA, 19 nt, Homo sapiens
  misc_RNA (1)...(19): siRNA sense strand
uugaagcgcuuggaagaua

SEQ ID NO: 1851700 - RNA, 19 nt, Homo sapiens
  misc_RNA (1)...(19): siRNA sense strand
gauacuacugcacgauuua

SEQ ID NO: 1851701 - RNA, 19 nt, Homo sapiens
  misc_RNA (1)...(19): siRNA sense strand
ccaauacuguggcuacugu

SEQ ID NO: 1851702 - RNA, 19 nt, Homo sapiens
  misc_RNA (1)...(19): siRNA sense strand
aaaggaacggcuucaguua

SEQ ID NO: 1851703 - RNA, 19 nt, Homo sapiens
  misc_RNA (1)...(19): siRNA sense strand
ggaaauaaacaaaguaagc

SEQ ID NO: 1851704 - RNA, 19 nt, Homo sapiens
  misc_RNA (1)...(19): siRNA sense strand
ucgacaggcuuuccaugua

SEQ ID NO: 1851705 - RNA, 19 nt, Homo sapiens
  misc_RNA (1)...(19): siRNA sense strand
uaaugcaagucagaaagua

SEQ ID NO: 1851706 - RNA, 19 nt, Homo sapiens
  misc_RNA (1)...(19): siRNA sense strand
gguaaccaacuggcaauua

SEQ ID NO: 1851707 - RNA, 19 nt, Homo sapiens
  misc_RNA (1)...(19): siRNA sense strand
ugauaauucucuuccugua

SEQ ID NO: 1851708 - RNA, 19 nt, Homo sapiens
  misc_RNA (1)...(19): siRNA sense strand
gaacggcuucaguuauuga

SEQ ID NO: 1851709 - RNA, 19 nt, Homo sapiens
  misc_RNA (1)...(19): siRNA sense strand
ggaacggcuucaguuauug

SEQ ID NO: 1851710 - RNA, 19 nt, Homo sapiens
  misc_RNA (1)...(19): siRNA sense strand
aggaacggcuucaguuauu

SEQ ID NO: 1851711 - RNA, 19 nt, Homo sapiens
  misc_RNA (1)...(19): siRNA sense strand
guucagaaauuuccaugca

SEQ ID NO: 1851712 - RNA, 19 nt, Homo sapiens
  misc_RNA (1)...(19): siRNA sense strand
cauagaagaagaaacugua

SEQ ID NO: 1851713 - RNA, 19 nt, Homo sapiens
  misc_RNA (1)...(19): siRNA sense strand
aguaagagcccucauauag

SEQ ID NO: 1851714 - RNA, 19 nt, Homo sapiens
  misc_RNA (1)...(19): siRNA sense strand
ggcaccaucucauauguau

SEQ ID NO: 1851715 - RNA, 19 nt, Homo sapiens
  misc_RNA (1)...(19): siRNA sense strand
ugacaguucuacacuaaca

SEQ ID NO: 1851716 - RNA, 19 nt, Homo sapiens
  misc_RNA (1)...(19): siRNA sense strand
ugauggagcuugcccaaca

SEQ ID NO: 1851717 - RNA, 19 nt, Homo sapiens
  misc_RNA (1)...(19): siRNA sense strand
ggaaaggaaauaaacaaag

SEQ ID NO: 1851718 - RNA, 19 nt, Homo sapiens
  misc_RNA (1)...(19): siRNA sense strand
gaacaaggaagagaaagca

SEQ ID NO: 1851719 - RNA, 19 nt, Homo sapiens
  misc_RNA (1)...(19): siRNA sense strand
ggagauaaugcaagucaga

SEQ ID NO: 1851720 - RNA, 19 nt, Homo sapiens
  misc_RNA (1)...(19): siRNA sense strand
acacaaccguaccaccuaa

SEQ ID NO: 1851721 - RNA, 19 nt, Homo sapiens
  misc_RNA (1)...(19): siRNA sense strand
gcaguggguggaauaauug

SEQ ID NO: 1851722 - RNA, 19 nt, Homo sapiens
  misc_RNA (1)...(19): siRNA sense strand
ggagcuugcccaacaacua

SEQ ID NO: 1851723 - RNA, 19 nt, Homo sapiens
  misc_RNA (1)...(19): siRNA sense strand
ucaccaacaucaucuguag

SEQ ID NO: 1851724 - RNA, 19 nt, Homo sapiens
  misc_RNA (1)...(19): siRNA sense strand
gaaaagaaaaggaaaggaa

SEQ ID NO: 1851725 - RNA, 19 nt, Homo sapiens
  misc_RNA (1)...(19): siRNA sense strand
gcacuagcaacaacucuau

SEQ ID NO: 1851726 - RNA, 19 nt, Homo sapiens
  misc_RNA (1)...(19): siRNA sense strand
ccgcaugaucguuauaaua

SEQ ID NO: 1851727 - RNA, 19 nt, Homo sapiens
  misc_RNA (1)...(19): siRNA sense strand
gagagcagccagagugaga

SEQ ID NO: 1851728 - RNA, 19 nt, Homo sapiens
  misc_RNA (1)...(19): siRNA sense strand
ggcucaaacuucuggcaua

SEQ ID NO: 1851729 - RNA, 19 nt, Homo sapiens
  misc_RNA (1)...(19): siRNA sense strand
gauauaagcgggcucaaac

SEQ ID NO: 1851730 - RNA, 19 nt, Homo sapiens
  misc_RNA (1)...(19): siRNA sense strand
guaauggugccgauaaugu

SEQ ID NO: 1851731 - RNA, 19 nt, Homo sapiens
  misc_RNA (1)...(19): siRNA sense strand
gaugaacaaggaagagaaa

SEQ ID NO: 1851732 - RNA, 19 nt, Homo sapiens
  misc_RNA (1)...(19): siRNA sense strand
gcaggaagcauaacaagcu

SEQ ID NO: 1851733 - RNA, 19 nt, Homo sapiens
  misc_RNA (1)...(19): siRNA sense strand
gcuauggcauuguucaagu

SEQ ID NO: 1851734 - RNA, 19 nt, Homo sapiens
  misc_RNA (1)...(19): siRNA sense strand
uggaauaauuggagcuuug

SEQ ID NO: 1851735 - RNA, 19 nt, Homo sapiens
  misc_RNA (1)...(19): siRNA sense strand
gccuguaacuuccaccauu

SEQ ID NO: 1851736 - RNA, 19 nt, Homo sapiens
  misc_RNA (1)...(19): siRNA sense strand
ugauguagcaguaucguuu

SEQ ID NO: 1851737 - RNA, 19 nt, Homo sapiens
  misc_RNA (1)...(19): siRNA sense strand
ggaacuccaggcaguguaa

SEQ ID NO: 1851738 - RNA, 19 nt, Homo sapiens
  misc_RNA (1)...(19): siRNA sense strand
ugcaguggguggaauaauu

SEQ ID NO: 1851739 - RNA, 19 nt, Homo sapiens
  misc_RNA (1)...(19): siRNA sense strand
ccuaguccgucucaucaaa

SEQ ID NO: 1851740 - RNA, 19 nt, Homo sapiens
  misc_RNA (1)...(19): siRNA sense strand
gagaggcaguggagugaag

SEQ ID NO: 1851741 - RNA, 19 nt, Homo sapiens
  misc_RNA (1)...(19): siRNA sense strand
caguaucguuuccaaaugu

SEQ ID NO: 1851742 - RNA, 19 nt, Homo sapiens
  misc_RNA (1)...(19): siRNA sense strand
gcucaaacuucuggcauag

SEQ ID NO: 1851743 - RNA, 19 nt, Homo sapiens
  misc_RNA (1)...(19): siRNA sense strand
ggauauaagcgggcucaaa

SEQ ID NO: 1851744 - RNA, 19 nt, Homo sapiens
  misc_RNA (1)...(19): siRNA sense strand
ccgauaauguccaauacug

SEQ ID NO: 1851745 - RNA, 19 nt, Homo sapiens
  misc_RNA (1)...(19): siRNA sense strand
gaagauuagaggaacaaau

SEQ ID NO: 1851746 - RNA, 19 nt, Homo sapiens
  misc_RNA (1)...(19): siRNA sense strand
ggcaacagcaguuuggaaa

SEQ ID NO: 1851747 - RNA, 19 nt, Homo sapiens
  misc_RNA (1)...(19): siRNA sense strand
ucacuuaccucagcagucu

SEQ ID NO: 1851748 - RNA, 19 nt, Homo sapiens
  misc_RNA (1)...(19): siRNA sense strand
gaagaaauccaggaacaac

SEQ ID NO: 1851749 - RNA, 19 nt, Homo sapiens
  misc_RNA (1)...(19): siRNA sense strand
agacugcuccuacuacuga

SEQ ID NO: 1851750 - RNA, 19 nt, Homo sapiens
  misc_RNA (1)...(19): siRNA sense strand
ggaagcauaacaagcucua

SEQ ID NO: 1851751 - RNA, 19 nt, Homo sapiens
  misc_RNA (1)...(19): siRNA sense strand
gagugaaggacagcaauuu

SEQ ID NO: 1851752 - RNA, 19 nt, Homo sapiens
  misc_RNA (1)...(19): siRNA sense strand
caacagcucacaccaguac

SEQ ID NO: 1851753 - RNA, 19 nt, Homo sapiens
  misc_RNA (1)...(19): siRNA sense strand
gagguacaauuugccaaug

SEQ ID NO: 1851754 - RNA, 19 nt, Homo sapiens
  misc_RNA (1)...(19): siRNA sense strand
gcacuuguaugaugaggua

SEQ ID NO: 1851755 - RNA, 19 nt, Homo sapiens
  misc_RNA (1)...(19): siRNA sense strand
gacaauaucugacaucucu

SEQ ID NO: 1851756 - RNA, 19 nt, Homo sapiens
  misc_RNA (1)...(19): siRNA sense strand
ggagacgccuuaaacuuga

SEQ ID NO: 1851757 - RNA, 19 nt, Homo sapiens
  misc_RNA (1)...(19): siRNA sense strand
gauuaaagguugugagucu

SEQ ID NO: 1851758 - RNA, 19 nt, Homo sapiens
  misc_RNA (1)...(19): siRNA sense strand
gggugaggcugguguguuu

SEQ ID NO: 1851759 - RNA, 19 nt, Homo sapiens
  misc_RNA (1)...(19): siRNA sense strand
gggagacgccuuaaacuug

SEQ ID NO: 1851760 - RNA, 19 nt, Homo sapiens
  misc_RNA (1)...(19): siRNA sense strand
agaagucgcucauccugaa

SEQ ID NO: 1851761 - RNA, 19 nt, Homo sapiens
  misc_RNA (1)...(19): siRNA sense strand
uaucugacaucucugcaaa

SEQ ID NO: 1851762 - RNA, 19 nt, Homo sapiens
  misc_RNA (1)...(19): siRNA sense strand
ccagagcccucccucaugu

SEQ ID NO: 1851763 - RNA, 19 nt, Homo sapiens
  misc_RNA (1)...(19): siRNA sense strand
ggcaguugcuggucuguga

SEQ ID NO: 1851764 - RNA, 19 nt, Homo sapiens
  misc_RNA (1)...(19): siRNA sense strand
ccacuggccugaagacaca

SEQ ID NO: 1851765 - RNA, 19 nt, Homo sapiens
  misc_RNA (1)...(19): siRNA sense strand
gcgaugacgcggaguauga

SEQ ID NO: 1851766 - RNA, 19 nt, Homo sapiens
  misc_RNA (1)...(19): siRNA sense strand
caaaccaacauucaacuug

SEQ ID NO: 1851767 - RNA, 19 nt, Homo sapiens
  misc_RNA (1)...(19): siRNA sense strand
aggaggaggugucuuauuc

SEQ ID NO: 1851768 - RNA, 19 nt, Homo sapiens
  misc_RNA (1)...(19): siRNA sense strand
aaaccaacauucaacuugu

SEQ ID NO: 1851769 - RNA, 19 nt, Homo sapiens
  misc_RNA (1)...(19): siRNA sense strand
ggaccaaaccaacauucaa

SEQ ID NO: 1851770 - RNA, 19 nt, Homo sapiens
  misc_RNA (1)...(19): siRNA sense strand
gcccagaaacuguggauug

SEQ ID NO: 1851771 - RNA, 19 nt, Homo sapiens
  misc_RNA (1)...(19): siRNA sense strand
ggacaaccaggccaaguuc

SEQ ID NO: 1851772 - RNA, 19 nt, Homo sapiens
  misc_RNA (1)...(19): siRNA sense strand
gggagagacugggagaaga

SEQ ID NO: 1851773 - RNA, 19 nt, Homo sapiens
  misc_RNA (1)...(19): siRNA sense strand
cagaggcagagccguauua

SEQ ID NO: 1851774 - RNA, 19 nt, Homo sapiens
  misc_RNA (1)...(19): siRNA sense strand
caugugaggccuucaguga

SEQ ID NO: 1851775 - RNA, 19 nt, Homo sapiens
  misc_RNA (1)...(19): siRNA sense strand
cuacagccuucuacaagau

SEQ ID NO: 1851776 - RNA, 19 nt, Homo sapiens
  misc_RNA (1)...(19): siRNA sense strand
ggauuacgcccucuucaca

SEQ ID NO: 1851777 - RNA, 19 nt, Homo sapiens
  misc_RNA (1)...(19): siRNA sense strand
ggagacagcaccaguucug

SEQ ID NO: 1851778 - RNA, 19 nt, Homo sapiens
  misc_RNA (1)...(19): siRNA sense strand
cugcaucuguggaauguga

SEQ ID NO: 1851779 - RNA, 19 nt, Homo sapiens
  misc_RNA (1)...(19): siRNA sense strand
ucacagggccgucggacaa

SEQ ID NO: 1851780 - RNA, 19 nt, Homo sapiens
  misc_RNA (1)...(19): siRNA sense strand
cccagaaacuguggauuga

SEQ ID NO: 1851781 - RNA, 19 nt, Homo sapiens
  misc_RNA (1)...(19): siRNA sense strand
gcaccugacaucaccauuc

SEQ ID NO: 1851782 - RNA, 19 nt, Homo sapiens
  misc_RNA (1)...(19): siRNA sense strand
ggacccagcuucccaucac

SEQ ID NO: 1851783 - RNA, 19 nt, Homo sapiens
  misc_RNA (1)...(19): siRNA sense strand
caacuaacgugacgauccu

SEQ ID NO: 1851784 - RNA, 19 nt, Homo sapiens
  misc_RNA (1)...(19): siRNA sense strand
gcagugugcuggugaugac

SEQ ID NO: 1851785 - RNA, 19 nt, Homo sapiens
  misc_RNA (1)...(19): siRNA sense strand
gaagccagcaccugacauc

SEQ ID NO: 1851786 - RNA, 19 nt, Homo sapiens
  misc_RNA (1)...(19): siRNA sense strand
gacccuccaucaggauuaa

SEQ ID NO: 1851787 - RNA, 19 nt, Homo sapiens
  misc_RNA (1)...(19): siRNA sense strand
uggaugacauggagaagau

SEQ ID NO: 1851788 - RNA, 19 nt, Homo sapiens
  misc_RNA (1)...(19): siRNA sense strand
ccugugaccucagcgauga

SEQ ID NO: 1851789 - RNA, 19 nt, Homo sapiens
  misc_RNA (1)...(19): siRNA sense strand
gauccaagaggaaucuaug

SEQ ID NO: 1851790 - RNA, 19 nt, Homo sapiens
  misc_RNA (1)...(19): siRNA sense strand
caggagagcgggacacuca

SEQ ID NO: 1851791 - RNA, 19 nt, Homo sapiens
  misc_RNA (1)...(19): siRNA sense strand
cuagugccauuauuaucuu

SEQ ID NO: 1851792 - RNA, 19 nt, Homo sapiens
  misc_RNA (1)...(19): siRNA sense strand
ccugggcacuuguaugaug

SEQ ID NO: 1851793 - RNA, 19 nt, Homo sapiens
  misc_RNA (1)...(19): siRNA sense strand
aagaccagcugcccacaga

SEQ ID NO: 1851794 - RNA, 19 nt, Homo sapiens
  misc_RNA (1)...(19): siRNA sense strand
gguacacggagcacacaua

SEQ ID NO: 1851795 - RNA, 19 nt, Homo sapiens
  misc_RNA (1)...(19): siRNA sense strand
ggagagacugggagaagau

SEQ ID NO: 1851796 - RNA, 19 nt, Homo sapiens
  misc_RNA (1)...(19): siRNA sense strand
ggacccugcuagaggugaa

SEQ ID NO: 1851797 - RNA, 19 nt, Homo sapiens
  misc_RNA (1)...(19): siRNA sense strand
cgcaggaggaggugucuua

SEQ ID NO: 1851798 - RNA, 19 nt, Homo sapiens
  misc_RNA (1)...(19): siRNA sense strand
cugaaggccuggcgcaguu

SEQ ID NO: 1851799 - RNA, 19 nt, Homo sapiens
  misc_RNA (1)...(19): siRNA sense strand
agcagaaacucuucacugu

SEQ ID NO: 1851800 - RNA, 19 nt, Homo sapiens
  misc_RNA (1)...(19): siRNA sense strand
ucuacagccuucuacaaga

SEQ ID NO: 1851801 - RNA, 19 nt, Homo sapiens
  misc_RNA (1)...(19): siRNA sense strand
ggagcguccuucugcaagu

SEQ ID NO: 1851802 - RNA, 19 nt, Homo sapiens
  misc_RNA (1)...(19): siRNA sense strand
gcagcuggcggugcaguuu

SEQ ID NO: 1851803 - RNA, 19 nt, Homo sapiens
  misc_RNA (1)...(19): siRNA sense strand
caccgugaauguucuguuc

SEQ ID NO: 1851804 - RNA, 19 nt, Homo sapiens
  misc_RNA (1)...(19): siRNA sense strand
ugcaguggcugaagaaugg

SEQ ID NO: 1851805 - RNA, 19 nt, Homo sapiens
  misc_RNA (1)...(19): siRNA sense strand
ggagagcgggacacucaga

SEQ ID NO: 1851806 - RNA, 19 nt, Homo sapiens
  misc_RNA (1)...(19): siRNA sense strand
ccccggagcucagauaaua

SEQ ID NO: 1851807 - RNA, 19 nt, Homo sapiens
  misc_RNA (1)...(19): siRNA sense strand
ggucuacagccuucuacaa

SEQ ID NO: 1851808 - RNA, 19 nt, Homo sapiens
  misc_RNA (1)...(19): siRNA sense strand
gcgaaaccgugagcuccuu

SEQ ID NO: 1851809 - RNA, 19 nt, Homo sapiens
  misc_RNA (1)...(19): siRNA sense strand
caccugacaucaccauucu

SEQ ID NO: 1851810 - RNA, 19 nt, Homo sapiens
  misc_RNA (1)...(19): siRNA sense strand
gaccuccacuggccugaag

SEQ ID NO: 1851811 - RNA, 19 nt, Homo sapiens
  misc_RNA (1)...(19): siRNA sense strand
gaugacauggagaagauau

SEQ ID NO: 1851812 - RNA, 19 nt, Homo sapiens
  misc_RNA (1)...(19): siRNA sense strand
ggaggagacagucauggau

SEQ ID NO: 1851813 - RNA, 19 nt, Homo sapiens
  misc_RNA (1)...(19): siRNA sense strand
gcucagauaauaggcaguu

SEQ ID NO: 1851814 - RNA, 19 nt, Homo sapiens
  misc_RNA (1)...(19): siRNA sense strand
ggacuccaggguuccacua

SEQ ID NO: 1851815 - RNA, 19 nt, Homo sapiens
  misc_RNA (1)...(19): siRNA sense strand
cagcugcacugccagaacu

SEQ ID NO: 1851816 - RNA, 19 nt, Homo sapiens
  misc_RNA (1)...(19): siRNA sense strand
gagcguccuucugcaagug

SEQ ID NO: 1851817 - RNA, 19 nt, Homo sapiens
  misc_RNA (1)...(19): siRNA sense strand
ucgcucauccugaacguaa

SEQ ID NO: 1851818 - RNA, 19 nt, Homo sapiens
  misc_RNA (1)...(19): siRNA sense strand
gagucaggaacgaauauga

SEQ ID NO: 1851819 - RNA, 19 nt, Homo sapiens
  misc_RNA (1)...(19): siRNA sense strand
caucaggauuaaagguugu

SEQ ID NO: 1851820 - RNA, 19 nt, Homo sapiens
  misc_RNA (1)...(19): siRNA sense strand
ccaaaccaacauucaacuu

SEQ ID NO: 1851821 - RNA, 19 nt, Homo sapiens
  misc_RNA (1)...(19): siRNA sense strand
gaggggacaucugguguaa

SEQ ID NO: 1851822 - RNA, 19 nt, Homo sapiens
  misc_RNA (1)...(19): siRNA sense strand
ccgauucucugcccuucga

SEQ ID NO: 1851823 - RNA, 19 nt, Homo sapiens
  misc_RNA (1)...(19): siRNA sense strand
ggccugaagacacauauca

SEQ ID NO: 1851824 - RNA, 19 nt, Homo sapiens
  misc_RNA (1)...(19): siRNA sense strand
gauccucuccauccugguu

SEQ ID NO: 1851825 - RNA, 19 nt, Homo sapiens
  misc_RNA (1)...(19): siRNA sense strand
ggaguacguggucaacugu

SEQ ID NO: 1851826 - RNA, 19 nt, Homo sapiens
  misc_RNA (1)...(19): siRNA sense strand
ugacaaagggacccagcuu

SEQ ID NO: 1851827 - RNA, 19 nt, Homo sapiens
  misc_RNA (1)...(19): siRNA sense strand
ggacgacggccucuaucag

SEQ ID NO: 1851828 - RNA, 19 nt, Homo sapiens
  misc_RNA (1)...(19): siRNA sense strand
ugaagacacauaucaggau

SEQ ID NO: 1851829 - RNA, 19 nt, Homo sapiens
  misc_RNA (1)...(19): siRNA sense strand
gaccaaaccaacauucaac

SEQ ID NO: 1851830 - RNA, 19 nt, Homo sapiens
  misc_RNA (1)...(19): siRNA sense strand
cggcugcuccgucuuguug

SEQ ID NO: 1851831 - RNA, 19 nt, Homo sapiens
  misc_RNA (1)...(19): siRNA sense strand
guacacggagcacacauac

SEQ ID NO: 1851832 - RNA, 19 nt, Homo sapiens
  misc_RNA (1)...(19): siRNA sense strand
acacggagcacacauacca

SEQ ID NO: 1851833 - RNA, 19 nt, Homo sapiens
  misc_RNA (1)...(19): siRNA sense strand
caucccagacugagaacaa

SEQ ID NO: 1851834 - RNA, 19 nt, Homo sapiens
  misc_RNA (1)...(19): siRNA sense strand
caggugaagaugaggauau

SEQ ID NO: 1851835 - RNA, 19 nt, Homo sapiens
  misc_RNA (1)...(19): siRNA sense strand
gauucaccaugccaaacug

SEQ ID NO: 1851836 - RNA, 19 nt, Homo sapiens
  misc_RNA (1)...(19): siRNA sense strand
cgggagacgccuuaaacuu

SEQ ID NO: 1851837 - RNA, 19 nt, Homo sapiens
  misc_RNA (1)...(19): siRNA sense strand
guaugaugagguagaaaga

SEQ ID NO: 1851838 - RNA, 19 nt, Homo sapiens
  misc_RNA (1)...(19): siRNA sense strand
aggaguacguggucaacug

SEQ ID NO: 1851839 - RNA, 19 nt, Homo sapiens
  misc_RNA (1)...(19): siRNA sense strand
cuccaggguuccacuaugu

SEQ ID NO: 1851840 - RNA, 19 nt, Homo sapiens
  misc_RNA (1)...(19): siRNA sense strand
gguucugcaucagguauga

SEQ ID NO: 1851841 - RNA, 19 nt, Homo sapiens
  misc_RNA (1)...(19): siRNA sense strand
acauucaacuugucagcau

SEQ ID NO: 1851842 - RNA, 19 nt, Homo sapiens
  misc_RNA (1)...(19): siRNA sense strand
caucaccauucuccugagu

SEQ ID NO: 1851843 - RNA, 19 nt, Homo sapiens
  misc_RNA (1)...(19): siRNA sense strand
gcgcuuaccagugcauugu

SEQ ID NO: 1851844 - RNA, 19 nt, Homo sapiens
  misc_RNA (1)...(19): siRNA sense strand
cgagggcucccagcagaaa

SEQ ID NO: 1851845 - RNA, 19 nt, Homo sapiens
  misc_RNA (1)...(19): siRNA sense strand
agacuuggacacucuggaa

SEQ ID NO: 1851846 - RNA, 19 nt, Homo sapiens
  misc_RNA (1)...(19): siRNA sense strand
ucccugggcacuuguauga

SEQ ID NO: 1851847 - RNA, 19 nt, Homo sapiens
  misc_RNA (1)...(19): siRNA sense strand
caggaggaggugucuuauu

SEQ ID NO: 1851848 - RNA, 19 nt, Homo sapiens
  misc_RNA (1)...(19): siRNA sense strand
gcaggaggaggugucuuau

SEQ ID NO: 1851849 - RNA, 19 nt, Homo sapiens
  misc_RNA (1)...(19): siRNA sense strand
uuaaagguugugagucuga

SEQ ID NO: 1851850 - RNA, 19 nt, Homo sapiens
  misc_RNA (1)...(19): siRNA sense strand
ugacccuccaucaggauua

SEQ ID NO: 1851851 - RNA, 19 nt, Homo sapiens
  misc_RNA (1)...(19): siRNA sense strand
gaccauugccaacgugucu

SEQ ID NO: 1851852 - RNA, 19 nt, Homo sapiens
  misc_RNA (1)...(19): siRNA sense strand
uaucaggauccaagaggaa

SEQ ID NO: 1851853 - RNA, 19 nt, Homo sapiens
  misc_RNA (1)...(19): siRNA sense strand
ggaccgagucaggaacgaa

SEQ ID NO: 1851854 - RNA, 19 nt, Homo sapiens
  misc_RNA (1)...(19): siRNA sense strand
ggacuggaccaaccucaaa

SEQ ID NO: 1851855 - RNA, 19 nt, Homo sapiens
  misc_RNA (1)...(19): siRNA sense strand
gugcgacgcucccauagug

SEQ ID NO: 1851856 - RNA, 19 nt, Homo sapiens
  misc_RNA (1)...(19): siRNA sense strand
ucaacacaaucucaaguga

SEQ ID NO: 1851857 - RNA, 19 nt, Homo sapiens
  misc_RNA (1)...(19): siRNA sense strand
gcaagauggcucacaccua

SEQ ID NO: 1851858 - RNA, 19 nt, Homo sapiens
  misc_RNA (1)...(19): siRNA sense strand
gcaagcguuuccaccagaa

SEQ ID NO: 1851859 - RNA, 19 nt, Homo sapiens
  misc_RNA (1)...(19): siRNA sense strand
gcugugagcugugcaccaa

SEQ ID NO: 1851860 - RNA, 19 nt, Homo sapiens
  misc_RNA (1)...(19): siRNA sense strand
guacggcaguccucuugug

SEQ ID NO: 1851861 - RNA, 19 nt, Homo sapiens
  misc_RNA (1)...(19): siRNA sense strand
gugagaagccgcacaagug

SEQ ID NO: 1851862 - RNA, 19 nt, Homo sapiens
  misc_RNA (1)...(19): siRNA sense strand
caccagaaguccgacauga

SEQ ID NO: 1851863 - RNA, 19 nt, Homo sapiens
  misc_RNA (1)...(19): siRNA sense strand
ugaagaagcacaccuacau

SEQ ID NO: 1851864 - RNA, 19 nt, Homo sapiens
  misc_RNA (1)...(19): siRNA sense strand
gaagaagcacaccuacauc

SEQ ID NO: 1851865 - RNA, 19 nt, Homo sapiens
  misc_RNA (1)...(19): siRNA sense strand
caaccuauggccacagcua

SEQ ID NO: 1851866 - RNA, 19 nt, Homo sapiens
  misc_RNA (1)...(19): siRNA sense strand
ccagaaguccgacaugaag

SEQ ID NO: 1851867 - RNA, 19 nt, Homo sapiens
  misc_RNA (1)...(19): siRNA sense strand
caugugcgacgcucccaua

SEQ ID NO: 1851868 - RNA, 19 nt, Homo sapiens
  misc_RNA (1)...(19): siRNA sense strand
ccgcgagagucaacacaau

SEQ ID NO: 1851869 - RNA, 19 nt, Homo sapiens
  misc_RNA (1)...(19): siRNA sense strand
ggagcaggaccagaacuug

SEQ ID NO: 1851870 - RNA, 19 nt, Homo sapiens
  misc_RNA (1)...(19): siRNA sense strand
gagaccaggcuccaagcaa

SEQ ID NO: 1851871 - RNA, 19 nt, Homo sapiens
  misc_RNA (1)...(19): siRNA sense strand
gcacaccuacauccacaca

SEQ ID NO: 1851872 - RNA, 19 nt, Homo sapiens
  misc_RNA (1)...(19): siRNA sense strand
uuagcacucuauucccaaa

SEQ ID NO: 1851873 - RNA, 19 nt, Homo sapiens
  misc_RNA (1)...(19): siRNA sense strand
ggugagaagccgcacaagu

SEQ ID NO: 1851874 - RNA, 19 nt, Homo sapiens
  misc_RNA (1)...(19): siRNA sense strand
gcccuucgccugugacauc

SEQ ID NO: 1851875 - RNA, 19 nt, Homo sapiens
  misc_RNA (1)...(19): siRNA sense strand
ccacccaccugcucaucca

SEQ ID NO: 1851876 - RNA, 19 nt, Homo sapiens
  misc_RNA (1)...(19): siRNA sense strand
gcacucuauucccaaacca

SEQ ID NO: 1851877 - RNA, 19 nt, Homo sapiens
  misc_RNA (1)...(19): siRNA sense strand
ccagagcuccaaccucauc

SEQ ID NO: 1851878 - RNA, 19 nt, Homo sapiens
  misc_RNA (1)...(19): siRNA sense strand
agaaguccgacaugaagaa

SEQ ID NO: 1851879 - RNA, 19 nt, Homo sapiens
  misc_RNA (1)...(19): siRNA sense strand
gauggggacucuccacugu

SEQ ID NO: 1851880 - RNA, 19 nt, Homo sapiens
  misc_RNA (1)...(19): siRNA sense strand
acaugaagaagcacaccua

SEQ ID NO: 1851881 - RNA, 19 nt, Homo sapiens
  misc_RNA (1)...(19): siRNA sense strand
caccuuggccacaaccuau

SEQ ID NO: 1851882 - RNA, 19 nt, Homo sapiens
  misc_RNA (1)...(19): siRNA sense strand
ucaagcccuucagcuguga

SEQ ID NO: 1851883 - RNA, 19 nt, Homo sapiens
  misc_RNA (1)...(19): siRNA sense strand
gcgagagucaacacaaucu

SEQ ID NO: 1851884 - RNA, 19 nt, Homo sapiens
  misc_RNA (1)...(19): siRNA sense strand
gaaggugauugaauacaaa

SEQ ID NO: 1851885 - RNA, 19 nt, Homo sapiens
  misc_RNA (1)...(19): siRNA sense strand
ggaaggugauugaauacaa

SEQ ID NO: 1851886 - RNA, 19 nt, Homo sapiens
  misc_RNA (1)...(19): siRNA sense strand
gucggaaggugauugaaua

SEQ ID NO: 1851887 - RNA, 19 nt, Homo sapiens
  misc_RNA (1)...(19): siRNA sense strand
ggacguggccaccuucuug

SEQ ID NO: 1851888 - RNA, 19 nt, Homo sapiens
  misc_RNA (1)...(19): siRNA sense strand
ccaagaauguguuugucaa

SEQ ID NO: 1851889 - RNA, 19 nt, Homo sapiens
  misc_RNA (1)...(19): siRNA sense strand
gaauguguuugucaaguuc

SEQ ID NO: 1851890 - RNA, 19 nt, Homo sapiens
  misc_RNA (1)...(19): siRNA sense strand
cgagcuggcugaggaguuu

SEQ ID NO: 1851891 - RNA, 19 nt, Homo sapiens
  misc_RNA (1)...(19): siRNA sense strand
gcagguggcuuuugacgaa

SEQ ID NO: 1851892 - RNA, 19 nt, Homo sapiens
  misc_RNA (1)...(19): siRNA sense strand
cagcguccaucacugcuuu

SEQ ID NO: 1851893 - RNA, 19 nt, Homo sapiens
  misc_RNA (1)...(19): siRNA sense strand
gaucagcggccaguuaaga

SEQ ID NO: 1851894 - RNA, 19 nt, Homo sapiens
  misc_RNA (1)...(19): siRNA sense strand
ccaugcggcuggaggauga

SEQ ID NO: 1851895 - RNA, 19 nt, Homo sapiens
  misc_RNA (1)...(19): siRNA sense strand
gggaucagcggccaguuaa

SEQ ID NO: 1851896 - RNA, 19 nt, Homo sapiens
  misc_RNA (1)...(19): siRNA sense strand
ugaaaccacuaagaaguau

SEQ ID NO: 1851897 - RNA, 19 nt, Homo sapiens
  misc_RNA (1)...(19): siRNA sense strand
agaauguguuugucaaguu

SEQ ID NO: 1851898 - RNA, 19 nt, Homo sapiens
  misc_RNA (1)...(19): siRNA sense strand
gcugaggaguuugguguga

SEQ ID NO: 1851899 - RNA, 19 nt, Homo sapiens
  misc_RNA (1)...(19): siRNA sense strand
gcaguacuuuggacucaag

SEQ ID NO: 1851900 - RNA, 19 nt, Homo sapiens
  misc_RNA (1)...(19): siRNA sense strand
ccacgaggacaucaucauu

SEQ ID NO: 1851901 - RNA, 19 nt, Homo sapiens
  misc_RNA (1)...(19): siRNA sense strand
ucaaccaccugcugcuguu

SEQ ID NO: 1851902 - RNA, 19 nt, Homo sapiens
  misc_RNA (1)...(19): siRNA sense strand
gaaguaugcgccuguggau

SEQ ID NO: 1851903 - RNA, 19 nt, Homo sapiens
  misc_RNA (1)...(19): siRNA sense strand
gggaggcauuggcugagaa

SEQ ID NO: 1851904 - RNA, 19 nt, Homo sapiens
  misc_RNA (1)...(19): siRNA sense strand
caucauugcugagcuggau

SEQ ID NO: 1851905 - RNA, 19 nt, Homo sapiens
  misc_RNA (1)...(19): siRNA sense strand
gugcacggcuucccuacuc

SEQ ID NO: 1851906 - RNA, 19 nt, Homo sapiens
  misc_RNA (1)...(19): siRNA sense strand
acacugugguucucuucaa

SEQ ID NO: 1851907 - RNA, 19 nt, Homo sapiens
  misc_RNA (1)...(19): siRNA sense strand
ggcauuggcugagaaguac

SEQ ID NO: 1851908 - RNA, 19 nt, Homo sapiens
  misc_RNA (1)...(19): siRNA sense strand
uugaaaccacuaagaagua

SEQ ID NO: 1851909 - RNA, 19 nt, Homo sapiens
  misc_RNA (1)...(19): siRNA sense strand
gguccaaggaggaacugua

SEQ ID NO: 1851910 - RNA, 19 nt, Homo sapiens
  misc_RNA (1)...(19): siRNA sense strand
ggaguacccuacgcucaag

SEQ ID NO: 1851911 - RNA, 19 nt, Homo sapiens
  misc_RNA (1)...(19): siRNA sense strand
gacgaaaccaagaaugugu

SEQ ID NO: 1851912 - RNA, 19 nt, Homo sapiens
  misc_RNA (1)...(19): siRNA sense strand
ggucggaaggugauugaau

SEQ ID NO: 1851913 - RNA, 19 nt, Homo sapiens
  misc_RNA (1)...(19): siRNA sense strand
gcacgugcugcaguacuuu

SEQ ID NO: 1851914 - RNA, 19 nt, Homo sapiens
  misc_RNA (1)...(19): siRNA sense strand
ugggaucagcggccaguua

SEQ ID NO: 1851915 - RNA, 19 nt, Homo sapiens
  misc_RNA (1)...(19): siRNA sense strand
caaggacacugugguucuc

SEQ ID NO: 1851916 - RNA, 19 nt, Homo sapiens
  misc_RNA (1)...(19): siRNA sense strand
aggcauuggcugagaagua

SEQ ID NO: 1851917 - RNA, 19 nt, Homo sapiens
  misc_RNA (1)...(19): siRNA sense strand
ggacacugugguucucuuc

SEQ ID NO: 1851918 - RNA, 19 nt, Homo sapiens
  misc_RNA (1)...(19): siRNA sense strand
acccuacgcucaaguucuu

SEQ ID NO: 1851919 - RNA, 19 nt, Homo sapiens
  misc_RNA (1)...(19): siRNA sense strand
aagaauguguuugucaagu

SEQ ID NO: 1851920 - RNA, 19 nt, Homo sapiens
  misc_RNA (1)...(19): siRNA sense strand
cacgaggacaucaucauug

SEQ ID NO: 1851921 - RNA, 19 nt, Homo sapiens
  misc_RNA (1)...(19): siRNA sense strand
ccaaggacacugugguucu

SEQ ID NO: 1851922 - RNA, 19 nt, Homo sapiens
  misc_RNA (1)...(19): siRNA sense strand
cucaaguucuuccgcaaug

SEQ ID NO: 1851923 - RNA, 19 nt, Homo sapiens
  misc_RNA (1)...(19): siRNA sense strand
ugacgaaaccaagaaugug

SEQ ID NO: 1851924 - RNA, 19 nt, Homo sapiens
  misc_RNA (1)...(19): siRNA sense strand
cggcuucccuacucucaag

SEQ ID NO: 1851925 - RNA, 19 nt, Homo sapiens
  misc_RNA (1)...(19): siRNA sense strand
uggcugagaaguaccaaga

SEQ ID NO: 1851926 - RNA, 19 nt, Homo sapiens
  misc_RNA (1)...(19): siRNA sense strand
gcucaaguucuuccgcaau

SEQ ID NO: 1851927 - RNA, 19 nt, Homo sapiens
  misc_RNA (1)...(19): siRNA sense strand
gcggcucuuucagcaguuu

SEQ ID NO: 1851928 - RNA, 19 nt, Homo sapiens
  misc_RNA (1)...(19): siRNA sense strand
ccaaggaggaugggaucuu

SEQ ID NO: 1851929 - RNA, 19 nt, Homo sapiens
  misc_RNA (1)...(19): siRNA sense strand
gaaaccacuaagaaguaug

SEQ ID NO: 1851930 - RNA, 19 nt, Homo sapiens
  misc_RNA (1)...(19): siRNA sense strand
cggaguacccuacgcucaa

SEQ ID NO: 1851931 - RNA, 19 nt, Homo sapiens
  misc_RNA (1)...(19): siRNA sense strand
caagaauguguuugucaag

SEQ ID NO: 1851932 - RNA, 19 nt, Homo sapiens
  misc_RNA (1)...(19): siRNA sense strand
gcccuggacaugaccuuug

SEQ ID NO: 1851933 - RNA, 19 nt, Homo sapiens
  misc_RNA (1)...(19): siRNA sense strand
ccucaacggccaagucaag

SEQ ID NO: 1851934 - RNA, 19 nt, Homo sapiens
  misc_RNA (1)...(19): siRNA sense strand
ggacagagauguugcaaga

SEQ ID NO: 1851935 - RNA, 19 nt, Homo sapiens
  misc_RNA (1)...(19): siRNA sense strand
ugagaaagcuguggaacua

SEQ ID NO: 1851936 - RNA, 19 nt, Homo sapiens
  misc_RNA (1)...(19): siRNA sense strand
acaggaaucuggagaagua

SEQ ID NO: 1851937 - RNA, 19 nt, Homo sapiens
  misc_RNA (1)...(19): siRNA sense strand
cgagagguguaucaauaua

SEQ ID NO: 1851938 - RNA, 19 nt, Homo sapiens
  misc_RNA (1)...(19): siRNA sense strand
guuaauggcugucccgaau

SEQ ID NO: 1851939 - RNA, 19 nt, Homo sapiens
  misc_RNA (1)...(19): siRNA sense strand
gagaccagcugcuaucagu

SEQ ID NO: 1851940 - RNA, 19 nt, Homo sapiens
  misc_RNA (1)...(19): siRNA sense strand
cggcagacauggcgacauu

SEQ ID NO: 1851941 - RNA, 19 nt, Homo sapiens
  misc_RNA (1)...(19): siRNA sense strand
uucgagagguguaucaaua

SEQ ID NO: 1851942 - RNA, 19 nt, Homo sapiens
  misc_RNA (1)...(19): siRNA sense strand
gaacggagugaguguggaa

SEQ ID NO: 1851943 - RNA, 19 nt, Homo sapiens
  misc_RNA (1)...(19): siRNA sense strand
gaaauggaggcucgcuuug

SEQ ID NO: 1851944 - RNA, 19 nt, Homo sapiens
  misc_RNA (1)...(19): siRNA sense strand
gcagacauggcgacauuga

SEQ ID NO: 1851945 - RNA, 19 nt, Homo sapiens
  misc_RNA (1)...(19): siRNA sense strand
uaauggcugucccgaauuc

SEQ ID NO: 1851946 - RNA, 19 nt, Homo sapiens
  misc_RNA (1)...(19): siRNA sense strand
aauggaggcucgcuuugaa

SEQ ID NO: 1851947 - RNA, 19 nt, Homo sapiens
  misc_RNA (1)...(19): siRNA sense strand
gaccagcugcuaucaguga

SEQ ID NO: 1851948 - RNA, 19 nt, Homo sapiens
  misc_RNA (1)...(19): siRNA sense strand
gaugaaggccuugguuuua

SEQ ID NO: 1851949 - RNA, 19 nt, Homo sapiens
  misc_RNA (1)...(19): siRNA sense strand
ucaagcugguggugcgaua

SEQ ID NO: 1851950 - RNA, 19 nt, Homo sapiens
  misc_RNA (1)...(19): siRNA sense strand
agagguguaucaauauaug

SEQ ID NO: 1851951 - RNA, 19 nt, Homo sapiens
  misc_RNA (1)...(19): siRNA sense strand
gaaggagaacaccaugaga

SEQ ID NO: 1851952 - RNA, 19 nt, Homo sapiens
  misc_RNA (1)...(19): siRNA sense strand
ggaaggagaacaccaugag

SEQ ID NO: 1851953 - RNA, 19 nt, Homo sapiens
  misc_RNA (1)...(19): siRNA sense strand
gaacuacucaaggcugcua

SEQ ID NO: 1851954 - RNA, 19 nt, Homo sapiens
  misc_RNA (1)...(19): siRNA sense strand
gaacugccaaagacugaug

SEQ ID NO: 1851955 - RNA, 19 nt, Homo sapiens
  misc_RNA (1)...(19): siRNA sense strand
agaaauggaggcucgcuuu

SEQ ID NO: 1851956 - RNA, 19 nt, Homo sapiens
  misc_RNA (1)...(19): siRNA sense strand
gagagguguaucaauauau

SEQ ID NO: 1851957 - RNA, 19 nt, Homo sapiens
  misc_RNA (1)...(19): siRNA sense strand
cagcaacaaacacaacaaa

SEQ ID NO: 1851958 - RNA, 19 nt, Homo sapiens
  misc_RNA (1)...(19): siRNA sense strand
caagcuacaaucccucaaa

SEQ ID NO: 1851959 - RNA, 19 nt, Homo sapiens
  misc_RNA (1)...(19): siRNA sense strand
gcaugaaacgauaacuguu

SEQ ID NO: 1851960 - RNA, 19 nt, Homo sapiens
  misc_RNA (1)...(19): siRNA sense strand
acucaaggcugcuaaagac

SEQ ID NO: 1851961 - RNA, 19 nt, Homo sapiens
  misc_RNA (1)...(19): siRNA sense strand
gagaacaccaugagaaagc

SEQ ID NO: 1851962 - RNA, 19 nt, Homo sapiens
  misc_RNA (1)...(19): siRNA sense strand
caacagcaaaggcaacagu

SEQ ID NO: 1851963 - RNA, 19 nt, Homo sapiens
  misc_RNA (1)...(19): siRNA sense strand
gaggagaccagcugcuauc

SEQ ID NO: 1851964 - RNA, 19 nt, Homo sapiens
  misc_RNA (1)...(19): siRNA sense strand
gagaaguaccagugcacaa

SEQ ID NO: 1851965 - RNA, 19 nt, Homo sapiens
  misc_RNA (1)...(19): siRNA sense strand
gaggaaaggagcaaaauuc

SEQ ID NO: 1851966 - RNA, 19 nt, Homo sapiens
  misc_RNA (1)...(19): siRNA sense strand
aaggagaacaccaugagaa

SEQ ID NO: 1851967 - RNA, 19 nt, Homo sapiens
  misc_RNA (1)...(19): siRNA sense strand
cuacaggaaucuggagaag

SEQ ID NO: 1851968 - RNA, 19 nt, Homo sapiens
  misc_RNA (1)...(19): siRNA sense strand
cagcagcagcagcaacaaa

SEQ ID NO: 1851969 - RNA, 19 nt, Homo sapiens
  misc_RNA (1)...(19): siRNA sense strand
ggagaacaccaugagaaag

SEQ ID NO: 1851970 - RNA, 19 nt, Homo sapiens
  misc_RNA (1)...(19): siRNA sense strand
uuaaugugaugggaggaaa

SEQ ID NO: 1851971 - RNA, 19 nt, Homo sapiens
  misc_RNA (1)...(19): siRNA sense strand
gcagcaacaaacacaacaa

SEQ ID NO: 1851972 - RNA, 19 nt, Homo sapiens
  misc_RNA (1)...(19): siRNA sense strand
agaaagcuguggaacuacu

SEQ ID NO: 1851973 - RNA, 19 nt, Homo sapiens
  misc_RNA (1)...(19): siRNA sense strand
agacauggcgacauugaca

SEQ ID NO: 1851974 - RNA, 19 nt, Homo sapiens
  misc_RNA (1)...(19): siRNA sense strand
uaauucagcagcagcaaca

SEQ ID NO: 1851975 - RNA, 19 nt, Homo sapiens
  misc_RNA (1)...(19): siRNA sense strand
aaauggaggcucgcuuuga

SEQ ID NO: 1851976 - RNA, 19 nt, Homo sapiens
  misc_RNA (1)...(19): siRNA sense strand
aggagaacaccaugagaaa

SEQ ID NO: 1851977 - RNA, 19 nt, Homo sapiens
  misc_RNA (1)...(19): siRNA sense strand
caauauaugcaugaaacga

SEQ ID NO: 1851978 - RNA, 19 nt, Homo sapiens
  misc_RNA (1)...(19): siRNA sense strand
ggccuugguuuuaauguga

SEQ ID NO: 1851979 - RNA, 19 nt, Homo sapiens
  misc_RNA (1)...(19): siRNA sense strand
ggaggaaaggagcaaaauu

SEQ ID NO: 1851980 - RNA, 19 nt, Homo sapiens
  misc_RNA (1)...(19): siRNA sense strand
gcagcagcagcaacaaaca

SEQ ID NO: 1851981 - RNA, 19 nt, Homo sapiens
  misc_RNA (1)...(19): siRNA sense strand
gcgauacaccccaaaaguu

SEQ ID NO: 1851982 - RNA, 19 nt, Homo sapiens
  misc_RNA (1)...(19): siRNA sense strand
aagaggagaccagcugcua

SEQ ID NO: 1851983 - RNA, 19 nt, Homo sapiens
  misc_RNA (1)...(19): siRNA sense strand
aacaaaaccacaugucaua

SEQ ID NO: 1851984 - RNA, 19 nt, Homo sapiens
  misc_RNA (1)...(19): siRNA sense strand
ggucagaacuguagaaaua

SEQ ID NO: 1851985 - RNA, 19 nt, Homo sapiens
  misc_RNA (1)...(19): siRNA sense strand
ggaaugaaaugguuaaaga

SEQ ID NO: 1851986 - RNA, 19 nt, Homo sapiens
  misc_RNA (1)...(19): siRNA sense strand
ggaaugggcucaucaacaa

SEQ ID NO: 1851987 - RNA, 19 nt, Homo sapiens
  misc_RNA (1)...(19): siRNA sense strand
ggaagaaggugauugaugu

SEQ ID NO: 1851988 - RNA, 19 nt, Homo sapiens
  misc_RNA (1)...(19): siRNA sense strand
ggaaagcacuggauucguu

SEQ ID NO: 1851989 - RNA, 19 nt, Homo sapiens
  misc_RNA (1)...(19): siRNA sense strand
gcaagaggcuggagcugua

SEQ ID NO: 1851990 - RNA, 19 nt, Homo sapiens
  misc_RNA (1)...(19): siRNA sense strand
gaagguggcuguucacuca

SEQ ID NO: 1851991 - RNA, 19 nt, Homo sapiens
  misc_RNA (1)...(19): siRNA sense strand
ggaagaagaucgugcaugu

SEQ ID NO: 1851992 - RNA, 19 nt, Homo sapiens
  misc_RNA (1)...(19): siRNA sense strand
gaucuuagcugugcauuug

SEQ ID NO: 1851993 - RNA, 19 nt, Homo sapiens
  misc_RNA (1)...(19): siRNA sense strand
gaaaguagcugugaacucu

SEQ ID NO: 1851994 - RNA, 19 nt, Homo sapiens
  misc_RNA (1)...(19): siRNA sense strand
guaaugaccucucuauaau

SEQ ID NO: 1851995 - RNA, 19 nt, Homo sapiens
  misc_RNA (1)...(19): siRNA sense strand
cuaaagaacuccucucuga

SEQ ID NO: 1851996 - RNA, 19 nt, Homo sapiens
  misc_RNA (1)...(19): siRNA sense strand
gaggauagcucaaaagaua

SEQ ID NO: 1851997 - RNA, 19 nt, Homo sapiens
  misc_RNA (1)...(19): siRNA sense strand
gguuaaagauggagaaauu

SEQ ID NO: 1851998 - RNA, 19 nt, Homo sapiens
  misc_RNA (1)...(19): siRNA sense strand
gagcugauuucuugaguaa

SEQ ID NO: 1851999 - RNA, 19 nt, Homo sapiens
  misc_RNA (1)...(19): siRNA sense strand
ggacagagauggauugcau

SEQ ID NO: 1852000 - RNA, 19 nt, Homo sapiens
  misc_RNA (1)...(19): siRNA sense strand
gaaauuguauacacuggaa

SEQ ID NO: 1852001 - RNA, 19 nt, Homo sapiens
  misc_RNA (1)...(19): siRNA sense strand
gaaauacuaugccaaugug

SEQ ID NO: 1852002 - RNA, 19 nt, Homo sapiens
  misc_RNA (1)...(19): siRNA sense strand
gcucaggaaucgauuguaa

SEQ ID NO: 1852003 - RNA, 19 nt, Homo sapiens
  misc_RNA (1)...(19): siRNA sense strand
uuacagguguucacaaaua

SEQ ID NO: 1852004 - RNA, 19 nt, Homo sapiens
  misc_RNA (1)...(19): siRNA sense strand
ccaaauggcuucagucauc

SEQ ID NO: 1852005 - RNA, 19 nt, Homo sapiens
  misc_RNA (1)...(19): siRNA sense strand
gacgaaagauggccaaguu

SEQ ID NO: 1852006 - RNA, 19 nt, Homo sapiens
  misc_RNA (1)...(19): siRNA sense strand
gaagguguaugauauaaag

SEQ ID NO: 1852007 - RNA, 19 nt, Homo sapiens
  misc_RNA (1)...(19): siRNA sense strand
gcaaugaagugaacauaag

SEQ ID NO: 1852008 - RNA, 19 nt, Homo sapiens
  misc_RNA (1)...(19): siRNA sense strand
caucaugucuggacuuuga

SEQ ID NO: 1852009 - RNA, 19 nt, Homo sapiens
  misc_RNA (1)...(19): siRNA sense strand
gcauacauuuggcagaaua

SEQ ID NO: 1852010 - RNA, 19 nt, Homo sapiens
  misc_RNA (1)...(19): siRNA sense strand
guuguuauguugccucuua

SEQ ID NO: 1852011 - RNA, 19 nt, Homo sapiens
  misc_RNA (1)...(19): siRNA sense strand
ccaaauccauggcaagaaa

SEQ ID NO: 1852012 - RNA, 19 nt, Homo sapiens
  misc_RNA (1)...(19): siRNA sense strand
ggaaucagcagcuacgaua

SEQ ID NO: 1852013 - RNA, 19 nt, Homo sapiens
  misc_RNA (1)...(19): siRNA sense strand
ggagguggcuuacauugug

SEQ ID NO: 1852014 - RNA, 19 nt, Homo sapiens
  misc_RNA (1)...(19): siRNA sense strand
ggugaaaggucuuccagaa

SEQ ID NO: 1852015 - RNA, 19 nt, Homo sapiens
  misc_RNA (1)...(19): siRNA sense strand
gaagauaccaggugcagaa

SEQ ID NO: 1852016 - RNA, 19 nt, Homo sapiens
  misc_RNA (1)...(19): siRNA sense strand
cagcaggccuuaucgcaua

SEQ ID NO: 1852017 - RNA, 19 nt, Homo sapiens
  misc_RNA (1)...(19): siRNA sense strand
cagaaacugugaugacuuu

SEQ ID NO: 1852018 - RNA, 19 nt, Homo sapiens
  misc_RNA (1)...(19): siRNA sense strand
gaaaggaacgggaugauca

SEQ ID NO: 1852019 - RNA, 19 nt, Homo sapiens
  misc_RNA (1)...(19): siRNA sense strand
cugaaaggcuccaagauaa

SEQ ID NO: 1852020 - RNA, 19 nt, Homo sapiens
  misc_RNA (1)...(19): siRNA sense strand
gaagggauagauacaauuu

SEQ ID NO: 1852021 - RNA, 19 nt, Homo sapiens
  misc_RNA (1)...(19): siRNA sense strand
ggaugaucaugaagaguua

SEQ ID NO: 1852022 - RNA, 19 nt, Homo sapiens
  misc_RNA (1)...(19): siRNA sense strand
gcagaugugugcuaagaug

SEQ ID NO: 1852023 - RNA, 19 nt, Homo sapiens
  misc_RNA (1)...(19): siRNA sense strand
gaauugaaguggucgaugu

SEQ ID NO: 1852024 - RNA, 19 nt, Homo sapiens
  misc_RNA (1)...(19): siRNA sense strand
gcggaagccucauuagaaa

SEQ ID NO: 1852025 - RNA, 19 nt, Homo sapiens
  misc_RNA (1)...(19): siRNA sense strand
uaccagcacuauuaacuua

SEQ ID NO: 1852026 - RNA, 19 nt, Homo sapiens
  misc_RNA (1)...(19): siRNA sense strand
ugagauuccucuuuaauga

SEQ ID NO: 1852027 - RNA, 19 nt, Homo sapiens
  misc_RNA (1)...(19): siRNA sense strand
acaacgagcuugccauuga

SEQ ID NO: 1852028 - RNA, 19 nt, Homo sapiens
  misc_RNA (1)...(19): siRNA sense strand
cagcauguguuuauuaaga

SEQ ID NO: 1852029 - RNA, 19 nt, Homo sapiens
  misc_RNA (1)...(19): siRNA sense strand
guagugcucuugcugcuuu

SEQ ID NO: 1852030 - RNA, 19 nt, Homo sapiens
  misc_RNA (1)...(19): siRNA sense strand
gcugaaaggcuccaagaua

SEQ ID NO: 1852031 - RNA, 19 nt, Homo sapiens
  misc_RNA (1)...(19): siRNA sense strand
ggaacgggaugaucaugaa

SEQ ID NO: 1852032 - RNA, 19 nt, Homo sapiens
  misc_RNA (1)...(19): siRNA sense strand
gagaagcguuuccugauuc

SEQ ID NO: 1852033 - RNA, 19 nt, Homo sapiens
  misc_RNA (1)...(19): siRNA sense strand
caacauugcuugaauccau

SEQ ID NO: 1852034 - RNA, 19 nt, Homo sapiens
  misc_RNA (1)...(19): siRNA sense strand
ccaaaucgcccuucucuug

SEQ ID NO: 1852035 - RNA, 19 nt, Homo sapiens
  misc_RNA (1)...(19): siRNA sense strand
ggacuggguugcuaucaga

SEQ ID NO: 1852036 - RNA, 19 nt, Homo sapiens
  misc_RNA (1)...(19): siRNA sense strand
ugaaaugccucguggagaa

SEQ ID NO: 1852037 - RNA, 19 nt, Homo sapiens
  misc_RNA (1)...(19): siRNA sense strand
gggaaccucuuacugauug

SEQ ID NO: 1852038 - RNA, 19 nt, Homo sapiens
  misc_RNA (1)...(19): siRNA sense strand
cgaagagagugauuuagaa

SEQ ID NO: 1852039 - RNA, 19 nt, Homo sapiens
  misc_RNA (1)...(19): siRNA sense strand
ggucgucgauucaugauug

SEQ ID NO: 1852040 - RNA, 19 nt, Homo sapiens
  misc_RNA (1)...(19): siRNA sense strand
gaacugaaggagugucuuu

SEQ ID NO: 1852041 - RNA, 19 nt, Homo sapiens
  misc_RNA (1)...(19): siRNA sense strand
cgaugaagguuugguauuu

SEQ ID NO: 1852042 - RNA, 19 nt, Homo sapiens
  misc_RNA (1)...(19): siRNA sense strand
gaagaaacaaggaaggaaa

SEQ ID NO: 1852043 - RNA, 19 nt, Homo sapiens
  misc_RNA (1)...(19): siRNA sense strand
cagaaucuauggaugauga

SEQ ID NO: 1852044 - RNA, 19 nt, Homo sapiens
  misc_RNA (1)...(19): siRNA sense strand
gcaacacagucgugaaaga

SEQ ID NO: 1852045 - RNA, 19 nt, Homo sapiens
  misc_RNA (1)...(19): siRNA sense strand
cgaaagauggccaaguuua

SEQ ID NO: 1852046 - RNA, 19 nt, Homo sapiens
  misc_RNA (1)...(19): siRNA sense strand
gaaacaagagcuuugaguu

SEQ ID NO: 1852047 - RNA, 19 nt, Homo sapiens
  misc_RNA (1)...(19): siRNA sense strand
gcagcuacguggucaagaa

SEQ ID NO: 1852048 - RNA, 19 nt, Homo sapiens
  misc_RNA (1)...(19): siRNA sense strand
caagauuggugauaaagug

SEQ ID NO: 1852049 - RNA, 19 nt, Homo sapiens
  misc_RNA (1)...(19): siRNA sense strand
guggacaucugcucaauga

SEQ ID NO: 1852050 - RNA, 19 nt, Homo sapiens
  misc_RNA (1)...(19): siRNA sense strand
gaaagaagaucugaaugac

SEQ ID NO: 1852051 - RNA, 19 nt, Homo sapiens
  misc_RNA (1)...(19): siRNA sense strand
aaaggcaguuugaauauga

SEQ ID NO: 1852052 - RNA, 19 nt, Homo sapiens
  misc_RNA (1)...(19): siRNA sense strand
gauaagaaccaagguguuu

SEQ ID NO: 1852053 - RNA, 19 nt, Homo sapiens
  misc_RNA (1)...(19): siRNA sense strand
ggagaggacggauggauaa

SEQ ID NO: 1852054 - RNA, 19 nt, Homo sapiens
  misc_RNA (1)...(19): siRNA sense strand
ggagaaccauaauaaagau

SEQ ID NO: 1852055 - RNA, 19 nt, Homo sapiens
  misc_RNA (1)...(19): siRNA sense strand
gaacaaagaaagaagaucu

SEQ ID NO: 1852056 - RNA, 19 nt, Homo sapiens
  misc_RNA (1)...(19): siRNA sense strand
gauaauacgacacagcuaa

SEQ ID NO: 1852057 - RNA, 19 nt, Homo sapiens
  misc_RNA (1)...(19): siRNA sense strand
gaugucagauguuuccuau

SEQ ID NO: 1852058 - RNA, 19 nt, Homo sapiens
  misc_RNA (1)...(19): siRNA sense strand
caagagacccauugcaauu

SEQ ID NO: 1852059 - RNA, 19 nt, Homo sapiens
  misc_RNA (1)...(19): siRNA sense strand
aaacgaagagagugauuua

SEQ ID NO: 1852060 - RNA, 19 nt, Homo sapiens
  misc_RNA (1)...(19): siRNA sense strand
gccagaaccugcagcauug

SEQ ID NO: 1852061 - RNA, 19 nt, Homo sapiens
  misc_RNA (1)...(19): siRNA sense strand
gaaagauggccaaguuuau

SEQ ID NO: 1852062 - RNA, 19 nt, Homo sapiens
  misc_RNA (1)...(19): siRNA sense strand
aagaagaucugaaugacaa

SEQ ID NO: 1852063 - RNA, 19 nt, Homo sapiens
  misc_RNA (1)...(19): siRNA sense strand
gaaggaacaucgaguuugc

SEQ ID NO: 1852064 - RNA, 19 nt, Homo sapiens
  misc_RNA (1)...(19): siRNA sense strand
ucagugagguugauaagga

SEQ ID NO: 1852065 - RNA, 19 nt, Homo sapiens
  misc_RNA (1)...(19): siRNA sense strand
gcugauuucuugaguaaug

SEQ ID NO: 1852066 - RNA, 19 nt, Homo sapiens
  misc_RNA (1)...(19): siRNA sense strand
aaacaucgcuucucagacu

SEQ ID NO: 1852067 - RNA, 19 nt, Homo sapiens
  misc_RNA (1)...(19): siRNA sense strand
gaauugagaccugcuguuu

SEQ ID NO: 1852068 - RNA, 19 nt, Homo sapiens
  misc_RNA (1)...(19): siRNA sense strand
cauuaagacucaucaagaa

SEQ ID NO: 1852069 - RNA, 19 nt, Homo sapiens
  misc_RNA (1)...(19): siRNA sense strand
gggaagguguaugauauaa

SEQ ID NO: 1852070 - RNA, 19 nt, Homo sapiens
  misc_RNA (1)...(19): siRNA sense strand
gaacagaaucaacccagaa

SEQ ID NO: 1852071 - RNA, 19 nt, Homo sapiens
  misc_RNA (1)...(19): siRNA sense strand
gaaccaaguggaacaaaga

SEQ ID NO: 1852072 - RNA, 19 nt, Homo sapiens
  misc_RNA (1)...(19): siRNA sense strand
gcaaguccauagacacaga

SEQ ID NO: 1852073 - RNA, 19 nt, Homo sapiens
  misc_RNA (1)...(19): siRNA sense strand
ggaaugcggaucccaguuu

SEQ ID NO: 1852074 - RNA, 19 nt, Homo sapiens
  misc_RNA (1)...(19): siRNA sense strand
ugaaggccauauuugauaa

SEQ ID NO: 1852075 - RNA, 19 nt, Homo sapiens
  misc_RNA (1)...(19): siRNA sense strand
cguuugagauuccucuuua

SEQ ID NO: 1852076 - RNA, 19 nt, Homo sapiens
  misc_RNA (1)...(19): siRNA sense strand
ggaaauacuaugccaaugu

SEQ ID NO: 1852077 - RNA, 19 nt, Homo sapiens
  misc_RNA (1)...(19): siRNA sense strand
gggcagaugugugcuaaga

SEQ ID NO: 1852078 - RNA, 19 nt, Homo sapiens
  misc_RNA (1)...(19): siRNA sense strand
gaaaagagagagauuguuu

SEQ ID NO: 1852079 - RNA, 19 nt, Homo sapiens
  misc_RNA (1)...(19): siRNA sense strand
gcacgcacauuggagauau

SEQ ID NO: 1852080 - RNA, 19 nt, Homo sapiens
  misc_RNA (1)...(19): siRNA sense strand
ucaagaagguggcuguuca

SEQ ID NO: 1852081 - RNA, 19 nt, Homo sapiens
  misc_RNA (1)...(19): siRNA sense strand
ugucagauguuuccuauca

SEQ ID NO: 1852082 - RNA, 19 nt, Homo sapiens
  misc_RNA (1)...(19): siRNA sense strand
caauaaauguggacaagag

SEQ ID NO: 1852083 - RNA, 19 nt, Homo sapiens
  misc_RNA (1)...(19): siRNA sense strand
uguaaugaccucucuauaa

SEQ ID NO: 1852084 - RNA, 19 nt, Homo sapiens
  misc_RNA (1)...(19): siRNA sense strand
gaaagaagcuaugaaagua

SEQ ID NO: 1852085 - RNA, 19 nt, Homo sapiens
  misc_RNA (1)...(19): siRNA sense strand
ggaauaugguuucuaguuu

SEQ ID NO: 1852086 - RNA, 19 nt, Homo sapiens
  misc_RNA (1)...(19): siRNA sense strand
gaagaaagaagcuaugaaa

SEQ ID NO: 1852087 - RNA, 19 nt, Homo sapiens
  misc_RNA (1)...(19): siRNA sense strand
ugaaggacuuucugauuua

SEQ ID NO: 1852088 - RNA, 19 nt, Homo sapiens
  misc_RNA (1)...(19): siRNA sense strand
ggaagacccuccugccaaa

SEQ ID NO: 1852089 - RNA, 19 nt, Homo sapiens
  misc_RNA (1)...(19): siRNA sense strand
ggacgccccuugaauauua

SEQ ID NO: 1852090 - RNA, 19 nt, Homo sapiens
  misc_RNA (1)...(19): siRNA sense strand
ggaaaugcaucuuuauguc

SEQ ID NO: 1852091 - RNA, 19 nt, Homo sapiens
  misc_RNA (1)...(19): siRNA sense strand
ccagagcacuaauuaaaga

SEQ ID NO: 1852092 - RNA, 19 nt, Homo sapiens
  misc_RNA (1)...(19): siRNA sense strand
uaucagccaucuucuguaa

SEQ ID NO: 1852093 - RNA, 19 nt, Homo sapiens
  misc_RNA (1)...(19): siRNA sense strand
ugagggcgcugcauuuauu

SEQ ID NO: 1852094 - RNA, 19 nt, Homo sapiens
  misc_RNA (1)...(19): siRNA sense strand
ucaacaaguuagagagaua

SEQ ID NO: 1852095 - RNA, 19 nt, Homo sapiens
  misc_RNA (1)...(19): siRNA sense strand
guucaagcguccucaguaa

SEQ ID NO: 1852096 - RNA, 19 nt, Homo sapiens
  misc_RNA (1)...(19): siRNA sense strand
caucagaaauugggaagaa

SEQ ID NO: 1852097 - RNA, 19 nt, Homo sapiens
  misc_RNA (1)...(19): siRNA sense strand
gcccugcgguucagauuaa

SEQ ID NO: 1852098 - RNA, 19 nt, Homo sapiens
  misc_RNA (1)...(19): siRNA sense strand
caaugacuguucugaugua

SEQ ID NO: 1852099 - RNA, 19 nt, Homo sapiens
  misc_RNA (1)...(19): siRNA sense strand
uugaaggacuuucugauuu

SEQ ID NO: 1852100 - RNA, 19 nt, Homo sapiens
  misc_RNA (1)...(19): siRNA sense strand
ucaagcaugucaucagauu

SEQ ID NO: 1852101 - RNA, 19 nt, Homo sapiens
  misc_RNA (1)...(19): siRNA sense strand
gaauuacucuaugucugua

SEQ ID NO: 1852102 - RNA, 19 nt, Homo sapiens
  misc_RNA (1)...(19): siRNA sense strand
gggaagaauuacucuaugu

SEQ ID NO: 1852103 - RNA, 19 nt, Homo sapiens
  misc_RNA (1)...(19): siRNA sense strand
gaugagggcgcugcauuua

SEQ ID NO: 1852104 - RNA, 19 nt, Homo sapiens
  misc_RNA (1)...(19): siRNA sense strand
gaaggacuuucugauuuau

SEQ ID NO: 1852105 - RNA, 19 nt, Homo sapiens
  misc_RNA (1)...(19): siRNA sense strand
gaaaugcaucuuuauguca

SEQ ID NO: 1852106 - RNA, 19 nt, Homo sapiens
  misc_RNA (1)...(19): siRNA sense strand
acaaucaaaucaucgguuu

SEQ ID NO: 1852107 - RNA, 19 nt, Homo sapiens
  misc_RNA (1)...(19): siRNA sense strand
gcagugacuuguacacauc

SEQ ID NO: 1852108 - RNA, 19 nt, Homo sapiens
  misc_RNA (1)...(19): siRNA sense strand
gagaucaaauuccaagaag

SEQ ID NO: 1852109 - RNA, 19 nt, Homo sapiens
  misc_RNA (1)...(19): siRNA sense strand
auacuaagcccacauuuga

SEQ ID NO: 1852110 - RNA, 19 nt, Homo sapiens
  misc_RNA (1)...(19): siRNA sense strand
gaucaaauuccaagaagau

SEQ ID NO: 1852111 - RNA, 19 nt, Homo sapiens
  misc_RNA (1)...(19): siRNA sense strand
gcaagaagaaaguagaugu

SEQ ID NO: 1852112 - RNA, 19 nt, Homo sapiens
  misc_RNA (1)...(19): siRNA sense strand
ucaguaccauuccaccaua

SEQ ID NO: 1852113 - RNA, 19 nt, Homo sapiens
  misc_RNA (1)...(19): siRNA sense strand
uaucaagcaugucaucaga

SEQ ID NO: 1852114 - RNA, 19 nt, Homo sapiens
  misc_RNA (1)...(19): siRNA sense strand
ugaggaauaugguuucuag

SEQ ID NO: 1852115 - RNA, 19 nt, Homo sapiens
  misc_RNA (1)...(19): siRNA sense strand
ggauuuguccuguguguga

SEQ ID NO: 1852116 - RNA, 19 nt, Homo sapiens
  misc_RNA (1)...(19): siRNA sense strand
ccaaagggguucucaugua

SEQ ID NO: 1852117 - RNA, 19 nt, Homo sapiens
  misc_RNA (1)...(19): siRNA sense strand
caaagcagcccaaccaaag

SEQ ID NO: 1852118 - RNA, 19 nt, Homo sapiens
  misc_RNA (1)...(19): siRNA sense strand
guucugugcugcuucaaga

SEQ ID NO: 1852119 - RNA, 19 nt, Homo sapiens
  misc_RNA (1)...(19): siRNA sense strand
caucagccauguuauuaca

SEQ ID NO: 1852120 - RNA, 19 nt, Homo sapiens
  misc_RNA (1)...(19): siRNA sense strand
gauacuaagcccacauuug

SEQ ID NO: 1852121 - RNA, 19 nt, Homo sapiens
  misc_RNA (1)...(19): siRNA sense strand
ugacuguucugauguagau

SEQ ID NO: 1852122 - RNA, 19 nt, Homo sapiens
  misc_RNA (1)...(19): siRNA sense strand
gcuauuccgccuucauuaa

SEQ ID NO: 1852123 - RNA, 19 nt, Homo sapiens
  misc_RNA (1)...(19): siRNA sense strand
ucgaagaguugaggaauau

SEQ ID NO: 1852124 - RNA, 19 nt, Homo sapiens
  misc_RNA (1)...(19): siRNA sense strand
caaguugcccucaagaaga

SEQ ID NO: 1852125 - RNA, 19 nt, Homo sapiens
  misc_RNA (1)...(19): siRNA sense strand
gcgcugcauuuauugaaga

SEQ ID NO: 1852126 - RNA, 19 nt, Homo sapiens
  misc_RNA (1)...(19): siRNA sense strand
caaugagaccgaagaaaga

SEQ ID NO: 1852127 - RNA, 19 nt, Homo sapiens
  misc_RNA (1)...(19): siRNA sense strand
gagacaaguugcccucaag

SEQ ID NO: 1852128 - RNA, 19 nt, Homo sapiens
  misc_RNA (1)...(19): siRNA sense strand
agaaagaagcuaugaaagu

SEQ ID NO: 1852129 - RNA, 19 nt, Homo sapiens
  misc_RNA (1)...(19): siRNA sense strand
uuagaaacccugaucauuc

SEQ ID NO: 1852130 - RNA, 19 nt, Homo sapiens
  misc_RNA (1)...(19): siRNA sense strand
ccaaugagaccgaagaaag

SEQ ID NO: 1852131 - RNA, 19 nt, Homo sapiens
  misc_RNA (1)...(19): siRNA sense strand
ucaucaagcccacgaguuu

SEQ ID NO: 1852132 - RNA, 19 nt, Homo sapiens
  misc_RNA (1)...(19): siRNA sense strand
uagaugagaucaaauucca

SEQ ID NO: 1852133 - RNA, 19 nt, Homo sapiens
  misc_RNA (1)...(19): siRNA sense strand
cugcagauccugauaguga

SEQ ID NO: 1852134 - RNA, 19 nt, Homo sapiens
  misc_RNA (1)...(19): siRNA sense strand
gaagaauuacucuaugucu

SEQ ID NO: 1852135 - RNA, 19 nt, Homo sapiens
  misc_RNA (1)...(19): siRNA sense strand
caacuagccuucggguauc

SEQ ID NO: 1852136 - RNA, 19 nt, Homo sapiens
  misc_RNA (1)...(19): siRNA sense strand
caagaagaaaguagauguu

SEQ ID NO: 1852137 - RNA, 19 nt, Homo sapiens
  misc_RNA (1)...(19): siRNA sense strand
gaugugcccuuuaggaaaa

SEQ ID NO: 1852138 - RNA, 19 nt, Homo sapiens
  misc_RNA (1)...(19): siRNA sense strand
gaucauuccagagcacuaa

SEQ ID NO: 1852139 - RNA, 19 nt, Homo sapiens
  misc_RNA (1)...(19): siRNA sense strand
guaagggugcccaguguga

SEQ ID NO: 1852140 - RNA, 19 nt, Homo sapiens
  misc_RNA (1)...(19): siRNA sense strand
aaucaucgguuuucaguuu

SEQ ID NO: 1852141 - RNA, 19 nt, Homo sapiens
  misc_RNA (1)...(19): siRNA sense strand
ucaccauccucuccuguug

SEQ ID NO: 1852142 - RNA, 19 nt, Homo sapiens
  misc_RNA (1)...(19): siRNA sense strand
ggugguaggagagauuaua

SEQ ID NO: 1852143 - RNA, 19 nt, Homo sapiens
  misc_RNA (1)...(19): siRNA sense strand
aagcaugaccuccugauga

SEQ ID NO: 1852144 - RNA, 19 nt, Homo sapiens
  misc_RNA (1)...(19): siRNA sense strand
acaacuagccuucggguau

SEQ ID NO: 1852145 - RNA, 19 nt, Homo sapiens
  misc_RNA (1)...(19): siRNA sense strand
uaucuuguacggcagcuua

SEQ ID NO: 1852146 - RNA, 19 nt, Homo sapiens
  misc_RNA (1)...(19): siRNA sense strand
gauuauacaguccaaguuc

SEQ ID NO: 1852147 - RNA, 19 nt, Homo sapiens
  misc_RNA (1)...(19): siRNA sense strand
caaagggguucucauguau

SEQ ID NO: 1852148 - RNA, 19 nt, Homo sapiens
  misc_RNA (1)...(19): siRNA sense strand
gaaauucucaaugacuguu

SEQ ID NO: 1852149 - RNA, 19 nt, Homo sapiens
  misc_RNA (1)...(19): siRNA sense strand
aaaaugggauugaacagaa

SEQ ID NO: 1852150 - RNA, 19 nt, Homo sapiens
  misc_RNA (1)...(19): siRNA sense strand
caucaagcccacgaguuua

SEQ ID NO: 1852151 - RNA, 19 nt, Homo sapiens
  misc_RNA (1)...(19): siRNA sense strand
gaagaguugaggaauaugg

SEQ ID NO: 1852152 - RNA, 19 nt, Homo sapiens
  misc_RNA (1)...(19): siRNA sense strand
cucaaugacuguucugaug

SEQ ID NO: 1852153 - RNA, 19 nt, Homo sapiens
  misc_RNA (1)...(19): siRNA sense strand
gagagauuauacaguccaa

SEQ ID NO: 1852154 - RNA, 19 nt, Homo sapiens
  misc_RNA (1)...(19): siRNA sense strand
aaagcaguauucagcgauu

SEQ ID NO: 1852155 - RNA, 19 nt, Homo sapiens
  misc_RNA (1)...(19): siRNA sense strand
auucagcgauuucaagaga

SEQ ID NO: 1852156 - RNA, 19 nt, Homo sapiens
  misc_RNA (1)...(19): siRNA sense strand
guucugauguagaugagau

SEQ ID NO: 1852157 - RNA, 19 nt, Homo sapiens
  misc_RNA (1)...(19): siRNA sense strand
ucagccauguuauuacaga

SEQ ID NO: 1852158 - RNA, 19 nt, Homo sapiens
  misc_RNA (1)...(19): siRNA sense strand
gagauuauacaguccaagu

SEQ ID NO: 1852159 - RNA, 19 nt, Homo sapiens
  misc_RNA (1)...(19): siRNA sense strand
gcuaugcaccaccgccuaa

SEQ ID NO: 1852160 - RNA, 19 nt, Homo sapiens
  misc_RNA (1)...(19): siRNA sense strand
caagcaagaagaaaguaga

SEQ ID NO: 1852161 - RNA, 19 nt, Homo sapiens
  misc_RNA (1)...(19): siRNA sense strand
gaguugaggaauaugguuu

SEQ ID NO: 1852162 - RNA, 19 nt, Homo sapiens
  misc_RNA (1)...(19): siRNA sense strand
ugagaucaaauuccaagaa

SEQ ID NO: 1852163 - RNA, 19 nt, Homo sapiens
  misc_RNA (1)...(19): siRNA sense strand
uuuaugauguccuugaugu

SEQ ID NO: 1852164 - RNA, 19 nt, Homo sapiens
  misc_RNA (1)...(19): siRNA sense strand
aagcaugucaucagauuug

SEQ ID NO: 1852165 - RNA, 19 nt, Homo sapiens
  misc_RNA (1)...(19): siRNA sense strand
gccaauaucaagcauguca

SEQ ID NO: 1852166 - RNA, 19 nt, Homo sapiens
  misc_RNA (1)...(19): siRNA sense strand
uaggguuucugaacuacaa

SEQ ID NO: 1852167 - RNA, 19 nt, Homo sapiens
  misc_RNA (1)...(19): siRNA sense strand
aagaagcuaugaaaguauc

SEQ ID NO: 1852168 - RNA, 19 nt, Homo sapiens
  misc_RNA (1)...(19): siRNA sense strand
cauuccagagcacuaauua

SEQ ID NO: 1852169 - RNA, 19 nt, Homo sapiens
  misc_RNA (1)...(19): siRNA sense strand
ggaagaauuacucuauguc

SEQ ID NO: 1852170 - RNA, 19 nt, Homo sapiens
  misc_RNA (1)...(19): siRNA sense strand
gacaaguugcccucaagaa

SEQ ID NO: 1852171 - RNA, 19 nt, Homo sapiens
  misc_RNA (1)...(19): siRNA sense strand
acacaaagcagcccaacca

SEQ ID NO: 1852172 - RNA, 19 nt, Homo sapiens
  misc_RNA (1)...(19): siRNA sense strand
aguaagccuuguucaguga

SEQ ID NO: 1852173 - RNA, 19 nt, Homo sapiens
  misc_RNA (1)...(19): siRNA sense strand
aaaguggacgcaagcauga

SEQ ID NO: 1852174 - RNA, 19 nt, Homo sapiens
  misc_RNA (1)...(19): siRNA sense strand
gcagauccugauagugaaa

SEQ ID NO: 1852175 - RNA, 19 nt, Homo sapiens
  misc_RNA (1)...(19): siRNA sense strand
uuccagagcacuaauuaaa

SEQ ID NO: 1852176 - RNA, 19 nt, Homo sapiens
  misc_RNA (1)...(19): siRNA sense strand
uagaaacccugaucauucc

SEQ ID NO: 1852177 - RNA, 19 nt, Homo sapiens
  misc_RNA (1)...(19): siRNA sense strand
gcccacgaguuuaguucaa

SEQ ID NO: 1852178 - RNA, 19 nt, Homo sapiens
  misc_RNA (1)...(19): siRNA sense strand
cgaagaaagaagcuaugaa

SEQ ID NO: 1852179 - RNA, 19 nt, Homo sapiens
  misc_RNA (1)...(19): siRNA sense strand
cgauauccacgaacucuug

SEQ ID NO: 1852180 - RNA, 19 nt, Homo sapiens
  misc_RNA (1)...(19): siRNA sense strand
uuaguuagguuaucuucag

SEQ ID NO: 1852181 - RNA, 19 nt, Homo sapiens
  misc_RNA (1)...(19): siRNA sense strand
gcaagcaagaagaaaguag

SEQ ID NO: 1852182 - RNA, 19 nt, Homo sapiens
  misc_RNA (1)...(19): siRNA sense strand
gguugauccugcugcuauu

SEQ ID NO: 1852183 - RNA, 19 nt, Homo sapiens
  misc_RNA (1)...(19): siRNA sense strand
acaaagcagcccaaccaaa

SEQ ID NO: 1852184 - RNA, 19 nt, Homo sapiens
  misc_RNA (1)...(19): siRNA sense strand
gaaagaagcuaugaaagua

SEQ ID NO: 1852185 - RNA, 19 nt, Homo sapiens
  misc_RNA (1)...(19): siRNA sense strand
ggaauaugguuucuaguuu

SEQ ID NO: 1852186 - RNA, 19 nt, Homo sapiens
  misc_RNA (1)...(19): siRNA sense strand
gaagaaagaagcuaugaaa

SEQ ID NO: 1852187 - RNA, 19 nt, Homo sapiens
  misc_RNA (1)...(19): siRNA sense strand
ugaaggacuuucugauuua

SEQ ID NO: 1852188 - RNA, 19 nt, Homo sapiens
  misc_RNA (1)...(19): siRNA sense strand
ggaagacccuccugccaaa

SEQ ID NO: 1852189 - RNA, 19 nt, Homo sapiens
  misc_RNA (1)...(19): siRNA sense strand
ggacgccccuugaauauua

SEQ ID NO: 1852190 - RNA, 19 nt, Homo sapiens
  misc_RNA (1)...(19): siRNA sense strand
ggaaaugcaucuuuauguc

SEQ ID NO: 1852191 - RNA, 19 nt, Homo sapiens
  misc_RNA (1)...(19): siRNA sense strand
ccagagcacuaauuaaaga

SEQ ID NO: 1852192 - RNA, 19 nt, Homo sapiens
  misc_RNA (1)...(19): siRNA sense strand
uaucagccaucuucuguaa

SEQ ID NO: 1852193 - RNA, 19 nt, Homo sapiens
  misc_RNA (1)...(19): siRNA sense strand
ugagggcgcugcauuuauu

SEQ ID NO: 1852194 - RNA, 19 nt, Homo sapiens
  misc_RNA (1)...(19): siRNA sense strand
ucaacaaguuagagagaua

SEQ ID NO: 1852195 - RNA, 19 nt, Homo sapiens
  misc_RNA (1)...(19): siRNA sense strand
guucaagcguccucaguaa

SEQ ID NO: 1852196 - RNA, 19 nt, Homo sapiens
  misc_RNA (1)...(19): siRNA sense strand
caucagaaauugggaagaa

SEQ ID NO: 1852197 - RNA, 19 nt, Homo sapiens
  misc_RNA (1)...(19): siRNA sense strand
gcccugcgguucagauuaa

SEQ ID NO: 1852198 - RNA, 19 nt, Homo sapiens
  misc_RNA (1)...(19): siRNA sense strand
caaugacuguucugaugua

SEQ ID NO: 1852199 - RNA, 19 nt, Homo sapiens
  misc_RNA (1)...(19): siRNA sense strand
uugaaggacuuucugauuu

SEQ ID NO: 1852200 - RNA, 19 nt, Homo sapiens
  misc_RNA (1)...(19): siRNA sense strand
ucaagcaugucaucagauu

SEQ ID NO: 1852201 - RNA, 19 nt, Homo sapiens
  misc_RNA (1)...(19): siRNA sense strand
gaauuacucuaugucugua

SEQ ID NO: 1852202 - RNA, 19 nt, Homo sapiens
  misc_RNA (1)...(19): siRNA sense strand
gggaagaauuacucuaugu

SEQ ID NO: 1852203 - RNA, 19 nt, Homo sapiens
  misc_RNA (1)...(19): siRNA sense strand
gaugagggcgcugcauuua

SEQ ID NO: 1852204 - RNA, 19 nt, Homo sapiens
  misc_RNA (1)...(19): siRNA sense strand
gaaggacuuucugauuuau

SEQ ID NO: 1852205 - RNA, 19 nt, Homo sapiens
  misc_RNA (1)...(19): siRNA sense strand
gaaaugcaucuuuauguca

SEQ ID NO: 1852206 - RNA, 19 nt, Homo sapiens
  misc_RNA (1)...(19): siRNA sense strand
acaaucaaaucaucgguuu

SEQ ID NO: 1852207 - RNA, 19 nt, Homo sapiens
  misc_RNA (1)...(19): siRNA sense strand
gcagugacuuguacacauc

SEQ ID NO: 1852208 - RNA, 19 nt, Homo sapiens
  misc_RNA (1)...(19): siRNA sense strand
gagaucaaauuccaagaag

SEQ ID NO: 1852209 - RNA, 19 nt, Homo sapiens
  misc_RNA (1)...(19): siRNA sense strand
auacuaagcccacauuuga

SEQ ID NO: 1852210 - RNA, 19 nt, Homo sapiens
  misc_RNA (1)...(19): siRNA sense strand
gaucaaauuccaagaagau

SEQ ID NO: 1852211 - RNA, 19 nt, Homo sapiens
  misc_RNA (1)...(19): siRNA sense strand
gcaagaagaaaguagaugu

SEQ ID NO: 1852212 - RNA, 19 nt, Homo sapiens
  misc_RNA (1)...(19): siRNA sense strand
ucaguaccauuccaccaua

SEQ ID NO: 1852213 - RNA, 19 nt, Homo sapiens
  misc_RNA (1)...(19): siRNA sense strand
uaucaagcaugucaucaga

SEQ ID NO: 1852214 - RNA, 19 nt, Homo sapiens
  misc_RNA (1)...(19): siRNA sense strand
ugaggaauaugguuucuag

SEQ ID NO: 1852215 - RNA, 19 nt, Homo sapiens
  misc_RNA (1)...(19): siRNA sense strand
ggauuuguccuguguguga

SEQ ID NO: 1852216 - RNA, 19 nt, Homo sapiens
  misc_RNA (1)...(19): siRNA sense strand
ccaaagggguucucaugua

SEQ ID NO: 1852217 - RNA, 19 nt, Homo sapiens
  misc_RNA (1)...(19): siRNA sense strand
caaagcagcccaaccaaag

SEQ ID NO: 1852218 - RNA, 19 nt, Homo sapiens
  misc_RNA (1)...(19): siRNA sense strand
guucugugcugcuucaaga

SEQ ID NO: 1852219 - RNA, 19 nt, Homo sapiens
  misc_RNA (1)...(19): siRNA sense strand
caucagccauguuauuaca

SEQ ID NO: 1852220 - RNA, 19 nt, Homo sapiens
  misc_RNA (1)...(19): siRNA sense strand
gauacuaagcccacauuug

SEQ ID NO: 1852221 - RNA, 19 nt, Homo sapiens
  misc_RNA (1)...(19): siRNA sense strand
ugacuguucugauguagau

SEQ ID NO: 1852222 - RNA, 19 nt, Homo sapiens
  misc_RNA (1)...(19): siRNA sense strand
gcuauuccgccuucauuaa

SEQ ID NO: 1852223 - RNA, 19 nt, Homo sapiens
  misc_RNA (1)...(19): siRNA sense strand
ucgaagaguugaggaauau

SEQ ID NO: 1852224 - RNA, 19 nt, Homo sapiens
  misc_RNA (1)...(19): siRNA sense strand
caaguugcccucaagaaga

SEQ ID NO: 1852225 - RNA, 19 nt, Homo sapiens
  misc_RNA (1)...(19): siRNA sense strand
gcgcugcauuuauugaaga

SEQ ID NO: 1852226 - RNA, 19 nt, Homo sapiens
  misc_RNA (1)...(19): siRNA sense strand
caaugagaccgaagaaaga

SEQ ID NO: 1852227 - RNA, 19 nt, Homo sapiens
  misc_RNA (1)...(19): siRNA sense strand
gagacaaguugcccucaag

SEQ ID NO: 1852228 - RNA, 19 nt, Homo sapiens
  misc_RNA (1)...(19): siRNA sense strand
agaaagaagcuaugaaagu

SEQ ID NO: 1852229 - RNA, 19 nt, Homo sapiens
  misc_RNA (1)...(19): siRNA sense strand
uuagaaacccugaucauuc

SEQ ID NO: 1852230 - RNA, 19 nt, Homo sapiens
  misc_RNA (1)...(19): siRNA sense strand
ccaaugagaccgaagaaag

SEQ ID NO: 1852231 - RNA, 19 nt, Homo sapiens
  misc_RNA (1)...(19): siRNA sense strand
ucaucaagcccacgaguuu

SEQ ID NO: 1852232 - RNA, 19 nt, Homo sapiens
  misc_RNA (1)...(19): siRNA sense strand
uagaugagaucaaauucca

SEQ ID NO: 1852233 - RNA, 19 nt, Homo sapiens
  misc_RNA (1)...(19): siRNA sense strand
cugcagauccugauaguga

SEQ ID NO: 1852234 - RNA, 19 nt, Homo sapiens
  misc_RNA (1)...(19): siRNA sense strand
gaagaauuacucuaugucu

SEQ ID NO: 1852235 - RNA, 19 nt, Homo sapiens
  misc_RNA (1)...(19): siRNA sense strand
caacuagccuucggguauc

SEQ ID NO: 1852236 - RNA, 19 nt, Homo sapiens
  misc_RNA (1)...(19): siRNA sense strand
caagaagaaaguagauguu

SEQ ID NO: 1852237 - RNA, 19 nt, Homo sapiens
  misc_RNA (1)...(19): siRNA sense strand
gaugugcccuuuaggaaaa

SEQ ID NO: 1852238 - RNA, 19 nt, Homo sapiens
  misc_RNA (1)...(19): siRNA sense strand
gaucauuccagagcacuaa

SEQ ID NO: 1852239 - RNA, 19 nt, Homo sapiens
  misc_RNA (1)...(19): siRNA sense strand
guaagggugcccaguguga

SEQ ID NO: 1852240 - RNA, 19 nt, Homo sapiens
  misc_RNA (1)...(19): siRNA sense strand
aaucaucgguuuucaguuu

SEQ ID NO: 1852241 - RNA, 19 nt, Homo sapiens
  misc_RNA (1)...(19): siRNA sense strand
ucaccauccucuccuguug

SEQ ID NO: 1852242 - RNA, 19 nt, Homo sapiens
  misc_RNA (1)...(19): siRNA sense strand
ggugguaggagagauuaua

SEQ ID NO: 1852243 - RNA, 19 nt, Homo sapiens
  misc_RNA (1)...(19): siRNA sense strand
aagcaugaccuccugauga

SEQ ID NO: 1852244 - RNA, 19 nt, Homo sapiens
  misc_RNA (1)...(19): siRNA sense strand
acaacuagccuucggguau

SEQ ID NO: 1852245 - RNA, 19 nt, Homo sapiens
  misc_RNA (1)...(19): siRNA sense strand
uaucuuguacggcagcuua

SEQ ID NO: 1852246 - RNA, 19 nt, Homo sapiens
  misc_RNA (1)...(19): siRNA sense strand
gauuauacaguccaaguuc

SEQ ID NO: 1852247 - RNA, 19 nt, Homo sapiens
  misc_RNA (1)...(19): siRNA sense strand
caaagggguucucauguau

SEQ ID NO: 1852248 - RNA, 19 nt, Homo sapiens
  misc_RNA (1)...(19): siRNA sense strand
gaaauucucaaugacuguu

SEQ ID NO: 1852249 - RNA, 19 nt, Homo sapiens
  misc_RNA (1)...(19): siRNA sense strand
aaaaugggauugaacagaa

SEQ ID NO: 1852250 - RNA, 19 nt, Homo sapiens
  misc_RNA (1)...(19): siRNA sense strand
caucaagcccacgaguuua

SEQ ID NO: 1852251 - RNA, 19 nt, Homo sapiens
  misc_RNA (1)...(19): siRNA sense strand
gaagaguugaggaauaugg

SEQ ID NO: 1852252 - RNA, 19 nt, Homo sapiens
  misc_RNA (1)...(19): siRNA sense strand
cucaaugacuguucugaug

SEQ ID NO: 1852253 - RNA, 19 nt, Homo sapiens
  misc_RNA (1)...(19): siRNA sense strand
gagagauuauacaguccaa

SEQ ID NO: 1852254 - RNA, 19 nt, Homo sapiens
  misc_RNA (1)...(19): siRNA sense strand
aaagcaguauucagcgauu

SEQ ID NO: 1852255 - RNA, 19 nt, Homo sapiens
  misc_RNA (1)...(19): siRNA sense strand
auucagcgauuucaagaga

SEQ ID NO: 1852256 - RNA, 19 nt, Homo sapiens
  misc_RNA (1)...(19): siRNA sense strand
guucugauguagaugagau

SEQ ID NO: 1852257 - RNA, 19 nt, Homo sapiens
  misc_RNA (1)...(19): siRNA sense strand
ucagccauguuauuacaga

SEQ ID NO: 1852258 - RNA, 19 nt, Homo sapiens
  misc_RNA (1)...(19): siRNA sense strand
gagauuauacaguccaagu

SEQ ID NO: 1852259 - RNA, 19 nt, Homo sapiens
  misc_RNA (1)...(19): siRNA sense strand
gcuaugcaccaccgccuaa

SEQ ID NO: 1852260 - RNA, 19 nt, Homo sapiens
  misc_RNA (1)...(19): siRNA sense strand
caagcaagaagaaaguaga

SEQ ID NO: 1852261 - RNA, 19 nt, Homo sapiens
  misc_RNA (1)...(19): siRNA sense strand
gaguugaggaauaugguuu

SEQ ID NO: 1852262 - RNA, 19 nt, Homo sapiens
  misc_RNA (1)...(19): siRNA sense strand
ugagaucaaauuccaagaa

SEQ ID NO: 1852263 - RNA, 19 nt, Homo sapiens
  misc_RNA (1)...(19): siRNA sense strand
uuuaugauguccuugaugu

SEQ ID NO: 1852264 - RNA, 19 nt, Homo sapiens
  misc_RNA (1)...(19): siRNA sense strand
aagcaugucaucagauuug

SEQ ID NO: 1852265 - RNA, 19 nt, Homo sapiens
  misc_RNA (1)...(19): siRNA sense strand
gccaauaucaagcauguca

SEQ ID NO: 1852266 - RNA, 19 nt, Homo sapiens
  misc_RNA (1)...(19): siRNA sense strand
uaggguuucugaacuacaa

SEQ ID NO: 1852267 - RNA, 19 nt, Homo sapiens
  misc_RNA (1)...(19): siRNA sense strand
aagaagcuaugaaaguauc

SEQ ID NO: 1852268 - RNA, 19 nt, Homo sapiens
  misc_RNA (1)...(19): siRNA sense strand
cauuccagagcacuaauua

SEQ ID NO: 1852269 - RNA, 19 nt, Homo sapiens
  misc_RNA (1)...(19): siRNA sense strand
ggaagaauuacucuauguc

SEQ ID NO: 1852270 - RNA, 19 nt, Homo sapiens
  misc_RNA (1)...(19): siRNA sense strand
gacaaguugcccucaagaa

SEQ ID NO: 1852271 - RNA, 19 nt, Homo sapiens
  misc_RNA (1)...(19): siRNA sense strand
acacaaagcagcccaacca

SEQ ID NO: 1852272 - RNA, 19 nt, Homo sapiens
  misc_RNA (1)...(19): siRNA sense strand
aguaagccuuguucaguga

SEQ ID NO: 1852273 - RNA, 19 nt, Homo sapiens
  misc_RNA (1)...(19): siRNA sense strand
aaaguggacgcaagcauga

SEQ ID NO: 1852274 - RNA, 19 nt, Homo sapiens
  misc_RNA (1)...(19): siRNA sense strand
gcagauccugauagugaaa

SEQ ID NO: 1852275 - RNA, 19 nt, Homo sapiens
  misc_RNA (1)...(19): siRNA sense strand
uuccagagcacuaauuaaa

SEQ ID NO: 1852276 - RNA, 19 nt, Homo sapiens
  misc_RNA (1)...(19): siRNA sense strand
uagaaacccugaucauucc

SEQ ID NO: 1852277 - RNA, 19 nt, Homo sapiens
  misc_RNA (1)...(19): siRNA sense strand
gcccacgaguuuaguucaa

SEQ ID NO: 1852278 - RNA, 19 nt, Homo sapiens
  misc_RNA (1)...(19): siRNA sense strand
cgaagaaagaagcuaugaa

SEQ ID NO: 1852279 - RNA, 19 nt, Homo sapiens
  misc_RNA (1)...(19): siRNA sense strand
cgauauccacgaacucuug

SEQ ID NO: 1852280 - RNA, 19 nt, Homo sapiens
  misc_RNA (1)...(19): siRNA sense strand
uuaguuagguuaucuucag

SEQ ID NO: 1852281 - RNA, 19 nt, Homo sapiens
  misc_RNA (1)...(19): siRNA sense strand
gcaagcaagaagaaaguag

SEQ ID NO: 1852282 - RNA, 19 nt, Homo sapiens
  misc_RNA (1)...(19): siRNA sense strand
gguugauccugcugcuauu

SEQ ID NO: 1852283 - RNA, 19 nt, Homo sapiens
  misc_RNA (1)...(19): siRNA sense strand
acaaagcagcccaaccaaa

SEQ ID NO: 1852284 - RNA, 19 nt, Homo sapiens
  misc_RNA (1)...(19): siRNA sense strand
aaagauggcuaucgguaua

SEQ ID NO: 1852285 - RNA, 19 nt, Homo sapiens
  misc_RNA (1)...(19): siRNA sense strand
ccgagaagcuggaaauuga

SEQ ID NO: 1852286 - RNA, 19 nt, Homo sapiens
  misc_RNA (1)...(19): siRNA sense strand
uacaagagcugcacgguuu

SEQ ID NO: 1852287 - RNA, 19 nt, Homo sapiens
  misc_RNA (1)...(19): siRNA sense strand
guucacggcugacacauuu

SEQ ID NO: 1852288 - RNA, 19 nt, Homo sapiens
  misc_RNA (1)...(19): siRNA sense strand
gagaagggcuacucuaugg

SEQ ID NO: 1852289 - RNA, 19 nt, Homo sapiens
  misc_RNA (1)...(19): siRNA sense strand
gaacacccguuuaacaaag

SEQ ID NO: 1852290 - RNA, 19 nt, Homo sapiens
  misc_RNA (1)...(19): siRNA sense strand
gaugagaugccaccagaua

SEQ ID NO: 1852291 - RNA, 19 nt, Homo sapiens
  misc_RNA (1)...(19): siRNA sense strand
ccagacacauacaaagaua

SEQ ID NO: 1852292 - RNA, 19 nt, Homo sapiens
  misc_RNA (1)...(19): siRNA sense strand
acaauguucuccaaagaua

SEQ ID NO: 1852293 - RNA, 19 nt, Homo sapiens
  misc_RNA (1)...(19): siRNA sense strand
caguaaagauccagaagaa

SEQ ID NO: 1852294 - RNA, 19 nt, Homo sapiens
  misc_RNA (1)...(19): siRNA sense strand
guaaagauccagaagaaga

SEQ ID NO: 1852295 - RNA, 19 nt, Homo sapiens
  misc_RNA (1)...(19): siRNA sense strand
gaaaugugccuuagugcuu

SEQ ID NO: 1852296 - RNA, 19 nt, Homo sapiens
  misc_RNA (1)...(19): siRNA sense strand
uaacauugguccugcuuau

SEQ ID NO: 1852297 - RNA, 19 nt, Homo sapiens
  misc_RNA (1)...(19): siRNA sense strand
gagacagaaucaucuaaug

SEQ ID NO: 1852298 - RNA, 19 nt, Homo sapiens
  misc_RNA (1)...(19): siRNA sense strand
gaucaggaccuuaguaaca

SEQ ID NO: 1852299 - RNA, 19 nt, Homo sapiens
  misc_RNA (1)...(19): siRNA sense strand
gagcugcaaugugggauuu

SEQ ID NO: 1852300 - RNA, 19 nt, Homo sapiens
  misc_RNA (1)...(19): siRNA sense strand
agagauguauucuugguaa

SEQ ID NO: 1852301 - RNA, 19 nt, Homo sapiens
  misc_RNA (1)...(19): siRNA sense strand
gcagugcugugucuacuag

SEQ ID NO: 1852302 - RNA, 19 nt, Homo sapiens
  misc_RNA (1)...(19): siRNA sense strand
gcugcacgguuuccauuaa

SEQ ID NO: 1852303 - RNA, 19 nt, Homo sapiens
  misc_RNA (1)...(19): siRNA sense strand
ccacagggaccaccaagaa

SEQ ID NO: 1852304 - RNA, 19 nt, Homo sapiens
  misc_RNA (1)...(19): siRNA sense strand
ggaccaugcuucaaguauc

SEQ ID NO: 1852305 - RNA, 19 nt, Homo sapiens
  misc_RNA (1)...(19): siRNA sense strand
ggaacacccguuuaacaaa

SEQ ID NO: 1852306 - RNA, 19 nt, Homo sapiens
  misc_RNA (1)...(19): siRNA sense strand
ggaagggugccugguauuu

SEQ ID NO: 1852307 - RNA, 19 nt, Homo sapiens
  misc_RNA (1)...(19): siRNA sense strand
acacuacucuucuggcuau

SEQ ID NO: 1852308 - RNA, 19 nt, Homo sapiens
  misc_RNA (1)...(19): siRNA sense strand
cgaagacaauguucuccaa

SEQ ID NO: 1852309 - RNA, 19 nt, Homo sapiens
  misc_RNA (1)...(19): siRNA sense strand
agacaauguucuccaaaga

SEQ ID NO: 1852310 - RNA, 19 nt, Homo sapiens
  misc_RNA (1)...(19): siRNA sense strand
gaguaaagaaagagaugua

SEQ ID NO: 1852311 - RNA, 19 nt, Homo sapiens
  misc_RNA (1)...(19): siRNA sense strand
ugacacauuuggcauagau

SEQ ID NO: 1852312 - RNA, 19 nt, Homo sapiens
  misc_RNA (1)...(19): siRNA sense strand
guccugggauuuuauauua

SEQ ID NO: 1852313 - RNA, 19 nt, Homo sapiens
  misc_RNA (1)...(19): siRNA sense strand
gaagacaauguucuccaaa

SEQ ID NO: 1852314 - RNA, 19 nt, Homo sapiens
  misc_RNA (1)...(19): siRNA sense strand
gagauguauucuugguaaa

SEQ ID NO: 1852315 - RNA, 19 nt, Homo sapiens
  misc_RNA (1)...(19): siRNA sense strand
gcaguaaagauccagaaga

SEQ ID NO: 1852316 - RNA, 19 nt, Homo sapiens
  misc_RNA (1)...(19): siRNA sense strand
ggagacagaaucaucuaau

SEQ ID NO: 1852317 - RNA, 19 nt, Homo sapiens
  misc_RNA (1)...(19): siRNA sense strand
aagcaaacuugaaggaaau

SEQ ID NO: 1852318 - RNA, 19 nt, Homo sapiens
  misc_RNA (1)...(19): siRNA sense strand
gguguggcuuacaaagaua

SEQ ID NO: 1852319 - RNA, 19 nt, Homo sapiens
  misc_RNA (1)...(19): siRNA sense strand
uggcugacgucuuguauca

SEQ ID NO: 1852320 - RNA, 19 nt, Homo sapiens
  misc_RNA (1)...(19): siRNA sense strand
gacagaaucaucuaaugga

SEQ ID NO: 1852321 - RNA, 19 nt, Homo sapiens
  misc_RNA (1)...(19): siRNA sense strand
cacccuggcugacgucuug

SEQ ID NO: 1852322 - RNA, 19 nt, Homo sapiens
  misc_RNA (1)...(19): siRNA sense strand
aaaugugccuuagugcuuu

SEQ ID NO: 1852323 - RNA, 19 nt, Homo sapiens
  misc_RNA (1)...(19): siRNA sense strand
ucaaucaagguguggcuua

SEQ ID NO: 1852324 - RNA, 19 nt, Homo sapiens
  misc_RNA (1)...(19): siRNA sense strand
cagaggugauggauacuca

SEQ ID NO: 1852325 - RNA, 19 nt, Homo sapiens
  misc_RNA (1)...(19): siRNA sense strand
gagcugcacgguuuccauu

SEQ ID NO: 1852326 - RNA, 19 nt, Homo sapiens
  misc_RNA (1)...(19): siRNA sense strand
ugaucgagcuccccaguua

SEQ ID NO: 1852327 - RNA, 19 nt, Homo sapiens
  misc_RNA (1)...(19): siRNA sense strand
caaagauggcuaucgguau

SEQ ID NO: 1852328 - RNA, 19 nt, Homo sapiens
  misc_RNA (1)...(19): siRNA sense strand
gaagauuaccccaaauuug

SEQ ID NO: 1852329 - RNA, 19 nt, Homo sapiens
  misc_RNA (1)...(19): siRNA sense strand
acagaaucaucuaauggaa

SEQ ID NO: 1852330 - RNA, 19 nt, Homo sapiens
  misc_RNA (1)...(19): siRNA sense strand
gaagagaauggccgacagu

SEQ ID NO: 1852331 - RNA, 19 nt, Homo sapiens
  misc_RNA (1)...(19): siRNA sense strand
ucaagcuccuuuagguuau

SEQ ID NO: 1852332 - RNA, 19 nt, Homo sapiens
  misc_RNA (1)...(19): siRNA sense strand
ugaaaucacuguggaugag

SEQ ID NO: 1852333 - RNA, 19 nt, Homo sapiens
  misc_RNA (1)...(19): siRNA sense strand
agaagaagauuaccccaaa

SEQ ID NO: 1852334 - RNA, 19 nt, Homo sapiens
  misc_RNA (1)...(19): siRNA sense strand
ggcaaacacuacucuucug

SEQ ID NO: 1852335 - RNA, 19 nt, Homo sapiens
  misc_RNA (1)...(19): siRNA sense strand
caaacuuggucgauguaag

SEQ ID NO: 1852336 - RNA, 19 nt, Homo sapiens
  misc_RNA (1)...(19): siRNA sense strand
cauuggaacacccguuuaa

SEQ ID NO: 1852337 - RNA, 19 nt, Homo sapiens
  misc_RNA (1)...(19): siRNA sense strand
gcugacacauuuggcauag

SEQ ID NO: 1852338 - RNA, 19 nt, Homo sapiens
  misc_RNA (1)...(19): siRNA sense strand
caggagcggucgcaaaugc

SEQ ID NO: 1852339 - RNA, 19 nt, Homo sapiens
  misc_RNA (1)...(19): siRNA sense strand
cagaaucaucuaauggaaa

SEQ ID NO: 1852340 - RNA, 19 nt, Homo sapiens
  misc_RNA (1)...(19): siRNA sense strand
uggaaaagauacacuagaa

SEQ ID NO: 1852341 - RNA, 19 nt, Homo sapiens
  misc_RNA (1)...(19): siRNA sense strand
uucaagcuccuuuagguua

SEQ ID NO: 1852342 - RNA, 19 nt, Homo sapiens
  misc_RNA (1)...(19): siRNA sense strand
uggaacacccguuuaacaa

SEQ ID NO: 1852343 - RNA, 19 nt, Homo sapiens
  misc_RNA (1)...(19): siRNA sense strand
ggagugacccuuuguuuuc

SEQ ID NO: 1852344 - RNA, 19 nt, Homo sapiens
  misc_RNA (1)...(19): siRNA sense strand
acauugguccugcuuauga

SEQ ID NO: 1852345 - RNA, 19 nt, Homo sapiens
  misc_RNA (1)...(19): siRNA sense strand
ucaggaccuuaguaacauu

SEQ ID NO: 1852346 - RNA, 19 nt, Homo sapiens
  misc_RNA (1)...(19): siRNA sense strand
gauguauucuugguaaagg

SEQ ID NO: 1852347 - RNA, 19 nt, Homo sapiens
  misc_RNA (1)...(19): siRNA sense strand
cuccaaagauaaggauauu

SEQ ID NO: 1852348 - RNA, 19 nt, Homo sapiens
  misc_RNA (1)...(19): siRNA sense strand
caaugugggauuuguacaa

SEQ ID NO: 1852349 - RNA, 19 nt, Homo sapiens
  misc_RNA (1)...(19): siRNA sense strand
gcacgguuuccauuaacuu

SEQ ID NO: 1852350 - RNA, 19 nt, Homo sapiens
  misc_RNA (1)...(19): siRNA sense strand
cagagacagccaagucauu

SEQ ID NO: 1852351 - RNA, 19 nt, Homo sapiens
  misc_RNA (1)...(19): siRNA sense strand
gaaaucacuguggaugaga

SEQ ID NO: 1852352 - RNA, 19 nt, Homo sapiens
  misc_RNA (1)...(19): siRNA sense strand
ugacugugguuggagagaa

SEQ ID NO: 1852353 - RNA, 19 nt, Homo sapiens
  misc_RNA (1)...(19): siRNA sense strand
cuacuagugggaauuuaaa

SEQ ID NO: 1852354 - RNA, 19 nt, Homo sapiens
  misc_RNA (1)...(19): siRNA sense strand
uaaagauccagaagaagau

SEQ ID NO: 1852355 - RNA, 19 nt, Homo sapiens
  misc_RNA (1)...(19): siRNA sense strand
gacaauguucuccaaagau

SEQ ID NO: 1852356 - RNA, 19 nt, Homo sapiens
  misc_RNA (1)...(19): siRNA sense strand
gcaaacuuggucgauguaa

SEQ ID NO: 1852357 - RNA, 19 nt, Homo sapiens
  misc_RNA (1)...(19): siRNA sense strand
uaccuuucaugaccaacua

SEQ ID NO: 1852358 - RNA, 19 nt, Homo sapiens
  misc_RNA (1)...(19): siRNA sense strand
caacgucugccaucacagu

SEQ ID NO: 1852359 - RNA, 19 nt, Homo sapiens
  misc_RNA (1)...(19): siRNA sense strand
uguaucacguggagacaga

SEQ ID NO: 1852360 - RNA, 19 nt, Homo sapiens
  misc_RNA (1)...(19): siRNA sense strand
cuccgaaggaucucacuua

SEQ ID NO: 1852361 - RNA, 19 nt, Homo sapiens
  misc_RNA (1)...(19): siRNA sense strand
agucauugccagacacaua

SEQ ID NO: 1852362 - RNA, 19 nt, Homo sapiens
  misc_RNA (1)...(19): siRNA sense strand
ggcuaucgguauauucuag

SEQ ID NO: 1852363 - RNA, 19 nt, Homo sapiens
  misc_RNA (1)...(19): siRNA sense strand
guaacauugguccugcuua

SEQ ID NO: 1852364 - RNA, 19 nt, Homo sapiens
  misc_RNA (1)...(19): siRNA sense strand
gaagaagauuaccccaaau

SEQ ID NO: 1852365 - RNA, 19 nt, Homo sapiens
  misc_RNA (1)...(19): siRNA sense strand
guaaaggaacacccagauc

SEQ ID NO: 1852366 - RNA, 19 nt, Homo sapiens
  misc_RNA (1)...(19): siRNA sense strand
gguaaaggaacacccagau

SEQ ID NO: 1852367 - RNA, 19 nt, Homo sapiens
  misc_RNA (1)...(19): siRNA sense strand
cagaugaccggcugacugu

SEQ ID NO: 1852368 - RNA, 19 nt, Homo sapiens
  misc_RNA (1)...(19): siRNA sense strand
gaccaugcuucaaguaucc

SEQ ID NO: 1852369 - RNA, 19 nt, Homo sapiens
  misc_RNA (1)...(19): siRNA sense strand
ccagccaucucacuguaca

SEQ ID NO: 1852370 - RNA, 19 nt, Homo sapiens
  misc_RNA (1)...(19): siRNA sense strand
acacagagacagccaaguc

SEQ ID NO: 1852371 - RNA, 19 nt, Homo sapiens
  misc_RNA (1)...(19): siRNA sense strand
aggcaaacuuggucgaugu

SEQ ID NO: 1852372 - RNA, 19 nt, Homo sapiens
  misc_RNA (1)...(19): siRNA sense strand
gaaaccuucaagcuccuuu

SEQ ID NO: 1852373 - RNA, 19 nt, Homo sapiens
  misc_RNA (1)...(19): siRNA sense strand
ucccagccaucucacugua

SEQ ID NO: 1852374 - RNA, 19 nt, Homo sapiens
  misc_RNA (1)...(19): siRNA sense strand
ccuucaagcuccuuuaggu

SEQ ID NO: 1852375 - RNA, 19 nt, Homo sapiens
  misc_RNA (1)...(19): siRNA sense strand
aagacaauguucuccaaag

SEQ ID NO: 1852376 - RNA, 19 nt, Homo sapiens
  misc_RNA (1)...(19): siRNA sense strand
ccaucucacuguacaagag

SEQ ID NO: 1852377 - RNA, 19 nt, Homo sapiens
  misc_RNA (1)...(19): siRNA sense strand
gagacguccugggauuuua

SEQ ID NO: 1852378 - RNA, 19 nt, Homo sapiens
  misc_RNA (1)...(19): siRNA sense strand
agggagacguccugggauu

SEQ ID NO: 1852379 - RNA, 19 nt, Homo sapiens
  misc_RNA (1)...(19): siRNA sense strand
uggaucaggaccuuaguaa

SEQ ID NO: 1852380 - RNA, 19 nt, Homo sapiens
  misc_RNA (1)...(19): siRNA sense strand
caauguucuccaaagauaa

SEQ ID NO: 1852381 - RNA, 19 nt, Homo sapiens
  misc_RNA (1)...(19): siRNA sense strand
gcgguggcuuggagacaga

SEQ ID NO: 1852382 - RNA, 19 nt, Homo sapiens
  misc_RNA (1)...(19): siRNA sense strand
gaagcagacuccccauagu

SEQ ID NO: 1852383 - RNA, 19 nt, Homo sapiens
  misc_RNA (1)...(19): siRNA sense strand
gccaagucauugccagaca

SEQ ID NO: 1852384 - RNA, 19 nt, Homo sapiens
  misc_RNA (1)...(19): siRNA sense strand
gaaacucucugaacaagaa

SEQ ID NO: 1852385 - RNA, 19 nt, Homo sapiens
  misc_RNA (1)...(19): siRNA sense strand
gaucugaacucccucauug

SEQ ID NO: 1852386 - RNA, 19 nt, Homo sapiens
  misc_RNA (1)...(19): siRNA sense strand
caacuuuacucuggauaua

SEQ ID NO: 1852387 - RNA, 19 nt, Homo sapiens
  misc_RNA (1)...(19): siRNA sense strand
caacuguucugauaaugaa

SEQ ID NO: 1852388 - RNA, 19 nt, Homo sapiens
  misc_RNA (1)...(19): siRNA sense strand
gacaagcucucuacugaug

SEQ ID NO: 1852389 - RNA, 19 nt, Homo sapiens
  misc_RNA (1)...(19): siRNA sense strand
gaacaggacagaaagauag

SEQ ID NO: 1852390 - RNA, 19 nt, Homo sapiens
  misc_RNA (1)...(19): siRNA sense strand
gcagaaaggcaguagauga

SEQ ID NO: 1852391 - RNA, 19 nt, Homo sapiens
  misc_RNA (1)...(19): siRNA sense strand
gaacagaaggccaccgaaa

SEQ ID NO: 1852392 - RNA, 19 nt, Homo sapiens
  misc_RNA (1)...(19): siRNA sense strand
ggagcuagcagcaaaguuu

SEQ ID NO: 1852393 - RNA, 19 nt, Homo sapiens
  misc_RNA (1)...(19): siRNA sense strand
gccaagagcuuagaagaug

SEQ ID NO: 1852394 - RNA, 19 nt, Homo sapiens
  misc_RNA (1)...(19): siRNA sense strand
aaagccaacuguucugaua

SEQ ID NO: 1852395 - RNA, 19 nt, Homo sapiens
  misc_RNA (1)...(19): siRNA sense strand
gcauuaaaguacagcauga

SEQ ID NO: 1852396 - RNA, 19 nt, Homo sapiens
  misc_RNA (1)...(19): siRNA sense strand
ggauauaaauacugccuau

SEQ ID NO: 1852397 - RNA, 19 nt, Homo sapiens
  misc_RNA (1)...(19): siRNA sense strand
gaaugacccuagaaacgaa

SEQ ID NO: 1852398 - RNA, 19 nt, Homo sapiens
  misc_RNA (1)...(19): siRNA sense strand
ggacagaaagauagaagaa

SEQ ID NO: 1852399 - RNA, 19 nt, Homo sapiens
  misc_RNA (1)...(19): siRNA sense strand
cgaaacagauaguggaaau

SEQ ID NO: 1852400 - RNA, 19 nt, Homo sapiens
  misc_RNA (1)...(19): siRNA sense strand
agaagcggcucaaauuauu

SEQ ID NO: 1852401 - RNA, 19 nt, Homo sapiens
  misc_RNA (1)...(19): siRNA sense strand
ugaauucacccaagcuuua

SEQ ID NO: 1852402 - RNA, 19 nt, Homo sapiens
  misc_RNA (1)...(19): siRNA sense strand
gaacagagagcuggcagaa

SEQ ID NO: 1852403 - RNA, 19 nt, Homo sapiens
  misc_RNA (1)...(19): siRNA sense strand
gcucugcccugaggauaua

SEQ ID NO: 1852404 - RNA, 19 nt, Homo sapiens
  misc_RNA (1)...(19): siRNA sense strand
acagagagcuggcagaaca

SEQ ID NO: 1852405 - RNA, 19 nt, Homo sapiens
  misc_RNA (1)...(19): siRNA sense strand
gaaugaguguuucagacuu

SEQ ID NO: 1852406 - RNA, 19 nt, Homo sapiens
  misc_RNA (1)...(19): siRNA sense strand
gaccucaucugcagaaaca

SEQ ID NO: 1852407 - RNA, 19 nt, Homo sapiens
  misc_RNA (1)...(19): siRNA sense strand
gagaagaaaucugcucagu

SEQ ID NO: 1852408 - RNA, 19 nt, Homo sapiens
  misc_RNA (1)...(19): siRNA sense strand
gcgaccaccugaagaaguu

SEQ ID NO: 1852409 - RNA, 19 nt, Homo sapiens
  misc_RNA (1)...(19): siRNA sense strand
caaagccaaagaagaguua

SEQ ID NO: 1852410 - RNA, 19 nt, Homo sapiens
  misc_RNA (1)...(19): siRNA sense strand
aacgagagcuggacaguau

SEQ ID NO: 1852411 - RNA, 19 nt, Homo sapiens
  misc_RNA (1)...(19): siRNA sense strand
cugacaagcucucuacuga

SEQ ID NO: 1852412 - RNA, 19 nt, Homo sapiens
  misc_RNA (1)...(19): siRNA sense strand
uaguugaucuggauaaugu

SEQ ID NO: 1852413 - RNA, 19 nt, Homo sapiens
  misc_RNA (1)...(19): siRNA sense strand
aaugaguguuucagacuua

SEQ ID NO: 1852414 - RNA, 19 nt, Homo sapiens
  misc_RNA (1)...(19): siRNA sense strand
ccaaagaagaguuagagaa

SEQ ID NO: 1852415 - RNA, 19 nt, Homo sapiens
  misc_RNA (1)...(19): siRNA sense strand
gaagaccucaucugcagaa

SEQ ID NO: 1852416 - RNA, 19 nt, Homo sapiens
  misc_RNA (1)...(19): siRNA sense strand
agucagagaugccauggaa

SEQ ID NO: 1852417 - RNA, 19 nt, Homo sapiens
  misc_RNA (1)...(19): siRNA sense strand
gcacaucgucguauugauc

SEQ ID NO: 1852418 - RNA, 19 nt, Homo sapiens
  misc_RNA (1)...(19): siRNA sense strand
gaagaugcucugaggcaaa

SEQ ID NO: 1852419 - RNA, 19 nt, Homo sapiens
  misc_RNA (1)...(19): siRNA sense strand
uggaaauccugacagcaua

SEQ ID NO: 1852420 - RNA, 19 nt, Homo sapiens
  misc_RNA (1)...(19): siRNA sense strand
gaaccugucugagaaacuc

SEQ ID NO: 1852421 - RNA, 19 nt, Homo sapiens
  misc_RNA (1)...(19): siRNA sense strand
aaagauagaagaagucaga

SEQ ID NO: 1852422 - RNA, 19 nt, Homo sapiens
  misc_RNA (1)...(19): siRNA sense strand
caugauaguugaucuggau

SEQ ID NO: 1852423 - RNA, 19 nt, Homo sapiens
  misc_RNA (1)...(19): siRNA sense strand
caaagaagaguuagagaag

SEQ ID NO: 1852424 - RNA, 19 nt, Homo sapiens
  misc_RNA (1)...(19): siRNA sense strand
acagaaagauagaagaagu

SEQ ID NO: 1852425 - RNA, 19 nt, Homo sapiens
  misc_RNA (1)...(19): siRNA sense strand
cagacaaacucuucgagau

SEQ ID NO: 1852426 - RNA, 19 nt, Homo sapiens
  misc_RNA (1)...(19): siRNA sense strand
cauggacaauucugagauu

SEQ ID NO: 1852427 - RNA, 19 nt, Homo sapiens
  misc_RNA (1)...(19): siRNA sense strand
acagaagcggcucaaauua

SEQ ID NO: 1852428 - RNA, 19 nt, Homo sapiens
  misc_RNA (1)...(19): siRNA sense strand
ugucauaugcuuccuauug

SEQ ID NO: 1852429 - RNA, 19 nt, Homo sapiens
  misc_RNA (1)...(19): siRNA sense strand
cgagagcuggacaguauua

SEQ ID NO: 1852430 - RNA, 19 nt, Homo sapiens
  misc_RNA (1)...(19): siRNA sense strand
ggccaagccucauauaacu

SEQ ID NO: 1852431 - RNA, 19 nt, Homo sapiens
  misc_RNA (1)...(19): siRNA sense strand
cagaaaggcaguagaugaa

SEQ ID NO: 1852432 - RNA, 19 nt, Homo sapiens
  misc_RNA (1)...(19): siRNA sense strand
cagaagcggcucaaauuau

SEQ ID NO: 1852433 - RNA, 19 nt, Homo sapiens
  misc_RNA (1)...(19): siRNA sense strand
caccugcacuuucagaaga

SEQ ID NO: 1852434 - RNA, 19 nt, Homo sapiens
  misc_RNA (1)...(19): siRNA sense strand
gaauucacccaagcuuuaa

SEQ ID NO: 1852435 - RNA, 19 nt, Homo sapiens
  misc_RNA (1)...(19): siRNA sense strand
gagaugccauggaaaauga

SEQ ID NO: 1852436 - RNA, 19 nt, Homo sapiens
  misc_RNA (1)...(19): siRNA sense strand
gauagaagaagucagagau

SEQ ID NO: 1852437 - RNA, 19 nt, Homo sapiens
  misc_RNA (1)...(19): siRNA sense strand
gauaguugaucuggauaau

SEQ ID NO: 1852438 - RNA, 19 nt, Homo sapiens
  misc_RNA (1)...(19): siRNA sense strand
ccgggaaaguguagagaaa

SEQ ID NO: 1852439 - RNA, 19 nt, Homo sapiens
  misc_RNA (1)...(19): siRNA sense strand
gcauuugacucugcaguag

SEQ ID NO: 1852440 - RNA, 19 nt, Homo sapiens
  misc_RNA (1)...(19): siRNA sense strand
aacaaaagcuggaagaaaa

SEQ ID NO: 1852441 - RNA, 19 nt, Homo sapiens
  misc_RNA (1)...(19): siRNA sense strand
ggguaaacuucacaacaug

SEQ ID NO: 1852442 - RNA, 19 nt, Homo sapiens
  misc_RNA (1)...(19): siRNA sense strand
aaagaagaguuagagaaga

SEQ ID NO: 1852443 - RNA, 19 nt, Homo sapiens
  misc_RNA (1)...(19): siRNA sense strand
caaugcacacuccaacaua

SEQ ID NO: 1852444 - RNA, 19 nt, Homo sapiens
  misc_RNA (1)...(19): siRNA sense strand
ggagcgaccaccugaagaa

SEQ ID NO: 1852445 - RNA, 19 nt, Homo sapiens
  misc_RNA (1)...(19): siRNA sense strand
gcauccucaucuucuauaa

SEQ ID NO: 1852446 - RNA, 19 nt, Homo sapiens
  misc_RNA (1)...(19): siRNA sense strand
uacagaagcggcucaaauu

SEQ ID NO: 1852447 - RNA, 19 nt, Homo sapiens
  misc_RNA (1)...(19): siRNA sense strand
aaacugaucacccugaaau

SEQ ID NO: 1852448 - RNA, 19 nt, Homo sapiens
  misc_RNA (1)...(19): siRNA sense strand
aagaagaguuagagaagau

SEQ ID NO: 1852449 - RNA, 19 nt, Homo sapiens
  misc_RNA (1)...(19): siRNA sense strand
ccuagaaacgaaacagaua

SEQ ID NO: 1852450 - RNA, 19 nt, Homo sapiens
  misc_RNA (1)...(19): siRNA sense strand
cagaaguaaugaaagaauc

SEQ ID NO: 1852451 - RNA, 19 nt, Homo sapiens
  misc_RNA (1)...(19): siRNA sense strand
uugaucagcugaacagaga

SEQ ID NO: 1852452 - RNA, 19 nt, Homo sapiens
  misc_RNA (1)...(19): siRNA sense strand
gaagaguuagagaagauga

SEQ ID NO: 1852453 - RNA, 19 nt, Homo sapiens
  misc_RNA (1)...(19): siRNA sense strand
gcagaaacaccuacuaucc

SEQ ID NO: 1852454 - RNA, 19 nt, Homo sapiens
  misc_RNA (1)...(19): siRNA sense strand
gguccaggcugucaaugca

SEQ ID NO: 1852455 - RNA, 19 nt, Homo sapiens
  misc_RNA (1)...(19): siRNA sense strand
cugaggauauaaacacauu

SEQ ID NO: 1852456 - RNA, 19 nt, Homo sapiens
  misc_RNA (1)...(19): siRNA sense strand
ugaacaggacagaaagaua

SEQ ID NO: 1852457 - RNA, 19 nt, Homo sapiens
  misc_RNA (1)...(19): siRNA sense strand
uauccuauaugccaaaugg

SEQ ID NO: 1852458 - RNA, 19 nt, Homo sapiens
  misc_RNA (1)...(19): siRNA sense strand
ucaggcagcucuggguuga

SEQ ID NO: 1852459 - RNA, 19 nt, Homo sapiens
  misc_RNA (1)...(19): siRNA sense strand
guucagagccaugcaguug

SEQ ID NO: 1852460 - RNA, 19 nt, Homo sapiens
  misc_RNA (1)...(19): siRNA sense strand
ugccagcgccguaggaaua

SEQ ID NO: 1852461 - RNA, 19 nt, Homo sapiens
  misc_RNA (1)...(19): siRNA sense strand
gccaugcaguugcugaaga

SEQ ID NO: 1852462 - RNA, 19 nt, Homo sapiens
  misc_RNA (1)...(19): siRNA sense strand
ucuaguguaucagaaguaa

SEQ ID NO: 1852463 - RNA, 19 nt, Homo sapiens
  misc_RNA (1)...(19): siRNA sense strand
gcucaugcacaucgucgua

SEQ ID NO: 1852464 - RNA, 19 nt, Homo sapiens
  misc_RNA (1)...(19): siRNA sense strand
gcacacuccaacauauuga

SEQ ID NO: 1852465 - RNA, 19 nt, Homo sapiens
  misc_RNA (1)...(19): siRNA sense strand
ugaaauuggugaaggaaaa

SEQ ID NO: 1852466 - RNA, 19 nt, Homo sapiens
  misc_RNA (1)...(19): siRNA sense strand
cuacagaagcggcucaaau

SEQ ID NO: 1852467 - RNA, 19 nt, Homo sapiens
  misc_RNA (1)...(19): siRNA sense strand
gaaagccgccauggacaau

SEQ ID NO: 1852468 - RNA, 19 nt, Homo sapiens
  misc_RNA (1)...(19): siRNA sense strand
ggaaauccugacagcauau

SEQ ID NO: 1852469 - RNA, 19 nt, Homo sapiens
  misc_RNA (1)...(19): siRNA sense strand
uacagucccugcuccuauu

SEQ ID NO: 1852470 - RNA, 19 nt, Homo sapiens
  misc_RNA (1)...(19): siRNA sense strand
gcagcuaucccuccagagu

SEQ ID NO: 1852471 - RNA, 19 nt, Homo sapiens
  misc_RNA (1)...(19): siRNA sense strand
caucaaagccaacuguucu

SEQ ID NO: 1852472 - RNA, 19 nt, Homo sapiens
  misc_RNA (1)...(19): siRNA sense strand
uacaagaacaggaauugaa

SEQ ID NO: 1852473 - RNA, 19 nt, Homo sapiens
  misc_RNA (1)...(19): siRNA sense strand
caagcucucuacugaugau

SEQ ID NO: 1852474 - RNA, 19 nt, Homo sapiens
  misc_RNA (1)...(19): siRNA sense strand
uggaaaggaaugaguguuu

SEQ ID NO: 1852475 - RNA, 19 nt, Homo sapiens
  misc_RNA (1)...(19): siRNA sense strand
gaggguaaacuucacaaca

SEQ ID NO: 1852476 - RNA, 19 nt, Homo sapiens
  misc_RNA (1)...(19): siRNA sense strand
gagcuggccuuuuguuugu

SEQ ID NO: 1852477 - RNA, 19 nt, Homo sapiens
  misc_RNA (1)...(19): siRNA sense strand
cgaaugacccuagaaacga

SEQ ID NO: 1852478 - RNA, 19 nt, Homo sapiens
  misc_RNA (1)...(19): siRNA sense strand
ccaacuguucugauaauga

SEQ ID NO: 1852479 - RNA, 19 nt, Homo sapiens
  misc_RNA (1)...(19): siRNA sense strand
caguggaggcauuaaagua

SEQ ID NO: 1852480 - RNA, 19 nt, Homo sapiens
  misc_RNA (1)...(19): siRNA sense strand
aacaggaauugaagucuga

SEQ ID NO: 1852481 - RNA, 19 nt, Homo sapiens
  misc_RNA (1)...(19): siRNA sense strand
guacaagaacaggaauuga

SEQ ID NO: 1852482 - RNA, 19 nt, Homo sapiens
  misc_RNA (1)...(19): siRNA sense strand
ggaaugaguguuucagacu

SEQ ID NO: 1852483 - RNA, 19 nt, Homo sapiens
  misc_RNA (1)...(19): siRNA sense strand
gcauggugaucuggagcua

SEQ ID NO: 1852484 - RNA, 19 nt, Homo sapiens
  misc_RNA (1)...(19): siRNA sense strand
ggacagagcuuccuucuca

SEQ ID NO: 1852485 - RNA, 19 nt, Homo sapiens
  misc_RNA (1)...(19): siRNA sense strand
gggcuuggcuuucuacuuu

SEQ ID NO: 1852486 - RNA, 19 nt, Homo sapiens
  misc_RNA (1)...(19): siRNA sense strand
gagaugaccgccuggauua

SEQ ID NO: 1852487 - RNA, 19 nt, Homo sapiens
  misc_RNA (1)...(19): siRNA sense strand
ggacaucuguggccacguu

SEQ ID NO: 1852488 - RNA, 19 nt, Homo sapiens
  misc_RNA (1)...(19): siRNA sense strand
gcacugagccugcaaacca

SEQ ID NO: 1852489 - RNA, 19 nt, Homo sapiens
  misc_RNA (1)...(19): siRNA sense strand
ugccagggaugcaauauuu

SEQ ID NO: 1852490 - RNA, 19 nt, Homo sapiens
  misc_RNA (1)...(19): siRNA sense strand
ggagacaagacaauuugaa

SEQ ID NO: 1852491 - RNA, 19 nt, Homo sapiens
  misc_RNA (1)...(19): siRNA sense strand
gaagguuggcuguaucuca

SEQ ID NO: 1852492 - RNA, 19 nt, Homo sapiens
  misc_RNA (1)...(19): siRNA sense strand
gagacaagacaauuugaau

SEQ ID NO: 1852493 - RNA, 19 nt, Homo sapiens
  misc_RNA (1)...(19): siRNA sense strand
gacaagacaauuugaaugg

SEQ ID NO: 1852494 - RNA, 19 nt, Homo sapiens
  misc_RNA (1)...(19): siRNA sense strand
cuuaaagacucauuucucu

SEQ ID NO: 1852495 - RNA, 19 nt, Homo sapiens
  misc_RNA (1)...(19): siRNA sense strand
ccacugggcuuggcuuucu

SEQ ID NO: 1852496 - RNA, 19 nt, Homo sapiens
  misc_RNA (1)...(19): siRNA sense strand
cgagagaggccgugguuuc

SEQ ID NO: 1852497 - RNA, 19 nt, Homo sapiens
  misc_RNA (1)...(19): siRNA sense strand
gagagaggccgugguuuca

SEQ ID NO: 1852498 - RNA, 19 nt, Homo sapiens
  misc_RNA (1)...(19): siRNA sense strand
ugagaugaccgccuggauu

SEQ ID NO: 1852499 - RNA, 19 nt, Homo sapiens
  misc_RNA (1)...(19): siRNA sense strand
cuacuuuccuggagacaag

SEQ ID NO: 1852500 - RNA, 19 nt, Homo sapiens
  misc_RNA (1)...(19): siRNA sense strand
agacaagacaauuugaaug

SEQ ID NO: 1852501 - RNA, 19 nt, Homo sapiens
  misc_RNA (1)...(19): siRNA sense strand
ccagggaugcaauauuuua

SEQ ID NO: 1852502 - RNA, 19 nt, Homo sapiens
  misc_RNA (1)...(19): siRNA sense strand
uggccacguucaugaagaa

SEQ ID NO: 1852503 - RNA, 19 nt, Homo sapiens
  misc_RNA (1)...(19): siRNA sense strand
ucacagugccucggacaga

SEQ ID NO: 1852504 - RNA, 19 nt, Homo sapiens
  misc_RNA (1)...(19): siRNA sense strand
ccacguucaugaagaagac

SEQ ID NO: 1852505 - RNA, 19 nt, Homo sapiens
  misc_RNA (1)...(19): siRNA sense strand
cugcaaaccaacucucuga

SEQ ID NO: 1852506 - RNA, 19 nt, Homo sapiens
  misc_RNA (1)...(19): siRNA sense strand
ccuggagacaagacaauuu

SEQ ID NO: 1852507 - RNA, 19 nt, Homo sapiens
  misc_RNA (1)...(19): siRNA sense strand
ccagaaggaagaaggaucu

SEQ ID NO: 1852508 - RNA, 19 nt, Homo sapiens
  misc_RNA (1)...(19): siRNA sense strand
cugagaagcagguuaucuu

SEQ ID NO: 1852509 - RNA, 19 nt, Homo sapiens
  misc_RNA (1)...(19): siRNA sense strand
cuggagauaugggaagguu

SEQ ID NO: 1852510 - RNA, 19 nt, Homo sapiens
  misc_RNA (1)...(19): siRNA sense strand
guggccacguucaugaaga

SEQ ID NO: 1852511 - RNA, 19 nt, Homo sapiens
  misc_RNA (1)...(19): siRNA sense strand
ggucuugaggccagaagga

SEQ ID NO: 1852512 - RNA, 19 nt, Homo sapiens
  misc_RNA (1)...(19): siRNA sense strand
ucugaacuuuccuugaaca

SEQ ID NO: 1852513 - RNA, 19 nt, Homo sapiens
  misc_RNA (1)...(19): siRNA sense strand
cacugagccugcaaaccaa

SEQ ID NO: 1852514 - RNA, 19 nt, Homo sapiens
  misc_RNA (1)...(19): siRNA sense strand
gaagaucaaugaccaguuu

SEQ ID NO: 1852515 - RNA, 19 nt, Homo sapiens
  misc_RNA (1)...(19): siRNA sense strand
ugaaauacgugacuguuua

SEQ ID NO: 1852516 - RNA, 19 nt, Homo sapiens
  misc_RNA (1)...(19): siRNA sense strand
ggaaagggccuauguacua

SEQ ID NO: 1852517 - RNA, 19 nt, Homo sapiens
  misc_RNA (1)...(19): siRNA sense strand
ggaaauggcuccuucaucu

SEQ ID NO: 1852518 - RNA, 19 nt, Homo sapiens
  misc_RNA (1)...(19): siRNA sense strand
ggacaggacaguauagaua

SEQ ID NO: 1852519 - RNA, 19 nt, Homo sapiens
  misc_RNA (1)...(19): siRNA sense strand
ggcaagccauuuaagauua

SEQ ID NO: 1852520 - RNA, 19 nt, Homo sapiens
  misc_RNA (1)...(19): siRNA sense strand
aaauaaagcucaacgagaa

SEQ ID NO: 1852521 - RNA, 19 nt, Homo sapiens
  misc_RNA (1)...(19): siRNA sense strand
caaaggaacuauacacaau

SEQ ID NO: 1852522 - RNA, 19 nt, Homo sapiens
  misc_RNA (1)...(19): siRNA sense strand
gaacagaaagagaaacuga

SEQ ID NO: 1852523 - RNA, 19 nt, Homo sapiens
  misc_RNA (1)...(19): siRNA sense strand
gcacagcggcuacaacaaa

SEQ ID NO: 1852524 - RNA, 19 nt, Homo sapiens
  misc_RNA (1)...(19): siRNA sense strand
ccacuagcauccacaagua

SEQ ID NO: 1852525 - RNA, 19 nt, Homo sapiens
  misc_RNA (1)...(19): siRNA sense strand
gaaacaagaagcugaagaa

SEQ ID NO: 1852526 - RNA, 19 nt, Homo sapiens
  misc_RNA (1)...(19): siRNA sense strand
gaaagggccuauguacuau

SEQ ID NO: 1852527 - RNA, 19 nt, Homo sapiens
  misc_RNA (1)...(19): siRNA sense strand
gcaacaaucuccucagagu

SEQ ID NO: 1852528 - RNA, 19 nt, Homo sapiens
  misc_RNA (1)...(19): siRNA sense strand
gaaagaagauaaagaaacc

SEQ ID NO: 1852529 - RNA, 19 nt, Homo sapiens
  misc_RNA (1)...(19): siRNA sense strand
aaagaaaccucagcaaaga

SEQ ID NO: 1852530 - RNA, 19 nt, Homo sapiens
  misc_RNA (1)...(19): siRNA sense strand
gcagaagaaugcagauuag

SEQ ID NO: 1852531 - RNA, 19 nt, Homo sapiens
  misc_RNA (1)...(19): siRNA sense strand
gagcaacaaucuccucaga

SEQ ID NO: 1852532 - RNA, 19 nt, Homo sapiens
  misc_RNA (1)...(19): siRNA sense strand
gaagaaugcaggauuauca

SEQ ID NO: 1852533 - RNA, 19 nt, Homo sapiens
  misc_RNA (1)...(19): siRNA sense strand
gauggcagguggaaacaaa

SEQ ID NO: 1852534 - RNA, 19 nt, Homo sapiens
  misc_RNA (1)...(19): siRNA sense strand
gcaagacaacggugguuua

SEQ ID NO: 1852535 - RNA, 19 nt, Homo sapiens
  misc_RNA (1)...(19): siRNA sense strand
acacaaugaugacggauaa

SEQ ID NO: 1852536 - RNA, 19 nt, Homo sapiens
  misc_RNA (1)...(19): siRNA sense strand
gaaggaagaacaagaacaa

SEQ ID NO: 1852537 - RNA, 19 nt, Homo sapiens
  misc_RNA (1)...(19): siRNA sense strand
gaacuauacacaaugauga

SEQ ID NO: 1852538 - RNA, 19 nt, Homo sapiens
  misc_RNA (1)...(19): siRNA sense strand
gaaaguggaauucuaagga

SEQ ID NO: 1852539 - RNA, 19 nt, Homo sapiens
  misc_RNA (1)...(19): siRNA sense strand
aagaagaaauggagaagaa

SEQ ID NO: 1852540 - RNA, 19 nt, Homo sapiens
  misc_RNA (1)...(19): siRNA sense strand
uaaagaauguuccacagau

SEQ ID NO: 1852541 - RNA, 19 nt, Homo sapiens
  misc_RNA (1)...(19): siRNA sense strand
cuucguaacuuaggaaaua

SEQ ID NO: 1852542 - RNA, 19 nt, Homo sapiens
  misc_RNA (1)...(19): siRNA sense strand
gaacaugaaacuucugaug

SEQ ID NO: 1852543 - RNA, 19 nt, Homo sapiens
  misc_RNA (1)...(19): siRNA sense strand
gauaaucggaagagauaua

SEQ ID NO: 1852544 - RNA, 19 nt, Homo sapiens
  misc_RNA (1)...(19): siRNA sense strand
gacgauaccgaaagaaaua

SEQ ID NO: 1852545 - RNA, 19 nt, Homo sapiens
  misc_RNA (1)...(19): siRNA sense strand
caacggugguuuaaguuug

SEQ ID NO: 1852546 - RNA, 19 nt, Homo sapiens
  misc_RNA (1)...(19): siRNA sense strand
gcugaaagacucucugaaa

SEQ ID NO: 1852547 - RNA, 19 nt, Homo sapiens
  misc_RNA (1)...(19): siRNA sense strand
guauuugucucuaccacua

SEQ ID NO: 1852548 - RNA, 19 nt, Homo sapiens
  misc_RNA (1)...(19): siRNA sense strand
ucagcaagauucacaagaa

SEQ ID NO: 1852549 - RNA, 19 nt, Homo sapiens
  misc_RNA (1)...(19): siRNA sense strand
gaagaggaagccaacagua

SEQ ID NO: 1852550 - RNA, 19 nt, Homo sapiens
  misc_RNA (1)...(19): siRNA sense strand
ugccaaagauuuacagauu

SEQ ID NO: 1852551 - RNA, 19 nt, Homo sapiens
  misc_RNA (1)...(19): siRNA sense strand
uauaauggaugcucgaaga

SEQ ID NO: 1852552 - RNA, 19 nt, Homo sapiens
  misc_RNA (1)...(19): siRNA sense strand
aaacugcucuucuaaugga

SEQ ID NO: 1852553 - RNA, 19 nt, Homo sapiens
  misc_RNA (1)...(19): siRNA sense strand
gauagaaaucuggaaguua

SEQ ID NO: 1852554 - RNA, 19 nt, Homo sapiens
  misc_RNA (1)...(19): siRNA sense strand
ggauugccuuagauuauuu

SEQ ID NO: 1852555 - RNA, 19 nt, Homo sapiens
  misc_RNA (1)...(19): siRNA sense strand
gcaaugagccuuugguuuu

SEQ ID NO: 1852556 - RNA, 19 nt, Homo sapiens
  misc_RNA (1)...(19): siRNA sense strand
caaauugccugaagagcau

SEQ ID NO: 1852557 - RNA, 19 nt, Homo sapiens
  misc_RNA (1)...(19): siRNA sense strand
aaaacuggcuccuuuguua

SEQ ID NO: 1852558 - RNA, 19 nt, Homo sapiens
  misc_RNA (1)...(19): siRNA sense strand
gcaaaggaacuauacacaa

SEQ ID NO: 1852559 - RNA, 19 nt, Homo sapiens
  misc_RNA (1)...(19): siRNA sense strand
cgaaagaaauaaagcucaa

SEQ ID NO: 1852560 - RNA, 19 nt, Homo sapiens
  misc_RNA (1)...(19): siRNA sense strand
ucaagcaacagcaggauua

SEQ ID NO: 1852561 - RNA, 19 nt, Homo sapiens
  misc_RNA (1)...(19): siRNA sense strand
agacaacggugguuuaagu

SEQ ID NO: 1852562 - RNA, 19 nt, Homo sapiens
  misc_RNA (1)...(19): siRNA sense strand
gaagaaugcagauuagauc

SEQ ID NO: 1852563 - RNA, 19 nt, Homo sapiens
  misc_RNA (1)...(19): siRNA sense strand
cagcuuauauccucuuuua

SEQ ID NO: 1852564 - RNA, 19 nt, Homo sapiens
  misc_RNA (1)...(19): siRNA sense strand
gaagaggugucuaucucau

SEQ ID NO: 1852565 - RNA, 19 nt, Homo sapiens
  misc_RNA (1)...(19): siRNA sense strand
aaagacacauggaagaaga

SEQ ID NO: 1852566 - RNA, 19 nt, Homo sapiens
  misc_RNA (1)...(19): siRNA sense strand
gggccuauguacuauauau

SEQ ID NO: 1852567 - RNA, 19 nt, Homo sapiens
  misc_RNA (1)...(19): siRNA sense strand
aagcacaccugccagauga

SEQ ID NO: 1852568 - RNA, 19 nt, Homo sapiens
  misc_RNA (1)...(19): siRNA sense strand
gaaguuaccaccugugcuu

SEQ ID NO: 1852569 - RNA, 19 nt, Homo sapiens
  misc_RNA (1)...(19): siRNA sense strand
gccaacauguuauccuaaa

SEQ ID NO: 1852570 - RNA, 19 nt, Homo sapiens
  misc_RNA (1)...(19): siRNA sense strand
gaaauggagaagaaagaaa

SEQ ID NO: 1852571 - RNA, 19 nt, Homo sapiens
  misc_RNA (1)...(19): siRNA sense strand
gaauguggaguauguggua

SEQ ID NO: 1852572 - RNA, 19 nt, Homo sapiens
  misc_RNA (1)...(19): siRNA sense strand
guacaaaccaugagcaaca

SEQ ID NO: 1852573 - RNA, 19 nt, Homo sapiens
  misc_RNA (1)...(19): siRNA sense strand
gcaggauuauuuccauuca

SEQ ID NO: 1852574 - RNA, 19 nt, Homo sapiens
  misc_RNA (1)...(19): siRNA sense strand
gaaccuuucguuauuauca

SEQ ID NO: 1852575 - RNA, 19 nt, Homo sapiens
  misc_RNA (1)...(19): siRNA sense strand
gacaagagcacgaagugaa

SEQ ID NO: 1852576 - RNA, 19 nt, Homo sapiens
  misc_RNA (1)...(19): siRNA sense strand
uaaagaaaccucagcaaag

SEQ ID NO: 1852577 - RNA, 19 nt, Homo sapiens
  misc_RNA (1)...(19): siRNA sense strand
gaaugggaccacugaauau

SEQ ID NO: 1852578 - RNA, 19 nt, Homo sapiens
  misc_RNA (1)...(19): siRNA sense strand
gccaaagauuuacagauug

SEQ ID NO: 1852579 - RNA, 19 nt, Homo sapiens
  misc_RNA (1)...(19): siRNA sense strand
aaagaauguuccacagauu

SEQ ID NO: 1852580 - RNA, 19 nt, Homo sapiens
  misc_RNA (1)...(19): siRNA sense strand
ucacagauaacaacagauu

SEQ ID NO: 1852581 - RNA, 19 nt, Homo sapiens
  misc_RNA (1)...(19): siRNA sense strand
cccaaucacuggaaccuuu

SEQ ID NO: 1852582 - RNA, 19 nt, Homo sapiens
  misc_RNA (1)...(19): siRNA sense strand
acaagaagcugaagaaaau

SEQ ID NO: 1852583 - RNA, 19 nt, Homo sapiens
  misc_RNA (1)...(19): siRNA sense strand
gaaauacgugacuguuuau

SEQ ID NO: 1852584 - RNA, 19 nt, Homo sapiens
  misc_RNA (1)...(19): siRNA sense strand
acauuuggcugauuauuuc

SEQ ID NO: 1852585 - RNA, 19 nt, Homo sapiens
  misc_RNA (1)...(19): siRNA sense strand
gcagucaaauugccugaag

SEQ ID NO: 1852586 - RNA, 19 nt, Homo sapiens
  misc_RNA (1)...(19): siRNA sense strand
agaaugggaccacugaaua

SEQ ID NO: 1852587 - RNA, 19 nt, Homo sapiens
  misc_RNA (1)...(19): siRNA sense strand
gcagcaagaggaacagaaa

SEQ ID NO: 1852588 - RNA, 19 nt, Homo sapiens
  misc_RNA (1)...(19): siRNA sense strand
gaggaaggaagaacaagaa

SEQ ID NO: 1852589 - RNA, 19 nt, Homo sapiens
  misc_RNA (1)...(19): siRNA sense strand
gaagacagaaguuaaacca

SEQ ID NO: 1852590 - RNA, 19 nt, Homo sapiens
  misc_RNA (1)...(19): siRNA sense strand
cggaagagauauaaagaag

SEQ ID NO: 1852591 - RNA, 19 nt, Homo sapiens
  misc_RNA (1)...(19): siRNA sense strand
ucacuggaaccuuucguua

SEQ ID NO: 1852592 - RNA, 19 nt, Homo sapiens
  misc_RNA (1)...(19): siRNA sense strand
cagauuagaucgugaugag

SEQ ID NO: 1852593 - RNA, 19 nt, Homo sapiens
  misc_RNA (1)...(19): siRNA sense strand
gacgccaccugcaucuaua

SEQ ID NO: 1852594 - RNA, 19 nt, Homo sapiens
  misc_RNA (1)...(19): siRNA sense strand
cuucuugacugguuuaguu

SEQ ID NO: 1852595 - RNA, 19 nt, Homo sapiens
  misc_RNA (1)...(19): siRNA sense strand
caagacaacggugguuuaa

SEQ ID NO: 1852596 - RNA, 19 nt, Homo sapiens
  misc_RNA (1)...(19): siRNA sense strand
gaacaggccaagaaagaag

SEQ ID NO: 1852597 - RNA, 19 nt, Homo sapiens
  misc_RNA (1)...(19): siRNA sense strand
ggaaaggcagcaagaggaa

SEQ ID NO: 1852598 - RNA, 19 nt, Homo sapiens
  misc_RNA (1)...(19): siRNA sense strand
aaacuguccugcgcaauga

SEQ ID NO: 1852599 - RNA, 19 nt, Homo sapiens
  misc_RNA (1)...(19): siRNA sense strand
gagagaaugggaccacuga

SEQ ID NO: 1852600 - RNA, 19 nt, Homo sapiens
  misc_RNA (1)...(19): siRNA sense strand
acuggaaccuuucguuauu

SEQ ID NO: 1852601 - RNA, 19 nt, Homo sapiens
  misc_RNA (1)...(19): siRNA sense strand
gauuaaaggacaaccagaa

SEQ ID NO: 1852602 - RNA, 19 nt, Homo sapiens
  misc_RNA (1)...(19): siRNA sense strand
uaccucaguucuucacuaa

SEQ ID NO: 1852603 - RNA, 19 nt, Homo sapiens
  misc_RNA (1)...(19): siRNA sense strand
gaagaaagaaagugaacag

SEQ ID NO: 1852604 - RNA, 19 nt, Homo sapiens
  misc_RNA (1)...(19): siRNA sense strand
caacucucauguuaacaga

SEQ ID NO: 1852605 - RNA, 19 nt, Homo sapiens
  misc_RNA (1)...(19): siRNA sense strand
acagauugaucguacuaaa

SEQ ID NO: 1852606 - RNA, 19 nt, Homo sapiens
  misc_RNA (1)...(19): siRNA sense strand
ggaacuauacacaaugaug

SEQ ID NO: 1852607 - RNA, 19 nt, Homo sapiens
  misc_RNA (1)...(19): siRNA sense strand
gauauaacccaggcuauuc

SEQ ID NO: 1852608 - RNA, 19 nt, Homo sapiens
  misc_RNA (1)...(19): siRNA sense strand
gcaaagaggggcaaagaaa

SEQ ID NO: 1852609 - RNA, 19 nt, Homo sapiens
  misc_RNA (1)...(19): siRNA sense strand
gaagaaauggagaagaaag

SEQ ID NO: 1852610 - RNA, 19 nt, Homo sapiens
  misc_RNA (1)...(19): siRNA sense strand
caaagaaauaacaggagua

SEQ ID NO: 1852611 - RNA, 19 nt, Homo sapiens
  misc_RNA (1)...(19): siRNA sense strand
cagggucaauucaaaucua

SEQ ID NO: 1852612 - RNA, 19 nt, Homo sapiens
  misc_RNA (1)...(19): siRNA sense strand
gaauugcuucuguuccuaa

SEQ ID NO: 1852613 - RNA, 19 nt, Homo sapiens
  misc_RNA (1)...(19): siRNA sense strand
ggaauucuaaggacaggaa

SEQ ID NO: 1852614 - RNA, 19 nt, Homo sapiens
  misc_RNA (1)...(19): siRNA sense strand
gacagaagcugcagacuaa

SEQ ID NO: 1852615 - RNA, 19 nt, Homo sapiens
  misc_RNA (1)...(19): siRNA sense strand
ggagagcuaugaugaugua

SEQ ID NO: 1852616 - RNA, 19 nt, Homo sapiens
  misc_RNA (1)...(19): siRNA sense strand
ggagaaagcccauaugaug

SEQ ID NO: 1852617 - RNA, 19 nt, Homo sapiens
  misc_RNA (1)...(19): siRNA sense strand
gcaagaaagggucaaauaa

SEQ ID NO: 1852618 - RNA, 19 nt, Homo sapiens
  misc_RNA (1)...(19): siRNA sense strand
caagaggccuggcaagaaa

SEQ ID NO: 1852619 - RNA, 19 nt, Homo sapiens
  misc_RNA (1)...(19): siRNA sense strand
caagagagaagaugaagaa

SEQ ID NO: 1852620 - RNA, 19 nt, Homo sapiens
  misc_RNA (1)...(19): siRNA sense strand
aagaaagggucaaauaaga

SEQ ID NO: 1852621 - RNA, 19 nt, Homo sapiens
  misc_RNA (1)...(19): siRNA sense strand
gagagaagaugaagaacag

SEQ ID NO: 1852622 - RNA, 19 nt, Homo sapiens
  misc_RNA (1)...(19): siRNA sense strand
gaacaagagagaagaugaa

SEQ ID NO: 1852623 - RNA, 19 nt, Homo sapiens
  misc_RNA (1)...(19): siRNA sense strand
ccagaaagcuguugaucca

SEQ ID NO: 1852624 - RNA, 19 nt, Homo sapiens
  misc_RNA (1)...(19): siRNA sense strand
gaaaggcuucucugauaaa

SEQ ID NO: 1852625 - RNA, 19 nt, Homo sapiens
  misc_RNA (1)...(19): siRNA sense strand
gagaaagcccauaugauga

SEQ ID NO: 1852626 - RNA, 19 nt, Homo sapiens
  misc_RNA (1)...(19): siRNA sense strand
gaagcaauguuuggcagaa

SEQ ID NO: 1852627 - RNA, 19 nt, Homo sapiens
  misc_RNA (1)...(19): siRNA sense strand
gaaagcuguugauccagaa

SEQ ID NO: 1852628 - RNA, 19 nt, Homo sapiens
  misc_RNA (1)...(19): siRNA sense strand
ugaauggccugaagcaaug

SEQ ID NO: 1852629 - RNA, 19 nt, Homo sapiens
  misc_RNA (1)...(19): siRNA sense strand
ggcaagaaagggucaaaua

SEQ ID NO: 1852630 - RNA, 19 nt, Homo sapiens
  misc_RNA (1)...(19): siRNA sense strand
cgaagcgacccacugauua

SEQ ID NO: 1852631 - RNA, 19 nt, Homo sapiens
  misc_RNA (1)...(19): siRNA sense strand
gaaagggucaaauaagaga

SEQ ID NO: 1852632 - RNA, 19 nt, Homo sapiens
  misc_RNA (1)...(19): siRNA sense strand
gaaagaagaaaggcucaaa

SEQ ID NO: 1852633 - RNA, 19 nt, Homo sapiens
  misc_RNA (1)...(19): siRNA sense strand
gagcuaugaugauguaucu

SEQ ID NO: 1852634 - RNA, 19 nt, Homo sapiens
  misc_RNA (1)...(19): siRNA sense strand
gaucuggaauggguugaaa

SEQ ID NO: 1852635 - RNA, 19 nt, Homo sapiens
  misc_RNA (1)...(19): siRNA sense strand
ggaaauggccaaaucugau

SEQ ID NO: 1852636 - RNA, 19 nt, Homo sapiens
  misc_RNA (1)...(19): siRNA sense strand
cgacagaagcugcagacua

SEQ ID NO: 1852637 - RNA, 19 nt, Homo sapiens
  misc_RNA (1)...(19): siRNA sense strand
gaagcgacccacugauuau

SEQ ID NO: 1852638 - RNA, 19 nt, Homo sapiens
  misc_RNA (1)...(19): siRNA sense strand
caagaaggcaggagccaaa

SEQ ID NO: 1852639 - RNA, 19 nt, Homo sapiens
  misc_RNA (1)...(19): siRNA sense strand
caaauaagagaccuggaaa

SEQ ID NO: 1852640 - RNA, 19 nt, Homo sapiens
  misc_RNA (1)...(19): siRNA sense strand
gcagaagauucgacagaag

SEQ ID NO: 1852641 - RNA, 19 nt, Homo sapiens
  misc_RNA (1)...(19): siRNA sense strand
ggaaauacgggaagaaggu

SEQ ID NO: 1852642 - RNA, 19 nt, Homo sapiens
  misc_RNA (1)...(19): siRNA sense strand
caagaaagggucaaauaag

SEQ ID NO: 1852643 - RNA, 19 nt, Homo sapiens
  misc_RNA (1)...(19): siRNA sense strand
gaaauggccaaaucugauc

SEQ ID NO: 1852644 - RNA, 19 nt, Homo sapiens
  misc_RNA (1)...(19): siRNA sense strand
gagaagaugaagaacagaa

SEQ ID NO: 1852645 - RNA, 19 nt, Homo sapiens
  misc_RNA (1)...(19): siRNA sense strand
gaaagcccauaugaugaau

SEQ ID NO: 1852646 - RNA, 19 nt, Homo sapiens
  misc_RNA (1)...(19): siRNA sense strand
ucaaauaagagaccuggaa

SEQ ID NO: 1852647 - RNA, 19 nt, Homo sapiens
  misc_RNA (1)...(19): siRNA sense strand
uaaacuggauuuccuugag

SEQ ID NO: 1852648 - RNA, 19 nt, Homo sapiens
  misc_RNA (1)...(19): siRNA sense strand
uaagagaccuggaaaacga

SEQ ID NO: 1852649 - RNA, 19 nt, Homo sapiens
  misc_RNA (1)...(19): siRNA sense strand
gaacaaggaccagaaagcu

SEQ ID NO: 1852650 - RNA, 19 nt, Homo sapiens
  misc_RNA (1)...(19): siRNA sense strand
gccaaaggccagcagauga

SEQ ID NO: 1852651 - RNA, 19 nt, Homo sapiens
  misc_RNA (1)...(19): siRNA sense strand
cgaagaaggccgugaacga

SEQ ID NO: 1852652 - RNA, 19 nt, Homo sapiens
  misc_RNA (1)...(19): siRNA sense strand
ugcgagcacuuaggaaaua

SEQ ID NO: 1852653 - RNA, 19 nt, Homo sapiens
  misc_RNA (1)...(19): siRNA sense strand
caacugcgagcacuuagga

SEQ ID NO: 1852654 - RNA, 19 nt, Homo sapiens
  misc_RNA (1)...(19): siRNA sense strand
caggagaaagcccauauga

SEQ ID NO: 1852655 - RNA, 19 nt, Homo sapiens
  misc_RNA (1)...(19): siRNA sense strand
ggaacacucgggagagcua

SEQ ID NO: 1852656 - RNA, 19 nt, Homo sapiens
  misc_RNA (1)...(19): siRNA sense strand
gaagaggcagcaggagaaa

SEQ ID NO: 1852657 - RNA, 19 nt, Homo sapiens
  misc_RNA (1)...(19): siRNA sense strand
cgggagagcuaugaugaug

SEQ ID NO: 1852658 - RNA, 19 nt, Homo sapiens
  misc_RNA (1)...(19): siRNA sense strand
gugaauggccugaagcaau

SEQ ID NO: 1852659 - RNA, 19 nt, Homo sapiens
  misc_RNA (1)...(19): siRNA sense strand
cgcagugcuugcagucuua

SEQ ID NO: 1852660 - RNA, 19 nt, Homo sapiens
  misc_RNA (1)...(19): siRNA sense strand
ucaagaggccuggcaagaa

SEQ ID NO: 1852661 - RNA, 19 nt, Homo sapiens
  misc_RNA (1)...(19): siRNA sense strand
gcuaaacgacgguauaaaa

SEQ ID NO: 1852662 - RNA, 19 nt, Homo sapiens
  misc_RNA (1)...(19): siRNA sense strand
gcccauaugaugaaugcua

SEQ ID NO: 1852663 - RNA, 19 nt, Homo sapiens
  misc_RNA (1)...(19): siRNA sense strand
agaaagcccauaugaugaa

SEQ ID NO: 1852664 - RNA, 19 nt, Homo sapiens
  misc_RNA (1)...(19): siRNA sense strand
cgacgugaauggccugaag

SEQ ID NO: 1852665 - RNA, 19 nt, Homo sapiens
  misc_RNA (1)...(19): siRNA sense strand
cuacgaagcgacccacuga

SEQ ID NO: 1852666 - RNA, 19 nt, Homo sapiens
  misc_RNA (1)...(19): siRNA sense strand
cgaacaagagagaagauga

SEQ ID NO: 1852667 - RNA, 19 nt, Homo sapiens
  misc_RNA (1)...(19): siRNA sense strand
gcuaugaugauguaucuag

SEQ ID NO: 1852668 - RNA, 19 nt, Homo sapiens
  misc_RNA (1)...(19): siRNA sense strand
augaaucccuugucacaga

SEQ ID NO: 1852669 - RNA, 19 nt, Homo sapiens
  misc_RNA (1)...(19): siRNA sense strand
guugaaaggcucgauguga

SEQ ID NO: 1852670 - RNA, 19 nt, Homo sapiens
  misc_RNA (1)...(19): siRNA sense strand
gugcuaaacgacgguauaa

SEQ ID NO: 1852671 - RNA, 19 nt, Homo sapiens
  misc_RNA (1)...(19): siRNA sense strand
ccgcagugcuugcagucuu

SEQ ID NO: 1852672 - RNA, 19 nt, Homo sapiens
  misc_RNA (1)...(19): siRNA sense strand
ggaaaacgaacaagagaga

SEQ ID NO: 1852673 - RNA, 19 nt, Homo sapiens
  misc_RNA (1)...(19): siRNA sense strand
cuaaacaggcugccaugga

SEQ ID NO: 1852674 - RNA, 19 nt, Homo sapiens
  misc_RNA (1)...(19): siRNA sense strand
gugcagaagauucgacaga

SEQ ID NO: 1852675 - RNA, 19 nt, Homo sapiens
  misc_RNA (1)...(19): siRNA sense strand
agaagaggcagcaggagaa

SEQ ID NO: 1852676 - RNA, 19 nt, Homo sapiens
  misc_RNA (1)...(19): siRNA sense strand
ucagaacaaggaccagaaa

SEQ ID NO: 1852677 - RNA, 19 nt, Homo sapiens
  misc_RNA (1)...(19): siRNA sense strand
caagcgggaucuggaaugg

SEQ ID NO: 1852678 - RNA, 19 nt, Homo sapiens
  misc_RNA (1)...(19): siRNA sense strand
gcaauguuuggcagaauuc

SEQ ID NO: 1852679 - RNA, 19 nt, Homo sapiens
  misc_RNA (1)...(19): siRNA sense strand
cgaugaaucccuugucaca

SEQ ID NO: 1852680 - RNA, 19 nt, Homo sapiens
  misc_RNA (1)...(19): siRNA sense strand
aggcuucucugauaaacug

SEQ ID NO: 1852681 - RNA, 19 nt, Homo sapiens
  misc_RNA (1)...(19): siRNA sense strand
aagcaacugcgagcacuua

SEQ ID NO: 1852682 - RNA, 19 nt, Homo sapiens
  misc_RNA (1)...(19): siRNA sense strand
cggaaauggccaaaucuga

SEQ ID NO: 1852683 - RNA, 19 nt, Homo sapiens
  misc_RNA (1)...(19): siRNA sense strand
gcaggagaaagcccauaug

SEQ ID NO: 1852684 - RNA, 19 nt, Homo sapiens
  misc_RNA (1)...(19): siRNA sense strand
gaagccaggccucaauguc

SEQ ID NO: 1852685 - RNA, 19 nt, Homo sapiens
  misc_RNA (1)...(19): siRNA sense strand
ugcagaagauucgacagaa

SEQ ID NO: 1852686 - RNA, 19 nt, Homo sapiens
  misc_RNA (1)...(19): siRNA sense strand
gcgacccacugauuauuuu

SEQ ID NO: 1852687 - RNA, 19 nt, Homo sapiens
  misc_RNA (1)...(19): siRNA sense strand
agaagaaaggcucaaagug

SEQ ID NO: 1852688 - RNA, 19 nt, Homo sapiens
  misc_RNA (1)...(19): siRNA sense strand
uugcggaaauggccaaauc

SEQ ID NO: 1852689 - RNA, 19 nt, Homo sapiens
  misc_RNA (1)...(19): siRNA sense strand
caaacggagguucuucaga

SEQ ID NO: 1852690 - RNA, 19 nt, Homo sapiens
  misc_RNA (1)...(19): siRNA sense strand
cccauaugaugaaugcuau

SEQ ID NO: 1852691 - RNA, 19 nt, Homo sapiens
  misc_RNA (1)...(19): siRNA sense strand
cgagagaugaguuucuauc

SEQ ID NO: 1852692 - RNA, 19 nt, Homo sapiens
  misc_RNA (1)...(19): siRNA sense strand
ggaaagaagaaaggcucaa

SEQ ID NO: 1852693 - RNA, 19 nt, Homo sapiens
  misc_RNA (1)...(19): siRNA sense strand
agcgagagaugaguuucua

SEQ ID NO: 1852694 - RNA, 19 nt, Homo sapiens
  misc_RNA (1)...(19): siRNA sense strand
aaacgaacaagagagaaga

SEQ ID NO: 1852695 - RNA, 19 nt, Homo sapiens
  misc_RNA (1)...(19): siRNA sense strand
aagaagaaaggcucaaagu

SEQ ID NO: 1852696 - RNA, 19 nt, Homo sapiens
  misc_RNA (1)...(19): siRNA sense strand
agcaauguuuggcagaauu

SEQ ID NO: 1852697 - RNA, 19 nt, Homo sapiens
  misc_RNA (1)...(19): siRNA sense strand
acgaagcgacccacugauu

SEQ ID NO: 1852698 - RNA, 19 nt, Homo sapiens
  misc_RNA (1)...(19): siRNA sense strand
cagcaccucagaacaagga

SEQ ID NO: 1852699 - RNA, 19 nt, Homo sapiens
  misc_RNA (1)...(19): siRNA sense strand
ucucugauaaacuggauuu

SEQ ID NO: 1852700 - RNA, 19 nt, Homo sapiens
  misc_RNA (1)...(19): siRNA sense strand
gccagcaccucagaacaag

SEQ ID NO: 1852701 - RNA, 19 nt, Homo sapiens
  misc_RNA (1)...(19): siRNA sense strand
ccaaaggccagcagaugag

SEQ ID NO: 1852702 - RNA, 19 nt, Homo sapiens
  misc_RNA (1)...(19): siRNA sense strand
gcaaacggagguucuucag

SEQ ID NO: 1852703 - RNA, 19 nt, Homo sapiens
  misc_RNA (1)...(19): siRNA sense strand
cgacuuccagcgagagaug

SEQ ID NO: 1852704 - RNA, 19 nt, Homo sapiens
  misc_RNA (1)...(19): siRNA sense strand
agagagaagaugaagaaca

SEQ ID NO: 1852705 - RNA, 19 nt, Homo sapiens
  misc_RNA (1)...(19): siRNA sense strand
gagagaugaguuucuaucg

SEQ ID NO: 1852706 - RNA, 19 nt, Homo sapiens
  misc_RNA (1)...(19): siRNA sense strand
ggaccagaaagcuguugau

SEQ ID NO: 1852707 - RNA, 19 nt, Homo sapiens
  misc_RNA (1)...(19): siRNA sense strand
cgccagcaccucagaacaa

SEQ ID NO: 1852708 - RNA, 19 nt, Homo sapiens
  misc_RNA (1)...(19): siRNA sense strand
gaccagaaagcuguugauc

SEQ ID NO: 1852709 - RNA, 19 nt, Homo sapiens
  misc_RNA (1)...(19): siRNA sense strand
ugaaaggcucgaugugaca

SEQ ID NO: 1852710 - RNA, 19 nt, Homo sapiens
  misc_RNA (1)...(19): siRNA sense strand
cugauaaacuggauuuccu

SEQ ID NO: 1852711 - RNA, 19 nt, Homo sapiens
  misc_RNA (1)...(19): siRNA sense strand
uccgaugaaucccuuguca

SEQ ID NO: 1852712 - RNA, 19 nt, Homo sapiens
  misc_RNA (1)...(19): siRNA sense strand
ugagggagaucagaaaccu

SEQ ID NO: 1852713 - RNA, 19 nt, Homo sapiens
  misc_RNA (1)...(19): siRNA sense strand
ggauuuccuugagggagau

SEQ ID NO: 1852714 - RNA, 19 nt, Homo sapiens
  misc_RNA (1)...(19): siRNA sense strand
ucaagacccucaacaauaa

SEQ ID NO: 1852715 - RNA, 19 nt, Homo sapiens
  misc_RNA (1)...(19): siRNA sense strand
ggacguagaugcugccuau

SEQ ID NO: 1852716 - RNA, 19 nt, Homo sapiens
  misc_RNA (1)...(19): siRNA sense strand
guacgaagaugaaauuaac

SEQ ID NO: 1852717 - RNA, 19 nt, Homo sapiens
  misc_RNA (1)...(19): siRNA sense strand
gaucaagacccucaacaau

SEQ ID NO: 1852718 - RNA, 19 nt, Homo sapiens
  misc_RNA (1)...(19): siRNA sense strand
guggucaccucuacucuuu

SEQ ID NO: 1852719 - RNA, 19 nt, Homo sapiens
  misc_RNA (1)...(19): siRNA sense strand
gaagagcuacacgcacuaa

SEQ ID NO: 1852720 - RNA, 19 nt, Homo sapiens
  misc_RNA (1)...(19): siRNA sense strand
augcagagcugucccaguu

SEQ ID NO: 1852721 - RNA, 19 nt, Homo sapiens
  misc_RNA (1)...(19): siRNA sense strand
gguacgaagaugaaauuaa

SEQ ID NO: 1852722 - RNA, 19 nt, Homo sapiens
  misc_RNA (1)...(19): siRNA sense strand
cguagaugcugccuauaug

SEQ ID NO: 1852723 - RNA, 19 nt, Homo sapiens
  misc_RNA (1)...(19): siRNA sense strand
gaacaagguggagcuggaa

SEQ ID NO: 1852724 - RNA, 19 nt, Homo sapiens
  misc_RNA (1)...(19): siRNA sense strand
agaacuggcucucaaggau

SEQ ID NO: 1852725 - RNA, 19 nt, Homo sapiens
  misc_RNA (1)...(19): siRNA sense strand
ccugggagguucuggauuc

SEQ ID NO: 1852726 - RNA, 19 nt, Homo sapiens
  misc_RNA (1)...(19): siRNA sense strand
ccaagcgggucuccaucaa

SEQ ID NO: 1852727 - RNA, 19 nt, Homo sapiens
  misc_RNA (1)...(19): siRNA sense strand
gcugagagcugagauugac

SEQ ID NO: 1852728 - RNA, 19 nt, Homo sapiens
  misc_RNA (1)...(19): siRNA sense strand
aagcgggucuccaucaaug

SEQ ID NO: 1852729 - RNA, 19 nt, Homo sapiens
  misc_RNA (1)...(19): siRNA sense strand
guucuagcgucaaguuugu

SEQ ID NO: 1852730 - RNA, 19 nt, Homo sapiens
  misc_RNA (1)...(19): siRNA sense strand
cgaaacaccaaacaagaga

SEQ ID NO: 1852731 - RNA, 19 nt, Homo sapiens
  misc_RNA (1)...(19): siRNA sense strand
uaucaucgccgaggucaaa

SEQ ID NO: 1852732 - RNA, 19 nt, Homo sapiens
  misc_RNA (1)...(19): siRNA sense strand
guagaugcugccuauauga

SEQ ID NO: 1852733 - RNA, 19 nt, Homo sapiens
  misc_RNA (1)...(19): siRNA sense strand
uguggaagauuucaaaguc

SEQ ID NO: 1852734 - RNA, 19 nt, Homo sapiens
  misc_RNA (1)...(19): siRNA sense strand
caacaguggauuuggcuau

SEQ ID NO: 1852735 - RNA, 19 nt, Homo sapiens
  misc_RNA (1)...(19): siRNA sense strand
gaugcugccuauaugaaca

SEQ ID NO: 1852736 - RNA, 19 nt, Homo sapiens
  misc_RNA (1)...(19): siRNA sense strand
gggagguucuggauucagu

SEQ ID NO: 1852737 - RNA, 19 nt, Homo sapiens
  misc_RNA (1)...(19): siRNA sense strand
ggagucaacaguggauuug

SEQ ID NO: 1852738 - RNA, 19 nt, Homo sapiens
  misc_RNA (1)...(19): siRNA sense strand
guggaagauuucaaaguca

SEQ ID NO: 1852739 - RNA, 19 nt, Homo sapiens
  misc_RNA (1)...(19): siRNA sense strand
caugcaggauguuguggaa

SEQ ID NO: 1852740 - RNA, 19 nt, Homo sapiens
  misc_RNA (1)...(19): siRNA sense strand
aucaagacccucaacaaua

SEQ ID NO: 1852741 - RNA, 19 nt, Homo sapiens
  misc_RNA (1)...(19): siRNA sense strand
cagguacgaagaugaaauu

SEQ ID NO: 1852742 - RNA, 19 nt, Homo sapiens
  misc_RNA (1)...(19): siRNA sense strand
caaagucagguacgaagau

SEQ ID NO: 1852743 - RNA, 19 nt, Homo sapiens
  misc_RNA (1)...(19): siRNA sense strand
gcuggaagccaaggucaaa

SEQ ID NO: 1852744 - RNA, 19 nt, Homo sapiens
  misc_RNA (1)...(19): siRNA sense strand
uccaagaggucacugucaa

SEQ ID NO: 1852745 - RNA, 19 nt, Homo sapiens
  misc_RNA (1)...(19): siRNA sense strand
ggcgaggagugcagguuga

SEQ ID NO: 1852746 - RNA, 19 nt, Homo sapiens
  misc_RNA (1)...(19): siRNA sense strand
caacggguuuggagucaac

SEQ ID NO: 1852747 - RNA, 19 nt, Homo sapiens
  misc_RNA (1)...(19): siRNA sense strand
gaggagcgcgagcagauca

SEQ ID NO: 1852748 - RNA, 19 nt, Homo sapiens
  misc_RNA (1)...(19): siRNA sense strand
accaggagcugaugaacau

SEQ ID NO: 1852749 - RNA, 19 nt, Homo sapiens
  misc_RNA (1)...(19): siRNA sense strand
ugaaaugaaccgcaugauc

SEQ ID NO: 1852750 - RNA, 19 nt, Homo sapiens
  misc_RNA (1)...(19): siRNA sense strand
gaagcugaacugaggaaca

SEQ ID NO: 1852751 - RNA, 19 nt, Homo sapiens
  misc_RNA (1)...(19): siRNA sense strand
gcaggauguuguggaagau

SEQ ID NO: 1852752 - RNA, 19 nt, Homo sapiens
  misc_RNA (1)...(19): siRNA sense strand
gggaugaccuucgaaacac

SEQ ID NO: 1852753 - RNA, 19 nt, Homo sapiens
  misc_RNA (1)...(19): siRNA sense strand
aagccaaggucaaaucucu

SEQ ID NO: 1852754 - RNA, 19 nt, Homo sapiens
  misc_RNA (1)...(19): siRNA sense strand
aagcugaacugaggaacau

SEQ ID NO: 1852755 - RNA, 19 nt, Homo sapiens
  misc_RNA (1)...(19): siRNA sense strand
aggauguuguggaagauuu

SEQ ID NO: 1852756 - RNA, 19 nt, Homo sapiens
  misc_RNA (1)...(19): siRNA sense strand
ugcaggauguuguggaaga

SEQ ID NO: 1852757 - RNA, 19 nt, Homo sapiens
  misc_RNA (1)...(19): siRNA sense strand
gcaacggguuuggagucaa

SEQ ID NO: 1852758 - RNA, 19 nt, Homo sapiens
  misc_RNA (1)...(19): siRNA sense strand
aaagucagguacgaagaug

SEQ ID NO: 1852759 - RNA, 19 nt, Homo sapiens
  misc_RNA (1)...(19): siRNA sense strand
ccgaggagaucaacuucag

SEQ ID NO: 1852760 - RNA, 19 nt, Homo sapiens
  misc_RNA (1)...(19): siRNA sense strand
gaucaacuucagccacuca

SEQ ID NO: 1852761 - RNA, 19 nt, Homo sapiens
  misc_RNA (1)...(19): siRNA sense strand
ccaggacugugaggcagaa

SEQ ID NO: 1852762 - RNA, 19 nt, Homo sapiens
  misc_RNA (1)...(19): siRNA sense strand
ggaagccgcagccucuaca

SEQ ID NO: 1852763 - RNA, 19 nt, Homo sapiens
  misc_RNA (1)...(19): siRNA sense strand
cuucagccacucagucuuu

SEQ ID NO: 1852764 - RNA, 19 nt, Homo sapiens
  misc_RNA (1)...(19): siRNA sense strand
ggaagccaaggucaaaucu

SEQ ID NO: 1852765 - RNA, 19 nt, Homo sapiens
  misc_RNA (1)...(19): siRNA sense strand
gguucuagcgucaaguuug

SEQ ID NO: 1852766 - RNA, 19 nt, Homo sapiens
  misc_RNA (1)...(19): siRNA sense strand
gaaacaccaaacaagagau

SEQ ID NO: 1852767 - RNA, 19 nt, Homo sapiens
  misc_RNA (1)...(19): siRNA sense strand
uagaugcugccuauaugaa

SEQ ID NO: 1852768 - RNA, 19 nt, Homo sapiens
  misc_RNA (1)...(19): siRNA sense strand
ggcagcggcuacuccuuca

SEQ ID NO: 1852769 - RNA, 19 nt, Homo sapiens
  misc_RNA (1)...(19): siRNA sense strand
ucucggcaguccuccauca

SEQ ID NO: 1852770 - RNA, 19 nt, Homo sapiens
  misc_RNA (1)...(19): siRNA sense strand
gcaguguuccagcuugcaa

SEQ ID NO: 1852771 - RNA, 19 nt, Homo sapiens
  misc_RNA (1)...(19): siRNA sense strand
gccaagcgggucuccauca

SEQ ID NO: 1852772 - RNA, 19 nt, Homo sapiens
  misc_RNA (1)...(19): siRNA sense strand
ggucaccucuacucuuucc

SEQ ID NO: 1852773 - RNA, 19 nt, Homo sapiens
  misc_RNA (1)...(19): siRNA sense strand
ucaaagucagguacgaaga

SEQ ID NO: 1852774 - RNA, 19 nt, Homo sapiens
  misc_RNA (1)...(19): siRNA sense strand
ccacucagucuuugaugca

SEQ ID NO: 1852775 - RNA, 19 nt, Homo sapiens
  misc_RNA (1)...(19): siRNA sense strand
ugaauuuguagcccugaaa

SEQ ID NO: 1852776 - RNA, 19 nt, Homo sapiens
  misc_RNA (1)...(19): siRNA sense strand
ugcugagaaugaauuugua

SEQ ID NO: 1852777 - RNA, 19 nt, Homo sapiens
  misc_RNA (1)...(19): siRNA sense strand
accuggaccuggauaguau

SEQ ID NO: 1852778 - RNA, 19 nt, Homo sapiens
  misc_RNA (1)...(19): siRNA sense strand
caagcgggucuccaucaau

SEQ ID NO: 1852779 - RNA, 19 nt, Homo sapiens
  misc_RNA (1)...(19): siRNA sense strand
gaguuucuccaguuaacau

SEQ ID NO: 1852780 - RNA, 19 nt, Homo sapiens
  misc_RNA (1)...(19): siRNA sense strand
caaacggccauugcugaug

SEQ ID NO: 1852781 - RNA, 19 nt, Homo sapiens
  misc_RNA (1)...(19): siRNA sense strand
aaacaccaaacaagagauc

SEQ ID NO: 1852782 - RNA, 19 nt, Homo sapiens
  misc_RNA (1)...(19): siRNA sense strand
cugccuauaugaacaaggu

SEQ ID NO: 1852783 - RNA, 19 nt, Homo sapiens
  misc_RNA (1)...(19): siRNA sense strand
gcugagaaugaauuuguag

SEQ ID NO: 1852784 - RNA, 19 nt, Homo sapiens
  misc_RNA (1)...(19): siRNA sense strand
cugcugagaaugaauuugu

SEQ ID NO: 1852785 - RNA, 19 nt, Homo sapiens
  misc_RNA (1)...(19): siRNA sense strand
ggacauaccugaagacuuu

SEQ ID NO: 1852786 - RNA, 19 nt, Homo sapiens
  misc_RNA (1)...(19): siRNA sense strand
ggaaagaagcgcaguauau

SEQ ID NO: 1852787 - RNA, 19 nt, Homo sapiens
  misc_RNA (1)...(19): siRNA sense strand
ggcgguagcuguuucauuu

SEQ ID NO: 1852788 - RNA, 19 nt, Homo sapiens
  misc_RNA (1)...(19): siRNA sense strand
cacaagagguuucucauau

SEQ ID NO: 1852789 - RNA, 19 nt, Homo sapiens
  misc_RNA (1)...(19): siRNA sense strand
ggaaauggaucuugcaaaa

SEQ ID NO: 1852790 - RNA, 19 nt, Homo sapiens
  misc_RNA (1)...(19): siRNA sense strand
gaaagaagcgcaguauaug

SEQ ID NO: 1852791 - RNA, 19 nt, Homo sapiens
  misc_RNA (1)...(19): siRNA sense strand
ggucugggauacugcuuua

SEQ ID NO: 1852792 - RNA, 19 nt, Homo sapiens
  misc_RNA (1)...(19): siRNA sense strand
gcucaucugcgucaucuua

SEQ ID NO: 1852793 - RNA, 19 nt, Homo sapiens
  misc_RNA (1)...(19): siRNA sense strand
caagagguuucucauaugu

SEQ ID NO: 1852794 - RNA, 19 nt, Homo sapiens
  misc_RNA (1)...(19): siRNA sense strand
uaaccauccuaucacaaua

SEQ ID NO: 1852795 - RNA, 19 nt, Homo sapiens
  misc_RNA (1)...(19): siRNA sense strand
cuacuacaguuaaacauug

SEQ ID NO: 1852796 - RNA, 19 nt, Homo sapiens
  misc_RNA (1)...(19): siRNA sense strand
cuauuagacuucuccauuu

SEQ ID NO: 1852797 - RNA, 19 nt, Homo sapiens
  misc_RNA (1)...(19): siRNA sense strand
gaacuaacuaccucaccua

SEQ ID NO: 1852798 - RNA, 19 nt, Homo sapiens
  misc_RNA (1)...(19): siRNA sense strand
gcaccuuccuuguacauca

SEQ ID NO: 1852799 - RNA, 19 nt, Homo sapiens
  misc_RNA (1)...(19): siRNA sense strand
gcuauuagacuucuccauu

SEQ ID NO: 1852800 - RNA, 19 nt, Homo sapiens
  misc_RNA (1)...(19): siRNA sense strand
guuuaugguuggaacaaua

SEQ ID NO: 1852801 - RNA, 19 nt, Homo sapiens
  misc_RNA (1)...(19): siRNA sense strand
gcaaauggagccgguauga

SEQ ID NO: 1852802 - RNA, 19 nt, Homo sapiens
  misc_RNA (1)...(19): siRNA sense strand
gcauuagucugggcauuga

SEQ ID NO: 1852803 - RNA, 19 nt, Homo sapiens
  misc_RNA (1)...(19): siRNA sense strand
gagaauguuucgcuguguu

SEQ ID NO: 1852804 - RNA, 19 nt, Homo sapiens
  misc_RNA (1)...(19): siRNA sense strand
agcaggaucucauggauaa

SEQ ID NO: 1852805 - RNA, 19 nt, Homo sapiens
  misc_RNA (1)...(19): siRNA sense strand
ucacaagagguuucucaua

SEQ ID NO: 1852806 - RNA, 19 nt, Homo sapiens
  misc_RNA (1)...(19): siRNA sense strand
acagggagcccauucguaa

SEQ ID NO: 1852807 - RNA, 19 nt, Homo sapiens
  misc_RNA (1)...(19): siRNA sense strand
cauuuggugucuucuuuaa

SEQ ID NO: 1852808 - RNA, 19 nt, Homo sapiens
  misc_RNA (1)...(19): siRNA sense strand
guuaaacauugucaucuuc

SEQ ID NO: 1852809 - RNA, 19 nt, Homo sapiens
  misc_RNA (1)...(19): siRNA sense strand
acaagagguuucucauaug

SEQ ID NO: 1852810 - RNA, 19 nt, Homo sapiens
  misc_RNA (1)...(19): siRNA sense strand
acacgaaccucaauagacu

SEQ ID NO: 1852811 - RNA, 19 nt, Homo sapiens
  misc_RNA (1)...(19): siRNA sense strand
caaaagacguuccauaguc

SEQ ID NO: 1852812 - RNA, 19 nt, Homo sapiens
  misc_RNA (1)...(19): siRNA sense strand
aagccaauguguauacuga

SEQ ID NO: 1852813 - RNA, 19 nt, Homo sapiens
  misc_RNA (1)...(19): siRNA sense strand
gcacugcucagacccauca

SEQ ID NO: 1852814 - RNA, 19 nt, Homo sapiens
  misc_RNA (1)...(19): siRNA sense strand
gcucagacccaucauuauc

SEQ ID NO: 1852815 - RNA, 19 nt, Homo sapiens
  misc_RNA (1)...(19): siRNA sense strand
ggaaggaucggagcugguu

SEQ ID NO: 1852816 - RNA, 19 nt, Homo sapiens
  misc_RNA (1)...(19): siRNA sense strand
cuaacuaccucaccuaaaa

SEQ ID NO: 1852817 - RNA, 19 nt, Homo sapiens
  misc_RNA (1)...(19): siRNA sense strand
gaaccucaauagacuccau

SEQ ID NO: 1852818 - RNA, 19 nt, Homo sapiens
  misc_RNA (1)...(19): siRNA sense strand
guaaccauccuaucacaau

SEQ ID NO: 1852819 - RNA, 19 nt, Homo sapiens
  misc_RNA (1)...(19): siRNA sense strand
ggugagaccguguaagaug

SEQ ID NO: 1852820 - RNA, 19 nt, Homo sapiens
  misc_RNA (1)...(19): siRNA sense strand
gaucggagcugguuuuguc

SEQ ID NO: 1852821 - RNA, 19 nt, Homo sapiens
  misc_RNA (1)...(19): siRNA sense strand
ugcauuauuuggucucuuu

SEQ ID NO: 1852822 - RNA, 19 nt, Homo sapiens
  misc_RNA (1)...(19): siRNA sense strand
ucucauggauaaucucaau

SEQ ID NO: 1852823 - RNA, 19 nt, Homo sapiens
  misc_RNA (1)...(19): siRNA sense strand
gagcucaucugcgucaucu

SEQ ID NO: 1852824 - RNA, 19 nt, Homo sapiens
  misc_RNA (1)...(19): siRNA sense strand
ggagaauguuucgcugugu

SEQ ID NO: 1852825 - RNA, 19 nt, Homo sapiens
  misc_RNA (1)...(19): siRNA sense strand
caauguguauacugaagug

SEQ ID NO: 1852826 - RNA, 19 nt, Homo sapiens
  misc_RNA (1)...(19): siRNA sense strand
gaaaacacgaaccucaaua

SEQ ID NO: 1852827 - RNA, 19 nt, Homo sapiens
  misc_RNA (1)...(19): siRNA sense strand
cugcucagacccaucauua

SEQ ID NO: 1852828 - RNA, 19 nt, Homo sapiens
  misc_RNA (1)...(19): siRNA sense strand
gauggccauugcagaaguu

SEQ ID NO: 1852829 - RNA, 19 nt, Homo sapiens
  misc_RNA (1)...(19): siRNA sense strand
ggaccaaaguaagaucuac

SEQ ID NO: 1852830 - RNA, 19 nt, Homo sapiens
  misc_RNA (1)...(19): siRNA sense strand
caucuucauucagagcaua

SEQ ID NO: 1852831 - RNA, 19 nt, Homo sapiens
  misc_RNA (1)...(19): siRNA sense strand
gucuacaucuucauucaga

SEQ ID NO: 1852832 - RNA, 19 nt, Homo sapiens
  misc_RNA (1)...(19): siRNA sense strand
ggagcccauucguaagauu

SEQ ID NO: 1852833 - RNA, 19 nt, Homo sapiens
  misc_RNA (1)...(19): siRNA sense strand
gagauacagccuccucuuc

SEQ ID NO: 1852834 - RNA, 19 nt, Homo sapiens
  misc_RNA (1)...(19): siRNA sense strand
gagcccauucguaagauuu

SEQ ID NO: 1852835 - RNA, 19 nt, Homo sapiens
  misc_RNA (1)...(19): siRNA sense strand
caucauuccucugggcauu

SEQ ID NO: 1852836 - RNA, 19 nt, Homo sapiens
  misc_RNA (1)...(19): siRNA sense strand
ggacaccgucugguaguga

SEQ ID NO: 1852837 - RNA, 19 nt, Homo sapiens
  misc_RNA (1)...(19): siRNA sense strand
ggaagacuuuacaggacau

SEQ ID NO: 1852838 - RNA, 19 nt, Homo sapiens
  misc_RNA (1)...(19): siRNA sense strand
uuuggugucuucuuuaaug

SEQ ID NO: 1852839 - RNA, 19 nt, Homo sapiens
  misc_RNA (1)...(19): siRNA sense strand
gaguucacgugcaaaugga

SEQ ID NO: 1852840 - RNA, 19 nt, Homo sapiens
  misc_RNA (1)...(19): siRNA sense strand
cagcaaucauggcucugaa

SEQ ID NO: 1852841 - RNA, 19 nt, Homo sapiens
  misc_RNA (1)...(19): siRNA sense strand
gggucuacaucuucauuca

SEQ ID NO: 1852842 - RNA, 19 nt, Homo sapiens
  misc_RNA (1)...(19): siRNA sense strand
aaacacgaaccucaauaga

SEQ ID NO: 1852843 - RNA, 19 nt, Homo sapiens
  misc_RNA (1)...(19): siRNA sense strand
cgcauuggcuggagauaca

SEQ ID NO: 1852844 - RNA, 19 nt, Homo sapiens
  misc_RNA (1)...(19): siRNA sense strand
gauacagccuccucuucgu

SEQ ID NO: 1852845 - RNA, 19 nt, Homo sapiens
  misc_RNA (1)...(19): siRNA sense strand
gaugaugucgugggcauug

SEQ ID NO: 1852846 - RNA, 19 nt, Homo sapiens
  misc_RNA (1)...(19): siRNA sense strand
ccaaagccaauguguauac

SEQ ID NO: 1852847 - RNA, 19 nt, Homo sapiens
  misc_RNA (1)...(19): siRNA sense strand
ggauacugcuuuaguuuuc

SEQ ID NO: 1852848 - RNA, 19 nt, Homo sapiens
  misc_RNA (1)...(19): siRNA sense strand
ggacugugccagcgucauc

SEQ ID NO: 1852849 - RNA, 19 nt, Homo sapiens
  misc_RNA (1)...(19): siRNA sense strand
gcaacacugggauucuuug

SEQ ID NO: 1852850 - RNA, 19 nt, Homo sapiens
  misc_RNA (1)...(19): siRNA sense strand
gccaauguguauacugaag

SEQ ID NO: 1852851 - RNA, 19 nt, Homo sapiens
  misc_RNA (1)...(19): siRNA sense strand
uagcaggaucucauggaua

SEQ ID NO: 1852852 - RNA, 19 nt, Homo sapiens
  misc_RNA (1)...(19): siRNA sense strand
caucugcgucaucuuauug

SEQ ID NO: 1852853 - RNA, 19 nt, Homo sapiens
  misc_RNA (1)...(19): siRNA sense strand
ggaccagcgucaccgaaaa

SEQ ID NO: 1852854 - RNA, 19 nt, Homo sapiens
  misc_RNA (1)...(19): siRNA sense strand
ucaucugcgucaucuuauu

SEQ ID NO: 1852855 - RNA, 19 nt, Homo sapiens
  misc_RNA (1)...(19): siRNA sense strand
gggcauuagucugggcauu

SEQ ID NO: 1852856 - RNA, 19 nt, Homo sapiens
  misc_RNA (1)...(19): siRNA sense strand
ccacaguccugagcaaucg

SEQ ID NO: 1852857 - RNA, 19 nt, Homo sapiens
  misc_RNA (1)...(19): siRNA sense strand
uaucuacgauggccauugc

SEQ ID NO: 1852858 - RNA, 19 nt, Homo sapiens
  misc_RNA (1)...(19): siRNA sense strand
cauagucacugcaguugcu

SEQ ID NO: 1852859 - RNA, 19 nt, Homo sapiens
  misc_RNA (1)...(19): siRNA sense strand
agagguuucucauauguac

SEQ ID NO: 1852860 - RNA, 19 nt, Homo sapiens
  misc_RNA (1)...(19): siRNA sense strand
guuccaaagccaaugugua

SEQ ID NO: 1852861 - RNA, 19 nt, Homo sapiens
  misc_RNA (1)...(19): siRNA sense strand
gaucucauggauaaucuca

SEQ ID NO: 1852862 - RNA, 19 nt, Homo sapiens
  misc_RNA (1)...(19): siRNA sense strand
gaagacuuuacaggacaua

SEQ ID NO: 1852863 - RNA, 19 nt, Homo sapiens
  misc_RNA (1)...(19): siRNA sense strand
ccaauagcaggaucucaug

SEQ ID NO: 1852864 - RNA, 19 nt, Homo sapiens
  misc_RNA (1)...(19): siRNA sense strand
ggaacaauaggaggacuca

SEQ ID NO: 1852865 - RNA, 19 nt, Homo sapiens
  misc_RNA (1)...(19): siRNA sense strand
gaaaaugagaaaacacgaa

SEQ ID NO: 1852866 - RNA, 19 nt, Homo sapiens
  misc_RNA (1)...(19): siRNA sense strand
cggaaagaagcgcaguaua

SEQ ID NO: 1852867 - RNA, 19 nt, Homo sapiens
  misc_RNA (1)...(19): siRNA sense strand
uuccaaagccaauguguau

SEQ ID NO: 1852868 - RNA, 19 nt, Homo sapiens
  misc_RNA (1)...(19): siRNA sense strand
uaggaggacucacauucca

SEQ ID NO: 1852869 - RNA, 19 nt, Homo sapiens
  misc_RNA (1)...(19): siRNA sense strand
caaucuguguguuugucuu

SEQ ID NO: 1852870 - RNA, 19 nt, Homo sapiens
  misc_RNA (1)...(19): siRNA sense strand
gcugggcgguagcuguuuc

SEQ ID NO: 1852871 - RNA, 19 nt, Homo sapiens
  misc_RNA (1)...(19): siRNA sense strand
cugggauacugcuuuaguu

SEQ ID NO: 1852872 - RNA, 19 nt, Homo sapiens
  misc_RNA (1)...(19): siRNA sense strand
aauaggaggacucacauuc

SEQ ID NO: 1852873 - RNA, 19 nt, Homo sapiens
  misc_RNA (1)...(19): siRNA sense strand
aaucuguguguuugucuua

SEQ ID NO: 1852874 - RNA, 19 nt, Homo sapiens
  misc_RNA (1)...(19): siRNA sense strand
aaucucaaucuguguguuu

SEQ ID NO: 1852875 - RNA, 19 nt, Homo sapiens
  misc_RNA (1)...(19): siRNA sense strand
caaagccaauguguauacu

SEQ ID NO: 1852876 - RNA, 19 nt, Homo sapiens
  misc_RNA (1)...(19): siRNA sense strand
caauaggaggacucacauu

SEQ ID NO: 1852877 - RNA, 19 nt, Homo sapiens
  misc_RNA (1)...(19): siRNA sense strand
gaaggaucggagcugguuu

SEQ ID NO: 1852878 - RNA, 19 nt, Homo sapiens
  misc_RNA (1)...(19): siRNA sense strand
ccuacuacaguuaaacauu

SEQ ID NO: 1852879 - RNA, 19 nt, Homo sapiens
  misc_RNA (1)...(19): siRNA sense strand
aaaagacguuccauaguca

SEQ ID NO: 1852880 - RNA, 19 nt, Homo sapiens
  misc_RNA (1)...(19): siRNA sense strand
ggcaucaucaagacauuug

SEQ ID NO: 1852881 - RNA, 19 nt, Homo sapiens
  misc_RNA (1)...(19): siRNA sense strand
gugccagcgucaucacuca

SEQ ID NO: 1852882 - RNA, 19 nt, Homo sapiens
  misc_RNA (1)...(19): siRNA sense strand
gggcgguagcuguuucauu

SEQ ID NO: 1852883 - RNA, 19 nt, Homo sapiens
  misc_RNA (1)...(19): siRNA sense strand
cgauggccauugcagaagu

SEQ ID NO: 1852884 - RNA, 19 nt, Homo sapiens
  misc_RNA (1)...(19): siRNA sense strand
gcaaaagacguuccauagu

SEQ ID NO: 1852885 - RNA, 19 nt, Homo sapiens
  misc_RNA (1)...(19): siRNA sense strand
ggaaacaccugcuuaccaa

SEQ ID NO: 1852886 - RNA, 19 nt, Homo sapiens
  misc_RNA (1)...(19): siRNA sense strand
ggacauaugaauucuguua

SEQ ID NO: 1852887 - RNA, 19 nt, Homo sapiens
  misc_RNA (1)...(19): siRNA sense strand
ggacgaauuugacuucuga

SEQ ID NO: 1852888 - RNA, 19 nt, Homo sapiens
  misc_RNA (1)...(19): siRNA sense strand
aaggagaucuucuucaaua

SEQ ID NO: 1852889 - RNA, 19 nt, Homo sapiens
  misc_RNA (1)...(19): siRNA sense strand
agaaagagcuggagagcaa

SEQ ID NO: 1852890 - RNA, 19 nt, Homo sapiens
  misc_RNA (1)...(19): siRNA sense strand
ggauuugauucgauucaua

SEQ ID NO: 1852891 - RNA, 19 nt, Homo sapiens
  misc_RNA (1)...(19): siRNA sense strand
cgagaaaccucaaggagau

SEQ ID NO: 1852892 - RNA, 19 nt, Homo sapiens
  misc_RNA (1)...(19): siRNA sense strand
ucaaggagaucuucuucaa

SEQ ID NO: 1852893 - RNA, 19 nt, Homo sapiens
  misc_RNA (1)...(19): siRNA sense strand
agagagagauggaagaaga

SEQ ID NO: 1852894 - RNA, 19 nt, Homo sapiens
  misc_RNA (1)...(19): siRNA sense strand
cagaugggcugaagaagga

SEQ ID NO: 1852895 - RNA, 19 nt, Homo sapiens
  misc_RNA (1)...(19): siRNA sense strand
cgacugggaugaugaaaca

SEQ ID NO: 1852896 - RNA, 19 nt, Homo sapiens
  misc_RNA (1)...(19): siRNA sense strand
ucuggaagaugcuuaauga

SEQ ID NO: 1852897 - RNA, 19 nt, Homo sapiens
  misc_RNA (1)...(19): siRNA sense strand
ggaugaagaugaggaugaa

SEQ ID NO: 1852898 - RNA, 19 nt, Homo sapiens
  misc_RNA (1)...(19): siRNA sense strand
uagaggagcugcaagaucu

SEQ ID NO: 1852899 - RNA, 19 nt, Homo sapiens
  misc_RNA (1)...(19): siRNA sense strand
ucaaagcaguauggagaua

SEQ ID NO: 1852900 - RNA, 19 nt, Homo sapiens
  misc_RNA (1)...(19): siRNA sense strand
ggaaaggggugauccagaa

SEQ ID NO: 1852901 - RNA, 19 nt, Homo sapiens
  misc_RNA (1)...(19): siRNA sense strand
caagcagcaucgucuuaaa

SEQ ID NO: 1852902 - RNA, 19 nt, Homo sapiens
  misc_RNA (1)...(19): siRNA sense strand
cauggaagauucagagauc

SEQ ID NO: 1852903 - RNA, 19 nt, Homo sapiens
  misc_RNA (1)...(19): siRNA sense strand
cacguuggcugacugauga

SEQ ID NO: 1852904 - RNA, 19 nt, Homo sapiens
  misc_RNA (1)...(19): siRNA sense strand
gaacaacgugcaggucaaa

SEQ ID NO: 1852905 - RNA, 19 nt, Homo sapiens
  misc_RNA (1)...(19): siRNA sense strand
gugauugucuccucuaagu

SEQ ID NO: 1852906 - RNA, 19 nt, Homo sapiens
  misc_RNA (1)...(19): siRNA sense strand
gcugaaagguggaacaaaa

SEQ ID NO: 1852907 - RNA, 19 nt, Homo sapiens
  misc_RNA (1)...(19): siRNA sense strand
cgaccaaggaugacaguaa

SEQ ID NO: 1852908 - RNA, 19 nt, Homo sapiens
  misc_RNA (1)...(19): siRNA sense strand
acucacagcugcagggaaa

SEQ ID NO: 1852909 - RNA, 19 nt, Homo sapiens
  misc_RNA (1)...(19): siRNA sense strand
ucaaaagacuggaggaaaa

SEQ ID NO: 1852910 - RNA, 19 nt, Homo sapiens
  misc_RNA (1)...(19): siRNA sense strand
ggaugaugcugcagaaguc

SEQ ID NO: 1852911 - RNA, 19 nt, Homo sapiens
  misc_RNA (1)...(19): siRNA sense strand
gaccaaggaugacaguaag

SEQ ID NO: 1852912 - RNA, 19 nt, Homo sapiens
  misc_RNA (1)...(19): siRNA sense strand
gcucucacauccacucuca

SEQ ID NO: 1852913 - RNA, 19 nt, Homo sapiens
  misc_RNA (1)...(19): siRNA sense strand
aaagcaguauggagauaaa

SEQ ID NO: 1852914 - RNA, 19 nt, Homo sapiens
  misc_RNA (1)...(19): siRNA sense strand
ugacuguccucgagaugaa

SEQ ID NO: 1852915 - RNA, 19 nt, Homo sapiens
  misc_RNA (1)...(19): siRNA sense strand
ggaugaggaugaggaugaa

SEQ ID NO: 1852916 - RNA, 19 nt, Homo sapiens
  misc_RNA (1)...(19): siRNA sense strand
gaaacgcugcuguccaguu

SEQ ID NO: 1852917 - RNA, 19 nt, Homo sapiens
  misc_RNA (1)...(19): siRNA sense strand
cacauccacucucaacaaa

SEQ ID NO: 1852918 - RNA, 19 nt, Homo sapiens
  misc_RNA (1)...(19): siRNA sense strand
gacgccacauccagcaaua

SEQ ID NO: 1852919 - RNA, 19 nt, Homo sapiens
  misc_RNA (1)...(19): siRNA sense strand
gcucuuaugugcugaccau

SEQ ID NO: 1852920 - RNA, 19 nt, Homo sapiens
  misc_RNA (1)...(19): siRNA sense strand
gcagagagagauggaagaa

SEQ ID NO: 1852921 - RNA, 19 nt, Homo sapiens
  misc_RNA (1)...(19): siRNA sense strand
acaaaggacugguggacau

SEQ ID NO: 1852922 - RNA, 19 nt, Homo sapiens
  misc_RNA (1)...(19): siRNA sense strand
ggaugaggaugaagaugag

SEQ ID NO: 1852923 - RNA, 19 nt, Homo sapiens
  misc_RNA (1)...(19): siRNA sense strand
acaguaaggacucagauuu

SEQ ID NO: 1852924 - RNA, 19 nt, Homo sapiens
  misc_RNA (1)...(19): siRNA sense strand
guggacauaugaauucugu

SEQ ID NO: 1852925 - RNA, 19 nt, Homo sapiens
  misc_RNA (1)...(19): siRNA sense strand
gggagaauuugagaaggaa

SEQ ID NO: 1852926 - RNA, 19 nt, Homo sapiens
  misc_RNA (1)...(19): siRNA sense strand
ggccugggaucccugaguu

SEQ ID NO: 1852927 - RNA, 19 nt, Homo sapiens
  misc_RNA (1)...(19): siRNA sense strand
gcacguuggcugacugaug

SEQ ID NO: 1852928 - RNA, 19 nt, Homo sapiens
  misc_RNA (1)...(19): siRNA sense strand
ugagugagaugcguuaugg

SEQ ID NO: 1852929 - RNA, 19 nt, Homo sapiens
  misc_RNA (1)...(19): siRNA sense strand
ggaggauccugagcacaga

SEQ ID NO: 1852930 - RNA, 19 nt, Homo sapiens
  misc_RNA (1)...(19): siRNA sense strand
guacauggccuacguucag

SEQ ID NO: 1852931 - RNA, 19 nt, Homo sapiens
  misc_RNA (1)...(19): siRNA sense strand
acccacagcugaaacaaau

SEQ ID NO: 1852932 - RNA, 19 nt, Homo sapiens
  misc_RNA (1)...(19): siRNA sense strand
caaagcaguauggagauaa

SEQ ID NO: 1852933 - RNA, 19 nt, Homo sapiens
  misc_RNA (1)...(19): siRNA sense strand
caaaggacugguggacaua

SEQ ID NO: 1852934 - RNA, 19 nt, Homo sapiens
  misc_RNA (1)...(19): siRNA sense strand
gcugcuguccaguuuguua

SEQ ID NO: 1852935 - RNA, 19 nt, Homo sapiens
  misc_RNA (1)...(19): siRNA sense strand
ggagaucuucuucaauauc

SEQ ID NO: 1852936 - RNA, 19 nt, Homo sapiens
  misc_RNA (1)...(19): siRNA sense strand
ucacauccacucucaacaa

SEQ ID NO: 1852937 - RNA, 19 nt, Homo sapiens
  misc_RNA (1)...(19): siRNA sense strand
ccaagcagcaucgucuuaa

SEQ ID NO: 1852938 - RNA, 19 nt, Homo sapiens
  misc_RNA (1)...(19): siRNA sense strand
ggaagauucagagaucaaa

SEQ ID NO: 1852939 - RNA, 19 nt, Homo sapiens
  misc_RNA (1)...(19): siRNA sense strand
caaaggugaaguccucuau

SEQ ID NO: 1852940 - RNA, 19 nt, Homo sapiens
  misc_RNA (1)...(19): siRNA sense strand
gaucuucuucaauaucuug

SEQ ID NO: 1852941 - RNA, 19 nt, Homo sapiens
  misc_RNA (1)...(19): siRNA sense strand
aagagcagccuguggauga

SEQ ID NO: 1852942 - RNA, 19 nt, Homo sapiens
  misc_RNA (1)...(19): siRNA sense strand
ugacgagggugcagguauc

SEQ ID NO: 1852943 - RNA, 19 nt, Homo sapiens
  misc_RNA (1)...(19): siRNA sense strand
gagcugaagaggcccagaa

SEQ ID NO: 1852944 - RNA, 19 nt, Homo sapiens
  misc_RNA (1)...(19): siRNA sense strand
gaggcaagccgacucaaag

SEQ ID NO: 1852945 - RNA, 19 nt, Homo sapiens
  misc_RNA (1)...(19): siRNA sense strand
cauccacucucaacaaacu

SEQ ID NO: 1852946 - RNA, 19 nt, Homo sapiens
  misc_RNA (1)...(19): siRNA sense strand
ggaggaaacaccugcuuac

SEQ ID NO: 1852947 - RNA, 19 nt, Homo sapiens
  misc_RNA (1)...(19): siRNA sense strand
ggagagggagggacucaca

SEQ ID NO: 1852948 - RNA, 19 nt, Homo sapiens
  misc_RNA (1)...(19): siRNA sense strand
ggugaagaagcacaagaaa

SEQ ID NO: 1852949 - RNA, 19 nt, Homo sapiens
  misc_RNA (1)...(19): siRNA sense strand
ggauccugcuuccgucaga

SEQ ID NO: 1852950 - RNA, 19 nt, Homo sapiens
  misc_RNA (1)...(19): siRNA sense strand
ugggagaauuugagaagga

SEQ ID NO: 1852951 - RNA, 19 nt, Homo sapiens
  misc_RNA (1)...(19): siRNA sense strand
ucgaagcccugcggauuug

SEQ ID NO: 1852952 - RNA, 19 nt, Homo sapiens
  misc_RNA (1)...(19): siRNA sense strand
ccaaugauuuucagaacaa

SEQ ID NO: 1852953 - RNA, 19 nt, Homo sapiens
  misc_RNA (1)...(19): siRNA sense strand
gcucccugcuugcugaaga

SEQ ID NO: 1852954 - RNA, 19 nt, Homo sapiens
  misc_RNA (1)...(19): siRNA sense strand
ccugcuugcugaagacaaa

SEQ ID NO: 1852955 - RNA, 19 nt, Homo sapiens
  misc_RNA (1)...(19): siRNA sense strand
ucaacaaacucaucaaaag

SEQ ID NO: 1852956 - RNA, 19 nt, Homo sapiens
  misc_RNA (1)...(19): siRNA sense strand
ggacugguggacauaugaa

SEQ ID NO: 1852957 - RNA, 19 nt, Homo sapiens
  misc_RNA (1)...(19): siRNA sense strand
ugaagaggcccagaaggaa

SEQ ID NO: 1852958 - RNA, 19 nt, Homo sapiens
  misc_RNA (1)...(19): siRNA sense strand
uggaggagcugagugagau

SEQ ID NO: 1852959 - RNA, 19 nt, Homo sapiens
  misc_RNA (1)...(19): siRNA sense strand
guacaaacagcgcuaugag

SEQ ID NO: 1852960 - RNA, 19 nt, Homo sapiens
  misc_RNA (1)...(19): siRNA sense strand
gacaguaaggacucagauu

SEQ ID NO: 1852961 - RNA, 19 nt, Homo sapiens
  misc_RNA (1)...(19): siRNA sense strand
aaggugaaguccucuaucu

SEQ ID NO: 1852962 - RNA, 19 nt, Homo sapiens
  misc_RNA (1)...(19): siRNA sense strand
caaacagcgcuaugagugu

SEQ ID NO: 1852963 - RNA, 19 nt, Homo sapiens
  misc_RNA (1)...(19): siRNA sense strand
aagaggaggaugaggauga

SEQ ID NO: 1852964 - RNA, 19 nt, Homo sapiens
  misc_RNA (1)...(19): siRNA sense strand
ugggaucccugaguuguug

SEQ ID NO: 1852965 - RNA, 19 nt, Homo sapiens
  misc_RNA (1)...(19): siRNA sense strand
uaucucggcuacuaccaau

SEQ ID NO: 1852966 - RNA, 19 nt, Homo sapiens
  misc_RNA (1)...(19): siRNA sense strand
ucauagaggagcugcaaga

SEQ ID NO: 1852967 - RNA, 19 nt, Homo sapiens
  misc_RNA (1)...(19): siRNA sense strand
gaacgccagcggcagaaag

SEQ ID NO: 1852968 - RNA, 19 nt, Homo sapiens
  misc_RNA (1)...(19): siRNA sense strand
gggcugaagggacugaaga

SEQ ID NO: 1852969 - RNA, 19 nt, Homo sapiens
  misc_RNA (1)...(19): siRNA sense strand
ccagaacggcagagagaga

SEQ ID NO: 1852970 - RNA, 19 nt, Homo sapiens
  misc_RNA (1)...(19): siRNA sense strand
gauuugauucgauucauag

SEQ ID NO: 1852971 - RNA, 19 nt, Homo sapiens
  misc_RNA (1)...(19): siRNA sense strand
cugcggauuugauucgauu

SEQ ID NO: 1852972 - RNA, 19 nt, Homo sapiens
  misc_RNA (1)...(19): siRNA sense strand
ccagcaauaccacauggaa

SEQ ID NO: 1852973 - RNA, 19 nt, Homo sapiens
  misc_RNA (1)...(19): siRNA sense strand
cugaagaggcccagaagga

SEQ ID NO: 1852974 - RNA, 19 nt, Homo sapiens
  misc_RNA (1)...(19): siRNA sense strand
caaggagaucuucuucaau

SEQ ID NO: 1852975 - RNA, 19 nt, Homo sapiens
  misc_RNA (1)...(19): siRNA sense strand
cuucggacguggugauugu

SEQ ID NO: 1852976 - RNA, 19 nt, Homo sapiens
  misc_RNA (1)...(19): siRNA sense strand
ugagagaugcucccugcuu

SEQ ID NO: 1852977 - RNA, 19 nt, Homo sapiens
  misc_RNA (1)...(19): siRNA sense strand
caacaaacucaucaaaaga

SEQ ID NO: 1852978 - RNA, 19 nt, Homo sapiens
  misc_RNA (1)...(19): siRNA sense strand
gagcugaaagguggaacaa

SEQ ID NO: 1852979 - RNA, 19 nt, Homo sapiens
  misc_RNA (1)...(19): siRNA sense strand
agaacaacgugcaggucaa

SEQ ID NO: 1852980 - RNA, 19 nt, Homo sapiens
  misc_RNA (1)...(19): siRNA sense strand
ggcagcagauucagcuucu

SEQ ID NO: 1852981 - RNA, 19 nt, Homo sapiens
  misc_RNA (1)...(19): siRNA sense strand
gagggcagagccaaucuuc

SEQ ID NO: 1852982 - RNA, 19 nt, Homo sapiens
  misc_RNA (1)...(19): siRNA sense strand
ggaagaagaggaggaugag

SEQ ID NO: 1852983 - RNA, 19 nt, Homo sapiens
  misc_RNA (1)...(19): siRNA sense strand
uggaagaagaggaggauga

SEQ ID NO: 1852984 - RNA, 19 nt, Homo sapiens
  misc_RNA (1)...(19): siRNA sense strand
aauaccacauggaagauuc

SEQ ID NO: 1852985 - RNA, 19 nt, Homo sapiens
  misc_RNA (1)...(19): siRNA sense strand
gacaggagcccuuauauua

SEQ ID NO: 1852986 - RNA, 19 nt, Homo sapiens
  misc_RNA (1)...(19): siRNA sense strand
ccaaguggcugcuguggua

SEQ ID NO: 1852987 - RNA, 19 nt, Homo sapiens
  misc_RNA (1)...(19): siRNA sense strand
gaaacacacugccaugaga

SEQ ID NO: 1852988 - RNA, 19 nt, Homo sapiens
  misc_RNA (1)...(19): siRNA sense strand
gaagaaagugauaagguua

SEQ ID NO: 1852989 - RNA, 19 nt, Homo sapiens
  misc_RNA (1)...(19): siRNA sense strand
gaucaaaacuggauuaaga

SEQ ID NO: 1852990 - RNA, 19 nt, Homo sapiens
  misc_RNA (1)...(19): siRNA sense strand
ugacauacuuggagagaaa

SEQ ID NO: 1852991 - RNA, 19 nt, Homo sapiens
  misc_RNA (1)...(19): siRNA sense strand
caggagcccuuauauuauu

SEQ ID NO: 1852992 - RNA, 19 nt, Homo sapiens
  misc_RNA (1)...(19): siRNA sense strand
ccacaagucuuaccucauc

SEQ ID NO: 1852993 - RNA, 19 nt, Homo sapiens
  misc_RNA (1)...(19): siRNA sense strand
ugaagaaagugauaagguu

SEQ ID NO: 1852994 - RNA, 19 nt, Homo sapiens
  misc_RNA (1)...(19): siRNA sense strand
gguccaaccuuacacuaaa

SEQ ID NO: 1852995 - RNA, 19 nt, Homo sapiens
  misc_RNA (1)...(19): siRNA sense strand
gaaggcaccucagagcaaa

SEQ ID NO: 1852996 - RNA, 19 nt, Homo sapiens
  misc_RNA (1)...(19): siRNA sense strand
ggacaggagcccuuauauu

SEQ ID NO: 1852997 - RNA, 19 nt, Homo sapiens
  misc_RNA (1)...(19): siRNA sense strand
ugacauuucucucuuuaga

SEQ ID NO: 1852998 - RNA, 19 nt, Homo sapiens
  misc_RNA (1)...(19): siRNA sense strand
gauacugccuguacugguu

SEQ ID NO: 1852999 - RNA, 19 nt, Homo sapiens
  misc_RNA (1)...(19): siRNA sense strand
caaauugguuggauuggau

SEQ ID NO: 1853000 - RNA, 19 nt, Homo sapiens
  misc_RNA (1)...(19): siRNA sense strand
caauggcucuuucuacuuc

SEQ ID NO: 1853001 - RNA, 19 nt, Homo sapiens
  misc_RNA (1)...(19): siRNA sense strand
gauaaaggcagcaguuugu

SEQ ID NO: 1853002 - RNA, 19 nt, Homo sapiens
  misc_RNA (1)...(19): siRNA sense strand
gcaaauugguuggauugga

SEQ ID NO: 1853003 - RNA, 19 nt, Homo sapiens
  misc_RNA (1)...(19): siRNA sense strand
uaucuccucucuucaguuu

SEQ ID NO: 1853004 - RNA, 19 nt, Homo sapiens
  misc_RNA (1)...(19): siRNA sense strand
gcaggcugguuauaugauu

SEQ ID NO: 1853005 - RNA, 19 nt, Homo sapiens
  misc_RNA (1)...(19): siRNA sense strand
ccucuuaccuuguuucugu

SEQ ID NO: 1853006 - RNA, 19 nt, Homo sapiens
  misc_RNA (1)...(19): siRNA sense strand
gcagaaggcuggacuaccu

SEQ ID NO: 1853007 - RNA, 19 nt, Homo sapiens
  misc_RNA (1)...(19): siRNA sense strand
gagacggucagucagauua

SEQ ID NO: 1853008 - RNA, 19 nt, Homo sapiens
  misc_RNA (1)...(19): siRNA sense strand
uaaccugcuugcuccuuua

SEQ ID NO: 1853009 - RNA, 19 nt, Homo sapiens
  misc_RNA (1)...(19): siRNA sense strand
ggagcuaucgcauugaauu

SEQ ID NO: 1853010 - RNA, 19 nt, Homo sapiens
  misc_RNA (1)...(19): siRNA sense strand
gaaguaucauuaccacaag

SEQ ID NO: 1853011 - RNA, 19 nt, Homo sapiens
  misc_RNA (1)...(19): siRNA sense strand
gauggaugauugugauuca

SEQ ID NO: 1853012 - RNA, 19 nt, Homo sapiens
  misc_RNA (1)...(19): siRNA sense strand
ggacuugccaguuucuuug

SEQ ID NO: 1853013 - RNA, 19 nt, Homo sapiens
  misc_RNA (1)...(19): siRNA sense strand
guugaucuguguaggaauu

SEQ ID NO: 1853014 - RNA, 19 nt, Homo sapiens
  misc_RNA (1)...(19): siRNA sense strand
gagcaaauugguuggauug

SEQ ID NO: 1853015 - RNA, 19 nt, Homo sapiens
  misc_RNA (1)...(19): siRNA sense strand
caucugcuuugccaucuuu

SEQ ID NO: 1853016 - RNA, 19 nt, Homo sapiens
  misc_RNA (1)...(19): siRNA sense strand
ggaugccucuuaccuuguu

SEQ ID NO: 1853017 - RNA, 19 nt, Homo sapiens
  misc_RNA (1)...(19): siRNA sense strand
aaagagugaugaagaaagu

SEQ ID NO: 1853018 - RNA, 19 nt, Homo sapiens
  misc_RNA (1)...(19): siRNA sense strand
gaccaagacuuuugcaauu

SEQ ID NO: 1853019 - RNA, 19 nt, Homo sapiens
  misc_RNA (1)...(19): siRNA sense strand
caggcugguuauaugauua

SEQ ID NO: 1853020 - RNA, 19 nt, Homo sapiens
  misc_RNA (1)...(19): siRNA sense strand
gacauacaauggcucuuuc

SEQ ID NO: 1853021 - RNA, 19 nt, Homo sapiens
  misc_RNA (1)...(19): siRNA sense strand
ugaauuuggugccuucuag

SEQ ID NO: 1853022 - RNA, 19 nt, Homo sapiens
  misc_RNA (1)...(19): siRNA sense strand
cuacuucucuggcauaugc

SEQ ID NO: 1853023 - RNA, 19 nt, Homo sapiens
  misc_RNA (1)...(19): siRNA sense strand
uaagacccauccauaucaa

SEQ ID NO: 1853024 - RNA, 19 nt, Homo sapiens
  misc_RNA (1)...(19): siRNA sense strand
aaaacuaccuccauucuug

SEQ ID NO: 1853025 - RNA, 19 nt, Homo sapiens
  misc_RNA (1)...(19): siRNA sense strand
uaugcuaucuccucucuuc

SEQ ID NO: 1853026 - RNA, 19 nt, Homo sapiens
  misc_RNA (1)...(19): siRNA sense strand
acagaagagucuaccauca

SEQ ID NO: 1853027 - RNA, 19 nt, Homo sapiens
  misc_RNA (1)...(19): siRNA sense strand
gagcuaucgcauugaauuu

SEQ ID NO: 1853028 - RNA, 19 nt, Homo sapiens
  misc_RNA (1)...(19): siRNA sense strand
gugguuaccuggcauugau

SEQ ID NO: 1853029 - RNA, 19 nt, Homo sapiens
  misc_RNA (1)...(19): siRNA sense strand
aaaucaaagugaagaguuc

SEQ ID NO: 1853030 - RNA, 19 nt, Homo sapiens
  misc_RNA (1)...(19): siRNA sense strand
ucaguuagcauacuucauc

SEQ ID NO: 1853031 - RNA, 19 nt, Homo sapiens
  misc_RNA (1)...(19): siRNA sense strand
uuuggguucugcuuucuua

SEQ ID NO: 1853032 - RNA, 19 nt, Homo sapiens
  misc_RNA (1)...(19): siRNA sense strand
ggacaguacuacgcagaag

SEQ ID NO: 1853033 - RNA, 19 nt, Homo sapiens
  misc_RNA (1)...(19): siRNA sense strand
cagaagagucuaccaucaa

SEQ ID NO: 1853034 - RNA, 19 nt, Homo sapiens
  misc_RNA (1)...(19): siRNA sense strand
gcagcugggccacaaguau

SEQ ID NO: 1853035 - RNA, 19 nt, Homo sapiens
  misc_RNA (1)...(19): siRNA sense strand
gauuauacccagacauaca

SEQ ID NO: 1853036 - RNA, 19 nt, Homo sapiens
  misc_RNA (1)...(19): siRNA sense strand
gaccuacaccaucugcuuu

SEQ ID NO: 1853037 - RNA, 19 nt, Homo sapiens
  misc_RNA (1)...(19): siRNA sense strand
cuaaccugcuugcuccuuu

SEQ ID NO: 1853038 - RNA, 19 nt, Homo sapiens
  misc_RNA (1)...(19): siRNA sense strand
aaagauaaaggcagcaguu

SEQ ID NO: 1853039 - RNA, 19 nt, Homo sapiens
  misc_RNA (1)...(19): siRNA sense strand
gcuauuauuugugacauac

SEQ ID NO: 1853040 - RNA, 19 nt, Homo sapiens
  misc_RNA (1)...(19): siRNA sense strand
agaaguaucauuaccacaa

SEQ ID NO: 1853041 - RNA, 19 nt, Homo sapiens
  misc_RNA (1)...(19): siRNA sense strand
caaaauuccugauagaucu

SEQ ID NO: 1853042 - RNA, 19 nt, Homo sapiens
  misc_RNA (1)...(19): siRNA sense strand
agacauacaauggcucuuu

SEQ ID NO: 1853043 - RNA, 19 nt, Homo sapiens
  misc_RNA (1)...(19): siRNA sense strand
ccaaaacacuggggauuga

SEQ ID NO: 1853044 - RNA, 19 nt, Homo sapiens
  misc_RNA (1)...(19): siRNA sense strand
ccaagacuuuugcaauuuu

SEQ ID NO: 1853045 - RNA, 19 nt, Homo sapiens
  misc_RNA (1)...(19): siRNA sense strand
gauuggauccaucauguca

SEQ ID NO: 1853046 - RNA, 19 nt, Homo sapiens
  misc_RNA (1)...(19): siRNA sense strand
cauaugcuaucuccucucu

SEQ ID NO: 1853047 - RNA, 19 nt, Homo sapiens
  misc_RNA (1)...(19): siRNA sense strand
uacaauggcucuuucuacu

SEQ ID NO: 1853048 - RNA, 19 nt, Homo sapiens
  misc_RNA (1)...(19): siRNA sense strand
caucuuugcuggugguuac

SEQ ID NO: 1853049 - RNA, 19 nt, Homo sapiens
  misc_RNA (1)...(19): siRNA sense strand
caccacauuuccacuacuu

SEQ ID NO: 1853050 - RNA, 19 nt, Homo sapiens
  misc_RNA (1)...(19): siRNA sense strand
cggcaucacuaaccugcuu

SEQ ID NO: 1853051 - RNA, 19 nt, Homo sapiens
  misc_RNA (1)...(19): siRNA sense strand
gacggucagucagauuauu

SEQ ID NO: 1853052 - RNA, 19 nt, Homo sapiens
  misc_RNA (1)...(19): siRNA sense strand
guuugacauuucucucuuu

SEQ ID NO: 1853053 - RNA, 19 nt, Homo sapiens
  misc_RNA (1)...(19): siRNA sense strand
agaagagucuaccaucaag

SEQ ID NO: 1853054 - RNA, 19 nt, Homo sapiens
  misc_RNA (1)...(19): siRNA sense strand
gcuaucgcauugaauuugg

SEQ ID NO: 1853055 - RNA, 19 nt, Homo sapiens
  misc_RNA (1)...(19): siRNA sense strand
ggauggggauggaugauug

SEQ ID NO: 1853056 - RNA, 19 nt, Homo sapiens
  misc_RNA (1)...(19): siRNA sense strand
auagcaggcugguuauaug

SEQ ID NO: 1853057 - RNA, 19 nt, Homo sapiens
  misc_RNA (1)...(19): siRNA sense strand
ccacauuuccacuacuuau

SEQ ID NO: 1853058 - RNA, 19 nt, Homo sapiens
  misc_RNA (1)...(19): siRNA sense strand
ucagucaguuagcauacuu

SEQ ID NO: 1853059 - RNA, 19 nt, Homo sapiens
  misc_RNA (1)...(19): siRNA sense strand
agaggcacaugcaacagaa

SEQ ID NO: 1853060 - RNA, 19 nt, Homo sapiens
  misc_RNA (1)...(19): siRNA sense strand
ggacugacuuuucuuuugg

SEQ ID NO: 1853061 - RNA, 19 nt, Homo sapiens
  misc_RNA (1)...(19): siRNA sense strand
ugggauggcuguccuuucu

SEQ ID NO: 1853062 - RNA, 19 nt, Homo sapiens
  misc_RNA (1)...(19): siRNA sense strand
gggacuugccaguuucuuu

SEQ ID NO: 1853063 - RNA, 19 nt, Homo sapiens
  misc_RNA (1)...(19): siRNA sense strand
acaggagcccuuauauuau

SEQ ID NO: 1853064 - RNA, 19 nt, Homo sapiens
  misc_RNA (1)...(19): siRNA sense strand
guaacuaccaaauacuuca

SEQ ID NO: 1853065 - RNA, 19 nt, Homo sapiens
  misc_RNA (1)...(19): siRNA sense strand
gcauugauacugccuguac

SEQ ID NO: 1853066 - RNA, 19 nt, Homo sapiens
  misc_RNA (1)...(19): siRNA sense strand
cagcugggccacaaguauu

SEQ ID NO: 1853067 - RNA, 19 nt, Homo sapiens
  misc_RNA (1)...(19): siRNA sense strand
gggacugacuuuucuuuug

SEQ ID NO: 1853068 - RNA, 19 nt, Homo sapiens
  misc_RNA (1)...(19): siRNA sense strand
acgauuggcucuuucuaca

SEQ ID NO: 1853069 - RNA, 19 nt, Homo sapiens
  misc_RNA (1)...(19): siRNA sense strand
ggguucugcuuucuuauac

SEQ ID NO: 1853070 - RNA, 19 nt, Homo sapiens
  misc_RNA (1)...(19): siRNA sense strand
gcuaucuccucucuucagu

SEQ ID NO: 1853071 - RNA, 19 nt, Homo sapiens
  misc_RNA (1)...(19): siRNA sense strand
agagcaaauugguuggauu

SEQ ID NO: 1853072 - RNA, 19 nt, Homo sapiens
  misc_RNA (1)...(19): siRNA sense strand
ugaaggcaccucagagcaa

SEQ ID NO: 1853073 - RNA, 19 nt, Homo sapiens
  misc_RNA (1)...(19): siRNA sense strand
cuggauggguugcugauca

SEQ ID NO: 1853074 - RNA, 19 nt, Homo sapiens
  misc_RNA (1)...(19): siRNA sense strand
uuaagacccauccauauca

SEQ ID NO: 1853075 - RNA, 19 nt, Homo sapiens
  misc_RNA (1)...(19): siRNA sense strand
caugucaucucuucguuuu

SEQ ID NO: 1853076 - RNA, 19 nt, Homo sapiens
  misc_RNA (1)...(19): siRNA sense strand
augauuauacccagacaua

SEQ ID NO: 1853077 - RNA, 19 nt, Homo sapiens
  misc_RNA (1)...(19): siRNA sense strand
ggaauucuacaguaaacag

SEQ ID NO: 1853078 - RNA, 19 nt, Homo sapiens
  misc_RNA (1)...(19): siRNA sense strand
cagaaacacacugccauga

SEQ ID NO: 1853079 - RNA, 19 nt, Homo sapiens
  misc_RNA (1)...(19): siRNA sense strand
ugguugcuauuauuuguga

SEQ ID NO: 1853080 - RNA, 19 nt, Homo sapiens
  misc_RNA (1)...(19): siRNA sense strand
gaucuguguaggaauucua

SEQ ID NO: 1853081 - RNA, 19 nt, Homo sapiens
  misc_RNA (1)...(19): siRNA sense strand
aucauuaccacaagucuua

SEQ ID NO: 1853082 - RNA, 19 nt, Homo sapiens
  misc_RNA (1)...(19): siRNA sense strand
ccugguugcuauuauuugu

SEQ ID NO: 1853083 - RNA, 19 nt, Homo sapiens
  misc_RNA (1)...(19): siRNA sense strand
acacugccaugagacagaa

SEQ ID NO: 1853084 - RNA, 19 nt, Homo sapiens
  misc_RNA (1)...(19): siRNA sense strand
gauccaucaugucaucucu

SEQ ID NO: 1853085 - RNA, 19 nt, Homo sapiens
  misc_RNA (1)...(19): siRNA sense strand
ggcaacuucuucugcauua

SEQ ID NO: 1853086 - RNA, 19 nt, Homo sapiens
  misc_RNA (1)...(19): siRNA sense strand
cgacccacgucuacaugua

SEQ ID NO: 1853087 - RNA, 19 nt, Homo sapiens
  misc_RNA (1)...(19): siRNA sense strand
caugguggcugcguccuuu

SEQ ID NO: 1853088 - RNA, 19 nt, Homo sapiens
  misc_RNA (1)...(19): siRNA sense strand
gggcuucauugacaucuuc

SEQ ID NO: 1853089 - RNA, 19 nt, Homo sapiens
  misc_RNA (1)...(19): siRNA sense strand
gcucaccuccucccugauu

SEQ ID NO: 1853090 - RNA, 19 nt, Homo sapiens
  misc_RNA (1)...(19): siRNA sense strand
gguccgcucugcagugugu

SEQ ID NO: 1853091 - RNA, 19 nt, Homo sapiens
  misc_RNA (1)...(19): siRNA sense strand
ggucuucugcaucuucuuu

SEQ ID NO: 1853092 - RNA, 19 nt, Homo sapiens
  misc_RNA (1)...(19): siRNA sense strand
ugcgggagguggagcauuu

SEQ ID NO: 1853093 - RNA, 19 nt, Homo sapiens
  misc_RNA (1)...(19): siRNA sense strand
caaguucuccagugccauu

SEQ ID NO: 1853094 - RNA, 19 nt, Homo sapiens
  misc_RNA (1)...(19): siRNA sense strand
ggccgucagugucuucuuc

SEQ ID NO: 1853095 - RNA, 19 nt, Homo sapiens
  misc_RNA (1)...(19): siRNA sense strand
ggagcaucauccaggucua

SEQ ID NO: 1853096 - RNA, 19 nt, Homo sapiens
  misc_RNA (1)...(19): siRNA sense strand
gcucaacugcugcgugugu

SEQ ID NO: 1853097 - RNA, 19 nt, Homo sapiens
  misc_RNA (1)...(19): siRNA sense strand
gggcaacuucuucugcauu

SEQ ID NO: 1853098 - RNA, 19 nt, Homo sapiens
  misc_RNA (1)...(19): siRNA sense strand
gguggagcauuuccugaag

SEQ ID NO: 1853099 - RNA, 19 nt, Homo sapiens
  misc_RNA (1)...(19): siRNA sense strand
uuaggaagaagcccaaaga

SEQ ID NO: 1853100 - RNA, 19 nt, Homo sapiens
  misc_RNA (1)...(19): siRNA sense strand
gcaguucgaggugcucaug

SEQ ID NO: 1853101 - RNA, 19 nt, Homo sapiens
  misc_RNA (1)...(19): siRNA sense strand
gcaacuucuucugcauuag

SEQ ID NO: 1853102 - RNA, 19 nt, Homo sapiens
  misc_RNA (1)...(19): siRNA sense strand
ucagugucuucuucaagga

SEQ ID NO: 1853103 - RNA, 19 nt, Homo sapiens
  misc_RNA (1)...(19): siRNA sense strand
ggguuuggcacucaacuuc

SEQ ID NO: 1853104 - RNA, 19 nt, Homo sapiens
  misc_RNA (1)...(19): siRNA sense strand
cagguccgcucugcagugu

SEQ ID NO: 1853105 - RNA, 19 nt, Homo sapiens
  misc_RNA (1)...(19): siRNA sense strand
caacuucuucugcauuagg

SEQ ID NO: 1853106 - RNA, 19 nt, Homo sapiens
  misc_RNA (1)...(19): siRNA sense strand
ccaaggccgucagugucuu

SEQ ID NO: 1853107 - RNA, 19 nt, Homo sapiens
  misc_RNA (1)...(19): siRNA sense strand
uuccagcccucgcucauca

SEQ ID NO: 1853108 - RNA, 19 nt, Homo sapiens
  misc_RNA (1)...(19): siRNA sense strand
ccgucuaccucuucagcuu

SEQ ID NO: 1853109 - RNA, 19 nt, Homo sapiens
  misc_RNA (1)...(19): siRNA sense strand
gcuucuccauguucuucaa

SEQ ID NO: 1853110 - RNA, 19 nt, Homo sapiens
  misc_RNA (1)...(19): siRNA sense strand
gaagauugcucagcgauua

SEQ ID NO: 1853111 - RNA, 19 nt, Homo sapiens
  misc_RNA (1)...(19): siRNA sense strand
gaacagacaucuaacacaa

SEQ ID NO: 1853112 - RNA, 19 nt, Homo sapiens
  misc_RNA (1)...(19): siRNA sense strand
caacaaauguguacuaguc

SEQ ID NO: 1853113 - RNA, 19 nt, Homo sapiens
  misc_RNA (1)...(19): siRNA sense strand
ggaagggcauggacaagaa

SEQ ID NO: 1853114 - RNA, 19 nt, Homo sapiens
  misc_RNA (1)...(19): siRNA sense strand
ugacuaagcuccagaucaa

SEQ ID NO: 1853115 - RNA, 19 nt, Homo sapiens
  misc_RNA (1)...(19): siRNA sense strand
gccaagaaguucaagauug

SEQ ID NO: 1853116 - RNA, 19 nt, Homo sapiens
  misc_RNA (1)...(19): siRNA sense strand
uaaagaaucaucaggagua

SEQ ID NO: 1853117 - RNA, 19 nt, Homo sapiens
  misc_RNA (1)...(19): siRNA sense strand
gagaugaaguuuaaacagu

SEQ ID NO: 1853118 - RNA, 19 nt, Homo sapiens
  misc_RNA (1)...(19): siRNA sense strand
cccaauggcuuugaucuua

SEQ ID NO: 1853119 - RNA, 19 nt, Homo sapiens
  misc_RNA (1)...(19): siRNA sense strand
gacaaugacacaccaguua

SEQ ID NO: 1853120 - RNA, 19 nt, Homo sapiens
  misc_RNA (1)...(19): siRNA sense strand
ggccgaagcucuaggcauu

SEQ ID NO: 1853121 - RNA, 19 nt, Homo sapiens
  misc_RNA (1)...(19): siRNA sense strand
ugaggaagcugugaagaaa

SEQ ID NO: 1853122 - RNA, 19 nt, Homo sapiens
  misc_RNA (1)...(19): siRNA sense strand
gaacccaaagugagaauuu

SEQ ID NO: 1853123 - RNA, 19 nt, Homo sapiens
  misc_RNA (1)...(19): siRNA sense strand
ugagaucucuaaagaauca

SEQ ID NO: 1853124 - RNA, 19 nt, Homo sapiens
  misc_RNA (1)...(19): siRNA sense strand
ugaagaggguccuggguuu

SEQ ID NO: 1853125 - RNA, 19 nt, Homo sapiens
  misc_RNA (1)...(19): siRNA sense strand
aaacaggcauccauacuuc

SEQ ID NO: 1853126 - RNA, 19 nt, Homo sapiens
  misc_RNA (1)...(19): siRNA sense strand
gcucagcgauuacggacaa

SEQ ID NO: 1853127 - RNA, 19 nt, Homo sapiens
  misc_RNA (1)...(19): siRNA sense strand
uuggagagaugaaguuuaa

SEQ ID NO: 1853128 - RNA, 19 nt, Homo sapiens
  misc_RNA (1)...(19): siRNA sense strand
gggcaaauuugagaagauu

SEQ ID NO: 1853129 - RNA, 19 nt, Homo sapiens
  misc_RNA (1)...(19): siRNA sense strand
ccgaucaucugaaaccuuu

SEQ ID NO: 1853130 - RNA, 19 nt, Homo sapiens
  misc_RNA (1)...(19): siRNA sense strand
gguagaagcccacgucaga

SEQ ID NO: 1853131 - RNA, 19 nt, Homo sapiens
  misc_RNA (1)...(19): siRNA sense strand
ccagaacgacuuccuauug

SEQ ID NO: 1853132 - RNA, 19 nt, Homo sapiens
  misc_RNA (1)...(19): siRNA sense strand
guaaagaagcgacgaauac

SEQ ID NO: 1853133 - RNA, 19 nt, Homo sapiens
  misc_RNA (1)...(19): siRNA sense strand
gaacagagaaaggucaaga

SEQ ID NO: 1853134 - RNA, 19 nt, Homo sapiens
  misc_RNA (1)...(19): siRNA sense strand
ggagauauuccugaaauug

SEQ ID NO: 1853135 - RNA, 19 nt, Homo sapiens
  misc_RNA (1)...(19): siRNA sense strand
acucugagaucucuaaaga

SEQ ID NO: 1853136 - RNA, 19 nt, Homo sapiens
  misc_RNA (1)...(19): siRNA sense strand
gagauauuccugaaauuga

SEQ ID NO: 1853137 - RNA, 19 nt, Homo sapiens
  misc_RNA (1)...(19): siRNA sense strand
ucugagaucucuaaagaau

SEQ ID NO: 1853138 - RNA, 19 nt, Homo sapiens
  misc_RNA (1)...(19): siRNA sense strand
gaggaaggccgaagcucua

SEQ ID NO: 1853139 - RNA, 19 nt, Homo sapiens
  misc_RNA (1)...(19): siRNA sense strand
gaagaaaaccaacaaaugu

SEQ ID NO: 1853140 - RNA, 19 nt, Homo sapiens
  misc_RNA (1)...(19): siRNA sense strand
ugaggagucugaugaggaa

SEQ ID NO: 1853141 - RNA, 19 nt, Homo sapiens
  misc_RNA (1)...(19): siRNA sense strand
gagagaagauuauuuugga

SEQ ID NO: 1853142 - RNA, 19 nt, Homo sapiens
  misc_RNA (1)...(19): siRNA sense strand
gcuaaaggaaggagauauu

SEQ ID NO: 1853143 - RNA, 19 nt, Homo sapiens
  misc_RNA (1)...(19): siRNA sense strand
gaagagggaacaauucaag

SEQ ID NO: 1853144 - RNA, 19 nt, Homo sapiens
  misc_RNA (1)...(19): siRNA sense strand
gaaggcagccgaucaucug

SEQ ID NO: 1853145 - RNA, 19 nt, Homo sapiens
  misc_RNA (1)...(19): siRNA sense strand
gcccuggcaugcugacuaa

SEQ ID NO: 1853146 - RNA, 19 nt, Homo sapiens
  misc_RNA (1)...(19): siRNA sense strand
ccaaggcccagaagaaauu

SEQ ID NO: 1853147 - RNA, 19 nt, Homo sapiens
  misc_RNA (1)...(19): siRNA sense strand
ccgcaugccuacucugaaa

SEQ ID NO: 1853148 - RNA, 19 nt, Homo sapiens
  misc_RNA (1)...(19): siRNA sense strand
caacaggcaaggagauuga

SEQ ID NO: 1853149 - RNA, 19 nt, Homo sapiens
  misc_RNA (1)...(19): siRNA sense strand
gaagaaggcagccgaucau

SEQ ID NO: 1853150 - RNA, 19 nt, Homo sapiens
  misc_RNA (1)...(19): siRNA sense strand
caaagagggagcuggauga

SEQ ID NO: 1853151 - RNA, 19 nt, Homo sapiens
  misc_RNA (1)...(19): siRNA sense strand
gaagcuacaggcagagauu

SEQ ID NO: 1853152 - RNA, 19 nt, Homo sapiens
  misc_RNA (1)...(19): siRNA sense strand
gagcugaaaccauggauag

SEQ ID NO: 1853153 - RNA, 19 nt, Homo sapiens
  misc_RNA (1)...(19): siRNA sense strand
gcugagugaaucuguguua

SEQ ID NO: 1853154 - RNA, 19 nt, Homo sapiens
  misc_RNA (1)...(19): siRNA sense strand
ggauagagaagacagugaa

SEQ ID NO: 1853155 - RNA, 19 nt, Homo sapiens
  misc_RNA (1)...(19): siRNA sense strand
aaagaaucaucaggaguaa

SEQ ID NO: 1853156 - RNA, 19 nt, Homo sapiens
  misc_RNA (1)...(19): siRNA sense strand
gaugaaguuuaaacagugu

SEQ ID NO: 1853157 - RNA, 19 nt, Homo sapiens
  misc_RNA (1)...(19): siRNA sense strand
aaagggagaugaugaugag

SEQ ID NO: 1853158 - RNA, 19 nt, Homo sapiens
  misc_RNA (1)...(19): siRNA sense strand
cagaaggaacuacaagaaa

SEQ ID NO: 1853159 - RNA, 19 nt, Homo sapiens
  misc_RNA (1)...(19): siRNA sense strand
gagcaagggcgcacuguag

SEQ ID NO: 1853160 - RNA, 19 nt, Homo sapiens
  misc_RNA (1)...(19): siRNA sense strand
caaagggagaugaugauga

SEQ ID NO: 1853161 - RNA, 19 nt, Homo sapiens
  misc_RNA (1)...(19): siRNA sense strand
aaagugggaugaacagaca

SEQ ID NO: 1853162 - RNA, 19 nt, Homo sapiens
  misc_RNA (1)...(19): siRNA sense strand
gugggacucuuacauaauc

SEQ ID NO: 1853163 - RNA, 19 nt, Homo sapiens
  misc_RNA (1)...(19): siRNA sense strand
gggaacaauucaagcaaca

SEQ ID NO: 1853164 - RNA, 19 nt, Homo sapiens
  misc_RNA (1)...(19): siRNA sense strand
cgacuaggcuugcccucau

SEQ ID NO: 1853165 - RNA, 19 nt, Homo sapiens
  misc_RNA (1)...(19): siRNA sense strand
ccaagagagaagauuauuu

SEQ ID NO: 1853166 - RNA, 19 nt, Homo sapiens
  misc_RNA (1)...(19): siRNA sense strand
uaagaaggagcuaaaggaa

SEQ ID NO: 1853167 - RNA, 19 nt, Homo sapiens
  misc_RNA (1)...(19): siRNA sense strand
ggcagccgaucaucugaaa

SEQ ID NO: 1853168 - RNA, 19 nt, Homo sapiens
  misc_RNA (1)...(19): siRNA sense strand
cagaacgacuuccuauugg

SEQ ID NO: 1853169 - RNA, 19 nt, Homo sapiens
  misc_RNA (1)...(19): siRNA sense strand
gacaagggcaaauuugaga

SEQ ID NO: 1853170 - RNA, 19 nt, Homo sapiens
  misc_RNA (1)...(19): siRNA sense strand
gagacgcacuuuuaaauuc

SEQ ID NO: 1853171 - RNA, 19 nt, Homo sapiens
  misc_RNA (1)...(19): siRNA sense strand
acacaaagggagaugauga

SEQ ID NO: 1853172 - RNA, 19 nt, Homo sapiens
  misc_RNA (1)...(19): siRNA sense strand
ccugaugccuccuccagaa

SEQ ID NO: 1853173 - RNA, 19 nt, Homo sapiens
  misc_RNA (1)...(19): siRNA sense strand
ccucauugcuccuaagaag

SEQ ID NO: 1853174 - RNA, 19 nt, Homo sapiens
  misc_RNA (1)...(19): siRNA sense strand
gacagaaagcgcaugaaga

SEQ ID NO: 1853175 - RNA, 19 nt, Homo sapiens
  misc_RNA (1)...(19): siRNA sense strand
gagugaaucuguguuagag

SEQ ID NO: 1853176 - RNA, 19 nt, Homo sapiens
  misc_RNA (1)...(19): siRNA sense strand
agagaaaggucaagaaaau

SEQ ID NO: 1853177 - RNA, 19 nt, Homo sapiens
  misc_RNA (1)...(19): siRNA sense strand
cagcagcauugaacugugu

SEQ ID NO: 1853178 - RNA, 19 nt, Homo sapiens
  misc_RNA (1)...(19): siRNA sense strand
gcacagaaggaacuacaag

SEQ ID NO: 1853179 - RNA, 19 nt, Homo sapiens
  misc_RNA (1)...(19): siRNA sense strand
gcacugaagccaggacuca

SEQ ID NO: 1853180 - RNA, 19 nt, Homo sapiens
  misc_RNA (1)...(19): siRNA sense strand
gcuuaaagaagacauuuca

SEQ ID NO: 1853181 - RNA, 19 nt, Homo sapiens
  misc_RNA (1)...(19): siRNA sense strand
uggugggacucuuacauaa

SEQ ID NO: 1853182 - RNA, 19 nt, Homo sapiens
  misc_RNA (1)...(19): siRNA sense strand
guggugggacucuuacaua

SEQ ID NO: 1853183 - RNA, 19 nt, Homo sapiens
  misc_RNA (1)...(19): siRNA sense strand
uugaggagguggaagaaga

SEQ ID NO: 1853184 - RNA, 19 nt, Homo sapiens
  misc_RNA (1)...(19): siRNA sense strand
acagacaucuaacacaaag

SEQ ID NO: 1853185 - RNA, 19 nt, Homo sapiens
  misc_RNA (1)...(19): siRNA sense strand
agaaggaacuacaagaaaa

SEQ ID NO: 1853186 - RNA, 19 nt, Homo sapiens
  misc_RNA (1)...(19): siRNA sense strand
gagcuaaaggaaggagaua

SEQ ID NO: 1853187 - RNA, 19 nt, Homo sapiens
  misc_RNA (1)...(19): siRNA sense strand
cuaagaaggagcuaaagga

SEQ ID NO: 1853188 - RNA, 19 nt, Homo sapiens
  misc_RNA (1)...(19): siRNA sense strand
caauucaagcaacaacuaa

SEQ ID NO: 1853189 - RNA, 19 nt, Homo sapiens
  misc_RNA (1)...(19): siRNA sense strand
caaccagaacgacuuccua

SEQ ID NO: 1853190 - RNA, 19 nt, Homo sapiens
  misc_RNA (1)...(19): siRNA sense strand
ggauaaagugggaugaaca

SEQ ID NO: 1853191 - RNA, 19 nt, Homo sapiens
  misc_RNA (1)...(19): siRNA sense strand
ugauucuacucuccgauuu

SEQ ID NO: 1853192 - RNA, 19 nt, Homo sapiens
  misc_RNA (1)...(19): siRNA sense strand
acagagaaaggucaagaaa

SEQ ID NO: 1853193 - RNA, 19 nt, Homo sapiens
  misc_RNA (1)...(19): siRNA sense strand
ggccaacgcugcccgaaaa

SEQ ID NO: 1853194 - RNA, 19 nt, Homo sapiens
  misc_RNA (1)...(19): siRNA sense strand
cugaaaccauggauagaga

SEQ ID NO: 1853195 - RNA, 19 nt, Homo sapiens
  misc_RNA (1)...(19): siRNA sense strand
gagggaagcacagaaggaa

SEQ ID NO: 1853196 - RNA, 19 nt, Homo sapiens
  misc_RNA (1)...(19): siRNA sense strand
ggagggaagcacagaagga

SEQ ID NO: 1853197 - RNA, 19 nt, Homo sapiens
  misc_RNA (1)...(19): siRNA sense strand
ggugaugacucugagaucu

SEQ ID NO: 1853198 - RNA, 19 nt, Homo sapiens
  misc_RNA (1)...(19): siRNA sense strand
ggagagaugaaguuuaaac

SEQ ID NO: 1853199 - RNA, 19 nt, Homo sapiens
  misc_RNA (1)...(19): siRNA sense strand
aaacuucggagacaaacaa

SEQ ID NO: 1853200 - RNA, 19 nt, Homo sapiens
  misc_RNA (1)...(19): siRNA sense strand
caaaggcucaacuggagaa

SEQ ID NO: 1853201 - RNA, 19 nt, Homo sapiens
  misc_RNA (1)...(19): siRNA sense strand
gaaaagccaucagaagaca

SEQ ID NO: 1853202 - RNA, 19 nt, Homo sapiens
  misc_RNA (1)...(19): siRNA sense strand
gaacaauucaagcaacaac

SEQ ID NO: 1853203 - RNA, 19 nt, Homo sapiens
  misc_RNA (1)...(19): siRNA sense strand
gagagaugaaguuuaaaca

SEQ ID NO: 1853204 - RNA, 19 nt, Homo sapiens
  misc_RNA (1)...(19): siRNA sense strand
caacgugguaguaguggaa

SEQ ID NO: 1853205 - RNA, 19 nt, Homo sapiens
  misc_RNA (1)...(19): siRNA sense strand
ggaugucaacgugguagua

SEQ ID NO: 1853206 - RNA, 19 nt, Homo sapiens
  misc_RNA (1)...(19): siRNA sense strand
acagaaggaacuacaagaa

SEQ ID NO: 1853207 - RNA, 19 nt, Homo sapiens
  misc_RNA (1)...(19): siRNA sense strand
cuaauuugaugcgaguauu

SEQ ID NO: 1853208 - RNA, 19 nt, Homo sapiens
  misc_RNA (1)...(19): siRNA sense strand
gagcaacccagccaagaag

SEQ ID NO: 1853209 - RNA, 19 nt, Homo sapiens
  misc_RNA (1)...(19): siRNA sense strand
acagaaagcgcaugaagag

SEQ ID NO: 1853210 - RNA, 19 nt, Homo sapiens
  misc_RNA (1)...(19): siRNA sense strand
gggaaggacuuacggaugu

SEQ ID NO: 1853211 - RNA, 19 nt, Homo sapiens
  misc_RNA (1)...(19): siRNA sense strand
gcagcuuccuacuucaauu

SEQ ID NO: 1853212 - RNA, 19 nt, Homo sapiens
  misc_RNA (1)...(19): siRNA sense strand
gaacaccaaguuucacugu

SEQ ID NO: 1853213 - RNA, 19 nt, Homo sapiens
  misc_RNA (1)...(19): siRNA sense strand
gagacacuccuauuaugaa

SEQ ID NO: 1853214 - RNA, 19 nt, Homo sapiens
  misc_RNA (1)...(19): siRNA sense strand
caaguuucacuguguaauu

SEQ ID NO: 1853215 - RNA, 19 nt, Homo sapiens
  misc_RNA (1)...(19): siRNA sense strand
agacacuccuauuaugaaa

SEQ ID NO: 1853216 - RNA, 19 nt, Homo sapiens
  misc_RNA (1)...(19): siRNA sense strand
acaaagaagugggcaguag

SEQ ID NO: 1853217 - RNA, 19 nt, Homo sapiens
  misc_RNA (1)...(19): siRNA sense strand
caccaaguuucacugugua

SEQ ID NO: 1853218 - RNA, 19 nt, Homo sapiens
  misc_RNA (1)...(19): siRNA sense strand
gcaguagagcgaacacgaa

SEQ ID NO: 1853219 - RNA, 19 nt, Homo sapiens
  misc_RNA (1)...(19): siRNA sense strand
caaagaagugggcaguaga

SEQ ID NO: 1853220 - RNA, 19 nt, Homo sapiens
  misc_RNA (1)...(19): siRNA sense strand
uccaaggacucauugacuu

SEQ ID NO: 1853221 - RNA, 19 nt, Homo sapiens
  misc_RNA (1)...(19): siRNA sense strand
aaguuucacuguguaauug

SEQ ID NO: 1853222 - RNA, 19 nt, Homo sapiens
  misc_RNA (1)...(19): siRNA sense strand
uguugcagcuuccuacuuc

SEQ ID NO: 1853223 - RNA, 19 nt, Homo sapiens
  misc_RNA (1)...(19): siRNA sense strand
ggaaggacuuacggauguc

SEQ ID NO: 1853224 - RNA, 19 nt, Homo sapiens
  misc_RNA (1)...(19): siRNA sense strand
ccaaggacucauugacuuc

SEQ ID NO: 1853225 - RNA, 19 nt, Homo sapiens
  misc_RNA (1)...(19): siRNA sense strand
uuaaacuuguggccucaga

SEQ ID NO: 1853226 - RNA, 19 nt, Homo sapiens
  misc_RNA (1)...(19): siRNA sense strand
ggacucauugacuucauca

SEQ ID NO: 1853227 - RNA, 19 nt, Homo sapiens
  misc_RNA (1)...(19): siRNA sense strand
cagcuuccuacuucaauug

SEQ ID NO: 1853228 - RNA, 19 nt, Homo sapiens
  misc_RNA (1)...(19): siRNA sense strand
guagagcgaacacgaacca

SEQ ID NO: 1853229 - RNA, 19 nt, Homo sapiens
  misc_RNA (1)...(19): siRNA sense strand
uuaugugaaucaguccuuu

SEQ ID NO: 1853230 - RNA, 19 nt, Homo sapiens
  misc_RNA (1)...(19): siRNA sense strand
aaucaguccuuugcuccuu

SEQ ID NO: 1853231 - RNA, 19 nt, Homo sapiens
  misc_RNA (1)...(19): siRNA sense strand
gaggagccgcagucugugu

SEQ ID NO: 1853232 - RNA, 19 nt, Homo sapiens
  misc_RNA (1)...(19): siRNA sense strand
caaggacucauugacuuca

SEQ ID NO: 1853233 - RNA, 19 nt, Homo sapiens
  misc_RNA (1)...(19): siRNA sense strand
ucucgagugucuccaagca

SEQ ID NO: 1853234 - RNA, 19 nt, Homo sapiens
  misc_RNA (1)...(19): siRNA sense strand
ggauauugcuauuucacuu

SEQ ID NO: 1853235 - RNA, 19 nt, Homo sapiens
  misc_RNA (1)...(19): siRNA sense strand
gccaagaacauaucuguau

SEQ ID NO: 1853236 - RNA, 19 nt, Homo sapiens
  misc_RNA (1)...(19): siRNA sense strand
uauuucacaugcagcuuua

SEQ ID NO: 1853237 - RNA, 19 nt, Homo sapiens
  misc_RNA (1)...(19): siRNA sense strand
caagcacuuucgaccauau

SEQ ID NO: 1853238 - RNA, 19 nt, Homo sapiens
  misc_RNA (1)...(19): siRNA sense strand
ucaagcacuuucgaccaua

SEQ ID NO: 1853239 - RNA, 19 nt, Homo sapiens
  misc_RNA (1)...(19): siRNA sense strand
ugucuggcccuacaaauga

SEQ ID NO: 1853240 - RNA, 19 nt, Homo sapiens
  misc_RNA (1)...(19): siRNA sense strand
caugcagcuuuaagacgua

SEQ ID NO: 1853241 - RNA, 19 nt, Homo sapiens
  misc_RNA (1)...(19): siRNA sense strand
ccacagcuggauauugcua

SEQ ID NO: 1853242 - RNA, 19 nt, Homo sapiens
  misc_RNA (1)...(19): siRNA sense strand
cacugacuauauucuguuu

SEQ ID NO: 1853243 - RNA, 19 nt, Homo sapiens
  misc_RNA (1)...(19): siRNA sense strand
gcagcuuuaagacguauga

SEQ ID NO: 1853244 - RNA, 19 nt, Homo sapiens
  misc_RNA (1)...(19): siRNA sense strand
acagcuggauauugcuauu

SEQ ID NO: 1853245 - RNA, 19 nt, Homo sapiens
  misc_RNA (1)...(19): siRNA sense strand
ccacugacuauauucuguu

SEQ ID NO: 1853246 - RNA, 19 nt, Homo sapiens
  misc_RNA (1)...(19): siRNA sense strand
caucauauacuuugaaccu

SEQ ID NO: 1853247 - RNA, 19 nt, Homo sapiens
  misc_RNA (1)...(19): siRNA sense strand
gcuggauauugcuauuuca

SEQ ID NO: 1853248 - RNA, 19 nt, Homo sapiens
  misc_RNA (1)...(19): siRNA sense strand
gguuccagccuacagaaug

SEQ ID NO: 1853249 - RNA, 19 nt, Homo sapiens
  misc_RNA (1)...(19): siRNA sense strand
guaugucuggcccuacaaa

SEQ ID NO: 1853250 - RNA, 19 nt, Homo sapiens
  misc_RNA (1)...(19): siRNA sense strand
cagcuggauauugcuauuu

SEQ ID NO: 1853251 - RNA, 19 nt, Homo sapiens
  misc_RNA (1)...(19): siRNA sense strand
guuccagccuacagaaugc

SEQ ID NO: 1853252 - RNA, 19 nt, Homo sapiens
  misc_RNA (1)...(19): siRNA sense strand
gaucaucucuguccuaaua

SEQ ID NO: 1853253 - RNA, 19 nt, Homo sapiens
  misc_RNA (1)...(19): siRNA sense strand
gaagauuucugcagggauu

SEQ ID NO: 1853254 - RNA, 19 nt, Homo sapiens
  misc_RNA (1)...(19): siRNA sense strand
caaagauucugugaagaua

SEQ ID NO: 1853255 - RNA, 19 nt, Homo sapiens
  misc_RNA (1)...(19): siRNA sense strand
gaagauauagagaugauga

SEQ ID NO: 1853256 - RNA, 19 nt, Homo sapiens
  misc_RNA (1)...(19): siRNA sense strand
gcauugcauuugugguuua

SEQ ID NO: 1853257 - RNA, 19 nt, Homo sapiens
  misc_RNA (1)...(19): siRNA sense strand
ggaaagaugcugccacuca

SEQ ID NO: 1853258 - RNA, 19 nt, Homo sapiens
  misc_RNA (1)...(19): siRNA sense strand
caacaacccuuggaauaca

SEQ ID NO: 1853259 - RNA, 19 nt, Homo sapiens
  misc_RNA (1)...(19): siRNA sense strand
gcaaagauucugugaagau

SEQ ID NO: 1853260 - RNA, 19 nt, Homo sapiens
  misc_RNA (1)...(19): siRNA sense strand
cagacgaguuucccaagua

SEQ ID NO: 1853261 - RNA, 19 nt, Homo sapiens
  misc_RNA (1)...(19): siRNA sense strand
ccaaggaaaugaauaaacu

SEQ ID NO: 1853262 - RNA, 19 nt, Homo sapiens
  misc_RNA (1)...(19): siRNA sense strand
gaacgcaaagucaacauug

SEQ ID NO: 1853263 - RNA, 19 nt, Homo sapiens
  misc_RNA (1)...(19): siRNA sense strand
ugaucacucucucuucuua

SEQ ID NO: 1853264 - RNA, 19 nt, Homo sapiens
  misc_RNA (1)...(19): siRNA sense strand
gagaucagguggccacuag

SEQ ID NO: 1853265 - RNA, 19 nt, Homo sapiens
  misc_RNA (1)...(19): siRNA sense strand
gugcuuuccucaucccuua

SEQ ID NO: 1853266 - RNA, 19 nt, Homo sapiens
  misc_RNA (1)...(19): siRNA sense strand
gaaagucugcugggcauuu

SEQ ID NO: 1853267 - RNA, 19 nt, Homo sapiens
  misc_RNA (1)...(19): siRNA sense strand
cuaaaggaaucaagacuuc

SEQ ID NO: 1853268 - RNA, 19 nt, Homo sapiens
  misc_RNA (1)...(19): siRNA sense strand
gaauacaccagaaugcaaa

SEQ ID NO: 1853269 - RNA, 19 nt, Homo sapiens
  misc_RNA (1)...(19): siRNA sense strand
gaaucaagacuucaggaaa

SEQ ID NO: 1853270 - RNA, 19 nt, Homo sapiens
  misc_RNA (1)...(19): siRNA sense strand
ggacuugacacuauguuug

SEQ ID NO: 1853271 - RNA, 19 nt, Homo sapiens
  misc_RNA (1)...(19): siRNA sense strand
acaccagaaugcaaagaua

SEQ ID NO: 1853272 - RNA, 19 nt, Homo sapiens
  misc_RNA (1)...(19): siRNA sense strand
ccuggaagauuuauugaga

SEQ ID NO: 1853273 - RNA, 19 nt, Homo sapiens
  misc_RNA (1)...(19): siRNA sense strand
gcugggaucugguacuuca

SEQ ID NO: 1853274 - RNA, 19 nt, Homo sapiens
  misc_RNA (1)...(19): siRNA sense strand
gcucuuaccgcuauccuaa

SEQ ID NO: 1853275 - RNA, 19 nt, Homo sapiens
  misc_RNA (1)...(19): siRNA sense strand
ggguggaauuuacauguuu

SEQ ID NO: 1853276 - RNA, 19 nt, Homo sapiens
  misc_RNA (1)...(19): siRNA sense strand
acucugggcugcugcauuu

SEQ ID NO: 1853277 - RNA, 19 nt, Homo sapiens
  misc_RNA (1)...(19): siRNA sense strand
ggcaaugucuggagguuuc

SEQ ID NO: 1853278 - RNA, 19 nt, Homo sapiens
  misc_RNA (1)...(19): siRNA sense strand
gagcugggaucugguacuu

SEQ ID NO: 1853279 - RNA, 19 nt, Homo sapiens
  misc_RNA (1)...(19): siRNA sense strand
guguauggcuugcaaagau

SEQ ID NO: 1853280 - RNA, 19 nt, Homo sapiens
  misc_RNA (1)...(19): siRNA sense strand
ggaauacaccagaaugcaa

SEQ ID NO: 1853281 - RNA, 19 nt, Homo sapiens
  misc_RNA (1)...(19): siRNA sense strand
ccuaacaucuucuggaaag

SEQ ID NO: 1853282 - RNA, 19 nt, Homo sapiens
  misc_RNA (1)...(19): siRNA sense strand
ucaaguacuuugugcugaa

SEQ ID NO: 1853283 - RNA, 19 nt, Homo sapiens
  misc_RNA (1)...(19): siRNA sense strand
gauauagagaugaugauug

SEQ ID NO: 1853284 - RNA, 19 nt, Homo sapiens
  misc_RNA (1)...(19): siRNA sense strand
cuacagggacacucuaauu

SEQ ID NO: 1853285 - RNA, 19 nt, Homo sapiens
  misc_RNA (1)...(19): siRNA sense strand
gcagugcucccaaggaaau

SEQ ID NO: 1853286 - RNA, 19 nt, Homo sapiens
  misc_RNA (1)...(19): siRNA sense strand
gugaagauauagagaugau

SEQ ID NO: 1853287 - RNA, 19 nt, Homo sapiens
  misc_RNA (1)...(19): siRNA sense strand
ggaaucaagacuucaggaa

SEQ ID NO: 1853288 - RNA, 19 nt, Homo sapiens
  misc_RNA (1)...(19): siRNA sense strand
gccauauacuacaauguga

SEQ ID NO: 1853289 - RNA, 19 nt, Homo sapiens
  misc_RNA (1)...(19): siRNA sense strand
guucugggccaucaucuuu

SEQ ID NO: 1853290 - RNA, 19 nt, Homo sapiens
  misc_RNA (1)...(19): siRNA sense strand
gcaacaacccuuggaauac

SEQ ID NO: 1853291 - RNA, 19 nt, Homo sapiens
  misc_RNA (1)...(19): siRNA sense strand
uagagaugaugauuggauu

SEQ ID NO: 1853292 - RNA, 19 nt, Homo sapiens
  misc_RNA (1)...(19): siRNA sense strand
aaauacagaucaagaacuc

SEQ ID NO: 1853293 - RNA, 19 nt, Homo sapiens
  misc_RNA (1)...(19): siRNA sense strand
uggcuugggucauugugua

SEQ ID NO: 1853294 - RNA, 19 nt, Homo sapiens
  misc_RNA (1)...(19): siRNA sense strand
gcuccucacucuuggacuu

SEQ ID NO: 1853295 - RNA, 19 nt, Homo sapiens
  misc_RNA (1)...(19): siRNA sense strand
ggccaggcauugcauuugu

SEQ ID NO: 1853296 - RNA, 19 nt, Homo sapiens
  misc_RNA (1)...(19): siRNA sense strand
ccuaauagccauauacuac

SEQ ID NO: 1853297 - RNA, 19 nt, Homo sapiens
  misc_RNA (1)...(19): siRNA sense strand
uugcaaagauucugugaag

SEQ ID NO: 1853298 - RNA, 19 nt, Homo sapiens
  misc_RNA (1)...(19): siRNA sense strand
ucacucaggguggaauuua

SEQ ID NO: 1853299 - RNA, 19 nt, Homo sapiens
  misc_RNA (1)...(19): siRNA sense strand
caacaaauuccacaacaac

SEQ ID NO: 1853300 - RNA, 19 nt, Homo sapiens
  misc_RNA (1)...(19): siRNA sense strand
acaacaaauuccacaacaa

SEQ ID NO: 1853301 - RNA, 19 nt, Homo sapiens
  misc_RNA (1)...(19): siRNA sense strand
ccaaguaccuacgcacaca

SEQ ID NO: 1853302 - RNA, 19 nt, Homo sapiens
  misc_RNA (1)...(19): siRNA sense strand
ugcaacaacccuuggaaua

SEQ ID NO: 1853303 - RNA, 19 nt, Homo sapiens
  misc_RNA (1)...(19): siRNA sense strand
gcuaaaggaaucaagacuu

SEQ ID NO: 1853304 - RNA, 19 nt, Homo sapiens
  misc_RNA (1)...(19): siRNA sense strand
ugaauauccuggcgagauc

SEQ ID NO: 1853305 - RNA, 19 nt, Homo sapiens
  misc_RNA (1)...(19): siRNA sense strand
ccaaugaacgcaaagucaa

SEQ ID NO: 1853306 - RNA, 19 nt, Homo sapiens
  misc_RNA (1)...(19): siRNA sense strand
auauagagaugaugauugg

SEQ ID NO: 1853307 - RNA, 19 nt, Homo sapiens
  misc_RNA (1)...(19): siRNA sense strand
ggggaucucuuauguguau

SEQ ID NO: 1853308 - RNA, 19 nt, Homo sapiens
  misc_RNA (1)...(19): siRNA sense strand
gauuacccaucuucuucuu

SEQ ID NO: 1853309 - RNA, 19 nt, Homo sapiens
  misc_RNA (1)...(19): siRNA sense strand
ggcauugcauuugugguuu

SEQ ID NO: 1853310 - RNA, 19 nt, Homo sapiens
  misc_RNA (1)...(19): siRNA sense strand
gaugcugccacucagauuu

SEQ ID NO: 1853311 - RNA, 19 nt, Homo sapiens
  misc_RNA (1)...(19): siRNA sense strand
ucaccagccaggccaauaa

SEQ ID NO: 1853312 - RNA, 19 nt, Homo sapiens
  misc_RNA (1)...(19): siRNA sense strand
caccagaaugcaaagauaa

SEQ ID NO: 1853313 - RNA, 19 nt, Homo sapiens
  misc_RNA (1)...(19): siRNA sense strand
ucaucuggaucccaauuau

SEQ ID NO: 1853314 - RNA, 19 nt, Homo sapiens
  misc_RNA (1)...(19): siRNA sense strand
caccuaugcugccuccuau

SEQ ID NO: 1853315 - RNA, 19 nt, Homo sapiens
  misc_RNA (1)...(19): siRNA sense strand
uacaacaaauuccacaaca

SEQ ID NO: 1853316 - RNA, 19 nt, Homo sapiens
  misc_RNA (1)...(19): siRNA sense strand
aaucaagacuucaggaaaa

SEQ ID NO: 1853317 - RNA, 19 nt, Homo sapiens
  misc_RNA (1)...(19): siRNA sense strand
uuagauuccuguguuauca

SEQ ID NO: 1853318 - RNA, 19 nt, Homo sapiens
  misc_RNA (1)...(19): siRNA sense strand
uaaccuuuauccuuugcuu

SEQ ID NO: 1853319 - RNA, 19 nt, Homo sapiens
  misc_RNA (1)...(19): siRNA sense strand
cauagugaccuccaucuca

SEQ ID NO: 1853320 - RNA, 19 nt, Homo sapiens
  misc_RNA (1)...(19): siRNA sense strand
gaucugguacuucaucaca

SEQ ID NO: 1853321 - RNA, 19 nt, Homo sapiens
  misc_RNA (1)...(19): siRNA sense strand
ucucucuucuuacaacaaa

SEQ ID NO: 1853322 - RNA, 19 nt, Homo sapiens
  misc_RNA (1)...(19): siRNA sense strand
caucauggguuuuccaaug

SEQ ID NO: 1853323 - RNA, 19 nt, Homo sapiens
  misc_RNA (1)...(19): siRNA sense strand
cugaucaucucuguccuaa

SEQ ID NO: 1853324 - RNA, 19 nt, Homo sapiens
  misc_RNA (1)...(19): siRNA sense strand
ggaucccaauuauguuugu

SEQ ID NO: 1853325 - RNA, 19 nt, Homo sapiens
  misc_RNA (1)...(19): siRNA sense strand
ggcuaaugcucgccuguuc

SEQ ID NO: 1853326 - RNA, 19 nt, Homo sapiens
  misc_RNA (1)...(19): siRNA sense strand
cuauggcucuuaccgcuau

SEQ ID NO: 1853327 - RNA, 19 nt, Homo sapiens
  misc_RNA (1)...(19): siRNA sense strand
cgcccaaacuuuccaguca

SEQ ID NO: 1853328 - RNA, 19 nt, Homo sapiens
  misc_RNA (1)...(19): siRNA sense strand
gguggaauuuacauguuuc

SEQ ID NO: 1853329 - RNA, 19 nt, Homo sapiens
  misc_RNA (1)...(19): siRNA sense strand
gcauuuguuucuucaucau

SEQ ID NO: 1853330 - RNA, 19 nt, Homo sapiens
  misc_RNA (1)...(19): siRNA sense strand
acgugacaaugguuaauuu

SEQ ID NO: 1853331 - RNA, 19 nt, Homo sapiens
  misc_RNA (1)...(19): siRNA sense strand
uugcagugcucccaaggaa

SEQ ID NO: 1853332 - RNA, 19 nt, Homo sapiens
  misc_RNA (1)...(19): siRNA sense strand
uguauggcuugcaaagauu

SEQ ID NO: 1853333 - RNA, 19 nt, Homo sapiens
  misc_RNA (1)...(19): siRNA sense strand
gguuuacccggaagccuua

SEQ ID NO: 1853334 - RNA, 19 nt, Homo sapiens
  misc_RNA (1)...(19): siRNA sense strand
uucgucaucuucuccguua

SEQ ID NO: 1853335 - RNA, 19 nt, Homo sapiens
  misc_RNA (1)...(19): siRNA sense strand
cuaccuguuugccuccuuu

SEQ ID NO: 1853336 - RNA, 19 nt, Homo sapiens
  misc_RNA (1)...(19): siRNA sense strand
gagcguuacaagaacauga

SEQ ID NO: 1853337 - RNA, 19 nt, Homo sapiens
  misc_RNA (1)...(19): siRNA sense strand
ccaaccauuuuaaccuuua

SEQ ID NO: 1853338 - RNA, 19 nt, Homo sapiens
  misc_RNA (1)...(19): siRNA sense strand
aaagucugcugggcauuug

SEQ ID NO: 1853339 - RNA, 19 nt, Homo sapiens
  misc_RNA (1)...(19): siRNA sense strand
gaccaagggccaggcauug

SEQ ID NO: 1853340 - RNA, 19 nt, Homo sapiens
  misc_RNA (1)...(19): siRNA sense strand
gaucaagaacucgacuuuc

SEQ ID NO: 1853341 - RNA, 19 nt, Homo sapiens
  misc_RNA (1)...(19): siRNA sense strand
ugacaaugguuaauuucac

SEQ ID NO: 1853342 - RNA, 19 nt, Homo sapiens
  misc_RNA (1)...(19): siRNA sense strand
gccaaugaacgcaaaguca

SEQ ID NO: 1853343 - RNA, 19 nt, Homo sapiens
  misc_RNA (1)...(19): siRNA sense strand
ccuaugcccuugucaucau

SEQ ID NO: 1853344 - RNA, 19 nt, Homo sapiens
  misc_RNA (1)...(19): siRNA sense strand
ccaggccaauaagacauuu

SEQ ID NO: 1853345 - RNA, 19 nt, Homo sapiens
  misc_RNA (1)...(19): siRNA sense strand
ccugaucacucucucuucu

SEQ ID NO: 1853346 - RNA, 19 nt, Homo sapiens
  misc_RNA (1)...(19): siRNA sense strand
gggaucugguacuucauca

SEQ ID NO: 1853347 - RNA, 19 nt, Homo sapiens
  misc_RNA (1)...(19): siRNA sense strand
agccuaacaucuucuggaa

SEQ ID NO: 1853348 - RNA, 19 nt, Homo sapiens
  misc_RNA (1)...(19): siRNA sense strand
gauuccagccuaacaucuu

SEQ ID NO: 1853349 - RNA, 19 nt, Homo sapiens
  misc_RNA (1)...(19): siRNA sense strand
gcugaucaucucuguccua

SEQ ID NO: 1853350 - RNA, 19 nt, Homo sapiens
  misc_RNA (1)...(19): siRNA sense strand
ucagacgaguuucccaagu

SEQ ID NO: 1853351 - RNA, 19 nt, Homo sapiens
  misc_RNA (1)...(19): siRNA sense strand
cauggccaaugaacgcaaa

SEQ ID NO: 1853352 - RNA, 19 nt, Homo sapiens
  misc_RNA (1)...(19): siRNA sense strand
ggaaucaaguucuucauaa

SEQ ID NO: 1853353 - RNA, 19 nt, Homo sapiens
  misc_RNA (1)...(19): siRNA sense strand
uaaaugaguuuguggcuua

SEQ ID NO: 1853354 - RNA, 19 nt, Homo sapiens
  misc_RNA (1)...(19): siRNA sense strand
gaacugaucuuggauauac

SEQ ID NO: 1853355 - RNA, 19 nt, Homo sapiens
  misc_RNA (1)...(19): siRNA sense strand
gggccuaggucuucaauuu

SEQ ID NO: 1853356 - RNA, 19 nt, Homo sapiens
  misc_RNA (1)...(19): siRNA sense strand
gcacuggccuuguuuguca

SEQ ID NO: 1853357 - RNA, 19 nt, Homo sapiens
  misc_RNA (1)...(19): siRNA sense strand
gauaaggaguucagugcua

SEQ ID NO: 1853358 - RNA, 19 nt, Homo sapiens
  misc_RNA (1)...(19): siRNA sense strand
ugugagagcugaaaucauu

SEQ ID NO: 1853359 - RNA, 19 nt, Homo sapiens
  misc_RNA (1)...(19): siRNA sense strand
gcaccaacccuccuucuuu

SEQ ID NO: 1853360 - RNA, 19 nt, Homo sapiens
  misc_RNA (1)...(19): siRNA sense strand
ucaaggaugucuuugcuuu

SEQ ID NO: 1853361 - RNA, 19 nt, Homo sapiens
  misc_RNA (1)...(19): siRNA sense strand
cagcuugcaucuugaauuu

SEQ ID NO: 1853362 - RNA, 19 nt, Homo sapiens
  misc_RNA (1)...(19): siRNA sense strand
ccauaggccuugcuacuaa

SEQ ID NO: 1853363 - RNA, 19 nt, Homo sapiens
  misc_RNA (1)...(19): siRNA sense strand
ggugaugacuggaggguuu

SEQ ID NO: 1853364 - RNA, 19 nt, Homo sapiens
  misc_RNA (1)...(19): siRNA sense strand
ggagagaaacaguggauuu

SEQ ID NO: 1853365 - RNA, 19 nt, Homo sapiens
  misc_RNA (1)...(19): siRNA sense strand
caagaggacugacgcacaa

SEQ ID NO: 1853366 - RNA, 19 nt, Homo sapiens
  misc_RNA (1)...(19): siRNA sense strand
gcaacugucucaauacaag

SEQ ID NO: 1853367 - RNA, 19 nt, Homo sapiens
  misc_RNA (1)...(19): siRNA sense strand
ggagaaagcaaguggaaga

SEQ ID NO: 1853368 - RNA, 19 nt, Homo sapiens
  misc_RNA (1)...(19): siRNA sense strand
gggauacacuggucaagga

SEQ ID NO: 1853369 - RNA, 19 nt, Homo sapiens
  misc_RNA (1)...(19): siRNA sense strand
gagcugaaaucauuacaac

SEQ ID NO: 1853370 - RNA, 19 nt, Homo sapiens
  misc_RNA (1)...(19): siRNA sense strand
gggaaucaaguucuucaua

SEQ ID NO: 1853371 - RNA, 19 nt, Homo sapiens
  misc_RNA (1)...(19): siRNA sense strand
ggacugggcccuuccacuu

SEQ ID NO: 1853372 - RNA, 19 nt, Homo sapiens
  misc_RNA (1)...(19): siRNA sense strand
ggacaugacacucucugaa

SEQ ID NO: 1853373 - RNA, 19 nt, Homo sapiens
  misc_RNA (1)...(19): siRNA sense strand
caucaaagcuagcguaucc

SEQ ID NO: 1853374 - RNA, 19 nt, Homo sapiens
  misc_RNA (1)...(19): siRNA sense strand
ggagagcagguccagauuu

SEQ ID NO: 1853375 - RNA, 19 nt, Homo sapiens
  misc_RNA (1)...(19): siRNA sense strand
gagagcagguccagauuuu

SEQ ID NO: 1853376 - RNA, 19 nt, Homo sapiens
  misc_RNA (1)...(19): siRNA sense strand
gacaugacacucucugaaa

SEQ ID NO: 1853377 - RNA, 19 nt, Homo sapiens
  misc_RNA (1)...(19): siRNA sense strand
ccuggcagcuugcaucuug

SEQ ID NO: 1853378 - RNA, 19 nt, Homo sapiens
  misc_RNA (1)...(19): siRNA sense strand
acacaaguuucaccaauag

SEQ ID NO: 1853379 - RNA, 19 nt, Homo sapiens
  misc_RNA (1)...(19): siRNA sense strand
gaaacaucuuuguggguau

SEQ ID NO: 1853380 - RNA, 19 nt, Homo sapiens
  misc_RNA (1)...(19): siRNA sense strand
guucauccuuauccucuuu

SEQ ID NO: 1853381 - RNA, 19 nt, Homo sapiens
  misc_RNA (1)...(19): siRNA sense strand
uaacugcuguggauucuac

SEQ ID NO: 1853382 - RNA, 19 nt, Homo sapiens
  misc_RNA (1)...(19): siRNA sense strand
cagaacugaucuuggauau

SEQ ID NO: 1853383 - RNA, 19 nt, Homo sapiens
  misc_RNA (1)...(19): siRNA sense strand
gggaauugguggacauaca

SEQ ID NO: 1853384 - RNA, 19 nt, Homo sapiens
  misc_RNA (1)...(19): siRNA sense strand
aacacaaguuucaccaaua

SEQ ID NO: 1853385 - RNA, 19 nt, Homo sapiens
  misc_RNA (1)...(19): siRNA sense strand
gcucauccgucccuaccuu

SEQ ID NO: 1853386 - RNA, 19 nt, Homo sapiens
  misc_RNA (1)...(19): siRNA sense strand
cagcaacugucucaauaca

SEQ ID NO: 1853387 - RNA, 19 nt, Homo sapiens
  misc_RNA (1)...(19): siRNA sense strand
uuucaggccuuaccaauca

SEQ ID NO: 1853388 - RNA, 19 nt, Homo sapiens
  misc_RNA (1)...(19): siRNA sense strand
ggucuucaauuugucuuug

SEQ ID NO: 1853389 - RNA, 19 nt, Homo sapiens
  misc_RNA (1)...(19): siRNA sense strand
ggucagggcccucuucaca

SEQ ID NO: 1853390 - RNA, 19 nt, Homo sapiens
  misc_RNA (1)...(19): siRNA sense strand
gaauggaggaguggauuga

SEQ ID NO: 1853391 - RNA, 19 nt, Homo sapiens
  misc_RNA (1)...(19): siRNA sense strand
aaacgucucucuggaaugg

SEQ ID NO: 1853392 - RNA, 19 nt, Homo sapiens
  misc_RNA (1)...(19): siRNA sense strand
acaaacgucucucuggaau

SEQ ID NO: 1853393 - RNA, 19 nt, Homo sapiens
  misc_RNA (1)...(19): siRNA sense strand
ggugaucuuuguccugguu

SEQ ID NO: 1853394 - RNA, 19 nt, Homo sapiens
  misc_RNA (1)...(19): siRNA sense strand
gcugaaaucauuacaacau

SEQ ID NO: 1853395 - RNA, 19 nt, Homo sapiens
  misc_RNA (1)...(19): siRNA sense strand
ggucaaggaugucuuugcu

SEQ ID NO: 1853396 - RNA, 19 nt, Homo sapiens
  misc_RNA (1)...(19): siRNA sense strand
gccuaggucuucaauuugu

SEQ ID NO: 1853397 - RNA, 19 nt, Homo sapiens
  misc_RNA (1)...(19): siRNA sense strand
cuacaacaauaccgucugu

SEQ ID NO: 1853398 - RNA, 19 nt, Homo sapiens
  misc_RNA (1)...(19): siRNA sense strand
gaaccuaugagaccuacau

SEQ ID NO: 1853399 - RNA, 19 nt, Homo sapiens
  misc_RNA (1)...(19): siRNA sense strand
gacugggcccuuccacuua

SEQ ID NO: 1853400 - RNA, 19 nt, Homo sapiens
  misc_RNA (1)...(19): siRNA sense strand
ugaaauccaugcggugaug

SEQ ID NO: 1853401 - RNA, 19 nt, Homo sapiens
  misc_RNA (1)...(19): siRNA sense strand
gcagcuugcaucuugaauu

SEQ ID NO: 1853402 - RNA, 19 nt, Homo sapiens
  misc_RNA (1)...(19): siRNA sense strand
caucugcuccuaucuccua

SEQ ID NO: 1853403 - RNA, 19 nt, Homo sapiens
  misc_RNA (1)...(19): siRNA sense strand
cagcaaagcaagaaguuuc

SEQ ID NO: 1853404 - RNA, 19 nt, Homo sapiens
  misc_RNA (1)...(19): siRNA sense strand
guuuguggcuuaucagcaa

SEQ ID NO: 1853405 - RNA, 19 nt, Homo sapiens
  misc_RNA (1)...(19): siRNA sense strand
agagggcacuggccuuguu

SEQ ID NO: 1853406 - RNA, 19 nt, Homo sapiens
  misc_RNA (1)...(19): siRNA sense strand
gcuguggauucuacaacaa

SEQ ID NO: 1853407 - RNA, 19 nt, Homo sapiens
  misc_RNA (1)...(19): siRNA sense strand
acaugacacucucugaaau

SEQ ID NO: 1853408 - RNA, 19 nt, Homo sapiens
  misc_RNA (1)...(19): siRNA sense strand
uguggauucuacaacaaua

SEQ ID NO: 1853409 - RNA, 19 nt, Homo sapiens
  misc_RNA (1)...(19): siRNA sense strand
ggaauggaggaguggauug

SEQ ID NO: 1853410 - RNA, 19 nt, Homo sapiens
  misc_RNA (1)...(19): siRNA sense strand
aucagcaacugucucaaua

SEQ ID NO: 1853411 - RNA, 19 nt, Homo sapiens
  misc_RNA (1)...(19): siRNA sense strand
gacacucucugaaauccau

SEQ ID NO: 1853412 - RNA, 19 nt, Homo sapiens
  misc_RNA (1)...(19): siRNA sense strand
caauuugucuuugggaucu

SEQ ID NO: 1853413 - RNA, 19 nt, Homo sapiens
  misc_RNA (1)...(19): siRNA sense strand
ggaagagugacuuguccaa

SEQ ID NO: 1853414 - RNA, 19 nt, Homo sapiens
  misc_RNA (1)...(19): siRNA sense strand
uguugggccuguuguguuu

SEQ ID NO: 1853415 - RNA, 19 nt, Homo sapiens
  misc_RNA (1)...(19): siRNA sense strand
uggcugagauggugggaau

SEQ ID NO: 1853416 - RNA, 19 nt, Homo sapiens
  misc_RNA (1)...(19): siRNA sense strand
gccauaggccuugcuacua

SEQ ID NO: 1853417 - RNA, 19 nt, Homo sapiens
  misc_RNA (1)...(19): siRNA sense strand
gaugugugguguccauucu

SEQ ID NO: 1853418 - RNA, 19 nt, Homo sapiens
  misc_RNA (1)...(19): siRNA sense strand
aguccaaguucaagaguga

SEQ ID NO: 1853419 - RNA, 19 nt, Homo sapiens
  misc_RNA (1)...(19): siRNA sense strand
ggccuuaccaaucaucauu

SEQ ID NO: 1853420 - RNA, 19 nt, Homo sapiens
  misc_RNA (1)...(19): siRNA sense strand
guguuggccuucaucaaug

SEQ ID NO: 1853421 - RNA, 19 nt, Homo sapiens
  misc_RNA (1)...(19): siRNA sense strand
aaacaucuuuguggguaug

SEQ ID NO: 1853422 - RNA, 19 nt, Homo sapiens
  misc_RNA (1)...(19): siRNA sense strand
ucagaaggucgccugguuu

SEQ ID NO: 1853423 - RNA, 19 nt, Homo sapiens
  misc_RNA (1)...(19): siRNA sense strand
gugcuauggcccuuacuaa

SEQ ID NO: 1853424 - RNA, 19 nt, Homo sapiens
  misc_RNA (1)...(19): siRNA sense strand
cuccuugguuggccuuaua

SEQ ID NO: 1853425 - RNA, 19 nt, Homo sapiens
  misc_RNA (1)...(19): siRNA sense strand
caauaccgucugugccuaa

SEQ ID NO: 1853426 - RNA, 19 nt, Homo sapiens
  misc_RNA (1)...(19): siRNA sense strand
ggauugagggagagaaaca

SEQ ID NO: 1853427 - RNA, 19 nt, Homo sapiens
  misc_RNA (1)...(19): siRNA sense strand
gcaauggguaguucagaag

SEQ ID NO: 1853428 - RNA, 19 nt, Homo sapiens
  misc_RNA (1)...(19): siRNA sense strand
ugucugaagcccuuugaaa

SEQ ID NO: 1853429 - RNA, 19 nt, Homo sapiens
  misc_RNA (1)...(19): siRNA sense strand
gcuauggcccuuacuaacu

SEQ ID NO: 1853430 - RNA, 19 nt, Homo sapiens
  misc_RNA (1)...(19): siRNA sense strand
caggucaucugcuccuauc

SEQ ID NO: 1853431 - RNA, 19 nt, Homo sapiens
  misc_RNA (1)...(19): siRNA sense strand
ucgguggccuuucagcaaa

SEQ ID NO: 1853432 - RNA, 19 nt, Homo sapiens
  misc_RNA (1)...(19): siRNA sense strand
ugcaauggguaguucagaa

SEQ ID NO: 1853433 - RNA, 19 nt, Homo sapiens
  misc_RNA (1)...(19): siRNA sense strand
gcucucgccucaucaaagc

SEQ ID NO: 1853434 - RNA, 19 nt, Homo sapiens
  misc_RNA (1)...(19): siRNA sense strand
cuuacuaacugcuguggau

SEQ ID NO: 1853435 - RNA, 19 nt, Homo sapiens
  misc_RNA (1)...(19): siRNA sense strand
cuauggcccuuacuaacug

SEQ ID NO: 1853436 - RNA, 19 nt, Homo sapiens
  misc_RNA (1)...(19): siRNA sense strand
auaaggaguucagugcuau

SEQ ID NO: 1853437 - RNA, 19 nt, Homo sapiens
  misc_RNA (1)...(19): siRNA sense strand
caccaacccuccuucuuuu

SEQ ID NO: 1853438 - RNA, 19 nt, Homo sapiens
  misc_RNA (1)...(19): siRNA sense strand
ccuaugagaccuacaugug

SEQ ID NO: 1853439 - RNA, 19 nt, Homo sapiens
  misc_RNA (1)...(19): siRNA sense strand
caaucuuaguuccauagga

SEQ ID NO: 1853440 - RNA, 19 nt, Homo sapiens
  misc_RNA (1)...(19): siRNA sense strand
ggaggagucgguggccuuu

SEQ ID NO: 1853441 - RNA, 19 nt, Homo sapiens
  misc_RNA (1)...(19): siRNA sense strand
ggccuaggucuucaauuug

SEQ ID NO: 1853442 - RNA, 19 nt, Homo sapiens
  misc_RNA (1)...(19): siRNA sense strand
acaaguuucaccaauagaa

SEQ ID NO: 1853443 - RNA, 19 nt, Homo sapiens
  misc_RNA (1)...(19): siRNA sense strand
gccuguguaucccuuauca

SEQ ID NO: 1853444 - RNA, 19 nt, Homo sapiens
  misc_RNA (1)...(19): siRNA sense strand
uaucagcaacugucucaau

SEQ ID NO: 1853445 - RNA, 19 nt, Homo sapiens
  misc_RNA (1)...(19): siRNA sense strand
cauaggccuugcuacuaau

SEQ ID NO: 1853446 - RNA, 19 nt, Homo sapiens
  misc_RNA (1)...(19): siRNA sense strand
gggcuggagcucauggaaa

SEQ ID NO: 1853447 - RNA, 19 nt, Homo sapiens
  misc_RNA (1)...(19): siRNA sense strand
ggcuggagcucauggaaaa

SEQ ID NO: 1853448 - RNA, 19 nt, Homo sapiens
  misc_RNA (1)...(19): siRNA sense strand
uguagcagccaaccugauu

SEQ ID NO: 1853449 - RNA, 19 nt, Homo sapiens
  misc_RNA (1)...(19): siRNA sense strand
uguccugguucacucguuu

SEQ ID NO: 1853450 - RNA, 19 nt, Homo sapiens
  misc_RNA (1)...(19): siRNA sense strand
ggaauugguggacauacag

SEQ ID NO: 1853451 - RNA, 19 nt, Homo sapiens
  misc_RNA (1)...(19): siRNA sense strand
caagaacaaacgucucucu

SEQ ID NO: 1853452 - RNA, 19 nt, Homo sapiens
  misc_RNA (1)...(19): siRNA sense strand
ggacaacaaugaaaugaua

SEQ ID NO: 1853453 - RNA, 19 nt, Homo sapiens
  misc_RNA (1)...(19): siRNA sense strand
gaaaugaucgguacagaaa

SEQ ID NO: 1853454 - RNA, 19 nt, Homo sapiens
  misc_RNA (1)...(19): siRNA sense strand
caaagacacuccacaagaa

SEQ ID NO: 1853455 - RNA, 19 nt, Homo sapiens
  misc_RNA (1)...(19): siRNA sense strand
ggaaacaucuggacaggau

SEQ ID NO: 1853456 - RNA, 19 nt, Homo sapiens
  misc_RNA (1)...(19): siRNA sense strand
gaaccugugucuacugaaa

SEQ ID NO: 1853457 - RNA, 19 nt, Homo sapiens
  misc_RNA (1)...(19): siRNA sense strand
ggacaggauucuagccuaa

SEQ ID NO: 1853458 - RNA, 19 nt, Homo sapiens
  misc_RNA (1)...(19): siRNA sense strand
ugacuuaucugagaaugua

SEQ ID NO: 1853459 - RNA, 19 nt, Homo sapiens
  misc_RNA (1)...(19): siRNA sense strand
agaaaugacugucccaauu

SEQ ID NO: 1853460 - RNA, 19 nt, Homo sapiens
  misc_RNA (1)...(19): siRNA sense strand
acaaggaggucuacacgua

SEQ ID NO: 1853461 - RNA, 19 nt, Homo sapiens
  misc_RNA (1)...(19): siRNA sense strand
gaacagcaauccuauaagc

SEQ ID NO: 1853462 - RNA, 19 nt, Homo sapiens
  misc_RNA (1)...(19): siRNA sense strand
gaaguugaaccaucuguaa

SEQ ID NO: 1853463 - RNA, 19 nt, Homo sapiens
  misc_RNA (1)...(19): siRNA sense strand
gcacaacaccagccuauga

SEQ ID NO: 1853464 - RNA, 19 nt, Homo sapiens
  misc_RNA (1)...(19): siRNA sense strand
gaagcauacugcaaauuau

SEQ ID NO: 1853465 - RNA, 19 nt, Homo sapiens
  misc_RNA (1)...(19): siRNA sense strand
ggaaagcaguagauaaagu

SEQ ID NO: 1853466 - RNA, 19 nt, Homo sapiens
  misc_RNA (1)...(19): siRNA sense strand
gcaaugagcaaauagaaga

SEQ ID NO: 1853467 - RNA, 19 nt, Homo sapiens
  misc_RNA (1)...(19): siRNA sense strand
gaaagcaauugcaggguau

SEQ ID NO: 1853468 - RNA, 19 nt, Homo sapiens
  misc_RNA (1)...(19): siRNA sense strand
gaagaaagugagaagcaua

SEQ ID NO: 1853469 - RNA, 19 nt, Homo sapiens
  misc_RNA (1)...(19): siRNA sense strand
gaaaugacugucccaauug

SEQ ID NO: 1853470 - RNA, 19 nt, Homo sapiens
  misc_RNA (1)...(19): siRNA sense strand
gaaaggagaaccagaaagu

SEQ ID NO: 1853471 - RNA, 19 nt, Homo sapiens
  misc_RNA (1)...(19): siRNA sense strand
gaaaaucgguggcaaaauc

SEQ ID NO: 1853472 - RNA, 19 nt, Homo sapiens
  misc_RNA (1)...(19): siRNA sense strand
caggaguucucauuugaua

SEQ ID NO: 1853473 - RNA, 19 nt, Homo sapiens
  misc_RNA (1)...(19): siRNA sense strand
gaagagaaacugggaaaga

SEQ ID NO: 1853474 - RNA, 19 nt, Homo sapiens
  misc_RNA (1)...(19): siRNA sense strand
gaaagcaguagauaaaguu

SEQ ID NO: 1853475 - RNA, 19 nt, Homo sapiens
  misc_RNA (1)...(19): siRNA sense strand
gaacagauucagaagcauu

SEQ ID NO: 1853476 - RNA, 19 nt, Homo sapiens
  misc_RNA (1)...(19): siRNA sense strand
gaaagcaaaguaaguguug

SEQ ID NO: 1853477 - RNA, 19 nt, Homo sapiens
  misc_RNA (1)...(19): siRNA sense strand
gaaagaaugacccagagaa

SEQ ID NO: 1853478 - RNA, 19 nt, Homo sapiens
  misc_RNA (1)...(19): siRNA sense strand
guaccaaccuguaucuugu

SEQ ID NO: 1853479 - RNA, 19 nt, Homo sapiens
  misc_RNA (1)...(19): siRNA sense strand
gaagacagacaagaaauug

SEQ ID NO: 1853480 - RNA, 19 nt, Homo sapiens
  misc_RNA (1)...(19): siRNA sense strand
guucucagcuaccuauaaa

SEQ ID NO: 1853481 - RNA, 19 nt, Homo sapiens
  misc_RNA (1)...(19): siRNA sense strand
agaagcauacugcaaauua

SEQ ID NO: 1853482 - RNA, 19 nt, Homo sapiens
  misc_RNA (1)...(19): siRNA sense strand
uaaagccuauguagacaaa

SEQ ID NO: 1853483 - RNA, 19 nt, Homo sapiens
  misc_RNA (1)...(19): siRNA sense strand
uaacauucauccucagcua

SEQ ID NO: 1853484 - RNA, 19 nt, Homo sapiens
  misc_RNA (1)...(19): siRNA sense strand
caacaccagccuaugaaua

SEQ ID NO: 1853485 - RNA, 19 nt, Homo sapiens
  misc_RNA (1)...(19): siRNA sense strand
gcagagaacgagaaaguga

SEQ ID NO: 1853486 - RNA, 19 nt, Homo sapiens
  misc_RNA (1)...(19): siRNA sense strand
gaaguaguuuugccuauaa

SEQ ID NO: 1853487 - RNA, 19 nt, Homo sapiens
  misc_RNA (1)...(19): siRNA sense strand
gguaauacuucgucaucaa

SEQ ID NO: 1853488 - RNA, 19 nt, Homo sapiens
  misc_RNA (1)...(19): siRNA sense strand
uaacaugaguacaccaguu

SEQ ID NO: 1853489 - RNA, 19 nt, Homo sapiens
  misc_RNA (1)...(19): siRNA sense strand
aaacggaagucuguaagaa

SEQ ID NO: 1853490 - RNA, 19 nt, Homo sapiens
  misc_RNA (1)...(19): siRNA sense strand
auaaagauaucaccaagga

SEQ ID NO: 1853491 - RNA, 19 nt, Homo sapiens
  misc_RNA (1)...(19): siRNA sense strand
uagagucagugguuaauga

SEQ ID NO: 1853492 - RNA, 19 nt, Homo sapiens
  misc_RNA (1)...(19): siRNA sense strand
gcaauccauuuaacauuca

SEQ ID NO: 1853493 - RNA, 19 nt, Homo sapiens
  misc_RNA (1)...(19): siRNA sense strand
aaacaaaccagcaaguuga

SEQ ID NO: 1853494 - RNA, 19 nt, Homo sapiens
  misc_RNA (1)...(19): siRNA sense strand
gaaaggaggcaaucucagu

SEQ ID NO: 1853495 - RNA, 19 nt, Homo sapiens
  misc_RNA (1)...(19): siRNA sense strand
caacaaagacacuccacaa

SEQ ID NO: 1853496 - RNA, 19 nt, Homo sapiens
  misc_RNA (1)...(19): siRNA sense strand
aaacacacauugaacagau

SEQ ID NO: 1853497 - RNA, 19 nt, Homo sapiens
  misc_RNA (1)...(19): siRNA sense strand
caacaagucaacuacauug

SEQ ID NO: 1853498 - RNA, 19 nt, Homo sapiens
  misc_RNA (1)...(19): siRNA sense strand
aguaagaguucaucauuug

SEQ ID NO: 1853499 - RNA, 19 nt, Homo sapiens
  misc_RNA (1)...(19): siRNA sense strand
aaucagagguaaagacaga

SEQ ID NO: 1853500 - RNA, 19 nt, Homo sapiens
  misc_RNA (1)...(19): siRNA sense strand
gaauguagagucagugguu

SEQ ID NO: 1853501 - RNA, 19 nt, Homo sapiens
  misc_RNA (1)...(19): siRNA sense strand
caagucaacuacauugcuu

SEQ ID NO: 1853502 - RNA, 19 nt, Homo sapiens
  misc_RNA (1)...(19): siRNA sense strand
caaacaaaccagcaaguug

SEQ ID NO: 1853503 - RNA, 19 nt, Homo sapiens
  misc_RNA (1)...(19): siRNA sense strand
gagcagagaacgagaaagu

SEQ ID NO: 1853504 - RNA, 19 nt, Homo sapiens
  misc_RNA (1)...(19): siRNA sense strand
cuucugaucuugcggauga

SEQ ID NO: 1853505 - RNA, 19 nt, Homo sapiens
  misc_RNA (1)...(19): siRNA sense strand
aaacagaggagcuuauaga

SEQ ID NO: 1853506 - RNA, 19 nt, Homo sapiens
  misc_RNA (1)...(19): siRNA sense strand
gaaauaauugcaacaugug

SEQ ID NO: 1853507 - RNA, 19 nt, Homo sapiens
  misc_RNA (1)...(19): siRNA sense strand
aagccuauguagacaaaua

SEQ ID NO: 1853508 - RNA, 19 nt, Homo sapiens
  misc_RNA (1)...(19): siRNA sense strand
cuacuaaaguggcaaaucu

SEQ ID NO: 1853509 - RNA, 19 nt, Homo sapiens
  misc_RNA (1)...(19): siRNA sense strand
caacuacauugcuucacaa

SEQ ID NO: 1853510 - RNA, 19 nt, Homo sapiens
  misc_RNA (1)...(19): siRNA sense strand
ggaaaugaucgguacagaa

SEQ ID NO: 1853511 - RNA, 19 nt, Homo sapiens
  misc_RNA (1)...(19): siRNA sense strand
guagacaguaguaacauuu

SEQ ID NO: 1853512 - RNA, 19 nt, Homo sapiens
  misc_RNA (1)...(19): siRNA sense strand
gcuaauugcuugaaaaguu

SEQ ID NO: 1853513 - RNA, 19 nt, Homo sapiens
  misc_RNA (1)...(19): siRNA sense strand
gguaaagacagauguaugu

SEQ ID NO: 1853514 - RNA, 19 nt, Homo sapiens
  misc_RNA (1)...(19): siRNA sense strand
caaaagaucucagccaaga

SEQ ID NO: 1853515 - RNA, 19 nt, Homo sapiens
  misc_RNA (1)...(19): siRNA sense strand
caccaucuccuaagaauga

SEQ ID NO: 1853516 - RNA, 19 nt, Homo sapiens
  misc_RNA (1)...(19): siRNA sense strand
aagagaaacugggaaagaa

SEQ ID NO: 1853517 - RNA, 19 nt, Homo sapiens
  misc_RNA (1)...(19): siRNA sense strand
gugacacacuguucugaaa

SEQ ID NO: 1853518 - RNA, 19 nt, Homo sapiens
  misc_RNA (1)...(19): siRNA sense strand
uauggagugugauucauuu

SEQ ID NO: 1853519 - RNA, 19 nt, Homo sapiens
  misc_RNA (1)...(19): siRNA sense strand
uguugaaacugaagaugua

SEQ ID NO: 1853520 - RNA, 19 nt, Homo sapiens
  misc_RNA (1)...(19): siRNA sense strand
caaaguguaccaaccugua

SEQ ID NO: 1853521 - RNA, 19 nt, Homo sapiens
  misc_RNA (1)...(19): siRNA sense strand
ggaagaaccugugucuacu

SEQ ID NO: 1853522 - RNA, 19 nt, Homo sapiens
  misc_RNA (1)...(19): siRNA sense strand
uaguaagaguggagaagua

SEQ ID NO: 1853523 - RNA, 19 nt, Homo sapiens
  misc_RNA (1)...(19): siRNA sense strand
gcagaaagcaaaguaagug

SEQ ID NO: 1853524 - RNA, 19 nt, Homo sapiens
  misc_RNA (1)...(19): siRNA sense strand
ucucagcuaccuauaaaua

SEQ ID NO: 1853525 - RNA, 19 nt, Homo sapiens
  misc_RNA (1)...(19): siRNA sense strand
gaaaaccagucugcuaauu

SEQ ID NO: 1853526 - RNA, 19 nt, Homo sapiens
  misc_RNA (1)...(19): siRNA sense strand
guaaugcagcaacaaauga

SEQ ID NO: 1853527 - RNA, 19 nt, Homo sapiens
  misc_RNA (1)...(19): siRNA sense strand
gagaaaggagaaccagaaa

SEQ ID NO: 1853528 - RNA, 19 nt, Homo sapiens
  misc_RNA (1)...(19): siRNA sense strand
gaagaucuagauuucauuc

SEQ ID NO: 1853529 - RNA, 19 nt, Homo sapiens
  misc_RNA (1)...(19): siRNA sense strand
aaaaggaggugauccauug

SEQ ID NO: 1853530 - RNA, 19 nt, Homo sapiens
  misc_RNA (1)...(19): siRNA sense strand
gcucgaagacagacaagaa

SEQ ID NO: 1853531 - RNA, 19 nt, Homo sapiens
  misc_RNA (1)...(19): siRNA sense strand
ucagcuaccuauaaauaug

SEQ ID NO: 1853532 - RNA, 19 nt, Homo sapiens
  misc_RNA (1)...(19): siRNA sense strand
ccagagaaacagaaugaaa

SEQ ID NO: 1853533 - RNA, 19 nt, Homo sapiens
  misc_RNA (1)...(19): siRNA sense strand
acagagaguucccuaguag

SEQ ID NO: 1853534 - RNA, 19 nt, Homo sapiens
  misc_RNA (1)...(19): siRNA sense strand
uaucuggacuuucacaauc

SEQ ID NO: 1853535 - RNA, 19 nt, Homo sapiens
  misc_RNA (1)...(19): siRNA sense strand
guacggaaagcaguagaua

SEQ ID NO: 1853536 - RNA, 19 nt, Homo sapiens
  misc_RNA (1)...(19): siRNA sense strand
ucaccaaggaagaauauaa

SEQ ID NO: 1853537 - RNA, 19 nt, Homo sapiens
  misc_RNA (1)...(19): siRNA sense strand
cuacauugcuucacaacca

SEQ ID NO: 1853538 - RNA, 19 nt, Homo sapiens
  misc_RNA (1)...(19): siRNA sense strand
caaauucugcugacaaaca

SEQ ID NO: 1853539 - RNA, 19 nt, Homo sapiens
  misc_RNA (1)...(19): siRNA sense strand
gaaagcaggaagucucaau

SEQ ID NO: 1853540 - RNA, 19 nt, Homo sapiens
  misc_RNA (1)...(19): siRNA sense strand
acucgaagaucuagauuuc

SEQ ID NO: 1853541 - RNA, 19 nt, Homo sapiens
  misc_RNA (1)...(19): siRNA sense strand
gaccgaacauccuagaucu

SEQ ID NO: 1853542 - RNA, 19 nt, Homo sapiens
  misc_RNA (1)...(19): siRNA sense strand
gugagaagcauacugcaaa

SEQ ID NO: 1853543 - RNA, 19 nt, Homo sapiens
  misc_RNA (1)...(19): siRNA sense strand
guucuucucauguaaguaa

SEQ ID NO: 1853544 - RNA, 19 nt, Homo sapiens
  misc_RNA (1)...(19): siRNA sense strand
gaaacaagaggaggaaaca

SEQ ID NO: 1853545 - RNA, 19 nt, Homo sapiens
  misc_RNA (1)...(19): siRNA sense strand
ucagggaauucaaacaguu

SEQ ID NO: 1853546 - RNA, 19 nt, Homo sapiens
  misc_RNA (1)...(19): siRNA sense strand
cauccuagaucuacagagu

SEQ ID NO: 1853547 - RNA, 19 nt, Homo sapiens
  misc_RNA (1)...(19): siRNA sense strand
uggaacagcaauccuauaa

SEQ ID NO: 1853548 - RNA, 19 nt, Homo sapiens
  misc_RNA (1)...(19): siRNA sense strand
ucaacuacauugcuucaca

SEQ ID NO: 1853549 - RNA, 19 nt, Homo sapiens
  misc_RNA (1)...(19): siRNA sense strand
gaaauacgggaaugguuca

SEQ ID NO: 1853550 - RNA, 19 nt, Homo sapiens
  misc_RNA (1)...(19): siRNA sense strand
uggcaaaucugguuaaagc

SEQ ID NO: 1853551 - RNA, 19 nt, Homo sapiens
  misc_RNA (1)...(19): siRNA sense strand
cgaagacagacaagaaauu

SEQ ID NO: 1853552 - RNA, 19 nt, Homo sapiens
  misc_RNA (1)...(19): siRNA sense strand
caaaugggacugucaauua

SEQ ID NO: 1853553 - RNA, 19 nt, Homo sapiens
  misc_RNA (1)...(19): siRNA sense strand
gacccaagcucuuucauuu

SEQ ID NO: 1853554 - RNA, 19 nt, Homo sapiens
  misc_RNA (1)...(19): siRNA sense strand
ccagaacucuccuauauau

SEQ ID NO: 1853555 - RNA, 19 nt, Homo sapiens
  misc_RNA (1)...(19): siRNA sense strand
gaagacaucuguuaaagac

SEQ ID NO: 1853556 - RNA, 19 nt, Homo sapiens
  misc_RNA (1)...(19): siRNA sense strand
aaagaaugauggugagaua

SEQ ID NO: 1853557 - RNA, 19 nt, Homo sapiens
  misc_RNA (1)...(19): siRNA sense strand
gacgaacccuggaggauaa

SEQ ID NO: 1853558 - RNA, 19 nt, Homo sapiens
  misc_RNA (1)...(19): siRNA sense strand
gaagaacggcuacccauug

SEQ ID NO: 1853559 - RNA, 19 nt, Homo sapiens
  misc_RNA (1)...(19): siRNA sense strand
aaagaaggauguacuguau

SEQ ID NO: 1853560 - RNA, 19 nt, Homo sapiens
  misc_RNA (1)...(19): siRNA sense strand
ucaaggagguucaucaaga

SEQ ID NO: 1853561 - RNA, 19 nt, Homo sapiens
  misc_RNA (1)...(19): siRNA sense strand
ucaacaaccucgugacuug

SEQ ID NO: 1853562 - RNA, 19 nt, Homo sapiens
  misc_RNA (1)...(19): siRNA sense strand
gagaagacaucuguuaaag

SEQ ID NO: 1853563 - RNA, 19 nt, Homo sapiens
  misc_RNA (1)...(19): siRNA sense strand
ggagaagacaucuguuaaa

SEQ ID NO: 1853564 - RNA, 19 nt, Homo sapiens
  misc_RNA (1)...(19): siRNA sense strand
caaggagguucaucaagaa

SEQ ID NO: 1853565 - RNA, 19 nt, Homo sapiens
  misc_RNA (1)...(19): siRNA sense strand
gaaaguaguccagcaaaga

SEQ ID NO: 1853566 - RNA, 19 nt, Homo sapiens
  misc_RNA (1)...(19): siRNA sense strand
caaagaaggauguacugua

SEQ ID NO: 1853567 - RNA, 19 nt, Homo sapiens
  misc_RNA (1)...(19): siRNA sense strand
agagggaacuacaggauaa

SEQ ID NO: 1853568 - RNA, 19 nt, Homo sapiens
  misc_RNA (1)...(19): siRNA sense strand
gaauggacgaugaggauaa

SEQ ID NO: 1853569 - RNA, 19 nt, Homo sapiens
  misc_RNA (1)...(19): siRNA sense strand
gaacgaauugcauuggaaa

SEQ ID NO: 1853570 - RNA, 19 nt, Homo sapiens
  misc_RNA (1)...(19): siRNA sense strand
gaagaaggccauucaaacu

SEQ ID NO: 1853571 - RNA, 19 nt, Homo sapiens
  misc_RNA (1)...(19): siRNA sense strand
gaacagcgcgaguacuaug

SEQ ID NO: 1853572 - RNA, 19 nt, Homo sapiens
  misc_RNA (1)...(19): siRNA sense strand
gagcagcgcagaacagaug

SEQ ID NO: 1853573 - RNA, 19 nt, Homo sapiens
  misc_RNA (1)...(19): siRNA sense strand
agaaggauguacuguauuc

SEQ ID NO: 1853574 - RNA, 19 nt, Homo sapiens
  misc_RNA (1)...(19): siRNA sense strand
aaaugggacugucaauuau

SEQ ID NO: 1853575 - RNA, 19 nt, Homo sapiens
  misc_RNA (1)...(19): siRNA sense strand
uuccagaacucuccuauau

SEQ ID NO: 1853576 - RNA, 19 nt, Homo sapiens
  misc_RNA (1)...(19): siRNA sense strand
gagagggaacuacaggaua

SEQ ID NO: 1853577 - RNA, 19 nt, Homo sapiens
  misc_RNA (1)...(19): siRNA sense strand
gcaucaggcuucccuuauc

SEQ ID NO: 1853578 - RNA, 19 nt, Homo sapiens
  misc_RNA (1)...(19): siRNA sense strand
gaacuucuucaccaaauca

SEQ ID NO: 1853579 - RNA, 19 nt, Homo sapiens
  misc_RNA (1)...(19): siRNA sense strand
aaucaaagcuuuccauucc

SEQ ID NO: 1853580 - RNA, 19 nt, Homo sapiens
  misc_RNA (1)...(19): siRNA sense strand
ggaagaacggcuacccauu

SEQ ID NO: 1853581 - RNA, 19 nt, Homo sapiens
  misc_RNA (1)...(19): siRNA sense strand
caaugaagccuuaccaaag

SEQ ID NO: 1853582 - RNA, 19 nt, Homo sapiens
  misc_RNA (1)...(19): siRNA sense strand
uaccaagucaggauuguua

SEQ ID NO: 1853583 - RNA, 19 nt, Homo sapiens
  misc_RNA (1)...(19): siRNA sense strand
cgacgaacccuggaggaua

SEQ ID NO: 1853584 - RNA, 19 nt, Homo sapiens
  misc_RNA (1)...(19): siRNA sense strand
ucaaacugcuauccgcaaa

SEQ ID NO: 1853585 - RNA, 19 nt, Homo sapiens
  misc_RNA (1)...(19): siRNA sense strand
gguucagauuccauauuua

SEQ ID NO: 1853586 - RNA, 19 nt, Homo sapiens
  misc_RNA (1)...(19): siRNA sense strand
cauagaagaggccaugaaa

SEQ ID NO: 1853587 - RNA, 19 nt, Homo sapiens
  misc_RNA (1)...(19): siRNA sense strand
ugaguucugugcugcguuu

SEQ ID NO: 1853588 - RNA, 19 nt, Homo sapiens
  misc_RNA (1)...(19): siRNA sense strand
cccaagcucuuucauuuca

SEQ ID NO: 1853589 - RNA, 19 nt, Homo sapiens
  misc_RNA (1)...(19): siRNA sense strand
ucaaugaagccuuaccaaa

SEQ ID NO: 1853590 - RNA, 19 nt, Homo sapiens
  misc_RNA (1)...(19): siRNA sense strand
cagaagaaggccauucaaa

SEQ ID NO: 1853591 - RNA, 19 nt, Homo sapiens
  misc_RNA (1)...(19): siRNA sense strand
gcagaaaguaguccagcaa

SEQ ID NO: 1853592 - RNA, 19 nt, Homo sapiens
  misc_RNA (1)...(19): siRNA sense strand
gaggauaaacagcaggaaa

SEQ ID NO: 1853593 - RNA, 19 nt, Homo sapiens
  misc_RNA (1)...(19): siRNA sense strand
uacuaucaaugaagccuua

SEQ ID NO: 1853594 - RNA, 19 nt, Homo sapiens
  misc_RNA (1)...(19): siRNA sense strand
caaaucaaagcuuuccauu

SEQ ID NO: 1853595 - RNA, 19 nt, Homo sapiens
  misc_RNA (1)...(19): siRNA sense strand
uaaccaggauguaacuagu

SEQ ID NO: 1853596 - RNA, 19 nt, Homo sapiens
  misc_RNA (1)...(19): siRNA sense strand
aagaacagcgcgaguacua

SEQ ID NO: 1853597 - RNA, 19 nt, Homo sapiens
  misc_RNA (1)...(19): siRNA sense strand
agguucagauuccauauuu

SEQ ID NO: 1853598 - RNA, 19 nt, Homo sapiens
  misc_RNA (1)...(19): siRNA sense strand
agacaucuguuaaagacau

SEQ ID NO: 1853599 - RNA, 19 nt, Homo sapiens
  misc_RNA (1)...(19): siRNA sense strand
uggcucggcugaacaguga

SEQ ID NO: 1853600 - RNA, 19 nt, Homo sapiens
  misc_RNA (1)...(19): siRNA sense strand
ccuuggaucugaauaaagu

SEQ ID NO: 1853601 - RNA, 19 nt, Homo sapiens
  misc_RNA (1)...(19): siRNA sense strand
cagcaacucccaaggauuc

SEQ ID NO: 1853602 - RNA, 19 nt, Homo sapiens
  misc_RNA (1)...(19): siRNA sense strand
ggauguaacuagugaugac

SEQ ID NO: 1853603 - RNA, 19 nt, Homo sapiens
  misc_RNA (1)...(19): siRNA sense strand
ucaaaagaauggacgauga

SEQ ID NO: 1853604 - RNA, 19 nt, Homo sapiens
  misc_RNA (1)...(19): siRNA sense strand
agaacgaauugcauuggaa

SEQ ID NO: 1853605 - RNA, 19 nt, Homo sapiens
  misc_RNA (1)...(19): siRNA sense strand
caaagcccauucguaggaa

SEQ ID NO: 1853606 - RNA, 19 nt, Homo sapiens
  misc_RNA (1)...(19): siRNA sense strand
ucaaagcccauucguagga

SEQ ID NO: 1853607 - RNA, 19 nt, Homo sapiens
  misc_RNA (1)...(19): siRNA sense strand
cagaagaacagcgcgagua

SEQ ID NO: 1853608 - RNA, 19 nt, Homo sapiens
  misc_RNA (1)...(19): siRNA sense strand
gaaugauggugagauacga

SEQ ID NO: 1853609 - RNA, 19 nt, Homo sapiens
  misc_RNA (1)...(19): siRNA sense strand
gaggauaacagaagaacag

SEQ ID NO: 1853610 - RNA, 19 nt, Homo sapiens
  misc_RNA (1)...(19): siRNA sense strand
ggacgugucugaggaucca

SEQ ID NO: 1853611 - RNA, 19 nt, Homo sapiens
  misc_RNA (1)...(19): siRNA sense strand
ccaaaugggacugucaauu

SEQ ID NO: 1853612 - RNA, 19 nt, Homo sapiens
  misc_RNA (1)...(19): siRNA sense strand
ggagagggaacuacaggau

SEQ ID NO: 1853613 - RNA, 19 nt, Homo sapiens
  misc_RNA (1)...(19): siRNA sense strand
ggaucugaauaaagucuuc

SEQ ID NO: 1853614 - RNA, 19 nt, Homo sapiens
  misc_RNA (1)...(19): siRNA sense strand
aaaguaguccagcaaagaa

SEQ ID NO: 1853615 - RNA, 19 nt, Homo sapiens
  misc_RNA (1)...(19): siRNA sense strand
gcaaagaaggauguacugu

SEQ ID NO: 1853616 - RNA, 19 nt, Homo sapiens
  misc_RNA (1)...(19): siRNA sense strand
gcuuagugaugcugacugu

SEQ ID NO: 1853617 - RNA, 19 nt, Homo sapiens
  misc_RNA (1)...(19): siRNA sense strand
uaacuagugaugacaaaca

SEQ ID NO: 1853618 - RNA, 19 nt, Homo sapiens
  misc_RNA (1)...(19): siRNA sense strand
gcucaaggagguucaucaa

SEQ ID NO: 1853619 - RNA, 19 nt, Homo sapiens
  misc_RNA (1)...(19): siRNA sense strand
uaccaaaggacgugucuga

SEQ ID NO: 1853620 - RNA, 19 nt, Homo sapiens
  misc_RNA (1)...(19): siRNA sense strand
agacauggcugaccuuccu

SEQ ID NO: 1853621 - RNA, 19 nt, Homo sapiens
  misc_RNA (1)...(19): siRNA sense strand
gcauccagcaccuuaugaa

SEQ ID NO: 1853622 - RNA, 19 nt, Homo sapiens
  misc_RNA (1)...(19): siRNA sense strand
ucucaaagcaagaccaaga

SEQ ID NO: 1853623 - RNA, 19 nt, Homo sapiens
  misc_RNA (1)...(19): siRNA sense strand
gcgaguacuaugucaauca

SEQ ID NO: 1853624 - RNA, 19 nt, Homo sapiens
  misc_RNA (1)...(19): siRNA sense strand
ucaagaacgaauugcauug

SEQ ID NO: 1853625 - RNA, 19 nt, Homo sapiens
  misc_RNA (1)...(19): siRNA sense strand
uggagaagacaucuguuaa

SEQ ID NO: 1853626 - RNA, 19 nt, Homo sapiens
  misc_RNA (1)...(19): siRNA sense strand
gauggugagauacgauuug

SEQ ID NO: 1853627 - RNA, 19 nt, Homo sapiens
  misc_RNA (1)...(19): siRNA sense strand
augggacugucaauuauuu

SEQ ID NO: 1853628 - RNA, 19 nt, Homo sapiens
  misc_RNA (1)...(19): siRNA sense strand
aguacuaugucaaucaguu

SEQ ID NO: 1853629 - RNA, 19 nt, Homo sapiens
  misc_RNA (1)...(19): siRNA sense strand
gcaggcagcuuuuccuaag

SEQ ID NO: 1853630 - RNA, 19 nt, Homo sapiens
  misc_RNA (1)...(19): siRNA sense strand
gaaaaccaagcuacagaaa

SEQ ID NO: 1853631 - RNA, 19 nt, Homo sapiens
  misc_RNA (1)...(19): siRNA sense strand
cuaagguucagauuccaua

SEQ ID NO: 1853632 - RNA, 19 nt, Homo sapiens
  misc_RNA (1)...(19): siRNA sense strand
gcaagaccaagauccagau

SEQ ID NO: 1853633 - RNA, 19 nt, Homo sapiens
  misc_RNA (1)...(19): siRNA sense strand
uguaacuagugaugacaaa

SEQ ID NO: 1853634 - RNA, 19 nt, Homo sapiens
  misc_RNA (1)...(19): siRNA sense strand
cugagucacugccggcaaa

SEQ ID NO: 1853635 - RNA, 19 nt, Homo sapiens
  misc_RNA (1)...(19): siRNA sense strand
uuagugaugcugacuguga

SEQ ID NO: 1853636 - RNA, 19 nt, Homo sapiens
  misc_RNA (1)...(19): siRNA sense strand
aauggacgaugaggauaaa

SEQ ID NO: 1853637 - RNA, 19 nt, Homo sapiens
  misc_RNA (1)...(19): siRNA sense strand
caugaaaccgcauccaaca

SEQ ID NO: 1853638 - RNA, 19 nt, Homo sapiens
  misc_RNA (1)...(19): siRNA sense strand
agaaaguaguccagcaaag

SEQ ID NO: 1853639 - RNA, 19 nt, Homo sapiens
  misc_RNA (1)...(19): siRNA sense strand
uccuauauaugggagcuua

SEQ ID NO: 1853640 - RNA, 19 nt, Homo sapiens
  misc_RNA (1)...(19): siRNA sense strand
aagaacgaauugcauugga

SEQ ID NO: 1853641 - RNA, 19 nt, Homo sapiens
  misc_RNA (1)...(19): siRNA sense strand
cagaaaguaguccagcaaa

SEQ ID NO: 1853642 - RNA, 19 nt, Homo sapiens
  misc_RNA (1)...(19): siRNA sense strand
ggauaaacagcaggaaaca

SEQ ID NO: 1853643 - RNA, 19 nt, Homo sapiens
  misc_RNA (1)...(19): siRNA sense strand
cggcaucaggcuucccuua

SEQ ID NO: 1853644 - RNA, 19 nt, Homo sapiens
  misc_RNA (1)...(19): siRNA sense strand
agaagacaucuguuaaaga

SEQ ID NO: 1853645 - RNA, 19 nt, Homo sapiens
  misc_RNA (1)...(19): siRNA sense strand
ugaaucggauggagaagac

SEQ ID NO: 1853646 - RNA, 19 nt, Homo sapiens
  misc_RNA (1)...(19): siRNA sense strand
caacaaccucgugacuuga

SEQ ID NO: 1853647 - RNA, 19 nt, Homo sapiens
  misc_RNA (1)...(19): siRNA sense strand
gcgcgaguacuaugucaau

SEQ ID NO: 1853648 - RNA, 19 nt, Homo sapiens
  misc_RNA (1)...(19): siRNA sense strand
aaagcagucuuccaaacag

SEQ ID NO: 1853649 - RNA, 19 nt, Homo sapiens
  misc_RNA (1)...(19): siRNA sense strand
ccaucaaagcccauucgua

SEQ ID NO: 1853650 - RNA, 19 nt, Homo sapiens
  misc_RNA (1)...(19): siRNA sense strand
auaaacagcaggaaacaca

SEQ ID NO: 1853651 - RNA, 19 nt, Homo sapiens
  misc_RNA (1)...(19): siRNA sense strand
aaacacagucucccacgau

SEQ ID NO: 1853652 - RNA, 19 nt, Homo sapiens
  misc_RNA (1)...(19): siRNA sense strand
gaaaccaacucucuuaaga

SEQ ID NO: 1853653 - RNA, 19 nt, Homo sapiens
  misc_RNA (1)...(19): siRNA sense strand
guagaacacugacuuacua

SEQ ID NO: 1853654 - RNA, 19 nt, Homo sapiens
  misc_RNA (1)...(19): siRNA sense strand
guuagaagaucgaaucaua

SEQ ID NO: 1853655 - RNA, 19 nt, Homo sapiens
  misc_RNA (1)...(19): siRNA sense strand
caacaacaaccaagaauaa

SEQ ID NO: 1853656 - RNA, 19 nt, Homo sapiens
  misc_RNA (1)...(19): siRNA sense strand
ggauagccauguucucaua

SEQ ID NO: 1853657 - RNA, 19 nt, Homo sapiens
  misc_RNA (1)...(19): siRNA sense strand
gaaagacagugacauuaca

SEQ ID NO: 1853658 - RNA, 19 nt, Homo sapiens
  misc_RNA (1)...(19): siRNA sense strand
gaagagaugaugaugauga

SEQ ID NO: 1853659 - RNA, 19 nt, Homo sapiens
  misc_RNA (1)...(19): siRNA sense strand
ccagaagaguggaaaguaa

SEQ ID NO: 1853660 - RNA, 19 nt, Homo sapiens
  misc_RNA (1)...(19): siRNA sense strand
gggcaaagcugaccaugca

SEQ ID NO: 1853661 - RNA, 19 nt, Homo sapiens
  misc_RNA (1)...(19): siRNA sense strand
caauagggauuucugaaga

SEQ ID NO: 1853662 - RNA, 19 nt, Homo sapiens
  misc_RNA (1)...(19): siRNA sense strand
ugagaaagguguagaagau

SEQ ID NO: 1853663 - RNA, 19 nt, Homo sapiens
  misc_RNA (1)...(19): siRNA sense strand
ggaaagagcaacccgaaga

SEQ ID NO: 1853664 - RNA, 19 nt, Homo sapiens
  misc_RNA (1)...(19): siRNA sense strand
uggaugagcuacaggauaa

SEQ ID NO: 1853665 - RNA, 19 nt, Homo sapiens
  misc_RNA (1)...(19): siRNA sense strand
ucacaauguuccuccuuua

SEQ ID NO: 1853666 - RNA, 19 nt, Homo sapiens
  misc_RNA (1)...(19): siRNA sense strand
gaaagguaaugaaggugaa

SEQ ID NO: 1853667 - RNA, 19 nt, Homo sapiens
  misc_RNA (1)...(19): siRNA sense strand
cagcagcaauggcuuguuu

SEQ ID NO: 1853668 - RNA, 19 nt, Homo sapiens
  misc_RNA (1)...(19): siRNA sense strand
gcaugacaguggagaauau

SEQ ID NO: 1853669 - RNA, 19 nt, Homo sapiens
  misc_RNA (1)...(19): siRNA sense strand
ccagguuggugaaacaaua

SEQ ID NO: 1853670 - RNA, 19 nt, Homo sapiens
  misc_RNA (1)...(19): siRNA sense strand
ggcagaagcaggccauuua

SEQ ID NO: 1853671 - RNA, 19 nt, Homo sapiens
  misc_RNA (1)...(19): siRNA sense strand
gugaagagaugaugaugau

SEQ ID NO: 1853672 - RNA, 19 nt, Homo sapiens
  misc_RNA (1)...(19): siRNA sense strand
cuacauccuugaccugaua

SEQ ID NO: 1853673 - RNA, 19 nt, Homo sapiens
  misc_RNA (1)...(19): siRNA sense strand
guagaagaguaggcacuua

SEQ ID NO: 1853674 - RNA, 19 nt, Homo sapiens
  misc_RNA (1)...(19): siRNA sense strand
gcaggagucuaggaaguuu

SEQ ID NO: 1853675 - RNA, 19 nt, Homo sapiens
  misc_RNA (1)...(19): siRNA sense strand
gggcgaaacugcuggugaa

SEQ ID NO: 1853676 - RNA, 19 nt, Homo sapiens
  misc_RNA (1)...(19): siRNA sense strand
ggcaguaacauauuugaua

SEQ ID NO: 1853677 - RNA, 19 nt, Homo sapiens
  misc_RNA (1)...(19): siRNA sense strand
agaagaaugugaagaugaa

SEQ ID NO: 1853678 - RNA, 19 nt, Homo sapiens
  misc_RNA (1)...(19): siRNA sense strand
ccucaucggugucuucauu

SEQ ID NO: 1853679 - RNA, 19 nt, Homo sapiens
  misc_RNA (1)...(19): siRNA sense strand
uaaugaaggugaaacugaa

SEQ ID NO: 1853680 - RNA, 19 nt, Homo sapiens
  misc_RNA (1)...(19): siRNA sense strand
gaaaugaaagguaaugaag

SEQ ID NO: 1853681 - RNA, 19 nt, Homo sapiens
  misc_RNA (1)...(19): siRNA sense strand
gaagcaacacugagcauga

SEQ ID NO: 1853682 - RNA, 19 nt, Homo sapiens
  misc_RNA (1)...(19): siRNA sense strand
ucaauugcgucauguaaau

SEQ ID NO: 1853683 - RNA, 19 nt, Homo sapiens
  misc_RNA (1)...(19): siRNA sense strand
ggagaagaaugugaagaug

SEQ ID NO: 1853684 - RNA, 19 nt, Homo sapiens
  misc_RNA (1)...(19): siRNA sense strand
gcaaacgucuugacuucuc

SEQ ID NO: 1853685 - RNA, 19 nt, Homo sapiens
  misc_RNA (1)...(19): siRNA sense strand
ccaaggagcgucauggaaa

SEQ ID NO: 1853686 - RNA, 19 nt, Homo sapiens
  misc_RNA (1)...(19): siRNA sense strand
guaaugaaggugaaacuga

SEQ ID NO: 1853687 - RNA, 19 nt, Homo sapiens
  misc_RNA (1)...(19): siRNA sense strand
gagaagaaugugaagauga

SEQ ID NO: 1853688 - RNA, 19 nt, Homo sapiens
  misc_RNA (1)...(19): siRNA sense strand
agaagauggugaaaugaaa

SEQ ID NO: 1853689 - RNA, 19 nt, Homo sapiens
  misc_RNA (1)...(19): siRNA sense strand
gaaacaagccaugcgauca

SEQ ID NO: 1853690 - RNA, 19 nt, Homo sapiens
  misc_RNA (1)...(19): siRNA sense strand
uuugugaucucuucaauug

SEQ ID NO: 1853691 - RNA, 19 nt, Homo sapiens
  misc_RNA (1)...(19): siRNA sense strand
caaccacucucaagggaau

SEQ ID NO: 1853692 - RNA, 19 nt, Homo sapiens
  misc_RNA (1)...(19): siRNA sense strand
aaaccuagcuccgaaaugg

SEQ ID NO: 1853693 - RNA, 19 nt, Homo sapiens
  misc_RNA (1)...(19): siRNA sense strand
gcagcagucucuucucauc

SEQ ID NO: 1853694 - RNA, 19 nt, Homo sapiens
  misc_RNA (1)...(19): siRNA sense strand
ggccaaagcagaaagcaaa

SEQ ID NO: 1853695 - RNA, 19 nt, Homo sapiens
  misc_RNA (1)...(19): siRNA sense strand
gggcagcagucucuucuca

SEQ ID NO: 1853696 - RNA, 19 nt, Homo sapiens
  misc_RNA (1)...(19): siRNA sense strand
aagcaaacgucuugacuuc

SEQ ID NO: 1853697 - RNA, 19 nt, Homo sapiens
  misc_RNA (1)...(19): siRNA sense strand
gcagaaagcaaaccagaag

SEQ ID NO: 1853698 - RNA, 19 nt, Homo sapiens
  misc_RNA (1)...(19): siRNA sense strand
aaucauauccuguccugua

SEQ ID NO: 1853699 - RNA, 19 nt, Homo sapiens
  misc_RNA (1)...(19): siRNA sense strand
cgcagaagauggugaaaug

SEQ ID NO: 1853700 - RNA, 19 nt, Homo sapiens
  misc_RNA (1)...(19): siRNA sense strand
ucaagcagacaaauaguaa

SEQ ID NO: 1853701 - RNA, 19 nt, Homo sapiens
  misc_RNA (1)...(19): siRNA sense strand
gguagaagcaaacgucuug

SEQ ID NO: 1853702 - RNA, 19 nt, Homo sapiens
  misc_RNA (1)...(19): siRNA sense strand
ccaacaacaaccaagaaua

SEQ ID NO: 1853703 - RNA, 19 nt, Homo sapiens
  misc_RNA (1)...(19): siRNA sense strand
caaugaaggugaagaugag

SEQ ID NO: 1853704 - RNA, 19 nt, Homo sapiens
  misc_RNA (1)...(19): siRNA sense strand
caaaacagccccagccaua

SEQ ID NO: 1853705 - RNA, 19 nt, Homo sapiens
  misc_RNA (1)...(19): siRNA sense strand
gaagcaaacgucuugacuu

SEQ ID NO: 1853706 - RNA, 19 nt, Homo sapiens
  misc_RNA (1)...(19): siRNA sense strand
gacauuacagcaaccuaua

SEQ ID NO: 1853707 - RNA, 19 nt, Homo sapiens
  misc_RNA (1)...(19): siRNA sense strand
caauguuccuccuuuacuu

SEQ ID NO: 1853708 - RNA, 19 nt, Homo sapiens
  misc_RNA (1)...(19): siRNA sense strand
gaaggcaggagucuaggaa

SEQ ID NO: 1853709 - RNA, 19 nt, Homo sapiens
  misc_RNA (1)...(19): siRNA sense strand
gggaaaaggugaaguauac

SEQ ID NO: 1853710 - RNA, 19 nt, Homo sapiens
  misc_RNA (1)...(19): siRNA sense strand
guaaauggagaaugaacaa

SEQ ID NO: 1853711 - RNA, 19 nt, Homo sapiens
  misc_RNA (1)...(19): siRNA sense strand
cgaaacugcuggugaaggu

SEQ ID NO: 1853712 - RNA, 19 nt, Homo sapiens
  misc_RNA (1)...(19): siRNA sense strand
cacaugagguagaagcaaa

SEQ ID NO: 1853713 - RNA, 19 nt, Homo sapiens
  misc_RNA (1)...(19): siRNA sense strand
gugaaagacagugacauua

SEQ ID NO: 1853714 - RNA, 19 nt, Homo sapiens
  misc_RNA (1)...(19): siRNA sense strand
gaaacugaaacacaaggaa

SEQ ID NO: 1853715 - RNA, 19 nt, Homo sapiens
  misc_RNA (1)...(19): siRNA sense strand
gcagcaggcacaucaauuc

SEQ ID NO: 1853716 - RNA, 19 nt, Homo sapiens
  misc_RNA (1)...(19): siRNA sense strand
gggcagugaugaagcaaca

SEQ ID NO: 1853717 - RNA, 19 nt, Homo sapiens
  misc_RNA (1)...(19): siRNA sense strand
caacauucucuuugucauu

SEQ ID NO: 1853718 - RNA, 19 nt, Homo sapiens
  misc_RNA (1)...(19): siRNA sense strand
gcacccagcaccucaacaa

SEQ ID NO: 1853719 - RNA, 19 nt, Homo sapiens
  misc_RNA (1)...(19): siRNA sense strand
ucuggaggcuggcaaagaa

SEQ ID NO: 1853720 - RNA, 19 nt, Homo sapiens
  misc_RNA (1)...(19): siRNA sense strand
caacuuuucugacacauga

SEQ ID NO: 1853721 - RNA, 19 nt, Homo sapiens
  misc_RNA (1)...(19): siRNA sense strand
ucagugugauguuagaaga

SEQ ID NO: 1853722 - RNA, 19 nt, Homo sapiens
  misc_RNA (1)...(19): siRNA sense strand
gucgggaccucuccaguga

SEQ ID NO: 1853723 - RNA, 19 nt, Homo sapiens
  misc_RNA (1)...(19): siRNA sense strand
cagaagauggugaaaugaa

SEQ ID NO: 1853724 - RNA, 19 nt, Homo sapiens
  misc_RNA (1)...(19): siRNA sense strand
gauguuagaagaucgaauc

SEQ ID NO: 1853725 - RNA, 19 nt, Homo sapiens
  misc_RNA (1)...(19): siRNA sense strand
caagcucugugggcaguaa

SEQ ID NO: 1853726 - RNA, 19 nt, Homo sapiens
  misc_RNA (1)...(19): siRNA sense strand
ccauuuaccucuuccuucu

SEQ ID NO: 1853727 - RNA, 19 nt, Homo sapiens
  misc_RNA (1)...(19): siRNA sense strand
caacagugaaagacaguga

SEQ ID NO: 1853728 - RNA, 19 nt, Homo sapiens
  misc_RNA (1)...(19): siRNA sense strand
gauggugaaaugaaaggua

SEQ ID NO: 1853729 - RNA, 19 nt, Homo sapiens
  misc_RNA (1)...(19): siRNA sense strand
aaacugaaacacaaggaaa

SEQ ID NO: 1853730 - RNA, 19 nt, Homo sapiens
  misc_RNA (1)...(19): siRNA sense strand
cgagagcacaggugaaaug

SEQ ID NO: 1853731 - RNA, 19 nt, Homo sapiens
  misc_RNA (1)...(19): siRNA sense strand
ggucauggccuuagaagac

SEQ ID NO: 1853732 - RNA, 19 nt, Homo sapiens
  misc_RNA (1)...(19): siRNA sense strand
cagacaagcugcagaucuc

SEQ ID NO: 1853733 - RNA, 19 nt, Homo sapiens
  misc_RNA (1)...(19): siRNA sense strand
aagaugaucccaacaacaa

SEQ ID NO: 1853734 - RNA, 19 nt, Homo sapiens
  misc_RNA (1)...(19): siRNA sense strand
gcaggccauuuaccucuuc

SEQ ID NO: 1853735 - RNA, 19 nt, Homo sapiens
  misc_RNA (1)...(19): siRNA sense strand
aaugaaagguaaugaaggu

SEQ ID NO: 1853736 - RNA, 19 nt, Homo sapiens
  misc_RNA (1)...(19): siRNA sense strand
aggugaaacugaagagaaa

SEQ ID NO: 1853737 - RNA, 19 nt, Homo sapiens
  misc_RNA (1)...(19): siRNA sense strand
gccuaugccuucuaugugu

SEQ ID NO: 1853738 - RNA, 19 nt, Homo sapiens
  misc_RNA (1)...(19): siRNA sense strand
gaaagaaggaaggaagaca

SEQ ID NO: 1853739 - RNA, 19 nt, Homo sapiens
  misc_RNA (1)...(19): siRNA sense strand
acaaugaaggugaagauga

SEQ ID NO: 1853740 - RNA, 19 nt, Homo sapiens
  misc_RNA (1)...(19): siRNA sense strand
ggugaaacaauagggauuu

SEQ ID NO: 1853741 - RNA, 19 nt, Homo sapiens
  misc_RNA (1)...(19): siRNA sense strand
acugcugccuggagucuua

SEQ ID NO: 1853742 - RNA, 19 nt, Homo sapiens
  misc_RNA (1)...(19): siRNA sense strand
guuccuccuuuacuuugua

SEQ ID NO: 1853743 - RNA, 19 nt, Homo sapiens
  misc_RNA (1)...(19): siRNA sense strand
gaaauccacgcagaagaug

SEQ ID NO: 1853744 - RNA, 19 nt, Homo sapiens
  misc_RNA (1)...(19): siRNA sense strand
ugaaguggaacaagcauau

SEQ ID NO: 1853745 - RNA, 19 nt, Homo sapiens
  misc_RNA (1)...(19): siRNA sense strand
ugauaaugcucauccucuu

SEQ ID NO: 1853746 - RNA, 19 nt, Homo sapiens
  misc_RNA (1)...(19): siRNA sense strand
gggcauugguaccauugug

SEQ ID NO: 1853747 - RNA, 19 nt, Homo sapiens
  misc_RNA (1)...(19): siRNA sense strand
gauccugggcuucacaaug

SEQ ID NO: 1853748 - RNA, 19 nt, Homo sapiens
  misc_RNA (1)...(19): siRNA sense strand
ugugggcaguaacauauuu

SEQ ID NO: 1853749 - RNA, 19 nt, Homo sapiens
  misc_RNA (1)...(19): siRNA sense strand
gaagauggugaaaugaaag

SEQ ID NO: 1853750 - RNA, 19 nt, Homo sapiens
  misc_RNA (1)...(19): siRNA sense strand
gcagaagauggugaaauga

SEQ ID NO: 1853751 - RNA, 19 nt, Homo sapiens
  misc_RNA (1)...(19): siRNA sense strand
aaacaauagggauuucuga

SEQ ID NO: 1853752 - RNA, 19 nt, Homo sapiens
  misc_RNA (1)...(19): siRNA sense strand
caaccaagcuauugaguua

SEQ ID NO: 1853753 - RNA, 19 nt, Homo sapiens
  misc_RNA (1)...(19): siRNA sense strand
gaaaggauuugguggaauu

SEQ ID NO: 1853754 - RNA, 19 nt, Homo sapiens
  misc_RNA (1)...(19): siRNA sense strand
ggaacugcaucuaacauua

SEQ ID NO: 1853755 - RNA, 19 nt, Homo sapiens
  misc_RNA (1)...(19): siRNA sense strand
caaauggucugguuguaua

SEQ ID NO: 1853756 - RNA, 19 nt, Homo sapiens
  misc_RNA (1)...(19): siRNA sense strand
gaauguggcuggucuaguu

SEQ ID NO: 1853757 - RNA, 19 nt, Homo sapiens
  misc_RNA (1)...(19): siRNA sense strand
gaucagagguuacaaucaa

SEQ ID NO: 1853758 - RNA, 19 nt, Homo sapiens
  misc_RNA (1)...(19): siRNA sense strand
gaacuaagucaaucugaua

SEQ ID NO: 1853759 - RNA, 19 nt, Homo sapiens
  misc_RNA (1)...(19): siRNA sense strand
gagaaguccugcacaaauu

SEQ ID NO: 1853760 - RNA, 19 nt, Homo sapiens
  misc_RNA (1)...(19): siRNA sense strand
ucaagaagcucauuaagag

SEQ ID NO: 1853761 - RNA, 19 nt, Homo sapiens
  misc_RNA (1)...(19): siRNA sense strand
ugagauauguucuucauug

SEQ ID NO: 1853762 - RNA, 19 nt, Homo sapiens
  misc_RNA (1)...(19): siRNA sense strand
gaacaauuguaacagaaga

SEQ ID NO: 1853763 - RNA, 19 nt, Homo sapiens
  misc_RNA (1)...(19): siRNA sense strand
gaacugcaucuaacauuaa

SEQ ID NO: 1853764 - RNA, 19 nt, Homo sapiens
  misc_RNA (1)...(19): siRNA sense strand
caagaagggucucaguuug

SEQ ID NO: 1853765 - RNA, 19 nt, Homo sapiens
  misc_RNA (1)...(19): siRNA sense strand
aaugggagcuguagaaauu

SEQ ID NO: 1853766 - RNA, 19 nt, Homo sapiens
  misc_RNA (1)...(19): siRNA sense strand
caaaguaccuccaaauggu

SEQ ID NO: 1853767 - RNA, 19 nt, Homo sapiens
  misc_RNA (1)...(19): siRNA sense strand
gcacuacuuucagaugaua

SEQ ID NO: 1853768 - RNA, 19 nt, Homo sapiens
  misc_RNA (1)...(19): siRNA sense strand
gaaccuuucaaaccaauua

SEQ ID NO: 1853769 - RNA, 19 nt, Homo sapiens
  misc_RNA (1)...(19): siRNA sense strand
ggacgauacuuugaugaaa

SEQ ID NO: 1853770 - RNA, 19 nt, Homo sapiens
  misc_RNA (1)...(19): siRNA sense strand
gaaauucauucaagagaag

SEQ ID NO: 1853771 - RNA, 19 nt, Homo sapiens
  misc_RNA (1)...(19): siRNA sense strand
caagagaaguccugcacaa

SEQ ID NO: 1853772 - RNA, 19 nt, Homo sapiens
  misc_RNA (1)...(19): siRNA sense strand
ggaaaugggagcuguagaa

SEQ ID NO: 1853773 - RNA, 19 nt, Homo sapiens
  misc_RNA (1)...(19): siRNA sense strand
ggagcuacguuggaaauug

SEQ ID NO: 1853774 - RNA, 19 nt, Homo sapiens
  misc_RNA (1)...(19): siRNA sense strand
gagcuacguuggaaauugu

SEQ ID NO: 1853775 - RNA, 19 nt, Homo sapiens
  misc_RNA (1)...(19): siRNA sense strand
uaacuauguucggaaagua

SEQ ID NO: 1853776 - RNA, 19 nt, Homo sapiens
  misc_RNA (1)...(19): siRNA sense strand
gaaaugggagcuguagaaa

SEQ ID NO: 1853777 - RNA, 19 nt, Homo sapiens
  misc_RNA (1)...(19): siRNA sense strand
gacgauacuuugaugaaau

SEQ ID NO: 1853778 - RNA, 19 nt, Homo sapiens
  misc_RNA (1)...(19): siRNA sense strand
aacauuaagucacgaguaa

SEQ ID NO: 1853779 - RNA, 19 nt, Homo sapiens
  misc_RNA (1)...(19): siRNA sense strand
gaaaagaaagucaacauug

SEQ ID NO: 1853780 - RNA, 19 nt, Homo sapiens
  misc_RNA (1)...(19): siRNA sense strand
uuacagcacuacuuucaga

SEQ ID NO: 1853781 - RNA, 19 nt, Homo sapiens
  misc_RNA (1)...(19): siRNA sense strand
ggacaggaacaugagcuua

SEQ ID NO: 1853782 - RNA, 19 nt, Homo sapiens
  misc_RNA (1)...(19): siRNA sense strand
caaagagaccggacaggaa

SEQ ID NO: 1853783 - RNA, 19 nt, Homo sapiens
  misc_RNA (1)...(19): siRNA sense strand
cagcacuacuuucagauga

SEQ ID NO: 1853784 - RNA, 19 nt, Homo sapiens
  misc_RNA (1)...(19): siRNA sense strand
uagcaaguuuggauucauu

SEQ ID NO: 1853785 - RNA, 19 nt, Homo sapiens
  misc_RNA (1)...(19): siRNA sense strand
ggaaauugucacagauaaa

SEQ ID NO: 1853786 - RNA, 19 nt, Homo sapiens
  misc_RNA (1)...(19): siRNA sense strand
uaacaaaguaccuccaaau

SEQ ID NO: 1853787 - RNA, 19 nt, Homo sapiens
  misc_RNA (1)...(19): siRNA sense strand
acagauaaaucacaagaag

SEQ ID NO: 1853788 - RNA, 19 nt, Homo sapiens
  misc_RNA (1)...(19): siRNA sense strand
gcuauugaguuaucuacug

SEQ ID NO: 1853789 - RNA, 19 nt, Homo sapiens
  misc_RNA (1)...(19): siRNA sense strand
gcucuuacagcacuacuuu

SEQ ID NO: 1853790 - RNA, 19 nt, Homo sapiens
  misc_RNA (1)...(19): siRNA sense strand
gaucauuccucccaaagac

SEQ ID NO: 1853791 - RNA, 19 nt, Homo sapiens
  misc_RNA (1)...(19): siRNA sense strand
acaagaagggucucaguuu

SEQ ID NO: 1853792 - RNA, 19 nt, Homo sapiens
  misc_RNA (1)...(19): siRNA sense strand
gaaauuaauaggacgauac

SEQ ID NO: 1853793 - RNA, 19 nt, Homo sapiens
  misc_RNA (1)...(19): siRNA sense strand
ugaguuaucuacugaaguc

SEQ ID NO: 1853794 - RNA, 19 nt, Homo sapiens
  misc_RNA (1)...(19): siRNA sense strand
gauagcaaguuuggauuca

SEQ ID NO: 1853795 - RNA, 19 nt, Homo sapiens
  misc_RNA (1)...(19): siRNA sense strand
uggauccgcugacuuuaaa

SEQ ID NO: 1853796 - RNA, 19 nt, Homo sapiens
  misc_RNA (1)...(19): siRNA sense strand
uggaaauugucacagauaa

SEQ ID NO: 1853797 - RNA, 19 nt, Homo sapiens
  misc_RNA (1)...(19): siRNA sense strand
aaacugaacuaagucaauc

SEQ ID NO: 1853798 - RNA, 19 nt, Homo sapiens
  misc_RNA (1)...(19): siRNA sense strand
guggaacaauuguaacaga

SEQ ID NO: 1853799 - RNA, 19 nt, Homo sapiens
  misc_RNA (1)...(19): siRNA sense strand
gugaaaggauuugguggaa

SEQ ID NO: 1853800 - RNA, 19 nt, Homo sapiens
  misc_RNA (1)...(19): siRNA sense strand
cuacugaaguccucuccaa

SEQ ID NO: 1853801 - RNA, 19 nt, Homo sapiens
  misc_RNA (1)...(19): siRNA sense strand
gaugauagcaaguuuggau

SEQ ID NO: 1853802 - RNA, 19 nt, Homo sapiens
  misc_RNA (1)...(19): siRNA sense strand
gacaacaaauuccauacag

SEQ ID NO: 1853803 - RNA, 19 nt, Homo sapiens
  misc_RNA (1)...(19): siRNA sense strand
ggaaugguuugcuaacaac

SEQ ID NO: 1853804 - RNA, 19 nt, Homo sapiens
  misc_RNA (1)...(19): siRNA sense strand
aauguuagcggaugaguuu

SEQ ID NO: 1853805 - RNA, 19 nt, Homo sapiens
  misc_RNA (1)...(19): siRNA sense strand
aggaggagacgaugaauuu

SEQ ID NO: 1853806 - RNA, 19 nt, Homo sapiens
  misc_RNA (1)...(19): siRNA sense strand
uguauacuguggaacaauu

SEQ ID NO: 1853807 - RNA, 19 nt, Homo sapiens
  misc_RNA (1)...(19): siRNA sense strand
uaacauuaagucacgagua

SEQ ID NO: 1853808 - RNA, 19 nt, Homo sapiens
  misc_RNA (1)...(19): siRNA sense strand
caauggcaccagcaugaua

SEQ ID NO: 1853809 - RNA, 19 nt, Homo sapiens
  misc_RNA (1)...(19): siRNA sense strand
uggaaugguuugcuaacaa

SEQ ID NO: 1853810 - RNA, 19 nt, Homo sapiens
  misc_RNA (1)...(19): siRNA sense strand
ggcaauggcaccagcauga

SEQ ID NO: 1853811 - RNA, 19 nt, Homo sapiens
  misc_RNA (1)...(19): siRNA sense strand
acaacaaauuccauacaga

SEQ ID NO: 1853812 - RNA, 19 nt, Homo sapiens
  misc_RNA (1)...(19): siRNA sense strand
ccaaggaggagacgaugaa

SEQ ID NO: 1853813 - RNA, 19 nt, Homo sapiens
  misc_RNA (1)...(19): siRNA sense strand
cuauugaguuaucuacuga

SEQ ID NO: 1853814 - RNA, 19 nt, Homo sapiens
  misc_RNA (1)...(19): siRNA sense strand
caaguuuggauucauugua

SEQ ID NO: 1853815 - RNA, 19 nt, Homo sapiens
  misc_RNA (1)...(19): siRNA sense strand
caaauucacuguggaucuc

SEQ ID NO: 1853816 - RNA, 19 nt, Homo sapiens
  misc_RNA (1)...(19): siRNA sense strand
gggaauggaauaccaagga

SEQ ID NO: 1853817 - RNA, 19 nt, Homo sapiens
  misc_RNA (1)...(19): siRNA sense strand
ggucucaguuugugaaagg

SEQ ID NO: 1853818 - RNA, 19 nt, Homo sapiens
  misc_RNA (1)...(19): siRNA sense strand
gacaggaacaugagcuuau

SEQ ID NO: 1853819 - RNA, 19 nt, Homo sapiens
  misc_RNA (1)...(19): siRNA sense strand
cuaagucaaucugauaugu

SEQ ID NO: 1853820 - RNA, 19 nt, Homo sapiens
  misc_RNA (1)...(19): siRNA sense strand
acauugacuuugaaccuuu

SEQ ID NO: 1853821 - RNA, 19 nt, Homo sapiens
  misc_RNA (1)...(19): siRNA sense strand
caaggaaacacaagagaag

SEQ ID NO: 1853822 - RNA, 19 nt, Homo sapiens
  misc_RNA (1)...(19): siRNA sense strand
ccaaggaaacacaagagaa

SEQ ID NO: 1853823 - RNA, 19 nt, Homo sapiens
  misc_RNA (1)...(19): siRNA sense strand
ugucacagauaaaucacaa

SEQ ID NO: 1853824 - RNA, 19 nt, Homo sapiens
  misc_RNA (1)...(19): siRNA sense strand
uauguuugaucagagguua

SEQ ID NO: 1853825 - RNA, 19 nt, Homo sapiens
  misc_RNA (1)...(19): siRNA sense strand
ugaacuaagucaaucugau

SEQ ID NO: 1853826 - RNA, 19 nt, Homo sapiens
  misc_RNA (1)...(19): siRNA sense strand
gaagaucaagaagcucauu

SEQ ID NO: 1853827 - RNA, 19 nt, Homo sapiens
  misc_RNA (1)...(19): siRNA sense strand
uggaacaauuguaacagaa

SEQ ID NO: 1853828 - RNA, 19 nt, Homo sapiens
  misc_RNA (1)...(19): siRNA sense strand
gugcagcuguuuauuucug

SEQ ID NO: 1853829 - RNA, 19 nt, Homo sapiens
  misc_RNA (1)...(19): siRNA sense strand
ucacagauaaaucacaaga

SEQ ID NO: 1853830 - RNA, 19 nt, Homo sapiens
  misc_RNA (1)...(19): siRNA sense strand
gagauauguucuucauugc

SEQ ID NO: 1853831 - RNA, 19 nt, Homo sapiens
  misc_RNA (1)...(19): siRNA sense strand
ccaaauggucugguuguau

SEQ ID NO: 1853832 - RNA, 19 nt, Homo sapiens
  misc_RNA (1)...(19): siRNA sense strand
uaauaggacgauacuuuga

SEQ ID NO: 1853833 - RNA, 19 nt, Homo sapiens
  misc_RNA (1)...(19): siRNA sense strand
uuaauaggacgauacuuug

SEQ ID NO: 1853834 - RNA, 19 nt, Homo sapiens
  misc_RNA (1)...(19): siRNA sense strand
gaucaagaagcucauuaag

SEQ ID NO: 1853835 - RNA, 19 nt, Homo sapiens
  misc_RNA (1)...(19): siRNA sense strand
ggauucaaccaagcuauug

SEQ ID NO: 1853836 - RNA, 19 nt, Homo sapiens
  misc_RNA (1)...(19): siRNA sense strand
cuguggaucucccaaagaa

SEQ ID NO: 1853837 - RNA, 19 nt, Homo sapiens
  misc_RNA (1)...(19): siRNA sense strand
ggaaaagaaagucaacauu

SEQ ID NO: 1853838 - RNA, 19 nt, Homo sapiens
  misc_RNA (1)...(19): siRNA sense strand
ugaccuugaugacuacuag

SEQ ID NO: 1853839 - RNA, 19 nt, Homo sapiens
  misc_RNA (1)...(19): siRNA sense strand
gguuugcuaacaacuauaa

SEQ ID NO: 1853840 - RNA, 19 nt, Homo sapiens
  misc_RNA (1)...(19): siRNA sense strand
gcacagaagaggagaaaau

SEQ ID NO: 1853841 - RNA, 19 nt, Homo sapiens
  misc_RNA (1)...(19): siRNA sense strand
gaguaaaccgccuuucagu

SEQ ID NO: 1853842 - RNA, 19 nt, Homo sapiens
  misc_RNA (1)...(19): siRNA sense strand
cuaucuaacuccagagcaa

SEQ ID NO: 1853843 - RNA, 19 nt, Homo sapiens
  misc_RNA (1)...(19): siRNA sense strand
agagaaguccugcacaaau

SEQ ID NO: 1853844 - RNA, 19 nt, Homo sapiens
  misc_RNA (1)...(19): siRNA sense strand
cguuggaaauugucacaga

SEQ ID NO: 1853845 - RNA, 19 nt, Homo sapiens
  misc_RNA (1)...(19): siRNA sense strand
gaaguccugcacaaauuca

SEQ ID NO: 1853846 - RNA, 19 nt, Homo sapiens
  misc_RNA (1)...(19): siRNA sense strand
agaagggucucaguuugug

SEQ ID NO: 1853847 - RNA, 19 nt, Homo sapiens
  misc_RNA (1)...(19): siRNA sense strand
auaacaaaguaccuccaaa

SEQ ID NO: 1853848 - RNA, 19 nt, Homo sapiens
  misc_RNA (1)...(19): siRNA sense strand
acaaaguaccuccaaaugg

SEQ ID NO: 1853849 - RNA, 19 nt, Homo sapiens
  misc_RNA (1)...(19): siRNA sense strand
guuggaaauugucacagau

SEQ ID NO: 1853850 - RNA, 19 nt, Homo sapiens
  misc_RNA (1)...(19): siRNA sense strand
cguugaagauacacuaaag

SEQ ID NO: 1853851 - RNA, 19 nt, Homo sapiens
  misc_RNA (1)...(19): siRNA sense strand
cugugcagcuguuuauuuc

SEQ ID NO: 1853852 - RNA, 19 nt, Homo sapiens
  misc_RNA (1)...(19): siRNA sense strand
guagaaagaucgacugcua

SEQ ID NO: 1853853 - RNA, 19 nt, Homo sapiens
  misc_RNA (1)...(19): siRNA sense strand
gucaguagcuggaaagaua

SEQ ID NO: 1853854 - RNA, 19 nt, Homo sapiens
  misc_RNA (1)...(19): siRNA sense strand
caacugaacuguaucuugu

SEQ ID NO: 1853855 - RNA, 19 nt, Homo sapiens
  misc_RNA (1)...(19): siRNA sense strand
caaaggagcucauuaccau

SEQ ID NO: 1853856 - RNA, 19 nt, Homo sapiens
  misc_RNA (1)...(19): siRNA sense strand
caaggaauguguagaaaga

SEQ ID NO: 1853857 - RNA, 19 nt, Homo sapiens
  misc_RNA (1)...(19): siRNA sense strand
gcaccaagauggcagcaaa

SEQ ID NO: 1853858 - RNA, 19 nt, Homo sapiens
  misc_RNA (1)...(19): siRNA sense strand
gaaaacggcucauuccuuu

SEQ ID NO: 1853859 - RNA, 19 nt, Homo sapiens
  misc_RNA (1)...(19): siRNA sense strand
aaacggagaucgauacuuc

SEQ ID NO: 1853860 - RNA, 19 nt, Homo sapiens
  misc_RNA (1)...(19): siRNA sense strand
cagcagguguaaucacuua

SEQ ID NO: 1853861 - RNA, 19 nt, Homo sapiens
  misc_RNA (1)...(19): siRNA sense strand
caauaucguucuucugauu

SEQ ID NO: 1853862 - RNA, 19 nt, Homo sapiens
  misc_RNA (1)...(19): siRNA sense strand
gagcaucccuggguuaaug

SEQ ID NO: 1853863 - RNA, 19 nt, Homo sapiens
  misc_RNA (1)...(19): siRNA sense strand
cagagaaccugcuggugua

SEQ ID NO: 1853864 - RNA, 19 nt, Homo sapiens
  misc_RNA (1)...(19): siRNA sense strand
ccaggaauguauuggauaa

SEQ ID NO: 1853865 - RNA, 19 nt, Homo sapiens
  misc_RNA (1)...(19): siRNA sense strand
gggauaaggcgcagagaua

SEQ ID NO: 1853866 - RNA, 19 nt, Homo sapiens
  misc_RNA (1)...(19): siRNA sense strand
ggaaggagagaguuaugua

SEQ ID NO: 1853867 - RNA, 19 nt, Homo sapiens
  misc_RNA (1)...(19): siRNA sense strand
gaugauggccucccagaaa

SEQ ID NO: 1853868 - RNA, 19 nt, Homo sapiens
  misc_RNA (1)...(19): siRNA sense strand
gggauaauguuuccgauuc

SEQ ID NO: 1853869 - RNA, 19 nt, Homo sapiens
  misc_RNA (1)...(19): siRNA sense strand
gaugauuucuugcuagaug

SEQ ID NO: 1853870 - RNA, 19 nt, Homo sapiens
  misc_RNA (1)...(19): siRNA sense strand
gagcagguccucaccgaua

SEQ ID NO: 1853871 - RNA, 19 nt, Homo sapiens
  misc_RNA (1)...(19): siRNA sense strand
gaagaaggccaagaaaguu

SEQ ID NO: 1853872 - RNA, 19 nt, Homo sapiens
  misc_RNA (1)...(19): siRNA sense strand
gaacaucagcugucaguag

SEQ ID NO: 1853873 - RNA, 19 nt, Homo sapiens
  misc_RNA (1)...(19): siRNA sense strand
ccauagagcccuucaagaa

SEQ ID NO: 1853874 - RNA, 19 nt, Homo sapiens
  misc_RNA (1)...(19): siRNA sense strand
ggagaucgauacuucaaag

SEQ ID NO: 1853875 - RNA, 19 nt, Homo sapiens
  misc_RNA (1)...(19): siRNA sense strand
gaaguuccguuaccaggau

SEQ ID NO: 1853876 - RNA, 19 nt, Homo sapiens
  misc_RNA (1)...(19): siRNA sense strand
gaagcugggugacuuugga

SEQ ID NO: 1853877 - RNA, 19 nt, Homo sapiens
  misc_RNA (1)...(19): siRNA sense strand
gcagcucgauggaugagaa

SEQ ID NO: 1853878 - RNA, 19 nt, Homo sapiens
  misc_RNA (1)...(19): siRNA sense strand
ggaaagauaaagaagcauu

SEQ ID NO: 1853879 - RNA, 19 nt, Homo sapiens
  misc_RNA (1)...(19): siRNA sense strand
ggacuuuccuucuccauac

SEQ ID NO: 1853880 - RNA, 19 nt, Homo sapiens
  misc_RNA (1)...(19): siRNA sense strand
ucaaagggauuguguaugc

SEQ ID NO: 1853881 - RNA, 19 nt, Homo sapiens
  misc_RNA (1)...(19): siRNA sense strand
cgauguagaucagcgauuu

SEQ ID NO: 1853882 - RNA, 19 nt, Homo sapiens
  misc_RNA (1)...(19): siRNA sense strand
gcaaagagcacaugaucca

SEQ ID NO: 1853883 - RNA, 19 nt, Homo sapiens
  misc_RNA (1)...(19): siRNA sense strand
gagugaagcaucccaauau

SEQ ID NO: 1853884 - RNA, 19 nt, Homo sapiens
  misc_RNA (1)...(19): siRNA sense strand
gcagguguaaucacuuaua

SEQ ID NO: 1853885 - RNA, 19 nt, Homo sapiens
  misc_RNA (1)...(19): siRNA sense strand
acggaaagcugucaggauu

SEQ ID NO: 1853886 - RNA, 19 nt, Homo sapiens
  misc_RNA (1)...(19): siRNA sense strand
ccaccgcucuugauaagga

SEQ ID NO: 1853887 - RNA, 19 nt, Homo sapiens
  misc_RNA (1)...(19): siRNA sense strand
gaccaccgcucuugauaag

SEQ ID NO: 1853888 - RNA, 19 nt, Homo sapiens
  misc_RNA (1)...(19): siRNA sense strand
cagaaugaagugucuauuu

SEQ ID NO: 1853889 - RNA, 19 nt, Homo sapiens
  misc_RNA (1)...(19): siRNA sense strand
aagcaaaugucgaggcaaa

SEQ ID NO: 1853890 - RNA, 19 nt, Homo sapiens
  misc_RNA (1)...(19): siRNA sense strand
uaaagucggaagaacaaua

SEQ ID NO: 1853891 - RNA, 19 nt, Homo sapiens
  misc_RNA (1)...(19): siRNA sense strand
gaucagggucuuuggacua

SEQ ID NO: 1853892 - RNA, 19 nt, Homo sapiens
  misc_RNA (1)...(19): siRNA sense strand
gaccacggguuuaccauca

SEQ ID NO: 1853893 - RNA, 19 nt, Homo sapiens
  misc_RNA (1)...(19): siRNA sense strand
ccagugggaugcuguacaa

SEQ ID NO: 1853894 - RNA, 19 nt, Homo sapiens
  misc_RNA (1)...(19): siRNA sense strand
ggagagaguuauguaugug

SEQ ID NO: 1853895 - RNA, 19 nt, Homo sapiens
  misc_RNA (1)...(19): siRNA sense strand
uaacaaauacaccgagaga

SEQ ID NO: 1853896 - RNA, 19 nt, Homo sapiens
  misc_RNA (1)...(19): siRNA sense strand
gaaggagagaguuauguau

SEQ ID NO: 1853897 - RNA, 19 nt, Homo sapiens
  misc_RNA (1)...(19): siRNA sense strand
aaagaagcauuucaacaca

SEQ ID NO: 1853898 - RNA, 19 nt, Homo sapiens
  misc_RNA (1)...(19): siRNA sense strand
gaacgauggcccuggagaa

SEQ ID NO: 1853899 - RNA, 19 nt, Homo sapiens
  misc_RNA (1)...(19): siRNA sense strand
ccaggaugauuucuugcua

SEQ ID NO: 1853900 - RNA, 19 nt, Homo sapiens
  misc_RNA (1)...(19): siRNA sense strand
ggaaagcugucaggauucu

SEQ ID NO: 1853901 - RNA, 19 nt, Homo sapiens
  misc_RNA (1)...(19): siRNA sense strand
caucagaaguggcgugaag

SEQ ID NO: 1853902 - RNA, 19 nt, Homo sapiens
  misc_RNA (1)...(19): siRNA sense strand
auacguggcuccagaaauc

SEQ ID NO: 1853903 - RNA, 19 nt, Homo sapiens
  misc_RNA (1)...(19): siRNA sense strand
uuaccaggaugauuucuug

SEQ ID NO: 1853904 - RNA, 19 nt, Homo sapiens
  misc_RNA (1)...(19): siRNA sense strand
gcacuggaccacggguuua

SEQ ID NO: 1853905 - RNA, 19 nt, Homo sapiens
  misc_RNA (1)...(19): siRNA sense strand
cgauggcccuggagaagaa

SEQ ID NO: 1853906 - RNA, 19 nt, Homo sapiens
  misc_RNA (1)...(19): siRNA sense strand
ucaagaaacuggaguacac

SEQ ID NO: 1853907 - RNA, 19 nt, Homo sapiens
  misc_RNA (1)...(19): siRNA sense strand
cauagagcccuucaagaaa

SEQ ID NO: 1853908 - RNA, 19 nt, Homo sapiens
  misc_RNA (1)...(19): siRNA sense strand
gauaaggagaggcagguuu

SEQ ID NO: 1853909 - RNA, 19 nt, Homo sapiens
  misc_RNA (1)...(19): siRNA sense strand
gaacaucguccaccgugau

SEQ ID NO: 1853910 - RNA, 19 nt, Homo sapiens
  misc_RNA (1)...(19): siRNA sense strand
gagaacaaucuacaccauu

SEQ ID NO: 1853911 - RNA, 19 nt, Homo sapiens
  misc_RNA (1)...(19): siRNA sense strand
gccaucaaauaccugcaua

SEQ ID NO: 1853912 - RNA, 19 nt, Homo sapiens
  misc_RNA (1)...(19): siRNA sense strand
gauuccagcuacaauaaca

SEQ ID NO: 1853913 - RNA, 19 nt, Homo sapiens
  misc_RNA (1)...(19): siRNA sense strand
ccagauuccagcuacaaua

SEQ ID NO: 1853914 - RNA, 19 nt, Homo sapiens
  misc_RNA (1)...(19): siRNA sense strand
gauauaaagucggaagaac

SEQ ID NO: 1853915 - RNA, 19 nt, Homo sapiens
  misc_RNA (1)...(19): siRNA sense strand
acaaauacaccgagagaga

SEQ ID NO: 1853916 - RNA, 19 nt, Homo sapiens
  misc_RNA (1)...(19): siRNA sense strand
gcaaaugucgaggcaaaga

SEQ ID NO: 1853917 - RNA, 19 nt, Homo sapiens
  misc_RNA (1)...(19): siRNA sense strand
aaacuggaguacaccaaga

SEQ ID NO: 1853918 - RNA, 19 nt, Homo sapiens
  misc_RNA (1)...(19): siRNA sense strand
gcaaaggagcucauuacca

SEQ ID NO: 1853919 - RNA, 19 nt, Homo sapiens
  misc_RNA (1)...(19): siRNA sense strand
ggacuggccaccauuguag

SEQ ID NO: 1853920 - RNA, 19 nt, Homo sapiens
  misc_RNA (1)...(19): siRNA sense strand
agaaccugcugguguauga

SEQ ID NO: 1853921 - RNA, 19 nt, Homo sapiens
  misc_RNA (1)...(19): siRNA sense strand
gccauuacuuccacuaaca

SEQ ID NO: 1853922 - RNA, 19 nt, Homo sapiens
  misc_RNA (1)...(19): siRNA sense strand
ugaacuguaucuugucaug

SEQ ID NO: 1853923 - RNA, 19 nt, Homo sapiens
  misc_RNA (1)...(19): siRNA sense strand
acauggagcuggagcacuu

SEQ ID NO: 1853924 - RNA, 19 nt, Homo sapiens
  misc_RNA (1)...(19): siRNA sense strand
aaagaucgacugcuagaga

SEQ ID NO: 1853925 - RNA, 19 nt, Homo sapiens
  misc_RNA (1)...(19): siRNA sense strand
gaacaauaggagauggaaa

SEQ ID NO: 1853926 - RNA, 19 nt, Homo sapiens
  misc_RNA (1)...(19): siRNA sense strand
cagauuccagcuacaauaa

SEQ ID NO: 1853927 - RNA, 19 nt, Homo sapiens
  misc_RNA (1)...(19): siRNA sense strand
aaacggcucauuccuuuga

SEQ ID NO: 1853928 - RNA, 19 nt, Homo sapiens
  misc_RNA (1)...(19): siRNA sense strand
uaaagaagcauuucaacac

SEQ ID NO: 1853929 - RNA, 19 nt, Homo sapiens
  misc_RNA (1)...(19): siRNA sense strand
cagguguaaucacuuauau

SEQ ID NO: 1853930 - RNA, 19 nt, Homo sapiens
  misc_RNA (1)...(19): siRNA sense strand
ggagauggaugugccaacu

SEQ ID NO: 1853931 - RNA, 19 nt, Homo sapiens
  misc_RNA (1)...(19): siRNA sense strand
gaugugccuucaggacuuu

SEQ ID NO: 1853932 - RNA, 19 nt, Homo sapiens
  misc_RNA (1)...(19): siRNA sense strand
gauggcagcaaaucacuga

SEQ ID NO: 1853933 - RNA, 19 nt, Homo sapiens
  misc_RNA (1)...(19): siRNA sense strand
agauggaugugccaacuga

SEQ ID NO: 1853934 - RNA, 19 nt, Homo sapiens
  misc_RNA (1)...(19): siRNA sense strand
ggagugagaacaaucuaca

SEQ ID NO: 1853935 - RNA, 19 nt, Homo sapiens
  misc_RNA (1)...(19): siRNA sense strand
agaagaaggccaagaaagu

SEQ ID NO: 1853936 - RNA, 19 nt, Homo sapiens
  misc_RNA (1)...(19): siRNA sense strand
ggauaauguuuccgauucu

SEQ ID NO: 1853937 - RNA, 19 nt, Homo sapiens
  misc_RNA (1)...(19): siRNA sense strand
gauuugacccgaacucugu

SEQ ID NO: 1853938 - RNA, 19 nt, Homo sapiens
  misc_RNA (1)...(19): siRNA sense strand
gauccagaaugaagugucu

SEQ ID NO: 1853939 - RNA, 19 nt, Homo sapiens
  misc_RNA (1)...(19): siRNA sense strand
ggaagaacaauaggagaug

SEQ ID NO: 1853940 - RNA, 19 nt, Homo sapiens
  misc_RNA (1)...(19): siRNA sense strand
gagaagaaggccaagaaag

SEQ ID NO: 1853941 - RNA, 19 nt, Homo sapiens
  misc_RNA (1)...(19): siRNA sense strand
gaugggcucaagaagauuu

SEQ ID NO: 1853942 - RNA, 19 nt, Homo sapiens
  misc_RNA (1)...(19): siRNA sense strand
gagcacaugauccagaaug

SEQ ID NO: 1853943 - RNA, 19 nt, Homo sapiens
  misc_RNA (1)...(19): siRNA sense strand
ccagaccgguuccgaucuu

SEQ ID NO: 1853944 - RNA, 19 nt, Homo sapiens
  misc_RNA (1)...(19): siRNA sense strand
cccaauaucguucuucuga

SEQ ID NO: 1853945 - RNA, 19 nt, Homo sapiens
  misc_RNA (1)...(19): siRNA sense strand
uauaaagucggaagaacaa

SEQ ID NO: 1853946 - RNA, 19 nt, Homo sapiens
  misc_RNA (1)...(19): siRNA sense strand
gcacaugauccagaaugaa

SEQ ID NO: 1853947 - RNA, 19 nt, Homo sapiens
  misc_RNA (1)...(19): siRNA sense strand
caauaggagauggaaauuu

SEQ ID NO: 1853948 - RNA, 19 nt, Homo sapiens
  misc_RNA (1)...(19): siRNA sense strand
gaucgacugcuagagagua

SEQ ID NO: 1853949 - RNA, 19 nt, Homo sapiens
  misc_RNA (1)...(19): siRNA sense strand
ggaauguauuggauaagac

SEQ ID NO: 1853950 - RNA, 19 nt, Homo sapiens
  misc_RNA (1)...(19): siRNA sense strand
cagggucuuuggacuacua

SEQ ID NO: 1853951 - RNA, 19 nt, Homo sapiens
  misc_RNA (1)...(19): siRNA sense strand
ccagaaaucauugcagaga

SEQ ID NO: 1853952 - RNA, 19 nt, Homo sapiens
  misc_RNA (1)...(19): siRNA sense strand
gaagauggcucgcagauug

SEQ ID NO: 1853953 - RNA, 19 nt, Homo sapiens
  misc_RNA (1)...(19): siRNA sense strand
gaaaucaacgucuaacaua

SEQ ID NO: 1853954 - RNA, 19 nt, Homo sapiens
  misc_RNA (1)...(19): siRNA sense strand
aaagaaagcugaaaugcaa

SEQ ID NO: 1853955 - RNA, 19 nt, Homo sapiens
  misc_RNA (1)...(19): siRNA sense strand
gggaaagguuugaauguaa

SEQ ID NO: 1853956 - RNA, 19 nt, Homo sapiens
  misc_RNA (1)...(19): siRNA sense strand
ggaaagguuugaauguaaa

SEQ ID NO: 1853957 - RNA, 19 nt, Homo sapiens
  misc_RNA (1)...(19): siRNA sense strand
caacacaacucagaacaug

SEQ ID NO: 1853958 - RNA, 19 nt, Homo sapiens
  misc_RNA (1)...(19): siRNA sense strand
gagaacaugucgauugaug

SEQ ID NO: 1853959 - RNA, 19 nt, Homo sapiens
  misc_RNA (1)...(19): siRNA sense strand
gaaagaugcugggugguau

SEQ ID NO: 1853960 - RNA, 19 nt, Homo sapiens
  misc_RNA (1)...(19): siRNA sense strand
gcaaagccaucccaaacug

SEQ ID NO: 1853961 - RNA, 19 nt, Homo sapiens
  misc_RNA (1)...(19): siRNA sense strand
gagcaccaauguuuaucua

SEQ ID NO: 1853962 - RNA, 19 nt, Homo sapiens
  misc_RNA (1)...(19): siRNA sense strand
caagaacuccugaucauga

SEQ ID NO: 1853963 - RNA, 19 nt, Homo sapiens
  misc_RNA (1)...(19): siRNA sense strand
gaacaugucgauugaugaa

SEQ ID NO: 1853964 - RNA, 19 nt, Homo sapiens
  misc_RNA (1)...(19): siRNA sense strand
cagagaacaugucgauuga

SEQ ID NO: 1853965 - RNA, 19 nt, Homo sapiens
  misc_RNA (1)...(19): siRNA sense strand
cagcaaauauuuagcacuu

SEQ ID NO: 1853966 - RNA, 19 nt, Homo sapiens
  misc_RNA (1)...(19): siRNA sense strand
gaccaacauucagcaaaua

SEQ ID NO: 1853967 - RNA, 19 nt, Homo sapiens
  misc_RNA (1)...(19): siRNA sense strand
caaacagucuuccauuauc

SEQ ID NO: 1853968 - RNA, 19 nt, Homo sapiens
  misc_RNA (1)...(19): siRNA sense strand
guuccuacaucacaaguaa

SEQ ID NO: 1853969 - RNA, 19 nt, Homo sapiens
  misc_RNA (1)...(19): siRNA sense strand
gcaccaauguuuaucuaca

SEQ ID NO: 1853970 - RNA, 19 nt, Homo sapiens
  misc_RNA (1)...(19): siRNA sense strand
gaaagaaagcugaaaugca

SEQ ID NO: 1853971 - RNA, 19 nt, Homo sapiens
  misc_RNA (1)...(19): siRNA sense strand
gaugugucaugguaucuaa

SEQ ID NO: 1853972 - RNA, 19 nt, Homo sapiens
  misc_RNA (1)...(19): siRNA sense strand
uaaaagagcaccaauguuu

SEQ ID NO: 1853973 - RNA, 19 nt, Homo sapiens
  misc_RNA (1)...(19): siRNA sense strand
ggacacccuucuucauaau

SEQ ID NO: 1853974 - RNA, 19 nt, Homo sapiens
  misc_RNA (1)...(19): siRNA sense strand
gcaaguuccuacaucacaa

SEQ ID NO: 1853975 - RNA, 19 nt, Homo sapiens
  misc_RNA (1)...(19): siRNA sense strand
ccagagaacaugucgauug

SEQ ID NO: 1853976 - RNA, 19 nt, Homo sapiens
  misc_RNA (1)...(19): siRNA sense strand
gaaacuagaaugccagauc

SEQ ID NO: 1853977 - RNA, 19 nt, Homo sapiens
  misc_RNA (1)...(19): siRNA sense strand
uaauggaaaucaacgucua

SEQ ID NO: 1853978 - RNA, 19 nt, Homo sapiens
  misc_RNA (1)...(19): siRNA sense strand
cgaccaacauucagcaaau

SEQ ID NO: 1853979 - RNA, 19 nt, Homo sapiens
  misc_RNA (1)...(19): siRNA sense strand
agaaguagaucaaccucaa

SEQ ID NO: 1853980 - RNA, 19 nt, Homo sapiens
  misc_RNA (1)...(19): siRNA sense strand
ggaaaucaacgucuaacau

SEQ ID NO: 1853981 - RNA, 19 nt, Homo sapiens
  misc_RNA (1)...(19): siRNA sense strand
gauucaagauuuggaaaga

SEQ ID NO: 1853982 - RNA, 19 nt, Homo sapiens
  misc_RNA (1)...(19): siRNA sense strand
accaaacagucuuccauua

SEQ ID NO: 1853983 - RNA, 19 nt, Homo sapiens
  misc_RNA (1)...(19): siRNA sense strand
uaacccagaaggagaauuu

SEQ ID NO: 1853984 - RNA, 19 nt, Homo sapiens
  misc_RNA (1)...(19): siRNA sense strand
uaaugaagcuggagugacu

SEQ ID NO: 1853985 - RNA, 19 nt, Homo sapiens
  misc_RNA (1)...(19): siRNA sense strand
ccaaacagucuuccauuau

SEQ ID NO: 1853986 - RNA, 19 nt, Homo sapiens
  misc_RNA (1)...(19): siRNA sense strand
aaacagucuuccauuauca

SEQ ID NO: 1853987 - RNA, 19 nt, Homo sapiens
  misc_RNA (1)...(19): siRNA sense strand
ugggaaagguuugaaugua

SEQ ID NO: 1853988 - RNA, 19 nt, Homo sapiens
  misc_RNA (1)...(19): siRNA sense strand
gcuaagcccauaccaagaa

SEQ ID NO: 1853989 - RNA, 19 nt, Homo sapiens
  misc_RNA (1)...(19): siRNA sense strand
gaaaugguacaauucaaca

SEQ ID NO: 1853990 - RNA, 19 nt, Homo sapiens
  misc_RNA (1)...(19): siRNA sense strand
agauaacacuggaagaguu

SEQ ID NO: 1853991 - RNA, 19 nt, Homo sapiens
  misc_RNA (1)...(19): siRNA sense strand
caaguaagaaguagaucaa

SEQ ID NO: 1853992 - RNA, 19 nt, Homo sapiens
  misc_RNA (1)...(19): siRNA sense strand
ucacucaucuuugaaguag

SEQ ID NO: 1853993 - RNA, 19 nt, Homo sapiens
  misc_RNA (1)...(19): siRNA sense strand
agucagagcuucagaugca

SEQ ID NO: 1853994 - RNA, 19 nt, Homo sapiens
  misc_RNA (1)...(19): siRNA sense strand
gcacuuaaugggaaagguu

SEQ ID NO: 1853995 - RNA, 19 nt, Homo sapiens
  misc_RNA (1)...(19): siRNA sense strand
ggaagaguuacuuuacuga

SEQ ID NO: 1853996 - RNA, 19 nt, Homo sapiens
  misc_RNA (1)...(19): siRNA sense strand
caccaaagcuuuucuggaa

SEQ ID NO: 1853997 - RNA, 19 nt, Homo sapiens
  misc_RNA (1)...(19): siRNA sense strand
aaggagaauuucagcguuu

SEQ ID NO: 1853998 - RNA, 19 nt, Homo sapiens
  misc_RNA (1)...(19): siRNA sense strand
uaacacaagauuagacguu

SEQ ID NO: 1853999 - RNA, 19 nt, Homo sapiens
  misc_RNA (1)...(19): siRNA sense strand
aaacuagaaugccagaucu

SEQ ID NO: 1854000 - RNA, 19 nt, Homo sapiens
  misc_RNA (1)...(19): siRNA sense strand
gaccaaacagucuuccauu

SEQ ID NO: 1854001 - RNA, 19 nt, Homo sapiens
  misc_RNA (1)...(19): siRNA sense strand
aacacaagauuagacguua

SEQ ID NO: 1854002 - RNA, 19 nt, Homo sapiens
  misc_RNA (1)...(19): siRNA sense strand
gauguaaacaagaaagaug

SEQ ID NO: 1854003 - RNA, 19 nt, Homo sapiens
  misc_RNA (1)...(19): siRNA sense strand
ggaugacaguggugcacaa

SEQ ID NO: 1854004 - RNA, 19 nt, Homo sapiens
  misc_RNA (1)...(19): siRNA sense strand
aaagagcaccaauguuuau

SEQ ID NO: 1854005 - RNA, 19 nt, Homo sapiens
  misc_RNA (1)...(19): siRNA sense strand
gaacuccugaucaugaaau

SEQ ID NO: 1854006 - RNA, 19 nt, Homo sapiens
  misc_RNA (1)...(19): siRNA sense strand
guaucuaaauggaagaaca

SEQ ID NO: 1854007 - RNA, 19 nt, Homo sapiens
  misc_RNA (1)...(19): siRNA sense strand
aggacacccuucuucauaa

SEQ ID NO: 1854008 - RNA, 19 nt, Homo sapiens
  misc_RNA (1)...(19): siRNA sense strand
uaaaaucccuuccgcuaug

SEQ ID NO: 1854009 - RNA, 19 nt, Homo sapiens
  misc_RNA (1)...(19): siRNA sense strand
gugacuacauguaacacaa

SEQ ID NO: 1854010 - RNA, 19 nt, Homo sapiens
  misc_RNA (1)...(19): siRNA sense strand
gaugcugggugguauacug

SEQ ID NO: 1854011 - RNA, 19 nt, Homo sapiens
  misc_RNA (1)...(19): siRNA sense strand
ucagcuggccaaccuauaa

SEQ ID NO: 1854012 - RNA, 19 nt, Homo sapiens
  misc_RNA (1)...(19): siRNA sense strand
ggaaagaaagcugaaaugc

SEQ ID NO: 1854013 - RNA, 19 nt, Homo sapiens
  misc_RNA (1)...(19): siRNA sense strand
ggcuauaccuccaccaaag

SEQ ID NO: 1854014 - RNA, 19 nt, Homo sapiens
  misc_RNA (1)...(19): siRNA sense strand
caccaauguuuaucuacaa

SEQ ID NO: 1854015 - RNA, 19 nt, Homo sapiens
  misc_RNA (1)...(19): siRNA sense strand
gcagcuggauguccuugca

SEQ ID NO: 1854016 - RNA, 19 nt, Homo sapiens
  misc_RNA (1)...(19): siRNA sense strand
gaucaugaaauacaaggau

SEQ ID NO: 1854017 - RNA, 19 nt, Homo sapiens
  misc_RNA (1)...(19): siRNA sense strand
aaucuggacucuaugaaag

SEQ ID NO: 1854018 - RNA, 19 nt, Homo sapiens
  misc_RNA (1)...(19): siRNA sense strand
cuacauguaacacaagauu

SEQ ID NO: 1854019 - RNA, 19 nt, Homo sapiens
  misc_RNA (1)...(19): siRNA sense strand
gaagaguuacuuuacugau

SEQ ID NO: 1854020 - RNA, 19 nt, Homo sapiens
  misc_RNA (1)...(19): siRNA sense strand
gaccagaaaccuccagcuu

SEQ ID NO: 1854021 - RNA, 19 nt, Homo sapiens
  misc_RNA (1)...(19): siRNA sense strand
gagaagauggcucgcagau

SEQ ID NO: 1854022 - RNA, 19 nt, Homo sapiens
  misc_RNA (1)...(19): siRNA sense strand
caaucuggacucuaugaaa

SEQ ID NO: 1854023 - RNA, 19 nt, Homo sapiens
  misc_RNA (1)...(19): siRNA sense strand
agaaagaugcuggguggua

SEQ ID NO: 1854024 - RNA, 19 nt, Homo sapiens
  misc_RNA (1)...(19): siRNA sense strand
gccaaccuauaaaugcaaa

SEQ ID NO: 1854025 - RNA, 19 nt, Homo sapiens
  misc_RNA (1)...(19): siRNA sense strand
gacuacauguaacacaaga

SEQ ID NO: 1854026 - RNA, 19 nt, Homo sapiens
  misc_RNA (1)...(19): siRNA sense strand
uggaagaguuacuuuacug

SEQ ID NO: 1854027 - RNA, 19 nt, Homo sapiens
  misc_RNA (1)...(19): siRNA sense strand
cuccugaugugucauggua

SEQ ID NO: 1854028 - RNA, 19 nt, Homo sapiens
  misc_RNA (1)...(19): siRNA sense strand
ugaaugaucaggaugcaau

SEQ ID NO: 1854029 - RNA, 19 nt, Homo sapiens
  misc_RNA (1)...(19): siRNA sense strand
ucuaacauaugaagagaag

SEQ ID NO: 1854030 - RNA, 19 nt, Homo sapiens
  misc_RNA (1)...(19): siRNA sense strand
uucauucacucaucuuuga

SEQ ID NO: 1854031 - RNA, 19 nt, Homo sapiens
  misc_RNA (1)...(19): siRNA sense strand
ggagugacuacauguaaca

SEQ ID NO: 1854032 - RNA, 19 nt, Homo sapiens
  misc_RNA (1)...(19): siRNA sense strand
gcauguguugccaagaaua

SEQ ID NO: 1854033 - RNA, 19 nt, Homo sapiens
  misc_RNA (1)...(19): siRNA sense strand
aagaacuccugaucaugaa

SEQ ID NO: 1854034 - RNA, 19 nt, Homo sapiens
  misc_RNA (1)...(19): siRNA sense strand
caagauaacacuggaagag

SEQ ID NO: 1854035 - RNA, 19 nt, Homo sapiens
  misc_RNA (1)...(19): siRNA sense strand
cuacaaaccacagagcaaa

SEQ ID NO: 1854036 - RNA, 19 nt, Homo sapiens
  misc_RNA (1)...(19): siRNA sense strand
ccaccacguuucauucaag

SEQ ID NO: 1854037 - RNA, 19 nt, Homo sapiens
  misc_RNA (1)...(19): siRNA sense strand
gcagcaacacaacucagaa

SEQ ID NO: 1854038 - RNA, 19 nt, Homo sapiens
  misc_RNA (1)...(19): siRNA sense strand
ggucuucauucacucaucu

SEQ ID NO: 1854039 - RNA, 19 nt, Homo sapiens
  misc_RNA (1)...(19): siRNA sense strand
ggacugccagcuccugaug

SEQ ID NO: 1854040 - RNA, 19 nt, Homo sapiens
  misc_RNA (1)...(19): siRNA sense strand
ucauucaagugccagagaa

SEQ ID NO: 1854041 - RNA, 19 nt, Homo sapiens
  misc_RNA (1)...(19): siRNA sense strand
ccauguggcuccagauugc

SEQ ID NO: 1854042 - RNA, 19 nt, Homo sapiens
  misc_RNA (1)...(19): siRNA sense strand
ugacaguggugcacaagac

SEQ ID NO: 1854043 - RNA, 19 nt, Homo sapiens
  misc_RNA (1)...(19): siRNA sense strand
ucacagccugauuacaaua

SEQ ID NO: 1854044 - RNA, 19 nt, Homo sapiens
  misc_RNA (1)...(19): siRNA sense strand
guagucagagcuucagaug

SEQ ID NO: 1854045 - RNA, 19 nt, Homo sapiens
  misc_RNA (1)...(19): siRNA sense strand
ucacaaguaagaaguagau

SEQ ID NO: 1854046 - RNA, 19 nt, Homo sapiens
  misc_RNA (1)...(19): siRNA sense strand
gcaacacaacucagaacau

SEQ ID NO: 1854047 - RNA, 19 nt, Homo sapiens
  misc_RNA (1)...(19): siRNA sense strand
caucacaaguaagaaguag

SEQ ID NO: 1854048 - RNA, 19 nt, Homo sapiens
  misc_RNA (1)...(19): siRNA sense strand
guguacagagcaaagauuu

SEQ ID NO: 1854049 - RNA, 19 nt, Homo sapiens
  misc_RNA (1)...(19): siRNA sense strand
aagcuggagugacuacaug

SEQ ID NO: 1854050 - RNA, 19 nt, Homo sapiens
  misc_RNA (1)...(19): siRNA sense strand
gucgauugaugaaggaaga

SEQ ID NO: 1854051 - RNA, 19 nt, Homo sapiens
  misc_RNA (1)...(19): siRNA sense strand
gaagcuggagugacuacau

SEQ ID NO: 1854052 - RNA, 19 nt, Homo sapiens
  misc_RNA (1)...(19): siRNA sense strand
gaacacagauuuaagugaa

SEQ ID NO: 1854053 - RNA, 19 nt, Homo sapiens
  misc_RNA (1)...(19): siRNA sense strand
agagaaaucuugcacaaua

SEQ ID NO: 1854054 - RNA, 19 nt, Homo sapiens
  misc_RNA (1)...(19): siRNA sense strand
ccaagaaggugaugaugua

SEQ ID NO: 1854055 - RNA, 19 nt, Homo sapiens
  misc_RNA (1)...(19): siRNA sense strand
gaaagagcccgaugaagaa

SEQ ID NO: 1854056 - RNA, 19 nt, Homo sapiens
  misc_RNA (1)...(19): siRNA sense strand
gcacaauacugagaaagaa

SEQ ID NO: 1854057 - RNA, 19 nt, Homo sapiens
  misc_RNA (1)...(19): siRNA sense strand
gaaggacuguguggacaua

SEQ ID NO: 1854058 - RNA, 19 nt, Homo sapiens
  misc_RNA (1)...(19): siRNA sense strand
gagaggaaaugcucgagaa

SEQ ID NO: 1854059 - RNA, 19 nt, Homo sapiens
  misc_RNA (1)...(19): siRNA sense strand
cgagaaacauggaauaauc

SEQ ID NO: 1854060 - RNA, 19 nt, Homo sapiens
  misc_RNA (1)...(19): siRNA sense strand
agaaauagcuaccaaugga

SEQ ID NO: 1854061 - RNA, 19 nt, Homo sapiens
  misc_RNA (1)...(19): siRNA sense strand
ugaaagagcccgaugaaga

SEQ ID NO: 1854062 - RNA, 19 nt, Homo sapiens
  misc_RNA (1)...(19): siRNA sense strand
caaggacucucuagcagaa

SEQ ID NO: 1854063 - RNA, 19 nt, Homo sapiens
  misc_RNA (1)...(19): siRNA sense strand
guagaaacccuuaaagaug

SEQ ID NO: 1854064 - RNA, 19 nt, Homo sapiens
  misc_RNA (1)...(19): siRNA sense strand
gguaaagucuacugacaga

SEQ ID NO: 1854065 - RNA, 19 nt, Homo sapiens
  misc_RNA (1)...(19): siRNA sense strand
gcaauagccuagagaacga

SEQ ID NO: 1854066 - RNA, 19 nt, Homo sapiens
  misc_RNA (1)...(19): siRNA sense strand
aaagaagacuguaccaugu

SEQ ID NO: 1854067 - RNA, 19 nt, Homo sapiens
  misc_RNA (1)...(19): siRNA sense strand
uagcagaaguugaagagaa

SEQ ID NO: 1854068 - RNA, 19 nt, Homo sapiens
  misc_RNA (1)...(19): siRNA sense strand
ccagaaagcagagaagaua

SEQ ID NO: 1854069 - RNA, 19 nt, Homo sapiens
  misc_RNA (1)...(19): siRNA sense strand
agaauuagaugaagguguu

SEQ ID NO: 1854070 - RNA, 19 nt, Homo sapiens
  misc_RNA (1)...(19): siRNA sense strand
uagaaacccuuaaagaugu

SEQ ID NO: 1854071 - RNA, 19 nt, Homo sapiens
  misc_RNA (1)...(19): siRNA sense strand
guucaaagccaaauucuug

SEQ ID NO: 1854072 - RNA, 19 nt, Homo sapiens
  misc_RNA (1)...(19): siRNA sense strand
gaaauccucugaagacacu

SEQ ID NO: 1854073 - RNA, 19 nt, Homo sapiens
  misc_RNA (1)...(19): siRNA sense strand
uaaaugcccucaagucuac

SEQ ID NO: 1854074 - RNA, 19 nt, Homo sapiens
  misc_RNA (1)...(19): siRNA sense strand
gcauagugaugacacaguu

SEQ ID NO: 1854075 - RNA, 19 nt, Homo sapiens
  misc_RNA (1)...(19): siRNA sense strand
gccgggagaucgacuguuu

SEQ ID NO: 1854076 - RNA, 19 nt, Homo sapiens
  misc_RNA (1)...(19): siRNA sense strand
ucucguagauccagaagaa

SEQ ID NO: 1854077 - RNA, 19 nt, Homo sapiens
  misc_RNA (1)...(19): siRNA sense strand
gagcaguucucucccugaa

SEQ ID NO: 1854078 - RNA, 19 nt, Homo sapiens
  misc_RNA (1)...(19): siRNA sense strand
gaagcgacagguccaagua

SEQ ID NO: 1854079 - RNA, 19 nt, Homo sapiens
  misc_RNA (1)...(19): siRNA sense strand
gaagacaaagaacaagaaa

SEQ ID NO: 1854080 - RNA, 19 nt, Homo sapiens
  misc_RNA (1)...(19): siRNA sense strand
gcacagggcauaguuuaga

SEQ ID NO: 1854081 - RNA, 19 nt, Homo sapiens
  misc_RNA (1)...(19): siRNA sense strand
ggaaagcuuuagacagcaa

SEQ ID NO: 1854082 - RNA, 19 nt, Homo sapiens
  misc_RNA (1)...(19): siRNA sense strand
uaacguaucagaacacaga

SEQ ID NO: 1854083 - RNA, 19 nt, Homo sapiens
  misc_RNA (1)...(19): siRNA sense strand
gaaaugcucgagaaacaug

SEQ ID NO: 1854084 - RNA, 19 nt, Homo sapiens
  misc_RNA (1)...(19): siRNA sense strand
ggugugagaugucagaaca

SEQ ID NO: 1854085 - RNA, 19 nt, Homo sapiens
  misc_RNA (1)...(19): siRNA sense strand
ugacacaguuuaucaugau

SEQ ID NO: 1854086 - RNA, 19 nt, Homo sapiens
  misc_RNA (1)...(19): siRNA sense strand
cgaagaagagggugaagaa

SEQ ID NO: 1854087 - RNA, 19 nt, Homo sapiens
  misc_RNA (1)...(19): siRNA sense strand
ggucaugggugcaccagau

SEQ ID NO: 1854088 - RNA, 19 nt, Homo sapiens
  misc_RNA (1)...(19): siRNA sense strand
gcacuucaauccagaaagc

SEQ ID NO: 1854089 - RNA, 19 nt, Homo sapiens
  misc_RNA (1)...(19): siRNA sense strand
uaaagucuacugacagaaa

SEQ ID NO: 1854090 - RNA, 19 nt, Homo sapiens
  misc_RNA (1)...(19): siRNA sense strand
agaagagggugaagaaaca

SEQ ID NO: 1854091 - RNA, 19 nt, Homo sapiens
  misc_RNA (1)...(19): siRNA sense strand
gaagagagccagggcacuu

SEQ ID NO: 1854092 - RNA, 19 nt, Homo sapiens
  misc_RNA (1)...(19): siRNA sense strand
aaugaacccuuagauauga

SEQ ID NO: 1854093 - RNA, 19 nt, Homo sapiens
  misc_RNA (1)...(19): siRNA sense strand
ggaaaucaaggacucucua

SEQ ID NO: 1854094 - RNA, 19 nt, Homo sapiens
  misc_RNA (1)...(19): siRNA sense strand
ggcugguggugaagaauua

SEQ ID NO: 1854095 - RNA, 19 nt, Homo sapiens
  misc_RNA (1)...(19): siRNA sense strand
gaagagcagguaaagucua

SEQ ID NO: 1854096 - RNA, 19 nt, Homo sapiens
  misc_RNA (1)...(19): siRNA sense strand
gcaguucucucccugaaaa

SEQ ID NO: 1854097 - RNA, 19 nt, Homo sapiens
  misc_RNA (1)...(19): siRNA sense strand
gagaaaucuugcacaauac

SEQ ID NO: 1854098 - RNA, 19 nt, Homo sapiens
  misc_RNA (1)...(19): siRNA sense strand
ggaugacaccguucaauca

SEQ ID NO: 1854099 - RNA, 19 nt, Homo sapiens
  misc_RNA (1)...(19): siRNA sense strand
gggcauaguuuagagaaag

SEQ ID NO: 1854100 - RNA, 19 nt, Homo sapiens
  misc_RNA (1)...(19): siRNA sense strand
gaaggggucucguaacaug

SEQ ID NO: 1854101 - RNA, 19 nt, Homo sapiens
  misc_RNA (1)...(19): siRNA sense strand
gaaacacaucggcuucuga

SEQ ID NO: 1854102 - RNA, 19 nt, Homo sapiens
  misc_RNA (1)...(19): siRNA sense strand
ugacaccguucaaucauca

SEQ ID NO: 1854103 - RNA, 19 nt, Homo sapiens
  misc_RNA (1)...(19): siRNA sense strand
caaaaugaacccuuagaua

SEQ ID NO: 1854104 - RNA, 19 nt, Homo sapiens
  misc_RNA (1)...(19): siRNA sense strand
ccagugaaguggaggugaa

SEQ ID NO: 1854105 - RNA, 19 nt, Homo sapiens
  misc_RNA (1)...(19): siRNA sense strand
gaauaccgaggaccagaaa

SEQ ID NO: 1854106 - RNA, 19 nt, Homo sapiens
  misc_RNA (1)...(19): siRNA sense strand
gauggagacacauuagauu

SEQ ID NO: 1854107 - RNA, 19 nt, Homo sapiens
  misc_RNA (1)...(19): siRNA sense strand
caaguacaguagacacuca

SEQ ID NO: 1854108 - RNA, 19 nt, Homo sapiens
  misc_RNA (1)...(19): siRNA sense strand
gaagaagagggugaagaaa

SEQ ID NO: 1854109 - RNA, 19 nt, Homo sapiens
  misc_RNA (1)...(19): siRNA sense strand
gagacaagcacagggcaua

SEQ ID NO: 1854110 - RNA, 19 nt, Homo sapiens
  misc_RNA (1)...(19): siRNA sense strand
uauaagaaggcuaugguuu

SEQ ID NO: 1854111 - RNA, 19 nt, Homo sapiens
  misc_RNA (1)...(19): siRNA sense strand
agaaggugaugauguacaa

SEQ ID NO: 1854112 - RNA, 19 nt, Homo sapiens
  misc_RNA (1)...(19): siRNA sense strand
guagggaucacaacgaaga

SEQ ID NO: 1854113 - RNA, 19 nt, Homo sapiens
  misc_RNA (1)...(19): siRNA sense strand
gcucgagaaacauggaaua

SEQ ID NO: 1854114 - RNA, 19 nt, Homo sapiens
  misc_RNA (1)...(19): siRNA sense strand
acagagaggugugagaugu

SEQ ID NO: 1854115 - RNA, 19 nt, Homo sapiens
  misc_RNA (1)...(19): siRNA sense strand
ggaagaagagcagguaaag

SEQ ID NO: 1854116 - RNA, 19 nt, Homo sapiens
  misc_RNA (1)...(19): siRNA sense strand
caagucagaccgucaggaa

SEQ ID NO: 1854117 - RNA, 19 nt, Homo sapiens
  misc_RNA (1)...(19): siRNA sense strand
agacaaacuucauguacca

SEQ ID NO: 1854118 - RNA, 19 nt, Homo sapiens
  misc_RNA (1)...(19): siRNA sense strand
aaaacgaggugacugaaaa

SEQ ID NO: 1854119 - RNA, 19 nt, Homo sapiens
  misc_RNA (1)...(19): siRNA sense strand
cagguaaagucuacugaca

SEQ ID NO: 1854120 - RNA, 19 nt, Homo sapiens
  misc_RNA (1)...(19): siRNA sense strand
aaaugaacccuuagauaug

SEQ ID NO: 1854121 - RNA, 19 nt, Homo sapiens
  misc_RNA (1)...(19): siRNA sense strand
gggugaagaaacaggauua

SEQ ID NO: 1854122 - RNA, 19 nt, Homo sapiens
  misc_RNA (1)...(19): siRNA sense strand
agaaagaauucaccaacca

SEQ ID NO: 1854123 - RNA, 19 nt, Homo sapiens
  misc_RNA (1)...(19): siRNA sense strand
aagcacagggcauaguuua

SEQ ID NO: 1854124 - RNA, 19 nt, Homo sapiens
  misc_RNA (1)...(19): siRNA sense strand
aggaaaugcucgagaaaca

SEQ ID NO: 1854125 - RNA, 19 nt, Homo sapiens
  misc_RNA (1)...(19): siRNA sense strand
guagaagagagaccagaaa

SEQ ID NO: 1854126 - RNA, 19 nt, Homo sapiens
  misc_RNA (1)...(19): siRNA sense strand
cguagaaacccuuaaagau

SEQ ID NO: 1854127 - RNA, 19 nt, Homo sapiens
  misc_RNA (1)...(19): siRNA sense strand
agaagaagacaaagaacaa

SEQ ID NO: 1854128 - RNA, 19 nt, Homo sapiens
  misc_RNA (1)...(19): siRNA sense strand
gagaggcauuggacucauc

SEQ ID NO: 1854129 - RNA, 19 nt, Homo sapiens
  misc_RNA (1)...(19): siRNA sense strand
gaaaucaaggacucucuag

SEQ ID NO: 1854130 - RNA, 19 nt, Homo sapiens
  misc_RNA (1)...(19): siRNA sense strand
ccaagguccuaccaagaug

SEQ ID NO: 1854131 - RNA, 19 nt, Homo sapiens
  misc_RNA (1)...(19): siRNA sense strand
ccgacacccucaauaaugu

SEQ ID NO: 1854132 - RNA, 19 nt, Homo sapiens
  misc_RNA (1)...(19): siRNA sense strand
augcucagcuagacaauga

SEQ ID NO: 1854133 - RNA, 19 nt, Homo sapiens
  misc_RNA (1)...(19): siRNA sense strand
gagggcugguggugaagaa

SEQ ID NO: 1854134 - RNA, 19 nt, Homo sapiens
  misc_RNA (1)...(19): siRNA sense strand
gaguuaacguaucagaaca

SEQ ID NO: 1854135 - RNA, 19 nt, Homo sapiens
  misc_RNA (1)...(19): siRNA sense strand
agaaagaacaacacacaga

SEQ ID NO: 1854136 - RNA, 19 nt, Homo sapiens
  misc_RNA (1)...(19): siRNA sense strand
uuaaaugcccucaagucua

SEQ ID NO: 1854137 - RNA, 19 nt, Homo sapiens
  misc_RNA (1)...(19): siRNA sense strand
gaaacauggaauaauccua

SEQ ID NO: 1854138 - RNA, 19 nt, Homo sapiens
  misc_RNA (1)...(19): siRNA sense strand
agaaggcuaugguuuccaa

SEQ ID NO: 1854139 - RNA, 19 nt, Homo sapiens
  misc_RNA (1)...(19): siRNA sense strand
uaaggaagaagagcaggua

SEQ ID NO: 1854140 - RNA, 19 nt, Homo sapiens
  misc_RNA (1)...(19): siRNA sense strand
gcacaguacagaaguaggu

SEQ ID NO: 1854141 - RNA, 19 nt, Homo sapiens
  misc_RNA (1)...(19): siRNA sense strand
gcagaaggaggaagacagu

SEQ ID NO: 1854142 - RNA, 19 nt, Homo sapiens
  misc_RNA (1)...(19): siRNA sense strand
ggaugggacccuaggaaga

SEQ ID NO: 1854143 - RNA, 19 nt, Homo sapiens
  misc_RNA (1)...(19): siRNA sense strand
guugauacccuaaaagaua

SEQ ID NO: 1854144 - RNA, 19 nt, Homo sapiens
  misc_RNA (1)...(19): siRNA sense strand
ucaauaauguuggauacca

SEQ ID NO: 1854145 - RNA, 19 nt, Homo sapiens
  misc_RNA (1)...(19): siRNA sense strand
gcacccugcccgaacauga

SEQ ID NO: 1854146 - RNA, 19 nt, Homo sapiens
  misc_RNA (1)...(19): siRNA sense strand
ggagacacauuagauuuug

SEQ ID NO: 1854147 - RNA, 19 nt, Homo sapiens
  misc_RNA (1)...(19): siRNA sense strand
aagaagagcagguaaaguc

SEQ ID NO: 1854148 - RNA, 19 nt, Homo sapiens
  misc_RNA (1)...(19): siRNA sense strand
ugacaaauguaugguagag

SEQ ID NO: 1854149 - RNA, 19 nt, Homo sapiens
  misc_RNA (1)...(19): siRNA sense strand
cguaucagaacacagauuu

SEQ ID NO: 1854150 - RNA, 19 nt, Homo sapiens
  misc_RNA (1)...(19): siRNA sense strand
gcagaaagcagugaaaaug

SEQ ID NO: 1854151 - RNA, 19 nt, Homo sapiens
  misc_RNA (1)...(19): siRNA sense strand
cagaaagucagcaguggaa

SEQ ID NO: 1854152 - RNA, 19 nt, Homo sapiens
  misc_RNA (1)...(19): siRNA sense strand
caagaagacuguaccuaaa

SEQ ID NO: 1854153 - RNA, 19 nt, Homo sapiens
  misc_RNA (1)...(19): siRNA sense strand
ucucagagguggccaauaa

SEQ ID NO: 1854154 - RNA, 19 nt, Homo sapiens
  misc_RNA (1)...(19): siRNA sense strand
caaaucagguucauuaaag

SEQ ID NO: 1854155 - RNA, 19 nt, Homo sapiens
  misc_RNA (1)...(19): siRNA sense strand
caaugccucuucccucuua

SEQ ID NO: 1854156 - RNA, 19 nt, Homo sapiens
  misc_RNA (1)...(19): siRNA sense strand
gcaguagucucuaaagcaa

SEQ ID NO: 1854157 - RNA, 19 nt, Homo sapiens
  misc_RNA (1)...(19): siRNA sense strand
gaacccagccucccaagaa

SEQ ID NO: 1854158 - RNA, 19 nt, Homo sapiens
  misc_RNA (1)...(19): siRNA sense strand
ccaagaagacuguaccuaa

SEQ ID NO: 1854159 - RNA, 19 nt, Homo sapiens
  misc_RNA (1)...(19): siRNA sense strand
uaaagaagcggaagcagaa

SEQ ID NO: 1854160 - RNA, 19 nt, Homo sapiens
  misc_RNA (1)...(19): siRNA sense strand
ccaaagcuccuccuaagaa

SEQ ID NO: 1854161 - RNA, 19 nt, Homo sapiens
  misc_RNA (1)...(19): siRNA sense strand
gaagagaagacaucuaagu

SEQ ID NO: 1854162 - RNA, 19 nt, Homo sapiens
  misc_RNA (1)...(19): siRNA sense strand
uaagaaagcuaagaagaag

SEQ ID NO: 1854163 - RNA, 19 nt, Homo sapiens
  misc_RNA (1)...(19): siRNA sense strand
gaaccagaagccaaagaua

SEQ ID NO: 1854164 - RNA, 19 nt, Homo sapiens
  misc_RNA (1)...(19): siRNA sense strand
caagagcucugauucugau

SEQ ID NO: 1854165 - RNA, 19 nt, Homo sapiens
  misc_RNA (1)...(19): siRNA sense strand
gcggacaacuccuuugaug

SEQ ID NO: 1854166 - RNA, 19 nt, Homo sapiens
  misc_RNA (1)...(19): siRNA sense strand
caaagaaccagaagccaaa

SEQ ID NO: 1854167 - RNA, 19 nt, Homo sapiens
  misc_RNA (1)...(19): siRNA sense strand
caacaguucuucuucugau

SEQ ID NO: 1854168 - RNA, 19 nt, Homo sapiens
  misc_RNA (1)...(19): siRNA sense strand
gaagaagccacagaaggua

SEQ ID NO: 1854169 - RNA, 19 nt, Homo sapiens
  misc_RNA (1)...(19): siRNA sense strand
ccaaagauaacaccuguga

SEQ ID NO: 1854170 - RNA, 19 nt, Homo sapiens
  misc_RNA (1)...(19): siRNA sense strand
caagaaggcuguggagaag

SEQ ID NO: 1854171 - RNA, 19 nt, Homo sapiens
  misc_RNA (1)...(19): siRNA sense strand
ggacagcagcucugauuca

SEQ ID NO: 1854172 - RNA, 19 nt, Homo sapiens
  misc_RNA (1)...(19): siRNA sense strand
caaauggaccaguggcuaa

SEQ ID NO: 1854173 - RNA, 19 nt, Homo sapiens
  misc_RNA (1)...(19): siRNA sense strand
ccaagaaggcuguggagaa

SEQ ID NO: 1854174 - RNA, 19 nt, Homo sapiens
  misc_RNA (1)...(19): siRNA sense strand
gcaaguccuuucggcauga

SEQ ID NO: 1854175 - RNA, 19 nt, Homo sapiens
  misc_RNA (1)...(19): siRNA sense strand
cuaagaaagcuaagaagaa

SEQ ID NO: 1854176 - RNA, 19 nt, Homo sapiens
  misc_RNA (1)...(19): siRNA sense strand
ccaaaucagguucauuaaa

SEQ ID NO: 1854177 - RNA, 19 nt, Homo sapiens
  misc_RNA (1)...(19): siRNA sense strand
cuaaggcaguagucucuaa

SEQ ID NO: 1854178 - RNA, 19 nt, Homo sapiens
  misc_RNA (1)...(19): siRNA sense strand
gcuaagaaagcuaagaaga

SEQ ID NO: 1854179 - RNA, 19 nt, Homo sapiens
  misc_RNA (1)...(19): siRNA sense strand
gaaaguuacaggcaaaugg

SEQ ID NO: 1854180 - RNA, 19 nt, Homo sapiens
  misc_RNA (1)...(19): siRNA sense strand
ugagguggauucacgaguu

SEQ ID NO: 1854181 - RNA, 19 nt, Homo sapiens
  misc_RNA (1)...(19): siRNA sense strand
caucuaagucugcaguuaa

SEQ ID NO: 1854182 - RNA, 19 nt, Homo sapiens
  misc_RNA (1)...(19): siRNA sense strand
gccaagagcucugauucug

SEQ ID NO: 1854183 - RNA, 19 nt, Homo sapiens
  misc_RNA (1)...(19): siRNA sense strand
gagaguagcagcagugaag

SEQ ID NO: 1854184 - RNA, 19 nt, Homo sapiens
  misc_RNA (1)...(19): siRNA sense strand
gcaaagaaagcagcagaga

SEQ ID NO: 1854185 - RNA, 19 nt, Homo sapiens
  misc_RNA (1)...(19): siRNA sense strand
guccaggucaauucuauua

SEQ ID NO: 1854186 - RNA, 19 nt, Homo sapiens
  misc_RNA (1)...(19): siRNA sense strand
ccaauaaguucgccaaagc

SEQ ID NO: 1854187 - RNA, 19 nt, Homo sapiens
  misc_RNA (1)...(19): siRNA sense strand
gcagugaggaggaggaaga

SEQ ID NO: 1854188 - RNA, 19 nt, Homo sapiens
  misc_RNA (1)...(19): siRNA sense strand
gccaaagcaucagagagua

SEQ ID NO: 1854189 - RNA, 19 nt, Homo sapiens
  misc_RNA (1)...(19): siRNA sense strand
gagguggauucacgaguug

SEQ ID NO: 1854190 - RNA, 19 nt, Homo sapiens
  misc_RNA (1)...(19): siRNA sense strand
gccagccucugcaaagaaa

SEQ ID NO: 1854191 - RNA, 19 nt, Homo sapiens
  misc_RNA (1)...(19): siRNA sense strand
uaaaccaccuccagcaaag

SEQ ID NO: 1854192 - RNA, 19 nt, Homo sapiens
  misc_RNA (1)...(19): siRNA sense strand
aaccaggucccuacaguua

SEQ ID NO: 1854193 - RNA, 19 nt, Homo sapiens
  misc_RNA (1)...(19): siRNA sense strand
ccaaucagguuuugaaguu

SEQ ID NO: 1854194 - RNA, 19 nt, Homo sapiens
  misc_RNA (1)...(19): siRNA sense strand
gaggagaagacaaagaaga

SEQ ID NO: 1854195 - RNA, 19 nt, Homo sapiens
  misc_RNA (1)...(19): siRNA sense strand
gaagacagcagugaugagu

SEQ ID NO: 1854196 - RNA, 19 nt, Homo sapiens
  misc_RNA (1)...(19): siRNA sense strand
ggucccagagcgaaaguua

SEQ ID NO: 1854197 - RNA, 19 nt, Homo sapiens
  misc_RNA (1)...(19): siRNA sense strand
uaaaccaggucccuacagu

SEQ ID NO: 1854198 - RNA, 19 nt, Homo sapiens
  misc_RNA (1)...(19): siRNA sense strand
gaggaugagccaccaaaga

SEQ ID NO: 1854199 - RNA, 19 nt, Homo sapiens
  misc_RNA (1)...(19): siRNA sense strand
gcucugauucugauucuga

SEQ ID NO: 1854200 - RNA, 19 nt, Homo sapiens
  misc_RNA (1)...(19): siRNA sense strand
aaagaaggcugcuguaccu

SEQ ID NO: 1854201 - RNA, 19 nt, Homo sapiens
  misc_RNA (1)...(19): siRNA sense strand
ggcaagggcucuccaagac

SEQ ID NO: 1854202 - RNA, 19 nt, Homo sapiens
  misc_RNA (1)...(19): siRNA sense strand
gcagugaugagucugauuc

SEQ ID NO: 1854203 - RNA, 19 nt, Homo sapiens
  misc_RNA (1)...(19): siRNA sense strand
ucaagggccuccagcaaag

SEQ ID NO: 1854204 - RNA, 19 nt, Homo sapiens
  misc_RNA (1)...(19): siRNA sense strand
uuccaaaucagguucauua

SEQ ID NO: 1854205 - RNA, 19 nt, Homo sapiens
  misc_RNA (1)...(19): siRNA sense strand
gcaacaguucuucuucuga

SEQ ID NO: 1854206 - RNA, 19 nt, Homo sapiens
  misc_RNA (1)...(19): siRNA sense strand
aggaagagaagacaucuaa

SEQ ID NO: 1854207 - RNA, 19 nt, Homo sapiens
  misc_RNA (1)...(19): siRNA sense strand
caaagcuccuccuaagaag

SEQ ID NO: 1854208 - RNA, 19 nt, Homo sapiens
  misc_RNA (1)...(19): siRNA sense strand
ccaggucaauucuauuaag

SEQ ID NO: 1854209 - RNA, 19 nt, Homo sapiens
  misc_RNA (1)...(19): siRNA sense strand
gggcaagggcucuccaaga

SEQ ID NO: 1854210 - RNA, 19 nt, Homo sapiens
  misc_RNA (1)...(19): siRNA sense strand
caaggcgacugccaaagca

SEQ ID NO: 1854211 - RNA, 19 nt, Homo sapiens
  misc_RNA (1)...(19): siRNA sense strand
ugacagcucugaggaugau

SEQ ID NO: 1854212 - RNA, 19 nt, Homo sapiens
  misc_RNA (1)...(19): siRNA sense strand
aaccagaagccaaagauaa

SEQ ID NO: 1854213 - RNA, 19 nt, Homo sapiens
  misc_RNA (1)...(19): siRNA sense strand
aaagauaacaccugugaca

SEQ ID NO: 1854214 - RNA, 19 nt, Homo sapiens
  misc_RNA (1)...(19): siRNA sense strand
acaucuaagucugcaguua

SEQ ID NO: 1854215 - RNA, 19 nt, Homo sapiens
  misc_RNA (1)...(19): siRNA sense strand
agaaugaggcugccaagga

SEQ ID NO: 1854216 - RNA, 19 nt, Homo sapiens
  misc_RNA (1)...(19): siRNA sense strand
gaacagugaggaggaggaa

SEQ ID NO: 1854217 - RNA, 19 nt, Homo sapiens
  misc_RNA (1)...(19): siRNA sense strand
aguuaaagcucagacuaaa

SEQ ID NO: 1854218 - RNA, 19 nt, Homo sapiens
  misc_RNA (1)...(19): siRNA sense strand
ggaggaaauugagguggau

SEQ ID NO: 1854219 - RNA, 19 nt, Homo sapiens
  misc_RNA (1)...(19): siRNA sense strand
gugaggaggagaagacaaa

SEQ ID NO: 1854220 - RNA, 19 nt, Homo sapiens
  misc_RNA (1)...(19): siRNA sense strand
caguuaaagcucagacuaa

SEQ ID NO: 1854221 - RNA, 19 nt, Homo sapiens
  misc_RNA (1)...(19): siRNA sense strand
ucagggaggaggaaauuga

SEQ ID NO: 1854222 - RNA, 19 nt, Homo sapiens
  misc_RNA (1)...(19): siRNA sense strand
gcacugacugcccagaaug

SEQ ID NO: 1854223 - RNA, 19 nt, Homo sapiens
  misc_RNA (1)...(19): siRNA sense strand
gagcucugauucugauucu

SEQ ID NO: 1854224 - RNA, 19 nt, Homo sapiens
  misc_RNA (1)...(19): siRNA sense strand
gagcgagccaaucagguuu

SEQ ID NO: 1854225 - RNA, 19 nt, Homo sapiens
  misc_RNA (1)...(19): siRNA sense strand
ggucagggaggaggaaauu

SEQ ID NO: 1854226 - RNA, 19 nt, Homo sapiens
  misc_RNA (1)...(19): siRNA sense strand
agugguaguuuccaaauca

SEQ ID NO: 1854227 - RNA, 19 nt, Homo sapiens
  misc_RNA (1)...(19): siRNA sense strand
cagcaacaguucuucuucu

SEQ ID NO: 1854228 - RNA, 19 nt, Homo sapiens
  misc_RNA (1)...(19): siRNA sense strand
agucugcaguuaagaagaa

SEQ ID NO: 1854229 - RNA, 19 nt, Homo sapiens
  misc_RNA (1)...(19): siRNA sense strand
ugaugagucugauucaagu

SEQ ID NO: 1854230 - RNA, 19 nt, Homo sapiens
  misc_RNA (1)...(19): siRNA sense strand
gcgauaaccaacucucaga

SEQ ID NO: 1854231 - RNA, 19 nt, Homo sapiens
  misc_RNA (1)...(19): siRNA sense strand
ggaggaagaagaaaagaaa

SEQ ID NO: 1854232 - RNA, 19 nt, Homo sapiens
  misc_RNA (1)...(19): siRNA sense strand
ggaagaguucuagcaguga

SEQ ID NO: 1854233 - RNA, 19 nt, Homo sapiens
  misc_RNA (1)...(19): siRNA sense strand
gccaauaaguucgccaaag

SEQ ID NO: 1854234 - RNA, 19 nt, Homo sapiens
  misc_RNA (1)...(19): siRNA sense strand
ccaagagcucugauucuga

SEQ ID NO: 1854235 - RNA, 19 nt, Homo sapiens
  misc_RNA (1)...(19): siRNA sense strand
ggaaauugagguggauuca

SEQ ID NO: 1854236 - RNA, 19 nt, Homo sapiens
  misc_RNA (1)...(19): siRNA sense strand
gcagcaacaguucuucuuc

SEQ ID NO: 1854237 - RNA, 19 nt, Homo sapiens
  misc_RNA (1)...(19): siRNA sense strand
uuaagaagaagccacagaa

SEQ ID NO: 1854238 - RNA, 19 nt, Homo sapiens
  misc_RNA (1)...(19): siRNA sense strand
ucaaauaagccagcuguca

SEQ ID NO: 1854239 - RNA, 19 nt, Homo sapiens
  misc_RNA (1)...(19): siRNA sense strand
cuaaaccaccuccagcaaa

SEQ ID NO: 1854240 - RNA, 19 nt, Homo sapiens
  misc_RNA (1)...(19): siRNA sense strand
gcagugaagacagcaguga

SEQ ID NO: 1854241 - RNA, 19 nt, Homo sapiens
  misc_RNA (1)...(19): siRNA sense strand
gcaaagaaggcugcuguac

SEQ ID NO: 1854242 - RNA, 19 nt, Homo sapiens
  misc_RNA (1)...(19): siRNA sense strand
gcagugguaguuuccaaau

SEQ ID NO: 1854243 - RNA, 19 nt, Homo sapiens
  misc_RNA (1)...(19): siRNA sense strand
gagagcagcaacaguucuu

SEQ ID NO: 1854244 - RNA, 19 nt, Homo sapiens
  misc_RNA (1)...(19): siRNA sense strand
ggaggaggaggaaguucaa

SEQ ID NO: 1854245 - RNA, 19 nt, Homo sapiens
  misc_RNA (1)...(19): siRNA sense strand
caguagcagugaugacuca

SEQ ID NO: 1854246 - RNA, 19 nt, Homo sapiens
  misc_RNA (1)...(19): siRNA sense strand
agaagaagccacagaaggu

SEQ ID NO: 1854247 - RNA, 19 nt, Homo sapiens
  misc_RNA (1)...(19): siRNA sense strand
caggucaauucuauuaagu

SEQ ID NO: 1854248 - RNA, 19 nt, Homo sapiens
  misc_RNA (1)...(19): siRNA sense strand
ggccaaagccccagugaaa

SEQ ID NO: 1854249 - RNA, 19 nt, Homo sapiens
  misc_RNA (1)...(19): siRNA sense strand
ccucaggccaagaagauaa

SEQ ID NO: 1854250 - RNA, 19 nt, Homo sapiens
  misc_RNA (1)...(19): siRNA sense strand
ugacugcccagaauggaaa

SEQ ID NO: 1854251 - RNA, 19 nt, Homo sapiens
  misc_RNA (1)...(19): siRNA sense strand
ggagaagacaaagaagaug

SEQ ID NO: 1854252 - RNA, 19 nt, Homo sapiens
  misc_RNA (1)...(19): siRNA sense strand
ccaagcaccugaccuauga

SEQ ID NO: 1854253 - RNA, 19 nt, Homo sapiens
  misc_RNA (1)...(19): siRNA sense strand
ucaagaacauccucacaga

SEQ ID NO: 1854254 - RNA, 19 nt, Homo sapiens
  misc_RNA (1)...(19): siRNA sense strand
gaggaagcauucaagaaca

SEQ ID NO: 1854255 - RNA, 19 nt, Homo sapiens
  misc_RNA (1)...(19): siRNA sense strand
guacgacuaccuauucaaa

SEQ ID NO: 1854256 - RNA, 19 nt, Homo sapiens
  misc_RNA (1)...(19): siRNA sense strand
uaacguagaggaagcauuc

SEQ ID NO: 1854257 - RNA, 19 nt, Homo sapiens
  misc_RNA (1)...(19): siRNA sense strand
ggaacaacgugguggacau

SEQ ID NO: 1854258 - RNA, 19 nt, Homo sapiens
  misc_RNA (1)...(19): siRNA sense strand
cgaguacgacuaccuauuc

SEQ ID NO: 1854259 - RNA, 19 nt, Homo sapiens
  misc_RNA (1)...(19): siRNA sense strand
gaguacgacuaccuauuca

SEQ ID NO: 1854260 - RNA, 19 nt, Homo sapiens
  misc_RNA (1)...(19): siRNA sense strand
gaacauccucacagagauc

SEQ ID NO: 1854261 - RNA, 19 nt, Homo sapiens
  misc_RNA (1)...(19): siRNA sense strand
gacagaagcccaacaagcu

SEQ ID NO: 1854262 - RNA, 19 nt, Homo sapiens
  misc_RNA (1)...(19): siRNA sense strand
cgacgaguacgacuaccua

SEQ ID NO: 1854263 - RNA, 19 nt, Homo sapiens
  misc_RNA (1)...(19): siRNA sense strand
guagaggaagcauucaaga

SEQ ID NO: 1854264 - RNA, 19 nt, Homo sapiens
  misc_RNA (1)...(19): siRNA sense strand
aagaacauccucacagaga

SEQ ID NO: 1854265 - RNA, 19 nt, Homo sapiens
  misc_RNA (1)...(19): siRNA sense strand
ggacgacgaguacgacuac

SEQ ID NO: 1854266 - RNA, 19 nt, Homo sapiens
  misc_RNA (1)...(19): siRNA sense strand
gaacaacgugguggacauc

SEQ ID NO: 1854267 - RNA, 19 nt, Homo sapiens
  misc_RNA (1)...(19): siRNA sense strand
ggauuccacuaacguagag

SEQ ID NO: 1854268 - RNA, 19 nt, Homo sapiens
  misc_RNA (1)...(19): siRNA sense strand
gcaccugaccuaugagaac

SEQ ID NO: 1854269 - RNA, 19 nt, Homo sapiens
  misc_RNA (1)...(19): siRNA sense strand
uagaggaagcauucaagaa

SEQ ID NO: 1854270 - RNA, 19 nt, Homo sapiens
  misc_RNA (1)...(19): siRNA sense strand
gccaagcaccugaccuaug

SEQ ID NO: 1854271 - RNA, 19 nt, Homo sapiens
  misc_RNA (1)...(19): siRNA sense strand
acgacuaccuauucaaagu

SEQ ID NO: 1854272 - RNA, 19 nt, Homo sapiens
  misc_RNA (1)...(19): siRNA sense strand
gaucuaccgcaucguguca

SEQ ID NO: 1854273 - RNA, 19 nt, Homo sapiens
  misc_RNA (1)...(19): siRNA sense strand
cagcaacaucgucaucaug

SEQ ID NO: 1854274 - RNA, 19 nt, Homo sapiens
  misc_RNA (1)...(19): siRNA sense strand
agaacauccucacagagau

SEQ ID NO: 1854275 - RNA, 19 nt, Homo sapiens
  misc_RNA (1)...(19): siRNA sense strand
gggacgacgaguacgacua

SEQ ID NO: 1854276 - RNA, 19 nt, Homo sapiens
  misc_RNA (1)...(19): siRNA sense strand
ccgcaucgugucacagaaa

SEQ ID NO: 1854277 - RNA, 19 nt, Homo sapiens
  misc_RNA (1)...(19): siRNA sense strand
agaggaagcauucaagaac

SEQ ID NO: 1854278 - RNA, 19 nt, Homo sapiens
  misc_RNA (1)...(19): siRNA sense strand
gcaacaucgucaucaugcu

SEQ ID NO: 1854279 - RNA, 19 nt, Homo sapiens
  misc_RNA (1)...(19): siRNA sense strand
ccacgcagacagcaacauc

SEQ ID NO: 1854280 - RNA, 19 nt, Homo sapiens
  misc_RNA (1)...(19): siRNA sense strand
cgacuaccuauucaaagug

SEQ ID NO: 1854281 - RNA, 19 nt, Homo sapiens
  misc_RNA (1)...(19): siRNA sense strand
ucgccaagcaccugaccua

SEQ ID NO: 1854282 - RNA, 19 nt, Homo sapiens
  misc_RNA (1)...(19): siRNA sense strand
uguacgacaucgccaagca

SEQ ID NO: 1854283 - RNA, 19 nt, Homo sapiens
  misc_RNA (1)...(19): siRNA sense strand
acagcaacaucgucaucau

SEQ ID NO: 1854284 - RNA, 19 nt, Homo sapiens
  misc_RNA (1)...(19): siRNA sense strand
ggacagaaauugaagauuc

SEQ ID NO: 1854285 - RNA, 19 nt, Homo sapiens
  misc_RNA (1)...(19): siRNA sense strand
gaaaggcguuggacagaaa

SEQ ID NO: 1854286 - RNA, 19 nt, Homo sapiens
  misc_RNA (1)...(19): siRNA sense strand
gauaaaggcuugcucauac

SEQ ID NO: 1854287 - RNA, 19 nt, Homo sapiens
  misc_RNA (1)...(19): siRNA sense strand
gcacgugccuccugagaga

SEQ ID NO: 1854288 - RNA, 19 nt, Homo sapiens
  misc_RNA (1)...(19): siRNA sense strand
gaacuuccauccagaccaa

SEQ ID NO: 1854289 - RNA, 19 nt, Homo sapiens
  misc_RNA (1)...(19): siRNA sense strand
ccacugcccugcuggagua

SEQ ID NO: 1854290 - RNA, 19 nt, Homo sapiens
  misc_RNA (1)...(19): siRNA sense strand
ggacagugacggcgaguuu

SEQ ID NO: 1854291 - RNA, 19 nt, Homo sapiens
  misc_RNA (1)...(19): siRNA sense strand
gaaaggcgccuaccucaag

SEQ ID NO: 1854292 - RNA, 19 nt, Homo sapiens
  misc_RNA (1)...(19): siRNA sense strand
ggaaaggcguuggacagaa

SEQ ID NO: 1854293 - RNA, 19 nt, Homo sapiens
  misc_RNA (1)...(19): siRNA sense strand
gaacagagcgcaggacauc

SEQ ID NO: 1854294 - RNA, 19 nt, Homo sapiens
  misc_RNA (1)...(19): siRNA sense strand
ugaagauucccacacauua

SEQ ID NO: 1854295 - RNA, 19 nt, Homo sapiens
  misc_RNA (1)...(19): siRNA sense strand
cauacaggaugcccacuuu

SEQ ID NO: 1854296 - RNA, 19 nt, Homo sapiens
  misc_RNA (1)...(19): siRNA sense strand
gcagcguacuucuggcuuu

SEQ ID NO: 1854297 - RNA, 19 nt, Homo sapiens
  misc_RNA (1)...(19): siRNA sense strand
gcaagucucagaaggauca

SEQ ID NO: 1854298 - RNA, 19 nt, Homo sapiens
  misc_RNA (1)...(19): siRNA sense strand
ucagccaccucacccauuu

SEQ ID NO: 1854299 - RNA, 19 nt, Homo sapiens
  misc_RNA (1)...(19): siRNA sense strand
gcgccuaccucaaggacaa

SEQ ID NO: 1854300 - RNA, 19 nt, Homo sapiens
  misc_RNA (1)...(19): siRNA sense strand
ccucagcccuugacaggaa

SEQ ID NO: 1854301 - RNA, 19 nt, Homo sapiens
  misc_RNA (1)...(19): siRNA sense strand
caaucaagcagcaauggua

SEQ ID NO: 1854302 - RNA, 19 nt, Homo sapiens
  misc_RNA (1)...(19): siRNA sense strand
ggcuggaacucaagucuga

SEQ ID NO: 1854303 - RNA, 19 nt, Homo sapiens
  misc_RNA (1)...(19): siRNA sense strand
gaagauucccacacauuag

SEQ ID NO: 1854304 - RNA, 19 nt, Homo sapiens
  misc_RNA (1)...(19): siRNA sense strand
cugaggagcuggccaagug

SEQ ID NO: 1854305 - RNA, 19 nt, Homo sapiens
  misc_RNA (1)...(19): siRNA sense strand
gauaguggacgucccauuc

SEQ ID NO: 1854306 - RNA, 19 nt, Homo sapiens
  misc_RNA (1)...(19): siRNA sense strand
cugagaagccagaagauaa

SEQ ID NO: 1854307 - RNA, 19 nt, Homo sapiens
  misc_RNA (1)...(19): siRNA sense strand
gggcaagucucagaaggau

SEQ ID NO: 1854308 - RNA, 19 nt, Homo sapiens
  misc_RNA (1)...(19): siRNA sense strand
ugagaagccagaagauaaa

SEQ ID NO: 1854309 - RNA, 19 nt, Homo sapiens
  misc_RNA (1)...(19): siRNA sense strand
aagcagcaaugguacuuau

SEQ ID NO: 1854310 - RNA, 19 nt, Homo sapiens
  misc_RNA (1)...(19): siRNA sense strand
ugcggaagcucaaguacaa

SEQ ID NO: 1854311 - RNA, 19 nt, Homo sapiens
  misc_RNA (1)...(19): siRNA sense strand
agauaaaggcuugcucaua

SEQ ID NO: 1854312 - RNA, 19 nt, Homo sapiens
  misc_RNA (1)...(19): siRNA sense strand
gagaaggaacgagcaucua

SEQ ID NO: 1854313 - RNA, 19 nt, Homo sapiens
  misc_RNA (1)...(19): siRNA sense strand
uggaccaccucaucaagaa

SEQ ID NO: 1854314 - RNA, 19 nt, Homo sapiens
  misc_RNA (1)...(19): siRNA sense strand
gagcaucuacucccuacau

SEQ ID NO: 1854315 - RNA, 19 nt, Homo sapiens
  misc_RNA (1)...(19): siRNA sense strand
gcaugcggaagcucaagua

SEQ ID NO: 1854316 - RNA, 19 nt, Homo sapiens
  misc_RNA (1)...(19): siRNA sense strand
ugauggagccgguggagaa

SEQ ID NO: 1854317 - RNA, 19 nt, Homo sapiens
  misc_RNA (1)...(19): siRNA sense strand
ggagaaggaacgagcaucu

SEQ ID NO: 1854318 - RNA, 19 nt, Homo sapiens
  misc_RNA (1)...(19): siRNA sense strand
ggacuugcugggucgcuuu

SEQ ID NO: 1854319 - RNA, 19 nt, Homo sapiens
  misc_RNA (1)...(19): siRNA sense strand
uaaugaaccgccuggaaga

SEQ ID NO: 1854320 - RNA, 19 nt, Homo sapiens
  misc_RNA (1)...(19): siRNA sense strand
ggacgucccauucuaugag

SEQ ID NO: 1854321 - RNA, 19 nt, Homo sapiens
  misc_RNA (1)...(19): siRNA sense strand
uaguggacgucccauucua

SEQ ID NO: 1854322 - RNA, 19 nt, Homo sapiens
  misc_RNA (1)...(19): siRNA sense strand
agaagcugcuccacaucaa

SEQ ID NO: 1854323 - RNA, 19 nt, Homo sapiens
  misc_RNA (1)...(19): siRNA sense strand
gacagaaauugaagauucc

SEQ ID NO: 1854324 - RNA, 19 nt, Homo sapiens
  misc_RNA (1)...(19): siRNA sense strand
ucucggagccacuaaugaa

SEQ ID NO: 1854325 - RNA, 19 nt, Homo sapiens
  misc_RNA (1)...(19): siRNA sense strand
aauugaagauucccacaca

SEQ ID NO: 1854326 - RNA, 19 nt, Homo sapiens
  misc_RNA (1)...(19): siRNA sense strand
caagcagcaaugguacuua

SEQ ID NO: 1854327 - RNA, 19 nt, Homo sapiens
  misc_RNA (1)...(19): siRNA sense strand
ggaacucaagucugaaugg

SEQ ID NO: 1854328 - RNA, 19 nt, Homo sapiens
  misc_RNA (1)...(19): siRNA sense strand
cagaagcugcuccacauca

SEQ ID NO: 1854329 - RNA, 19 nt, Homo sapiens
  misc_RNA (1)...(19): siRNA sense strand
uccagaagcugcuccacau

SEQ ID NO: 1854330 - RNA, 19 nt, Homo sapiens
  misc_RNA (1)...(19): siRNA sense strand
ccucccagguuccuugaug

SEQ ID NO: 1854331 - RNA, 19 nt, Homo sapiens
  misc_RNA (1)...(19): siRNA sense strand
ugaaccgccuggaagacaa

SEQ ID NO: 1854332 - RNA, 19 nt, Homo sapiens
  misc_RNA (1)...(19): siRNA sense strand
ucucucacuugcugucuga

SEQ ID NO: 1854333 - RNA, 19 nt, Homo sapiens
  misc_RNA (1)...(19): siRNA sense strand
cgacuuggacagcaaucaa

SEQ ID NO: 1854334 - RNA, 19 nt, Homo sapiens
  misc_RNA (1)...(19): siRNA sense strand
gcgaguuucugcccguaag

SEQ ID NO: 1854335 - RNA, 19 nt, Homo sapiens
  misc_RNA (1)...(19): siRNA sense strand
cccauaagacucugacuuc

SEQ ID NO: 1854336 - RNA, 19 nt, Homo sapiens
  misc_RNA (1)...(19): siRNA sense strand
gccucggucuggcauggua

SEQ ID NO: 1854337 - RNA, 19 nt, Homo sapiens
  misc_RNA (1)...(19): siRNA sense strand
auaaaggcuugcucauaca

SEQ ID NO: 1854338 - RNA, 19 nt, Homo sapiens
  misc_RNA (1)...(19): siRNA sense strand
gaaggaacgagcaucuacu

SEQ ID NO: 1854339 - RNA, 19 nt, Homo sapiens
  misc_RNA (1)...(19): siRNA sense strand
ccacuuucaucaacuucuc

SEQ ID NO: 1854340 - RNA, 19 nt, Homo sapiens
  misc_RNA (1)...(19): siRNA sense strand
gcccauaagacucugacuu

SEQ ID NO: 1854341 - RNA, 19 nt, Homo sapiens
  misc_RNA (1)...(19): siRNA sense strand
gcaaucaagcagcaauggu

SEQ ID NO: 1854342 - RNA, 19 nt, Homo sapiens
  misc_RNA (1)...(19): siRNA sense strand
cguccuccacccugaauuu

SEQ ID NO: 1854343 - RNA, 19 nt, Homo sapiens
  misc_RNA (1)...(19): siRNA sense strand
agaccaagaggaucaguuc

SEQ ID NO: 1854344 - RNA, 19 nt, Homo sapiens
  misc_RNA (1)...(19): siRNA sense strand
agcaucuacucccuacaua

SEQ ID NO: 1854345 - RNA, 19 nt, Homo sapiens
  misc_RNA (1)...(19): siRNA sense strand
gacgucccauucuaugagu

SEQ ID NO: 1854346 - RNA, 19 nt, Homo sapiens
  misc_RNA (1)...(19): siRNA sense strand
ggcguuggacagaaauuga

SEQ ID NO: 1854347 - RNA, 19 nt, Homo sapiens
  misc_RNA (1)...(19): siRNA sense strand
uggagccgguggagaagga

SEQ ID NO: 1854348 - RNA, 19 nt, Homo sapiens
  misc_RNA (1)...(19): siRNA sense strand
ucuucagccugguacauga

SEQ ID NO: 1854349 - RNA, 19 nt, Homo sapiens
  misc_RNA (1)...(19): siRNA sense strand
gcaucuacucccuacauag

SEQ ID NO: 1854350 - RNA, 19 nt, Homo sapiens
  misc_RNA (1)...(19): siRNA sense strand
uugaagauucccacacauu

SEQ ID NO: 1854351 - RNA, 19 nt, Homo sapiens
  misc_RNA (1)...(19): siRNA sense strand
gcguuggacagaaauugaa

SEQ ID NO: 1854352 - RNA, 19 nt, Homo sapiens
  misc_RNA (1)...(19): siRNA sense strand
gagguggccacgcaguaug

SEQ ID NO: 1854353 - RNA, 19 nt, Homo sapiens
  misc_RNA (1)...(19): siRNA sense strand
ccaccuccagggucuaaga

SEQ ID NO: 1854354 - RNA, 19 nt, Homo sapiens
  misc_RNA (1)...(19): siRNA sense strand
ggacagaaauugaagauuc

SEQ ID NO: 1854355 - RNA, 19 nt, Homo sapiens
  misc_RNA (1)...(19): siRNA sense strand
gaaaggcguuggacagaaa

SEQ ID NO: 1854356 - RNA, 19 nt, Homo sapiens
  misc_RNA (1)...(19): siRNA sense strand
gauaaaggcuugcucauac

SEQ ID NO: 1854357 - RNA, 19 nt, Homo sapiens
  misc_RNA (1)...(19): siRNA sense strand
gcacgugccuccugagaga

SEQ ID NO: 1854358 - RNA, 19 nt, Homo sapiens
  misc_RNA (1)...(19): siRNA sense strand
gaacuuccauccagaccaa

SEQ ID NO: 1854359 - RNA, 19 nt, Homo sapiens
  misc_RNA (1)...(19): siRNA sense strand
ccacugcccugcuggagua

SEQ ID NO: 1854360 - RNA, 19 nt, Homo sapiens
  misc_RNA (1)...(19): siRNA sense strand
ggacagugacggcgaguuu

SEQ ID NO: 1854361 - RNA, 19 nt, Homo sapiens
  misc_RNA (1)...(19): siRNA sense strand
gaaaggcgccuaccucaag

SEQ ID NO: 1854362 - RNA, 19 nt, Homo sapiens
  misc_RNA (1)...(19): siRNA sense strand
ggaaaggcguuggacagaa

SEQ ID NO: 1854363 - RNA, 19 nt, Homo sapiens
  misc_RNA (1)...(19): siRNA sense strand
gaacagagcgcaggacauc

SEQ ID NO: 1854364 - RNA, 19 nt, Homo sapiens
  misc_RNA (1)...(19): siRNA sense strand
ugaagauucccacacauua

SEQ ID NO: 1854365 - RNA, 19 nt, Homo sapiens
  misc_RNA (1)...(19): siRNA sense strand
cauacaggaugcccacuuu

SEQ ID NO: 1854366 - RNA, 19 nt, Homo sapiens
  misc_RNA (1)...(19): siRNA sense strand
gcagcguacuucuggcuuu

SEQ ID NO: 1854367 - RNA, 19 nt, Homo sapiens
  misc_RNA (1)...(19): siRNA sense strand
gcaagucucagaaggauca

SEQ ID NO: 1854368 - RNA, 19 nt, Homo sapiens
  misc_RNA (1)...(19): siRNA sense strand
ucagccaccucacccauuu

SEQ ID NO: 1854369 - RNA, 19 nt, Homo sapiens
  misc_RNA (1)...(19): siRNA sense strand
gcgccuaccucaaggacaa

SEQ ID NO: 1854370 - RNA, 19 nt, Homo sapiens
  misc_RNA (1)...(19): siRNA sense strand
ccucagcccuugacaggaa

SEQ ID NO: 1854371 - RNA, 19 nt, Homo sapiens
  misc_RNA (1)...(19): siRNA sense strand
caaucaagcagcaauggua

SEQ ID NO: 1854372 - RNA, 19 nt, Homo sapiens
  misc_RNA (1)...(19): siRNA sense strand
ggcuggaacucaagucuga

SEQ ID NO: 1854373 - RNA, 19 nt, Homo sapiens
  misc_RNA (1)...(19): siRNA sense strand
gaagauucccacacauuag

SEQ ID NO: 1854374 - RNA, 19 nt, Homo sapiens
  misc_RNA (1)...(19): siRNA sense strand
cugaggagcuggccaagug

SEQ ID NO: 1854375 - RNA, 19 nt, Homo sapiens
  misc_RNA (1)...(19): siRNA sense strand
gauaguggacgucccauuc

SEQ ID NO: 1854376 - RNA, 19 nt, Homo sapiens
  misc_RNA (1)...(19): siRNA sense strand
cugagaagccagaagauaa

SEQ ID NO: 1854377 - RNA, 19 nt, Homo sapiens
  misc_RNA (1)...(19): siRNA sense strand
gggcaagucucagaaggau

SEQ ID NO: 1854378 - RNA, 19 nt, Homo sapiens
  misc_RNA (1)...(19): siRNA sense strand
ugagaagccagaagauaaa

SEQ ID NO: 1854379 - RNA, 19 nt, Homo sapiens
  misc_RNA (1)...(19): siRNA sense strand
aagcagcaaugguacuuau

SEQ ID NO: 1854380 - RNA, 19 nt, Homo sapiens
  misc_RNA (1)...(19): siRNA sense strand
ugcggaagcucaaguacaa

SEQ ID NO: 1854381 - RNA, 19 nt, Homo sapiens
  misc_RNA (1)...(19): siRNA sense strand
agauaaaggcuugcucaua

SEQ ID NO: 1854382 - RNA, 19 nt, Homo sapiens
  misc_RNA (1)...(19): siRNA sense strand
gagaaggaacgagcaucua

SEQ ID NO: 1854383 - RNA, 19 nt, Homo sapiens
  misc_RNA (1)...(19): siRNA sense strand
uggaccaccucaucaagaa

SEQ ID NO: 1854384 - RNA, 19 nt, Homo sapiens
  misc_RNA (1)...(19): siRNA sense strand
gagcaucuacucccuacau

SEQ ID NO: 1854385 - RNA, 19 nt, Homo sapiens
  misc_RNA (1)...(19): siRNA sense strand
gcaugcggaagcucaagua

SEQ ID NO: 1854386 - RNA, 19 nt, Homo sapiens
  misc_RNA (1)...(19): siRNA sense strand
ugauggagccgguggagaa

SEQ ID NO: 1854387 - RNA, 19 nt, Homo sapiens
  misc_RNA (1)...(19): siRNA sense strand
ggagaaggaacgagcaucu

SEQ ID NO: 1854388 - RNA, 19 nt, Homo sapiens
  misc_RNA (1)...(19): siRNA sense strand
ggacuugcugggucgcuuu

SEQ ID NO: 1854389 - RNA, 19 nt, Homo sapiens
  misc_RNA (1)...(19): siRNA sense strand
uaaugaaccgccuggaaga

SEQ ID NO: 1854390 - RNA, 19 nt, Homo sapiens
  misc_RNA (1)...(19): siRNA sense strand
ggacgucccauucuaugag

SEQ ID NO: 1854391 - RNA, 19 nt, Homo sapiens
  misc_RNA (1)...(19): siRNA sense strand
uaguggacgucccauucua

SEQ ID NO: 1854392 - RNA, 19 nt, Homo sapiens
  misc_RNA (1)...(19): siRNA sense strand
agaagcugcuccacaucaa

SEQ ID NO: 1854393 - RNA, 19 nt, Homo sapiens
  misc_RNA (1)...(19): siRNA sense strand
gacagaaauugaagauucc

SEQ ID NO: 1854394 - RNA, 19 nt, Homo sapiens
  misc_RNA (1)...(19): siRNA sense strand
ucucggagccacuaaugaa

SEQ ID NO: 1854395 - RNA, 19 nt, Homo sapiens
  misc_RNA (1)...(19): siRNA sense strand
aauugaagauucccacaca

SEQ ID NO: 1854396 - RNA, 19 nt, Homo sapiens
  misc_RNA (1)...(19): siRNA sense strand
caagcagcaaugguacuua

SEQ ID NO: 1854397 - RNA, 19 nt, Homo sapiens
  misc_RNA (1)...(19): siRNA sense strand
ggaacucaagucugaaugg

SEQ ID NO: 1854398 - RNA, 19 nt, Homo sapiens
  misc_RNA (1)...(19): siRNA sense strand
cagaagcugcuccacauca

SEQ ID NO: 1854399 - RNA, 19 nt, Homo sapiens
  misc_RNA (1)...(19): siRNA sense strand
uccagaagcugcuccacau

SEQ ID NO: 1854400 - RNA, 19 nt, Homo sapiens
  misc_RNA (1)...(19): siRNA sense strand
ccucccagguuccuugaug

SEQ ID NO: 1854401 - RNA, 19 nt, Homo sapiens
  misc_RNA (1)...(19): siRNA sense strand
ugaaccgccuggaagacaa

SEQ ID NO: 1854402 - RNA, 19 nt, Homo sapiens
  misc_RNA (1)...(19): siRNA sense strand
ucucucacuugcugucuga

SEQ ID NO: 1854403 - RNA, 19 nt, Homo sapiens
  misc_RNA (1)...(19): siRNA sense strand
cgacuuggacagcaaucaa

SEQ ID NO: 1854404 - RNA, 19 nt, Homo sapiens
  misc_RNA (1)...(19): siRNA sense strand
gcgaguuucugcccguaag

SEQ ID NO: 1854405 - RNA, 19 nt, Homo sapiens
  misc_RNA (1)...(19): siRNA sense strand
cccauaagacucugacuuc

SEQ ID NO: 1854406 - RNA, 19 nt, Homo sapiens
  misc_RNA (1)...(19): siRNA sense strand
gccucggucuggcauggua

SEQ ID NO: 1854407 - RNA, 19 nt, Homo sapiens
  misc_RNA (1)...(19): siRNA sense strand
auaaaggcuugcucauaca

SEQ ID NO: 1854408 - RNA, 19 nt, Homo sapiens
  misc_RNA (1)...(19): siRNA sense strand
gaaggaacgagcaucuacu

SEQ ID NO: 1854409 - RNA, 19 nt, Homo sapiens
  misc_RNA (1)...(19): siRNA sense strand
ccacuuucaucaacuucuc

SEQ ID NO: 1854410 - RNA, 19 nt, Homo sapiens
  misc_RNA (1)...(19): siRNA sense strand
gcccauaagacucugacuu

SEQ ID NO: 1854411 - RNA, 19 nt, Homo sapiens
  misc_RNA (1)...(19): siRNA sense strand
gcaaucaagcagcaauggu

SEQ ID NO: 1854412 - RNA, 19 nt, Homo sapiens
  misc_RNA (1)...(19): siRNA sense strand
cguccuccacccugaauuu

SEQ ID NO: 1854413 - RNA, 19 nt, Homo sapiens
  misc_RNA (1)...(19): siRNA sense strand
agaccaagaggaucaguuc

SEQ ID NO: 1854414 - RNA, 19 nt, Homo sapiens
  misc_RNA (1)...(19): siRNA sense strand
agcaucuacucccuacaua

SEQ ID NO: 1854415 - RNA, 19 nt, Homo sapiens
  misc_RNA (1)...(19): siRNA sense strand
gacgucccauucuaugagu

SEQ ID NO: 1854416 - RNA, 19 nt, Homo sapiens
  misc_RNA (1)...(19): siRNA sense strand
ggcguuggacagaaauuga

SEQ ID NO: 1854417 - RNA, 19 nt, Homo sapiens
  misc_RNA (1)...(19): siRNA sense strand
uggagccgguggagaagga

SEQ ID NO: 1854418 - RNA, 19 nt, Homo sapiens
  misc_RNA (1)...(19): siRNA sense strand
ucuucagccugguacauga

SEQ ID NO: 1854419 - RNA, 19 nt, Homo sapiens
  misc_RNA (1)...(19): siRNA sense strand
gcaucuacucccuacauag

SEQ ID NO: 1854420 - RNA, 19 nt, Homo sapiens
  misc_RNA (1)...(19): siRNA sense strand
uugaagauucccacacauu

SEQ ID NO: 1854421 - RNA, 19 nt, Homo sapiens
  misc_RNA (1)...(19): siRNA sense strand
gcguuggacagaaauugaa

SEQ ID NO: 1854422 - RNA, 19 nt, Homo sapiens
  misc_RNA (1)...(19): siRNA sense strand
gagguggccacgcaguaug

SEQ ID NO: 1854423 - RNA, 19 nt, Homo sapiens
  misc_RNA (1)...(19): siRNA sense strand
ccaccuccagggucuaaga

SEQ ID NO: 1854424 - RNA, 19 nt, Homo sapiens
  misc_RNA (1)...(19): siRNA sense strand
gaaaccagcuucccuauuc

SEQ ID NO: 1854425 - RNA, 19 nt, Homo sapiens
  misc_RNA (1)...(19): siRNA sense strand
caacauaccucccuuggaa

SEQ ID NO: 1854426 - RNA, 19 nt, Homo sapiens
  misc_RNA (1)...(19): siRNA sense strand
gagagaagcuuugauuuca

SEQ ID NO: 1854427 - RNA, 19 nt, Homo sapiens
  misc_RNA (1)...(19): siRNA sense strand
gaaaccagcucuuggaaaa

SEQ ID NO: 1854428 - RNA, 19 nt, Homo sapiens
  misc_RNA (1)...(19): siRNA sense strand
gcccauaucccacccuuua

SEQ ID NO: 1854429 - RNA, 19 nt, Homo sapiens
  misc_RNA (1)...(19): siRNA sense strand
uaacuaugcuccugaagau

SEQ ID NO: 1854430 - RNA, 19 nt, Homo sapiens
  misc_RNA (1)...(19): siRNA sense strand
cagagugggucccuucuuu

SEQ ID NO: 1854431 - RNA, 19 nt, Homo sapiens
  misc_RNA (1)...(19): siRNA sense strand
ccagaagacuuugauauag

SEQ ID NO: 1854432 - RNA, 19 nt, Homo sapiens
  misc_RNA (1)...(19): siRNA sense strand
ccaccaguaucccuaauga

SEQ ID NO: 1854433 - RNA, 19 nt, Homo sapiens
  misc_RNA (1)...(19): siRNA sense strand
gaaauacucaagcccaaga

SEQ ID NO: 1854434 - RNA, 19 nt, Homo sapiens
  misc_RNA (1)...(19): siRNA sense strand
ccaagggaguucaugauca

SEQ ID NO: 1854435 - RNA, 19 nt, Homo sapiens
  misc_RNA (1)...(19): siRNA sense strand
uauaaggauuccaccagua

SEQ ID NO: 1854436 - RNA, 19 nt, Homo sapiens
  misc_RNA (1)...(19): siRNA sense strand
cagaagacuuugauauagu

SEQ ID NO: 1854437 - RNA, 19 nt, Homo sapiens
  misc_RNA (1)...(19): siRNA sense strand
gaccagagagcaaaucaga

SEQ ID NO: 1854438 - RNA, 19 nt, Homo sapiens
  misc_RNA (1)...(19): siRNA sense strand
gcagagacuugggaugugu

SEQ ID NO: 1854439 - RNA, 19 nt, Homo sapiens
  misc_RNA (1)...(19): siRNA sense strand
gagcaaaucagagacagaa

SEQ ID NO: 1854440 - RNA, 19 nt, Homo sapiens
  misc_RNA (1)...(19): siRNA sense strand
uaacugucauucugcuuug

SEQ ID NO: 1854441 - RNA, 19 nt, Homo sapiens
  misc_RNA (1)...(19): siRNA sense strand
gcuaugaaauacagugaca

SEQ ID NO: 1854442 - RNA, 19 nt, Homo sapiens
  misc_RNA (1)...(19): siRNA sense strand
ggaaaccagcucuuggaaa

SEQ ID NO: 1854443 - RNA, 19 nt, Homo sapiens
  misc_RNA (1)...(19): siRNA sense strand
caagggaguucaugaucau

SEQ ID NO: 1854444 - RNA, 19 nt, Homo sapiens
  misc_RNA (1)...(19): siRNA sense strand
gaagcgccaucaagagaca

SEQ ID NO: 1854445 - RNA, 19 nt, Homo sapiens
  misc_RNA (1)...(19): siRNA sense strand
gccacucgcccuuauuaua

SEQ ID NO: 1854446 - RNA, 19 nt, Homo sapiens
  misc_RNA (1)...(19): siRNA sense strand
agacagcaguggucauuuc

SEQ ID NO: 1854447 - RNA, 19 nt, Homo sapiens
  misc_RNA (1)...(19): siRNA sense strand
ccagagagcaaaucagaga

SEQ ID NO: 1854448 - RNA, 19 nt, Homo sapiens
  misc_RNA (1)...(19): siRNA sense strand
caagacagcaguggucauu

SEQ ID NO: 1854449 - RNA, 19 nt, Homo sapiens
  misc_RNA (1)...(19): siRNA sense strand
ccauaucccacccuuuaua

SEQ ID NO: 1854450 - RNA, 19 nt, Homo sapiens
  misc_RNA (1)...(19): siRNA sense strand
agaagaagcgccaucaaga

SEQ ID NO: 1854451 - RNA, 19 nt, Homo sapiens
  misc_RNA (1)...(19): siRNA sense strand
ggacuaaccaugggcaguu

SEQ ID NO: 1854452 - RNA, 19 nt, Homo sapiens
  misc_RNA (1)...(19): siRNA sense strand
gaagaagcgccaucaagag

SEQ ID NO: 1854453 - RNA, 19 nt, Homo sapiens
  misc_RNA (1)...(19): siRNA sense strand
gaaggcaugcccuaacugu

SEQ ID NO: 1854454 - RNA, 19 nt, Homo sapiens
  misc_RNA (1)...(19): siRNA sense strand
uccagaagacuuugauaua

SEQ ID NO: 1854455 - RNA, 19 nt, Homo sapiens
  misc_RNA (1)...(19): siRNA sense strand
acaaauggccucuuucuac

SEQ ID NO: 1854456 - RNA, 19 nt, Homo sapiens
  misc_RNA (1)...(19): siRNA sense strand
gcagucaguuacucagaca

SEQ ID NO: 1854457 - RNA, 19 nt, Homo sapiens
  misc_RNA (1)...(19): siRNA sense strand
guaacuaugcuccugaaga

SEQ ID NO: 1854458 - RNA, 19 nt, Homo sapiens
  misc_RNA (1)...(19): siRNA sense strand
ugagagaagcuuugauuuc

SEQ ID NO: 1854459 - RNA, 19 nt, Homo sapiens
  misc_RNA (1)...(19): siRNA sense strand
uaugagagaagcuuugauu

SEQ ID NO: 1854460 - RNA, 19 nt, Homo sapiens
  misc_RNA (1)...(19): siRNA sense strand
caaagucugauguuuacaa

SEQ ID NO: 1854461 - RNA, 19 nt, Homo sapiens
  misc_RNA (1)...(19): siRNA sense strand
caaccacaauggccacauc

SEQ ID NO: 1854462 - RNA, 19 nt, Homo sapiens
  misc_RNA (1)...(19): siRNA sense strand
gaagaaggcaugcccuaac

SEQ ID NO: 1854463 - RNA, 19 nt, Homo sapiens
  misc_RNA (1)...(19): siRNA sense strand
cgacaaggcacggcugaaa

SEQ ID NO: 1854464 - RNA, 19 nt, Homo sapiens
  misc_RNA (1)...(19): siRNA sense strand
ugaaauacagugacagugu

SEQ ID NO: 1854465 - RNA, 19 nt, Homo sapiens
  misc_RNA (1)...(19): siRNA sense strand
cauaucccacccuuuauaa

SEQ ID NO: 1854466 - RNA, 19 nt, Homo sapiens
  misc_RNA (1)...(19): siRNA sense strand
ucccaaagucugauguuua

SEQ ID NO: 1854467 - RNA, 19 nt, Homo sapiens
  misc_RNA (1)...(19): siRNA sense strand
gacaaauggccucuuucua

SEQ ID NO: 1854468 - RNA, 19 nt, Homo sapiens
  misc_RNA (1)...(19): siRNA sense strand
gaucauccaagaccagaga

SEQ ID NO: 1854469 - RNA, 19 nt, Homo sapiens
  misc_RNA (1)...(19): siRNA sense strand
gcuuugauuucaccaacaa

SEQ ID NO: 1854470 - RNA, 19 nt, Homo sapiens
  misc_RNA (1)...(19): siRNA sense strand
caucugaacacacuacaau

SEQ ID NO: 1854471 - RNA, 19 nt, Homo sapiens
  misc_RNA (1)...(19): siRNA sense strand
auacugggaugucugucua

SEQ ID NO: 1854472 - RNA, 19 nt, Homo sapiens
  misc_RNA (1)...(19): siRNA sense strand
gaucaccaccaccacuaaa

SEQ ID NO: 1854473 - RNA, 19 nt, Homo sapiens
  misc_RNA (1)...(19): siRNA sense strand
gcaguggucauuucagcaa

SEQ ID NO: 1854474 - RNA, 19 nt, Homo sapiens
  misc_RNA (1)...(19): siRNA sense strand
gacuaaccaugggcaguuu

SEQ ID NO: 1854475 - RNA, 19 nt, Homo sapiens
  misc_RNA (1)...(19): siRNA sense strand
gagaauccgaggcagaaga

SEQ ID NO: 1854476 - RNA, 19 nt, Homo sapiens
  misc_RNA (1)...(19): siRNA sense strand
uaugugcgcuucaucuaca

SEQ ID NO: 1854477 - RNA, 19 nt, Homo sapiens
  misc_RNA (1)...(19): siRNA sense strand
cccaaagucugauguuuac

SEQ ID NO: 1854478 - RNA, 19 nt, Homo sapiens
  misc_RNA (1)...(19): siRNA sense strand
ggaaaauccagaagacuuu

SEQ ID NO: 1854479 - RNA, 19 nt, Homo sapiens
  misc_RNA (1)...(19): siRNA sense strand
caaagcuaccugugaccua

SEQ ID NO: 1854480 - RNA, 19 nt, Homo sapiens
  misc_RNA (1)...(19): siRNA sense strand
gcuaugugcgcuucaucua

SEQ ID NO: 1854481 - RNA, 19 nt, Homo sapiens
  misc_RNA (1)...(19): siRNA sense strand
agaguggccugacggcuau

SEQ ID NO: 1854482 - RNA, 19 nt, Homo sapiens
  misc_RNA (1)...(19): siRNA sense strand
cagcagcgaugagaagaag

SEQ ID NO: 1854483 - RNA, 19 nt, Homo sapiens
  misc_RNA (1)...(19): siRNA sense strand
gagacagaagcuagaagaa

SEQ ID NO: 1854484 - RNA, 19 nt, Homo sapiens
  misc_RNA (1)...(19): siRNA sense strand
cagaugaagcagagacuug

SEQ ID NO: 1854485 - RNA, 19 nt, Homo sapiens
  misc_RNA (1)...(19): siRNA sense strand
aagaagcgccaucaagaga

SEQ ID NO: 1854486 - RNA, 19 nt, Homo sapiens
  misc_RNA (1)...(19): siRNA sense strand
agagugggucccuucuuua

SEQ ID NO: 1854487 - RNA, 19 nt, Homo sapiens
  misc_RNA (1)...(19): siRNA sense strand
ugccacccuuccagaaaua

SEQ ID NO: 1854488 - RNA, 19 nt, Homo sapiens
  misc_RNA (1)...(19): siRNA sense strand
ugaccuagccaccuuucaa

SEQ ID NO: 1854489 - RNA, 19 nt, Homo sapiens
  misc_RNA (1)...(19): siRNA sense strand
gcaacauaccucccuugga

SEQ ID NO: 1854490 - RNA, 19 nt, Homo sapiens
  misc_RNA (1)...(19): siRNA sense strand
uggccacucgcccuuauua

SEQ ID NO: 1854491 - RNA, 19 nt, Homo sapiens
  misc_RNA (1)...(19): siRNA sense strand
caguaucccuaaugacaca

SEQ ID NO: 1854492 - RNA, 19 nt, Homo sapiens
  misc_RNA (1)...(19): siRNA sense strand
caacaccaacaaccacaau

SEQ ID NO: 1854493 - RNA, 19 nt, Homo sapiens
  misc_RNA (1)...(19): siRNA sense strand
cuaacugucauucugcuuu

SEQ ID NO: 1854494 - RNA, 19 nt, Homo sapiens
  misc_RNA (1)...(19): siRNA sense strand
gcuaugagagaagcuuuga

SEQ ID NO: 1854495 - RNA, 19 nt, Homo sapiens
  misc_RNA (1)...(19): siRNA sense strand
gcuuuggaguugauuccuu

SEQ ID NO: 1854496 - RNA, 19 nt, Homo sapiens
  misc_RNA (1)...(19): siRNA sense strand
ugaaaccagcuucccuauu

SEQ ID NO: 1854497 - RNA, 19 nt, Homo sapiens
  misc_RNA (1)...(19): siRNA sense strand
cuacaacaaugaggauuuu

SEQ ID NO: 1854498 - RNA, 19 nt, Homo sapiens
  misc_RNA (1)...(19): siRNA sense strand
ucagggccaccuccuauga

SEQ ID NO: 1854499 - RNA, 19 nt, Homo sapiens
  misc_RNA (1)...(19): siRNA sense strand
ggccacauccucaagaagu

SEQ ID NO: 1854500 - RNA, 19 nt, Homo sapiens
  misc_RNA (1)...(19): siRNA sense strand
gcagcuaugaauuggcaaa

SEQ ID NO: 1854501 - RNA, 19 nt, Homo sapiens
  misc_RNA (1)...(19): siRNA sense strand
ccuacaacaaugaggauuu

SEQ ID NO: 1854502 - RNA, 19 nt, Homo sapiens
  misc_RNA (1)...(19): siRNA sense strand
cauggccacucgcccuuau

SEQ ID NO: 1854503 - RNA, 19 nt, Homo sapiens
  misc_RNA (1)...(19): siRNA sense strand
aaacccagccuuguggaaa

SEQ ID NO: 1854504 - RNA, 19 nt, Homo sapiens
  misc_RNA (1)...(19): siRNA sense strand
uacagcagcuaugagagaa

SEQ ID NO: 1854505 - RNA, 19 nt, Homo sapiens
  misc_RNA (1)...(19): siRNA sense strand
agagacagaagcuagaaga

SEQ ID NO: 1854506 - RNA, 19 nt, Homo sapiens
  misc_RNA (1)...(19): siRNA sense strand
gacacagacuggguucauc

SEQ ID NO: 1854507 - RNA, 19 nt, Homo sapiens
  misc_RNA (1)...(19): siRNA sense strand
ccugugaccuagccaccuu

SEQ ID NO: 1854508 - RNA, 19 nt, Homo sapiens
  misc_RNA (1)...(19): siRNA sense strand
aagaaggcaugcccuaacu

SEQ ID NO: 1854509 - RNA, 19 nt, Homo sapiens
  misc_RNA (1)...(19): siRNA sense strand
uagaagaagcgccaucaag

SEQ ID NO: 1854510 - RNA, 19 nt, Homo sapiens
  misc_RNA (1)...(19): siRNA sense strand
agaagaaggcaugcccuaa

SEQ ID NO: 1854511 - RNA, 19 nt, Homo sapiens
  misc_RNA (1)...(19): siRNA sense strand
ggcccucuuugaccaauuc

SEQ ID NO: 1854512 - RNA, 19 nt, Homo sapiens
  misc_RNA (1)...(19): siRNA sense strand
gcaacaccaacaaccacaa

SEQ ID NO: 1854513 - RNA, 19 nt, Homo sapiens
  misc_RNA (1)...(19): siRNA sense strand
gcuagaagaagcgccauca

SEQ ID NO: 1854514 - RNA, 19 nt, Homo sapiens
  misc_RNA (1)...(19): siRNA sense strand
gugaucaccaccaccacua

SEQ ID NO: 1854515 - RNA, 19 nt, Homo sapiens
  misc_RNA (1)...(19): siRNA sense strand
uaggccaccuugcagcuau

SEQ ID NO: 1854516 - RNA, 19 nt, Homo sapiens
  misc_RNA (1)...(19): siRNA sense strand
ggucauuucagcaacauac

SEQ ID NO: 1854517 - RNA, 19 nt, Homo sapiens
  misc_RNA (1)...(19): siRNA sense strand
ugaagauacugggaugucu

SEQ ID NO: 1854518 - RNA, 19 nt, Homo sapiens
  misc_RNA (1)...(19): siRNA sense strand
cuuucgagcuguaacuaug

SEQ ID NO: 1854519 - RNA, 19 nt, Homo sapiens
  misc_RNA (1)...(19): siRNA sense strand
ucauucugcuuuggaguug

SEQ ID NO: 1854520 - RNA, 19 nt, Homo sapiens
  misc_RNA (1)...(19): siRNA sense strand
auacagcagcuaugagaga

SEQ ID NO: 1854521 - RNA, 19 nt, Homo sapiens
  misc_RNA (1)...(19): siRNA sense strand
ucugauguuuacaaagcua

SEQ ID NO: 1854522 - RNA, 19 nt, Homo sapiens
  misc_RNA (1)...(19): siRNA sense strand
cucaggagcuggcccucuu

SEQ ID NO: 1854523 - RNA, 19 nt, Homo sapiens
  misc_RNA (1)...(19): siRNA sense strand
aagcagagacuugggaugu

SEQ ID NO: 1854524 - RNA, 19 nt, Homo sapiens
  misc_RNA (1)...(19): siRNA sense strand
gaacaacccugucuucacu

SEQ ID NO: 1854525 - RNA, 19 nt, Homo sapiens
  misc_RNA (1)...(19): siRNA sense strand
cgaccaagcucgugaacaa

SEQ ID NO: 1854526 - RNA, 19 nt, Homo sapiens
  misc_RNA (1)...(19): siRNA sense strand
acaagaagcuccggaauuc

SEQ ID NO: 1854527 - RNA, 19 nt, Homo sapiens
  misc_RNA (1)...(19): siRNA sense strand
gcagaauccugacaaccaa

SEQ ID NO: 1854528 - RNA, 19 nt, Homo sapiens
  misc_RNA (1)...(19): siRNA sense strand
gcucuaaucaucuuuaugu

SEQ ID NO: 1854529 - RNA, 19 nt, Homo sapiens
  misc_RNA (1)...(19): siRNA sense strand
caaucgcuaucaaccguua

SEQ ID NO: 1854530 - RNA, 19 nt, Homo sapiens
  misc_RNA (1)...(19): siRNA sense strand
caaugagaauuuccgaaga

SEQ ID NO: 1854531 - RNA, 19 nt, Homo sapiens
  misc_RNA (1)...(19): siRNA sense strand
gaucugagccaguuacagu

SEQ ID NO: 1854532 - RNA, 19 nt, Homo sapiens
  misc_RNA (1)...(19): siRNA sense strand
ugaagaugauccugaugaa

SEQ ID NO: 1854533 - RNA, 19 nt, Homo sapiens
  misc_RNA (1)...(19): siRNA sense strand
ucuacgggcuccucaauga

SEQ ID NO: 1854534 - RNA, 19 nt, Homo sapiens
  misc_RNA (1)...(19): siRNA sense strand
aacccugucuucacuguua

SEQ ID NO: 1854535 - RNA, 19 nt, Homo sapiens
  misc_RNA (1)...(19): siRNA sense strand
ccacaagucugucuuuagc

SEQ ID NO: 1854536 - RNA, 19 nt, Homo sapiens
  misc_RNA (1)...(19): siRNA sense strand
gagaauuuccgaagagaau

SEQ ID NO: 1854537 - RNA, 19 nt, Homo sapiens
  misc_RNA (1)...(19): siRNA sense strand
gaacaagaagcuccggaau

SEQ ID NO: 1854538 - RNA, 19 nt, Homo sapiens
  misc_RNA (1)...(19): siRNA sense strand
gaagaugauccugaugaaa

SEQ ID NO: 1854539 - RNA, 19 nt, Homo sapiens
  misc_RNA (1)...(19): siRNA sense strand
caccacaagucugucuuua

SEQ ID NO: 1854540 - RNA, 19 nt, Homo sapiens
  misc_RNA (1)...(19): siRNA sense strand
ggagauggcaggcaagauc

SEQ ID NO: 1854541 - RNA, 19 nt, Homo sapiens
  misc_RNA (1)...(19): siRNA sense strand
gugaggaucuggaccaaag

SEQ ID NO: 1854542 - RNA, 19 nt, Homo sapiens
  misc_RNA (1)...(19): siRNA sense strand
gcccaccacugcugacuau

SEQ ID NO: 1854543 - RNA, 19 nt, Homo sapiens
  misc_RNA (1)...(19): siRNA sense strand
caccaucguuguagaccua

SEQ ID NO: 1854544 - RNA, 19 nt, Homo sapiens
  misc_RNA (1)...(19): siRNA sense strand
gcaacuccauggucauuuu

SEQ ID NO: 1854545 - RNA, 19 nt, Homo sapiens
  misc_RNA (1)...(19): siRNA sense strand
guaccaaugauuaccauga

SEQ ID NO: 1854546 - RNA, 19 nt, Homo sapiens
  misc_RNA (1)...(19): siRNA sense strand
cuaccaguaccaaugauua

SEQ ID NO: 1854547 - RNA, 19 nt, Homo sapiens
  misc_RNA (1)...(19): siRNA sense strand
acaccugcaucuucaacua

SEQ ID NO: 1854548 - RNA, 19 nt, Homo sapiens
  misc_RNA (1)...(19): siRNA sense strand
caacuggcuuuaucuugca

SEQ ID NO: 1854549 - RNA, 19 nt, Homo sapiens
  misc_RNA (1)...(19): siRNA sense strand
gggugacucuguccauuuc

SEQ ID NO: 1854550 - RNA, 19 nt, Homo sapiens
  misc_RNA (1)...(19): siRNA sense strand
gggugacucuguccauuuc

SEQ ID NO: 1854551 - RNA, 19 nt, Homo sapiens
  misc_RNA (1)...(19): siRNA sense strand
aagaugauccugaugaaau

SEQ ID NO: 1854552 - RNA, 19 nt, Homo sapiens
  misc_RNA (1)...(19): siRNA sense strand
ggaauucuggcaacaucuu

SEQ ID NO: 1854553 - RNA, 19 nt, Homo sapiens
  misc_RNA (1)...(19): siRNA sense strand
ucacuaccaguaccaauga

SEQ ID NO: 1854554 - RNA, 19 nt, Homo sapiens
  misc_RNA (1)...(19): siRNA sense strand
ugacaacccugagcucucu

SEQ ID NO: 1854555 - RNA, 19 nt, Homo sapiens
  misc_RNA (1)...(19): siRNA sense strand
gcggcacccuaucauauuc

SEQ ID NO: 1854556 - RNA, 19 nt, Homo sapiens
  misc_RNA (1)...(19): siRNA sense strand
ccucaacgcugugaucuac

SEQ ID NO: 1854557 - RNA, 19 nt, Homo sapiens
  misc_RNA (1)...(19): siRNA sense strand
gguuaucaccaucguugua

SEQ ID NO: 1854558 - RNA, 19 nt, Homo sapiens
  misc_RNA (1)...(19): siRNA sense strand
gagaauacuggaccaucuu

SEQ ID NO: 1854559 - RNA, 19 nt, Homo sapiens
  misc_RNA (1)...(19): siRNA sense strand
gcaauuuucuaaccauguu

SEQ ID NO: 1854560 - RNA, 19 nt, Homo sapiens
  misc_RNA (1)...(19): siRNA sense strand
gaucuucagugugcgcaau

SEQ ID NO: 1854561 - RNA, 19 nt, Homo sapiens
  misc_RNA (1)...(19): siRNA sense strand
cgaugaauguccggaaugu

SEQ ID NO: 1854562 - RNA, 19 nt, Homo sapiens
  misc_RNA (1)...(19): siRNA sense strand
ggaccaucuuccaugcuau

SEQ ID NO: 1854563 - RNA, 19 nt, Homo sapiens
  misc_RNA (1)...(19): siRNA sense strand
gaauacccaccggcucuaa

SEQ ID NO: 1854564 - RNA, 19 nt, Homo sapiens
  misc_RNA (1)...(19): siRNA sense strand
ggucaucaccuggaucaug

SEQ ID NO: 1854565 - RNA, 19 nt, Homo sapiens
  misc_RNA (1)...(19): siRNA sense strand
agaugauccugaugaaaug

SEQ ID NO: 1854566 - RNA, 19 nt, Homo sapiens
  misc_RNA (1)...(19): siRNA sense strand
gcccaucacuggccaccau

SEQ ID NO: 1854567 - RNA, 19 nt, Homo sapiens
  misc_RNA (1)...(19): siRNA sense strand
gaucuacgggcuccucaau

SEQ ID NO: 1854568 - RNA, 19 nt, Homo sapiens
  misc_RNA (1)...(19): siRNA sense strand
uaaccauguuugugaucuu

SEQ ID NO: 1854569 - RNA, 19 nt, Homo sapiens
  misc_RNA (1)...(19): siRNA sense strand
uuucaagccugacucuguu

SEQ ID NO: 1854570 - RNA, 19 nt, Homo sapiens
  misc_RNA (1)...(19): siRNA sense strand
gccugacucuguucauuuc

SEQ ID NO: 1854571 - RNA, 19 nt, Homo sapiens
  misc_RNA (1)...(19): siRNA sense strand
ucuugcagccuacuucaua

SEQ ID NO: 1854572 - RNA, 19 nt, Homo sapiens
  misc_RNA (1)...(19): siRNA sense strand
gguuguugauguugaagau

SEQ ID NO: 1854573 - RNA, 19 nt, Homo sapiens
  misc_RNA (1)...(19): siRNA sense strand
ucccuggccucaucaguga

SEQ ID NO: 1854574 - RNA, 19 nt, Homo sapiens
  misc_RNA (1)...(19): siRNA sense strand
ucaacgugcucacugucuu

SEQ ID NO: 1854575 - RNA, 19 nt, Homo sapiens
  misc_RNA (1)...(19): siRNA sense strand
ugucgugguuguugauguu

SEQ ID NO: 1854576 - RNA, 19 nt, Homo sapiens
  misc_RNA (1)...(19): siRNA sense strand
ucagugauauucgugagau

SEQ ID NO: 1854577 - RNA, 19 nt, Homo sapiens
  misc_RNA (1)...(19): siRNA sense strand
agagaauacuggaccaucu

SEQ ID NO: 1854578 - RNA, 19 nt, Homo sapiens
  misc_RNA (1)...(19): siRNA sense strand
cuucauagccuacuucaac

SEQ ID NO: 1854579 - RNA, 19 nt, Homo sapiens
  misc_RNA (1)...(19): siRNA sense strand
ccaaugauuaccaugaugu

SEQ ID NO: 1854580 - RNA, 19 nt, Homo sapiens
  misc_RNA (1)...(19): siRNA sense strand
uaccaaugauuaccaugau

SEQ ID NO: 1854581 - RNA, 19 nt, Homo sapiens
  misc_RNA (1)...(19): siRNA sense strand
ccaccacaagucugucuuu

SEQ ID NO: 1854582 - RNA, 19 nt, Homo sapiens
  misc_RNA (1)...(19): siRNA sense strand
gcuaugcggcacccuauca

SEQ ID NO: 1854583 - RNA, 19 nt, Homo sapiens
  misc_RNA (1)...(19): siRNA sense strand
aacaagaagcuccggaauu

SEQ ID NO: 1854584 - RNA, 19 nt, Homo sapiens
  misc_RNA (1)...(19): siRNA sense strand
ccacuaccagccacccuaa

SEQ ID NO: 1854585 - RNA, 19 nt, Homo sapiens
  misc_RNA (1)...(19): siRNA sense strand
ccaagucugccacugucua

SEQ ID NO: 1854586 - RNA, 19 nt, Homo sapiens
  misc_RNA (1)...(19): siRNA sense strand
guggucggcuccaucuuca

SEQ ID NO: 1854587 - RNA, 19 nt, Homo sapiens
  misc_RNA (1)...(19): siRNA sense strand
gaggaaaccccgaugaaug

SEQ ID NO: 1854588 - RNA, 19 nt, Homo sapiens
  misc_RNA (1)...(19): siRNA sense strand
aaugagaauuuccgaagag

SEQ ID NO: 1854589 - RNA, 19 nt, Homo sapiens
  misc_RNA (1)...(19): siRNA sense strand
caacgugcucacugucuug

SEQ ID NO: 1854590 - RNA, 19 nt, Homo sapiens
  misc_RNA (1)...(19): siRNA sense strand
uuucuaaccauguuuguga

SEQ ID NO: 1854591 - RNA, 19 nt, Homo sapiens
  misc_RNA (1)...(19): siRNA sense strand
gcaucuaccuggucaucac

SEQ ID NO: 1854592 - RNA, 19 nt, Homo sapiens
  misc_RNA (1)...(19): siRNA sense strand
caucuacccauacccuuug

SEQ ID NO: 1854593 - RNA, 19 nt, Homo sapiens
  misc_RNA (1)...(19): siRNA sense strand
uuguugauguugaagauga

SEQ ID NO: 1854594 - RNA, 19 nt, Homo sapiens
  misc_RNA (1)...(19): siRNA sense strand
aagccugacucuguucauu

SEQ ID NO: 1854595 - RNA, 19 nt, Homo sapiens
  misc_RNA (1)...(19): siRNA sense strand
caccggcucuaaucaucuu

SEQ ID NO: 1854596 - RNA, 19 nt, Homo sapiens
  misc_RNA (1)...(19): siRNA sense strand
acgaacggaucuucagugu

SEQ ID NO: 1854597 - RNA, 19 nt, Homo sapiens
  misc_RNA (1)...(19): siRNA sense strand
gccacagccuccaguacga

SEQ ID NO: 1854598 - RNA, 19 nt, Homo sapiens
  misc_RNA (1)...(19): siRNA sense strand
ccaguuacagugccagaug

SEQ ID NO: 1854599 - RNA, 19 nt, Homo sapiens
  misc_RNA (1)...(19): siRNA sense strand
gugacucuguccauuucaa

SEQ ID NO: 1854600 - RNA, 19 nt, Homo sapiens
  misc_RNA (1)...(19): siRNA sense strand
gugacucuguccauuucaa

SEQ ID NO: 1854601 - RNA, 19 nt, Homo sapiens
  misc_RNA (1)...(19): siRNA sense strand
gcgcaauaccugcaucuac

SEQ ID NO: 1854602 - RNA, 19 nt, Homo sapiens
  misc_RNA (1)...(19): siRNA sense strand
ccaucuacccauacccuuu

SEQ ID NO: 1854603 - RNA, 19 nt, Homo sapiens
  misc_RNA (1)...(19): siRNA sense strand
ccggaauucuggcaacauc

SEQ ID NO: 1854604 - RNA, 19 nt, Homo sapiens
  misc_RNA (1)...(19): siRNA sense strand
gacagugaccucccugagu

SEQ ID NO: 1854605 - RNA, 19 nt, Homo sapiens
  misc_RNA (1)...(19): siRNA sense strand
ggcagaauccugacaacca

SEQ ID NO: 1854606 - RNA, 19 nt, Homo sapiens
  misc_RNA (1)...(19): siRNA sense strand
gcaccuacaccugcaucuu

SEQ ID NO: 1854607 - RNA, 19 nt, Homo sapiens
  misc_RNA (1)...(19): siRNA sense strand
caccuacaccugcaucuuc

SEQ ID NO: 1854608 - RNA, 19 nt, Homo sapiens
  misc_RNA (1)...(19): siRNA sense strand
caccaucgcugaccuuccu

SEQ ID NO: 1854609 - RNA, 19 nt, Homo sapiens
  misc_RNA (1)...(19): siRNA sense strand
uaucgcaaaucugccucua

SEQ ID NO: 1854610 - RNA, 19 nt, Homo sapiens
  misc_RNA (1)...(19): siRNA sense strand
gaauuuccgaagagaauac

SEQ ID NO: 1854611 - RNA, 19 nt, Homo sapiens
  misc_RNA (1)...(19): siRNA sense strand
gagguucgcaauuuucuaa

SEQ ID NO: 1854612 - RNA, 19 nt, Homo sapiens
  misc_RNA (1)...(19): siRNA sense strand
cggcucuaaucaucuuuau

SEQ ID NO: 1854613 - RNA, 19 nt, Homo sapiens
  misc_RNA (1)...(19): siRNA sense strand
uugaagaugauccugauga

SEQ ID NO: 1854614 - RNA, 19 nt, Homo sapiens
  misc_RNA (1)...(19): siRNA sense strand
ugacgaagaacaagaagcu

SEQ ID NO: 1854615 - RNA, 19 nt, Homo sapiens
  misc_RNA (1)...(19): siRNA sense strand
gaccaucuuccaugcuaug

SEQ ID NO: 1854616 - RNA, 19 nt, Homo sapiens
  misc_RNA (1)...(19): siRNA sense strand
gaagagaauacuggaccau

SEQ ID NO: 1854617 - RNA, 19 nt, Homo sapiens
  misc_RNA (1)...(19): siRNA sense strand
cuaucaacgugcucacugu

SEQ ID NO: 1854618 - RNA, 19 nt, Homo sapiens
  misc_RNA (1)...(19): siRNA sense strand
guacgaacggaucuucagu

SEQ ID NO: 1854619 - RNA, 19 nt, Homo sapiens
  misc_RNA (1)...(19): siRNA sense strand
caugaugucgugguuguug

SEQ ID NO: 1854620 - RNA, 19 nt, Homo sapiens
  misc_RNA (1)...(19): siRNA sense strand
cuccaagucugccuucagu

SEQ ID NO: 1854621 - RNA, 19 nt, Homo sapiens
  misc_RNA (1)...(19): siRNA sense strand
ugacucuguucauuucaag

SEQ ID NO: 1854622 - RNA, 19 nt, Homo sapiens
  misc_RNA (1)...(19): siRNA sense strand
cguccucccucuccucauc

SEQ ID NO: 1854623 - RNA, 19 nt, Homo sapiens
  misc_RNA (1)...(19): siRNA sense strand
aagggugacucuguccauu

SEQ ID NO: 1854624 - RNA, 19 nt, Homo sapiens
  misc_RNA (1)...(19): siRNA sense strand
gaacagaguugaaguuaaa

SEQ ID NO: 1854625 - RNA, 19 nt, Homo sapiens
  misc_RNA (1)...(19): siRNA sense strand
gaagagccuugcuuuauua

SEQ ID NO: 1854626 - RNA, 19 nt, Homo sapiens
  misc_RNA (1)...(19): siRNA sense strand
uaaaguaccuggcaaagaa

SEQ ID NO: 1854627 - RNA, 19 nt, Homo sapiens
  misc_RNA (1)...(19): siRNA sense strand
guacccagcuacucuauaa

SEQ ID NO: 1854628 - RNA, 19 nt, Homo sapiens
  misc_RNA (1)...(19): siRNA sense strand
caagaaaucucguggaaac

SEQ ID NO: 1854629 - RNA, 19 nt, Homo sapiens
  misc_RNA (1)...(19): siRNA sense strand
gcaaagaauucugcaacuu

SEQ ID NO: 1854630 - RNA, 19 nt, Homo sapiens
  misc_RNA (1)...(19): siRNA sense strand
gagaagagccuugcuuuau

SEQ ID NO: 1854631 - RNA, 19 nt, Homo sapiens
  misc_RNA (1)...(19): siRNA sense strand
gaggaaacauucaugaaca

SEQ ID NO: 1854632 - RNA, 19 nt, Homo sapiens
  misc_RNA (1)...(19): siRNA sense strand
ggagcaauguuggcuuaua

SEQ ID NO: 1854633 - RNA, 19 nt, Homo sapiens
  misc_RNA (1)...(19): siRNA sense strand
ggacaccaauuugcagaaa

SEQ ID NO: 1854634 - RNA, 19 nt, Homo sapiens
  misc_RNA (1)...(19): siRNA sense strand
agaagagccuugcuuuauu

SEQ ID NO: 1854635 - RNA, 19 nt, Homo sapiens
  misc_RNA (1)...(19): siRNA sense strand
gaaaacaccuggaaaugga

SEQ ID NO: 1854636 - RNA, 19 nt, Homo sapiens
  misc_RNA (1)...(19): siRNA sense strand
ucaaauacguggacaccaa

SEQ ID NO: 1854637 - RNA, 19 nt, Homo sapiens
  misc_RNA (1)...(19): siRNA sense strand
guguaaagguugccauaaa

SEQ ID NO: 1854638 - RNA, 19 nt, Homo sapiens
  misc_RNA (1)...(19): siRNA sense strand
cagcuacucuauaaauuug

SEQ ID NO: 1854639 - RNA, 19 nt, Homo sapiens
  misc_RNA (1)...(19): siRNA sense strand
aaagauuccugaagagcua

SEQ ID NO: 1854640 - RNA, 19 nt, Homo sapiens
  misc_RNA (1)...(19): siRNA sense strand
gcagaguacucaaauacgu

SEQ ID NO: 1854641 - RNA, 19 nt, Homo sapiens
  misc_RNA (1)...(19): siRNA sense strand
gagcaauguuggcuuauac

SEQ ID NO: 1854642 - RNA, 19 nt, Homo sapiens
  misc_RNA (1)...(19): siRNA sense strand
ugaacagaguugaaguuaa

SEQ ID NO: 1854643 - RNA, 19 nt, Homo sapiens
  misc_RNA (1)...(19): siRNA sense strand
uacaagaaaucucguggaa

SEQ ID NO: 1854644 - RNA, 19 nt, Homo sapiens
  misc_RNA (1)...(19): siRNA sense strand
gcagaaacagcgagaacuu

SEQ ID NO: 1854645 - RNA, 19 nt, Homo sapiens
  misc_RNA (1)...(19): siRNA sense strand
acacagauaauaaggagua

SEQ ID NO: 1854646 - RNA, 19 nt, Homo sapiens
  misc_RNA (1)...(19): siRNA sense strand
aaguaaagauuccugaaga

SEQ ID NO: 1854647 - RNA, 19 nt, Homo sapiens
  misc_RNA (1)...(19): siRNA sense strand
guggaaacacagauaauaa

SEQ ID NO: 1854648 - RNA, 19 nt, Homo sapiens
  misc_RNA (1)...(19): siRNA sense strand
gaaaucucguggaaacaca

SEQ ID NO: 1854649 - RNA, 19 nt, Homo sapiens
  misc_RNA (1)...(19): siRNA sense strand
aaccguggcuuguugauga

SEQ ID NO: 1854650 - RNA, 19 nt, Homo sapiens
  misc_RNA (1)...(19): siRNA sense strand
gaaacacagauaauaagga

SEQ ID NO: 1854651 - RNA, 19 nt, Homo sapiens
  misc_RNA (1)...(19): siRNA sense strand
ggagagcagaguacucaaa

SEQ ID NO: 1854652 - RNA, 19 nt, Homo sapiens
  misc_RNA (1)...(19): siRNA sense strand
ugagaagagccuugcuuua

SEQ ID NO: 1854653 - RNA, 19 nt, Homo sapiens
  misc_RNA (1)...(19): siRNA sense strand
gagcagaguacucaaauac

SEQ ID NO: 1854654 - RNA, 19 nt, Homo sapiens
  misc_RNA (1)...(19): siRNA sense strand
gaagcaaaguguguaaagg

SEQ ID NO: 1854655 - RNA, 19 nt, Homo sapiens
  misc_RNA (1)...(19): siRNA sense strand
ggacaaacaagugaaauac

SEQ ID NO: 1854656 - RNA, 19 nt, Homo sapiens
  misc_RNA (1)...(19): siRNA sense strand
aaacagcucuuuuaucuuc

SEQ ID NO: 1854657 - RNA, 19 nt, Homo sapiens
  misc_RNA (1)...(19): siRNA sense strand
guugaugacugggacuuaa

SEQ ID NO: 1854658 - RNA, 19 nt, Homo sapiens
  misc_RNA (1)...(19): siRNA sense strand
ccagcuacucuauaaauuu

SEQ ID NO: 1854659 - RNA, 19 nt, Homo sapiens
  misc_RNA (1)...(19): siRNA sense strand
gagccuugcuuuauuacuc

SEQ ID NO: 1854660 - RNA, 19 nt, Homo sapiens
  misc_RNA (1)...(19): siRNA sense strand
gaugacugggacuuaauua

SEQ ID NO: 1854661 - RNA, 19 nt, Homo sapiens
  misc_RNA (1)...(19): siRNA sense strand
ggaguaugcgguuaaugaa

SEQ ID NO: 1854662 - RNA, 19 nt, Homo sapiens
  misc_RNA (1)...(19): siRNA sense strand
ucaugggccucuucuuuau

SEQ ID NO: 1854663 - RNA, 19 nt, Homo sapiens
  misc_RNA (1)...(19): siRNA sense strand
aaacauucaugaacagagu

SEQ ID NO: 1854664 - RNA, 19 nt, Homo sapiens
  misc_RNA (1)...(19): siRNA sense strand
cgagugcugugcuuucaug

SEQ ID NO: 1854665 - RNA, 19 nt, Homo sapiens
  misc_RNA (1)...(19): siRNA sense strand
auacaccucuggaugagaa

SEQ ID NO: 1854666 - RNA, 19 nt, Homo sapiens
  misc_RNA (1)...(19): siRNA sense strand
uuacagugguuggaauaaa

SEQ ID NO: 1854667 - RNA, 19 nt, Homo sapiens
  misc_RNA (1)...(19): siRNA sense strand
acaguaugcugaaauucuu

SEQ ID NO: 1854668 - RNA, 19 nt, Homo sapiens
  misc_RNA (1)...(19): siRNA sense strand
gaaguuguggcagggauaa

SEQ ID NO: 1854669 - RNA, 19 nt, Homo sapiens
  misc_RNA (1)...(19): siRNA sense strand
aaacagcgagaacuucaaa

SEQ ID NO: 1854670 - RNA, 19 nt, Homo sapiens
  misc_RNA (1)...(19): siRNA sense strand
agagcagaguacucaaaua

SEQ ID NO: 1854671 - RNA, 19 nt, Homo sapiens
  misc_RNA (1)...(19): siRNA sense strand
gagagcagaguacucaaau

SEQ ID NO: 1854672 - RNA, 19 nt, Homo sapiens
  misc_RNA (1)...(19): siRNA sense strand
cagaguugaaguuaaagua

SEQ ID NO: 1854673 - RNA, 19 nt, Homo sapiens
  misc_RNA (1)...(19): siRNA sense strand
uguaaagguugccauaaag

SEQ ID NO: 1854674 - RNA, 19 nt, Homo sapiens
  misc_RNA (1)...(19): siRNA sense strand
uuggagcaauguuggcuua

SEQ ID NO: 1854675 - RNA, 19 nt, Homo sapiens
  misc_RNA (1)...(19): siRNA sense strand
aauaaggaguaugcgguua

SEQ ID NO: 1854676 - RNA, 19 nt, Homo sapiens
  misc_RNA (1)...(19): siRNA sense strand
cauaaaggacaaacaagug

SEQ ID NO: 1854677 - RNA, 19 nt, Homo sapiens
  misc_RNA (1)...(19): siRNA sense strand
cugaaauucuugcagauca

SEQ ID NO: 1854678 - RNA, 19 nt, Homo sapiens
  misc_RNA (1)...(19): siRNA sense strand
acaccaauuugcagaaaca

SEQ ID NO: 1854679 - RNA, 19 nt, Homo sapiens
  misc_RNA (1)...(19): siRNA sense strand
ugccagcgauuaugaagug

SEQ ID NO: 1854680 - RNA, 19 nt, Homo sapiens
  misc_RNA (1)...(19): siRNA sense strand
ggaaacacagauaauaagg

SEQ ID NO: 1854681 - RNA, 19 nt, Homo sapiens
  misc_RNA (1)...(19): siRNA sense strand
cguggaaacacagauaaua

SEQ ID NO: 1854682 - RNA, 19 nt, Homo sapiens
  misc_RNA (1)...(19): siRNA sense strand
gaaacagcgagaacuucaa

SEQ ID NO: 1854683 - RNA, 19 nt, Homo sapiens
  misc_RNA (1)...(19): siRNA sense strand
auuccauucuugaggauua

SEQ ID NO: 1854684 - RNA, 19 nt, Homo sapiens
  misc_RNA (1)...(19): siRNA sense strand
gaugagaagagccuugcuu

SEQ ID NO: 1854685 - RNA, 19 nt, Homo sapiens
  misc_RNA (1)...(19): siRNA sense strand
uaaggaguaugcgguuaau

SEQ ID NO: 1854686 - RNA, 19 nt, Homo sapiens
  misc_RNA (1)...(19): siRNA sense strand
cccagcuacucuauaaauu

SEQ ID NO: 1854687 - RNA, 19 nt, Homo sapiens
  misc_RNA (1)...(19): siRNA sense strand
ggcaaagaauucugcaacu

SEQ ID NO: 1854688 - RNA, 19 nt, Homo sapiens
  misc_RNA (1)...(19): siRNA sense strand
uuucaugggccucuucuuu

SEQ ID NO: 1854689 - RNA, 19 nt, Homo sapiens
  misc_RNA (1)...(19): siRNA sense strand
guaugcgguuaaugaaguu

SEQ ID NO: 1854690 - RNA, 19 nt, Homo sapiens
  misc_RNA (1)...(19): siRNA sense strand
ggaaacauucaugaacaga

SEQ ID NO: 1854691 - RNA, 19 nt, Homo sapiens
  misc_RNA (1)...(19): siRNA sense strand
aggaguaugcgguuaauga

SEQ ID NO: 1854692 - RNA, 19 nt, Homo sapiens
  misc_RNA (1)...(19): siRNA sense strand
caauuaucuucacgauuuc

SEQ ID NO: 1854693 - RNA, 19 nt, Homo sapiens
  misc_RNA (1)...(19): siRNA sense strand
ccauaaaggacaaacaagu

SEQ ID NO: 1854694 - RNA, 19 nt, Homo sapiens
  misc_RNA (1)...(19): siRNA sense strand
uaaagguugccauaaagga

SEQ ID NO: 1854695 - RNA, 19 nt, Homo sapiens
  misc_RNA (1)...(19): siRNA sense strand
uaaaggacaaacaagugaa

SEQ ID NO: 1854696 - RNA, 19 nt, Homo sapiens
  misc_RNA (1)...(19): siRNA sense strand
cuccugagauuauuuguac

SEQ ID NO: 1854697 - RNA, 19 nt, Homo sapiens
  misc_RNA (1)...(19): siRNA sense strand
cauuacagugguuggaaua

SEQ ID NO: 1854698 - RNA, 19 nt, Homo sapiens
  misc_RNA (1)...(19): siRNA sense strand
gacugggacuuaauuacca

SEQ ID NO: 1854699 - RNA, 19 nt, Homo sapiens
  misc_RNA (1)...(19): siRNA sense strand
uucaugggccucuucuuua

SEQ ID NO: 1854700 - RNA, 19 nt, Homo sapiens
  misc_RNA (1)...(19): siRNA sense strand
uggcagggauaaaagaaua

SEQ ID NO: 1854701 - RNA, 19 nt, Homo sapiens
  misc_RNA (1)...(19): siRNA sense strand
aaaggacaaacaagugaaa

SEQ ID NO: 1854702 - RNA, 19 nt, Homo sapiens
  misc_RNA (1)...(19): siRNA sense strand
caaauacguggacaccaau

SEQ ID NO: 1854703 - RNA, 19 nt, Homo sapiens
  misc_RNA (1)...(19): siRNA sense strand
uaucuucacgauuuccuaa

SEQ ID NO: 1854704 - RNA, 19 nt, Homo sapiens
  misc_RNA (1)...(19): siRNA sense strand
cuuauacaccucuggauga

SEQ ID NO: 1854705 - RNA, 19 nt, Homo sapiens
  misc_RNA (1)...(19): siRNA sense strand
aggacaaacaagugaaaua

SEQ ID NO: 1854706 - RNA, 19 nt, Homo sapiens
  misc_RNA (1)...(19): siRNA sense strand
gaccacaguaugcugaaau

SEQ ID NO: 1854707 - RNA, 19 nt, Homo sapiens
  misc_RNA (1)...(19): siRNA sense strand
aguaugcgguuaaugaagu

SEQ ID NO: 1854708 - RNA, 19 nt, Homo sapiens
  misc_RNA (1)...(19): siRNA sense strand
auaaaggacaaacaaguga

SEQ ID NO: 1854709 - RNA, 19 nt, Homo sapiens
  misc_RNA (1)...(19): siRNA sense strand
cuaaaaccguggcuuguug

SEQ ID NO: 1854710 - RNA, 19 nt, Homo sapiens
  misc_RNA (1)...(19): siRNA sense strand
caugaacagaguugaaguu

SEQ ID NO: 1854711 - RNA, 19 nt, Homo sapiens
  misc_RNA (1)...(19): siRNA sense strand
agaaacagcgagaacuuca

SEQ ID NO: 1854712 - RNA, 19 nt, Homo sapiens
  misc_RNA (1)...(19): siRNA sense strand
cuaaaguaccuggcaaaga

SEQ ID NO: 1854713 - RNA, 19 nt, Homo sapiens
  misc_RNA (1)...(19): siRNA sense strand
agcaaaguguguaaagguu

SEQ ID NO: 1854714 - RNA, 19 nt, Homo sapiens
  misc_RNA (1)...(19): siRNA sense strand
gagcgagugcugugcuuuc

SEQ ID NO: 1854715 - RNA, 19 nt, Homo sapiens
  misc_RNA (1)...(19): siRNA sense strand
gcaaauuacaagaaaucuc

SEQ ID NO: 1854716 - RNA, 19 nt, Homo sapiens
  misc_RNA (1)...(19): siRNA sense strand
gaaauucuugcagaucauc

SEQ ID NO: 1854717 - RNA, 19 nt, Homo sapiens
  misc_RNA (1)...(19): siRNA sense strand
ucuugaggauuaugcaaau

SEQ ID NO: 1854718 - RNA, 19 nt, Homo sapiens
  misc_RNA (1)...(19): siRNA sense strand
gaaguggcuccuccugagu

SEQ ID NO: 1854719 - RNA, 19 nt, Homo sapiens
  misc_RNA (1)...(19): siRNA sense strand
ggacccgaagccuaaauuc

SEQ ID NO: 1854720 - RNA, 19 nt, Homo sapiens
  misc_RNA (1)...(19): siRNA sense strand
uucacgauuuccuaaagua

SEQ ID NO: 1854721 - RNA, 19 nt, Homo sapiens
  misc_RNA (1)...(19): siRNA sense strand
ugaaauucuugcagaucau

SEQ ID NO: 1854722 - RNA, 19 nt, Homo sapiens
  misc_RNA (1)...(19): siRNA sense strand
auaaggaguaugcgguuaa

SEQ ID NO: 1854723 - RNA, 19 nt, Homo sapiens
  misc_RNA (1)...(19): siRNA sense strand
ugaggauuaugcaaauuac

SEQ ID NO: 1854724 - RNA, 19 nt, Homo sapiens
  misc_RNA (1)...(19): siRNA sense strand
ggaaagaccacgcugauca

SEQ ID NO: 1854725 - RNA, 19 nt, Homo sapiens
  misc_RNA (1)...(19): siRNA sense strand
ggacaggaagcucaucuuu

SEQ ID NO: 1854726 - RNA, 19 nt, Homo sapiens
  misc_RNA (1)...(19): siRNA sense strand
ggagacagauccucacucu

SEQ ID NO: 1854727 - RNA, 19 nt, Homo sapiens
  misc_RNA (1)...(19): siRNA sense strand
caacucagccuacggcaaa

SEQ ID NO: 1854728 - RNA, 19 nt, Homo sapiens
  misc_RNA (1)...(19): siRNA sense strand
gcacaggucgaacuugaaa

SEQ ID NO: 1854729 - RNA, 19 nt, Homo sapiens
  misc_RNA (1)...(19): siRNA sense strand
gaagcucuuuccaggauga

SEQ ID NO: 1854730 - RNA, 19 nt, Homo sapiens
  misc_RNA (1)...(19): siRNA sense strand
ccacucggaucucaucuug

SEQ ID NO: 1854731 - RNA, 19 nt, Homo sapiens
  misc_RNA (1)...(19): siRNA sense strand
acaggaagcucaucuuugg

SEQ ID NO: 1854732 - RNA, 19 nt, Homo sapiens
  misc_RNA (1)...(19): siRNA sense strand
aggcggagcuccagaaaug

SEQ ID NO: 1854733 - RNA, 19 nt, Homo sapiens
  misc_RNA (1)...(19): siRNA sense strand
gaaagaccacgcugaucaa

SEQ ID NO: 1854734 - RNA, 19 nt, Homo sapiens
  misc_RNA (1)...(19): siRNA sense strand
cugcacaucuuccgcugua

SEQ ID NO: 1854735 - RNA, 19 nt, Homo sapiens
  misc_RNA (1)...(19): siRNA sense strand
gacaggaagcucaucuuug

SEQ ID NO: 1854736 - RNA, 19 nt, Homo sapiens
  misc_RNA (1)...(19): siRNA sense strand
cugcacaggucgaacuuga

SEQ ID NO: 1854737 - RNA, 19 nt, Homo sapiens
  misc_RNA (1)...(19): siRNA sense strand
gaacuuugagcaccugaca

SEQ ID NO: 1854738 - RNA, 19 nt, Homo sapiens
  misc_RNA (1)...(19): siRNA sense strand
ucacgugcgucuuccugaa

SEQ ID NO: 1854739 - RNA, 19 nt, Homo sapiens
  misc_RNA (1)...(19): siRNA sense strand
gcaaauuccggaagcucuu

SEQ ID NO: 1854740 - RNA, 19 nt, Homo sapiens
  misc_RNA (1)...(19): siRNA sense strand
gaccaagaaagaacuggaa

SEQ ID NO: 1854741 - RNA, 19 nt, Homo sapiens
  misc_RNA (1)...(19): siRNA sense strand
acgcugcccucacgcauga

SEQ ID NO: 1854742 - RNA, 19 nt, Homo sapiens
  misc_RNA (1)...(19): siRNA sense strand
ugguggagguucacaacaa

SEQ ID NO: 1854743 - RNA, 19 nt, Homo sapiens
  misc_RNA (1)...(19): siRNA sense strand
guauaaggaggccacaguu

SEQ ID NO: 1854744 - RNA, 19 nt, Homo sapiens
  misc_RNA (1)...(19): siRNA sense strand
gguggagguucacaacaag

SEQ ID NO: 1854745 - RNA, 19 nt, Homo sapiens
  misc_RNA (1)...(19): siRNA sense strand
uggacaggcuucgcaagaa

SEQ ID NO: 1854746 - RNA, 19 nt, Homo sapiens
  misc_RNA (1)...(19): siRNA sense strand
gacgugagggucaucauca

SEQ ID NO: 1854747 - RNA, 19 nt, Homo sapiens
  misc_RNA (1)...(19): siRNA sense strand
gaacgucgugcccgugucu

SEQ ID NO: 1854748 - RNA, 19 nt, Homo sapiens
  misc_RNA (1)...(19): siRNA sense strand
acucggaucucaucuugca

SEQ ID NO: 1854749 - RNA, 19 nt, Homo sapiens
  misc_RNA (1)...(19): siRNA sense strand
gcggaaagaccacgcugau

SEQ ID NO: 1854750 - RNA, 19 nt, Homo sapiens
  misc_RNA (1)...(19): siRNA sense strand
ccaaaacgccggacaggaa

SEQ ID NO: 1854751 - RNA, 19 nt, Homo sapiens
  misc_RNA (1)...(19): siRNA sense strand
gcaugaccguccuguacgu

SEQ ID NO: 1854752 - RNA, 19 nt, Homo sapiens
  misc_RNA (1)...(19): siRNA sense strand
gguccguggugcagacaau

SEQ ID NO: 1854753 - RNA, 19 nt, Homo sapiens
  misc_RNA (1)...(19): siRNA sense strand
ccacgggaccagcuguuug

SEQ ID NO: 1854754 - RNA, 19 nt, Homo sapiens
  misc_RNA (1)...(19): siRNA sense strand
caaauuccggaagcucuuu

SEQ ID NO: 1854755 - RNA, 19 nt, Homo sapiens
  misc_RNA (1)...(19): siRNA sense strand
guacaccaacugcggaaag

SEQ ID NO: 1854756 - RNA, 19 nt, Homo sapiens
  misc_RNA (1)...(19): siRNA sense strand
gcacaucuuccgcuguaac

SEQ ID NO: 1854757 - RNA, 19 nt, Homo sapiens
  misc_RNA (1)...(19): siRNA sense strand
auaaggaggccacaguuca

SEQ ID NO: 1854758 - RNA, 19 nt, Homo sapiens
  misc_RNA (1)...(19): siRNA sense strand
uacaccaacugcggaaaga

SEQ ID NO: 1854759 - RNA, 19 nt, Homo sapiens
  misc_RNA (1)...(19): siRNA sense strand
ugagggucaucaucagcaa

SEQ ID NO: 1854760 - RNA, 19 nt, Homo sapiens
  misc_RNA (1)...(19): siRNA sense strand
uuugagcaccugacagaaa

SEQ ID NO: 1854761 - RNA, 19 nt, Homo sapiens
  misc_RNA (1)...(19): siRNA sense strand
ggucaucaucagcaacuca

SEQ ID NO: 1854762 - RNA, 19 nt, Homo sapiens
  misc_RNA (1)...(19): siRNA sense strand
uauaaggaggccacaguuc

SEQ ID NO: 1854763 - RNA, 19 nt, Homo sapiens
  misc_RNA (1)...(19): siRNA sense strand
gcaagaagcggaagaaaug

SEQ ID NO: 1854764 - RNA, 19 nt, Homo sapiens
  misc_RNA (1)...(19): siRNA sense strand
ggaauuaaauggacaaagg

SEQ ID NO: 1854765 - RNA, 19 nt, Homo sapiens
  misc_RNA (1)...(19): siRNA sense strand
ggacacagccagugaggua

SEQ ID NO: 1854766 - RNA, 19 nt, Homo sapiens
  misc_RNA (1)...(19): siRNA sense strand
ggagaagaguccagugcua

SEQ ID NO: 1854767 - RNA, 19 nt, Homo sapiens
  misc_RNA (1)...(19): siRNA sense strand
gaacagugccgcagccaaa

SEQ ID NO: 1854768 - RNA, 19 nt, Homo sapiens
  misc_RNA (1)...(19): siRNA sense strand
agacaugccuggauuaguu

SEQ ID NO: 1854769 - RNA, 19 nt, Homo sapiens
  misc_RNA (1)...(19): siRNA sense strand
gcgaguacaucuacaucua

SEQ ID NO: 1854770 - RNA, 19 nt, Homo sapiens
  misc_RNA (1)...(19): siRNA sense strand
ggaaaucagcauugaauau

SEQ ID NO: 1854771 - RNA, 19 nt, Homo sapiens
  misc_RNA (1)...(19): siRNA sense strand
ggaaugguccguuugugua

SEQ ID NO: 1854772 - RNA, 19 nt, Homo sapiens
  misc_RNA (1)...(19): siRNA sense strand
gaaaucagcauugaauaug

SEQ ID NO: 1854773 - RNA, 19 nt, Homo sapiens
  misc_RNA (1)...(19): siRNA sense strand
gccaagcacugcagagcua

SEQ ID NO: 1854774 - RNA, 19 nt, Homo sapiens
  misc_RNA (1)...(19): siRNA sense strand
ggaagacaugccuggauua

SEQ ID NO: 1854775 - RNA, 19 nt, Homo sapiens
  misc_RNA (1)...(19): siRNA sense strand
cuacacggcuuccauaucu

SEQ ID NO: 1854776 - RNA, 19 nt, Homo sapiens
  misc_RNA (1)...(19): siRNA sense strand
aaucggagcucagcaagaa

SEQ ID NO: 1854777 - RNA, 19 nt, Homo sapiens
  misc_RNA (1)...(19): siRNA sense strand
cuacaucuauggcaacaug

SEQ ID NO: 1854778 - RNA, 19 nt, Homo sapiens
  misc_RNA (1)...(19): siRNA sense strand
ccgaagaccuggccagugu

SEQ ID NO: 1854779 - RNA, 19 nt, Homo sapiens
  misc_RNA (1)...(19): siRNA sense strand
cagcaguucuguagcaaga

SEQ ID NO: 1854780 - RNA, 19 nt, Homo sapiens
  misc_RNA (1)...(19): siRNA sense strand
gagcuacacggcuuccaua

SEQ ID NO: 1854781 - RNA, 19 nt, Homo sapiens
  misc_RNA (1)...(19): siRNA sense strand
cgaugacgguuucuacuau

SEQ ID NO: 1854782 - RNA, 19 nt, Homo sapiens
  misc_RNA (1)...(19): siRNA sense strand
ggaugucauuacuguguuu

SEQ ID NO: 1854783 - RNA, 19 nt, Homo sapiens
  misc_RNA (1)...(19): siRNA sense strand
gacaagcgcagaaugagaa

SEQ ID NO: 1854784 - RNA, 19 nt, Homo sapiens
  misc_RNA (1)...(19): siRNA sense strand
aagagcagcuucccugaga

SEQ ID NO: 1854785 - RNA, 19 nt, Homo sapiens
  misc_RNA (1)...(19): siRNA sense strand
gaacacugcagccgacuuc

SEQ ID NO: 1854786 - RNA, 19 nt, Homo sapiens
  misc_RNA (1)...(19): siRNA sense strand
gaguacaucuacaucuaug

SEQ ID NO: 1854787 - RNA, 19 nt, Homo sapiens
  misc_RNA (1)...(19): siRNA sense strand
gaaagcugcaggaaacgaa

SEQ ID NO: 1854788 - RNA, 19 nt, Homo sapiens
  misc_RNA (1)...(19): siRNA sense strand
cagaaacacuggcuuacca

SEQ ID NO: 1854789 - RNA, 19 nt, Homo sapiens
  misc_RNA (1)...(19): siRNA sense strand
uggaagacaugccuggauu

SEQ ID NO: 1854790 - RNA, 19 nt, Homo sapiens
  misc_RNA (1)...(19): siRNA sense strand
ccaaggccgugcuggagaa

SEQ ID NO: 1854791 - RNA, 19 nt, Homo sapiens
  misc_RNA (1)...(19): siRNA sense strand
gaacugcagcugagacaag

SEQ ID NO: 1854792 - RNA, 19 nt, Homo sapiens
  misc_RNA (1)...(19): siRNA sense strand
gaugacgguuucuacuaug

SEQ ID NO: 1854793 - RNA, 19 nt, Homo sapiens
  misc_RNA (1)...(19): siRNA sense strand
gcaagcccuuccagagaga

SEQ ID NO: 1854794 - RNA, 19 nt, Homo sapiens
  misc_RNA (1)...(19): siRNA sense strand
ggacaaccuacccgugauu

SEQ ID NO: 1854795 - RNA, 19 nt, Homo sapiens
  misc_RNA (1)...(19): siRNA sense strand
ccucagaaacacuggcuua

SEQ ID NO: 1854796 - RNA, 19 nt, Homo sapiens
  misc_RNA (1)...(19): siRNA sense strand
gcaacagcaucagggagaa

SEQ ID NO: 1854797 - RNA, 19 nt, Homo sapiens
  misc_RNA (1)...(19): siRNA sense strand
caaccuacccgugauucua

SEQ ID NO: 1854798 - RNA, 19 nt, Homo sapiens
  misc_RNA (1)...(19): siRNA sense strand
ugagacaagcgcagaauga

SEQ ID NO: 1854799 - RNA, 19 nt, Homo sapiens
  misc_RNA (1)...(19): siRNA sense strand
ggaggaugcggacaaccua

SEQ ID NO: 1854800 - RNA, 19 nt, Homo sapiens
  misc_RNA (1)...(19): siRNA sense strand
gcagccgacuucucagcaa

SEQ ID NO: 1854801 - RNA, 19 nt, Homo sapiens
  misc_RNA (1)...(19): siRNA sense strand
gaagacaugccuggauuag

SEQ ID NO: 1854802 - RNA, 19 nt, Homo sapiens
  misc_RNA (1)...(19): siRNA sense strand
gagacugccuggaagacau

SEQ ID NO: 1854803 - RNA, 19 nt, Homo sapiens
  misc_RNA (1)...(19): siRNA sense strand
ugacagcgaugaggagauc

SEQ ID NO: 1854804 - RNA, 19 nt, Homo sapiens
  misc_RNA (1)...(19): siRNA sense strand
cagcuucccugagacagaa

SEQ ID NO: 1854805 - RNA, 19 nt, Homo sapiens
  misc_RNA (1)...(19): siRNA sense strand
gcuuggaaaucagcauuga

SEQ ID NO: 1854806 - RNA, 19 nt, Homo sapiens
  misc_RNA (1)...(19): siRNA sense strand
ggacuugcuccuuccagaa

SEQ ID NO: 1854807 - RNA, 19 nt, Homo sapiens
  misc_RNA (1)...(19): siRNA sense strand
gagcgugugucggaugaug

SEQ ID NO: 1854808 - RNA, 19 nt, Homo sapiens
  misc_RNA (1)...(19): siRNA sense strand
caaugagaauccagaagca

SEQ ID NO: 1854809 - RNA, 19 nt, Homo sapiens
  misc_RNA (1)...(19): siRNA sense strand
gugcacugcuggccaagga

SEQ ID NO: 1854810 - RNA, 19 nt, Homo sapiens
  misc_RNA (1)...(19): siRNA sense strand
ggaggaggaggaagaggaa

SEQ ID NO: 1854811 - RNA, 19 nt, Homo sapiens
  misc_RNA (1)...(19): siRNA sense strand
gagccaggauccaggucuu

SEQ ID NO: 1854812 - RNA, 19 nt, Homo sapiens
  misc_RNA (1)...(19): siRNA sense strand
ggaccagcuuggaguugug

SEQ ID NO: 1854813 - RNA, 19 nt, Homo sapiens
  misc_RNA (1)...(19): siRNA sense strand
gcauggacgaugacgguuu

SEQ ID NO: 1854814 - RNA, 19 nt, Homo sapiens
  misc_RNA (1)...(19): siRNA sense strand
cgacuucucagcaacaaug

SEQ ID NO: 1854815 - RNA, 19 nt, Homo sapiens
  misc_RNA (1)...(19): siRNA sense strand
gcccagcaggcgccaaaua

SEQ ID NO: 1854816 - RNA, 19 nt, Homo sapiens
  misc_RNA (1)...(19): siRNA sense strand
gaucuuuguggcucuguuu

SEQ ID NO: 1854817 - RNA, 19 nt, Homo sapiens
  misc_RNA (1)...(19): siRNA sense strand
ggagagccacagagaagga

SEQ ID NO: 1854818 - RNA, 19 nt, Homo sapiens
  misc_RNA (1)...(19): siRNA sense strand
cauggacgaugacgguuuc

SEQ ID NO: 1854819 - RNA, 19 nt, Homo sapiens
  misc_RNA (1)...(19): siRNA sense strand
gggaugucauuacuguguu

SEQ ID NO: 1854820 - RNA, 19 nt, Homo sapiens
  misc_RNA (1)...(19): siRNA sense strand
gcagcgcugugccauccuu

SEQ ID NO: 1854821 - RNA, 19 nt, Homo sapiens
  misc_RNA (1)...(19): siRNA sense strand
ggacagccagcacaucuac

SEQ ID NO: 1854822 - RNA, 19 nt, Homo sapiens
  misc_RNA (1)...(19): siRNA sense strand
ggacgaugacgguuucuac

SEQ ID NO: 1854823 - RNA, 19 nt, Homo sapiens
  misc_RNA (1)...(19): siRNA sense strand
gggaaugguccguuugugu

SEQ ID NO: 1854824 - RNA, 19 nt, Homo sapiens
  misc_RNA (1)...(19): siRNA sense strand
ggaugccgauggcuucuac

SEQ ID NO: 1854825 - RNA, 19 nt, Homo sapiens
  misc_RNA (1)...(19): siRNA sense strand
uucaagaacugaggucuga

SEQ ID NO: 1854826 - RNA, 19 nt, Homo sapiens
  misc_RNA (1)...(19): siRNA sense strand
cccgaaagcugcaggaaac

SEQ ID NO: 1854827 - RNA, 19 nt, Homo sapiens
  misc_RNA (1)...(19): siRNA sense strand
gcgaugaggagaucuugga

SEQ ID NO: 1854828 - RNA, 19 nt, Homo sapiens
  misc_RNA (1)...(19): siRNA sense strand
ggccuggucccuuccaauu

SEQ ID NO: 1854829 - RNA, 19 nt, Homo sapiens
  misc_RNA (1)...(19): siRNA sense strand
ccagagggaacaugaagga

SEQ ID NO: 1854830 - RNA, 19 nt, Homo sapiens
  misc_RNA (1)...(19): siRNA sense strand
uagagcgugugucggauga

SEQ ID NO: 1854831 - RNA, 19 nt, Homo sapiens
  misc_RNA (1)...(19): siRNA sense strand
gaacgaggaggagaagagu

SEQ ID NO: 1854832 - RNA, 19 nt, Homo sapiens
  misc_RNA (1)...(19): siRNA sense strand
gaggacagccagcacaucu

SEQ ID NO: 1854833 - RNA, 19 nt, Homo sapiens
  misc_RNA (1)...(19): siRNA sense strand
gggaccagcuuggaguugu

SEQ ID NO: 1854834 - RNA, 19 nt, Homo sapiens
  misc_RNA (1)...(19): siRNA sense strand
cuacauucccugcaacaug

SEQ ID NO: 1854835 - RNA, 19 nt, Homo sapiens
  misc_RNA (1)...(19): siRNA sense strand
gccagaggccagaggauga

SEQ ID NO: 1854836 - RNA, 19 nt, Homo sapiens
  misc_RNA (1)...(19): siRNA sense strand
ugaaggccaagcugaauau

SEQ ID NO: 1854837 - RNA, 19 nt, Homo sapiens
  misc_RNA (1)...(19): siRNA sense strand
ggaggacacagcagagcuu

SEQ ID NO: 1854838 - RNA, 19 nt, Homo sapiens
  misc_RNA (1)...(19): siRNA sense strand
gcuggagucuaccuuggau

SEQ ID NO: 1854839 - RNA, 19 nt, Homo sapiens
  misc_RNA (1)...(19): siRNA sense strand
gccagaggaugaggaagug

SEQ ID NO: 1854840 - RNA, 19 nt, Homo sapiens
  misc_RNA (1)...(19): siRNA sense strand
ccagagagauggcaaaagg

SEQ ID NO: 1854841 - RNA, 19 nt, Homo sapiens
  misc_RNA (1)...(19): siRNA sense strand
ccuuggaucugcucacauc

SEQ ID NO: 1854842 - RNA, 19 nt, Homo sapiens
  misc_RNA (1)...(19): siRNA sense strand
caugguggcugcauuugac

SEQ ID NO: 1854843 - RNA, 19 nt, Homo sapiens
  misc_RNA (1)...(19): siRNA sense strand
augaggaaguggaggcuuu

SEQ ID NO: 1854844 - RNA, 19 nt, Homo sapiens
  misc_RNA (1)...(19): siRNA sense strand
gcaacucagaccugucaga

SEQ ID NO: 1854845 - RNA, 19 nt, Homo sapiens
  misc_RNA (1)...(19): siRNA sense strand
ggccaccuucugccacuua

SEQ ID NO: 1854846 - RNA, 19 nt, Homo sapiens
  misc_RNA (1)...(19): siRNA sense strand
uuccauaucugugugaaug

SEQ ID NO: 1854847 - RNA, 19 nt, Homo sapiens
  misc_RNA (1)...(19): siRNA sense strand
ugaaggagagcucauggau

SEQ ID NO: 1854848 - RNA, 19 nt, Homo sapiens
  misc_RNA (1)...(19): siRNA sense strand
gaaucggagcucagcaaga

SEQ ID NO: 1854849 - RNA, 19 nt, Homo sapiens
  misc_RNA (1)...(19): siRNA sense strand
cgaguacaucuacaucuau

SEQ ID NO: 1854850 - RNA, 19 nt, Homo sapiens
  misc_RNA (1)...(19): siRNA sense strand
aauaugauucggaggauga

SEQ ID NO: 1854851 - RNA, 19 nt, Homo sapiens
  misc_RNA (1)...(19): siRNA sense strand
gcccgaaagcugcaggaaa

SEQ ID NO: 1854852 - RNA, 19 nt, Homo sapiens
  misc_RNA (1)...(19): siRNA sense strand
caugccaucuaccucaaug

SEQ ID NO: 1854853 - RNA, 19 nt, Homo sapiens
  misc_RNA (1)...(19): siRNA sense strand
gccaaggacaagcagauug

SEQ ID NO: 1854854 - RNA, 19 nt, Homo sapiens
  misc_RNA (1)...(19): siRNA sense strand
aggccaagcugaauaugag

SEQ ID NO: 1854855 - RNA, 19 nt, Homo sapiens
  misc_RNA (1)...(19): siRNA sense strand
gcagcuucccugagacaga

SEQ ID NO: 1854856 - RNA, 19 nt, Homo sapiens
  misc_RNA (1)...(19): siRNA sense strand
gagcagcuucccugagaca

SEQ ID NO: 1854857 - RNA, 19 nt, Homo sapiens
  misc_RNA (1)...(19): siRNA sense strand
uggagagccuggagcaagu

SEQ ID NO: 1854858 - RNA, 19 nt, Homo sapiens
  misc_RNA (1)...(19): siRNA sense strand
cagagaacgaggaggagaa

SEQ ID NO: 1854859 - RNA, 19 nt, Homo sapiens
  misc_RNA (1)...(19): siRNA sense strand
uggcucuguuugacuauga

SEQ ID NO: 1854860 - RNA, 19 nt, Homo sapiens
  misc_RNA (1)...(19): siRNA sense strand
uggaaaucagcauugaaua

SEQ ID NO: 1854861 - RNA, 19 nt, Homo sapiens
  misc_RNA (1)...(19): siRNA sense strand
cagcagagcuugggguuca

SEQ ID NO: 1854862 - RNA, 19 nt, Homo sapiens
  misc_RNA (1)...(19): siRNA sense strand
ggccagaggaugaggaagu

SEQ ID NO: 1854863 - RNA, 19 nt, Homo sapiens
  misc_RNA (1)...(19): siRNA sense strand
gaagaagccuuuaaagaaa

SEQ ID NO: 1854864 - RNA, 19 nt, Homo sapiens
  misc_RNA (1)...(19): siRNA sense strand
gaagagcuccgagaaauua

SEQ ID NO: 1854865 - RNA, 19 nt, Homo sapiens
  misc_RNA (1)...(19): siRNA sense strand
gcauuggaguguuaacaua

SEQ ID NO: 1854866 - RNA, 19 nt, Homo sapiens
  misc_RNA (1)...(19): siRNA sense strand
gaucuuaguucuggaauau

SEQ ID NO: 1854867 - RNA, 19 nt, Homo sapiens
  misc_RNA (1)...(19): siRNA sense strand
gagaagaagccuuuaaaga

SEQ ID NO: 1854868 - RNA, 19 nt, Homo sapiens
  misc_RNA (1)...(19): siRNA sense strand
uaagaaaccugaagaucga

SEQ ID NO: 1854869 - RNA, 19 nt, Homo sapiens
  misc_RNA (1)...(19): siRNA sense strand
ggauggaaauaauucauga

SEQ ID NO: 1854870 - RNA, 19 nt, Homo sapiens
  misc_RNA (1)...(19): siRNA sense strand
agaagaagccuuuaaagaa

SEQ ID NO: 1854871 - RNA, 19 nt, Homo sapiens
  misc_RNA (1)...(19): siRNA sense strand
gaggaagaauuugauguuu

SEQ ID NO: 1854872 - RNA, 19 nt, Homo sapiens
  misc_RNA (1)...(19): siRNA sense strand
uaacauaugucaugcuuac

SEQ ID NO: 1854873 - RNA, 19 nt, Homo sapiens
  misc_RNA (1)...(19): siRNA sense strand
ugagauugcuguacuugaa

SEQ ID NO: 1854874 - RNA, 19 nt, Homo sapiens
  misc_RNA (1)...(19): siRNA sense strand
acagauauguggagcauug

SEQ ID NO: 1854875 - RNA, 19 nt, Homo sapiens
  misc_RNA (1)...(19): siRNA sense strand
gacaauccuugggucauua

SEQ ID NO: 1854876 - RNA, 19 nt, Homo sapiens
  misc_RNA (1)...(19): siRNA sense strand
gugaagagcuccgagaaau

SEQ ID NO: 1854877 - RNA, 19 nt, Homo sapiens
  misc_RNA (1)...(19): siRNA sense strand
uuuagaagguguucacuuu

SEQ ID NO: 1854878 - RNA, 19 nt, Homo sapiens
  misc_RNA (1)...(19): siRNA sense strand
aggaauaucaccuuucuua

SEQ ID NO: 1854879 - RNA, 19 nt, Homo sapiens
  misc_RNA (1)...(19): siRNA sense strand
cugcaaaguucaugagaaa

SEQ ID NO: 1854880 - RNA, 19 nt, Homo sapiens
  misc_RNA (1)...(19): siRNA sense strand
gcaaaugcccuccaagaag

SEQ ID NO: 1854881 - RNA, 19 nt, Homo sapiens
  misc_RNA (1)...(19): siRNA sense strand
gauuugaagccucagaaua

SEQ ID NO: 1854882 - RNA, 19 nt, Homo sapiens
  misc_RNA (1)...(19): siRNA sense strand
ggaagaauuugauguuuug

SEQ ID NO: 1854883 - RNA, 19 nt, Homo sapiens
  misc_RNA (1)...(19): siRNA sense strand
guggagcauuggaguguua

SEQ ID NO: 1854884 - RNA, 19 nt, Homo sapiens
  misc_RNA (1)...(19): siRNA sense strand
gaauauugaagaacaguga

SEQ ID NO: 1854885 - RNA, 19 nt, Homo sapiens
  misc_RNA (1)...(19): siRNA sense strand
gagacugcaucagaaauga

SEQ ID NO: 1854886 - RNA, 19 nt, Homo sapiens
  misc_RNA (1)...(19): siRNA sense strand
caacagauauguggagcau

SEQ ID NO: 1854887 - RNA, 19 nt, Homo sapiens
  misc_RNA (1)...(19): siRNA sense strand
agacuuaugcgacagauuu

SEQ ID NO: 1854888 - RNA, 19 nt, Homo sapiens
  misc_RNA (1)...(19): siRNA sense strand
agacagagaagaagccuuu

SEQ ID NO: 1854889 - RNA, 19 nt, Homo sapiens
  misc_RNA (1)...(19): siRNA sense strand
uuacaggaauaucaccuuu

SEQ ID NO: 1854890 - RNA, 19 nt, Homo sapiens
  misc_RNA (1)...(19): siRNA sense strand
guuaacauaugucaugcuu

SEQ ID NO: 1854891 - RNA, 19 nt, Homo sapiens
  misc_RNA (1)...(19): siRNA sense strand
auauguggcuccugaaauu

SEQ ID NO: 1854892 - RNA, 19 nt, Homo sapiens
  misc_RNA (1)...(19): siRNA sense strand
gaauauguggcuccugaaa

SEQ ID NO: 1854893 - RNA, 19 nt, Homo sapiens
  misc_RNA (1)...(19): siRNA sense strand
ugaaaucuuugaccagugu

SEQ ID NO: 1854894 - RNA, 19 nt, Homo sapiens
  misc_RNA (1)...(19): siRNA sense strand
acaagaaauuccaggagaa

SEQ ID NO: 1854895 - RNA, 19 nt, Homo sapiens
  misc_RNA (1)...(19): siRNA sense strand
gaaccuuugcuacaagaaa

SEQ ID NO: 1854896 - RNA, 19 nt, Homo sapiens
  misc_RNA (1)...(19): siRNA sense strand
ugaggaaccuuugcuacaa

SEQ ID NO: 1854897 - RNA, 19 nt, Homo sapiens
  misc_RNA (1)...(19): siRNA sense strand
ggaaaaggcacuagaagaa

SEQ ID NO: 1854898 - RNA, 19 nt, Homo sapiens
  misc_RNA (1)...(19): siRNA sense strand
gaauaucaccuuucuuagg

SEQ ID NO: 1854899 - RNA, 19 nt, Homo sapiens
  misc_RNA (1)...(19): siRNA sense strand
ugagucggcuguugauuuc

SEQ ID NO: 1854900 - RNA, 19 nt, Homo sapiens
  misc_RNA (1)...(19): siRNA sense strand
cagagaagaagccuuuaaa

SEQ ID NO: 1854901 - RNA, 19 nt, Homo sapiens
  misc_RNA (1)...(19): siRNA sense strand
gcugcaaaguucaugagaa

SEQ ID NO: 1854902 - RNA, 19 nt, Homo sapiens
  misc_RNA (1)...(19): siRNA sense strand
gaaauuugcaguggugaga

SEQ ID NO: 1854903 - RNA, 19 nt, Homo sapiens
  misc_RNA (1)...(19): siRNA sense strand
guaguuacuucauauacuc

SEQ ID NO: 1854904 - RNA, 19 nt, Homo sapiens
  misc_RNA (1)...(19): siRNA sense strand
ucucacagaugaauuuaag

SEQ ID NO: 1854905 - RNA, 19 nt, Homo sapiens
  misc_RNA (1)...(19): siRNA sense strand
caggagaauuuaucuacug

SEQ ID NO: 1854906 - RNA, 19 nt, Homo sapiens
  misc_RNA (1)...(19): siRNA sense strand
acacagagcaguauucaag

SEQ ID NO: 1854907 - RNA, 19 nt, Homo sapiens
  misc_RNA (1)...(19): siRNA sense strand
agacaauccuugggucauu

SEQ ID NO: 1854908 - RNA, 19 nt, Homo sapiens
  misc_RNA (1)...(19): siRNA sense strand
gauuucaucaggacacuuu

SEQ ID NO: 1854909 - RNA, 19 nt, Homo sapiens
  misc_RNA (1)...(19): siRNA sense strand
gcaaaaggccauuuccaaa

SEQ ID NO: 1854910 - RNA, 19 nt, Homo sapiens
  misc_RNA (1)...(19): siRNA sense strand
ugaacuagcacaagacaau

SEQ ID NO: 1854911 - RNA, 19 nt, Homo sapiens
  misc_RNA (1)...(19): siRNA sense strand
ugucaugcuuacaggaaua

SEQ ID NO: 1854912 - RNA, 19 nt, Homo sapiens
  misc_RNA (1)...(19): siRNA sense strand
aauauucuguugacaagug

SEQ ID NO: 1854913 - RNA, 19 nt, Homo sapiens
  misc_RNA (1)...(19): siRNA sense strand
gaggaaccuuugcuacaag

SEQ ID NO: 1854914 - RNA, 19 nt, Homo sapiens
  misc_RNA (1)...(19): siRNA sense strand
gaagaaaaggccaagauug

SEQ ID NO: 1854915 - RNA, 19 nt, Homo sapiens
  misc_RNA (1)...(19): siRNA sense strand
auccuugggucauuaauuu

SEQ ID NO: 1854916 - RNA, 19 nt, Homo sapiens
  misc_RNA (1)...(19): siRNA sense strand
uaaguuauucugaggaaga

SEQ ID NO: 1854917 - RNA, 19 nt, Homo sapiens
  misc_RNA (1)...(19): siRNA sense strand
ucagaaaugaucuuaguuc

SEQ ID NO: 1854918 - RNA, 19 nt, Homo sapiens
  misc_RNA (1)...(19): siRNA sense strand
ugaggaagaauuugauguu

SEQ ID NO: 1854919 - RNA, 19 nt, Homo sapiens
  misc_RNA (1)...(19): siRNA sense strand
cuauaagcauggcaacaga

SEQ ID NO: 1854920 - RNA, 19 nt, Homo sapiens
  misc_RNA (1)...(19): siRNA sense strand
gcugaagaaugucuaaagc

SEQ ID NO: 1854921 - RNA, 19 nt, Homo sapiens
  misc_RNA (1)...(19): siRNA sense strand
uuaugagacugcaucagaa

SEQ ID NO: 1854922 - RNA, 19 nt, Homo sapiens
  misc_RNA (1)...(19): siRNA sense strand
ucaggacacuuuuaguuaa

SEQ ID NO: 1854923 - RNA, 19 nt, Homo sapiens
  misc_RNA (1)...(19): siRNA sense strand
acaggaauaucaccuuucu

SEQ ID NO: 1854924 - RNA, 19 nt, Homo sapiens
  misc_RNA (1)...(19): siRNA sense strand
gacaagugaaucuccauug

SEQ ID NO: 1854925 - RNA, 19 nt, Homo sapiens
  misc_RNA (1)...(19): siRNA sense strand
acacacucgugauguaguu

SEQ ID NO: 1854926 - RNA, 19 nt, Homo sapiens
  misc_RNA (1)...(19): siRNA sense strand
agaagcaaaugcccuccaa

SEQ ID NO: 1854927 - RNA, 19 nt, Homo sapiens
  misc_RNA (1)...(19): siRNA sense strand
caagauugucggauggaaa

SEQ ID NO: 1854928 - RNA, 19 nt, Homo sapiens
  misc_RNA (1)...(19): siRNA sense strand
ggccauuuccaaacgauuu

SEQ ID NO: 1854929 - RNA, 19 nt, Homo sapiens
  misc_RNA (1)...(19): siRNA sense strand
acaagugaaucuccauugg

SEQ ID NO: 1854930 - RNA, 19 nt, Homo sapiens
  misc_RNA (1)...(19): siRNA sense strand
uaaauuugaggaaccuuug

SEQ ID NO: 1854931 - RNA, 19 nt, Homo sapiens
  misc_RNA (1)...(19): siRNA sense strand
gauugucggauggaaauaa

SEQ ID NO: 1854932 - RNA, 19 nt, Homo sapiens
  misc_RNA (1)...(19): siRNA sense strand
ucgagccacugcugaagaa

SEQ ID NO: 1854933 - RNA, 19 nt, Homo sapiens
  misc_RNA (1)...(19): siRNA sense strand
aggcaaugauaaacaagaa

SEQ ID NO: 1854934 - RNA, 19 nt, Homo sapiens
  misc_RNA (1)...(19): siRNA sense strand
cuuaggcaaugauaaacaa

SEQ ID NO: 1854935 - RNA, 19 nt, Homo sapiens
  misc_RNA (1)...(19): siRNA sense strand
ggaauaucaccuuucuuag

SEQ ID NO: 1854936 - RNA, 19 nt, Homo sapiens
  misc_RNA (1)...(19): siRNA sense strand
ugaagagcuccgagaaauu

SEQ ID NO: 1854937 - RNA, 19 nt, Homo sapiens
  misc_RNA (1)...(19): siRNA sense strand
ugaucuuaguucuggaaua

SEQ ID NO: 1854938 - RNA, 19 nt, Homo sapiens
  misc_RNA (1)...(19): siRNA sense strand
ccgaagaguuaauuguagu

SEQ ID NO: 1854939 - RNA, 19 nt, Homo sapiens
  misc_RNA (1)...(19): siRNA sense strand
ggauaccgacaaaucagaa

SEQ ID NO: 1854940 - RNA, 19 nt, Homo sapiens
  misc_RNA (1)...(19): siRNA sense strand
gcaaugauaaacaagaaac

SEQ ID NO: 1854941 - RNA, 19 nt, Homo sapiens
  misc_RNA (1)...(19): siRNA sense strand
caagaauauugaagaacag

SEQ ID NO: 1854942 - RNA, 19 nt, Homo sapiens
  misc_RNA (1)...(19): siRNA sense strand
ugggugacauuaagauugu

SEQ ID NO: 1854943 - RNA, 19 nt, Homo sapiens
  misc_RNA (1)...(19): siRNA sense strand
ccaguguguugcagacaga

SEQ ID NO: 1854944 - RNA, 19 nt, Homo sapiens
  misc_RNA (1)...(19): siRNA sense strand
aaccgaagaguuaauugua

SEQ ID NO: 1854945 - RNA, 19 nt, Homo sapiens
  misc_RNA (1)...(19): siRNA sense strand
uguaguucaucuugauuug

SEQ ID NO: 1854946 - RNA, 19 nt, Homo sapiens
  misc_RNA (1)...(19): siRNA sense strand
acagagaagaagccuuuaa

SEQ ID NO: 1854947 - RNA, 19 nt, Homo sapiens
  misc_RNA (1)...(19): siRNA sense strand
aagcaaaugcccuccaaga

SEQ ID NO: 1854948 - RNA, 19 nt, Homo sapiens
  misc_RNA (1)...(19): siRNA sense strand
aggagaauuuaucuacuga

SEQ ID NO: 1854949 - RNA, 19 nt, Homo sapiens
  misc_RNA (1)...(19): siRNA sense strand
gccauuuccaaacgauuua

SEQ ID NO: 1854950 - RNA, 19 nt, Homo sapiens
  misc_RNA (1)...(19): siRNA sense strand
gaacuagcacaagacaauc

SEQ ID NO: 1854951 - RNA, 19 nt, Homo sapiens
  misc_RNA (1)...(19): siRNA sense strand
ccaagauugucggauggaa

SEQ ID NO: 1854952 - RNA, 19 nt, Homo sapiens
  misc_RNA (1)...(19): siRNA sense strand
gucauucugugccugaaau

SEQ ID NO: 1854953 - RNA, 19 nt, Homo sapiens
  misc_RNA (1)...(19): siRNA sense strand
uuugaagccucagaauauu

SEQ ID NO: 1854954 - RNA, 19 nt, Homo sapiens
  misc_RNA (1)...(19): siRNA sense strand
caaagacuuaugcgacaga

SEQ ID NO: 1854955 - RNA, 19 nt, Homo sapiens
  misc_RNA (1)...(19): siRNA sense strand
cugagucggcuguugauuu

SEQ ID NO: 1854956 - RNA, 19 nt, Homo sapiens
  misc_RNA (1)...(19): siRNA sense strand
gaaucuccauugggugaca

SEQ ID NO: 1854957 - RNA, 19 nt, Homo sapiens
  misc_RNA (1)...(19): siRNA sense strand
aagagaaaauggagcaaaa

SEQ ID NO: 1854958 - RNA, 19 nt, Homo sapiens
  misc_RNA (1)...(19): siRNA sense strand
gcacuagaagaagcaaaug

SEQ ID NO: 1854959 - RNA, 19 nt, Homo sapiens
  misc_RNA (1)...(19): siRNA sense strand
gagccacugcugaagaaug

SEQ ID NO: 1854960 - RNA, 19 nt, Homo sapiens
  misc_RNA (1)...(19): siRNA sense strand
aauuugcaguggugagaaa

SEQ ID NO: 1854961 - RNA, 19 nt, Homo sapiens
  misc_RNA (1)...(19): siRNA sense strand
ugagacugcaucagaaaug

SEQ ID NO: 1854962 - RNA, 19 nt, Homo sapiens
  misc_RNA (1)...(19): siRNA sense strand
ccaggagaauuuaucuacu

SEQ ID NO: 1854963 - RNA, 19 nt, Homo sapiens
  misc_RNA (1)...(19): siRNA sense strand
ggagagaguucauauguuu

SEQ ID NO: 1854964 - RNA, 19 nt, Homo sapiens
  misc_RNA (1)...(19): siRNA sense strand
gaagggagcaucauuguua

SEQ ID NO: 1854965 - RNA, 19 nt, Homo sapiens
  misc_RNA (1)...(19): siRNA sense strand
gcagcaagcucuuacagua

SEQ ID NO: 1854966 - RNA, 19 nt, Homo sapiens
  misc_RNA (1)...(19): siRNA sense strand
caacagcauuguaaagaua

SEQ ID NO: 1854967 - RNA, 19 nt, Homo sapiens
  misc_RNA (1)...(19): siRNA sense strand
ggacacacccauuauguua

SEQ ID NO: 1854968 - RNA, 19 nt, Homo sapiens
  misc_RNA (1)...(19): siRNA sense strand
gcagaugaccgucuuguua

SEQ ID NO: 1854969 - RNA, 19 nt, Homo sapiens
  misc_RNA (1)...(19): siRNA sense strand
gaaauucagcccaaacaua

SEQ ID NO: 1854970 - RNA, 19 nt, Homo sapiens
  misc_RNA (1)...(19): siRNA sense strand
gaacagaaguggaaacaac

SEQ ID NO: 1854971 - RNA, 19 nt, Homo sapiens
  misc_RNA (1)...(19): siRNA sense strand
gaacagaggaccagaguug

SEQ ID NO: 1854972 - RNA, 19 nt, Homo sapiens
  misc_RNA (1)...(19): siRNA sense strand
gaccagaguugcacacuuu

SEQ ID NO: 1854973 - RNA, 19 nt, Homo sapiens
  misc_RNA (1)...(19): siRNA sense strand
gaacucauacgaagaauug

SEQ ID NO: 1854974 - RNA, 19 nt, Homo sapiens
  misc_RNA (1)...(19): siRNA sense strand
gagcuagucuguauugcua

SEQ ID NO: 1854975 - RNA, 19 nt, Homo sapiens
  misc_RNA (1)...(19): siRNA sense strand
gaaacaacuugcugaacuu

SEQ ID NO: 1854976 - RNA, 19 nt, Homo sapiens
  misc_RNA (1)...(19): siRNA sense strand
gugaugacaugcuuauuaa

SEQ ID NO: 1854977 - RNA, 19 nt, Homo sapiens
  misc_RNA (1)...(19): siRNA sense strand
ggaaacaacuugcugaacu

SEQ ID NO: 1854978 - RNA, 19 nt, Homo sapiens
  misc_RNA (1)...(19): siRNA sense strand
gggagaugcugaaauuaaa

SEQ ID NO: 1854979 - RNA, 19 nt, Homo sapiens
  misc_RNA (1)...(19): siRNA sense strand
gaacuugccauuaguaaau

SEQ ID NO: 1854980 - RNA, 19 nt, Homo sapiens
  misc_RNA (1)...(19): siRNA sense strand
ggacaauacagaacucaua

SEQ ID NO: 1854981 - RNA, 19 nt, Homo sapiens
  misc_RNA (1)...(19): siRNA sense strand
cuagagcucuuaauuagaa

SEQ ID NO: 1854982 - RNA, 19 nt, Homo sapiens
  misc_RNA (1)...(19): siRNA sense strand
gaacuuacuuacccaguca

SEQ ID NO: 1854983 - RNA, 19 nt, Homo sapiens
  misc_RNA (1)...(19): siRNA sense strand
uaaagauggugaaagauug

SEQ ID NO: 1854984 - RNA, 19 nt, Homo sapiens
  misc_RNA (1)...(19): siRNA sense strand
gauauugacacaacagaua

SEQ ID NO: 1854985 - RNA, 19 nt, Homo sapiens
  misc_RNA (1)...(19): siRNA sense strand
gaaauauacccucagacua

SEQ ID NO: 1854986 - RNA, 19 nt, Homo sapiens
  misc_RNA (1)...(19): siRNA sense strand
ggacaagccauaccucauu

SEQ ID NO: 1854987 - RNA, 19 nt, Homo sapiens
  misc_RNA (1)...(19): siRNA sense strand
gguaggcgauugcuucauu

SEQ ID NO: 1854988 - RNA, 19 nt, Homo sapiens
  misc_RNA (1)...(19): siRNA sense strand
ggagucagaucuguaaaug

SEQ ID NO: 1854989 - RNA, 19 nt, Homo sapiens
  misc_RNA (1)...(19): siRNA sense strand
gacaagccauaccucauuu

SEQ ID NO: 1854990 - RNA, 19 nt, Homo sapiens
  misc_RNA (1)...(19): siRNA sense strand
ggaaacacaugcugaucug

SEQ ID NO: 1854991 - RNA, 19 nt, Homo sapiens
  misc_RNA (1)...(19): siRNA sense strand
ggaaacacaugagggaguu

SEQ ID NO: 1854992 - RNA, 19 nt, Homo sapiens
  misc_RNA (1)...(19): siRNA sense strand
ggagaaauagucaccauug

SEQ ID NO: 1854993 - RNA, 19 nt, Homo sapiens
  misc_RNA (1)...(19): siRNA sense strand
ggaugccaauggaaagaua

SEQ ID NO: 1854994 - RNA, 19 nt, Homo sapiens
  misc_RNA (1)...(19): siRNA sense strand
gcaacagcauuguaaagau

SEQ ID NO: 1854995 - RNA, 19 nt, Homo sapiens
  misc_RNA (1)...(19): siRNA sense strand
gauaugggcaguugugaaa

SEQ ID NO: 1854996 - RNA, 19 nt, Homo sapiens
  misc_RNA (1)...(19): siRNA sense strand
uaaaggauaugggcaguug

SEQ ID NO: 1854997 - RNA, 19 nt, Homo sapiens
  misc_RNA (1)...(19): siRNA sense strand
aaugggagaugcugaaauu

SEQ ID NO: 1854998 - RNA, 19 nt, Homo sapiens
  misc_RNA (1)...(19): siRNA sense strand
ccacacagccaacaaagaa

SEQ ID NO: 1854999 - RNA, 19 nt, Homo sapiens
  misc_RNA (1)...(19): siRNA sense strand
gccuagagcucuuaauuag

SEQ ID NO: 1855000 - RNA, 19 nt, Homo sapiens
  misc_RNA (1)...(19): siRNA sense strand
gauggaacaguacguauuu

SEQ ID NO: 1855001 - RNA, 19 nt, Homo sapiens
  misc_RNA (1)...(19): siRNA sense strand
gagagcaacagcauuguaa

SEQ ID NO: 1855002 - RNA, 19 nt, Homo sapiens
  misc_RNA (1)...(19): siRNA sense strand
ccacgauucuucagaguau

SEQ ID NO: 1855003 - RNA, 19 nt, Homo sapiens
  misc_RNA (1)...(19): siRNA sense strand
gcggaugacaugcagauua

SEQ ID NO: 1855004 - RNA, 19 nt, Homo sapiens
  misc_RNA (1)...(19): siRNA sense strand
agagaaaugucauggaaga

SEQ ID NO: 1855005 - RNA, 19 nt, Homo sapiens
  misc_RNA (1)...(19): siRNA sense strand
agagagaaaugucauggaa

SEQ ID NO: 1855006 - RNA, 19 nt, Homo sapiens
  misc_RNA (1)...(19): siRNA sense strand
gaagauggcauugaagaug

SEQ ID NO: 1855007 - RNA, 19 nt, Homo sapiens
  misc_RNA (1)...(19): siRNA sense strand
uaugggcaguugugaaaua

SEQ ID NO: 1855008 - RNA, 19 nt, Homo sapiens
  misc_RNA (1)...(19): siRNA sense strand
guacguauuuggcauucaa

SEQ ID NO: 1855009 - RNA, 19 nt, Homo sapiens
  misc_RNA (1)...(19): siRNA sense strand
gaagauggaacaguacgua

SEQ ID NO: 1855010 - RNA, 19 nt, Homo sapiens
  misc_RNA (1)...(19): siRNA sense strand
ggugaagacauuugaagua

SEQ ID NO: 1855011 - RNA, 19 nt, Homo sapiens
  misc_RNA (1)...(19): siRNA sense strand
gagcaucauuguuaagcuu

SEQ ID NO: 1855012 - RNA, 19 nt, Homo sapiens
  misc_RNA (1)...(19): siRNA sense strand
gugaagacauuugaaguau

SEQ ID NO: 1855013 - RNA, 19 nt, Homo sapiens
  misc_RNA (1)...(19): siRNA sense strand
uaucacagguucagaagau

SEQ ID NO: 1855014 - RNA, 19 nt, Homo sapiens
  misc_RNA (1)...(19): siRNA sense strand
cuaagagggucaaacaaug

SEQ ID NO: 1855015 - RNA, 19 nt, Homo sapiens
  misc_RNA (1)...(19): siRNA sense strand
ggagagcuagucuguauug

SEQ ID NO: 1855016 - RNA, 19 nt, Homo sapiens
  misc_RNA (1)...(19): siRNA sense strand
ccaaagauaacaaucaguu

SEQ ID NO: 1855017 - RNA, 19 nt, Homo sapiens
  misc_RNA (1)...(19): siRNA sense strand
aaauauacccucagacuau

SEQ ID NO: 1855018 - RNA, 19 nt, Homo sapiens
  misc_RNA (1)...(19): siRNA sense strand
gcuauucccugcugguuuc

SEQ ID NO: 1855019 - RNA, 19 nt, Homo sapiens
  misc_RNA (1)...(19): siRNA sense strand
gaaaugcuaauauggugaa

SEQ ID NO: 1855020 - RNA, 19 nt, Homo sapiens
  misc_RNA (1)...(19): siRNA sense strand
cagauuagaguguucaauu

SEQ ID NO: 1855021 - RNA, 19 nt, Homo sapiens
  misc_RNA (1)...(19): siRNA sense strand
gaagaaugggugaaggaaa

SEQ ID NO: 1855022 - RNA, 19 nt, Homo sapiens
  misc_RNA (1)...(19): siRNA sense strand
ggucaaacaaugucgcuuu

SEQ ID NO: 1855023 - RNA, 19 nt, Homo sapiens
  misc_RNA (1)...(19): siRNA sense strand
ggaaggacaugcccaaaau

SEQ ID NO: 1855024 - RNA, 19 nt, Homo sapiens
  misc_RNA (1)...(19): siRNA sense strand
gaaggacacacccauuaug

SEQ ID NO: 1855025 - RNA, 19 nt, Homo sapiens
  misc_RNA (1)...(19): siRNA sense strand
gaauugcauugauuacuac

SEQ ID NO: 1855026 - RNA, 19 nt, Homo sapiens
  misc_RNA (1)...(19): siRNA sense strand
ggaccagaguugcacacuu

SEQ ID NO: 1855027 - RNA, 19 nt, Homo sapiens
  misc_RNA (1)...(19): siRNA sense strand
cagaugaccgucuuguuaa

SEQ ID NO: 1855028 - RNA, 19 nt, Homo sapiens
  misc_RNA (1)...(19): siRNA sense strand
gaaggaaacacaugcugau

SEQ ID NO: 1855029 - RNA, 19 nt, Homo sapiens
  misc_RNA (1)...(19): siRNA sense strand
cuggagagcuagucuguau

SEQ ID NO: 1855030 - RNA, 19 nt, Homo sapiens
  misc_RNA (1)...(19): siRNA sense strand
uggcaagucuuuacaaugg

SEQ ID NO: 1855031 - RNA, 19 nt, Homo sapiens
  misc_RNA (1)...(19): siRNA sense strand
gccaauggaaagauaauuu

SEQ ID NO: 1855032 - RNA, 19 nt, Homo sapiens
  misc_RNA (1)...(19): siRNA sense strand
uguucgagcugcaaaguuu

SEQ ID NO: 1855033 - RNA, 19 nt, Homo sapiens
  misc_RNA (1)...(19): siRNA sense strand
uagaagauauugacacaac

SEQ ID NO: 1855034 - RNA, 19 nt, Homo sapiens
  misc_RNA (1)...(19): siRNA sense strand
cgaacuagaaguagauuug

SEQ ID NO: 1855035 - RNA, 19 nt, Homo sapiens
  misc_RNA (1)...(19): siRNA sense strand
guaggcgauugcuucauuu

SEQ ID NO: 1855036 - RNA, 19 nt, Homo sapiens
  misc_RNA (1)...(19): siRNA sense strand
caaugucgcuuugggcuau

SEQ ID NO: 1855037 - RNA, 19 nt, Homo sapiens
  misc_RNA (1)...(19): siRNA sense strand
gacaggagcggaugacaug

SEQ ID NO: 1855038 - RNA, 19 nt, Homo sapiens
  misc_RNA (1)...(19): siRNA sense strand
gccaaacaauacccacuug

SEQ ID NO: 1855039 - RNA, 19 nt, Homo sapiens
  misc_RNA (1)...(19): siRNA sense strand
gaagcagagucagaacaga

SEQ ID NO: 1855040 - RNA, 19 nt, Homo sapiens
  misc_RNA (1)...(19): siRNA sense strand
gaacaucauuagcuauucc

SEQ ID NO: 1855041 - RNA, 19 nt, Homo sapiens
  misc_RNA (1)...(19): siRNA sense strand
aaagcuaacugcuagaucu

SEQ ID NO: 1855042 - RNA, 19 nt, Homo sapiens
  misc_RNA (1)...(19): siRNA sense strand
gcaauaagagagagcaaca

SEQ ID NO: 1855043 - RNA, 19 nt, Homo sapiens
  misc_RNA (1)...(19): siRNA sense strand
gggcaguugugaaauauac

SEQ ID NO: 1855044 - RNA, 19 nt, Homo sapiens
  misc_RNA (1)...(19): siRNA sense strand
agugaugacaugcuuauua

SEQ ID NO: 1855045 - RNA, 19 nt, Homo sapiens
  misc_RNA (1)...(19): siRNA sense strand
ggaauuagaagauauugac

SEQ ID NO: 1855046 - RNA, 19 nt, Homo sapiens
  misc_RNA (1)...(19): siRNA sense strand
gaggagaaauagucaccau

SEQ ID NO: 1855047 - RNA, 19 nt, Homo sapiens
  misc_RNA (1)...(19): siRNA sense strand
gagaaaggcgugaauugca

SEQ ID NO: 1855048 - RNA, 19 nt, Homo sapiens
  misc_RNA (1)...(19): siRNA sense strand
agacacuggugaagacauu

SEQ ID NO: 1855049 - RNA, 19 nt, Homo sapiens
  misc_RNA (1)...(19): siRNA sense strand
acacacccauuauguuaug

SEQ ID NO: 1855050 - RNA, 19 nt, Homo sapiens
  misc_RNA (1)...(19): siRNA sense strand
aaauucagcccaaacauau

SEQ ID NO: 1855051 - RNA, 19 nt, Homo sapiens
  misc_RNA (1)...(19): siRNA sense strand
uucagaagauggaacagua

SEQ ID NO: 1855052 - RNA, 19 nt, Homo sapiens
  misc_RNA (1)...(19): siRNA sense strand
gaaaggcgugaauugcauu

SEQ ID NO: 1855053 - RNA, 19 nt, Homo sapiens
  misc_RNA (1)...(19): siRNA sense strand
ugacacaacagauaucaau

SEQ ID NO: 1855054 - RNA, 19 nt, Homo sapiens
  misc_RNA (1)...(19): siRNA sense strand
uuucagcccucaagaucua

SEQ ID NO: 1855055 - RNA, 19 nt, Homo sapiens
  misc_RNA (1)...(19): siRNA sense strand
ggcgauugcuucauuuaca

SEQ ID NO: 1855056 - RNA, 19 nt, Homo sapiens
  misc_RNA (1)...(19): siRNA sense strand
ggcgugaauugcauugauu

SEQ ID NO: 1855057 - RNA, 19 nt, Homo sapiens
  misc_RNA (1)...(19): siRNA sense strand
cggaugacaugcagauuag

SEQ ID NO: 1855058 - RNA, 19 nt, Homo sapiens
  misc_RNA (1)...(19): siRNA sense strand
caaaugaagagagaaaugu

SEQ ID NO: 1855059 - RNA, 19 nt, Homo sapiens
  misc_RNA (1)...(19): siRNA sense strand
gaauugaacaucauuagcu

SEQ ID NO: 1855060 - RNA, 19 nt, Homo sapiens
  misc_RNA (1)...(19): siRNA sense strand
gagagcacacugaauuaug

SEQ ID NO: 1855061 - RNA, 19 nt, Homo sapiens
  misc_RNA (1)...(19): siRNA sense strand
gcagugaugacaugcuuau

SEQ ID NO: 1855062 - RNA, 19 nt, Homo sapiens
  misc_RNA (1)...(19): siRNA sense strand
gagaaauagucaccauugc

SEQ ID NO: 1855063 - RNA, 19 nt, Homo sapiens
  misc_RNA (1)...(19): siRNA sense strand
gaagugaaccgcaagaaga

SEQ ID NO: 1855064 - RNA, 19 nt, Homo sapiens
  misc_RNA (1)...(19): siRNA sense strand
caagaaccauuuccaaaca

SEQ ID NO: 1855065 - RNA, 19 nt, Homo sapiens
  misc_RNA (1)...(19): siRNA sense strand
gucaagaaccauuuccaaa

SEQ ID NO: 1855066 - RNA, 19 nt, Homo sapiens
  misc_RNA (1)...(19): siRNA sense strand
ggaagugaaccgcaagaag

SEQ ID NO: 1855067 - RNA, 19 nt, Homo sapiens
  misc_RNA (1)...(19): siRNA sense strand
ggucagucaagaaccauuu

SEQ ID NO: 1855068 - RNA, 19 nt, Homo sapiens
  misc_RNA (1)...(19): siRNA sense strand
ucaagaaccauuuccaaac

SEQ ID NO: 1855069 - RNA, 19 nt, Homo sapiens
  misc_RNA (1)...(19): siRNA sense strand
aagaaccauuuccaaacaa

SEQ ID NO: 1855070 - RNA, 19 nt, Homo sapiens
  misc_RNA (1)...(19): siRNA sense strand
aaucaguuaccuccacuuu

SEQ ID NO: 1855071 - RNA, 19 nt, Homo sapiens
  misc_RNA (1)...(19): siRNA sense strand
agaaccauuuccaaacaag

SEQ ID NO: 1855072 - RNA, 19 nt, Homo sapiens
  misc_RNA (1)...(19): siRNA sense strand
gaaacuggagugagaauua

SEQ ID NO: 1855073 - RNA, 19 nt, Homo sapiens
  misc_RNA (1)...(19): siRNA sense strand
cuccagagcuccagaaaua

SEQ ID NO: 1855074 - RNA, 19 nt, Homo sapiens
  misc_RNA (1)...(19): siRNA sense strand
gauccaagcuaauaugaga

SEQ ID NO: 1855075 - RNA, 19 nt, Homo sapiens
  misc_RNA (1)...(19): siRNA sense strand
caacagcaaugaugauaau

SEQ ID NO: 1855076 - RNA, 19 nt, Homo sapiens
  misc_RNA (1)...(19): siRNA sense strand
gaacaagaucaucaccuua

SEQ ID NO: 1855077 - RNA, 19 nt, Homo sapiens
  misc_RNA (1)...(19): siRNA sense strand
caaagagcauccagaguga

SEQ ID NO: 1855078 - RNA, 19 nt, Homo sapiens
  misc_RNA (1)...(19): siRNA sense strand
ucacagagaacuacaagua

SEQ ID NO: 1855079 - RNA, 19 nt, Homo sapiens
  misc_RNA (1)...(19): siRNA sense strand
gaacuacaaguaugaagaa

SEQ ID NO: 1855080 - RNA, 19 nt, Homo sapiens
  misc_RNA (1)...(19): siRNA sense strand
ucaaggaccucaaagugaa

SEQ ID NO: 1855081 - RNA, 19 nt, Homo sapiens
  misc_RNA (1)...(19): siRNA sense strand
gaaaagcaguccugagaaa

SEQ ID NO: 1855082 - RNA, 19 nt, Homo sapiens
  misc_RNA (1)...(19): siRNA sense strand
gaucaucaccuuaucuuau

SEQ ID NO: 1855083 - RNA, 19 nt, Homo sapiens
  misc_RNA (1)...(19): siRNA sense strand
caacaugggccaggauaua

SEQ ID NO: 1855084 - RNA, 19 nt, Homo sapiens
  misc_RNA (1)...(19): siRNA sense strand
aaaggcagauccaagcuaa

SEQ ID NO: 1855085 - RNA, 19 nt, Homo sapiens
  misc_RNA (1)...(19): siRNA sense strand
gcaggaguaugucaugaau

SEQ ID NO: 1855086 - RNA, 19 nt, Homo sapiens
  misc_RNA (1)...(19): siRNA sense strand
caacauguccucccaguuc

SEQ ID NO: 1855087 - RNA, 19 nt, Homo sapiens
  misc_RNA (1)...(19): siRNA sense strand
uauccaagcaucacgauua

SEQ ID NO: 1855088 - RNA, 19 nt, Homo sapiens
  misc_RNA (1)...(19): siRNA sense strand
ggacacagcguucaucaca

SEQ ID NO: 1855089 - RNA, 19 nt, Homo sapiens
  misc_RNA (1)...(19): siRNA sense strand
cuacaaguaugaagaagga

SEQ ID NO: 1855090 - RNA, 19 nt, Homo sapiens
  misc_RNA (1)...(19): siRNA sense strand
gcaacaaguuuaaggacau

SEQ ID NO: 1855091 - RNA, 19 nt, Homo sapiens
  misc_RNA (1)...(19): siRNA sense strand
gaaccagccacucuccaua

SEQ ID NO: 1855092 - RNA, 19 nt, Homo sapiens
  misc_RNA (1)...(19): siRNA sense strand
ccaaagaggagcagaguug

SEQ ID NO: 1855093 - RNA, 19 nt, Homo sapiens
  misc_RNA (1)...(19): siRNA sense strand
ggagugagaauuacacaga

SEQ ID NO: 1855094 - RNA, 19 nt, Homo sapiens
  misc_RNA (1)...(19): siRNA sense strand
ggaauaagaagaaggauac

SEQ ID NO: 1855095 - RNA, 19 nt, Homo sapiens
  misc_RNA (1)...(19): siRNA sense strand
gugcaagucucccugaaau

SEQ ID NO: 1855096 - RNA, 19 nt, Homo sapiens
  misc_RNA (1)...(19): siRNA sense strand
ugaacaagaucaucaccuu

SEQ ID NO: 1855097 - RNA, 19 nt, Homo sapiens
  misc_RNA (1)...(19): siRNA sense strand
ugaggaugcugucuacuug

SEQ ID NO: 1855098 - RNA, 19 nt, Homo sapiens
  misc_RNA (1)...(19): siRNA sense strand
gcagaaagucuuccuugga

SEQ ID NO: 1855099 - RNA, 19 nt, Homo sapiens
  misc_RNA (1)...(19): siRNA sense strand
gcauacaccuucccuucga

SEQ ID NO: 1855100 - RNA, 19 nt, Homo sapiens
  misc_RNA (1)...(19): siRNA sense strand
cgaguucuguuggcaauuu

SEQ ID NO: 1855101 - RNA, 19 nt, Homo sapiens
  misc_RNA (1)...(19): siRNA sense strand
gaaguggaccugaacuaug

SEQ ID NO: 1855102 - RNA, 19 nt, Homo sapiens
  misc_RNA (1)...(19): siRNA sense strand
ggucuuugcugccgucaug

SEQ ID NO: 1855103 - RNA, 19 nt, Homo sapiens
  misc_RNA (1)...(19): siRNA sense strand
gcaagucucccugaaauuc

SEQ ID NO: 1855104 - RNA, 19 nt, Homo sapiens
  misc_RNA (1)...(19): siRNA sense strand
gauggaaaccugaucauag

SEQ ID NO: 1855105 - RNA, 19 nt, Homo sapiens
  misc_RNA (1)...(19): siRNA sense strand
caacaaguuuaaggacauu

SEQ ID NO: 1855106 - RNA, 19 nt, Homo sapiens
  misc_RNA (1)...(19): siRNA sense strand
aaguggaccugaacuauga

SEQ ID NO: 1855107 - RNA, 19 nt, Homo sapiens
  misc_RNA (1)...(19): siRNA sense strand
acagagaacuacaaguaug

SEQ ID NO: 1855108 - RNA, 19 nt, Homo sapiens
  misc_RNA (1)...(19): siRNA sense strand
gaaccugagugcccagucu

SEQ ID NO: 1855109 - RNA, 19 nt, Homo sapiens
  misc_RNA (1)...(19): siRNA sense strand
aauggaaacuggagugaga

SEQ ID NO: 1855110 - RNA, 19 nt, Homo sapiens
  misc_RNA (1)...(19): siRNA sense strand
gaagcaacaaguuuaagga

SEQ ID NO: 1855111 - RNA, 19 nt, Homo sapiens
  misc_RNA (1)...(19): siRNA sense strand
ugucagagccaucaaagaa

SEQ ID NO: 1855112 - RNA, 19 nt, Homo sapiens
  misc_RNA (1)...(19): siRNA sense strand
gggaauaagaagaaggaua

SEQ ID NO: 1855113 - RNA, 19 nt, Homo sapiens
  misc_RNA (1)...(19): siRNA sense strand
gggcaaugcugggucuuug

SEQ ID NO: 1855114 - RNA, 19 nt, Homo sapiens
  misc_RNA (1)...(19): siRNA sense strand
gggccaggauauaugcuuu

SEQ ID NO: 1855115 - RNA, 19 nt, Homo sapiens
  misc_RNA (1)...(19): siRNA sense strand
caucaaagaaggagaagug

SEQ ID NO: 1855116 - RNA, 19 nt, Homo sapiens
  misc_RNA (1)...(19): siRNA sense strand
acaggaauguuuauguaga

SEQ ID NO: 1855117 - RNA, 19 nt, Homo sapiens
  misc_RNA (1)...(19): siRNA sense strand
gagcagccguugugaacca

SEQ ID NO: 1855118 - RNA, 19 nt, Homo sapiens
  misc_RNA (1)...(19): siRNA sense strand
ccaagcaucacgauuaaug

SEQ ID NO: 1855119 - RNA, 19 nt, Homo sapiens
  misc_RNA (1)...(19): siRNA sense strand
gagaaguggaccugaacua

SEQ ID NO: 1855120 - RNA, 19 nt, Homo sapiens
  misc_RNA (1)...(19): siRNA sense strand
gcacagugaugaggugucu

SEQ ID NO: 1855121 - RNA, 19 nt, Homo sapiens
  misc_RNA (1)...(19): siRNA sense strand
cacacucucuccuaaagaa

SEQ ID NO: 1855122 - RNA, 19 nt, Homo sapiens
  misc_RNA (1)...(19): siRNA sense strand
caacaucaucuucgugguu

SEQ ID NO: 1855123 - RNA, 19 nt, Homo sapiens
  misc_RNA (1)...(19): siRNA sense strand
gccugaagcugcuagacaa

SEQ ID NO: 1855124 - RNA, 19 nt, Homo sapiens
  misc_RNA (1)...(19): siRNA sense strand
gacaacacaggcaggauuu

SEQ ID NO: 1855125 - RNA, 19 nt, Homo sapiens
  misc_RNA (1)...(19): siRNA sense strand
gcagauccaagcuaauaug

SEQ ID NO: 1855126 - RNA, 19 nt, Homo sapiens
  misc_RNA (1)...(19): siRNA sense strand
ccagugauguggugcaagu

SEQ ID NO: 1855127 - RNA, 19 nt, Homo sapiens
  misc_RNA (1)...(19): siRNA sense strand
ggaaaccugaucauagaug

SEQ ID NO: 1855128 - RNA, 19 nt, Homo sapiens
  misc_RNA (1)...(19): siRNA sense strand
ucaagaaacagcagaaagu

SEQ ID NO: 1855129 - RNA, 19 nt, Homo sapiens
  misc_RNA (1)...(19): siRNA sense strand
cuaaagaagcaaagaccua

SEQ ID NO: 1855130 - RNA, 19 nt, Homo sapiens
  misc_RNA (1)...(19): siRNA sense strand
ggagcagaguugcaaccuu

SEQ ID NO: 1855131 - RNA, 19 nt, Homo sapiens
  misc_RNA (1)...(19): siRNA sense strand
ugagaagcaacaaguuuaa

SEQ ID NO: 1855132 - RNA, 19 nt, Homo sapiens
  misc_RNA (1)...(19): siRNA sense strand
ucaucacacucucuccuaa

SEQ ID NO: 1855133 - RNA, 19 nt, Homo sapiens
  misc_RNA (1)...(19): siRNA sense strand
gaacuggauccgcccaugu

SEQ ID NO: 1855134 - RNA, 19 nt, Homo sapiens
  misc_RNA (1)...(19): siRNA sense strand
uaugagaagcaacaaguuu

SEQ ID NO: 1855135 - RNA, 19 nt, Homo sapiens
  misc_RNA (1)...(19): siRNA sense strand
gagaaaagcaguccugaga

SEQ ID NO: 1855136 - RNA, 19 nt, Homo sapiens
  misc_RNA (1)...(19): siRNA sense strand
aaacugaggaugcugucua

SEQ ID NO: 1855137 - RNA, 19 nt, Homo sapiens
  misc_RNA (1)...(19): siRNA sense strand
auggaaaccugaucauaga

SEQ ID NO: 1855138 - RNA, 19 nt, Homo sapiens
  misc_RNA (1)...(19): siRNA sense strand
cauuaaggguuacaggaau

SEQ ID NO: 1855139 - RNA, 19 nt, Homo sapiens
  misc_RNA (1)...(19): siRNA sense strand
gcuaauaugagaagcaaca

SEQ ID NO: 1855140 - RNA, 19 nt, Homo sapiens
  misc_RNA (1)...(19): siRNA sense strand
ugacaacacaggcaggauu

SEQ ID NO: 1855141 - RNA, 19 nt, Homo sapiens
  misc_RNA (1)...(19): siRNA sense strand
caaaggcagauccaagcua

SEQ ID NO: 1855142 - RNA, 19 nt, Homo sapiens
  misc_RNA (1)...(19): siRNA sense strand
guucaaggaccucaaagug

SEQ ID NO: 1855143 - RNA, 19 nt, Homo sapiens
  misc_RNA (1)...(19): siRNA sense strand
gaacuaugacacgcccuuu

SEQ ID NO: 1855144 - RNA, 19 nt, Homo sapiens
  misc_RNA (1)...(19): siRNA sense strand
ccaugucccuggaacuaug

SEQ ID NO: 1855145 - RNA, 19 nt, Homo sapiens
  misc_RNA (1)...(19): siRNA sense strand
gcaucacgauuaauguucu

SEQ ID NO: 1855146 - RNA, 19 nt, Homo sapiens
  misc_RNA (1)...(19): siRNA sense strand
gagaggcagguguuucuga

SEQ ID NO: 1855147 - RNA, 19 nt, Homo sapiens
  misc_RNA (1)...(19): siRNA sense strand
cagagaacuacaaguauga

SEQ ID NO: 1855148 - RNA, 19 nt, Homo sapiens
  misc_RNA (1)...(19): siRNA sense strand
agaggcagguguuucugaa

SEQ ID NO: 1855149 - RNA, 19 nt, Homo sapiens
  misc_RNA (1)...(19): siRNA sense strand
ugaaggcucugcagaagcu

SEQ ID NO: 1855150 - RNA, 19 nt, Homo sapiens
  misc_RNA (1)...(19): siRNA sense strand
gccgucaugugcacaguga

SEQ ID NO: 1855151 - RNA, 19 nt, Homo sapiens
  misc_RNA (1)...(19): siRNA sense strand
aggcagauccaagcuaaua

SEQ ID NO: 1855152 - RNA, 19 nt, Homo sapiens
  misc_RNA (1)...(19): siRNA sense strand
caucacgauuaauguucua

SEQ ID NO: 1855153 - RNA, 19 nt, Homo sapiens
  misc_RNA (1)...(19): siRNA sense strand
aaggagaaguggaccugaa

SEQ ID NO: 1855154 - RNA, 19 nt, Homo sapiens
  misc_RNA (1)...(19): siRNA sense strand
ccagagcuccagaaauaau

SEQ ID NO: 1855155 - RNA, 19 nt, Homo sapiens
  misc_RNA (1)...(19): siRNA sense strand
agaaacagcagaaagucuu

SEQ ID NO: 1855156 - RNA, 19 nt, Homo sapiens
  misc_RNA (1)...(19): siRNA sense strand
gaaacagcagaaagucuuc

SEQ ID NO: 1855157 - RNA, 19 nt, Homo sapiens
  misc_RNA (1)...(19): siRNA sense strand
ucaacagcaaugaugauaa

SEQ ID NO: 1855158 - RNA, 19 nt, Homo sapiens
  misc_RNA (1)...(19): siRNA sense strand
acaccaagcaagcaucauu

SEQ ID NO: 1855159 - RNA, 19 nt, Homo sapiens
  misc_RNA (1)...(19): siRNA sense strand
caacaccaagcaagcauca

SEQ ID NO: 1855160 - RNA, 19 nt, Homo sapiens
  misc_RNA (1)...(19): siRNA sense strand
ggaaacuggagugagaauu

SEQ ID NO: 1855161 - RNA, 19 nt, Homo sapiens
  misc_RNA (1)...(19): siRNA sense strand
ucagugcccugggugaaga

SEQ ID NO: 1855162 - RNA, 19 nt, Homo sapiens
  misc_RNA (1)...(19): siRNA sense strand
gcccaugucccuggaacua

SEQ ID NO: 1855163 - RNA, 19 nt, Homo sapiens
  misc_RNA (1)...(19): siRNA sense strand
ucauagacaucugccugaa

SEQ ID NO: 1855164 - RNA, 19 nt, Homo sapiens
  misc_RNA (1)...(19): siRNA sense strand
ccuucaaccucacccugua

SEQ ID NO: 1855165 - RNA, 19 nt, Homo sapiens
  misc_RNA (1)...(19): siRNA sense strand
augagaagcaacaaguuua

SEQ ID NO: 1855166 - RNA, 19 nt, Homo sapiens
  misc_RNA (1)...(19): siRNA sense strand
aagcuaauaugagaagcaa

SEQ ID NO: 1855167 - RNA, 19 nt, Homo sapiens
  misc_RNA (1)...(19): siRNA sense strand
acacagcguucaucacacu

SEQ ID NO: 1855168 - RNA, 19 nt, Homo sapiens
  misc_RNA (1)...(19): siRNA sense strand
aaacuggagugagaauuac

SEQ ID NO: 1855169 - RNA, 19 nt, Homo sapiens
  misc_RNA (1)...(19): siRNA sense strand
gcaauuuuaucagcacaaa

SEQ ID NO: 1855170 - RNA, 19 nt, Homo sapiens
  misc_RNA (1)...(19): siRNA sense strand
cacgauuaauguucuagga

SEQ ID NO: 1855171 - RNA, 19 nt, Homo sapiens
  misc_RNA (1)...(19): siRNA sense strand
auccaagcaucacgauuaa

SEQ ID NO: 1855172 - RNA, 19 nt, Homo sapiens
  misc_RNA (1)...(19): siRNA sense strand
ucaacacggugcccuauuu

SEQ ID NO: 1855173 - RNA, 19 nt, Homo sapiens
  misc_RNA (1)...(19): siRNA sense strand
gcacuccuccaucuucuuu

SEQ ID NO: 1855174 - RNA, 19 nt, Homo sapiens
  misc_RNA (1)...(19): siRNA sense strand
aaacugcacuccuccaucu

SEQ ID NO: 1855175 - RNA, 19 nt, Homo sapiens
  misc_RNA (1)...(19): siRNA sense strand
acaaugugcugcuccugaa

SEQ ID NO: 1855176 - RNA, 19 nt, Homo sapiens
  misc_RNA (1)...(19): siRNA sense strand
caucuucuuucucaacaug

SEQ ID NO: 1855177 - RNA, 19 nt, Homo sapiens
  misc_RNA (1)...(19): siRNA sense strand
gaauggagucauccucuuc

SEQ ID NO: 1855178 - RNA, 19 nt, Homo sapiens
  misc_RNA (1)...(19): siRNA sense strand
gggcaccaccuucugcaaa

SEQ ID NO: 1855179 - RNA, 19 nt, Homo sapiens
  misc_RNA (1)...(19): siRNA sense strand
gguggagaauggagucauc

SEQ ID NO: 1855180 - RNA, 19 nt, Homo sapiens
  misc_RNA (1)...(19): siRNA sense strand
ugagcagcaccucgaguua

SEQ ID NO: 1855181 - RNA, 19 nt, Homo sapiens
  misc_RNA (1)...(19): siRNA sense strand
agaauggagucauccucuu

SEQ ID NO: 1855182 - RNA, 19 nt, Homo sapiens
  misc_RNA (1)...(19): siRNA sense strand
caacacggugcccuauuuc

SEQ ID NO: 1855183 - RNA, 19 nt, Homo sapiens
  misc_RNA (1)...(19): siRNA sense strand
gagcagcaccucgaguuag

SEQ ID NO: 1855184 - RNA, 19 nt, Homo sapiens
  misc_RNA (1)...(19): siRNA sense strand
cuucuucaccuacuucuug

SEQ ID NO: 1855185 - RNA, 19 nt, Homo sapiens
  misc_RNA (1)...(19): siRNA sense strand
gcaaacugcacuccuccau

SEQ ID NO: 1855186 - RNA, 19 nt, Homo sapiens
  misc_RNA (1)...(19): siRNA sense strand
cgcauuaugugcuacuaca

SEQ ID NO: 1855187 - RNA, 19 nt, Homo sapiens
  misc_RNA (1)...(19): siRNA sense strand
gagcugggcaccaccuucu

SEQ ID NO: 1855188 - RNA, 19 nt, Homo sapiens
  misc_RNA (1)...(19): siRNA sense strand
cugcuucccugcccuucuu

SEQ ID NO: 1855189 - RNA, 19 nt, Homo sapiens
  misc_RNA (1)...(19): siRNA sense strand
ggccaacgccacacugaag

SEQ ID NO: 1855190 - RNA, 19 nt, Homo sapiens
  misc_RNA (1)...(19): siRNA sense strand
gcaccaccuucugcaaacu

SEQ ID NO: 1855191 - RNA, 19 nt, Homo sapiens
  misc_RNA (1)...(19): siRNA sense strand
cauuaugugcuacuacaau

SEQ ID NO: 1855192 - RNA, 19 nt, Homo sapiens
  misc_RNA (1)...(19): siRNA sense strand
ggugcccuauuucguguuc

SEQ ID NO: 1855193 - RNA, 19 nt, Homo sapiens
  misc_RNA (1)...(19): siRNA sense strand
gcucaacacggugcccuau

SEQ ID NO: 1855194 - RNA, 19 nt, Homo sapiens
  misc_RNA (1)...(19): siRNA sense strand
ggcaccaccuucugcaaac

SEQ ID NO: 1855195 - RNA, 19 nt, Homo sapiens
  misc_RNA (1)...(19): siRNA sense strand
auuaugugcuacuacaaug

SEQ ID NO: 1855196 - RNA, 19 nt, Homo sapiens
  misc_RNA (1)...(19): siRNA sense strand
caaagucugccuggugcuu

SEQ ID NO: 1855197 - RNA, 19 nt, Homo sapiens
  misc_RNA (1)...(19): siRNA sense strand
gcauuaugugcuacuacaa

SEQ ID NO: 1855198 - RNA, 19 nt, Homo sapiens
  misc_RNA (1)...(19): siRNA sense strand
gaagaagacucccacacua

SEQ ID NO: 1855199 - RNA, 19 nt, Homo sapiens
  misc_RNA (1)...(19): siRNA sense strand
ccaaugagauuuacagaaa

SEQ ID NO: 1855200 - RNA, 19 nt, Homo sapiens
  misc_RNA (1)...(19): siRNA sense strand
gaaagucugugucucauga

SEQ ID NO: 1855201 - RNA, 19 nt, Homo sapiens
  misc_RNA (1)...(19): siRNA sense strand
caacggaccuuacaugaga

SEQ ID NO: 1855202 - RNA, 19 nt, Homo sapiens
  misc_RNA (1)...(19): siRNA sense strand
gaacagcuaucgaaugaca

SEQ ID NO: 1855203 - RNA, 19 nt, Homo sapiens
  misc_RNA (1)...(19): siRNA sense strand
ggacuacucugagcaauau

SEQ ID NO: 1855204 - RNA, 19 nt, Homo sapiens
  misc_RNA (1)...(19): siRNA sense strand
ggaacaauauggagaaugu

SEQ ID NO: 1855205 - RNA, 19 nt, Homo sapiens
  misc_RNA (1)...(19): siRNA sense strand
gaacagcaguuaccauagu

SEQ ID NO: 1855206 - RNA, 19 nt, Homo sapiens
  misc_RNA (1)...(19): siRNA sense strand
gcagguuucucaucgauuu

SEQ ID NO: 1855207 - RNA, 19 nt, Homo sapiens
  misc_RNA (1)...(19): siRNA sense strand
gauaaaggauaaagaggaa

SEQ ID NO: 1855208 - RNA, 19 nt, Homo sapiens
  misc_RNA (1)...(19): siRNA sense strand
gaagaaaggauaugcaaug

SEQ ID NO: 1855209 - RNA, 19 nt, Homo sapiens
  misc_RNA (1)...(19): siRNA sense strand
caauuggaguugaguguua

SEQ ID NO: 1855210 - RNA, 19 nt, Homo sapiens
  misc_RNA (1)...(19): siRNA sense strand
caaacccgcuuuauacuga

SEQ ID NO: 1855211 - RNA, 19 nt, Homo sapiens
  misc_RNA (1)...(19): siRNA sense strand
ggaugugucugcauuauuc

SEQ ID NO: 1855212 - RNA, 19 nt, Homo sapiens
  misc_RNA (1)...(19): siRNA sense strand
gaaagagaauuagagauca

SEQ ID NO: 1855213 - RNA, 19 nt, Homo sapiens
  misc_RNA (1)...(19): siRNA sense strand
ggaauuauuucgugauauc

SEQ ID NO: 1855214 - RNA, 19 nt, Homo sapiens
  misc_RNA (1)...(19): siRNA sense strand
ugaugacacuccuaucuua

SEQ ID NO: 1855215 - RNA, 19 nt, Homo sapiens
  misc_RNA (1)...(19): siRNA sense strand
gaaacagcguccuucagaa

SEQ ID NO: 1855216 - RNA, 19 nt, Homo sapiens
  misc_RNA (1)...(19): siRNA sense strand
gaaagagaguugugagucu

SEQ ID NO: 1855217 - RNA, 19 nt, Homo sapiens
  misc_RNA (1)...(19): siRNA sense strand
ggauuggaauaaacugaua

SEQ ID NO: 1855218 - RNA, 19 nt, Homo sapiens
  misc_RNA (1)...(19): siRNA sense strand
ggaaagagaauuagagauc

SEQ ID NO: 1855219 - RNA, 19 nt, Homo sapiens
  misc_RNA (1)...(19): siRNA sense strand
gaucagcauuaagaaguua

SEQ ID NO: 1855220 - RNA, 19 nt, Homo sapiens
  misc_RNA (1)...(19): siRNA sense strand
gaaaagcacugccaacaga

SEQ ID NO: 1855221 - RNA, 19 nt, Homo sapiens
  misc_RNA (1)...(19): siRNA sense strand
gugagucucuuuccuguuu

SEQ ID NO: 1855222 - RNA, 19 nt, Homo sapiens
  misc_RNA (1)...(19): siRNA sense strand
gaggaagucuaaagaugaa

SEQ ID NO: 1855223 - RNA, 19 nt, Homo sapiens
  misc_RNA (1)...(19): siRNA sense strand
gaaaagaaaccagaaguua

SEQ ID NO: 1855224 - RNA, 19 nt, Homo sapiens
  misc_RNA (1)...(19): siRNA sense strand
agaagaagaugaagaguca

SEQ ID NO: 1855225 - RNA, 19 nt, Homo sapiens
  misc_RNA (1)...(19): siRNA sense strand
gagaauacuuccgucguuu

SEQ ID NO: 1855226 - RNA, 19 nt, Homo sapiens
  misc_RNA (1)...(19): siRNA sense strand
ggaugugccuuccguauca

SEQ ID NO: 1855227 - RNA, 19 nt, Homo sapiens
  misc_RNA (1)...(19): siRNA sense strand
ggaguugaguguuaaagau

SEQ ID NO: 1855228 - RNA, 19 nt, Homo sapiens
  misc_RNA (1)...(19): siRNA sense strand
gagaaaccguuaucugauc

SEQ ID NO: 1855229 - RNA, 19 nt, Homo sapiens
  misc_RNA (1)...(19): siRNA sense strand
acucaaggcugcccaaauu

SEQ ID NO: 1855230 - RNA, 19 nt, Homo sapiens
  misc_RNA (1)...(19): siRNA sense strand
gcgcuauacuaauccaaua

SEQ ID NO: 1855231 - RNA, 19 nt, Homo sapiens
  misc_RNA (1)...(19): siRNA sense strand
ggacucaauuccuauaaag

SEQ ID NO: 1855232 - RNA, 19 nt, Homo sapiens
  misc_RNA (1)...(19): siRNA sense strand
gucagacccugcagaguua

SEQ ID NO: 1855233 - RNA, 19 nt, Homo sapiens
  misc_RNA (1)...(19): siRNA sense strand
gaagagauuccucauagug

SEQ ID NO: 1855234 - RNA, 19 nt, Homo sapiens
  misc_RNA (1)...(19): siRNA sense strand
ggccauccauccuguuuaa

SEQ ID NO: 1855235 - RNA, 19 nt, Homo sapiens
  misc_RNA (1)...(19): siRNA sense strand
gcaaugcugugucuucauc

SEQ ID NO: 1855236 - RNA, 19 nt, Homo sapiens
  misc_RNA (1)...(19): siRNA sense strand
aaagaaggcagcacagaua

SEQ ID NO: 1855237 - RNA, 19 nt, Homo sapiens
  misc_RNA (1)...(19): siRNA sense strand
gggaaaagauaaaggauaa

SEQ ID NO: 1855238 - RNA, 19 nt, Homo sapiens
  misc_RNA (1)...(19): siRNA sense strand
aaacggcgcuauacuaauc

SEQ ID NO: 1855239 - RNA, 19 nt, Homo sapiens
  misc_RNA (1)...(19): siRNA sense strand
gcagaaaguuggagugacu

SEQ ID NO: 1855240 - RNA, 19 nt, Homo sapiens
  misc_RNA (1)...(19): siRNA sense strand
gccaggaaaucaugacuga

SEQ ID NO: 1855241 - RNA, 19 nt, Homo sapiens
  misc_RNA (1)...(19): siRNA sense strand
ggaggagccugguguucaa

SEQ ID NO: 1855242 - RNA, 19 nt, Homo sapiens
  misc_RNA (1)...(19): siRNA sense strand
aaaccaggauuuaaguuga

SEQ ID NO: 1855243 - RNA, 19 nt, Homo sapiens
  misc_RNA (1)...(19): siRNA sense strand
gaaggaugugucugcauua

SEQ ID NO: 1855244 - RNA, 19 nt, Homo sapiens
  misc_RNA (1)...(19): siRNA sense strand
gcuaauaugcagaagagua

SEQ ID NO: 1855245 - RNA, 19 nt, Homo sapiens
  misc_RNA (1)...(19): siRNA sense strand
ccagauacauccacaccuu

SEQ ID NO: 1855246 - RNA, 19 nt, Homo sapiens
  misc_RNA (1)...(19): siRNA sense strand
ucacaaagcccacgcugaa

SEQ ID NO: 1855247 - RNA, 19 nt, Homo sapiens
  misc_RNA (1)...(19): siRNA sense strand
ugucaaauaugucgaccua

SEQ ID NO: 1855248 - RNA, 19 nt, Homo sapiens
  misc_RNA (1)...(19): siRNA sense strand
gaacaaaaccgagaaaaga

SEQ ID NO: 1855249 - RNA, 19 nt, Homo sapiens
  misc_RNA (1)...(19): siRNA sense strand
ugacacagcccaugaugaa

SEQ ID NO: 1855250 - RNA, 19 nt, Homo sapiens
  misc_RNA (1)...(19): siRNA sense strand
gcacugggaacauaaguau

SEQ ID NO: 1855251 - RNA, 19 nt, Homo sapiens
  misc_RNA (1)...(19): siRNA sense strand
gacaagcagaucagcauua

SEQ ID NO: 1855252 - RNA, 19 nt, Homo sapiens
  misc_RNA (1)...(19): siRNA sense strand
gaacaagcacugcagaaag

SEQ ID NO: 1855253 - RNA, 19 nt, Homo sapiens
  misc_RNA (1)...(19): siRNA sense strand
gacgaaaacuucuacaaaa

SEQ ID NO: 1855254 - RNA, 19 nt, Homo sapiens
  misc_RNA (1)...(19): siRNA sense strand
acaagcagaucagcauuaa

SEQ ID NO: 1855255 - RNA, 19 nt, Homo sapiens
  misc_RNA (1)...(19): siRNA sense strand
gucuaaagaugaagaagaa

SEQ ID NO: 1855256 - RNA, 19 nt, Homo sapiens
  misc_RNA (1)...(19): siRNA sense strand
agaaggaugugucugcauu

SEQ ID NO: 1855257 - RNA, 19 nt, Homo sapiens
  misc_RNA (1)...(19): siRNA sense strand
ugaaugccaugaacagcua

SEQ ID NO: 1855258 - RNA, 19 nt, Homo sapiens
  misc_RNA (1)...(19): siRNA sense strand
cagcuacucucaaccauca

SEQ ID NO: 1855259 - RNA, 19 nt, Homo sapiens
  misc_RNA (1)...(19): siRNA sense strand
ggaagaggaugaaaaugaa

SEQ ID NO: 1855260 - RNA, 19 nt, Homo sapiens
  misc_RNA (1)...(19): siRNA sense strand
gcaaauagccagccaucuc

SEQ ID NO: 1855261 - RNA, 19 nt, Homo sapiens
  misc_RNA (1)...(19): siRNA sense strand
uaagggcuauggcagguuu

SEQ ID NO: 1855262 - RNA, 19 nt, Homo sapiens
  misc_RNA (1)...(19): siRNA sense strand
uggcaaaguuguuucuuga

SEQ ID NO: 1855263 - RNA, 19 nt, Homo sapiens
  misc_RNA (1)...(19): siRNA sense strand
ggaaaucaagcacuucaga

SEQ ID NO: 1855264 - RNA, 19 nt, Homo sapiens
  misc_RNA (1)...(19): siRNA sense strand
gaaccagacagcacaguau

SEQ ID NO: 1855265 - RNA, 19 nt, Homo sapiens
  misc_RNA (1)...(19): siRNA sense strand
ggcagugcaucgaguguaa

SEQ ID NO: 1855266 - RNA, 19 nt, Homo sapiens
  misc_RNA (1)...(19): siRNA sense strand
aaacaaguccuuccucaug

SEQ ID NO: 1855267 - RNA, 19 nt, Homo sapiens
  misc_RNA (1)...(19): siRNA sense strand
ucucaucgauuucaguuau

SEQ ID NO: 1855268 - RNA, 19 nt, Homo sapiens
  misc_RNA (1)...(19): siRNA sense strand
cagcugaccaacaccauua

SEQ ID NO: 1855269 - RNA, 19 nt, Homo sapiens
  misc_RNA (1)...(19): siRNA sense strand
uggaagcacugggaacaua

SEQ ID NO: 1855270 - RNA, 19 nt, Homo sapiens
  misc_RNA (1)...(19): siRNA sense strand
ccacgacgcugaugaugag

SEQ ID NO: 1855271 - RNA, 19 nt, Homo sapiens
  misc_RNA (1)...(19): siRNA sense strand
gcagacagcagcaauaguc

SEQ ID NO: 1855272 - RNA, 19 nt, Homo sapiens
  misc_RNA (1)...(19): siRNA sense strand
gaagcgaaagaaaccauuu

SEQ ID NO: 1855273 - RNA, 19 nt, Homo sapiens
  misc_RNA (1)...(19): siRNA sense strand
gaaguuauggcuccaguca

SEQ ID NO: 1855274 - RNA, 19 nt, Homo sapiens
  misc_RNA (1)...(19): siRNA sense strand
agauguagauccagaaugu

SEQ ID NO: 1855275 - RNA, 19 nt, Homo sapiens
  misc_RNA (1)...(19): siRNA sense strand
caaauaaaggacucaauuc

SEQ ID NO: 1855276 - RNA, 19 nt, Homo sapiens
  misc_RNA (1)...(19): siRNA sense strand
augaacagcuaucgaauga

SEQ ID NO: 1855277 - RNA, 19 nt, Homo sapiens
  misc_RNA (1)...(19): siRNA sense strand
aaagaaaccagaaguuaug

SEQ ID NO: 1855278 - RNA, 19 nt, Homo sapiens
  misc_RNA (1)...(19): siRNA sense strand
ggacuuccguagugaccaa

SEQ ID NO: 1855279 - RNA, 19 nt, Homo sapiens
  misc_RNA (1)...(19): siRNA sense strand
cuacauggcauauuggaaa

SEQ ID NO: 1855280 - RNA, 19 nt, Homo sapiens
  misc_RNA (1)...(19): siRNA sense strand
gauaugcaaugcugugucu

SEQ ID NO: 1855281 - RNA, 19 nt, Homo sapiens
  misc_RNA (1)...(19): siRNA sense strand
caauaucgaaucagaaaga

SEQ ID NO: 1855282 - RNA, 19 nt, Homo sapiens
  misc_RNA (1)...(19): siRNA sense strand
uaaggaagaguuaaucgaa

SEQ ID NO: 1855283 - RNA, 19 nt, Homo sapiens
  misc_RNA (1)...(19): siRNA sense strand
ugagaucgaugaagaagag

SEQ ID NO: 1855284 - RNA, 19 nt, Homo sapiens
  misc_RNA (1)...(19): siRNA sense strand
uuuaucggcucaacacuaa

SEQ ID NO: 1855285 - RNA, 19 nt, Homo sapiens
  misc_RNA (1)...(19): siRNA sense strand
gaccuuacaugagaagaug

SEQ ID NO: 1855286 - RNA, 19 nt, Homo sapiens
  misc_RNA (1)...(19): siRNA sense strand
gcauugagagcaccacuga

SEQ ID NO: 1855287 - RNA, 19 nt, Homo sapiens
  misc_RNA (1)...(19): siRNA sense strand
gaucagcccagaacaagga

SEQ ID NO: 1855288 - RNA, 19 nt, Homo sapiens
  misc_RNA (1)...(19): siRNA sense strand
ggcaagagccgcaaaccaa

SEQ ID NO: 1855289 - RNA, 19 nt, Homo sapiens
  misc_RNA (1)...(19): siRNA sense strand
gaugaagagucagaugaug

SEQ ID NO: 1855290 - RNA, 19 nt, Homo sapiens
  misc_RNA (1)...(19): siRNA sense strand
gaagugcagauuaacagaa

SEQ ID NO: 1855291 - RNA, 19 nt, Homo sapiens
  misc_RNA (1)...(19): siRNA sense strand
gauguggagccauuucuuu

SEQ ID NO: 1855292 - RNA, 19 nt, Homo sapiens
  misc_RNA (1)...(19): siRNA sense strand
ucauugaguuugggaagua

SEQ ID NO: 1855293 - RNA, 19 nt, Homo sapiens
  misc_RNA (1)...(19): siRNA sense strand
ccaaucagcaucaucauca

SEQ ID NO: 1855294 - RNA, 19 nt, Homo sapiens
  misc_RNA (1)...(19): siRNA sense strand
aagaggaagucuaaagaug

SEQ ID NO: 1855295 - RNA, 19 nt, Homo sapiens
  misc_RNA (1)...(19): siRNA sense strand
ggaagcacugggaacauaa

SEQ ID NO: 1855296 - RNA, 19 nt, Homo sapiens
  misc_RNA (1)...(19): siRNA sense strand
caacgugccugcccuugag

SEQ ID NO: 1855297 - RNA, 19 nt, Homo sapiens
  misc_RNA (1)...(19): siRNA sense strand
ggaggagcagcaggaauua

SEQ ID NO: 1855298 - RNA, 19 nt, Homo sapiens
  misc_RNA (1)...(19): siRNA sense strand
gagcugaccuucuguagga

SEQ ID NO: 1855299 - RNA, 19 nt, Homo sapiens
  misc_RNA (1)...(19): siRNA sense strand
gcaucucgcucaugucugu

SEQ ID NO: 1855300 - RNA, 19 nt, Homo sapiens
  misc_RNA (1)...(19): siRNA sense strand
ggaaucguggagaauauga

SEQ ID NO: 1855301 - RNA, 19 nt, Homo sapiens
  misc_RNA (1)...(19): siRNA sense strand
gcaagaaggugggaauccu

SEQ ID NO: 1855302 - RNA, 19 nt, Homo sapiens
  misc_RNA (1)...(19): siRNA sense strand
ggagugcaccagcgucuuc

SEQ ID NO: 1855303 - RNA, 19 nt, Homo sapiens
  misc_RNA (1)...(19): siRNA sense strand
ugaugggaaucguggagaa

SEQ ID NO: 1855304 - RNA, 19 nt, Homo sapiens
  misc_RNA (1)...(19): siRNA sense strand
ugggaaucguggagaauau

SEQ ID NO: 1855305 - RNA, 19 nt, Homo sapiens
  misc_RNA (1)...(19): siRNA sense strand
gaccuccgaugagcacaug

SEQ ID NO: 1855306 - RNA, 19 nt, Homo sapiens
  misc_RNA (1)...(19): siRNA sense strand
gagaauaugagcggcuuca

SEQ ID NO: 1855307 - RNA, 19 nt, Homo sapiens
  misc_RNA (1)...(19): siRNA sense strand
ggagggccacgacuucauc

SEQ ID NO: 1855308 - RNA, 19 nt, Homo sapiens
  misc_RNA (1)...(19): siRNA sense strand
cuccauagcccagaagauu

SEQ ID NO: 1855309 - RNA, 19 nt, Homo sapiens
  misc_RNA (1)...(19): siRNA sense strand
ucaccuccauagcccagaa

SEQ ID NO: 1855310 - RNA, 19 nt, Homo sapiens
  misc_RNA (1)...(19): siRNA sense strand
aaaacgcgcugauaaagca

SEQ ID NO: 1855311 - RNA, 19 nt, Homo sapiens
  misc_RNA (1)...(19): siRNA sense strand
gcgcugauaaagcaguuug

SEQ ID NO: 1855312 - RNA, 19 nt, Homo sapiens
  misc_RNA (1)...(19): siRNA sense strand
gaggagggccacgacuuca

SEQ ID NO: 1855313 - RNA, 19 nt, Homo sapiens
  misc_RNA (1)...(19): siRNA sense strand
ggacauacauggcagaaau

SEQ ID NO: 1855314 - RNA, 19 nt, Homo sapiens
  misc_RNA (1)...(19): siRNA sense strand
ggacaaaccacgcaaagaa

SEQ ID NO: 1855315 - RNA, 19 nt, Homo sapiens
  misc_RNA (1)...(19): siRNA sense strand
gcagaaauuuaagcaauga

SEQ ID NO: 1855316 - RNA, 19 nt, Homo sapiens
  misc_RNA (1)...(19): siRNA sense strand
guaagaaacaaacugauga

SEQ ID NO: 1855317 - RNA, 19 nt, Homo sapiens
  misc_RNA (1)...(19): siRNA sense strand
aaagaaagguuggcucguu

SEQ ID NO: 1855318 - RNA, 19 nt, Homo sapiens
  misc_RNA (1)...(19): siRNA sense strand
cagaugagcuagaagagau

SEQ ID NO: 1855319 - RNA, 19 nt, Homo sapiens
  misc_RNA (1)...(19): siRNA sense strand
gcaaugaggagaugauaca

SEQ ID NO: 1855320 - RNA, 19 nt, Homo sapiens
  misc_RNA (1)...(19): siRNA sense strand
gacaaaccacgcaaagaaa

SEQ ID NO: 1855321 - RNA, 19 nt, Homo sapiens
  misc_RNA (1)...(19): siRNA sense strand
ggcagaaauuuaagcaaug

SEQ ID NO: 1855322 - RNA, 19 nt, Homo sapiens
  misc_RNA (1)...(19): siRNA sense strand
uggcagaaauuuaagcaau

SEQ ID NO: 1855323 - RNA, 19 nt, Homo sapiens
  misc_RNA (1)...(19): siRNA sense strand
gaagagaugaaaagaguaa

SEQ ID NO: 1855324 - RNA, 19 nt, Homo sapiens
  misc_RNA (1)...(19): siRNA sense strand
caaagaaaaugaagaagag

SEQ ID NO: 1855325 - RNA, 19 nt, Homo sapiens
  misc_RNA (1)...(19): siRNA sense strand
ggcagcagaugagcuagaa

SEQ ID NO: 1855326 - RNA, 19 nt, Homo sapiens
  misc_RNA (1)...(19): siRNA sense strand
gcaaagaaaaugaagaaga

SEQ ID NO: 1855327 - RNA, 19 nt, Homo sapiens
  misc_RNA (1)...(19): siRNA sense strand
gcagaugagcuagaagaga

SEQ ID NO: 1855328 - RNA, 19 nt, Homo sapiens
  misc_RNA (1)...(19): siRNA sense strand
cagcagaugagcuagaaga

SEQ ID NO: 1855329 - RNA, 19 nt, Homo sapiens
  misc_RNA (1)...(19): siRNA sense strand
cauacauggcagaaauuua

SEQ ID NO: 1855330 - RNA, 19 nt, Homo sapiens
  misc_RNA (1)...(19): siRNA sense strand
uagaagagaugaaaagagu

SEQ ID NO: 1855331 - RNA, 19 nt, Homo sapiens
  misc_RNA (1)...(19): siRNA sense strand
gaugauacaggcagcagau

SEQ ID NO: 1855332 - RNA, 19 nt, Homo sapiens
  misc_RNA (1)...(19): siRNA sense strand
gacauacauggcagaaauu

SEQ ID NO: 1855333 - RNA, 19 nt, Homo sapiens
  misc_RNA (1)...(19): siRNA sense strand
agaguaagaaacaaacuga

SEQ ID NO: 1855334 - RNA, 19 nt, Homo sapiens
  misc_RNA (1)...(19): siRNA sense strand
acaaacugaugauaaugca

SEQ ID NO: 1855335 - RNA, 19 nt, Homo sapiens
  misc_RNA (1)...(19): siRNA sense strand
acaggcagcagaugagcua

SEQ ID NO: 1855336 - RNA, 19 nt, Homo sapiens
  misc_RNA (1)...(19): siRNA sense strand
ugauacaggcagcagauga

SEQ ID NO: 1855337 - RNA, 19 nt, Homo sapiens
  misc_RNA (1)...(19): siRNA sense strand
gauacaggcagcagaugag

SEQ ID NO: 1855338 - RNA, 19 nt, Homo sapiens
  misc_RNA (1)...(19): siRNA sense strand
aguaagaaacaaacugaug

SEQ ID NO: 1855339 - RNA, 19 nt, Homo sapiens
  misc_RNA (1)...(19): siRNA sense strand
ccugagcuccugccugaga

SEQ ID NO: 1855340 - RNA, 19 nt, Homo sapiens
  misc_RNA (1)...(19): siRNA sense strand
gaugagcuagaagagauga

SEQ ID NO: 1855341 - RNA, 19 nt, Homo sapiens
  misc_RNA (1)...(19): siRNA sense strand
ugagcuagaagagaugaaa

SEQ ID NO: 1855342 - RNA, 19 nt, Homo sapiens
  misc_RNA (1)...(19): siRNA sense strand
acauacauggcagaaauuu

SEQ ID NO: 1855343 - RNA, 19 nt, Homo sapiens
  misc_RNA (1)...(19): siRNA sense strand
aagcaaugaggagaugaua

SEQ ID NO: 1855344 - RNA, 19 nt, Homo sapiens
  misc_RNA (1)...(19): siRNA sense strand
uuuaagcaaugaggagaug

SEQ ID NO: 1855345 - RNA, 19 nt, Homo sapiens
  misc_RNA (1)...(19): siRNA sense strand
gagcagacauuaccuguua

SEQ ID NO: 1855346 - RNA, 19 nt, Homo sapiens
  misc_RNA (1)...(19): siRNA sense strand
cgacuuauaugaugaguuu

SEQ ID NO: 1855347 - RNA, 19 nt, Homo sapiens
  misc_RNA (1)...(19): siRNA sense strand
ggaagaagcugggagaguu

SEQ ID NO: 1855348 - RNA, 19 nt, Homo sapiens
  misc_RNA (1)...(19): siRNA sense strand
gaagauguacucagagaua

SEQ ID NO: 1855349 - RNA, 19 nt, Homo sapiens
  misc_RNA (1)...(19): siRNA sense strand
ucacagaacccauuauuaa

SEQ ID NO: 1855350 - RNA, 19 nt, Homo sapiens
  misc_RNA (1)...(19): siRNA sense strand
gauggagccuuacuacuuu

SEQ ID NO: 1855351 - RNA, 19 nt, Homo sapiens
  misc_RNA (1)...(19): siRNA sense strand
gcaacuggguucugauuga

SEQ ID NO: 1855352 - RNA, 19 nt, Homo sapiens
  misc_RNA (1)...(19): siRNA sense strand
gaggaagacucccagauau

SEQ ID NO: 1855353 - RNA, 19 nt, Homo sapiens
  misc_RNA (1)...(19): siRNA sense strand
gaccauaguucaagaggaa

SEQ ID NO: 1855354 - RNA, 19 nt, Homo sapiens
  misc_RNA (1)...(19): siRNA sense strand
gaugagaaccugauccuuu

SEQ ID NO: 1855355 - RNA, 19 nt, Homo sapiens
  misc_RNA (1)...(19): siRNA sense strand
ugaggucaauggauuaaua

SEQ ID NO: 1855356 - RNA, 19 nt, Homo sapiens
  misc_RNA (1)...(19): siRNA sense strand
acucagagcucaucagaaa

SEQ ID NO: 1855357 - RNA, 19 nt, Homo sapiens
  misc_RNA (1)...(19): siRNA sense strand
caagguggcugacccaguu

SEQ ID NO: 1855358 - RNA, 19 nt, Homo sapiens
  misc_RNA (1)...(19): siRNA sense strand
ugaagaugaugaugaauug

SEQ ID NO: 1855359 - RNA, 19 nt, Homo sapiens
  misc_RNA (1)...(19): siRNA sense strand
gaaguuucguggaguuuau

SEQ ID NO: 1855360 - RNA, 19 nt, Homo sapiens
  misc_RNA (1)...(19): siRNA sense strand
uggcggaucugauggauaa

SEQ ID NO: 1855361 - RNA, 19 nt, Homo sapiens
  misc_RNA (1)...(19): siRNA sense strand
ccucagagcugcccaagau

SEQ ID NO: 1855362 - RNA, 19 nt, Homo sapiens
  misc_RNA (1)...(19): siRNA sense strand
gaccaaagaucuugaugag

SEQ ID NO: 1855363 - RNA, 19 nt, Homo sapiens
  misc_RNA (1)...(19): siRNA sense strand
caacugaugcuuauuacaa

SEQ ID NO: 1855364 - RNA, 19 nt, Homo sapiens
  misc_RNA (1)...(19): siRNA sense strand
cagaggacauagagaauga

SEQ ID NO: 1855365 - RNA, 19 nt, Homo sapiens
  misc_RNA (1)...(19): siRNA sense strand
ggaagggccucagugaaga

SEQ ID NO: 1855366 - RNA, 19 nt, Homo sapiens
  misc_RNA (1)...(19): siRNA sense strand
ucagaaaugugacccuuug

SEQ ID NO: 1855367 - RNA, 19 nt, Homo sapiens
  misc_RNA (1)...(19): siRNA sense strand
gcauaucccuucuccaaag

SEQ ID NO: 1855368 - RNA, 19 nt, Homo sapiens
  misc_RNA (1)...(19): siRNA sense strand
cgacgacgaugacguagga

SEQ ID NO: 1855369 - RNA, 19 nt, Homo sapiens
  misc_RNA (1)...(19): siRNA sense strand
caagaucugugcuauacug

SEQ ID NO: 1855370 - RNA, 19 nt, Homo sapiens
  misc_RNA (1)...(19): siRNA sense strand
ugaugaagaugaugaugaa

SEQ ID NO: 1855371 - RNA, 19 nt, Homo sapiens
  misc_RNA (1)...(19): siRNA sense strand
ugaggaagacucccagaua

SEQ ID NO: 1855372 - RNA, 19 nt, Homo sapiens
  misc_RNA (1)...(19): siRNA sense strand
gaaacauccucccucaagu

SEQ ID NO: 1855373 - RNA, 19 nt, Homo sapiens
  misc_RNA (1)...(19): siRNA sense strand
ggaaacauccucccucaag

SEQ ID NO: 1855374 - RNA, 19 nt, Homo sapiens
  misc_RNA (1)...(19): siRNA sense strand
gauaccgacuuauaugaug

SEQ ID NO: 1855375 - RNA, 19 nt, Homo sapiens
  misc_RNA (1)...(19): siRNA sense strand
gaacagacucacccggaaa

SEQ ID NO: 1855376 - RNA, 19 nt, Homo sapiens
  misc_RNA (1)...(19): siRNA sense strand
ggacaagccuuuucucugu

SEQ ID NO: 1855377 - RNA, 19 nt, Homo sapiens
  misc_RNA (1)...(19): siRNA sense strand
gaucuaugccgacaccuuu

SEQ ID NO: 1855378 - RNA, 19 nt, Homo sapiens
  misc_RNA (1)...(19): siRNA sense strand
gagcucaucagaaauguga

SEQ ID NO: 1855379 - RNA, 19 nt, Homo sapiens
  misc_RNA (1)...(19): siRNA sense strand
gaaguucaauaccacaucu

SEQ ID NO: 1855380 - RNA, 19 nt, Homo sapiens
  misc_RNA (1)...(19): siRNA sense strand
gcgccaagcccaagauuga

SEQ ID NO: 1855381 - RNA, 19 nt, Homo sapiens
  misc_RNA (1)...(19): siRNA sense strand
gaucugugcuauacugaca

SEQ ID NO: 1855382 - RNA, 19 nt, Homo sapiens
  misc_RNA (1)...(19): siRNA sense strand
gcugaaacgccuaauaaga

SEQ ID NO: 1855383 - RNA, 19 nt, Homo sapiens
  misc_RNA (1)...(19): siRNA sense strand
uugaugagauggaugauga

SEQ ID NO: 1855384 - RNA, 19 nt, Homo sapiens
  misc_RNA (1)...(19): siRNA sense strand
ccaacauucugguggauga

SEQ ID NO: 1855385 - RNA, 19 nt, Homo sapiens
  misc_RNA (1)...(19): siRNA sense strand
caacuggguucugauugaa

SEQ ID NO: 1855386 - RNA, 19 nt, Homo sapiens
  misc_RNA (1)...(19): siRNA sense strand
uggaugaggucaauggauu

SEQ ID NO: 1855387 - RNA, 19 nt, Homo sapiens
  misc_RNA (1)...(19): siRNA sense strand
gaagcugccuccaacugau

SEQ ID NO: 1855388 - RNA, 19 nt, Homo sapiens
  misc_RNA (1)...(19): siRNA sense strand
agaaugaggugguccagau

SEQ ID NO: 1855389 - RNA, 19 nt, Homo sapiens
  misc_RNA (1)...(19): siRNA sense strand
guagagagaccaaagaucu

SEQ ID NO: 1855390 - RNA, 19 nt, Homo sapiens
  misc_RNA (1)...(19): siRNA sense strand
ggaugaggucaauggauua

SEQ ID NO: 1855391 - RNA, 19 nt, Homo sapiens
  misc_RNA (1)...(19): siRNA sense strand
uguaugagauggauuucuu

SEQ ID NO: 1855392 - RNA, 19 nt, Homo sapiens
  misc_RNA (1)...(19): siRNA sense strand
gucaauggauuaauaagca

SEQ ID NO: 1855393 - RNA, 19 nt, Homo sapiens
  misc_RNA (1)...(19): siRNA sense strand
gugaagacagcaaccauaa

SEQ ID NO: 1855394 - RNA, 19 nt, Homo sapiens
  misc_RNA (1)...(19): siRNA sense strand
cagcauaucccuucuccaa

SEQ ID NO: 1855395 - RNA, 19 nt, Homo sapiens
  misc_RNA (1)...(19): siRNA sense strand
ucuuggagccucuuuauaa

SEQ ID NO: 1855396 - RNA, 19 nt, Homo sapiens
  misc_RNA (1)...(19): siRNA sense strand
augaugaguuugggaauua

SEQ ID NO: 1855397 - RNA, 19 nt, Homo sapiens
  misc_RNA (1)...(19): siRNA sense strand
aggauguugugcucaauua

SEQ ID NO: 1855398 - RNA, 19 nt, Homo sapiens
  misc_RNA (1)...(19): siRNA sense strand
cugaaacgccuaauaagaa

SEQ ID NO: 1855399 - RNA, 19 nt, Homo sapiens
  misc_RNA (1)...(19): siRNA sense strand
gcauccaccugacgaagga

SEQ ID NO: 1855400 - RNA, 19 nt, Homo sapiens
  misc_RNA (1)...(19): siRNA sense strand
ggaucucuguggccaggua

SEQ ID NO: 1855401 - RNA, 19 nt, Homo sapiens
  misc_RNA (1)...(19): siRNA sense strand
ggaggagucuggcgagcau

SEQ ID NO: 1855402 - RNA, 19 nt, Homo sapiens
  misc_RNA (1)...(19): siRNA sense strand
ugacgacgacgaugacgua

SEQ ID NO: 1855403 - RNA, 19 nt, Homo sapiens
  misc_RNA (1)...(19): siRNA sense strand
gcacgugacucaggaugca

SEQ ID NO: 1855404 - RNA, 19 nt, Homo sapiens
  misc_RNA (1)...(19): siRNA sense strand
ccucugugaugaauugauu

SEQ ID NO: 1855405 - RNA, 19 nt, Homo sapiens
  misc_RNA (1)...(19): siRNA sense strand
cagcaucguucaagguuuc

SEQ ID NO: 1855406 - RNA, 19 nt, Homo sapiens
  misc_RNA (1)...(19): siRNA sense strand
cggaagauguacucagaga

SEQ ID NO: 1855407 - RNA, 19 nt, Homo sapiens
  misc_RNA (1)...(19): siRNA sense strand
accaagaaauucacucuga

SEQ ID NO: 1855408 - RNA, 19 nt, Homo sapiens
  misc_RNA (1)...(19): siRNA sense strand
cguaggagaucaugacgau

SEQ ID NO: 1855409 - RNA, 19 nt, Homo sapiens
  misc_RNA (1)...(19): siRNA sense strand
ccaagaaauucacucugau

SEQ ID NO: 1855410 - RNA, 19 nt, Homo sapiens
  misc_RNA (1)...(19): siRNA sense strand
ucagcaaauucuucgauga

SEQ ID NO: 1855411 - RNA, 19 nt, Homo sapiens
  misc_RNA (1)...(19): siRNA sense strand
guaggaagggccucaguga

SEQ ID NO: 1855412 - RNA, 19 nt, Homo sapiens
  misc_RNA (1)...(19): siRNA sense strand
agacugaucuccggacuca

SEQ ID NO: 1855413 - RNA, 19 nt, Homo sapiens
  misc_RNA (1)...(19): siRNA sense strand
gcauguauuccacugauga

SEQ ID NO: 1855414 - RNA, 19 nt, Homo sapiens
  misc_RNA (1)...(19): siRNA sense strand
gaggucaauggauuaauaa

SEQ ID NO: 1855415 - RNA, 19 nt, Homo sapiens
  misc_RNA (1)...(19): siRNA sense strand
gaaaucagaaagcgcuaug

SEQ ID NO: 1855416 - RNA, 19 nt, Homo sapiens
  misc_RNA (1)...(19): siRNA sense strand
caaaagcacuccugugaca

SEQ ID NO: 1855417 - RNA, 19 nt, Homo sapiens
  misc_RNA (1)...(19): siRNA sense strand
guacagcacagaugaugga

SEQ ID NO: 1855418 - RNA, 19 nt, Homo sapiens
  misc_RNA (1)...(19): siRNA sense strand
ggacaugugugugcagcau

SEQ ID NO: 1855419 - RNA, 19 nt, Homo sapiens
  misc_RNA (1)...(19): siRNA sense strand
caugugaauuucucugaug

SEQ ID NO: 1855420 - RNA, 19 nt, Homo sapiens
  misc_RNA (1)...(19): siRNA sense strand
ugaccaagaucugugcuau

SEQ ID NO: 1855421 - RNA, 19 nt, Homo sapiens
  misc_RNA (1)...(19): siRNA sense strand
ugauggagccuuacuacuu

SEQ ID NO: 1855422 - RNA, 19 nt, Homo sapiens
  misc_RNA (1)...(19): siRNA sense strand
ugaaacgccuaauaagaag

SEQ ID NO: 1855423 - RNA, 19 nt, Homo sapiens
  misc_RNA (1)...(19): siRNA sense strand
uaccacaucuguuaucaag

SEQ ID NO: 1855424 - RNA, 19 nt, Homo sapiens
  misc_RNA (1)...(19): siRNA sense strand
uucaauaccacaucuguua

SEQ ID NO: 1855425 - RNA, 19 nt, Homo sapiens
  misc_RNA (1)...(19): siRNA sense strand
gcuggcaacuggguucuga

SEQ ID NO: 1855426 - RNA, 19 nt, Homo sapiens
  misc_RNA (1)...(19): siRNA sense strand
gaacuacacccuggaggau

SEQ ID NO: 1855427 - RNA, 19 nt, Homo sapiens
  misc_RNA (1)...(19): siRNA sense strand
acacagagcggcugaucaa

SEQ ID NO: 1855428 - RNA, 19 nt, Homo sapiens
  misc_RNA (1)...(19): siRNA sense strand
gaccaagaucugugcuaua

SEQ ID NO: 1855429 - RNA, 19 nt, Homo sapiens
  misc_RNA (1)...(19): siRNA sense strand
uaacucagagcucaucaga

SEQ ID NO: 1855430 - RNA, 19 nt, Homo sapiens
  misc_RNA (1)...(19): siRNA sense strand
gagcaucagcaaauucuuc

SEQ ID NO: 1855431 - RNA, 19 nt, Homo sapiens
  misc_RNA (1)...(19): siRNA sense strand
gauugcgucucugcaguuu

SEQ ID NO: 1855432 - RNA, 19 nt, Homo sapiens
  misc_RNA (1)...(19): siRNA sense strand
acuagcagcucccagagaa

SEQ ID NO: 1855433 - RNA, 19 nt, Homo sapiens
  misc_RNA (1)...(19): siRNA sense strand
ccaagaauuugcuaaaaga

SEQ ID NO: 1855434 - RNA, 19 nt, Homo sapiens
  misc_RNA (1)...(19): siRNA sense strand
acacucagccucucacaga

SEQ ID NO: 1855435 - RNA, 19 nt, Homo sapiens
  misc_RNA (1)...(19): siRNA sense strand
gauccucgcccagguugua

SEQ ID NO: 1855436 - RNA, 19 nt, Homo sapiens
  misc_RNA (1)...(19): siRNA sense strand
caacagccgaggaggugua

SEQ ID NO: 1855437 - RNA, 19 nt, Homo sapiens
  misc_RNA (1)...(19): siRNA sense strand
cagagcggcugaucaagca

SEQ ID NO: 1855438 - RNA, 19 nt, Homo sapiens
  misc_RNA (1)...(19): siRNA sense strand
gaacacagagcggcugauc

SEQ ID NO: 1855439 - RNA, 19 nt, Homo sapiens
  misc_RNA (1)...(19): siRNA sense strand
caagaaauucacucugaug

SEQ ID NO: 1855440 - RNA, 19 nt, Homo sapiens
  misc_RNA (1)...(19): siRNA sense strand
ucagagcucaucagaaaug

SEQ ID NO: 1855441 - RNA, 19 nt, Homo sapiens
  misc_RNA (1)...(19): siRNA sense strand
acucagagauagacaucaa

SEQ ID NO: 1855442 - RNA, 19 nt, Homo sapiens
  misc_RNA (1)...(19): siRNA sense strand
gggugaugcugaacacaga

SEQ ID NO: 1855443 - RNA, 19 nt, Homo sapiens
  misc_RNA (1)...(19): siRNA sense strand
gaaugaggugguccagauu

SEQ ID NO: 1855444 - RNA, 19 nt, Homo sapiens
  misc_RNA (1)...(19): siRNA sense strand
gaagaagcugggagaguuc

SEQ ID NO: 1855445 - RNA, 19 nt, Homo sapiens
  misc_RNA (1)...(19): siRNA sense strand
ccaagagccucaaaucuaa

SEQ ID NO: 1855446 - RNA, 19 nt, Homo sapiens
  misc_RNA (1)...(19): siRNA sense strand
gggaggaccugaacaagaa

SEQ ID NO: 1855447 - RNA, 19 nt, Homo sapiens
  misc_RNA (1)...(19): siRNA sense strand
gcaaccagcuggaguacaa

SEQ ID NO: 1855448 - RNA, 19 nt, Homo sapiens
  misc_RNA (1)...(19): siRNA sense strand
gcacacggcuuggcuggua

SEQ ID NO: 1855449 - RNA, 19 nt, Homo sapiens
  misc_RNA (1)...(19): siRNA sense strand
ggaaaccaccgcucuuuaa

SEQ ID NO: 1855450 - RNA, 19 nt, Homo sapiens
  misc_RNA (1)...(19): siRNA sense strand
gaaaaucccucaagacaga

SEQ ID NO: 1855451 - RNA, 19 nt, Homo sapiens
  misc_RNA (1)...(19): siRNA sense strand
gaaacauccugcugucaga

SEQ ID NO: 1855452 - RNA, 19 nt, Homo sapiens
  misc_RNA (1)...(19): siRNA sense strand
gcaguacgauggcaaagug

SEQ ID NO: 1855453 - RNA, 19 nt, Homo sapiens
  misc_RNA (1)...(19): siRNA sense strand
cuaaggagcugcagaucaa

SEQ ID NO: 1855454 - RNA, 19 nt, Homo sapiens
  misc_RNA (1)...(19): siRNA sense strand
ccaccgcucuuuaacauga

SEQ ID NO: 1855455 - RNA, 19 nt, Homo sapiens
  misc_RNA (1)...(19): siRNA sense strand
ggcaagacaucaucaagga

SEQ ID NO: 1855456 - RNA, 19 nt, Homo sapiens
  misc_RNA (1)...(19): siRNA sense strand
gcaaggaacagcugaagga

SEQ ID NO: 1855457 - RNA, 19 nt, Homo sapiens
  misc_RNA (1)...(19): siRNA sense strand
gaggugcgguucuuacaga

SEQ ID NO: 1855458 - RNA, 19 nt, Homo sapiens
  misc_RNA (1)...(19): siRNA sense strand
gggaagcaguccaaugaga

SEQ ID NO: 1855459 - RNA, 19 nt, Homo sapiens
  misc_RNA (1)...(19): siRNA sense strand
cuacaaacuucgcaaggaa

SEQ ID NO: 1855460 - RNA, 19 nt, Homo sapiens
  misc_RNA (1)...(19): siRNA sense strand
ucaagaagauguccuacag

SEQ ID NO: 1855461 - RNA, 19 nt, Homo sapiens
  misc_RNA (1)...(19): siRNA sense strand
uggcugagcucuucuucaa

SEQ ID NO: 1855462 - RNA, 19 nt, Homo sapiens
  misc_RNA (1)...(19): siRNA sense strand
ggaagcaguccaaugagaa

SEQ ID NO: 1855463 - RNA, 19 nt, Homo sapiens
  misc_RNA (1)...(19): siRNA sense strand
cgacuccugucuucagaaa

SEQ ID NO: 1855464 - RNA, 19 nt, Homo sapiens
  misc_RNA (1)...(19): siRNA sense strand
cgagcuggcugaacggaaa

SEQ ID NO: 1855465 - RNA, 19 nt, Homo sapiens
  misc_RNA (1)...(19): siRNA sense strand
gaagcaguccaaugagaaa

SEQ ID NO: 1855466 - RNA, 19 nt, Homo sapiens
  misc_RNA (1)...(19): siRNA sense strand
gcucugacaaccuauauga

SEQ ID NO: 1855467 - RNA, 19 nt, Homo sapiens
  misc_RNA (1)...(19): siRNA sense strand
gaagcggaccuacaaacuu

SEQ ID NO: 1855468 - RNA, 19 nt, Homo sapiens
  misc_RNA (1)...(19): siRNA sense strand
gcccaaagcucagcacaag

SEQ ID NO: 1855469 - RNA, 19 nt, Homo sapiens
  misc_RNA (1)...(19): siRNA sense strand
cccaagagccucaaaucua

SEQ ID NO: 1855470 - RNA, 19 nt, Homo sapiens
  misc_RNA (1)...(19): siRNA sense strand
ugaagaagauccuguucca

SEQ ID NO: 1855471 - RNA, 19 nt, Homo sapiens
  misc_RNA (1)...(19): siRNA sense strand
uuaagcggcucaaggaaga

SEQ ID NO: 1855472 - RNA, 19 nt, Homo sapiens
  misc_RNA (1)...(19): siRNA sense strand
gcacagaagcggaccuaca

SEQ ID NO: 1855473 - RNA, 19 nt, Homo sapiens
  misc_RNA (1)...(19): siRNA sense strand
gugggaagcaguccaauga

SEQ ID NO: 1855474 - RNA, 19 nt, Homo sapiens
  misc_RNA (1)...(19): siRNA sense strand
uaacaugaaugcgaugagu

SEQ ID NO: 1855475 - RNA, 19 nt, Homo sapiens
  misc_RNA (1)...(19): siRNA sense strand
gaaauggcaagacaucauc

SEQ ID NO: 1855476 - RNA, 19 nt, Homo sapiens
  misc_RNA (1)...(19): siRNA sense strand
cggcuuggcugguaaugga

SEQ ID NO: 1855477 - RNA, 19 nt, Homo sapiens
  misc_RNA (1)...(19): siRNA sense strand
gcacaagagccuccuuaag

SEQ ID NO: 1855478 - RNA, 19 nt, Homo sapiens
  misc_RNA (1)...(19): siRNA sense strand
acaagaagcagacccagaa

SEQ ID NO: 1855479 - RNA, 19 nt, Homo sapiens
  misc_RNA (1)...(19): siRNA sense strand
agaagauccuguuccaaga

SEQ ID NO: 1855480 - RNA, 19 nt, Homo sapiens
  misc_RNA (1)...(19): siRNA sense strand
cuucaaggaugacccagaa

SEQ ID NO: 1855481 - RNA, 19 nt, Homo sapiens
  misc_RNA (1)...(19): siRNA sense strand
caaugguucuucccacuuc

SEQ ID NO: 1855482 - RNA, 19 nt, Homo sapiens
  misc_RNA (1)...(19): siRNA sense strand
guagagaucgcagcuguga

SEQ ID NO: 1855483 - RNA, 19 nt, Homo sapiens
  misc_RNA (1)...(19): siRNA sense strand
ugugaaggcuggaaacauc

SEQ ID NO: 1855484 - RNA, 19 nt, Homo sapiens
  misc_RNA (1)...(19): siRNA sense strand
aagcggaccuacaaacuuc

SEQ ID NO: 1855485 - RNA, 19 nt, Homo sapiens
  misc_RNA (1)...(19): siRNA sense strand
ucaaggaggugcgguucuu

SEQ ID NO: 1855486 - RNA, 19 nt, Homo sapiens
  misc_RNA (1)...(19): siRNA sense strand
uaucugcacucccacaaca

SEQ ID NO: 1855487 - RNA, 19 nt, Homo sapiens
  misc_RNA (1)...(19): siRNA sense strand
cugacaaccuauaugauga

SEQ ID NO: 1855488 - RNA, 19 nt, Homo sapiens
  misc_RNA (1)...(19): siRNA sense strand
ggaggaagaaggcccugaa

SEQ ID NO: 1855489 - RNA, 19 nt, Homo sapiens
  misc_RNA (1)...(19): siRNA sense strand
aaugagaaauggcaagaca

SEQ ID NO: 1855490 - RNA, 19 nt, Homo sapiens
  misc_RNA (1)...(19): siRNA sense strand
cagcacaagagccuccuua

SEQ ID NO: 1855491 - RNA, 19 nt, Homo sapiens
  misc_RNA (1)...(19): siRNA sense strand
ugaccagccucgagaguag

SEQ ID NO: 1855492 - RNA, 19 nt, Homo sapiens
  misc_RNA (1)...(19): siRNA sense strand
cggaaaccaccgcucuuua

SEQ ID NO: 1855493 - RNA, 19 nt, Homo sapiens
  misc_RNA (1)...(19): siRNA sense strand
acacuggucugaguacuuc

SEQ ID NO: 1855494 - RNA, 19 nt, Homo sapiens
  misc_RNA (1)...(19): siRNA sense strand
gaucuuggcggagcaguau

SEQ ID NO: 1855495 - RNA, 19 nt, Homo sapiens
  misc_RNA (1)...(19): siRNA sense strand
ucucacagcuccauuaucc

SEQ ID NO: 1855496 - RNA, 19 nt, Homo sapiens
  misc_RNA (1)...(19): siRNA sense strand
gcugucagagccaggguua

SEQ ID NO: 1855497 - RNA, 19 nt, Homo sapiens
  misc_RNA (1)...(19): siRNA sense strand
ucugaguacuuccggaauu

SEQ ID NO: 1855498 - RNA, 19 nt, Homo sapiens
  misc_RNA (1)...(19): siRNA sense strand
gcaguccaaugagaaaugg

SEQ ID NO: 1855499 - RNA, 19 nt, Homo sapiens
  misc_RNA (1)...(19): siRNA sense strand
gcaguggcagugagaaugu

SEQ ID NO: 1855500 - RNA, 19 nt, Homo sapiens
  misc_RNA (1)...(19): siRNA sense strand
ccuacaaacuucgcaagga

SEQ ID NO: 1855501 - RNA, 19 nt, Homo sapiens
  misc_RNA (1)...(19): siRNA sense strand
cacagaagcggaccuacaa

SEQ ID NO: 1855502 - RNA, 19 nt, Homo sapiens
  misc_RNA (1)...(19): siRNA sense strand
cugaguacuuccggaauuu

SEQ ID NO: 1855503 - RNA, 19 nt, Homo sapiens
  misc_RNA (1)...(19): siRNA sense strand
uauaccacauugcacagaa

SEQ ID NO: 1855504 - RNA, 19 nt, Homo sapiens
  misc_RNA (1)...(19): siRNA sense strand
cuuuggagccguauacuuu

SEQ ID NO: 1855505 - RNA, 19 nt, Homo sapiens
  misc_RNA (1)...(19): siRNA sense strand
caaggaggugcgguucuua

SEQ ID NO: 1855506 - RNA, 19 nt, Homo sapiens
  misc_RNA (1)...(19): siRNA sense strand
gaaaccaccgcucuuuaac

SEQ ID NO: 1855507 - RNA, 19 nt, Homo sapiens
  misc_RNA (1)...(19): siRNA sense strand
cagugucgcuucccacauc

SEQ ID NO: 1855508 - RNA, 19 nt, Homo sapiens
  misc_RNA (1)...(19): siRNA sense strand
cacaagagccuccuuaagc

SEQ ID NO: 1855509 - RNA, 19 nt, Homo sapiens
  misc_RNA (1)...(19): siRNA sense strand
agacggagcugggcaacca

SEQ ID NO: 1855510 - RNA, 19 nt, Homo sapiens
  misc_RNA (1)...(19): siRNA sense strand
cagagguucuccugaagca

SEQ ID NO: 1855511 - RNA, 19 nt, Homo sapiens
  misc_RNA (1)...(19): siRNA sense strand
guucuucccacuucuauuc

SEQ ID NO: 1855512 - RNA, 19 nt, Homo sapiens
  misc_RNA (1)...(19): siRNA sense strand
ccaaagcucagcacaagag

SEQ ID NO: 1855513 - RNA, 19 nt, Homo sapiens
  misc_RNA (1)...(19): siRNA sense strand
ggaagaggaggaggaggaa

SEQ ID NO: 1855514 - RNA, 19 nt, Homo sapiens
  misc_RNA (1)...(19): siRNA sense strand
gaagaagauccuguuccaa

SEQ ID NO: 1855515 - RNA, 19 nt, Homo sapiens
  misc_RNA (1)...(19): siRNA sense strand
aaccaccgcucuuuaacau

SEQ ID NO: 1855516 - RNA, 19 nt, Homo sapiens
  misc_RNA (1)...(19): siRNA sense strand
uaccagagcaagaucaaga

SEQ ID NO: 1855517 - RNA, 19 nt, Homo sapiens
  misc_RNA (1)...(19): siRNA sense strand
caacaagcggcgugagcaa

SEQ ID NO: 1855518 - RNA, 19 nt, Homo sapiens
  misc_RNA (1)...(19): siRNA sense strand
gaagauccuguuccaagag

SEQ ID NO: 1855519 - RNA, 19 nt, Homo sapiens
  misc_RNA (1)...(19): siRNA sense strand
uagcagaugccucagacaa

SEQ ID NO: 1855520 - RNA, 19 nt, Homo sapiens
  misc_RNA (1)...(19): siRNA sense strand
gauccagacucggcaguac

SEQ ID NO: 1855521 - RNA, 19 nt, Homo sapiens
  misc_RNA (1)...(19): siRNA sense strand
guacaagcgcaagauguug

SEQ ID NO: 1855522 - RNA, 19 nt, Homo sapiens
  misc_RNA (1)...(19): siRNA sense strand
ccacauugcacagaacgaa

SEQ ID NO: 1855523 - RNA, 19 nt, Homo sapiens
  misc_RNA (1)...(19): siRNA sense strand
ucucugaccuccgggaaau

SEQ ID NO: 1855524 - RNA, 19 nt, Homo sapiens
  misc_RNA (1)...(19): siRNA sense strand
agaagcagacccagaagga

SEQ ID NO: 1855525 - RNA, 19 nt, Homo sapiens
  misc_RNA (1)...(19): siRNA sense strand
gagcagcugagcggcuaua

SEQ ID NO: 1855526 - RNA, 19 nt, Homo sapiens
  misc_RNA (1)...(19): siRNA sense strand
ccacuuccaccaccucuuc

SEQ ID NO: 1855527 - RNA, 19 nt, Homo sapiens
  misc_RNA (1)...(19): siRNA sense strand
gggauguccggaauaguga

SEQ ID NO: 1855528 - RNA, 19 nt, Homo sapiens
  misc_RNA (1)...(19): siRNA sense strand
ucugacaaccuauaugaug

SEQ ID NO: 1855529 - RNA, 19 nt, Homo sapiens
  misc_RNA (1)...(19): siRNA sense strand
gcaugaggcugggcuucuc

SEQ ID NO: 1855530 - RNA, 19 nt, Homo sapiens
  misc_RNA (1)...(19): siRNA sense strand
cagagaugcucagcucaca

SEQ ID NO: 1855531 - RNA, 19 nt, Homo sapiens
  misc_RNA (1)...(19): siRNA sense strand
gacgacagcaccagaagca

SEQ ID NO: 1855532 - RNA, 19 nt, Homo sapiens
  misc_RNA (1)...(19): siRNA sense strand
agauguggcugagcucuuc

SEQ ID NO: 1855533 - RNA, 19 nt, Homo sapiens
  misc_RNA (1)...(19): siRNA sense strand
ugagaaauggcaagacauc

SEQ ID NO: 1855534 - RNA, 19 nt, Homo sapiens
  misc_RNA (1)...(19): siRNA sense strand
cggcagcgccaguacuuug

SEQ ID NO: 1855535 - RNA, 19 nt, Homo sapiens
  misc_RNA (1)...(19): siRNA sense strand
ucuagaagugcacaagaaa

SEQ ID NO: 1855536 - RNA, 19 nt, Homo sapiens
  misc_RNA (1)...(19): siRNA sense strand
ccaaugagaaauggcaaga

SEQ ID NO: 1855537 - RNA, 19 nt, Homo sapiens
  misc_RNA (1)...(19): siRNA sense strand
gaugaagaagauccuguuc

SEQ ID NO: 1855538 - RNA, 19 nt, Homo sapiens
  misc_RNA (1)...(19): siRNA sense strand
ucagagccaggguuaguga

SEQ ID NO: 1855539 - RNA, 19 nt, Homo sapiens
  misc_RNA (1)...(19): siRNA sense strand
ggcugguaauggaguauug

SEQ ID NO: 1855540 - RNA, 19 nt, Homo sapiens
  misc_RNA (1)...(19): siRNA sense strand
ccagaaggacuuggagugu

SEQ ID NO: 1855541 - RNA, 19 nt, Homo sapiens
  misc_RNA (1)...(19): siRNA sense strand
cagcugagcggcuauaagc

SEQ ID NO: 1855542 - RNA, 19 nt, Homo sapiens
  misc_RNA (1)...(19): siRNA sense strand
gugaggugguggccaucaa

SEQ ID NO: 1855543 - RNA, 19 nt, Homo sapiens
  misc_RNA (1)...(19): siRNA sense strand
ucccacaacaugauccaua

SEQ ID NO: 1855544 - RNA, 19 nt, Homo sapiens
  misc_RNA (1)...(19): siRNA sense strand
gcccugcugcugcuaagaa

SEQ ID NO: 1855545 - RNA, 19 nt, Homo sapiens
  misc_RNA (1)...(19): siRNA sense strand
guacagagcuuucaguuaa

SEQ ID NO: 1855546 - RNA, 19 nt, Homo sapiens
  misc_RNA (1)...(19): siRNA sense strand
aagaaggucuggaauauua

SEQ ID NO: 1855547 - RNA, 19 nt, Homo sapiens
  misc_RNA (1)...(19): siRNA sense strand
agagauggcuuguuuauuu

SEQ ID NO: 1855548 - RNA, 19 nt, Homo sapiens
  misc_RNA (1)...(19): siRNA sense strand
ggaagaaggucuggaauau

SEQ ID NO: 1855549 - RNA, 19 nt, Homo sapiens
  misc_RNA (1)...(19): siRNA sense strand
gaacaagaaugaacaccaa

SEQ ID NO: 1855550 - RNA, 19 nt, Homo sapiens
  misc_RNA (1)...(19): siRNA sense strand
gagguacaguucuuuaaua

SEQ ID NO: 1855551 - RNA, 19 nt, Homo sapiens
  misc_RNA (1)...(19): siRNA sense strand
gaacaccaaugauguaaag

SEQ ID NO: 1855552 - RNA, 19 nt, Homo sapiens
  misc_RNA (1)...(19): siRNA sense strand
guaaaggcccugcuugaua

SEQ ID NO: 1855553 - RNA, 19 nt, Homo sapiens
  misc_RNA (1)...(19): siRNA sense strand
ccauuucaguugcuaauua

SEQ ID NO: 1855554 - RNA, 19 nt, Homo sapiens
  misc_RNA (1)...(19): siRNA sense strand
gaccaaaucuuccaagcuu

SEQ ID NO: 1855555 - RNA, 19 nt, Homo sapiens
  misc_RNA (1)...(19): siRNA sense strand
cuaaagagcuggauaagag

SEQ ID NO: 1855556 - RNA, 19 nt, Homo sapiens
  misc_RNA (1)...(19): siRNA sense strand
gcagaugauucucaacaaa

SEQ ID NO: 1855557 - RNA, 19 nt, Homo sapiens
  misc_RNA (1)...(19): siRNA sense strand
gacaggagcugcagaaagu

SEQ ID NO: 1855558 - RNA, 19 nt, Homo sapiens
  misc_RNA (1)...(19): siRNA sense strand
gaacugaagaggaagauga

SEQ ID NO: 1855559 - RNA, 19 nt, Homo sapiens
  misc_RNA (1)...(19): siRNA sense strand
gcauuaucauuucugcuua

SEQ ID NO: 1855560 - RNA, 19 nt, Homo sapiens
  misc_RNA (1)...(19): siRNA sense strand
caccagcacugaagaauau

SEQ ID NO: 1855561 - RNA, 19 nt, Homo sapiens
  misc_RNA (1)...(19): siRNA sense strand
ggaaagagcaaaggaagaa

SEQ ID NO: 1855562 - RNA, 19 nt, Homo sapiens
  misc_RNA (1)...(19): siRNA sense strand
ggaagaagguaaaacaaaa

SEQ ID NO: 1855563 - RNA, 19 nt, Homo sapiens
  misc_RNA (1)...(19): siRNA sense strand
agacaaaccugugggcuuu

SEQ ID NO: 1855564 - RNA, 19 nt, Homo sapiens
  misc_RNA (1)...(19): siRNA sense strand
gacauuuggucuaaagaaa

SEQ ID NO: 1855565 - RNA, 19 nt, Homo sapiens
  misc_RNA (1)...(19): siRNA sense strand
ucucaaagcugcugcacaa

SEQ ID NO: 1855566 - RNA, 19 nt, Homo sapiens
  misc_RNA (1)...(19): siRNA sense strand
guacucaucucuuggucaa

SEQ ID NO: 1855567 - RNA, 19 nt, Homo sapiens
  misc_RNA (1)...(19): siRNA sense strand
ccaauuacuuccacucaga

SEQ ID NO: 1855568 - RNA, 19 nt, Homo sapiens
  misc_RNA (1)...(19): siRNA sense strand
gcacaagcucaucuucaua

SEQ ID NO: 1855569 - RNA, 19 nt, Homo sapiens
  misc_RNA (1)...(19): siRNA sense strand
ucaaguagauuccaguauc

SEQ ID NO: 1855570 - RNA, 19 nt, Homo sapiens
  misc_RNA (1)...(19): siRNA sense strand
cucagaagcuuuaacguuu

SEQ ID NO: 1855571 - RNA, 19 nt, Homo sapiens
  misc_RNA (1)...(19): siRNA sense strand
cgacugggauuauauacau

SEQ ID NO: 1855572 - RNA, 19 nt, Homo sapiens
  misc_RNA (1)...(19): siRNA sense strand
uaaugucacuaccgacuuu

SEQ ID NO: 1855573 - RNA, 19 nt, Homo sapiens
  misc_RNA (1)...(19): siRNA sense strand
caaguagauuccaguauca

SEQ ID NO: 1855574 - RNA, 19 nt, Homo sapiens
  misc_RNA (1)...(19): siRNA sense strand
uaaaggcccugcuugauac

SEQ ID NO: 1855575 - RNA, 19 nt, Homo sapiens
  misc_RNA (1)...(19): siRNA sense strand
gaagaaggucuggaauauu

SEQ ID NO: 1855576 - RNA, 19 nt, Homo sapiens
  misc_RNA (1)...(19): siRNA sense strand
gagauggcuuguuuauuuc

SEQ ID NO: 1855577 - RNA, 19 nt, Homo sapiens
  misc_RNA (1)...(19): siRNA sense strand
guaccacugcuuuguauuu

SEQ ID NO: 1855578 - RNA, 19 nt, Homo sapiens
  misc_RNA (1)...(19): siRNA sense strand
ggcaaauacauucucauua

SEQ ID NO: 1855579 - RNA, 19 nt, Homo sapiens
  misc_RNA (1)...(19): siRNA sense strand
caucaugguucucccaaga

SEQ ID NO: 1855580 - RNA, 19 nt, Homo sapiens
  misc_RNA (1)...(19): siRNA sense strand
gaaugaacaccaaugaugu

SEQ ID NO: 1855581 - RNA, 19 nt, Homo sapiens
  misc_RNA (1)...(19): siRNA sense strand
gggaagaggcugacauugu

SEQ ID NO: 1855582 - RNA, 19 nt, Homo sapiens
  misc_RNA (1)...(19): siRNA sense strand
cuaggagucuugccucauu

SEQ ID NO: 1855583 - RNA, 19 nt, Homo sapiens
  misc_RNA (1)...(19): siRNA sense strand
ggaccaaccugcgacuuca

SEQ ID NO: 1855584 - RNA, 19 nt, Homo sapiens
  misc_RNA (1)...(19): siRNA sense strand
ccucacauguggagccaua

SEQ ID NO: 1855585 - RNA, 19 nt, Homo sapiens
  misc_RNA (1)...(19): siRNA sense strand
uacaggaacugaagaggaa

SEQ ID NO: 1855586 - RNA, 19 nt, Homo sapiens
  misc_RNA (1)...(19): siRNA sense strand
caagaaugaacaccaauga

SEQ ID NO: 1855587 - RNA, 19 nt, Homo sapiens
  misc_RNA (1)...(19): siRNA sense strand
caucagcgaucacaugaag

SEQ ID NO: 1855588 - RNA, 19 nt, Homo sapiens
  misc_RNA (1)...(19): siRNA sense strand
gaagaauauccacaucuga

SEQ ID NO: 1855589 - RNA, 19 nt, Homo sapiens
  misc_RNA (1)...(19): siRNA sense strand
gaugaguucuggugguuuc

SEQ ID NO: 1855590 - RNA, 19 nt, Homo sapiens
  misc_RNA (1)...(19): siRNA sense strand
ccacaguccuaguauuugu

SEQ ID NO: 1855591 - RNA, 19 nt, Homo sapiens
  misc_RNA (1)...(19): siRNA sense strand
gaggagguacaguucuuua

SEQ ID NO: 1855592 - RNA, 19 nt, Homo sapiens
  misc_RNA (1)...(19): siRNA sense strand
ccacugcuuuguauuuguu

SEQ ID NO: 1855593 - RNA, 19 nt, Homo sapiens
  misc_RNA (1)...(19): siRNA sense strand
ggaaugaccgacugggauu

SEQ ID NO: 1855594 - RNA, 19 nt, Homo sapiens
  misc_RNA (1)...(19): siRNA sense strand
aaagagggaacaagaauga

SEQ ID NO: 1855595 - RNA, 19 nt, Homo sapiens
  misc_RNA (1)...(19): siRNA sense strand
cuagauaaauacuguguag

SEQ ID NO: 1855596 - RNA, 19 nt, Homo sapiens
  misc_RNA (1)...(19): siRNA sense strand
ugaagaauauccacaucug

SEQ ID NO: 1855597 - RNA, 19 nt, Homo sapiens
  misc_RNA (1)...(19): siRNA sense strand
gguacauucuuguggauau

SEQ ID NO: 1855598 - RNA, 19 nt, Homo sapiens
  misc_RNA (1)...(19): siRNA sense strand
gaaggucuggaauauuaaa

SEQ ID NO: 1855599 - RNA, 19 nt, Homo sapiens
  misc_RNA (1)...(19): siRNA sense strand
caaagcugcugcacaaacu

SEQ ID NO: 1855600 - RNA, 19 nt, Homo sapiens
  misc_RNA (1)...(19): siRNA sense strand
ggcaacaacuaagaacuga

SEQ ID NO: 1855601 - RNA, 19 nt, Homo sapiens
  misc_RNA (1)...(19): siRNA sense strand
uaauggaagugaaagcaau

SEQ ID NO: 1855602 - RNA, 19 nt, Homo sapiens
  misc_RNA (1)...(19): siRNA sense strand
cagaagcuuuaacguuuga

SEQ ID NO: 1855603 - RNA, 19 nt, Homo sapiens
  misc_RNA (1)...(19): siRNA sense strand
gagucuugccucauuauaa

SEQ ID NO: 1855604 - RNA, 19 nt, Homo sapiens
  misc_RNA (1)...(19): siRNA sense strand
gauuaucaccauucucauu

SEQ ID NO: 1855605 - RNA, 19 nt, Homo sapiens
  misc_RNA (1)...(19): siRNA sense strand
uugagaagagugccaauua

SEQ ID NO: 1855606 - RNA, 19 nt, Homo sapiens
  misc_RNA (1)...(19): siRNA sense strand
cgucuacccuguacauguu

SEQ ID NO: 1855607 - RNA, 19 nt, Homo sapiens
  misc_RNA (1)...(19): siRNA sense strand
guacauucuuguggauauu

SEQ ID NO: 1855608 - RNA, 19 nt, Homo sapiens
  misc_RNA (1)...(19): siRNA sense strand
ggagguacaguucuuuaau

SEQ ID NO: 1855609 - RNA, 19 nt, Homo sapiens
  misc_RNA (1)...(19): siRNA sense strand
ccucaacccuaucagcauu

SEQ ID NO: 1855610 - RNA, 19 nt, Homo sapiens
  misc_RNA (1)...(19): siRNA sense strand
agaggaagaugaaggagau

SEQ ID NO: 1855611 - RNA, 19 nt, Homo sapiens
  misc_RNA (1)...(19): siRNA sense strand
gagcagaugauucucaaca

SEQ ID NO: 1855612 - RNA, 19 nt, Homo sapiens
  misc_RNA (1)...(19): siRNA sense strand
ucagaagcuuuaacguuug

SEQ ID NO: 1855613 - RNA, 19 nt, Homo sapiens
  misc_RNA (1)...(19): siRNA sense strand
caccuaccauaucaacuaa

SEQ ID NO: 1855614 - RNA, 19 nt, Homo sapiens
  misc_RNA (1)...(19): siRNA sense strand
cauaucaacuaauggaagu

SEQ ID NO: 1855615 - RNA, 19 nt, Homo sapiens
  misc_RNA (1)...(19): siRNA sense strand
gauuaaucauucagccuau

SEQ ID NO: 1855616 - RNA, 19 nt, Homo sapiens
  misc_RNA (1)...(19): siRNA sense strand
uaggagucuugccucauua

SEQ ID NO: 1855617 - RNA, 19 nt, Homo sapiens
  misc_RNA (1)...(19): siRNA sense strand
caacuggcccacaaguauu

SEQ ID NO: 1855618 - RNA, 19 nt, Homo sapiens
  misc_RNA (1)...(19): siRNA sense strand
ucauucugcuugccacuuu

SEQ ID NO: 1855619 - RNA, 19 nt, Homo sapiens
  misc_RNA (1)...(19): siRNA sense strand
uaucauuucugcuuacuac

SEQ ID NO: 1855620 - RNA, 19 nt, Homo sapiens
  misc_RNA (1)...(19): siRNA sense strand
auauggaaaucuugcagua

SEQ ID NO: 1855621 - RNA, 19 nt, Homo sapiens
  misc_RNA (1)...(19): siRNA sense strand
cgagagauggcuuguuuau

SEQ ID NO: 1855622 - RNA, 19 nt, Homo sapiens
  misc_RNA (1)...(19): siRNA sense strand
gggauugauugguauaugg

SEQ ID NO: 1855623 - RNA, 19 nt, Homo sapiens
  misc_RNA (1)...(19): siRNA sense strand
gcaacaacuugaacuuuug

SEQ ID NO: 1855624 - RNA, 19 nt, Homo sapiens
  misc_RNA (1)...(19): siRNA sense strand
ggcaacaacuugaacuuuu

SEQ ID NO: 1855625 - RNA, 19 nt, Homo sapiens
  misc_RNA (1)...(19): siRNA sense strand
auggaaaucuugcaguaaa

SEQ ID NO: 1855626 - RNA, 19 nt, Homo sapiens
  misc_RNA (1)...(19): siRNA sense strand
ggacagguacauucuugug

SEQ ID NO: 1855627 - RNA, 19 nt, Homo sapiens
  misc_RNA (1)...(19): siRNA sense strand
uggaugaaguacagaaguu

SEQ ID NO: 1855628 - RNA, 19 nt, Homo sapiens
  misc_RNA (1)...(19): siRNA sense strand
cuacagugauggaugaagu

SEQ ID NO: 1855629 - RNA, 19 nt, Homo sapiens
  misc_RNA (1)...(19): siRNA sense strand
caacaacuaagaacugauc

SEQ ID NO: 1855630 - RNA, 19 nt, Homo sapiens
  misc_RNA (1)...(19): siRNA sense strand
gcagaauccuugcgaugac

SEQ ID NO: 1855631 - RNA, 19 nt, Homo sapiens
  misc_RNA (1)...(19): siRNA sense strand
gaccgacugggauuauaua

SEQ ID NO: 1855632 - RNA, 19 nt, Homo sapiens
  misc_RNA (1)...(19): siRNA sense strand
gaaugaccgacugggauua

SEQ ID NO: 1855633 - RNA, 19 nt, Homo sapiens
  misc_RNA (1)...(19): siRNA sense strand
ugacccauuuguccaacua

SEQ ID NO: 1855634 - RNA, 19 nt, Homo sapiens
  misc_RNA (1)...(19): siRNA sense strand
agaaugaacaccaaugaug

SEQ ID NO: 1855635 - RNA, 19 nt, Homo sapiens
  misc_RNA (1)...(19): siRNA sense strand
gauagcaggacauuucugu

SEQ ID NO: 1855636 - RNA, 19 nt, Homo sapiens
  misc_RNA (1)...(19): siRNA sense strand
acaccuaccauaucaacua

SEQ ID NO: 1855637 - RNA, 19 nt, Homo sapiens
  misc_RNA (1)...(19): siRNA sense strand
cugcagcucugaaguuuag

SEQ ID NO: 1855638 - RNA, 19 nt, Homo sapiens
  misc_RNA (1)...(19): siRNA sense strand
aaacugguaccacugcuuu

SEQ ID NO: 1855639 - RNA, 19 nt, Homo sapiens
  misc_RNA (1)...(19): siRNA sense strand
uggaagaaggucuggaaua

SEQ ID NO: 1855640 - RNA, 19 nt, Homo sapiens
  misc_RNA (1)...(19): siRNA sense strand
aaaggcaaauacauucuca

SEQ ID NO: 1855641 - RNA, 19 nt, Homo sapiens
  misc_RNA (1)...(19): siRNA sense strand
ggagucuugccucauuaua

SEQ ID NO: 1855642 - RNA, 19 nt, Homo sapiens
  misc_RNA (1)...(19): siRNA sense strand
ugagaagagugccaauuac

SEQ ID NO: 1855643 - RNA, 19 nt, Homo sapiens
  misc_RNA (1)...(19): siRNA sense strand
ucagggaaauuuuaccaua

SEQ ID NO: 1855644 - RNA, 19 nt, Homo sapiens
  misc_RNA (1)...(19): siRNA sense strand
gaaaagagggaacaagaau

SEQ ID NO: 1855645 - RNA, 19 nt, Homo sapiens
  misc_RNA (1)...(19): siRNA sense strand
gaacagaguugaaguuaaa

SEQ ID NO: 1855646 - RNA, 19 nt, Homo sapiens
  misc_RNA (1)...(19): siRNA sense strand
gaagagccuugcuuuauua

SEQ ID NO: 1855647 - RNA, 19 nt, Homo sapiens
  misc_RNA (1)...(19): siRNA sense strand
uaaaguaccuggcaaagaa

SEQ ID NO: 1855648 - RNA, 19 nt, Homo sapiens
  misc_RNA (1)...(19): siRNA sense strand
aaacagcucuucuaucuuc

SEQ ID NO: 1855649 - RNA, 19 nt, Homo sapiens
  misc_RNA (1)...(19): siRNA sense strand
caagaaaucucauggaaac

SEQ ID NO: 1855650 - RNA, 19 nt, Homo sapiens
  misc_RNA (1)...(19): siRNA sense strand
gagaagagccuugcuuuau

SEQ ID NO: 1855651 - RNA, 19 nt, Homo sapiens
  misc_RNA (1)...(19): siRNA sense strand
gcaaagaauucugcaacuu

SEQ ID NO: 1855652 - RNA, 19 nt, Homo sapiens
  misc_RNA (1)...(19): siRNA sense strand
gaggaaacauucaugaaca

SEQ ID NO: 1855653 - RNA, 19 nt, Homo sapiens
  misc_RNA (1)...(19): siRNA sense strand
gcacccagcuacucaacaa

SEQ ID NO: 1855654 - RNA, 19 nt, Homo sapiens
  misc_RNA (1)...(19): siRNA sense strand
gaaaacaccuggaaaugga

SEQ ID NO: 1855655 - RNA, 19 nt, Homo sapiens
  misc_RNA (1)...(19): siRNA sense strand
agaagagccuugcuuuauu

SEQ ID NO: 1855656 - RNA, 19 nt, Homo sapiens
  misc_RNA (1)...(19): siRNA sense strand
aaccauggcuuguugauga

SEQ ID NO: 1855657 - RNA, 19 nt, Homo sapiens
  misc_RNA (1)...(19): siRNA sense strand
aaagauuccugaagagcua

SEQ ID NO: 1855658 - RNA, 19 nt, Homo sapiens
  misc_RNA (1)...(19): siRNA sense strand
ggagcaauguuggccuaua

SEQ ID NO: 1855659 - RNA, 19 nt, Homo sapiens
  misc_RNA (1)...(19): siRNA sense strand
uacaagaaaucucauggaa

SEQ ID NO: 1855660 - RNA, 19 nt, Homo sapiens
  misc_RNA (1)...(19): siRNA sense strand
ugaacagaguugaaguuaa

SEQ ID NO: 1855661 - RNA, 19 nt, Homo sapiens
  misc_RNA (1)...(19): siRNA sense strand
ccgaaauucuugcagauug

SEQ ID NO: 1855662 - RNA, 19 nt, Homo sapiens
  misc_RNA (1)...(19): siRNA sense strand
gaaaucucauggaaacaca

SEQ ID NO: 1855663 - RNA, 19 nt, Homo sapiens
  misc_RNA (1)...(19): siRNA sense strand
acacagauaauaaggagua

SEQ ID NO: 1855664 - RNA, 19 nt, Homo sapiens
  misc_RNA (1)...(19): siRNA sense strand
gagcaauguuggccuauac

SEQ ID NO: 1855665 - RNA, 19 nt, Homo sapiens
  misc_RNA (1)...(19): siRNA sense strand
uaaggaguaugcaguuaau

SEQ ID NO: 1855666 - RNA, 19 nt, Homo sapiens
  misc_RNA (1)...(19): siRNA sense strand
aaguaaagauuccugaaga

SEQ ID NO: 1855667 - RNA, 19 nt, Homo sapiens
  misc_RNA (1)...(19): siRNA sense strand
gaaacacagauaauaagga

SEQ ID NO: 1855668 - RNA, 19 nt, Homo sapiens
  misc_RNA (1)...(19): siRNA sense strand
aauaaggaguaugcaguua

SEQ ID NO: 1855669 - RNA, 19 nt, Homo sapiens
  misc_RNA (1)...(19): siRNA sense strand
ugagaagagccuugcuuua

SEQ ID NO: 1855670 - RNA, 19 nt, Homo sapiens
  misc_RNA (1)...(19): siRNA sense strand
guugaugacugggacuuaa

SEQ ID NO: 1855671 - RNA, 19 nt, Homo sapiens
  misc_RNA (1)...(19): siRNA sense strand
ggaguaugcaguuaaugaa

SEQ ID NO: 1855672 - RNA, 19 nt, Homo sapiens
  misc_RNA (1)...(19): siRNA sense strand
cauggaaacacagauaaua

SEQ ID NO: 1855673 - RNA, 19 nt, Homo sapiens
  misc_RNA (1)...(19): siRNA sense strand
auacaccucugaaugagaa

SEQ ID NO: 1855674 - RNA, 19 nt, Homo sapiens
  misc_RNA (1)...(19): siRNA sense strand
gagccuugcuuuauuacuc

SEQ ID NO: 1855675 - RNA, 19 nt, Homo sapiens
  misc_RNA (1)...(19): siRNA sense strand
gaugacugggacuuaauua

SEQ ID NO: 1855676 - RNA, 19 nt, Homo sapiens
  misc_RNA (1)...(19): siRNA sense strand
ccuauacaccucugaauga

SEQ ID NO: 1855677 - RNA, 19 nt, Homo sapiens
  misc_RNA (1)...(19): siRNA sense strand
guaugcaguuaaugaaguu

SEQ ID NO: 1855678 - RNA, 19 nt, Homo sapiens
  misc_RNA (1)...(19): siRNA sense strand
aaacauucaugaacagagu

SEQ ID NO: 1855679 - RNA, 19 nt, Homo sapiens
  misc_RNA (1)...(19): siRNA sense strand
cgaaauucuugcagauugu

SEQ ID NO: 1855680 - RNA, 19 nt, Homo sapiens
  misc_RNA (1)...(19): siRNA sense strand
gaaguuguggcagggauaa

SEQ ID NO: 1855681 - RNA, 19 nt, Homo sapiens
  misc_RNA (1)...(19): siRNA sense strand
gaauucugcaacuuuguuu

SEQ ID NO: 1855682 - RNA, 19 nt, Homo sapiens
  misc_RNA (1)...(19): siRNA sense strand
cagaguugaaguuaaagua

SEQ ID NO: 1855683 - RNA, 19 nt, Homo sapiens
  misc_RNA (1)...(19): siRNA sense strand
gauuaucuguacaaauugg

SEQ ID NO: 1855684 - RNA, 19 nt, Homo sapiens
  misc_RNA (1)...(19): siRNA sense strand
ggaaacacagauaauaagg

SEQ ID NO: 1855685 - RNA, 19 nt, Homo sapiens
  misc_RNA (1)...(19): siRNA sense strand
ugccagcgauuaugaagug

SEQ ID NO: 1855686 - RNA, 19 nt, Homo sapiens
  misc_RNA (1)...(19): siRNA sense strand
uaauaaggaguaugcaguu

SEQ ID NO: 1855687 - RNA, 19 nt, Homo sapiens
  misc_RNA (1)...(19): siRNA sense strand
ggacuaugcaaauuacaag

SEQ ID NO: 1855688 - RNA, 19 nt, Homo sapiens
  misc_RNA (1)...(19): siRNA sense strand
aaguggcucuuccugagua

SEQ ID NO: 1855689 - RNA, 19 nt, Homo sapiens
  misc_RNA (1)...(19): siRNA sense strand
ugaggacuaugcaaauuac

SEQ ID NO: 1855690 - RNA, 19 nt, Homo sapiens
  misc_RNA (1)...(19): siRNA sense strand
acaagaaaucucauggaaa

SEQ ID NO: 1855691 - RNA, 19 nt, Homo sapiens
  misc_RNA (1)...(19): siRNA sense strand
ggcaaagaauucugcaacu

SEQ ID NO: 1855692 - RNA, 19 nt, Homo sapiens
  misc_RNA (1)...(19): siRNA sense strand
ccagcuacucaacaaauuu

SEQ ID NO: 1855693 - RNA, 19 nt, Homo sapiens
  misc_RNA (1)...(19): siRNA sense strand
ggaaacauucaugaacaga

SEQ ID NO: 1855694 - RNA, 19 nt, Homo sapiens
  misc_RNA (1)...(19): siRNA sense strand
cuaaaaccauggcuuguug

SEQ ID NO: 1855695 - RNA, 19 nt, Homo sapiens
  misc_RNA (1)...(19): siRNA sense strand
caauuaucuucacgauuuc

SEQ ID NO: 1855696 - RNA, 19 nt, Homo sapiens
  misc_RNA (1)...(19): siRNA sense strand
ucucauggaaacacagaua

SEQ ID NO: 1855697 - RNA, 19 nt, Homo sapiens
  misc_RNA (1)...(19): siRNA sense strand
gacugggacuuaauuacca

SEQ ID NO: 1855698 - RNA, 19 nt, Homo sapiens
  misc_RNA (1)...(19): siRNA sense strand
cccagcuacucaacaaauu

SEQ ID NO: 1855699 - RNA, 19 nt, Homo sapiens
  misc_RNA (1)...(19): siRNA sense strand
gaauacuucaaccuaaugu

SEQ ID NO: 1855700 - RNA, 19 nt, Homo sapiens
  misc_RNA (1)...(19): siRNA sense strand
uugaggacuaugcaaauua

SEQ ID NO: 1855701 - RNA, 19 nt, Homo sapiens
  misc_RNA (1)...(19): siRNA sense strand
cuugaggacuaugcaaauu

SEQ ID NO: 1855702 - RNA, 19 nt, Homo sapiens
  misc_RNA (1)...(19): siRNA sense strand
uggcagggauaaaagaaua

SEQ ID NO: 1855703 - RNA, 19 nt, Homo sapiens
  misc_RNA (1)...(19): siRNA sense strand
cagcuacucaacaaauuug

SEQ ID NO: 1855704 - RNA, 19 nt, Homo sapiens
  misc_RNA (1)...(19): siRNA sense strand
auaaggaguaugcaguuaa

SEQ ID NO: 1855705 - RNA, 19 nt, Homo sapiens
  misc_RNA (1)...(19): siRNA sense strand
uaucuucacgauuuccuaa

SEQ ID NO: 1855706 - RNA, 19 nt, Homo sapiens
  misc_RNA (1)...(19): siRNA sense strand
caugaacagaguugaaguu

SEQ ID NO: 1855707 - RNA, 19 nt, Homo sapiens
  misc_RNA (1)...(19): siRNA sense strand
cuaaaguaccuggcaaaga

SEQ ID NO: 1855708 - RNA, 19 nt, Homo sapiens
  misc_RNA (1)...(19): siRNA sense strand
gcaaauuacaagaaaucuc

SEQ ID NO: 1855709 - RNA, 19 nt, Homo sapiens
  misc_RNA (1)...(19): siRNA sense strand
gaccacaguaugccgaaau

SEQ ID NO: 1855710 - RNA, 19 nt, Homo sapiens
  misc_RNA (1)...(19): siRNA sense strand
uucacgauuuccuaaagua

SEQ ID NO: 1855711 - RNA, 19 nt, Homo sapiens
  misc_RNA (1)...(19): siRNA sense strand
aggaguaugcaguuaauga

SEQ ID NO: 1855712 - RNA, 19 nt, Homo sapiens
  misc_RNA (1)...(19): siRNA sense strand
cagauaauaaggaguaugc

SEQ ID NO: 1855713 - RNA, 19 nt, Homo sapiens
  misc_RNA (1)...(19): siRNA sense strand
gccuauacaccucugaaug

SEQ ID NO: 1855714 - RNA, 19 nt, Homo sapiens
  misc_RNA (1)...(19): siRNA sense strand
aaaguaaagauuccugaag

SEQ ID NO: 1855715 - RNA, 19 nt, Homo sapiens
  misc_RNA (1)...(19): siRNA sense strand
aguaugcaguuaaugaagu

SEQ ID NO: 1855716 - RNA, 19 nt, Homo sapiens
  misc_RNA (1)...(19): siRNA sense strand
augaacagaguugaaguua

SEQ ID NO: 1855717 - RNA, 19 nt, Homo sapiens
  misc_RNA (1)...(19): siRNA sense strand
ugaggaaacauucaugaac

SEQ ID NO: 1855718 - RNA, 19 nt, Homo sapiens
  misc_RNA (1)...(19): siRNA sense strand
ugaugacugggacuuaauu

SEQ ID NO: 1855719 - RNA, 19 nt, Homo sapiens
  misc_RNA (1)...(19): siRNA sense strand
agaauucugcaacuuuguu

SEQ ID NO: 1855720 - RNA, 19 nt, Homo sapiens
  misc_RNA (1)...(19): siRNA sense strand
acaguaugccgaaauucuu

SEQ ID NO: 1855721 - RNA, 19 nt, Homo sapiens
  misc_RNA (1)...(19): siRNA sense strand
uuacaagaaaucucaugga

SEQ ID NO: 1855722 - RNA, 19 nt, Homo sapiens
  misc_RNA (1)...(19): siRNA sense strand
gaaauucuugcagauuguc

SEQ ID NO: 1855723 - RNA, 19 nt, Homo sapiens
  misc_RNA (1)...(19): siRNA sense strand
ugaaguuguggcagggaua

SEQ ID NO: 1855724 - RNA, 19 nt, Homo sapiens
  misc_RNA (1)...(19): siRNA sense strand
aguaaagauuccugaagag

SEQ ID NO: 1855725 - RNA, 19 nt, Homo sapiens
  misc_RNA (1)...(19): siRNA sense strand
uuagugccagcgauuauga

SEQ ID NO: 1855726 - RNA, 19 nt, Homo sapiens
  misc_RNA (1)...(19): siRNA sense strand
ucugcaacuuuguuuagug

SEQ ID NO: 1855727 - RNA, 19 nt, Homo sapiens
  misc_RNA (1)...(19): siRNA sense strand
acucaauuaucuucacgau

SEQ ID NO: 1855728 - RNA, 19 nt, Homo sapiens
  misc_RNA (1)...(19): siRNA sense strand
gccgaaauucuugcagauu

SEQ ID NO: 1855729 - RNA, 19 nt, Homo sapiens
  misc_RNA (1)...(19): siRNA sense strand
caguaugccgaaauucuug

SEQ ID NO: 1855730 - RNA, 19 nt, Homo sapiens
  misc_RNA (1)...(19): siRNA sense strand
accacaguaugccgaaauu

SEQ ID NO: 1855731 - RNA, 19 nt, Homo sapiens
  misc_RNA (1)...(19): siRNA sense strand
agaauacuucaaccuaaug

SEQ ID NO: 1855732 - RNA, 19 nt, Homo sapiens
  misc_RNA (1)...(19): siRNA sense strand
gaguaugcaguuaaugaag

SEQ ID NO: 1855733 - RNA, 19 nt, Homo sapiens
  misc_RNA (1)...(19): siRNA sense strand
uggaaacacagauaauaag

SEQ ID NO: 1855734 - RNA, 19 nt, Homo sapiens
  misc_RNA (1)...(19): siRNA sense strand
ggaaugaacucuuuacaga

SEQ ID NO: 1855735 - RNA, 19 nt, Homo sapiens
  misc_RNA (1)...(19): siRNA sense strand
gaacauccuccaucagaaa

SEQ ID NO: 1855736 - RNA, 19 nt, Homo sapiens
  misc_RNA (1)...(19): siRNA sense strand
ugaaaggaaugcucucaga

SEQ ID NO: 1855737 - RNA, 19 nt, Homo sapiens
  misc_RNA (1)...(19): siRNA sense strand
ggaacauccuccaucagaa

SEQ ID NO: 1855738 - RNA, 19 nt, Homo sapiens
  misc_RNA (1)...(19): siRNA sense strand
ucaaggaguugcagagaga

SEQ ID NO: 1855739 - RNA, 19 nt, Homo sapiens
  misc_RNA (1)...(19): siRNA sense strand
gaaaggaaugcucucagaa

SEQ ID NO: 1855740 - RNA, 19 nt, Homo sapiens
  misc_RNA (1)...(19): siRNA sense strand
ggugacaucuccagcaaca

SEQ ID NO: 1855741 - RNA, 19 nt, Homo sapiens
  misc_RNA (1)...(19): siRNA sense strand
ggaaugcucucagaauggu

SEQ ID NO: 1855742 - RNA, 19 nt, Homo sapiens
  misc_RNA (1)...(19): siRNA sense strand
ggguggagcugggaacauu

SEQ ID NO: 1855743 - RNA, 19 nt, Homo sapiens
  misc_RNA (1)...(19): siRNA sense strand
aaacagaagagaagaacaa

SEQ ID NO: 1855744 - RNA, 19 nt, Homo sapiens
  misc_RNA (1)...(19): siRNA sense strand
uaaagcgagucgucaagga

SEQ ID NO: 1855745 - RNA, 19 nt, Homo sapiens
  misc_RNA (1)...(19): siRNA sense strand
ucaagucugucaccuauac

SEQ ID NO: 1855746 - RNA, 19 nt, Homo sapiens
  misc_RNA (1)...(19): siRNA sense strand
ugggaggaaugaacucuuu

SEQ ID NO: 1855747 - RNA, 19 nt, Homo sapiens
  misc_RNA (1)...(19): siRNA sense strand
gagagaguuuccucaccuu

SEQ ID NO: 1855748 - RNA, 19 nt, Homo sapiens
  misc_RNA (1)...(19): siRNA sense strand
gcuccaagaucaucaaagc

SEQ ID NO: 1855749 - RNA, 19 nt, Homo sapiens
  misc_RNA (1)...(19): siRNA sense strand
aaggaaugcucucagaaug

SEQ ID NO: 1855750 - RNA, 19 nt, Homo sapiens
  misc_RNA (1)...(19): siRNA sense strand
gaaggagcaugggaggaau

SEQ ID NO: 1855751 - RNA, 19 nt, Homo sapiens
  misc_RNA (1)...(19): siRNA sense strand
caucagaaacagaagagaa

SEQ ID NO: 1855752 - RNA, 19 nt, Homo sapiens
  misc_RNA (1)...(19): siRNA sense strand
ucaacuggauggcggaugu

SEQ ID NO: 1855753 - RNA, 19 nt, Homo sapiens
  misc_RNA (1)...(19): siRNA sense strand
gaucacagguggccccauu

SEQ ID NO: 1855754 - RNA, 19 nt, Homo sapiens
  misc_RNA (1)...(19): siRNA sense strand
gaaugaacucuuuacagau

SEQ ID NO: 1855755 - RNA, 19 nt, Homo sapiens
  misc_RNA (1)...(19): siRNA sense strand
cuucugaacucgcaaacga

SEQ ID NO: 1855756 - RNA, 19 nt, Homo sapiens
  misc_RNA (1)...(19): siRNA sense strand
uuucaagucugucaccuau

SEQ ID NO: 1855757 - RNA, 19 nt, Homo sapiens
  misc_RNA (1)...(19): siRNA sense strand
aaucacugcugcgaucuuu

SEQ ID NO: 1855758 - RNA, 19 nt, Homo sapiens
  misc_RNA (1)...(19): siRNA sense strand
guaccuguauggagagaag

SEQ ID NO: 1855759 - RNA, 19 nt, Homo sapiens
  misc_RNA (1)...(19): siRNA sense strand
gaacggguuaccuggcauu

SEQ ID NO: 1855760 - RNA, 19 nt, Homo sapiens
  misc_RNA (1)...(19): siRNA sense strand
cgaaggagcaugggaggaa

SEQ ID NO: 1855761 - RNA, 19 nt, Homo sapiens
  misc_RNA (1)...(19): siRNA sense strand
ggaguugcagagagaguuu

SEQ ID NO: 1855762 - RNA, 19 nt, Homo sapiens
  misc_RNA (1)...(19): siRNA sense strand
gcgcggacuucgugagcuu

SEQ ID NO: 1855763 - RNA, 19 nt, Homo sapiens
  misc_RNA (1)...(19): siRNA sense strand
gggaggaaugaacucuuua

SEQ ID NO: 1855764 - RNA, 19 nt, Homo sapiens
  misc_RNA (1)...(19): siRNA sense strand
ggacguccgggaaaugaau

SEQ ID NO: 1855765 - RNA, 19 nt, Homo sapiens
  misc_RNA (1)...(19): siRNA sense strand
aaaggaaugcucucagaau

SEQ ID NO: 1855766 - RNA, 19 nt, Homo sapiens
  misc_RNA (1)...(19): siRNA sense strand
ccuacgagcugcgcgagaa

SEQ ID NO: 1855767 - RNA, 19 nt, Homo sapiens
  misc_RNA (1)...(19): siRNA sense strand
ccagcaacauccaggcaau

SEQ ID NO: 1855768 - RNA, 19 nt, Homo sapiens
  misc_RNA (1)...(19): siRNA sense strand
uaccucggcuccaagauca

SEQ ID NO: 1855769 - RNA, 19 nt, Homo sapiens
  misc_RNA (1)...(19): siRNA sense strand
gaagagaagaacaaaauca

SEQ ID NO: 1855770 - RNA, 19 nt, Homo sapiens
  misc_RNA (1)...(19): siRNA sense strand
ugacaucuccagcaacauc

SEQ ID NO: 1855771 - RNA, 19 nt, Homo sapiens
  misc_RNA (1)...(19): siRNA sense strand
ggcacugacuggugacauc

SEQ ID NO: 1855772 - RNA, 19 nt, Homo sapiens
  misc_RNA (1)...(19): siRNA sense strand
gaaacagaagagaagaaca

SEQ ID NO: 1855773 - RNA, 19 nt, Homo sapiens
  misc_RNA (1)...(19): siRNA sense strand
gagcaugggaggaaugaac

SEQ ID NO: 1855774 - RNA, 19 nt, Homo sapiens
  misc_RNA (1)...(19): siRNA sense strand
cagaaacagaagagaagaa

SEQ ID NO: 1855775 - RNA, 19 nt, Homo sapiens
  misc_RNA (1)...(19): siRNA sense strand
ugucaccuauaccugguuu

SEQ ID NO: 1855776 - RNA, 19 nt, Homo sapiens
  misc_RNA (1)...(19): siRNA sense strand
ggaggaaugaacucuuuac

SEQ ID NO: 1855777 - RNA, 19 nt, Homo sapiens
  misc_RNA (1)...(19): siRNA sense strand
gaggaaugaacucuuuaca

SEQ ID NO: 1855778 - RNA, 19 nt, Homo sapiens
  misc_RNA (1)...(19): siRNA sense strand
aaaacuggauggacaugaa

SEQ ID NO: 1855779 - RNA, 19 nt, Homo sapiens
  misc_RNA (1)...(19): siRNA sense strand
cagccuaguggcccaguuu

SEQ ID NO: 1855780 - RNA, 19 nt, Homo sapiens
  misc_RNA (1)...(19): siRNA sense strand
ggccaacuaccgcuacuuc

SEQ ID NO: 1855781 - RNA, 19 nt, Homo sapiens
  misc_RNA (1)...(19): siRNA sense strand
ucacugcugcgaucuuuua

SEQ ID NO: 1855782 - RNA, 19 nt, Homo sapiens
  misc_RNA (1)...(19): siRNA sense strand
cagaagagaagaacaaaau

SEQ ID NO: 1855783 - RNA, 19 nt, Homo sapiens
  misc_RNA (1)...(19): siRNA sense strand
gaggcugugcauccuguaa

SEQ ID NO: 1855784 - RNA, 19 nt, Homo sapiens
  misc_RNA (1)...(19): siRNA sense strand
gcugcagacuccgcugaug

SEQ ID NO: 1855785 - RNA, 19 nt, Homo sapiens
  misc_RNA (1)...(19): siRNA sense strand
ucauaaagcgagucgucaa

SEQ ID NO: 1855786 - RNA, 19 nt, Homo sapiens
  misc_RNA (1)...(19): siRNA sense strand
ugaacucgcaaacgaagga

SEQ ID NO: 1855787 - RNA, 19 nt, Homo sapiens
  misc_RNA (1)...(19): siRNA sense strand
gguguuacuucuuuucuca

SEQ ID NO: 1855788 - RNA, 19 nt, Homo sapiens
  misc_RNA (1)...(19): siRNA sense strand
ggacuucgugagcuucuac

SEQ ID NO: 1855789 - RNA, 19 nt, Homo sapiens
  misc_RNA (1)...(19): siRNA sense strand
gggagccccuggucguuuu

SEQ ID NO: 1855790 - RNA, 19 nt, Homo sapiens
  misc_RNA (1)...(19): siRNA sense strand
ccuccuaccucggcuccaa

SEQ ID NO: 1855791 - RNA, 19 nt, Homo sapiens
  misc_RNA (1)...(19): siRNA sense strand
cgagacagaugaacacuuc

SEQ ID NO: 1855792 - RNA, 19 nt, Homo sapiens
  misc_RNA (1)...(19): siRNA sense strand
ggagagagacccagagaug

SEQ ID NO: 1855793 - RNA, 19 nt, Homo sapiens
  misc_RNA (1)...(19): siRNA sense strand
gaacaggaagcgugaaauc

SEQ ID NO: 1855794 - RNA, 19 nt, Homo sapiens
  misc_RNA (1)...(19): siRNA sense strand
ggagggugguccugccauu

SEQ ID NO: 1855795 - RNA, 19 nt, Homo sapiens
  misc_RNA (1)...(19): siRNA sense strand
aaagggaccucagggcuau

SEQ ID NO: 1855796 - RNA, 19 nt, Homo sapiens
  misc_RNA (1)...(19): siRNA sense strand
cgaagugaccugccugguu

SEQ ID NO: 1855797 - RNA, 19 nt, Homo sapiens
  misc_RNA (1)...(19): siRNA sense strand
agacagagacagagagaga

SEQ ID NO: 1855798 - RNA, 19 nt, Homo sapiens
  misc_RNA (1)...(19): siRNA sense strand
gaggugaacgggcagaaug

SEQ ID NO: 1855799 - RNA, 19 nt, Homo sapiens
  misc_RNA (1)...(19): siRNA sense strand
cgccacagauggacuggaa

SEQ ID NO: 1855800 - RNA, 19 nt, Homo sapiens
  misc_RNA (1)...(19): siRNA sense strand
gaugugagagagagucaga

SEQ ID NO: 1855801 - RNA, 19 nt, Homo sapiens
  misc_RNA (1)...(19): siRNA sense strand
gagagacccagagauguga

SEQ ID NO: 1855802 - RNA, 19 nt, Homo sapiens
  misc_RNA (1)...(19): siRNA sense strand
caaccugcauagugacaag

SEQ ID NO: 1855803 - RNA, 19 nt, Homo sapiens
  misc_RNA (1)...(19): siRNA sense strand
agagagagacagagagaga

SEQ ID NO: 1855804 - RNA, 19 nt, Homo sapiens
  misc_RNA (1)...(19): siRNA sense strand
acacagagagagacagaga

SEQ ID NO: 1855805 - RNA, 19 nt, Homo sapiens
  misc_RNA (1)...(19): siRNA sense strand
agagagagacacagagaga

SEQ ID NO: 1855806 - RNA, 19 nt, Homo sapiens
  misc_RNA (1)...(19): siRNA sense strand
agacagagagagagagaga

SEQ ID NO: 1855807 - RNA, 19 nt, Homo sapiens
  misc_RNA (1)...(19): siRNA sense strand
acaggaagcgugaaaucuu

SEQ ID NO: 1855808 - RNA, 19 nt, Homo sapiens
  misc_RNA (1)...(19): siRNA sense strand
ugagagagagucagagaca

SEQ ID NO: 1855809 - RNA, 19 nt, Homo sapiens
  misc_RNA (1)...(19): siRNA sense strand
gagagagacccagagaugu

SEQ ID NO: 1855810 - RNA, 19 nt, Homo sapiens
  misc_RNA (1)...(19): siRNA sense strand
cgacaaggacacugaggau

SEQ ID NO: 1855811 - RNA, 19 nt, Homo sapiens
  misc_RNA (1)...(19): siRNA sense strand
cuccgaagcuggcaagaag

SEQ ID NO: 1855812 - RNA, 19 nt, Homo sapiens
  misc_RNA (1)...(19): siRNA sense strand
gccaguacauccgcucugu

SEQ ID NO: 1855813 - RNA, 19 nt, Homo sapiens
  misc_RNA (1)...(19): siRNA sense strand
ccucagggcuauggguuca

SEQ ID NO: 1855814 - RNA, 19 nt, Homo sapiens
  misc_RNA (1)...(19): siRNA sense strand
gaaaucuucagcaacuucu

SEQ ID NO: 1855815 - RNA, 19 nt, Homo sapiens
  misc_RNA (1)...(19): siRNA sense strand
guccugccauugcccagaa

SEQ ID NO: 1855816 - RNA, 19 nt, Homo sapiens
  misc_RNA (1)...(19): siRNA sense strand
ccacagauggacuggaaca

SEQ ID NO: 1855817 - RNA, 19 nt, Homo sapiens
  misc_RNA (1)...(19): siRNA sense strand
acagagagagacagagaga

SEQ ID NO: 1855818 - RNA, 19 nt, Homo sapiens
  misc_RNA (1)...(19): siRNA sense strand
agagagagagacacagaga

SEQ ID NO: 1855819 - RNA, 19 nt, Homo sapiens
  misc_RNA (1)...(19): siRNA sense strand
agagagagagagacacaga

SEQ ID NO: 1855820 - RNA, 19 nt, Homo sapiens
  misc_RNA (1)...(19): siRNA sense strand
agagagagagagagagaga

SEQ ID NO: 1855821 - RNA, 19 nt, Homo sapiens
  misc_RNA (1)...(19): siRNA sense strand
acagagagagagagagaga

SEQ ID NO: 1855822 - RNA, 19 nt, Homo sapiens
  misc_RNA (1)...(19): siRNA sense strand
agagagacccagagaugug

SEQ ID NO: 1855823 - RNA, 19 nt, Homo sapiens
  misc_RNA (1)...(19): siRNA sense strand
agagagacacagagagaga

SEQ ID NO: 1855824 - RNA, 19 nt, Homo sapiens
  misc_RNA (1)...(19): siRNA sense strand
agagagagucagagacaga

SEQ ID NO: 1855825 - RNA, 19 nt, Homo sapiens
  misc_RNA (1)...(19): siRNA sense strand
cgucacccgucaccaaugg

SEQ ID NO: 1855826 - RNA, 19 nt, Homo sapiens
  misc_RNA (1)...(19): siRNA sense strand
agacacagagagagacaga

SEQ ID NO: 1855827 - RNA, 19 nt, Homo sapiens
  misc_RNA (1)...(19): siRNA sense strand
agucagagacagagacaga

SEQ ID NO: 1855828 - RNA, 19 nt, Homo sapiens
  misc_RNA (1)...(19): siRNA sense strand
ggaacaggaagcgugaaau

SEQ ID NO: 1855829 - RNA, 19 nt, Homo sapiens
  misc_RNA (1)...(19): siRNA sense strand
ucagagacagagacagaga

SEQ ID NO: 1855830 - RNA, 19 nt, Homo sapiens
  misc_RNA (1)...(19): siRNA sense strand
gcagugccuggaagcaaga

SEQ ID NO: 1855831 - RNA, 19 nt, Homo sapiens
  misc_RNA (1)...(19): siRNA sense strand
ggccuguggcagcaagaua

SEQ ID NO: 1855832 - RNA, 19 nt, Homo sapiens
  misc_RNA (1)...(19): siRNA sense strand
gcuccgaagcuggcaagaa

SEQ ID NO: 1855833 - RNA, 19 nt, Homo sapiens
  misc_RNA (1)...(19): siRNA sense strand
cccaggaccggcucauuga

SEQ ID NO: 1855834 - RNA, 19 nt, Homo sapiens
  misc_RNA (1)...(19): siRNA sense strand
gagaugugagagagaguca

SEQ ID NO: 1855835 - RNA, 19 nt, Homo sapiens
  misc_RNA (1)...(19): siRNA sense strand
ggacuacgcucucugaauu

SEQ ID NO: 1855836 - RNA, 19 nt, Homo sapiens
  misc_RNA (1)...(19): siRNA sense strand
gaagauggauucuggugua

SEQ ID NO: 1855837 - RNA, 19 nt, Homo sapiens
  misc_RNA (1)...(19): siRNA sense strand
gaacauaacacuucagauu

SEQ ID NO: 1855838 - RNA, 19 nt, Homo sapiens
  misc_RNA (1)...(19): siRNA sense strand
ggaaauaacaucacaagaa

SEQ ID NO: 1855839 - RNA, 19 nt, Homo sapiens
  misc_RNA (1)...(19): siRNA sense strand
ccaaggaacucuccaacua

SEQ ID NO: 1855840 - RNA, 19 nt, Homo sapiens
  misc_RNA (1)...(19): siRNA sense strand
gaaaucaccuucagcuguu

SEQ ID NO: 1855841 - RNA, 19 nt, Homo sapiens
  misc_RNA (1)...(19): siRNA sense strand
ucaaguggcuagcggauua

SEQ ID NO: 1855842 - RNA, 19 nt, Homo sapiens
  misc_RNA (1)...(19): siRNA sense strand
ggaaauaaaugcguacaug

SEQ ID NO: 1855843 - RNA, 19 nt, Homo sapiens
  misc_RNA (1)...(19): siRNA sense strand
gaauguacuugcuuggaua

SEQ ID NO: 1855844 - RNA, 19 nt, Homo sapiens
  misc_RNA (1)...(19): siRNA sense strand
gaaaugaugacaauaguug

SEQ ID NO: 1855845 - RNA, 19 nt, Homo sapiens
  misc_RNA (1)...(19): siRNA sense strand
ggacagcugugaucgagaa

SEQ ID NO: 1855846 - RNA, 19 nt, Homo sapiens
  misc_RNA (1)...(19): siRNA sense strand
gauggauucugguguauuu

SEQ ID NO: 1855847 - RNA, 19 nt, Homo sapiens
  misc_RNA (1)...(19): siRNA sense strand
caagagaugucacagaguu

SEQ ID NO: 1855848 - RNA, 19 nt, Homo sapiens
  misc_RNA (1)...(19): siRNA sense strand
gaacagaacacaaucaaag

SEQ ID NO: 1855849 - RNA, 19 nt, Homo sapiens
  misc_RNA (1)...(19): siRNA sense strand
gggaaaggauaagagauua

SEQ ID NO: 1855850 - RNA, 19 nt, Homo sapiens
  misc_RNA (1)...(19): siRNA sense strand
cagaauaaaugagccaaua

SEQ ID NO: 1855851 - RNA, 19 nt, Homo sapiens
  misc_RNA (1)...(19): siRNA sense strand
uggaggaacuugccacuua

SEQ ID NO: 1855852 - RNA, 19 nt, Homo sapiens
  misc_RNA (1)...(19): siRNA sense strand
gagaguggcugagaaagaa

SEQ ID NO: 1855853 - RNA, 19 nt, Homo sapiens
  misc_RNA (1)...(19): siRNA sense strand
gaaauacguuuggaacaga

SEQ ID NO: 1855854 - RNA, 19 nt, Homo sapiens
  misc_RNA (1)...(19): siRNA sense strand
ccaagaaggugucccgauu

SEQ ID NO: 1855855 - RNA, 19 nt, Homo sapiens
  misc_RNA (1)...(19): siRNA sense strand
gcggaauccuccuguauaa

SEQ ID NO: 1855856 - RNA, 19 nt, Homo sapiens
  misc_RNA (1)...(19): siRNA sense strand
ggagcuuucucaccauaua

SEQ ID NO: 1855857 - RNA, 19 nt, Homo sapiens
  misc_RNA (1)...(19): siRNA sense strand
ggaggaacuugccacuuaa

SEQ ID NO: 1855858 - RNA, 19 nt, Homo sapiens
  misc_RNA (1)...(19): siRNA sense strand
gaaggagcaucugguguaa

SEQ ID NO: 1855859 - RNA, 19 nt, Homo sapiens
  misc_RNA (1)...(19): siRNA sense strand
ccaaagggauucaaaugug

SEQ ID NO: 1855860 - RNA, 19 nt, Homo sapiens
  misc_RNA (1)...(19): siRNA sense strand
caaagggauucaaauguga

SEQ ID NO: 1855861 - RNA, 19 nt, Homo sapiens
  misc_RNA (1)...(19): siRNA sense strand
cgaaagguauuccaagaga

SEQ ID NO: 1855862 - RNA, 19 nt, Homo sapiens
  misc_RNA (1)...(19): siRNA sense strand
aaucagagcuucagcaaca

SEQ ID NO: 1855863 - RNA, 19 nt, Homo sapiens
  misc_RNA (1)...(19): siRNA sense strand
uaaaugagccaauauguca

SEQ ID NO: 1855864 - RNA, 19 nt, Homo sapiens
  misc_RNA (1)...(19): siRNA sense strand
gaacggcuauacgugcaua

SEQ ID NO: 1855865 - RNA, 19 nt, Homo sapiens
  misc_RNA (1)...(19): siRNA sense strand
gaacuugccacuuaaagga

SEQ ID NO: 1855866 - RNA, 19 nt, Homo sapiens
  misc_RNA (1)...(19): siRNA sense strand
ucaaagcaguccacucuga

SEQ ID NO: 1855867 - RNA, 19 nt, Homo sapiens
  misc_RNA (1)...(19): siRNA sense strand
gaauuacgaagacagauuu

SEQ ID NO: 1855868 - RNA, 19 nt, Homo sapiens
  misc_RNA (1)...(19): siRNA sense strand
gaaauggcagauaaacuuu

SEQ ID NO: 1855869 - RNA, 19 nt, Homo sapiens
  misc_RNA (1)...(19): siRNA sense strand
ugaauucacuuguccucua

SEQ ID NO: 1855870 - RNA, 19 nt, Homo sapiens
  misc_RNA (1)...(19): siRNA sense strand
gaauggagcucaguguauc

SEQ ID NO: 1855871 - RNA, 19 nt, Homo sapiens
  misc_RNA (1)...(19): siRNA sense strand
ggagggagcauuugaagga

SEQ ID NO: 1855872 - RNA, 19 nt, Homo sapiens
  misc_RNA (1)...(19): siRNA sense strand
gaagaggaggaucuguuua

SEQ ID NO: 1855873 - RNA, 19 nt, Homo sapiens
  misc_RNA (1)...(19): siRNA sense strand
cuagagagacugcguuuaa

SEQ ID NO: 1855874 - RNA, 19 nt, Homo sapiens
  misc_RNA (1)...(19): siRNA sense strand
caagaaggugucccgauua

SEQ ID NO: 1855875 - RNA, 19 nt, Homo sapiens
  misc_RNA (1)...(19): siRNA sense strand
caacguugaugauugugaa

SEQ ID NO: 1855876 - RNA, 19 nt, Homo sapiens
  misc_RNA (1)...(19): siRNA sense strand
ugacggaaaugaugacaau

SEQ ID NO: 1855877 - RNA, 19 nt, Homo sapiens
  misc_RNA (1)...(19): siRNA sense strand
gcaagaaauuccguuguuc

SEQ ID NO: 1855878 - RNA, 19 nt, Homo sapiens
  misc_RNA (1)...(19): siRNA sense strand
gaauucacuuguccucuau

SEQ ID NO: 1855879 - RNA, 19 nt, Homo sapiens
  misc_RNA (1)...(19): siRNA sense strand
gaucagcuguauugaagau

SEQ ID NO: 1855880 - RNA, 19 nt, Homo sapiens
  misc_RNA (1)...(19): siRNA sense strand
gagacuggauuuaaaugga

SEQ ID NO: 1855881 - RNA, 19 nt, Homo sapiens
  misc_RNA (1)...(19): siRNA sense strand
gaauaagauuagcaccauu

SEQ ID NO: 1855882 - RNA, 19 nt, Homo sapiens
  misc_RNA (1)...(19): siRNA sense strand
gaauaaaugagccaauaug

SEQ ID NO: 1855883 - RNA, 19 nt, Homo sapiens
  misc_RNA (1)...(19): siRNA sense strand
gaagauaaugacugugaaa

SEQ ID NO: 1855884 - RNA, 19 nt, Homo sapiens
  misc_RNA (1)...(19): siRNA sense strand
ggauuaaagucucuucgau

SEQ ID NO: 1855885 - RNA, 19 nt, Homo sapiens
  misc_RNA (1)...(19): siRNA sense strand
gagcaucugguguaaauga

SEQ ID NO: 1855886 - RNA, 19 nt, Homo sapiens
  misc_RNA (1)...(19): siRNA sense strand
gaaggaaccacaguagauu

SEQ ID NO: 1855887 - RNA, 19 nt, Homo sapiens
  misc_RNA (1)...(19): siRNA sense strand
ccuuacagcuccuauuauu

SEQ ID NO: 1855888 - RNA, 19 nt, Homo sapiens
  misc_RNA (1)...(19): siRNA sense strand
cagaucagcuguauugaag

SEQ ID NO: 1855889 - RNA, 19 nt, Homo sapiens
  misc_RNA (1)...(19): siRNA sense strand
ccgagagacuggauuuaaa

SEQ ID NO: 1855890 - RNA, 19 nt, Homo sapiens
  misc_RNA (1)...(19): siRNA sense strand
gaaggugcuuucaaugauc

SEQ ID NO: 1855891 - RNA, 19 nt, Homo sapiens
  misc_RNA (1)...(19): siRNA sense strand
cuccucaccuuaauucuua

SEQ ID NO: 1855892 - RNA, 19 nt, Homo sapiens
  misc_RNA (1)...(19): siRNA sense strand
caacauuacuagacuuucu

SEQ ID NO: 1855893 - RNA, 19 nt, Homo sapiens
  misc_RNA (1)...(19): siRNA sense strand
gagccaauaugucaguguu

SEQ ID NO: 1855894 - RNA, 19 nt, Homo sapiens
  misc_RNA (1)...(19): siRNA sense strand
gauucaaagugcauccuaa

SEQ ID NO: 1855895 - RNA, 19 nt, Homo sapiens
  misc_RNA (1)...(19): siRNA sense strand
aaugauggcacauguaaua

SEQ ID NO: 1855896 - RNA, 19 nt, Homo sapiens
  misc_RNA (1)...(19): siRNA sense strand
gaaacuuccucaauuacgu

SEQ ID NO: 1855897 - RNA, 19 nt, Homo sapiens
  misc_RNA (1)...(19): siRNA sense strand
ggaagccacaggaaucuuu

SEQ ID NO: 1855898 - RNA, 19 nt, Homo sapiens
  misc_RNA (1)...(19): siRNA sense strand
gcagaguugcgucucaaua

SEQ ID NO: 1855899 - RNA, 19 nt, Homo sapiens
  misc_RNA (1)...(19): siRNA sense strand
ccagagaccaucacagaaa

SEQ ID NO: 1855900 - RNA, 19 nt, Homo sapiens
  misc_RNA (1)...(19): siRNA sense strand
ggaaggagaagaagaugga

SEQ ID NO: 1855901 - RNA, 19 nt, Homo sapiens
  misc_RNA (1)...(19): siRNA sense strand
gauggcacauguaauagug

SEQ ID NO: 1855902 - RNA, 19 nt, Homo sapiens
  misc_RNA (1)...(19): siRNA sense strand
gaucuggcuugcccugaaa

SEQ ID NO: 1855903 - RNA, 19 nt, Homo sapiens
  misc_RNA (1)...(19): siRNA sense strand
uacagaagauuaucgauca

SEQ ID NO: 1855904 - RNA, 19 nt, Homo sapiens
  misc_RNA (1)...(19): siRNA sense strand
cggauuaucuccauaccaa

SEQ ID NO: 1855905 - RNA, 19 nt, Homo sapiens
  misc_RNA (1)...(19): siRNA sense strand
gagacugcguuuaaacaga

SEQ ID NO: 1855906 - RNA, 19 nt, Homo sapiens
  misc_RNA (1)...(19): siRNA sense strand
acagugagcugcaggacuu

SEQ ID NO: 1855907 - RNA, 19 nt, Homo sapiens
  misc_RNA (1)...(19): siRNA sense strand
ccaacccucuuuacuguga

SEQ ID NO: 1855908 - RNA, 19 nt, Homo sapiens
  misc_RNA (1)...(19): siRNA sense strand
ggaaauccuagaugucaaa

SEQ ID NO: 1855909 - RNA, 19 nt, Homo sapiens
  misc_RNA (1)...(19): siRNA sense strand
ugaaggagcaucuggugua

SEQ ID NO: 1855910 - RNA, 19 nt, Homo sapiens
  misc_RNA (1)...(19): siRNA sense strand
aaccauaugccuaaacuua

SEQ ID NO: 1855911 - RNA, 19 nt, Homo sapiens
  misc_RNA (1)...(19): siRNA sense strand
uuacagcuccuauuauuga

SEQ ID NO: 1855912 - RNA, 19 nt, Homo sapiens
  misc_RNA (1)...(19): siRNA sense strand
cuggagaaauggcagauaa

SEQ ID NO: 1855913 - RNA, 19 nt, Homo sapiens
  misc_RNA (1)...(19): siRNA sense strand
gaaagguauuccaagagau

SEQ ID NO: 1855914 - RNA, 19 nt, Homo sapiens
  misc_RNA (1)...(19): siRNA sense strand
gaagccacaggaaucuuua

SEQ ID NO: 1855915 - RNA, 19 nt, Homo sapiens
  misc_RNA (1)...(19): siRNA sense strand
gaguugcgucucaauaaua

SEQ ID NO: 1855916 - RNA, 19 nt, Homo sapiens
  misc_RNA (1)...(19): siRNA sense strand
agacuuaaguaacaacaga

SEQ ID NO: 1855917 - RNA, 19 nt, Homo sapiens
  misc_RNA (1)...(19): siRNA sense strand
ggaacucuccaacuacaaa

SEQ ID NO: 1855918 - RNA, 19 nt, Homo sapiens
  misc_RNA (1)...(19): siRNA sense strand
gccgaaagguauuccaaga

SEQ ID NO: 1855919 - RNA, 19 nt, Homo sapiens
  misc_RNA (1)...(19): siRNA sense strand
ggagaguggcugagaaaga

SEQ ID NO: 1855920 - RNA, 19 nt, Homo sapiens
  misc_RNA (1)...(19): siRNA sense strand
uugauacucuccauucuuu

SEQ ID NO: 1855921 - RNA, 19 nt, Homo sapiens
  misc_RNA (1)...(19): siRNA sense strand
ggaacuacuugccuuggau

SEQ ID NO: 1855922 - RNA, 19 nt, Homo sapiens
  misc_RNA (1)...(19): siRNA sense strand
aaacagaaaucaccuucag

SEQ ID NO: 1855923 - RNA, 19 nt, Homo sapiens
  misc_RNA (1)...(19): siRNA sense strand
uauuugugcugauggauuu

SEQ ID NO: 1855924 - RNA, 19 nt, Homo sapiens
  misc_RNA (1)...(19): siRNA sense strand
agaaauggcagauaaacuu

SEQ ID NO: 1855925 - RNA, 19 nt, Homo sapiens
  misc_RNA (1)...(19): siRNA sense strand
gauuaaagucucuucgauu

SEQ ID NO: 1855926 - RNA, 19 nt, Homo sapiens
  misc_RNA (1)...(19): siRNA sense strand
gcaaucgaauaaccugugu

SEQ ID NO: 1855927 - RNA, 19 nt, Homo sapiens
  misc_RNA (1)...(19): siRNA sense strand
aagauuagcaccauugaaa

SEQ ID NO: 1855928 - RNA, 19 nt, Homo sapiens
  misc_RNA (1)...(19): siRNA sense strand
ggaucuggcuugcccugaa

SEQ ID NO: 1855929 - RNA, 19 nt, Homo sapiens
  misc_RNA (1)...(19): siRNA sense strand
gcaccuguccauaugguuu

SEQ ID NO: 1855930 - RNA, 19 nt, Homo sapiens
  misc_RNA (1)...(19): siRNA sense strand
gaaggugucccgauuagag

SEQ ID NO: 1855931 - RNA, 19 nt, Homo sapiens
  misc_RNA (1)...(19): siRNA sense strand
aaucaucacuaacuuguca

SEQ ID NO: 1855932 - RNA, 19 nt, Homo sapiens
  misc_RNA (1)...(19): siRNA sense strand
gccaauaugucaguguuug

SEQ ID NO: 1855933 - RNA, 19 nt, Homo sapiens
  misc_RNA (1)...(19): siRNA sense strand
gccaagacaacaaguguaa

SEQ ID NO: 1855934 - RNA, 19 nt, Homo sapiens
  misc_RNA (1)...(19): siRNA sense strand
ucgauggcauuaauaacua

SEQ ID NO: 1855935 - RNA, 19 nt, Homo sapiens
  misc_RNA (1)...(19): siRNA sense strand
ccucuucgcucgcuuauua

SEQ ID NO: 1855936 - RNA, 19 nt, Homo sapiens
  misc_RNA (1)...(19): siRNA sense strand
ggaauaugauuauggcuuu

SEQ ID NO: 1855937 - RNA, 19 nt, Homo sapiens
  misc_RNA (1)...(19): siRNA sense strand
gagcauguccuucacuuua

SEQ ID NO: 1855938 - RNA, 19 nt, Homo sapiens
  misc_RNA (1)...(19): siRNA sense strand
ccagaugacucggauaaua

SEQ ID NO: 1855939 - RNA, 19 nt, Homo sapiens
  misc_RNA (1)...(19): siRNA sense strand
gaguaucuccugcuuauua

SEQ ID NO: 1855940 - RNA, 19 nt, Homo sapiens
  misc_RNA (1)...(19): siRNA sense strand
gauaauagcgugucagaga

SEQ ID NO: 1855941 - RNA, 19 nt, Homo sapiens
  misc_RNA (1)...(19): siRNA sense strand
ggaguugaaugaugaagaa

SEQ ID NO: 1855942 - RNA, 19 nt, Homo sapiens
  misc_RNA (1)...(19): siRNA sense strand
gaacagaaguuuaauuacc

SEQ ID NO: 1855943 - RNA, 19 nt, Homo sapiens
  misc_RNA (1)...(19): siRNA sense strand
uaucugcacuaucuacuua

SEQ ID NO: 1855944 - RNA, 19 nt, Homo sapiens
  misc_RNA (1)...(19): siRNA sense strand
uaaauaagccugggaauau

SEQ ID NO: 1855945 - RNA, 19 nt, Homo sapiens
  misc_RNA (1)...(19): siRNA sense strand
gcaacaaucugaugaacuc

SEQ ID NO: 1855946 - RNA, 19 nt, Homo sapiens
  misc_RNA (1)...(19): siRNA sense strand
uaacaugacuucuucuaca

SEQ ID NO: 1855947 - RNA, 19 nt, Homo sapiens
  misc_RNA (1)...(19): siRNA sense strand
cagauaaccugggugauuu

SEQ ID NO: 1855948 - RNA, 19 nt, Homo sapiens
  misc_RNA (1)...(19): siRNA sense strand
gggagagcauuaaggauuu

SEQ ID NO: 1855949 - RNA, 19 nt, Homo sapiens
  misc_RNA (1)...(19): siRNA sense strand
gauauuggaugaggaaguu

SEQ ID NO: 1855950 - RNA, 19 nt, Homo sapiens
  misc_RNA (1)...(19): siRNA sense strand
acaacaacaucucaaguaa

SEQ ID NO: 1855951 - RNA, 19 nt, Homo sapiens
  misc_RNA (1)...(19): siRNA sense strand
caagacauuugcucaguga

SEQ ID NO: 1855952 - RNA, 19 nt, Homo sapiens
  misc_RNA (1)...(19): siRNA sense strand
gagcuaaccuuuccuuugc

SEQ ID NO: 1855953 - RNA, 19 nt, Homo sapiens
  misc_RNA (1)...(19): siRNA sense strand
gcagauaaccugggugauu

SEQ ID NO: 1855954 - RNA, 19 nt, Homo sapiens
  misc_RNA (1)...(19): siRNA sense strand
ggaaauaugugagcaacuc

SEQ ID NO: 1855955 - RNA, 19 nt, Homo sapiens
  misc_RNA (1)...(19): siRNA sense strand
gagaucaagucacucuuug

SEQ ID NO: 1855956 - RNA, 19 nt, Homo sapiens
  misc_RNA (1)...(19): siRNA sense strand
gacuaugccucuaagaauu

SEQ ID NO: 1855957 - RNA, 19 nt, Homo sapiens
  misc_RNA (1)...(19): siRNA sense strand
ccaaucagaugccagaaau

SEQ ID NO: 1855958 - RNA, 19 nt, Homo sapiens
  misc_RNA (1)...(19): siRNA sense strand
ggaagagauuaccaaaguu

SEQ ID NO: 1855959 - RNA, 19 nt, Homo sapiens
  misc_RNA (1)...(19): siRNA sense strand
cagagagccuggaugaauu

SEQ ID NO: 1855960 - RNA, 19 nt, Homo sapiens
  misc_RNA (1)...(19): siRNA sense strand
ggaaacguguguucugcaa

SEQ ID NO: 1855961 - RNA, 19 nt, Homo sapiens
  misc_RNA (1)...(19): siRNA sense strand
ugaggaaguuagaacauuu

SEQ ID NO: 1855962 - RNA, 19 nt, Homo sapiens
  misc_RNA (1)...(19): siRNA sense strand
ccaggcaaccacuuaauua

SEQ ID NO: 1855963 - RNA, 19 nt, Homo sapiens
  misc_RNA (1)...(19): siRNA sense strand
gaucacagcaggaaauaug

SEQ ID NO: 1855964 - RNA, 19 nt, Homo sapiens
  misc_RNA (1)...(19): siRNA sense strand
gggcaaauguaccagaaga

SEQ ID NO: 1855965 - RNA, 19 nt, Homo sapiens
  misc_RNA (1)...(19): siRNA sense strand
gcagagaggaaacaacaaa

SEQ ID NO: 1855966 - RNA, 19 nt, Homo sapiens
  misc_RNA (1)...(19): siRNA sense strand
caacauccaucaguucaug

SEQ ID NO: 1855967 - RNA, 19 nt, Homo sapiens
  misc_RNA (1)...(19): siRNA sense strand
gagccgaaguuuccacaga

SEQ ID NO: 1855968 - RNA, 19 nt, Homo sapiens
  misc_RNA (1)...(19): siRNA sense strand
caagaugggugccuuaaaa

SEQ ID NO: 1855969 - RNA, 19 nt, Homo sapiens
  misc_RNA (1)...(19): siRNA sense strand
caguagagcuagaagauca

SEQ ID NO: 1855970 - RNA, 19 nt, Homo sapiens
  misc_RNA (1)...(19): siRNA sense strand
ccaaacagaucccuuuaac

SEQ ID NO: 1855971 - RNA, 19 nt, Homo sapiens
  misc_RNA (1)...(19): siRNA sense strand
gaggaaaccuaugcagaug

SEQ ID NO: 1855972 - RNA, 19 nt, Homo sapiens
  misc_RNA (1)...(19): siRNA sense strand
gaagagauuaccaaaguuc

SEQ ID NO: 1855973 - RNA, 19 nt, Homo sapiens
  misc_RNA (1)...(19): siRNA sense strand
ccaaauguaugccucagau

SEQ ID NO: 1855974 - RNA, 19 nt, Homo sapiens
  misc_RNA (1)...(19): siRNA sense strand
caucagagaucaagucacu

SEQ ID NO: 1855975 - RNA, 19 nt, Homo sapiens
  misc_RNA (1)...(19): siRNA sense strand
gaauuuagaagccaugaau

SEQ ID NO: 1855976 - RNA, 19 nt, Homo sapiens
  misc_RNA (1)...(19): siRNA sense strand
ggcaaccacuuaauuaaca

SEQ ID NO: 1855977 - RNA, 19 nt, Homo sapiens
  misc_RNA (1)...(19): siRNA sense strand
acugguagauuugauguua

SEQ ID NO: 1855978 - RNA, 19 nt, Homo sapiens
  misc_RNA (1)...(19): siRNA sense strand
gcagaugccugugaugagu

SEQ ID NO: 1855979 - RNA, 19 nt, Homo sapiens
  misc_RNA (1)...(19): siRNA sense strand
aggaagagauuaccaaagu

SEQ ID NO: 1855980 - RNA, 19 nt, Homo sapiens
  misc_RNA (1)...(19): siRNA sense strand
ggaagcauagaaagaauga

SEQ ID NO: 1855981 - RNA, 19 nt, Homo sapiens
  misc_RNA (1)...(19): siRNA sense strand
gugaguacaugaacaagau

SEQ ID NO: 1855982 - RNA, 19 nt, Homo sapiens
  misc_RNA (1)...(19): siRNA sense strand
gccaauagagcuaaccuuu

SEQ ID NO: 1855983 - RNA, 19 nt, Homo sapiens
  misc_RNA (1)...(19): siRNA sense strand
gaccagauccggccaaaca

SEQ ID NO: 1855984 - RNA, 19 nt, Homo sapiens
  misc_RNA (1)...(19): siRNA sense strand
gcaggccgcaccaagauuu

SEQ ID NO: 1855985 - RNA, 19 nt, Homo sapiens
  misc_RNA (1)...(19): siRNA sense strand
gaccaaacagaucccuuua

SEQ ID NO: 1855986 - RNA, 19 nt, Homo sapiens
  misc_RNA (1)...(19): siRNA sense strand
ugagaaggaucgaggugaa

SEQ ID NO: 1855987 - RNA, 19 nt, Homo sapiens
  misc_RNA (1)...(19): siRNA sense strand
gaagcuaugccagccauuu

SEQ ID NO: 1855988 - RNA, 19 nt, Homo sapiens
  misc_RNA (1)...(19): siRNA sense strand
cagauucccuggagcaugu

SEQ ID NO: 1855989 - RNA, 19 nt, Homo sapiens
  misc_RNA (1)...(19): siRNA sense strand
caauagagcuaaccuuucc

SEQ ID NO: 1855990 - RNA, 19 nt, Homo sapiens
  misc_RNA (1)...(19): siRNA sense strand
gagccuggaugaauucgau

SEQ ID NO: 1855991 - RNA, 19 nt, Homo sapiens
  misc_RNA (1)...(19): siRNA sense strand
gcauagaaagaaugaagaa

SEQ ID NO: 1855992 - RNA, 19 nt, Homo sapiens
  misc_RNA (1)...(19): siRNA sense strand
guccauggcuguucuacug

SEQ ID NO: 1855993 - RNA, 19 nt, Homo sapiens
  misc_RNA (1)...(19): siRNA sense strand
aaagauauggcaaagguuu

SEQ ID NO: 1855994 - RNA, 19 nt, Homo sapiens
  misc_RNA (1)...(19): siRNA sense strand
ggucauugaagccuugaua

SEQ ID NO: 1855995 - RNA, 19 nt, Homo sapiens
  misc_RNA (1)...(19): siRNA sense strand
agaaauggcaguagagcua

SEQ ID NO: 1855996 - RNA, 19 nt, Homo sapiens
  misc_RNA (1)...(19): siRNA sense strand
ccaaggacccuaccaaugg

SEQ ID NO: 1855997 - RNA, 19 nt, Homo sapiens
  misc_RNA (1)...(19): siRNA sense strand
gagaauaacaacaacaucu

SEQ ID NO: 1855998 - RNA, 19 nt, Homo sapiens
  misc_RNA (1)...(19): siRNA sense strand
gaagcaacaaucugaugaa

SEQ ID NO: 1855999 - RNA, 19 nt, Homo sapiens
  misc_RNA (1)...(19): siRNA sense strand
uuaaggauuuggcugacua

SEQ ID NO: 1856000 - RNA, 19 nt, Homo sapiens
  misc_RNA (1)...(19): siRNA sense strand
caaacuagcagagguguug

SEQ ID NO: 1856001 - RNA, 19 nt, Homo sapiens
  misc_RNA (1)...(19): siRNA sense strand
cuacagcucuuuggcuuau

SEQ ID NO: 1856002 - RNA, 19 nt, Homo sapiens
  misc_RNA (1)...(19): siRNA sense strand
ccagauggcuacagcucuu

SEQ ID NO: 1856003 - RNA, 19 nt, Homo sapiens
  misc_RNA (1)...(19): siRNA sense strand
ccaucuaucuuucuaccaa

SEQ ID NO: 1856004 - RNA, 19 nt, Homo sapiens
  misc_RNA (1)...(19): siRNA sense strand
guuagaacauuuccagaag

SEQ ID NO: 1856005 - RNA, 19 nt, Homo sapiens
  misc_RNA (1)...(19): siRNA sense strand
gaucaagucacucuuugug

SEQ ID NO: 1856006 - RNA, 19 nt, Homo sapiens
  misc_RNA (1)...(19): siRNA sense strand
gaauaacaacaacaucuca

SEQ ID NO: 1856007 - RNA, 19 nt, Homo sapiens
  misc_RNA (1)...(19): siRNA sense strand
ggauauucuucucuauuuc

SEQ ID NO: 1856008 - RNA, 19 nt, Homo sapiens
  misc_RNA (1)...(19): siRNA sense strand
cugaguaucuccugcuuau

SEQ ID NO: 1856009 - RNA, 19 nt, Homo sapiens
  misc_RNA (1)...(19): siRNA sense strand
ugagcaagauaaagauuca

SEQ ID NO: 1856010 - RNA, 19 nt, Homo sapiens
  misc_RNA (1)...(19): siRNA sense strand
ggagagcauuaaggauuug

SEQ ID NO: 1856011 - RNA, 19 nt, Homo sapiens
  misc_RNA (1)...(19): siRNA sense strand
uggaagaaauggcaguaga

SEQ ID NO: 1856012 - RNA, 19 nt, Homo sapiens
  misc_RNA (1)...(19): siRNA sense strand
cccagcagcuuguaucaga

SEQ ID NO: 1856013 - RNA, 19 nt, Homo sapiens
  misc_RNA (1)...(19): siRNA sense strand
ugccucagaugcuuucuuu

SEQ ID NO: 1856014 - RNA, 19 nt, Homo sapiens
  misc_RNA (1)...(19): siRNA sense strand
ccagaaaccaaacacugua

SEQ ID NO: 1856015 - RNA, 19 nt, Homo sapiens
  misc_RNA (1)...(19): siRNA sense strand
cuaaaucucucugcugauc

SEQ ID NO: 1856016 - RNA, 19 nt, Homo sapiens
  misc_RNA (1)...(19): siRNA sense strand
caacucaacaucaaucaca

SEQ ID NO: 1856017 - RNA, 19 nt, Homo sapiens
  misc_RNA (1)...(19): siRNA sense strand
aagagcagcugaagcaaca

SEQ ID NO: 1856018 - RNA, 19 nt, Homo sapiens
  misc_RNA (1)...(19): siRNA sense strand
ucaaggacuucagcgaauu

SEQ ID NO: 1856019 - RNA, 19 nt, Homo sapiens
  misc_RNA (1)...(19): siRNA sense strand
uuucuuaaccugcuaauga

SEQ ID NO: 1856020 - RNA, 19 nt, Homo sapiens
  misc_RNA (1)...(19): siRNA sense strand
ggaguaauucugaguaucu

SEQ ID NO: 1856021 - RNA, 19 nt, Homo sapiens
  misc_RNA (1)...(19): siRNA sense strand
uuaccaaaguuccagagaa

SEQ ID NO: 1856022 - RNA, 19 nt, Homo sapiens
  misc_RNA (1)...(19): siRNA sense strand
caaggaagagauuaccaaa

SEQ ID NO: 1856023 - RNA, 19 nt, Homo sapiens
  misc_RNA (1)...(19): siRNA sense strand
gcaggagagaggcacauuu

SEQ ID NO: 1856024 - RNA, 19 nt, Homo sapiens
  misc_RNA (1)...(19): siRNA sense strand
augagcaacugguagauuu

SEQ ID NO: 1856025 - RNA, 19 nt, Homo sapiens
  misc_RNA (1)...(19): siRNA sense strand
ccaacucucuuugcacaga

SEQ ID NO: 1856026 - RNA, 19 nt, Homo sapiens
  misc_RNA (1)...(19): siRNA sense strand
uuggacagcuggcacguuu

SEQ ID NO: 1856027 - RNA, 19 nt, Homo sapiens
  misc_RNA (1)...(19): siRNA sense strand
gcccagaugacucggauaa

SEQ ID NO: 1856028 - RNA, 19 nt, Homo sapiens
  misc_RNA (1)...(19): siRNA sense strand
cauugaagccuugauauug

SEQ ID NO: 1856029 - RNA, 19 nt, Homo sapiens
  misc_RNA (1)...(19): siRNA sense strand
agucaugauuccaguguuu

SEQ ID NO: 1856030 - RNA, 19 nt, Homo sapiens
  misc_RNA (1)...(19): siRNA sense strand
gauccaccauugcaagaca

SEQ ID NO: 1856031 - RNA, 19 nt, Homo sapiens
  misc_RNA (1)...(19): siRNA sense strand
cagagucacuguggauaga

SEQ ID NO: 1856032 - RNA, 19 nt, Homo sapiens
  misc_RNA (1)...(19): siRNA sense strand
aaauaagccugggaauaug

SEQ ID NO: 1856033 - RNA, 19 nt, Homo sapiens
  misc_RNA (1)...(19): siRNA sense strand
auaaauaagccugggaaua

SEQ ID NO: 1856034 - RNA, 19 nt, Homo sapiens
  misc_RNA (1)...(19): siRNA sense strand
gcacguuuccauaacauca

SEQ ID NO: 1856035 - RNA, 19 nt, Homo sapiens
  misc_RNA (1)...(19): siRNA sense strand
gaacaaagcaagaaucugu

SEQ ID NO: 1856036 - RNA, 19 nt, Homo sapiens
  misc_RNA (1)...(19): siRNA sense strand
ggaaagcucugccaacauc

SEQ ID NO: 1856037 - RNA, 19 nt, Homo sapiens
  misc_RNA (1)...(19): siRNA sense strand
gcaagaaucugugugaauc

SEQ ID NO: 1856038 - RNA, 19 nt, Homo sapiens
  misc_RNA (1)...(19): siRNA sense strand
gagagaggaugguuuggaa

SEQ ID NO: 1856039 - RNA, 19 nt, Homo sapiens
  misc_RNA (1)...(19): siRNA sense strand
gaauggaaaugcaugugaa

SEQ ID NO: 1856040 - RNA, 19 nt, Homo sapiens
  misc_RNA (1)...(19): siRNA sense strand
gagaaugcauagacgauga

SEQ ID NO: 1856041 - RNA, 19 nt, Homo sapiens
  misc_RNA (1)...(19): siRNA sense strand
gaaggguucuugucauugu

SEQ ID NO: 1856042 - RNA, 19 nt, Homo sapiens
  misc_RNA (1)...(19): siRNA sense strand
gggaaggguucuugucauu

SEQ ID NO: 1856043 - RNA, 19 nt, Homo sapiens
  misc_RNA (1)...(19): siRNA sense strand
ggaaaugcaugugaaaucu

SEQ ID NO: 1856044 - RNA, 19 nt, Homo sapiens
  misc_RNA (1)...(19): siRNA sense strand
gaagaaaaguaaccaaaug

SEQ ID NO: 1856045 - RNA, 19 nt, Homo sapiens
  misc_RNA (1)...(19): siRNA sense strand
ugacagagacugcgacaaa

SEQ ID NO: 1856046 - RNA, 19 nt, Homo sapiens
  misc_RNA (1)...(19): siRNA sense strand
cgaugaaacagaagaaaua

SEQ ID NO: 1856047 - RNA, 19 nt, Homo sapiens
  misc_RNA (1)...(19): siRNA sense strand
cauagacgaugaaacagaa

SEQ ID NO: 1856048 - RNA, 19 nt, Homo sapiens
  misc_RNA (1)...(19): siRNA sense strand
gcauggagauaaaugugaa

SEQ ID NO: 1856049 - RNA, 19 nt, Homo sapiens
  misc_RNA (1)...(19): siRNA sense strand
cagagggacuuguguaugu

SEQ ID NO: 1856050 - RNA, 19 nt, Homo sapiens
  misc_RNA (1)...(19): siRNA sense strand
ccaacuaacugugacuuga

SEQ ID NO: 1856051 - RNA, 19 nt, Homo sapiens
  misc_RNA (1)...(19): siRNA sense strand
cggaagaugugacugcaaa

SEQ ID NO: 1856052 - RNA, 19 nt, Homo sapiens
  misc_RNA (1)...(19): siRNA sense strand
aaccaaaugugcaagaauu

SEQ ID NO: 1856053 - RNA, 19 nt, Homo sapiens
  misc_RNA (1)...(19): siRNA sense strand
ggucauggacaguguaauu

SEQ ID NO: 1856054 - RNA, 19 nt, Homo sapiens
  misc_RNA (1)...(19): siRNA sense strand
ggacuuguguaugguaaau

SEQ ID NO: 1856055 - RNA, 19 nt, Homo sapiens
  misc_RNA (1)...(19): siRNA sense strand
ugaaucagcagauggcaua

SEQ ID NO: 1856056 - RNA, 19 nt, Homo sapiens
  misc_RNA (1)...(19): siRNA sense strand
uaacaugacggaagaacaa

SEQ ID NO: 1856057 - RNA, 19 nt, Homo sapiens
  misc_RNA (1)...(19): siRNA sense strand
uaacagagggacuugugua

SEQ ID NO: 1856058 - RNA, 19 nt, Homo sapiens
  misc_RNA (1)...(19): siRNA sense strand
ggaauggaaaugcauguga

SEQ ID NO: 1856059 - RNA, 19 nt, Homo sapiens
  misc_RNA (1)...(19): siRNA sense strand
caacauccgcggaagugua

SEQ ID NO: 1856060 - RNA, 19 nt, Homo sapiens
  misc_RNA (1)...(19): siRNA sense strand
ccgcggaaguguaacauga

SEQ ID NO: 1856061 - RNA, 19 nt, Homo sapiens
  misc_RNA (1)...(19): siRNA sense strand
ggacaccugugaaugugau

SEQ ID NO: 1856062 - RNA, 19 nt, Homo sapiens
  misc_RNA (1)...(19): siRNA sense strand
gaggagagcaucaggaagu

SEQ ID NO: 1856063 - RNA, 19 nt, Homo sapiens
  misc_RNA (1)...(19): siRNA sense strand
gaagaacaaagcaagaauc

SEQ ID NO: 1856064 - RNA, 19 nt, Homo sapiens
  misc_RNA (1)...(19): siRNA sense strand
guaaccaaaugugcaagaa

SEQ ID NO: 1856065 - RNA, 19 nt, Homo sapiens
  misc_RNA (1)...(19): siRNA sense strand
caagacaucaucugcucua

SEQ ID NO: 1856066 - RNA, 19 nt, Homo sapiens
  misc_RNA (1)...(19): siRNA sense strand
ggagauaaaugugaauucc

SEQ ID NO: 1856067 - RNA, 19 nt, Homo sapiens
  misc_RNA (1)...(19): siRNA sense strand
gcauagacgaugaaacaga

SEQ ID NO: 1856068 - RNA, 19 nt, Homo sapiens
  misc_RNA (1)...(19): siRNA sense strand
gaugaucgccgcugugaag

SEQ ID NO: 1856069 - RNA, 19 nt, Homo sapiens
  misc_RNA (1)...(19): siRNA sense strand
ggaguucugugacugugau

SEQ ID NO: 1856070 - RNA, 19 nt, Homo sapiens
  misc_RNA (1)...(19): siRNA sense strand
gaauuccagugcgauauca

SEQ ID NO: 1856071 - RNA, 19 nt, Homo sapiens
  misc_RNA (1)...(19): siRNA sense strand
ggaagaacaaagcaagaau

SEQ ID NO: 1856072 - RNA, 19 nt, Homo sapiens
  misc_RNA (1)...(19): siRNA sense strand
gaaagcaagcgaagaugca

SEQ ID NO: 1856073 - RNA, 19 nt, Homo sapiens
  misc_RNA (1)...(19): siRNA sense strand
ggcaaaaucugcaguaaca

SEQ ID NO: 1856074 - RNA, 19 nt, Homo sapiens
  misc_RNA (1)...(19): siRNA sense strand
guaagugugauaauucaga

SEQ ID NO: 1856075 - RNA, 19 nt, Homo sapiens
  misc_RNA (1)...(19): siRNA sense strand
gguaugggaagaaguguga

SEQ ID NO: 1856076 - RNA, 19 nt, Homo sapiens
  misc_RNA (1)...(19): siRNA sense strand
guugucagcuguuccucaa

SEQ ID NO: 1856077 - RNA, 19 nt, Homo sapiens
  misc_RNA (1)...(19): siRNA sense strand
ugggauggauggaauggaa

SEQ ID NO: 1856078 - RNA, 19 nt, Homo sapiens
  misc_RNA (1)...(19): siRNA sense strand
gguguaagugugauaauuc

SEQ ID NO: 1856079 - RNA, 19 nt, Homo sapiens
  misc_RNA (1)...(19): siRNA sense strand
ccgauauucugaugacuuc

SEQ ID NO: 1856080 - RNA, 19 nt, Homo sapiens
  misc_RNA (1)...(19): siRNA sense strand
gggaaguguuacuguggaa

SEQ ID NO: 1856081 - RNA, 19 nt, Homo sapiens
  misc_RNA (1)...(19): siRNA sense strand
guguaagugugauaauuca

SEQ ID NO: 1856082 - RNA, 19 nt, Homo sapiens
  misc_RNA (1)...(19): siRNA sense strand
gcagguguaagugugauaa

SEQ ID NO: 1856083 - RNA, 19 nt, Homo sapiens
  misc_RNA (1)...(19): siRNA sense strand
uacagggaauggaauaugu

SEQ ID NO: 1856084 - RNA, 19 nt, Homo sapiens
  misc_RNA (1)...(19): siRNA sense strand
aaagcaagaaucuguguga

SEQ ID NO: 1856085 - RNA, 19 nt, Homo sapiens
  misc_RNA (1)...(19): siRNA sense strand
gaggccaugggaaguguua

SEQ ID NO: 1856086 - RNA, 19 nt, Homo sapiens
  misc_RNA (1)...(19): siRNA sense strand
guacagggaauggaauaug

SEQ ID NO: 1856087 - RNA, 19 nt, Homo sapiens
  misc_RNA (1)...(19): siRNA sense strand
gugcaagaauucacaagac

SEQ ID NO: 1856088 - RNA, 19 nt, Homo sapiens
  misc_RNA (1)...(19): siRNA sense strand
ggaaggguucuugucauug

SEQ ID NO: 1856089 - RNA, 19 nt, Homo sapiens
  misc_RNA (1)...(19): siRNA sense strand
uaaaugugaauguggcaaa

SEQ ID NO: 1856090 - RNA, 19 nt, Homo sapiens
  misc_RNA (1)...(19): siRNA sense strand
ugugggaagugcauuuguu

SEQ ID NO: 1856091 - RNA, 19 nt, Homo sapiens
  misc_RNA (1)...(19): siRNA sense strand
gaaaugcaugugaaaucug

SEQ ID NO: 1856092 - RNA, 19 nt, Homo sapiens
  misc_RNA (1)...(19): siRNA sense strand
gaauauguagcuguggaaa

SEQ ID NO: 1856093 - RNA, 19 nt, Homo sapiens
  misc_RNA (1)...(19): siRNA sense strand
ggaauauguagcuguggaa

SEQ ID NO: 1856094 - RNA, 19 nt, Homo sapiens
  misc_RNA (1)...(19): siRNA sense strand
caagaauucacaagacauc

SEQ ID NO: 1856095 - RNA, 19 nt, Homo sapiens
  misc_RNA (1)...(19): siRNA sense strand
gagaggaugguuuggaaag

SEQ ID NO: 1856096 - RNA, 19 nt, Homo sapiens
  misc_RNA (1)...(19): siRNA sense strand
uaugaccgauauucugaug

SEQ ID NO: 1856097 - RNA, 19 nt, Homo sapiens
  misc_RNA (1)...(19): siRNA sense strand
guaccugucacgauguuga

SEQ ID NO: 1856098 - RNA, 19 nt, Homo sapiens
  misc_RNA (1)...(19): siRNA sense strand
gaaacagaagaaauaugug

SEQ ID NO: 1856099 - RNA, 19 nt, Homo sapiens
  misc_RNA (1)...(19): siRNA sense strand
gacgauagagaaugcauag

SEQ ID NO: 1856100 - RNA, 19 nt, Homo sapiens
  misc_RNA (1)...(19): siRNA sense strand
gcaagaauucacaagacau

SEQ ID NO: 1856101 - RNA, 19 nt, Homo sapiens
  misc_RNA (1)...(19): siRNA sense strand
gaauucacaagacaucauc

SEQ ID NO: 1856102 - RNA, 19 nt, Homo sapiens
  misc_RNA (1)...(19): siRNA sense strand
acugugacuugacaaagaa

SEQ ID NO: 1856103 - RNA, 19 nt, Homo sapiens
  misc_RNA (1)...(19): siRNA sense strand
gagacugcgacaaacauga

SEQ ID NO: 1856104 - RNA, 19 nt, Homo sapiens
  misc_RNA (1)...(19): siRNA sense strand
aguguaacaugacggaaga

SEQ ID NO: 1856105 - RNA, 19 nt, Homo sapiens
  misc_RNA (1)...(19): siRNA sense strand
guggacuuguguaugguaa

SEQ ID NO: 1856106 - RNA, 19 nt, Homo sapiens
  misc_RNA (1)...(19): siRNA sense strand
gaugagagggacuguagag

SEQ ID NO: 1856107 - RNA, 19 nt, Homo sapiens
  misc_RNA (1)...(19): siRNA sense strand
cagcagauggcauauugug

SEQ ID NO: 1856108 - RNA, 19 nt, Homo sapiens
  misc_RNA (1)...(19): siRNA sense strand
aaaguaaccaaaugugcaa

SEQ ID NO: 1856109 - RNA, 19 nt, Homo sapiens
  misc_RNA (1)...(19): siRNA sense strand
uggcuuggcucagaauauc

SEQ ID NO: 1856110 - RNA, 19 nt, Homo sapiens
  misc_RNA (1)...(19): siRNA sense strand
aucagcagauggcauauug

SEQ ID NO: 1856111 - RNA, 19 nt, Homo sapiens
  misc_RNA (1)...(19): siRNA sense strand
ugucagcuguuccucaaag

SEQ ID NO: 1856112 - RNA, 19 nt, Homo sapiens
  misc_RNA (1)...(19): siRNA sense strand
gcaaagcaggcugguaugg

SEQ ID NO: 1856113 - RNA, 19 nt, Homo sapiens
  misc_RNA (1)...(19): siRNA sense strand
ucuaugaccgauauucuga

SEQ ID NO: 1856114 - RNA, 19 nt, Homo sapiens
  misc_RNA (1)...(19): siRNA sense strand
caaagcuucucgccaucuc

SEQ ID NO: 1856115 - RNA, 19 nt, Homo sapiens
  misc_RNA (1)...(19): siRNA sense strand
aacugugacuugacaaaga

SEQ ID NO: 1856116 - RNA, 19 nt, Homo sapiens
  misc_RNA (1)...(19): siRNA sense strand
ugcaagaauucacaagaca

SEQ ID NO: 1856117 - RNA, 19 nt, Homo sapiens
  misc_RNA (1)...(19): siRNA sense strand
gacagagacugcgacaaac

SEQ ID NO: 1856118 - RNA, 19 nt, Homo sapiens
  misc_RNA (1)...(19): siRNA sense strand
gaggaugguuuggaaagcu

SEQ ID NO: 1856119 - RNA, 19 nt, Homo sapiens
  misc_RNA (1)...(19): siRNA sense strand
ugaccgauauucugaugac

SEQ ID NO: 1856120 - RNA, 19 nt, Homo sapiens
  misc_RNA (1)...(19): siRNA sense strand
gugaugagagggacuguag

SEQ ID NO: 1856121 - RNA, 19 nt, Homo sapiens
  misc_RNA (1)...(19): siRNA sense strand
gcaucugccacgugacuga

SEQ ID NO: 1856122 - RNA, 19 nt, Homo sapiens
  misc_RNA (1)...(19): siRNA sense strand
ugugauaauucagauggaa

SEQ ID NO: 1856123 - RNA, 19 nt, Homo sapiens
  misc_RNA (1)...(19): siRNA sense strand
acaguguaauugcggaaga

SEQ ID NO: 1856124 - RNA, 19 nt, Homo sapiens
  misc_RNA (1)...(19): siRNA sense strand
gggaagugcauuuguucug

SEQ ID NO: 1856125 - RNA, 19 nt, Homo sapiens
  misc_RNA (1)...(19): siRNA sense strand
caagaaucugugugaauca

SEQ ID NO: 1856126 - RNA, 19 nt, Homo sapiens
  misc_RNA (1)...(19): siRNA sense strand
aagcaagaaucugugugaa

SEQ ID NO: 1856127 - RNA, 19 nt, Homo sapiens
  misc_RNA (1)...(19): siRNA sense strand
ggaggccacggcacauguu

SEQ ID NO: 1856128 - RNA, 19 nt, Homo sapiens
  misc_RNA (1)...(19): siRNA sense strand
uaaccaaaugugcaagaau

SEQ ID NO: 1856129 - RNA, 19 nt, Homo sapiens
  misc_RNA (1)...(19): siRNA sense strand
gggaauggaauauguagcu

SEQ ID NO: 1856130 - RNA, 19 nt, Homo sapiens
  misc_RNA (1)...(19): siRNA sense strand
gcaguaacagagggacuug

SEQ ID NO: 1856131 - RNA, 19 nt, Homo sapiens
  misc_RNA (1)...(19): siRNA sense strand
ggcauggagauaaauguga

SEQ ID NO: 1856132 - RNA, 19 nt, Homo sapiens
  misc_RNA (1)...(19): siRNA sense strand
gaaguguuacuguggaaac

SEQ ID NO: 1856133 - RNA, 19 nt, Homo sapiens
  misc_RNA (1)...(19): siRNA sense strand
augcauagacgaugaaaca

SEQ ID NO: 1856134 - RNA, 19 nt, Homo sapiens
  misc_RNA (1)...(19): siRNA sense strand
ugacgauagagaaugcaua

SEQ ID NO: 1856135 - RNA, 19 nt, Homo sapiens
  misc_RNA (1)...(19): siRNA sense strand
gaaaccaacuccucauuua

SEQ ID NO: 1856136 - RNA, 19 nt, Homo sapiens
  misc_RNA (1)...(19): siRNA sense strand
gcagagagcucaaagaaug

SEQ ID NO: 1856137 - RNA, 19 nt, Homo sapiens
  misc_RNA (1)...(19): siRNA sense strand
ucagauagcucaagugauu

SEQ ID NO: 1856138 - RNA, 19 nt, Homo sapiens
  misc_RNA (1)...(19): siRNA sense strand
ccaggaagaucaagaagua

SEQ ID NO: 1856139 - RNA, 19 nt, Homo sapiens
  misc_RNA (1)...(19): siRNA sense strand
gaacaggaauacaggagaa

SEQ ID NO: 1856140 - RNA, 19 nt, Homo sapiens
  misc_RNA (1)...(19): siRNA sense strand
gaagagaucccuccuauac

SEQ ID NO: 1856141 - RNA, 19 nt, Homo sapiens
  misc_RNA (1)...(19): siRNA sense strand
agagaagucuaaacaguua

SEQ ID NO: 1856142 - RNA, 19 nt, Homo sapiens
  misc_RNA (1)...(19): siRNA sense strand
gaaguaaagagaagucuaa

SEQ ID NO: 1856143 - RNA, 19 nt, Homo sapiens
  misc_RNA (1)...(19): siRNA sense strand
gaauuucucuugucaaugg

SEQ ID NO: 1856144 - RNA, 19 nt, Homo sapiens
  misc_RNA (1)...(19): siRNA sense strand
gcagaaacaaagacaaaua

SEQ ID NO: 1856145 - RNA, 19 nt, Homo sapiens
  misc_RNA (1)...(19): siRNA sense strand
ggaaaggaguagaaguaaa

SEQ ID NO: 1856146 - RNA, 19 nt, Homo sapiens
  misc_RNA (1)...(19): siRNA sense strand
gaauuaaaguccuccaugu

SEQ ID NO: 1856147 - RNA, 19 nt, Homo sapiens
  misc_RNA (1)...(19): siRNA sense strand
gcaaggaguaccauagaua

SEQ ID NO: 1856148 - RNA, 19 nt, Homo sapiens
  misc_RNA (1)...(19): siRNA sense strand
gacgagaguuucgcuguua

SEQ ID NO: 1856149 - RNA, 19 nt, Homo sapiens
  misc_RNA (1)...(19): siRNA sense strand
gaagaaaguuaaagaccau

SEQ ID NO: 1856150 - RNA, 19 nt, Homo sapiens
  misc_RNA (1)...(19): siRNA sense strand
cagaagagaucccuccuau

SEQ ID NO: 1856151 - RNA, 19 nt, Homo sapiens
  misc_RNA (1)...(19): siRNA sense strand
gaacuuucguugucuuugu

SEQ ID NO: 1856152 - RNA, 19 nt, Homo sapiens
  misc_RNA (1)...(19): siRNA sense strand
gaaaucaacucagaaacca

SEQ ID NO: 1856153 - RNA, 19 nt, Homo sapiens
  misc_RNA (1)...(19): siRNA sense strand
aguaagagcucacacagaa

SEQ ID NO: 1856154 - RNA, 19 nt, Homo sapiens
  misc_RNA (1)...(19): siRNA sense strand
gaagaaagucaaagcagaa

SEQ ID NO: 1856155 - RNA, 19 nt, Homo sapiens
  misc_RNA (1)...(19): siRNA sense strand
gaguagagaaugugauaua

SEQ ID NO: 1856156 - RNA, 19 nt, Homo sapiens
  misc_RNA (1)...(19): siRNA sense strand
ccauaaaucuaacagcaaa

SEQ ID NO: 1856157 - RNA, 19 nt, Homo sapiens
  misc_RNA (1)...(19): siRNA sense strand
guaaagagaagucuaaaca

SEQ ID NO: 1856158 - RNA, 19 nt, Homo sapiens
  misc_RNA (1)...(19): siRNA sense strand
ucacaguucuucauaacaa

SEQ ID NO: 1856159 - RNA, 19 nt, Homo sapiens
  misc_RNA (1)...(19): siRNA sense strand
gguaucaaguggugaaaga

SEQ ID NO: 1856160 - RNA, 19 nt, Homo sapiens
  misc_RNA (1)...(19): siRNA sense strand
gaaaggaguagaaguaaag

SEQ ID NO: 1856161 - RNA, 19 nt, Homo sapiens
  misc_RNA (1)...(19): siRNA sense strand
gaagaggaccaaggcguua

SEQ ID NO: 1856162 - RNA, 19 nt, Homo sapiens
  misc_RNA (1)...(19): siRNA sense strand
ucagagaaguccaguuaga

SEQ ID NO: 1856163 - RNA, 19 nt, Homo sapiens
  misc_RNA (1)...(19): siRNA sense strand
aaucagagaaguccaguua

SEQ ID NO: 1856164 - RNA, 19 nt, Homo sapiens
  misc_RNA (1)...(19): siRNA sense strand
uggaacagaugaagacaaa

SEQ ID NO: 1856165 - RNA, 19 nt, Homo sapiens
  misc_RNA (1)...(19): siRNA sense strand
ucacagaguugucaaggau

SEQ ID NO: 1856166 - RNA, 19 nt, Homo sapiens
  misc_RNA (1)...(19): siRNA sense strand
aaagagaagucuaaacagu

SEQ ID NO: 1856167 - RNA, 19 nt, Homo sapiens
  misc_RNA (1)...(19): siRNA sense strand
gcaagaagagugcaucuag

SEQ ID NO: 1856168 - RNA, 19 nt, Homo sapiens
  misc_RNA (1)...(19): siRNA sense strand
ggaccaaggcguuaucgaa

SEQ ID NO: 1856169 - RNA, 19 nt, Homo sapiens
  misc_RNA (1)...(19): siRNA sense strand
ggaguaagagcaaagagaa

SEQ ID NO: 1856170 - RNA, 19 nt, Homo sapiens
  misc_RNA (1)...(19): siRNA sense strand
caaucaaccugcuggaaga

SEQ ID NO: 1856171 - RNA, 19 nt, Homo sapiens
  misc_RNA (1)...(19): siRNA sense strand
aguaaucucuggucaagaa

SEQ ID NO: 1856172 - RNA, 19 nt, Homo sapiens
  misc_RNA (1)...(19): siRNA sense strand
ucaaauaacagcagggaaa

SEQ ID NO: 1856173 - RNA, 19 nt, Homo sapiens
  misc_RNA (1)...(19): siRNA sense strand
ggaguaccauagauacaga

SEQ ID NO: 1856174 - RNA, 19 nt, Homo sapiens
  misc_RNA (1)...(19): siRNA sense strand
caggaaaggaguagaagua

SEQ ID NO: 1856175 - RNA, 19 nt, Homo sapiens
  misc_RNA (1)...(19): siRNA sense strand
gucaagaaguuguaagaga

SEQ ID NO: 1856176 - RNA, 19 nt, Homo sapiens
  misc_RNA (1)...(19): siRNA sense strand
caaguaaucucuggucaag

SEQ ID NO: 1856177 - RNA, 19 nt, Homo sapiens
  misc_RNA (1)...(19): siRNA sense strand
gcaaagagaaaucaaagag

SEQ ID NO: 1856178 - RNA, 19 nt, Homo sapiens
  misc_RNA (1)...(19): siRNA sense strand
gaaaaggcauaaaucauca

SEQ ID NO: 1856179 - RNA, 19 nt, Homo sapiens
  misc_RNA (1)...(19): siRNA sense strand
gaaagucaaagcagaaaca

SEQ ID NO: 1856180 - RNA, 19 nt, Homo sapiens
  misc_RNA (1)...(19): siRNA sense strand
aggaugaggucaaggagua

SEQ ID NO: 1856181 - RNA, 19 nt, Homo sapiens
  misc_RNA (1)...(19): siRNA sense strand
gagaaguccaguuagagua

SEQ ID NO: 1856182 - RNA, 19 nt, Homo sapiens
  misc_RNA (1)...(19): siRNA sense strand
gcagucugauucuaaagga

SEQ ID NO: 1856183 - RNA, 19 nt, Homo sapiens
  misc_RNA (1)...(19): siRNA sense strand
gaaaagggccaaaucuaaa

SEQ ID NO: 1856184 - RNA, 19 nt, Homo sapiens
  misc_RNA (1)...(19): siRNA sense strand
gagagagacaucagaagaa

SEQ ID NO: 1856185 - RNA, 19 nt, Homo sapiens
  misc_RNA (1)...(19): siRNA sense strand
gaaguccaguuagaguaaa

SEQ ID NO: 1856186 - RNA, 19 nt, Homo sapiens
  misc_RNA (1)...(19): siRNA sense strand
aaagcagucugauucuaaa

SEQ ID NO: 1856187 - RNA, 19 nt, Homo sapiens
  misc_RNA (1)...(19): siRNA sense strand
uaacagaucacaggaaugu

SEQ ID NO: 1856188 - RNA, 19 nt, Homo sapiens
  misc_RNA (1)...(19): siRNA sense strand
ggaaagagaguguaaucca

SEQ ID NO: 1856189 - RNA, 19 nt, Homo sapiens
  misc_RNA (1)...(19): siRNA sense strand
uuaaaguccuccauguuga

SEQ ID NO: 1856190 - RNA, 19 nt, Homo sapiens
  misc_RNA (1)...(19): siRNA sense strand
gaaaagcagucugauucua

SEQ ID NO: 1856191 - RNA, 19 nt, Homo sapiens
  misc_RNA (1)...(19): siRNA sense strand
guaaaggaagggaucauga

SEQ ID NO: 1856192 - RNA, 19 nt, Homo sapiens
  misc_RNA (1)...(19): siRNA sense strand
agagagacaucagaagaaa

SEQ ID NO: 1856193 - RNA, 19 nt, Homo sapiens
  misc_RNA (1)...(19): siRNA sense strand
gaaaaggagaagaaaguua

SEQ ID NO: 1856194 - RNA, 19 nt, Homo sapiens
  misc_RNA (1)...(19): siRNA sense strand
cgaaaccaacuccucauuu

SEQ ID NO: 1856195 - RNA, 19 nt, Homo sapiens
  misc_RNA (1)...(19): siRNA sense strand
gaucaggaaaggaguagaa

SEQ ID NO: 1856196 - RNA, 19 nt, Homo sapiens
  misc_RNA (1)...(19): siRNA sense strand
gcauaaaucaucaucaucu

SEQ ID NO: 1856197 - RNA, 19 nt, Homo sapiens
  misc_RNA (1)...(19): siRNA sense strand
acagaguugucaaggauuu

SEQ ID NO: 1856198 - RNA, 19 nt, Homo sapiens
  misc_RNA (1)...(19): siRNA sense strand
gaucaaagucccuucucaa

SEQ ID NO: 1856199 - RNA, 19 nt, Homo sapiens
  misc_RNA (1)...(19): siRNA sense strand
caaagaguaaugagcauga

SEQ ID NO: 1856200 - RNA, 19 nt, Homo sapiens
  misc_RNA (1)...(19): siRNA sense strand
agagugaguugaaugaaau

SEQ ID NO: 1856201 - RNA, 19 nt, Homo sapiens
  misc_RNA (1)...(19): siRNA sense strand
caagaagagugcaucuagu

SEQ ID NO: 1856202 - RNA, 19 nt, Homo sapiens
  misc_RNA (1)...(19): siRNA sense strand
ggauaagagugaguugaau

SEQ ID NO: 1856203 - RNA, 19 nt, Homo sapiens
  misc_RNA (1)...(19): siRNA sense strand
gaagcaaggaguaccauag

SEQ ID NO: 1856204 - RNA, 19 nt, Homo sapiens
  misc_RNA (1)...(19): siRNA sense strand
aauaacagaucacaggaau

SEQ ID NO: 1856205 - RNA, 19 nt, Homo sapiens
  misc_RNA (1)...(19): siRNA sense strand
aagagugaguugaaugaaa

SEQ ID NO: 1856206 - RNA, 19 nt, Homo sapiens
  misc_RNA (1)...(19): siRNA sense strand
gggauaagagugaguugaa

SEQ ID NO: 1856207 - RNA, 19 nt, Homo sapiens
  misc_RNA (1)...(19): siRNA sense strand
ucaagaaaaugaccaugua

SEQ ID NO: 1856208 - RNA, 19 nt, Homo sapiens
  misc_RNA (1)...(19): siRNA sense strand
gaucaagaaguaaagauag

SEQ ID NO: 1856209 - RNA, 19 nt, Homo sapiens
  misc_RNA (1)...(19): siRNA sense strand
caagaacccaugacagaga

SEQ ID NO: 1856210 - RNA, 19 nt, Homo sapiens
  misc_RNA (1)...(19): siRNA sense strand
uauaauagcagaacaagag

SEQ ID NO: 1856211 - RNA, 19 nt, Homo sapiens
  misc_RNA (1)...(19): siRNA sense strand
cuaaagguaaacacaguua

SEQ ID NO: 1856212 - RNA, 19 nt, Homo sapiens
  misc_RNA (1)...(19): siRNA sense strand
caguuagaaucaaagagua

SEQ ID NO: 1856213 - RNA, 19 nt, Homo sapiens
  misc_RNA (1)...(19): siRNA sense strand
gauaagagugaguugaaug

SEQ ID NO: 1856214 - RNA, 19 nt, Homo sapiens
  misc_RNA (1)...(19): siRNA sense strand
agagacaucagaagaaauu

SEQ ID NO: 1856215 - RNA, 19 nt, Homo sapiens
  misc_RNA (1)...(19): siRNA sense strand
gaguagaaguaaagagaag

SEQ ID NO: 1856216 - RNA, 19 nt, Homo sapiens
  misc_RNA (1)...(19): siRNA sense strand
gagcaaagagaaaucaaag

SEQ ID NO: 1856217 - RNA, 19 nt, Homo sapiens
  misc_RNA (1)...(19): siRNA sense strand
uaaaggaagggaucaugaa

SEQ ID NO: 1856218 - RNA, 19 nt, Homo sapiens
  misc_RNA (1)...(19): siRNA sense strand
acagaaaccaagagaguaa

SEQ ID NO: 1856219 - RNA, 19 nt, Homo sapiens
  misc_RNA (1)...(19): siRNA sense strand
aaagauaggaggagaagga

SEQ ID NO: 1856220 - RNA, 19 nt, Homo sapiens
  misc_RNA (1)...(19): siRNA sense strand
gguucacaguucuucauaa

SEQ ID NO: 1856221 - RNA, 19 nt, Homo sapiens
  misc_RNA (1)...(19): siRNA sense strand
gaaucuaucuauggaggau

SEQ ID NO: 1856222 - RNA, 19 nt, Homo sapiens
  misc_RNA (1)...(19): siRNA sense strand
gaagaucaagaaguaaaga

SEQ ID NO: 1856223 - RNA, 19 nt, Homo sapiens
  misc_RNA (1)...(19): siRNA sense strand
ucacgaagccgagagagaa

SEQ ID NO: 1856224 - RNA, 19 nt, Homo sapiens
  misc_RNA (1)...(19): siRNA sense strand
gcagaagagugcgaucaag

SEQ ID NO: 1856225 - RNA, 19 nt, Homo sapiens
  misc_RNA (1)...(19): siRNA sense strand
agagaacgaagcagaagua

SEQ ID NO: 1856226 - RNA, 19 nt, Homo sapiens
  misc_RNA (1)...(19): siRNA sense strand
uacuagaucuggcaggaaa

SEQ ID NO: 1856227 - RNA, 19 nt, Homo sapiens
  misc_RNA (1)...(19): siRNA sense strand
gagaguguaauccaccuaa

SEQ ID NO: 1856228 - RNA, 19 nt, Homo sapiens
  misc_RNA (1)...(19): siRNA sense strand
gaaagggaaagagagugua

SEQ ID NO: 1856229 - RNA, 19 nt, Homo sapiens
  misc_RNA (1)...(19): siRNA sense strand
guacggauacucaguugug

SEQ ID NO: 1856230 - RNA, 19 nt, Homo sapiens
  misc_RNA (1)...(19): siRNA sense strand
gaagggaucaugaaaaugu

SEQ ID NO: 1856231 - RNA, 19 nt, Homo sapiens
  misc_RNA (1)...(19): siRNA sense strand
gaaacaaagacaaauacag

SEQ ID NO: 1856232 - RNA, 19 nt, Homo sapiens
  misc_RNA (1)...(19): siRNA sense strand
ggaguagaaguaaagagaa

SEQ ID NO: 1856233 - RNA, 19 nt, Homo sapiens
  misc_RNA (1)...(19): siRNA sense strand
gaaguuguaagagagauug

SEQ ID NO: 1856234 - RNA, 19 nt, Homo sapiens
  misc_RNA (1)...(19): siRNA sense strand
cucagaaaccauuacauua

SEQ ID NO: 1856235 - RNA, 19 nt, Homo sapiens
  misc_RNA (1)...(19): siRNA sense strand
ccaggaaacuugaauguua

SEQ ID NO: 1856236 - RNA, 19 nt, Homo sapiens
  misc_RNA (1)...(19): siRNA sense strand
gggaagaccuccuuaacua

SEQ ID NO: 1856237 - RNA, 19 nt, Homo sapiens
  misc_RNA (1)...(19): siRNA sense strand
gaaaguugcugcugaaauc

SEQ ID NO: 1856238 - RNA, 19 nt, Homo sapiens
  misc_RNA (1)...(19): siRNA sense strand
gagcauaugcgaacaauaa

SEQ ID NO: 1856239 - RNA, 19 nt, Homo sapiens
  misc_RNA (1)...(19): siRNA sense strand
gggcagaaauagugaagua

SEQ ID NO: 1856240 - RNA, 19 nt, Homo sapiens
  misc_RNA (1)...(19): siRNA sense strand
gggaaacaguacaaacaaa

SEQ ID NO: 1856241 - RNA, 19 nt, Homo sapiens
  misc_RNA (1)...(19): siRNA sense strand
gguauacuguggugaagaa

SEQ ID NO: 1856242 - RNA, 19 nt, Homo sapiens
  misc_RNA (1)...(19): siRNA sense strand
gaauguuacccuucaaauu

SEQ ID NO: 1856243 - RNA, 19 nt, Homo sapiens
  misc_RNA (1)...(19): siRNA sense strand
gaaguacccggaagaagaa

SEQ ID NO: 1856244 - RNA, 19 nt, Homo sapiens
  misc_RNA (1)...(19): siRNA sense strand
gaacagucacagcguauug

SEQ ID NO: 1856245 - RNA, 19 nt, Homo sapiens
  misc_RNA (1)...(19): siRNA sense strand
ggauaacauugccaggaaa

SEQ ID NO: 1856246 - RNA, 19 nt, Homo sapiens
  misc_RNA (1)...(19): siRNA sense strand
gggaucaaauuaaacaaag

SEQ ID NO: 1856247 - RNA, 19 nt, Homo sapiens
  misc_RNA (1)...(19): siRNA sense strand
ugaaguacccggaagaaga

SEQ ID NO: 1856248 - RNA, 19 nt, Homo sapiens
  misc_RNA (1)...(19): siRNA sense strand
caacauaccaccucuacuc

SEQ ID NO: 1856249 - RNA, 19 nt, Homo sapiens
  misc_RNA (1)...(19): siRNA sense strand
ucaagaaacuuuugggaaa

SEQ ID NO: 1856250 - RNA, 19 nt, Homo sapiens
  misc_RNA (1)...(19): siRNA sense strand
gaguagaaucuguucagua

SEQ ID NO: 1856251 - RNA, 19 nt, Homo sapiens
  misc_RNA (1)...(19): siRNA sense strand
guacaaacaaacuauagga

SEQ ID NO: 1856252 - RNA, 19 nt, Homo sapiens
  misc_RNA (1)...(19): siRNA sense strand
ggaguccucuugguauaug

SEQ ID NO: 1856253 - RNA, 19 nt, Homo sapiens
  misc_RNA (1)...(19): siRNA sense strand
cauaccaccucuacucaga

SEQ ID NO: 1856254 - RNA, 19 nt, Homo sapiens
  misc_RNA (1)...(19): siRNA sense strand
cuauaggacuggauuucuu

SEQ ID NO: 1856255 - RNA, 19 nt, Homo sapiens
  misc_RNA (1)...(19): siRNA sense strand
caaacuauaggacuggauu

SEQ ID NO: 1856256 - RNA, 19 nt, Homo sapiens
  misc_RNA (1)...(19): siRNA sense strand
gaggcaaaauguuggauaa

SEQ ID NO: 1856257 - RNA, 19 nt, Homo sapiens
  misc_RNA (1)...(19): siRNA sense strand
gaaagugagcgaggaguca

SEQ ID NO: 1856258 - RNA, 19 nt, Homo sapiens
  misc_RNA (1)...(19): siRNA sense strand
aguagaaucuguucaguac

SEQ ID NO: 1856259 - RNA, 19 nt, Homo sapiens
  misc_RNA (1)...(19): siRNA sense strand
ggaaacaguacaaacaaac

SEQ ID NO: 1856260 - RNA, 19 nt, Homo sapiens
  misc_RNA (1)...(19): siRNA sense strand
aggauaacauugccaggaa

SEQ ID NO: 1856261 - RNA, 19 nt, Homo sapiens
  misc_RNA (1)...(19): siRNA sense strand
gccacugguugccuuggua

SEQ ID NO: 1856262 - RNA, 19 nt, Homo sapiens
  misc_RNA (1)...(19): siRNA sense strand
gauauaggagggcagacaa

SEQ ID NO: 1856263 - RNA, 19 nt, Homo sapiens
  misc_RNA (1)...(19): siRNA sense strand
uauaggagggcagacaaua

SEQ ID NO: 1856264 - RNA, 19 nt, Homo sapiens
  misc_RNA (1)...(19): siRNA sense strand
gaaacaguacaaacaaacu

SEQ ID NO: 1856265 - RNA, 19 nt, Homo sapiens
  misc_RNA (1)...(19): siRNA sense strand
gcuuugagaauuuagaaga

SEQ ID NO: 1856266 - RNA, 19 nt, Homo sapiens
  misc_RNA (1)...(19): siRNA sense strand
caggaaacuugaauguuac

SEQ ID NO: 1856267 - RNA, 19 nt, Homo sapiens
  misc_RNA (1)...(19): siRNA sense strand
uauaggacuggauuucuuu

SEQ ID NO: 1856268 - RNA, 19 nt, Homo sapiens
  misc_RNA (1)...(19): siRNA sense strand
gcagacaauaggaggcaaa

SEQ ID NO: 1856269 - RNA, 19 nt, Homo sapiens
  misc_RNA (1)...(19): siRNA sense strand
uaacauugccaggaaacuu

SEQ ID NO: 1856270 - RNA, 19 nt, Homo sapiens
  misc_RNA (1)...(19): siRNA sense strand
cuucaaauuugggauauag

SEQ ID NO: 1856271 - RNA, 19 nt, Homo sapiens
  misc_RNA (1)...(19): siRNA sense strand
agggaguccucuugguaua

SEQ ID NO: 1856272 - RNA, 19 nt, Homo sapiens
  misc_RNA (1)...(19): siRNA sense strand
acagggaguccucuuggua

SEQ ID NO: 1856273 - RNA, 19 nt, Homo sapiens
  misc_RNA (1)...(19): siRNA sense strand
ggaagaccuccuuaacuac

SEQ ID NO: 1856274 - RNA, 19 nt, Homo sapiens
  misc_RNA (1)...(19): siRNA sense strand
uuagaagauugguauacug

SEQ ID NO: 1856275 - RNA, 19 nt, Homo sapiens
  misc_RNA (1)...(19): siRNA sense strand
ugucagggcagaaauagug

SEQ ID NO: 1856276 - RNA, 19 nt, Homo sapiens
  misc_RNA (1)...(19): siRNA sense strand
auacuguggugaagaaagu

SEQ ID NO: 1856277 - RNA, 19 nt, Homo sapiens
  misc_RNA (1)...(19): siRNA sense strand
gacaauaggaggcaaaaug

SEQ ID NO: 1856278 - RNA, 19 nt, Homo sapiens
  misc_RNA (1)...(19): siRNA sense strand
ucaaauuugggauauagga

SEQ ID NO: 1856279 - RNA, 19 nt, Homo sapiens
  misc_RNA (1)...(19): siRNA sense strand
ggcaaaauguuggauaaau

SEQ ID NO: 1856280 - RNA, 19 nt, Homo sapiens
  misc_RNA (1)...(19): siRNA sense strand
ggauauaggagggcagaca

SEQ ID NO: 1856281 - RNA, 19 nt, Homo sapiens
  misc_RNA (1)...(19): siRNA sense strand
uccuugggaucaaauuaaa

SEQ ID NO: 1856282 - RNA, 19 nt, Homo sapiens
  misc_RNA (1)...(19): siRNA sense strand
gagcgaggagucagaaacu

SEQ ID NO: 1856283 - RNA, 19 nt, Homo sapiens
  misc_RNA (1)...(19): siRNA sense strand
uagaagauugguauacugu

SEQ ID NO: 1856284 - RNA, 19 nt, Homo sapiens
  misc_RNA (1)...(19): siRNA sense strand
ggaucaaauuaaacaaagc

SEQ ID NO: 1856285 - RNA, 19 nt, Homo sapiens
  misc_RNA (1)...(19): siRNA sense strand
ggagcauaugcgaacaaua

SEQ ID NO: 1856286 - RNA, 19 nt, Homo sapiens
  misc_RNA (1)...(19): siRNA sense strand
cagggaguccucuugguau

SEQ ID NO: 1856287 - RNA, 19 nt, Homo sapiens
  misc_RNA (1)...(19): siRNA sense strand
caaagcagaaauagaacag

SEQ ID NO: 1856288 - RNA, 19 nt, Homo sapiens
  misc_RNA (1)...(19): siRNA sense strand
aaacuauaggacuggauuu

SEQ ID NO: 1856289 - RNA, 19 nt, Homo sapiens
  misc_RNA (1)...(19): siRNA sense strand
gccaggaaacuugaauguu

SEQ ID NO: 1856290 - RNA, 19 nt, Homo sapiens
  misc_RNA (1)...(19): siRNA sense strand
gccaggaccggcaacugaa

SEQ ID NO: 1856291 - RNA, 19 nt, Homo sapiens
  misc_RNA (1)...(19): siRNA sense strand
agaaaguugcugcugaaau

SEQ ID NO: 1856292 - RNA, 19 nt, Homo sapiens
  misc_RNA (1)...(19): siRNA sense strand
ccaggaccggcaacugaaa

SEQ ID NO: 1856293 - RNA, 19 nt, Homo sapiens
  misc_RNA (1)...(19): siRNA sense strand
ccuucaaauuugggauaua

SEQ ID NO: 1856294 - RNA, 19 nt, Homo sapiens
  misc_RNA (1)...(19): siRNA sense strand
auguuacccuucaaauuug

SEQ ID NO: 1856295 - RNA, 19 nt, Homo sapiens
  misc_RNA (1)...(19): siRNA sense strand
gagcacagggaguccucuu

SEQ ID NO: 1856296 - RNA, 19 nt, Homo sapiens
  misc_RNA (1)...(19): siRNA sense strand
gggaguccucuugguauau

SEQ ID NO: 1856297 - RNA, 19 nt, Homo sapiens
  misc_RNA (1)...(19): siRNA sense strand
ggaagaagaaaaucaacau

SEQ ID NO: 1856298 - RNA, 19 nt, Homo sapiens
  misc_RNA (1)...(19): siRNA sense strand
ugggaaacaguacaaacaa

SEQ ID NO: 1856299 - RNA, 19 nt, Homo sapiens
  misc_RNA (1)...(19): siRNA sense strand
gaacgugacccuccagugu

SEQ ID NO: 1856300 - RNA, 19 nt, Homo sapiens
  misc_RNA (1)...(19): siRNA sense strand
gacaggagccuacagcaaa

SEQ ID NO: 1856301 - RNA, 19 nt, Homo sapiens
  misc_RNA (1)...(19): siRNA sense strand
ucacaggacaguucuauga

SEQ ID NO: 1856302 - RNA, 19 nt, Homo sapiens
  misc_RNA (1)...(19): siRNA sense strand
cagagaagccuacaagaug

SEQ ID NO: 1856303 - RNA, 19 nt, Homo sapiens
  misc_RNA (1)...(19): siRNA sense strand
ucucacagguggcauuuga

SEQ ID NO: 1856304 - RNA, 19 nt, Homo sapiens
  misc_RNA (1)...(19): siRNA sense strand
gcaccaagcucagcagaac

SEQ ID NO: 1856305 - RNA, 19 nt, Homo sapiens
  misc_RNA (1)...(19): siRNA sense strand
gaggaguaccaucuauaua

SEQ ID NO: 1856306 - RNA, 19 nt, Homo sapiens
  misc_RNA (1)...(19): siRNA sense strand
gauuuguucuguauaagga

SEQ ID NO: 1856307 - RNA, 19 nt, Homo sapiens
  misc_RNA (1)...(19): siRNA sense strand
ggaguaccaucuauauagg

SEQ ID NO: 1856308 - RNA, 19 nt, Homo sapiens
  misc_RNA (1)...(19): siRNA sense strand
guacaggugcuaugcuuau

SEQ ID NO: 1856309 - RNA, 19 nt, Homo sapiens
  misc_RNA (1)...(19): siRNA sense strand
gaacgugacccugcugugu

SEQ ID NO: 1856310 - RNA, 19 nt, Homo sapiens
  misc_RNA (1)...(19): siRNA sense strand
ggagggagaacgugacuuc

SEQ ID NO: 1856311 - RNA, 19 nt, Homo sapiens
  misc_RNA (1)...(19): siRNA sense strand
gcagaaccaggcugaauuc

SEQ ID NO: 1856312 - RNA, 19 nt, Homo sapiens
  misc_RNA (1)...(19): siRNA sense strand
gcugaggaguaccaucuau

SEQ ID NO: 1856313 - RNA, 19 nt, Homo sapiens
  misc_RNA (1)...(19): siRNA sense strand
uaaggaaggagaagaugaa

SEQ ID NO: 1856314 - RNA, 19 nt, Homo sapiens
  misc_RNA (1)...(19): siRNA sense strand
aaaucagcauccuggguua

SEQ ID NO: 1856315 - RNA, 19 nt, Homo sapiens
  misc_RNA (1)...(19): siRNA sense strand
guaaggaaggagaagauga

SEQ ID NO: 1856316 - RNA, 19 nt, Homo sapiens
  misc_RNA (1)...(19): siRNA sense strand
ccagagaagccuacaagau

SEQ ID NO: 1856317 - RNA, 19 nt, Homo sapiens
  misc_RNA (1)...(19): siRNA sense strand
uaagaagccaucacucuca

SEQ ID NO: 1856318 - RNA, 19 nt, Homo sapiens
  misc_RNA (1)...(19): siRNA sense strand
gaucacaggacaguucuau

SEQ ID NO: 1856319 - RNA, 19 nt, Homo sapiens
  misc_RNA (1)...(19): siRNA sense strand
uacaagagccugggaagaa

SEQ ID NO: 1856320 - RNA, 19 nt, Homo sapiens
  misc_RNA (1)...(19): siRNA sense strand
cagcaaacccacccucuca

SEQ ID NO: 1856321 - RNA, 19 nt, Homo sapiens
  misc_RNA (1)...(19): siRNA sense strand
gcucagcacagccagagaa

SEQ ID NO: 1856322 - RNA, 19 nt, Homo sapiens
  misc_RNA (1)...(19): siRNA sense strand
acacuuuccuucugaccaa

SEQ ID NO: 1856323 - RNA, 19 nt, Homo sapiens
  misc_RNA (1)...(19): siRNA sense strand
ggaaggagaagaugaacac

SEQ ID NO: 1856324 - RNA, 19 nt, Homo sapiens
  misc_RNA (1)...(19): siRNA sense strand
gcauuugacggcuucauuc

SEQ ID NO: 1856325 - RNA, 19 nt, Homo sapiens
  misc_RNA (1)...(19): siRNA sense strand
uaccaucuauauagggaaa

SEQ ID NO: 1856326 - RNA, 19 nt, Homo sapiens
  misc_RNA (1)...(19): siRNA sense strand
ugaggaguaccaucuauau

SEQ ID NO: 1856327 - RNA, 19 nt, Homo sapiens
  misc_RNA (1)...(19): siRNA sense strand
acaagagccugggaagaau

SEQ ID NO: 1856328 - RNA, 19 nt, Homo sapiens
  misc_RNA (1)...(19): siRNA sense strand
cagccacaaucacucauca

SEQ ID NO: 1856329 - RNA, 19 nt, Homo sapiens
  misc_RNA (1)...(19): siRNA sense strand
gacucgaacucucccuaug

SEQ ID NO: 1856330 - RNA, 19 nt, Homo sapiens
  misc_RNA (1)...(19): siRNA sense strand
ccucgggauucugcuauuu

SEQ ID NO: 1856331 - RNA, 19 nt, Homo sapiens
  misc_RNA (1)...(19): siRNA sense strand
gaagaugaacacccacaac

SEQ ID NO: 1856332 - RNA, 19 nt, Homo sapiens
  misc_RNA (1)...(19): siRNA sense strand
ucacgguccugaucugucu

SEQ ID NO: 1856333 - RNA, 19 nt, Homo sapiens
  misc_RNA (1)...(19): siRNA sense strand
ggucccagguguuucuaag

SEQ ID NO: 1856334 - RNA, 19 nt, Homo sapiens
  misc_RNA (1)...(19): siRNA sense strand
ucgggauucugcuauuuga

SEQ ID NO: 1856335 - RNA, 19 nt, Homo sapiens
  misc_RNA (1)...(19): siRNA sense strand
gagccugacccuccagugu

SEQ ID NO: 1856336 - RNA, 19 nt, Homo sapiens
  misc_RNA (1)...(19): siRNA sense strand
uuugacggcuucauucugu

SEQ ID NO: 1856337 - RNA, 19 nt, Homo sapiens
  misc_RNA (1)...(19): siRNA sense strand
acaggacaguucuaugaca

SEQ ID NO: 1856338 - RNA, 19 nt, Homo sapiens
  misc_RNA (1)...(19): siRNA sense strand
ugacaggagccuacagcaa

SEQ ID NO: 1856339 - RNA, 19 nt, Homo sapiens
  misc_RNA (1)...(19): siRNA sense strand
guuccacacuuuccuucug

SEQ ID NO: 1856340 - RNA, 19 nt, Homo sapiens
  misc_RNA (1)...(19): siRNA sense strand
uguggucucuacccaguga

SEQ ID NO: 1856341 - RNA, 19 nt, Homo sapiens
  misc_RNA (1)...(19): siRNA sense strand
ugggaagaauggccaguuc

SEQ ID NO: 1856342 - RNA, 19 nt, Homo sapiens
  misc_RNA (1)...(19): siRNA sense strand
ggaacacgcagggcgguau

SEQ ID NO: 1856343 - RNA, 19 nt, Homo sapiens
  misc_RNA (1)...(19): siRNA sense strand
gccaggcucugugaucauc

SEQ ID NO: 1856344 - RNA, 19 nt, Homo sapiens
  misc_RNA (1)...(19): siRNA sense strand
cagcaucccuaggccaaca

SEQ ID NO: 1856345 - RNA, 19 nt, Homo sapiens
  misc_RNA (1)...(19): siRNA sense strand
gcaguuccacacuuuccuu

SEQ ID NO: 1856346 - RNA, 19 nt, Homo sapiens
  misc_RNA (1)...(19): siRNA sense strand
aggaguaccaucuauauag

SEQ ID NO: 1856347 - RNA, 19 nt, Homo sapiens
  misc_RNA (1)...(19): siRNA sense strand
ggcauuugacggcuucauu

SEQ ID NO: 1856348 - RNA, 19 nt, Homo sapiens
  misc_RNA (1)...(19): siRNA sense strand
gccacaaucacucaucaga

SEQ ID NO: 1856349 - RNA, 19 nt, Homo sapiens
  misc_RNA (1)...(19): siRNA sense strand
gaacacgcagggcgguauc

SEQ ID NO: 1856350 - RNA, 19 nt, Homo sapiens
  misc_RNA (1)...(19): siRNA sense strand
caagagccugggaagaaug

SEQ ID NO: 1856351 - RNA, 19 nt, Homo sapiens
  misc_RNA (1)...(19): siRNA sense strand
gccugacccuccagugugu

SEQ ID NO: 1856352 - RNA, 19 nt, Homo sapiens
  misc_RNA (1)...(19): siRNA sense strand
cuacagccacaaucacuca

SEQ ID NO: 1856353 - RNA, 19 nt, Homo sapiens
  misc_RNA (1)...(19): siRNA sense strand
ucguacaggugcuaugcuu

SEQ ID NO: 1856354 - RNA, 19 nt, Homo sapiens
  misc_RNA (1)...(19): siRNA sense strand
cugaggaguaccaucuaua

SEQ ID NO: 1856355 - RNA, 19 nt, Homo sapiens
  misc_RNA (1)...(19): siRNA sense strand
ucuaagaagccaucacucu

SEQ ID NO: 1856356 - RNA, 19 nt, Homo sapiens
  misc_RNA (1)...(19): siRNA sense strand
ggauuacacaguggagaau

SEQ ID NO: 1856357 - RNA, 19 nt, Homo sapiens
  misc_RNA (1)...(19): siRNA sense strand
gagaucagagcaccaagcu

SEQ ID NO: 1856358 - RNA, 19 nt, Homo sapiens
  misc_RNA (1)...(19): siRNA sense strand
gcuaugcuuaugacucgaa

SEQ ID NO: 1856359 - RNA, 19 nt, Homo sapiens
  misc_RNA (1)...(19): siRNA sense strand
uuccacacuuuccuucuga

SEQ ID NO: 1856360 - RNA, 19 nt, Homo sapiens
  misc_RNA (1)...(19): siRNA sense strand
ggguuagacggauacaaga

SEQ ID NO: 1856361 - RNA, 19 nt, Homo sapiens
  misc_RNA (1)...(19): siRNA sense strand
gcagaaccaugaaccagua

SEQ ID NO: 1856362 - RNA, 19 nt, Homo sapiens
  misc_RNA (1)...(19): siRNA sense strand
caacaacggucucuaccuu

SEQ ID NO: 1856363 - RNA, 19 nt, Homo sapiens
  misc_RNA (1)...(19): siRNA sense strand
ucagauggccuuuggaaua

SEQ ID NO: 1856364 - RNA, 19 nt, Homo sapiens
  misc_RNA (1)...(19): siRNA sense strand
gcucaccauuguacucuua

SEQ ID NO: 1856365 - RNA, 19 nt, Homo sapiens
  misc_RNA (1)...(19): siRNA sense strand
cagauggccuuuggaauaa

SEQ ID NO: 1856366 - RNA, 19 nt, Homo sapiens
  misc_RNA (1)...(19): siRNA sense strand
ggacacacgcuauaagcua

SEQ ID NO: 1856367 - RNA, 19 nt, Homo sapiens
  misc_RNA (1)...(19): siRNA sense strand
ggaugucucuuugaccaua

SEQ ID NO: 1856368 - RNA, 19 nt, Homo sapiens
  misc_RNA (1)...(19): siRNA sense strand
caaucaaacucaacuguuc

SEQ ID NO: 1856369 - RNA, 19 nt, Homo sapiens
  misc_RNA (1)...(19): siRNA sense strand
gaaaaucaccguaucauug

SEQ ID NO: 1856370 - RNA, 19 nt, Homo sapiens
  misc_RNA (1)...(19): siRNA sense strand
aaacucaacuguuccuaga

SEQ ID NO: 1856371 - RNA, 19 nt, Homo sapiens
  misc_RNA (1)...(19): siRNA sense strand
ggaauaacaaucaaacuca

SEQ ID NO: 1856372 - RNA, 19 nt, Homo sapiens
  misc_RNA (1)...(19): siRNA sense strand
ggaaugacaccgugacaga

SEQ ID NO: 1856373 - RNA, 19 nt, Homo sapiens
  misc_RNA (1)...(19): siRNA sense strand
uuuagcagccuucaaauua

SEQ ID NO: 1856374 - RNA, 19 nt, Homo sapiens
  misc_RNA (1)...(19): siRNA sense strand
aaaggagguucaacaacua

SEQ ID NO: 1856375 - RNA, 19 nt, Homo sapiens
  misc_RNA (1)...(19): siRNA sense strand
ggaaggacacacgcuauaa

SEQ ID NO: 1856376 - RNA, 19 nt, Homo sapiens
  misc_RNA (1)...(19): siRNA sense strand
ggucacgacuacuccaauu

SEQ ID NO: 1856377 - RNA, 19 nt, Homo sapiens
  misc_RNA (1)...(19): siRNA sense strand
gaagggaugucucuuugac

SEQ ID NO: 1856378 - RNA, 19 nt, Homo sapiens
  misc_RNA (1)...(19): siRNA sense strand
caguggagcugucacauca

SEQ ID NO: 1856379 - RNA, 19 nt, Homo sapiens
  misc_RNA (1)...(19): siRNA sense strand
uuagcagccuucaaauuaa

SEQ ID NO: 1856380 - RNA, 19 nt, Homo sapiens
  misc_RNA (1)...(19): siRNA sense strand
uagcagccuucaaauuaaa

SEQ ID NO: 1856381 - RNA, 19 nt, Homo sapiens
  misc_RNA (1)...(19): siRNA sense strand
gaacccacgucaccuaucg

SEQ ID NO: 1856382 - RNA, 19 nt, Homo sapiens
  misc_RNA (1)...(19): siRNA sense strand
gcagaaacccacccuacga

SEQ ID NO: 1856383 - RNA, 19 nt, Homo sapiens
  misc_RNA (1)...(19): siRNA sense strand
gacacacgcuauaagcuau

SEQ ID NO: 1856384 - RNA, 19 nt, Homo sapiens
  misc_RNA (1)...(19): siRNA sense strand
ucaaugugcuggaauagag

SEQ ID NO: 1856385 - RNA, 19 nt, Homo sapiens
  misc_RNA (1)...(19): siRNA sense strand
cgacgacaaugacuguuuc

SEQ ID NO: 1856386 - RNA, 19 nt, Homo sapiens
  misc_RNA (1)...(19): siRNA sense strand
guauauuguugccguguug

SEQ ID NO: 1856387 - RNA, 19 nt, Homo sapiens
  misc_RNA (1)...(19): siRNA sense strand
gccaauaccacuaaaggaa

SEQ ID NO: 1856388 - RNA, 19 nt, Homo sapiens
  misc_RNA (1)...(19): siRNA sense strand
caacgagcauuccaacaac

SEQ ID NO: 1856389 - RNA, 19 nt, Homo sapiens
  misc_RNA (1)...(19): siRNA sense strand
gacaguggcguauauuguu

SEQ ID NO: 1856390 - RNA, 19 nt, Homo sapiens
  misc_RNA (1)...(19): siRNA sense strand
ucauuuagcagccuucaaa

SEQ ID NO: 1856391 - RNA, 19 nt, Homo sapiens
  misc_RNA (1)...(19): siRNA sense strand
acaacggucucuaccuuug

SEQ ID NO: 1856392 - RNA, 19 nt, Homo sapiens
  misc_RNA (1)...(19): siRNA sense strand
caauaccacuaaaggaauc

SEQ ID NO: 1856393 - RNA, 19 nt, Homo sapiens
  misc_RNA (1)...(19): siRNA sense strand
caucuuaagccucauccua

SEQ ID NO: 1856394 - RNA, 19 nt, Homo sapiens
  misc_RNA (1)...(19): siRNA sense strand
gaaggacacacgcuauaag

SEQ ID NO: 1856395 - RNA, 19 nt, Homo sapiens
  misc_RNA (1)...(19): siRNA sense strand
gcuggagucuguauuucug

SEQ ID NO: 1856396 - RNA, 19 nt, Homo sapiens
  misc_RNA (1)...(19): siRNA sense strand
aaucuaugcuggagucugu

SEQ ID NO: 1856397 - RNA, 19 nt, Homo sapiens
  misc_RNA (1)...(19): siRNA sense strand
gccuucaaauuaaagcuuu

SEQ ID NO: 1856398 - RNA, 19 nt, Homo sapiens
  misc_RNA (1)...(19): siRNA sense strand
guggagcugucacaucaau

SEQ ID NO: 1856399 - RNA, 19 nt, Homo sapiens
  misc_RNA (1)...(19): siRNA sense strand
aaaggaaguccaagcagaa

SEQ ID NO: 1856400 - RNA, 19 nt, Homo sapiens
  misc_RNA (1)...(19): siRNA sense strand
acaacgagcauuccaacaa

SEQ ID NO: 1856401 - RNA, 19 nt, Homo sapiens
  misc_RNA (1)...(19): siRNA sense strand
cggaaggacacacgcuaua

SEQ ID NO: 1856402 - RNA, 19 nt, Homo sapiens
  misc_RNA (1)...(19): siRNA sense strand
acacuacccugccacuaca

SEQ ID NO: 1856403 - RNA, 19 nt, Homo sapiens
  misc_RNA (1)...(19): siRNA sense strand
acaguggcguauauuguug

SEQ ID NO: 1856404 - RNA, 19 nt, Homo sapiens
  misc_RNA (1)...(19): siRNA sense strand
gcagaagacaauaucuaca

SEQ ID NO: 1856405 - RNA, 19 nt, Homo sapiens
  misc_RNA (1)...(19): siRNA sense strand
aagcagaagacaauaucua

SEQ ID NO: 1856406 - RNA, 19 nt, Homo sapiens
  misc_RNA (1)...(19): siRNA sense strand
ugacggccaauaccacuaa

SEQ ID NO: 1856407 - RNA, 19 nt, Homo sapiens
  misc_RNA (1)...(19): siRNA sense strand
gauggccuuuggaauaaca

SEQ ID NO: 1856408 - RNA, 19 nt, Homo sapiens
  misc_RNA (1)...(19): siRNA sense strand
ugacaguggcguauauugu

SEQ ID NO: 1856409 - RNA, 19 nt, Homo sapiens
  misc_RNA (1)...(19): siRNA sense strand
cagaagacaauaucuacau

SEQ ID NO: 1856410 - RNA, 19 nt, Homo sapiens
  misc_RNA (1)...(19): siRNA sense strand
ccaauaccacuaaaggaau

SEQ ID NO: 1856411 - RNA, 19 nt, Homo sapiens
  misc_RNA (1)...(19): siRNA sense strand
gugacagagucuucagaug

SEQ ID NO: 1856412 - RNA, 19 nt, Homo sapiens
  misc_RNA (1)...(19): siRNA sense strand
ccaagcagaagacaauauc

SEQ ID NO: 1856413 - RNA, 19 nt, Homo sapiens
  misc_RNA (1)...(19): siRNA sense strand
gcaaaaugcaguugaaaag

SEQ ID NO: 1856414 - RNA, 19 nt, Homo sapiens
  misc_RNA (1)...(19): siRNA sense strand
aaaaugcaguugaaaagga

SEQ ID NO: 1856415 - RNA, 19 nt, Homo sapiens
  misc_RNA (1)...(19): siRNA sense strand
cacccaaggucacgacuac

SEQ ID NO: 1856416 - RNA, 19 nt, Homo sapiens
  misc_RNA (1)...(19): siRNA sense strand
uucuguagcugguucugua

SEQ ID NO: 1856417 - RNA, 19 nt, Homo sapiens
  misc_RNA (1)...(19): siRNA sense strand
ccucaaguggucaucuuaa

SEQ ID NO: 1856418 - RNA, 19 nt, Homo sapiens
  misc_RNA (1)...(19): siRNA sense strand
gaacccaccagcucaccau

SEQ ID NO: 1856419 - RNA, 19 nt, Homo sapiens
  misc_RNA (1)...(19): siRNA sense strand
cgacuguuccgacgacaau

SEQ ID NO: 1856420 - RNA, 19 nt, Homo sapiens
  misc_RNA (1)...(19): siRNA sense strand
ucacgacuacuccaauugu

SEQ ID NO: 1856421 - RNA, 19 nt, Homo sapiens
  misc_RNA (1)...(19): siRNA sense strand
cgacaaugacuguuucaac

SEQ ID NO: 1856422 - RNA, 19 nt, Homo sapiens
  misc_RNA (1)...(19): siRNA sense strand
uaugcuggagucuguauuu

SEQ ID NO: 1856423 - RNA, 19 nt, Homo sapiens
  misc_RNA (1)...(19): siRNA sense strand
cccaccagcucaccauugu

SEQ ID NO: 1856424 - RNA, 19 nt, Homo sapiens
  misc_RNA (1)...(19): siRNA sense strand
gacacugcagggagcaaua

SEQ ID NO: 1856425 - RNA, 19 nt, Homo sapiens
  misc_RNA (1)...(19): siRNA sense strand
ugacaacaacggucucuac

SEQ ID NO: 1856426 - RNA, 19 nt, Homo sapiens
  misc_RNA (1)...(19): siRNA sense strand
aaaaggagguucaacaacu

SEQ ID NO: 1856427 - RNA, 19 nt, Homo sapiens
  misc_RNA (1)...(19): siRNA sense strand
gagguucaacaacuaagug

SEQ ID NO: 1856428 - RNA, 19 nt, Homo sapiens
  misc_RNA (1)...(19): siRNA sense strand
acacaacagaugggaauga

SEQ ID NO: 1856429 - RNA, 19 nt, Homo sapiens
  misc_RNA (1)...(19): siRNA sense strand
acaaucaaacucaacuguu

SEQ ID NO: 1856430 - RNA, 19 nt, Homo sapiens
  misc_RNA (1)...(19): siRNA sense strand
ccaacgacaacgacuguuc

SEQ ID NO: 1856431 - RNA, 19 nt, Homo sapiens
  misc_RNA (1)...(19): siRNA sense strand
gagaggcagguccaucugu

SEQ ID NO: 1856432 - RNA, 19 nt, Homo sapiens
  misc_RNA (1)...(19): siRNA sense strand
gagucuguauuucugucuu

SEQ ID NO: 1856433 - RNA, 19 nt, Homo sapiens
  misc_RNA (1)...(19): siRNA sense strand
uuacacaacagaugggaau

SEQ ID NO: 1856434 - RNA, 19 nt, Homo sapiens
  misc_RNA (1)...(19): siRNA sense strand
guagccacuucaccaucuu

SEQ ID NO: 1856435 - RNA, 19 nt, Homo sapiens
  misc_RNA (1)...(19): siRNA sense strand
gagcauuccaacaacaaca

SEQ ID NO: 1856436 - RNA, 19 nt, Homo sapiens
  misc_RNA (1)...(19): siRNA sense strand
ccaacgacaacgagcauuc

SEQ ID NO: 1856437 - RNA, 19 nt, Homo sapiens
  misc_RNA (1)...(19): siRNA sense strand
ccaacgacaacgacuguuc

SEQ ID NO: 1856438 - RNA, 19 nt, Homo sapiens
  misc_RNA (1)...(19): siRNA sense strand
caccguaucauuggagauu

SEQ ID NO: 1856439 - RNA, 19 nt, Homo sapiens
  misc_RNA (1)...(19): siRNA sense strand
gucugacaguggcguauau

SEQ ID NO: 1856440 - RNA, 19 nt, Homo sapiens
  misc_RNA (1)...(19): siRNA sense strand
ggaaguccaagcagaagac

SEQ ID NO: 1856441 - RNA, 19 nt, Homo sapiens
  misc_RNA (1)...(19): siRNA sense strand
gacggccaauaccacuaaa

SEQ ID NO: 1856442 - RNA, 19 nt, Homo sapiens
  misc_RNA (1)...(19): siRNA sense strand
ccgacgacaaugacuguuu

SEQ ID NO: 1856443 - RNA, 19 nt, Homo sapiens
  misc_RNA (1)...(19): siRNA sense strand
cguauauuguugccguguu

SEQ ID NO: 1856444 - RNA, 19 nt, Homo sapiens
  misc_RNA (1)...(19): siRNA sense strand
ggagguucaacaacuaagu

SEQ ID NO: 1856445 - RNA, 19 nt, Homo sapiens
  misc_RNA (1)...(19): siRNA sense strand
ccacuaaaggaaucuaugc

SEQ ID NO: 1856446 - RNA, 19 nt, Homo sapiens
  misc_RNA (1)...(19): siRNA sense strand
ggccaauaccacuaaagga

SEQ ID NO: 1856447 - RNA, 19 nt, Homo sapiens
  misc_RNA (1)...(19): siRNA sense strand
acacugcagggagcaauaa

SEQ ID NO: 1856448 - RNA, 19 nt, Homo sapiens
  misc_RNA (1)...(19): siRNA sense strand
gaugucucuuugaccauag

SEQ ID NO: 1856449 - RNA, 19 nt, Homo sapiens
  misc_RNA (1)...(19): siRNA sense strand
ggagaggcagguccaucug

SEQ ID NO: 1856450 - RNA, 19 nt, Homo sapiens
  misc_RNA (1)...(19): siRNA sense strand
caacggucucuaccuuugu

SEQ ID NO: 1856451 - RNA, 19 nt, Homo sapiens
  misc_RNA (1)...(19): siRNA sense strand
ucuuaagccucauccuaca

SEQ ID NO: 1856452 - RNA, 19 nt, Homo sapiens
  misc_RNA (1)...(19): siRNA sense strand
uaccuuuguuccuccaaug

SEQ ID NO: 1856453 - RNA, 19 nt, Homo sapiens
  misc_RNA (1)...(19): siRNA sense strand
gaauuuggcuggaaacuug

SEQ ID NO: 1856454 - RNA, 19 nt, Homo sapiens
  misc_RNA (1)...(19): siRNA sense strand
ccuauuggcuguuacauua

SEQ ID NO: 1856455 - RNA, 19 nt, Homo sapiens
  misc_RNA (1)...(19): siRNA sense strand
gcacaaagauauugcuaga

SEQ ID NO: 1856456 - RNA, 19 nt, Homo sapiens
  misc_RNA (1)...(19): siRNA sense strand
aaagaugccuguguuauua

SEQ ID NO: 1856457 - RNA, 19 nt, Homo sapiens
  misc_RNA (1)...(19): siRNA sense strand
agagaaagcugaagacaaa

SEQ ID NO: 1856458 - RNA, 19 nt, Homo sapiens
  misc_RNA (1)...(19): siRNA sense strand
ggaaagcgcccaucugaaa

SEQ ID NO: 1856459 - RNA, 19 nt, Homo sapiens
  misc_RNA (1)...(19): siRNA sense strand
ggucauuguucucuucuua

SEQ ID NO: 1856460 - RNA, 19 nt, Homo sapiens
  misc_RNA (1)...(19): siRNA sense strand
ggucacaccagauguauua

SEQ ID NO: 1856461 - RNA, 19 nt, Homo sapiens
  misc_RNA (1)...(19): siRNA sense strand
ggaagaauuuggcuggaaa

SEQ ID NO: 1856462 - RNA, 19 nt, Homo sapiens
  misc_RNA (1)...(19): siRNA sense strand
caacuauacuucuuugcua

SEQ ID NO: 1856463 - RNA, 19 nt, Homo sapiens
  misc_RNA (1)...(19): siRNA sense strand
ggaaugguagcuaugauua

SEQ ID NO: 1856464 - RNA, 19 nt, Homo sapiens
  misc_RNA (1)...(19): siRNA sense strand
ggacacugguugccauauu

SEQ ID NO: 1856465 - RNA, 19 nt, Homo sapiens
  misc_RNA (1)...(19): siRNA sense strand
gcacaauucuguacuuugg

SEQ ID NO: 1856466 - RNA, 19 nt, Homo sapiens
  misc_RNA (1)...(19): siRNA sense strand
ccgaaaagcuucaaacaua

SEQ ID NO: 1856467 - RNA, 19 nt, Homo sapiens
  misc_RNA (1)...(19): siRNA sense strand
cuucuuaucuggaauggua

SEQ ID NO: 1856468 - RNA, 19 nt, Homo sapiens
  misc_RNA (1)...(19): siRNA sense strand
gcugacuucuuuauaauga

SEQ ID NO: 1856469 - RNA, 19 nt, Homo sapiens
  misc_RNA (1)...(19): siRNA sense strand
aaucaguucuuccuuauga

SEQ ID NO: 1856470 - RNA, 19 nt, Homo sapiens
  misc_RNA (1)...(19): siRNA sense strand
cgaggaagaugauaagauc

SEQ ID NO: 1856471 - RNA, 19 nt, Homo sapiens
  misc_RNA (1)...(19): siRNA sense strand
aaacauaccauacagagaa

SEQ ID NO: 1856472 - RNA, 19 nt, Homo sapiens
  misc_RNA (1)...(19): siRNA sense strand
uguauuugcugacuucuuu

SEQ ID NO: 1856473 - RNA, 19 nt, Homo sapiens
  misc_RNA (1)...(19): siRNA sense strand
cuucaaacauacccauaua

SEQ ID NO: 1856474 - RNA, 19 nt, Homo sapiens
  misc_RNA (1)...(19): siRNA sense strand
ugaauucccuggucauugu

SEQ ID NO: 1856475 - RNA, 19 nt, Homo sapiens
  misc_RNA (1)...(19): siRNA sense strand
guuauuaccuguucugaag

SEQ ID NO: 1856476 - RNA, 19 nt, Homo sapiens
  misc_RNA (1)...(19): siRNA sense strand
gugcaaggccgaaauagaa

SEQ ID NO: 1856477 - RNA, 19 nt, Homo sapiens
  misc_RNA (1)...(19): siRNA sense strand
gaaggagaccuguaagcuu

SEQ ID NO: 1856478 - RNA, 19 nt, Homo sapiens
  misc_RNA (1)...(19): siRNA sense strand
ggacacugcacaaagauau

SEQ ID NO: 1856479 - RNA, 19 nt, Homo sapiens
  misc_RNA (1)...(19): siRNA sense strand
gaauacacagcguuugauu

SEQ ID NO: 1856480 - RNA, 19 nt, Homo sapiens
  misc_RNA (1)...(19): siRNA sense strand
gacacugguugccauauug

SEQ ID NO: 1856481 - RNA, 19 nt, Homo sapiens
  misc_RNA (1)...(19): siRNA sense strand
gccuauacuuacucuguua

SEQ ID NO: 1856482 - RNA, 19 nt, Homo sapiens
  misc_RNA (1)...(19): siRNA sense strand
ccuguaagcuuguuuguac

SEQ ID NO: 1856483 - RNA, 19 nt, Homo sapiens
  misc_RNA (1)...(19): siRNA sense strand
auucagugguuuagcauua

SEQ ID NO: 1856484 - RNA, 19 nt, Homo sapiens
  misc_RNA (1)...(19): siRNA sense strand
acaauuggcuucuuugcau

SEQ ID NO: 1856485 - RNA, 19 nt, Homo sapiens
  misc_RNA (1)...(19): siRNA sense strand
gaaaagggaugcugcuauc

SEQ ID NO: 1856486 - RNA, 19 nt, Homo sapiens
  misc_RNA (1)...(19): siRNA sense strand
guuuauuggugcauacuuu

SEQ ID NO: 1856487 - RNA, 19 nt, Homo sapiens
  misc_RNA (1)...(19): siRNA sense strand
caagcacaauucuguacuu

SEQ ID NO: 1856488 - RNA, 19 nt, Homo sapiens
  misc_RNA (1)...(19): siRNA sense strand
gugcagaggauuaucauug

SEQ ID NO: 1856489 - RNA, 19 nt, Homo sapiens
  misc_RNA (1)...(19): siRNA sense strand
gguuuagcauuaugaauuc

SEQ ID NO: 1856490 - RNA, 19 nt, Homo sapiens
  misc_RNA (1)...(19): siRNA sense strand
gaacagcaagcacaauucu

SEQ ID NO: 1856491 - RNA, 19 nt, Homo sapiens
  misc_RNA (1)...(19): siRNA sense strand
caacuuuucuucauucuga

SEQ ID NO: 1856492 - RNA, 19 nt, Homo sapiens
  misc_RNA (1)...(19): siRNA sense strand
gauuguauuugcugacuuc

SEQ ID NO: 1856493 - RNA, 19 nt, Homo sapiens
  misc_RNA (1)...(19): siRNA sense strand
ggaagaugcccaggaagaa

SEQ ID NO: 1856494 - RNA, 19 nt, Homo sapiens
  misc_RNA (1)...(19): siRNA sense strand
gauuuccuauuggcuguua

SEQ ID NO: 1856495 - RNA, 19 nt, Homo sapiens
  misc_RNA (1)...(19): siRNA sense strand
gggaacagcaagcacaauu

SEQ ID NO: 1856496 - RNA, 19 nt, Homo sapiens
  misc_RNA (1)...(19): siRNA sense strand
acgaagcccuugccuggua

SEQ ID NO: 1856497 - RNA, 19 nt, Homo sapiens
  misc_RNA (1)...(19): siRNA sense strand
ucaaacauacccauauaga

SEQ ID NO: 1856498 - RNA, 19 nt, Homo sapiens
  misc_RNA (1)...(19): siRNA sense strand
uuacauguuuggcuuccua

SEQ ID NO: 1856499 - RNA, 19 nt, Homo sapiens
  misc_RNA (1)...(19): siRNA sense strand
cccuuuggcugcaucuuua

SEQ ID NO: 1856500 - RNA, 19 nt, Homo sapiens
  misc_RNA (1)...(19): siRNA sense strand
gaaacuuguucauggugau

SEQ ID NO: 1856501 - RNA, 19 nt, Homo sapiens
  misc_RNA (1)...(19): siRNA sense strand
guccaugggagcaagauua

SEQ ID NO: 1856502 - RNA, 19 nt, Homo sapiens
  misc_RNA (1)...(19): siRNA sense strand
gaaagcugaagacaaacaa

SEQ ID NO: 1856503 - RNA, 19 nt, Homo sapiens
  misc_RNA (1)...(19): siRNA sense strand
auaagaaggagaccuguaa

SEQ ID NO: 1856504 - RNA, 19 nt, Homo sapiens
  misc_RNA (1)...(19): siRNA sense strand
aggaacaauuggcuucuuu

SEQ ID NO: 1856505 - RNA, 19 nt, Homo sapiens
  misc_RNA (1)...(19): siRNA sense strand
ccaccuaugugcagaggau

SEQ ID NO: 1856506 - RNA, 19 nt, Homo sapiens
  misc_RNA (1)...(19): siRNA sense strand
gcccuugccugguauuauc

SEQ ID NO: 1856507 - RNA, 19 nt, Homo sapiens
  misc_RNA (1)...(19): siRNA sense strand
gcccuuugguucugcauau

SEQ ID NO: 1856508 - RNA, 19 nt, Homo sapiens
  misc_RNA (1)...(19): siRNA sense strand
gcugccagauucuauaagu

SEQ ID NO: 1856509 - RNA, 19 nt, Homo sapiens
  misc_RNA (1)...(19): siRNA sense strand
uauauuccguccuccaaga

SEQ ID NO: 1856510 - RNA, 19 nt, Homo sapiens
  misc_RNA (1)...(19): siRNA sense strand
gaagaugcccaggaagaau

SEQ ID NO: 1856511 - RNA, 19 nt, Homo sapiens
  misc_RNA (1)...(19): siRNA sense strand
ccaugaaagagauacauuu

SEQ ID NO: 1856512 - RNA, 19 nt, Homo sapiens
  misc_RNA (1)...(19): siRNA sense strand
acaauucuguacuuugguu

SEQ ID NO: 1856513 - RNA, 19 nt, Homo sapiens
  misc_RNA (1)...(19): siRNA sense strand
uaucuggaaugguagcuau

SEQ ID NO: 1856514 - RNA, 19 nt, Homo sapiens
  misc_RNA (1)...(19): siRNA sense strand
gaaggaaagcgcccaucug

SEQ ID NO: 1856515 - RNA, 19 nt, Homo sapiens
  misc_RNA (1)...(19): siRNA sense strand
cgagugcaaggccgaaaua

SEQ ID NO: 1856516 - RNA, 19 nt, Homo sapiens
  misc_RNA (1)...(19): siRNA sense strand
cauguuuggcuuccuauuu

SEQ ID NO: 1856517 - RNA, 19 nt, Homo sapiens
  misc_RNA (1)...(19): siRNA sense strand
aaggaaagcgcccaucuga

SEQ ID NO: 1856518 - RNA, 19 nt, Homo sapiens
  misc_RNA (1)...(19): siRNA sense strand
gaaugguagcuaugauuau

SEQ ID NO: 1856519 - RNA, 19 nt, Homo sapiens
  misc_RNA (1)...(19): siRNA sense strand
gaaccuucaccauauaagu

SEQ ID NO: 1856520 - RNA, 19 nt, Homo sapiens
  misc_RNA (1)...(19): siRNA sense strand
aagcacaauucuguacuuu

SEQ ID NO: 1856521 - RNA, 19 nt, Homo sapiens
  misc_RNA (1)...(19): siRNA sense strand
aagcaacuauacuucuuug

SEQ ID NO: 1856522 - RNA, 19 nt, Homo sapiens
  misc_RNA (1)...(19): siRNA sense strand
ugacguuuauuggugcaua

SEQ ID NO: 1856523 - RNA, 19 nt, Homo sapiens
  misc_RNA (1)...(19): siRNA sense strand
gcgucuagaugggacuaua

SEQ ID NO: 1856524 - RNA, 19 nt, Homo sapiens
  misc_RNA (1)...(19): siRNA sense strand
gcaaaagaugccuguguua

SEQ ID NO: 1856525 - RNA, 19 nt, Homo sapiens
  misc_RNA (1)...(19): siRNA sense strand
caaacauacccauauagau

SEQ ID NO: 1856526 - RNA, 19 nt, Homo sapiens
  misc_RNA (1)...(19): siRNA sense strand
ggaacagcaagcacaauuc

SEQ ID NO: 1856527 - RNA, 19 nt, Homo sapiens
  misc_RNA (1)...(19): siRNA sense strand
uacggacacugcacaaaga

SEQ ID NO: 1856528 - RNA, 19 nt, Homo sapiens
  misc_RNA (1)...(19): siRNA sense strand
aaugguagcuaugauuaug

SEQ ID NO: 1856529 - RNA, 19 nt, Homo sapiens
  misc_RNA (1)...(19): siRNA sense strand
guucucuucuuaucuggaa

SEQ ID NO: 1856530 - RNA, 19 nt, Homo sapiens
  misc_RNA (1)...(19): siRNA sense strand
ggaacaauuggcuucuuug

SEQ ID NO: 1856531 - RNA, 19 nt, Homo sapiens
  misc_RNA (1)...(19): siRNA sense strand
uggcuuuacugcaguuuau

SEQ ID NO: 1856532 - RNA, 19 nt, Homo sapiens
  misc_RNA (1)...(19): siRNA sense strand
cagauucuauaaguccuuu

SEQ ID NO: 1856533 - RNA, 19 nt, Homo sapiens
  misc_RNA (1)...(19): siRNA sense strand
gcuaucagucuuucuagga

SEQ ID NO: 1856534 - RNA, 19 nt, Homo sapiens
  misc_RNA (1)...(19): siRNA sense strand
gauauauuccguccuccaa

SEQ ID NO: 1856535 - RNA, 19 nt, Homo sapiens
  misc_RNA (1)...(19): siRNA sense strand
uacggaagaugcccaggaa

SEQ ID NO: 1856536 - RNA, 19 nt, Homo sapiens
  misc_RNA (1)...(19): siRNA sense strand
cagacuugauucaguggaa

SEQ ID NO: 1856537 - RNA, 19 nt, Homo sapiens
  misc_RNA (1)...(19): siRNA sense strand
auaaucagauggacucuac

SEQ ID NO: 1856538 - RNA, 19 nt, Homo sapiens
  misc_RNA (1)...(19): siRNA sense strand
ucagaugggcgucuagaug

SEQ ID NO: 1856539 - RNA, 19 nt, Homo sapiens
  misc_RNA (1)...(19): siRNA sense strand
ggugagaaguggaaaacaa

SEQ ID NO: 1856540 - RNA, 19 nt, Homo sapiens
  misc_RNA (1)...(19): siRNA sense strand
gauggacucuacggaagau

SEQ ID NO: 1856541 - RNA, 19 nt, Homo sapiens
  misc_RNA (1)...(19): siRNA sense strand
ggagaccuguaagcuuguu

SEQ ID NO: 1856542 - RNA, 19 nt, Homo sapiens
  misc_RNA (1)...(19): siRNA sense strand
acuauauucuggagucuau

SEQ ID NO: 1856543 - RNA, 19 nt, Homo sapiens
  misc_RNA (1)...(19): siRNA sense strand
guggauaauaugccuguaa

SEQ ID NO: 1856544 - RNA, 19 nt, Homo sapiens
  misc_RNA (1)...(19): siRNA sense strand
caccauauaaguuuacguu

SEQ ID NO: 1856545 - RNA, 19 nt, Homo sapiens
  misc_RNA (1)...(19): siRNA sense strand
cuauguugcugccagauuc

SEQ ID NO: 1856546 - RNA, 19 nt, Homo sapiens
  misc_RNA (1)...(19): siRNA sense strand
guguuacgauguugaagau

SEQ ID NO: 1856547 - RNA, 19 nt, Homo sapiens
  misc_RNA (1)...(19): siRNA sense strand
gauaauaugccuguaacgu

SEQ ID NO: 1856548 - RNA, 19 nt, Homo sapiens
  misc_RNA (1)...(19): siRNA sense strand
cagagaaagcugaagacaa

SEQ ID NO: 1856549 - RNA, 19 nt, Homo sapiens
  misc_RNA (1)...(19): siRNA sense strand
gaacaauuggcuucuuugc

SEQ ID NO: 1856550 - RNA, 19 nt, Homo sapiens
  misc_RNA (1)...(19): siRNA sense strand
gauaaugguuuugaucuuc

SEQ ID NO: 1856551 - RNA, 19 nt, Homo sapiens
  misc_RNA (1)...(19): siRNA sense strand
gcuuuacugcaguuuauuu

SEQ ID NO: 1856552 - RNA, 19 nt, Homo sapiens
  misc_RNA (1)...(19): siRNA sense strand
gcugcuaucagucuuucua

SEQ ID NO: 1856553 - RNA, 19 nt, Homo sapiens
  misc_RNA (1)...(19): siRNA sense strand
ggaaauguaucuguacuuu

SEQ ID NO: 1856554 - RNA, 19 nt, Homo sapiens
  misc_RNA (1)...(19): siRNA sense strand
gcaagucuguccuuucuga

SEQ ID NO: 1856555 - RNA, 19 nt, Homo sapiens
  misc_RNA (1)...(19): siRNA sense strand
ggaagaagaaccaggauga

SEQ ID NO: 1856556 - RNA, 19 nt, Homo sapiens
  misc_RNA (1)...(19): siRNA sense strand
gaagaaccaggaugacuuu

SEQ ID NO: 1856557 - RNA, 19 nt, Homo sapiens
  misc_RNA (1)...(19): siRNA sense strand
gaaccaggaugacuuugag

SEQ ID NO: 1856558 - RNA, 19 nt, Homo sapiens
  misc_RNA (1)...(19): siRNA sense strand
ggaaguugaugaagaggau

SEQ ID NO: 1856559 - RNA, 19 nt, Homo sapiens
  misc_RNA (1)...(19): siRNA sense strand
ccacuugcauuuggaagaa

SEQ ID NO: 1856560 - RNA, 19 nt, Homo sapiens
  misc_RNA (1)...(19): siRNA sense strand
guaugaaugugucaguguu

SEQ ID NO: 1856561 - RNA, 19 nt, Homo sapiens
  misc_RNA (1)...(19): siRNA sense strand
ugaagaggaugaguaugaa

SEQ ID NO: 1856562 - RNA, 19 nt, Homo sapiens
  misc_RNA (1)...(19): siRNA sense strand
gcaaccuccuggccacuug

SEQ ID NO: 1856563 - RNA, 19 nt, Homo sapiens
  misc_RNA (1)...(19): siRNA sense strand
gaaauguaucuguacuuug

SEQ ID NO: 1856564 - RNA, 19 nt, Homo sapiens
  misc_RNA (1)...(19): siRNA sense strand
gugcguaucuggcgucagu

SEQ ID NO: 1856565 - RNA, 19 nt, Homo sapiens
  misc_RNA (1)...(19): siRNA sense strand
ggccaugaauccacugugu

SEQ ID NO: 1856566 - RNA, 19 nt, Homo sapiens
  misc_RNA (1)...(19): siRNA sense strand
caaggaccauuuaugacau

SEQ ID NO: 1856567 - RNA, 19 nt, Homo sapiens
  misc_RNA (1)...(19): siRNA sense strand
cacaggaugucaagcaugu

SEQ ID NO: 1856568 - RNA, 19 nt, Homo sapiens
  misc_RNA (1)...(19): siRNA sense strand
acucaaggaccauuuauga

SEQ ID NO: 1856569 - RNA, 19 nt, Homo sapiens
  misc_RNA (1)...(19): siRNA sense strand
ucaaggaccauuuaugaca

SEQ ID NO: 1856570 - RNA, 19 nt, Homo sapiens
  misc_RNA (1)...(19): siRNA sense strand
ggaugacuuugagugugua

SEQ ID NO: 1856571 - RNA, 19 nt, Homo sapiens
  misc_RNA (1)...(19): siRNA sense strand
ucaacuguguggccuggaa

SEQ ID NO: 1856572 - RNA, 19 nt, Homo sapiens
  misc_RNA (1)...(19): siRNA sense strand
ucugggaaguugaugaaga

SEQ ID NO: 1856573 - RNA, 19 nt, Homo sapiens
  misc_RNA (1)...(19): siRNA sense strand
aaaaugaggucaagucagu

SEQ ID NO: 1856574 - RNA, 19 nt, Homo sapiens
  misc_RNA (1)...(19): siRNA sense strand
ugacagcccacuugcauca

SEQ ID NO: 1856575 - RNA, 19 nt, Homo sapiens
  misc_RNA (1)...(19): siRNA sense strand
gaagaggaugaguaugaau

SEQ ID NO: 1856576 - RNA, 19 nt, Homo sapiens
  misc_RNA (1)...(19): siRNA sense strand
ggucugggaaguugaugaa

SEQ ID NO: 1856577 - RNA, 19 nt, Homo sapiens
  misc_RNA (1)...(19): siRNA sense strand
guguggagcuuggccuuug

SEQ ID NO: 1856578 - RNA, 19 nt, Homo sapiens
  misc_RNA (1)...(19): siRNA sense strand
augaagaggaugaguauga

SEQ ID NO: 1856579 - RNA, 19 nt, Homo sapiens
  misc_RNA (1)...(19): siRNA sense strand
cugcaagucuguccuuucu

SEQ ID NO: 1856580 - RNA, 19 nt, Homo sapiens
  misc_RNA (1)...(19): siRNA sense strand
gcuuugaugcuaccacuug

SEQ ID NO: 1856581 - RNA, 19 nt, Homo sapiens
  misc_RNA (1)...(19): siRNA sense strand
gaggaugaguaugaaugug

SEQ ID NO: 1856582 - RNA, 19 nt, Homo sapiens
  misc_RNA (1)...(19): siRNA sense strand
agaagaaccaggaugacuu

SEQ ID NO: 1856583 - RNA, 19 nt, Homo sapiens
  misc_RNA (1)...(19): siRNA sense strand
cccaggaugucaacugugu

SEQ ID NO: 1856584 - RNA, 19 nt, Homo sapiens
  misc_RNA (1)...(19): siRNA sense strand
gcuaugaugacacagugaa

SEQ ID NO: 1856585 - RNA, 19 nt, Homo sapiens
  misc_RNA (1)...(19): siRNA sense strand
gaaugugucaguguucuca

SEQ ID NO: 1856586 - RNA, 19 nt, Homo sapiens
  misc_RNA (1)...(19): siRNA sense strand
ugaugaagaggaugaguau

SEQ ID NO: 1856587 - RNA, 19 nt, Homo sapiens
  misc_RNA (1)...(19): siRNA sense strand
uaucuggcgucaguaucua

SEQ ID NO: 1856588 - RNA, 19 nt, Homo sapiens
  misc_RNA (1)...(19): siRNA sense strand
gaagaggaugacuggguau

SEQ ID NO: 1856589 - RNA, 19 nt, Homo sapiens
  misc_RNA (1)...(19): siRNA sense strand
aguuggaaauguaucugua

SEQ ID NO: 1856590 - RNA, 19 nt, Homo sapiens
  misc_RNA (1)...(19): siRNA sense strand
gaggaugacuggguaugcu

SEQ ID NO: 1856591 - RNA, 19 nt, Homo sapiens
  misc_RNA (1)...(19): siRNA sense strand
aaggaccauuuaugacauu

SEQ ID NO: 1856592 - RNA, 19 nt, Homo sapiens
  misc_RNA (1)...(19): siRNA sense strand
gcuaccacuugcauuugga

SEQ ID NO: 1856593 - RNA, 19 nt, Homo sapiens
  misc_RNA (1)...(19): siRNA sense strand
guaucuaccaggcaaugaa

SEQ ID NO: 1856594 - RNA, 19 nt, Homo sapiens
  misc_RNA (1)...(19): siRNA sense strand
gaucugcaagucuguccuu

SEQ ID NO: 1856595 - RNA, 19 nt, Homo sapiens
  misc_RNA (1)...(19): siRNA sense strand
gaccauuuaugacauugcu

SEQ ID NO: 1856596 - RNA, 19 nt, Homo sapiens
  misc_RNA (1)...(19): siRNA sense strand
aggaugacuuugagugugu

SEQ ID NO: 1856597 - RNA, 19 nt, Homo sapiens
  misc_RNA (1)...(19): siRNA sense strand
ggaugucaagcaugugguu

SEQ ID NO: 1856598 - RNA, 19 nt, Homo sapiens
  misc_RNA (1)...(19): siRNA sense strand
ccacuugcagccgagauaa

SEQ ID NO: 1856599 - RNA, 19 nt, Homo sapiens
  misc_RNA (1)...(19): siRNA sense strand
guuugggucugggaaguug

SEQ ID NO: 1856600 - RNA, 19 nt, Homo sapiens
  misc_RNA (1)...(19): siRNA sense strand
gccacuugcagccgagaua

SEQ ID NO: 1856601 - RNA, 19 nt, Homo sapiens
  misc_RNA (1)...(19): siRNA sense strand
ccacucaaggaccauuuau

SEQ ID NO: 1856602 - RNA, 19 nt, Homo sapiens
  misc_RNA (1)...(19): siRNA sense strand
agaaccaggaugacuuuga

SEQ ID NO: 1856603 - RNA, 19 nt, Homo sapiens
  misc_RNA (1)...(19): siRNA sense strand
acacacaggaugucaagca

SEQ ID NO: 1856604 - RNA, 19 nt, Homo sapiens
  misc_RNA (1)...(19): siRNA sense strand
ccacacacaggaugucaag

SEQ ID NO: 1856605 - RNA, 19 nt, Homo sapiens
  misc_RNA (1)...(19): siRNA sense strand
ccaggaugacuuugagugu

SEQ ID NO: 1856606 - RNA, 19 nt, Homo sapiens
  misc_RNA (1)...(19): siRNA sense strand
gggagguggccuucuggaa

SEQ ID NO: 1856607 - RNA, 19 nt, Homo sapiens
  misc_RNA (1)...(19): siRNA sense strand
ucugccagcuuugaugcua

SEQ ID NO: 1856608 - RNA, 19 nt, Homo sapiens
  misc_RNA (1)...(19): siRNA sense strand
gaagcuguaccgggaggaa

SEQ ID NO: 1856609 - RNA, 19 nt, Homo sapiens
  misc_RNA (1)...(19): siRNA sense strand
gcauuuggaagaagaacca

SEQ ID NO: 1856610 - RNA, 19 nt, Homo sapiens
  misc_RNA (1)...(19): siRNA sense strand
gaagaagaaccaggaugac

SEQ ID NO: 1856611 - RNA, 19 nt, Homo sapiens
  misc_RNA (1)...(19): siRNA sense strand
aagaggaugaguaugaaug

SEQ ID NO: 1856612 - RNA, 19 nt, Homo sapiens
  misc_RNA (1)...(19): siRNA sense strand
gaccccaguuggaaaugua

SEQ ID NO: 1856613 - RNA, 19 nt, Homo sapiens
  misc_RNA (1)...(19): siRNA sense strand
ugccagcuaugaugacaca

SEQ ID NO: 1856614 - RNA, 19 nt, Homo sapiens
  misc_RNA (1)...(19): siRNA sense strand
gaugucaagcaugugguuu

SEQ ID NO: 1856615 - RNA, 19 nt, Homo sapiens
  misc_RNA (1)...(19): siRNA sense strand
ggaggcaccugcacuguua

SEQ ID NO: 1856616 - RNA, 19 nt, Homo sapiens
  misc_RNA (1)...(19): siRNA sense strand
ggaggaaggugagccauua

SEQ ID NO: 1856617 - RNA, 19 nt, Homo sapiens
  misc_RNA (1)...(19): siRNA sense strand
gaggauagccgucacuuua

SEQ ID NO: 1856618 - RNA, 19 nt, Homo sapiens
  misc_RNA (1)...(19): siRNA sense strand
gaaauucccuauacaacaa

SEQ ID NO: 1856619 - RNA, 19 nt, Homo sapiens
  misc_RNA (1)...(19): siRNA sense strand
gaaggaugcuggcgaguau

SEQ ID NO: 1856620 - RNA, 19 nt, Homo sapiens
  misc_RNA (1)...(19): siRNA sense strand
gaagguuucccaagacuua

SEQ ID NO: 1856621 - RNA, 19 nt, Homo sapiens
  misc_RNA (1)...(19): siRNA sense strand
gagucaaguuuacaaguua

SEQ ID NO: 1856622 - RNA, 19 nt, Homo sapiens
  misc_RNA (1)...(19): siRNA sense strand
ggagucaaguuuacaaguu

SEQ ID NO: 1856623 - RNA, 19 nt, Homo sapiens
  misc_RNA (1)...(19): siRNA sense strand
ggaccaaaccaauguuaua

SEQ ID NO: 1856624 - RNA, 19 nt, Homo sapiens
  misc_RNA (1)...(19): siRNA sense strand
guaaauugcuggugcacuu

SEQ ID NO: 1856625 - RNA, 19 nt, Homo sapiens
  misc_RNA (1)...(19): siRNA sense strand
ccagcuagcucucacauau

SEQ ID NO: 1856626 - RNA, 19 nt, Homo sapiens
  misc_RNA (1)...(19): siRNA sense strand
ggcaagagcucuccaucaa

SEQ ID NO: 1856627 - RNA, 19 nt, Homo sapiens
  misc_RNA (1)...(19): siRNA sense strand
ugacagaaauucccuauac

SEQ ID NO: 1856628 - RNA, 19 nt, Homo sapiens
  misc_RNA (1)...(19): siRNA sense strand
ucucauauguggcaucuuu

SEQ ID NO: 1856629 - RNA, 19 nt, Homo sapiens
  misc_RNA (1)...(19): siRNA sense strand
guacgugucuccaaagugu

SEQ ID NO: 1856630 - RNA, 19 nt, Homo sapiens
  misc_RNA (1)...(19): siRNA sense strand
gagcaaagacuaaucuaau

SEQ ID NO: 1856631 - RNA, 19 nt, Homo sapiens
  misc_RNA (1)...(19): siRNA sense strand
gcaggaauguacuggugua

SEQ ID NO: 1856632 - RNA, 19 nt, Homo sapiens
  misc_RNA (1)...(19): siRNA sense strand
caauggaaaccuucaguua

SEQ ID NO: 1856633 - RNA, 19 nt, Homo sapiens
  misc_RNA (1)...(19): siRNA sense strand
ggacugaaauugcucacau

SEQ ID NO: 1856634 - RNA, 19 nt, Homo sapiens
  misc_RNA (1)...(19): siRNA sense strand
caaacacugaugagaauua

SEQ ID NO: 1856635 - RNA, 19 nt, Homo sapiens
  misc_RNA (1)...(19): siRNA sense strand
cagaaaggaccacuguuua

SEQ ID NO: 1856636 - RNA, 19 nt, Homo sapiens
  misc_RNA (1)...(19): siRNA sense strand
gagcuggacucagaagauu

SEQ ID NO: 1856637 - RNA, 19 nt, Homo sapiens
  misc_RNA (1)...(19): siRNA sense strand
gcaaagacuaaucuaauug

SEQ ID NO: 1856638 - RNA, 19 nt, Homo sapiens
  misc_RNA (1)...(19): siRNA sense strand
ugaaauugcucacauugau

SEQ ID NO: 1856639 - RNA, 19 nt, Homo sapiens
  misc_RNA (1)...(19): siRNA sense strand
uaagguacgugucuccaaa

SEQ ID NO: 1856640 - RNA, 19 nt, Homo sapiens
  misc_RNA (1)...(19): siRNA sense strand
gaugagaauuacuauggaa

SEQ ID NO: 1856641 - RNA, 19 nt, Homo sapiens
  misc_RNA (1)...(19): siRNA sense strand
gaaaggaccacuguuuaga

SEQ ID NO: 1856642 - RNA, 19 nt, Homo sapiens
  misc_RNA (1)...(19): siRNA sense strand
caacacugauauagaaugu

SEQ ID NO: 1856643 - RNA, 19 nt, Homo sapiens
  misc_RNA (1)...(19): siRNA sense strand
uaaagucucuggagucaag

SEQ ID NO: 1856644 - RNA, 19 nt, Homo sapiens
  misc_RNA (1)...(19): siRNA sense strand
gauuauuucucucuccaaa

SEQ ID NO: 1856645 - RNA, 19 nt, Homo sapiens
  misc_RNA (1)...(19): siRNA sense strand
gagaauuacuauggaaguu

SEQ ID NO: 1856646 - RNA, 19 nt, Homo sapiens
  misc_RNA (1)...(19): siRNA sense strand
gauggaggaugcaggaaug

SEQ ID NO: 1856647 - RNA, 19 nt, Homo sapiens
  misc_RNA (1)...(19): siRNA sense strand
gauauagaauguagcaucu

SEQ ID NO: 1856648 - RNA, 19 nt, Homo sapiens
  misc_RNA (1)...(19): siRNA sense strand
ccaagcaaguggauuaauc

SEQ ID NO: 1856649 - RNA, 19 nt, Homo sapiens
  misc_RNA (1)...(19): siRNA sense strand
ggaagagacaggaguguau

SEQ ID NO: 1856650 - RNA, 19 nt, Homo sapiens
  misc_RNA (1)...(19): siRNA sense strand
gaccaaaccaauguuauaa

SEQ ID NO: 1856651 - RNA, 19 nt, Homo sapiens
  misc_RNA (1)...(19): siRNA sense strand
ucagaaaggaccacuguuu

SEQ ID NO: 1856652 - RNA, 19 nt, Homo sapiens
  misc_RNA (1)...(19): siRNA sense strand
caagagcucuccaucaacu

SEQ ID NO: 1856653 - RNA, 19 nt, Homo sapiens
  misc_RNA (1)...(19): siRNA sense strand
gagagacacucgccuuucu

SEQ ID NO: 1856654 - RNA, 19 nt, Homo sapiens
  misc_RNA (1)...(19): siRNA sense strand
caggaaguccagaucauua

SEQ ID NO: 1856655 - RNA, 19 nt, Homo sapiens
  misc_RNA (1)...(19): siRNA sense strand
acuaaugccucuuggcuaa

SEQ ID NO: 1856656 - RNA, 19 nt, Homo sapiens
  misc_RNA (1)...(19): siRNA sense strand
uauagaauguagcaucuug

SEQ ID NO: 1856657 - RNA, 19 nt, Homo sapiens
  misc_RNA (1)...(19): siRNA sense strand
gaaguguggucgugucuac

SEQ ID NO: 1856658 - RNA, 19 nt, Homo sapiens
  misc_RNA (1)...(19): siRNA sense strand
ggcaggugcuucagagaaa

SEQ ID NO: 1856659 - RNA, 19 nt, Homo sapiens
  misc_RNA (1)...(19): siRNA sense strand
ugacuaagcucagcauugg

SEQ ID NO: 1856660 - RNA, 19 nt, Homo sapiens
  misc_RNA (1)...(19): siRNA sense strand
gaauuacuauggaaguuac

SEQ ID NO: 1856661 - RNA, 19 nt, Homo sapiens
  misc_RNA (1)...(19): siRNA sense strand
gaauggcuccugucuacaa

SEQ ID NO: 1856662 - RNA, 19 nt, Homo sapiens
  misc_RNA (1)...(19): siRNA sense strand
uaaagauccuggagaugga

SEQ ID NO: 1856663 - RNA, 19 nt, Homo sapiens
  misc_RNA (1)...(19): siRNA sense strand
gaagaaugacuacaaagag

SEQ ID NO: 1856664 - RNA, 19 nt, Homo sapiens
  misc_RNA (1)...(19): siRNA sense strand
aagaaugacuacaaagaga

SEQ ID NO: 1856665 - RNA, 19 nt, Homo sapiens
  misc_RNA (1)...(19): siRNA sense strand
ucacggugcugccuucaga

SEQ ID NO: 1856666 - RNA, 19 nt, Homo sapiens
  misc_RNA (1)...(19): siRNA sense strand
agaaguaacaguucagaaa

SEQ ID NO: 1856667 - RNA, 19 nt, Homo sapiens
  misc_RNA (1)...(19): siRNA sense strand
ccaagccacugagauuauu

SEQ ID NO: 1856668 - RNA, 19 nt, Homo sapiens
  misc_RNA (1)...(19): siRNA sense strand
cuacagacuuuguccugaa

SEQ ID NO: 1856669 - RNA, 19 nt, Homo sapiens
  misc_RNA (1)...(19): siRNA sense strand
ggagauggaccaaaccaau

SEQ ID NO: 1856670 - RNA, 19 nt, Homo sapiens
  misc_RNA (1)...(19): siRNA sense strand
ccugaagaaugacuacaaa

SEQ ID NO: 1856671 - RNA, 19 nt, Homo sapiens
  misc_RNA (1)...(19): siRNA sense strand
gcagcugggugccuccuau

SEQ ID NO: 1856672 - RNA, 19 nt, Homo sapiens
  misc_RNA (1)...(19): siRNA sense strand
gaaguaacaguucagaaag

SEQ ID NO: 1856673 - RNA, 19 nt, Homo sapiens
  misc_RNA (1)...(19): siRNA sense strand
ccagagagaaguaacaguu

SEQ ID NO: 1856674 - RNA, 19 nt, Homo sapiens
  misc_RNA (1)...(19): siRNA sense strand
gaaggcgccuacagaugug

SEQ ID NO: 1856675 - RNA, 19 nt, Homo sapiens
  misc_RNA (1)...(19): siRNA sense strand
acacugauauagaauguag

SEQ ID NO: 1856676 - RNA, 19 nt, Homo sapiens
  misc_RNA (1)...(19): siRNA sense strand
cuccaacacugauauagaa

SEQ ID NO: 1856677 - RNA, 19 nt, Homo sapiens
  misc_RNA (1)...(19): siRNA sense strand
gacagaaauucccuauaca

SEQ ID NO: 1856678 - RNA, 19 nt, Homo sapiens
  misc_RNA (1)...(19): siRNA sense strand
guuuagagcugaagguuac

SEQ ID NO: 1856679 - RNA, 19 nt, Homo sapiens
  misc_RNA (1)...(19): siRNA sense strand
ggaagaugaaggcaacuga

SEQ ID NO: 1856680 - RNA, 19 nt, Homo sapiens
  misc_RNA (1)...(19): siRNA sense strand
acucagaagauuucaguua

SEQ ID NO: 1856681 - RNA, 19 nt, Homo sapiens
  misc_RNA (1)...(19): siRNA sense strand
acacucgccuuucucugua

SEQ ID NO: 1856682 - RNA, 19 nt, Homo sapiens
  misc_RNA (1)...(19): siRNA sense strand
ggaugaaggcgccuacaga

SEQ ID NO: 1856683 - RNA, 19 nt, Homo sapiens
  misc_RNA (1)...(19): siRNA sense strand
uuauuucucucuccaaaga

SEQ ID NO: 1856684 - RNA, 19 nt, Homo sapiens
  misc_RNA (1)...(19): siRNA sense strand
cugagaagguuucccaaga

SEQ ID NO: 1856685 - RNA, 19 nt, Homo sapiens
  misc_RNA (1)...(19): siRNA sense strand
gcucagcauuggccagaga

SEQ ID NO: 1856686 - RNA, 19 nt, Homo sapiens
  misc_RNA (1)...(19): siRNA sense strand
caacuccaacacugauaua

SEQ ID NO: 1856687 - RNA, 19 nt, Homo sapiens
  misc_RNA (1)...(19): siRNA sense strand
ugaagaaugacuacaaaga

SEQ ID NO: 1856688 - RNA, 19 nt, Homo sapiens
  misc_RNA (1)...(19): siRNA sense strand
gaaauugcucacauugaug

SEQ ID NO: 1856689 - RNA, 19 nt, Homo sapiens
  misc_RNA (1)...(19): siRNA sense strand
gacugaaauugcucacauu

SEQ ID NO: 1856690 - RNA, 19 nt, Homo sapiens
  misc_RNA (1)...(19): siRNA sense strand
aaaguguacuggaccgaaa

SEQ ID NO: 1856691 - RNA, 19 nt, Homo sapiens
  misc_RNA (1)...(19): siRNA sense strand
acacaaggcuggagaaaau

SEQ ID NO: 1856692 - RNA, 19 nt, Homo sapiens
  misc_RNA (1)...(19): siRNA sense strand
gaaaguccccugucuguga

SEQ ID NO: 1856693 - RNA, 19 nt, Homo sapiens
  misc_RNA (1)...(19): siRNA sense strand
agacacagcccgaguuugu

SEQ ID NO: 1856694 - RNA, 19 nt, Homo sapiens
  misc_RNA (1)...(19): siRNA sense strand
aguagaaguuuaugacaga

SEQ ID NO: 1856695 - RNA, 19 nt, Homo sapiens
  misc_RNA (1)...(19): siRNA sense strand
gaaguagaaguuuaugaca

SEQ ID NO: 1856696 - RNA, 19 nt, Homo sapiens
  misc_RNA (1)...(19): siRNA sense strand
guaucagugugaaguagaa

SEQ ID NO: 1856697 - RNA, 19 nt, Homo sapiens
  misc_RNA (1)...(19): siRNA sense strand
ggacucagaagauuucagu

SEQ ID NO: 1856698 - RNA, 19 nt, Homo sapiens
  misc_RNA (1)...(19): siRNA sense strand
acacugaugagaauuacua

SEQ ID NO: 1856699 - RNA, 19 nt, Homo sapiens
  misc_RNA (1)...(19): siRNA sense strand
ugaaggcgccuacagaugu

SEQ ID NO: 1856700 - RNA, 19 nt, Homo sapiens
  misc_RNA (1)...(19): siRNA sense strand
ugccuucucuuacgcagua

SEQ ID NO: 1856701 - RNA, 19 nt, Homo sapiens
  misc_RNA (1)...(19): siRNA sense strand
cuaacagaauugaaacuca

SEQ ID NO: 1856702 - RNA, 19 nt, Homo sapiens
  misc_RNA (1)...(19): siRNA sense strand
gagauggaccaaaccaaug

SEQ ID NO: 1856703 - RNA, 19 nt, Homo sapiens
  misc_RNA (1)...(19): siRNA sense strand
agugugaaguagaaguuua

SEQ ID NO: 1856704 - RNA, 19 nt, Homo sapiens
  misc_RNA (1)...(19): siRNA sense strand
ucacagacaguggcacaua

SEQ ID NO: 1856705 - RNA, 19 nt, Homo sapiens
  misc_RNA (1)...(19): siRNA sense strand
agaaagcagucaccagaca

SEQ ID NO: 1856706 - RNA, 19 nt, Homo sapiens
  misc_RNA (1)...(19): siRNA sense strand
ucugucaccugguaccuaa

SEQ ID NO: 1856707 - RNA, 19 nt, Homo sapiens
  misc_RNA (1)...(19): siRNA sense strand
cacccaagcaaguggauua

SEQ ID NO: 1856708 - RNA, 19 nt, Homo sapiens
  misc_RNA (1)...(19): siRNA sense strand
ggaaguaagguacgugucu

SEQ ID NO: 1856709 - RNA, 19 nt, Homo sapiens
  misc_RNA (1)...(19): siRNA sense strand
ggcuaaagauccuggagau

SEQ ID NO: 1856710 - RNA, 19 nt, Homo sapiens
  misc_RNA (1)...(19): siRNA sense strand
acauaugagugcagaguau

SEQ ID NO: 1856711 - RNA, 19 nt, Homo sapiens
  misc_RNA (1)...(19): siRNA sense strand
gguagcagaggucaugaaa

SEQ ID NO: 1856712 - RNA, 19 nt, Homo sapiens
  misc_RNA (1)...(19): siRNA sense strand
caaggcauuugguucuuca

SEQ ID NO: 1856713 - RNA, 19 nt, Homo sapiens
  misc_RNA (1)...(19): siRNA sense strand
agggucagcuguucuguga

SEQ ID NO: 1856714 - RNA, 19 nt, Homo sapiens
  misc_RNA (1)...(19): siRNA sense strand
ugacguacagcucaacaaa

SEQ ID NO: 1856715 - RNA, 19 nt, Homo sapiens
  misc_RNA (1)...(19): siRNA sense strand
ggaagagccucaucuaagg

SEQ ID NO: 1856716 - RNA, 19 nt, Homo sapiens
  misc_RNA (1)...(19): siRNA sense strand
acagugaggucccagauuu

SEQ ID NO: 1856717 - RNA, 19 nt, Homo sapiens
  misc_RNA (1)...(19): siRNA sense strand
caauacagcuuaccguaca

SEQ ID NO: 1856718 - RNA, 19 nt, Homo sapiens
  misc_RNA (1)...(19): siRNA sense strand
gcucaaggccaaucugaaa

SEQ ID NO: 1856719 - RNA, 19 nt, Homo sapiens
  misc_RNA (1)...(19): siRNA sense strand
gcacagcugccuccaguug

SEQ ID NO: 1856720 - RNA, 19 nt, Homo sapiens
  misc_RNA (1)...(19): siRNA sense strand
gaucuaggcucagaggaau

SEQ ID NO: 1856721 - RNA, 19 nt, Homo sapiens
  misc_RNA (1)...(19): siRNA sense strand
gcaggagcgugcagucaug

SEQ ID NO: 1856722 - RNA, 19 nt, Homo sapiens
  misc_RNA (1)...(19): siRNA sense strand
ccaccaaccugcaccuuuc

SEQ ID NO: 1856723 - RNA, 19 nt, Homo sapiens
  misc_RNA (1)...(19): siRNA sense strand
ccuagauccuggcugguua

SEQ ID NO: 1856724 - RNA, 19 nt, Homo sapiens
  misc_RNA (1)...(19): siRNA sense strand
gcaccuggcuguggcugaa

SEQ ID NO: 1856725 - RNA, 19 nt, Homo sapiens
  misc_RNA (1)...(19): siRNA sense strand
ucagaggaaucacaacuuc

SEQ ID NO: 1856726 - RNA, 19 nt, Homo sapiens
  misc_RNA (1)...(19): siRNA sense strand
gcacucccaauacagcuua

SEQ ID NO: 1856727 - RNA, 19 nt, Homo sapiens
  misc_RNA (1)...(19): siRNA sense strand
ggagaaggaccagauaugu

SEQ ID NO: 1856728 - RNA, 19 nt, Homo sapiens
  misc_RNA (1)...(19): siRNA sense strand
aagcagaaguggcggaaga

SEQ ID NO: 1856729 - RNA, 19 nt, Homo sapiens
  misc_RNA (1)...(19): siRNA sense strand
ggaagcaacgggaaucugu

SEQ ID NO: 1856730 - RNA, 19 nt, Homo sapiens
  misc_RNA (1)...(19): siRNA sense strand
aaaccucgauuccauuauc

SEQ ID NO: 1856731 - RNA, 19 nt, Homo sapiens
  misc_RNA (1)...(19): siRNA sense strand
gauaugugacuuccucuau

SEQ ID NO: 1856732 - RNA, 19 nt, Homo sapiens
  misc_RNA (1)...(19): siRNA sense strand
gcaagucccugugcuacca

SEQ ID NO: 1856733 - RNA, 19 nt, Homo sapiens
  misc_RNA (1)...(19): siRNA sense strand
agaaggaccagauauguga

SEQ ID NO: 1856734 - RNA, 19 nt, Homo sapiens
  misc_RNA (1)...(19): siRNA sense strand
gcaauuacguacggcucaa

SEQ ID NO: 1856735 - RNA, 19 nt, Homo sapiens
  misc_RNA (1)...(19): siRNA sense strand
gagaaggaccagauaugug

SEQ ID NO: 1856736 - RNA, 19 nt, Homo sapiens
  misc_RNA (1)...(19): siRNA sense strand
ucagugagcuggccuucca

SEQ ID NO: 1856737 - RNA, 19 nt, Homo sapiens
  misc_RNA (1)...(19): siRNA sense strand
ccaccgugcugccacucua

SEQ ID NO: 1856738 - RNA, 19 nt, Homo sapiens
  misc_RNA (1)...(19): siRNA sense strand
gcgaccaccuauacccauu

SEQ ID NO: 1856739 - RNA, 19 nt, Homo sapiens
  misc_RNA (1)...(19): siRNA sense strand
caagugaggaagacacaga

SEQ ID NO: 1856740 - RNA, 19 nt, Homo sapiens
  misc_RNA (1)...(19): siRNA sense strand
gcgagaagcggagauggaa

SEQ ID NO: 1856741 - RNA, 19 nt, Homo sapiens
  misc_RNA (1)...(19): siRNA sense strand
gaggagaaggaccagauau

SEQ ID NO: 1856742 - RNA, 19 nt, Homo sapiens
  misc_RNA (1)...(19): siRNA sense strand
gcaugggcgugcacugcuu

SEQ ID NO: 1856743 - RNA, 19 nt, Homo sapiens
  misc_RNA (1)...(19): siRNA sense strand
ggaagaaaggggaguguuu

SEQ ID NO: 1856744 - RNA, 19 nt, Homo sapiens
  misc_RNA (1)...(19): siRNA sense strand
acaugaagcagaaacacua

SEQ ID NO: 1856745 - RNA, 19 nt, Homo sapiens
  misc_RNA (1)...(19): siRNA sense strand
uaggaagagccucaucuaa

SEQ ID NO: 1856746 - RNA, 19 nt, Homo sapiens
  misc_RNA (1)...(19): siRNA sense strand
gaagaaaggggaguguuuu

SEQ ID NO: 1856747 - RNA, 19 nt, Homo sapiens
  misc_RNA (1)...(19): siRNA sense strand
agaggccugugcccaagua

SEQ ID NO: 1856748 - RNA, 19 nt, Homo sapiens
  misc_RNA (1)...(19): siRNA sense strand
caaaaccucgauuccauua

SEQ ID NO: 1856749 - RNA, 19 nt, Homo sapiens
  misc_RNA (1)...(19): siRNA sense strand
aggaggccaucgagacuuu

SEQ ID NO: 1856750 - RNA, 19 nt, Homo sapiens
  misc_RNA (1)...(19): siRNA sense strand
gaaccuuccaggccuuuca

SEQ ID NO: 1856751 - RNA, 19 nt, Homo sapiens
  misc_RNA (1)...(19): siRNA sense strand
gcagaaguggcggaagaaa

SEQ ID NO: 1856752 - RNA, 19 nt, Homo sapiens
  misc_RNA (1)...(19): siRNA sense strand
ugagcgggcacucccaaua

SEQ ID NO: 1856753 - RNA, 19 nt, Homo sapiens
  misc_RNA (1)...(19): siRNA sense strand
cuaggaagagccucaucua

SEQ ID NO: 1856754 - RNA, 19 nt, Homo sapiens
  misc_RNA (1)...(19): siRNA sense strand
uaugugacuuccucuaugg

SEQ ID NO: 1856755 - RNA, 19 nt, Homo sapiens
  misc_RNA (1)...(19): siRNA sense strand
gaggaaucacaacuucuga

SEQ ID NO: 1856756 - RNA, 19 nt, Homo sapiens
  misc_RNA (1)...(19): siRNA sense strand
ugaggagaaggaccagaua

SEQ ID NO: 1856757 - RNA, 19 nt, Homo sapiens
  misc_RNA (1)...(19): siRNA sense strand
cguacaggcuuuggacaug

SEQ ID NO: 1856758 - RNA, 19 nt, Homo sapiens
  misc_RNA (1)...(19): siRNA sense strand
ccauuaucauuuacugcaa

SEQ ID NO: 1856759 - RNA, 19 nt, Homo sapiens
  misc_RNA (1)...(19): siRNA sense strand
gagcgggcacucccaauac

SEQ ID NO: 1856760 - RNA, 19 nt, Homo sapiens
  misc_RNA (1)...(19): siRNA sense strand
ugagucggcuguccuuggu

SEQ ID NO: 1856761 - RNA, 19 nt, Homo sapiens
  misc_RNA (1)...(19): siRNA sense strand
cgagagcugcgcagacaug

SEQ ID NO: 1856762 - RNA, 19 nt, Homo sapiens
  misc_RNA (1)...(19): siRNA sense strand
aggaagagccucaucuaag

SEQ ID NO: 1856763 - RNA, 19 nt, Homo sapiens
  misc_RNA (1)...(19): siRNA sense strand
ggcucaacaugaagcagaa

SEQ ID NO: 1856764 - RNA, 19 nt, Homo sapiens
  misc_RNA (1)...(19): siRNA sense strand
ucgagacuuugcugugcua

SEQ ID NO: 1856765 - RNA, 19 nt, Homo sapiens
  misc_RNA (1)...(19): siRNA sense strand
ggaggaggccaucgagacu

SEQ ID NO: 1856766 - RNA, 19 nt, Homo sapiens
  misc_RNA (1)...(19): siRNA sense strand
ggcuguagcaguugaggaa

SEQ ID NO: 1856767 - RNA, 19 nt, Homo sapiens
  misc_RNA (1)...(19): siRNA sense strand
acguacggcucaacaugaa

SEQ ID NO: 1856768 - RNA, 19 nt, Homo sapiens
  misc_RNA (1)...(19): siRNA sense strand
ggagucuuguuuccugaac

SEQ ID NO: 1856769 - RNA, 19 nt, Homo sapiens
  misc_RNA (1)...(19): siRNA sense strand
gccgcuacuuugaggaaga

SEQ ID NO: 1856770 - RNA, 19 nt, Homo sapiens
  misc_RNA (1)...(19): siRNA sense strand
auaugugacuuccucuaug

SEQ ID NO: 1856771 - RNA, 19 nt, Homo sapiens
  misc_RNA (1)...(19): siRNA sense strand
ggaccagauaugugacuuc

SEQ ID NO: 1856772 - RNA, 19 nt, Homo sapiens
  misc_RNA (1)...(19): siRNA sense strand
gcucagaggaaucacaacu

SEQ ID NO: 1856773 - RNA, 19 nt, Homo sapiens
  misc_RNA (1)...(19): siRNA sense strand
ugcauacacucgggcauga

SEQ ID NO: 1856774 - RNA, 19 nt, Homo sapiens
  misc_RNA (1)...(19): siRNA sense strand
ucccagcgcugcucuacag

SEQ ID NO: 1856775 - RNA, 19 nt, Homo sapiens
  misc_RNA (1)...(19): siRNA sense strand
gugccacagucacaaccaa

SEQ ID NO: 1856776 - RNA, 19 nt, Homo sapiens
  misc_RNA (1)...(19): siRNA sense strand
agaaguggcggaagaaagg

SEQ ID NO: 1856777 - RNA, 19 nt, Homo sapiens
  misc_RNA (1)...(19): siRNA sense strand
gcaagcaggcauggaagca

SEQ ID NO: 1856778 - RNA, 19 nt, Homo sapiens
  misc_RNA (1)...(19): siRNA sense strand
ucagggcaguuggcagaga

SEQ ID NO: 1856779 - RNA, 19 nt, Homo sapiens
  misc_RNA (1)...(19): siRNA sense strand
gcugcgacauccgccaguu

SEQ ID NO: 1856780 - RNA, 19 nt, Homo sapiens
  misc_RNA (1)...(19): siRNA sense strand
ugaucuaggcucagaggaa

SEQ ID NO: 1856781 - RNA, 19 nt, Homo sapiens
  misc_RNA (1)...(19): siRNA sense strand
uuacguacggcucaacaug

SEQ ID NO: 1856782 - RNA, 19 nt, Homo sapiens
  misc_RNA (1)...(19): siRNA sense strand
ccacagucacaaccaagga

SEQ ID NO: 1856783 - RNA, 19 nt, Homo sapiens
  misc_RNA (1)...(19): siRNA sense strand
acucgggcaugaccaggaa

SEQ ID NO: 1856784 - RNA, 19 nt, Homo sapiens
  misc_RNA (1)...(19): siRNA sense strand
ccucgauuccauuaucauu

SEQ ID NO: 1856785 - RNA, 19 nt, Homo sapiens
  misc_RNA (1)...(19): siRNA sense strand
caaggcaaacguuuucaaa

SEQ ID NO: 1856786 - RNA, 19 nt, Homo sapiens
  misc_RNA (1)...(19): siRNA sense strand
ggacauacuuccuuuguga

SEQ ID NO: 1856787 - RNA, 19 nt, Homo sapiens
  misc_RNA (1)...(19): siRNA sense strand
gcaggagaauauuguauaa

SEQ ID NO: 1856788 - RNA, 19 nt, Homo sapiens
  misc_RNA (1)...(19): siRNA sense strand
agagagauguguaaagaua

SEQ ID NO: 1856789 - RNA, 19 nt, Homo sapiens
  misc_RNA (1)...(19): siRNA sense strand
caacacagauggcaguaug

SEQ ID NO: 1856790 - RNA, 19 nt, Homo sapiens
  misc_RNA (1)...(19): siRNA sense strand
aaagagagauguguaaaga

SEQ ID NO: 1856791 - RNA, 19 nt, Homo sapiens
  misc_RNA (1)...(19): siRNA sense strand
gaaaugugcacaacuuuga

SEQ ID NO: 1856792 - RNA, 19 nt, Homo sapiens
  misc_RNA (1)...(19): siRNA sense strand
ucugaaggcucuuaucuuu

SEQ ID NO: 1856793 - RNA, 19 nt, Homo sapiens
  misc_RNA (1)...(19): siRNA sense strand
ggaauugcauuacaacaca

SEQ ID NO: 1856794 - RNA, 19 nt, Homo sapiens
  misc_RNA (1)...(19): siRNA sense strand
ugacacaagugaucagauu

SEQ ID NO: 1856795 - RNA, 19 nt, Homo sapiens
  misc_RNA (1)...(19): siRNA sense strand
gaaugucuauggugacugu

SEQ ID NO: 1856796 - RNA, 19 nt, Homo sapiens
  misc_RNA (1)...(19): siRNA sense strand
gaaagcagccauccagaca

SEQ ID NO: 1856797 - RNA, 19 nt, Homo sapiens
  misc_RNA (1)...(19): siRNA sense strand
gacaagagacuguauaugg

SEQ ID NO: 1856798 - RNA, 19 nt, Homo sapiens
  misc_RNA (1)...(19): siRNA sense strand
gcugugaccuucaaugaca

SEQ ID NO: 1856799 - RNA, 19 nt, Homo sapiens
  misc_RNA (1)...(19): siRNA sense strand
caagugaucagauuauuuc

SEQ ID NO: 1856800 - RNA, 19 nt, Homo sapiens
  misc_RNA (1)...(19): siRNA sense strand
gagaggccaugcagauuca

SEQ ID NO: 1856801 - RNA, 19 nt, Homo sapiens
  misc_RNA (1)...(19): siRNA sense strand
aagcuaaccuacaccauga

SEQ ID NO: 1856802 - RNA, 19 nt, Homo sapiens
  misc_RNA (1)...(19): siRNA sense strand
ccaaugcaauggacaauac

SEQ ID NO: 1856803 - RNA, 19 nt, Homo sapiens
  misc_RNA (1)...(19): siRNA sense strand
cuuagcaucugcaggauuu

SEQ ID NO: 1856804 - RNA, 19 nt, Homo sapiens
  misc_RNA (1)...(19): siRNA sense strand
ggaaaugugcacaacuuug

SEQ ID NO: 1856805 - RNA, 19 nt, Homo sapiens
  misc_RNA (1)...(19): siRNA sense strand
ggauuugaccgacugauau

SEQ ID NO: 1856806 - RNA, 19 nt, Homo sapiens
  misc_RNA (1)...(19): siRNA sense strand
cgacagguuuguuuaugug

SEQ ID NO: 1856807 - RNA, 19 nt, Homo sapiens
  misc_RNA (1)...(19): siRNA sense strand
gagcagugauggaauugca

SEQ ID NO: 1856808 - RNA, 19 nt, Homo sapiens
  misc_RNA (1)...(19): siRNA sense strand
gaagucuacugcugcaagu

SEQ ID NO: 1856809 - RNA, 19 nt, Homo sapiens
  misc_RNA (1)...(19): siRNA sense strand
gaaacaggugagaggguua

SEQ ID NO: 1856810 - RNA, 19 nt, Homo sapiens
  misc_RNA (1)...(19): siRNA sense strand
guggagcagugauggaauu

SEQ ID NO: 1856811 - RNA, 19 nt, Homo sapiens
  misc_RNA (1)...(19): siRNA sense strand
aaggaaaugugcacaacuu

SEQ ID NO: 1856812 - RNA, 19 nt, Homo sapiens
  misc_RNA (1)...(19): siRNA sense strand
aagcagccauccagacauu

SEQ ID NO: 1856813 - RNA, 19 nt, Homo sapiens
  misc_RNA (1)...(19): siRNA sense strand
gcaauggacaauacaguuc

SEQ ID NO: 1856814 - RNA, 19 nt, Homo sapiens
  misc_RNA (1)...(19): siRNA sense strand
gugacuggccugaguuuaa

SEQ ID NO: 1856815 - RNA, 19 nt, Homo sapiens
  misc_RNA (1)...(19): siRNA sense strand
caacggauccaccuuagca

SEQ ID NO: 1856816 - RNA, 19 nt, Homo sapiens
  misc_RNA (1)...(19): siRNA sense strand
caugcuggcuccaucaaug

SEQ ID NO: 1856817 - RNA, 19 nt, Homo sapiens
  misc_RNA (1)...(19): siRNA sense strand
acagauggcaguaugcuuu

SEQ ID NO: 1856818 - RNA, 19 nt, Homo sapiens
  misc_RNA (1)...(19): siRNA sense strand
gaccuucaaugacacaagu

SEQ ID NO: 1856819 - RNA, 19 nt, Homo sapiens
  misc_RNA (1)...(19): siRNA sense strand
gcucuuaucuuuuguccaa

SEQ ID NO: 1856820 - RNA, 19 nt, Homo sapiens
  misc_RNA (1)...(19): siRNA sense strand
ggaauagacaaugauauca

SEQ ID NO: 1856821 - RNA, 19 nt, Homo sapiens
  misc_RNA (1)...(19): siRNA sense strand
gacacaagugaucagauua

SEQ ID NO: 1856822 - RNA, 19 nt, Homo sapiens
  misc_RNA (1)...(19): siRNA sense strand
gcugcucucuggacaugaa

SEQ ID NO: 1856823 - RNA, 19 nt, Homo sapiens
  misc_RNA (1)...(19): siRNA sense strand
uagaucagcagaagcguaa

SEQ ID NO: 1856824 - RNA, 19 nt, Homo sapiens
  misc_RNA (1)...(19): siRNA sense strand
ugaaggcucuuaucuuuug

SEQ ID NO: 1856825 - RNA, 19 nt, Homo sapiens
  misc_RNA (1)...(19): siRNA sense strand
ugauggaauugcauuacaa

SEQ ID NO: 1856826 - RNA, 19 nt, Homo sapiens
  misc_RNA (1)...(19): siRNA sense strand
gguggaauagacaaugaua

SEQ ID NO: 1856827 - RNA, 19 nt, Homo sapiens
  misc_RNA (1)...(19): siRNA sense strand
cacaagugaucagauuauu

SEQ ID NO: 1856828 - RNA, 19 nt, Homo sapiens
  misc_RNA (1)...(19): siRNA sense strand
ggacacaguggagcaguga

SEQ ID NO: 1856829 - RNA, 19 nt, Homo sapiens
  misc_RNA (1)...(19): siRNA sense strand
ucaaugaaguggcuuucca

SEQ ID NO: 1856830 - RNA, 19 nt, Homo sapiens
  misc_RNA (1)...(19): siRNA sense strand
ggagaauauuguauaagcu

SEQ ID NO: 1856831 - RNA, 19 nt, Homo sapiens
  misc_RNA (1)...(19): siRNA sense strand
gcagugauggaauugcauu

SEQ ID NO: 1856832 - RNA, 19 nt, Homo sapiens
  misc_RNA (1)...(19): siRNA sense strand
ggccugaguuuaaguucug

SEQ ID NO: 1856833 - RNA, 19 nt, Homo sapiens
  misc_RNA (1)...(19): siRNA sense strand
agacauuucagaacacgua

SEQ ID NO: 1856834 - RNA, 19 nt, Homo sapiens
  misc_RNA (1)...(19): siRNA sense strand
gugauggaauugcauuaca

SEQ ID NO: 1856835 - RNA, 19 nt, Homo sapiens
  misc_RNA (1)...(19): siRNA sense strand
gauuugaccgacugauauu

SEQ ID NO: 1856836 - RNA, 19 nt, Homo sapiens
  misc_RNA (1)...(19): siRNA sense strand
caaagagagauguguaaag

SEQ ID NO: 1856837 - RNA, 19 nt, Homo sapiens
  misc_RNA (1)...(19): siRNA sense strand
ccaaagagagauguguaaa

SEQ ID NO: 1856838 - RNA, 19 nt, Homo sapiens
  misc_RNA (1)...(19): siRNA sense strand
auacuuccuuugugaauuc

SEQ ID NO: 1856839 - RNA, 19 nt, Homo sapiens
  misc_RNA (1)...(19): siRNA sense strand
gccgacagguuuguuuaug

SEQ ID NO: 1856840 - RNA, 19 nt, Homo sapiens
  misc_RNA (1)...(19): siRNA sense strand
ugauauuacuguggaaugu

SEQ ID NO: 1856841 - RNA, 19 nt, Homo sapiens
  misc_RNA (1)...(19): siRNA sense strand
cagccgacagguuuguuua

SEQ ID NO: 1856842 - RNA, 19 nt, Homo sapiens
  misc_RNA (1)...(19): siRNA sense strand
gauggcacaguuaagcuuu

SEQ ID NO: 1856843 - RNA, 19 nt, Homo sapiens
  misc_RNA (1)...(19): siRNA sense strand
cauacuuccuuugugaauu

SEQ ID NO: 1856844 - RNA, 19 nt, Homo sapiens
  misc_RNA (1)...(19): siRNA sense strand
gggacauacuuccuuugug

SEQ ID NO: 1856845 - RNA, 19 nt, Homo sapiens
  misc_RNA (1)...(19): siRNA sense strand
ugacuggccugaguuuaag

SEQ ID NO: 1856846 - RNA, 19 nt, Homo sapiens
  misc_RNA (1)...(19): siRNA sense strand
cagugacgauggcacaguu

SEQ ID NO: 1856847 - RNA, 19 nt, Homo sapiens
  misc_RNA (1)...(19): siRNA sense strand
caagcaggagaauauugua

SEQ ID NO: 1856848 - RNA, 19 nt, Homo sapiens
  misc_RNA (1)...(19): siRNA sense strand
ccgacagguuuguuuaugu

SEQ ID NO: 1856849 - RNA, 19 nt, Homo sapiens
  misc_RNA (1)...(19): siRNA sense strand
gagagauguguaaagauau

SEQ ID NO: 1856850 - RNA, 19 nt, Homo sapiens
  misc_RNA (1)...(19): siRNA sense strand
gcaagcgggaccuccaaga

SEQ ID NO: 1856851 - RNA, 19 nt, Homo sapiens
  misc_RNA (1)...(19): siRNA sense strand
acacaagugaucagauuau

SEQ ID NO: 1856852 - RNA, 19 nt, Homo sapiens
  misc_RNA (1)...(19): siRNA sense strand
uagcugugaccuucaauga

SEQ ID NO: 1856853 - RNA, 19 nt, Homo sapiens
  misc_RNA (1)...(19): siRNA sense strand
agaacaagcuaaccuacac

SEQ ID NO: 1856854 - RNA, 19 nt, Homo sapiens
  misc_RNA (1)...(19): siRNA sense strand
cuucugagauguucuuggu

SEQ ID NO: 1856855 - RNA, 19 nt, Homo sapiens
  misc_RNA (1)...(19): siRNA sense strand
gcagccauccagacauuuc

SEQ ID NO: 1856856 - RNA, 19 nt, Homo sapiens
  misc_RNA (1)...(19): siRNA sense strand
ccacaagcaggagaauauu

SEQ ID NO: 1856857 - RNA, 19 nt, Homo sapiens
  misc_RNA (1)...(19): siRNA sense strand
ucaaggaaaugugcacaac

SEQ ID NO: 1856858 - RNA, 19 nt, Homo sapiens
  misc_RNA (1)...(19): siRNA sense strand
gcguaagggcccagaguug

SEQ ID NO: 1856859 - RNA, 19 nt, Homo sapiens
  misc_RNA (1)...(19): siRNA sense strand
uaccagguguuagcuguga

SEQ ID NO: 1856860 - RNA, 19 nt, Homo sapiens
  misc_RNA (1)...(19): siRNA sense strand
caguuaagcuuugggacau

SEQ ID NO: 1856861 - RNA, 19 nt, Homo sapiens
  misc_RNA (1)...(19): siRNA sense strand
uggaauagacaaugauauc

SEQ ID NO: 1856862 - RNA, 19 nt, Homo sapiens
  misc_RNA (1)...(19): siRNA sense strand
uaacuaugccacacugaag

SEQ ID NO: 1856863 - RNA, 19 nt, Homo sapiens
  misc_RNA (1)...(19): siRNA sense strand
gugacaagagacuguauau

SEQ ID NO: 1856864 - RNA, 19 nt, Homo sapiens
  misc_RNA (1)...(19): siRNA sense strand
ugagaggccaugcagauuc

SEQ ID NO: 1856865 - RNA, 19 nt, Homo sapiens
  misc_RNA (1)...(19): siRNA sense strand
gccagaacaagcuaaccua

SEQ ID NO: 1856866 - RNA, 19 nt, Homo sapiens
  misc_RNA (1)...(19): siRNA sense strand
caagauguuccucccuuca

SEQ ID NO: 1856867 - RNA, 19 nt, Homo sapiens
  misc_RNA (1)...(19): siRNA sense strand
ccaugcagauucagugacu

SEQ ID NO: 1856868 - RNA, 19 nt, Homo sapiens
  misc_RNA (1)...(19): siRNA sense strand
ucucagcauccacagauaa

SEQ ID NO: 1856869 - RNA, 19 nt, Homo sapiens
  misc_RNA (1)...(19): siRNA sense strand
aaacaggugagaggguuaa

SEQ ID NO: 1856870 - RNA, 19 nt, Homo sapiens
  misc_RNA (1)...(19): siRNA sense strand
aggagaauauuguauaagc

SEQ ID NO: 1856871 - RNA, 19 nt, Homo sapiens
  misc_RNA (1)...(19): siRNA sense strand
ggaagaaagcagccaucca

SEQ ID NO: 1856872 - RNA, 19 nt, Homo sapiens
  misc_RNA (1)...(19): siRNA sense strand
cugguggaauagacaauga

SEQ ID NO: 1856873 - RNA, 19 nt, Homo sapiens
  misc_RNA (1)...(19): siRNA sense strand
caagcgggaccuccaagau

SEQ ID NO: 1856874 - RNA, 19 nt, Homo sapiens
  misc_RNA (1)...(19): siRNA sense strand
cccaaagagagauguguaa

SEQ ID NO: 1856875 - RNA, 19 nt, Homo sapiens
  misc_RNA (1)...(19): siRNA sense strand
agcaggagaauauuguaua

SEQ ID NO: 1856876 - RNA, 19 nt, Homo sapiens
  misc_RNA (1)...(19): siRNA sense strand
gauaccacaagcaggagaa

SEQ ID NO: 1856877 - RNA, 19 nt, Homo sapiens
  misc_RNA (1)...(19): siRNA sense strand
uaugggagagauucaguga

SEQ ID NO: 1856878 - RNA, 19 nt, Homo sapiens
  misc_RNA (1)...(19): siRNA sense strand
ggauccaccuuagcaucug

SEQ ID NO: 1856879 - RNA, 19 nt, Homo sapiens
  misc_RNA (1)...(19): siRNA sense strand
cagcaucgagugacaagag

SEQ ID NO: 1856880 - RNA, 19 nt, Homo sapiens
  misc_RNA (1)...(19): siRNA sense strand
cacaagcaggagaauauug

SEQ ID NO: 1856881 - RNA, 19 nt, Homo sapiens
  misc_RNA (1)...(19): siRNA sense strand
gaccgacugauauuacugu

SEQ ID NO: 1856882 - RNA, 19 nt, Homo sapiens
  misc_RNA (1)...(19): siRNA sense strand
ugggauguccggccauuug

SEQ ID NO: 1856883 - RNA, 19 nt, Homo sapiens
  misc_RNA (1)...(19): siRNA sense strand
gcuaaccuacaccaugaga

SEQ ID NO: 1856884 - RNA, 19 nt, Homo sapiens
  misc_RNA (1)...(19): siRNA sense strand
cagaacaagcuaaccuaca

SEQ ID NO: 1856885 - RNA, 19 nt, Homo sapiens
  misc_RNA (1)...(19): siRNA sense strand
aggauuugaccgacugaua

SEQ ID NO: 1856886 - RNA, 19 nt, Homo sapiens
  misc_RNA (1)...(19): siRNA sense strand
gcaaagaccuucuaagaca

SEQ ID NO: 1856887 - RNA, 19 nt, Homo sapiens
  misc_RNA (1)...(19): siRNA sense strand
ggucaacucucuacugaua

SEQ ID NO: 1856888 - RNA, 19 nt, Homo sapiens
  misc_RNA (1)...(19): siRNA sense strand
gaaguucucccacauguua

SEQ ID NO: 1856889 - RNA, 19 nt, Homo sapiens
  misc_RNA (1)...(19): siRNA sense strand
gaaauaaaccgaauucuuc

SEQ ID NO: 1856890 - RNA, 19 nt, Homo sapiens
  misc_RNA (1)...(19): siRNA sense strand
ggaaugcacuugguagaua

SEQ ID NO: 1856891 - RNA, 19 nt, Homo sapiens
  misc_RNA (1)...(19): siRNA sense strand
gaacuaacauuggaauuca

SEQ ID NO: 1856892 - RNA, 19 nt, Homo sapiens
  misc_RNA (1)...(19): siRNA sense strand
gcaagaauccugccuuuga

SEQ ID NO: 1856893 - RNA, 19 nt, Homo sapiens
  misc_RNA (1)...(19): siRNA sense strand
cuaaugcucuucuuaauga

SEQ ID NO: 1856894 - RNA, 19 nt, Homo sapiens
  misc_RNA (1)...(19): siRNA sense strand
caacaagccuccagauuag

SEQ ID NO: 1856895 - RNA, 19 nt, Homo sapiens
  misc_RNA (1)...(19): siRNA sense strand
ugaacgagcuacaucauuu

SEQ ID NO: 1856896 - RNA, 19 nt, Homo sapiens
  misc_RNA (1)...(19): siRNA sense strand
gauuagaccuguaaguuug

SEQ ID NO: 1856897 - RNA, 19 nt, Homo sapiens
  misc_RNA (1)...(19): siRNA sense strand
ucacagaaguuaaugaaga

SEQ ID NO: 1856898 - RNA, 19 nt, Homo sapiens
  misc_RNA (1)...(19): siRNA sense strand
ggaaauauccuuacaaacu

SEQ ID NO: 1856899 - RNA, 19 nt, Homo sapiens
  misc_RNA (1)...(19): siRNA sense strand
ucaaggaguuggugaauga

SEQ ID NO: 1856900 - RNA, 19 nt, Homo sapiens
  misc_RNA (1)...(19): siRNA sense strand
gcagaaauaugggaaaugu

SEQ ID NO: 1856901 - RNA, 19 nt, Homo sapiens
  misc_RNA (1)...(19): siRNA sense strand
gguaguagaucaugcagaa

SEQ ID NO: 1856902 - RNA, 19 nt, Homo sapiens
  misc_RNA (1)...(19): siRNA sense strand
gagcuuggcuugccugaug

SEQ ID NO: 1856903 - RNA, 19 nt, Homo sapiens
  misc_RNA (1)...(19): siRNA sense strand
ccacugcagucucuguuua

SEQ ID NO: 1856904 - RNA, 19 nt, Homo sapiens
  misc_RNA (1)...(19): siRNA sense strand
gaagaaagaagaaaugauc

SEQ ID NO: 1856905 - RNA, 19 nt, Homo sapiens
  misc_RNA (1)...(19): siRNA sense strand
gcacaacuccggacacuug

SEQ ID NO: 1856906 - RNA, 19 nt, Homo sapiens
  misc_RNA (1)...(19): siRNA sense strand
acaacaagccuccagauua

SEQ ID NO: 1856907 - RNA, 19 nt, Homo sapiens
  misc_RNA (1)...(19): siRNA sense strand
cuagaaauauggucaaguu

SEQ ID NO: 1856908 - RNA, 19 nt, Homo sapiens
  misc_RNA (1)...(19): siRNA sense strand
gauccaacauguaaaugaa

SEQ ID NO: 1856909 - RNA, 19 nt, Homo sapiens
  misc_RNA (1)...(19): siRNA sense strand
gagcaucugucuucaagug

SEQ ID NO: 1856910 - RNA, 19 nt, Homo sapiens
  misc_RNA (1)...(19): siRNA sense strand
ccagcaaacucuacagaaa

SEQ ID NO: 1856911 - RNA, 19 nt, Homo sapiens
  misc_RNA (1)...(19): siRNA sense strand
uauaacagguccuuccuuu

SEQ ID NO: 1856912 - RNA, 19 nt, Homo sapiens
  misc_RNA (1)...(19): siRNA sense strand
gaggacagaugcucuaaca

SEQ ID NO: 1856913 - RNA, 19 nt, Homo sapiens
  misc_RNA (1)...(19): siRNA sense strand
ggacaaacaguaugaacaa

SEQ ID NO: 1856914 - RNA, 19 nt, Homo sapiens
  misc_RNA (1)...(19): siRNA sense strand
cagaaaugcucacugcaaa

SEQ ID NO: 1856915 - RNA, 19 nt, Homo sapiens
  misc_RNA (1)...(19): siRNA sense strand
caagaauccugccuuugaa

SEQ ID NO: 1856916 - RNA, 19 nt, Homo sapiens
  misc_RNA (1)...(19): siRNA sense strand
aaagagauccaacauguaa

SEQ ID NO: 1856917 - RNA, 19 nt, Homo sapiens
  misc_RNA (1)...(19): siRNA sense strand
ugacaaauguugaagaaag

SEQ ID NO: 1856918 - RNA, 19 nt, Homo sapiens
  misc_RNA (1)...(19): siRNA sense strand
gcaacuagaacuaacauug

SEQ ID NO: 1856919 - RNA, 19 nt, Homo sapiens
  misc_RNA (1)...(19): siRNA sense strand
uaacagguccuuccuuuau

SEQ ID NO: 1856920 - RNA, 19 nt, Homo sapiens
  misc_RNA (1)...(19): siRNA sense strand
cuacugauauuacaacuuc

SEQ ID NO: 1856921 - RNA, 19 nt, Homo sapiens
  misc_RNA (1)...(19): siRNA sense strand
gagagaaauggcagaaaua

SEQ ID NO: 1856922 - RNA, 19 nt, Homo sapiens
  misc_RNA (1)...(19): siRNA sense strand
caaaagagauccaacaugu

SEQ ID NO: 1856923 - RNA, 19 nt, Homo sapiens
  misc_RNA (1)...(19): siRNA sense strand
gaagagugucuccuuguuu

SEQ ID NO: 1856924 - RNA, 19 nt, Homo sapiens
  misc_RNA (1)...(19): siRNA sense strand
gacaaauguugaagaaaga

SEQ ID NO: 1856925 - RNA, 19 nt, Homo sapiens
  misc_RNA (1)...(19): siRNA sense strand
gcauagguguuguugauca

SEQ ID NO: 1856926 - RNA, 19 nt, Homo sapiens
  misc_RNA (1)...(19): siRNA sense strand
gagcagaauucacacaagu

SEQ ID NO: 1856927 - RNA, 19 nt, Homo sapiens
  misc_RNA (1)...(19): siRNA sense strand
caucgaaaguguuuggaaa

SEQ ID NO: 1856928 - RNA, 19 nt, Homo sapiens
  misc_RNA (1)...(19): siRNA sense strand
acacaaguuucgcaaauug

SEQ ID NO: 1856929 - RNA, 19 nt, Homo sapiens
  misc_RNA (1)...(19): siRNA sense strand
ugagagaaauggcagaaau

SEQ ID NO: 1856930 - RNA, 19 nt, Homo sapiens
  misc_RNA (1)...(19): siRNA sense strand
uagcauagguguuguugau

SEQ ID NO: 1856931 - RNA, 19 nt, Homo sapiens
  misc_RNA (1)...(19): siRNA sense strand
gaaugcacuugguagauau

SEQ ID NO: 1856932 - RNA, 19 nt, Homo sapiens
  misc_RNA (1)...(19): siRNA sense strand
ugaaugauaucaggaaguu

SEQ ID NO: 1856933 - RNA, 19 nt, Homo sapiens
  misc_RNA (1)...(19): siRNA sense strand
uugaagaccucgaagauga

SEQ ID NO: 1856934 - RNA, 19 nt, Homo sapiens
  misc_RNA (1)...(19): siRNA sense strand
ccaggagacuuucaucgaa

SEQ ID NO: 1856935 - RNA, 19 nt, Homo sapiens
  misc_RNA (1)...(19): siRNA sense strand
ggacagaugcucuaacagu

SEQ ID NO: 1856936 - RNA, 19 nt, Homo sapiens
  misc_RNA (1)...(19): siRNA sense strand
uaaagaacacugacucuau

SEQ ID NO: 1856937 - RNA, 19 nt, Homo sapiens
  misc_RNA (1)...(19): siRNA sense strand
gggcucaaguccuuaaguu

SEQ ID NO: 1856938 - RNA, 19 nt, Homo sapiens
  misc_RNA (1)...(19): siRNA sense strand
uuaaauaguucccaaccuu

SEQ ID NO: 1856939 - RNA, 19 nt, Homo sapiens
  misc_RNA (1)...(19): siRNA sense strand
guuccaagguguugaaugu

SEQ ID NO: 1856940 - RNA, 19 nt, Homo sapiens
  misc_RNA (1)...(19): siRNA sense strand
caggucaacucucuacuga

SEQ ID NO: 1856941 - RNA, 19 nt, Homo sapiens
  misc_RNA (1)...(19): siRNA sense strand
ucauauacgucuagaggaa

SEQ ID NO: 1856942 - RNA, 19 nt, Homo sapiens
  misc_RNA (1)...(19): siRNA sense strand
gaagaugaaauuccacaau

SEQ ID NO: 1856943 - RNA, 19 nt, Homo sapiens
  misc_RNA (1)...(19): siRNA sense strand
gaucaaggcuguuuuccaa

SEQ ID NO: 1856944 - RNA, 19 nt, Homo sapiens
  misc_RNA (1)...(19): siRNA sense strand
ggaaacaggagcaaaauaa

SEQ ID NO: 1856945 - RNA, 19 nt, Homo sapiens
  misc_RNA (1)...(19): siRNA sense strand
ucuccaggcuaacaaauuu

SEQ ID NO: 1856946 - RNA, 19 nt, Homo sapiens
  misc_RNA (1)...(19): siRNA sense strand
ggaguccacuagaaauaug

SEQ ID NO: 1856947 - RNA, 19 nt, Homo sapiens
  misc_RNA (1)...(19): siRNA sense strand
caaagaccuucuaagacaa

SEQ ID NO: 1856948 - RNA, 19 nt, Homo sapiens
  misc_RNA (1)...(19): siRNA sense strand
acaacgugcuguuaaagaa

SEQ ID NO: 1856949 - RNA, 19 nt, Homo sapiens
  misc_RNA (1)...(19): siRNA sense strand
ucugauaggucaacaaaca

SEQ ID NO: 1856950 - RNA, 19 nt, Homo sapiens
  misc_RNA (1)...(19): siRNA sense strand
gaaagagacauugaacguu

SEQ ID NO: 1856951 - RNA, 19 nt, Homo sapiens
  misc_RNA (1)...(19): siRNA sense strand
aagcaaagaccuucuaaga

SEQ ID NO: 1856952 - RNA, 19 nt, Homo sapiens
  misc_RNA (1)...(19): siRNA sense strand
ucaacucucuacugauauu

SEQ ID NO: 1856953 - RNA, 19 nt, Homo sapiens
  misc_RNA (1)...(19): siRNA sense strand
gcaaagucuuccauguuuc

SEQ ID NO: 1856954 - RNA, 19 nt, Homo sapiens
  misc_RNA (1)...(19): siRNA sense strand
cuaagaacauaguuucaug

SEQ ID NO: 1856955 - RNA, 19 nt, Homo sapiens
  misc_RNA (1)...(19): siRNA sense strand
aaagaacacugacucuauc

SEQ ID NO: 1856956 - RNA, 19 nt, Homo sapiens
  misc_RNA (1)...(19): siRNA sense strand
ggagauguaggcaaugauu

SEQ ID NO: 1856957 - RNA, 19 nt, Homo sapiens
  misc_RNA (1)...(19): siRNA sense strand
gcaagcaacuggucaaccu

SEQ ID NO: 1856958 - RNA, 19 nt, Homo sapiens
  misc_RNA (1)...(19): siRNA sense strand
ggccaaauauguguauaga

SEQ ID NO: 1856959 - RNA, 19 nt, Homo sapiens
  misc_RNA (1)...(19): siRNA sense strand
acacacaaguuucgcaaau

SEQ ID NO: 1856960 - RNA, 19 nt, Homo sapiens
  misc_RNA (1)...(19): siRNA sense strand
agcaaagucuuccauguuu

SEQ ID NO: 1856961 - RNA, 19 nt, Homo sapiens
  misc_RNA (1)...(19): siRNA sense strand
gcagaggcaacuagaacua

SEQ ID NO: 1856962 - RNA, 19 nt, Homo sapiens
  misc_RNA (1)...(19): siRNA sense strand
gaggaacugcuccguguuu

SEQ ID NO: 1856963 - RNA, 19 nt, Homo sapiens
  misc_RNA (1)...(19): siRNA sense strand
gcagaauucacacaaguug

SEQ ID NO: 1856964 - RNA, 19 nt, Homo sapiens
  misc_RNA (1)...(19): siRNA sense strand
acagguccuuccuuuauaa

SEQ ID NO: 1856965 - RNA, 19 nt, Homo sapiens
  misc_RNA (1)...(19): siRNA sense strand
uaacagugcagauauaaca

SEQ ID NO: 1856966 - RNA, 19 nt, Homo sapiens
  misc_RNA (1)...(19): siRNA sense strand
ccaagaguacagugaauuu

SEQ ID NO: 1856967 - RNA, 19 nt, Homo sapiens
  misc_RNA (1)...(19): siRNA sense strand
gaaagaagaaaugaucuag

SEQ ID NO: 1856968 - RNA, 19 nt, Homo sapiens
  misc_RNA (1)...(19): siRNA sense strand
ugcagucucuguuuacuaa

SEQ ID NO: 1856969 - RNA, 19 nt, Homo sapiens
  misc_RNA (1)...(19): siRNA sense strand
cacagaaguuaaugaagaa

SEQ ID NO: 1856970 - RNA, 19 nt, Homo sapiens
  misc_RNA (1)...(19): siRNA sense strand
uagacaacgugcuguuaaa

SEQ ID NO: 1856971 - RNA, 19 nt, Homo sapiens
  misc_RNA (1)...(19): siRNA sense strand
gaaugcaacaguuugaaga

SEQ ID NO: 1856972 - RNA, 19 nt, Homo sapiens
  misc_RNA (1)...(19): siRNA sense strand
gagagaggcaucugagaga

SEQ ID NO: 1856973 - RNA, 19 nt, Homo sapiens
  misc_RNA (1)...(19): siRNA sense strand
gacaaacaguaugaacaaa

SEQ ID NO: 1856974 - RNA, 19 nt, Homo sapiens
  misc_RNA (1)...(19): siRNA sense strand
gaacgagcuacaucauuug

SEQ ID NO: 1856975 - RNA, 19 nt, Homo sapiens
  misc_RNA (1)...(19): siRNA sense strand
ucugugacgucuugaaauu

SEQ ID NO: 1856976 - RNA, 19 nt, Homo sapiens
  misc_RNA (1)...(19): siRNA sense strand
cggauuacaucaaggaguu

SEQ ID NO: 1856977 - RNA, 19 nt, Homo sapiens
  misc_RNA (1)...(19): siRNA sense strand
acacuuauuuggagcagaa

SEQ ID NO: 1856978 - RNA, 19 nt, Homo sapiens
  misc_RNA (1)...(19): siRNA sense strand
ugaagagugucuccuuguu

SEQ ID NO: 1856979 - RNA, 19 nt, Homo sapiens
  misc_RNA (1)...(19): siRNA sense strand
cauuugggauguuuaguga

SEQ ID NO: 1856980 - RNA, 19 nt, Homo sapiens
  misc_RNA (1)...(19): siRNA sense strand
agugugaucuuacccuuaa

SEQ ID NO: 1856981 - RNA, 19 nt, Homo sapiens
  misc_RNA (1)...(19): siRNA sense strand
gagcuggcuuugucauaug

SEQ ID NO: 1856982 - RNA, 19 nt, Homo sapiens
  misc_RNA (1)...(19): siRNA sense strand
gaagaaagagacauugaac

SEQ ID NO: 1856983 - RNA, 19 nt, Homo sapiens
  misc_RNA (1)...(19): siRNA sense strand
gaagaagcaaaugaacuuu

SEQ ID NO: 1856984 - RNA, 19 nt, Homo sapiens
  misc_RNA (1)...(19): siRNA sense strand
ugauaucugugacgucuug

SEQ ID NO: 1856985 - RNA, 19 nt, Homo sapiens
  misc_RNA (1)...(19): siRNA sense strand
gggaauuuaucgugugugu

SEQ ID NO: 1856986 - RNA, 19 nt, Homo sapiens
  misc_RNA (1)...(19): siRNA sense strand
gagcagagcugaacaaaug

SEQ ID NO: 1856987 - RNA, 19 nt, Homo sapiens
  misc_RNA (1)...(19): siRNA sense strand
gaacgggucuggcaacuaa

SEQ ID NO: 1856988 - RNA, 19 nt, Homo sapiens
  misc_RNA (1)...(19): siRNA sense strand
gcaccaaguucccagcuua

SEQ ID NO: 1856989 - RNA, 19 nt, Homo sapiens
  misc_RNA (1)...(19): siRNA sense strand
caauaguucucgaaaguua

SEQ ID NO: 1856990 - RNA, 19 nt, Homo sapiens
  misc_RNA (1)...(19): siRNA sense strand
ggagagacgucaucaguau

SEQ ID NO: 1856991 - RNA, 19 nt, Homo sapiens
  misc_RNA (1)...(19): siRNA sense strand
gaacaaagaagaauccuau

SEQ ID NO: 1856992 - RNA, 19 nt, Homo sapiens
  misc_RNA (1)...(19): siRNA sense strand
ggagaaacgucaauuguca

SEQ ID NO: 1856993 - RNA, 19 nt, Homo sapiens
  misc_RNA (1)...(19): siRNA sense strand
gaaggucgcugcuauugug

SEQ ID NO: 1856994 - RNA, 19 nt, Homo sapiens
  misc_RNA (1)...(19): siRNA sense strand
ggagugguccgguuaaaua

SEQ ID NO: 1856995 - RNA, 19 nt, Homo sapiens
  misc_RNA (1)...(19): siRNA sense strand
ggagucagaucuucguaaa

SEQ ID NO: 1856996 - RNA, 19 nt, Homo sapiens
  misc_RNA (1)...(19): siRNA sense strand
gcaaugaugucgggauauu

SEQ ID NO: 1856997 - RNA, 19 nt, Homo sapiens
  misc_RNA (1)...(19): siRNA sense strand
ugaguuaccugacugguuu

SEQ ID NO: 1856998 - RNA, 19 nt, Homo sapiens
  misc_RNA (1)...(19): siRNA sense strand
uaacugagaacaugucuuu

SEQ ID NO: 1856999 - RNA, 19 nt, Homo sapiens
  misc_RNA (1)...(19): siRNA sense strand
gcgagaagcugguuucaag

SEQ ID NO: 1857000 - RNA, 19 nt, Homo sapiens
  misc_RNA (1)...(19): siRNA sense strand
gcagugaggagcaagauaa

SEQ ID NO: 1857001 - RNA, 19 nt, Homo sapiens
  misc_RNA (1)...(19): siRNA sense strand
caacaucccgucauuaaau

SEQ ID NO: 1857002 - RNA, 19 nt, Homo sapiens
  misc_RNA (1)...(19): siRNA sense strand
gaacacacaggauuucaga

SEQ ID NO: 1857003 - RNA, 19 nt, Homo sapiens
  misc_RNA (1)...(19): siRNA sense strand
ugacagugacucagaaaua

SEQ ID NO: 1857004 - RNA, 19 nt, Homo sapiens
  misc_RNA (1)...(19): siRNA sense strand
gaagccacuuugaauguga

SEQ ID NO: 1857005 - RNA, 19 nt, Homo sapiens
  misc_RNA (1)...(19): siRNA sense strand
gcaagauaaugcucccaaa

SEQ ID NO: 1857006 - RNA, 19 nt, Homo sapiens
  misc_RNA (1)...(19): siRNA sense strand
cuguggaccuguugaauua

SEQ ID NO: 1857007 - RNA, 19 nt, Homo sapiens
  misc_RNA (1)...(19): siRNA sense strand
gugagaagcugaaggaaag

SEQ ID NO: 1857008 - RNA, 19 nt, Homo sapiens
  misc_RNA (1)...(19): siRNA sense strand
gagccgauguguauagaga

SEQ ID NO: 1857009 - RNA, 19 nt, Homo sapiens
  misc_RNA (1)...(19): siRNA sense strand
gcagagcgaacgaagagua

SEQ ID NO: 1857010 - RNA, 19 nt, Homo sapiens
  misc_RNA (1)...(19): siRNA sense strand
gggcaucuaccaaagguua

SEQ ID NO: 1857011 - RNA, 19 nt, Homo sapiens
  misc_RNA (1)...(19): siRNA sense strand
gcuagcagcgaucaacuua

SEQ ID NO: 1857012 - RNA, 19 nt, Homo sapiens
  misc_RNA (1)...(19): siRNA sense strand
caaccuaaauucagccaau

SEQ ID NO: 1857013 - RNA, 19 nt, Homo sapiens
  misc_RNA (1)...(19): siRNA sense strand
gaagaugaagcaauauaug

SEQ ID NO: 1857014 - RNA, 19 nt, Homo sapiens
  misc_RNA (1)...(19): siRNA sense strand
aaacgucaauugucauuuc

SEQ ID NO: 1857015 - RNA, 19 nt, Homo sapiens
  misc_RNA (1)...(19): siRNA sense strand
gagccgagccgauguguau

SEQ ID NO: 1857016 - RNA, 19 nt, Homo sapiens
  misc_RNA (1)...(19): siRNA sense strand
ucacgaaggagacauaauu

SEQ ID NO: 1857017 - RNA, 19 nt, Homo sapiens
  misc_RNA (1)...(19): siRNA sense strand
gaccgcauguccuacuuaa

SEQ ID NO: 1857018 - RNA, 19 nt, Homo sapiens
  misc_RNA (1)...(19): siRNA sense strand
ggaacgaguuggagaaagg

SEQ ID NO: 1857019 - RNA, 19 nt, Homo sapiens
  misc_RNA (1)...(19): siRNA sense strand
caagaucaaugggacugua

SEQ ID NO: 1857020 - RNA, 19 nt, Homo sapiens
  misc_RNA (1)...(19): siRNA sense strand
caacaauaguucucgaaag

SEQ ID NO: 1857021 - RNA, 19 nt, Homo sapiens
  misc_RNA (1)...(19): siRNA sense strand
uggaagggauggaugauga

SEQ ID NO: 1857022 - RNA, 19 nt, Homo sapiens
  misc_RNA (1)...(19): siRNA sense strand
gagaggagccggcugaaca

SEQ ID NO: 1857023 - RNA, 19 nt, Homo sapiens
  misc_RNA (1)...(19): siRNA sense strand
gauauuuguugcuggcauu

SEQ ID NO: 1857024 - RNA, 19 nt, Homo sapiens
  misc_RNA (1)...(19): siRNA sense strand
ggaugugcuucauucguuu

SEQ ID NO: 1857025 - RNA, 19 nt, Homo sapiens
  misc_RNA (1)...(19): siRNA sense strand
ggaucgaaauugcccagaa

SEQ ID NO: 1857026 - RNA, 19 nt, Homo sapiens
  misc_RNA (1)...(19): siRNA sense strand
cgaaagcuguggaccuguu

SEQ ID NO: 1857027 - RNA, 19 nt, Homo sapiens
  misc_RNA (1)...(19): siRNA sense strand
ggauaagcaugcacuacug

SEQ ID NO: 1857028 - RNA, 19 nt, Homo sapiens
  misc_RNA (1)...(19): siRNA sense strand
gcaggagggccuucaagaa

SEQ ID NO: 1857029 - RNA, 19 nt, Homo sapiens
  misc_RNA (1)...(19): siRNA sense strand
gacagugacucagaaauag

SEQ ID NO: 1857030 - RNA, 19 nt, Homo sapiens
  misc_RNA (1)...(19): siRNA sense strand
agacauaauucucaagauc

SEQ ID NO: 1857031 - RNA, 19 nt, Homo sapiens
  misc_RNA (1)...(19): siRNA sense strand
gcaauauauggcccuaaua

SEQ ID NO: 1857032 - RNA, 19 nt, Homo sapiens
  misc_RNA (1)...(19): siRNA sense strand
gaucgaaauugcccagaag

SEQ ID NO: 1857033 - RNA, 19 nt, Homo sapiens
  misc_RNA (1)...(19): siRNA sense strand
agauaaugcucccaaauca

SEQ ID NO: 1857034 - RNA, 19 nt, Homo sapiens
  misc_RNA (1)...(19): siRNA sense strand
cagcuacaaucaaccuaaa

SEQ ID NO: 1857035 - RNA, 19 nt, Homo sapiens
  misc_RNA (1)...(19): siRNA sense strand
uuaccugacugguuucaaa

SEQ ID NO: 1857036 - RNA, 19 nt, Homo sapiens
  misc_RNA (1)...(19): siRNA sense strand
agaaaucccuaaaggugaa

SEQ ID NO: 1857037 - RNA, 19 nt, Homo sapiens
  misc_RNA (1)...(19): siRNA sense strand
ucaaugggacuguaacuga

SEQ ID NO: 1857038 - RNA, 19 nt, Homo sapiens
  misc_RNA (1)...(19): siRNA sense strand
gaagaagaaccugaggaaa

SEQ ID NO: 1857039 - RNA, 19 nt, Homo sapiens
  misc_RNA (1)...(19): siRNA sense strand
gcucgaaaauugauagaaa

SEQ ID NO: 1857040 - RNA, 19 nt, Homo sapiens
  misc_RNA (1)...(19): siRNA sense strand
ccucaucagugacuuugaa

SEQ ID NO: 1857041 - RNA, 19 nt, Homo sapiens
  misc_RNA (1)...(19): siRNA sense strand
ucaagaaggagaccagauu

SEQ ID NO: 1857042 - RNA, 19 nt, Homo sapiens
  misc_RNA (1)...(19): siRNA sense strand
cgucaauugucauuucuga

SEQ ID NO: 1857043 - RNA, 19 nt, Homo sapiens
  misc_RNA (1)...(19): siRNA sense strand
caagugagaagcugaagga

SEQ ID NO: 1857044 - RNA, 19 nt, Homo sapiens
  misc_RNA (1)...(19): siRNA sense strand
gauuaucauuccucaagug

SEQ ID NO: 1857045 - RNA, 19 nt, Homo sapiens
  misc_RNA (1)...(19): siRNA sense strand
gaggagagacgucaucagu

SEQ ID NO: 1857046 - RNA, 19 nt, Homo sapiens
  misc_RNA (1)...(19): siRNA sense strand
gagcugauaugggaacagu

SEQ ID NO: 1857047 - RNA, 19 nt, Homo sapiens
  misc_RNA (1)...(19): siRNA sense strand
gggccaggguuacaagaga

SEQ ID NO: 1857048 - RNA, 19 nt, Homo sapiens
  misc_RNA (1)...(19): siRNA sense strand
uggagaagauggaucacaa

SEQ ID NO: 1857049 - RNA, 19 nt, Homo sapiens
  misc_RNA (1)...(19): siRNA sense strand
gcuacaaucaaccuaaauu

SEQ ID NO: 1857050 - RNA, 19 nt, Homo sapiens
  misc_RNA (1)...(19): siRNA sense strand
uauaagaagccacuuugaa

SEQ ID NO: 1857051 - RNA, 19 nt, Homo sapiens
  misc_RNA (1)...(19): siRNA sense strand
uggcaaugaugucgggaua

SEQ ID NO: 1857052 - RNA, 19 nt, Homo sapiens
  misc_RNA (1)...(19): siRNA sense strand
uaaaugacagugacucaga

SEQ ID NO: 1857053 - RNA, 19 nt, Homo sapiens
  misc_RNA (1)...(19): siRNA sense strand
acaaaaggauuccaaaaga

SEQ ID NO: 1857054 - RNA, 19 nt, Homo sapiens
  misc_RNA (1)...(19): siRNA sense strand
acaaagaagaauccuauga

SEQ ID NO: 1857055 - RNA, 19 nt, Homo sapiens
  misc_RNA (1)...(19): siRNA sense strand
gaggagagcauaaggaaac

SEQ ID NO: 1857056 - RNA, 19 nt, Homo sapiens
  misc_RNA (1)...(19): siRNA sense strand
aacaauaguucucgaaagu

SEQ ID NO: 1857057 - RNA, 19 nt, Homo sapiens
  misc_RNA (1)...(19): siRNA sense strand
gcaaguuauugaacaggau

SEQ ID NO: 1857058 - RNA, 19 nt, Homo sapiens
  misc_RNA (1)...(19): siRNA sense strand
uaagaagccacuuugaaug

SEQ ID NO: 1857059 - RNA, 19 nt, Homo sapiens
  misc_RNA (1)...(19): siRNA sense strand
cagcagacccucaucaaca

SEQ ID NO: 1857060 - RNA, 19 nt, Homo sapiens
  misc_RNA (1)...(19): siRNA sense strand
cuccaaauccuaugaauau

SEQ ID NO: 1857061 - RNA, 19 nt, Homo sapiens
  misc_RNA (1)...(19): siRNA sense strand
gcgccuacacugacaauga

SEQ ID NO: 1857062 - RNA, 19 nt, Homo sapiens
  misc_RNA (1)...(19): siRNA sense strand
gcuaaugaguuaccugacu

SEQ ID NO: 1857063 - RNA, 19 nt, Homo sapiens
  misc_RNA (1)...(19): siRNA sense strand
uccugaagaugaagcaaua

SEQ ID NO: 1857064 - RNA, 19 nt, Homo sapiens
  misc_RNA (1)...(19): siRNA sense strand
cgacacccacucccuuuaa

SEQ ID NO: 1857065 - RNA, 19 nt, Homo sapiens
  misc_RNA (1)...(19): siRNA sense strand
gugggaaggucgcugcuau

SEQ ID NO: 1857066 - RNA, 19 nt, Homo sapiens
  misc_RNA (1)...(19): siRNA sense strand
gcgaucaacuuagggacaa

SEQ ID NO: 1857067 - RNA, 19 nt, Homo sapiens
  misc_RNA (1)...(19): siRNA sense strand
uaaauucagccaaugauag

SEQ ID NO: 1857068 - RNA, 19 nt, Homo sapiens
  misc_RNA (1)...(19): siRNA sense strand
ugaagaagaaccugaggaa

SEQ ID NO: 1857069 - RNA, 19 nt, Homo sapiens
  misc_RNA (1)...(19): siRNA sense strand
ccacagagccuggccuuca

SEQ ID NO: 1857070 - RNA, 19 nt, Homo sapiens
  misc_RNA (1)...(19): siRNA sense strand
ccaacaaggaacccagaua

SEQ ID NO: 1857071 - RNA, 19 nt, Homo sapiens
  misc_RNA (1)...(19): siRNA sense strand
ggacuacgagcgagccuau

SEQ ID NO: 1857072 - RNA, 19 nt, Homo sapiens
  misc_RNA (1)...(19): siRNA sense strand
gacuguaacugagaacaug

SEQ ID NO: 1857073 - RNA, 19 nt, Homo sapiens
  misc_RNA (1)...(19): siRNA sense strand
ucucgaaaguuauuugauc

SEQ ID NO: 1857074 - RNA, 19 nt, Homo sapiens
  misc_RNA (1)...(19): siRNA sense strand
ugaauuacacccagugguu

SEQ ID NO: 1857075 - RNA, 19 nt, Homo sapiens
  misc_RNA (1)...(19): siRNA sense strand
gcuguggaccuguugaauu

SEQ ID NO: 1857076 - RNA, 19 nt, Homo sapiens
  misc_RNA (1)...(19): siRNA sense strand
gcugauauagcaauggaaa

SEQ ID NO: 1857077 - RNA, 19 nt, Homo sapiens
  misc_RNA (1)...(19): siRNA sense strand
caaauggccaguguucaaa

SEQ ID NO: 1857078 - RNA, 19 nt, Homo sapiens
  misc_RNA (1)...(19): siRNA sense strand
caacaaggaacccagauac

SEQ ID NO: 1857079 - RNA, 19 nt, Homo sapiens
  misc_RNA (1)...(19): siRNA sense strand
agagucaacccgaucauuu

SEQ ID NO: 1857080 - RNA, 19 nt, Homo sapiens
  misc_RNA (1)...(19): siRNA sense strand
caaggaacccagauaccaa

SEQ ID NO: 1857081 - RNA, 19 nt, Homo sapiens
  misc_RNA (1)...(19): siRNA sense strand
gaaugcaaggaucgaaauu

SEQ ID NO: 1857082 - RNA, 19 nt, Homo sapiens
  misc_RNA (1)...(19): siRNA sense strand
gaagaccucacagcuguug

SEQ ID NO: 1857083 - RNA, 19 nt, Homo sapiens
  misc_RNA (1)...(19): siRNA sense strand
gagaaggaaacuccacaga

SEQ ID NO: 1857084 - RNA, 19 nt, Homo sapiens
  misc_RNA (1)...(19): siRNA sense strand
cugaugggcugcuccaaga

SEQ ID NO: 1857085 - RNA, 19 nt, Homo sapiens
  misc_RNA (1)...(19): siRNA sense strand
ucaauugucauuucugaug

SEQ ID NO: 1857086 - RNA, 19 nt, Homo sapiens
  misc_RNA (1)...(19): siRNA sense strand
gcaggaagauguuggaaga

SEQ ID NO: 1857087 - RNA, 19 nt, Homo sapiens
  misc_RNA (1)...(19): siRNA sense strand
gaagcaagcuauccuggaa

SEQ ID NO: 1857088 - RNA, 19 nt, Homo sapiens
  misc_RNA (1)...(19): siRNA sense strand
gaagagaccaucaaguuug

SEQ ID NO: 1857089 - RNA, 19 nt, Homo sapiens
  misc_RNA (1)...(19): siRNA sense strand
gcgcauggguugugagauu

SEQ ID NO: 1857090 - RNA, 19 nt, Homo sapiens
  misc_RNA (1)...(19): siRNA sense strand
ccaaaucccuggagaagau

SEQ ID NO: 1857091 - RNA, 19 nt, Homo sapiens
  misc_RNA (1)...(19): siRNA sense strand
ggaagagaccaucaaguuu

SEQ ID NO: 1857092 - RNA, 19 nt, Homo sapiens
  misc_RNA (1)...(19): siRNA sense strand
ggaagaagcugaggcuaag

SEQ ID NO: 1857093 - RNA, 19 nt, Homo sapiens
  misc_RNA (1)...(19): siRNA sense strand
aaacauaaguaccgccaaa

SEQ ID NO: 1857094 - RNA, 19 nt, Homo sapiens
  misc_RNA (1)...(19): siRNA sense strand
gcacaaagaacgagaacga

SEQ ID NO: 1857095 - RNA, 19 nt, Homo sapiens
  misc_RNA (1)...(19): siRNA sense strand
gcaccauccucaccaagaa

SEQ ID NO: 1857096 - RNA, 19 nt, Homo sapiens
  misc_RNA (1)...(19): siRNA sense strand
caggagagcuggcugacaa

SEQ ID NO: 1857097 - RNA, 19 nt, Homo sapiens
  misc_RNA (1)...(19): siRNA sense strand
ggaccgagaucgagacaag

SEQ ID NO: 1857098 - RNA, 19 nt, Homo sapiens
  misc_RNA (1)...(19): siRNA sense strand
uaagaaggaugaagaggau

SEQ ID NO: 1857099 - RNA, 19 nt, Homo sapiens
  misc_RNA (1)...(19): siRNA sense strand
ggacaaggaccguaaacga

SEQ ID NO: 1857100 - RNA, 19 nt, Homo sapiens
  misc_RNA (1)...(19): siRNA sense strand
gcaagacuccgcaaacuuc

SEQ ID NO: 1857101 - RNA, 19 nt, Homo sapiens
  misc_RNA (1)...(19): siRNA sense strand
gcagucacguuucuaugga

SEQ ID NO: 1857102 - RNA, 19 nt, Homo sapiens
  misc_RNA (1)...(19): siRNA sense strand
gcagauaggaugauugaca

SEQ ID NO: 1857103 - RNA, 19 nt, Homo sapiens
  misc_RNA (1)...(19): siRNA sense strand
gaagaugcuggccaacuuu

SEQ ID NO: 1857104 - RNA, 19 nt, Homo sapiens
  misc_RNA (1)...(19): siRNA sense strand
ggaugaacauggugauaag

SEQ ID NO: 1857105 - RNA, 19 nt, Homo sapiens
  misc_RNA (1)...(19): siRNA sense strand
cggcaucguucaagggaua

SEQ ID NO: 1857106 - RNA, 19 nt, Homo sapiens
  misc_RNA (1)...(19): siRNA sense strand
ggaggucauugauaagugu

SEQ ID NO: 1857107 - RNA, 19 nt, Homo sapiens
  misc_RNA (1)...(19): siRNA sense strand
cguaaacgauccagcuuau

SEQ ID NO: 1857108 - RNA, 19 nt, Homo sapiens
  misc_RNA (1)...(19): siRNA sense strand
gaucgucauuggucucaga

SEQ ID NO: 1857109 - RNA, 19 nt, Homo sapiens
  misc_RNA (1)...(19): siRNA sense strand
uuccaaaucugcagaaaga

SEQ ID NO: 1857110 - RNA, 19 nt, Homo sapiens
  misc_RNA (1)...(19): siRNA sense strand
ucuuggaggucauugauaa

SEQ ID NO: 1857111 - RNA, 19 nt, Homo sapiens
  misc_RNA (1)...(19): siRNA sense strand
gauagaaagcggcaucguu

SEQ ID NO: 1857112 - RNA, 19 nt, Homo sapiens
  misc_RNA (1)...(19): siRNA sense strand
gcuuaaggcccagccauua

SEQ ID NO: 1857113 - RNA, 19 nt, Homo sapiens
  misc_RNA (1)...(19): siRNA sense strand
ggcagaggaugcuugaaga

SEQ ID NO: 1857114 - RNA, 19 nt, Homo sapiens
  misc_RNA (1)...(19): siRNA sense strand
gaagggcugcgacguguug

SEQ ID NO: 1857115 - RNA, 19 nt, Homo sapiens
  misc_RNA (1)...(19): siRNA sense strand
agaagaugcuggccaacuu

SEQ ID NO: 1857116 - RNA, 19 nt, Homo sapiens
  misc_RNA (1)...(19): siRNA sense strand
ggaacugcaugccauuaag

SEQ ID NO: 1857117 - RNA, 19 nt, Homo sapiens
  misc_RNA (1)...(19): siRNA sense strand
gaacgggagaccaauggaa

SEQ ID NO: 1857118 - RNA, 19 nt, Homo sapiens
  misc_RNA (1)...(19): siRNA sense strand
gagaacgacggcacaaaga

SEQ ID NO: 1857119 - RNA, 19 nt, Homo sapiens
  misc_RNA (1)...(19): siRNA sense strand
gaucgaagagucagaccaa

SEQ ID NO: 1857120 - RNA, 19 nt, Homo sapiens
  misc_RNA (1)...(19): siRNA sense strand
agaggaugcuugaagaaga

SEQ ID NO: 1857121 - RNA, 19 nt, Homo sapiens
  misc_RNA (1)...(19): siRNA sense strand
aaagaacgagaacgagaua

SEQ ID NO: 1857122 - RNA, 19 nt, Homo sapiens
  misc_RNA (1)...(19): siRNA sense strand
gacccacccaucauuauuu

SEQ ID NO: 1857123 - RNA, 19 nt, Homo sapiens
  misc_RNA (1)...(19): siRNA sense strand
ucaaugaccggaaauuugu

SEQ ID NO: 1857124 - RNA, 19 nt, Homo sapiens
  misc_RNA (1)...(19): siRNA sense strand
gccaucaccuuccucacaa

SEQ ID NO: 1857125 - RNA, 19 nt, Homo sapiens
  misc_RNA (1)...(19): siRNA sense strand
ugauugaugugcuggagaa

SEQ ID NO: 1857126 - RNA, 19 nt, Homo sapiens
  misc_RNA (1)...(19): siRNA sense strand
agacaaggaugggcacaga

SEQ ID NO: 1857127 - RNA, 19 nt, Homo sapiens
  misc_RNA (1)...(19): siRNA sense strand
caacuaugauauggccaaa

SEQ ID NO: 1857128 - RNA, 19 nt, Homo sapiens
  misc_RNA (1)...(19): siRNA sense strand
cagauaggaugauugacau

SEQ ID NO: 1857129 - RNA, 19 nt, Homo sapiens
  misc_RNA (1)...(19): siRNA sense strand
acagagagcgggauagaga

SEQ ID NO: 1857130 - RNA, 19 nt, Homo sapiens
  misc_RNA (1)...(19): siRNA sense strand
uuaccuggguggcaucaaa

SEQ ID NO: 1857131 - RNA, 19 nt, Homo sapiens
  misc_RNA (1)...(19): siRNA sense strand
ggagaccaauggaaaugag

SEQ ID NO: 1857132 - RNA, 19 nt, Homo sapiens
  misc_RNA (1)...(19): siRNA sense strand
ugaagaggaugaacauggu

SEQ ID NO: 1857133 - RNA, 19 nt, Homo sapiens
  misc_RNA (1)...(19): siRNA sense strand
ggcagaagauccgggaaga

SEQ ID NO: 1857134 - RNA, 19 nt, Homo sapiens
  misc_RNA (1)...(19): siRNA sense strand
ccuaugugguucuggauga

SEQ ID NO: 1857135 - RNA, 19 nt, Homo sapiens
  misc_RNA (1)...(19): siRNA sense strand
gaucaccacacuucccaaa

SEQ ID NO: 1857136 - RNA, 19 nt, Homo sapiens
  misc_RNA (1)...(19): siRNA sense strand
acagaaucgugacaucauu

SEQ ID NO: 1857137 - RNA, 19 nt, Homo sapiens
  misc_RNA (1)...(19): siRNA sense strand
gcagaggaugcuugaagaa

SEQ ID NO: 1857138 - RNA, 19 nt, Homo sapiens
  misc_RNA (1)...(19): siRNA sense strand
ggacucugcuguguucuac

SEQ ID NO: 1857139 - RNA, 19 nt, Homo sapiens
  misc_RNA (1)...(19): siRNA sense strand
aggaagagaccaucaaguu

SEQ ID NO: 1857140 - RNA, 19 nt, Homo sapiens
  misc_RNA (1)...(19): siRNA sense strand
gggaagagaaggauaagag

SEQ ID NO: 1857141 - RNA, 19 nt, Homo sapiens
  misc_RNA (1)...(19): siRNA sense strand
gaggaugcuugaagaagag

SEQ ID NO: 1857142 - RNA, 19 nt, Homo sapiens
  misc_RNA (1)...(19): siRNA sense strand
gacaaggaccguaaacgau

SEQ ID NO: 1857143 - RNA, 19 nt, Homo sapiens
  misc_RNA (1)...(19): siRNA sense strand
gacagggacuggcggaucu

SEQ ID NO: 1857144 - RNA, 19 nt, Homo sapiens
  misc_RNA (1)...(19): siRNA sense strand
caaaucugcagaaagagaa

SEQ ID NO: 1857145 - RNA, 19 nt, Homo sapiens
  misc_RNA (1)...(19): siRNA sense strand
cagaagauccgggaagaga

SEQ ID NO: 1857146 - RNA, 19 nt, Homo sapiens
  misc_RNA (1)...(19): siRNA sense strand
gauuacauccaccgcauug

SEQ ID NO: 1857147 - RNA, 19 nt, Homo sapiens
  misc_RNA (1)...(19): siRNA sense strand
cgagagcagucacguuucu

SEQ ID NO: 1857148 - RNA, 19 nt, Homo sapiens
  misc_RNA (1)...(19): siRNA sense strand
uaaacgauccagcuuaucu

SEQ ID NO: 1857149 - RNA, 19 nt, Homo sapiens
  misc_RNA (1)...(19): siRNA sense strand
gaacgacggcacaaagaac

SEQ ID NO: 1857150 - RNA, 19 nt, Homo sapiens
  misc_RNA (1)...(19): siRNA sense strand
ccaaaucugcagaaagaga

SEQ ID NO: 1857151 - RNA, 19 nt, Homo sapiens
  misc_RNA (1)...(19): siRNA sense strand
guugugagauugugauugc

SEQ ID NO: 1857152 - RNA, 19 nt, Homo sapiens
  misc_RNA (1)...(19): siRNA sense strand
caaagaacgagaacgagau

SEQ ID NO: 1857153 - RNA, 19 nt, Homo sapiens
  misc_RNA (1)...(19): siRNA sense strand
gacagcagccuuccucauc

SEQ ID NO: 1857154 - RNA, 19 nt, Homo sapiens
  misc_RNA (1)...(19): siRNA sense strand
gaagauccgggaagagaag

SEQ ID NO: 1857155 - RNA, 19 nt, Homo sapiens
  misc_RNA (1)...(19): siRNA sense strand
ccaauggaaaugaggauga

SEQ ID NO: 1857156 - RNA, 19 nt, Homo sapiens
  misc_RNA (1)...(19): siRNA sense strand
gaggaugaacauggugaua

SEQ ID NO: 1857157 - RNA, 19 nt, Homo sapiens
  misc_RNA (1)...(19): siRNA sense strand
ccaaguuccucucuaaagc

SEQ ID NO: 1857158 - RNA, 19 nt, Homo sapiens
  misc_RNA (1)...(19): siRNA sense strand
ggaugaagaggaugaacau

SEQ ID NO: 1857159 - RNA, 19 nt, Homo sapiens
  misc_RNA (1)...(19): siRNA sense strand
gaccugcugugguguacau

SEQ ID NO: 1857160 - RNA, 19 nt, Homo sapiens
  misc_RNA (1)...(19): siRNA sense strand
ugauugacaugggcuuuga

SEQ ID NO: 1857161 - RNA, 19 nt, Homo sapiens
  misc_RNA (1)...(19): siRNA sense strand
gagcgggaucggaauaaga

SEQ ID NO: 1857162 - RNA, 19 nt, Homo sapiens
  misc_RNA (1)...(19): siRNA sense strand
guuccucucuaaagcagaa

SEQ ID NO: 1857163 - RNA, 19 nt, Homo sapiens
  misc_RNA (1)...(19): siRNA sense strand
gaagaggcgaacccuggaa

SEQ ID NO: 1857164 - RNA, 19 nt, Homo sapiens
  misc_RNA (1)...(19): siRNA sense strand
gaccaucaaguuugggaaa

SEQ ID NO: 1857165 - RNA, 19 nt, Homo sapiens
  misc_RNA (1)...(19): siRNA sense strand
gcuacagaaucgugacauc

SEQ ID NO: 1857166 - RNA, 19 nt, Homo sapiens
  misc_RNA (1)...(19): siRNA sense strand
gaacgagaacgagauaagg

SEQ ID NO: 1857167 - RNA, 19 nt, Homo sapiens
  misc_RNA (1)...(19): siRNA sense strand
ggauggaacgggagaccaa

SEQ ID NO: 1857168 - RNA, 19 nt, Homo sapiens
  misc_RNA (1)...(19): siRNA sense strand
ugaggacccugagaagaug

SEQ ID NO: 1857169 - RNA, 19 nt, Homo sapiens
  misc_RNA (1)...(19): siRNA sense strand
ugaggcagauaggaugauu

SEQ ID NO: 1857170 - RNA, 19 nt, Homo sapiens
  misc_RNA (1)...(19): siRNA sense strand
gaauaagaaggaccgagau

SEQ ID NO: 1857171 - RNA, 19 nt, Homo sapiens
  misc_RNA (1)...(19): siRNA sense strand
acaaggaaccaacaccuau

SEQ ID NO: 1857172 - RNA, 19 nt, Homo sapiens
  misc_RNA (1)...(19): siRNA sense strand
cgugaggacuacagcauca

SEQ ID NO: 1857173 - RNA, 19 nt, Homo sapiens
  misc_RNA (1)...(19): siRNA sense strand
gagacucuaagaaggauga

SEQ ID NO: 1857174 - RNA, 19 nt, Homo sapiens
  misc_RNA (1)...(19): siRNA sense strand
gaaagcggcaucguucaag

SEQ ID NO: 1857175 - RNA, 19 nt, Homo sapiens
  misc_RNA (1)...(19): siRNA sense strand
gaucuuccgugaggacuac

SEQ ID NO: 1857176 - RNA, 19 nt, Homo sapiens
  misc_RNA (1)...(19): siRNA sense strand
aagcagcgcugggaugauc

SEQ ID NO: 1857177 - RNA, 19 nt, Homo sapiens
  misc_RNA (1)...(19): siRNA sense strand
ccaagcagcgcugggauga

SEQ ID NO: 1857178 - RNA, 19 nt, Homo sapiens
  misc_RNA (1)...(19): siRNA sense strand
uaagaaggaccgagaucga

SEQ ID NO: 1857179 - RNA, 19 nt, Homo sapiens
  misc_RNA (1)...(19): siRNA sense strand
gaagagaggaagaaaagga

SEQ ID NO: 1857180 - RNA, 19 nt, Homo sapiens
  misc_RNA (1)...(19): siRNA sense strand
gaagaagagaggaagaaaa

SEQ ID NO: 1857181 - RNA, 19 nt, Homo sapiens
  misc_RNA (1)...(19): siRNA sense strand
gaacugcaugccauuaagg

SEQ ID NO: 1857182 - RNA, 19 nt, Homo sapiens
  misc_RNA (1)...(19): siRNA sense strand
gcacuguggcugucauugg

SEQ ID NO: 1857183 - RNA, 19 nt, Homo sapiens
  misc_RNA (1)...(19): siRNA sense strand
ccauugggcuacagaaucg

SEQ ID NO: 1857184 - RNA, 19 nt, Homo sapiens
  misc_RNA (1)...(19): siRNA sense strand
guaagaaggaagccaagca

SEQ ID NO: 1857185 - RNA, 19 nt, Homo sapiens
  misc_RNA (1)...(19): siRNA sense strand
ugacagagagcgggauaga

SEQ ID NO: 1857186 - RNA, 19 nt, Homo sapiens
  misc_RNA (1)...(19): siRNA sense strand
gacaggagccuacaucaaa

SEQ ID NO: 1857187 - RNA, 19 nt, Homo sapiens
  misc_RNA (1)...(19): siRNA sense strand
ucagaucaauacacgaaua

SEQ ID NO: 1857188 - RNA, 19 nt, Homo sapiens
  misc_RNA (1)...(19): siRNA sense strand
gaacgugacccuccauugu

SEQ ID NO: 1857189 - RNA, 19 nt, Homo sapiens
  misc_RNA (1)...(19): siRNA sense strand
gcagcuucauucuguguaa

SEQ ID NO: 1857190 - RNA, 19 nt, Homo sapiens
  misc_RNA (1)...(19): siRNA sense strand
gcagccagguccuauagug

SEQ ID NO: 1857191 - RNA, 19 nt, Homo sapiens
  misc_RNA (1)...(19): siRNA sense strand
gauuuguucuguauaagga

SEQ ID NO: 1857192 - RNA, 19 nt, Homo sapiens
  misc_RNA (1)...(19): siRNA sense strand
ggaguaccgucuguauaga

SEQ ID NO: 1857193 - RNA, 19 nt, Homo sapiens
  misc_RNA (1)...(19): siRNA sense strand
acacgaauauccuaaguac

SEQ ID NO: 1857194 - RNA, 19 nt, Homo sapiens
  misc_RNA (1)...(19): siRNA sense strand
gaagaugaacacccacaau

SEQ ID NO: 1857195 - RNA, 19 nt, Homo sapiens
  misc_RNA (1)...(19): siRNA sense strand
gaaaacagcacccuggauu

SEQ ID NO: 1857196 - RNA, 19 nt, Homo sapiens
  misc_RNA (1)...(19): siRNA sense strand
guacaggugcuaugcuuau

SEQ ID NO: 1857197 - RNA, 19 nt, Homo sapiens
  misc_RNA (1)...(19): siRNA sense strand
gaacgugacccugcugugu

SEQ ID NO: 1857198 - RNA, 19 nt, Homo sapiens
  misc_RNA (1)...(19): siRNA sense strand
ggagggagaacgugacuuc

SEQ ID NO: 1857199 - RNA, 19 nt, Homo sapiens
  misc_RNA (1)...(19): siRNA sense strand
cacaaugccugaacucaca

SEQ ID NO: 1857200 - RNA, 19 nt, Homo sapiens
  misc_RNA (1)...(19): siRNA sense strand
cuaaguaccaggcugaauu

SEQ ID NO: 1857201 - RNA, 19 nt, Homo sapiens
  misc_RNA (1)...(19): siRNA sense strand
uaaggaaggagaagaugaa

SEQ ID NO: 1857202 - RNA, 19 nt, Homo sapiens
  misc_RNA (1)...(19): siRNA sense strand
gcauuuggcagcuucauuc

SEQ ID NO: 1857203 - RNA, 19 nt, Homo sapiens
  misc_RNA (1)...(19): siRNA sense strand
guaaggaaggagaagauga

SEQ ID NO: 1857204 - RNA, 19 nt, Homo sapiens
  misc_RNA (1)...(19): siRNA sense strand
caucaaacccacccucuca

SEQ ID NO: 1857205 - RNA, 19 nt, Homo sapiens
  misc_RNA (1)...(19): siRNA sense strand
caggcugaauucccuauga

SEQ ID NO: 1857206 - RNA, 19 nt, Homo sapiens
  misc_RNA (1)...(19): siRNA sense strand
uaagaagccaucacucuca

SEQ ID NO: 1857207 - RNA, 19 nt, Homo sapiens
  misc_RNA (1)...(19): siRNA sense strand
gaacacacagggcgguauc

SEQ ID NO: 1857208 - RNA, 19 nt, Homo sapiens
  misc_RNA (1)...(19): siRNA sense strand
ggaacgugacccuccauug

SEQ ID NO: 1857209 - RNA, 19 nt, Homo sapiens
  misc_RNA (1)...(19): siRNA sense strand
acacuuuccuucugaccaa

SEQ ID NO: 1857210 - RNA, 19 nt, Homo sapiens
  misc_RNA (1)...(19): siRNA sense strand
gcucagcacagccagagaa

SEQ ID NO: 1857211 - RNA, 19 nt, Homo sapiens
  misc_RNA (1)...(19): siRNA sense strand
ggaaggagaagaugaacac

SEQ ID NO: 1857212 - RNA, 19 nt, Homo sapiens
  misc_RNA (1)...(19): siRNA sense strand
gacccuccauugugucuca

SEQ ID NO: 1857213 - RNA, 19 nt, Homo sapiens
  misc_RNA (1)...(19): siRNA sense strand
caggaguaccgucuguaua

SEQ ID NO: 1857214 - RNA, 19 nt, Homo sapiens
  misc_RNA (1)...(19): siRNA sense strand
ucaauacacgaauauccua

SEQ ID NO: 1857215 - RNA, 19 nt, Homo sapiens
  misc_RNA (1)...(19): siRNA sense strand
ucucacagguggcauuugg

SEQ ID NO: 1857216 - RNA, 19 nt, Homo sapiens
  misc_RNA (1)...(19): siRNA sense strand
ccucgggauucugcuauuu

SEQ ID NO: 1857217 - RNA, 19 nt, Homo sapiens
  misc_RNA (1)...(19): siRNA sense strand
caauacacgaauauccuaa

SEQ ID NO: 1857218 - RNA, 19 nt, Homo sapiens
  misc_RNA (1)...(19): siRNA sense strand
uuuggcagcuucauucugu

SEQ ID NO: 1857219 - RNA, 19 nt, Homo sapiens
  misc_RNA (1)...(19): siRNA sense strand
ucgggauucugcuauuuga

SEQ ID NO: 1857220 - RNA, 19 nt, Homo sapiens
  misc_RNA (1)...(19): siRNA sense strand
uaccgucuguauagagaaa

SEQ ID NO: 1857221 - RNA, 19 nt, Homo sapiens
  misc_RNA (1)...(19): siRNA sense strand
ugacaggagccuacaucaa

SEQ ID NO: 1857222 - RNA, 19 nt, Homo sapiens
  misc_RNA (1)...(19): siRNA sense strand
uaaguaccaggcugaauuc

SEQ ID NO: 1857223 - RNA, 19 nt, Homo sapiens
  misc_RNA (1)...(19): siRNA sense strand
gagccugacccuccagugu

SEQ ID NO: 1857224 - RNA, 19 nt, Homo sapiens
  misc_RNA (1)...(19): siRNA sense strand
ccaggaguaccgucuguau

SEQ ID NO: 1857225 - RNA, 19 nt, Homo sapiens
  misc_RNA (1)...(19): siRNA sense strand
ucucagaucaauacacgaa

SEQ ID NO: 1857226 - RNA, 19 nt, Homo sapiens
  misc_RNA (1)...(19): siRNA sense strand
guuccacacuuuccuucug

SEQ ID NO: 1857227 - RNA, 19 nt, Homo sapiens
  misc_RNA (1)...(19): siRNA sense strand
uguggucucuacccaguga

SEQ ID NO: 1857228 - RNA, 19 nt, Homo sapiens
  misc_RNA (1)...(19): siRNA sense strand
aagaugaacacccacaaug

SEQ ID NO: 1857229 - RNA, 19 nt, Homo sapiens
  misc_RNA (1)...(19): siRNA sense strand
cagcuacgacagauuuguu

SEQ ID NO: 1857230 - RNA, 19 nt, Homo sapiens
  misc_RNA (1)...(19): siRNA sense strand
cagaucaauacacgaauau

SEQ ID NO: 1857231 - RNA, 19 nt, Homo sapiens
  misc_RNA (1)...(19): siRNA sense strand
gaucaauacacgaauaucc

SEQ ID NO: 1857232 - RNA, 19 nt, Homo sapiens
  misc_RNA (1)...(19): siRNA sense strand
acgaauauccuaaguacca

SEQ ID NO: 1857233 - RNA, 19 nt, Homo sapiens
  misc_RNA (1)...(19): siRNA sense strand
aaacagcacccuggauuac

SEQ ID NO: 1857234 - RNA, 19 nt, Homo sapiens
  misc_RNA (1)...(19): siRNA sense strand
auacacgaauauccuaagu

SEQ ID NO: 1857235 - RNA, 19 nt, Homo sapiens
  misc_RNA (1)...(19): siRNA sense strand
gccugacccuccagugugu

SEQ ID NO: 1857236 - RNA, 19 nt, Homo sapiens
  misc_RNA (1)...(19): siRNA sense strand
ucguacaggugcuaugcuu

SEQ ID NO: 1857237 - RNA, 19 nt, Homo sapiens
  misc_RNA (1)...(19): siRNA sense strand
ccaguguguuucugauguc

SEQ ID NO: 1857238 - RNA, 19 nt, Homo sapiens
  misc_RNA (1)...(19): siRNA sense strand
aggaguaccgucuguauag

SEQ ID NO: 1857239 - RNA, 19 nt, Homo sapiens
  misc_RNA (1)...(19): siRNA sense strand
ggaacacacagggcgguau

SEQ ID NO: 1857240 - RNA, 19 nt, Homo sapiens
  misc_RNA (1)...(19): siRNA sense strand
ggauuacacaguggagaau

SEQ ID NO: 1857241 - RNA, 19 nt, Homo sapiens
  misc_RNA (1)...(19): siRNA sense strand
ggugacaggagccuacauc

SEQ ID NO: 1857242 - RNA, 19 nt, Homo sapiens
  misc_RNA (1)...(19): siRNA sense strand
uccaguguguuucugaugu

SEQ ID NO: 1857243 - RNA, 19 nt, Homo sapiens
  misc_RNA (1)...(19): siRNA sense strand
ucuaagaagccaucacucu

SEQ ID NO: 1857244 - RNA, 19 nt, Homo sapiens
  misc_RNA (1)...(19): siRNA sense strand
gcuaugcuuaugacucgaa

SEQ ID NO: 1857245 - RNA, 19 nt, Homo sapiens
  misc_RNA (1)...(19): siRNA sense strand
acccucagcccaucacaaa

SEQ ID NO: 1857246 - RNA, 19 nt, Homo sapiens
  misc_RNA (1)...(19): siRNA sense strand
ccacaaaacaaguccgauu

SEQ ID NO: 1857247 - RNA, 19 nt, Homo sapiens
  misc_RNA (1)...(19): siRNA sense strand
aguaccgucuguauagaga

SEQ ID NO: 1857248 - RNA, 19 nt, Homo sapiens
  misc_RNA (1)...(19): siRNA sense strand
uuccacacuuuccuucuga

SEQ ID NO: 1857249 - RNA, 19 nt, Homo sapiens
  misc_RNA (1)...(19): siRNA sense strand
gugcagccagguccuauag

SEQ ID NO: 1857250 - RNA, 19 nt, Homo sapiens
  misc_RNA (1)...(19): siRNA sense strand
ggacauaucucaaagaaga

SEQ ID NO: 1857251 - RNA, 19 nt, Homo sapiens
  misc_RNA (1)...(19): siRNA sense strand
ggaaagaaauggaccaguu

SEQ ID NO: 1857252 - RNA, 19 nt, Homo sapiens
  misc_RNA (1)...(19): siRNA sense strand
caaagaagaugaacaaaca

SEQ ID NO: 1857253 - RNA, 19 nt, Homo sapiens
  misc_RNA (1)...(19): siRNA sense strand
gaaagaaauggaccaguua

SEQ ID NO: 1857254 - RNA, 19 nt, Homo sapiens
  misc_RNA (1)...(19): siRNA sense strand
gcaguggagucaccuauuu

SEQ ID NO: 1857255 - RNA, 19 nt, Homo sapiens
  misc_RNA (1)...(19): siRNA sense strand
ucaaaugugugccacuuua

SEQ ID NO: 1857256 - RNA, 19 nt, Homo sapiens
  misc_RNA (1)...(19): siRNA sense strand
gaaguguaguugcagcuua

SEQ ID NO: 1857257 - RNA, 19 nt, Homo sapiens
  misc_RNA (1)...(19): siRNA sense strand
caacagcugucuccucaaa

SEQ ID NO: 1857258 - RNA, 19 nt, Homo sapiens
  misc_RNA (1)...(19): siRNA sense strand
gaagagaaacuccuggaaa

SEQ ID NO: 1857259 - RNA, 19 nt, Homo sapiens
  misc_RNA (1)...(19): siRNA sense strand
ucacagauguugcauugaa

SEQ ID NO: 1857260 - RNA, 19 nt, Homo sapiens
  misc_RNA (1)...(19): siRNA sense strand
cuaguacgcuggaagauuu

SEQ ID NO: 1857261 - RNA, 19 nt, Homo sapiens
  misc_RNA (1)...(19): siRNA sense strand
gaacaccaguugauuaaac

SEQ ID NO: 1857262 - RNA, 19 nt, Homo sapiens
  misc_RNA (1)...(19): siRNA sense strand
gcagguagauuuaauagac

SEQ ID NO: 1857263 - RNA, 19 nt, Homo sapiens
  misc_RNA (1)...(19): siRNA sense strand
gcuccuggcuguccucuuu

SEQ ID NO: 1857264 - RNA, 19 nt, Homo sapiens
  misc_RNA (1)...(19): siRNA sense strand
gaagguguuugcuccauga

SEQ ID NO: 1857265 - RNA, 19 nt, Homo sapiens
  misc_RNA (1)...(19): siRNA sense strand
gggaauaugagcacaauaa

SEQ ID NO: 1857266 - RNA, 19 nt, Homo sapiens
  misc_RNA (1)...(19): siRNA sense strand
gggcaaugcugacgaugaa

SEQ ID NO: 1857267 - RNA, 19 nt, Homo sapiens
  misc_RNA (1)...(19): siRNA sense strand
ugccagaguuugauauaua

SEQ ID NO: 1857268 - RNA, 19 nt, Homo sapiens
  misc_RNA (1)...(19): siRNA sense strand
ccaaacagguggugaagca

SEQ ID NO: 1857269 - RNA, 19 nt, Homo sapiens
  misc_RNA (1)...(19): siRNA sense strand
gagcaaggaaggagaugua

SEQ ID NO: 1857270 - RNA, 19 nt, Homo sapiens
  misc_RNA (1)...(19): siRNA sense strand
gauguugcauugaaguuug

SEQ ID NO: 1857271 - RNA, 19 nt, Homo sapiens
  misc_RNA (1)...(19): siRNA sense strand
ugauuaaacucucagaugu

SEQ ID NO: 1857272 - RNA, 19 nt, Homo sapiens
  misc_RNA (1)...(19): siRNA sense strand
ggagaacgucuuuaugaga

SEQ ID NO: 1857273 - RNA, 19 nt, Homo sapiens
  misc_RNA (1)...(19): siRNA sense strand
gcauccagcuccagaagau

SEQ ID NO: 1857274 - RNA, 19 nt, Homo sapiens
  misc_RNA (1)...(19): siRNA sense strand
ugaagaguaugaugacaga

SEQ ID NO: 1857275 - RNA, 19 nt, Homo sapiens
  misc_RNA (1)...(19): siRNA sense strand
aagagaaacuccuggaaau

SEQ ID NO: 1857276 - RNA, 19 nt, Homo sapiens
  misc_RNA (1)...(19): siRNA sense strand
ggucaagcauaacaacgaa

SEQ ID NO: 1857277 - RNA, 19 nt, Homo sapiens
  misc_RNA (1)...(19): siRNA sense strand
uagaggagcccacugauga

SEQ ID NO: 1857278 - RNA, 19 nt, Homo sapiens
  misc_RNA (1)...(19): siRNA sense strand
acacaugaagccagucuua

SEQ ID NO: 1857279 - RNA, 19 nt, Homo sapiens
  misc_RNA (1)...(19): siRNA sense strand
auuaagagguuacugcaaa

SEQ ID NO: 1857280 - RNA, 19 nt, Homo sapiens
  misc_RNA (1)...(19): siRNA sense strand
gcacuguaguuuguguaaa

SEQ ID NO: 1857281 - RNA, 19 nt, Homo sapiens
  misc_RNA (1)...(19): siRNA sense strand
gaauccaucucuucaugca

SEQ ID NO: 1857282 - RNA, 19 nt, Homo sapiens
  misc_RNA (1)...(19): siRNA sense strand
gcuggaagauuuuaaaaga

SEQ ID NO: 1857283 - RNA, 19 nt, Homo sapiens
  misc_RNA (1)...(19): siRNA sense strand
gugcauaccuggccaucau

SEQ ID NO: 1857284 - RNA, 19 nt, Homo sapiens
  misc_RNA (1)...(19): siRNA sense strand
gaaguuugaacaccaguug

SEQ ID NO: 1857285 - RNA, 19 nt, Homo sapiens
  misc_RNA (1)...(19): siRNA sense strand
uuucacagauguugcauug

SEQ ID NO: 1857286 - RNA, 19 nt, Homo sapiens
  misc_RNA (1)...(19): siRNA sense strand
ccaggcaaaucucaacaga

SEQ ID NO: 1857287 - RNA, 19 nt, Homo sapiens
  misc_RNA (1)...(19): siRNA sense strand
aaucgaagcuguggagaug

SEQ ID NO: 1857288 - RNA, 19 nt, Homo sapiens
  misc_RNA (1)...(19): siRNA sense strand
uaccagguccaauuuguua

SEQ ID NO: 1857289 - RNA, 19 nt, Homo sapiens
  misc_RNA (1)...(19): siRNA sense strand
aaacuaccagguccaauuu

SEQ ID NO: 1857290 - RNA, 19 nt, Homo sapiens
  misc_RNA (1)...(19): siRNA sense strand
gucaaaggcuauuucacuu

SEQ ID NO: 1857291 - RNA, 19 nt, Homo sapiens
  misc_RNA (1)...(19): siRNA sense strand
cccagcaggucaagcauaa

SEQ ID NO: 1857292 - RNA, 19 nt, Homo sapiens
  misc_RNA (1)...(19): siRNA sense strand
gaauaugagcacaauaauc

SEQ ID NO: 1857293 - RNA, 19 nt, Homo sapiens
  misc_RNA (1)...(19): siRNA sense strand
ccuggaaucuucaguucaa

SEQ ID NO: 1857294 - RNA, 19 nt, Homo sapiens
  misc_RNA (1)...(19): siRNA sense strand
aaucaccucucccagugua

SEQ ID NO: 1857295 - RNA, 19 nt, Homo sapiens
  misc_RNA (1)...(19): siRNA sense strand
ccuccacccuguuaacaaa

SEQ ID NO: 1857296 - RNA, 19 nt, Homo sapiens
  misc_RNA (1)...(19): siRNA sense strand
gcagacaaacagaauggaa

SEQ ID NO: 1857297 - RNA, 19 nt, Homo sapiens
  misc_RNA (1)...(19): siRNA sense strand
ucacaggccuucacucacu

SEQ ID NO: 1857298 - RNA, 19 nt, Homo sapiens
  misc_RNA (1)...(19): siRNA sense strand
ccaguuacaggcucucuaa

SEQ ID NO: 1857299 - RNA, 19 nt, Homo sapiens
  misc_RNA (1)...(19): siRNA sense strand
ccugagcacuguaguuugu

SEQ ID NO: 1857300 - RNA, 19 nt, Homo sapiens
  misc_RNA (1)...(19): siRNA sense strand
ggaauaugagcacaauaau

SEQ ID NO: 1857301 - RNA, 19 nt, Homo sapiens
  misc_RNA (1)...(19): siRNA sense strand
ccuguuaucuuguggaaag

SEQ ID NO: 1857302 - RNA, 19 nt, Homo sapiens
  misc_RNA (1)...(19): siRNA sense strand
cgacuggauuaagagguua

SEQ ID NO: 1857303 - RNA, 19 nt, Homo sapiens
  misc_RNA (1)...(19): siRNA sense strand
ggaagagaaacuccuggaa

SEQ ID NO: 1857304 - RNA, 19 nt, Homo sapiens
  misc_RNA (1)...(19): siRNA sense strand
gcagaaaaccccuucagaa

SEQ ID NO: 1857305 - RNA, 19 nt, Homo sapiens
  misc_RNA (1)...(19): siRNA sense strand
cuccaugacugcagacaaa

SEQ ID NO: 1857306 - RNA, 19 nt, Homo sapiens
  misc_RNA (1)...(19): siRNA sense strand
gccagaguuugauauauag

SEQ ID NO: 1857307 - RNA, 19 nt, Homo sapiens
  misc_RNA (1)...(19): siRNA sense strand
gaagccagucuuaggagaa

SEQ ID NO: 1857308 - RNA, 19 nt, Homo sapiens
  misc_RNA (1)...(19): siRNA sense strand
ucagaagccuuguggaaac

SEQ ID NO: 1857309 - RNA, 19 nt, Homo sapiens
  misc_RNA (1)...(19): siRNA sense strand
gggaaggcuuuaccaccaa

SEQ ID NO: 1857310 - RNA, 19 nt, Homo sapiens
  misc_RNA (1)...(19): siRNA sense strand
ugaccugacugagaucuau

SEQ ID NO: 1857311 - RNA, 19 nt, Homo sapiens
  misc_RNA (1)...(19): siRNA sense strand
ggaaggcuuuaccaccaau

SEQ ID NO: 1857312 - RNA, 19 nt, Homo sapiens
  misc_RNA (1)...(19): siRNA sense strand
uaucaaaugugugccacuu

SEQ ID NO: 1857313 - RNA, 19 nt, Homo sapiens
  misc_RNA (1)...(19): siRNA sense strand
ccaaugagaggauucaagu

SEQ ID NO: 1857314 - RNA, 19 nt, Homo sapiens
  misc_RNA (1)...(19): siRNA sense strand
gcacugaccauggacaauc

SEQ ID NO: 1857315 - RNA, 19 nt, Homo sapiens
  misc_RNA (1)...(19): siRNA sense strand
ugauucuccugucuucuaa

SEQ ID NO: 1857316 - RNA, 19 nt, Homo sapiens
  misc_RNA (1)...(19): siRNA sense strand
gugauucuccugucuucua

SEQ ID NO: 1857317 - RNA, 19 nt, Homo sapiens
  misc_RNA (1)...(19): siRNA sense strand
gaugggcaaugcugacgau

SEQ ID NO: 1857318 - RNA, 19 nt, Homo sapiens
  misc_RNA (1)...(19): siRNA sense strand
gaauggaacagucuauacu

SEQ ID NO: 1857319 - RNA, 19 nt, Homo sapiens
  misc_RNA (1)...(19): siRNA sense strand
acaauugagucaggaauca

SEQ ID NO: 1857320 - RNA, 19 nt, Homo sapiens
  misc_RNA (1)...(19): siRNA sense strand
ggaacagucuauacuugcu

SEQ ID NO: 1857321 - RNA, 19 nt, Homo sapiens
  misc_RNA (1)...(19): siRNA sense strand
ucucaaagaagaugaacaa

SEQ ID NO: 1857322 - RNA, 19 nt, Homo sapiens
  misc_RNA (1)...(19): siRNA sense strand
gauuggacauaucucaaag

SEQ ID NO: 1857323 - RNA, 19 nt, Homo sapiens
  misc_RNA (1)...(19): siRNA sense strand
aggcaaaucucaacagacu

SEQ ID NO: 1857324 - RNA, 19 nt, Homo sapiens
  misc_RNA (1)...(19): siRNA sense strand
uuuaaugucugaugaagag

SEQ ID NO: 1857325 - RNA, 19 nt, Homo sapiens
  misc_RNA (1)...(19): siRNA sense strand
gcaaggaaggagauguaga

SEQ ID NO: 1857326 - RNA, 19 nt, Homo sapiens
  misc_RNA (1)...(19): siRNA sense strand
ccacugagggcaugaucaa

SEQ ID NO: 1857327 - RNA, 19 nt, Homo sapiens
  misc_RNA (1)...(19): siRNA sense strand
uggcagcacugaccaugga

SEQ ID NO: 1857328 - RNA, 19 nt, Homo sapiens
  misc_RNA (1)...(19): siRNA sense strand
gcagucaaaggcuauuuca

SEQ ID NO: 1857329 - RNA, 19 nt, Homo sapiens
  misc_RNA (1)...(19): siRNA sense strand
ccgacuggauuaagagguu

SEQ ID NO: 1857330 - RNA, 19 nt, Homo sapiens
  misc_RNA (1)...(19): siRNA sense strand
gaagaugaacaaacagacu

SEQ ID NO: 1857331 - RNA, 19 nt, Homo sapiens
  misc_RNA (1)...(19): siRNA sense strand
gaacacaugaagccagucu

SEQ ID NO: 1857332 - RNA, 19 nt, Homo sapiens
  misc_RNA (1)...(19): siRNA sense strand
caaggaaggagauguagag

SEQ ID NO: 1857333 - RNA, 19 nt, Homo sapiens
  misc_RNA (1)...(19): siRNA sense strand
cagaauggaacagucuaua

SEQ ID NO: 1857334 - RNA, 19 nt, Homo sapiens
  misc_RNA (1)...(19): siRNA sense strand
ccucaaaguuggcucaaaa

SEQ ID NO: 1857335 - RNA, 19 nt, Homo sapiens
  misc_RNA (1)...(19): siRNA sense strand
caggcagucuguuccaaug

SEQ ID NO: 1857336 - RNA, 19 nt, Homo sapiens
  misc_RNA (1)...(19): siRNA sense strand
uuggacauaucucaaagaa

SEQ ID NO: 1857337 - RNA, 19 nt, Homo sapiens
  misc_RNA (1)...(19): siRNA sense strand
ugagaucuauggagaacgu

SEQ ID NO: 1857338 - RNA, 19 nt, Homo sapiens
  misc_RNA (1)...(19): siRNA sense strand
gaugaagaguaugaugaca

SEQ ID NO: 1857339 - RNA, 19 nt, Homo sapiens
  misc_RNA (1)...(19): siRNA sense strand
guagaggagcccacugaug

SEQ ID NO: 1857340 - RNA, 19 nt, Homo sapiens
  misc_RNA (1)...(19): siRNA sense strand
gcaaugcugacgaugaaca

SEQ ID NO: 1857341 - RNA, 19 nt, Homo sapiens
  misc_RNA (1)...(19): siRNA sense strand
uuugaacaccaguugauua

SEQ ID NO: 1857342 - RNA, 19 nt, Homo sapiens
  misc_RNA (1)...(19): siRNA sense strand
uaccagaaguguaguugca

SEQ ID NO: 1857343 - RNA, 19 nt, Homo sapiens
  misc_RNA (1)...(19): siRNA sense strand
caaagcagucaaaggcuau

SEQ ID NO: 1857344 - RNA, 19 nt, Homo sapiens
  misc_RNA (1)...(19): siRNA sense strand
ggaguggucgggcaucugu

SEQ ID NO: 1857345 - RNA, 19 nt, Homo sapiens
  misc_RNA (1)...(19): siRNA sense strand
cugcucagcuccuggaauc

SEQ ID NO: 1857346 - RNA, 19 nt, Homo sapiens
  misc_RNA (1)...(19): siRNA sense strand
uggcuccggugcuucuuaa

SEQ ID NO: 1857347 - RNA, 19 nt, Homo sapiens
  misc_RNA (1)...(19): siRNA sense strand
agacuuucauguuggauag

SEQ ID NO: 1857348 - RNA, 19 nt, Homo sapiens
  misc_RNA (1)...(19): siRNA sense strand
ccgugaagcugcaguaugc

SEQ ID NO: 1857349 - RNA, 19 nt, Homo sapiens
  misc_RNA (1)...(19): siRNA sense strand
uaccaguccugccagaguu

SEQ ID NO: 1857350 - RNA, 19 nt, Homo sapiens
  misc_RNA (1)...(19): siRNA sense strand
gggaguauguggagaaauu

SEQ ID NO: 1857351 - RNA, 19 nt, Homo sapiens
  misc_RNA (1)...(19): siRNA sense strand
ucaaugggcuggagaagaa

SEQ ID NO: 1857352 - RNA, 19 nt, Homo sapiens
  misc_RNA (1)...(19): siRNA sense strand
ggaggacgaugaggacaaa

SEQ ID NO: 1857353 - RNA, 19 nt, Homo sapiens
  misc_RNA (1)...(19): siRNA sense strand
gaaauuugcccucaacuac

SEQ ID NO: 1857354 - RNA, 19 nt, Homo sapiens
  misc_RNA (1)...(19): siRNA sense strand
ugaagcagguguggaagua

SEQ ID NO: 1857355 - RNA, 19 nt, Homo sapiens
  misc_RNA (1)...(19): siRNA sense strand
ggacaucacagcugaguuc

SEQ ID NO: 1857356 - RNA, 19 nt, Homo sapiens
  misc_RNA (1)...(19): siRNA sense strand
ggagaaauuugcccucaac

SEQ ID NO: 1857357 - RNA, 19 nt, Homo sapiens
  misc_RNA (1)...(19): siRNA sense strand
gcaaggaggagcccaagga

SEQ ID NO: 1857358 - RNA, 19 nt, Homo sapiens
  misc_RNA (1)...(19): siRNA sense strand
ucaaacgcauguaugagaa

SEQ ID NO: 1857359 - RNA, 19 nt, Homo sapiens
  misc_RNA (1)...(19): siRNA sense strand
gcagaucuccggccaguca

SEQ ID NO: 1857360 - RNA, 19 nt, Homo sapiens
  misc_RNA (1)...(19): siRNA sense strand
ggagaaaccagaccagaag

SEQ ID NO: 1857361 - RNA, 19 nt, Homo sapiens
  misc_RNA (1)...(19): siRNA sense strand
ggacaucauccugcuauug

SEQ ID NO: 1857362 - RNA, 19 nt, Homo sapiens
  misc_RNA (1)...(19): siRNA sense strand
ggacggaggagacagugaa

SEQ ID NO: 1857363 - RNA, 19 nt, Homo sapiens
  misc_RNA (1)...(19): siRNA sense strand
gcaaguacugcgaggauga

SEQ ID NO: 1857364 - RNA, 19 nt, Homo sapiens
  misc_RNA (1)...(19): siRNA sense strand
gcacggaagcccagaucaa

SEQ ID NO: 1857365 - RNA, 19 nt, Homo sapiens
  misc_RNA (1)...(19): siRNA sense strand
gcaccuaucugggcauguc

SEQ ID NO: 1857366 - RNA, 19 nt, Homo sapiens
  misc_RNA (1)...(19): siRNA sense strand
ggaugagagucgcaccuau

SEQ ID NO: 1857367 - RNA, 19 nt, Homo sapiens
  misc_RNA (1)...(19): siRNA sense strand
gagagcuccugaucgcauu

SEQ ID NO: 1857368 - RNA, 19 nt, Homo sapiens
  misc_RNA (1)...(19): siRNA sense strand
gagggaaacucagccuugu

SEQ ID NO: 1857369 - RNA, 19 nt, Homo sapiens
  misc_RNA (1)...(19): siRNA sense strand
gcucauggccacacagaug

SEQ ID NO: 1857370 - RNA, 19 nt, Homo sapiens
  misc_RNA (1)...(19): siRNA sense strand
gagaagaugcuaugaagac

SEQ ID NO: 1857371 - RNA, 19 nt, Homo sapiens
  misc_RNA (1)...(19): siRNA sense strand
ugaaauccaucaucaaagc

SEQ ID NO: 1857372 - RNA, 19 nt, Homo sapiens
  misc_RNA (1)...(19): siRNA sense strand
gcacagccucacagacaaa

SEQ ID NO: 1857373 - RNA, 19 nt, Homo sapiens
  misc_RNA (1)...(19): siRNA sense strand
gcccugcaguggaugguaa

SEQ ID NO: 1857374 - RNA, 19 nt, Homo sapiens
  misc_RNA (1)...(19): siRNA sense strand
gcugacgccugauaaugug

SEQ ID NO: 1857375 - RNA, 19 nt, Homo sapiens
  misc_RNA (1)...(19): siRNA sense strand
gcccagguccgcauaaaga

SEQ ID NO: 1857376 - RNA, 19 nt, Homo sapiens
  misc_RNA (1)...(19): siRNA sense strand
uggagaagaugcuaugaag

SEQ ID NO: 1857377 - RNA, 19 nt, Homo sapiens
  misc_RNA (1)...(19): siRNA sense strand
gcacccacgccaucaaguu

SEQ ID NO: 1857378 - RNA, 19 nt, Homo sapiens
  misc_RNA (1)...(19): siRNA sense strand
acagagagcguccugauca

SEQ ID NO: 1857379 - RNA, 19 nt, Homo sapiens
  misc_RNA (1)...(19): siRNA sense strand
agaagguggugaagacaga

SEQ ID NO: 1857380 - RNA, 19 nt, Homo sapiens
  misc_RNA (1)...(19): siRNA sense strand
gagcugacaaggacacaga

SEQ ID NO: 1857381 - RNA, 19 nt, Homo sapiens
  misc_RNA (1)...(19): siRNA sense strand
guucaugucugaggugauc

SEQ ID NO: 1857382 - RNA, 19 nt, Homo sapiens
  misc_RNA (1)...(19): siRNA sense strand
caacauugacuccgugaag

SEQ ID NO: 1857383 - RNA, 19 nt, Homo sapiens
  misc_RNA (1)...(19): siRNA sense strand
gauccaggccuaugaaacu

SEQ ID NO: 1857384 - RNA, 19 nt, Homo sapiens
  misc_RNA (1)...(19): siRNA sense strand
ggagaagaugcuaugaaga

SEQ ID NO: 1857385 - RNA, 19 nt, Homo sapiens
  misc_RNA (1)...(19): siRNA sense strand
uccagucccugaccaugua

SEQ ID NO: 1857386 - RNA, 19 nt, Homo sapiens
  misc_RNA (1)...(19): siRNA sense strand
cgggcucccuggacaagua

SEQ ID NO: 1857387 - RNA, 19 nt, Homo sapiens
  misc_RNA (1)...(19): siRNA sense strand
gcagugugcguaagaaucu

SEQ ID NO: 1857388 - RNA, 19 nt, Homo sapiens
  misc_RNA (1)...(19): siRNA sense strand
gcagcugggagccgucuuu

SEQ ID NO: 1857389 - RNA, 19 nt, Homo sapiens
  misc_RNA (1)...(19): siRNA sense strand
gggagggcuucaucaagug

SEQ ID NO: 1857390 - RNA, 19 nt, Homo sapiens
  misc_RNA (1)...(19): siRNA sense strand
ugggagggcuucaucaagu

SEQ ID NO: 1857391 - RNA, 19 nt, Homo sapiens
  misc_RNA (1)...(19): siRNA sense strand
cugauaauguggcuaaucu

SEQ ID NO: 1857392 - RNA, 19 nt, Homo sapiens
  misc_RNA (1)...(19): siRNA sense strand
ugucuggccugcaggagaa

SEQ ID NO: 1857393 - RNA, 19 nt, Homo sapiens
  misc_RNA (1)...(19): siRNA sense strand
cagagagcguccugaucaa

SEQ ID NO: 1857394 - RNA, 19 nt, Homo sapiens
  misc_RNA (1)...(19): siRNA sense strand
gaucgcauuacacaacauu

SEQ ID NO: 1857395 - RNA, 19 nt, Homo sapiens
  misc_RNA (1)...(19): siRNA sense strand
agaaauuugcccucaacua

SEQ ID NO: 1857396 - RNA, 19 nt, Homo sapiens
  misc_RNA (1)...(19): siRNA sense strand
gaaaccagaccagaaggau

SEQ ID NO: 1857397 - RNA, 19 nt, Homo sapiens
  misc_RNA (1)...(19): siRNA sense strand
ugccuaaacucaucaaacu

SEQ ID NO: 1857398 - RNA, 19 nt, Homo sapiens
  misc_RNA (1)...(19): siRNA sense strand
agacacuggucacgagaug

SEQ ID NO: 1857399 - RNA, 19 nt, Homo sapiens
  misc_RNA (1)...(19): siRNA sense strand
ggaguauguggagaaauuu

SEQ ID NO: 1857400 - RNA, 19 nt, Homo sapiens
  misc_RNA (1)...(19): siRNA sense strand
gcgggaguauguggagaaa

SEQ ID NO: 1857401 - RNA, 19 nt, Homo sapiens
  misc_RNA (1)...(19): siRNA sense strand
gaugagagucgcaccuauc

SEQ ID NO: 1857402 - RNA, 19 nt, Homo sapiens
  misc_RNA (1)...(19): siRNA sense strand
ccuaaacucaucaaacuca

SEQ ID NO: 1857403 - RNA, 19 nt, Homo sapiens
  misc_RNA (1)...(19): siRNA sense strand
ucaugaagcagguguggaa

SEQ ID NO: 1857404 - RNA, 19 nt, Homo sapiens
  misc_RNA (1)...(19): siRNA sense strand
gcacaccucaggccgagau

SEQ ID NO: 1857405 - RNA, 19 nt, Homo sapiens
  misc_RNA (1)...(19): siRNA sense strand
gacaucauccugcuauugg

SEQ ID NO: 1857406 - RNA, 19 nt, Homo sapiens
  misc_RNA (1)...(19): siRNA sense strand
gagcagccgauccgaggaa

SEQ ID NO: 1857407 - RNA, 19 nt, Homo sapiens
  misc_RNA (1)...(19): siRNA sense strand
aggagcagcugcgggagua

SEQ ID NO: 1857408 - RNA, 19 nt, Homo sapiens
  misc_RNA (1)...(19): siRNA sense strand
gcuaaucugguccucauca

SEQ ID NO: 1857409 - RNA, 19 nt, Homo sapiens
  misc_RNA (1)...(19): siRNA sense strand
guguagagcagaccaaaca

SEQ ID NO: 1857410 - RNA, 19 nt, Homo sapiens
  misc_RNA (1)...(19): siRNA sense strand
ggacggugcugagggucau

SEQ ID NO: 1857411 - RNA, 19 nt, Homo sapiens
  misc_RNA (1)...(19): siRNA sense strand
gaagcugggcgcugugaag

SEQ ID NO: 1857412 - RNA, 19 nt, Homo sapiens
  misc_RNA (1)...(19): siRNA sense strand
ggacuccacacucaagaag

SEQ ID NO: 1857413 - RNA, 19 nt, Homo sapiens
  misc_RNA (1)...(19): siRNA sense strand
cugaggaagccauggauuu

SEQ ID NO: 1857414 - RNA, 19 nt, Homo sapiens
  misc_RNA (1)...(19): siRNA sense strand
guucaucaaacgcauguau

SEQ ID NO: 1857415 - RNA, 19 nt, Homo sapiens
  misc_RNA (1)...(19): siRNA sense strand
cagcccagguccgcauaaa

SEQ ID NO: 1857416 - RNA, 19 nt, Homo sapiens
  misc_RNA (1)...(19): siRNA sense strand
ugggcucccuugccaauau

SEQ ID NO: 1857417 - RNA, 19 nt, Homo sapiens
  misc_RNA (1)...(19): siRNA sense strand
ccaccaaccugugcuuugc

SEQ ID NO: 1857418 - RNA, 19 nt, Homo sapiens
  misc_RNA (1)...(19): siRNA sense strand
gggacaucauccugcuauu

SEQ ID NO: 1857419 - RNA, 19 nt, Homo sapiens
  misc_RNA (1)...(19): siRNA sense strand
guacugcgaggaugagagu

SEQ ID NO: 1857420 - RNA, 19 nt, Homo sapiens
  misc_RNA (1)...(19): siRNA sense strand
uggcuaaucugguccucau

SEQ ID NO: 1857421 - RNA, 19 nt, Homo sapiens
  misc_RNA (1)...(19): siRNA sense strand
aggaugggaucuucaccaa

SEQ ID NO: 1857422 - RNA, 19 nt, Homo sapiens
  misc_RNA (1)...(19): siRNA sense strand
gcggagguccuguccuuca

SEQ ID NO: 1857423 - RNA, 19 nt, Homo sapiens
  misc_RNA (1)...(19): siRNA sense strand
aggcggagguccuguccuu

SEQ ID NO: 1857424 - RNA, 19 nt, Homo sapiens
  misc_RNA (1)...(19): siRNA sense strand
gaggagaagguggugaaga

SEQ ID NO: 1857425 - RNA, 19 nt, Homo sapiens
  misc_RNA (1)...(19): siRNA sense strand
gacucggacuccacacuca

SEQ ID NO: 1857426 - RNA, 19 nt, Homo sapiens
  misc_RNA (1)...(19): siRNA sense strand
ugaggaagccauggauuuc

SEQ ID NO: 1857427 - RNA, 19 nt, Homo sapiens
  misc_RNA (1)...(19): siRNA sense strand
gagccgucuuugacaagug

SEQ ID NO: 1857428 - RNA, 19 nt, Homo sapiens
  misc_RNA (1)...(19): siRNA sense strand
ggagccgucuuugacaagu

SEQ ID NO: 1857429 - RNA, 19 nt, Homo sapiens
  misc_RNA (1)...(19): siRNA sense strand
cuaaacucaucaaacucaa

SEQ ID NO: 1857430 - RNA, 19 nt, Homo sapiens
  misc_RNA (1)...(19): siRNA sense strand
cacccacgccaucaaguuu

SEQ ID NO: 1857431 - RNA, 19 nt, Homo sapiens
  misc_RNA (1)...(19): siRNA sense strand
uucgagaccugaucuucaa

SEQ ID NO: 1857432 - RNA, 19 nt, Homo sapiens
  misc_RNA (1)...(19): siRNA sense strand
gagcagugugcguaagaau

SEQ ID NO: 1857433 - RNA, 19 nt, Homo sapiens
  misc_RNA (1)...(19): siRNA sense strand
aucccuaacuccaucauga

SEQ ID NO: 1857434 - RNA, 19 nt, Homo sapiens
  misc_RNA (1)...(19): siRNA sense strand
gcccauguccgcuccuuca

SEQ ID NO: 1857435 - RNA, 19 nt, Homo sapiens
  misc_RNA (1)...(19): siRNA sense strand
cgugaagugcgacaugaaa

SEQ ID NO: 1857436 - RNA, 19 nt, Homo sapiens
  misc_RNA (1)...(19): siRNA sense strand
gaguauguggagaaauuug

SEQ ID NO: 1857437 - RNA, 19 nt, Homo sapiens
  misc_RNA (1)...(19): siRNA sense strand
gcaguggaugguaaaguca

SEQ ID NO: 1857438 - RNA, 19 nt, Homo sapiens
  misc_RNA (1)...(19): siRNA sense strand
acuccacacucaagaagau

SEQ ID NO: 1857439 - RNA, 19 nt, Homo sapiens
  misc_RNA (1)...(19): siRNA sense strand
uccgggaucucuaccacaa

SEQ ID NO: 1857440 - RNA, 19 nt, Homo sapiens
  misc_RNA (1)...(19): siRNA sense strand
ggaggugguccgcaaguac

SEQ ID NO: 1857441 - RNA, 19 nt, Homo sapiens
  misc_RNA (1)...(19): siRNA sense strand
uggaggugguccgcaagua

SEQ ID NO: 1857442 - RNA, 19 nt, Homo sapiens
  misc_RNA (1)...(19): siRNA sense strand
cgaugaggacaaagacuug

SEQ ID NO: 1857443 - RNA, 19 nt, Homo sapiens
  misc_RNA (1)...(19): siRNA sense strand
gcaacaugccgagcagcaa

SEQ ID NO: 1857444 - RNA, 19 nt, Homo sapiens
  misc_RNA (1)...(19): siRNA sense strand
ccugccaucuccuccauca

SEQ ID NO: 1857445 - RNA, 19 nt, Homo sapiens
  misc_RNA (1)...(19): siRNA sense strand
ugagcagugugcguaagaa

SEQ ID NO: 1857446 - RNA, 19 nt, Homo sapiens
  misc_RNA (1)...(19): siRNA sense strand
gaagccaucgccgacauca

SEQ ID NO: 1857447 - RNA, 19 nt, Homo sapiens
  misc_RNA (1)...(19): siRNA sense strand
gggcauguccacacuucga

SEQ ID NO: 1857448 - RNA, 19 nt, Homo sapiens
  misc_RNA (1)...(19): siRNA sense strand
aggagaagguggugaagac

SEQ ID NO: 1857449 - RNA, 19 nt, Homo sapiens
  misc_RNA (1)...(19): siRNA sense strand
gcugggagccgucuuugac

SEQ ID NO: 1857450 - RNA, 19 nt, Homo sapiens
  misc_RNA (1)...(19): siRNA sense strand
ggacauuacugguguagaa

SEQ ID NO: 1857451 - RNA, 19 nt, Homo sapiens
  misc_RNA (1)...(19): siRNA sense strand
ggacuaagauaagcgauga

SEQ ID NO: 1857452 - RNA, 19 nt, Homo sapiens
  misc_RNA (1)...(19): siRNA sense strand
gauaagcgaugaugaugau

SEQ ID NO: 1857453 - RNA, 19 nt, Homo sapiens
  misc_RNA (1)...(19): siRNA sense strand
gaggaagacucaggacauu

SEQ ID NO: 1857454 - RNA, 19 nt, Homo sapiens
  misc_RNA (1)...(19): siRNA sense strand
uaaggaggcuucagcacuu

SEQ ID NO: 1857455 - RNA, 19 nt, Homo sapiens
  misc_RNA (1)...(19): siRNA sense strand
gagaagaaaggcuggugua

SEQ ID NO: 1857456 - RNA, 19 nt, Homo sapiens
  misc_RNA (1)...(19): siRNA sense strand
caccaugacugaucugaga

SEQ ID NO: 1857457 - RNA, 19 nt, Homo sapiens
  misc_RNA (1)...(19): siRNA sense strand
aagaaaggcugguguaagg

SEQ ID NO: 1857458 - RNA, 19 nt, Homo sapiens
  misc_RNA (1)...(19): siRNA sense strand
gcuuggaccucucgauuca

SEQ ID NO: 1857459 - RNA, 19 nt, Homo sapiens
  misc_RNA (1)...(19): siRNA sense strand
gaaucuaccgcccuucuga

SEQ ID NO: 1857460 - RNA, 19 nt, Homo sapiens
  misc_RNA (1)...(19): siRNA sense strand
gaagaaaggcugguguaag

SEQ ID NO: 1857461 - RNA, 19 nt, Homo sapiens
  misc_RNA (1)...(19): siRNA sense strand
uaagauaagcgaugaugau

SEQ ID NO: 1857462 - RNA, 19 nt, Homo sapiens
  misc_RNA (1)...(19): siRNA sense strand
ggaagacucaggacauuac

SEQ ID NO: 1857463 - RNA, 19 nt, Homo sapiens
  misc_RNA (1)...(19): siRNA sense strand
gauucuaucuggugguauc

SEQ ID NO: 1857464 - RNA, 19 nt, Homo sapiens
  misc_RNA (1)...(19): siRNA sense strand
cuaaguccgucagauucua

SEQ ID NO: 1857465 - RNA, 19 nt, Homo sapiens
  misc_RNA (1)...(19): siRNA sense strand
ucaguuuccucaccuguag

SEQ ID NO: 1857466 - RNA, 19 nt, Homo sapiens
  misc_RNA (1)...(19): siRNA sense strand
uaccaucccugucccuuca

SEQ ID NO: 1857467 - RNA, 19 nt, Homo sapiens
  misc_RNA (1)...(19): siRNA sense strand
aagcgaugaugaugaugaa

SEQ ID NO: 1857468 - RNA, 19 nt, Homo sapiens
  misc_RNA (1)...(19): siRNA sense strand
guugcaaggacuaagauaa

SEQ ID NO: 1857469 - RNA, 19 nt, Homo sapiens
  misc_RNA (1)...(19): siRNA sense strand
uaagcgaugaugaugauga

SEQ ID NO: 1857470 - RNA, 19 nt, Homo sapiens
  misc_RNA (1)...(19): siRNA sense strand
gaugaugaacacacuuugu

SEQ ID NO: 1857471 - RNA, 19 nt, Homo sapiens
  misc_RNA (1)...(19): siRNA sense strand
ggaccucucgauucacaau

SEQ ID NO: 1857472 - RNA, 19 nt, Homo sapiens
  misc_RNA (1)...(19): siRNA sense strand
ucucuaaguccgucagauu

SEQ ID NO: 1857473 - RNA, 19 nt, Homo sapiens
  misc_RNA (1)...(19): siRNA sense strand
gcuggcuucuucacuguca

SEQ ID NO: 1857474 - RNA, 19 nt, Homo sapiens
  misc_RNA (1)...(19): siRNA sense strand
gcgaugaugaugaugaaca

SEQ ID NO: 1857475 - RNA, 19 nt, Homo sapiens
  misc_RNA (1)...(19): siRNA sense strand
ggggacauaugguggaaaa

SEQ ID NO: 1857476 - RNA, 19 nt, Homo sapiens
  misc_RNA (1)...(19): siRNA sense strand
agaagaaaggcugguguaa

SEQ ID NO: 1857477 - RNA, 19 nt, Homo sapiens
  misc_RNA (1)...(19): siRNA sense strand
acaacucugucucuaaguc

SEQ ID NO: 1857478 - RNA, 19 nt, Homo sapiens
  misc_RNA (1)...(19): siRNA sense strand
ucaggacauuacuggugua

SEQ ID NO: 1857479 - RNA, 19 nt, Homo sapiens
  misc_RNA (1)...(19): siRNA sense strand
ccaaggcucagguacuuca

SEQ ID NO: 1857480 - RNA, 19 nt, Homo sapiens
  misc_RNA (1)...(19): siRNA sense strand
ggacuccucguagccaaga

SEQ ID NO: 1857481 - RNA, 19 nt, Homo sapiens
  misc_RNA (1)...(19): siRNA sense strand
ccucaccuguagagagaga

SEQ ID NO: 1857482 - RNA, 19 nt, Homo sapiens
  misc_RNA (1)...(19): siRNA sense strand
gcucucaggcacaauccaa

SEQ ID NO: 1857483 - RNA, 19 nt, Homo sapiens
  misc_RNA (1)...(19): siRNA sense strand
cauuacugguguagaaucu

SEQ ID NO: 1857484 - RNA, 19 nt, Homo sapiens
  misc_RNA (1)...(19): siRNA sense strand
cuaccgcccuucugacaac

SEQ ID NO: 1857485 - RNA, 19 nt, Homo sapiens
  misc_RNA (1)...(19): siRNA sense strand
uuccucaccuguagagaga

SEQ ID NO: 1857486 - RNA, 19 nt, Homo sapiens
  misc_RNA (1)...(19): siRNA sense strand
gcuccaagcccaggacgau

SEQ ID NO: 1857487 - RNA, 19 nt, Homo sapiens
  misc_RNA (1)...(19): siRNA sense strand
cuaagauaagcgaugauga

SEQ ID NO: 1857488 - RNA, 19 nt, Homo sapiens
  misc_RNA (1)...(19): siRNA sense strand
ggaaaggagagcagauuua

SEQ ID NO: 1857489 - RNA, 19 nt, Homo sapiens
  misc_RNA (1)...(19): siRNA sense strand
ucucaaggcucaucuguuu

SEQ ID NO: 1857490 - RNA, 19 nt, Homo sapiens
  misc_RNA (1)...(19): siRNA sense strand
gagagcagauuuacuaugc

SEQ ID NO: 1857491 - RNA, 19 nt, Homo sapiens
  misc_RNA (1)...(19): siRNA sense strand
gcucaucuguuuugaauuu

SEQ ID NO: 1857492 - RNA, 19 nt, Homo sapiens
  misc_RNA (1)...(19): siRNA sense strand
ugaccuagcucucaugucu

SEQ ID NO: 1857493 - RNA, 19 nt, Homo sapiens
  misc_RNA (1)...(19): siRNA sense strand
gaguugcgauccauuacaa

SEQ ID NO: 1857494 - RNA, 19 nt, Homo sapiens
  misc_RNA (1)...(19): siRNA sense strand
aaggagagcagauuuacua

SEQ ID NO: 1857495 - RNA, 19 nt, Homo sapiens
  misc_RNA (1)...(19): siRNA sense strand
ugagagaggacaucaaaga

SEQ ID NO: 1857496 - RNA, 19 nt, Homo sapiens
  misc_RNA (1)...(19): siRNA sense strand
ccagaguugcgauccauua

SEQ ID NO: 1857497 - RNA, 19 nt, Homo sapiens
  misc_RNA (1)...(19): siRNA sense strand
gaaaggagagcagauuuac

SEQ ID NO: 1857498 - RNA, 19 nt, Homo sapiens
  misc_RNA (1)...(19): siRNA sense strand
gauuuuggcuuuucuguug

SEQ ID NO: 1857499 - RNA, 19 nt, Homo sapiens
  misc_RNA (1)...(19): siRNA sense strand
gcgauccauuacaagauuu

SEQ ID NO: 1857500 - RNA, 19 nt, Homo sapiens
  misc_RNA (1)...(19): siRNA sense strand
gaaaaguguuccaagcaau

SEQ ID NO: 1857501 - RNA, 19 nt, Homo sapiens
  misc_RNA (1)...(19): siRNA sense strand
ggagagcagauuuacuaug

SEQ ID NO: 1857502 - RNA, 19 nt, Homo sapiens
  misc_RNA (1)...(19): siRNA sense strand
aaaguguuccaagcaauua

SEQ ID NO: 1857503 - RNA, 19 nt, Homo sapiens
  misc_RNA (1)...(19): siRNA sense strand
augcugggccugucaauaa

SEQ ID NO: 1857504 - RNA, 19 nt, Homo sapiens
  misc_RNA (1)...(19): siRNA sense strand
cagggagaauaccagguuu

SEQ ID NO: 1857505 - RNA, 19 nt, Homo sapiens
  misc_RNA (1)...(19): siRNA sense strand
gaaggaaaggagagcagau

SEQ ID NO: 1857506 - RNA, 19 nt, Homo sapiens
  misc_RNA (1)...(19): siRNA sense strand
ugcgauccauuacaagauu

SEQ ID NO: 1857507 - RNA, 19 nt, Homo sapiens
  misc_RNA (1)...(19): siRNA sense strand
aggcggcucugcccaaguu

SEQ ID NO: 1857508 - RNA, 19 nt, Homo sapiens
  misc_RNA (1)...(19): siRNA sense strand
ucugagagaggacaucaaa

SEQ ID NO: 1857509 - RNA, 19 nt, Homo sapiens
  misc_RNA (1)...(19): siRNA sense strand
ucagggagaauaccagguu

SEQ ID NO: 1857510 - RNA, 19 nt, Homo sapiens
  misc_RNA (1)...(19): siRNA sense strand
ugcuggaacuguacacuga

SEQ ID NO: 1857511 - RNA, 19 nt, Homo sapiens
  misc_RNA (1)...(19): siRNA sense strand
gagagaggacaucaaagag

SEQ ID NO: 1857512 - RNA, 19 nt, Homo sapiens
  misc_RNA (1)...(19): siRNA sense strand
cgacagcggcuuggaagug

SEQ ID NO: 1857513 - RNA, 19 nt, Homo sapiens
  misc_RNA (1)...(19): siRNA sense strand
ucuccuaucccaucuguga

SEQ ID NO: 1857514 - RNA, 19 nt, Homo sapiens
  misc_RNA (1)...(19): siRNA sense strand
ugaaaaguguuccaagcaa

SEQ ID NO: 1857515 - RNA, 19 nt, Homo sapiens
  misc_RNA (1)...(19): siRNA sense strand
cuggaacuguacacugaaa

SEQ ID NO: 1857516 - RNA, 19 nt, Homo sapiens
  misc_RNA (1)...(19): siRNA sense strand
gcuuggaagugcucuacca

SEQ ID NO: 1857517 - RNA, 19 nt, Homo sapiens
  misc_RNA (1)...(19): siRNA sense strand
ggaaagccuggcccacaca

SEQ ID NO: 1857518 - RNA, 19 nt, Homo sapiens
  misc_RNA (1)...(19): siRNA sense strand
aggaaaggagagcagauuu

SEQ ID NO: 1857519 - RNA, 19 nt, Homo sapiens
  misc_RNA (1)...(19): siRNA sense strand
guugcgauccauuacaaga

SEQ ID NO: 1857520 - RNA, 19 nt, Homo sapiens
  misc_RNA (1)...(19): siRNA sense strand
gaaagaagcugccaagaua

SEQ ID NO: 1857521 - RNA, 19 nt, Homo sapiens
  misc_RNA (1)...(19): siRNA sense strand
gaagaacaaugcagugaga

SEQ ID NO: 1857522 - RNA, 19 nt, Homo sapiens
  misc_RNA (1)...(19): siRNA sense strand
gcagugagaucaacagaga

SEQ ID NO: 1857523 - RNA, 19 nt, Homo sapiens
  misc_RNA (1)...(19): siRNA sense strand
gagccaaggugaucauaaa

SEQ ID NO: 1857524 - RNA, 19 nt, Homo sapiens
  misc_RNA (1)...(19): siRNA sense strand
gcgcaugucuuccagauug

SEQ ID NO: 1857525 - RNA, 19 nt, Homo sapiens
  misc_RNA (1)...(19): siRNA sense strand
agacagagcugaaagaucu

SEQ ID NO: 1857526 - RNA, 19 nt, Homo sapiens
  misc_RNA (1)...(19): siRNA sense strand
gaauaugaccuucaccaaa

SEQ ID NO: 1857527 - RNA, 19 nt, Homo sapiens
  misc_RNA (1)...(19): siRNA sense strand
gaacagcuaucggaucauc

SEQ ID NO: 1857528 - RNA, 19 nt, Homo sapiens
  misc_RNA (1)...(19): siRNA sense strand
gcagagagagacaaucaaa

SEQ ID NO: 1857529 - RNA, 19 nt, Homo sapiens
  misc_RNA (1)...(19): siRNA sense strand
caaagugcguuccuuaaag

SEQ ID NO: 1857530 - RNA, 19 nt, Homo sapiens
  misc_RNA (1)...(19): siRNA sense strand
caagauagccaaagacaag

SEQ ID NO: 1857531 - RNA, 19 nt, Homo sapiens
  misc_RNA (1)...(19): siRNA sense strand
caaguaaucauucccaaga

SEQ ID NO: 1857532 - RNA, 19 nt, Homo sapiens
  misc_RNA (1)...(19): siRNA sense strand
aaagugcguuccuuaaaga

SEQ ID NO: 1857533 - RNA, 19 nt, Homo sapiens
  misc_RNA (1)...(19): siRNA sense strand
gaacaaugcagugagauca

SEQ ID NO: 1857534 - RNA, 19 nt, Homo sapiens
  misc_RNA (1)...(19): siRNA sense strand
agacaaagugcguuccuua

SEQ ID NO: 1857535 - RNA, 19 nt, Homo sapiens
  misc_RNA (1)...(19): siRNA sense strand
ccaagaaucugggcgugaa

SEQ ID NO: 1857536 - RNA, 19 nt, Homo sapiens
  misc_RNA (1)...(19): siRNA sense strand
gcugaaagaucuccgaaaa

SEQ ID NO: 1857537 - RNA, 19 nt, Homo sapiens
  misc_RNA (1)...(19): siRNA sense strand
caagauugaugagcuggaa

SEQ ID NO: 1857538 - RNA, 19 nt, Homo sapiens
  misc_RNA (1)...(19): siRNA sense strand
aaucauaccucagcucaug

SEQ ID NO: 1857539 - RNA, 19 nt, Homo sapiens
  misc_RNA (1)...(19): siRNA sense strand
gcacaaucacaccgaauau

SEQ ID NO: 1857540 - RNA, 19 nt, Homo sapiens
  misc_RNA (1)...(19): siRNA sense strand
gacaaagugcguuccuuaa

SEQ ID NO: 1857541 - RNA, 19 nt, Homo sapiens
  misc_RNA (1)...(19): siRNA sense strand
uaccucagcucaugucaga

SEQ ID NO: 1857542 - RNA, 19 nt, Homo sapiens
  misc_RNA (1)...(19): siRNA sense strand
gcuaucggaucaucagugu

SEQ ID NO: 1857543 - RNA, 19 nt, Homo sapiens
  misc_RNA (1)...(19): siRNA sense strand
gaucauaaacagcacaauc

SEQ ID NO: 1857544 - RNA, 19 nt, Homo sapiens
  misc_RNA (1)...(19): siRNA sense strand
ggucaccguuuccuacuuc

SEQ ID NO: 1857545 - RNA, 19 nt, Homo sapiens
  misc_RNA (1)...(19): siRNA sense strand
gaaauuccaggaggugaaa

SEQ ID NO: 1857546 - RNA, 19 nt, Homo sapiens
  misc_RNA (1)...(19): siRNA sense strand
gagcgcaugucuuccagau

SEQ ID NO: 1857547 - RNA, 19 nt, Homo sapiens
  misc_RNA (1)...(19): siRNA sense strand
ucuaugaugucacaaggaa

SEQ ID NO: 1857548 - RNA, 19 nt, Homo sapiens
  misc_RNA (1)...(19): siRNA sense strand
ugaaagaagcugccaagau

SEQ ID NO: 1857549 - RNA, 19 nt, Homo sapiens
  misc_RNA (1)...(19): siRNA sense strand
gagaaugacaagcugaaga

SEQ ID NO: 1857550 - RNA, 19 nt, Homo sapiens
  misc_RNA (1)...(19): siRNA sense strand
uugaugagcuggaagaaca

SEQ ID NO: 1857551 - RNA, 19 nt, Homo sapiens
  misc_RNA (1)...(19): siRNA sense strand
acaaucacaccgaauauga

SEQ ID NO: 1857552 - RNA, 19 nt, Homo sapiens
  misc_RNA (1)...(19): siRNA sense strand
acaaagugcguuccuuaaa

SEQ ID NO: 1857553 - RNA, 19 nt, Homo sapiens
  misc_RNA (1)...(19): siRNA sense strand
acagagagaaggagaagaa

SEQ ID NO: 1857554 - RNA, 19 nt, Homo sapiens
  misc_RNA (1)...(19): siRNA sense strand
cuacuucuaugaugucaca

SEQ ID NO: 1857555 - RNA, 19 nt, Homo sapiens
  misc_RNA (1)...(19): siRNA sense strand
ggaagaggcaguucuccau

SEQ ID NO: 1857556 - RNA, 19 nt, Homo sapiens
  misc_RNA (1)...(19): siRNA sense strand
cagccaacgugaagaagug

SEQ ID NO: 1857557 - RNA, 19 nt, Homo sapiens
  misc_RNA (1)...(19): siRNA sense strand
aaaucgagaccucaaguaa

SEQ ID NO: 1857558 - RNA, 19 nt, Homo sapiens
  misc_RNA (1)...(19): siRNA sense strand
aggaacagcuaucggauca

SEQ ID NO: 1857559 - RNA, 19 nt, Homo sapiens
  misc_RNA (1)...(19): siRNA sense strand
ggacggagccaaggugauc

SEQ ID NO: 1857560 - RNA, 19 nt, Homo sapiens
  misc_RNA (1)...(19): siRNA sense strand
ggagccaaggugaucauaa

SEQ ID NO: 1857561 - RNA, 19 nt, Homo sapiens
  misc_RNA (1)...(19): siRNA sense strand
gaagauugacgaccugcau

SEQ ID NO: 1857562 - RNA, 19 nt, Homo sapiens
  misc_RNA (1)...(19): siRNA sense strand
aauaugaccuucaccaaaa

SEQ ID NO: 1857563 - RNA, 19 nt, Homo sapiens
  misc_RNA (1)...(19): siRNA sense strand
ccaaggugaucauaaacag

SEQ ID NO: 1857564 - RNA, 19 nt, Homo sapiens
  misc_RNA (1)...(19): siRNA sense strand
ugaaagaucuccgaaaaca

SEQ ID NO: 1857565 - RNA, 19 nt, Homo sapiens
  misc_RNA (1)...(19): siRNA sense strand
gcuagaggcggcagagaga

SEQ ID NO: 1857566 - RNA, 19 nt, Homo sapiens
  misc_RNA (1)...(19): siRNA sense strand
gaagaacacgcagcugaag

SEQ ID NO: 1857567 - RNA, 19 nt, Homo sapiens
  misc_RNA (1)...(19): siRNA sense strand
gaccggcuccgcaacaaga

SEQ ID NO: 1857568 - RNA, 19 nt, Homo sapiens
  misc_RNA (1)...(19): siRNA sense strand
ggagacagagcugaaagau

SEQ ID NO: 1857569 - RNA, 19 nt, Homo sapiens
  misc_RNA (1)...(19): siRNA sense strand
gcgcagccaacgugaagaa

SEQ ID NO: 1857570 - RNA, 19 nt, Homo sapiens
  misc_RNA (1)...(19): siRNA sense strand
cugccaagauagccaaaga

SEQ ID NO: 1857571 - RNA, 19 nt, Homo sapiens
  misc_RNA (1)...(19): siRNA sense strand
gagcgcagccaacgugaag

SEQ ID NO: 1857572 - RNA, 19 nt, Homo sapiens
  misc_RNA (1)...(19): siRNA sense strand
gaaugacaagcugaagauu

SEQ ID NO: 1857573 - RNA, 19 nt, Homo sapiens
  misc_RNA (1)...(19): siRNA sense strand
caugucagagugcgaauau

SEQ ID NO: 1857574 - RNA, 19 nt, Homo sapiens
  misc_RNA (1)...(19): siRNA sense strand
cgaauaugaccuucaccaa

SEQ ID NO: 1857575 - RNA, 19 nt, Homo sapiens
  misc_RNA (1)...(19): siRNA sense strand
acauugaggagagcaaaua

SEQ ID NO: 1857576 - RNA, 19 nt, Homo sapiens
  misc_RNA (1)...(19): siRNA sense strand
ccuuaaagacagacauuga

SEQ ID NO: 1857577 - RNA, 19 nt, Homo sapiens
  misc_RNA (1)...(19): siRNA sense strand
caacagagagaaggagaag

SEQ ID NO: 1857578 - RNA, 19 nt, Homo sapiens
  misc_RNA (1)...(19): siRNA sense strand
cggcagagagagacaauca

SEQ ID NO: 1857579 - RNA, 19 nt, Homo sapiens
  misc_RNA (1)...(19): siRNA sense strand
acucaggcauccaguguca

SEQ ID NO: 1857580 - RNA, 19 nt, Homo sapiens
  misc_RNA (1)...(19): siRNA sense strand
aaagaucuccgaaaacaaa

SEQ ID NO: 1857581 - RNA, 19 nt, Homo sapiens
  misc_RNA (1)...(19): siRNA sense strand
agacaagacgcaggagaaa

SEQ ID NO: 1857582 - RNA, 19 nt, Homo sapiens
  misc_RNA (1)...(19): siRNA sense strand
gcugggcaccgauaacuag

SEQ ID NO: 1857583 - RNA, 19 nt, Homo sapiens
  misc_RNA (1)...(19): siRNA sense strand
ugucagagugcgaauaugu

SEQ ID NO: 1857584 - RNA, 19 nt, Homo sapiens
  misc_RNA (1)...(19): siRNA sense strand
agaagaacacgcagcugaa

SEQ ID NO: 1857585 - RNA, 19 nt, Homo sapiens
  misc_RNA (1)...(19): siRNA sense strand
gagagaaggagaagaacac

SEQ ID NO: 1857586 - RNA, 19 nt, Homo sapiens
  misc_RNA (1)...(19): siRNA sense strand
aucgagaccucaaguaauc

SEQ ID NO: 1857587 - RNA, 19 nt, Homo sapiens
  misc_RNA (1)...(19): siRNA sense strand
gugcuggacgggaagauug

SEQ ID NO: 1857588 - RNA, 19 nt, Homo sapiens
  misc_RNA (1)...(19): siRNA sense strand
aaugacaagcugaagauug

SEQ ID NO: 1857589 - RNA, 19 nt, Homo sapiens
  misc_RNA (1)...(19): siRNA sense strand
agaaugacaagcugaagau

SEQ ID NO: 1857590 - RNA, 19 nt, Homo sapiens
  misc_RNA (1)...(19): siRNA sense strand
aaguaaucauucccaagaa

SEQ ID NO: 1857591 - RNA, 19 nt, Homo sapiens
  misc_RNA (1)...(19): siRNA sense strand
gccaagauagccaaagaca

SEQ ID NO: 1857592 - RNA, 19 nt, Homo sapiens
  misc_RNA (1)...(19): siRNA sense strand
gaggcagagcuccgagaaa

SEQ ID NO: 1857593 - RNA, 19 nt, Homo sapiens
  misc_RNA (1)...(19): siRNA sense strand
aaaccuggaagacaaagug

SEQ ID NO: 1857594 - RNA, 19 nt, Homo sapiens
  misc_RNA (1)...(19): siRNA sense strand
gagacagagcugaaagauc

SEQ ID NO: 1857595 - RNA, 19 nt, Homo sapiens
  misc_RNA (1)...(19): siRNA sense strand
aaaguuugcagagaaauuc

SEQ ID NO: 1857596 - RNA, 19 nt, Homo sapiens
  misc_RNA (1)...(19): siRNA sense strand
ccaagcugggcaccgauaa

SEQ ID NO: 1857597 - RNA, 19 nt, Homo sapiens
  misc_RNA (1)...(19): siRNA sense strand
uugacgaccugcaugacuu

SEQ ID NO: 1857598 - RNA, 19 nt, Homo sapiens
  misc_RNA (1)...(19): siRNA sense strand
gccaaggugaucauaaaca

SEQ ID NO: 1857599 - RNA, 19 nt, Homo sapiens
  misc_RNA (1)...(19): siRNA sense strand
gcagccaacgugaagaagu

SEQ ID NO: 1857600 - RNA, 19 nt, Homo sapiens
  misc_RNA (1)...(19): siRNA sense strand
ucacaccgaauaugaccuu

SEQ ID NO: 1857601 - RNA, 19 nt, Homo sapiens
  misc_RNA (1)...(19): siRNA sense strand
aagacaagacgcaggagaa

SEQ ID NO: 1857602 - RNA, 19 nt, Homo sapiens
  misc_RNA (1)...(19): siRNA sense strand
cauaaacagcacaaucaca

SEQ ID NO: 1857603 - RNA, 19 nt, Homo sapiens
  misc_RNA (1)...(19): siRNA sense strand
aggcagagcuccgagaaaa

SEQ ID NO: 1857604 - RNA, 19 nt, Homo sapiens
  misc_RNA (1)...(19): siRNA sense strand
caagaaucugggcgugaaa

SEQ ID NO: 1857605 - RNA, 19 nt, Homo sapiens
  misc_RNA (1)...(19): siRNA sense strand
cgacagcagagccaacaca

SEQ ID NO: 1857606 - RNA, 19 nt, Homo sapiens
  misc_RNA (1)...(19): siRNA sense strand
aaaggagacagagcugaaa

SEQ ID NO: 1857607 - RNA, 19 nt, Homo sapiens
  misc_RNA (1)...(19): siRNA sense strand
caccguuuccuacuucuau

SEQ ID NO: 1857608 - RNA, 19 nt, Homo sapiens
  misc_RNA (1)...(19): siRNA sense strand
gaaaaucgagaccucaagu

SEQ ID NO: 1857609 - RNA, 19 nt, Homo sapiens
  misc_RNA (1)...(19): siRNA sense strand
ccaagauagccaaagacaa

SEQ ID NO: 1857610 - RNA, 19 nt, Homo sapiens
  misc_RNA (1)...(19): siRNA sense strand
ugaagucugagaaugacaa

SEQ ID NO: 1857611 - RNA, 19 nt, Homo sapiens
  misc_RNA (1)...(19): siRNA sense strand
aagaggcaguucuccaucu

SEQ ID NO: 1857612 - RNA, 19 nt, Homo sapiens
  misc_RNA (1)...(19): siRNA sense strand
aaucgagaccucaaguaau

SEQ ID NO: 1857613 - RNA, 19 nt, Homo sapiens
  misc_RNA (1)...(19): siRNA sense strand
uaugaugucacaaggaaca

SEQ ID NO: 1857614 - RNA, 19 nt, Homo sapiens
  misc_RNA (1)...(19): siRNA sense strand
cacccgagcgcaugucuuc

SEQ ID NO: 1857615 - RNA, 19 nt, Homo sapiens
  misc_RNA (1)...(19): siRNA sense strand
augacaagcugaagauugc

SEQ ID NO: 1857616 - RNA, 19 nt, Homo sapiens
  misc_RNA (1)...(19): siRNA sense strand
gggaauuccuggacacaaa

SEQ ID NO: 1857617 - RNA, 19 nt, Homo sapiens
  misc_RNA (1)...(19): siRNA sense strand
gugaaacacuccaguccua

SEQ ID NO: 1857618 - RNA, 19 nt, Homo sapiens
  misc_RNA (1)...(19): siRNA sense strand
gcaaacacaggacaucuga

SEQ ID NO: 1857619 - RNA, 19 nt, Homo sapiens
  misc_RNA (1)...(19): siRNA sense strand
gaauaugacccuccgaugu

SEQ ID NO: 1857620 - RNA, 19 nt, Homo sapiens
  misc_RNA (1)...(19): siRNA sense strand
ggguggagcuggacaguca

SEQ ID NO: 1857621 - RNA, 19 nt, Homo sapiens
  misc_RNA (1)...(19): siRNA sense strand
gauuuguucuguauaagga

SEQ ID NO: 1857622 - RNA, 19 nt, Homo sapiens
  misc_RNA (1)...(19): siRNA sense strand
ggagauaccgcugccacua

SEQ ID NO: 1857623 - RNA, 19 nt, Homo sapiens
  misc_RNA (1)...(19): siRNA sense strand
gaccagagaaagacugauu

SEQ ID NO: 1857624 - RNA, 19 nt, Homo sapiens
  misc_RNA (1)...(19): siRNA sense strand
caccuggucugggaagaua

SEQ ID NO: 1857625 - RNA, 19 nt, Homo sapiens
  misc_RNA (1)...(19): siRNA sense strand
gguggagguucacaugcua

SEQ ID NO: 1857626 - RNA, 19 nt, Homo sapiens
  misc_RNA (1)...(19): siRNA sense strand
ccaagaacaaggccagauu

SEQ ID NO: 1857627 - RNA, 19 nt, Homo sapiens
  misc_RNA (1)...(19): siRNA sense strand
guucacaugcuauuacuau

SEQ ID NO: 1857628 - RNA, 19 nt, Homo sapiens
  misc_RNA (1)...(19): siRNA sense strand
gagauaccgcugccacuau

SEQ ID NO: 1857629 - RNA, 19 nt, Homo sapiens
  misc_RNA (1)...(19): siRNA sense strand
agauaccgcugccacuauu

SEQ ID NO: 1857630 - RNA, 19 nt, Homo sapiens
  misc_RNA (1)...(19): siRNA sense strand
ggagguucacaugcuauua

SEQ ID NO: 1857631 - RNA, 19 nt, Homo sapiens
  misc_RNA (1)...(19): siRNA sense strand
ccucaggcgugucuaggaa

SEQ ID NO: 1857632 - RNA, 19 nt, Homo sapiens
  misc_RNA (1)...(19): siRNA sense strand
acacuuuccuucugaccaa

SEQ ID NO: 1857633 - RNA, 19 nt, Homo sapiens
  misc_RNA (1)...(19): siRNA sense strand
ugaaggacacacagucuga

SEQ ID NO: 1857634 - RNA, 19 nt, Homo sapiens
  misc_RNA (1)...(19): siRNA sense strand
caagaacaaggccagauuc

SEQ ID NO: 1857635 - RNA, 19 nt, Homo sapiens
  misc_RNA (1)...(19): siRNA sense strand
auaaguaccaggcugaauu

SEQ ID NO: 1857636 - RNA, 19 nt, Homo sapiens
  misc_RNA (1)...(19): siRNA sense strand
gcucugaugucggcuacga

SEQ ID NO: 1857637 - RNA, 19 nt, Homo sapiens
  misc_RNA (1)...(19): siRNA sense strand
caauguacggagcucauaa

SEQ ID NO: 1857638 - RNA, 19 nt, Homo sapiens
  misc_RNA (1)...(19): siRNA sense strand
gauaccgcugccacuauua

SEQ ID NO: 1857639 - RNA, 19 nt, Homo sapiens
  misc_RNA (1)...(19): siRNA sense strand
cugcugacguccaggaaga

SEQ ID NO: 1857640 - RNA, 19 nt, Homo sapiens
  misc_RNA (1)...(19): siRNA sense strand
gagccugacccuccagugu

SEQ ID NO: 1857641 - RNA, 19 nt, Homo sapiens
  misc_RNA (1)...(19): siRNA sense strand
uaaguaccaggcugaauuc

SEQ ID NO: 1857642 - RNA, 19 nt, Homo sapiens
  misc_RNA (1)...(19): siRNA sense strand
ugaggcugcugcaucugaa

SEQ ID NO: 1857643 - RNA, 19 nt, Homo sapiens
  misc_RNA (1)...(19): siRNA sense strand
ucagagcccacacgaugaa

SEQ ID NO: 1857644 - RNA, 19 nt, Homo sapiens
  misc_RNA (1)...(19): siRNA sense strand
aauaugacccuccgaugug

SEQ ID NO: 1857645 - RNA, 19 nt, Homo sapiens
  misc_RNA (1)...(19): siRNA sense strand
gagguucacaugcuauuac

SEQ ID NO: 1857646 - RNA, 19 nt, Homo sapiens
  misc_RNA (1)...(19): siRNA sense strand
acaguggccucaggagaga

SEQ ID NO: 1857647 - RNA, 19 nt, Homo sapiens
  misc_RNA (1)...(19): siRNA sense strand
cagaaauaacccacuggaa

SEQ ID NO: 1857648 - RNA, 19 nt, Homo sapiens
  misc_RNA (1)...(19): siRNA sense strand
ucaauguacggagcucaua

SEQ ID NO: 1857649 - RNA, 19 nt, Homo sapiens
  misc_RNA (1)...(19): siRNA sense strand
ccacugcgucugagaucaa

SEQ ID NO: 1857650 - RNA, 19 nt, Homo sapiens
  misc_RNA (1)...(19): siRNA sense strand
ccacuggaacccaagaaca

SEQ ID NO: 1857651 - RNA, 19 nt, Homo sapiens
  misc_RNA (1)...(19): siRNA sense strand
uuugacacuuuccuucuga

SEQ ID NO: 1857652 - RNA, 19 nt, Homo sapiens
  misc_RNA (1)...(19): siRNA sense strand
ggaauuccuggacacaaag

SEQ ID NO: 1857653 - RNA, 19 nt, Homo sapiens
  misc_RNA (1)...(19): siRNA sense strand
guuugacacuuuccuucug

SEQ ID NO: 1857654 - RNA, 19 nt, Homo sapiens
  misc_RNA (1)...(19): siRNA sense strand
ucuccucccuccucacugu

SEQ ID NO: 1857655 - RNA, 19 nt, Homo sapiens
  misc_RNA (1)...(19): siRNA sense strand
uguacggagcucauaagua

SEQ ID NO: 1857656 - RNA, 19 nt, Homo sapiens
  misc_RNA (1)...(19): siRNA sense strand
ccacucuggccauccacua

SEQ ID NO: 1857657 - RNA, 19 nt, Homo sapiens
  misc_RNA (1)...(19): siRNA sense strand
aaacacuccaguccuagga

SEQ ID NO: 1857658 - RNA, 19 nt, Homo sapiens
  misc_RNA (1)...(19): siRNA sense strand
cacuggaacccaagaacaa

SEQ ID NO: 1857659 - RNA, 19 nt, Homo sapiens
  misc_RNA (1)...(19): siRNA sense strand
cacugaggcugcugcaucu

SEQ ID NO: 1857660 - RNA, 19 nt, Homo sapiens
  misc_RNA (1)...(19): siRNA sense strand
gaacacagauuaccgcuua

SEQ ID NO: 1857661 - RNA, 19 nt, Homo sapiens
  misc_RNA (1)...(19): siRNA sense strand
gaaagaagcagaagaaaga

SEQ ID NO: 1857662 - RNA, 19 nt, Homo sapiens
  misc_RNA (1)...(19): siRNA sense strand
gaaugaagcuugugaaucu

SEQ ID NO: 1857663 - RNA, 19 nt, Homo sapiens
  misc_RNA (1)...(19): siRNA sense strand
gcaaacagaugauaaccaa

SEQ ID NO: 1857664 - RNA, 19 nt, Homo sapiens
  misc_RNA (1)...(19): siRNA sense strand
gaccagauccgaaucauua

SEQ ID NO: 1857665 - RNA, 19 nt, Homo sapiens
  misc_RNA (1)...(19): siRNA sense strand
ggauugagauguggaguua

SEQ ID NO: 1857666 - RNA, 19 nt, Homo sapiens
  misc_RNA (1)...(19): siRNA sense strand
uaaagaaugugcugaugaa

SEQ ID NO: 1857667 - RNA, 19 nt, Homo sapiens
  misc_RNA (1)...(19): siRNA sense strand
guaaugacgucuccaucua

SEQ ID NO: 1857668 - RNA, 19 nt, Homo sapiens
  misc_RNA (1)...(19): siRNA sense strand
ucuuagagcugcaguauuu

SEQ ID NO: 1857669 - RNA, 19 nt, Homo sapiens
  misc_RNA (1)...(19): siRNA sense strand
gaacauuuauacacagaga

SEQ ID NO: 1857670 - RNA, 19 nt, Homo sapiens
  misc_RNA (1)...(19): siRNA sense strand
gacgagaucuccagucuau

SEQ ID NO: 1857671 - RNA, 19 nt, Homo sapiens
  misc_RNA (1)...(19): siRNA sense strand
gcaagcagaugauaaagag

SEQ ID NO: 1857672 - RNA, 19 nt, Homo sapiens
  misc_RNA (1)...(19): siRNA sense strand
gcaaaucuacuauaacaga

SEQ ID NO: 1857673 - RNA, 19 nt, Homo sapiens
  misc_RNA (1)...(19): siRNA sense strand
uuacaugguuuccugcuua

SEQ ID NO: 1857674 - RNA, 19 nt, Homo sapiens
  misc_RNA (1)...(19): siRNA sense strand
gcaaucauuuguuguggaa

SEQ ID NO: 1857675 - RNA, 19 nt, Homo sapiens
  misc_RNA (1)...(19): siRNA sense strand
cagagaagaugguagaaga

SEQ ID NO: 1857676 - RNA, 19 nt, Homo sapiens
  misc_RNA (1)...(19): siRNA sense strand
agaaaggccuggugaaaga

SEQ ID NO: 1857677 - RNA, 19 nt, Homo sapiens
  misc_RNA (1)...(19): siRNA sense strand
cuacagaucccaaauuuga

SEQ ID NO: 1857678 - RNA, 19 nt, Homo sapiens
  misc_RNA (1)...(19): siRNA sense strand
gaaugagaccagugaauuu

SEQ ID NO: 1857679 - RNA, 19 nt, Homo sapiens
  misc_RNA (1)...(19): siRNA sense strand
ggaaugagaccagugaauu

SEQ ID NO: 1857680 - RNA, 19 nt, Homo sapiens
  misc_RNA (1)...(19): siRNA sense strand
gaagaaagagaacccaaga

SEQ ID NO: 1857681 - RNA, 19 nt, Homo sapiens
  misc_RNA (1)...(19): siRNA sense strand
gagcaucuguauauuguuc

SEQ ID NO: 1857682 - RNA, 19 nt, Homo sapiens
  misc_RNA (1)...(19): siRNA sense strand
gagcuguguucucuuguuu

SEQ ID NO: 1857683 - RNA, 19 nt, Homo sapiens
  misc_RNA (1)...(19): siRNA sense strand
guguauaagugccucuuua

SEQ ID NO: 1857684 - RNA, 19 nt, Homo sapiens
  misc_RNA (1)...(19): siRNA sense strand
gaggcaacaucacugagua

SEQ ID NO: 1857685 - RNA, 19 nt, Homo sapiens
  misc_RNA (1)...(19): siRNA sense strand
uggaagcacuggaggauaa

SEQ ID NO: 1857686 - RNA, 19 nt, Homo sapiens
  misc_RNA (1)...(19): siRNA sense strand
aagcugacauuccuaaauu

SEQ ID NO: 1857687 - RNA, 19 nt, Homo sapiens
  misc_RNA (1)...(19): siRNA sense strand
gauggaacauuuauacaca

SEQ ID NO: 1857688 - RNA, 19 nt, Homo sapiens
  misc_RNA (1)...(19): siRNA sense strand
cagacagccugcaaacaua

SEQ ID NO: 1857689 - RNA, 19 nt, Homo sapiens
  misc_RNA (1)...(19): siRNA sense strand
gaaagagaacccaagauuc

SEQ ID NO: 1857690 - RNA, 19 nt, Homo sapiens
  misc_RNA (1)...(19): siRNA sense strand
gggagcaucuguauauugu

SEQ ID NO: 1857691 - RNA, 19 nt, Homo sapiens
  misc_RNA (1)...(19): siRNA sense strand
ggagccagaucuauacgaa

SEQ ID NO: 1857692 - RNA, 19 nt, Homo sapiens
  misc_RNA (1)...(19): siRNA sense strand
gaagaauccaugagugaaa

SEQ ID NO: 1857693 - RNA, 19 nt, Homo sapiens
  misc_RNA (1)...(19): siRNA sense strand
ggagaaaggccuggugaaa

SEQ ID NO: 1857694 - RNA, 19 nt, Homo sapiens
  misc_RNA (1)...(19): siRNA sense strand
ggccaaggaugauucagaa

SEQ ID NO: 1857695 - RNA, 19 nt, Homo sapiens
  misc_RNA (1)...(19): siRNA sense strand
gagcugaaguccaaaggau

SEQ ID NO: 1857696 - RNA, 19 nt, Homo sapiens
  misc_RNA (1)...(19): siRNA sense strand
ucacuuagaccggcauuua

SEQ ID NO: 1857697 - RNA, 19 nt, Homo sapiens
  misc_RNA (1)...(19): siRNA sense strand
ccagagagguuugcaaauc

SEQ ID NO: 1857698 - RNA, 19 nt, Homo sapiens
  misc_RNA (1)...(19): siRNA sense strand
gaacccaagauucaaguuu

SEQ ID NO: 1857699 - RNA, 19 nt, Homo sapiens
  misc_RNA (1)...(19): siRNA sense strand
gagaugaucgggagcguuu

SEQ ID NO: 1857700 - RNA, 19 nt, Homo sapiens
  misc_RNA (1)...(19): siRNA sense strand
gcaaggaggacguguugaa

SEQ ID NO: 1857701 - RNA, 19 nt, Homo sapiens
  misc_RNA (1)...(19): siRNA sense strand
gaggacguguugaagcuuu

SEQ ID NO: 1857702 - RNA, 19 nt, Homo sapiens
  misc_RNA (1)...(19): siRNA sense strand
aagcagacaucuuuguuga

SEQ ID NO: 1857703 - RNA, 19 nt, Homo sapiens
  misc_RNA (1)...(19): siRNA sense strand
aaagagaacccaagauuca

SEQ ID NO: 1857704 - RNA, 19 nt, Homo sapiens
  misc_RNA (1)...(19): siRNA sense strand
ugacuaaggccaaggauga

SEQ ID NO: 1857705 - RNA, 19 nt, Homo sapiens
  misc_RNA (1)...(19): siRNA sense strand
agaaggacaugaacgagaa

SEQ ID NO: 1857706 - RNA, 19 nt, Homo sapiens
  misc_RNA (1)...(19): siRNA sense strand
agacugcaaucauuuguug

SEQ ID NO: 1857707 - RNA, 19 nt, Homo sapiens
  misc_RNA (1)...(19): siRNA sense strand
gaucccaaaugcaaacaga

SEQ ID NO: 1857708 - RNA, 19 nt, Homo sapiens
  misc_RNA (1)...(19): siRNA sense strand
cgucaaauguccugucuca

SEQ ID NO: 1857709 - RNA, 19 nt, Homo sapiens
  misc_RNA (1)...(19): siRNA sense strand
ggugaaagaagcagaagaa

SEQ ID NO: 1857710 - RNA, 19 nt, Homo sapiens
  misc_RNA (1)...(19): siRNA sense strand
guaaagcugacauuccuaa

SEQ ID NO: 1857711 - RNA, 19 nt, Homo sapiens
  misc_RNA (1)...(19): siRNA sense strand
auagaagccuugcugauga

SEQ ID NO: 1857712 - RNA, 19 nt, Homo sapiens
  misc_RNA (1)...(19): siRNA sense strand
gguggaguguagagauaua

SEQ ID NO: 1857713 - RNA, 19 nt, Homo sapiens
  misc_RNA (1)...(19): siRNA sense strand
gauaagugccugauugauc

SEQ ID NO: 1857714 - RNA, 19 nt, Homo sapiens
  misc_RNA (1)...(19): siRNA sense strand
agaaagagaacccaagauu

SEQ ID NO: 1857715 - RNA, 19 nt, Homo sapiens
  misc_RNA (1)...(19): siRNA sense strand
gaugaaggauuuucgguuu

SEQ ID NO: 1857716 - RNA, 19 nt, Homo sapiens
  misc_RNA (1)...(19): siRNA sense strand
ggaaaagguuacaugguuu

SEQ ID NO: 1857717 - RNA, 19 nt, Homo sapiens
  misc_RNA (1)...(19): siRNA sense strand
ucaaauguccugucucaug

SEQ ID NO: 1857718 - RNA, 19 nt, Homo sapiens
  misc_RNA (1)...(19): siRNA sense strand
ugacauuccuaaauucugu

SEQ ID NO: 1857719 - RNA, 19 nt, Homo sapiens
  misc_RNA (1)...(19): siRNA sense strand
gaugauggacccagagcua

SEQ ID NO: 1857720 - RNA, 19 nt, Homo sapiens
  misc_RNA (1)...(19): siRNA sense strand
gcuguguucucuuguuuau

SEQ ID NO: 1857721 - RNA, 19 nt, Homo sapiens
  misc_RNA (1)...(19): siRNA sense strand
ggagcuguguucucuuguu

SEQ ID NO: 1857722 - RNA, 19 nt, Homo sapiens
  misc_RNA (1)...(19): siRNA sense strand
gcacuuacaacccgccaaa

SEQ ID NO: 1857723 - RNA, 19 nt, Homo sapiens
  misc_RNA (1)...(19): siRNA sense strand
uaaacaugcugaaggaaag

SEQ ID NO: 1857724 - RNA, 19 nt, Homo sapiens
  misc_RNA (1)...(19): siRNA sense strand
uaucgaaugucugaaagaa

SEQ ID NO: 1857725 - RNA, 19 nt, Homo sapiens
  misc_RNA (1)...(19): siRNA sense strand
gugguggaguguagagaua

SEQ ID NO: 1857726 - RNA, 19 nt, Homo sapiens
  misc_RNA (1)...(19): siRNA sense strand
gaagaugguagaagacugu

SEQ ID NO: 1857727 - RNA, 19 nt, Homo sapiens
  misc_RNA (1)...(19): siRNA sense strand
uaacuacagaucccaaauu

SEQ ID NO: 1857728 - RNA, 19 nt, Homo sapiens
  misc_RNA (1)...(19): siRNA sense strand
gugccgagcugaaguccaa

SEQ ID NO: 1857729 - RNA, 19 nt, Homo sapiens
  misc_RNA (1)...(19): siRNA sense strand
aacuacagaucccaaauuu

SEQ ID NO: 1857730 - RNA, 19 nt, Homo sapiens
  misc_RNA (1)...(19): siRNA sense strand
gaagaaauaccggugcaau

SEQ ID NO: 1857731 - RNA, 19 nt, Homo sapiens
  misc_RNA (1)...(19): siRNA sense strand
uaaauucugucacgguauc

SEQ ID NO: 1857732 - RNA, 19 nt, Homo sapiens
  misc_RNA (1)...(19): siRNA sense strand
acaccauuguuccggauua

SEQ ID NO: 1857733 - RNA, 19 nt, Homo sapiens
  misc_RNA (1)...(19): siRNA sense strand
caaaugcaaacagaugaua

SEQ ID NO: 1857734 - RNA, 19 nt, Homo sapiens
  misc_RNA (1)...(19): siRNA sense strand
gauuaucgaaugucugaaa

SEQ ID NO: 1857735 - RNA, 19 nt, Homo sapiens
  misc_RNA (1)...(19): siRNA sense strand
ggaaaauggugcagugaga

SEQ ID NO: 1857736 - RNA, 19 nt, Homo sapiens
  misc_RNA (1)...(19): siRNA sense strand
ucacccagaacacagauua

SEQ ID NO: 1857737 - RNA, 19 nt, Homo sapiens
  misc_RNA (1)...(19): siRNA sense strand
gaagugugccaucggaguu

SEQ ID NO: 1857738 - RNA, 19 nt, Homo sapiens
  misc_RNA (1)...(19): siRNA sense strand
ucugaaauguggcaguauu

SEQ ID NO: 1857739 - RNA, 19 nt, Homo sapiens
  misc_RNA (1)...(19): siRNA sense strand
gaagaccagauccgaauca

SEQ ID NO: 1857740 - RNA, 19 nt, Homo sapiens
  misc_RNA (1)...(19): siRNA sense strand
gcuuggagccagaucuaua

SEQ ID NO: 1857741 - RNA, 19 nt, Homo sapiens
  misc_RNA (1)...(19): siRNA sense strand
gaguuagaaucagaggaua

SEQ ID NO: 1857742 - RNA, 19 nt, Homo sapiens
  misc_RNA (1)...(19): siRNA sense strand
gcauguugauggaagacuu

SEQ ID NO: 1857743 - RNA, 19 nt, Homo sapiens
  misc_RNA (1)...(19): siRNA sense strand
gaaauaccggugcaaugug

SEQ ID NO: 1857744 - RNA, 19 nt, Homo sapiens
  misc_RNA (1)...(19): siRNA sense strand
cugcaagagugacaucaaa

SEQ ID NO: 1857745 - RNA, 19 nt, Homo sapiens
  misc_RNA (1)...(19): siRNA sense strand
gaucgagcuuugaaugaag

SEQ ID NO: 1857746 - RNA, 19 nt, Homo sapiens
  misc_RNA (1)...(19): siRNA sense strand
ugacaucaacauucugaaa

SEQ ID NO: 1857747 - RNA, 19 nt, Homo sapiens
  misc_RNA (1)...(19): siRNA sense strand
ggaaagcaaagcagacauc

SEQ ID NO: 1857748 - RNA, 19 nt, Homo sapiens
  misc_RNA (1)...(19): siRNA sense strand
caaugacacucugcaggaa

SEQ ID NO: 1857749 - RNA, 19 nt, Homo sapiens
  misc_RNA (1)...(19): siRNA sense strand
ugagaccagugaauuuaug

SEQ ID NO: 1857750 - RNA, 19 nt, Homo sapiens
  misc_RNA (1)...(19): siRNA sense strand
aaugagaccagugaauuua

SEQ ID NO: 1857751 - RNA, 19 nt, Homo sapiens
  misc_RNA (1)...(19): siRNA sense strand
gcagauuaccgcauugauc

SEQ ID NO: 1857752 - RNA, 19 nt, Homo sapiens
  misc_RNA (1)...(19): siRNA sense strand
caggcucuccuacuuguua

SEQ ID NO: 1857753 - RNA, 19 nt, Homo sapiens
  misc_RNA (1)...(19): siRNA sense strand
aaggugaggugguaucaug

SEQ ID NO: 1857754 - RNA, 19 nt, Homo sapiens
  misc_RNA (1)...(19): siRNA sense strand
ggacguguacggaggaugu

SEQ ID NO: 1857755 - RNA, 19 nt, Homo sapiens
  misc_RNA (1)...(19): siRNA sense strand
cuugugcccuggacauuaa

SEQ ID NO: 1857756 - RNA, 19 nt, Homo sapiens
  misc_RNA (1)...(19): siRNA sense strand
caucggaguuacccacuuc

SEQ ID NO: 1857757 - RNA, 19 nt, Homo sapiens
  misc_RNA (1)...(19): siRNA sense strand
ggacaugaacgagaagugu

SEQ ID NO: 1857758 - RNA, 19 nt, Homo sapiens
  misc_RNA (1)...(19): siRNA sense strand
ccagacagccugcaaacau

SEQ ID NO: 1857759 - RNA, 19 nt, Homo sapiens
  misc_RNA (1)...(19): siRNA sense strand
ugaucgagcuuugaaugaa

SEQ ID NO: 1857760 - RNA, 19 nt, Homo sapiens
  misc_RNA (1)...(19): siRNA sense strand
ggagcgagcuggugcauaa

SEQ ID NO: 1857761 - RNA, 19 nt, Homo sapiens
  misc_RNA (1)...(19): siRNA sense strand
gggaagagauggaauuauu

SEQ ID NO: 1857762 - RNA, 19 nt, Homo sapiens
  misc_RNA (1)...(19): siRNA sense strand
ggcaggagaugcugaauca

SEQ ID NO: 1857763 - RNA, 19 nt, Homo sapiens
  misc_RNA (1)...(19): siRNA sense strand
ugacagcuguagcaacuuu

SEQ ID NO: 1857764 - RNA, 19 nt, Homo sapiens
  misc_RNA (1)...(19): siRNA sense strand
uggaugaacuggugaagaa

SEQ ID NO: 1857765 - RNA, 19 nt, Homo sapiens
  misc_RNA (1)...(19): siRNA sense strand
gaugacagcuguagcaacu

SEQ ID NO: 1857766 - RNA, 19 nt, Homo sapiens
  misc_RNA (1)...(19): siRNA sense strand
ugaagaaccuggagaugau

SEQ ID NO: 1857767 - RNA, 19 nt, Homo sapiens
  misc_RNA (1)...(19): siRNA sense strand
ugagaugccugaccaguuc

SEQ ID NO: 1857768 - RNA, 19 nt, Homo sapiens
  misc_RNA (1)...(19): siRNA sense strand
gagcaaaccugagccugau

SEQ ID NO: 1857769 - RNA, 19 nt, Homo sapiens
  misc_RNA (1)...(19): siRNA sense strand
caagagagccaucaacaag

SEQ ID NO: 1857770 - RNA, 19 nt, Homo sapiens
  misc_RNA (1)...(19): siRNA sense strand
gaagaugacagcuguagca

SEQ ID NO: 1857771 - RNA, 19 nt, Homo sapiens
  misc_RNA (1)...(19): siRNA sense strand
ggaagagauggaauuauug

SEQ ID NO: 1857772 - RNA, 19 nt, Homo sapiens
  misc_RNA (1)...(19): siRNA sense strand
guagcaacuuugugucuga

SEQ ID NO: 1857773 - RNA, 19 nt, Homo sapiens
  misc_RNA (1)...(19): siRNA sense strand
gcaacuuugugucugaaga

SEQ ID NO: 1857774 - RNA, 19 nt, Homo sapiens
  misc_RNA (1)...(19): siRNA sense strand
ccaacaagcccgucugaga

SEQ ID NO: 1857775 - RNA, 19 nt, Homo sapiens
  misc_RNA (1)...(19): siRNA sense strand
ucaacaaguccaagccuua

SEQ ID NO: 1857776 - RNA, 19 nt, Homo sapiens
  misc_RNA (1)...(19): siRNA sense strand
ugaagcagcucucccuaca

SEQ ID NO: 1857777 - RNA, 19 nt, Homo sapiens
  misc_RNA (1)...(19): siRNA sense strand
caacaagcccgucugagau

SEQ ID NO: 1857778 - RNA, 19 nt, Homo sapiens
  misc_RNA (1)...(19): siRNA sense strand
uaaaucaguccacggauga

SEQ ID NO: 1857779 - RNA, 19 nt, Homo sapiens
  misc_RNA (1)...(19): siRNA sense strand
ggagaagaaacucaagaga

SEQ ID NO: 1857780 - RNA, 19 nt, Homo sapiens
  misc_RNA (1)...(19): siRNA sense strand
ugcgacagcuggagaagaa

SEQ ID NO: 1857781 - RNA, 19 nt, Homo sapiens
  misc_RNA (1)...(19): siRNA sense strand
ugacaaagccaacaacaac

SEQ ID NO: 1857782 - RNA, 19 nt, Homo sapiens
  misc_RNA (1)...(19): siRNA sense strand
uggaauuauugcugacaua

SEQ ID NO: 1857783 - RNA, 19 nt, Homo sapiens
  misc_RNA (1)...(19): siRNA sense strand
gacgggagacugaacuuga

SEQ ID NO: 1857784 - RNA, 19 nt, Homo sapiens
  misc_RNA (1)...(19): siRNA sense strand
gaagagauggaauuauugc

SEQ ID NO: 1857785 - RNA, 19 nt, Homo sapiens
  misc_RNA (1)...(19): siRNA sense strand
gaggcaggcucagcuggaa

SEQ ID NO: 1857786 - RNA, 19 nt, Homo sapiens
  misc_RNA (1)...(19): siRNA sense strand
guuccgcucuguucugguu

SEQ ID NO: 1857787 - RNA, 19 nt, Homo sapiens
  misc_RNA (1)...(19): siRNA sense strand
gaugauguucccaguguug

SEQ ID NO: 1857788 - RNA, 19 nt, Homo sapiens
  misc_RNA (1)...(19): siRNA sense strand
acaaguccaagccuuauuu

SEQ ID NO: 1857789 - RNA, 19 nt, Homo sapiens
  misc_RNA (1)...(19): siRNA sense strand
caacaaguccaagccuuau

SEQ ID NO: 1857790 - RNA, 19 nt, Homo sapiens
  misc_RNA (1)...(19): siRNA sense strand
aagcagcucucccuacagu

SEQ ID NO: 1857791 - RNA, 19 nt, Homo sapiens
  misc_RNA (1)...(19): siRNA sense strand
gcagcucgagcaacugaaa

SEQ ID NO: 1857792 - RNA, 19 nt, Homo sapiens
  misc_RNA (1)...(19): siRNA sense strand
gaagaaaauuggcaaagcu

SEQ ID NO: 1857793 - RNA, 19 nt, Homo sapiens
  misc_RNA (1)...(19): siRNA sense strand
aaagggaagagauggaauu

SEQ ID NO: 1857794 - RNA, 19 nt, Homo sapiens
  misc_RNA (1)...(19): siRNA sense strand
agagagccaucaacaaguc

SEQ ID NO: 1857795 - RNA, 19 nt, Homo sapiens
  misc_RNA (1)...(19): siRNA sense strand
ugaggaugcucgucagaag

SEQ ID NO: 1857796 - RNA, 19 nt, Homo sapiens
  misc_RNA (1)...(19): siRNA sense strand
uggcaaagcuguggaagac

SEQ ID NO: 1857797 - RNA, 19 nt, Homo sapiens
  misc_RNA (1)...(19): siRNA sense strand
gcgagcuggugcauaagga

SEQ ID NO: 1857798 - RNA, 19 nt, Homo sapiens
  misc_RNA (1)...(19): siRNA sense strand
gaaguuccgcucuguucug

SEQ ID NO: 1857799 - RNA, 19 nt, Homo sapiens
  misc_RNA (1)...(19): siRNA sense strand
cggaggccuuugaagauga

SEQ ID NO: 1857800 - RNA, 19 nt, Homo sapiens
  misc_RNA (1)...(19): siRNA sense strand
ggaugauguucccaguguu

SEQ ID NO: 1857801 - RNA, 19 nt, Homo sapiens
  misc_RNA (1)...(19): siRNA sense strand
gaccaacaagcccgucuga

SEQ ID NO: 1857802 - RNA, 19 nt, Homo sapiens
  misc_RNA (1)...(19): siRNA sense strand
gaaagccacgcaggacuuc

SEQ ID NO: 1857803 - RNA, 19 nt, Homo sapiens
  misc_RNA (1)...(19): siRNA sense strand
cuggagaaguuaaaucagu

SEQ ID NO: 1857804 - RNA, 19 nt, Homo sapiens
  misc_RNA (1)...(19): siRNA sense strand
guugggcccucgaagugaa

SEQ ID NO: 1857805 - RNA, 19 nt, Homo sapiens
  misc_RNA (1)...(19): siRNA sense strand
gcaaaaggcgaguacaaga

SEQ ID NO: 1857806 - RNA, 19 nt, Homo sapiens
  misc_RNA (1)...(19): siRNA sense strand
ucaagagagccaucaacaa

SEQ ID NO: 1857807 - RNA, 19 nt, Homo sapiens
  misc_RNA (1)...(19): siRNA sense strand
gaucugcccagcccugugu

SEQ ID NO: 1857808 - RNA, 19 nt, Homo sapiens
  misc_RNA (1)...(19): siRNA sense strand
caacagacgggagacugaa

SEQ ID NO: 1857809 - RNA, 19 nt, Homo sapiens
  misc_RNA (1)...(19): siRNA sense strand
caacggugaaacuggauga

SEQ ID NO: 1857810 - RNA, 19 nt, Homo sapiens
  misc_RNA (1)...(19): siRNA sense strand
caagugacaaagccaacaa

SEQ ID NO: 1857811 - RNA, 19 nt, Homo sapiens
  misc_RNA (1)...(19): siRNA sense strand
cugaagaaccuggagauga

SEQ ID NO: 1857812 - RNA, 19 nt, Homo sapiens
  misc_RNA (1)...(19): siRNA sense strand
caagauggcccugaagaac

SEQ ID NO: 1857813 - RNA, 19 nt, Homo sapiens
  misc_RNA (1)...(19): siRNA sense strand
gaacuggugaagaaaauug

SEQ ID NO: 1857814 - RNA, 19 nt, Homo sapiens
  misc_RNA (1)...(19): siRNA sense strand
gcagugguggcagcaguaa

SEQ ID NO: 1857815 - RNA, 19 nt, Homo sapiens
  misc_RNA (1)...(19): siRNA sense strand
gaaguagaacgaggagaca

SEQ ID NO: 1857816 - RNA, 19 nt, Homo sapiens
  misc_RNA (1)...(19): siRNA sense strand
cccugaaugugaaguagaa

SEQ ID NO: 1857817 - RNA, 19 nt, Homo sapiens
  misc_RNA (1)...(19): siRNA sense strand
ccaaacugacccuggcaaa

SEQ ID NO: 1857818 - RNA, 19 nt, Homo sapiens
  misc_RNA (1)...(19): siRNA sense strand
ucaaggcaaaguacuaugu

SEQ ID NO: 1857819 - RNA, 19 nt, Homo sapiens
  misc_RNA (1)...(19): siRNA sense strand
gaacucaaggcaaaguacu

SEQ ID NO: 1857820 - RNA, 19 nt, Homo sapiens
  misc_RNA (1)...(19): siRNA sense strand
aagggaagagauggaauua

SEQ ID NO: 1857821 - RNA, 19 nt, Homo sapiens
  misc_RNA (1)...(19): siRNA sense strand
ccaguucccugcgguugug

SEQ ID NO: 1857822 - RNA, 19 nt, Homo sapiens
  misc_RNA (1)...(19): siRNA sense strand
ucaacagacgggagacuga

SEQ ID NO: 1857823 - RNA, 19 nt, Homo sapiens
  misc_RNA (1)...(19): siRNA sense strand
ucaaagggaagagauggaa

SEQ ID NO: 1857824 - RNA, 19 nt, Homo sapiens
  misc_RNA (1)...(19): siRNA sense strand
acaagauggcccugaagaa

SEQ ID NO: 1857825 - RNA, 19 nt, Homo sapiens
  misc_RNA (1)...(19): siRNA sense strand
aguacaagauggcccugaa

SEQ ID NO: 1857826 - RNA, 19 nt, Homo sapiens
  misc_RNA (1)...(19): siRNA sense strand
guccaagccuuauuuugaa

SEQ ID NO: 1857827 - RNA, 19 nt, Homo sapiens
  misc_RNA (1)...(19): siRNA sense strand
ugucagaguuugggaugau

SEQ ID NO: 1857828 - RNA, 19 nt, Homo sapiens
  misc_RNA (1)...(19): siRNA sense strand
caacuuugugucugaagau

SEQ ID NO: 1857829 - RNA, 19 nt, Homo sapiens
  misc_RNA (1)...(19): siRNA sense strand
ggaggaagaagagguggau

SEQ ID NO: 1857830 - RNA, 19 nt, Homo sapiens
  misc_RNA (1)...(19): siRNA sense strand
ccacucagagggucaugga

SEQ ID NO: 1857831 - RNA, 19 nt, Homo sapiens
  misc_RNA (1)...(19): siRNA sense strand
gugacaaagccaacaacaa

SEQ ID NO: 1857832 - RNA, 19 nt, Homo sapiens
  misc_RNA (1)...(19): siRNA sense strand
gaccugcaggccaaacuga

SEQ ID NO: 1857833 - RNA, 19 nt, Homo sapiens
  misc_RNA (1)...(19): siRNA sense strand
gugcagcucgagcaacuga

SEQ ID NO: 1857834 - RNA, 19 nt, Homo sapiens
  misc_RNA (1)...(19): siRNA sense strand
caaggcaaaguacuaugug

SEQ ID NO: 1857835 - RNA, 19 nt, Homo sapiens
  misc_RNA (1)...(19): siRNA sense strand
ucggaggccuuugaagaug

SEQ ID NO: 1857836 - RNA, 19 nt, Homo sapiens
  misc_RNA (1)...(19): siRNA sense strand
uagcaacuuugugucugaa

SEQ ID NO: 1857837 - RNA, 19 nt, Homo sapiens
  misc_RNA (1)...(19): siRNA sense strand
cagaaggggcagagaauaa

SEQ ID NO: 1857838 - RNA, 19 nt, Homo sapiens
  misc_RNA (1)...(19): siRNA sense strand
ggaugaacuggugaagaaa

SEQ ID NO: 1857839 - RNA, 19 nt, Homo sapiens
  misc_RNA (1)...(19): siRNA sense strand
gcagaaggggcagagaaua

SEQ ID NO: 1857840 - RNA, 19 nt, Homo sapiens
  misc_RNA (1)...(19): siRNA sense strand
agaaagccacgcaggacuu

SEQ ID NO: 1857841 - RNA, 19 nt, Homo sapiens
  misc_RNA (1)...(19): siRNA sense strand
guccacggaugauaucaac

SEQ ID NO: 1857842 - RNA, 19 nt, Homo sapiens
  misc_RNA (1)...(19): siRNA sense strand
cggugaaacuggaugaacu

SEQ ID NO: 1857843 - RNA, 19 nt, Homo sapiens
  misc_RNA (1)...(19): siRNA sense strand
gagaauaaaacaagugaca

SEQ ID NO: 1857844 - RNA, 19 nt, Homo sapiens
  misc_RNA (1)...(19): siRNA sense strand
caguccguguccagcuuua

SEQ ID NO: 1857845 - RNA, 19 nt, Homo sapiens
  misc_RNA (1)...(19): siRNA sense strand
gagggcagcagcacaucug

SEQ ID NO: 1857846 - RNA, 19 nt, Homo sapiens
  misc_RNA (1)...(19): siRNA sense strand
gaagaaccuggagaugauc

SEQ ID NO: 1857847 - RNA, 19 nt, Homo sapiens
  misc_RNA (1)...(19): siRNA sense strand
gcaugcgacagcuggagaa

SEQ ID NO: 1857848 - RNA, 19 nt, Homo sapiens
  misc_RNA (1)...(19): siRNA sense strand
uacaagauggcccugaaga

SEQ ID NO: 1857849 - RNA, 19 nt, Homo sapiens
  misc_RNA (1)...(19): siRNA sense strand
ccacggaugauaucaacag

SEQ ID NO: 1857850 - RNA, 19 nt, Homo sapiens
  misc_RNA (1)...(19): siRNA sense strand
ggagacugaacuugaggau

SEQ ID NO: 1857851 - RNA, 19 nt, Homo sapiens
  misc_RNA (1)...(19): siRNA sense strand
caaagggaagagauggaau

SEQ ID NO: 1857852 - RNA, 19 nt, Homo sapiens
  misc_RNA (1)...(19): siRNA sense strand
gaaggggcagagaauaaaa

SEQ ID NO: 1857853 - RNA, 19 nt, Homo sapiens
  misc_RNA (1)...(19): siRNA sense strand
ggugaaacuggaugaacug

SEQ ID NO: 1857854 - RNA, 19 nt, Homo sapiens
  misc_RNA (1)...(19): siRNA sense strand
gaggaugcucgucagaagu

SEQ ID NO: 1857855 - RNA, 19 nt, Homo sapiens
  misc_RNA (1)...(19): siRNA sense strand
ggaggaugaugcaaauaaa

SEQ ID NO: 1857856 - RNA, 19 nt, Homo sapiens
  misc_RNA (1)...(19): siRNA sense strand
gaacagaauaucaaacaga

SEQ ID NO: 1857857 - RNA, 19 nt, Homo sapiens
  misc_RNA (1)...(19): siRNA sense strand
ucacagagcuaugaacaga

SEQ ID NO: 1857858 - RNA, 19 nt, Homo sapiens
  misc_RNA (1)...(19): siRNA sense strand
gaaagauggugagaaggaa

SEQ ID NO: 1857859 - RNA, 19 nt, Homo sapiens
  misc_RNA (1)...(19): siRNA sense strand
ugacuuccaucucuucaaa

SEQ ID NO: 1857860 - RNA, 19 nt, Homo sapiens
  misc_RNA (1)...(19): siRNA sense strand
gggaggaugaugcaaauaa

SEQ ID NO: 1857861 - RNA, 19 nt, Homo sapiens
  misc_RNA (1)...(19): siRNA sense strand
gaacgagacaagaaucaga

SEQ ID NO: 1857862 - RNA, 19 nt, Homo sapiens
  misc_RNA (1)...(19): siRNA sense strand
caaguucgacgcuuugaaa

SEQ ID NO: 1857863 - RNA, 19 nt, Homo sapiens
  misc_RNA (1)...(19): siRNA sense strand
acagaaagauggugagaag

SEQ ID NO: 1857864 - RNA, 19 nt, Homo sapiens
  misc_RNA (1)...(19): siRNA sense strand
caaacagauuggcaccuuu

SEQ ID NO: 1857865 - RNA, 19 nt, Homo sapiens
  misc_RNA (1)...(19): siRNA sense strand
cagaauaucaaacagauug

SEQ ID NO: 1857866 - RNA, 19 nt, Homo sapiens
  misc_RNA (1)...(19): siRNA sense strand
acaacaaguucgacgcuuu

SEQ ID NO: 1857867 - RNA, 19 nt, Homo sapiens
  misc_RNA (1)...(19): siRNA sense strand
gguggcaaguggauuauuc

SEQ ID NO: 1857868 - RNA, 19 nt, Homo sapiens
  misc_RNA (1)...(19): siRNA sense strand
gcuaugaacagaauaucaa

SEQ ID NO: 1857869 - RNA, 19 nt, Homo sapiens
  misc_RNA (1)...(19): siRNA sense strand
ucaaacagauuggcaccuu

SEQ ID NO: 1857870 - RNA, 19 nt, Homo sapiens
  misc_RNA (1)...(19): siRNA sense strand
ggaccaugaucagaaugaa

SEQ ID NO: 1857871 - RNA, 19 nt, Homo sapiens
  misc_RNA (1)...(19): siRNA sense strand
aaucagagcaguagcaaga

SEQ ID NO: 1857872 - RNA, 19 nt, Homo sapiens
  misc_RNA (1)...(19): siRNA sense strand
gaagaaaacagcacacaga

SEQ ID NO: 1857873 - RNA, 19 nt, Homo sapiens
  misc_RNA (1)...(19): siRNA sense strand
aaacggaacgagacaagaa

SEQ ID NO: 1857874 - RNA, 19 nt, Homo sapiens
  misc_RNA (1)...(19): siRNA sense strand
acagagcuaugaacagaau

SEQ ID NO: 1857875 - RNA, 19 nt, Homo sapiens
  misc_RNA (1)...(19): siRNA sense strand
gacaagaaucagagcagua

SEQ ID NO: 1857876 - RNA, 19 nt, Homo sapiens
  misc_RNA (1)...(19): siRNA sense strand
caacaaguucgacgcuuug

SEQ ID NO: 1857877 - RNA, 19 nt, Homo sapiens
  misc_RNA (1)...(19): siRNA sense strand
gagcaguucuggagguuuu

SEQ ID NO: 1857878 - RNA, 19 nt, Homo sapiens
  misc_RNA (1)...(19): siRNA sense strand
gaaaacagcacacagaaag

SEQ ID NO: 1857879 - RNA, 19 nt, Homo sapiens
  misc_RNA (1)...(19): siRNA sense strand
ucagagcaguagcaagaga

SEQ ID NO: 1857880 - RNA, 19 nt, Homo sapiens
  misc_RNA (1)...(19): siRNA sense strand
gugggaggaugaugcaaau

SEQ ID NO: 1857881 - RNA, 19 nt, Homo sapiens
  misc_RNA (1)...(19): siRNA sense strand
agaaagauggugagaagga

SEQ ID NO: 1857882 - RNA, 19 nt, Homo sapiens
  misc_RNA (1)...(19): siRNA sense strand
ucaggaagacauuauuuca

SEQ ID NO: 1857883 - RNA, 19 nt, Homo sapiens
  misc_RNA (1)...(19): siRNA sense strand
uguggugucuguccgcuuu

SEQ ID NO: 1857884 - RNA, 19 nt, Homo sapiens
  misc_RNA (1)...(19): siRNA sense strand
uuugaaagaugaugacagu

SEQ ID NO: 1857885 - RNA, 19 nt, Homo sapiens
  misc_RNA (1)...(19): siRNA sense strand
gaaggaauuaaacccaugu

SEQ ID NO: 1857886 - RNA, 19 nt, Homo sapiens
  misc_RNA (1)...(19): siRNA sense strand
aaacagauuggcaccuuug

SEQ ID NO: 1857887 - RNA, 19 nt, Homo sapiens
  misc_RNA (1)...(19): siRNA sense strand
gcgguugaaugugccauga

SEQ ID NO: 1857888 - RNA, 19 nt, Homo sapiens
  misc_RNA (1)...(19): siRNA sense strand
cacagugacuuccaucucu

SEQ ID NO: 1857889 - RNA, 19 nt, Homo sapiens
  misc_RNA (1)...(19): siRNA sense strand
aaugguggcaaguggauua

SEQ ID NO: 1857890 - RNA, 19 nt, Homo sapiens
  misc_RNA (1)...(19): siRNA sense strand
ucacaccgacagcaucaaa

SEQ ID NO: 1857891 - RNA, 19 nt, Homo sapiens
  misc_RNA (1)...(19): siRNA sense strand
gcaagagaaaggcuguugu

SEQ ID NO: 1857892 - RNA, 19 nt, Homo sapiens
  misc_RNA (1)...(19): siRNA sense strand
caagagaaaggcuguuguc

SEQ ID NO: 1857893 - RNA, 19 nt, Homo sapiens
  misc_RNA (1)...(19): siRNA sense strand
cuaccucccaacaccauua

SEQ ID NO: 1857894 - RNA, 19 nt, Homo sapiens
  misc_RNA (1)...(19): siRNA sense strand
caggaagacauuauuucaa

SEQ ID NO: 1857895 - RNA, 19 nt, Homo sapiens
  misc_RNA (1)...(19): siRNA sense strand
aaacagcacacagaaagau

SEQ ID NO: 1857896 - RNA, 19 nt, Homo sapiens
  misc_RNA (1)...(19): siRNA sense strand
gggaccaugaucagaauga

SEQ ID NO: 1857897 - RNA, 19 nt, Homo sapiens
  misc_RNA (1)...(19): siRNA sense strand
gcaguacaacuacacuuuu

SEQ ID NO: 1857898 - RNA, 19 nt, Homo sapiens
  misc_RNA (1)...(19): siRNA sense strand
acagugacuuccaucucuu

SEQ ID NO: 1857899 - RNA, 19 nt, Homo sapiens
  misc_RNA (1)...(19): siRNA sense strand
acaagaaucagagcaguag

SEQ ID NO: 1857900 - RNA, 19 nt, Homo sapiens
  misc_RNA (1)...(19): siRNA sense strand
ugcaguacaacuacacuuu

SEQ ID NO: 1857901 - RNA, 19 nt, Homo sapiens
  misc_RNA (1)...(19): siRNA sense strand
ugaacagaauaucaaacag

SEQ ID NO: 1857902 - RNA, 19 nt, Homo sapiens
  misc_RNA (1)...(19): siRNA sense strand
aaagauggugagaaggaaa

SEQ ID NO: 1857903 - RNA, 19 nt, Homo sapiens
  misc_RNA (1)...(19): siRNA sense strand
gcacguccacuuuaucaaa

SEQ ID NO: 1857904 - RNA, 19 nt, Homo sapiens
  misc_RNA (1)...(19): siRNA sense strand
gcaggaccauugucaagau

SEQ ID NO: 1857905 - RNA, 19 nt, Homo sapiens
  misc_RNA (1)...(19): siRNA sense strand
ugacguggaugucuugguu

SEQ ID NO: 1857906 - RNA, 19 nt, Homo sapiens
  misc_RNA (1)...(19): siRNA sense strand
ggaggagaaucccgaguuc

SEQ ID NO: 1857907 - RNA, 19 nt, Homo sapiens
  misc_RNA (1)...(19): siRNA sense strand
gcagugacguggaugucuu

SEQ ID NO: 1857908 - RNA, 19 nt, Homo sapiens
  misc_RNA (1)...(19): siRNA sense strand
ccacuucccuggcaguuuc

SEQ ID NO: 1857909 - RNA, 19 nt, Homo sapiens
  misc_RNA (1)...(19): siRNA sense strand
ccagaggcuuugcgucuau

SEQ ID NO: 1857910 - RNA, 19 nt, Homo sapiens
  misc_RNA (1)...(19): siRNA sense strand
ggaggaagagugcaaagag

SEQ ID NO: 1857911 - RNA, 19 nt, Homo sapiens
  misc_RNA (1)...(19): siRNA sense strand
gggaagaugaggaggaaga

SEQ ID NO: 1857912 - RNA, 19 nt, Homo sapiens
  misc_RNA (1)...(19): siRNA sense strand
gccagaggcuuugcgucua

SEQ ID NO: 1857913 - RNA, 19 nt, Homo sapiens
  misc_RNA (1)...(19): siRNA sense strand
ugggugggcuccuugcaaa

SEQ ID NO: 1857914 - RNA, 19 nt, Homo sapiens
  misc_RNA (1)...(19): siRNA sense strand
gcaguuucguggaggagau

SEQ ID NO: 1857915 - RNA, 19 nt, Homo sapiens
  misc_RNA (1)...(19): siRNA sense strand
gcacaugcgcaggaccauu

SEQ ID NO: 1857916 - RNA, 19 nt, Homo sapiens
  misc_RNA (1)...(19): siRNA sense strand
cacaugcgcaggaccauug

SEQ ID NO: 1857917 - RNA, 19 nt, Homo sapiens
  misc_RNA (1)...(19): siRNA sense strand
ccagggcagugacguggau

SEQ ID NO: 1857918 - RNA, 19 nt, Homo sapiens
  misc_RNA (1)...(19): siRNA sense strand
gcccuggcauucccugauc

SEQ ID NO: 1857919 - RNA, 19 nt, Homo sapiens
  misc_RNA (1)...(19): siRNA sense strand
gcgcaggaccauugucaag

SEQ ID NO: 1857920 - RNA, 19 nt, Homo sapiens
  misc_RNA (1)...(19): siRNA sense strand
guggaugucuugguuuguc

SEQ ID NO: 1857921 - RNA, 19 nt, Homo sapiens
  misc_RNA (1)...(19): siRNA sense strand
ugagauccaagccaucaug

SEQ ID NO: 1857922 - RNA, 19 nt, Homo sapiens
  misc_RNA (1)...(19): siRNA sense strand
caggaccauugucaagauc

SEQ ID NO: 1857923 - RNA, 19 nt, Homo sapiens
  misc_RNA (1)...(19): siRNA sense strand
cggcacguccacuuuauca

SEQ ID NO: 1857924 - RNA, 19 nt, Homo sapiens
  misc_RNA (1)...(19): siRNA sense strand
ggaauauccugcagaagaa

SEQ ID NO: 1857925 - RNA, 19 nt, Homo sapiens
  misc_RNA (1)...(19): siRNA sense strand
ugacagauuugaccaguuu

SEQ ID NO: 1857926 - RNA, 19 nt, Homo sapiens
  misc_RNA (1)...(19): siRNA sense strand
gaaccauacuauuugcuuu

SEQ ID NO: 1857927 - RNA, 19 nt, Homo sapiens
  misc_RNA (1)...(19): siRNA sense strand
caucugagcuacccggaua

SEQ ID NO: 1857928 - RNA, 19 nt, Homo sapiens
  misc_RNA (1)...(19): siRNA sense strand
caacuuguuucacgcuaua

SEQ ID NO: 1857929 - RNA, 19 nt, Homo sapiens
  misc_RNA (1)...(19): siRNA sense strand
ccaauugguuugcuauuug

SEQ ID NO: 1857930 - RNA, 19 nt, Homo sapiens
  misc_RNA (1)...(19): siRNA sense strand
aagcagaaccauacuauuu

SEQ ID NO: 1857931 - RNA, 19 nt, Homo sapiens
  misc_RNA (1)...(19): siRNA sense strand
gaacaucacaguacauuuu

SEQ ID NO: 1857932 - RNA, 19 nt, Homo sapiens
  misc_RNA (1)...(19): siRNA sense strand
ggaagcagaaccauacuau

SEQ ID NO: 1857933 - RNA, 19 nt, Homo sapiens
  misc_RNA (1)...(19): siRNA sense strand
guugguaacugacaaagug

SEQ ID NO: 1857934 - RNA, 19 nt, Homo sapiens
  misc_RNA (1)...(19): siRNA sense strand
ggacgaauuccaacuuguu

SEQ ID NO: 1857935 - RNA, 19 nt, Homo sapiens
  misc_RNA (1)...(19): siRNA sense strand
ugagcuacccggauaauuu

SEQ ID NO: 1857936 - RNA, 19 nt, Homo sapiens
  misc_RNA (1)...(19): siRNA sense strand
gacaagaagacauuaguga

SEQ ID NO: 1857937 - RNA, 19 nt, Homo sapiens
  misc_RNA (1)...(19): siRNA sense strand
caagaagacauuagugaga

SEQ ID NO: 1857938 - RNA, 19 nt, Homo sapiens
  misc_RNA (1)...(19): siRNA sense strand
caauugguuugcuauuuga

SEQ ID NO: 1857939 - RNA, 19 nt, Homo sapiens
  misc_RNA (1)...(19): siRNA sense strand
cauggaauauccugcagaa

SEQ ID NO: 1857940 - RNA, 19 nt, Homo sapiens
  misc_RNA (1)...(19): siRNA sense strand
ugacaaagaugugcuucga

SEQ ID NO: 1857941 - RNA, 19 nt, Homo sapiens
  misc_RNA (1)...(19): siRNA sense strand
agaagacauuagugagaua

SEQ ID NO: 1857942 - RNA, 19 nt, Homo sapiens
  misc_RNA (1)...(19): siRNA sense strand
gaaggcacaccacugaaau

SEQ ID NO: 1857943 - RNA, 19 nt, Homo sapiens
  misc_RNA (1)...(19): siRNA sense strand
ggcauuauccaauugguuu

SEQ ID NO: 1857944 - RNA, 19 nt, Homo sapiens
  misc_RNA (1)...(19): siRNA sense strand
gaagcagaaccauacuauu

SEQ ID NO: 1857945 - RNA, 19 nt, Homo sapiens
  misc_RNA (1)...(19): siRNA sense strand
gcagaaccauacuauuugc

SEQ ID NO: 1857946 - RNA, 19 nt, Homo sapiens
  misc_RNA (1)...(19): siRNA sense strand
gcaauugaagcucauuuua

SEQ ID NO: 1857947 - RNA, 19 nt, Homo sapiens
  misc_RNA (1)...(19): siRNA sense strand
uggaauauccugcagaaga

SEQ ID NO: 1857948 - RNA, 19 nt, Homo sapiens
  misc_RNA (1)...(19): siRNA sense strand
ccaagaguaaguuauuuga

SEQ ID NO: 1857949 - RNA, 19 nt, Homo sapiens
  misc_RNA (1)...(19): siRNA sense strand
gagaucuccucaaagaagu

SEQ ID NO: 1857950 - RNA, 19 nt, Homo sapiens
  misc_RNA (1)...(19): siRNA sense strand
uaaguuauuugacguuggu

SEQ ID NO: 1857951 - RNA, 19 nt, Homo sapiens
  misc_RNA (1)...(19): siRNA sense strand
uuagugagauaugguuuga

SEQ ID NO: 1857952 - RNA, 19 nt, Homo sapiens
  misc_RNA (1)...(19): siRNA sense strand
ugagugaacaucugagcua

SEQ ID NO: 1857953 - RNA, 19 nt, Homo sapiens
  misc_RNA (1)...(19): siRNA sense strand
ggaaacucauggaauaucc

SEQ ID NO: 1857954 - RNA, 19 nt, Homo sapiens
  misc_RNA (1)...(19): siRNA sense strand
cuucugcacuguccaucua

SEQ ID NO: 1857955 - RNA, 19 nt, Homo sapiens
  misc_RNA (1)...(19): siRNA sense strand
gcuauuugaucuucuugca

SEQ ID NO: 1857956 - RNA, 19 nt, Homo sapiens
  misc_RNA (1)...(19): siRNA sense strand
gaagacauuagugagauau

SEQ ID NO: 1857957 - RNA, 19 nt, Homo sapiens
  misc_RNA (1)...(19): siRNA sense strand
aucggaaacucauggaaua

SEQ ID NO: 1857958 - RNA, 19 nt, Homo sapiens
  misc_RNA (1)...(19): siRNA sense strand
gcugaugcuuuaaaacaua

SEQ ID NO: 1857959 - RNA, 19 nt, Homo sapiens
  misc_RNA (1)...(19): siRNA sense strand
uccaauugguuugcuauuu

SEQ ID NO: 1857960 - RNA, 19 nt, Homo sapiens
  misc_RNA (1)...(19): siRNA sense strand
gacgaauuccaacuuguuu

SEQ ID NO: 1857961 - RNA, 19 nt, Homo sapiens
  misc_RNA (1)...(19): siRNA sense strand
agugagauaugguuugaau

SEQ ID NO: 1857962 - RNA, 19 nt, Homo sapiens
  misc_RNA (1)...(19): siRNA sense strand
uaugaaggcacaccacuga

SEQ ID NO: 1857963 - RNA, 19 nt, Homo sapiens
  misc_RNA (1)...(19): siRNA sense strand
ggaacaucacaguacauuu

SEQ ID NO: 1857964 - RNA, 19 nt, Homo sapiens
  misc_RNA (1)...(19): siRNA sense strand
gcaucaaguucagcucuuc

SEQ ID NO: 1857965 - RNA, 19 nt, Homo sapiens
  misc_RNA (1)...(19): siRNA sense strand
ugaaggcacaccacugaaa

SEQ ID NO: 1857966 - RNA, 19 nt, Homo sapiens
  misc_RNA (1)...(19): siRNA sense strand
aaagggaagcagaaccaua

SEQ ID NO: 1857967 - RNA, 19 nt, Homo sapiens
  misc_RNA (1)...(19): siRNA sense strand
gcuucgagaugugugguuu

SEQ ID NO: 1857968 - RNA, 19 nt, Homo sapiens
  misc_RNA (1)...(19): siRNA sense strand
gaugugugguuuggacgaa

SEQ ID NO: 1857969 - RNA, 19 nt, Homo sapiens
  misc_RNA (1)...(19): siRNA sense strand
gagacaagaagacauuagu

SEQ ID NO: 1857970 - RNA, 19 nt, Homo sapiens
  misc_RNA (1)...(19): siRNA sense strand
uaugagacaagaagacauu

SEQ ID NO: 1857971 - RNA, 19 nt, Homo sapiens
  misc_RNA (1)...(19): siRNA sense strand
aagaagacauuagugagau

SEQ ID NO: 1857972 - RNA, 19 nt, Homo sapiens
  misc_RNA (1)...(19): siRNA sense strand
gccaagaguaaguuauuug

SEQ ID NO: 1857973 - RNA, 19 nt, Homo sapiens
  misc_RNA (1)...(19): siRNA sense strand
ccggauaauuuucuucaua

SEQ ID NO: 1857974 - RNA, 19 nt, Homo sapiens
  misc_RNA (1)...(19): siRNA sense strand
ggcugcagauggacaguug

SEQ ID NO: 1857975 - RNA, 19 nt, Homo sapiens
  misc_RNA (1)...(19): siRNA sense strand
aaagaugugcuucgagaug

SEQ ID NO: 1857976 - RNA, 19 nt, Homo sapiens
  misc_RNA (1)...(19): siRNA sense strand
ccaacuuguuucacgcuau

SEQ ID NO: 1857977 - RNA, 19 nt, Homo sapiens
  misc_RNA (1)...(19): siRNA sense strand
ugccaagaguaaguuauuu

SEQ ID NO: 1857978 - RNA, 19 nt, Homo sapiens
  misc_RNA (1)...(19): siRNA sense strand
gggaagcagaaccauacua

SEQ ID NO: 1857979 - RNA, 19 nt, Homo sapiens
  misc_RNA (1)...(19): siRNA sense strand
ugacguugguaacugacaa

SEQ ID NO: 1857980 - RNA, 19 nt, Homo sapiens
  misc_RNA (1)...(19): siRNA sense strand
gguaacugacaaagugaaa

SEQ ID NO: 1857981 - RNA, 19 nt, Homo sapiens
  misc_RNA (1)...(19): siRNA sense strand
ggacaguugcacacacuag

SEQ ID NO: 1857982 - RNA, 19 nt, Homo sapiens
  misc_RNA (1)...(19): siRNA sense strand
gaauauccugcagaagaaa

SEQ ID NO: 1857983 - RNA, 19 nt, Homo sapiens
  misc_RNA (1)...(19): siRNA sense strand
gcacuguccaucuaaggau

SEQ ID NO: 1857984 - RNA, 19 nt, Homo sapiens
  misc_RNA (1)...(19): siRNA sense strand
cgaauuccaacuuguuuca

SEQ ID NO: 1857985 - RNA, 19 nt, Homo sapiens
  misc_RNA (1)...(19): siRNA sense strand
caggaugagauaacugaaa

SEQ ID NO: 1857986 - RNA, 19 nt, Homo sapiens
  misc_RNA (1)...(19): siRNA sense strand
ggaugggauugcaaaauga

SEQ ID NO: 1857987 - RNA, 19 nt, Homo sapiens
  misc_RNA (1)...(19): siRNA sense strand
aggaugagauaacugaaag

SEQ ID NO: 1857988 - RNA, 19 nt, Homo sapiens
  misc_RNA (1)...(19): siRNA sense strand
gagcuacccggauaauuuu

SEQ ID NO: 1857989 - RNA, 19 nt, Homo sapiens
  misc_RNA (1)...(19): siRNA sense strand
gaucuccucaaagaaguuu

SEQ ID NO: 1857990 - RNA, 19 nt, Homo sapiens
  misc_RNA (1)...(19): siRNA sense strand
agacauuagugagauaugg

SEQ ID NO: 1857991 - RNA, 19 nt, Homo sapiens
  misc_RNA (1)...(19): siRNA sense strand
uucagaagguuaugagaca

SEQ ID NO: 1857992 - RNA, 19 nt, Homo sapiens
  misc_RNA (1)...(19): siRNA sense strand
gguuugcuauuugaucuuc

SEQ ID NO: 1857993 - RNA, 19 nt, Homo sapiens
  misc_RNA (1)...(19): siRNA sense strand
aagaugugcuucgagaugu

SEQ ID NO: 1857994 - RNA, 19 nt, Homo sapiens
  misc_RNA (1)...(19): siRNA sense strand
gaagguuaugagacaagaa

SEQ ID NO: 1857995 - RNA, 19 nt, Homo sapiens
  misc_RNA (1)...(19): siRNA sense strand
ucagaagguuaugagacaa

SEQ ID NO: 1857996 - RNA, 19 nt, Homo sapiens
  misc_RNA (1)...(19): siRNA sense strand
agaagguuaugagacaaga

SEQ ID NO: 1857997 - RNA, 19 nt, Homo sapiens
  misc_RNA (1)...(19): siRNA sense strand
ucccacagccaacagauug

SEQ ID NO: 1857998 - RNA, 19 nt, Homo sapiens
  misc_RNA (1)...(19): siRNA sense strand
caaguaaucaaugaaaugc

SEQ ID NO: 1857999 - RNA, 19 nt, Homo sapiens
  misc_RNA (1)...(19): siRNA sense strand
gaguaaguuauuugacguu

SEQ ID NO: 1858000 - RNA, 19 nt, Homo sapiens
  misc_RNA (1)...(19): siRNA sense strand
ugugugguuuggacgaauu

SEQ ID NO: 1858001 - RNA, 19 nt, Homo sapiens
  misc_RNA (1)...(19): siRNA sense strand
gaccuuucauucagaagcu

SEQ ID NO: 1858002 - RNA, 19 nt, Homo sapiens
  misc_RNA (1)...(19): siRNA sense strand
ggaugcaauugaagcucau

SEQ ID NO: 1858003 - RNA, 19 nt, Homo sapiens
  misc_RNA (1)...(19): siRNA sense strand
ugaaagggaagcagaacca

SEQ ID NO: 1858004 - RNA, 19 nt, Homo sapiens
  misc_RNA (1)...(19): siRNA sense strand
gaaagggaagcagaaccau

SEQ ID NO: 1858005 - RNA, 19 nt, Homo sapiens
  misc_RNA (1)...(19): siRNA sense strand
agacaagaagacauuagug

SEQ ID NO: 1858006 - RNA, 19 nt, Homo sapiens
  misc_RNA (1)...(19): siRNA sense strand
agcagaaccauacuauuug

SEQ ID NO: 1858007 - RNA, 19 nt, Homo sapiens
  misc_RNA (1)...(19): siRNA sense strand
aaucggaaacucauggaau

SEQ ID NO: 1858008 - RNA, 19 nt, Homo sapiens
  misc_RNA (1)...(19): siRNA sense strand
ggccaucaaucggaaacuc

SEQ ID NO: 1858009 - RNA, 19 nt, Homo sapiens
  misc_RNA (1)...(19): siRNA sense strand
uggaacaucacaguacauu

SEQ ID NO: 1858010 - RNA, 19 nt, Homo sapiens
  misc_RNA (1)...(19): siRNA sense strand
gcauuauccaauugguuug

SEQ ID NO: 1858011 - RNA, 19 nt, Homo sapiens
  misc_RNA (1)...(19): siRNA sense strand
gugagauaugguuugaaua

SEQ ID NO: 1858012 - RNA, 19 nt, Homo sapiens
  misc_RNA (1)...(19): siRNA sense strand
gcaaagagcaagaaccaaa

SEQ ID NO: 1858013 - RNA, 19 nt, Homo sapiens
  misc_RNA (1)...(19): siRNA sense strand
gagcugaagcgcuacagua

SEQ ID NO: 1858014 - RNA, 19 nt, Homo sapiens
  misc_RNA (1)...(19): siRNA sense strand
gaagaaaucaacaccaaag

SEQ ID NO: 1858015 - RNA, 19 nt, Homo sapiens
  misc_RNA (1)...(19): siRNA sense strand
gucagcaacuucuucauga

SEQ ID NO: 1858016 - RNA, 19 nt, Homo sapiens
  misc_RNA (1)...(19): siRNA sense strand
caaaggagaugcagaucac

SEQ ID NO: 1858017 - RNA, 19 nt, Homo sapiens
  misc_RNA (1)...(19): siRNA sense strand
gaacaaacgcccgucaaag

SEQ ID NO: 1858018 - RNA, 19 nt, Homo sapiens
  misc_RNA (1)...(19): siRNA sense strand
ggaagaaaucaacaccaaa

SEQ ID NO: 1858019 - RNA, 19 nt, Homo sapiens
  misc_RNA (1)...(19): siRNA sense strand
uggaagaaaucaacaccaa

SEQ ID NO: 1858020 - RNA, 19 nt, Homo sapiens
  misc_RNA (1)...(19): siRNA sense strand
gagaugcagaucaccauuu

SEQ ID NO: 1858021 - RNA, 19 nt, Homo sapiens
  misc_RNA (1)...(19): siRNA sense strand
gaacacucuucgccaucuu

SEQ ID NO: 1858022 - RNA, 19 nt, Homo sapiens
  misc_RNA (1)...(19): siRNA sense strand
gguguucacugaccuccaa

SEQ ID NO: 1858023 - RNA, 19 nt, Homo sapiens
  misc_RNA (1)...(19): siRNA sense strand
acaaagacaggaacaauuc

SEQ ID NO: 1858024 - RNA, 19 nt, Homo sapiens
  misc_RNA (1)...(19): siRNA sense strand
gaacaauucccagaagaag

SEQ ID NO: 1858025 - RNA, 19 nt, Homo sapiens
  misc_RNA (1)...(19): siRNA sense strand
gagcaagaaccaaacaaag

SEQ ID NO: 1858026 - RNA, 19 nt, Homo sapiens
  misc_RNA (1)...(19): siRNA sense strand
ucacaaccgucagcaacuu

SEQ ID NO: 1858027 - RNA, 19 nt, Homo sapiens
  misc_RNA (1)...(19): siRNA sense strand
gcaagaaccaaacaaagac

SEQ ID NO: 1858028 - RNA, 19 nt, Homo sapiens
  misc_RNA (1)...(19): siRNA sense strand
aaacaaagacaggaacaau

SEQ ID NO: 1858029 - RNA, 19 nt, Homo sapiens
  misc_RNA (1)...(19): siRNA sense strand
ucagcaacuucuucaugaa

SEQ ID NO: 1858030 - RNA, 19 nt, Homo sapiens
  misc_RNA (1)...(19): siRNA sense strand
agaugcagaucaccauuuc

SEQ ID NO: 1858031 - RNA, 19 nt, Homo sapiens
  misc_RNA (1)...(19): siRNA sense strand
gagaacaaacgcccgucaa

SEQ ID NO: 1858032 - RNA, 19 nt, Homo sapiens
  misc_RNA (1)...(19): siRNA sense strand
ggagaugcagaucaccauu

SEQ ID NO: 1858033 - RNA, 19 nt, Homo sapiens
  misc_RNA (1)...(19): siRNA sense strand
agaacaaacgcccgucaaa

SEQ ID NO: 1858034 - RNA, 19 nt, Homo sapiens
  misc_RNA (1)...(19): siRNA sense strand
acccggagcugacaaugga

SEQ ID NO: 1858035 - RNA, 19 nt, Homo sapiens
  misc_RNA (1)...(19): siRNA sense strand
gcaaacgcaaagagcaaga

SEQ ID NO: 1858036 - RNA, 19 nt, Homo sapiens
  misc_RNA (1)...(19): siRNA sense strand
gaccugcuccggaauccaa

SEQ ID NO: 1858037 - RNA, 19 nt, Homo sapiens
  misc_RNA (1)...(19): siRNA sense strand
ggagaaguggcaagacgau

SEQ ID NO: 1858038 - RNA, 19 nt, Homo sapiens
  misc_RNA (1)...(19): siRNA sense strand
ucaaaggagaugcagauca

SEQ ID NO: 1858039 - RNA, 19 nt, Homo sapiens
  misc_RNA (1)...(19): siRNA sense strand
acaaacgcccgucaaagga

SEQ ID NO: 1858040 - RNA, 19 nt, Homo sapiens
  misc_RNA (1)...(19): siRNA sense strand
cgggccagcuggaagaaau

SEQ ID NO: 1858041 - RNA, 19 nt, Homo sapiens
  misc_RNA (1)...(19): siRNA sense strand
agagcaagaaccaaacaaa

SEQ ID NO: 1858042 - RNA, 19 nt, Homo sapiens
  misc_RNA (1)...(19): siRNA sense strand
aacaaagacaggaacaauu

SEQ ID NO: 1858043 - RNA, 19 nt, Homo sapiens
  misc_RNA (1)...(19): siRNA sense strand
agcaagaaccaaacaaaga

SEQ ID NO: 1858044 - RNA, 19 nt, Homo sapiens
  misc_RNA (1)...(19): siRNA sense strand
caaacaaagacaggaacaa

SEQ ID NO: 1858045 - RNA, 19 nt, Homo sapiens
  misc_RNA (1)...(19): siRNA sense strand
cgucaaaggagaugcagau

SEQ ID NO: 1858046 - RNA, 19 nt, Homo sapiens
  misc_RNA (1)...(19): siRNA sense strand
cgucagcaacuucuucaug

SEQ ID NO: 1858047 - RNA, 19 nt, Homo sapiens
  misc_RNA (1)...(19): siRNA sense strand
gaaguggcaagacgaucug

SEQ ID NO: 1858048 - RNA, 19 nt, Homo sapiens
  misc_RNA (1)...(19): siRNA sense strand
gugcaaacgcaaagagcaa

SEQ ID NO: 1858049 - RNA, 19 nt, Homo sapiens
  misc_RNA (1)...(19): siRNA sense strand
ccucuacagucccuacaag

SEQ ID NO: 1858050 - RNA, 19 nt, Homo sapiens
  misc_RNA (1)...(19): siRNA sense strand
caagaaccaaacaaagaca

SEQ ID NO: 1858051 - RNA, 19 nt, Homo sapiens
  misc_RNA (1)...(19): siRNA sense strand
ccacaacgcgcagcagagu

SEQ ID NO: 1858052 - RNA, 19 nt, Homo sapiens
  misc_RNA (1)...(19): siRNA sense strand
cugaagcgcuacaguaucc

SEQ ID NO: 1858053 - RNA, 19 nt, Homo sapiens
  misc_RNA (1)...(19): siRNA sense strand
ucaccagcauggccucgau

SEQ ID NO: 1858054 - RNA, 19 nt, Homo sapiens
  misc_RNA (1)...(19): siRNA sense strand
ccaaaaccguggaguaaac

SEQ ID NO: 1858055 - RNA, 19 nt, Homo sapiens
  misc_RNA (1)...(19): siRNA sense strand
caaacgcaaagagcaagaa

SEQ ID NO: 1858056 - RNA, 19 nt, Homo sapiens
  misc_RNA (1)...(19): siRNA sense strand
gagcugacaauggaaaguc

SEQ ID NO: 1858057 - RNA, 19 nt, Homo sapiens
  misc_RNA (1)...(19): siRNA sense strand
acaauucccagaagaaguc

SEQ ID NO: 1858058 - RNA, 19 nt, Homo sapiens
  misc_RNA (1)...(19): siRNA sense strand
ccaaacaaagacaggaaca

SEQ ID NO: 1858059 - RNA, 19 nt, Homo sapiens
  misc_RNA (1)...(19): siRNA sense strand
caaagagcaagaaccaaac

SEQ ID NO: 1858060 - RNA, 19 nt, Homo sapiens
  misc_RNA (1)...(19): siRNA sense strand
gaacccggagcugacaaug

SEQ ID NO: 1858061 - RNA, 19 nt, Homo sapiens
  misc_RNA (1)...(19): siRNA sense strand
caugaacaaccucuacagu

SEQ ID NO: 1858062 - RNA, 19 nt, Homo sapiens
  misc_RNA (1)...(19): siRNA sense strand
gacagaaccucuuggauga

SEQ ID NO: 1858063 - RNA, 19 nt, Homo sapiens
  misc_RNA (1)...(19): siRNA sense strand
ccaagaaauugcugagaaa

SEQ ID NO: 1858064 - RNA, 19 nt, Homo sapiens
  misc_RNA (1)...(19): siRNA sense strand
ggaaugaauuggaugaaca

SEQ ID NO: 1858065 - RNA, 19 nt, Homo sapiens
  misc_RNA (1)...(19): siRNA sense strand
gcuaagagcugugucaaca

SEQ ID NO: 1858066 - RNA, 19 nt, Homo sapiens
  misc_RNA (1)...(19): siRNA sense strand
ccucuuggaugaucuugua

SEQ ID NO: 1858067 - RNA, 19 nt, Homo sapiens
  misc_RNA (1)...(19): siRNA sense strand
gaaaaggcaccaaagcuua

SEQ ID NO: 1858068 - RNA, 19 nt, Homo sapiens
  misc_RNA (1)...(19): siRNA sense strand
gcccuuuccucuaucauaa

SEQ ID NO: 1858069 - RNA, 19 nt, Homo sapiens
  misc_RNA (1)...(19): siRNA sense strand
uaaacaugguggacagaaa

SEQ ID NO: 1858070 - RNA, 19 nt, Homo sapiens
  misc_RNA (1)...(19): siRNA sense strand
ccacauacgauucuacuug

SEQ ID NO: 1858071 - RNA, 19 nt, Homo sapiens
  misc_RNA (1)...(19): siRNA sense strand
gguccagccugaugaguga

SEQ ID NO: 1858072 - RNA, 19 nt, Homo sapiens
  misc_RNA (1)...(19): siRNA sense strand
uugaaggacuuauugcuaa

SEQ ID NO: 1858073 - RNA, 19 nt, Homo sapiens
  misc_RNA (1)...(19): siRNA sense strand
gauucuacuugucaaauug

SEQ ID NO: 1858074 - RNA, 19 nt, Homo sapiens
  misc_RNA (1)...(19): siRNA sense strand
caacacaucagauaacaca

SEQ ID NO: 1858075 - RNA, 19 nt, Homo sapiens
  misc_RNA (1)...(19): siRNA sense strand
gcaggaaauugggaaugaa

SEQ ID NO: 1858076 - RNA, 19 nt, Homo sapiens
  misc_RNA (1)...(19): siRNA sense strand
ggcaggaaauugggaauga

SEQ ID NO: 1858077 - RNA, 19 nt, Homo sapiens
  misc_RNA (1)...(19): siRNA sense strand
caacaacgaaaucaauaug

SEQ ID NO: 1858078 - RNA, 19 nt, Homo sapiens
  misc_RNA (1)...(19): siRNA sense strand
cccaagaaauugcugagaa

SEQ ID NO: 1858079 - RNA, 19 nt, Homo sapiens
  misc_RNA (1)...(19): siRNA sense strand
uggcauccuuuaagaauga

SEQ ID NO: 1858080 - RNA, 19 nt, Homo sapiens
  misc_RNA (1)...(19): siRNA sense strand
gaaugagggugccgaacca

SEQ ID NO: 1858081 - RNA, 19 nt, Homo sapiens
  misc_RNA (1)...(19): siRNA sense strand
ugagauaauugacgaccuu

SEQ ID NO: 1858082 - RNA, 19 nt, Homo sapiens
  misc_RNA (1)...(19): siRNA sense strand
caacagcagcagaaaauua

SEQ ID NO: 1858083 - RNA, 19 nt, Homo sapiens
  misc_RNA (1)...(19): siRNA sense strand
cgauucuacuugucaaauu

SEQ ID NO: 1858084 - RNA, 19 nt, Homo sapiens
  misc_RNA (1)...(19): siRNA sense strand
gcagaaaauuauccaagaa

SEQ ID NO: 1858085 - RNA, 19 nt, Homo sapiens
  misc_RNA (1)...(19): siRNA sense strand
ucagagcuuuguugcagaa

SEQ ID NO: 1858086 - RNA, 19 nt, Homo sapiens
  misc_RNA (1)...(19): siRNA sense strand
gaaugaauuggaugaacaa

SEQ ID NO: 1858087 - RNA, 19 nt, Homo sapiens
  misc_RNA (1)...(19): siRNA sense strand
gcuuguggcuaucgugguu

SEQ ID NO: 1858088 - RNA, 19 nt, Homo sapiens
  misc_RNA (1)...(19): siRNA sense strand
cacauacgauucuacuugu

SEQ ID NO: 1858089 - RNA, 19 nt, Homo sapiens
  misc_RNA (1)...(19): siRNA sense strand
ugacgaccuugccaaccua

SEQ ID NO: 1858090 - RNA, 19 nt, Homo sapiens
  misc_RNA (1)...(19): siRNA sense strand
gaaaccaggcggguaaaca

SEQ ID NO: 1858091 - RNA, 19 nt, Homo sapiens
  misc_RNA (1)...(19): siRNA sense strand
ucuuguaacucgagagaga

SEQ ID NO: 1858092 - RNA, 19 nt, Homo sapiens
  misc_RNA (1)...(19): siRNA sense strand
cuacuucuggcauccuuua

SEQ ID NO: 1858093 - RNA, 19 nt, Homo sapiens
  misc_RNA (1)...(19): siRNA sense strand
gaucuuguaacucgagaga

SEQ ID NO: 1858094 - RNA, 19 nt, Homo sapiens
  misc_RNA (1)...(19): siRNA sense strand
uugaugcccuuuccucuau

SEQ ID NO: 1858095 - RNA, 19 nt, Homo sapiens
  misc_RNA (1)...(19): siRNA sense strand
cuucuggcauccuuuaaga

SEQ ID NO: 1858096 - RNA, 19 nt, Homo sapiens
  misc_RNA (1)...(19): siRNA sense strand
aagcuuaccgugacaauca

SEQ ID NO: 1858097 - RNA, 19 nt, Homo sapiens
  misc_RNA (1)...(19): siRNA sense strand
uugcagaaccugaaggaaa

SEQ ID NO: 1858098 - RNA, 19 nt, Homo sapiens
  misc_RNA (1)...(19): siRNA sense strand
aaugaaaccaggcggguaa

SEQ ID NO: 1858099 - RNA, 19 nt, Homo sapiens
  misc_RNA (1)...(19): siRNA sense strand
cagaaccucuuggaugauc

SEQ ID NO: 1858100 - RNA, 19 nt, Homo sapiens
  misc_RNA (1)...(19): siRNA sense strand
ucagauaacacagcuugaa

SEQ ID NO: 1858101 - RNA, 19 nt, Homo sapiens
  misc_RNA (1)...(19): siRNA sense strand
gggaaugaauuggaugaac

SEQ ID NO: 1858102 - RNA, 19 nt, Homo sapiens
  misc_RNA (1)...(19): siRNA sense strand
gacagaaagucagccucuu

SEQ ID NO: 1858103 - RNA, 19 nt, Homo sapiens
  misc_RNA (1)...(19): siRNA sense strand
guggagaacacagaugaaa

SEQ ID NO: 1858104 - RNA, 19 nt, Homo sapiens
  misc_RNA (1)...(19): siRNA sense strand
acagaaagucagccucuug

SEQ ID NO: 1858105 - RNA, 19 nt, Homo sapiens
  misc_RNA (1)...(19): siRNA sense strand
guaaacaugguggacagaa

SEQ ID NO: 1858106 - RNA, 19 nt, Homo sapiens
  misc_RNA (1)...(19): siRNA sense strand
gucaacacaucagauaaca

SEQ ID NO: 1858107 - RNA, 19 nt, Homo sapiens
  misc_RNA (1)...(19): siRNA sense strand
gaugcccuuuccucuauca

SEQ ID NO: 1858108 - RNA, 19 nt, Homo sapiens
  misc_RNA (1)...(19): siRNA sense strand
gaaggggaccgaagacaga

SEQ ID NO: 1858109 - RNA, 19 nt, Homo sapiens
  misc_RNA (1)...(19): siRNA sense strand
gaaccucuuggaugaucuu

SEQ ID NO: 1858110 - RNA, 19 nt, Homo sapiens
  misc_RNA (1)...(19): siRNA sense strand
cagaaagucagccucuugu

SEQ ID NO: 1858111 - RNA, 19 nt, Homo sapiens
  misc_RNA (1)...(19): siRNA sense strand
ugucaaauugcccaagaaa

SEQ ID NO: 1858112 - RNA, 19 nt, Homo sapiens
  misc_RNA (1)...(19): siRNA sense strand
aaacaugguggacagaaag

SEQ ID NO: 1858113 - RNA, 19 nt, Homo sapiens
  misc_RNA (1)...(19): siRNA sense strand
uuugaaggacuuauugcua

SEQ ID NO: 1858114 - RNA, 19 nt, Homo sapiens
  misc_RNA (1)...(19): siRNA sense strand
aaaccaggcggguaaacau

SEQ ID NO: 1858115 - RNA, 19 nt, Homo sapiens
  misc_RNA (1)...(19): siRNA sense strand
uaguggagaacacagauga

SEQ ID NO: 1858116 - RNA, 19 nt, Homo sapiens
  misc_RNA (1)...(19): siRNA sense strand
cauacgauucuacuuguca

SEQ ID NO: 1858117 - RNA, 19 nt, Homo sapiens
  misc_RNA (1)...(19): siRNA sense strand
gacuacuucuggcauccuu

SEQ ID NO: 1858118 - RNA, 19 nt, Homo sapiens
  misc_RNA (1)...(19): siRNA sense strand
ugagaaaauucaacaacga

SEQ ID NO: 1858119 - RNA, 19 nt, Homo sapiens
  misc_RNA (1)...(19): siRNA sense strand
gagcuuuguugcagaaccu

SEQ ID NO: 1858120 - RNA, 19 nt, Homo sapiens
  misc_RNA (1)...(19): siRNA sense strand
ugcagaaccugaaggaaaa

SEQ ID NO: 1858121 - RNA, 19 nt, Homo sapiens
  misc_RNA (1)...(19): siRNA sense strand
uugccaaccuaguggagaa

SEQ ID NO: 1858122 - RNA, 19 nt, Homo sapiens
  misc_RNA (1)...(19): siRNA sense strand
caggaaauugggaaugaau

SEQ ID NO: 1858123 - RNA, 19 nt, Homo sapiens
  misc_RNA (1)...(19): siRNA sense strand
caaagcuuaccgugacaau

SEQ ID NO: 1858124 - RNA, 19 nt, Homo sapiens
  misc_RNA (1)...(19): siRNA sense strand
ggaugaacaaaaugagaua

SEQ ID NO: 1858125 - RNA, 19 nt, Homo sapiens
  misc_RNA (1)...(19): siRNA sense strand
gagaaaauucaacaacgaa

SEQ ID NO: 1858126 - RNA, 19 nt, Homo sapiens
  misc_RNA (1)...(19): siRNA sense strand
cagauaacacagcuugaag

SEQ ID NO: 1858127 - RNA, 19 nt, Homo sapiens
  misc_RNA (1)...(19): siRNA sense strand
gaucgcggauggauuauua

SEQ ID NO: 1858128 - RNA, 19 nt, Homo sapiens
  misc_RNA (1)...(19): siRNA sense strand
gaacaguccuccuggauau

SEQ ID NO: 1858129 - RNA, 19 nt, Homo sapiens
  misc_RNA (1)...(19): siRNA sense strand
gcauuugccucccuaauuu

SEQ ID NO: 1858130 - RNA, 19 nt, Homo sapiens
  misc_RNA (1)...(19): siRNA sense strand
gcaaauagcauagaagaaa

SEQ ID NO: 1858131 - RNA, 19 nt, Homo sapiens
  misc_RNA (1)...(19): siRNA sense strand
gaugagaucuguaugaaag

SEQ ID NO: 1858132 - RNA, 19 nt, Homo sapiens
  misc_RNA (1)...(19): siRNA sense strand
gaucacagccgucauuauu

SEQ ID NO: 1858133 - RNA, 19 nt, Homo sapiens
  misc_RNA (1)...(19): siRNA sense strand
gaugaucgcggauggauua

SEQ ID NO: 1858134 - RNA, 19 nt, Homo sapiens
  misc_RNA (1)...(19): siRNA sense strand
gcaauugaauccuuguuug

SEQ ID NO: 1858135 - RNA, 19 nt, Homo sapiens
  misc_RNA (1)...(19): siRNA sense strand
ucacagccgucauuauuaa

SEQ ID NO: 1858136 - RNA, 19 nt, Homo sapiens
  misc_RNA (1)...(19): siRNA sense strand
guacaauucucaacauuca

SEQ ID NO: 1858137 - RNA, 19 nt, Homo sapiens
  misc_RNA (1)...(19): siRNA sense strand
gaacauaagcucaagaaag

SEQ ID NO: 1858138 - RNA, 19 nt, Homo sapiens
  misc_RNA (1)...(19): siRNA sense strand
gaccagugcuuguguuuga

SEQ ID NO: 1858139 - RNA, 19 nt, Homo sapiens
  misc_RNA (1)...(19): siRNA sense strand
ugaagaagauguugaagau

SEQ ID NO: 1858140 - RNA, 19 nt, Homo sapiens
  misc_RNA (1)...(19): siRNA sense strand
ggagugaauugugaacaua

SEQ ID NO: 1858141 - RNA, 19 nt, Homo sapiens
  misc_RNA (1)...(19): siRNA sense strand
ccagguggcugaaguuuga

SEQ ID NO: 1858142 - RNA, 19 nt, Homo sapiens
  misc_RNA (1)...(19): siRNA sense strand
gaagagaaacaaccucauu

SEQ ID NO: 1858143 - RNA, 19 nt, Homo sapiens
  misc_RNA (1)...(19): siRNA sense strand
gcaacugucuuguccauca

SEQ ID NO: 1858144 - RNA, 19 nt, Homo sapiens
  misc_RNA (1)...(19): siRNA sense strand
ggaauucaguucuuugauc

SEQ ID NO: 1858145 - RNA, 19 nt, Homo sapiens
  misc_RNA (1)...(19): siRNA sense strand
uuacagagcuggaugagau

SEQ ID NO: 1858146 - RNA, 19 nt, Homo sapiens
  misc_RNA (1)...(19): siRNA sense strand
ggagaugcauggagaguuc

SEQ ID NO: 1858147 - RNA, 19 nt, Homo sapiens
  misc_RNA (1)...(19): siRNA sense strand
gaacauaguccuguggauu

SEQ ID NO: 1858148 - RNA, 19 nt, Homo sapiens
  misc_RNA (1)...(19): siRNA sense strand
ugacugggauugcuuauuc

SEQ ID NO: 1858149 - RNA, 19 nt, Homo sapiens
  misc_RNA (1)...(19): siRNA sense strand
gcaaagcaccagccagauu

SEQ ID NO: 1858150 - RNA, 19 nt, Homo sapiens
  misc_RNA (1)...(19): siRNA sense strand
ugacaggccuuaugaucuu

SEQ ID NO: 1858151 - RNA, 19 nt, Homo sapiens
  misc_RNA (1)...(19): siRNA sense strand
gagaagaugcugaguggaa

SEQ ID NO: 1858152 - RNA, 19 nt, Homo sapiens
  misc_RNA (1)...(19): siRNA sense strand
ugacggcuaucuuaaaguu

SEQ ID NO: 1858153 - RNA, 19 nt, Homo sapiens
  misc_RNA (1)...(19): siRNA sense strand
gcucuucucuguacuaucu

SEQ ID NO: 1858154 - RNA, 19 nt, Homo sapiens
  misc_RNA (1)...(19): siRNA sense strand
ggaacaguccuccuggaua

SEQ ID NO: 1858155 - RNA, 19 nt, Homo sapiens
  misc_RNA (1)...(19): siRNA sense strand
ggagcugccuuauuaaugg

SEQ ID NO: 1858156 - RNA, 19 nt, Homo sapiens
  misc_RNA (1)...(19): siRNA sense strand
ccaguucccuugucugcua

SEQ ID NO: 1858157 - RNA, 19 nt, Homo sapiens
  misc_RNA (1)...(19): siRNA sense strand
caaagcaccagccagauuu

SEQ ID NO: 1858158 - RNA, 19 nt, Homo sapiens
  misc_RNA (1)...(19): siRNA sense strand
ucccuugucugcuacauua

SEQ ID NO: 1858159 - RNA, 19 nt, Homo sapiens
  misc_RNA (1)...(19): siRNA sense strand
gcaauuaucccagcucuuc

SEQ ID NO: 1858160 - RNA, 19 nt, Homo sapiens
  misc_RNA (1)...(19): siRNA sense strand
gcagaucacagccgucauu

SEQ ID NO: 1858161 - RNA, 19 nt, Homo sapiens
  misc_RNA (1)...(19): siRNA sense strand
gcagucugauccucauuug

SEQ ID NO: 1858162 - RNA, 19 nt, Homo sapiens
  misc_RNA (1)...(19): siRNA sense strand
ugaagaagcugugguggau

SEQ ID NO: 1858163 - RNA, 19 nt, Homo sapiens
  misc_RNA (1)...(19): siRNA sense strand
caugggaguuucuucacua

SEQ ID NO: 1858164 - RNA, 19 nt, Homo sapiens
  misc_RNA (1)...(19): siRNA sense strand
gugagugacuuugcuguuu

SEQ ID NO: 1858165 - RNA, 19 nt, Homo sapiens
  misc_RNA (1)...(19): siRNA sense strand
ggaaggaacauaagcucaa

SEQ ID NO: 1858166 - RNA, 19 nt, Homo sapiens
  misc_RNA (1)...(19): siRNA sense strand
ucagagaccagaugaagaa

SEQ ID NO: 1858167 - RNA, 19 nt, Homo sapiens
  misc_RNA (1)...(19): siRNA sense strand
ggaccgcuuuccuguguau

SEQ ID NO: 1858168 - RNA, 19 nt, Homo sapiens
  misc_RNA (1)...(19): siRNA sense strand
uaagugcaauugaauccuu

SEQ ID NO: 1858169 - RNA, 19 nt, Homo sapiens
  misc_RNA (1)...(19): siRNA sense strand
gaugaucucacgccugaaa

SEQ ID NO: 1858170 - RNA, 19 nt, Homo sapiens
  misc_RNA (1)...(19): siRNA sense strand
cgaggaagaugaagagcau

SEQ ID NO: 1858171 - RNA, 19 nt, Homo sapiens
  misc_RNA (1)...(19): siRNA sense strand
gaaggaacauaagcucaag

SEQ ID NO: 1858172 - RNA, 19 nt, Homo sapiens
  misc_RNA (1)...(19): siRNA sense strand
ggucagcaguaccaugaga

SEQ ID NO: 1858173 - RNA, 19 nt, Homo sapiens
  misc_RNA (1)...(19): siRNA sense strand
aacauaagcucaagaaagg

SEQ ID NO: 1858174 - RNA, 19 nt, Homo sapiens
  misc_RNA (1)...(19): siRNA sense strand
cagagaauccaaacaauca

SEQ ID NO: 1858175 - RNA, 19 nt, Homo sapiens
  misc_RNA (1)...(19): siRNA sense strand
acgcauaagugcaauugaa

SEQ ID NO: 1858176 - RNA, 19 nt, Homo sapiens
  misc_RNA (1)...(19): siRNA sense strand
gagaugcacucagcuuaca

SEQ ID NO: 1858177 - RNA, 19 nt, Homo sapiens
  misc_RNA (1)...(19): siRNA sense strand
ugggaucccuccauuagaa

SEQ ID NO: 1858178 - RNA, 19 nt, Homo sapiens
  misc_RNA (1)...(19): siRNA sense strand
gaaguuugaagaagauguu

SEQ ID NO: 1858179 - RNA, 19 nt, Homo sapiens
  misc_RNA (1)...(19): siRNA sense strand
ggacugugauagcugcaau

SEQ ID NO: 1858180 - RNA, 19 nt, Homo sapiens
  misc_RNA (1)...(19): siRNA sense strand
ggauaaacauggucaaacc

SEQ ID NO: 1858181 - RNA, 19 nt, Homo sapiens
  misc_RNA (1)...(19): siRNA sense strand
gaagcagucugauccucau

SEQ ID NO: 1858182 - RNA, 19 nt, Homo sapiens
  misc_RNA (1)...(19): siRNA sense strand
caaccucauucccauuguu

SEQ ID NO: 1858183 - RNA, 19 nt, Homo sapiens
  misc_RNA (1)...(19): siRNA sense strand
gaucagggugggaccagua

SEQ ID NO: 1858184 - RNA, 19 nt, Homo sapiens
  misc_RNA (1)...(19): siRNA sense strand
caaauucugcaaagacuau

SEQ ID NO: 1858185 - RNA, 19 nt, Homo sapiens
  misc_RNA (1)...(19): siRNA sense strand
guucuucucucaggccuaa

SEQ ID NO: 1858186 - RNA, 19 nt, Homo sapiens
  misc_RNA (1)...(19): siRNA sense strand
gguagaccuucauuucaug

SEQ ID NO: 1858187 - RNA, 19 nt, Homo sapiens
  misc_RNA (1)...(19): siRNA sense strand
acauaguccuguggauuua

SEQ ID NO: 1858188 - RNA, 19 nt, Homo sapiens
  misc_RNA (1)...(19): siRNA sense strand
gcugaaguuugaagaagau

SEQ ID NO: 1858189 - RNA, 19 nt, Homo sapiens
  misc_RNA (1)...(19): siRNA sense strand
cuucaugacggcuaucuua

SEQ ID NO: 1858190 - RNA, 19 nt, Homo sapiens
  misc_RNA (1)...(19): siRNA sense strand
uaucccagcucuucucugu

SEQ ID NO: 1858191 - RNA, 19 nt, Homo sapiens
  misc_RNA (1)...(19): siRNA sense strand
aaugacagcaugaggguua

SEQ ID NO: 1858192 - RNA, 19 nt, Homo sapiens
  misc_RNA (1)...(19): siRNA sense strand
guacugugccugcauguca

SEQ ID NO: 1858193 - RNA, 19 nt, Homo sapiens
  misc_RNA (1)...(19): siRNA sense strand
ggaggaagaggucauaguc

SEQ ID NO: 1858194 - RNA, 19 nt, Homo sapiens
  misc_RNA (1)...(19): siRNA sense strand
caugacggcuaucuuaaag

SEQ ID NO: 1858195 - RNA, 19 nt, Homo sapiens
  misc_RNA (1)...(19): siRNA sense strand
gaugcugaguggaaggaaa

SEQ ID NO: 1858196 - RNA, 19 nt, Homo sapiens
  misc_RNA (1)...(19): siRNA sense strand
ugaacagccucaagcuaga

SEQ ID NO: 1858197 - RNA, 19 nt, Homo sapiens
  misc_RNA (1)...(19): siRNA sense strand
ggaaaggucagcaguacca

SEQ ID NO: 1858198 - RNA, 19 nt, Homo sapiens
  misc_RNA (1)...(19): siRNA sense strand
gcauagaagaaauuucaga

SEQ ID NO: 1858199 - RNA, 19 nt, Homo sapiens
  misc_RNA (1)...(19): siRNA sense strand
aagaagaaguuggaugaug

SEQ ID NO: 1858200 - RNA, 19 nt, Homo sapiens
  misc_RNA (1)...(19): siRNA sense strand
gaaagucauggaucucugu

SEQ ID NO: 1858201 - RNA, 19 nt, Homo sapiens
  misc_RNA (1)...(19): siRNA sense strand
ccaguacaauucucaacau

SEQ ID NO: 1858202 - RNA, 19 nt, Homo sapiens
  misc_RNA (1)...(19): siRNA sense strand
gccucaagcuagaaucuga

SEQ ID NO: 1858203 - RNA, 19 nt, Homo sapiens
  misc_RNA (1)...(19): siRNA sense strand
guggaccgcuuuccugugu

SEQ ID NO: 1858204 - RNA, 19 nt, Homo sapiens
  misc_RNA (1)...(19): siRNA sense strand
gauugcuuauuccuuguuu

SEQ ID NO: 1858205 - RNA, 19 nt, Homo sapiens
  misc_RNA (1)...(19): siRNA sense strand
gaagugccaaucccaacaa

SEQ ID NO: 1858206 - RNA, 19 nt, Homo sapiens
  misc_RNA (1)...(19): siRNA sense strand
uggaugagaucuguaugaa

SEQ ID NO: 1858207 - RNA, 19 nt, Homo sapiens
  misc_RNA (1)...(19): siRNA sense strand
ucaggaaagucauggaucu

SEQ ID NO: 1858208 - RNA, 19 nt, Homo sapiens
  misc_RNA (1)...(19): siRNA sense strand
gaacagccucaagcuagaa

SEQ ID NO: 1858209 - RNA, 19 nt, Homo sapiens
  misc_RNA (1)...(19): siRNA sense strand
ggccugcccugguuuguag

SEQ ID NO: 1858210 - RNA, 19 nt, Homo sapiens
  misc_RNA (1)...(19): siRNA sense strand
gcuggaaggucacagaacu

SEQ ID NO: 1858211 - RNA, 19 nt, Homo sapiens
  misc_RNA (1)...(19): siRNA sense strand
gccagagaauccaaacaau

SEQ ID NO: 1858212 - RNA, 19 nt, Homo sapiens
  misc_RNA (1)...(19): siRNA sense strand
ggaccaccuuagccucuau

SEQ ID NO: 1858213 - RNA, 19 nt, Homo sapiens
  misc_RNA (1)...(19): siRNA sense strand
caguacaauucucaacauu

SEQ ID NO: 1858214 - RNA, 19 nt, Homo sapiens
  misc_RNA (1)...(19): siRNA sense strand
ggacgcauaagugcaauug

SEQ ID NO: 1858215 - RNA, 19 nt, Homo sapiens
  misc_RNA (1)...(19): siRNA sense strand
gagaccagaugaagaagcu

SEQ ID NO: 1858216 - RNA, 19 nt, Homo sapiens
  misc_RNA (1)...(19): siRNA sense strand
ucucacgccugaaagcaaa

SEQ ID NO: 1858217 - RNA, 19 nt, Homo sapiens
  misc_RNA (1)...(19): siRNA sense strand
ggugggaccaguacaauuc

SEQ ID NO: 1858218 - RNA, 19 nt, Homo sapiens
  misc_RNA (1)...(19): siRNA sense strand
acagggaauucaguucuuu

SEQ ID NO: 1858219 - RNA, 19 nt, Homo sapiens
  misc_RNA (1)...(19): siRNA sense strand
ccacugggcuaaccugacu

SEQ ID NO: 1858220 - RNA, 19 nt, Homo sapiens
  misc_RNA (1)...(19): siRNA sense strand
ccugcgagcuuguauugga

SEQ ID NO: 1858221 - RNA, 19 nt, Homo sapiens
  misc_RNA (1)...(19): siRNA sense strand
agagugggaucccuccauu

SEQ ID NO: 1858222 - RNA, 19 nt, Homo sapiens
  misc_RNA (1)...(19): siRNA sense strand
aagaagcugugguggauca

SEQ ID NO: 1858223 - RNA, 19 nt, Homo sapiens
  misc_RNA (1)...(19): siRNA sense strand
caaggaggaagaggucaua

SEQ ID NO: 1858224 - RNA, 19 nt, Homo sapiens
  misc_RNA (1)...(19): siRNA sense strand
gagagugacaggccuuaug

SEQ ID NO: 1858225 - RNA, 19 nt, Homo sapiens
  misc_RNA (1)...(19): siRNA sense strand
gcaccgaggaagaugaaga

SEQ ID NO: 1858226 - RNA, 19 nt, Homo sapiens
  misc_RNA (1)...(19): siRNA sense strand
cguguucaguucauucuug

SEQ ID NO: 1858227 - RNA, 19 nt, Homo sapiens
  misc_RNA (1)...(19): siRNA sense strand
gagaacagauuaagaagua

SEQ ID NO: 1858228 - RNA, 19 nt, Homo sapiens
  misc_RNA (1)...(19): siRNA sense strand
gccaagagcuguagaaauu

SEQ ID NO: 1858229 - RNA, 19 nt, Homo sapiens
  misc_RNA (1)...(19): siRNA sense strand
cuacacagauacaggauua

SEQ ID NO: 1858230 - RNA, 19 nt, Homo sapiens
  misc_RNA (1)...(19): siRNA sense strand
gcacuuggacggacaauuu

SEQ ID NO: 1858231 - RNA, 19 nt, Homo sapiens
  misc_RNA (1)...(19): siRNA sense strand
ggacuuaguggauuauaua

SEQ ID NO: 1858232 - RNA, 19 nt, Homo sapiens
  misc_RNA (1)...(19): siRNA sense strand
ggagagaacagauuaagaa

SEQ ID NO: 1858233 - RNA, 19 nt, Homo sapiens
  misc_RNA (1)...(19): siRNA sense strand
ggaaugaauuuaucuagca

SEQ ID NO: 1858234 - RNA, 19 nt, Homo sapiens
  misc_RNA (1)...(19): siRNA sense strand
ggaguaauccuuagagaga

SEQ ID NO: 1858235 - RNA, 19 nt, Homo sapiens
  misc_RNA (1)...(19): siRNA sense strand
ccagagagcagacuguaua

SEQ ID NO: 1858236 - RNA, 19 nt, Homo sapiens
  misc_RNA (1)...(19): siRNA sense strand
ccaaagcauucucuaaaga

SEQ ID NO: 1858237 - RNA, 19 nt, Homo sapiens
  misc_RNA (1)...(19): siRNA sense strand
gaagagaucccaguuagau

SEQ ID NO: 1858238 - RNA, 19 nt, Homo sapiens
  misc_RNA (1)...(19): siRNA sense strand
gcaggaaguugaaaccaau

SEQ ID NO: 1858239 - RNA, 19 nt, Homo sapiens
  misc_RNA (1)...(19): siRNA sense strand
gagagcagacuguauacua

SEQ ID NO: 1858240 - RNA, 19 nt, Homo sapiens
  misc_RNA (1)...(19): siRNA sense strand
guauaugguuugugaauca

SEQ ID NO: 1858241 - RNA, 19 nt, Homo sapiens
  misc_RNA (1)...(19): siRNA sense strand
caagaagagaucccaguua

SEQ ID NO: 1858242 - RNA, 19 nt, Homo sapiens
  misc_RNA (1)...(19): siRNA sense strand
ugagacaauucgagaagua

SEQ ID NO: 1858243 - RNA, 19 nt, Homo sapiens
  misc_RNA (1)...(19): siRNA sense strand
ucauuucggugacucuuua

SEQ ID NO: 1858244 - RNA, 19 nt, Homo sapiens
  misc_RNA (1)...(19): siRNA sense strand
ggaaguugaaaccaauuua

SEQ ID NO: 1858245 - RNA, 19 nt, Homo sapiens
  misc_RNA (1)...(19): siRNA sense strand
aggcaaauguuaugcuaua

SEQ ID NO: 1858246 - RNA, 19 nt, Homo sapiens
  misc_RNA (1)...(19): siRNA sense strand
guaggcaaauguuaugcua

SEQ ID NO: 1858247 - RNA, 19 nt, Homo sapiens
  misc_RNA (1)...(19): siRNA sense strand
ggaagacucugggcucuca

SEQ ID NO: 1858248 - RNA, 19 nt, Homo sapiens
  misc_RNA (1)...(19): siRNA sense strand
uuaagcaacuaccagauuu

SEQ ID NO: 1858249 - RNA, 19 nt, Homo sapiens
  misc_RNA (1)...(19): siRNA sense strand
guacaagugucacagaaag

SEQ ID NO: 1858250 - RNA, 19 nt, Homo sapiens
  misc_RNA (1)...(19): siRNA sense strand
gagcguggaguaauccuua

SEQ ID NO: 1858251 - RNA, 19 nt, Homo sapiens
  misc_RNA (1)...(19): siRNA sense strand
gaagauauugguaggcaaa

SEQ ID NO: 1858252 - RNA, 19 nt, Homo sapiens
  misc_RNA (1)...(19): siRNA sense strand
gcgggacggucauuauauu

SEQ ID NO: 1858253 - RNA, 19 nt, Homo sapiens
  misc_RNA (1)...(19): siRNA sense strand
gaaaccaauuuacaagaag

SEQ ID NO: 1858254 - RNA, 19 nt, Homo sapiens
  misc_RNA (1)...(19): siRNA sense strand
cgagaaguauguaccaaau

SEQ ID NO: 1858255 - RNA, 19 nt, Homo sapiens
  misc_RNA (1)...(19): siRNA sense strand
gaacgugagcguggaguaa

SEQ ID NO: 1858256 - RNA, 19 nt, Homo sapiens
  misc_RNA (1)...(19): siRNA sense strand
gacuguauaugguuuguga

SEQ ID NO: 1858257 - RNA, 19 nt, Homo sapiens
  misc_RNA (1)...(19): siRNA sense strand
gaauggaugcgacucugua

SEQ ID NO: 1858258 - RNA, 19 nt, Homo sapiens
  misc_RNA (1)...(19): siRNA sense strand
uguguuggcuucgugauua

SEQ ID NO: 1858259 - RNA, 19 nt, Homo sapiens
  misc_RNA (1)...(19): siRNA sense strand
caauggaacagcacacuuu

SEQ ID NO: 1858260 - RNA, 19 nt, Homo sapiens
  misc_RNA (1)...(19): siRNA sense strand
uuaaacagauacgcaguaa

SEQ ID NO: 1858261 - RNA, 19 nt, Homo sapiens
  misc_RNA (1)...(19): siRNA sense strand
aaacagauacgcaguaaca

SEQ ID NO: 1858262 - RNA, 19 nt, Homo sapiens
  misc_RNA (1)...(19): siRNA sense strand
aagaagagaucccaguuag

SEQ ID NO: 1858263 - RNA, 19 nt, Homo sapiens
  misc_RNA (1)...(19): siRNA sense strand
gagaaguauguaccaaaua

SEQ ID NO: 1858264 - RNA, 19 nt, Homo sapiens
  misc_RNA (1)...(19): siRNA sense strand
ggagguguuucccaugaug

SEQ ID NO: 1858265 - RNA, 19 nt, Homo sapiens
  misc_RNA (1)...(19): siRNA sense strand
gcacgagccagaaaucuuc

SEQ ID NO: 1858266 - RNA, 19 nt, Homo sapiens
  misc_RNA (1)...(19): siRNA sense strand
ggaagugagauucguguga

SEQ ID NO: 1858267 - RNA, 19 nt, Homo sapiens
  misc_RNA (1)...(19): siRNA sense strand
gccaaagcauucucuaaag

SEQ ID NO: 1858268 - RNA, 19 nt, Homo sapiens
  misc_RNA (1)...(19): siRNA sense strand
gccauagcuuucagucuuu

SEQ ID NO: 1858269 - RNA, 19 nt, Homo sapiens
  misc_RNA (1)...(19): siRNA sense strand
uuagagagaugcaggaagu

SEQ ID NO: 1858270 - RNA, 19 nt, Homo sapiens
  misc_RNA (1)...(19): siRNA sense strand
caacugggaucgcucuuuu

SEQ ID NO: 1858271 - RNA, 19 nt, Homo sapiens
  misc_RNA (1)...(19): siRNA sense strand
gauugaugcuggaaguaga

SEQ ID NO: 1858272 - RNA, 19 nt, Homo sapiens
  misc_RNA (1)...(19): siRNA sense strand
uauaauaggaguccagcua

SEQ ID NO: 1858273 - RNA, 19 nt, Homo sapiens
  misc_RNA (1)...(19): siRNA sense strand
ugccauagcuuucagucuu

SEQ ID NO: 1858274 - RNA, 19 nt, Homo sapiens
  misc_RNA (1)...(19): siRNA sense strand
ggaaguagauacgaaaaug

SEQ ID NO: 1858275 - RNA, 19 nt, Homo sapiens
  misc_RNA (1)...(19): siRNA sense strand
ggaggaaugaauuuaucua

SEQ ID NO: 1858276 - RNA, 19 nt, Homo sapiens
  misc_RNA (1)...(19): siRNA sense strand
caacuccaauuugugaaga

SEQ ID NO: 1858277 - RNA, 19 nt, Homo sapiens
  misc_RNA (1)...(19): siRNA sense strand
guucaacuccaauuuguga

SEQ ID NO: 1858278 - RNA, 19 nt, Homo sapiens
  misc_RNA (1)...(19): siRNA sense strand
guuggacucuggauugaug

SEQ ID NO: 1858279 - RNA, 19 nt, Homo sapiens
  misc_RNA (1)...(19): siRNA sense strand
gaauugaugcugugaaugc

SEQ ID NO: 1858280 - RNA, 19 nt, Homo sapiens
  misc_RNA (1)...(19): siRNA sense strand
agagcagacuguauacuau

SEQ ID NO: 1858281 - RNA, 19 nt, Homo sapiens
  misc_RNA (1)...(19): siRNA sense strand
cagcgagagucuucuaauc

SEQ ID NO: 1858282 - RNA, 19 nt, Homo sapiens
  misc_RNA (1)...(19): siRNA sense strand
gaacagauuaagaaguaca

SEQ ID NO: 1858283 - RNA, 19 nt, Homo sapiens
  misc_RNA (1)...(19): siRNA sense strand
uacaaucugucucaugguu

SEQ ID NO: 1858284 - RNA, 19 nt, Homo sapiens
  misc_RNA (1)...(19): siRNA sense strand
aagaauugaugcugugaau

SEQ ID NO: 1858285 - RNA, 19 nt, Homo sapiens
  misc_RNA (1)...(19): siRNA sense strand
acucugggcucucaacaug

SEQ ID NO: 1858286 - RNA, 19 nt, Homo sapiens
  misc_RNA (1)...(19): siRNA sense strand
gauauugguaggcaaaugu

SEQ ID NO: 1858287 - RNA, 19 nt, Homo sapiens
  misc_RNA (1)...(19): siRNA sense strand
gggaugacaagaugccuuu

SEQ ID NO: 1858288 - RNA, 19 nt, Homo sapiens
  misc_RNA (1)...(19): siRNA sense strand
gagagaugcaggaaguuga

SEQ ID NO: 1858289 - RNA, 19 nt, Homo sapiens
  misc_RNA (1)...(19): siRNA sense strand
gggagaagcagagauugaa

SEQ ID NO: 1858290 - RNA, 19 nt, Homo sapiens
  misc_RNA (1)...(19): siRNA sense strand
gauacgcaguaacaugugu

SEQ ID NO: 1858291 - RNA, 19 nt, Homo sapiens
  misc_RNA (1)...(19): siRNA sense strand
gaaguugaaaccaauuuac

SEQ ID NO: 1858292 - RNA, 19 nt, Homo sapiens
  misc_RNA (1)...(19): siRNA sense strand
ggacggucauuauauuuug

SEQ ID NO: 1858293 - RNA, 19 nt, Homo sapiens
  misc_RNA (1)...(19): siRNA sense strand
ugugagggaugacaagaug

SEQ ID NO: 1858294 - RNA, 19 nt, Homo sapiens
  misc_RNA (1)...(19): siRNA sense strand
gagcagacuguauacuaug

SEQ ID NO: 1858295 - RNA, 19 nt, Homo sapiens
  misc_RNA (1)...(19): siRNA sense strand
gcaacuaccagauuuuaaa

SEQ ID NO: 1858296 - RNA, 19 nt, Homo sapiens
  misc_RNA (1)...(19): siRNA sense strand
gggcacauccagauacaau

SEQ ID NO: 1858297 - RNA, 19 nt, Homo sapiens
  misc_RNA (1)...(19): siRNA sense strand
ccaagaagagaucccaguu

SEQ ID NO: 1858298 - RNA, 19 nt, Homo sapiens
  misc_RNA (1)...(19): siRNA sense strand
cagauacgcaguaacaugu

SEQ ID NO: 1858299 - RNA, 19 nt, Homo sapiens
  misc_RNA (1)...(19): siRNA sense strand
gaugguucaacuccaauuu

SEQ ID NO: 1858300 - RNA, 19 nt, Homo sapiens
  misc_RNA (1)...(19): siRNA sense strand
gcaacugggaucgcucuuu

SEQ ID NO: 1858301 - RNA, 19 nt, Homo sapiens
  misc_RNA (1)...(19): siRNA sense strand
ugaugaauugcuugacuua

SEQ ID NO: 1858302 - RNA, 19 nt, Homo sapiens
  misc_RNA (1)...(19): siRNA sense strand
uaugggugcucaucucaau

SEQ ID NO: 1858303 - RNA, 19 nt, Homo sapiens
  misc_RNA (1)...(19): siRNA sense strand
ugccaaagcauucucuaaa

SEQ ID NO: 1858304 - RNA, 19 nt, Homo sapiens
  misc_RNA (1)...(19): siRNA sense strand
ugugaaugcugagacaauu

SEQ ID NO: 1858305 - RNA, 19 nt, Homo sapiens
  misc_RNA (1)...(19): siRNA sense strand
uuucaacacuuccuacaca

SEQ ID NO: 1858306 - RNA, 19 nt, Homo sapiens
  misc_RNA (1)...(19): siRNA sense strand
uuuagaaaguggacucaga

SEQ ID NO: 1858307 - RNA, 19 nt, Homo sapiens
  misc_RNA (1)...(19): siRNA sense strand
gcucucaacaugcacaguu

SEQ ID NO: 1858308 - RNA, 19 nt, Homo sapiens
  misc_RNA (1)...(19): siRNA sense strand
gaggaaugaauuuaucuag

SEQ ID NO: 1858309 - RNA, 19 nt, Homo sapiens
  misc_RNA (1)...(19): siRNA sense strand
ccaaguuguucugaauguu

SEQ ID NO: 1858310 - RNA, 19 nt, Homo sapiens
  misc_RNA (1)...(19): siRNA sense strand
caacacuuccuacacagau

SEQ ID NO: 1858311 - RNA, 19 nt, Homo sapiens
  misc_RNA (1)...(19): siRNA sense strand
ugaaacaagaguaacaugu

SEQ ID NO: 1858312 - RNA, 19 nt, Homo sapiens
  misc_RNA (1)...(19): siRNA sense strand
guggaguaauccuuagaga

SEQ ID NO: 1858313 - RNA, 19 nt, Homo sapiens
  misc_RNA (1)...(19): siRNA sense strand
caaguuguucugaauguuc

SEQ ID NO: 1858314 - RNA, 19 nt, Homo sapiens
  misc_RNA (1)...(19): siRNA sense strand
uggcccagcucacuuguca

SEQ ID NO: 1858315 - RNA, 19 nt, Homo sapiens
  misc_RNA (1)...(19): siRNA sense strand
gcucaucucaaugccuaua

SEQ ID NO: 1858316 - RNA, 19 nt, Homo sapiens
  misc_RNA (1)...(19): siRNA sense strand
guaacauguuuagaaagug

SEQ ID NO: 1858317 - RNA, 19 nt, Homo sapiens
  misc_RNA (1)...(19): siRNA sense strand
acacaaaggagaaauacca

SEQ ID NO: 1858318 - RNA, 19 nt, Homo sapiens
  misc_RNA (1)...(19): siRNA sense strand
caugaugaauugcuugacu

SEQ ID NO: 1858319 - RNA, 19 nt, Homo sapiens
  misc_RNA (1)...(19): siRNA sense strand
aaacagcacauugggagaa

SEQ ID NO: 1858320 - RNA, 19 nt, Homo sapiens
  misc_RNA (1)...(19): siRNA sense strand
cuacccaaguuguucugaa

SEQ ID NO: 1858321 - RNA, 19 nt, Homo sapiens
  misc_RNA (1)...(19): siRNA sense strand
acaguuggacucuggauug

SEQ ID NO: 1858322 - RNA, 19 nt, Homo sapiens
  misc_RNA (1)...(19): siRNA sense strand
gcaagaauugaugcuguga

SEQ ID NO: 1858323 - RNA, 19 nt, Homo sapiens
  misc_RNA (1)...(19): siRNA sense strand
caguuggacucuggauuga

SEQ ID NO: 1858324 - RNA, 19 nt, Homo sapiens
  misc_RNA (1)...(19): siRNA sense strand
cuggagguguuucccauga

SEQ ID NO: 1858325 - RNA, 19 nt, Homo sapiens
  misc_RNA (1)...(19): siRNA sense strand
uggauuauauaaccacaca

SEQ ID NO: 1858326 - RNA, 19 nt, Homo sapiens
  misc_RNA (1)...(19): siRNA sense strand
gaguaauccuuagagagau

SEQ ID NO: 1858327 - RNA, 19 nt, Homo sapiens
  misc_RNA (1)...(19): siRNA sense strand
ugagucagcuguccuauaa

SEQ ID NO: 1858328 - RNA, 19 nt, Homo sapiens
  misc_RNA (1)...(19): siRNA sense strand
ugaauccuccuucguauua

SEQ ID NO: 1858329 - RNA, 19 nt, Homo sapiens
  misc_RNA (1)...(19): siRNA sense strand
gcaugaauccuccuucgua

SEQ ID NO: 1858330 - RNA, 19 nt, Homo sapiens
  misc_RNA (1)...(19): siRNA sense strand
ggaccgcccuauccaaaug

SEQ ID NO: 1858331 - RNA, 19 nt, Homo sapiens
  misc_RNA (1)...(19): siRNA sense strand
cccaauaacaauccaauua

SEQ ID NO: 1858332 - RNA, 19 nt, Homo sapiens
  misc_RNA (1)...(19): siRNA sense strand
ggacguggaccauuacugu

SEQ ID NO: 1858333 - RNA, 19 nt, Homo sapiens
  misc_RNA (1)...(19): siRNA sense strand
ugcaggacguggaccauua

SEQ ID NO: 1858334 - RNA, 19 nt, Homo sapiens
  misc_RNA (1)...(19): siRNA sense strand
ccaccuucaugucuucuuu

SEQ ID NO: 1858335 - RNA, 19 nt, Homo sapiens
  misc_RNA (1)...(19): siRNA sense strand
gcaccuccauccuaugaag

SEQ ID NO: 1858336 - RNA, 19 nt, Homo sapiens
  misc_RNA (1)...(19): siRNA sense strand
caugaauccuccuucguau

SEQ ID NO: 1858337 - RNA, 19 nt, Homo sapiens
  misc_RNA (1)...(19): siRNA sense strand
acaagaugaucgugaguca

SEQ ID NO: 1858338 - RNA, 19 nt, Homo sapiens
  misc_RNA (1)...(19): siRNA sense strand
aauccuccuucguauuaua

SEQ ID NO: 1858339 - RNA, 19 nt, Homo sapiens
  misc_RNA (1)...(19): siRNA sense strand
gaccauuacugucccaacu

SEQ ID NO: 1858340 - RNA, 19 nt, Homo sapiens
  misc_RNA (1)...(19): siRNA sense strand
ccaauaacaauccaauuac

SEQ ID NO: 1858341 - RNA, 19 nt, Homo sapiens
  misc_RNA (1)...(19): siRNA sense strand
gaauccuccuucguauuau

SEQ ID NO: 1858342 - RNA, 19 nt, Homo sapiens
  misc_RNA (1)...(19): siRNA sense strand
gggcccaccuucaugucuu

SEQ ID NO: 1858343 - RNA, 19 nt, Homo sapiens
  misc_RNA (1)...(19): siRNA sense strand
gugagucagcuguccuaua

SEQ ID NO: 1858344 - RNA, 19 nt, Homo sapiens
  misc_RNA (1)...(19): siRNA sense strand
gagcucuccugggcaccua

SEQ ID NO: 1858345 - RNA, 19 nt, Homo sapiens
  misc_RNA (1)...(19): siRNA sense strand
caauaacaauccaauuacc

SEQ ID NO: 1858346 - RNA, 19 nt, Homo sapiens
  misc_RNA (1)...(19): siRNA sense strand
gaugggaagggcaugaauc

SEQ ID NO: 1858347 - RNA, 19 nt, Homo sapiens
  misc_RNA (1)...(19): siRNA sense strand
cauccgcaccuccauccua

SEQ ID NO: 1858348 - RNA, 19 nt, Homo sapiens
  misc_RNA (1)...(19): siRNA sense strand
ccgcaccuccauccuauga

SEQ ID NO: 1858349 - RNA, 19 nt, Homo sapiens
  misc_RNA (1)...(19): siRNA sense strand
ucgcaaaacuaacaaaucu

SEQ ID NO: 1858350 - RNA, 19 nt, Homo sapiens
  misc_RNA (1)...(19): siRNA sense strand
caaauguguuguccuuccu

SEQ ID NO: 1858351 - RNA, 19 nt, Homo sapiens
  misc_RNA (1)...(19): siRNA sense strand
auccaaauguguuguccuu

SEQ ID NO: 1858352 - RNA, 19 nt, Homo sapiens
  misc_RNA (1)...(19): siRNA sense strand
uguccuuccugcaacaaga

SEQ ID NO: 1858353 - RNA, 19 nt, Homo sapiens
  misc_RNA (1)...(19): siRNA sense strand
cagcgcccauccccaauaa

SEQ ID NO: 1858354 - RNA, 19 nt, Homo sapiens
  misc_RNA (1)...(19): siRNA sense strand
auagcgggcugcugcuuca

SEQ ID NO: 1858355 - RNA, 19 nt, Homo sapiens
  misc_RNA (1)...(19): siRNA sense strand
gaccuaugaugacuuguua

SEQ ID NO: 1858356 - RNA, 19 nt, Homo sapiens
  misc_RNA (1)...(19): siRNA sense strand
caaagacugccacugcaua

SEQ ID NO: 1858357 - RNA, 19 nt, Homo sapiens
  misc_RNA (1)...(19): siRNA sense strand
ccagaccuaugaugacuug

SEQ ID NO: 1858358 - RNA, 19 nt, Homo sapiens
  misc_RNA (1)...(19): siRNA sense strand
gggugucgcuccagaccua

SEQ ID NO: 1858359 - RNA, 19 nt, Homo sapiens
  misc_RNA (1)...(19): siRNA sense strand
gaacucaggacggugaaug

SEQ ID NO: 1858360 - RNA, 19 nt, Homo sapiens
  misc_RNA (1)...(19): siRNA sense strand
agacugccacugcauauga

SEQ ID NO: 1858361 - RNA, 19 nt, Homo sapiens
  misc_RNA (1)...(19): siRNA sense strand
gauacucacgccagaagug

SEQ ID NO: 1858362 - RNA, 19 nt, Homo sapiens
  misc_RNA (1)...(19): siRNA sense strand
ggugaauggcucucagaug

SEQ ID NO: 1858363 - RNA, 19 nt, Homo sapiens
  misc_RNA (1)...(19): siRNA sense strand
ccacgggaggugcaaguga

SEQ ID NO: 1858364 - RNA, 19 nt, Homo sapiens
  misc_RNA (1)...(19): siRNA sense strand
ccauggugcucauucaaaa

SEQ ID NO: 1858365 - RNA, 19 nt, Homo sapiens
  misc_RNA (1)...(19): siRNA sense strand
aaagacugccacugcauau

SEQ ID NO: 1858366 - RNA, 19 nt, Homo sapiens
  misc_RNA (1)...(19): siRNA sense strand
caaacaugcacgcgcagau

SEQ ID NO: 1858367 - RNA, 19 nt, Homo sapiens
  misc_RNA (1)...(19): siRNA sense strand
gaggugcaagugaccaugu

SEQ ID NO: 1858368 - RNA, 19 nt, Homo sapiens
  misc_RNA (1)...(19): siRNA sense strand
agaccuaugaugacuuguu

SEQ ID NO: 1858369 - RNA, 19 nt, Homo sapiens
  misc_RNA (1)...(19): siRNA sense strand
ccgcguggauggccuauua

SEQ ID NO: 1858370 - RNA, 19 nt, Homo sapiens
  misc_RNA (1)...(19): siRNA sense strand
gcagcuaccugaaggaguu

SEQ ID NO: 1858371 - RNA, 19 nt, Homo sapiens
  misc_RNA (1)...(19): siRNA sense strand
caagggagaagcuguguuu

SEQ ID NO: 1858372 - RNA, 19 nt, Homo sapiens
  misc_RNA (1)...(19): siRNA sense strand
caacuucuccauccacaug

SEQ ID NO: 1858373 - RNA, 19 nt, Homo sapiens
  misc_RNA (1)...(19): siRNA sense strand
ugaaggaguuccgggacua

SEQ ID NO: 1858374 - RNA, 19 nt, Homo sapiens
  misc_RNA (1)...(19): siRNA sense strand
gagcucagcaggugaaacu

SEQ ID NO: 1858375 - RNA, 19 nt, Homo sapiens
  misc_RNA (1)...(19): siRNA sense strand
uggagauucuggacgcaaa

SEQ ID NO: 1858376 - RNA, 19 nt, Homo sapiens
  misc_RNA (1)...(19): siRNA sense strand
caaucacccucucuacacu

SEQ ID NO: 1858377 - RNA, 19 nt, Homo sapiens
  misc_RNA (1)...(19): siRNA sense strand
gcgcucgccaucuuuguga

SEQ ID NO: 1858378 - RNA, 19 nt, Homo sapiens
  misc_RNA (1)...(19): siRNA sense strand
gcauuacgagguggagauu

SEQ ID NO: 1858379 - RNA, 19 nt, Homo sapiens
  misc_RNA (1)...(19): siRNA sense strand
gcaccgcagcuaccugaag

SEQ ID NO: 1858380 - RNA, 19 nt, Homo sapiens
  misc_RNA (1)...(19): siRNA sense strand
agacgcggaagaucccaua

SEQ ID NO: 1858381 - RNA, 19 nt, Homo sapiens
  misc_RNA (1)...(19): siRNA sense strand
ccgcguggauggccuauua

SEQ ID NO: 1858382 - RNA, 19 nt, Homo sapiens
  misc_RNA (1)...(19): siRNA sense strand
gcagcuaccugaaggaguu

SEQ ID NO: 1858383 - RNA, 19 nt, Homo sapiens
  misc_RNA (1)...(19): siRNA sense strand
caagggagaagcuguguuu

SEQ ID NO: 1858384 - RNA, 19 nt, Homo sapiens
  misc_RNA (1)...(19): siRNA sense strand
caacuucuccauccacaug

SEQ ID NO: 1858385 - RNA, 19 nt, Homo sapiens
  misc_RNA (1)...(19): siRNA sense strand
ugaaggaguuccgggacua

SEQ ID NO: 1858386 - RNA, 19 nt, Homo sapiens
  misc_RNA (1)...(19): siRNA sense strand
gagcucagcaggugaaacu

SEQ ID NO: 1858387 - RNA, 19 nt, Homo sapiens
  misc_RNA (1)...(19): siRNA sense strand
uggagauucuggacgcaaa

SEQ ID NO: 1858388 - RNA, 19 nt, Homo sapiens
  misc_RNA (1)...(19): siRNA sense strand
caaucacccucucuacacu

SEQ ID NO: 1858389 - RNA, 19 nt, Homo sapiens
  misc_RNA (1)...(19): siRNA sense strand
gcgcucgccaucuuuguga

SEQ ID NO: 1858390 - RNA, 19 nt, Homo sapiens
  misc_RNA (1)...(19): siRNA sense strand
gcauuacgagguggagauu

SEQ ID NO: 1858391 - RNA, 19 nt, Homo sapiens
  misc_RNA (1)...(19): siRNA sense strand
gcaccgcagcuaccugaag

SEQ ID NO: 1858392 - RNA, 19 nt, Homo sapiens
  misc_RNA (1)...(19): siRNA sense strand
agacgcggaagaucccaua

SEQ ID NO: 1858393 - RNA, 19 nt, Homo sapiens
  misc_RNA (1)...(19): siRNA sense strand
gaaaugcuacgaccaacuu

SEQ ID NO: 1858394 - RNA, 19 nt, Homo sapiens
  misc_RNA (1)...(19): siRNA sense strand
cagcaucacuaacaacuuc

SEQ ID NO: 1858395 - RNA, 19 nt, Homo sapiens
  misc_RNA (1)...(19): siRNA sense strand
gugcuucucucaccucuga

SEQ ID NO: 1858396 - RNA, 19 nt, Homo sapiens
  misc_RNA (1)...(19): siRNA sense strand
acuaacaacuucccauuca

SEQ ID NO: 1858397 - RNA, 19 nt, Homo sapiens
  misc_RNA (1)...(19): siRNA sense strand
ucaagauucuccucagcaa

SEQ ID NO: 1858398 - RNA, 19 nt, Homo sapiens
  misc_RNA (1)...(19): siRNA sense strand
ccugauggcugggaccuuu

SEQ ID NO: 1858399 - RNA, 19 nt, Homo sapiens
  misc_RNA (1)...(19): siRNA sense strand
ccgcccagcugcucuucua

SEQ ID NO: 1858400 - RNA, 19 nt, Homo sapiens
  misc_RNA (1)...(19): siRNA sense strand
gguugagucuccagucugu

SEQ ID NO: 1858401 - RNA, 19 nt, Homo sapiens
  misc_RNA (1)...(19): siRNA sense strand
gcccgaaucuucacuucca

SEQ ID NO: 1858402 - RNA, 19 nt, Homo sapiens
  misc_RNA (1)...(19): siRNA sense strand
cauuguggcuggcucacuu

SEQ ID NO: 1858403 - RNA, 19 nt, Homo sapiens
  misc_RNA (1)...(19): siRNA sense strand
ggccagcucucagccauca

SEQ ID NO: 1858404 - RNA, 19 nt, Homo sapiens
  misc_RNA (1)...(19): siRNA sense strand
ugagaaaugcuacgaccaa

SEQ ID NO: 1858405 - RNA, 19 nt, Homo sapiens
  misc_RNA (1)...(19): siRNA sense strand
ucacuaacaacuucccauu

SEQ ID NO: 1858406 - RNA, 19 nt, Homo sapiens
  misc_RNA (1)...(19): siRNA sense strand
guggcuggcucacuucuag

SEQ ID NO: 1858407 - RNA, 19 nt, Homo sapiens
  misc_RNA (1)...(19): siRNA sense strand
ucgcuuuccucgcuugcua

SEQ ID NO: 1858408 - RNA, 19 nt, Homo sapiens
  misc_RNA (1)...(19): siRNA sense strand
caagauucuccucagcaaa

SEQ ID NO: 1858409 - RNA, 19 nt, Homo sapiens
  misc_RNA (1)...(19): siRNA sense strand
gcuccaggccuccaaugug

SEQ ID NO: 1858410 - RNA, 19 nt, Homo sapiens
  misc_RNA (1)...(19): siRNA sense strand
ucuacagcaucacuaacaa

SEQ ID NO: 1858411 - RNA, 19 nt, Homo sapiens
  misc_RNA (1)...(19): siRNA sense strand
aaucuucacuuccauucag

SEQ ID NO: 1858412 - RNA, 19 nt, Homo sapiens
  misc_RNA (1)...(19): siRNA sense strand
ucucagccaucacagucuu

SEQ ID NO: 1858413 - RNA, 19 nt, Homo sapiens
  misc_RNA (1)...(19): siRNA sense strand
gcucacuucuaguaaagcu

SEQ ID NO: 1858414 - RNA, 19 nt, Homo sapiens
  misc_RNA (1)...(19): siRNA sense strand
cuggcucacuucuaguaaa

SEQ ID NO: 1858415 - RNA, 19 nt, Homo sapiens
  misc_RNA (1)...(19): siRNA sense strand
ggcuggcucacuucuagua

SEQ ID NO: 1858416 - RNA, 19 nt, Homo sapiens
  misc_RNA (1)...(19): siRNA sense strand
uggcucacuucuaguaaag

SEQ ID NO: 1858417 - RNA, 19 nt, Homo sapiens
  misc_RNA (1)...(19): siRNA sense strand
gcacuacagaggacagacu

SEQ ID NO: 1858418 - RNA, 19 nt, Homo sapiens
  misc_RNA (1)...(19): siRNA sense strand
gcucgugccgauucuuuua

SEQ ID NO: 1858419 - RNA, 19 nt, Homo sapiens
  misc_RNA (1)...(19): siRNA sense strand
ccaggcagccaccaacuac

SEQ ID NO: 1858420 - RNA, 19 nt, Homo sapiens
  misc_RNA (1)...(19): siRNA sense strand
ugcuggagcuaguggcauu

SEQ ID NO: 1858421 - RNA, 19 nt, Homo sapiens
  misc_RNA (1)...(19): siRNA sense strand
gaaccaggcugaucucuuu

SEQ ID NO: 1858422 - RNA, 19 nt, Homo sapiens
  misc_RNA (1)...(19): siRNA sense strand
gcaaagaucaugccaaguu

SEQ ID NO: 1858423 - RNA, 19 nt, Homo sapiens
  misc_RNA (1)...(19): siRNA sense strand
ggaaugagaagcuaaagaa

SEQ ID NO: 1858424 - RNA, 19 nt, Homo sapiens
  misc_RNA (1)...(19): siRNA sense strand
caaagaucaugccaaguuu

SEQ ID NO: 1858425 - RNA, 19 nt, Homo sapiens
  misc_RNA (1)...(19): siRNA sense strand
gaaccaaggagaugaagaa

SEQ ID NO: 1858426 - RNA, 19 nt, Homo sapiens
  misc_RNA (1)...(19): siRNA sense strand
gcacggagauagauacucu

SEQ ID NO: 1858427 - RNA, 19 nt, Homo sapiens
  misc_RNA (1)...(19): siRNA sense strand
ggaggcagcugaggaguug

SEQ ID NO: 1858428 - RNA, 19 nt, Homo sapiens
  misc_RNA (1)...(19): siRNA sense strand
agagaaaucuuccggaaug

SEQ ID NO: 1858429 - RNA, 19 nt, Homo sapiens
  misc_RNA (1)...(19): siRNA sense strand
uagcugaggugccaacuau

SEQ ID NO: 1858430 - RNA, 19 nt, Homo sapiens
  misc_RNA (1)...(19): siRNA sense strand
ccaacgaacuguacgugaa

SEQ ID NO: 1858431 - RNA, 19 nt, Homo sapiens
  misc_RNA (1)...(19): siRNA sense strand
gaauuuccguguggaugua

SEQ ID NO: 1858432 - RNA, 19 nt, Homo sapiens
  misc_RNA (1)...(19): siRNA sense strand
gcgagaccauccuggcuaa

SEQ ID NO: 1858433 - RNA, 19 nt, Homo sapiens
  misc_RNA (1)...(19): siRNA sense strand
cuacugacuuucccgguaa

SEQ ID NO: 1858434 - RNA, 19 nt, Homo sapiens
  misc_RNA (1)...(19): siRNA sense strand
gcaggaaguccaagguaaa

SEQ ID NO: 1858435 - RNA, 19 nt, Homo sapiens
  misc_RNA (1)...(19): siRNA sense strand
gcaauguccauacuacuga

SEQ ID NO: 1858436 - RNA, 19 nt, Homo sapiens
  misc_RNA (1)...(19): siRNA sense strand
gaaaucuuccggaaugaga

SEQ ID NO: 1858437 - RNA, 19 nt, Homo sapiens
  misc_RNA (1)...(19): siRNA sense strand
uggagaagguccuggugua

SEQ ID NO: 1858438 - RNA, 19 nt, Homo sapiens
  misc_RNA (1)...(19): siRNA sense strand
gagaaaucuuccggaauga

SEQ ID NO: 1858439 - RNA, 19 nt, Homo sapiens
  misc_RNA (1)...(19): siRNA sense strand
gaaggcacggagauagaua

SEQ ID NO: 1858440 - RNA, 19 nt, Homo sapiens
  misc_RNA (1)...(19): siRNA sense strand
gaagaaggcacggagauag

SEQ ID NO: 1858441 - RNA, 19 nt, Homo sapiens
  misc_RNA (1)...(19): siRNA sense strand
guccugguguacaauaaua

SEQ ID NO: 1858442 - RNA, 19 nt, Homo sapiens
  misc_RNA (1)...(19): siRNA sense strand
ggaauugacgcagccauug

SEQ ID NO: 1858443 - RNA, 19 nt, Homo sapiens
  misc_RNA (1)...(19): siRNA sense strand
gaccagugcaugaugauau

SEQ ID NO: 1858444 - RNA, 19 nt, Homo sapiens
  misc_RNA (1)...(19): siRNA sense strand
caacuauggcuguggagaa

SEQ ID NO: 1858445 - RNA, 19 nt, Homo sapiens
  misc_RNA (1)...(19): siRNA sense strand
caagggcauuggcaaagau

SEQ ID NO: 1858446 - RNA, 19 nt, Homo sapiens
  misc_RNA (1)...(19): siRNA sense strand
agaagguccugguguacaa

SEQ ID NO: 1858447 - RNA, 19 nt, Homo sapiens
  misc_RNA (1)...(19): siRNA sense strand
gguucgagaucauuauauc

SEQ ID NO: 1858448 - RNA, 19 nt, Homo sapiens
  misc_RNA (1)...(19): siRNA sense strand
ucaagggcauuggcaaaga

SEQ ID NO: 1858449 - RNA, 19 nt, Homo sapiens
  misc_RNA (1)...(19): siRNA sense strand
aaauugaccugcucaugca

SEQ ID NO: 1858450 - RNA, 19 nt, Homo sapiens
  misc_RNA (1)...(19): siRNA sense strand
guguauaccaggcauauga

SEQ ID NO: 1858451 - RNA, 19 nt, Homo sapiens
  misc_RNA (1)...(19): siRNA sense strand
ugaagaaggcacggagaua

SEQ ID NO: 1858452 - RNA, 19 nt, Homo sapiens
  misc_RNA (1)...(19): siRNA sense strand
guacgugaaccacaaagug

SEQ ID NO: 1858453 - RNA, 19 nt, Homo sapiens
  misc_RNA (1)...(19): siRNA sense strand
ugcaggaaguccaagguaa

SEQ ID NO: 1858454 - RNA, 19 nt, Homo sapiens
  misc_RNA (1)...(19): siRNA sense strand
ccaggcauaugacauggau

SEQ ID NO: 1858455 - RNA, 19 nt, Homo sapiens
  misc_RNA (1)...(19): siRNA sense strand
gggaauugacgcagccauu

SEQ ID NO: 1858456 - RNA, 19 nt, Homo sapiens
  misc_RNA (1)...(19): siRNA sense strand
acacauggaugaaaacuca

SEQ ID NO: 1858457 - RNA, 19 nt, Homo sapiens
  misc_RNA (1)...(19): siRNA sense strand
ugacuuucccgguaacuau

SEQ ID NO: 1858458 - RNA, 19 nt, Homo sapiens
  misc_RNA (1)...(19): siRNA sense strand
guaguacacauggaugaaa

SEQ ID NO: 1858459 - RNA, 19 nt, Homo sapiens
  misc_RNA (1)...(19): siRNA sense strand
ggaaccaggcugaucucuu

SEQ ID NO: 1858460 - RNA, 19 nt, Homo sapiens
  misc_RNA (1)...(19): siRNA sense strand
gaagaauuuccguguggau

SEQ ID NO: 1858461 - RNA, 19 nt, Homo sapiens
  misc_RNA (1)...(19): siRNA sense strand
uuauugaggugcaggaagu

SEQ ID NO: 1858462 - RNA, 19 nt, Homo sapiens
  misc_RNA (1)...(19): siRNA sense strand
gugcaggaaguccaaggua

SEQ ID NO: 1858463 - RNA, 19 nt, Homo sapiens
  misc_RNA (1)...(19): siRNA sense strand
ccuguaaucccagcacuuu

SEQ ID NO: 1858464 - RNA, 19 nt, Homo sapiens
  misc_RNA (1)...(19): siRNA sense strand
gaaugagaagcuaaagaag

SEQ ID NO: 1858465 - RNA, 19 nt, Homo sapiens
  misc_RNA (1)...(19): siRNA sense strand
augagaagcuaaagaaggu

SEQ ID NO: 1858466 - RNA, 19 nt, Homo sapiens
  misc_RNA (1)...(19): siRNA sense strand
uguccauacuacugacuuu

SEQ ID NO: 1858467 - RNA, 19 nt, Homo sapiens
  misc_RNA (1)...(19): siRNA sense strand
gcucaugcacugugucaag

SEQ ID NO: 1858468 - RNA, 19 nt, Homo sapiens
  misc_RNA (1)...(19): siRNA sense strand
gagaagguccugguguaca

SEQ ID NO: 1858469 - RNA, 19 nt, Homo sapiens
  misc_RNA (1)...(19): siRNA sense strand
gcugaggugccaacuaugg

SEQ ID NO: 1858470 - RNA, 19 nt, Homo sapiens
  misc_RNA (1)...(19): siRNA sense strand
gggaggcagcugaggaguu

SEQ ID NO: 1858471 - RNA, 19 nt, Homo sapiens
  misc_RNA (1)...(19): siRNA sense strand
ggaaccaaggagaugaaga

SEQ ID NO: 1858472 - RNA, 19 nt, Homo sapiens
  misc_RNA (1)...(19): siRNA sense strand
ggccaaggcgaguggauca

SEQ ID NO: 1858473 - RNA, 19 nt, Homo sapiens
  misc_RNA (1)...(19): siRNA sense strand
gaauugacgcagccauugc

SEQ ID NO: 1858474 - RNA, 19 nt, Homo sapiens
  misc_RNA (1)...(19): siRNA sense strand
gauaccuucagcagagaaa

SEQ ID NO: 1858475 - RNA, 19 nt, Homo sapiens
  misc_RNA (1)...(19): siRNA sense strand
aagaaggcacggagauaga

SEQ ID NO: 1858476 - RNA, 19 nt, Homo sapiens
  misc_RNA (1)...(19): siRNA sense strand
gggcucauucccauucaug

SEQ ID NO: 1858477 - RNA, 19 nt, Homo sapiens
  misc_RNA (1)...(19): siRNA sense strand
ggagaagguccugguguac

SEQ ID NO: 1858478 - RNA, 19 nt, Homo sapiens
  misc_RNA (1)...(19): siRNA sense strand
caacgaacuguacgugaac

SEQ ID NO: 1858479 - RNA, 19 nt, Homo sapiens
  misc_RNA (1)...(19): siRNA sense strand
cggguucgagaucauuaua

SEQ ID NO: 1858480 - RNA, 19 nt, Homo sapiens
  misc_RNA (1)...(19): siRNA sense strand
cagagaaaucuuccggaau

SEQ ID NO: 1858481 - RNA, 19 nt, Homo sapiens
  misc_RNA (1)...(19): siRNA sense strand
cuauuccgguuaugaugau

SEQ ID NO: 1858482 - RNA, 19 nt, Homo sapiens
  misc_RNA (1)...(19): siRNA sense strand
cugcuaaagauuccucuga

SEQ ID NO: 1858483 - RNA, 19 nt, Homo sapiens
  misc_RNA (1)...(19): siRNA sense strand
ugucaagggcauuggcaaa

SEQ ID NO: 1858484 - RNA, 19 nt, Homo sapiens
  misc_RNA (1)...(19): siRNA sense strand
cgaccagugcaugaugaua

SEQ ID NO: 1858485 - RNA, 19 nt, Homo sapiens
  misc_RNA (1)...(19): siRNA sense strand
uaacaaaucuccuaagcaa

SEQ ID NO: 1858486 - RNA, 19 nt, Homo sapiens
  misc_RNA (1)...(19): siRNA sense strand
gaaaugugauguuagagaa

SEQ ID NO: 1858487 - RNA, 19 nt, Homo sapiens
  misc_RNA (1)...(19): siRNA sense strand
caaagaagguuauaaugga

SEQ ID NO: 1858488 - RNA, 19 nt, Homo sapiens
  misc_RNA (1)...(19): siRNA sense strand
ggaaagagcccuggaauau

SEQ ID NO: 1858489 - RNA, 19 nt, Homo sapiens
  misc_RNA (1)...(19): siRNA sense strand
aaagagcccuggaauauga

SEQ ID NO: 1858490 - RNA, 19 nt, Homo sapiens
  misc_RNA (1)...(19): siRNA sense strand
gacaugagaugguggauga

SEQ ID NO: 1858491 - RNA, 19 nt, Homo sapiens
  misc_RNA (1)...(19): siRNA sense strand
ggagagaaaucuuacaagu

SEQ ID NO: 1858492 - RNA, 19 nt, Homo sapiens
  misc_RNA (1)...(19): siRNA sense strand
agagaaaccuuacaaaugu

SEQ ID NO: 1858493 - RNA, 19 nt, Homo sapiens
  misc_RNA (1)...(19): siRNA sense strand
gcaaaguauuucaauguga

SEQ ID NO: 1858494 - RNA, 19 nt, Homo sapiens
  misc_RNA (1)...(19): siRNA sense strand
cuacaaaugugaagaaugu

SEQ ID NO: 1858495 - RNA, 19 nt, Homo sapiens
  misc_RNA (1)...(19): siRNA sense strand
cuacaaaugugaagaaugu

SEQ ID NO: 1858496 - RNA, 19 nt, Homo sapiens
  misc_RNA (1)...(19): siRNA sense strand
gaagagaaaccuuacaaau

SEQ ID NO: 1858497 - RNA, 19 nt, Homo sapiens
  misc_RNA (1)...(19): siRNA sense strand
aagcaacucucaacccuua

SEQ ID NO: 1858498 - RNA, 19 nt, Homo sapiens
  misc_RNA (1)...(19): siRNA sense strand
aaacagaccuaagauaaga

SEQ ID NO: 1858499 - RNA, 19 nt, Homo sapiens
  misc_RNA (1)...(19): siRNA sense strand
ucaaacagaccuaagauaa

SEQ ID NO: 1858500 - RNA, 19 nt, Homo sapiens
  misc_RNA (1)...(19): siRNA sense strand
gagaaacucuacaaaugug

SEQ ID NO: 1858501 - RNA, 19 nt, Homo sapiens
  misc_RNA (1)...(19): siRNA sense strand
gagagaaaucuuacaagua

SEQ ID NO: 1858502 - RNA, 19 nt, Homo sapiens
  misc_RNA (1)...(19): siRNA sense strand
gcacagcagaauuuauaua

SEQ ID NO: 1858503 - RNA, 19 nt, Homo sapiens
  misc_RNA (1)...(19): siRNA sense strand
ccucaacccuuacuaauca

SEQ ID NO: 1858504 - RNA, 19 nt, Homo sapiens
  misc_RNA (1)...(19): siRNA sense strand
ccagguauguguccucauu

SEQ ID NO: 1858505 - RNA, 19 nt, Homo sapiens
  misc_RNA (1)...(19): siRNA sense strand
ggacuuaaccaguguuuca

SEQ ID NO: 1858506 - RNA, 19 nt, Homo sapiens
  misc_RNA (1)...(19): siRNA sense strand
gagcaaaguauuucaaugu

SEQ ID NO: 1858507 - RNA, 19 nt, Homo sapiens
  misc_RNA (1)...(19): siRNA sense strand
gagagaaguccuacaaaug

SEQ ID NO: 1858508 - RNA, 19 nt, Homo sapiens
  misc_RNA (1)...(19): siRNA sense strand
aguauaaggugaacaaaga

SEQ ID NO: 1858509 - RNA, 19 nt, Homo sapiens
  misc_RNA (1)...(19): siRNA sense strand
gagagcaacccuacaaaug

SEQ ID NO: 1858510 - RNA, 19 nt, Homo sapiens
  misc_RNA (1)...(19): siRNA sense strand
gggaaagagcccuggaaua

SEQ ID NO: 1858511 - RNA, 19 nt, Homo sapiens
  misc_RNA (1)...(19): siRNA sense strand
gaaagagcccuggaauaug

SEQ ID NO: 1858512 - RNA, 19 nt, Homo sapiens
  misc_RNA (1)...(19): siRNA sense strand
guaaaaguguggaugagua

SEQ ID NO: 1858513 - RNA, 19 nt, Homo sapiens
  misc_RNA (1)...(19): siRNA sense strand
gaaaugggacuguugacau

SEQ ID NO: 1858514 - RNA, 19 nt, Homo sapiens
  misc_RNA (1)...(19): siRNA sense strand
agagagaaguccuacaaau

SEQ ID NO: 1858515 - RNA, 19 nt, Homo sapiens
  misc_RNA (1)...(19): siRNA sense strand
ugaagaauguggcaaagca

SEQ ID NO: 1858516 - RNA, 19 nt, Homo sapiens
  misc_RNA (1)...(19): siRNA sense strand
cagauaagauaacucauac

SEQ ID NO: 1858517 - RNA, 19 nt, Homo sapiens
  misc_RNA (1)...(19): siRNA sense strand
gauaagauaacucauacug

SEQ ID NO: 1858518 - RNA, 19 nt, Homo sapiens
  misc_RNA (1)...(19): siRNA sense strand
aagcaauacugagaagaua

SEQ ID NO: 1858519 - RNA, 19 nt, Homo sapiens
  misc_RNA (1)...(19): siRNA sense strand
gacaugagaauuuacaguu

SEQ ID NO: 1858520 - RNA, 19 nt, Homo sapiens
  misc_RNA (1)...(19): siRNA sense strand
ccacagauaagauaacuca

SEQ ID NO: 1858521 - RNA, 19 nt, Homo sapiens
  misc_RNA (1)...(19): siRNA sense strand
gagcagggcauggaagauu

SEQ ID NO: 1858522 - RNA, 19 nt, Homo sapiens
  misc_RNA (1)...(19): siRNA sense strand
ggauguggccauagaauuc

SEQ ID NO: 1858523 - RNA, 19 nt, Homo sapiens
  misc_RNA (1)...(19): siRNA sense strand
aagagaaaccuuacaaaug

SEQ ID NO: 1858524 - RNA, 19 nt, Homo sapiens
  misc_RNA (1)...(19): siRNA sense strand
gagaaaccuuacaaaugug

SEQ ID NO: 1858525 - RNA, 19 nt, Homo sapiens
  misc_RNA (1)...(19): siRNA sense strand
gcaauacugagaagauaug

SEQ ID NO: 1858526 - RNA, 19 nt, Homo sapiens
  misc_RNA (1)...(19): siRNA sense strand
ggagagcaacccuacaaau

SEQ ID NO: 1858527 - RNA, 19 nt, Homo sapiens
  misc_RNA (1)...(19): siRNA sense strand
ccucaacccuaacuaaaca

SEQ ID NO: 1858528 - RNA, 19 nt, Homo sapiens
  misc_RNA (1)...(19): siRNA sense strand
agaaaaggcuguaaaagug

SEQ ID NO: 1858529 - RNA, 19 nt, Homo sapiens
  misc_RNA (1)...(19): siRNA sense strand
cauaagagaauucauacug

SEQ ID NO: 1858530 - RNA, 19 nt, Homo sapiens
  misc_RNA (1)...(19): siRNA sense strand
gaucaccugucuggaacaa

SEQ ID NO: 1858531 - RNA, 19 nt, Homo sapiens
  misc_RNA (1)...(19): siRNA sense strand
uugcacagcagaauuuaua

SEQ ID NO: 1858532 - RNA, 19 nt, Homo sapiens
  misc_RNA (1)...(19): siRNA sense strand
ucucaacccuuacuacaca

SEQ ID NO: 1858533 - RNA, 19 nt, Homo sapiens
  misc_RNA (1)...(19): siRNA sense strand
gauaagacauacugaaaag

SEQ ID NO: 1858534 - RNA, 19 nt, Homo sapiens
  misc_RNA (1)...(19): siRNA sense strand
agagaaguccuacaaaugu

SEQ ID NO: 1858535 - RNA, 19 nt, Homo sapiens
  misc_RNA (1)...(19): siRNA sense strand
gaaacucuacaaaugugaa

SEQ ID NO: 1858536 - RNA, 19 nt, Homo sapiens
  misc_RNA (1)...(19): siRNA sense strand
ugaagaauguggcaaagcu

SEQ ID NO: 1858537 - RNA, 19 nt, Homo sapiens
  misc_RNA (1)...(19): siRNA sense strand
gaccuaagauaagacauac

SEQ ID NO: 1858538 - RNA, 19 nt, Homo sapiens
  misc_RNA (1)...(19): siRNA sense strand
gauguuagagaacuacaga

SEQ ID NO: 1858539 - RNA, 19 nt, Homo sapiens
  misc_RNA (1)...(19): siRNA sense strand
uuuaaucgguccucaacuu

SEQ ID NO: 1858540 - RNA, 19 nt, Homo sapiens
  misc_RNA (1)...(19): siRNA sense strand
gcauuuaucauagagagaa

SEQ ID NO: 1858541 - RNA, 19 nt, Homo sapiens
  misc_RNA (1)...(19): siRNA sense strand
aaaguguggaugaguauaa

SEQ ID NO: 1858542 - RNA, 19 nt, Homo sapiens
  misc_RNA (1)...(19): siRNA sense strand
ggacauugcacagcagaau

SEQ ID NO: 1858543 - RNA, 19 nt, Homo sapiens
  misc_RNA (1)...(19): siRNA sense strand
ccucgcaccucaccacaga

SEQ ID NO: 1858544 - RNA, 19 nt, Homo sapiens
  misc_RNA (1)...(19): siRNA sense strand
auacugaagagaaaccuua

SEQ ID NO: 1858545 - RNA, 19 nt, Homo sapiens
  misc_RNA (1)...(19): siRNA sense strand
agaccuaagauaagacaua

SEQ ID NO: 1858546 - RNA, 19 nt, Homo sapiens
  misc_RNA (1)...(19): siRNA sense strand
caaacagaccuaagauaag

SEQ ID NO: 1858547 - RNA, 19 nt, Homo sapiens
  misc_RNA (1)...(19): siRNA sense strand
gaaaauauggacaugagaa

SEQ ID NO: 1858548 - RNA, 19 nt, Homo sapiens
  misc_RNA (1)...(19): siRNA sense strand
gagaaaucuuacaaguaug

SEQ ID NO: 1858549 - RNA, 19 nt, Homo sapiens
  misc_RNA (1)...(19): siRNA sense strand
uuagggauguggccauaga

SEQ ID NO: 1858550 - RNA, 19 nt, Homo sapiens
  misc_RNA (1)...(19): siRNA sense strand
acaaagaagguuauaaugg

SEQ ID NO: 1858551 - RNA, 19 nt, Homo sapiens
  misc_RNA (1)...(19): siRNA sense strand
uauaacaaaucuccuaagc

SEQ ID NO: 1858552 - RNA, 19 nt, Homo sapiens
  misc_RNA (1)...(19): siRNA sense strand
ccucaccacagauaagaua

SEQ ID NO: 1858553 - RNA, 19 nt, Homo sapiens
  misc_RNA (1)...(19): siRNA sense strand
gguccucaacccuuacuaa

SEQ ID NO: 1858554 - RNA, 19 nt, Homo sapiens
  misc_RNA (1)...(19): siRNA sense strand
gguccucaacccuaacuaa

SEQ ID NO: 1858555 - RNA, 19 nt, Homo sapiens
  misc_RNA (1)...(19): siRNA sense strand
guaaaacccuacaaaugug

SEQ ID NO: 1858556 - RNA, 19 nt, Homo sapiens
  misc_RNA (1)...(19): siRNA sense strand
ggaauaugaagcgacauga

SEQ ID NO: 1858557 - RNA, 19 nt, Homo sapiens
  misc_RNA (1)...(19): siRNA sense strand
gggauguggccauagaauu

SEQ ID NO: 1858558 - RNA, 19 nt, Homo sapiens
  misc_RNA (1)...(19): siRNA sense strand
auacuggagagaaaucuua

SEQ ID NO: 1858559 - RNA, 19 nt, Homo sapiens
  misc_RNA (1)...(19): siRNA sense strand
ugaagagaaaccuuacaaa

SEQ ID NO: 1858560 - RNA, 19 nt, Homo sapiens
  misc_RNA (1)...(19): siRNA sense strand
ggacaugagaauuuacagu

SEQ ID NO: 1858561 - RNA, 19 nt, Homo sapiens
  misc_RNA (1)...(19): siRNA sense strand
gaagaauguggcaaagcuu

SEQ ID NO: 1858562 - RNA, 19 nt, Homo sapiens
  misc_RNA (1)...(19): siRNA sense strand
caacccuaacuaaacauaa

SEQ ID NO: 1858563 - RNA, 19 nt, Homo sapiens
  misc_RNA (1)...(19): siRNA sense strand
aauugguccucaacccuua

SEQ ID NO: 1858564 - RNA, 19 nt, Homo sapiens
  misc_RNA (1)...(19): siRNA sense strand
gaguaaaacccuacaaaug

SEQ ID NO: 1858565 - RNA, 19 nt, Homo sapiens
  misc_RNA (1)...(19): siRNA sense strand
augggacuguugacauuua

SEQ ID NO: 1858566 - RNA, 19 nt, Homo sapiens
  misc_RNA (1)...(19): siRNA sense strand
ggguauugcugucucuaag

SEQ ID NO: 1858567 - RNA, 19 nt, Homo sapiens
  misc_RNA (1)...(19): siRNA sense strand
uugcaugcuuucacauaaa

SEQ ID NO: 1858568 - RNA, 19 nt, Homo sapiens
  misc_RNA (1)...(19): siRNA sense strand
agagcaaaguauuucaaug

SEQ ID NO: 1858569 - RNA, 19 nt, Homo sapiens
  misc_RNA (1)...(19): siRNA sense strand
uaaccaguguuucacaacu

SEQ ID NO: 1858570 - RNA, 19 nt, Homo sapiens
  misc_RNA (1)...(19): siRNA sense strand
auacugagaagauauggaa

SEQ ID NO: 1858571 - RNA, 19 nt, Homo sapiens
  misc_RNA (1)...(19): siRNA sense strand
agaaaugugauguuagaga

SEQ ID NO: 1858572 - RNA, 19 nt, Homo sapiens
  misc_RNA (1)...(19): siRNA sense strand
uuugcaugcuuucacauaa

SEQ ID NO: 1858573 - RNA, 19 nt, Homo sapiens
  misc_RNA (1)...(19): siRNA sense strand
uaauggacuuaaccagugu

SEQ ID NO: 1858574 - RNA, 19 nt, Homo sapiens
  misc_RNA (1)...(19): siRNA sense strand
acauugcacagcagaauuu

SEQ ID NO: 1858575 - RNA, 19 nt, Homo sapiens
  misc_RNA (1)...(19): siRNA sense strand
cauaaaacccaacacaaaa

SEQ ID NO: 1858576 - RNA, 19 nt, Homo sapiens
  misc_RNA (1)...(19): siRNA sense strand
cuagaaaugggacuguuga

SEQ ID NO: 1858577 - RNA, 19 nt, Homo sapiens
  misc_RNA (1)...(19): siRNA sense strand
gaagguuauaauggacuua

SEQ ID NO: 1858578 - RNA, 19 nt, Homo sapiens
  misc_RNA (1)...(19): siRNA sense strand
uaacucauacuggagagaa

SEQ ID NO: 1858579 - RNA, 19 nt, Homo sapiens
  misc_RNA (1)...(19): siRNA sense strand
aaucgguccucaacuuuua

SEQ ID NO: 1858580 - RNA, 19 nt, Homo sapiens
  misc_RNA (1)...(19): siRNA sense strand
aauaugaagcgacaugaga

SEQ ID NO: 1858581 - RNA, 19 nt, Homo sapiens
  misc_RNA (1)...(19): siRNA sense strand
gacauugcacagcagaauu

SEQ ID NO: 1858582 - RNA, 19 nt, Homo sapiens
  misc_RNA (1)...(19): siRNA sense strand
gaguauaaggugaacaaag

SEQ ID NO: 1858583 - RNA, 19 nt, Homo sapiens
  misc_RNA (1)...(19): siRNA sense strand
acaaaucuccuaagcaacu

SEQ ID NO: 1858584 - RNA, 19 nt, Homo sapiens
  misc_RNA (1)...(19): siRNA sense strand
gcaccucaccacagauaag

SEQ ID NO: 1858585 - RNA, 19 nt, Homo sapiens
  misc_RNA (1)...(19): siRNA sense strand
ucacaaagguguucgaaau

SEQ ID NO: 1858586 - RNA, 19 nt, Homo sapiens
  misc_RNA (1)...(19): siRNA sense strand
ggaagaauuucagaacauu

SEQ ID NO: 1858587 - RNA, 19 nt, Homo sapiens
  misc_RNA (1)...(19): siRNA sense strand
uaaugaagguggacaaaga

SEQ ID NO: 1858588 - RNA, 19 nt, Homo sapiens
  misc_RNA (1)...(19): siRNA sense strand
cagcagagcucacaaaggu

SEQ ID NO: 1858589 - RNA, 19 nt, Homo sapiens
  misc_RNA (1)...(19): siRNA sense strand
ggacaaagaccggcagaug

SEQ ID NO: 1858590 - RNA, 19 nt, Homo sapiens
  misc_RNA (1)...(19): siRNA sense strand
gaggaagaauuucagaaca

SEQ ID NO: 1858591 - RNA, 19 nt, Homo sapiens
  misc_RNA (1)...(19): siRNA sense strand
gaacaacagaugauguaug

SEQ ID NO: 1858592 - RNA, 19 nt, Homo sapiens
  misc_RNA (1)...(19): siRNA sense strand
gaaauccgcaccacugaug

SEQ ID NO: 1858593 - RNA, 19 nt, Homo sapiens
  misc_RNA (1)...(19): siRNA sense strand
agacaaugcagccaucaua

SEQ ID NO: 1858594 - RNA, 19 nt, Homo sapiens
  misc_RNA (1)...(19): siRNA sense strand
gacaaugcagccaucauaa

SEQ ID NO: 1858595 - RNA, 19 nt, Homo sapiens
  misc_RNA (1)...(19): siRNA sense strand
caaugcagccaucauaaug

SEQ ID NO: 1858596 - RNA, 19 nt, Homo sapiens
  misc_RNA (1)...(19): siRNA sense strand
cgagguagacccagagcua

SEQ ID NO: 1858597 - RNA, 19 nt, Homo sapiens
  misc_RNA (1)...(19): siRNA sense strand
ccacugaugaccucacuga

SEQ ID NO: 1858598 - RNA, 19 nt, Homo sapiens
  misc_RNA (1)...(19): siRNA sense strand
cggaacaacagaugaugua

SEQ ID NO: 1858599 - RNA, 19 nt, Homo sapiens
  misc_RNA (1)...(19): siRNA sense strand
gaaaagagacagacaaugc

SEQ ID NO: 1858600 - RNA, 19 nt, Homo sapiens
  misc_RNA (1)...(19): siRNA sense strand
gaaauuccgcuuccgaaaa

SEQ ID NO: 1858601 - RNA, 19 nt, Homo sapiens
  misc_RNA (1)...(19): siRNA sense strand
cagaggagcucaaaaugga

SEQ ID NO: 1858602 - RNA, 19 nt, Homo sapiens
  misc_RNA (1)...(19): siRNA sense strand
ggaggaagaauuucagaac

SEQ ID NO: 1858603 - RNA, 19 nt, Homo sapiens
  misc_RNA (1)...(19): siRNA sense strand
uguccuacccuuuguguuu

SEQ ID NO: 1858604 - RNA, 19 nt, Homo sapiens
  misc_RNA (1)...(19): siRNA sense strand
ggugcuggaggaagaauuu

SEQ ID NO: 1858605 - RNA, 19 nt, Homo sapiens
  misc_RNA (1)...(19): siRNA sense strand
aacaacagaugauguaugc

SEQ ID NO: 1858606 - RNA, 19 nt, Homo sapiens
  misc_RNA (1)...(19): siRNA sense strand
gagguagacccagagcuaa

SEQ ID NO: 1858607 - RNA, 19 nt, Homo sapiens
  misc_RNA (1)...(19): siRNA sense strand
gcagacagcagagcucaca

SEQ ID NO: 1858608 - RNA, 19 nt, Homo sapiens
  misc_RNA (1)...(19): siRNA sense strand
gcuacaaguacgugcauga

SEQ ID NO: 1858609 - RNA, 19 nt, Homo sapiens
  misc_RNA (1)...(19): siRNA sense strand
aggaagaauuucagaacau

SEQ ID NO: 1858610 - RNA, 19 nt, Homo sapiens
  misc_RNA (1)...(19): siRNA sense strand
gcugcaagccggaacaaca

SEQ ID NO: 1858611 - RNA, 19 nt, Homo sapiens
  misc_RNA (1)...(19): siRNA sense strand
cagcccagguucgugguuu

SEQ ID NO: 1858612 - RNA, 19 nt, Homo sapiens
  misc_RNA (1)...(19): siRNA sense strand
cgaguguccuacccuuugu

SEQ ID NO: 1858613 - RNA, 19 nt, Homo sapiens
  misc_RNA (1)...(19): siRNA sense strand
agacagcagagcucacaaa

SEQ ID NO: 1858614 - RNA, 19 nt, Homo sapiens
  misc_RNA (1)...(19): siRNA sense strand
ggaacaacagaugauguau

SEQ ID NO: 1858615 - RNA, 19 nt, Homo sapiens
  misc_RNA (1)...(19): siRNA sense strand
cauaaugaagguggacaaa

SEQ ID NO: 1858616 - RNA, 19 nt, Homo sapiens
  misc_RNA (1)...(19): siRNA sense strand
gguucgugguuuacagcua

SEQ ID NO: 1858617 - RNA, 19 nt, Homo sapiens
  misc_RNA (1)...(19): siRNA sense strand
acaaagaccggcagauggu

SEQ ID NO: 1858618 - RNA, 19 nt, Homo sapiens
  misc_RNA (1)...(19): siRNA sense strand
acaaugcagccaucauaau

SEQ ID NO: 1858619 - RNA, 19 nt, Homo sapiens
  misc_RNA (1)...(19): siRNA sense strand
ccgaguguccuacccuuug

SEQ ID NO: 1858620 - RNA, 19 nt, Homo sapiens
  misc_RNA (1)...(19): siRNA sense strand
guccuacccuuuguguuuc

SEQ ID NO: 1858621 - RNA, 19 nt, Homo sapiens
  misc_RNA (1)...(19): siRNA sense strand
gauguaugcagggaguaaa

SEQ ID NO: 1858622 - RNA, 19 nt, Homo sapiens
  misc_RNA (1)...(19): siRNA sense strand
gcucacaaagguguucgaa

SEQ ID NO: 1858623 - RNA, 19 nt, Homo sapiens
  misc_RNA (1)...(19): siRNA sense strand
acaaagguguucgaaaucc

SEQ ID NO: 1858624 - RNA, 19 nt, Homo sapiens
  misc_RNA (1)...(19): siRNA sense strand
gacagcagagcucacaaag

SEQ ID NO: 1858625 - RNA, 19 nt, Homo sapiens
  misc_RNA (1)...(19): siRNA sense strand
gaauaucguugguucaaua

SEQ ID NO: 1858626 - RNA, 19 nt, Homo sapiens
  misc_RNA (1)...(19): siRNA sense strand
gaauuggccuuacuacuuu

SEQ ID NO: 1858627 - RNA, 19 nt, Homo sapiens
  misc_RNA (1)...(19): siRNA sense strand
gcaaugcaguccucauaua

SEQ ID NO: 1858628 - RNA, 19 nt, Homo sapiens
  misc_RNA (1)...(19): siRNA sense strand
ggaauuggccuuacuacuu

SEQ ID NO: 1858629 - RNA, 19 nt, Homo sapiens
  misc_RNA (1)...(19): siRNA sense strand
gacaugcucuucaaccuuu

SEQ ID NO: 1858630 - RNA, 19 nt, Homo sapiens
  misc_RNA (1)...(19): siRNA sense strand
uagcugaccuggcauuuga

SEQ ID NO: 1858631 - RNA, 19 nt, Homo sapiens
  misc_RNA (1)...(19): siRNA sense strand
gcaacagacucuuccacaa

SEQ ID NO: 1858632 - RNA, 19 nt, Homo sapiens
  misc_RNA (1)...(19): siRNA sense strand
augcaguccucauauauua

SEQ ID NO: 1858633 - RNA, 19 nt, Homo sapiens
  misc_RNA (1)...(19): siRNA sense strand
guauagagcggaaacaaga

SEQ ID NO: 1858634 - RNA, 19 nt, Homo sapiens
  misc_RNA (1)...(19): siRNA sense strand
gagagugaaccacguauug

SEQ ID NO: 1858635 - RNA, 19 nt, Homo sapiens
  misc_RNA (1)...(19): siRNA sense strand
gguaacagcccgaauuauc

SEQ ID NO: 1858636 - RNA, 19 nt, Homo sapiens
  misc_RNA (1)...(19): siRNA sense strand
gccauuugguuucaggaua

SEQ ID NO: 1858637 - RNA, 19 nt, Homo sapiens
  misc_RNA (1)...(19): siRNA sense strand
caaaauaauugcugacaug

SEQ ID NO: 1858638 - RNA, 19 nt, Homo sapiens
  misc_RNA (1)...(19): siRNA sense strand
ccucuuuccuuuauucauu

SEQ ID NO: 1858639 - RNA, 19 nt, Homo sapiens
  misc_RNA (1)...(19): siRNA sense strand
cagcaaugcaguccucaua

SEQ ID NO: 1858640 - RNA, 19 nt, Homo sapiens
  misc_RNA (1)...(19): siRNA sense strand
gaaccacguauuguuagua

SEQ ID NO: 1858641 - RNA, 19 nt, Homo sapiens
  misc_RNA (1)...(19): siRNA sense strand
ucacuguacugcuuugaau

SEQ ID NO: 1858642 - RNA, 19 nt, Homo sapiens
  misc_RNA (1)...(19): siRNA sense strand
aaagcuagaugcucgaauc

SEQ ID NO: 1858643 - RNA, 19 nt, Homo sapiens
  misc_RNA (1)...(19): siRNA sense strand
caccagcgguugucuaaca

SEQ ID NO: 1858644 - RNA, 19 nt, Homo sapiens
  misc_RNA (1)...(19): siRNA sense strand
gaaaugcaccagcgguugu

SEQ ID NO: 1858645 - RNA, 19 nt, Homo sapiens
  misc_RNA (1)...(19): siRNA sense strand
caagagagugaaccacgua

SEQ ID NO: 1858646 - RNA, 19 nt, Homo sapiens
  misc_RNA (1)...(19): siRNA sense strand
ccauuugguuucaggauau

SEQ ID NO: 1858647 - RNA, 19 nt, Homo sapiens
  misc_RNA (1)...(19): siRNA sense strand
cgaagaagggcaaguagug

SEQ ID NO: 1858648 - RNA, 19 nt, Homo sapiens
  misc_RNA (1)...(19): siRNA sense strand
caacagacucuuccacaag

SEQ ID NO: 1858649 - RNA, 19 nt, Homo sapiens
  misc_RNA (1)...(19): siRNA sense strand
gaggagcagcgucgaagaa

SEQ ID NO: 1858650 - RNA, 19 nt, Homo sapiens
  misc_RNA (1)...(19): siRNA sense strand
ucuauccucuuuccuuuau

SEQ ID NO: 1858651 - RNA, 19 nt, Homo sapiens
  misc_RNA (1)...(19): siRNA sense strand
gcauaugucccuucucuac

SEQ ID NO: 1858652 - RNA, 19 nt, Homo sapiens
  misc_RNA (1)...(19): siRNA sense strand
ccacguauuguuaguagaa

SEQ ID NO: 1858653 - RNA, 19 nt, Homo sapiens
  misc_RNA (1)...(19): siRNA sense strand
gaagaagggcaaguagugu

SEQ ID NO: 1858654 - RNA, 19 nt, Homo sapiens
  misc_RNA (1)...(19): siRNA sense strand
caaugcaguccucauauau

SEQ ID NO: 1858655 - RNA, 19 nt, Homo sapiens
  misc_RNA (1)...(19): siRNA sense strand
uaucguugguucaauaaag

SEQ ID NO: 1858656 - RNA, 19 nt, Homo sapiens
  misc_RNA (1)...(19): siRNA sense strand
guuagucuccugcauaugu

SEQ ID NO: 1858657 - RNA, 19 nt, Homo sapiens
  misc_RNA (1)...(19): siRNA sense strand
guguguaguugauaguuug

SEQ ID NO: 1858658 - RNA, 19 nt, Homo sapiens
  misc_RNA (1)...(19): siRNA sense strand
gaaacaagagagugaacca

SEQ ID NO: 1858659 - RNA, 19 nt, Homo sapiens
  misc_RNA (1)...(19): siRNA sense strand
gagugaaccacguauuguu

SEQ ID NO: 1858660 - RNA, 19 nt, Homo sapiens
  misc_RNA (1)...(19): siRNA sense strand
uaucaguggcugccucuuu

SEQ ID NO: 1858661 - RNA, 19 nt, Homo sapiens
  misc_RNA (1)...(19): siRNA sense strand
agugaaccacguauuguua

SEQ ID NO: 1858662 - RNA, 19 nt, Homo sapiens
  misc_RNA (1)...(19): siRNA sense strand
gguucagucuccucuuguu

SEQ ID NO: 1858663 - RNA, 19 nt, Homo sapiens
  misc_RNA (1)...(19): siRNA sense strand
uauccucuuuccuuuauuc

SEQ ID NO: 1858664 - RNA, 19 nt, Homo sapiens
  misc_RNA (1)...(19): siRNA sense strand
uuucuauccucuuuccuuu

SEQ ID NO: 1858665 - RNA, 19 nt, Homo sapiens
  misc_RNA (1)...(19): siRNA sense strand
gguggaguguucugguuca

SEQ ID NO: 1858666 - RNA, 19 nt, Homo sapiens
  misc_RNA (1)...(19): siRNA sense strand
gcaguccucauauauuauc

SEQ ID NO: 1858667 - RNA, 19 nt, Homo sapiens
  misc_RNA (1)...(19): siRNA sense strand
aauuaucggugacccauca

SEQ ID NO: 1858668 - RNA, 19 nt, Homo sapiens
  misc_RNA (1)...(19): siRNA sense strand
cugcauaugucccuucucu

SEQ ID NO: 1858669 - RNA, 19 nt, Homo sapiens
  misc_RNA (1)...(19): siRNA sense strand
uguguguaguugauaguuu

SEQ ID NO: 1858670 - RNA, 19 nt, Homo sapiens
  misc_RNA (1)...(19): siRNA sense strand
guacugcuuugaauaucgu

SEQ ID NO: 1858671 - RNA, 19 nt, Homo sapiens
  misc_RNA (1)...(19): siRNA sense strand
gaguauagagcggaaacaa

SEQ ID NO: 1858672 - RNA, 19 nt, Homo sapiens
  misc_RNA (1)...(19): siRNA sense strand
cagcgguugucuaacauag

SEQ ID NO: 1858673 - RNA, 19 nt, Homo sapiens
  misc_RNA (1)...(19): siRNA sense strand
uaacauagaaaggaauugg

SEQ ID NO: 1858674 - RNA, 19 nt, Homo sapiens
  misc_RNA (1)...(19): siRNA sense strand
guaacagcccgaauuaucg

SEQ ID NO: 1858675 - RNA, 19 nt, Homo sapiens
  misc_RNA (1)...(19): siRNA sense strand
uaucagcgccaaugaagca

SEQ ID NO: 1858676 - RNA, 19 nt, Homo sapiens
  misc_RNA (1)...(19): siRNA sense strand
ugguuagucuccugcauau

SEQ ID NO: 1858677 - RNA, 19 nt, Homo sapiens
  misc_RNA (1)...(19): siRNA sense strand
ccucacccauucccuagug

SEQ ID NO: 1858678 - RNA, 19 nt, Homo sapiens
  misc_RNA (1)...(19): siRNA sense strand
cauuugguuucaggauaua

SEQ ID NO: 1858679 - RNA, 19 nt, Homo sapiens
  misc_RNA (1)...(19): siRNA sense strand
cgucgaagaagggcaagua

SEQ ID NO: 1858680 - RNA, 19 nt, Homo sapiens
  misc_RNA (1)...(19): siRNA sense strand
ucagucuccucuuguuuua

SEQ ID NO: 1858681 - RNA, 19 nt, Homo sapiens
  misc_RNA (1)...(19): siRNA sense strand
ucggucagcugguuagucu

SEQ ID NO: 1858682 - RNA, 19 nt, Homo sapiens
  misc_RNA (1)...(19): siRNA sense strand
ucuacucacuguacugcuu

SEQ ID NO: 1858683 - RNA, 19 nt, Homo sapiens
  misc_RNA (1)...(19): siRNA sense strand
gaauguuugugagucucuu

SEQ ID NO: 1858684 - RNA, 19 nt, Homo sapiens
  misc_RNA (1)...(19): siRNA sense strand
ggaccuugccagaggaauc

SEQ ID NO: 1858685 - RNA, 19 nt, Homo sapiens
  misc_RNA (1)...(19): siRNA sense strand
ccaguguugugcuuggaau

SEQ ID NO: 1858686 - RNA, 19 nt, Homo sapiens
  misc_RNA (1)...(19): siRNA sense strand
uugcugacaugcucuucaa

SEQ ID NO: 1858687 - RNA, 19 nt, Homo sapiens
  misc_RNA (1)...(19): siRNA sense strand
guucagucuccucuuguuu

SEQ ID NO: 1858688 - RNA, 19 nt, Homo sapiens
  misc_RNA (1)...(19): siRNA sense strand
ggaaucaaagacuccaucu

SEQ ID NO: 1858689 - RNA, 19 nt, Homo sapiens
  misc_RNA (1)...(19): siRNA sense strand
ugacaugcucuucaaccuu

SEQ ID NO: 1858690 - RNA, 19 nt, Homo sapiens
  misc_RNA (1)...(19): siRNA sense strand
ugaaccacguauuguuagu

SEQ ID NO: 1858691 - RNA, 19 nt, Homo sapiens
  misc_RNA (1)...(19): siRNA sense strand
aaccacguauuguuaguag

SEQ ID NO: 1858692 - RNA, 19 nt, Homo sapiens
  misc_RNA (1)...(19): siRNA sense strand
aguagugucuuggcacaga

SEQ ID NO: 1858693 - RNA, 19 nt, Homo sapiens
  misc_RNA (1)...(19): siRNA sense strand
cagcgccaaugaagcaaag

SEQ ID NO: 1858694 - RNA, 19 nt, Homo sapiens
  misc_RNA (1)...(19): siRNA sense strand
uuagcaaaguggugaaugc

SEQ ID NO: 1858695 - RNA, 19 nt, Homo sapiens
  misc_RNA (1)...(19): siRNA sense strand
cugguucagucuccucuug

SEQ ID NO: 1858696 - RNA, 19 nt, Homo sapiens
  misc_RNA (1)...(19): siRNA sense strand
gaccuugccagaggaauca

SEQ ID NO: 1858697 - RNA, 19 nt, Homo sapiens
  misc_RNA (1)...(19): siRNA sense strand
gcccuuggcuuuucucaca

SEQ ID NO: 1858698 - RNA, 19 nt, Homo sapiens
  misc_RNA (1)...(19): siRNA sense strand
gcucgaauccagcaaaaga

SEQ ID NO: 1858699 - RNA, 19 nt, Homo sapiens
  misc_RNA (1)...(19): siRNA sense strand
gaaucaaagacuccaucug

SEQ ID NO: 1858700 - RNA, 19 nt, Homo sapiens
  misc_RNA (1)...(19): siRNA sense strand
guagaauuuuccaguguug

SEQ ID NO: 1858701 - RNA, 19 nt, Homo sapiens
  misc_RNA (1)...(19): siRNA sense strand
cugguuagucuccugcaua

SEQ ID NO: 1858702 - RNA, 19 nt, Homo sapiens
  misc_RNA (1)...(19): siRNA sense strand
gcaaagaccccuggcaaag

SEQ ID NO: 1858703 - RNA, 19 nt, Homo sapiens
  misc_RNA (1)...(19): siRNA sense strand
guccucauauauuaucagu

SEQ ID NO: 1858704 - RNA, 19 nt, Homo sapiens
  misc_RNA (1)...(19): siRNA sense strand
aaugcaguccucauauauu

SEQ ID NO: 1858705 - RNA, 19 nt, Homo sapiens
  misc_RNA (1)...(19): siRNA sense strand
uaguuuggguggugaagag

SEQ ID NO: 1858706 - RNA, 19 nt, Homo sapiens
  misc_RNA (1)...(19): siRNA sense strand
gaagagaaacuccaagaug

SEQ ID NO: 1858707 - RNA, 19 nt, Homo sapiens
  misc_RNA (1)...(19): siRNA sense strand
ccaccuaucucaacuucaa

SEQ ID NO: 1858708 - RNA, 19 nt, Homo sapiens
  misc_RNA (1)...(19): siRNA sense strand
ucaagaaccgggagaagua

SEQ ID NO: 1858709 - RNA, 19 nt, Homo sapiens
  misc_RNA (1)...(19): siRNA sense strand
gaucaugagcgucuuguug

SEQ ID NO: 1858710 - RNA, 19 nt, Homo sapiens
  misc_RNA (1)...(19): siRNA sense strand
gagaagagaaacuccaaga

SEQ ID NO: 1858711 - RNA, 19 nt, Homo sapiens
  misc_RNA (1)...(19): siRNA sense strand
cauaaccaguucaucaaga

SEQ ID NO: 1858712 - RNA, 19 nt, Homo sapiens
  misc_RNA (1)...(19): siRNA sense strand
ccaagaugcuccagaaggu

SEQ ID NO: 1858713 - RNA, 19 nt, Homo sapiens
  misc_RNA (1)...(19): siRNA sense strand
gaagugcccaccuaucuca

SEQ ID NO: 1858714 - RNA, 19 nt, Homo sapiens
  misc_RNA (1)...(19): siRNA sense strand
cugcugggcuccuacauug

SEQ ID NO: 1858715 - RNA, 19 nt, Homo sapiens
  misc_RNA (1)...(19): siRNA sense strand
ucacuguccuuaucuucaa

SEQ ID NO: 1858716 - RNA, 19 nt, Homo sapiens
  misc_RNA (1)...(19): siRNA sense strand
ugaacucgguggaggagaa

SEQ ID NO: 1858717 - RNA, 19 nt, Homo sapiens
  misc_RNA (1)...(19): siRNA sense strand
guucaucgagcacucagua

SEQ ID NO: 1858718 - RNA, 19 nt, Homo sapiens
  misc_RNA (1)...(19): siRNA sense strand
cuucaucacuguccuuauc

SEQ ID NO: 1858719 - RNA, 19 nt, Homo sapiens
  misc_RNA (1)...(19): siRNA sense strand
ccucauaaccaguucauca

SEQ ID NO: 1858720 - RNA, 19 nt, Homo sapiens
  misc_RNA (1)...(19): siRNA sense strand
cgaggaagcccugucuuug

SEQ ID NO: 1858721 - RNA, 19 nt, Homo sapiens
  misc_RNA (1)...(19): siRNA sense strand
gcccaccuaucucaacuuc

SEQ ID NO: 1858722 - RNA, 19 nt, Homo sapiens
  misc_RNA (1)...(19): siRNA sense strand
gcuacagauugaucaagug

SEQ ID NO: 1858723 - RNA, 19 nt, Homo sapiens
  misc_RNA (1)...(19): siRNA sense strand
acauggaagugcccaccua

SEQ ID NO: 1858724 - RNA, 19 nt, Homo sapiens
  misc_RNA (1)...(19): siRNA sense strand
ucaaguccaugaaccacau

SEQ ID NO: 1858725 - RNA, 19 nt, Homo sapiens
  misc_RNA (1)...(19): siRNA sense strand
acuccaagaugcuccagaa

SEQ ID NO: 1858726 - RNA, 19 nt, Homo sapiens
  misc_RNA (1)...(19): siRNA sense strand
ccugcaagcucucccagau

SEQ ID NO: 1858727 - RNA, 19 nt, Homo sapiens
  misc_RNA (1)...(19): siRNA sense strand
cgugcuagcuccuccaagu

SEQ ID NO: 1858728 - RNA, 19 nt, Homo sapiens
  misc_RNA (1)...(19): siRNA sense strand
ucaugagcgucuuguuguu

SEQ ID NO: 1858729 - RNA, 19 nt, Homo sapiens
  misc_RNA (1)...(19): siRNA sense strand
uggcggugcuacagauuga

SEQ ID NO: 1858730 - RNA, 19 nt, Homo sapiens
  misc_RNA (1)...(19): siRNA sense strand
ucaccaugcucuucaucau

SEQ ID NO: 1858731 - RNA, 19 nt, Homo sapiens
  misc_RNA (1)...(19): siRNA sense strand
gaggaagcccugucuuugc

SEQ ID NO: 1858732 - RNA, 19 nt, Homo sapiens
  misc_RNA (1)...(19): siRNA sense strand
acagauugaucaagugcau

SEQ ID NO: 1858733 - RNA, 19 nt, Homo sapiens
  misc_RNA (1)...(19): siRNA sense strand
accaugcucuucaucauca

SEQ ID NO: 1858734 - RNA, 19 nt, Homo sapiens
  misc_RNA (1)...(19): siRNA sense strand
auaaccaguucaucaagau

SEQ ID NO: 1858735 - RNA, 19 nt, Homo sapiens
  misc_RNA (1)...(19): siRNA sense strand
ucuucaaggucuacauguu

SEQ ID NO: 1858736 - RNA, 19 nt, Homo sapiens
  misc_RNA (1)...(19): siRNA sense strand
gcucaucaccaugcucuuc

SEQ ID NO: 1858737 - RNA, 19 nt, Homo sapiens
  misc_RNA (1)...(19): siRNA sense strand
acgaggaagcccugucuuu

SEQ ID NO: 1858738 - RNA, 19 nt, Homo sapiens
  misc_RNA (1)...(19): siRNA sense strand
ggaagugcccaccuaucuc

SEQ ID NO: 1858739 - RNA, 19 nt, Homo sapiens
  misc_RNA (1)...(19): siRNA sense strand
gcaaaucauggacuaucuc

SEQ ID NO: 1858740 - RNA, 19 nt, Homo sapiens
  misc_RNA (1)...(19): siRNA sense strand
cugcagcuccuacauggaa

SEQ ID NO: 1858741 - RNA, 19 nt, Homo sapiens
  misc_RNA (1)...(19): siRNA sense strand
gaccugcugcugcuucaau

SEQ ID NO: 1858742 - RNA, 19 nt, Homo sapiens
  misc_RNA (1)...(19): siRNA sense strand
ggccaucuaccaugugauc

SEQ ID NO: 1858743 - RNA, 19 nt, Homo sapiens
  misc_RNA (1)...(19): siRNA sense strand
agauugaucaagugcauga

SEQ ID NO: 1858744 - RNA, 19 nt, Homo sapiens
  misc_RNA (1)...(19): siRNA sense strand
cagaccugcugcugcuuca

SEQ ID NO: 1858745 - RNA, 19 nt, Homo sapiens
  misc_RNA (1)...(19): siRNA sense strand
gcagcaaucuucauuauuu

SEQ ID NO: 1858746 - RNA, 19 nt, Homo sapiens
  misc_RNA (1)...(19): siRNA sense strand
gaaauacugugguuugcuu

SEQ ID NO: 1858747 - RNA, 19 nt, Homo sapiens
  misc_RNA (1)...(19): siRNA sense strand
uaacacugcuggacaauau

SEQ ID NO: 1858748 - RNA, 19 nt, Homo sapiens
  misc_RNA (1)...(19): siRNA sense strand
ggccauaagugauuuacua

SEQ ID NO: 1858749 - RNA, 19 nt, Homo sapiens
  misc_RNA (1)...(19): siRNA sense strand
gacacaaacucuucagaaa

SEQ ID NO: 1858750 - RNA, 19 nt, Homo sapiens
  misc_RNA (1)...(19): siRNA sense strand
agacucaacucccagaaua

SEQ ID NO: 1858751 - RNA, 19 nt, Homo sapiens
  misc_RNA (1)...(19): siRNA sense strand
uaacagcagugagauuuaa

SEQ ID NO: 1858752 - RNA, 19 nt, Homo sapiens
  misc_RNA (1)...(19): siRNA sense strand
gaacaaacauaugcacaca

SEQ ID NO: 1858753 - RNA, 19 nt, Homo sapiens
  misc_RNA (1)...(19): siRNA sense strand
ucacuaaucucuucaucuu

SEQ ID NO: 1858754 - RNA, 19 nt, Homo sapiens
  misc_RNA (1)...(19): siRNA sense strand
guaaugaggaacaaacaua

SEQ ID NO: 1858755 - RNA, 19 nt, Homo sapiens
  misc_RNA (1)...(19): siRNA sense strand
gugguuugcuuuauuguaa

SEQ ID NO: 1858756 - RNA, 19 nt, Homo sapiens
  misc_RNA (1)...(19): siRNA sense strand
ggacacaaacucuucagaa

SEQ ID NO: 1858757 - RNA, 19 nt, Homo sapiens
  misc_RNA (1)...(19): siRNA sense strand
ugucgcagcuucagucuuu

SEQ ID NO: 1858758 - RNA, 19 nt, Homo sapiens
  misc_RNA (1)...(19): siRNA sense strand
acacaaagcaucaucugua

SEQ ID NO: 1858759 - RNA, 19 nt, Homo sapiens
  misc_RNA (1)...(19): siRNA sense strand
ggggaaaccuugcuuuaua

SEQ ID NO: 1858760 - RNA, 19 nt, Homo sapiens
  misc_RNA (1)...(19): siRNA sense strand
gaaacacgaugugcaagau

SEQ ID NO: 1858761 - RNA, 19 nt, Homo sapiens
  misc_RNA (1)...(19): siRNA sense strand
aaacacaucuaaucagcuu

SEQ ID NO: 1858762 - RNA, 19 nt, Homo sapiens
  misc_RNA (1)...(19): siRNA sense strand
aaccaaagcucacuaucaa

SEQ ID NO: 1858763 - RNA, 19 nt, Homo sapiens
  misc_RNA (1)...(19): siRNA sense strand
caucauguauggaaggauu

SEQ ID NO: 1858764 - RNA, 19 nt, Homo sapiens
  misc_RNA (1)...(19): siRNA sense strand
aaaccuugcuuuauaggaa

SEQ ID NO: 1858765 - RNA, 19 nt, Homo sapiens
  misc_RNA (1)...(19): siRNA sense strand
ccaggaaucuacauuucaa

SEQ ID NO: 1858766 - RNA, 19 nt, Homo sapiens
  misc_RNA (1)...(19): siRNA sense strand
gggaaaccuugcuuuauag

SEQ ID NO: 1858767 - RNA, 19 nt, Homo sapiens
  misc_RNA (1)...(19): siRNA sense strand
uuaccuaugugaacuacua

SEQ ID NO: 1858768 - RNA, 19 nt, Homo sapiens
  misc_RNA (1)...(19): siRNA sense strand
uaaugaugcucucagacua

SEQ ID NO: 1858769 - RNA, 19 nt, Homo sapiens
  misc_RNA (1)...(19): siRNA sense strand
gaugggaaauacugugguu

SEQ ID NO: 1858770 - RNA, 19 nt, Homo sapiens
  misc_RNA (1)...(19): siRNA sense strand
cuacaccacugugcuguuu

SEQ ID NO: 1858771 - RNA, 19 nt, Homo sapiens
  misc_RNA (1)...(19): siRNA sense strand
ggaaacacgaugugcaaga

SEQ ID NO: 1858772 - RNA, 19 nt, Homo sapiens
  misc_RNA (1)...(19): siRNA sense strand
uaugugaacuacuaucuuc

SEQ ID NO: 1858773 - RNA, 19 nt, Homo sapiens
  misc_RNA (1)...(19): siRNA sense strand
caucauuuaugguuucuuc

SEQ ID NO: 1858774 - RNA, 19 nt, Homo sapiens
  misc_RNA (1)...(19): siRNA sense strand
gaaaugaggaagaucuaca

SEQ ID NO: 1858775 - RNA, 19 nt, Homo sapiens
  misc_RNA (1)...(19): siRNA sense strand
ccaaagcucacuaucaaga

SEQ ID NO: 1858776 - RNA, 19 nt, Homo sapiens
  misc_RNA (1)...(19): siRNA sense strand
gauuggaauuucacucuuc

SEQ ID NO: 1858777 - RNA, 19 nt, Homo sapiens
  misc_RNA (1)...(19): siRNA sense strand
gaaaugggacacaaacucu

SEQ ID NO: 1858778 - RNA, 19 nt, Homo sapiens
  misc_RNA (1)...(19): siRNA sense strand
agacuacgcugaccuuucu

SEQ ID NO: 1858779 - RNA, 19 nt, Homo sapiens
  misc_RNA (1)...(19): siRNA sense strand
cagcuucagucuuuacguu

SEQ ID NO: 1858780 - RNA, 19 nt, Homo sapiens
  misc_RNA (1)...(19): siRNA sense strand
uuaagaugcuccugauugu

SEQ ID NO: 1858781 - RNA, 19 nt, Homo sapiens
  misc_RNA (1)...(19): siRNA sense strand
uggcagcaaucuucauuau

SEQ ID NO: 1858782 - RNA, 19 nt, Homo sapiens
  misc_RNA (1)...(19): siRNA sense strand
ccaaaugaacugcagauca

SEQ ID NO: 1858783 - RNA, 19 nt, Homo sapiens
  misc_RNA (1)...(19): siRNA sense strand
acgcugaccuuucuccaaa

SEQ ID NO: 1858784 - RNA, 19 nt, Homo sapiens
  misc_RNA (1)...(19): siRNA sense strand
acaaacauaugcacacagu

SEQ ID NO: 1858785 - RNA, 19 nt, Homo sapiens
  misc_RNA (1)...(19): siRNA sense strand
caucccaucuggaauguca

SEQ ID NO: 1858786 - RNA, 19 nt, Homo sapiens
  misc_RNA (1)...(19): siRNA sense strand
gagaauuuccgccgugguu

SEQ ID NO: 1858787 - RNA, 19 nt, Homo sapiens
  misc_RNA (1)...(19): siRNA sense strand
gaacugcagaucaucaaca

SEQ ID NO: 1858788 - RNA, 19 nt, Homo sapiens
  misc_RNA (1)...(19): siRNA sense strand
aaacauaugcacacaguca

SEQ ID NO: 1858789 - RNA, 19 nt, Homo sapiens
  misc_RNA (1)...(19): siRNA sense strand
aaagccaugugcucauaaa

SEQ ID NO: 1858790 - RNA, 19 nt, Homo sapiens
  misc_RNA (1)...(19): siRNA sense strand
gugucaaucccaucauuua

SEQ ID NO: 1858791 - RNA, 19 nt, Homo sapiens
  misc_RNA (1)...(19): siRNA sense strand
ggauuggaauuucacucuu

SEQ ID NO: 1858792 - RNA, 19 nt, Homo sapiens
  misc_RNA (1)...(19): siRNA sense strand
cagcguuugucauuauuau

SEQ ID NO: 1858793 - RNA, 19 nt, Homo sapiens
  misc_RNA (1)...(19): siRNA sense strand
ugaccuuucuccaaaugaa

SEQ ID NO: 1858794 - RNA, 19 nt, Homo sapiens
  misc_RNA (1)...(19): siRNA sense strand
uaaaagccaugugcucaua

SEQ ID NO: 1858795 - RNA, 19 nt, Homo sapiens
  misc_RNA (1)...(19): siRNA sense strand
cuauaacacugcuggacaa

SEQ ID NO: 1858796 - RNA, 19 nt, Homo sapiens
  misc_RNA (1)...(19): siRNA sense strand
ggaauuagugauggaagaa

SEQ ID NO: 1858797 - RNA, 19 nt, Homo sapiens
  misc_RNA (1)...(19): siRNA sense strand
ucaucaacaucuacaucua

SEQ ID NO: 1858798 - RNA, 19 nt, Homo sapiens
  misc_RNA (1)...(19): siRNA sense strand
aaaccaaagcucacuauca

SEQ ID NO: 1858799 - RNA, 19 nt, Homo sapiens
  misc_RNA (1)...(19): siRNA sense strand
acacugcuggacaauauua

SEQ ID NO: 1858800 - RNA, 19 nt, Homo sapiens
  misc_RNA (1)...(19): siRNA sense strand
guccaggaaucuacauuuc

SEQ ID NO: 1858801 - RNA, 19 nt, Homo sapiens
  misc_RNA (1)...(19): siRNA sense strand
caaaucaggaaaugaggaa

SEQ ID NO: 1858802 - RNA, 19 nt, Homo sapiens
  misc_RNA (1)...(19): siRNA sense strand
cgggaagacuggccaaauc

SEQ ID NO: 1858803 - RNA, 19 nt, Homo sapiens
  misc_RNA (1)...(19): siRNA sense strand
caauugcuguagauagguu

SEQ ID NO: 1858804 - RNA, 19 nt, Homo sapiens
  misc_RNA (1)...(19): siRNA sense strand
cagcaaucuucauuauuuc

SEQ ID NO: 1858805 - RNA, 19 nt, Homo sapiens
  misc_RNA (1)...(19): siRNA sense strand
ccuguggacucuaaugaug

SEQ ID NO: 1858806 - RNA, 19 nt, Homo sapiens
  misc_RNA (1)...(19): siRNA sense strand
ucaaguggcagcaaucuuc

SEQ ID NO: 1858807 - RNA, 19 nt, Homo sapiens
  misc_RNA (1)...(19): siRNA sense strand
gguccuagccaucaccauu

SEQ ID NO: 1858808 - RNA, 19 nt, Homo sapiens
  misc_RNA (1)...(19): siRNA sense strand
cacagucacuaaucucuuc

SEQ ID NO: 1858809 - RNA, 19 nt, Homo sapiens
  misc_RNA (1)...(19): siRNA sense strand
gcucauaaacacaucuaau

SEQ ID NO: 1858810 - RNA, 19 nt, Homo sapiens
  misc_RNA (1)...(19): siRNA sense strand
gcugaccuuucuccaaaug

SEQ ID NO: 1858811 - RNA, 19 nt, Homo sapiens
  misc_RNA (1)...(19): siRNA sense strand
gcaggauggccauuuggaa

SEQ ID NO: 1858812 - RNA, 19 nt, Homo sapiens
  misc_RNA (1)...(19): siRNA sense strand
gaucaucaacaucuacauc

SEQ ID NO: 1858813 - RNA, 19 nt, Homo sapiens
  misc_RNA (1)...(19): siRNA sense strand
ucauuaagaugcuccugau

SEQ ID NO: 1858814 - RNA, 19 nt, Homo sapiens
  misc_RNA (1)...(19): siRNA sense strand
gcagaagaucauuaagaug

SEQ ID NO: 1858815 - RNA, 19 nt, Homo sapiens
  misc_RNA (1)...(19): siRNA sense strand
agcagaagaucauuaagau

SEQ ID NO: 1858816 - RNA, 19 nt, Homo sapiens
  misc_RNA (1)...(19): siRNA sense strand
aagcagaagaucauuaaga

SEQ ID NO: 1858817 - RNA, 19 nt, Homo sapiens
  misc_RNA (1)...(19): siRNA sense strand
guccuagccaucaccauua

SEQ ID NO: 1858818 - RNA, 19 nt, Homo sapiens
  misc_RNA (1)...(19): siRNA sense strand
uagauagguuccagugugu

SEQ ID NO: 1858819 - RNA, 19 nt, Homo sapiens
  misc_RNA (1)...(19): siRNA sense strand
caggauggccauuuggaaa

SEQ ID NO: 1858820 - RNA, 19 nt, Homo sapiens
  misc_RNA (1)...(19): siRNA sense strand
acaucuacaucuacccuuu

SEQ ID NO: 1858821 - RNA, 19 nt, Homo sapiens
  misc_RNA (1)...(19): siRNA sense strand
caucuuaaaccuggccaua

SEQ ID NO: 1858822 - RNA, 19 nt, Homo sapiens
  misc_RNA (1)...(19): siRNA sense strand
cuaacagcagugagauuua

SEQ ID NO: 1858823 - RNA, 19 nt, Homo sapiens
  misc_RNA (1)...(19): siRNA sense strand
cagugucaaucccaucauu

SEQ ID NO: 1858824 - RNA, 19 nt, Homo sapiens
  misc_RNA (1)...(19): siRNA sense strand
gggaagacuggccaaauca

SEQ ID NO: 1858825 - RNA, 19 nt, Homo sapiens
  misc_RNA (1)...(19): siRNA sense strand
cacaaagcaucaucuguac

SEQ ID NO: 1858826 - RNA, 19 nt, Homo sapiens
  misc_RNA (1)...(19): siRNA sense strand
ggauggccauuuggaaaca

SEQ ID NO: 1858827 - RNA, 19 nt, Homo sapiens
  misc_RNA (1)...(19): siRNA sense strand
uauggaaggauuggaauuu

SEQ ID NO: 1858828 - RNA, 19 nt, Homo sapiens
  misc_RNA (1)...(19): siRNA sense strand
caaagcaucaucuguacuc

SEQ ID NO: 1858829 - RNA, 19 nt, Homo sapiens
  misc_RNA (1)...(19): siRNA sense strand
uuuacuaguuggcauauuc

SEQ ID NO: 1858830 - RNA, 19 nt, Homo sapiens
  misc_RNA (1)...(19): siRNA sense strand
gaaaccuugcuuuauagga

SEQ ID NO: 1858831 - RNA, 19 nt, Homo sapiens
  misc_RNA (1)...(19): siRNA sense strand
ucaaugacacaaagcauca

SEQ ID NO: 1858832 - RNA, 19 nt, Homo sapiens
  misc_RNA (1)...(19): siRNA sense strand
uggaaggauuggaauuuca

SEQ ID NO: 1858833 - RNA, 19 nt, Homo sapiens
  misc_RNA (1)...(19): siRNA sense strand
gcuggacaauauuauagca

SEQ ID NO: 1858834 - RNA, 19 nt, Homo sapiens
  misc_RNA (1)...(19): siRNA sense strand
aaagcucacuaucaagaca

SEQ ID NO: 1858835 - RNA, 19 nt, Homo sapiens
  misc_RNA (1)...(19): siRNA sense strand
gaauuuccgccgugguuuc

SEQ ID NO: 1858836 - RNA, 19 nt, Homo sapiens
  misc_RNA (1)...(19): siRNA sense strand
gguuugcuuuauuguaaug

SEQ ID NO: 1858837 - RNA, 19 nt, Homo sapiens
  misc_RNA (1)...(19): siRNA sense strand
ggauugguccagggaauau

SEQ ID NO: 1858838 - RNA, 19 nt, Homo sapiens
  misc_RNA (1)...(19): siRNA sense strand
acuaacagcagugagauuu

SEQ ID NO: 1858839 - RNA, 19 nt, Homo sapiens
  misc_RNA (1)...(19): siRNA sense strand
ccaacaggaauuagugaug

SEQ ID NO: 1858840 - RNA, 19 nt, Homo sapiens
  misc_RNA (1)...(19): siRNA sense strand
gcacacagucacuaaucuc

SEQ ID NO: 1858841 - RNA, 19 nt, Homo sapiens
  misc_RNA (1)...(19): siRNA sense strand
gggaaauacugugguuugc

SEQ ID NO: 1858842 - RNA, 19 nt, Homo sapiens
  misc_RNA (1)...(19): siRNA sense strand
gcuucagucuuuacguuag

SEQ ID NO: 1858843 - RNA, 19 nt, Homo sapiens
  misc_RNA (1)...(19): siRNA sense strand
auagcaggauggccauuug

SEQ ID NO: 1858844 - RNA, 19 nt, Homo sapiens
  misc_RNA (1)...(19): siRNA sense strand
aaugagaaaugggacacaa

SEQ ID NO: 1858845 - RNA, 19 nt, Homo sapiens
  misc_RNA (1)...(19): siRNA sense strand
gcagcaaucuucauuauuu

SEQ ID NO: 1858846 - RNA, 19 nt, Homo sapiens
  misc_RNA (1)...(19): siRNA sense strand
gaaauacugugguuugcuu

SEQ ID NO: 1858847 - RNA, 19 nt, Homo sapiens
  misc_RNA (1)...(19): siRNA sense strand
uaacacugcuggacaauau

SEQ ID NO: 1858848 - RNA, 19 nt, Homo sapiens
  misc_RNA (1)...(19): siRNA sense strand
ggccauaagugauuuacua

SEQ ID NO: 1858849 - RNA, 19 nt, Homo sapiens
  misc_RNA (1)...(19): siRNA sense strand
gacacaaacucuucagaaa

SEQ ID NO: 1858850 - RNA, 19 nt, Homo sapiens
  misc_RNA (1)...(19): siRNA sense strand
agacucaacucccagaaua

SEQ ID NO: 1858851 - RNA, 19 nt, Homo sapiens
  misc_RNA (1)...(19): siRNA sense strand
uaacagcagugagauuuaa

SEQ ID NO: 1858852 - RNA, 19 nt, Homo sapiens
  misc_RNA (1)...(19): siRNA sense strand
gaacaaacauaugcacaca

SEQ ID NO: 1858853 - RNA, 19 nt, Homo sapiens
  misc_RNA (1)...(19): siRNA sense strand
ucacuaaucucuucaucuu

SEQ ID NO: 1858854 - RNA, 19 nt, Homo sapiens
  misc_RNA (1)...(19): siRNA sense strand
guaaugaggaacaaacaua

SEQ ID NO: 1858855 - RNA, 19 nt, Homo sapiens
  misc_RNA (1)...(19): siRNA sense strand
gugguuugcuuuauuguaa

SEQ ID NO: 1858856 - RNA, 19 nt, Homo sapiens
  misc_RNA (1)...(19): siRNA sense strand
ggacacaaacucuucagaa

SEQ ID NO: 1858857 - RNA, 19 nt, Homo sapiens
  misc_RNA (1)...(19): siRNA sense strand
ugucgcagcuucagucuuu

SEQ ID NO: 1858858 - RNA, 19 nt, Homo sapiens
  misc_RNA (1)...(19): siRNA sense strand
acacaaagcaucaucugua

SEQ ID NO: 1858859 - RNA, 19 nt, Homo sapiens
  misc_RNA (1)...(19): siRNA sense strand
ggggaaaccuugcuuuaua

SEQ ID NO: 1858860 - RNA, 19 nt, Homo sapiens
  misc_RNA (1)...(19): siRNA sense strand
gaaacacgaugugcaagau

SEQ ID NO: 1858861 - RNA, 19 nt, Homo sapiens
  misc_RNA (1)...(19): siRNA sense strand
aaacacaucuaaucagcuu

SEQ ID NO: 1858862 - RNA, 19 nt, Homo sapiens
  misc_RNA (1)...(19): siRNA sense strand
aaccaaagcucacuaucaa

SEQ ID NO: 1858863 - RNA, 19 nt, Homo sapiens
  misc_RNA (1)...(19): siRNA sense strand
caucauguauggaaggauu

SEQ ID NO: 1858864 - RNA, 19 nt, Homo sapiens
  misc_RNA (1)...(19): siRNA sense strand
aaaccuugcuuuauaggaa

SEQ ID NO: 1858865 - RNA, 19 nt, Homo sapiens
  misc_RNA (1)...(19): siRNA sense strand
ccaggaaucuacauuucaa

SEQ ID NO: 1858866 - RNA, 19 nt, Homo sapiens
  misc_RNA (1)...(19): siRNA sense strand
gggaaaccuugcuuuauag

SEQ ID NO: 1858867 - RNA, 19 nt, Homo sapiens
  misc_RNA (1)...(19): siRNA sense strand
uuaccuaugugaacuacua

SEQ ID NO: 1858868 - RNA, 19 nt, Homo sapiens
  misc_RNA (1)...(19): siRNA sense strand
uaaugaugcucucagacua

SEQ ID NO: 1858869 - RNA, 19 nt, Homo sapiens
  misc_RNA (1)...(19): siRNA sense strand
gaugggaaauacugugguu

SEQ ID NO: 1858870 - RNA, 19 nt, Homo sapiens
  misc_RNA (1)...(19): siRNA sense strand
cuacaccacugugcuguuu

SEQ ID NO: 1858871 - RNA, 19 nt, Homo sapiens
  misc_RNA (1)...(19): siRNA sense strand
ggaaacacgaugugcaaga

SEQ ID NO: 1858872 - RNA, 19 nt, Homo sapiens
  misc_RNA (1)...(19): siRNA sense strand
uaugugaacuacuaucuuc

SEQ ID NO: 1858873 - RNA, 19 nt, Homo sapiens
  misc_RNA (1)...(19): siRNA sense strand
caucauuuaugguuucuuc

SEQ ID NO: 1858874 - RNA, 19 nt, Homo sapiens
  misc_RNA (1)...(19): siRNA sense strand
gaaaugaggaagaucuaca

SEQ ID NO: 1858875 - RNA, 19 nt, Homo sapiens
  misc_RNA (1)...(19): siRNA sense strand
ccaaagcucacuaucaaga

SEQ ID NO: 1858876 - RNA, 19 nt, Homo sapiens
  misc_RNA (1)...(19): siRNA sense strand
gauuggaauuucacucuuc

SEQ ID NO: 1858877 - RNA, 19 nt, Homo sapiens
  misc_RNA (1)...(19): siRNA sense strand
gaaaugggacacaaacucu

SEQ ID NO: 1858878 - RNA, 19 nt, Homo sapiens
  misc_RNA (1)...(19): siRNA sense strand
agacuacgcugaccuuucu

SEQ ID NO: 1858879 - RNA, 19 nt, Homo sapiens
  misc_RNA (1)...(19): siRNA sense strand
cagcuucagucuuuacguu

SEQ ID NO: 1858880 - RNA, 19 nt, Homo sapiens
  misc_RNA (1)...(19): siRNA sense strand
uuaagaugcuccugauugu

SEQ ID NO: 1858881 - RNA, 19 nt, Homo sapiens
  misc_RNA (1)...(19): siRNA sense strand
uggcagcaaucuucauuau

SEQ ID NO: 1858882 - RNA, 19 nt, Homo sapiens
  misc_RNA (1)...(19): siRNA sense strand
ccaaaugaacugcagauca

SEQ ID NO: 1858883 - RNA, 19 nt, Homo sapiens
  misc_RNA (1)...(19): siRNA sense strand
acgcugaccuuucuccaaa

SEQ ID NO: 1858884 - RNA, 19 nt, Homo sapiens
  misc_RNA (1)...(19): siRNA sense strand
acaaacauaugcacacagu

SEQ ID NO: 1858885 - RNA, 19 nt, Homo sapiens
  misc_RNA (1)...(19): siRNA sense strand
caucccaucuggaauguca

SEQ ID NO: 1858886 - RNA, 19 nt, Homo sapiens
  misc_RNA (1)...(19): siRNA sense strand
gagaauuuccgccgugguu

SEQ ID NO: 1858887 - RNA, 19 nt, Homo sapiens
  misc_RNA (1)...(19): siRNA sense strand
gaacugcagaucaucaaca

SEQ ID NO: 1858888 - RNA, 19 nt, Homo sapiens
  misc_RNA (1)...(19): siRNA sense strand
aaacauaugcacacaguca

SEQ ID NO: 1858889 - RNA, 19 nt, Homo sapiens
  misc_RNA (1)...(19): siRNA sense strand
aaagccaugugcucauaaa

SEQ ID NO: 1858890 - RNA, 19 nt, Homo sapiens
  misc_RNA (1)...(19): siRNA sense strand
gugucaaucccaucauuua

SEQ ID NO: 1858891 - RNA, 19 nt, Homo sapiens
  misc_RNA (1)...(19): siRNA sense strand
ggauuggaauuucacucuu

SEQ ID NO: 1858892 - RNA, 19 nt, Homo sapiens
  misc_RNA (1)...(19): siRNA sense strand
cagcguuugucauuauuau

SEQ ID NO: 1858893 - RNA, 19 nt, Homo sapiens
  misc_RNA (1)...(19): siRNA sense strand
ugaccuuucuccaaaugaa

SEQ ID NO: 1858894 - RNA, 19 nt, Homo sapiens
  misc_RNA (1)...(19): siRNA sense strand
uaaaagccaugugcucaua

SEQ ID NO: 1858895 - RNA, 19 nt, Homo sapiens
  misc_RNA (1)...(19): siRNA sense strand
cuauaacacugcuggacaa

SEQ ID NO: 1858896 - RNA, 19 nt, Homo sapiens
  misc_RNA (1)...(19): siRNA sense strand
ggaauuagugauggaagaa

SEQ ID NO: 1858897 - RNA, 19 nt, Homo sapiens
  misc_RNA (1)...(19): siRNA sense strand
ucaucaacaucuacaucua

SEQ ID NO: 1858898 - RNA, 19 nt, Homo sapiens
  misc_RNA (1)...(19): siRNA sense strand
aaaccaaagcucacuauca

SEQ ID NO: 1858899 - RNA, 19 nt, Homo sapiens
  misc_RNA (1)...(19): siRNA sense strand
acacugcuggacaauauua

SEQ ID NO: 1858900 - RNA, 19 nt, Homo sapiens
  misc_RNA (1)...(19): siRNA sense strand
guccaggaaucuacauuuc

SEQ ID NO: 1858901 - RNA, 19 nt, Homo sapiens
  misc_RNA (1)...(19): siRNA sense strand
caaaucaggaaaugaggaa

SEQ ID NO: 1858902 - RNA, 19 nt, Homo sapiens
  misc_RNA (1)...(19): siRNA sense strand
cgggaagacuggccaaauc

SEQ ID NO: 1858903 - RNA, 19 nt, Homo sapiens
  misc_RNA (1)...(19): siRNA sense strand
caauugcuguagauagguu

SEQ ID NO: 1858904 - RNA, 19 nt, Homo sapiens
  misc_RNA (1)...(19): siRNA sense strand
cagcaaucuucauuauuuc

SEQ ID NO: 1858905 - RNA, 19 nt, Homo sapiens
  misc_RNA (1)...(19): siRNA sense strand
ccuguggacucuaaugaug

SEQ ID NO: 1858906 - RNA, 19 nt, Homo sapiens
  misc_RNA (1)...(19): siRNA sense strand
ucaaguggcagcaaucuuc

SEQ ID NO: 1858907 - RNA, 19 nt, Homo sapiens
  misc_RNA (1)...(19): siRNA sense strand
gguccuagccaucaccauu

SEQ ID NO: 1858908 - RNA, 19 nt, Homo sapiens
  misc_RNA (1)...(19): siRNA sense strand
cacagucacuaaucucuuc

SEQ ID NO: 1858909 - RNA, 19 nt, Homo sapiens
  misc_RNA (1)...(19): siRNA sense strand
gcucauaaacacaucuaau

SEQ ID NO: 1858910 - RNA, 19 nt, Homo sapiens
  misc_RNA (1)...(19): siRNA sense strand
gcugaccuuucuccaaaug

SEQ ID NO: 1858911 - RNA, 19 nt, Homo sapiens
  misc_RNA (1)...(19): siRNA sense strand
gcaggauggccauuuggaa

SEQ ID NO: 1858912 - RNA, 19 nt, Homo sapiens
  misc_RNA (1)...(19): siRNA sense strand
gaucaucaacaucuacauc

SEQ ID NO: 1858913 - RNA, 19 nt, Homo sapiens
  misc_RNA (1)...(19): siRNA sense strand
ucauuaagaugcuccugau

SEQ ID NO: 1858914 - RNA, 19 nt, Homo sapiens
  misc_RNA (1)...(19): siRNA sense strand
gcagaagaucauuaagaug

SEQ ID NO: 1858915 - RNA, 19 nt, Homo sapiens
  misc_RNA (1)...(19): siRNA sense strand
agcagaagaucauuaagau

SEQ ID NO: 1858916 - RNA, 19 nt, Homo sapiens
  misc_RNA (1)...(19): siRNA sense strand
aagcagaagaucauuaaga

SEQ ID NO: 1858917 - RNA, 19 nt, Homo sapiens
  misc_RNA (1)...(19): siRNA sense strand
guccuagccaucaccauua

SEQ ID NO: 1858918 - RNA, 19 nt, Homo sapiens
  misc_RNA (1)...(19): siRNA sense strand
uagauagguuccagugugu

SEQ ID NO: 1858919 - RNA, 19 nt, Homo sapiens
  misc_RNA (1)...(19): siRNA sense strand
caggauggccauuuggaaa

SEQ ID NO: 1858920 - RNA, 19 nt, Homo sapiens
  misc_RNA (1)...(19): siRNA sense strand
acaucuacaucuacccuuu

SEQ ID NO: 1858921 - RNA, 19 nt, Homo sapiens
  misc_RNA (1)...(19): siRNA sense strand
caucuuaaaccuggccaua

SEQ ID NO: 1858922 - RNA, 19 nt, Homo sapiens
  misc_RNA (1)...(19): siRNA sense strand
cuaacagcagugagauuua

SEQ ID NO: 1858923 - RNA, 19 nt, Homo sapiens
  misc_RNA (1)...(19): siRNA sense strand
cagugucaaucccaucauu

SEQ ID NO: 1858924 - RNA, 19 nt, Homo sapiens
  misc_RNA (1)...(19): siRNA sense strand
gggaagacuggccaaauca

SEQ ID NO: 1858925 - RNA, 19 nt, Homo sapiens
  misc_RNA (1)...(19): siRNA sense strand
cacaaagcaucaucuguac

SEQ ID NO: 1858926 - RNA, 19 nt, Homo sapiens
  misc_RNA (1)...(19): siRNA sense strand
ggauggccauuuggaaaca

SEQ ID NO: 1858927 - RNA, 19 nt, Homo sapiens
  misc_RNA (1)...(19): siRNA sense strand
uauggaaggauuggaauuu

SEQ ID NO: 1858928 - RNA, 19 nt, Homo sapiens
  misc_RNA (1)...(19): siRNA sense strand
caaagcaucaucuguacuc

SEQ ID NO: 1858929 - RNA, 19 nt, Homo sapiens
  misc_RNA (1)...(19): siRNA sense strand
uuuacuaguuggcauauuc

SEQ ID NO: 1858930 - RNA, 19 nt, Homo sapiens
  misc_RNA (1)...(19): siRNA sense strand
gaaaccuugcuuuauagga

SEQ ID NO: 1858931 - RNA, 19 nt, Homo sapiens
  misc_RNA (1)...(19): siRNA sense strand
ucaaugacacaaagcauca

SEQ ID NO: 1858932 - RNA, 19 nt, Homo sapiens
  misc_RNA (1)...(19): siRNA sense strand
uggaaggauuggaauuuca

SEQ ID NO: 1858933 - RNA, 19 nt, Homo sapiens
  misc_RNA (1)...(19): siRNA sense strand
gcuggacaauauuauagca

SEQ ID NO: 1858934 - RNA, 19 nt, Homo sapiens
  misc_RNA (1)...(19): siRNA sense strand
aaagcucacuaucaagaca

SEQ ID NO: 1858935 - RNA, 19 nt, Homo sapiens
  misc_RNA (1)...(19): siRNA sense strand
gaauuuccgccgugguuuc

SEQ ID NO: 1858936 - RNA, 19 nt, Homo sapiens
  misc_RNA (1)...(19): siRNA sense strand
gguuugcuuuauuguaaug

SEQ ID NO: 1858937 - RNA, 19 nt, Homo sapiens
  misc_RNA (1)...(19): siRNA sense strand
ggauugguccagggaauau

SEQ ID NO: 1858938 - RNA, 19 nt, Homo sapiens
  misc_RNA (1)...(19): siRNA sense strand
acuaacagcagugagauuu

SEQ ID NO: 1858939 - RNA, 19 nt, Homo sapiens
  misc_RNA (1)...(19): siRNA sense strand
ccaacaggaauuagugaug

SEQ ID NO: 1858940 - RNA, 19 nt, Homo sapiens
  misc_RNA (1)...(19): siRNA sense strand
gcacacagucacuaaucuc

SEQ ID NO: 1858941 - RNA, 19 nt, Homo sapiens
  misc_RNA (1)...(19): siRNA sense strand
gggaaauacugugguuugc

SEQ ID NO: 1858942 - RNA, 19 nt, Homo sapiens
  misc_RNA (1)...(19): siRNA sense strand
gcuucagucuuuacguuag

SEQ ID NO: 1858943 - RNA, 19 nt, Homo sapiens
  misc_RNA (1)...(19): siRNA sense strand
auagcaggauggccauuug

SEQ ID NO: 1858944 - RNA, 19 nt, Homo sapiens
  misc_RNA (1)...(19): siRNA sense strand
aaugagaaaugggacacaa

SEQ ID NO: 1858945 - RNA, 19 nt, Homo sapiens
  misc_RNA (1)...(19): siRNA sense strand
agaaggaggugucagauuu

SEQ ID NO: 1858946 - RNA, 19 nt, Homo sapiens
  misc_RNA (1)...(19): siRNA sense strand
ggaaguggcuggccugaca

SEQ ID NO: 1858947 - RNA, 19 nt, Homo sapiens
  misc_RNA (1)...(19): siRNA sense strand
agacaaggcugcugcuauu

SEQ ID NO: 1858948 - RNA, 19 nt, Homo sapiens
  misc_RNA (1)...(19): siRNA sense strand
gaugaugacugucgcuaug

SEQ ID NO: 1858949 - RNA, 19 nt, Homo sapiens
  misc_RNA (1)...(19): siRNA sense strand
gagaggagcauacuacaug

SEQ ID NO: 1858950 - RNA, 19 nt, Homo sapiens
  misc_RNA (1)...(19): siRNA sense strand
ggacacacgcuccauugaa

SEQ ID NO: 1858951 - RNA, 19 nt, Homo sapiens
  misc_RNA (1)...(19): siRNA sense strand
gcaagagaaacaacagaaa

SEQ ID NO: 1858952 - RNA, 19 nt, Homo sapiens
  misc_RNA (1)...(19): siRNA sense strand
ggaggugucagauuucauu

SEQ ID NO: 1858953 - RNA, 19 nt, Homo sapiens
  misc_RNA (1)...(19): siRNA sense strand
caaggcugcugcuauuaga

SEQ ID NO: 1858954 - RNA, 19 nt, Homo sapiens
  misc_RNA (1)...(19): siRNA sense strand
ggugucagauuucauucaa

SEQ ID NO: 1858955 - RNA, 19 nt, Homo sapiens
  misc_RNA (1)...(19): siRNA sense strand
gaagaaacuacaagagcaa

SEQ ID NO: 1858956 - RNA, 19 nt, Homo sapiens
  misc_RNA (1)...(19): siRNA sense strand
guaaaaggauggagaagga

SEQ ID NO: 1858957 - RNA, 19 nt, Homo sapiens
  misc_RNA (1)...(19): siRNA sense strand
ugucagauuucauucaaga

SEQ ID NO: 1858958 - RNA, 19 nt, Homo sapiens
  misc_RNA (1)...(19): siRNA sense strand
caaagacgcagcccacaug

SEQ ID NO: 1858959 - RNA, 19 nt, Homo sapiens
  misc_RNA (1)...(19): siRNA sense strand
gagaaggaggugucagauu

SEQ ID NO: 1858960 - RNA, 19 nt, Homo sapiens
  misc_RNA (1)...(19): siRNA sense strand
uugaagaggcuaugaauga

SEQ ID NO: 1858961 - RNA, 19 nt, Homo sapiens
  misc_RNA (1)...(19): siRNA sense strand
gacacacgcuccauugaag

SEQ ID NO: 1858962 - RNA, 19 nt, Homo sapiens
  misc_RNA (1)...(19): siRNA sense strand
ccagaaggcugaggagaag

SEQ ID NO: 1858963 - RNA, 19 nt, Homo sapiens
  misc_RNA (1)...(19): siRNA sense strand
gaagaggcuaugaaugaga

SEQ ID NO: 1858964 - RNA, 19 nt, Homo sapiens
  misc_RNA (1)...(19): siRNA sense strand
gagacaaggcugcugcuau

SEQ ID NO: 1858965 - RNA, 19 nt, Homo sapiens
  misc_RNA (1)...(19): siRNA sense strand
gaaggaggugucagauuuc

SEQ ID NO: 1858966 - RNA, 19 nt, Homo sapiens
  misc_RNA (1)...(19): siRNA sense strand
gcaagggagcagccaaaga

SEQ ID NO: 1858967 - RNA, 19 nt, Homo sapiens
  misc_RNA (1)...(19): siRNA sense strand
gcgacuacaaggacaagua

SEQ ID NO: 1858968 - RNA, 19 nt, Homo sapiens
  misc_RNA (1)...(19): siRNA sense strand
agacgcagcccacaugcua

SEQ ID NO: 1858969 - RNA, 19 nt, Homo sapiens
  misc_RNA (1)...(19): siRNA sense strand
caagagaaacaacagaaag

SEQ ID NO: 1858970 - RNA, 19 nt, Homo sapiens
  misc_RNA (1)...(19): siRNA sense strand
gcuaugucaugaucuucaa

SEQ ID NO: 1858971 - RNA, 19 nt, Homo sapiens
  misc_RNA (1)...(19): siRNA sense strand
gacaaggcugcugcuauua

SEQ ID NO: 1858972 - RNA, 19 nt, Homo sapiens
  misc_RNA (1)...(19): siRNA sense strand
cguuggagcuuggauaugu

SEQ ID NO: 1858973 - RNA, 19 nt, Homo sapiens
  misc_RNA (1)...(19): siRNA sense strand
ugacauccuucuccuuugg

SEQ ID NO: 1858974 - RNA, 19 nt, Homo sapiens
  misc_RNA (1)...(19): siRNA sense strand
ccugacauccuucuccuuu

SEQ ID NO: 1858975 - RNA, 19 nt, Homo sapiens
  misc_RNA (1)...(19): siRNA sense strand
gacugucgcuaugucauga

SEQ ID NO: 1858976 - RNA, 19 nt, Homo sapiens
  misc_RNA (1)...(19): siRNA sense strand
agaggagcauacuacauga

SEQ ID NO: 1858977 - RNA, 19 nt, Homo sapiens
  misc_RNA (1)...(19): siRNA sense strand
aaaguggaguuucguaaaa

SEQ ID NO: 1858978 - RNA, 19 nt, Homo sapiens
  misc_RNA (1)...(19): siRNA sense strand
caagggagcagccaaagac

SEQ ID NO: 1858979 - RNA, 19 nt, Homo sapiens
  misc_RNA (1)...(19): siRNA sense strand
gagcaagagaaacaacaga

SEQ ID NO: 1858980 - RNA, 19 nt, Homo sapiens
  misc_RNA (1)...(19): siRNA sense strand
acagugggcagaucaagaa

SEQ ID NO: 1858981 - RNA, 19 nt, Homo sapiens
  misc_RNA (1)...(19): siRNA sense strand
gaucgagaggagcauacua

SEQ ID NO: 1858982 - RNA, 19 nt, Homo sapiens
  misc_RNA (1)...(19): siRNA sense strand
caagacagugggcagauca

SEQ ID NO: 1858983 - RNA, 19 nt, Homo sapiens
  misc_RNA (1)...(19): siRNA sense strand
uacaagagcaagagaaaca

SEQ ID NO: 1858984 - RNA, 19 nt, Homo sapiens
  misc_RNA (1)...(19): siRNA sense strand
caagaucgagaggagcaua

SEQ ID NO: 1858985 - RNA, 19 nt, Homo sapiens
  misc_RNA (1)...(19): siRNA sense strand
ugaagaggcuaugaaugag

SEQ ID NO: 1858986 - RNA, 19 nt, Homo sapiens
  misc_RNA (1)...(19): siRNA sense strand
acagguguuugauuuguca

SEQ ID NO: 1858987 - RNA, 19 nt, Homo sapiens
  misc_RNA (1)...(19): siRNA sense strand
ggaguuugcacccucagau

SEQ ID NO: 1858988 - RNA, 19 nt, Homo sapiens
  misc_RNA (1)...(19): siRNA sense strand
gaaacuacaagagcaagag

SEQ ID NO: 1858989 - RNA, 19 nt, Homo sapiens
  misc_RNA (1)...(19): siRNA sense strand
gagggacacacgcuccauu

SEQ ID NO: 1858990 - RNA, 19 nt, Homo sapiens
  misc_RNA (1)...(19): siRNA sense strand
gacagugggcagaucaaga

SEQ ID NO: 1858991 - RNA, 19 nt, Homo sapiens
  misc_RNA (1)...(19): siRNA sense strand
aagaggcuaugaaugagau

SEQ ID NO: 1858992 - RNA, 19 nt, Homo sapiens
  misc_RNA (1)...(19): siRNA sense strand
uggcuggccugacauccuu

SEQ ID NO: 1858993 - RNA, 19 nt, Homo sapiens
  misc_RNA (1)...(19): siRNA sense strand
acccucagaugaagagcua

SEQ ID NO: 1858994 - RNA, 19 nt, Homo sapiens
  misc_RNA (1)...(19): siRNA sense strand
gggacacacgcuccauuga

SEQ ID NO: 1858995 - RNA, 19 nt, Homo sapiens
  misc_RNA (1)...(19): siRNA sense strand
gugugcccguggccaauaa

SEQ ID NO: 1858996 - RNA, 19 nt, Homo sapiens
  misc_RNA (1)...(19): siRNA sense strand
caaguacagccaccucauc

SEQ ID NO: 1858997 - RNA, 19 nt, Homo sapiens
  misc_RNA (1)...(19): siRNA sense strand
ggagaaggaggugucagau

SEQ ID NO: 1858998 - RNA, 19 nt, Homo sapiens
  misc_RNA (1)...(19): siRNA sense strand
ucaagacagugggcagauc

SEQ ID NO: 1858999 - RNA, 19 nt, Homo sapiens
  misc_RNA (1)...(19): siRNA sense strand
gugcguggcaugugugugu

SEQ ID NO: 1859000 - RNA, 19 nt, Homo sapiens
  misc_RNA (1)...(19): siRNA sense strand
cccagaaggcugaggagaa

SEQ ID NO: 1859001 - RNA, 19 nt, Homo sapiens
  misc_RNA (1)...(19): siRNA sense strand
ggcuaugaaugagaucaga

SEQ ID NO: 1859002 - RNA, 19 nt, Homo sapiens
  misc_RNA (1)...(19): siRNA sense strand
ccauugaagaggcuaugaa

SEQ ID NO: 1859003 - RNA, 19 nt, Homo sapiens
  misc_RNA (1)...(19): siRNA sense strand
ccaaagacgcagcccacau

SEQ ID NO: 1859004 - RNA, 19 nt, Homo sapiens
  misc_RNA (1)...(19): siRNA sense strand
ggauaugugcguggcaugu

SEQ ID NO: 1859005 - RNA, 19 nt, Homo sapiens
  misc_RNA (1)...(19): siRNA sense strand
cauugaagaggcuaugaau

SEQ ID NO: 1859006 - RNA, 19 nt, Homo sapiens
  misc_RNA (1)...(19): siRNA sense strand
gaguuugcacccucagaug

SEQ ID NO: 1859007 - RNA, 19 nt, Homo sapiens
  misc_RNA (1)...(19): siRNA sense strand
ucagauuucauucaagaca

SEQ ID NO: 1859008 - RNA, 19 nt, Homo sapiens
  misc_RNA (1)...(19): siRNA sense strand
aaacuacaagagcaagaga

SEQ ID NO: 1859009 - RNA, 19 nt, Homo sapiens
  misc_RNA (1)...(19): siRNA sense strand
aagagaaacaacagaaagu

SEQ ID NO: 1859010 - RNA, 19 nt, Homo sapiens
  misc_RNA (1)...(19): siRNA sense strand
acuacaagagcaagagaaa

SEQ ID NO: 1859011 - RNA, 19 nt, Homo sapiens
  misc_RNA (1)...(19): siRNA sense strand
acaaggcugcugcuauuag

SEQ ID NO: 1859012 - RNA, 19 nt, Homo sapiens
  misc_RNA (1)...(19): siRNA sense strand
aaggaggugucagauuuca

SEQ ID NO: 1859013 - RNA, 19 nt, Homo sapiens
  misc_RNA (1)...(19): siRNA sense strand
uggagaaggaggugucaga

SEQ ID NO: 1859014 - RNA, 19 nt, Homo sapiens
  misc_RNA (1)...(19): siRNA sense strand
caggagauuuggauaggaa

SEQ ID NO: 1859015 - RNA, 19 nt, Homo sapiens
  misc_RNA (1)...(19): siRNA sense strand
aauccgggcugcugauaaa

SEQ ID NO: 1859016 - RNA, 19 nt, Homo sapiens
  misc_RNA (1)...(19): siRNA sense strand
ccuacuacaccaaaguuua

SEQ ID NO: 1859017 - RNA, 19 nt, Homo sapiens
  misc_RNA (1)...(19): siRNA sense strand
gggcuucaucguuuauaaa

SEQ ID NO: 1859018 - RNA, 19 nt, Homo sapiens
  misc_RNA (1)...(19): siRNA sense strand
gaagcccuacuacaccaaa

SEQ ID NO: 1859019 - RNA, 19 nt, Homo sapiens
  misc_RNA (1)...(19): siRNA sense strand
caaaguuuaccaggagauu

SEQ ID NO: 1859020 - RNA, 19 nt, Homo sapiens
  misc_RNA (1)...(19): siRNA sense strand
ugggcuucaucguuuauaa

SEQ ID NO: 1859021 - RNA, 19 nt, Homo sapiens
  misc_RNA (1)...(19): siRNA sense strand
ccaggagauuuggauagga

SEQ ID NO: 1859022 - RNA, 19 nt, Homo sapiens
  misc_RNA (1)...(19): siRNA sense strand
ggagauuuggauaggaaug

SEQ ID NO: 1859023 - RNA, 19 nt, Homo sapiens
  misc_RNA (1)...(19): siRNA sense strand
cuacuacaccaaaguuuac

SEQ ID NO: 1859024 - RNA, 19 nt, Homo sapiens
  misc_RNA (1)...(19): siRNA sense strand
ccaugaagcccuacuacac

SEQ ID NO: 1859025 - RNA, 19 nt, Homo sapiens
  misc_RNA (1)...(19): siRNA sense strand
aaaguuuaccaggagauuu

SEQ ID NO: 1859026 - RNA, 19 nt, Homo sapiens
  misc_RNA (1)...(19): siRNA sense strand
aaguuuaccaggagauuug

SEQ ID NO: 1859027 - RNA, 19 nt, Homo sapiens
  misc_RNA (1)...(19): siRNA sense strand
gcccuacuacaccaaaguu

SEQ ID NO: 1859028 - RNA, 19 nt, Homo sapiens
  misc_RNA (1)...(19): siRNA sense strand
gaaagucagugauuacauu

SEQ ID NO: 1859029 - RNA, 19 nt, Homo sapiens
  misc_RNA (1)...(19): siRNA sense strand
cuacaaugcugcuaaauuu

SEQ ID NO: 1859030 - RNA, 19 nt, Homo sapiens
  misc_RNA (1)...(19): siRNA sense strand
gcaacaaagugguccauuu

SEQ ID NO: 1859031 - RNA, 19 nt, Homo sapiens
  misc_RNA (1)...(19): siRNA sense strand
cagagaaagucagugauua

SEQ ID NO: 1859032 - RNA, 19 nt, Homo sapiens
  misc_RNA (1)...(19): siRNA sense strand
gaaagccaguggucaugaa

SEQ ID NO: 1859033 - RNA, 19 nt, Homo sapiens
  misc_RNA (1)...(19): siRNA sense strand
gacaagaaauuucaaaggu

SEQ ID NO: 1859034 - RNA, 19 nt, Homo sapiens
  misc_RNA (1)...(19): siRNA sense strand
gagagacuauccagccuuu

SEQ ID NO: 1859035 - RNA, 19 nt, Homo sapiens
  misc_RNA (1)...(19): siRNA sense strand
gcacuuugacuuucuguuu

SEQ ID NO: 1859036 - RNA, 19 nt, Homo sapiens
  misc_RNA (1)...(19): siRNA sense strand
gaauuuaacuugggaugug

SEQ ID NO: 1859037 - RNA, 19 nt, Homo sapiens
  misc_RNA (1)...(19): siRNA sense strand
cacaugaucuguuggauau

SEQ ID NO: 1859038 - RNA, 19 nt, Homo sapiens
  misc_RNA (1)...(19): siRNA sense strand
gcgaagccauuguccguaa

SEQ ID NO: 1859039 - RNA, 19 nt, Homo sapiens
  misc_RNA (1)...(19): siRNA sense strand
gagauacgaagacagaaua

SEQ ID NO: 1859040 - RNA, 19 nt, Homo sapiens
  misc_RNA (1)...(19): siRNA sense strand
gauuacauuucuccacuuu

SEQ ID NO: 1859041 - RNA, 19 nt, Homo sapiens
  misc_RNA (1)...(19): siRNA sense strand
ccaauucacuuccagaaca

SEQ ID NO: 1859042 - RNA, 19 nt, Homo sapiens
  misc_RNA (1)...(19): siRNA sense strand
gcaaaggauuauugugcaa

SEQ ID NO: 1859043 - RNA, 19 nt, Homo sapiens
  misc_RNA (1)...(19): siRNA sense strand
gcauguguaucgagucuau

SEQ ID NO: 1859044 - RNA, 19 nt, Homo sapiens
  misc_RNA (1)...(19): siRNA sense strand
cagugggucucgaguauuu

SEQ ID NO: 1859045 - RNA, 19 nt, Homo sapiens
  misc_RNA (1)...(19): siRNA sense strand
gaggauguguuacgaaugg

SEQ ID NO: 1859046 - RNA, 19 nt, Homo sapiens
  misc_RNA (1)...(19): siRNA sense strand
gcaggaagaaguagcuaaa

SEQ ID NO: 1859047 - RNA, 19 nt, Homo sapiens
  misc_RNA (1)...(19): siRNA sense strand
caaauuauggucauuagug

SEQ ID NO: 1859048 - RNA, 19 nt, Homo sapiens
  misc_RNA (1)...(19): siRNA sense strand
gaaacaggaagguguguau

SEQ ID NO: 1859049 - RNA, 19 nt, Homo sapiens
  misc_RNA (1)...(19): siRNA sense strand
ggucucgaguauuuguuua

SEQ ID NO: 1859050 - RNA, 19 nt, Homo sapiens
  misc_RNA (1)...(19): siRNA sense strand
gauuugagcauauugaaga

SEQ ID NO: 1859051 - RNA, 19 nt, Homo sapiens
  misc_RNA (1)...(19): siRNA sense strand
gaagcuacagacaccaaua

SEQ ID NO: 1859052 - RNA, 19 nt, Homo sapiens
  misc_RNA (1)...(19): siRNA sense strand
agacugccuugcaaguuua

SEQ ID NO: 1859053 - RNA, 19 nt, Homo sapiens
  misc_RNA (1)...(19): siRNA sense strand
caaaucggccuggauguuu

SEQ ID NO: 1859054 - RNA, 19 nt, Homo sapiens
  misc_RNA (1)...(19): siRNA sense strand
cuaaagcugcaaaggauua

SEQ ID NO: 1859055 - RNA, 19 nt, Homo sapiens
  misc_RNA (1)...(19): siRNA sense strand
ccaguaggguguccucgaa

SEQ ID NO: 1859056 - RNA, 19 nt, Homo sapiens
  misc_RNA (1)...(19): siRNA sense strand
gaaagcagcgaagccauug

SEQ ID NO: 1859057 - RNA, 19 nt, Homo sapiens
  misc_RNA (1)...(19): siRNA sense strand
cgacagagauacgaagaca

SEQ ID NO: 1859058 - RNA, 19 nt, Homo sapiens
  misc_RNA (1)...(19): siRNA sense strand
caaacgagacccagacuuc

SEQ ID NO: 1859059 - RNA, 19 nt, Homo sapiens
  misc_RNA (1)...(19): siRNA sense strand
ccacaugaucuguuggaua

SEQ ID NO: 1859060 - RNA, 19 nt, Homo sapiens
  misc_RNA (1)...(19): siRNA sense strand
aagacugccuugcaaguuu

SEQ ID NO: 1859061 - RNA, 19 nt, Homo sapiens
  misc_RNA (1)...(19): siRNA sense strand
agacuacaaugcugcuaaa

SEQ ID NO: 1859062 - RNA, 19 nt, Homo sapiens
  misc_RNA (1)...(19): siRNA sense strand
ccagagaaagucagugauu

SEQ ID NO: 1859063 - RNA, 19 nt, Homo sapiens
  misc_RNA (1)...(19): siRNA sense strand
ugacucucaugcagaagua

SEQ ID NO: 1859064 - RNA, 19 nt, Homo sapiens
  misc_RNA (1)...(19): siRNA sense strand
gagcauguguaucgagucu

SEQ ID NO: 1859065 - RNA, 19 nt, Homo sapiens
  misc_RNA (1)...(19): siRNA sense strand
caauccacaugaucuguug

SEQ ID NO: 1859066 - RNA, 19 nt, Homo sapiens
  misc_RNA (1)...(19): siRNA sense strand
acgagggacuggagacuuu

SEQ ID NO: 1859067 - RNA, 19 nt, Homo sapiens
  misc_RNA (1)...(19): siRNA sense strand
cgacucagauagcguacga

SEQ ID NO: 1859068 - RNA, 19 nt, Homo sapiens
  misc_RNA (1)...(19): siRNA sense strand
ucagauagcguacgaaguc

SEQ ID NO: 1859069 - RNA, 19 nt, Homo sapiens
  misc_RNA (1)...(19): siRNA sense strand
cuacaggacccgcuuucua

SEQ ID NO: 1859070 - RNA, 19 nt, Homo sapiens
  misc_RNA (1)...(19): siRNA sense strand
uacuaaagcugcaaaggau

SEQ ID NO: 1859071 - RNA, 19 nt, Homo sapiens
  misc_RNA (1)...(19): siRNA sense strand
gacccagacuucccucaau

SEQ ID NO: 1859072 - RNA, 19 nt, Homo sapiens
  misc_RNA (1)...(19): siRNA sense strand
gacagaauauuugccaaca

SEQ ID NO: 1859073 - RNA, 19 nt, Homo sapiens
  misc_RNA (1)...(19): siRNA sense strand
ucaggcaaaugagggauaa

SEQ ID NO: 1859074 - RNA, 19 nt, Homo sapiens
  misc_RNA (1)...(19): siRNA sense strand
gagacuacaaugcugcuaa

SEQ ID NO: 1859075 - RNA, 19 nt, Homo sapiens
  misc_RNA (1)...(19): siRNA sense strand
aaacugagcauguguaucg

SEQ ID NO: 1859076 - RNA, 19 nt, Homo sapiens
  misc_RNA (1)...(19): siRNA sense strand
gaaagccagcagaaagcua

SEQ ID NO: 1859077 - RNA, 19 nt, Homo sapiens
  misc_RNA (1)...(19): siRNA sense strand
uaacuugggaugugauguu

SEQ ID NO: 1859078 - RNA, 19 nt, Homo sapiens
  misc_RNA (1)...(19): siRNA sense strand
cuuaaagacugccuugcaa

SEQ ID NO: 1859079 - RNA, 19 nt, Homo sapiens
  misc_RNA (1)...(19): siRNA sense strand
caacaaagugguccauuuu

SEQ ID NO: 1859080 - RNA, 19 nt, Homo sapiens
  misc_RNA (1)...(19): siRNA sense strand
ccagagacaagaaauuuca

SEQ ID NO: 1859081 - RNA, 19 nt, Homo sapiens
  misc_RNA (1)...(19): siRNA sense strand
uauccagccuuucaugaau

SEQ ID NO: 1859082 - RNA, 19 nt, Homo sapiens
  misc_RNA (1)...(19): siRNA sense strand
cccuagacauuaaagauga

SEQ ID NO: 1859083 - RNA, 19 nt, Homo sapiens
  misc_RNA (1)...(19): siRNA sense strand
caaugcugcucgacagaga

SEQ ID NO: 1859084 - RNA, 19 nt, Homo sapiens
  misc_RNA (1)...(19): siRNA sense strand
agacaccucucuacauucu

SEQ ID NO: 1859085 - RNA, 19 nt, Homo sapiens
  misc_RNA (1)...(19): siRNA sense strand
gccaaauuauggucauuag

SEQ ID NO: 1859086 - RNA, 19 nt, Homo sapiens
  misc_RNA (1)...(19): siRNA sense strand
gagacuauccagccuuuca

SEQ ID NO: 1859087 - RNA, 19 nt, Homo sapiens
  misc_RNA (1)...(19): siRNA sense strand
gaagguguguaugcuugga

SEQ ID NO: 1859088 - RNA, 19 nt, Homo sapiens
  misc_RNA (1)...(19): siRNA sense strand
uaaccagagacaagaaauu

SEQ ID NO: 1859089 - RNA, 19 nt, Homo sapiens
  misc_RNA (1)...(19): siRNA sense strand
gagucuauguggccacguu

SEQ ID NO: 1859090 - RNA, 19 nt, Homo sapiens
  misc_RNA (1)...(19): siRNA sense strand
ggaaacaggaaggugugua

SEQ ID NO: 1859091 - RNA, 19 nt, Homo sapiens
  misc_RNA (1)...(19): siRNA sense strand
cugcacggcuggaaugaga

SEQ ID NO: 1859092 - RNA, 19 nt, Homo sapiens
  misc_RNA (1)...(19): siRNA sense strand
gcaauccacaugaucuguu

SEQ ID NO: 1859093 - RNA, 19 nt, Homo sapiens
  misc_RNA (1)...(19): siRNA sense strand
cauaauggcaauccacaug

SEQ ID NO: 1859094 - RNA, 19 nt, Homo sapiens
  misc_RNA (1)...(19): siRNA sense strand
uccacaggcuuaaguauca

SEQ ID NO: 1859095 - RNA, 19 nt, Homo sapiens
  misc_RNA (1)...(19): siRNA sense strand
gucauaauccgaaauaagu

SEQ ID NO: 1859096 - RNA, 19 nt, Homo sapiens
  misc_RNA (1)...(19): siRNA sense strand
ucaccaaacugagcaugug

SEQ ID NO: 1859097 - RNA, 19 nt, Homo sapiens
  misc_RNA (1)...(19): siRNA sense strand
ggauuggcaucuccugucu

SEQ ID NO: 1859098 - RNA, 19 nt, Homo sapiens
  misc_RNA (1)...(19): siRNA sense strand
guugucauaauccgaaaua

SEQ ID NO: 1859099 - RNA, 19 nt, Homo sapiens
  misc_RNA (1)...(19): siRNA sense strand
ccgaggauguguuacgaau

SEQ ID NO: 1859100 - RNA, 19 nt, Homo sapiens
  misc_RNA (1)...(19): siRNA sense strand
acagagauacgaagacaga

SEQ ID NO: 1859101 - RNA, 19 nt, Homo sapiens
  misc_RNA (1)...(19): siRNA sense strand
ugaaagcagcgaagccauu

SEQ ID NO: 1859102 - RNA, 19 nt, Homo sapiens
  misc_RNA (1)...(19): siRNA sense strand
uugagcauauugaagauga

SEQ ID NO: 1859103 - RNA, 19 nt, Homo sapiens
  misc_RNA (1)...(19): siRNA sense strand
gcugaccuccacaggcuua

SEQ ID NO: 1859104 - RNA, 19 nt, Homo sapiens
  misc_RNA (1)...(19): siRNA sense strand
ggacuguacgccucucaug

SEQ ID NO: 1859105 - RNA, 19 nt, Homo sapiens
  misc_RNA (1)...(19): siRNA sense strand
aaauaaguaugggcgacua

SEQ ID NO: 1859106 - RNA, 19 nt, Homo sapiens
  misc_RNA (1)...(19): siRNA sense strand
ccccaaaacuguaagcuuu

SEQ ID NO: 1859107 - RNA, 19 nt, Homo sapiens
  misc_RNA (1)...(19): siRNA sense strand
cgaagccauuguccguaaa

SEQ ID NO: 1859108 - RNA, 19 nt, Homo sapiens
  misc_RNA (1)...(19): siRNA sense strand
cgacuaaccagagacaaga

SEQ ID NO: 1859109 - RNA, 19 nt, Homo sapiens
  misc_RNA (1)...(19): siRNA sense strand
cguuuccugucaacuauaa

SEQ ID NO: 1859110 - RNA, 19 nt, Homo sapiens
  misc_RNA (1)...(19): siRNA sense strand
uuacuaaagcugcaaagga

SEQ ID NO: 1859111 - RNA, 19 nt, Homo sapiens
  misc_RNA (1)...(19): siRNA sense strand
ggcacgaguuaccgacauu

SEQ ID NO: 1859112 - RNA, 19 nt, Homo sapiens
  misc_RNA (1)...(19): siRNA sense strand
ggccacguuucuuggguuu

SEQ ID NO: 1859113 - RNA, 19 nt, Homo sapiens
  misc_RNA (1)...(19): siRNA sense strand
aaccagagacaagaaauuu

SEQ ID NO: 1859114 - RNA, 19 nt, Homo sapiens
  misc_RNA (1)...(19): siRNA sense strand
uguuugagguguuucauag

SEQ ID NO: 1859115 - RNA, 19 nt, Homo sapiens
  misc_RNA (1)...(19): siRNA sense strand
gaugaaauccagcaaaaug

SEQ ID NO: 1859116 - RNA, 19 nt, Homo sapiens
  misc_RNA (1)...(19): siRNA sense strand
gagaaagucagugauuaca

SEQ ID NO: 1859117 - RNA, 19 nt, Homo sapiens
  misc_RNA (1)...(19): siRNA sense strand
uaauggcaauccacaugau

SEQ ID NO: 1859118 - RNA, 19 nt, Homo sapiens
  misc_RNA (1)...(19): siRNA sense strand
cuacaaccacuaccuguuc

SEQ ID NO: 1859119 - RNA, 19 nt, Homo sapiens
  misc_RNA (1)...(19): siRNA sense strand
aaaucggccuggauguuug

SEQ ID NO: 1859120 - RNA, 19 nt, Homo sapiens
  misc_RNA (1)...(19): siRNA sense strand
uuggauaucaggcaaauga

SEQ ID NO: 1859121 - RNA, 19 nt, Homo sapiens
  misc_RNA (1)...(19): siRNA sense strand
auuggcaucuccugucuuu

SEQ ID NO: 1859122 - RNA, 19 nt, Homo sapiens
  misc_RNA (1)...(19): siRNA sense strand
aaagaugaaauccagcaaa

SEQ ID NO: 1859123 - RNA, 19 nt, Homo sapiens
  misc_RNA (1)...(19): siRNA sense strand
gauacgaagacagaauauu

SEQ ID NO: 1859124 - RNA, 19 nt, Homo sapiens
  misc_RNA (1)...(19): siRNA sense strand
aaccgggcauuucagaauu

SEQ ID NO: 1859125 - RNA, 19 nt, Homo sapiens
  misc_RNA (1)...(19): siRNA sense strand
ucaaaucggccuggauguu

SEQ ID NO: 1859126 - RNA, 19 nt, Homo sapiens
  misc_RNA (1)...(19): siRNA sense strand
aaaggauuauugugcaaca

SEQ ID NO: 1859127 - RNA, 19 nt, Homo sapiens
  misc_RNA (1)...(19): siRNA sense strand
uauugaagaugaugaugag

SEQ ID NO: 1859128 - RNA, 19 nt, Homo sapiens
  misc_RNA (1)...(19): siRNA sense strand
cauaaagacugcccaauaa

SEQ ID NO: 1859129 - RNA, 19 nt, Homo sapiens
  misc_RNA (1)...(19): siRNA sense strand
gaaagaaucacaaggauau

SEQ ID NO: 1859130 - RNA, 19 nt, Homo sapiens
  misc_RNA (1)...(19): siRNA sense strand
cggaauaucucgaugcaua

SEQ ID NO: 1859131 - RNA, 19 nt, Homo sapiens
  misc_RNA (1)...(19): siRNA sense strand
gcacaaacaugaaaugacu

SEQ ID NO: 1859132 - RNA, 19 nt, Homo sapiens
  misc_RNA (1)...(19): siRNA sense strand
uaacagccaugcagaaaga

SEQ ID NO: 1859133 - RNA, 19 nt, Homo sapiens
  misc_RNA (1)...(19): siRNA sense strand
gacaauauguuaucagauc

SEQ ID NO: 1859134 - RNA, 19 nt, Homo sapiens
  misc_RNA (1)...(19): siRNA sense strand
caacaagucauccagcaua

SEQ ID NO: 1859135 - RNA, 19 nt, Homo sapiens
  misc_RNA (1)...(19): siRNA sense strand
caagucauccagcauaaua

SEQ ID NO: 1859136 - RNA, 19 nt, Homo sapiens
  misc_RNA (1)...(19): siRNA sense strand
ccaacgagauuccugaaga

SEQ ID NO: 1859137 - RNA, 19 nt, Homo sapiens
  misc_RNA (1)...(19): siRNA sense strand
gcagaaagaaucacaagga

SEQ ID NO: 1859138 - RNA, 19 nt, Homo sapiens
  misc_RNA (1)...(19): siRNA sense strand
caacgagauuccugaagaa

SEQ ID NO: 1859139 - RNA, 19 nt, Homo sapiens
  misc_RNA (1)...(19): siRNA sense strand
acaugcagcuucagaauga

SEQ ID NO: 1859140 - RNA, 19 nt, Homo sapiens
  misc_RNA (1)...(19): siRNA sense strand
ucagugaacuccagcauca

SEQ ID NO: 1859141 - RNA, 19 nt, Homo sapiens
  misc_RNA (1)...(19): siRNA sense strand
agaaugaagugucuauguu

SEQ ID NO: 1859142 - RNA, 19 nt, Homo sapiens
  misc_RNA (1)...(19): siRNA sense strand
gcacagguuucaccagcaa

SEQ ID NO: 1859143 - RNA, 19 nt, Homo sapiens
  misc_RNA (1)...(19): siRNA sense strand
gaucgaagguccaaaucuc

SEQ ID NO: 1859144 - RNA, 19 nt, Homo sapiens
  misc_RNA (1)...(19): siRNA sense strand
gaacucacccagacaaaca

SEQ ID NO: 1859145 - RNA, 19 nt, Homo sapiens
  misc_RNA (1)...(19): siRNA sense strand
gagagcagcaagcggaaua

SEQ ID NO: 1859146 - RNA, 19 nt, Homo sapiens
  misc_RNA (1)...(19): siRNA sense strand
gaaugaagugucuauguug

SEQ ID NO: 1859147 - RNA, 19 nt, Homo sapiens
  misc_RNA (1)...(19): siRNA sense strand
cagacaauauguuaucaga

SEQ ID NO: 1859148 - RNA, 19 nt, Homo sapiens
  misc_RNA (1)...(19): siRNA sense strand
acauaaagacugcccaaua

SEQ ID NO: 1859149 - RNA, 19 nt, Homo sapiens
  misc_RNA (1)...(19): siRNA sense strand
agacaaacaugcagcuuca

SEQ ID NO: 1859150 - RNA, 19 nt, Homo sapiens
  misc_RNA (1)...(19): siRNA sense strand
gaagaacucacccagacaa

SEQ ID NO: 1859151 - RNA, 19 nt, Homo sapiens
  misc_RNA (1)...(19): siRNA sense strand
ucacaaggauaucuaaguc

SEQ ID NO: 1859152 - RNA, 19 nt, Homo sapiens
  misc_RNA (1)...(19): siRNA sense strand
cauaauaccaucacuacuu

SEQ ID NO: 1859153 - RNA, 19 nt, Homo sapiens
  misc_RNA (1)...(19): siRNA sense strand
ugaagugucuauguugaaa

SEQ ID NO: 1859154 - RNA, 19 nt, Homo sapiens
  misc_RNA (1)...(19): siRNA sense strand
ggaauaucucgaugcauaa

SEQ ID NO: 1859155 - RNA, 19 nt, Homo sapiens
  misc_RNA (1)...(19): siRNA sense strand
gcucaccacucacagaaca

SEQ ID NO: 1859156 - RNA, 19 nt, Homo sapiens
  misc_RNA (1)...(19): siRNA sense strand
cagaaagaaucacaaggau

SEQ ID NO: 1859157 - RNA, 19 nt, Homo sapiens
  misc_RNA (1)...(19): siRNA sense strand
caccagaccucgccacauc

SEQ ID NO: 1859158 - RNA, 19 nt, Homo sapiens
  misc_RNA (1)...(19): siRNA sense strand
ucacagaacagaccugaau

SEQ ID NO: 1859159 - RNA, 19 nt, Homo sapiens
  misc_RNA (1)...(19): siRNA sense strand
cgagauuccugaagaacug

SEQ ID NO: 1859160 - RNA, 19 nt, Homo sapiens
  misc_RNA (1)...(19): siRNA sense strand
gcccggaacucaccagcuu

SEQ ID NO: 1859161 - RNA, 19 nt, Homo sapiens
  misc_RNA (1)...(19): siRNA sense strand
gaaucacaaggauaucuaa

SEQ ID NO: 1859162 - RNA, 19 nt, Homo sapiens
  misc_RNA (1)...(19): siRNA sense strand
ggacacaugauggagauga

SEQ ID NO: 1859163 - RNA, 19 nt, Homo sapiens
  misc_RNA (1)...(19): siRNA sense strand
aaagaaagcagaagaacuc

SEQ ID NO: 1859164 - RNA, 19 nt, Homo sapiens
  misc_RNA (1)...(19): siRNA sense strand
gcagccaacccagacaaua

SEQ ID NO: 1859165 - RNA, 19 nt, Homo sapiens
  misc_RNA (1)...(19): siRNA sense strand
acaccaacguugugauuca

SEQ ID NO: 1859166 - RNA, 19 nt, Homo sapiens
  misc_RNA (1)...(19): siRNA sense strand
ucagccagcucaccacuca

SEQ ID NO: 1859167 - RNA, 19 nt, Homo sapiens
  misc_RNA (1)...(19): siRNA sense strand
uaucuucucugcuacaucu

SEQ ID NO: 1859168 - RNA, 19 nt, Homo sapiens
  misc_RNA (1)...(19): siRNA sense strand
guugaaggcugcauugacu

SEQ ID NO: 1859169 - RNA, 19 nt, Homo sapiens
  misc_RNA (1)...(19): siRNA sense strand
agaaagaaucacaaggaua

SEQ ID NO: 1859170 - RNA, 19 nt, Homo sapiens
  misc_RNA (1)...(19): siRNA sense strand
aaugaagugucuauguuga

SEQ ID NO: 1859171 - RNA, 19 nt, Homo sapiens
  misc_RNA (1)...(19): siRNA sense strand
ccacaucaccacucccauu

SEQ ID NO: 1859172 - RNA, 19 nt, Homo sapiens
  misc_RNA (1)...(19): siRNA sense strand
uaaagacugcccaauaaca

SEQ ID NO: 1859173 - RNA, 19 nt, Homo sapiens
  misc_RNA (1)...(19): siRNA sense strand
gacagacaauauguuauca

SEQ ID NO: 1859174 - RNA, 19 nt, Homo sapiens
  misc_RNA (1)...(19): siRNA sense strand
auaauaccaucacuacuuc

SEQ ID NO: 1859175 - RNA, 19 nt, Homo sapiens
  misc_RNA (1)...(19): siRNA sense strand
ccaauggagcgacaaaugu

SEQ ID NO: 1859176 - RNA, 19 nt, Homo sapiens
  misc_RNA (1)...(19): siRNA sense strand
caauaacagccaugcagaa

SEQ ID NO: 1859177 - RNA, 19 nt, Homo sapiens
  misc_RNA (1)...(19): siRNA sense strand
aacaagucauccagcauaa

SEQ ID NO: 1859178 - RNA, 19 nt, Homo sapiens
  misc_RNA (1)...(19): siRNA sense strand
ucaggaaggcucaggaaga

SEQ ID NO: 1859179 - RNA, 19 nt, Homo sapiens
  misc_RNA (1)...(19): siRNA sense strand
caaacaugcagcuucagaa

SEQ ID NO: 1859180 - RNA, 19 nt, Homo sapiens
  misc_RNA (1)...(19): siRNA sense strand
uggcccagcugaaacaguu

SEQ ID NO: 1859181 - RNA, 19 nt, Homo sapiens
  misc_RNA (1)...(19): siRNA sense strand
ugacaccaacguugugauu

SEQ ID NO: 1859182 - RNA, 19 nt, Homo sapiens
  misc_RNA (1)...(19): siRNA sense strand
cagcauaauaccaucacua

SEQ ID NO: 1859183 - RNA, 19 nt, Homo sapiens
  misc_RNA (1)...(19): siRNA sense strand
ggauaucuaaguccagaga

SEQ ID NO: 1859184 - RNA, 19 nt, Homo sapiens
  misc_RNA (1)...(19): siRNA sense strand
ugggugaugucauuggaaa

SEQ ID NO: 1859185 - RNA, 19 nt, Homo sapiens
  misc_RNA (1)...(19): siRNA sense strand
gcagaaccauccacaucac

SEQ ID NO: 1859186 - RNA, 19 nt, Homo sapiens
  misc_RNA (1)...(19): siRNA sense strand
gccaauggagcgacaaaug

SEQ ID NO: 1859187 - RNA, 19 nt, Homo sapiens
  misc_RNA (1)...(19): siRNA sense strand
cagaaugaagugucuaugu

SEQ ID NO: 1859188 - RNA, 19 nt, Homo sapiens
  misc_RNA (1)...(19): siRNA sense strand
cagcagaaccauccacauc

SEQ ID NO: 1859189 - RNA, 19 nt, Homo sapiens
  misc_RNA (1)...(19): siRNA sense strand
caggaaggcucaggaagag

SEQ ID NO: 1859190 - RNA, 19 nt, Homo sapiens
  misc_RNA (1)...(19): siRNA sense strand
ccagcucugucaucacuca

SEQ ID NO: 1859191 - RNA, 19 nt, Homo sapiens
  misc_RNA (1)...(19): siRNA sense strand
agacagacaauauguuauc

SEQ ID NO: 1859192 - RNA, 19 nt, Homo sapiens
  misc_RNA (1)...(19): siRNA sense strand
aaacaugcagcuucagaau

SEQ ID NO: 1859193 - RNA, 19 nt, Homo sapiens
  misc_RNA (1)...(19): siRNA sense strand
ggaaaagaaagcagaagaa

SEQ ID NO: 1859194 - RNA, 19 nt, Homo sapiens
  misc_RNA (1)...(19): siRNA sense strand
ccacccugcugccauguca

SEQ ID NO: 1859195 - RNA, 19 nt, Homo sapiens
  misc_RNA (1)...(19): siRNA sense strand
gaauaucucgaugcauaau

SEQ ID NO: 1859196 - RNA, 19 nt, Homo sapiens
  misc_RNA (1)...(19): siRNA sense strand
uaucuaaguccagagagua

SEQ ID NO: 1859197 - RNA, 19 nt, Homo sapiens
  misc_RNA (1)...(19): siRNA sense strand
ccacucccauucccaccuu

SEQ ID NO: 1859198 - RNA, 19 nt, Homo sapiens
  misc_RNA (1)...(19): siRNA sense strand
cauaggcacaaacaugaaa

SEQ ID NO: 1859199 - RNA, 19 nt, Homo sapiens
  misc_RNA (1)...(19): siRNA sense strand
gcagcaagcggaauaucuc

SEQ ID NO: 1859200 - RNA, 19 nt, Homo sapiens
  misc_RNA (1)...(19): siRNA sense strand
gcaagcggaauaucucgau

SEQ ID NO: 1859201 - RNA, 19 nt, Homo sapiens
  misc_RNA (1)...(19): siRNA sense strand
gcacaccggcaaccaagca

SEQ ID NO: 1859202 - RNA, 19 nt, Homo sapiens
  misc_RNA (1)...(19): siRNA sense strand
ggaacucaccagcuuagca

SEQ ID NO: 1859203 - RNA, 19 nt, Homo sapiens
  misc_RNA (1)...(19): siRNA sense strand
gucccaggcucucuaucuu

SEQ ID NO: 1859204 - RNA, 19 nt, Homo sapiens
  misc_RNA (1)...(19): siRNA sense strand
aauaacagccaugcagaaa

SEQ ID NO: 1859205 - RNA, 19 nt, Homo sapiens
  misc_RNA (1)...(19): siRNA sense strand
gagguugaaggcugcauug

SEQ ID NO: 1859206 - RNA, 19 nt, Homo sapiens
  misc_RNA (1)...(19): siRNA sense strand
gacacaugauggagaugau

SEQ ID NO: 1859207 - RNA, 19 nt, Homo sapiens
  misc_RNA (1)...(19): siRNA sense strand
guccagcucugucaucacu

SEQ ID NO: 1859208 - RNA, 19 nt, Homo sapiens
  misc_RNA (1)...(19): siRNA sense strand
ugagguggcccagcugaaa

SEQ ID NO: 1859209 - RNA, 19 nt, Homo sapiens
  misc_RNA (1)...(19): siRNA sense strand
gaucuuccgccgucuugau

SEQ ID NO: 1859210 - RNA, 19 nt, Homo sapiens
  misc_RNA (1)...(19): siRNA sense strand
ugucaaaugggaacaugaa

SEQ ID NO: 1859211 - RNA, 19 nt, Homo sapiens
  misc_RNA (1)...(19): siRNA sense strand
agaaucacaaggauaucua

SEQ ID NO: 1859212 - RNA, 19 nt, Homo sapiens
  misc_RNA (1)...(19): siRNA sense strand
cagcucaccacucacagaa

SEQ ID NO: 1859213 - RNA, 19 nt, Homo sapiens
  misc_RNA (1)...(19): siRNA sense strand
ucaaaugggaacaugaaca

SEQ ID NO: 1859214 - RNA, 19 nt, Homo sapiens
  misc_RNA (1)...(19): siRNA sense strand
acaaacaugcagcuucaga

SEQ ID NO: 1859215 - RNA, 19 nt, Homo sapiens
  misc_RNA (1)...(19): siRNA sense strand
gaaggucugggugauguca

SEQ ID NO: 1859216 - RNA, 19 nt, Homo sapiens
  misc_RNA (1)...(19): siRNA sense strand
gcagacagaagaggaaggu

SEQ ID NO: 1859217 - RNA, 19 nt, Homo sapiens
  misc_RNA (1)...(19): siRNA sense strand
gcaacaagucauccagcau

SEQ ID NO: 1859218 - RNA, 19 nt, Homo sapiens
  misc_RNA (1)...(19): siRNA sense strand
caggagaggccgucugucu

SEQ ID NO: 1859219 - RNA, 19 nt, Homo sapiens
  misc_RNA (1)...(19): siRNA sense strand
caaaugggaacaugaacac

SEQ ID NO: 1859220 - RNA, 19 nt, Homo sapiens
  misc_RNA (1)...(19): siRNA sense strand
aggaaggucugggugaugu

SEQ ID NO: 1859221 - RNA, 19 nt, Homo sapiens
  misc_RNA (1)...(19): siRNA sense strand
ucccagcgcuucccaacag

SEQ ID NO: 1859222 - RNA, 19 nt, Homo sapiens
  misc_RNA (1)...(19): siRNA sense strand
caaccaugacaccaacguu

SEQ ID NO: 1859223 - RNA, 19 nt, Homo sapiens
  misc_RNA (1)...(19): siRNA sense strand
gaggaaggucugggugaug

SEQ ID NO: 1859224 - RNA, 19 nt, Homo sapiens
  misc_RNA (1)...(19): siRNA sense strand
ugggacacaugauggagau

SEQ ID NO: 1859225 - RNA, 19 nt, Homo sapiens
  misc_RNA (1)...(19): siRNA sense strand
ggucagcgaggugguagga

SEQ ID NO: 1859226 - RNA, 19 nt, Homo sapiens
  misc_RNA (1)...(19): siRNA sense strand
guucaggaaggcucaggaa

SEQ ID NO: 1859227 - RNA, 19 nt, Homo sapiens
  misc_RNA (1)...(19): siRNA sense strand
cagccaacccagacaauac

SEQ ID NO: 1859228 - RNA, 19 nt, Homo sapiens
  misc_RNA (1)...(19): siRNA sense strand
cauaaagacugcccaauaa

SEQ ID NO: 1859229 - RNA, 19 nt, Homo sapiens
  misc_RNA (1)...(19): siRNA sense strand
gaaagaaucacaaggauau

SEQ ID NO: 1859230 - RNA, 19 nt, Homo sapiens
  misc_RNA (1)...(19): siRNA sense strand
cggaauaucucgaugcaua

SEQ ID NO: 1859231 - RNA, 19 nt, Homo sapiens
  misc_RNA (1)...(19): siRNA sense strand
gcacaaacaugaaaugacu

SEQ ID NO: 1859232 - RNA, 19 nt, Homo sapiens
  misc_RNA (1)...(19): siRNA sense strand
uaacagccaugcagaaaga

SEQ ID NO: 1859233 - RNA, 19 nt, Homo sapiens
  misc_RNA (1)...(19): siRNA sense strand
gacaauauguuaucagauc

SEQ ID NO: 1859234 - RNA, 19 nt, Homo sapiens
  misc_RNA (1)...(19): siRNA sense strand
caacaagucauccagcaua

SEQ ID NO: 1859235 - RNA, 19 nt, Homo sapiens
  misc_RNA (1)...(19): siRNA sense strand
caagucauccagcauaaua

SEQ ID NO: 1859236 - RNA, 19 nt, Homo sapiens
  misc_RNA (1)...(19): siRNA sense strand
ccaacgagauuccugaaga

SEQ ID NO: 1859237 - RNA, 19 nt, Homo sapiens
  misc_RNA (1)...(19): siRNA sense strand
gcagaaagaaucacaagga

SEQ ID NO: 1859238 - RNA, 19 nt, Homo sapiens
  misc_RNA (1)...(19): siRNA sense strand
caacgagauuccugaagaa

SEQ ID NO: 1859239 - RNA, 19 nt, Homo sapiens
  misc_RNA (1)...(19): siRNA sense strand
acaugcagcuucagaauga

SEQ ID NO: 1859240 - RNA, 19 nt, Homo sapiens
  misc_RNA (1)...(19): siRNA sense strand
ucagugaacuccagcauca

SEQ ID NO: 1859241 - RNA, 19 nt, Homo sapiens
  misc_RNA (1)...(19): siRNA sense strand
agaaugaagugucuauguu

SEQ ID NO: 1859242 - RNA, 19 nt, Homo sapiens
  misc_RNA (1)...(19): siRNA sense strand
gcacagguuucaccagcaa

SEQ ID NO: 1859243 - RNA, 19 nt, Homo sapiens
  misc_RNA (1)...(19): siRNA sense strand
gaucgaagguccaaaucuc

SEQ ID NO: 1859244 - RNA, 19 nt, Homo sapiens
  misc_RNA (1)...(19): siRNA sense strand
gaacucacccagacaaaca

SEQ ID NO: 1859245 - RNA, 19 nt, Homo sapiens
  misc_RNA (1)...(19): siRNA sense strand
gagagcagcaagcggaaua

SEQ ID NO: 1859246 - RNA, 19 nt, Homo sapiens
  misc_RNA (1)...(19): siRNA sense strand
gaaugaagugucuauguug

SEQ ID NO: 1859247 - RNA, 19 nt, Homo sapiens
  misc_RNA (1)...(19): siRNA sense strand
cagacaauauguuaucaga

SEQ ID NO: 1859248 - RNA, 19 nt, Homo sapiens
  misc_RNA (1)...(19): siRNA sense strand
acauaaagacugcccaaua

SEQ ID NO: 1859249 - RNA, 19 nt, Homo sapiens
  misc_RNA (1)...(19): siRNA sense strand
agacaaacaugcagcuuca

SEQ ID NO: 1859250 - RNA, 19 nt, Homo sapiens
  misc_RNA (1)...(19): siRNA sense strand
gaagaacucacccagacaa

SEQ ID NO: 1859251 - RNA, 19 nt, Homo sapiens
  misc_RNA (1)...(19): siRNA sense strand
ucacaaggauaucuaaguc

SEQ ID NO: 1859252 - RNA, 19 nt, Homo sapiens
  misc_RNA (1)...(19): siRNA sense strand
cauaauaccaucacuacuu

SEQ ID NO: 1859253 - RNA, 19 nt, Homo sapiens
  misc_RNA (1)...(19): siRNA sense strand
uaugaggaauccaagauga

SEQ ID NO: 1859254 - RNA, 19 nt, Homo sapiens
  misc_RNA (1)...(19): siRNA sense strand
ugaagugucuauguugaaa

SEQ ID NO: 1859255 - RNA, 19 nt, Homo sapiens
  misc_RNA (1)...(19): siRNA sense strand
ggaauaucucgaugcauaa

SEQ ID NO: 1859256 - RNA, 19 nt, Homo sapiens
  misc_RNA (1)...(19): siRNA sense strand
gcucaccacucacagaaca

SEQ ID NO: 1859257 - RNA, 19 nt, Homo sapiens
  misc_RNA (1)...(19): siRNA sense strand
cagaaagaaucacaaggau

SEQ ID NO: 1859258 - RNA, 19 nt, Homo sapiens
  misc_RNA (1)...(19): siRNA sense strand
caccagaccucgccacauc

SEQ ID NO: 1859259 - RNA, 19 nt, Homo sapiens
  misc_RNA (1)...(19): siRNA sense strand
ucacagaacagaccugaau

SEQ ID NO: 1859260 - RNA, 19 nt, Homo sapiens
  misc_RNA (1)...(19): siRNA sense strand
cgagauuccugaagaacug

SEQ ID NO: 1859261 - RNA, 19 nt, Homo sapiens
  misc_RNA (1)...(19): siRNA sense strand
gcccggaacucaccagcuu

SEQ ID NO: 1859262 - RNA, 19 nt, Homo sapiens
  misc_RNA (1)...(19): siRNA sense strand
gaaucacaaggauaucuaa

SEQ ID NO: 1859263 - RNA, 19 nt, Homo sapiens
  misc_RNA (1)...(19): siRNA sense strand
ggacacaugauggagauga

SEQ ID NO: 1859264 - RNA, 19 nt, Homo sapiens
  misc_RNA (1)...(19): siRNA sense strand
aaagaaagcagaagaacuc

SEQ ID NO: 1859265 - RNA, 19 nt, Homo sapiens
  misc_RNA (1)...(19): siRNA sense strand
gcagccaacccagacaaua

SEQ ID NO: 1859266 - RNA, 19 nt, Homo sapiens
  misc_RNA (1)...(19): siRNA sense strand
acaccaacguugugauuca

SEQ ID NO: 1859267 - RNA, 19 nt, Homo sapiens
  misc_RNA (1)...(19): siRNA sense strand
ucagccagcucaccacuca

SEQ ID NO: 1859268 - RNA, 19 nt, Homo sapiens
  misc_RNA (1)...(19): siRNA sense strand
uaucuucucugcuacaucu

SEQ ID NO: 1859269 - RNA, 19 nt, Homo sapiens
  misc_RNA (1)...(19): siRNA sense strand
guugaaggcugcauugacu

SEQ ID NO: 1859270 - RNA, 19 nt, Homo sapiens
  misc_RNA (1)...(19): siRNA sense strand
agaaagaaucacaaggaua

SEQ ID NO: 1859271 - RNA, 19 nt, Homo sapiens
  misc_RNA (1)...(19): siRNA sense strand
aaugaagugucuauguuga

SEQ ID NO: 1859272 - RNA, 19 nt, Homo sapiens
  misc_RNA (1)...(19): siRNA sense strand
ccacaucaccacucccauu

SEQ ID NO: 1859273 - RNA, 19 nt, Homo sapiens
  misc_RNA (1)...(19): siRNA sense strand
uaaagacugcccaauaaca

SEQ ID NO: 1859274 - RNA, 19 nt, Homo sapiens
  misc_RNA (1)...(19): siRNA sense strand
gacagacaauauguuauca

SEQ ID NO: 1859275 - RNA, 19 nt, Homo sapiens
  misc_RNA (1)...(19): siRNA sense strand
auaauaccaucacuacuuc

SEQ ID NO: 1859276 - RNA, 19 nt, Homo sapiens
  misc_RNA (1)...(19): siRNA sense strand
ccaauggagcgacaaaugu

SEQ ID NO: 1859277 - RNA, 19 nt, Homo sapiens
  misc_RNA (1)...(19): siRNA sense strand
ucaggaaggcucaggaaga

SEQ ID NO: 1859278 - RNA, 19 nt, Homo sapiens
  misc_RNA (1)...(19): siRNA sense strand
aacaagucauccagcauaa

SEQ ID NO: 1859279 - RNA, 19 nt, Homo sapiens
  misc_RNA (1)...(19): siRNA sense strand
caauaacagccaugcagaa

SEQ ID NO: 1859280 - RNA, 19 nt, Homo sapiens
  misc_RNA (1)...(19): siRNA sense strand
caaacaugcagcuucagaa

SEQ ID NO: 1859281 - RNA, 19 nt, Homo sapiens
  misc_RNA (1)...(19): siRNA sense strand
uggcccagcugaaacaguu

SEQ ID NO: 1859282 - RNA, 19 nt, Homo sapiens
  misc_RNA (1)...(19): siRNA sense strand
ugacaccaacguugugauu

SEQ ID NO: 1859283 - RNA, 19 nt, Homo sapiens
  misc_RNA (1)...(19): siRNA sense strand
cagcauaauaccaucacua

SEQ ID NO: 1859284 - RNA, 19 nt, Homo sapiens
  misc_RNA (1)...(19): siRNA sense strand
ggauaucuaaguccagaga

SEQ ID NO: 1859285 - RNA, 19 nt, Homo sapiens
  misc_RNA (1)...(19): siRNA sense strand
ugggugaugucauuggaaa

SEQ ID NO: 1859286 - RNA, 19 nt, Homo sapiens
  misc_RNA (1)...(19): siRNA sense strand
gcagaaccauccacaucac

SEQ ID NO: 1859287 - RNA, 19 nt, Homo sapiens
  misc_RNA (1)...(19): siRNA sense strand
gccaauggagcgacaaaug

SEQ ID NO: 1859288 - RNA, 19 nt, Homo sapiens
  misc_RNA (1)...(19): siRNA sense strand
cagaaugaagugucuaugu

SEQ ID NO: 1859289 - RNA, 19 nt, Homo sapiens
  misc_RNA (1)...(19): siRNA sense strand
caggaaggcucaggaagag

SEQ ID NO: 1859290 - RNA, 19 nt, Homo sapiens
  misc_RNA (1)...(19): siRNA sense strand
cagcagaaccauccacauc

SEQ ID NO: 1859291 - RNA, 19 nt, Homo sapiens
  misc_RNA (1)...(19): siRNA sense strand
agacagacaauauguuauc

SEQ ID NO: 1859292 - RNA, 19 nt, Homo sapiens
  misc_RNA (1)...(19): siRNA sense strand
gaggaauccaagaugaauu

SEQ ID NO: 1859293 - RNA, 19 nt, Homo sapiens
  misc_RNA (1)...(19): siRNA sense strand
aaacaugcagcuucagaau

SEQ ID NO: 1859294 - RNA, 19 nt, Homo sapiens
  misc_RNA (1)...(19): siRNA sense strand
ggaaaagaaagcagaagaa

SEQ ID NO: 1859295 - RNA, 19 nt, Homo sapiens
  misc_RNA (1)...(19): siRNA sense strand
ccacccugcugccauguca

SEQ ID NO: 1859296 - RNA, 19 nt, Homo sapiens
  misc_RNA (1)...(19): siRNA sense strand
ccagcucugucaucacuca

SEQ ID NO: 1859297 - RNA, 19 nt, Homo sapiens
  misc_RNA (1)...(19): siRNA sense strand
ccacucccauucccaccuu

SEQ ID NO: 1859298 - RNA, 19 nt, Homo sapiens
  misc_RNA (1)...(19): siRNA sense strand
aggaauccaagaugaauuu

SEQ ID NO: 1859299 - RNA, 19 nt, Homo sapiens
  misc_RNA (1)...(19): siRNA sense strand
gaauaucucgaugcauaau

SEQ ID NO: 1859300 - RNA, 19 nt, Homo sapiens
  misc_RNA (1)...(19): siRNA sense strand
uaucuaaguccagagagua

SEQ ID NO: 1859301 - RNA, 19 nt, Homo sapiens
  misc_RNA (1)...(19): siRNA sense strand
ggaacucaccagcuuagca

SEQ ID NO: 1859302 - RNA, 19 nt, Homo sapiens
  misc_RNA (1)...(19): siRNA sense strand
gcagcaagcggaauaucuc

SEQ ID NO: 1859303 - RNA, 19 nt, Homo sapiens
  misc_RNA (1)...(19): siRNA sense strand
cauaggcacaaacaugaaa

SEQ ID NO: 1859304 - RNA, 19 nt, Homo sapiens
  misc_RNA (1)...(19): siRNA sense strand
gcaagcggaauaucucgau

SEQ ID NO: 1859305 - RNA, 19 nt, Homo sapiens
  misc_RNA (1)...(19): siRNA sense strand
gcacaccggcaaccaagca

SEQ ID NO: 1859306 - RNA, 19 nt, Homo sapiens
  misc_RNA (1)...(19): siRNA sense strand
gucccaggcucucuaucuu

SEQ ID NO: 1859307 - RNA, 19 nt, Homo sapiens
  misc_RNA (1)...(19): siRNA sense strand
aauaacagccaugcagaaa

SEQ ID NO: 1859308 - RNA, 19 nt, Homo sapiens
  misc_RNA (1)...(19): siRNA sense strand
gagguugaaggcugcauug

SEQ ID NO: 1859309 - RNA, 19 nt, Homo sapiens
  misc_RNA (1)...(19): siRNA sense strand
gacacaugauggagaugau

SEQ ID NO: 1859310 - RNA, 19 nt, Homo sapiens
  misc_RNA (1)...(19): siRNA sense strand
guccagcucugucaucacu

SEQ ID NO: 1859311 - RNA, 19 nt, Homo sapiens
  misc_RNA (1)...(19): siRNA sense strand
ugagguggcccagcugaaa

SEQ ID NO: 1859312 - RNA, 19 nt, Homo sapiens
  misc_RNA (1)...(19): siRNA sense strand
gaucuuccgccgucuugau

SEQ ID NO: 1859313 - RNA, 19 nt, Homo sapiens
  misc_RNA (1)...(19): siRNA sense strand
ugucaaaugggaacaugaa

SEQ ID NO: 1859314 - RNA, 19 nt, Homo sapiens
  misc_RNA (1)...(19): siRNA sense strand
agaaucacaaggauaucua

SEQ ID NO: 1859315 - RNA, 19 nt, Homo sapiens
  misc_RNA (1)...(19): siRNA sense strand
cagcucaccacucacagaa

SEQ ID NO: 1859316 - RNA, 19 nt, Homo sapiens
  misc_RNA (1)...(19): siRNA sense strand
ucaaaugggaacaugaaca

SEQ ID NO: 1859317 - RNA, 19 nt, Homo sapiens
  misc_RNA (1)...(19): siRNA sense strand
acaaacaugcagcuucaga

SEQ ID NO: 1859318 - RNA, 19 nt, Homo sapiens
  misc_RNA (1)...(19): siRNA sense strand
gaaggucugggugauguca

SEQ ID NO: 1859319 - RNA, 19 nt, Homo sapiens
  misc_RNA (1)...(19): siRNA sense strand
gcagacagaagaggaaggu

SEQ ID NO: 1859320 - RNA, 19 nt, Homo sapiens
  misc_RNA (1)...(19): siRNA sense strand
gcaacaagucauccagcau

SEQ ID NO: 1859321 - RNA, 19 nt, Homo sapiens
  misc_RNA (1)...(19): siRNA sense strand
caggagaggccgucugucu

SEQ ID NO: 1859322 - RNA, 19 nt, Homo sapiens
  misc_RNA (1)...(19): siRNA sense strand
caaaugggaacaugaacac

SEQ ID NO: 1859323 - RNA, 19 nt, Homo sapiens
  misc_RNA (1)...(19): siRNA sense strand
aggaaggucugggugaugu

SEQ ID NO: 1859324 - RNA, 19 nt, Homo sapiens
  misc_RNA (1)...(19): siRNA sense strand
ucccagcgcuucccaacag

SEQ ID NO: 1859325 - RNA, 19 nt, Homo sapiens
  misc_RNA (1)...(19): siRNA sense strand
caaccaugacaccaacguu

SEQ ID NO: 1859326 - RNA, 19 nt, Homo sapiens
  misc_RNA (1)...(19): siRNA sense strand
ggaauccaagaugaauuug

SEQ ID NO: 1859327 - RNA, 19 nt, Homo sapiens
  misc_RNA (1)...(19): siRNA sense strand
gaggaaggucugggugaug

SEQ ID NO: 1859328 - RNA, 19 nt, Homo sapiens
  misc_RNA (1)...(19): siRNA sense strand
caagaaagcccgucuggaa

SEQ ID NO: 1859329 - RNA, 19 nt, Homo sapiens
  misc_RNA (1)...(19): siRNA sense strand
gaaagcccgucuggaagaa

SEQ ID NO: 1859330 - RNA, 19 nt, Homo sapiens
  misc_RNA (1)...(19): siRNA sense strand
caaagucagccgcaaacga

SEQ ID NO: 1859331 - RNA, 19 nt, Homo sapiens
  misc_RNA (1)...(19): siRNA sense strand
agaaagcccgucuggaaga

SEQ ID NO: 1859332 - RNA, 19 nt, Homo sapiens
  misc_RNA (1)...(19): siRNA sense strand
gaggcacagcgcaucauga

SEQ ID NO: 1859333 - RNA, 19 nt, Homo sapiens
  misc_RNA (1)...(19): siRNA sense strand
caggaaacauugucuuuac

SEQ ID NO: 1859334 - RNA, 19 nt, Homo sapiens
  misc_RNA (1)...(19): siRNA sense strand
ucaggaaacauugucuuua

SEQ ID NO: 1859335 - RNA, 19 nt, Homo sapiens
  misc_RNA (1)...(19): siRNA sense strand
caccagaaccggaacauuc

SEQ ID NO: 1859336 - RNA, 19 nt, Homo sapiens
  misc_RNA (1)...(19): siRNA sense strand
gccggcaaacguccaaaua

SEQ ID NO: 1859337 - RNA, 19 nt, Homo sapiens
  misc_RNA (1)...(19): siRNA sense strand
cagcuggucaggaaacauu

SEQ ID NO: 1859338 - RNA, 19 nt, Homo sapiens
  misc_RNA (1)...(19): siRNA sense strand
gucaggaaacauugucuuu

SEQ ID NO: 1859339 - RNA, 19 nt, Homo sapiens
  misc_RNA (1)...(19): siRNA sense strand
cccgaguucugcaaccaaa

SEQ ID NO: 1859340 - RNA, 19 nt, Homo sapiens
  misc_RNA (1)...(19): siRNA sense strand
aggaaacauugucuuuaca

SEQ ID NO: 1859341 - RNA, 19 nt, Homo sapiens
  misc_RNA (1)...(19): siRNA sense strand
ggucaggaaacauugucuu

SEQ ID NO: 1859342 - RNA, 19 nt, Homo sapiens
  misc_RNA (1)...(19): siRNA sense strand
gaagccggcaaacguccaa

SEQ ID NO: 1859343 - RNA, 19 nt, Homo sapiens
  misc_RNA (1)...(19): siRNA sense strand
cggcaaacguccaaauacc

SEQ ID NO: 1859344 - RNA, 19 nt, Homo sapiens
  misc_RNA (1)...(19): siRNA sense strand
ggacuggaguauacuguug

SEQ ID NO: 1859345 - RNA, 19 nt, Homo sapiens
  misc_RNA (1)...(19): siRNA sense strand
ggaguauacuguugagaga

SEQ ID NO: 1859346 - RNA, 19 nt, Homo sapiens
  misc_RNA (1)...(19): siRNA sense strand
ccaauuaguugaagguguu

SEQ ID NO: 1859347 - RNA, 19 nt, Homo sapiens
  misc_RNA (1)...(19): siRNA sense strand
ccaaagagguucccaagac

SEQ ID NO: 1859348 - RNA, 19 nt, Homo sapiens
  misc_RNA (1)...(19): siRNA sense strand
ccacaagacuaacauaaaa

SEQ ID NO: 1859349 - RNA, 19 nt, Homo sapiens
  misc_RNA (1)...(19): siRNA sense strand
caaagagguucccaagaca

SEQ ID NO: 1859350 - RNA, 19 nt, Homo sapiens
  misc_RNA (1)...(19): siRNA sense strand
gaacaaaaggcucuccaua

SEQ ID NO: 1859351 - RNA, 19 nt, Homo sapiens
  misc_RNA (1)...(19): siRNA sense strand
uugaagguguuaagagaaa

SEQ ID NO: 1859352 - RNA, 19 nt, Homo sapiens
  misc_RNA (1)...(19): siRNA sense strand
gugaagauguccaggaaac

SEQ ID NO: 1859353 - RNA, 19 nt, Homo sapiens
  misc_RNA (1)...(19): siRNA sense strand
cagguggacuggaguauac

SEQ ID NO: 1859354 - RNA, 19 nt, Homo sapiens
  misc_RNA (1)...(19): siRNA sense strand
caacaaccacccaccaaca

SEQ ID NO: 1859355 - RNA, 19 nt, Homo sapiens
  misc_RNA (1)...(19): siRNA sense strand
ggaauucuaccacaagacu

SEQ ID NO: 1859356 - RNA, 19 nt, Homo sapiens
  misc_RNA (1)...(19): siRNA sense strand
agacaacucggaagggaaa

SEQ ID NO: 1859357 - RNA, 19 nt, Homo sapiens
  misc_RNA (1)...(19): siRNA sense strand
uggugaagauguccaggaa

SEQ ID NO: 1859358 - RNA, 19 nt, Homo sapiens
  misc_RNA (1)...(19): siRNA sense strand
aaagggacccaucgaggaa

SEQ ID NO: 1859359 - RNA, 19 nt, Homo sapiens
  misc_RNA (1)...(19): siRNA sense strand
aguugaagguguuaagaga

SEQ ID NO: 1859360 - RNA, 19 nt, Homo sapiens
  misc_RNA (1)...(19): siRNA sense strand
uaccacaagacuaacauaa

SEQ ID NO: 1859361 - RNA, 19 nt, Homo sapiens
  misc_RNA (1)...(19): siRNA sense strand
ggccucauccaauuaguug

SEQ ID NO: 1859362 - RNA, 19 nt, Homo sapiens
  misc_RNA (1)...(19): siRNA sense strand
gaagauguccaggaaacca

SEQ ID NO: 1859363 - RNA, 19 nt, Homo sapiens
  misc_RNA (1)...(19): siRNA sense strand
gaauucuaccacaagacua

SEQ ID NO: 1859364 - RNA, 19 nt, Homo sapiens
  misc_RNA (1)...(19): siRNA sense strand
aaggaauucuaccacaaga

SEQ ID NO: 1859365 - RNA, 19 nt, Homo sapiens
  misc_RNA (1)...(19): siRNA sense strand
acgcuggucuggugaagau

SEQ ID NO: 1859366 - RNA, 19 nt, Homo sapiens
  misc_RNA (1)...(19): siRNA sense strand
caccaacaccaaagagguu

SEQ ID NO: 1859367 - RNA, 19 nt, Homo sapiens
  misc_RNA (1)...(19): siRNA sense strand
aaaaggaauucuaccacaa

SEQ ID NO: 1859368 - RNA, 19 nt, Homo sapiens
  misc_RNA (1)...(19): siRNA sense strand
ccucauccaauuaguugaa

SEQ ID NO: 1859369 - RNA, 19 nt, Homo sapiens
  misc_RNA (1)...(19): siRNA sense strand
guugaagguguuaagagaa

SEQ ID NO: 1859370 - RNA, 19 nt, Homo sapiens
  misc_RNA (1)...(19): siRNA sense strand
aauucuaccacaagacuaa

SEQ ID NO: 1859371 - RNA, 19 nt, Homo sapiens
  misc_RNA (1)...(19): siRNA sense strand
aacaaaaggcucuccauaa

SEQ ID NO: 1859372 - RNA, 19 nt, Homo sapiens
  misc_RNA (1)...(19): siRNA sense strand
gggccucauccaauuaguu

SEQ ID NO: 1859373 - RNA, 19 nt, Homo sapiens
  misc_RNA (1)...(19): siRNA sense strand
aaaggaauucuaccacaag

SEQ ID NO: 1859374 - RNA, 19 nt, Homo sapiens
  misc_RNA (1)...(19): siRNA sense strand
cuaccacaagacuaacaua

SEQ ID NO: 1859375 - RNA, 19 nt, Homo sapiens
  misc_RNA (1)...(19): siRNA sense strand
accacaagacuaacauaaa

SEQ ID NO: 1859376 - RNA, 19 nt, Homo sapiens
  misc_RNA (1)...(19): siRNA sense strand
aaagagguucccaagacaa

SEQ ID NO: 1859377 - RNA, 19 nt, Homo sapiens
  misc_RNA (1)...(19): siRNA sense strand
gaaccaagcuccaaaucug

SEQ ID NO: 1859378 - RNA, 19 nt, Homo sapiens
  misc_RNA (1)...(19): siRNA sense strand
ggucagaugucauguuuga

SEQ ID NO: 1859379 - RNA, 19 nt, Homo sapiens
  misc_RNA (1)...(19): siRNA sense strand
gcaggacucugaugaacaa

SEQ ID NO: 1859380 - RNA, 19 nt, Homo sapiens
  misc_RNA (1)...(19): siRNA sense strand
gcaggaaccuacagauguu

SEQ ID NO: 1859381 - RNA, 19 nt, Homo sapiens
  misc_RNA (1)...(19): siRNA sense strand
aaagaaugcugcuguaaug

SEQ ID NO: 1859382 - RNA, 19 nt, Homo sapiens
  misc_RNA (1)...(19): siRNA sense strand
ggaaacccuucaaguaguu

SEQ ID NO: 1859383 - RNA, 19 nt, Homo sapiens
  misc_RNA (1)...(19): siRNA sense strand
acaggaaacccuucaagua

SEQ ID NO: 1859384 - RNA, 19 nt, Homo sapiens
  misc_RNA (1)...(19): siRNA sense strand
cgucguggguuuaacaauu

SEQ ID NO: 1859385 - RNA, 19 nt, Homo sapiens
  misc_RNA (1)...(19): siRNA sense strand
gcagggaccuacagauguc

SEQ ID NO: 1859386 - RNA, 19 nt, Homo sapiens
  misc_RNA (1)...(19): siRNA sense strand
gagagaacgugaccuuguc

SEQ ID NO: 1859387 - RNA, 19 nt, Homo sapiens
  misc_RNA (1)...(19): siRNA sense strand
ggagagaacgugaccuugu

SEQ ID NO: 1859388 - RNA, 19 nt, Homo sapiens
  misc_RNA (1)...(19): siRNA sense strand
gaacauuccaggcagacuu

SEQ ID NO: 1859389 - RNA, 19 nt, Homo sapiens
  misc_RNA (1)...(19): siRNA sense strand
gaagccacguucccaucuu

SEQ ID NO: 1859390 - RNA, 19 nt, Homo sapiens
  misc_RNA (1)...(19): siRNA sense strand
cuacagauguuaugguucu

SEQ ID NO: 1859391 - RNA, 19 nt, Homo sapiens
  misc_RNA (1)...(19): siRNA sense strand
gucguggguuuaacaauuu

SEQ ID NO: 1859392 - RNA, 19 nt, Homo sapiens
  misc_RNA (1)...(19): siRNA sense strand
uaacagauaccagcgugua

SEQ ID NO: 1859393 - RNA, 19 nt, Homo sapiens
  misc_RNA (1)...(19): siRNA sense strand
ugaauaggcaggacucuga

SEQ ID NO: 1859394 - RNA, 19 nt, Homo sapiens
  misc_RNA (1)...(19): siRNA sense strand
gaggacacguggcucuuca

SEQ ID NO: 1859395 - RNA, 19 nt, Homo sapiens
  misc_RNA (1)...(19): siRNA sense strand
caggaaacccuucaaguag

SEQ ID NO: 1859396 - RNA, 19 nt, Homo sapiens
  misc_RNA (1)...(19): siRNA sense strand
caucuuccacggcagaaua

SEQ ID NO: 1859397 - RNA, 19 nt, Homo sapiens
  misc_RNA (1)...(19): siRNA sense strand
ucacuaucgucguggguuu

SEQ ID NO: 1859398 - RNA, 19 nt, Homo sapiens
  misc_RNA (1)...(19): siRNA sense strand
uaugacaucuaccaucugu

SEQ ID NO: 1859399 - RNA, 19 nt, Homo sapiens
  misc_RNA (1)...(19): siRNA sense strand
ggagggaccuacagaugcu

SEQ ID NO: 1859400 - RNA, 19 nt, Homo sapiens
  misc_RNA (1)...(19): siRNA sense strand
acaccugcauguucugauu

SEQ ID NO: 1859401 - RNA, 19 nt, Homo sapiens
  misc_RNA (1)...(19): siRNA sense strand
gagcuccuaugacaucuac

SEQ ID NO: 1859402 - RNA, 19 nt, Homo sapiens
  misc_RNA (1)...(19): siRNA sense strand
ggacucugaugaacaagac

SEQ ID NO: 1859403 - RNA, 19 nt, Homo sapiens
  misc_RNA (1)...(19): siRNA sense strand
ggacagaacagugaauagg

SEQ ID NO: 1859404 - RNA, 19 nt, Homo sapiens
  misc_RNA (1)...(19): siRNA sense strand
acaauuucaugcuguacaa

SEQ ID NO: 1859405 - RNA, 19 nt, Homo sapiens
  misc_RNA (1)...(19): siRNA sense strand
aacgugaccuuguccugua

SEQ ID NO: 1859406 - RNA, 19 nt, Homo sapiens
  misc_RNA (1)...(19): siRNA sense strand
uuggucagaugucauguuu

SEQ ID NO: 1859407 - RNA, 19 nt, Homo sapiens
  misc_RNA (1)...(19): siRNA sense strand
ucacaggaaaccacagaaa

SEQ ID NO: 1859408 - RNA, 19 nt, Homo sapiens
  misc_RNA (1)...(19): siRNA sense strand
ccuaugacaucuaccaucu

SEQ ID NO: 1859409 - RNA, 19 nt, Homo sapiens
  misc_RNA (1)...(19): siRNA sense strand
guggucaucuuccucuuca

SEQ ID NO: 1859410 - RNA, 19 nt, Homo sapiens
  misc_RNA (1)...(19): siRNA sense strand
ccucuucuuucuccuuuau

SEQ ID NO: 1859411 - RNA, 19 nt, Homo sapiens
  misc_RNA (1)...(19): siRNA sense strand
gaauauuccaggagagcuu

SEQ ID NO: 1859412 - RNA, 19 nt, Homo sapiens
  misc_RNA (1)...(19): siRNA sense strand
acagaugcuucggcucuuu

SEQ ID NO: 1859413 - RNA, 19 nt, Homo sapiens
  misc_RNA (1)...(19): siRNA sense strand
ccacagaaccaagcuccaa

SEQ ID NO: 1859414 - RNA, 19 nt, Homo sapiens
  misc_RNA (1)...(19): siRNA sense strand
gcacaugcagggaccuaca

SEQ ID NO: 1859415 - RNA, 19 nt, Homo sapiens
  misc_RNA (1)...(19): siRNA sense strand
caauguuggucagauguca

SEQ ID NO: 1859416 - RNA, 19 nt, Homo sapiens
  misc_RNA (1)...(19): siRNA sense strand
ggucacaggaaaccacaga

SEQ ID NO: 1859417 - RNA, 19 nt, Homo sapiens
  misc_RNA (1)...(19): siRNA sense strand
aggaaacccuucaaguagu

SEQ ID NO: 1859418 - RNA, 19 nt, Homo sapiens
  misc_RNA (1)...(19): siRNA sense strand
ccacggagggaccuacaga

SEQ ID NO: 1859419 - RNA, 19 nt, Homo sapiens
  misc_RNA (1)...(19): siRNA sense strand
caaggucaacagaacauuc

SEQ ID NO: 1859420 - RNA, 19 nt, Homo sapiens
  misc_RNA (1)...(19): siRNA sense strand
gaaccuacagauguuaugg

SEQ ID NO: 1859421 - RNA, 19 nt, Homo sapiens
  misc_RNA (1)...(19): siRNA sense strand
ucaaguaguuggccuucac

SEQ ID NO: 1859422 - RNA, 19 nt, Homo sapiens
  misc_RNA (1)...(19): siRNA sense strand
cauguuugagcacuucuuu

SEQ ID NO: 1859423 - RNA, 19 nt, Homo sapiens
  misc_RNA (1)...(19): siRNA sense strand
caggagagaacgugaccuu

SEQ ID NO: 1859424 - RNA, 19 nt, Homo sapiens
  misc_RNA (1)...(19): siRNA sense strand
ccaggagagcuucaucaug

SEQ ID NO: 1859425 - RNA, 19 nt, Homo sapiens
  misc_RNA (1)...(19): siRNA sense strand
caaaugcugagcccagauc

SEQ ID NO: 1859426 - RNA, 19 nt, Homo sapiens
  misc_RNA (1)...(19): siRNA sense strand
ggucaucuuccucuucauc

SEQ ID NO: 1859427 - RNA, 19 nt, Homo sapiens
  misc_RNA (1)...(19): siRNA sense strand
ggacacguggcucuucagu

SEQ ID NO: 1859428 - RNA, 19 nt, Homo sapiens
  misc_RNA (1)...(19): siRNA sense strand
cauggguggucaggacaaa

SEQ ID NO: 1859429 - RNA, 19 nt, Homo sapiens
  misc_RNA (1)...(19): siRNA sense strand
gaauaggcaggacucugau

SEQ ID NO: 1859430 - RNA, 19 nt, Homo sapiens
  misc_RNA (1)...(19): siRNA sense strand
ggaggacacguggcucuuc

SEQ ID NO: 1859431 - RNA, 19 nt, Homo sapiens
  misc_RNA (1)...(19): siRNA sense strand
ggaaccuacagauguuaug

SEQ ID NO: 1859432 - RNA, 19 nt, Homo sapiens
  misc_RNA (1)...(19): siRNA sense strand
gaucauggucacaggaaac

SEQ ID NO: 1859433 - RNA, 19 nt, Homo sapiens
  misc_RNA (1)...(19): siRNA sense strand
gugacccacugcuuguuuc

SEQ ID NO: 1859434 - RNA, 19 nt, Homo sapiens
  misc_RNA (1)...(19): siRNA sense strand
cugcaauguuggucagaug

SEQ ID NO: 1859435 - RNA, 19 nt, Homo sapiens
  misc_RNA (1)...(19): siRNA sense strand
ugaucauggucacaggaaa

SEQ ID NO: 1859436 - RNA, 19 nt, Homo sapiens
  misc_RNA (1)...(19): siRNA sense strand
uccuggagcuccuaugaca

SEQ ID NO: 1859437 - RNA, 19 nt, Homo sapiens
  misc_RNA (1)...(19): siRNA sense strand
caggaaccuacagauguua

SEQ ID NO: 1859438 - RNA, 19 nt, Homo sapiens
  misc_RNA (1)...(19): siRNA sense strand
cauccuccuccucuucuuu

SEQ ID NO: 1859439 - RNA, 19 nt, Homo sapiens
  misc_RNA (1)...(19): siRNA sense strand
agaaugcugcuguaaugga

SEQ ID NO: 1859440 - RNA, 19 nt, Homo sapiens
  misc_RNA (1)...(19): siRNA sense strand
cuugaugccuguccuugca

SEQ ID NO: 1859441 - RNA, 19 nt, Homo sapiens
  misc_RNA (1)...(19): siRNA sense strand
aagccacguucccaucuuc

SEQ ID NO: 1859442 - RNA, 19 nt, Homo sapiens
  misc_RNA (1)...(19): siRNA sense strand
cacagaaccaagcuccaaa

SEQ ID NO: 1859443 - RNA, 19 nt, Homo sapiens
  misc_RNA (1)...(19): siRNA sense strand
gugcagugcccaaggucaa

SEQ ID NO: 1859444 - RNA, 19 nt, Homo sapiens
  misc_RNA (1)...(19): siRNA sense strand
accuacagauguuaugguu

SEQ ID NO: 1859445 - RNA, 19 nt, Homo sapiens
  misc_RNA (1)...(19): siRNA sense strand
ugcaggaaccuacagaugu

SEQ ID NO: 1859446 - RNA, 19 nt, Homo sapiens
  misc_RNA (1)...(19): siRNA sense strand
ggaaaucucacaucuacuu

SEQ ID NO: 1859447 - RNA, 19 nt, Homo sapiens
  misc_RNA (1)...(19): siRNA sense strand
uggcaaaguucaccuguuu

SEQ ID NO: 1859448 - RNA, 19 nt, Homo sapiens
  misc_RNA (1)...(19): siRNA sense strand
cgaaguaugugcugugugu

SEQ ID NO: 1859449 - RNA, 19 nt, Homo sapiens
  misc_RNA (1)...(19): siRNA sense strand
ggacggcacugauaucaac

SEQ ID NO: 1859450 - RNA, 19 nt, Homo sapiens
  misc_RNA (1)...(19): siRNA sense strand
ugacaaauguggccuucuu

SEQ ID NO: 1859451 - RNA, 19 nt, Homo sapiens
  misc_RNA (1)...(19): siRNA sense strand
ggcaaggccucuuugagaa

SEQ ID NO: 1859452 - RNA, 19 nt, Homo sapiens
  misc_RNA (1)...(19): siRNA sense strand
ggcuucagcugaugacuuu

SEQ ID NO: 1859453 - RNA, 19 nt, Homo sapiens
  misc_RNA (1)...(19): siRNA sense strand
gcaaugaacagaucucagu

SEQ ID NO: 1859454 - RNA, 19 nt, Homo sapiens
  misc_RNA (1)...(19): siRNA sense strand
gcagccaugugacaaaugu

SEQ ID NO: 1859455 - RNA, 19 nt, Homo sapiens
  misc_RNA (1)...(19): siRNA sense strand
gaugucaagugcuccaaug

SEQ ID NO: 1859456 - RNA, 19 nt, Homo sapiens
  misc_RNA (1)...(19): siRNA sense strand
ccacacagacggcaaugaa

SEQ ID NO: 1859457 - RNA, 19 nt, Homo sapiens
  misc_RNA (1)...(19): siRNA sense strand
ggagauaguguacuuugug

SEQ ID NO: 1859458 - RNA, 19 nt, Homo sapiens
  misc_RNA (1)...(19): siRNA sense strand
gcaaggccucuuugagaaa

SEQ ID NO: 1859459 - RNA, 19 nt, Homo sapiens
  misc_RNA (1)...(19): siRNA sense strand
cgggaaaucucacaucuac

SEQ ID NO: 1859460 - RNA, 19 nt, Homo sapiens
  misc_RNA (1)...(19): siRNA sense strand
gcaaaguucaccuguuuag

SEQ ID NO: 1859461 - RNA, 19 nt, Homo sapiens
  misc_RNA (1)...(19): siRNA sense strand
gauaagcuggugcaucuau

SEQ ID NO: 1859462 - RNA, 19 nt, Homo sapiens
  misc_RNA (1)...(19): siRNA sense strand
gcaaaggugggaaccguau

SEQ ID NO: 1859463 - RNA, 19 nt, Homo sapiens
  misc_RNA (1)...(19): siRNA sense strand
ugaauccaaugaucacaug

SEQ ID NO: 1859464 - RNA, 19 nt, Homo sapiens
  misc_RNA (1)...(19): siRNA sense strand
aggauaagcuggugcaucu

SEQ ID NO: 1859465 - RNA, 19 nt, Homo sapiens
  misc_RNA (1)...(19): siRNA sense strand
acuaugagauucuguacug

SEQ ID NO: 1859466 - RNA, 19 nt, Homo sapiens
  misc_RNA (1)...(19): siRNA sense strand
gcucgggccauuccaguuu

SEQ ID NO: 1859467 - RNA, 19 nt, Homo sapiens
  misc_RNA (1)...(19): siRNA sense strand
cggcaaggccucuuugaga

SEQ ID NO: 1859468 - RNA, 19 nt, Homo sapiens
  misc_RNA (1)...(19): siRNA sense strand
gaggauggcuccgugaaaa

SEQ ID NO: 1859469 - RNA, 19 nt, Homo sapiens
  misc_RNA (1)...(19): siRNA sense strand
gggagauaguguacuuugu

SEQ ID NO: 1859470 - RNA, 19 nt, Homo sapiens
  misc_RNA (1)...(19): siRNA sense strand
cccaugaccugguggcuau

SEQ ID NO: 1859471 - RNA, 19 nt, Homo sapiens
  misc_RNA (1)...(19): siRNA sense strand
gacacuaccugggacacaa

SEQ ID NO: 1859472 - RNA, 19 nt, Homo sapiens
  misc_RNA (1)...(19): siRNA sense strand
ugugugggcuucuccaaau

SEQ ID NO: 1859473 - RNA, 19 nt, Homo sapiens
  misc_RNA (1)...(19): siRNA sense strand
gggccaaccuuuauuugcu

SEQ ID NO: 1859474 - RNA, 19 nt, Homo sapiens
  misc_RNA (1)...(19): siRNA sense strand
ccaaggugguggaugucaa

SEQ ID NO: 1859475 - RNA, 19 nt, Homo sapiens
  misc_RNA (1)...(19): siRNA sense strand
acaacuugguguacgugua

SEQ ID NO: 1859476 - RNA, 19 nt, Homo sapiens
  misc_RNA (1)...(19): siRNA sense strand
agacggcaaugaacagauc

SEQ ID NO: 1859477 - RNA, 19 nt, Homo sapiens
  misc_RNA (1)...(19): siRNA sense strand
cagcagccaugugacaaau

SEQ ID NO: 1859478 - RNA, 19 nt, Homo sapiens
  misc_RNA (1)...(19): siRNA sense strand
aaguucaccuguuuagcua

SEQ ID NO: 1859479 - RNA, 19 nt, Homo sapiens
  misc_RNA (1)...(19): siRNA sense strand
ggcaagugcucgggccauu

SEQ ID NO: 1859480 - RNA, 19 nt, Homo sapiens
  misc_RNA (1)...(19): siRNA sense strand
gcagcugcuuugucaccaa

SEQ ID NO: 1859481 - RNA, 19 nt, Homo sapiens
  misc_RNA (1)...(19): siRNA sense strand
caaauguggccuucuugug

SEQ ID NO: 1859482 - RNA, 19 nt, Homo sapiens
  misc_RNA (1)...(19): siRNA sense strand
ggacccggcuaccuguaag

SEQ ID NO: 1859483 - RNA, 19 nt, Homo sapiens
  misc_RNA (1)...(19): siRNA sense strand
gaaaucucacaucuacuuc

SEQ ID NO: 1859484 - RNA, 19 nt, Homo sapiens
  misc_RNA (1)...(19): siRNA sense strand
gcuuaucaccugcgggaaa

SEQ ID NO: 1859485 - RNA, 19 nt, Homo sapiens
  misc_RNA (1)...(19): siRNA sense strand
ggcaaaguucaccuguuua

SEQ ID NO: 1859486 - RNA, 19 nt, Homo sapiens
  misc_RNA (1)...(19): siRNA sense strand
caugagaaaccgaaguaug

SEQ ID NO: 1859487 - RNA, 19 nt, Homo sapiens
  misc_RNA (1)...(19): siRNA sense strand
gggacuaugagauucugua

SEQ ID NO: 1859488 - RNA, 19 nt, Homo sapiens
  misc_RNA (1)...(19): siRNA sense strand
gagcagaggcagcgacacu

SEQ ID NO: 1859489 - RNA, 19 nt, Homo sapiens
  misc_RNA (1)...(19): siRNA sense strand
gcgggaaaucucacaucua

SEQ ID NO: 1859490 - RNA, 19 nt, Homo sapiens
  misc_RNA (1)...(19): siRNA sense strand
gggcggacggcacugauau

SEQ ID NO: 1859491 - RNA, 19 nt, Homo sapiens
  misc_RNA (1)...(19): siRNA sense strand
ggaaugggccacagcuacu

SEQ ID NO: 1859492 - RNA, 19 nt, Homo sapiens
  misc_RNA (1)...(19): siRNA sense strand
ccacggagacacacuguac

SEQ ID NO: 1859493 - RNA, 19 nt, Homo sapiens
  misc_RNA (1)...(19): siRNA sense strand
caguuucccucuccaccuu

SEQ ID NO: 1859494 - RNA, 19 nt, Homo sapiens
  misc_RNA (1)...(19): siRNA sense strand
gcgcaucugggacucaguu

SEQ ID NO: 1859495 - RNA, 19 nt, Homo sapiens
  misc_RNA (1)...(19): siRNA sense strand
gugcggaugcugugaggaa

SEQ ID NO: 1859496 - RNA, 19 nt, Homo sapiens
  misc_RNA (1)...(19): siRNA sense strand
gggacccggcuaccuguaa

SEQ ID NO: 1859497 - RNA, 19 nt, Homo sapiens
  misc_RNA (1)...(19): siRNA sense strand
gggcuucuccaaaucuaau

SEQ ID NO: 1859498 - RNA, 19 nt, Homo sapiens
  misc_RNA (1)...(19): siRNA sense strand
gacaaauguggccuucuug

SEQ ID NO: 1859499 - RNA, 19 nt, Homo sapiens
  misc_RNA (1)...(19): siRNA sense strand
aacaugagaaaccgaagua

SEQ ID NO: 1859500 - RNA, 19 nt, Homo sapiens
  misc_RNA (1)...(19): siRNA sense strand
gugggcuucuccaaaucua

SEQ ID NO: 1859501 - RNA, 19 nt, Homo sapiens
  misc_RNA (1)...(19): siRNA sense strand
gaaugggccacagcuacuu

SEQ ID NO: 1859502 - RNA, 19 nt, Homo sapiens
  misc_RNA (1)...(19): siRNA sense strand
acacagacggcaaugaaca

SEQ ID NO: 1859503 - RNA, 19 nt, Homo sapiens
  misc_RNA (1)...(19): siRNA sense strand
ucaaaugcuuggccaucca

SEQ ID NO: 1859504 - RNA, 19 nt, Homo sapiens
  misc_RNA (1)...(19): siRNA sense strand
caaggccucuuugagaaac

SEQ ID NO: 1859505 - RNA, 19 nt, Homo sapiens
  misc_RNA (1)...(19): siRNA sense strand
aaucucacaucuacuucug

SEQ ID NO: 1859506 - RNA, 19 nt, Homo sapiens
  misc_RNA (1)...(19): siRNA sense strand
gcagaggcagcgacacuac

SEQ ID NO: 1859507 - RNA, 19 nt, Homo sapiens
  misc_RNA (1)...(19): siRNA sense strand
ggccauccacccagauaug

SEQ ID NO: 1859508 - RNA, 19 nt, Homo sapiens
  misc_RNA (1)...(19): siRNA sense strand
augagaaaccgaaguaugu

SEQ ID NO: 1859509 - RNA, 19 nt, Homo sapiens
  misc_RNA (1)...(19): siRNA sense strand
caagcggcaaggccucuuu

SEQ ID NO: 1859510 - RNA, 19 nt, Homo sapiens
  misc_RNA (1)...(19): siRNA sense strand
gcuccaaugaggcuguauu

SEQ ID NO: 1859511 - RNA, 19 nt, Homo sapiens
  misc_RNA (1)...(19): siRNA sense strand
ggacuaugagauucuguac

SEQ ID NO: 1859512 - RNA, 19 nt, Homo sapiens
  misc_RNA (1)...(19): siRNA sense strand
ggcgggaaccacuaaggaa

SEQ ID NO: 1859513 - RNA, 19 nt, Homo sapiens
  misc_RNA (1)...(19): siRNA sense strand
aaaguucaccuguuuagcu

SEQ ID NO: 1859514 - RNA, 19 nt, Homo sapiens
  misc_RNA (1)...(19): siRNA sense strand
gggcucccacgacaacuug

SEQ ID NO: 1859515 - RNA, 19 nt, Homo sapiens
  misc_RNA (1)...(19): siRNA sense strand
cuuaucaccugcgggaaau

SEQ ID NO: 1859516 - RNA, 19 nt, Homo sapiens
  misc_RNA (1)...(19): siRNA sense strand
gcggacggcacugauauca

SEQ ID NO: 1859517 - RNA, 19 nt, Homo sapiens
  misc_RNA (1)...(19): siRNA sense strand
gcaagugcucgggccauuc

SEQ ID NO: 1859518 - RNA, 19 nt, Homo sapiens
  misc_RNA (1)...(19): siRNA sense strand
ggcaaaaccaaagaaguua

SEQ ID NO: 1859519 - RNA, 19 nt, Homo sapiens
  misc_RNA (1)...(19): siRNA sense strand
ccaaagauguggcuguaua

SEQ ID NO: 1859520 - RNA, 19 nt, Homo sapiens
  misc_RNA (1)...(19): siRNA sense strand
gagagaagguggaugucua

SEQ ID NO: 1859521 - RNA, 19 nt, Homo sapiens
  misc_RNA (1)...(19): siRNA sense strand
ccaaggagaugaccaagug

SEQ ID NO: 1859522 - RNA, 19 nt, Homo sapiens
  misc_RNA (1)...(19): siRNA sense strand
gcaccgaagucaccaauag

SEQ ID NO: 1859523 - RNA, 19 nt, Homo sapiens
  misc_RNA (1)...(19): siRNA sense strand
caaggucucuggcuucuuc

SEQ ID NO: 1859524 - RNA, 19 nt, Homo sapiens
  misc_RNA (1)...(19): siRNA sense strand
ccagugaggugguuaagau

SEQ ID NO: 1859525 - RNA, 19 nt, Homo sapiens
  misc_RNA (1)...(19): siRNA sense strand
ggaccaagcggaucgacua

SEQ ID NO: 1859526 - RNA, 19 nt, Homo sapiens
  misc_RNA (1)...(19): siRNA sense strand
gaacauugcccgagacucu

SEQ ID NO: 1859527 - RNA, 19 nt, Homo sapiens
  misc_RNA (1)...(19): siRNA sense strand
ccauugaaauugagaccua

SEQ ID NO: 1859528 - RNA, 19 nt, Homo sapiens
  misc_RNA (1)...(19): siRNA sense strand
gcgaggagccguccaucua

SEQ ID NO: 1859529 - RNA, 19 nt, Homo sapiens
  misc_RNA (1)...(19): siRNA sense strand
gagggccacugucugauga

SEQ ID NO: 1859530 - RNA, 19 nt, Homo sapiens
  misc_RNA (1)...(19): siRNA sense strand
cgaggcagcuaaaggcauu

SEQ ID NO: 1859531 - RNA, 19 nt, Homo sapiens
  misc_RNA (1)...(19): siRNA sense strand
ccaugagccuggacgagua

SEQ ID NO: 1859532 - RNA, 19 nt, Homo sapiens
  misc_RNA (1)...(19): siRNA sense strand
ugacuucauugaugccuuu

SEQ ID NO: 1859533 - RNA, 19 nt, Homo sapiens
  misc_RNA (1)...(19): siRNA sense strand
gaacaucguggccgguuau

SEQ ID NO: 1859534 - RNA, 19 nt, Homo sapiens
  misc_RNA (1)...(19): siRNA sense strand
gaacagcuccgaggaagag

SEQ ID NO: 1859535 - RNA, 19 nt, Homo sapiens
  misc_RNA (1)...(19): siRNA sense strand
gugggagcaugaacaauga

SEQ ID NO: 1859536 - RNA, 19 nt, Homo sapiens
  misc_RNA (1)...(19): siRNA sense strand
gcacggaggcuguggucuu

SEQ ID NO: 1859537 - RNA, 19 nt, Homo sapiens
  misc_RNA (1)...(19): siRNA sense strand
caucaaggaauaccacauu

SEQ ID NO: 1859538 - RNA, 19 nt, Homo sapiens
  misc_RNA (1)...(19): siRNA sense strand
gauuggagaugguguuggu

SEQ ID NO: 1859539 - RNA, 19 nt, Homo sapiens
  misc_RNA (1)...(19): siRNA sense strand
ccuauaagcugugcaaggu

SEQ ID NO: 1859540 - RNA, 19 nt, Homo sapiens
  misc_RNA (1)...(19): siRNA sense strand
ucuccaaccugagcccuua

SEQ ID NO: 1859541 - RNA, 19 nt, Homo sapiens
  misc_RNA (1)...(19): siRNA sense strand
gggcaggucgcacugauug

SEQ ID NO: 1859542 - RNA, 19 nt, Homo sapiens
  misc_RNA (1)...(19): siRNA sense strand
aagccaagaucgagcaguu

SEQ ID NO: 1859543 - RNA, 19 nt, Homo sapiens
  misc_RNA (1)...(19): siRNA sense strand
ugaacaucguggccgguua

SEQ ID NO: 1859544 - RNA, 19 nt, Homo sapiens
  misc_RNA (1)...(19): siRNA sense strand
guucuuugaugcccacgaa

SEQ ID NO: 1859545 - RNA, 19 nt, Homo sapiens
  misc_RNA (1)...(19): siRNA sense strand
gaggagccguccaucuaca

SEQ ID NO: 1859546 - RNA, 19 nt, Homo sapiens
  misc_RNA (1)...(19): siRNA sense strand
ccuaugcccuugucuccaa

SEQ ID NO: 1859547 - RNA, 19 nt, Homo sapiens
  misc_RNA (1)...(19): siRNA sense strand
gcugcucucuccggaguuu

SEQ ID NO: 1859548 - RNA, 19 nt, Homo sapiens
  misc_RNA (1)...(19): siRNA sense strand
ggccggauaugcagaagca

SEQ ID NO: 1859549 - RNA, 19 nt, Homo sapiens
  misc_RNA (1)...(19): siRNA sense strand
ccggcuaccugaucgugua

SEQ ID NO: 1859550 - RNA, 19 nt, Homo sapiens
  misc_RNA (1)...(19): siRNA sense strand
ccacaccuaugccgaaugc

SEQ ID NO: 1859551 - RNA, 19 nt, Homo sapiens
  misc_RNA (1)...(19): siRNA sense strand
ucccaaagauguggcugua

SEQ ID NO: 1859552 - RNA, 19 nt, Homo sapiens
  misc_RNA (1)...(19): siRNA sense strand
caacacccaccucuacuag

SEQ ID NO: 1859553 - RNA, 19 nt, Homo sapiens
  misc_RNA (1)...(19): siRNA sense strand
gugaacagaucuacaaccu

SEQ ID NO: 1859554 - RNA, 19 nt, Homo sapiens
  misc_RNA (1)...(19): siRNA sense strand
gagcugagcauggcugaca

SEQ ID NO: 1859555 - RNA, 19 nt, Homo sapiens
  misc_RNA (1)...(19): siRNA sense strand
ggacuccggcuaccugauc

SEQ ID NO: 1859556 - RNA, 19 nt, Homo sapiens
  misc_RNA (1)...(19): siRNA sense strand
gccaggugaucgagaagga

SEQ ID NO: 1859557 - RNA, 19 nt, Homo sapiens
  misc_RNA (1)...(19): siRNA sense strand
ccaagcggaucgacuacuc

SEQ ID NO: 1859558 - RNA, 19 nt, Homo sapiens
  misc_RNA (1)...(19): siRNA sense strand
ggacucagagggccuggau

SEQ ID NO: 1859559 - RNA, 19 nt, Homo sapiens
  misc_RNA (1)...(19): siRNA sense strand
ccuggcagaugguguggaa

SEQ ID NO: 1859560 - RNA, 19 nt, Homo sapiens
  misc_RNA (1)...(19): siRNA sense strand
guccacgcccucuuccuua

SEQ ID NO: 1859561 - RNA, 19 nt, Homo sapiens
  misc_RNA (1)...(19): siRNA sense strand
ggugcuggcucugcgcaaa

SEQ ID NO: 1859562 - RNA, 19 nt, Homo sapiens
  misc_RNA (1)...(19): siRNA sense strand
gcuaccugaucguguaugu

SEQ ID NO: 1859563 - RNA, 19 nt, Homo sapiens
  misc_RNA (1)...(19): siRNA sense strand
gaccacaccuaugccgaau

SEQ ID NO: 1859564 - RNA, 19 nt, Homo sapiens
  misc_RNA (1)...(19): siRNA sense strand
ucaacacccaccucuacua

SEQ ID NO: 1859565 - RNA, 19 nt, Homo sapiens
  misc_RNA (1)...(19): siRNA sense strand
gggaagcagugguccucau

SEQ ID NO: 1859566 - RNA, 19 nt, Homo sapiens
  misc_RNA (1)...(19): siRNA sense strand
gggagaaguggcagcgaaa

SEQ ID NO: 1859567 - RNA, 19 nt, Homo sapiens
  misc_RNA (1)...(19): siRNA sense strand
cccgagggcucucagaaca

SEQ ID NO: 1859568 - RNA, 19 nt, Homo sapiens
  misc_RNA (1)...(19): siRNA sense strand
gcaccaaccaggccuacuc

SEQ ID NO: 1859569 - RNA, 19 nt, Homo sapiens
  misc_RNA (1)...(19): siRNA sense strand
cuacucaucccaacaugga

SEQ ID NO: 1859570 - RNA, 19 nt, Homo sapiens
  misc_RNA (1)...(19): siRNA sense strand
ggaagcagugguccucauc

SEQ ID NO: 1859571 - RNA, 19 nt, Homo sapiens
  misc_RNA (1)...(19): siRNA sense strand
cgccucaccuucccaguuc

SEQ ID NO: 1859572 - RNA, 19 nt, Homo sapiens
  misc_RNA (1)...(19): siRNA sense strand
ggagguaggacugaacauc

SEQ ID NO: 1859573 - RNA, 19 nt, Homo sapiens
  misc_RNA (1)...(19): siRNA sense strand
ggacagugaggaggucuuc

SEQ ID NO: 1859574 - RNA, 19 nt, Homo sapiens
  misc_RNA (1)...(19): siRNA sense strand
gcagugccaguuccuguca

SEQ ID NO: 1859575 - RNA, 19 nt, Homo sapiens
  misc_RNA (1)...(19): siRNA sense strand
uggaggagcuggagaugcu

SEQ ID NO: 1859576 - RNA, 19 nt, Homo sapiens
  misc_RNA (1)...(19): siRNA sense strand
cgugggagcaugaacaaug

SEQ ID NO: 1859577 - RNA, 19 nt, Homo sapiens
  misc_RNA (1)...(19): siRNA sense strand
gcaggucgcacugauugga

SEQ ID NO: 1859578 - RNA, 19 nt, Homo sapiens
  misc_RNA (1)...(19): siRNA sense strand
ugagaacagcuccgaggaa

SEQ ID NO: 1859579 - RNA, 19 nt, Homo sapiens
  misc_RNA (1)...(19): siRNA sense strand
uggcccagcucuacaugau

SEQ ID NO: 1859580 - RNA, 19 nt, Homo sapiens
  misc_RNA (1)...(19): siRNA sense strand
gcgaguacaaagcagaaga

SEQ ID NO: 1859581 - RNA, 19 nt, Homo sapiens
  misc_RNA (1)...(19): siRNA sense strand
gggcagcgggcaauacaca

SEQ ID NO: 1859582 - RNA, 19 nt, Homo sapiens
  misc_RNA (1)...(19): siRNA sense strand
gcccgagacucugagaaca

SEQ ID NO: 1859583 - RNA, 19 nt, Homo sapiens
  misc_RNA (1)...(19): siRNA sense strand
caagaucgagcaguucauc

SEQ ID NO: 1859584 - RNA, 19 nt, Homo sapiens
  misc_RNA (1)...(19): siRNA sense strand
ggcaaagcacggagcauca

SEQ ID NO: 1859585 - RNA, 19 nt, Homo sapiens
  misc_RNA (1)...(19): siRNA sense strand
uaccugaucguguauguca

SEQ ID NO: 1859586 - RNA, 19 nt, Homo sapiens
  misc_RNA (1)...(19): siRNA sense strand
cacggaggcuguggucuuc

SEQ ID NO: 1859587 - RNA, 19 nt, Homo sapiens
  misc_RNA (1)...(19): siRNA sense strand
ggagagaagguggaugucu

SEQ ID NO: 1859588 - RNA, 19 nt, Homo sapiens
  misc_RNA (1)...(19): siRNA sense strand
gagaugaccaaguggaacu

SEQ ID NO: 1859589 - RNA, 19 nt, Homo sapiens
  misc_RNA (1)...(19): siRNA sense strand
ugacauccgggcacuggaa

SEQ ID NO: 1859590 - RNA, 19 nt, Homo sapiens
  misc_RNA (1)...(19): siRNA sense strand
gccaagaucgagcaguuca

SEQ ID NO: 1859591 - RNA, 19 nt, Homo sapiens
  misc_RNA (1)...(19): siRNA sense strand
caaagauguggcuguauac

SEQ ID NO: 1859592 - RNA, 19 nt, Homo sapiens
  misc_RNA (1)...(19): siRNA sense strand
gaaauugagaccuauuacc

SEQ ID NO: 1859593 - RNA, 19 nt, Homo sapiens
  misc_RNA (1)...(19): siRNA sense strand
cacauucugcugcccauga

SEQ ID NO: 1859594 - RNA, 19 nt, Homo sapiens
  misc_RNA (1)...(19): siRNA sense strand
ggcaauacacacacaaggu

SEQ ID NO: 1859595 - RNA, 19 nt, Homo sapiens
  misc_RNA (1)...(19): siRNA sense strand
ccucaacacccaccucuac

SEQ ID NO: 1859596 - RNA, 19 nt, Homo sapiens
  misc_RNA (1)...(19): siRNA sense strand
gcacuccagccucuuucug

SEQ ID NO: 1859597 - RNA, 19 nt, Homo sapiens
  misc_RNA (1)...(19): siRNA sense strand
gacgcacuccagccucuuu

SEQ ID NO: 1859598 - RNA, 19 nt, Homo sapiens
  misc_RNA (1)...(19): siRNA sense strand
gagccgaggcagcuaaagg

SEQ ID NO: 1859599 - RNA, 19 nt, Homo sapiens
  misc_RNA (1)...(19): siRNA sense strand
gcagcgggcaauacacaca

SEQ ID NO: 1859600 - RNA, 19 nt, Homo sapiens
  misc_RNA (1)...(19): siRNA sense strand
cauugaaauugagaccuau

SEQ ID NO: 1859601 - RNA, 19 nt, Homo sapiens
  misc_RNA (1)...(19): siRNA sense strand
gaguggcgcaugcagaaca

SEQ ID NO: 1859602 - RNA, 19 nt, Homo sapiens
  misc_RNA (1)...(19): siRNA sense strand
gggcaugcaagccaagauc

SEQ ID NO: 1859603 - RNA, 19 nt, Homo sapiens
  misc_RNA (1)...(19): siRNA sense strand
gcagcagccaaacgucuuc

SEQ ID NO: 1859604 - RNA, 19 nt, Homo sapiens
  misc_RNA (1)...(19): siRNA sense strand
gcugggcauuggugucuac

SEQ ID NO: 1859605 - RNA, 19 nt, Homo sapiens
  misc_RNA (1)...(19): siRNA sense strand
cgagggccacugucugaug

SEQ ID NO: 1859606 - RNA, 19 nt, Homo sapiens
  misc_RNA (1)...(19): siRNA sense strand
ucacaaagcuguaagaaag

SEQ ID NO: 1859607 - RNA, 19 nt, Homo sapiens
  misc_RNA (1)...(19): siRNA sense strand
gcaccuggccggaauaaug

SEQ ID NO: 1859608 - RNA, 19 nt, Homo sapiens
  misc_RNA (1)...(19): siRNA sense strand
ggacaccgcaucuggauug

SEQ ID NO: 1859609 - RNA, 19 nt, Homo sapiens
  misc_RNA (1)...(19): siRNA sense strand
ggaaaccacuaaagaagcu

SEQ ID NO: 1859610 - RNA, 19 nt, Homo sapiens
  misc_RNA (1)...(19): siRNA sense strand
gaaacuagcacagcagugu

SEQ ID NO: 1859611 - RNA, 19 nt, Homo sapiens
  misc_RNA (1)...(19): siRNA sense strand
ugaggagcauccacuauau

SEQ ID NO: 1859612 - RNA, 19 nt, Homo sapiens
  misc_RNA (1)...(19): siRNA sense strand
ggaauaauggagucacuuc

SEQ ID NO: 1859613 - RNA, 19 nt, Homo sapiens
  misc_RNA (1)...(19): siRNA sense strand
gaaccuagugauugccaaa

SEQ ID NO: 1859614 - RNA, 19 nt, Homo sapiens
  misc_RNA (1)...(19): siRNA sense strand
ucgaggaccuggagcaguu

SEQ ID NO: 1859615 - RNA, 19 nt, Homo sapiens
  misc_RNA (1)...(19): siRNA sense strand
cacccgagaucuuccagaa

SEQ ID NO: 1859616 - RNA, 19 nt, Homo sapiens
  misc_RNA (1)...(19): siRNA sense strand
aggccaagcucaagaggaa

SEQ ID NO: 1859617 - RNA, 19 nt, Homo sapiens
  misc_RNA (1)...(19): siRNA sense strand
gauggagaaccuagugauu

SEQ ID NO: 1859618 - RNA, 19 nt, Homo sapiens
  misc_RNA (1)...(19): siRNA sense strand
cuauaucucccagguguua

SEQ ID NO: 1859619 - RNA, 19 nt, Homo sapiens
  misc_RNA (1)...(19): siRNA sense strand
gcugugcccugcgcagaaa

SEQ ID NO: 1859620 - RNA, 19 nt, Homo sapiens
  misc_RNA (1)...(19): siRNA sense strand
gagacacuccagagaaaga

SEQ ID NO: 1859621 - RNA, 19 nt, Homo sapiens
  misc_RNA (1)...(19): siRNA sense strand
cugaggagcauccacuaua

SEQ ID NO: 1859622 - RNA, 19 nt, Homo sapiens
  misc_RNA (1)...(19): siRNA sense strand
gcugaaggcugcguaugag

SEQ ID NO: 1859623 - RNA, 19 nt, Homo sapiens
  misc_RNA (1)...(19): siRNA sense strand
auaagcagguggugguguu

SEQ ID NO: 1859624 - RNA, 19 nt, Homo sapiens
  misc_RNA (1)...(19): siRNA sense strand
gcagagucacaaagcugua

SEQ ID NO: 1859625 - RNA, 19 nt, Homo sapiens
  misc_RNA (1)...(19): siRNA sense strand
ccuccaagaugcugaaacu

SEQ ID NO: 1859626 - RNA, 19 nt, Homo sapiens
  misc_RNA (1)...(19): siRNA sense strand
cggaauaccugaggagcau

SEQ ID NO: 1859627 - RNA, 19 nt, Homo sapiens
  misc_RNA (1)...(19): siRNA sense strand
gaugauggagaaccuagug

SEQ ID NO: 1859628 - RNA, 19 nt, Homo sapiens
  misc_RNA (1)...(19): siRNA sense strand
uaaagaagcuggggaaacu

SEQ ID NO: 1859629 - RNA, 19 nt, Homo sapiens
  misc_RNA (1)...(19): siRNA sense strand
ggacacaggaggcauacac

SEQ ID NO: 1859630 - RNA, 19 nt, Homo sapiens
  misc_RNA (1)...(19): siRNA sense strand
guuacuagaagaaguggaa

SEQ ID NO: 1859631 - RNA, 19 nt, Homo sapiens
  misc_RNA (1)...(19): siRNA sense strand
caaugucucuggguguauc

SEQ ID NO: 1859632 - RNA, 19 nt, Homo sapiens
  misc_RNA (1)...(19): siRNA sense strand
ucgcagagccuccauugca

SEQ ID NO: 1859633 - RNA, 19 nt, Homo sapiens
  misc_RNA (1)...(19): siRNA sense strand
gaagcugaaggcugcguau

SEQ ID NO: 1859634 - RNA, 19 nt, Homo sapiens
  misc_RNA (1)...(19): siRNA sense strand
uguauacuccgaugaagga

SEQ ID NO: 1859635 - RNA, 19 nt, Homo sapiens
  misc_RNA (1)...(19): siRNA sense strand
ggaaggccaagcucaagag

SEQ ID NO: 1859636 - RNA, 19 nt, Homo sapiens
  misc_RNA (1)...(19): siRNA sense strand
gucacaaagcuguaagaaa

SEQ ID NO: 1859637 - RNA, 19 nt, Homo sapiens
  misc_RNA (1)...(19): siRNA sense strand
cucaaugucucugggugua

SEQ ID NO: 1859638 - RNA, 19 nt, Homo sapiens
  misc_RNA (1)...(19): siRNA sense strand
gaggagcauccacuauauc

SEQ ID NO: 1859639 - RNA, 19 nt, Homo sapiens
  misc_RNA (1)...(19): siRNA sense strand
uggagaaccuagugauugc

SEQ ID NO: 1859640 - RNA, 19 nt, Homo sapiens
  misc_RNA (1)...(19): siRNA sense strand
gcagaugauggagaaccua

SEQ ID NO: 1859641 - RNA, 19 nt, Homo sapiens
  misc_RNA (1)...(19): siRNA sense strand
aggccucccugcagaauca

SEQ ID NO: 1859642 - RNA, 19 nt, Homo sapiens
  misc_RNA (1)...(19): siRNA sense strand
ucucccagguguuacuaga

SEQ ID NO: 1859643 - RNA, 19 nt, Homo sapiens
  misc_RNA (1)...(19): siRNA sense strand
gcuaaccaccgcagcucaa

SEQ ID NO: 1859644 - RNA, 19 nt, Homo sapiens
  misc_RNA (1)...(19): siRNA sense strand
guggugguguuccuugcuu

SEQ ID NO: 1859645 - RNA, 19 nt, Homo sapiens
  misc_RNA (1)...(19): siRNA sense strand
caggaggcauacacggaau

SEQ ID NO: 1859646 - RNA, 19 nt, Homo sapiens
  misc_RNA (1)...(19): siRNA sense strand
acaaagcuguaagaaagag

SEQ ID NO: 1859647 - RNA, 19 nt, Homo sapiens
  misc_RNA (1)...(19): siRNA sense strand
cagagucacaaagcuguaa

SEQ ID NO: 1859648 - RNA, 19 nt, Homo sapiens
  misc_RNA (1)...(19): siRNA sense strand
gggcaccuggccggaauaa

SEQ ID NO: 1859649 - RNA, 19 nt, Homo sapiens
  misc_RNA (1)...(19): siRNA sense strand
cacaaagcuguaagaaaga

SEQ ID NO: 1859650 - RNA, 19 nt, Homo sapiens
  misc_RNA (1)...(19): siRNA sense strand
gguguuacuagaagaagug

SEQ ID NO: 1859651 - RNA, 19 nt, Homo sapiens
  misc_RNA (1)...(19): siRNA sense strand
ccagguguuacuagaagaa

SEQ ID NO: 1859652 - RNA, 19 nt, Homo sapiens
  misc_RNA (1)...(19): siRNA sense strand
uccaagaugcugaaacuag

SEQ ID NO: 1859653 - RNA, 19 nt, Homo sapiens
  misc_RNA (1)...(19): siRNA sense strand
ccagccaggccaugcagaa

SEQ ID NO: 1859654 - RNA, 19 nt, Homo sapiens
  misc_RNA (1)...(19): siRNA sense strand
ugaagaagcucaagaguaa

SEQ ID NO: 1859655 - RNA, 19 nt, Homo sapiens
  misc_RNA (1)...(19): siRNA sense strand
gaagaaguauggccaaguc

SEQ ID NO: 1859656 - RNA, 19 nt, Homo sapiens
  misc_RNA (1)...(19): siRNA sense strand
guaaacguguucccaucua

SEQ ID NO: 1859657 - RNA, 19 nt, Homo sapiens
  misc_RNA (1)...(19): siRNA sense strand
gcaauuccuuccuccugaa

SEQ ID NO: 1859658 - RNA, 19 nt, Homo sapiens
  misc_RNA (1)...(19): siRNA sense strand
gaucgaagcgcugcaagaa

SEQ ID NO: 1859659 - RNA, 19 nt, Homo sapiens
  misc_RNA (1)...(19): siRNA sense strand
gcucaagaguaaacguguu

SEQ ID NO: 1859660 - RNA, 19 nt, Homo sapiens
  misc_RNA (1)...(19): siRNA sense strand
ucgaagcgcugcaagaagu

SEQ ID NO: 1859661 - RNA, 19 nt, Homo sapiens
  misc_RNA (1)...(19): siRNA sense strand
caucuacucugccguggau

SEQ ID NO: 1859662 - RNA, 19 nt, Homo sapiens
  misc_RNA (1)...(19): siRNA sense strand
uaaacguguucccaucuau

SEQ ID NO: 1859663 - RNA, 19 nt, Homo sapiens
  misc_RNA (1)...(19): siRNA sense strand
ggugagcagugugcaguga

SEQ ID NO: 1859664 - RNA, 19 nt, Homo sapiens
  misc_RNA (1)...(19): siRNA sense strand
gaagaagcucaagaguaaa

SEQ ID NO: 1859665 - RNA, 19 nt, Homo sapiens
  misc_RNA (1)...(19): siRNA sense strand
ccaucuaugagaagaagua

SEQ ID NO: 1859666 - RNA, 19 nt, Homo sapiens
  misc_RNA (1)...(19): siRNA sense strand
cccgagcccuggacaucua

SEQ ID NO: 1859667 - RNA, 19 nt, Homo sapiens
  misc_RNA (1)...(19): siRNA sense strand
gggcaaggaucgggaagcu

SEQ ID NO: 1859668 - RNA, 19 nt, Homo sapiens
  misc_RNA (1)...(19): siRNA sense strand
gcagugugcagugaggaaa

SEQ ID NO: 1859669 - RNA, 19 nt, Homo sapiens
  misc_RNA (1)...(19): siRNA sense strand
ggaucgggaagcuguguga

SEQ ID NO: 1859670 - RNA, 19 nt, Homo sapiens
  misc_RNA (1)...(19): siRNA sense strand
gaaccuccugcaauuccuu

SEQ ID NO: 1859671 - RNA, 19 nt, Homo sapiens
  misc_RNA (1)...(19): siRNA sense strand
ucuaugagaagaaguaugg

SEQ ID NO: 1859672 - RNA, 19 nt, Homo sapiens
  misc_RNA (1)...(19): siRNA sense strand
guucccaucuaugagaaga

SEQ ID NO: 1859673 - RNA, 19 nt, Homo sapiens
  misc_RNA (1)...(19): siRNA sense strand
cgagaaggagcugaucgaa

SEQ ID NO: 1859674 - RNA, 19 nt, Homo sapiens
  misc_RNA (1)...(19): siRNA sense strand
ugacgccggugagcagugu

SEQ ID NO: 1859675 - RNA, 19 nt, Homo sapiens
  misc_RNA (1)...(19): siRNA sense strand
gcugaugcuaccucuguug

SEQ ID NO: 1859676 - RNA, 19 nt, Homo sapiens
  misc_RNA (1)...(19): siRNA sense strand
ggaaagcccuggagaguca

SEQ ID NO: 1859677 - RNA, 19 nt, Homo sapiens
  misc_RNA (1)...(19): siRNA sense strand
cuaagaggcuggaacaugu

SEQ ID NO: 1859678 - RNA, 19 nt, Homo sapiens
  misc_RNA (1)...(19): siRNA sense strand
ccaccaagcgggagaaauu

SEQ ID NO: 1859679 - RNA, 19 nt, Homo sapiens
  misc_RNA (1)...(19): siRNA sense strand
caagagaagcuucaaagug

SEQ ID NO: 1859680 - RNA, 19 nt, Homo sapiens
  misc_RNA (1)...(19): siRNA sense strand
gaacauguccuggagaagu

SEQ ID NO: 1859681 - RNA, 19 nt, Homo sapiens
  misc_RNA (1)...(19): siRNA sense strand
cgggagaaauucaagagaa

SEQ ID NO: 1859682 - RNA, 19 nt, Homo sapiens
  misc_RNA (1)...(19): siRNA sense strand
ugacccagcccaacacuuu

SEQ ID NO: 1859683 - RNA, 19 nt, Homo sapiens
  misc_RNA (1)...(19): siRNA sense strand
ccacgcagccacucacaaa

SEQ ID NO: 1859684 - RNA, 19 nt, Homo sapiens
  misc_RNA (1)...(19): siRNA sense strand
gggagaaauucaagagaag

SEQ ID NO: 1859685 - RNA, 19 nt, Homo sapiens
  misc_RNA (1)...(19): siRNA sense strand
gcuccucccucaacaucaa

SEQ ID NO: 1859686 - RNA, 19 nt, Homo sapiens
  misc_RNA (1)...(19): siRNA sense strand
gcccuagccuuccgccuau

SEQ ID NO: 1859687 - RNA, 19 nt, Homo sapiens
  misc_RNA (1)...(19): siRNA sense strand
uggaacauguccuggagaa

SEQ ID NO: 1859688 - RNA, 19 nt, Homo sapiens
  misc_RNA (1)...(19): siRNA sense strand
cuggagaagucauugcauu

SEQ ID NO: 1859689 - RNA, 19 nt, Homo sapiens
  misc_RNA (1)...(19): siRNA sense strand
gcauugcucugugcucaag

SEQ ID NO: 1859690 - RNA, 19 nt, Homo sapiens
  misc_RNA (1)...(19): siRNA sense strand
caguagaguuggagcaagu

SEQ ID NO: 1859691 - RNA, 19 nt, Homo sapiens
  misc_RNA (1)...(19): siRNA sense strand
ccgaguagccuaucaggau

SEQ ID NO: 1859692 - RNA, 19 nt, Homo sapiens
  misc_RNA (1)...(19): siRNA sense strand
gagcccagccugcuuacug

SEQ ID NO: 1859693 - RNA, 19 nt, Homo sapiens
  misc_RNA (1)...(19): siRNA sense strand
ccugcaagcugcucuacau

SEQ ID NO: 1859694 - RNA, 19 nt, Homo sapiens
  misc_RNA (1)...(19): siRNA sense strand
gccaccaaguuccgaguga

SEQ ID NO: 1859695 - RNA, 19 nt, Homo sapiens
  misc_RNA (1)...(19): siRNA sense strand
gcucauguucccagaccua

SEQ ID NO: 1859696 - RNA, 19 nt, Homo sapiens
  misc_RNA (1)...(19): siRNA sense strand
gagaagucauugcauugcu

SEQ ID NO: 1859697 - RNA, 19 nt, Homo sapiens
  misc_RNA (1)...(19): siRNA sense strand
gagcuccucccucaacauc

SEQ ID NO: 1859698 - RNA, 19 nt, Homo sapiens
  misc_RNA (1)...(19): siRNA sense strand
ccagggacauucgggaaca

SEQ ID NO: 1859699 - RNA, 19 nt, Homo sapiens
  misc_RNA (1)...(19): siRNA sense strand
ccuaagaggcuggaacaug

SEQ ID NO: 1859700 - RNA, 19 nt, Homo sapiens
  misc_RNA (1)...(19): siRNA sense strand
cccaggacccacuguauga

SEQ ID NO: 1859701 - RNA, 19 nt, Homo sapiens
  misc_RNA (1)...(19): siRNA sense strand
uguaugacgugcccaaugc

SEQ ID NO: 1859702 - RNA, 19 nt, Homo sapiens
  misc_RNA (1)...(19): siRNA sense strand
aagcucgugucgccuaaga

SEQ ID NO: 1859703 - RNA, 19 nt, Homo sapiens
  misc_RNA (1)...(19): siRNA sense strand
gcccaggacccacuguaug

SEQ ID NO: 1859704 - RNA, 19 nt, Homo sapiens
  misc_RNA (1)...(19): siRNA sense strand
ggagccgccuugugcuucu

SEQ ID NO: 1859705 - RNA, 19 nt, Homo sapiens
  misc_RNA (1)...(19): siRNA sense strand
gcucugugccaccaaguuc

SEQ ID NO: 1859706 - RNA, 19 nt, Homo sapiens
  misc_RNA (1)...(19): siRNA sense strand
agaagcucgugucgccuaa

SEQ ID NO: 1859707 - RNA, 19 nt, Homo sapiens
  misc_RNA (1)...(19): siRNA sense strand
ggacauucgggaacagucu

SEQ ID NO: 1859708 - RNA, 19 nt, Homo sapiens
  misc_RNA (1)...(19): siRNA sense strand
ucaagagaagcuucaaagu

SEQ ID NO: 1859709 - RNA, 19 nt, Homo sapiens
  misc_RNA (1)...(19): siRNA sense strand
cagcaccuccuccgaguag

SEQ ID NO: 1859710 - RNA, 19 nt, Homo sapiens
  misc_RNA (1)...(19): siRNA sense strand
uggagaggguggcuacuac

SEQ ID NO: 1859711 - RNA, 19 nt, Homo sapiens
  misc_RNA (1)...(19): siRNA sense strand
gugcgcguguccacagaga

SEQ ID NO: 1859712 - RNA, 19 nt, Homo sapiens
  misc_RNA (1)...(19): siRNA sense strand
ggagaagucauugcauugc

SEQ ID NO: 1859713 - RNA, 19 nt, Homo sapiens
  misc_RNA (1)...(19): siRNA sense strand
cgagugacccagcccaaca

SEQ ID NO: 1859714 - RNA, 19 nt, Homo sapiens
  misc_RNA (1)...(19): siRNA sense strand
gcuggaggccgaguacaug

SEQ ID NO: 1859715 - RNA, 19 nt, Homo sapiens
  misc_RNA (1)...(19): siRNA sense strand
gggcaccuggcgagagaaa

SEQ ID NO: 1859716 - RNA, 19 nt, Homo sapiens
  misc_RNA (1)...(19): siRNA sense strand
uggagaagucauugcauug

SEQ ID NO: 1859717 - RNA, 19 nt, Homo sapiens
  misc_RNA (1)...(19): siRNA sense strand
ccaagcgggagaaauucaa

SEQ ID NO: 1859718 - RNA, 19 nt, Homo sapiens
  misc_RNA (1)...(19): siRNA sense strand
ggacuaaggaucaccauua

SEQ ID NO: 1859719 - RNA, 19 nt, Homo sapiens
  misc_RNA (1)...(19): siRNA sense strand
gcaaucgggugguaucaua

SEQ ID NO: 1859720 - RNA, 19 nt, Homo sapiens
  misc_RNA (1)...(19): siRNA sense strand
ggauugaugucucagguua

SEQ ID NO: 1859721 - RNA, 19 nt, Homo sapiens
  misc_RNA (1)...(19): siRNA sense strand
auacauggcugcauacaua

SEQ ID NO: 1859722 - RNA, 19 nt, Homo sapiens
  misc_RNA (1)...(19): siRNA sense strand
guacucagaugcucaauca

SEQ ID NO: 1859723 - RNA, 19 nt, Homo sapiens
  misc_RNA (1)...(19): siRNA sense strand
cuacaaaccuccugaugaa

SEQ ID NO: 1859724 - RNA, 19 nt, Homo sapiens
  misc_RNA (1)...(19): siRNA sense strand
ggugaaaccaugaucauua

SEQ ID NO: 1859725 - RNA, 19 nt, Homo sapiens
  misc_RNA (1)...(19): siRNA sense strand
ccuuagaagucucauauuu

SEQ ID NO: 1859726 - RNA, 19 nt, Homo sapiens
  misc_RNA (1)...(19): siRNA sense strand
gcaggaagcucagaguauc

SEQ ID NO: 1859727 - RNA, 19 nt, Homo sapiens
  misc_RNA (1)...(19): siRNA sense strand
gugaaaccaugaucauuau

SEQ ID NO: 1859728 - RNA, 19 nt, Homo sapiens
  misc_RNA (1)...(19): siRNA sense strand
ggaguuucauguuggguuu

SEQ ID NO: 1859729 - RNA, 19 nt, Homo sapiens
  misc_RNA (1)...(19): siRNA sense strand
cuacaaauacgacaagaaa

SEQ ID NO: 1859730 - RNA, 19 nt, Homo sapiens
  misc_RNA (1)...(19): siRNA sense strand
gugaauacguugaguucuu

SEQ ID NO: 1859731 - RNA, 19 nt, Homo sapiens
  misc_RNA (1)...(19): siRNA sense strand
gagcuguuguggaauaaau

SEQ ID NO: 1859732 - RNA, 19 nt, Homo sapiens
  misc_RNA (1)...(19): siRNA sense strand
ggucaggucuuugauuugu

SEQ ID NO: 1859733 - RNA, 19 nt, Homo sapiens
  misc_RNA (1)...(19): siRNA sense strand
gaguaucgaugaaaucuac

SEQ ID NO: 1859734 - RNA, 19 nt, Homo sapiens
  misc_RNA (1)...(19): siRNA sense strand
gaugaaaucuacaaauacg

SEQ ID NO: 1859735 - RNA, 19 nt, Homo sapiens
  misc_RNA (1)...(19): siRNA sense strand
gguguacacugcaaacaau

SEQ ID NO: 1859736 - RNA, 19 nt, Homo sapiens
  misc_RNA (1)...(19): siRNA sense strand
ggcuauggcugcuggcuuu

SEQ ID NO: 1859737 - RNA, 19 nt, Homo sapiens
  misc_RNA (1)...(19): siRNA sense strand
ggugauugauccaacaaga

SEQ ID NO: 1859738 - RNA, 19 nt, Homo sapiens
  misc_RNA (1)...(19): siRNA sense strand
ggauugauguuaguacuca

SEQ ID NO: 1859739 - RNA, 19 nt, Homo sapiens
  misc_RNA (1)...(19): siRNA sense strand
gcgaagcccuggacuaagg

SEQ ID NO: 1859740 - RNA, 19 nt, Homo sapiens
  misc_RNA (1)...(19): siRNA sense strand
gcuacaaaccuccugauga

SEQ ID NO: 1859741 - RNA, 19 nt, Homo sapiens
  misc_RNA (1)...(19): siRNA sense strand
gcagggaaagugaaucuug

SEQ ID NO: 1859742 - RNA, 19 nt, Homo sapiens
  misc_RNA (1)...(19): siRNA sense strand
gauccaacaagaacaauau

SEQ ID NO: 1859743 - RNA, 19 nt, Homo sapiens
  misc_RNA (1)...(19): siRNA sense strand
gaauaaauacugggugaau

SEQ ID NO: 1859744 - RNA, 19 nt, Homo sapiens
  misc_RNA (1)...(19): siRNA sense strand
caaauugcuugagcuguug

SEQ ID NO: 1859745 - RNA, 19 nt, Homo sapiens
  misc_RNA (1)...(19): siRNA sense strand
ggaacuggccaacaacaug

SEQ ID NO: 1859746 - RNA, 19 nt, Homo sapiens
  misc_RNA (1)...(19): siRNA sense strand
agagacagcuguaaaacua

SEQ ID NO: 1859747 - RNA, 19 nt, Homo sapiens
  misc_RNA (1)...(19): siRNA sense strand
ucuucuagcuugcuuacua

SEQ ID NO: 1859748 - RNA, 19 nt, Homo sapiens
  misc_RNA (1)...(19): siRNA sense strand
augaauacauggcugcaua

SEQ ID NO: 1859749 - RNA, 19 nt, Homo sapiens
  misc_RNA (1)...(19): siRNA sense strand
gcacugaaacccgaguaaa

SEQ ID NO: 1859750 - RNA, 19 nt, Homo sapiens
  misc_RNA (1)...(19): siRNA sense strand
guaccagacuauuccacuu

SEQ ID NO: 1859751 - RNA, 19 nt, Homo sapiens
  misc_RNA (1)...(19): siRNA sense strand
ugucucagguuauuaagga

SEQ ID NO: 1859752 - RNA, 19 nt, Homo sapiens
  misc_RNA (1)...(19): siRNA sense strand
cuugagcuguuguggaaua

SEQ ID NO: 1859753 - RNA, 19 nt, Homo sapiens
  misc_RNA (1)...(19): siRNA sense strand
ggacgagggaguuucaugu

SEQ ID NO: 1859754 - RNA, 19 nt, Homo sapiens
  misc_RNA (1)...(19): siRNA sense strand
agaaacagcagcaagaaau

SEQ ID NO: 1859755 - RNA, 19 nt, Homo sapiens
  misc_RNA (1)...(19): siRNA sense strand
ccugggaacuggccaacaa

SEQ ID NO: 1859756 - RNA, 19 nt, Homo sapiens
  misc_RNA (1)...(19): siRNA sense strand
ggagcgguauggcccagaa

SEQ ID NO: 1859757 - RNA, 19 nt, Homo sapiens
  misc_RNA (1)...(19): siRNA sense strand
gaaacagcagcaagaaauc

SEQ ID NO: 1859758 - RNA, 19 nt, Homo sapiens
  misc_RNA (1)...(19): siRNA sense strand
cuggucaggucuuugauuu

SEQ ID NO: 1859759 - RNA, 19 nt, Homo sapiens
  misc_RNA (1)...(19): siRNA sense strand
caagaaacagcagcaagaa

SEQ ID NO: 1859760 - RNA, 19 nt, Homo sapiens
  misc_RNA (1)...(19): siRNA sense strand
uagaaacgcaugaccgaaa

SEQ ID NO: 1859761 - RNA, 19 nt, Homo sapiens
  misc_RNA (1)...(19): siRNA sense strand
ccacuggucaggucuuuga

SEQ ID NO: 1859762 - RNA, 19 nt, Homo sapiens
  misc_RNA (1)...(19): siRNA sense strand
cuaaggaucaccauuacuu

SEQ ID NO: 1859763 - RNA, 19 nt, Homo sapiens
  misc_RNA (1)...(19): siRNA sense strand
gacuaaggaucaccauuac

SEQ ID NO: 1859764 - RNA, 19 nt, Homo sapiens
  misc_RNA (1)...(19): siRNA sense strand
guacacugcaaacaauauu

SEQ ID NO: 1859765 - RNA, 19 nt, Homo sapiens
  misc_RNA (1)...(19): siRNA sense strand
aaggaucaccauuacuuua

SEQ ID NO: 1859766 - RNA, 19 nt, Homo sapiens
  misc_RNA (1)...(19): siRNA sense strand
ugaauacguugaguucuuc

SEQ ID NO: 1859767 - RNA, 19 nt, Homo sapiens
  misc_RNA (1)...(19): siRNA sense strand
acaagaaacagcagcaaga

SEQ ID NO: 1859768 - RNA, 19 nt, Homo sapiens
  misc_RNA (1)...(19): siRNA sense strand
acaaauacgacaagaaaca

SEQ ID NO: 1859769 - RNA, 19 nt, Homo sapiens
  misc_RNA (1)...(19): siRNA sense strand
uaccagacuauuccacuua

SEQ ID NO: 1859770 - RNA, 19 nt, Homo sapiens
  misc_RNA (1)...(19): siRNA sense strand
cggcgaagcccuggacuaa

SEQ ID NO: 1859771 - RNA, 19 nt, Homo sapiens
  misc_RNA (1)...(19): siRNA sense strand
uaaggaucaccauuacuuu

SEQ ID NO: 1859772 - RNA, 19 nt, Homo sapiens
  misc_RNA (1)...(19): siRNA sense strand
ucaggcugcugcauaugaa

SEQ ID NO: 1859773 - RNA, 19 nt, Homo sapiens
  misc_RNA (1)...(19): siRNA sense strand
gaagacaaacuugccaaag

SEQ ID NO: 1859774 - RNA, 19 nt, Homo sapiens
  misc_RNA (1)...(19): siRNA sense strand
gcucagaguaucgaugaaa

SEQ ID NO: 1859775 - RNA, 19 nt, Homo sapiens
  misc_RNA (1)...(19): siRNA sense strand
ggaucaccauuacuuuaag

SEQ ID NO: 1859776 - RNA, 19 nt, Homo sapiens
  misc_RNA (1)...(19): siRNA sense strand
cuucuagcuugcuuacuaa

SEQ ID NO: 1859777 - RNA, 19 nt, Homo sapiens
  misc_RNA (1)...(19): siRNA sense strand
aauacugggugaauacguu

SEQ ID NO: 1859778 - RNA, 19 nt, Homo sapiens
  misc_RNA (1)...(19): siRNA sense strand
aacaauauccgcagggaaa

SEQ ID NO: 1859779 - RNA, 19 nt, Homo sapiens
  misc_RNA (1)...(19): siRNA sense strand
ggucuuugauuugucugaa

SEQ ID NO: 1859780 - RNA, 19 nt, Homo sapiens
  misc_RNA (1)...(19): siRNA sense strand
ugaugucucagguuauuaa

SEQ ID NO: 1859781 - RNA, 19 nt, Homo sapiens
  misc_RNA (1)...(19): siRNA sense strand
agacaaacuugccaaagcu

SEQ ID NO: 1859782 - RNA, 19 nt, Homo sapiens
  misc_RNA (1)...(19): siRNA sense strand
cauuggcucugcugaagau

SEQ ID NO: 1859783 - RNA, 19 nt, Homo sapiens
  misc_RNA (1)...(19): siRNA sense strand
ggaaagguggauggugaaa

SEQ ID NO: 1859784 - RNA, 19 nt, Homo sapiens
  misc_RNA (1)...(19): siRNA sense strand
ugcuugagcuguuguggaa

SEQ ID NO: 1859785 - RNA, 19 nt, Homo sapiens
  misc_RNA (1)...(19): siRNA sense strand
ccaggaaccauuuguagca

SEQ ID NO: 1859786 - RNA, 19 nt, Homo sapiens
  misc_RNA (1)...(19): siRNA sense strand
ggaagugaugggucugaug

SEQ ID NO: 1859787 - RNA, 19 nt, Homo sapiens
  misc_RNA (1)...(19): siRNA sense strand
acgagggaguuucauguug

SEQ ID NO: 1859788 - RNA, 19 nt, Homo sapiens
  misc_RNA (1)...(19): siRNA sense strand
gacgagggaguuucauguu

SEQ ID NO: 1859789 - RNA, 19 nt, Homo sapiens
  misc_RNA (1)...(19): siRNA sense strand
ugaucauuauggacaguuu

SEQ ID NO: 1859790 - RNA, 19 nt, Homo sapiens
  misc_RNA (1)...(19): siRNA sense strand
aggaucaccauuacuuuaa

SEQ ID NO: 1859791 - RNA, 19 nt, Homo sapiens
  misc_RNA (1)...(19): siRNA sense strand
gacaaacuugccaaagcua

SEQ ID NO: 1859792 - RNA, 19 nt, Homo sapiens
  misc_RNA (1)...(19): siRNA sense strand
aagacaaacuugccaaagc

SEQ ID NO: 1859793 - RNA, 19 nt, Homo sapiens
  misc_RNA (1)...(19): siRNA sense strand
gcuuacuaaugcagacuau

SEQ ID NO: 1859794 - RNA, 19 nt, Homo sapiens
  misc_RNA (1)...(19): siRNA sense strand
ggaauaaauacugggugaa

SEQ ID NO: 1859795 - RNA, 19 nt, Homo sapiens
  misc_RNA (1)...(19): siRNA sense strand
accagacuauuccacuuaa

SEQ ID NO: 1859796 - RNA, 19 nt, Homo sapiens
  misc_RNA (1)...(19): siRNA sense strand
aaaguuagagcagucagaa

SEQ ID NO: 1859797 - RNA, 19 nt, Homo sapiens
  misc_RNA (1)...(19): siRNA sense strand
cuagcuugcuuacuaaugc

SEQ ID NO: 1859798 - RNA, 19 nt, Homo sapiens
  misc_RNA (1)...(19): siRNA sense strand
gugauugauccaacaagaa

SEQ ID NO: 1859799 - RNA, 19 nt, Homo sapiens
  misc_RNA (1)...(19): siRNA sense strand
aaucuuggcgccuuuagga

SEQ ID NO: 1859800 - RNA, 19 nt, Homo sapiens
  misc_RNA (1)...(19): siRNA sense strand
aaagguggauggugaaacc

SEQ ID NO: 1859801 - RNA, 19 nt, Homo sapiens
  misc_RNA (1)...(19): siRNA sense strand
aagcucagaguaucgauga

SEQ ID NO: 1859802 - RNA, 19 nt, Homo sapiens
  misc_RNA (1)...(19): siRNA sense strand
ucaggucuuugauuugucu

SEQ ID NO: 1859803 - RNA, 19 nt, Homo sapiens
  misc_RNA (1)...(19): siRNA sense strand
gggugaauacguugaguuc

SEQ ID NO: 1859804 - RNA, 19 nt, Homo sapiens
  misc_RNA (1)...(19): siRNA sense strand
cuuagaagucucauauuuc

SEQ ID NO: 1859805 - RNA, 19 nt, Homo sapiens
  misc_RNA (1)...(19): siRNA sense strand
ccagacuauuccacuuaau

SEQ ID NO: 1859806 - RNA, 19 nt, Homo sapiens
  misc_RNA (1)...(19): siRNA sense strand
cacugaaacccgaguaaau

SEQ ID NO: 1859807 - RNA, 19 nt, Homo sapiens
  misc_RNA (1)...(19): siRNA sense strand
auugaugucucagguuauu

SEQ ID NO: 1859808 - RNA, 19 nt, Homo sapiens
  misc_RNA (1)...(19): siRNA sense strand
cgaugaaaucuacaaauac

SEQ ID NO: 1859809 - RNA, 19 nt, Homo sapiens
  misc_RNA (1)...(19): siRNA sense strand
aagaaacagcagcaagaaa

SEQ ID NO: 1859810 - RNA, 19 nt, Homo sapiens
  misc_RNA (1)...(19): siRNA sense strand
uuucugggauugauguuag

SEQ ID NO: 1859811 - RNA, 19 nt, Homo sapiens
  misc_RNA (1)...(19): siRNA sense strand
agugaugggucugaugcua

SEQ ID NO: 1859812 - RNA, 19 nt, Homo sapiens
  misc_RNA (1)...(19): siRNA sense strand
uuacuaaugcagacuauac

SEQ ID NO: 1859813 - RNA, 19 nt, Homo sapiens
  misc_RNA (1)...(19): siRNA sense strand
uauuaugccuuagaagucu

SEQ ID NO: 1859814 - RNA, 19 nt, Homo sapiens
  misc_RNA (1)...(19): siRNA sense strand
gcauuggcucugcugaaga

SEQ ID NO: 1859815 - RNA, 19 nt, Homo sapiens
  misc_RNA (1)...(19): siRNA sense strand
ccgaaaaucagaagacaaa

SEQ ID NO: 1859816 - RNA, 19 nt, Homo sapiens
  misc_RNA (1)...(19): siRNA sense strand
ucucagguuauuaaggaua

SEQ ID NO: 1859817 - RNA, 19 nt, Homo sapiens
  misc_RNA (1)...(19): siRNA sense strand
agaagacaaacuugccaaa

SEQ ID NO: 1859818 - RNA, 19 nt, Homo sapiens
  misc_RNA (1)...(19): siRNA sense strand
gagcagcggauuccaguuu

SEQ ID NO: 1859819 - RNA, 19 nt, Homo sapiens
  misc_RNA (1)...(19): siRNA sense strand
cauaucagccggagaggaa

SEQ ID NO: 1859820 - RNA, 19 nt, Homo sapiens
  misc_RNA (1)...(19): siRNA sense strand
ggccuggcaucuacgaaga

SEQ ID NO: 1859821 - RNA, 19 nt, Homo sapiens
  misc_RNA (1)...(19): siRNA sense strand
gcagcugguccuaacauau

SEQ ID NO: 1859822 - RNA, 19 nt, Homo sapiens
  misc_RNA (1)...(19): siRNA sense strand
cagcugguccuaacauauc

SEQ ID NO: 1859823 - RNA, 19 nt, Homo sapiens
  misc_RNA (1)...(19): siRNA sense strand
gcagcggauuccaguuucu

SEQ ID NO: 1859824 - RNA, 19 nt, Homo sapiens
  misc_RNA (1)...(19): siRNA sense strand
gagcagcugguccuaacau

SEQ ID NO: 1859825 - RNA, 19 nt, Homo sapiens
  misc_RNA (1)...(19): siRNA sense strand
gaccauggccagauugacu

SEQ ID NO: 1859826 - RNA, 19 nt, Homo sapiens
  misc_RNA (1)...(19): siRNA sense strand
cagcaucacagugcacuug

SEQ ID NO: 1859827 - RNA, 19 nt, Homo sapiens
  misc_RNA (1)...(19): siRNA sense strand
ggagaaccugggugacugu

SEQ ID NO: 1859828 - RNA, 19 nt, Homo sapiens
  misc_RNA (1)...(19): siRNA sense strand
gcagaccauggccagauug

SEQ ID NO: 1859829 - RNA, 19 nt, Homo sapiens
  misc_RNA (1)...(19): siRNA sense strand
gcagauaugaacccagcau

SEQ ID NO: 1859830 - RNA, 19 nt, Homo sapiens
  misc_RNA (1)...(19): siRNA sense strand
cgaagcuucugugcgucua

SEQ ID NO: 1859831 - RNA, 19 nt, Homo sapiens
  misc_RNA (1)...(19): siRNA sense strand
uggagcagcugguccuaac

SEQ ID NO: 1859832 - RNA, 19 nt, Homo sapiens
  misc_RNA (1)...(19): siRNA sense strand
gaaagaauaugcccaaguu

SEQ ID NO: 1859833 - RNA, 19 nt, Homo sapiens
  misc_RNA (1)...(19): siRNA sense strand
gcaaagagcggaaaugaaa

SEQ ID NO: 1859834 - RNA, 19 nt, Homo sapiens
  misc_RNA (1)...(19): siRNA sense strand
gaagaagaaugccacaaug

SEQ ID NO: 1859835 - RNA, 19 nt, Homo sapiens
  misc_RNA (1)...(19): siRNA sense strand
aaagaaagcccauguacua

SEQ ID NO: 1859836 - RNA, 19 nt, Homo sapiens
  misc_RNA (1)...(19): siRNA sense strand
gcaggaagauuaugaugug

SEQ ID NO: 1859837 - RNA, 19 nt, Homo sapiens
  misc_RNA (1)...(19): siRNA sense strand
gaauaauacuggaaggaaa

SEQ ID NO: 1859838 - RNA, 19 nt, Homo sapiens
  misc_RNA (1)...(19): siRNA sense strand
ucacauaucugacucuuuc

SEQ ID NO: 1859839 - RNA, 19 nt, Homo sapiens
  misc_RNA (1)...(19): siRNA sense strand
gauauuccaucaagagaaa

SEQ ID NO: 1859840 - RNA, 19 nt, Homo sapiens
  misc_RNA (1)...(19): siRNA sense strand
caaccgagauuauguguuc

SEQ ID NO: 1859841 - RNA, 19 nt, Homo sapiens
  misc_RNA (1)...(19): siRNA sense strand
cagaagaacuagaggauga

SEQ ID NO: 1859842 - RNA, 19 nt, Homo sapiens
  misc_RNA (1)...(19): siRNA sense strand
gcagaugucaugagacuuu

SEQ ID NO: 1859843 - RNA, 19 nt, Homo sapiens
  misc_RNA (1)...(19): siRNA sense strand
gucaagaucucaaagaaga

SEQ ID NO: 1859844 - RNA, 19 nt, Homo sapiens
  misc_RNA (1)...(19): siRNA sense strand
gaugaaggcuccagagaag

SEQ ID NO: 1859845 - RNA, 19 nt, Homo sapiens
  misc_RNA (1)...(19): siRNA sense strand
gaaaggcugugcugaugau

SEQ ID NO: 1859846 - RNA, 19 nt, Homo sapiens
  misc_RNA (1)...(19): siRNA sense strand
uaacauggacgucuucaaa

SEQ ID NO: 1859847 - RNA, 19 nt, Homo sapiens
  misc_RNA (1)...(19): siRNA sense strand
gagucaagaucucaaagaa

SEQ ID NO: 1859848 - RNA, 19 nt, Homo sapiens
  misc_RNA (1)...(19): siRNA sense strand
gcgaguacaugaauaauac

SEQ ID NO: 1859849 - RNA, 19 nt, Homo sapiens
  misc_RNA (1)...(19): siRNA sense strand
gguagauugugaugucaua

SEQ ID NO: 1859850 - RNA, 19 nt, Homo sapiens
  misc_RNA (1)...(19): siRNA sense strand
gggcagggcuagucaacuu

SEQ ID NO: 1859851 - RNA, 19 nt, Homo sapiens
  misc_RNA (1)...(19): siRNA sense strand
ggugaaacuuaacuaugua

SEQ ID NO: 1859852 - RNA, 19 nt, Homo sapiens
  misc_RNA (1)...(19): siRNA sense strand
gaaagggaggucaaagaaa

SEQ ID NO: 1859853 - RNA, 19 nt, Homo sapiens
  misc_RNA (1)...(19): siRNA sense strand
gagaaaagccugaagaauu

SEQ ID NO: 1859854 - RNA, 19 nt, Homo sapiens
  misc_RNA (1)...(19): siRNA sense strand
cgaagcagguucucgaaug

SEQ ID NO: 1859855 - RNA, 19 nt, Homo sapiens
  misc_RNA (1)...(19): siRNA sense strand
acgcuucgcugaacaagua

SEQ ID NO: 1859856 - RNA, 19 nt, Homo sapiens
  misc_RNA (1)...(19): siRNA sense strand
ugguagagguugccaauuu

SEQ ID NO: 1859857 - RNA, 19 nt, Homo sapiens
  misc_RNA (1)...(19): siRNA sense strand
guacaggcuuuaagugaau

SEQ ID NO: 1859858 - RNA, 19 nt, Homo sapiens
  misc_RNA (1)...(19): siRNA sense strand
gugaacagaucgcuaagga

SEQ ID NO: 1859859 - RNA, 19 nt, Homo sapiens
  misc_RNA (1)...(19): siRNA sense strand
gguagagguugccaauuug

SEQ ID NO: 1859860 - RNA, 19 nt, Homo sapiens
  misc_RNA (1)...(19): siRNA sense strand
guucagagcacuuucacua

SEQ ID NO: 1859861 - RNA, 19 nt, Homo sapiens
  misc_RNA (1)...(19): siRNA sense strand
gagaagguguuggaagcua

SEQ ID NO: 1859862 - RNA, 19 nt, Homo sapiens
  misc_RNA (1)...(19): siRNA sense strand
ugacagaggccguggauga

SEQ ID NO: 1859863 - RNA, 19 nt, Homo sapiens
  misc_RNA (1)...(19): siRNA sense strand
gagcaagccacucagaauu

SEQ ID NO: 1859864 - RNA, 19 nt, Homo sapiens
  misc_RNA (1)...(19): siRNA sense strand
gacgacagcggcaaugaua

SEQ ID NO: 1859865 - RNA, 19 nt, Homo sapiens
  misc_RNA (1)...(19): siRNA sense strand
ccgggcagcucgagucaua

SEQ ID NO: 1859866 - RNA, 19 nt, Homo sapiens
  misc_RNA (1)...(19): siRNA sense strand
gcaagccacucagaauuuc

SEQ ID NO: 1859867 - RNA, 19 nt, Homo sapiens
  misc_RNA (1)...(19): siRNA sense strand
ccaaauaccagaaggucua

SEQ ID NO: 1859868 - RNA, 19 nt, Homo sapiens
  misc_RNA (1)...(19): siRNA sense strand
cauuaaugcugccaagaaa

SEQ ID NO: 1859869 - RNA, 19 nt, Homo sapiens
  misc_RNA (1)...(19): siRNA sense strand
ggaaaugacagacuucaca

SEQ ID NO: 1859870 - RNA, 19 nt, Homo sapiens
  misc_RNA (1)...(19): siRNA sense strand
cagaaaggcugugcugaug

SEQ ID NO: 1859871 - RNA, 19 nt, Homo sapiens
  misc_RNA (1)...(19): siRNA sense strand
gaagacaacaggagcugaa

SEQ ID NO: 1859872 - RNA, 19 nt, Homo sapiens
  misc_RNA (1)...(19): siRNA sense strand
ucaaagcaauggauuccuu

SEQ ID NO: 1859873 - RNA, 19 nt, Homo sapiens
  misc_RNA (1)...(19): siRNA sense strand
aagcagauguguaugauca

SEQ ID NO: 1859874 - RNA, 19 nt, Homo sapiens
  misc_RNA (1)...(19): siRNA sense strand
caagagaucuaaggagaca

SEQ ID NO: 1859875 - RNA, 19 nt, Homo sapiens
  misc_RNA (1)...(19): siRNA sense strand
gcugaaggauccucacugu

SEQ ID NO: 1859876 - RNA, 19 nt, Homo sapiens
  misc_RNA (1)...(19): siRNA sense strand
aaagggaggucaaagaaag

SEQ ID NO: 1859877 - RNA, 19 nt, Homo sapiens
  misc_RNA (1)...(19): siRNA sense strand
gaagcagguucucgaaugg

SEQ ID NO: 1859878 - RNA, 19 nt, Homo sapiens
  misc_RNA (1)...(19): siRNA sense strand
uguacuagcugccucugua

SEQ ID NO: 1859879 - RNA, 19 nt, Homo sapiens
  misc_RNA (1)...(19): siRNA sense strand
cauguaagcaggauuuauu

SEQ ID NO: 1859880 - RNA, 19 nt, Homo sapiens
  misc_RNA (1)...(19): siRNA sense strand
aaguagagguugccauuga

SEQ ID NO: 1859881 - RNA, 19 nt, Homo sapiens
  misc_RNA (1)...(19): siRNA sense strand
gccaucagcuuaauaucug

SEQ ID NO: 1859882 - RNA, 19 nt, Homo sapiens
  misc_RNA (1)...(19): siRNA sense strand
gaaaugacagacuucacaa

SEQ ID NO: 1859883 - RNA, 19 nt, Homo sapiens
  misc_RNA (1)...(19): siRNA sense strand
caagcuggaugcagaagug

SEQ ID NO: 1859884 - RNA, 19 nt, Homo sapiens
  misc_RNA (1)...(19): siRNA sense strand
ggaaaagggugaacagauc

SEQ ID NO: 1859885 - RNA, 19 nt, Homo sapiens
  misc_RNA (1)...(19): siRNA sense strand
ggcuuuaagugaauucaaa

SEQ ID NO: 1859886 - RNA, 19 nt, Homo sapiens
  misc_RNA (1)...(19): siRNA sense strand
agaggaugauucugacuuu

SEQ ID NO: 1859887 - RNA, 19 nt, Homo sapiens
  misc_RNA (1)...(19): siRNA sense strand
gacccuugcucgucgguaa

SEQ ID NO: 1859888 - RNA, 19 nt, Homo sapiens
  misc_RNA (1)...(19): siRNA sense strand
gaaagcccauguacuagcu

SEQ ID NO: 1859889 - RNA, 19 nt, Homo sapiens
  misc_RNA (1)...(19): siRNA sense strand
guucucgaauggacaaauu

SEQ ID NO: 1859890 - RNA, 19 nt, Homo sapiens
  misc_RNA (1)...(19): siRNA sense strand
gcagauguguaugaucaug

SEQ ID NO: 1859891 - RNA, 19 nt, Homo sapiens
  misc_RNA (1)...(19): siRNA sense strand
gaucgccuccuccgaguuu

SEQ ID NO: 1859892 - RNA, 19 nt, Homo sapiens
  misc_RNA (1)...(19): siRNA sense strand
caacuucaccuaucauucu

SEQ ID NO: 1859893 - RNA, 19 nt, Homo sapiens
  misc_RNA (1)...(19): siRNA sense strand
gacagugccacaucgcuua

SEQ ID NO: 1859894 - RNA, 19 nt, Homo sapiens
  misc_RNA (1)...(19): siRNA sense strand
ugagguagauugugauguc

SEQ ID NO: 1859895 - RNA, 19 nt, Homo sapiens
  misc_RNA (1)...(19): siRNA sense strand
ucaacgaauugccuuguau

SEQ ID NO: 1859896 - RNA, 19 nt, Homo sapiens
  misc_RNA (1)...(19): siRNA sense strand
caacaaacugguagagguu

SEQ ID NO: 1859897 - RNA, 19 nt, Homo sapiens
  misc_RNA (1)...(19): siRNA sense strand
ggugaaagcauccuaugug

SEQ ID NO: 1859898 - RNA, 19 nt, Homo sapiens
  misc_RNA (1)...(19): siRNA sense strand
gaucacauaucugacucuu

SEQ ID NO: 1859899 - RNA, 19 nt, Homo sapiens
  misc_RNA (1)...(19): siRNA sense strand
caaaggcccaucugguaaa

SEQ ID NO: 1859900 - RNA, 19 nt, Homo sapiens
  misc_RNA (1)...(19): siRNA sense strand
ccucucgccugguguauga

SEQ ID NO: 1859901 - RNA, 19 nt, Homo sapiens
  misc_RNA (1)...(19): siRNA sense strand
gaugugaacaaguguguga

SEQ ID NO: 1859902 - RNA, 19 nt, Homo sapiens
  misc_RNA (1)...(19): siRNA sense strand
uggugaaacuuaacuaugu

SEQ ID NO: 1859903 - RNA, 19 nt, Homo sapiens
  misc_RNA (1)...(19): siRNA sense strand
uuuaugagguagauuguga

SEQ ID NO: 1859904 - RNA, 19 nt, Homo sapiens
  misc_RNA (1)...(19): siRNA sense strand
ggagauauuccaucaagag

SEQ ID NO: 1859905 - RNA, 19 nt, Homo sapiens
  misc_RNA (1)...(19): siRNA sense strand
augcugagauggagaacua

SEQ ID NO: 1859906 - RNA, 19 nt, Homo sapiens
  misc_RNA (1)...(19): siRNA sense strand
guacacggccucucaagca

SEQ ID NO: 1859907 - RNA, 19 nt, Homo sapiens
  misc_RNA (1)...(19): siRNA sense strand
gagcggaaaugaaaaggaa

SEQ ID NO: 1859908 - RNA, 19 nt, Homo sapiens
  misc_RNA (1)...(19): siRNA sense strand
agaaaagccugaagaauuc

SEQ ID NO: 1859909 - RNA, 19 nt, Homo sapiens
  misc_RNA (1)...(19): siRNA sense strand
ccuccgaguuugcagauga

SEQ ID NO: 1859910 - RNA, 19 nt, Homo sapiens
  misc_RNA (1)...(19): siRNA sense strand
gaauucaaagcaauggauu

SEQ ID NO: 1859911 - RNA, 19 nt, Homo sapiens
  misc_RNA (1)...(19): siRNA sense strand
aaacacauuucgccuguac

SEQ ID NO: 1859912 - RNA, 19 nt, Homo sapiens
  misc_RNA (1)...(19): siRNA sense strand
caacgaauugccuuguauu

SEQ ID NO: 1859913 - RNA, 19 nt, Homo sapiens
  misc_RNA (1)...(19): siRNA sense strand
uagccuaccuucaacgaau

SEQ ID NO: 1859914 - RNA, 19 nt, Homo sapiens
  misc_RNA (1)...(19): siRNA sense strand
ccaagcagauguguaugau

SEQ ID NO: 1859915 - RNA, 19 nt, Homo sapiens
  misc_RNA (1)...(19): siRNA sense strand
agaaagggaggucaaagaa

SEQ ID NO: 1859916 - RNA, 19 nt, Homo sapiens
  misc_RNA (1)...(19): siRNA sense strand
guuggaagcuacaaaauug

SEQ ID NO: 1859917 - RNA, 19 nt, Homo sapiens
  misc_RNA (1)...(19): siRNA sense strand
gaagcagguccgaguguug

SEQ ID NO: 1859918 - RNA, 19 nt, Homo sapiens
  misc_RNA (1)...(19): siRNA sense strand
caaaguugcucaggauaac

SEQ ID NO: 1859919 - RNA, 19 nt, Homo sapiens
  misc_RNA (1)...(19): siRNA sense strand
caauguuccuuugcuaguu

SEQ ID NO: 1859920 - RNA, 19 nt, Homo sapiens
  misc_RNA (1)...(19): siRNA sense strand
cgauugauaagaugacuaa

SEQ ID NO: 1859921 - RNA, 19 nt, Homo sapiens
  misc_RNA (1)...(19): siRNA sense strand
aacaaaggcccaucuggua

SEQ ID NO: 1859922 - RNA, 19 nt, Homo sapiens
  misc_RNA (1)...(19): siRNA sense strand
gcaaacaaggugagacgau

SEQ ID NO: 1859923 - RNA, 19 nt, Homo sapiens
  misc_RNA (1)...(19): siRNA sense strand
cagcauguaagcaggauuu

SEQ ID NO: 1859924 - RNA, 19 nt, Homo sapiens
  misc_RNA (1)...(19): siRNA sense strand
ugaagaagaaugccacaau

SEQ ID NO: 1859925 - RNA, 19 nt, Homo sapiens
  misc_RNA (1)...(19): siRNA sense strand
uggaggaugugaacaagug

SEQ ID NO: 1859926 - RNA, 19 nt, Homo sapiens
  misc_RNA (1)...(19): siRNA sense strand
uguacaggcuuuaagugaa

SEQ ID NO: 1859927 - RNA, 19 nt, Homo sapiens
  misc_RNA (1)...(19): siRNA sense strand
uauguggccucaaccaaau

SEQ ID NO: 1859928 - RNA, 19 nt, Homo sapiens
  misc_RNA (1)...(19): siRNA sense strand
acaaaggcccaucugguaa

SEQ ID NO: 1859929 - RNA, 19 nt, Homo sapiens
  misc_RNA (1)...(19): siRNA sense strand
cugagcagguggagauauu

SEQ ID NO: 1859930 - RNA, 19 nt, Homo sapiens
  misc_RNA (1)...(19): siRNA sense strand
gaggaugauucugacuuug

SEQ ID NO: 1859931 - RNA, 19 nt, Homo sapiens
  misc_RNA (1)...(19): siRNA sense strand
cuacaaaauugcuuucuga

SEQ ID NO: 1859932 - RNA, 19 nt, Homo sapiens
  misc_RNA (1)...(19): siRNA sense strand
gcaauuaaaugacguggua

SEQ ID NO: 1859933 - RNA, 19 nt, Homo sapiens
  misc_RNA (1)...(19): siRNA sense strand
gagagaaccugggaaauuu

SEQ ID NO: 1859934 - RNA, 19 nt, Homo sapiens
  misc_RNA (1)...(19): siRNA sense strand
gaagcgggcauuucaguua

SEQ ID NO: 1859935 - RNA, 19 nt, Homo sapiens
  misc_RNA (1)...(19): siRNA sense strand
caaggaaggaagaauauua

SEQ ID NO: 1859936 - RNA, 19 nt, Homo sapiens
  misc_RNA (1)...(19): siRNA sense strand
gaaccagauugcaaauauu

SEQ ID NO: 1859937 - RNA, 19 nt, Homo sapiens
  misc_RNA (1)...(19): siRNA sense strand
ggaagaacccucuaccaaa

SEQ ID NO: 1859938 - RNA, 19 nt, Homo sapiens
  misc_RNA (1)...(19): siRNA sense strand
ucacagaucucauuagucu

SEQ ID NO: 1859939 - RNA, 19 nt, Homo sapiens
  misc_RNA (1)...(19): siRNA sense strand
ccaaguaacacaucaagua

SEQ ID NO: 1859940 - RNA, 19 nt, Homo sapiens
  misc_RNA (1)...(19): siRNA sense strand
gaaaguacaggcagugaaa

SEQ ID NO: 1859941 - RNA, 19 nt, Homo sapiens
  misc_RNA (1)...(19): siRNA sense strand
gaagaacccucuaccaaaa

SEQ ID NO: 1859942 - RNA, 19 nt, Homo sapiens
  misc_RNA (1)...(19): siRNA sense strand
cagacaaacuggcuauaaa

SEQ ID NO: 1859943 - RNA, 19 nt, Homo sapiens
  misc_RNA (1)...(19): siRNA sense strand
aaauacaacugcagacaaa

SEQ ID NO: 1859944 - RNA, 19 nt, Homo sapiens
  misc_RNA (1)...(19): siRNA sense strand
gagaggaguugcugagaau

SEQ ID NO: 1859945 - RNA, 19 nt, Homo sapiens
  misc_RNA (1)...(19): siRNA sense strand
ugaagaaacugaaccagau

SEQ ID NO: 1859946 - RNA, 19 nt, Homo sapiens
  misc_RNA (1)...(19): siRNA sense strand
ugaaccagauugcaaauau

SEQ ID NO: 1859947 - RNA, 19 nt, Homo sapiens
  misc_RNA (1)...(19): siRNA sense strand
caaagaagcgggcauuuca

SEQ ID NO: 1859948 - RNA, 19 nt, Homo sapiens
  misc_RNA (1)...(19): siRNA sense strand
gagccgagguaguggagua

SEQ ID NO: 1859949 - RNA, 19 nt, Homo sapiens
  misc_RNA (1)...(19): siRNA sense strand
cgagagaacaauaacaaua

SEQ ID NO: 1859950 - RNA, 19 nt, Homo sapiens
  misc_RNA (1)...(19): siRNA sense strand
gcacagugggugaugauaa

SEQ ID NO: 1859951 - RNA, 19 nt, Homo sapiens
  misc_RNA (1)...(19): siRNA sense strand
ccucagaguuaaauuagaa

SEQ ID NO: 1859952 - RNA, 19 nt, Homo sapiens
  misc_RNA (1)...(19): siRNA sense strand
gcagacaaacuggcuauaa

SEQ ID NO: 1859953 - RNA, 19 nt, Homo sapiens
  misc_RNA (1)...(19): siRNA sense strand
ucagagaaauuaccaacug

SEQ ID NO: 1859954 - RNA, 19 nt, Homo sapiens
  misc_RNA (1)...(19): siRNA sense strand
ggacgagggcauccuguuu

SEQ ID NO: 1859955 - RNA, 19 nt, Homo sapiens
  misc_RNA (1)...(19): siRNA sense strand
caagaccucuggaacaaca

SEQ ID NO: 1859956 - RNA, 19 nt, Homo sapiens
  misc_RNA (1)...(19): siRNA sense strand
gacccaagacugauuauug

SEQ ID NO: 1859957 - RNA, 19 nt, Homo sapiens
  misc_RNA (1)...(19): siRNA sense strand
cuacaaggaaggaagaaua

SEQ ID NO: 1859958 - RNA, 19 nt, Homo sapiens
  misc_RNA (1)...(19): siRNA sense strand
guaaauagaagcacugaca

SEQ ID NO: 1859959 - RNA, 19 nt, Homo sapiens
  misc_RNA (1)...(19): siRNA sense strand
caucuacuauuauccagaa

SEQ ID NO: 1859960 - RNA, 19 nt, Homo sapiens
  misc_RNA (1)...(19): siRNA sense strand
gagcaagaucacuguauuu

SEQ ID NO: 1859961 - RNA, 19 nt, Homo sapiens
  misc_RNA (1)...(19): siRNA sense strand
gaagaaacugaaccagauu

SEQ ID NO: 1859962 - RNA, 19 nt, Homo sapiens
  misc_RNA (1)...(19): siRNA sense strand
ggcaagaccucuggaacaa

SEQ ID NO: 1859963 - RNA, 19 nt, Homo sapiens
  misc_RNA (1)...(19): siRNA sense strand
ggcaacagcaauuaaauga

SEQ ID NO: 1859964 - RNA, 19 nt, Homo sapiens
  misc_RNA (1)...(19): siRNA sense strand
gcaaagaagcgggcauuuc

SEQ ID NO: 1859965 - RNA, 19 nt, Homo sapiens
  misc_RNA (1)...(19): siRNA sense strand
gaaccugggaaauuugauu

SEQ ID NO: 1859966 - RNA, 19 nt, Homo sapiens
  misc_RNA (1)...(19): siRNA sense strand
ugagagaaccugggaaauu

SEQ ID NO: 1859967 - RNA, 19 nt, Homo sapiens
  misc_RNA (1)...(19): siRNA sense strand
gcaaauauucaaagaagca

SEQ ID NO: 1859968 - RNA, 19 nt, Homo sapiens
  misc_RNA (1)...(19): siRNA sense strand
cagagaaauuaccaacuga

SEQ ID NO: 1859969 - RNA, 19 nt, Homo sapiens
  misc_RNA (1)...(19): siRNA sense strand
agagcaagaucacuguauu

SEQ ID NO: 1859970 - RNA, 19 nt, Homo sapiens
  misc_RNA (1)...(19): siRNA sense strand
uaacacaucaaguacagaa

SEQ ID NO: 1859971 - RNA, 19 nt, Homo sapiens
  misc_RNA (1)...(19): siRNA sense strand
ugagaauucuguagucauc

SEQ ID NO: 1859972 - RNA, 19 nt, Homo sapiens
  misc_RNA (1)...(19): siRNA sense strand
acccaagacugauuauuga

SEQ ID NO: 1859973 - RNA, 19 nt, Homo sapiens
  misc_RNA (1)...(19): siRNA sense strand
cagaaauuccucagagaaa

SEQ ID NO: 1859974 - RNA, 19 nt, Homo sapiens
  misc_RNA (1)...(19): siRNA sense strand
cgucacagaucucauuagu

SEQ ID NO: 1859975 - RNA, 19 nt, Homo sapiens
  misc_RNA (1)...(19): siRNA sense strand
gaccaaugcuugaugucau

SEQ ID NO: 1859976 - RNA, 19 nt, Homo sapiens
  misc_RNA (1)...(19): siRNA sense strand
ucaaagaagcauuggaaga

SEQ ID NO: 1859977 - RNA, 19 nt, Homo sapiens
  misc_RNA (1)...(19): siRNA sense strand
gccagaaauuccucagaga

SEQ ID NO: 1859978 - RNA, 19 nt, Homo sapiens
  misc_RNA (1)...(19): siRNA sense strand
ggaagagucgagagaacaa

SEQ ID NO: 1859979 - RNA, 19 nt, Homo sapiens
  misc_RNA (1)...(19): siRNA sense strand
caaagaagcauuggaagag

SEQ ID NO: 1859980 - RNA, 19 nt, Homo sapiens
  misc_RNA (1)...(19): siRNA sense strand
agagaggaguugcugagaa

SEQ ID NO: 1859981 - RNA, 19 nt, Homo sapiens
  misc_RNA (1)...(19): siRNA sense strand
ccagaggcaacagcaauua

SEQ ID NO: 1859982 - RNA, 19 nt, Homo sapiens
  misc_RNA (1)...(19): siRNA sense strand
aaacugaaccagauugcaa

SEQ ID NO: 1859983 - RNA, 19 nt, Homo sapiens
  misc_RNA (1)...(19): siRNA sense strand
ucccaagucuccgaaagua

SEQ ID NO: 1859984 - RNA, 19 nt, Homo sapiens
  misc_RNA (1)...(19): siRNA sense strand
gcugagaauucuguaguca

SEQ ID NO: 1859985 - RNA, 19 nt, Homo sapiens
  misc_RNA (1)...(19): siRNA sense strand
gagaaccugggaaauuuga

SEQ ID NO: 1859986 - RNA, 19 nt, Homo sapiens
  misc_RNA (1)...(19): siRNA sense strand
uauagucuguuaccacugu

SEQ ID NO: 1859987 - RNA, 19 nt, Homo sapiens
  misc_RNA (1)...(19): siRNA sense strand
caaacuggcuauaaaacuu

SEQ ID NO: 1859988 - RNA, 19 nt, Homo sapiens
  misc_RNA (1)...(19): siRNA sense strand
ccagaaauuccucagagaa

SEQ ID NO: 1859989 - RNA, 19 nt, Homo sapiens
  misc_RNA (1)...(19): siRNA sense strand
caacgacugccucagaguu

SEQ ID NO: 1859990 - RNA, 19 nt, Homo sapiens
  misc_RNA (1)...(19): siRNA sense strand
agaaauuccucagagaaau

SEQ ID NO: 1859991 - RNA, 19 nt, Homo sapiens
  misc_RNA (1)...(19): siRNA sense strand
caagaucacuguauuuugg

SEQ ID NO: 1859992 - RNA, 19 nt, Homo sapiens
  misc_RNA (1)...(19): siRNA sense strand
ggagaaaagauugcauuua

SEQ ID NO: 1859993 - RNA, 19 nt, Homo sapiens
  misc_RNA (1)...(19): siRNA sense strand
ggagugugcugcggguuuc

SEQ ID NO: 1859994 - RNA, 19 nt, Homo sapiens
  misc_RNA (1)...(19): siRNA sense strand
aacaacaucuuccaguuca

SEQ ID NO: 1859995 - RNA, 19 nt, Homo sapiens
  misc_RNA (1)...(19): siRNA sense strand
agacaacgacugccucaga

SEQ ID NO: 1859996 - RNA, 19 nt, Homo sapiens
  misc_RNA (1)...(19): siRNA sense strand
gagagcaagaucacuguau

SEQ ID NO: 1859997 - RNA, 19 nt, Homo sapiens
  misc_RNA (1)...(19): siRNA sense strand
ccagagacccagcaaguag

SEQ ID NO: 1859998 - RNA, 19 nt, Homo sapiens
  misc_RNA (1)...(19): siRNA sense strand
gggcaagaccucuggaaca

SEQ ID NO: 1859999 - RNA, 19 nt, Homo sapiens
  misc_RNA (1)...(19): siRNA sense strand
aaagguaguguaagcguuu

SEQ ID NO: 1860000 - RNA, 19 nt, Homo sapiens
  misc_RNA (1)...(19): siRNA sense strand
gacgaccaaugcuugaugu

SEQ ID NO: 1860001 - RNA, 19 nt, Homo sapiens
  misc_RNA (1)...(19): siRNA sense strand
ggagagcaagaucacugua

SEQ ID NO: 1860002 - RNA, 19 nt, Homo sapiens
  misc_RNA (1)...(19): siRNA sense strand
gugaaagacugggccaauc

SEQ ID NO: 1860003 - RNA, 19 nt, Homo sapiens
  misc_RNA (1)...(19): siRNA sense strand
gaagaauauuaagccacaa

SEQ ID NO: 1860004 - RNA, 19 nt, Homo sapiens
  misc_RNA (1)...(19): siRNA sense strand
gaaggucuuggaucuggaa

SEQ ID NO: 1860005 - RNA, 19 nt, Homo sapiens
  misc_RNA (1)...(19): siRNA sense strand
gaggaguugcugagaauuc

SEQ ID NO: 1860006 - RNA, 19 nt, Homo sapiens
  misc_RNA (1)...(19): siRNA sense strand
ugaaagacugggccaauca

SEQ ID NO: 1860007 - RNA, 19 nt, Homo sapiens
  misc_RNA (1)...(19): siRNA sense strand
gaggcguucuggcucaaau

SEQ ID NO: 1860008 - RNA, 19 nt, Homo sapiens
  misc_RNA (1)...(19): siRNA sense strand
ugaugucucugacuacaag

SEQ ID NO: 1860009 - RNA, 19 nt, Homo sapiens
  misc_RNA (1)...(19): siRNA sense strand
caaaagagagucccaguuc

SEQ ID NO: 1860010 - RNA, 19 nt, Homo sapiens
  misc_RNA (1)...(19): siRNA sense strand
gaggcaacagcaauuaaau

SEQ ID NO: 1860011 - RNA, 19 nt, Homo sapiens
  misc_RNA (1)...(19): siRNA sense strand
cauccuguuuccuguguug

SEQ ID NO: 1860012 - RNA, 19 nt, Homo sapiens
  misc_RNA (1)...(19): siRNA sense strand
caacaucuuccaguucaga

SEQ ID NO: 1860013 - RNA, 19 nt, Homo sapiens
  misc_RNA (1)...(19): siRNA sense strand
gagaaauuaccaacugagu

SEQ ID NO: 1860014 - RNA, 19 nt, Homo sapiens
  misc_RNA (1)...(19): siRNA sense strand
aaagaagcauuggaagagu

SEQ ID NO: 1860015 - RNA, 19 nt, Homo sapiens
  misc_RNA (1)...(19): siRNA sense strand
caaguaacacaucaaguac

SEQ ID NO: 1860016 - RNA, 19 nt, Homo sapiens
  misc_RNA (1)...(19): siRNA sense strand
ccaagacugauuauugaau

SEQ ID NO: 1860017 - RNA, 19 nt, Homo sapiens
  misc_RNA (1)...(19): siRNA sense strand
guaguggaguacgcuguga

SEQ ID NO: 1860018 - RNA, 19 nt, Homo sapiens
  misc_RNA (1)...(19): siRNA sense strand
cagcaaguagauauagaaa

SEQ ID NO: 1860019 - RNA, 19 nt, Homo sapiens
  misc_RNA (1)...(19): siRNA sense strand
ccagcaaguagauauagaa

SEQ ID NO: 1860020 - RNA, 19 nt, Homo sapiens
  misc_RNA (1)...(19): siRNA sense strand
caguagagacacccaagaa

SEQ ID NO: 1860021 - RNA, 19 nt, Homo sapiens
  misc_RNA (1)...(19): siRNA sense strand
cagaggcaacagcaauuaa

SEQ ID NO: 1860022 - RNA, 19 nt, Homo sapiens
  misc_RNA (1)...(19): siRNA sense strand
uaaauagaagcacugacaa

SEQ ID NO: 1860023 - RNA, 19 nt, Homo sapiens
  misc_RNA (1)...(19): siRNA sense strand
gagucugagucuugugaug

SEQ ID NO: 1860024 - RNA, 19 nt, Homo sapiens
  misc_RNA (1)...(19): siRNA sense strand
ccaagucuccgaaaguaca

SEQ ID NO: 1860025 - RNA, 19 nt, Homo sapiens
  misc_RNA (1)...(19): siRNA sense strand
gccaaucagagauguaguu

SEQ ID NO: 1860026 - RNA, 19 nt, Homo sapiens
  misc_RNA (1)...(19): siRNA sense strand
gacccagcaaguagauaua

SEQ ID NO: 1860027 - RNA, 19 nt, Homo sapiens
  misc_RNA (1)...(19): siRNA sense strand
ggaaggaagaauauuaagc

SEQ ID NO: 1860028 - RNA, 19 nt, Homo sapiens
  misc_RNA (1)...(19): siRNA sense strand
uagagacacccaagaagga

SEQ ID NO: 1860029 - RNA, 19 nt, Homo sapiens
  misc_RNA (1)...(19): siRNA sense strand
ccuguuuccuguguuguaa

SEQ ID NO: 1860030 - RNA, 19 nt, Homo sapiens
  misc_RNA (1)...(19): siRNA sense strand
gucucucccugcuaguuua

SEQ ID NO: 1860031 - RNA, 19 nt, Homo sapiens
  misc_RNA (1)...(19): siRNA sense strand
gauggucccagcaaaguca

SEQ ID NO: 1860032 - RNA, 19 nt, Homo sapiens
  misc_RNA (1)...(19): siRNA sense strand
ggaagaggcucgggacaua

SEQ ID NO: 1860033 - RNA, 19 nt, Homo sapiens
  misc_RNA (1)...(19): siRNA sense strand
ccagagggauugccacaua

SEQ ID NO: 1860034 - RNA, 19 nt, Homo sapiens
  misc_RNA (1)...(19): siRNA sense strand
acaaaugucuguagaagaa

SEQ ID NO: 1860035 - RNA, 19 nt, Homo sapiens
  misc_RNA (1)...(19): siRNA sense strand
gagcauagcccuucagaau

SEQ ID NO: 1860036 - RNA, 19 nt, Homo sapiens
  misc_RNA (1)...(19): siRNA sense strand
gaucauugccacaguguua

SEQ ID NO: 1860037 - RNA, 19 nt, Homo sapiens
  misc_RNA (1)...(19): siRNA sense strand
ggaauuggcugaggacaug

SEQ ID NO: 1860038 - RNA, 19 nt, Homo sapiens
  misc_RNA (1)...(19): siRNA sense strand
ggaaauggaagaagaagaa

SEQ ID NO: 1860039 - RNA, 19 nt, Homo sapiens
  misc_RNA (1)...(19): siRNA sense strand
caacuugucucagaauuug

SEQ ID NO: 1860040 - RNA, 19 nt, Homo sapiens
  misc_RNA (1)...(19): siRNA sense strand
gaaggaauuucuaccugaa

SEQ ID NO: 1860041 - RNA, 19 nt, Homo sapiens
  misc_RNA (1)...(19): siRNA sense strand
gaggaugccuucuacaguu

SEQ ID NO: 1860042 - RNA, 19 nt, Homo sapiens
  misc_RNA (1)...(19): siRNA sense strand
gggcuuagcuggaaggaau

SEQ ID NO: 1860043 - RNA, 19 nt, Homo sapiens
  misc_RNA (1)...(19): siRNA sense strand
gaacagaagguggaguaua

SEQ ID NO: 1860044 - RNA, 19 nt, Homo sapiens
  misc_RNA (1)...(19): siRNA sense strand
gcaaaccgguuccagaauc

SEQ ID NO: 1860045 - RNA, 19 nt, Homo sapiens
  misc_RNA (1)...(19): siRNA sense strand
guuaaugaccgaagauaua

SEQ ID NO: 1860046 - RNA, 19 nt, Homo sapiens
  misc_RNA (1)...(19): siRNA sense strand
caaagaugaugaugagguu

SEQ ID NO: 1860047 - RNA, 19 nt, Homo sapiens
  misc_RNA (1)...(19): siRNA sense strand
agaaggaguuugagaaaga

SEQ ID NO: 1860048 - RNA, 19 nt, Homo sapiens
  misc_RNA (1)...(19): siRNA sense strand
gggaacagaaguaugaaua

SEQ ID NO: 1860049 - RNA, 19 nt, Homo sapiens
  misc_RNA (1)...(19): siRNA sense strand
gaauauaagucagaucagu

SEQ ID NO: 1860050 - RNA, 19 nt, Homo sapiens
  misc_RNA (1)...(19): siRNA sense strand
ccacagaaagcacagauaa

SEQ ID NO: 1860051 - RNA, 19 nt, Homo sapiens
  misc_RNA (1)...(19): siRNA sense strand
agacuucacuccauccuuu

SEQ ID NO: 1860052 - RNA, 19 nt, Homo sapiens
  misc_RNA (1)...(19): siRNA sense strand
acagaaagcacagauaaua

SEQ ID NO: 1860053 - RNA, 19 nt, Homo sapiens
  misc_RNA (1)...(19): siRNA sense strand
cgaaagcuguuguugaauc

SEQ ID NO: 1860054 - RNA, 19 nt, Homo sapiens
  misc_RNA (1)...(19): siRNA sense strand
agacaaagaugaugaugag

SEQ ID NO: 1860055 - RNA, 19 nt, Homo sapiens
  misc_RNA (1)...(19): siRNA sense strand
uggagaagcugcugaagga

SEQ ID NO: 1860056 - RNA, 19 nt, Homo sapiens
  misc_RNA (1)...(19): siRNA sense strand
uaccaaggguuguaugaaa

SEQ ID NO: 1860057 - RNA, 19 nt, Homo sapiens
  misc_RNA (1)...(19): siRNA sense strand
gaaccacgcaagaucauug

SEQ ID NO: 1860058 - RNA, 19 nt, Homo sapiens
  misc_RNA (1)...(19): siRNA sense strand
gaacaucgagagcacauca

SEQ ID NO: 1860059 - RNA, 19 nt, Homo sapiens
  misc_RNA (1)...(19): siRNA sense strand
caacuucucuguggccuau

SEQ ID NO: 1860060 - RNA, 19 nt, Homo sapiens
  misc_RNA (1)...(19): siRNA sense strand
guggaagccucuaaaccua

SEQ ID NO: 1860061 - RNA, 19 nt, Homo sapiens
  misc_RNA (1)...(19): siRNA sense strand
gaauaucuccaucucaaug

SEQ ID NO: 1860062 - RNA, 19 nt, Homo sapiens
  misc_RNA (1)...(19): siRNA sense strand
gaggacgccugaaggaaga

SEQ ID NO: 1860063 - RNA, 19 nt, Homo sapiens
  misc_RNA (1)...(19): siRNA sense strand
gaauggaucaguauuucaa

SEQ ID NO: 1860064 - RNA, 19 nt, Homo sapiens
  misc_RNA (1)...(19): siRNA sense strand
uaaggaggcugagauggaa

SEQ ID NO: 1860065 - RNA, 19 nt, Homo sapiens
  misc_RNA (1)...(19): siRNA sense strand
ggaagaagaagaagaagag

SEQ ID NO: 1860066 - RNA, 19 nt, Homo sapiens
  misc_RNA (1)...(19): siRNA sense strand
gauguuaacagaggcaaua

SEQ ID NO: 1860067 - RNA, 19 nt, Homo sapiens
  misc_RNA (1)...(19): siRNA sense strand
ggacucaaaggaagacaaa

SEQ ID NO: 1860068 - RNA, 19 nt, Homo sapiens
  misc_RNA (1)...(19): siRNA sense strand
gaaauccaaggcuaucauu

SEQ ID NO: 1860069 - RNA, 19 nt, Homo sapiens
  misc_RNA (1)...(19): siRNA sense strand
uccgaaagcuguuguugaa

SEQ ID NO: 1860070 - RNA, 19 nt, Homo sapiens
  misc_RNA (1)...(19): siRNA sense strand
uaagaaccaugaugaagag

SEQ ID NO: 1860071 - RNA, 19 nt, Homo sapiens
  misc_RNA (1)...(19): siRNA sense strand
ggaacagaaguaugaauau

SEQ ID NO: 1860072 - RNA, 19 nt, Homo sapiens
  misc_RNA (1)...(19): siRNA sense strand
gaugaagagucccuugagu

SEQ ID NO: 1860073 - RNA, 19 nt, Homo sapiens
  misc_RNA (1)...(19): siRNA sense strand
ggaggagucugaccacaac

SEQ ID NO: 1860074 - RNA, 19 nt, Homo sapiens
  misc_RNA (1)...(19): siRNA sense strand
gaacugguaacacccauuc

SEQ ID NO: 1860075 - RNA, 19 nt, Homo sapiens
  misc_RNA (1)...(19): siRNA sense strand
gcauagcccuucagaaucc

SEQ ID NO: 1860076 - RNA, 19 nt, Homo sapiens
  misc_RNA (1)...(19): siRNA sense strand
caugacggcugucugcuau

SEQ ID NO: 1860077 - RNA, 19 nt, Homo sapiens
  misc_RNA (1)...(19): siRNA sense strand
gggacacuaugacaacuau

SEQ ID NO: 1860078 - RNA, 19 nt, Homo sapiens
  misc_RNA (1)...(19): siRNA sense strand
gaaagacaaagaugaugau

SEQ ID NO: 1860079 - RNA, 19 nt, Homo sapiens
  misc_RNA (1)...(19): siRNA sense strand
ggaaauucaugagccuaau

SEQ ID NO: 1860080 - RNA, 19 nt, Homo sapiens
  misc_RNA (1)...(19): siRNA sense strand
ucacagccuucuucaagug

SEQ ID NO: 1860081 - RNA, 19 nt, Homo sapiens
  misc_RNA (1)...(19): siRNA sense strand
gaggaggaguuagagaaga

SEQ ID NO: 1860082 - RNA, 19 nt, Homo sapiens
  misc_RNA (1)...(19): siRNA sense strand
ccauugaccagauccauaa

SEQ ID NO: 1860083 - RNA, 19 nt, Homo sapiens
  misc_RNA (1)...(19): siRNA sense strand
caaguuuauuggagaguug

SEQ ID NO: 1860084 - RNA, 19 nt, Homo sapiens
  misc_RNA (1)...(19): siRNA sense strand
gaaagcuguuguugaaucg

SEQ ID NO: 1860085 - RNA, 19 nt, Homo sapiens
  misc_RNA (1)...(19): siRNA sense strand
gugaguuccugcuugguuu

SEQ ID NO: 1860086 - RNA, 19 nt, Homo sapiens
  misc_RNA (1)...(19): siRNA sense strand
ggaggaaauggaagaagaa

SEQ ID NO: 1860087 - RNA, 19 nt, Homo sapiens
  misc_RNA (1)...(19): siRNA sense strand
cugaggacauggaaauuga

SEQ ID NO: 1860088 - RNA, 19 nt, Homo sapiens
  misc_RNA (1)...(19): siRNA sense strand
aggaauaucuccaucucaa

SEQ ID NO: 1860089 - RNA, 19 nt, Homo sapiens
  misc_RNA (1)...(19): siRNA sense strand
cagaggcaauaaugcauga

SEQ ID NO: 1860090 - RNA, 19 nt, Homo sapiens
  misc_RNA (1)...(19): siRNA sense strand
ugacgcagcuggccaucga

SEQ ID NO: 1860091 - RNA, 19 nt, Homo sapiens
  misc_RNA (1)...(19): siRNA sense strand
ucacaaugcugagaacauc

SEQ ID NO: 1860092 - RNA, 19 nt, Homo sapiens
  misc_RNA (1)...(19): siRNA sense strand
ccagccaacuugucucaga

SEQ ID NO: 1860093 - RNA, 19 nt, Homo sapiens
  misc_RNA (1)...(19): siRNA sense strand
gaaaggaggagaggaacug

SEQ ID NO: 1860094 - RNA, 19 nt, Homo sapiens
  misc_RNA (1)...(19): siRNA sense strand
ggacauggaaauugacauc

SEQ ID NO: 1860095 - RNA, 19 nt, Homo sapiens
  misc_RNA (1)...(19): siRNA sense strand
gaagaaauccaaggcuauc

SEQ ID NO: 1860096 - RNA, 19 nt, Homo sapiens
  misc_RNA (1)...(19): siRNA sense strand
ccaagaccauugaccagau

SEQ ID NO: 1860097 - RNA, 19 nt, Homo sapiens
  misc_RNA (1)...(19): siRNA sense strand
gaucugcgagggagcaauu

SEQ ID NO: 1860098 - RNA, 19 nt, Homo sapiens
  misc_RNA (1)...(19): siRNA sense strand
ucaaacugcuuaagaacca

SEQ ID NO: 1860099 - RNA, 19 nt, Homo sapiens
  misc_RNA (1)...(19): siRNA sense strand
uaacagaggcaauaaugca

SEQ ID NO: 1860100 - RNA, 19 nt, Homo sapiens
  misc_RNA (1)...(19): siRNA sense strand
gaaauucaugagccuaaug

SEQ ID NO: 1860101 - RNA, 19 nt, Homo sapiens
  misc_RNA (1)...(19): siRNA sense strand
uaugaaaucuuggaauugg

SEQ ID NO: 1860102 - RNA, 19 nt, Homo sapiens
  misc_RNA (1)...(19): siRNA sense strand
gaugucagaaggaguuuga

SEQ ID NO: 1860103 - RNA, 19 nt, Homo sapiens
  misc_RNA (1)...(19): siRNA sense strand
gagauuacaaagccucuga

SEQ ID NO: 1860104 - RNA, 19 nt, Homo sapiens
  misc_RNA (1)...(19): siRNA sense strand
guuaacagaggcaauaaug

SEQ ID NO: 1860105 - RNA, 19 nt, Homo sapiens
  misc_RNA (1)...(19): siRNA sense strand
ucagaaggaguuugagaaa

SEQ ID NO: 1860106 - RNA, 19 nt, Homo sapiens
  misc_RNA (1)...(19): siRNA sense strand
ggaggugacagcaucaaug

SEQ ID NO: 1860107 - RNA, 19 nt, Homo sapiens
  misc_RNA (1)...(19): siRNA sense strand
ugucugcuauucugcaauu

SEQ ID NO: 1860108 - RNA, 19 nt, Homo sapiens
  misc_RNA (1)...(19): siRNA sense strand
gcaaaagcauggguccuaa

SEQ ID NO: 1860109 - RNA, 19 nt, Homo sapiens
  misc_RNA (1)...(19): siRNA sense strand
agaaagcacagauaauaga

SEQ ID NO: 1860110 - RNA, 19 nt, Homo sapiens
  misc_RNA (1)...(19): siRNA sense strand
ccgaauggaucaguauuuc

SEQ ID NO: 1860111 - RNA, 19 nt, Homo sapiens
  misc_RNA (1)...(19): siRNA sense strand
uagcaaaccgguuccagaa

SEQ ID NO: 1860112 - RNA, 19 nt, Homo sapiens
  misc_RNA (1)...(19): siRNA sense strand
gagcuguucagggagauua

SEQ ID NO: 1860113 - RNA, 19 nt, Homo sapiens
  misc_RNA (1)...(19): siRNA sense strand
gaucaguggaagccucuaa

SEQ ID NO: 1860114 - RNA, 19 nt, Homo sapiens
  misc_RNA (1)...(19): siRNA sense strand
caggagaagcugagaguga

SEQ ID NO: 1860115 - RNA, 19 nt, Homo sapiens
  misc_RNA (1)...(19): siRNA sense strand
agaagaagaagaagaggaa

SEQ ID NO: 1860116 - RNA, 19 nt, Homo sapiens
  misc_RNA (1)...(19): siRNA sense strand
ggacguugcagugcugaaa

SEQ ID NO: 1860117 - RNA, 19 nt, Homo sapiens
  misc_RNA (1)...(19): siRNA sense strand
aacagaagguggaguauac

SEQ ID NO: 1860118 - RNA, 19 nt, Homo sapiens
  misc_RNA (1)...(19): siRNA sense strand
ccaucucaaugacaugaaa

SEQ ID NO: 1860119 - RNA, 19 nt, Homo sapiens
  misc_RNA (1)...(19): siRNA sense strand
ugaaggcggcucucucuga

SEQ ID NO: 1860120 - RNA, 19 nt, Homo sapiens
  misc_RNA (1)...(19): siRNA sense strand
uuaagaaccaugaugaaga

SEQ ID NO: 1860121 - RNA, 19 nt, Homo sapiens
  misc_RNA (1)...(19): siRNA sense strand
ggacaaggccaauaaaaca

SEQ ID NO: 1860122 - RNA, 19 nt, Homo sapiens
  misc_RNA (1)...(19): siRNA sense strand
gcagaagccagagggauug

SEQ ID NO: 1860123 - RNA, 19 nt, Homo sapiens
  misc_RNA (1)...(19): siRNA sense strand
ugagaaaggaggagaggaa

SEQ ID NO: 1860124 - RNA, 19 nt, Homo sapiens
  misc_RNA (1)...(19): siRNA sense strand
cagaggagcaggccaagga

SEQ ID NO: 1860125 - RNA, 19 nt, Homo sapiens
  misc_RNA (1)...(19): siRNA sense strand
cugcuauucugcaauuauu

SEQ ID NO: 1860126 - RNA, 19 nt, Homo sapiens
  misc_RNA (1)...(19): siRNA sense strand
ccucacgacucaccaagau

SEQ ID NO: 1860127 - RNA, 19 nt, Homo sapiens
  misc_RNA (1)...(19): siRNA sense strand
agaaagacaaagaugauga

SEQ ID NO: 1860128 - RNA, 19 nt, Homo sapiens
  misc_RNA (1)...(19): siRNA sense strand
cagagggauugccacauau

SEQ ID NO: 1860129 - RNA, 19 nt, Homo sapiens
  misc_RNA (1)...(19): siRNA sense strand
ccaacuugucucagaauuu

SEQ ID NO: 1860130 - RNA, 19 nt, Homo sapiens
  misc_RNA (1)...(19): siRNA sense strand
gauagaggccaaccugagu

SEQ ID NO: 1860131 - RNA, 19 nt, Homo sapiens
  misc_RNA (1)...(19): siRNA sense strand
ggaggaugccuucuacagu

SEQ ID NO: 1860132 - RNA, 19 nt, Homo sapiens
  misc_RNA (1)...(19): siRNA sense strand
ggaagaggcucgggacaua

SEQ ID NO: 1860133 - RNA, 19 nt, Homo sapiens
  misc_RNA (1)...(19): siRNA sense strand
ccagagggauugccacaua

SEQ ID NO: 1860134 - RNA, 19 nt, Homo sapiens
  misc_RNA (1)...(19): siRNA sense strand
acaaaugucuguagaagaa

SEQ ID NO: 1860135 - RNA, 19 nt, Homo sapiens
  misc_RNA (1)...(19): siRNA sense strand
gagcauagcccuucagaau

SEQ ID NO: 1860136 - RNA, 19 nt, Homo sapiens
  misc_RNA (1)...(19): siRNA sense strand
gaucauugccacaguguua

SEQ ID NO: 1860137 - RNA, 19 nt, Homo sapiens
  misc_RNA (1)...(19): siRNA sense strand
ggaauuggcugaggacaug

SEQ ID NO: 1860138 - RNA, 19 nt, Homo sapiens
  misc_RNA (1)...(19): siRNA sense strand
ggaaauggaagaagaagaa

SEQ ID NO: 1860139 - RNA, 19 nt, Homo sapiens
  misc_RNA (1)...(19): siRNA sense strand
caacuugucucagaauuug

SEQ ID NO: 1860140 - RNA, 19 nt, Homo sapiens
  misc_RNA (1)...(19): siRNA sense strand
gaaggaauuucuaccugaa

SEQ ID NO: 1860141 - RNA, 19 nt, Homo sapiens
  misc_RNA (1)...(19): siRNA sense strand
gaggaugccuucuacaguu

SEQ ID NO: 1860142 - RNA, 19 nt, Homo sapiens
  misc_RNA (1)...(19): siRNA sense strand
gggcuuagcuggaaggaau

SEQ ID NO: 1860143 - RNA, 19 nt, Homo sapiens
  misc_RNA (1)...(19): siRNA sense strand
gaacagaagguggaguaua

SEQ ID NO: 1860144 - RNA, 19 nt, Homo sapiens
  misc_RNA (1)...(19): siRNA sense strand
gcaaaccgguuccagaauc

SEQ ID NO: 1860145 - RNA, 19 nt, Homo sapiens
  misc_RNA (1)...(19): siRNA sense strand
guuaaugaccgaagauaua

SEQ ID NO: 1860146 - RNA, 19 nt, Homo sapiens
  misc_RNA (1)...(19): siRNA sense strand
caaagaugaugaugagguu

SEQ ID NO: 1860147 - RNA, 19 nt, Homo sapiens
  misc_RNA (1)...(19): siRNA sense strand
agaaggaguuugagaaaga

SEQ ID NO: 1860148 - RNA, 19 nt, Homo sapiens
  misc_RNA (1)...(19): siRNA sense strand
gggaacagaaguaugaaua

SEQ ID NO: 1860149 - RNA, 19 nt, Homo sapiens
  misc_RNA (1)...(19): siRNA sense strand
gaauauaagucagaucagu

SEQ ID NO: 1860150 - RNA, 19 nt, Homo sapiens
  misc_RNA (1)...(19): siRNA sense strand
ccacagaaagcacagauaa

SEQ ID NO: 1860151 - RNA, 19 nt, Homo sapiens
  misc_RNA (1)...(19): siRNA sense strand
agacuucacuccauccuuu

SEQ ID NO: 1860152 - RNA, 19 nt, Homo sapiens
  misc_RNA (1)...(19): siRNA sense strand
acagaaagcacagauaaua

SEQ ID NO: 1860153 - RNA, 19 nt, Homo sapiens
  misc_RNA (1)...(19): siRNA sense strand
cgaaagcuguuguugaauc

SEQ ID NO: 1860154 - RNA, 19 nt, Homo sapiens
  misc_RNA (1)...(19): siRNA sense strand
agacaaagaugaugaugag

SEQ ID NO: 1860155 - RNA, 19 nt, Homo sapiens
  misc_RNA (1)...(19): siRNA sense strand
uggagaagcugcugaagga

SEQ ID NO: 1860156 - RNA, 19 nt, Homo sapiens
  misc_RNA (1)...(19): siRNA sense strand
uaccaaggguuguaugaaa

SEQ ID NO: 1860157 - RNA, 19 nt, Homo sapiens
  misc_RNA (1)...(19): siRNA sense strand
gaaccacgcaagaucauug

SEQ ID NO: 1860158 - RNA, 19 nt, Homo sapiens
  misc_RNA (1)...(19): siRNA sense strand
gaacaucgagagcacauca

SEQ ID NO: 1860159 - RNA, 19 nt, Homo sapiens
  misc_RNA (1)...(19): siRNA sense strand
caacuucucuguggccuau

SEQ ID NO: 1860160 - RNA, 19 nt, Homo sapiens
  misc_RNA (1)...(19): siRNA sense strand
guggaagccucuaaaccua

SEQ ID NO: 1860161 - RNA, 19 nt, Homo sapiens
  misc_RNA (1)...(19): siRNA sense strand
gaauaucuccaucucaaug

SEQ ID NO: 1860162 - RNA, 19 nt, Homo sapiens
  misc_RNA (1)...(19): siRNA sense strand
gaggacgccugaaggaaga

SEQ ID NO: 1860163 - RNA, 19 nt, Homo sapiens
  misc_RNA (1)...(19): siRNA sense strand
gaggaaaggauaucacaga

SEQ ID NO: 1860164 - RNA, 19 nt, Homo sapiens
  misc_RNA (1)...(19): siRNA sense strand
uaaggaggcugagauggaa

SEQ ID NO: 1860165 - RNA, 19 nt, Homo sapiens
  misc_RNA (1)...(19): siRNA sense strand
gaauggaucaguauuucaa

SEQ ID NO: 1860166 - RNA, 19 nt, Homo sapiens
  misc_RNA (1)...(19): siRNA sense strand
ggaagaagaagaagaagag

SEQ ID NO: 1860167 - RNA, 19 nt, Homo sapiens
  misc_RNA (1)...(19): siRNA sense strand
gauguuaacagaggcaaua

SEQ ID NO: 1860168 - RNA, 19 nt, Homo sapiens
  misc_RNA (1)...(19): siRNA sense strand
ggacucaaaggaagacaaa

SEQ ID NO: 1860169 - RNA, 19 nt, Homo sapiens
  misc_RNA (1)...(19): siRNA sense strand
gaaauccaaggcuaucauu

SEQ ID NO: 1860170 - RNA, 19 nt, Homo sapiens
  misc_RNA (1)...(19): siRNA sense strand
uccgaaagcuguuguugaa

SEQ ID NO: 1860171 - RNA, 19 nt, Homo sapiens
  misc_RNA (1)...(19): siRNA sense strand
uaagaaccaugaugaagag

SEQ ID NO: 1860172 - RNA, 19 nt, Homo sapiens
  misc_RNA (1)...(19): siRNA sense strand
ggaacagaaguaugaauau

SEQ ID NO: 1860173 - RNA, 19 nt, Homo sapiens
  misc_RNA (1)...(19): siRNA sense strand
gaugaagagucccuugagu

SEQ ID NO: 1860174 - RNA, 19 nt, Homo sapiens
  misc_RNA (1)...(19): siRNA sense strand
ggaggagucugaccacaac

SEQ ID NO: 1860175 - RNA, 19 nt, Homo sapiens
  misc_RNA (1)...(19): siRNA sense strand
gaacugguaacacccauuc

SEQ ID NO: 1860176 - RNA, 19 nt, Homo sapiens
  misc_RNA (1)...(19): siRNA sense strand
gcauagcccuucagaaucc

SEQ ID NO: 1860177 - RNA, 19 nt, Homo sapiens
  misc_RNA (1)...(19): siRNA sense strand
caugacggcugucugcuau

SEQ ID NO: 1860178 - RNA, 19 nt, Homo sapiens
  misc_RNA (1)...(19): siRNA sense strand
gggacacuaugacaacuau

SEQ ID NO: 1860179 - RNA, 19 nt, Homo sapiens
  misc_RNA (1)...(19): siRNA sense strand
gaaagacaaagaugaugau

SEQ ID NO: 1860180 - RNA, 19 nt, Homo sapiens
  misc_RNA (1)...(19): siRNA sense strand
ggaaauucaugagccuaau

SEQ ID NO: 1860181 - RNA, 19 nt, Homo sapiens
  misc_RNA (1)...(19): siRNA sense strand
ucacagccuucuucaagug

SEQ ID NO: 1860182 - RNA, 19 nt, Homo sapiens
  misc_RNA (1)...(19): siRNA sense strand
gaggaggaguuagagaaga

SEQ ID NO: 1860183 - RNA, 19 nt, Homo sapiens
  misc_RNA (1)...(19): siRNA sense strand
ccauugaccagauccauaa

SEQ ID NO: 1860184 - RNA, 19 nt, Homo sapiens
  misc_RNA (1)...(19): siRNA sense strand
caaguuuauuggagaguug

SEQ ID NO: 1860185 - RNA, 19 nt, Homo sapiens
  misc_RNA (1)...(19): siRNA sense strand
gaaagcuguuguugaaucg

SEQ ID NO: 1860186 - RNA, 19 nt, Homo sapiens
  misc_RNA (1)...(19): siRNA sense strand
gugaguuccugcuugguuu

SEQ ID NO: 1860187 - RNA, 19 nt, Homo sapiens
  misc_RNA (1)...(19): siRNA sense strand
ggaggaaauggaagaagaa

SEQ ID NO: 1860188 - RNA, 19 nt, Homo sapiens
  misc_RNA (1)...(19): siRNA sense strand
cugaggacauggaaauuga

SEQ ID NO: 1860189 - RNA, 19 nt, Homo sapiens
  misc_RNA (1)...(19): siRNA sense strand
aggaauaucuccaucucaa

SEQ ID NO: 1860190 - RNA, 19 nt, Homo sapiens
  misc_RNA (1)...(19): siRNA sense strand
cagaggcaauaaugcauga

SEQ ID NO: 1860191 - RNA, 19 nt, Homo sapiens
  misc_RNA (1)...(19): siRNA sense strand
ugacgcagcuggccaucga

SEQ ID NO: 1860192 - RNA, 19 nt, Homo sapiens
  misc_RNA (1)...(19): siRNA sense strand
ucacaaugcugagaacauc

SEQ ID NO: 1860193 - RNA, 19 nt, Homo sapiens
  misc_RNA (1)...(19): siRNA sense strand
ccagccaacuugucucaga

SEQ ID NO: 1860194 - RNA, 19 nt, Homo sapiens
  misc_RNA (1)...(19): siRNA sense strand
gaaaggaggagaggaacug

SEQ ID NO: 1860195 - RNA, 19 nt, Homo sapiens
  misc_RNA (1)...(19): siRNA sense strand
ggacauggaaauugacauc

SEQ ID NO: 1860196 - RNA, 19 nt, Homo sapiens
  misc_RNA (1)...(19): siRNA sense strand
gaagaaauccaaggcuauc

SEQ ID NO: 1860197 - RNA, 19 nt, Homo sapiens
  misc_RNA (1)...(19): siRNA sense strand
ccaagaccauugaccagau

SEQ ID NO: 1860198 - RNA, 19 nt, Homo sapiens
  misc_RNA (1)...(19): siRNA sense strand
gaucugcgagggagcaauu

SEQ ID NO: 1860199 - RNA, 19 nt, Homo sapiens
  misc_RNA (1)...(19): siRNA sense strand
ucaaacugcuuaagaacca

SEQ ID NO: 1860200 - RNA, 19 nt, Homo sapiens
  misc_RNA (1)...(19): siRNA sense strand
uaacagaggcaauaaugca

SEQ ID NO: 1860201 - RNA, 19 nt, Homo sapiens
  misc_RNA (1)...(19): siRNA sense strand
gaaauucaugagccuaaug

SEQ ID NO: 1860202 - RNA, 19 nt, Homo sapiens
  misc_RNA (1)...(19): siRNA sense strand
uaugaaaucuuggaauugg

SEQ ID NO: 1860203 - RNA, 19 nt, Homo sapiens
  misc_RNA (1)...(19): siRNA sense strand
gaugucagaaggaguuuga

SEQ ID NO: 1860204 - RNA, 19 nt, Homo sapiens
  misc_RNA (1)...(19): siRNA sense strand
gagauuacaaagccucuga

SEQ ID NO: 1860205 - RNA, 19 nt, Homo sapiens
  misc_RNA (1)...(19): siRNA sense strand
guuaacagaggcaauaaug

SEQ ID NO: 1860206 - RNA, 19 nt, Homo sapiens
  misc_RNA (1)...(19): siRNA sense strand
ucagaaggaguuugagaaa

SEQ ID NO: 1860207 - RNA, 19 nt, Homo sapiens
  misc_RNA (1)...(19): siRNA sense strand
ggaggugacagcaucaaug

SEQ ID NO: 1860208 - RNA, 19 nt, Homo sapiens
  misc_RNA (1)...(19): siRNA sense strand
ugucugcuauucugcaauu

SEQ ID NO: 1860209 - RNA, 19 nt, Homo sapiens
  misc_RNA (1)...(19): siRNA sense strand
gcaaaagcauggguccuaa

SEQ ID NO: 1860210 - RNA, 19 nt, Homo sapiens
  misc_RNA (1)...(19): siRNA sense strand
agaaagcacagauaauaga

SEQ ID NO: 1860211 - RNA, 19 nt, Homo sapiens
  misc_RNA (1)...(19): siRNA sense strand
ccgaauggaucaguauuuc

SEQ ID NO: 1860212 - RNA, 19 nt, Homo sapiens
  misc_RNA (1)...(19): siRNA sense strand
uagcaaaccgguuccagaa

SEQ ID NO: 1860213 - RNA, 19 nt, Homo sapiens
  misc_RNA (1)...(19): siRNA sense strand
gagcuguucagggagauua

SEQ ID NO: 1860214 - RNA, 19 nt, Homo sapiens
  misc_RNA (1)...(19): siRNA sense strand
gaucaguggaagccucuaa

SEQ ID NO: 1860215 - RNA, 19 nt, Homo sapiens
  misc_RNA (1)...(19): siRNA sense strand
caggagaagcugagaguga

SEQ ID NO: 1860216 - RNA, 19 nt, Homo sapiens
  misc_RNA (1)...(19): siRNA sense strand
agaagaagaagaagaggaa

SEQ ID NO: 1860217 - RNA, 19 nt, Homo sapiens
  misc_RNA (1)...(19): siRNA sense strand
ggacguugcagugcugaaa

SEQ ID NO: 1860218 - RNA, 19 nt, Homo sapiens
  misc_RNA (1)...(19): siRNA sense strand
aacagaagguggaguauac

SEQ ID NO: 1860219 - RNA, 19 nt, Homo sapiens
  misc_RNA (1)...(19): siRNA sense strand
ccaucucaaugacaugaaa

SEQ ID NO: 1860220 - RNA, 19 nt, Homo sapiens
  misc_RNA (1)...(19): siRNA sense strand
ugaaggcggcucucucuga

SEQ ID NO: 1860221 - RNA, 19 nt, Homo sapiens
  misc_RNA (1)...(19): siRNA sense strand
uuaagaaccaugaugaaga

SEQ ID NO: 1860222 - RNA, 19 nt, Homo sapiens
  misc_RNA (1)...(19): siRNA sense strand
ggacaaggccaauaaaaca

SEQ ID NO: 1860223 - RNA, 19 nt, Homo sapiens
  misc_RNA (1)...(19): siRNA sense strand
gcagaagccagagggauug

SEQ ID NO: 1860224 - RNA, 19 nt, Homo sapiens
  misc_RNA (1)...(19): siRNA sense strand
ugagaaaggaggagaggaa

SEQ ID NO: 1860225 - RNA, 19 nt, Homo sapiens
  misc_RNA (1)...(19): siRNA sense strand
cagaggagcaggccaagga

SEQ ID NO: 1860226 - RNA, 19 nt, Homo sapiens
  misc_RNA (1)...(19): siRNA sense strand
cugcuauucugcaauuauu

SEQ ID NO: 1860227 - RNA, 19 nt, Homo sapiens
  misc_RNA (1)...(19): siRNA sense strand
ccucacgacucaccaagau

SEQ ID NO: 1860228 - RNA, 19 nt, Homo sapiens
  misc_RNA (1)...(19): siRNA sense strand
agaaagacaaagaugauga

SEQ ID NO: 1860229 - RNA, 19 nt, Homo sapiens
  misc_RNA (1)...(19): siRNA sense strand
cagagggauugccacauau

SEQ ID NO: 1860230 - RNA, 19 nt, Homo sapiens
  misc_RNA (1)...(19): siRNA sense strand
ccaacuugucucagaauuu

SEQ ID NO: 1860231 - RNA, 19 nt, Homo sapiens
  misc_RNA (1)...(19): siRNA sense strand
ggaggaugccuucuacagu

SEQ ID NO: 1860232 - RNA, 19 nt, Homo sapiens
  misc_RNA (1)...(19): siRNA sense strand
ggaagaggcucgggacaua

SEQ ID NO: 1860233 - RNA, 19 nt, Homo sapiens
  misc_RNA (1)...(19): siRNA sense strand
ccagagggauugccacaua

SEQ ID NO: 1860234 - RNA, 19 nt, Homo sapiens
  misc_RNA (1)...(19): siRNA sense strand
acaaaugucuguagaagaa

SEQ ID NO: 1860235 - RNA, 19 nt, Homo sapiens
  misc_RNA (1)...(19): siRNA sense strand
gagcauagcccuucagaau

SEQ ID NO: 1860236 - RNA, 19 nt, Homo sapiens
  misc_RNA (1)...(19): siRNA sense strand
gaucauugccacaguguua

SEQ ID NO: 1860237 - RNA, 19 nt, Homo sapiens
  misc_RNA (1)...(19): siRNA sense strand
ggaauuggcugaggacaug

SEQ ID NO: 1860238 - RNA, 19 nt, Homo sapiens
  misc_RNA (1)...(19): siRNA sense strand
ggaaauggaagaagaagaa

SEQ ID NO: 1860239 - RNA, 19 nt, Homo sapiens
  misc_RNA (1)...(19): siRNA sense strand
caacuugucucagaauuug

SEQ ID NO: 1860240 - RNA, 19 nt, Homo sapiens
  misc_RNA (1)...(19): siRNA sense strand
gaaggaauuucuaccugaa

SEQ ID NO: 1860241 - RNA, 19 nt, Homo sapiens
  misc_RNA (1)...(19): siRNA sense strand
gaggaugccuucuacaguu

SEQ ID NO: 1860242 - RNA, 19 nt, Homo sapiens
  misc_RNA (1)...(19): siRNA sense strand
gggcuuagcuggaaggaau

SEQ ID NO: 1860243 - RNA, 19 nt, Homo sapiens
  misc_RNA (1)...(19): siRNA sense strand
gaacagaagguggaguaua

SEQ ID NO: 1860244 - RNA, 19 nt, Homo sapiens
  misc_RNA (1)...(19): siRNA sense strand
gcaaaccgguuccagaauc

SEQ ID NO: 1860245 - RNA, 19 nt, Homo sapiens
  misc_RNA (1)...(19): siRNA sense strand
guuaaugaccgaagauaua

SEQ ID NO: 1860246 - RNA, 19 nt, Homo sapiens
  misc_RNA (1)...(19): siRNA sense strand
caaagaugaugaugagguu

SEQ ID NO: 1860247 - RNA, 19 nt, Homo sapiens
  misc_RNA (1)...(19): siRNA sense strand
agaaggaguuugagaaaga

SEQ ID NO: 1860248 - RNA, 19 nt, Homo sapiens
  misc_RNA (1)...(19): siRNA sense strand
gggaacagaaguaugaaua

SEQ ID NO: 1860249 - RNA, 19 nt, Homo sapiens
  misc_RNA (1)...(19): siRNA sense strand
gaauauaagucagaucagu

SEQ ID NO: 1860250 - RNA, 19 nt, Homo sapiens
  misc_RNA (1)...(19): siRNA sense strand
ccacagaaagcacagauaa

SEQ ID NO: 1860251 - RNA, 19 nt, Homo sapiens
  misc_RNA (1)...(19): siRNA sense strand
agacuucacuccauccuuu

SEQ ID NO: 1860252 - RNA, 19 nt, Homo sapiens
  misc_RNA (1)...(19): siRNA sense strand
acagaaagcacagauaaua

SEQ ID NO: 1860253 - RNA, 19 nt, Homo sapiens
  misc_RNA (1)...(19): siRNA sense strand
cgaaagcuguuguugaauc

SEQ ID NO: 1860254 - RNA, 19 nt, Homo sapiens
  misc_RNA (1)...(19): siRNA sense strand
agacaaagaugaugaugag

SEQ ID NO: 1860255 - RNA, 19 nt, Homo sapiens
  misc_RNA (1)...(19): siRNA sense strand
uggagaagcugcugaagga

SEQ ID NO: 1860256 - RNA, 19 nt, Homo sapiens
  misc_RNA (1)...(19): siRNA sense strand
uaccaaggguuguaugaaa

SEQ ID NO: 1860257 - RNA, 19 nt, Homo sapiens
  misc_RNA (1)...(19): siRNA sense strand
gaaccacgcaagaucauug

SEQ ID NO: 1860258 - RNA, 19 nt, Homo sapiens
  misc_RNA (1)...(19): siRNA sense strand
gaacaucgagagcacauca

SEQ ID NO: 1860259 - RNA, 19 nt, Homo sapiens
  misc_RNA (1)...(19): siRNA sense strand
caacuucucuguggccuau

SEQ ID NO: 1860260 - RNA, 19 nt, Homo sapiens
  misc_RNA (1)...(19): siRNA sense strand
guggaagccucuaaaccua

SEQ ID NO: 1860261 - RNA, 19 nt, Homo sapiens
  misc_RNA (1)...(19): siRNA sense strand
gaauaucuccaucucaaug

SEQ ID NO: 1860262 - RNA, 19 nt, Homo sapiens
  misc_RNA (1)...(19): siRNA sense strand
gaggacgccugaaggaaga

SEQ ID NO: 1860263 - RNA, 19 nt, Homo sapiens
  misc_RNA (1)...(19): siRNA sense strand
gaggaaaggauaucacaga

SEQ ID NO: 1860264 - RNA, 19 nt, Homo sapiens
  misc_RNA (1)...(19): siRNA sense strand
uaaggaggcugagauggaa

SEQ ID NO: 1860265 - RNA, 19 nt, Homo sapiens
  misc_RNA (1)...(19): siRNA sense strand
gaauggaucaguauuucaa

SEQ ID NO: 1860266 - RNA, 19 nt, Homo sapiens
  misc_RNA (1)...(19): siRNA sense strand
ggaagaagaagaagaagag

SEQ ID NO: 1860267 - RNA, 19 nt, Homo sapiens
  misc_RNA (1)...(19): siRNA sense strand
gauguuaacagaggcaaua

SEQ ID NO: 1860268 - RNA, 19 nt, Homo sapiens
  misc_RNA (1)...(19): siRNA sense strand
ggacucaaaggaagacaaa

SEQ ID NO: 1860269 - RNA, 19 nt, Homo sapiens
  misc_RNA (1)...(19): siRNA sense strand
gaaauccaaggcuaucauu

SEQ ID NO: 1860270 - RNA, 19 nt, Homo sapiens
  misc_RNA (1)...(19): siRNA sense strand
uccgaaagcuguuguugaa

SEQ ID NO: 1860271 - RNA, 19 nt, Homo sapiens
  misc_RNA (1)...(19): siRNA sense strand
uaagaaccaugaugaagag

SEQ ID NO: 1860272 - RNA, 19 nt, Homo sapiens
  misc_RNA (1)...(19): siRNA sense strand
ggaacagaaguaugaauau

SEQ ID NO: 1860273 - RNA, 19 nt, Homo sapiens
  misc_RNA (1)...(19): siRNA sense strand
gaugaagagucccuugagu

SEQ ID NO: 1860274 - RNA, 19 nt, Homo sapiens
  misc_RNA (1)...(19): siRNA sense strand
ggaggagucugaccacaac

SEQ ID NO: 1860275 - RNA, 19 nt, Homo sapiens
  misc_RNA (1)...(19): siRNA sense strand
gaacugguaacacccauuc

SEQ ID NO: 1860276 - RNA, 19 nt, Homo sapiens
  misc_RNA (1)...(19): siRNA sense strand
gcauagcccuucagaaucc

SEQ ID NO: 1860277 - RNA, 19 nt, Homo sapiens
  misc_RNA (1)...(19): siRNA sense strand
caugacggcugucugcuau

SEQ ID NO: 1860278 - RNA, 19 nt, Homo sapiens
  misc_RNA (1)...(19): siRNA sense strand
gggacacuaugacaacuau

SEQ ID NO: 1860279 - RNA, 19 nt, Homo sapiens
  misc_RNA (1)...(19): siRNA sense strand
gaaagacaaagaugaugau

SEQ ID NO: 1860280 - RNA, 19 nt, Homo sapiens
  misc_RNA (1)...(19): siRNA sense strand
ggaaauucaugagccuaau

SEQ ID NO: 1860281 - RNA, 19 nt, Homo sapiens
  misc_RNA (1)...(19): siRNA sense strand
ucacagccuucuucaagug

SEQ ID NO: 1860282 - RNA, 19 nt, Homo sapiens
  misc_RNA (1)...(19): siRNA sense strand
gaggaggaguuagagaaga

SEQ ID NO: 1860283 - RNA, 19 nt, Homo sapiens
  misc_RNA (1)...(19): siRNA sense strand
ccauugaccagauccauaa

SEQ ID NO: 1860284 - RNA, 19 nt, Homo sapiens
  misc_RNA (1)...(19): siRNA sense strand
caaguuuauuggagaguug

SEQ ID NO: 1860285 - RNA, 19 nt, Homo sapiens
  misc_RNA (1)...(19): siRNA sense strand
gaaagcuguuguugaaucg

SEQ ID NO: 1860286 - RNA, 19 nt, Homo sapiens
  misc_RNA (1)...(19): siRNA sense strand
gugaguuccugcuugguuu

SEQ ID NO: 1860287 - RNA, 19 nt, Homo sapiens
  misc_RNA (1)...(19): siRNA sense strand
ggaggaaauggaagaagaa

SEQ ID NO: 1860288 - RNA, 19 nt, Homo sapiens
  misc_RNA (1)...(19): siRNA sense strand
cugaggacauggaaauuga

SEQ ID NO: 1860289 - RNA, 19 nt, Homo sapiens
  misc_RNA (1)...(19): siRNA sense strand
aggaauaucuccaucucaa

SEQ ID NO: 1860290 - RNA, 19 nt, Homo sapiens
  misc_RNA (1)...(19): siRNA sense strand
cagaggcaauaaugcauga

SEQ ID NO: 1860291 - RNA, 19 nt, Homo sapiens
  misc_RNA (1)...(19): siRNA sense strand
ugacgcagcuggccaucga

SEQ ID NO: 1860292 - RNA, 19 nt, Homo sapiens
  misc_RNA (1)...(19): siRNA sense strand
ucacaaugcugagaacauc

SEQ ID NO: 1860293 - RNA, 19 nt, Homo sapiens
  misc_RNA (1)...(19): siRNA sense strand
ccagccaacuugucucaga

SEQ ID NO: 1860294 - RNA, 19 nt, Homo sapiens
  misc_RNA (1)...(19): siRNA sense strand
gaaaggaggagaggaacug

SEQ ID NO: 1860295 - RNA, 19 nt, Homo sapiens
  misc_RNA (1)...(19): siRNA sense strand
ggacauggaaauugacauc

SEQ ID NO: 1860296 - RNA, 19 nt, Homo sapiens
  misc_RNA (1)...(19): siRNA sense strand
gaagaaauccaaggcuauc

SEQ ID NO: 1860297 - RNA, 19 nt, Homo sapiens
  misc_RNA (1)...(19): siRNA sense strand
ccaagaccauugaccagau

SEQ ID NO: 1860298 - RNA, 19 nt, Homo sapiens
  misc_RNA (1)...(19): siRNA sense strand
gaucugcgagggagcaauu

SEQ ID NO: 1860299 - RNA, 19 nt, Homo sapiens
  misc_RNA (1)...(19): siRNA sense strand
ucaaacugcuuaagaacca

SEQ ID NO: 1860300 - RNA, 19 nt, Homo sapiens
  misc_RNA (1)...(19): siRNA sense strand
uaacagaggcaauaaugca

SEQ ID NO: 1860301 - RNA, 19 nt, Homo sapiens
  misc_RNA (1)...(19): siRNA sense strand
gaaauucaugagccuaaug

SEQ ID NO: 1860302 - RNA, 19 nt, Homo sapiens
  misc_RNA (1)...(19): siRNA sense strand
uaugaaaucuuggaauugg

SEQ ID NO: 1860303 - RNA, 19 nt, Homo sapiens
  misc_RNA (1)...(19): siRNA sense strand
gaugucagaaggaguuuga

SEQ ID NO: 1860304 - RNA, 19 nt, Homo sapiens
  misc_RNA (1)...(19): siRNA sense strand
gagauuacaaagccucuga

SEQ ID NO: 1860305 - RNA, 19 nt, Homo sapiens
  misc_RNA (1)...(19): siRNA sense strand
guuaacagaggcaauaaug

SEQ ID NO: 1860306 - RNA, 19 nt, Homo sapiens
  misc_RNA (1)...(19): siRNA sense strand
ucagaaggaguuugagaaa

SEQ ID NO: 1860307 - RNA, 19 nt, Homo sapiens
  misc_RNA (1)...(19): siRNA sense strand
ggaggugacagcaucaaug

SEQ ID NO: 1860308 - RNA, 19 nt, Homo sapiens
  misc_RNA (1)...(19): siRNA sense strand
ugucugcuauucugcaauu

SEQ ID NO: 1860309 - RNA, 19 nt, Homo sapiens
  misc_RNA (1)...(19): siRNA sense strand
gcaaaagcauggguccuaa

SEQ ID NO: 1860310 - RNA, 19 nt, Homo sapiens
  misc_RNA (1)...(19): siRNA sense strand
agaaagcacagauaauaga

SEQ ID NO: 1860311 - RNA, 19 nt, Homo sapiens
  misc_RNA (1)...(19): siRNA sense strand
ccgaauggaucaguauuuc

SEQ ID NO: 1860312 - RNA, 19 nt, Homo sapiens
  misc_RNA (1)...(19): siRNA sense strand
uagcaaaccgguuccagaa

SEQ ID NO: 1860313 - RNA, 19 nt, Homo sapiens
  misc_RNA (1)...(19): siRNA sense strand
gagcuguucagggagauua

SEQ ID NO: 1860314 - RNA, 19 nt, Homo sapiens
  misc_RNA (1)...(19): siRNA sense strand
gaucaguggaagccucuaa

SEQ ID NO: 1860315 - RNA, 19 nt, Homo sapiens
  misc_RNA (1)...(19): siRNA sense strand
caggagaagcugagaguga

SEQ ID NO: 1860316 - RNA, 19 nt, Homo sapiens
  misc_RNA (1)...(19): siRNA sense strand
agaagaagaagaagaggaa

SEQ ID NO: 1860317 - RNA, 19 nt, Homo sapiens
  misc_RNA (1)...(19): siRNA sense strand
ggacguugcagugcugaaa

SEQ ID NO: 1860318 - RNA, 19 nt, Homo sapiens
  misc_RNA (1)...(19): siRNA sense strand
aacagaagguggaguauac

SEQ ID NO: 1860319 - RNA, 19 nt, Homo sapiens
  misc_RNA (1)...(19): siRNA sense strand
ccaucucaaugacaugaaa

SEQ ID NO: 1860320 - RNA, 19 nt, Homo sapiens
  misc_RNA (1)...(19): siRNA sense strand
ugaaggcggcucucucuga

SEQ ID NO: 1860321 - RNA, 19 nt, Homo sapiens
  misc_RNA (1)...(19): siRNA sense strand
uuaagaaccaugaugaaga

SEQ ID NO: 1860322 - RNA, 19 nt, Homo sapiens
  misc_RNA (1)...(19): siRNA sense strand
ggacaaggccaauaaaaca

SEQ ID NO: 1860323 - RNA, 19 nt, Homo sapiens
  misc_RNA (1)...(19): siRNA sense strand
gcagaagccagagggauug

SEQ ID NO: 1860324 - RNA, 19 nt, Homo sapiens
  misc_RNA (1)...(19): siRNA sense strand
ugagaaaggaggagaggaa

SEQ ID NO: 1860325 - RNA, 19 nt, Homo sapiens
  misc_RNA (1)...(19): siRNA sense strand
cagaggagcaggccaagga

SEQ ID NO: 1860326 - RNA, 19 nt, Homo sapiens
  misc_RNA (1)...(19): siRNA sense strand
cugcuauucugcaauuauu

SEQ ID NO: 1860327 - RNA, 19 nt, Homo sapiens
  misc_RNA (1)...(19): siRNA sense strand
ccucacgacucaccaagau

SEQ ID NO: 1860328 - RNA, 19 nt, Homo sapiens
  misc_RNA (1)...(19): siRNA sense strand
agaaagacaaagaugauga

SEQ ID NO: 1860329 - RNA, 19 nt, Homo sapiens
  misc_RNA (1)...(19): siRNA sense strand
cagagggauugccacauau

SEQ ID NO: 1860330 - RNA, 19 nt, Homo sapiens
  misc_RNA (1)...(19): siRNA sense strand
ccaacuugucucagaauuu

SEQ ID NO: 1860331 - RNA, 19 nt, Homo sapiens
  misc_RNA (1)...(19): siRNA sense strand
ggaggaugccuucuacagu

SEQ ID NO: 1860332 - RNA, 19 nt, Homo sapiens
  misc_RNA (1)...(19): siRNA sense strand
ggaagaggcucgggacaua

SEQ ID NO: 1860333 - RNA, 19 nt, Homo sapiens
  misc_RNA (1)...(19): siRNA sense strand
ccagagggauugccacaua

SEQ ID NO: 1860334 - RNA, 19 nt, Homo sapiens
  misc_RNA (1)...(19): siRNA sense strand
acaaaugucuguagaagaa

SEQ ID NO: 1860335 - RNA, 19 nt, Homo sapiens
  misc_RNA (1)...(19): siRNA sense strand
gagcauagcccuucagaau

SEQ ID NO: 1860336 - RNA, 19 nt, Homo sapiens
  misc_RNA (1)...(19): siRNA sense strand
gaucauugccacaguguua

SEQ ID NO: 1860337 - RNA, 19 nt, Homo sapiens
  misc_RNA (1)...(19): siRNA sense strand
ggaauuggcugaggacaug

SEQ ID NO: 1860338 - RNA, 19 nt, Homo sapiens
  misc_RNA (1)...(19): siRNA sense strand
ggaaauggaagaagaagaa

SEQ ID NO: 1860339 - RNA, 19 nt, Homo sapiens
  misc_RNA (1)...(19): siRNA sense strand
caacuugucucagaauuug

SEQ ID NO: 1860340 - RNA, 19 nt, Homo sapiens
  misc_RNA (1)...(19): siRNA sense strand
gaaggaauuucuaccugaa

SEQ ID NO: 1860341 - RNA, 19 nt, Homo sapiens
  misc_RNA (1)...(19): siRNA sense strand
gaggaugccuucuacaguu

SEQ ID NO: 1860342 - RNA, 19 nt, Homo sapiens
  misc_RNA (1)...(19): siRNA sense strand
gggcuuagcuggaaggaau

SEQ ID NO: 1860343 - RNA, 19 nt, Homo sapiens
  misc_RNA (1)...(19): siRNA sense strand
gaacagaagguggaguaua

SEQ ID NO: 1860344 - RNA, 19 nt, Homo sapiens
  misc_RNA (1)...(19): siRNA sense strand
gcaaaccgguuccagaauc

SEQ ID NO: 1860345 - RNA, 19 nt, Homo sapiens
  misc_RNA (1)...(19): siRNA sense strand
guuaaugaccgaagauaua

SEQ ID NO: 1860346 - RNA, 19 nt, Homo sapiens
  misc_RNA (1)...(19): siRNA sense strand
caaagaugaugaugagguu

SEQ ID NO: 1860347 - RNA, 19 nt, Homo sapiens
  misc_RNA (1)...(19): siRNA sense strand
agaaggaguuugagaaaga

SEQ ID NO: 1860348 - RNA, 19 nt, Homo sapiens
  misc_RNA (1)...(19): siRNA sense strand
gggaacagaaguaugaaua

SEQ ID NO: 1860349 - RNA, 19 nt, Homo sapiens
  misc_RNA (1)...(19): siRNA sense strand
gaauauaagucagaucagu

SEQ ID NO: 1860350 - RNA, 19 nt, Homo sapiens
  misc_RNA (1)...(19): siRNA sense strand
ccacagaaagcacagauaa

SEQ ID NO: 1860351 - RNA, 19 nt, Homo sapiens
  misc_RNA (1)...(19): siRNA sense strand
agacuucacuccauccuuu

SEQ ID NO: 1860352 - RNA, 19 nt, Homo sapiens
  misc_RNA (1)...(19): siRNA sense strand
acagaaagcacagauaaua

SEQ ID NO: 1860353 - RNA, 19 nt, Homo sapiens
  misc_RNA (1)...(19): siRNA sense strand
cgaaagcuguuguugaauc

SEQ ID NO: 1860354 - RNA, 19 nt, Homo sapiens
  misc_RNA (1)...(19): siRNA sense strand
agacaaagaugaugaugag

SEQ ID NO: 1860355 - RNA, 19 nt, Homo sapiens
  misc_RNA (1)...(19): siRNA sense strand
uggagaagcugcugaagga

SEQ ID NO: 1860356 - RNA, 19 nt, Homo sapiens
  misc_RNA (1)...(19): siRNA sense strand
uaccaaggguuguaugaaa

SEQ ID NO: 1860357 - RNA, 19 nt, Homo sapiens
  misc_RNA (1)...(19): siRNA sense strand
gaaccacgcaagaucauug

SEQ ID NO: 1860358 - RNA, 19 nt, Homo sapiens
  misc_RNA (1)...(19): siRNA sense strand
gaacaucgagagcacauca

SEQ ID NO: 1860359 - RNA, 19 nt, Homo sapiens
  misc_RNA (1)...(19): siRNA sense strand
caacuucucuguggccuau

SEQ ID NO: 1860360 - RNA, 19 nt, Homo sapiens
  misc_RNA (1)...(19): siRNA sense strand
guggaagccucuaaaccua

SEQ ID NO: 1860361 - RNA, 19 nt, Homo sapiens
  misc_RNA (1)...(19): siRNA sense strand
gaauaucuccaucucaaug

SEQ ID NO: 1860362 - RNA, 19 nt, Homo sapiens
  misc_RNA (1)...(19): siRNA sense strand
gaggacgccugaaggaaga

SEQ ID NO: 1860363 - RNA, 19 nt, Homo sapiens
  misc_RNA (1)...(19): siRNA sense strand
gaggaaaggauaucacaga

SEQ ID NO: 1860364 - RNA, 19 nt, Homo sapiens
  misc_RNA (1)...(19): siRNA sense strand
uaaggaggcugagauggaa

SEQ ID NO: 1860365 - RNA, 19 nt, Homo sapiens
  misc_RNA (1)...(19): siRNA sense strand
gaauggaucaguauuucaa

SEQ ID NO: 1860366 - RNA, 19 nt, Homo sapiens
  misc_RNA (1)...(19): siRNA sense strand
ggaagaagaagaagaagag

SEQ ID NO: 1860367 - RNA, 19 nt, Homo sapiens
  misc_RNA (1)...(19): siRNA sense strand
gauguuaacagaggcaaua

SEQ ID NO: 1860368 - RNA, 19 nt, Homo sapiens
  misc_RNA (1)...(19): siRNA sense strand
ggacucaaaggaagacaaa

SEQ ID NO: 1860369 - RNA, 19 nt, Homo sapiens
  misc_RNA (1)...(19): siRNA sense strand
gaaauccaaggcuaucauu

SEQ ID NO: 1860370 - RNA, 19 nt, Homo sapiens
  misc_RNA (1)...(19): siRNA sense strand
uccgaaagcuguuguugaa

SEQ ID NO: 1860371 - RNA, 19 nt, Homo sapiens
  misc_RNA (1)...(19): siRNA sense strand
uaagaaccaugaugaagag

SEQ ID NO: 1860372 - RNA, 19 nt, Homo sapiens
  misc_RNA (1)...(19): siRNA sense strand
ggaacagaaguaugaauau

SEQ ID NO: 1860373 - RNA, 19 nt, Homo sapiens
  misc_RNA (1)...(19): siRNA sense strand
gaugaagagucccuugagu

SEQ ID NO: 1860374 - RNA, 19 nt, Homo sapiens
  misc_RNA (1)...(19): siRNA sense strand
ggaggagucugaccacaac

SEQ ID NO: 1860375 - RNA, 19 nt, Homo sapiens
  misc_RNA (1)...(19): siRNA sense strand
gaacugguaacacccauuc

SEQ ID NO: 1860376 - RNA, 19 nt, Homo sapiens
  misc_RNA (1)...(19): siRNA sense strand
gcauagcccuucagaaucc

SEQ ID NO: 1860377 - RNA, 19 nt, Homo sapiens
  misc_RNA (1)...(19): siRNA sense strand
caugacggcugucugcuau

SEQ ID NO: 1860378 - RNA, 19 nt, Homo sapiens
  misc_RNA (1)...(19): siRNA sense strand
gggacacuaugacaacuau

SEQ ID NO: 1860379 - RNA, 19 nt, Homo sapiens
  misc_RNA (1)...(19): siRNA sense strand
gaaagacaaagaugaugau

SEQ ID NO: 1860380 - RNA, 19 nt, Homo sapiens
  misc_RNA (1)...(19): siRNA sense strand
ggaaauucaugagccuaau

SEQ ID NO: 1860381 - RNA, 19 nt, Homo sapiens
  misc_RNA (1)...(19): siRNA sense strand
ucacagccuucuucaagug

SEQ ID NO: 1860382 - RNA, 19 nt, Homo sapiens
  misc_RNA (1)...(19): siRNA sense strand
gaggaggaguuagagaaga

SEQ ID NO: 1860383 - RNA, 19 nt, Homo sapiens
  misc_RNA (1)...(19): siRNA sense strand
ccauugaccagauccauaa

SEQ ID NO: 1860384 - RNA, 19 nt, Homo sapiens
  misc_RNA (1)...(19): siRNA sense strand
caaguuuauuggagaguug

SEQ ID NO: 1860385 - RNA, 19 nt, Homo sapiens
  misc_RNA (1)...(19): siRNA sense strand
gaaagcuguuguugaaucg

SEQ ID NO: 1860386 - RNA, 19 nt, Homo sapiens
  misc_RNA (1)...(19): siRNA sense strand
gugaguuccugcuugguuu

SEQ ID NO: 1860387 - RNA, 19 nt, Homo sapiens
  misc_RNA (1)...(19): siRNA sense strand
ggaggaaauggaagaagaa

SEQ ID NO: 1860388 - RNA, 19 nt, Homo sapiens
  misc_RNA (1)...(19): siRNA sense strand
cugaggacauggaaauuga

SEQ ID NO: 1860389 - RNA, 19 nt, Homo sapiens
  misc_RNA (1)...(19): siRNA sense strand
aggaauaucuccaucucaa

SEQ ID NO: 1860390 - RNA, 19 nt, Homo sapiens
  misc_RNA (1)...(19): siRNA sense strand
cagaggcaauaaugcauga

SEQ ID NO: 1860391 - RNA, 19 nt, Homo sapiens
  misc_RNA (1)...(19): siRNA sense strand
ugacgcagcuggccaucga

SEQ ID NO: 1860392 - RNA, 19 nt, Homo sapiens
  misc_RNA (1)...(19): siRNA sense strand
ucacaaugcugagaacauc

SEQ ID NO: 1860393 - RNA, 19 nt, Homo sapiens
  misc_RNA (1)...(19): siRNA sense strand
ccagccaacuugucucaga

SEQ ID NO: 1860394 - RNA, 19 nt, Homo sapiens
  misc_RNA (1)...(19): siRNA sense strand
gaaaggaggagaggaacug

SEQ ID NO: 1860395 - RNA, 19 nt, Homo sapiens
  misc_RNA (1)...(19): siRNA sense strand
ggacauggaaauugacauc

SEQ ID NO: 1860396 - RNA, 19 nt, Homo sapiens
  misc_RNA (1)...(19): siRNA sense strand
gaagaaauccaaggcuauc

SEQ ID NO: 1860397 - RNA, 19 nt, Homo sapiens
  misc_RNA (1)...(19): siRNA sense strand
ccaagaccauugaccagau

SEQ ID NO: 1860398 - RNA, 19 nt, Homo sapiens
  misc_RNA (1)...(19): siRNA sense strand
gaucugcgagggagcaauu

SEQ ID NO: 1860399 - RNA, 19 nt, Homo sapiens
  misc_RNA (1)...(19): siRNA sense strand
ucaaacugcuuaagaacca

SEQ ID NO: 1860400 - RNA, 19 nt, Homo sapiens
  misc_RNA (1)...(19): siRNA sense strand
uaacagaggcaauaaugca

SEQ ID NO: 1860401 - RNA, 19 nt, Homo sapiens
  misc_RNA (1)...(19): siRNA sense strand
gaaauucaugagccuaaug

SEQ ID NO: 1860402 - RNA, 19 nt, Homo sapiens
  misc_RNA (1)...(19): siRNA sense strand
uaugaaaucuuggaauugg

SEQ ID NO: 1860403 - RNA, 19 nt, Homo sapiens
  misc_RNA (1)...(19): siRNA sense strand
gaugucagaaggaguuuga

SEQ ID NO: 1860404 - RNA, 19 nt, Homo sapiens
  misc_RNA (1)...(19): siRNA sense strand
gagauuacaaagccucuga

SEQ ID NO: 1860405 - RNA, 19 nt, Homo sapiens
  misc_RNA (1)...(19): siRNA sense strand
guuaacagaggcaauaaug

SEQ ID NO: 1860406 - RNA, 19 nt, Homo sapiens
  misc_RNA (1)...(19): siRNA sense strand
ucagaaggaguuugagaaa

SEQ ID NO: 1860407 - RNA, 19 nt, Homo sapiens
  misc_RNA (1)...(19): siRNA sense strand
ggaggugacagcaucaaug

SEQ ID NO: 1860408 - RNA, 19 nt, Homo sapiens
  misc_RNA (1)...(19): siRNA sense strand
ugucugcuauucugcaauu

SEQ ID NO: 1860409 - RNA, 19 nt, Homo sapiens
  misc_RNA (1)...(19): siRNA sense strand
gcaaaagcauggguccuaa

SEQ ID NO: 1860410 - RNA, 19 nt, Homo sapiens
  misc_RNA (1)...(19): siRNA sense strand
agaaagcacagauaauaga

SEQ ID NO: 1860411 - RNA, 19 nt, Homo sapiens
  misc_RNA (1)...(19): siRNA sense strand
ccgaauggaucaguauuuc

SEQ ID NO: 1860412 - RNA, 19 nt, Homo sapiens
  misc_RNA (1)...(19): siRNA sense strand
uagcaaaccgguuccagaa

SEQ ID NO: 1860413 - RNA, 19 nt, Homo sapiens
  misc_RNA (1)...(19): siRNA sense strand
gagcuguucagggagauua

SEQ ID NO: 1860414 - RNA, 19 nt, Homo sapiens
  misc_RNA (1)...(19): siRNA sense strand
gaucaguggaagccucuaa

SEQ ID NO: 1860415 - RNA, 19 nt, Homo sapiens
  misc_RNA (1)...(19): siRNA sense strand
caggagaagcugagaguga

SEQ ID NO: 1860416 - RNA, 19 nt, Homo sapiens
  misc_RNA (1)...(19): siRNA sense strand
agaagaagaagaagaggaa

SEQ ID NO: 1860417 - RNA, 19 nt, Homo sapiens
  misc_RNA (1)...(19): siRNA sense strand
ggacguugcagugcugaaa

SEQ ID NO: 1860418 - RNA, 19 nt, Homo sapiens
  misc_RNA (1)...(19): siRNA sense strand
aacagaagguggaguauac

SEQ ID NO: 1860419 - RNA, 19 nt, Homo sapiens
  misc_RNA (1)...(19): siRNA sense strand
ccaucucaaugacaugaaa

SEQ ID NO: 1860420 - RNA, 19 nt, Homo sapiens
  misc_RNA (1)...(19): siRNA sense strand
ugaaggcggcucucucuga

SEQ ID NO: 1860421 - RNA, 19 nt, Homo sapiens
  misc_RNA (1)...(19): siRNA sense strand
uuaagaaccaugaugaaga

SEQ ID NO: 1860422 - RNA, 19 nt, Homo sapiens
  misc_RNA (1)...(19): siRNA sense strand
ggacaaggccaauaaaaca

SEQ ID NO: 1860423 - RNA, 19 nt, Homo sapiens
  misc_RNA (1)...(19): siRNA sense strand
gcagaagccagagggauug

SEQ ID NO: 1860424 - RNA, 19 nt, Homo sapiens
  misc_RNA (1)...(19): siRNA sense strand
ugagaaaggaggagaggaa

SEQ ID NO: 1860425 - RNA, 19 nt, Homo sapiens
  misc_RNA (1)...(19): siRNA sense strand
cagaggagcaggccaagga

SEQ ID NO: 1860426 - RNA, 19 nt, Homo sapiens
  misc_RNA (1)...(19): siRNA sense strand
cugcuauucugcaauuauu

SEQ ID NO: 1860427 - RNA, 19 nt, Homo sapiens
  misc_RNA (1)...(19): siRNA sense strand
ccucacgacucaccaagau

SEQ ID NO: 1860428 - RNA, 19 nt, Homo sapiens
  misc_RNA (1)...(19): siRNA sense strand
agaaagacaaagaugauga

SEQ ID NO: 1860429 - RNA, 19 nt, Homo sapiens
  misc_RNA (1)...(19): siRNA sense strand
cagagggauugccacauau

SEQ ID NO: 1860430 - RNA, 19 nt, Homo sapiens
  misc_RNA (1)...(19): siRNA sense strand
ccaacuugucucagaauuu

SEQ ID NO: 1860431 - RNA, 19 nt, Homo sapiens
  misc_RNA (1)...(19): siRNA sense strand
ggaggaugccuucuacagu

SEQ ID NO: 1860432 - RNA, 19 nt, Homo sapiens
  misc_RNA (1)...(19): siRNA sense strand
ggaagaggcucgggacaua

SEQ ID NO: 1860433 - RNA, 19 nt, Homo sapiens
  misc_RNA (1)...(19): siRNA sense strand
ccagagggauugccacaua

SEQ ID NO: 1860434 - RNA, 19 nt, Homo sapiens
  misc_RNA (1)...(19): siRNA sense strand
acaaaugucuguagaagaa

SEQ ID NO: 1860435 - RNA, 19 nt, Homo sapiens
  misc_RNA (1)...(19): siRNA sense strand
gagcauagcccuucagaau

SEQ ID NO: 1860436 - RNA, 19 nt, Homo sapiens
  misc_RNA (1)...(19): siRNA sense strand
gaucauugccacaguguua

SEQ ID NO: 1860437 - RNA, 19 nt, Homo sapiens
  misc_RNA (1)...(19): siRNA sense strand
ggaauuggcugaggacaug

SEQ ID NO: 1860438 - RNA, 19 nt, Homo sapiens
  misc_RNA (1)...(19): siRNA sense strand
ggaaauggaagaagaagaa

SEQ ID NO: 1860439 - RNA, 19 nt, Homo sapiens
  misc_RNA (1)...(19): siRNA sense strand
caacuugucucagaauuug

SEQ ID NO: 1860440 - RNA, 19 nt, Homo sapiens
  misc_RNA (1)...(19): siRNA sense strand
gaaggaauuucuaccugaa

SEQ ID NO: 1860441 - RNA, 19 nt, Homo sapiens
  misc_RNA (1)...(19): siRNA sense strand
gaggaugccuucuacaguu

SEQ ID NO: 1860442 - RNA, 19 nt, Homo sapiens
  misc_RNA (1)...(19): siRNA sense strand
gggcuuagcuggaaggaau

SEQ ID NO: 1860443 - RNA, 19 nt, Homo sapiens
  misc_RNA (1)...(19): siRNA sense strand
gaacagaagguggaguaua

SEQ ID NO: 1860444 - RNA, 19 nt, Homo sapiens
  misc_RNA (1)...(19): siRNA sense strand
gcaaaccgguuccagaauc

SEQ ID NO: 1860445 - RNA, 19 nt, Homo sapiens
  misc_RNA (1)...(19): siRNA sense strand
guuaaugaccgaagauaua

SEQ ID NO: 1860446 - RNA, 19 nt, Homo sapiens
  misc_RNA (1)...(19): siRNA sense strand
caaagaugaugaugagguu

SEQ ID NO: 1860447 - RNA, 19 nt, Homo sapiens
  misc_RNA (1)...(19): siRNA sense strand
agaaggaguuugagaaaga

SEQ ID NO: 1860448 - RNA, 19 nt, Homo sapiens
  misc_RNA (1)...(19): siRNA sense strand
gggaacagaaguaugaaua

SEQ ID NO: 1860449 - RNA, 19 nt, Homo sapiens
  misc_RNA (1)...(19): siRNA sense strand
gaauauaagucagaucagu

SEQ ID NO: 1860450 - RNA, 19 nt, Homo sapiens
  misc_RNA (1)...(19): siRNA sense strand
ccacagaaagcacagauaa

SEQ ID NO: 1860451 - RNA, 19 nt, Homo sapiens
  misc_RNA (1)...(19): siRNA sense strand
agacuucacuccauccuuu

SEQ ID NO: 1860452 - RNA, 19 nt, Homo sapiens
  misc_RNA (1)...(19): siRNA sense strand
acagaaagcacagauaaua

SEQ ID NO: 1860453 - RNA, 19 nt, Homo sapiens
  misc_RNA (1)...(19): siRNA sense strand
cgaaagcuguuguugaauc

SEQ ID NO: 1860454 - RNA, 19 nt, Homo sapiens
  misc_RNA (1)...(19): siRNA sense strand
agacaaagaugaugaugag

SEQ ID NO: 1860455 - RNA, 19 nt, Homo sapiens
  misc_RNA (1)...(19): siRNA sense strand
uggagaagcugcugaagga

SEQ ID NO: 1860456 - RNA, 19 nt, Homo sapiens
  misc_RNA (1)...(19): siRNA sense strand
uaccaaggguuguaugaaa

SEQ ID NO: 1860457 - RNA, 19 nt, Homo sapiens
  misc_RNA (1)...(19): siRNA sense strand
gaaccacgcaagaucauug

SEQ ID NO: 1860458 - RNA, 19 nt, Homo sapiens
  misc_RNA (1)...(19): siRNA sense strand
gaacaucgagagcacauca

SEQ ID NO: 1860459 - RNA, 19 nt, Homo sapiens
  misc_RNA (1)...(19): siRNA sense strand
caacuucucuguggccuau

SEQ ID NO: 1860460 - RNA, 19 nt, Homo sapiens
  misc_RNA (1)...(19): siRNA sense strand
guggaagccucuaaaccua

SEQ ID NO: 1860461 - RNA, 19 nt, Homo sapiens
  misc_RNA (1)...(19): siRNA sense strand
gaauaucuccaucucaaug

SEQ ID NO: 1860462 - RNA, 19 nt, Homo sapiens
  misc_RNA (1)...(19): siRNA sense strand
gaggacgccugaaggaaga

SEQ ID NO: 1860463 - RNA, 19 nt, Homo sapiens
  misc_RNA (1)...(19): siRNA sense strand
gaggaaaggauaucacaga

SEQ ID NO: 1860464 - RNA, 19 nt, Homo sapiens
  misc_RNA (1)...(19): siRNA sense strand
uaaggaggcugagauggaa

SEQ ID NO: 1860465 - RNA, 19 nt, Homo sapiens
  misc_RNA (1)...(19): siRNA sense strand
gaauggaucaguauuucaa

SEQ ID NO: 1860466 - RNA, 19 nt, Homo sapiens
  misc_RNA (1)...(19): siRNA sense strand
ggaagaagaagaagaagag

SEQ ID NO: 1860467 - RNA, 19 nt, Homo sapiens
  misc_RNA (1)...(19): siRNA sense strand
gauguuaacagaggcaaua

SEQ ID NO: 1860468 - RNA, 19 nt, Homo sapiens
  misc_RNA (1)...(19): siRNA sense strand
ggacucaaaggaagacaaa

SEQ ID NO: 1860469 - RNA, 19 nt, Homo sapiens
  misc_RNA (1)...(19): siRNA sense strand
gaaauccaaggcuaucauu

SEQ ID NO: 1860470 - RNA, 19 nt, Homo sapiens
  misc_RNA (1)...(19): siRNA sense strand
uccgaaagcuguuguugaa

SEQ ID NO: 1860471 - RNA, 19 nt, Homo sapiens
  misc_RNA (1)...(19): siRNA sense strand
uaagaaccaugaugaagag

SEQ ID NO: 1860472 - RNA, 19 nt, Homo sapiens
  misc_RNA (1)...(19): siRNA sense strand
ggaacagaaguaugaauau

SEQ ID NO: 1860473 - RNA, 19 nt, Homo sapiens
  misc_RNA (1)...(19): siRNA sense strand
gaugaagagucccuugagu

SEQ ID NO: 1860474 - RNA, 19 nt, Homo sapiens
  misc_RNA (1)...(19): siRNA sense strand
ggaggagucugaccacaac

SEQ ID NO: 1860475 - RNA, 19 nt, Homo sapiens
  misc_RNA (1)...(19): siRNA sense strand
gaacugguaacacccauuc

SEQ ID NO: 1860476 - RNA, 19 nt, Homo sapiens
  misc_RNA (1)...(19): siRNA sense strand
gcauagcccuucagaaucc

SEQ ID NO: 1860477 - RNA, 19 nt, Homo sapiens
  misc_RNA (1)...(19): siRNA sense strand
caugacggcugucugcuau

SEQ ID NO: 1860478 - RNA, 19 nt, Homo sapiens
  misc_RNA (1)...(19): siRNA sense strand
gggacacuaugacaacuau

SEQ ID NO: 1860479 - RNA, 19 nt, Homo sapiens
  misc_RNA (1)...(19): siRNA sense strand
gaaagacaaagaugaugau

SEQ ID NO: 1860480 - RNA, 19 nt, Homo sapiens
  misc_RNA (1)...(19): siRNA sense strand
ggaaauucaugagccuaau

SEQ ID NO: 1860481 - RNA, 19 nt, Homo sapiens
  misc_RNA (1)...(19): siRNA sense strand
ucacagccuucuucaagug

SEQ ID NO: 1860482 - RNA, 19 nt, Homo sapiens
  misc_RNA (1)...(19): siRNA sense strand
gaggaggaguuagagaaga

SEQ ID NO: 1860483 - RNA, 19 nt, Homo sapiens
  misc_RNA (1)...(19): siRNA sense strand
ccauugaccagauccauaa

SEQ ID NO: 1860484 - RNA, 19 nt, Homo sapiens
  misc_RNA (1)...(19): siRNA sense strand
caaguuuauuggagaguug

SEQ ID NO: 1860485 - RNA, 19 nt, Homo sapiens
  misc_RNA (1)...(19): siRNA sense strand
gaaagcuguuguugaaucg

SEQ ID NO: 1860486 - RNA, 19 nt, Homo sapiens
  misc_RNA (1)...(19): siRNA sense strand
gugaguuccugcuugguuu

SEQ ID NO: 1860487 - RNA, 19 nt, Homo sapiens
  misc_RNA (1)...(19): siRNA sense strand
ggaggaaauggaagaagaa

SEQ ID NO: 1860488 - RNA, 19 nt, Homo sapiens
  misc_RNA (1)...(19): siRNA sense strand
cugaggacauggaaauuga

SEQ ID NO: 1860489 - RNA, 19 nt, Homo sapiens
  misc_RNA (1)...(19): siRNA sense strand
aggaauaucuccaucucaa

SEQ ID NO: 1860490 - RNA, 19 nt, Homo sapiens
  misc_RNA (1)...(19): siRNA sense strand
cagaggcaauaaugcauga

SEQ ID NO: 1860491 - RNA, 19 nt, Homo sapiens
  misc_RNA (1)...(19): siRNA sense strand
ugacgcagcuggccaucga

SEQ ID NO: 1860492 - RNA, 19 nt, Homo sapiens
  misc_RNA (1)...(19): siRNA sense strand
ucacaaugcugagaacauc

SEQ ID NO: 1860493 - RNA, 19 nt, Homo sapiens
  misc_RNA (1)...(19): siRNA sense strand
ccagccaacuugucucaga

SEQ ID NO: 1860494 - RNA, 19 nt, Homo sapiens
  misc_RNA (1)...(19): siRNA sense strand
gaaaggaggagaggaacug

SEQ ID NO: 1860495 - RNA, 19 nt, Homo sapiens
  misc_RNA (1)...(19): siRNA sense strand
ggacauggaaauugacauc

SEQ ID NO: 1860496 - RNA, 19 nt, Homo sapiens
  misc_RNA (1)...(19): siRNA sense strand
gaagaaauccaaggcuauc

SEQ ID NO: 1860497 - RNA, 19 nt, Homo sapiens
  misc_RNA (1)...(19): siRNA sense strand
ccaagaccauugaccagau

SEQ ID NO: 1860498 - RNA, 19 nt, Homo sapiens
  misc_RNA (1)...(19): siRNA sense strand
gaucugcgagggagcaauu

SEQ ID NO: 1860499 - RNA, 19 nt, Homo sapiens
  misc_RNA (1)...(19): siRNA sense strand
ucaaacugcuuaagaacca

SEQ ID NO: 1860500 - RNA, 19 nt, Homo sapiens
  misc_RNA (1)...(19): siRNA sense strand
uaacagaggcaauaaugca

SEQ ID NO: 1860501 - RNA, 19 nt, Homo sapiens
  misc_RNA (1)...(19): siRNA sense strand
gaaauucaugagccuaaug

SEQ ID NO: 1860502 - RNA, 19 nt, Homo sapiens
  misc_RNA (1)...(19): siRNA sense strand
uaugaaaucuuggaauugg

SEQ ID NO: 1860503 - RNA, 19 nt, Homo sapiens
  misc_RNA (1)...(19): siRNA sense strand
gaugucagaaggaguuuga

SEQ ID NO: 1860504 - RNA, 19 nt, Homo sapiens
  misc_RNA (1)...(19): siRNA sense strand
gagauuacaaagccucuga

SEQ ID NO: 1860505 - RNA, 19 nt, Homo sapiens
  misc_RNA (1)...(19): siRNA sense strand
guuaacagaggcaauaaug

SEQ ID NO: 1860506 - RNA, 19 nt, Homo sapiens
  misc_RNA (1)...(19): siRNA sense strand
ucagaaggaguuugagaaa

SEQ ID NO: 1860507 - RNA, 19 nt, Homo sapiens
  misc_RNA (1)...(19): siRNA sense strand
ggaggugacagcaucaaug

SEQ ID NO: 1860508 - RNA, 19 nt, Homo sapiens
  misc_RNA (1)...(19): siRNA sense strand
ugucugcuauucugcaauu

SEQ ID NO: 1860509 - RNA, 19 nt, Homo sapiens
  misc_RNA (1)...(19): siRNA sense strand
gcaaaagcauggguccuaa

SEQ ID NO: 1860510 - RNA, 19 nt, Homo sapiens
  misc_RNA (1)...(19): siRNA sense strand
agaaagcacagauaauaga

SEQ ID NO: 1860511 - RNA, 19 nt, Homo sapiens
  misc_RNA (1)...(19): siRNA sense strand
ccgaauggaucaguauuuc

SEQ ID NO: 1860512 - RNA, 19 nt, Homo sapiens
  misc_RNA (1)...(19): siRNA sense strand
uagcaaaccgguuccagaa

SEQ ID NO: 1860513 - RNA, 19 nt, Homo sapiens
  misc_RNA (1)...(19): siRNA sense strand
gagcuguucagggagauua

SEQ ID NO: 1860514 - RNA, 19 nt, Homo sapiens
  misc_RNA (1)...(19): siRNA sense strand
gaucaguggaagccucuaa

SEQ ID NO: 1860515 - RNA, 19 nt, Homo sapiens
  misc_RNA (1)...(19): siRNA sense strand
caggagaagcugagaguga

SEQ ID NO: 1860516 - RNA, 19 nt, Homo sapiens
  misc_RNA (1)...(19): siRNA sense strand
agaagaagaagaagaggaa

SEQ ID NO: 1860517 - RNA, 19 nt, Homo sapiens
  misc_RNA (1)...(19): siRNA sense strand
ggacguugcagugcugaaa

SEQ ID NO: 1860518 - RNA, 19 nt, Homo sapiens
  misc_RNA (1)...(19): siRNA sense strand
aacagaagguggaguauac

SEQ ID NO: 1860519 - RNA, 19 nt, Homo sapiens
  misc_RNA (1)...(19): siRNA sense strand
ccaucucaaugacaugaaa

SEQ ID NO: 1860520 - RNA, 19 nt, Homo sapiens
  misc_RNA (1)...(19): siRNA sense strand
ugaaggcggcucucucuga

SEQ ID NO: 1860521 - RNA, 19 nt, Homo sapiens
  misc_RNA (1)...(19): siRNA sense strand
uuaagaaccaugaugaaga

SEQ ID NO: 1860522 - RNA, 19 nt, Homo sapiens
  misc_RNA (1)...(19): siRNA sense strand
ggacaaggccaauaaaaca

SEQ ID NO: 1860523 - RNA, 19 nt, Homo sapiens
  misc_RNA (1)...(19): siRNA sense strand
gcagaagccagagggauug

SEQ ID NO: 1860524 - RNA, 19 nt, Homo sapiens
  misc_RNA (1)...(19): siRNA sense strand
ugagaaaggaggagaggaa

SEQ ID NO: 1860525 - RNA, 19 nt, Homo sapiens
  misc_RNA (1)...(19): siRNA sense strand
cagaggagcaggccaagga

SEQ ID NO: 1860526 - RNA, 19 nt, Homo sapiens
  misc_RNA (1)...(19): siRNA sense strand
cugcuauucugcaauuauu

SEQ ID NO: 1860527 - RNA, 19 nt, Homo sapiens
  misc_RNA (1)...(19): siRNA sense strand
ccucacgacucaccaagau

SEQ ID NO: 1860528 - RNA, 19 nt, Homo sapiens
  misc_RNA (1)...(19): siRNA sense strand
agaaagacaaagaugauga

SEQ ID NO: 1860529 - RNA, 19 nt, Homo sapiens
  misc_RNA (1)...(19): siRNA sense strand
cagagggauugccacauau

SEQ ID NO: 1860530 - RNA, 19 nt, Homo sapiens
  misc_RNA (1)...(19): siRNA sense strand
ccaacuugucucagaauuu

SEQ ID NO: 1860531 - RNA, 19 nt, Homo sapiens
  misc_RNA (1)...(19): siRNA sense strand
ggaggaugccuucuacagu

SEQ ID NO: 1860532 - RNA, 19 nt, Homo sapiens
  misc_RNA (1)...(19): siRNA sense strand
gcacagagcugacccgaaa

SEQ ID NO: 1860533 - RNA, 19 nt, Homo sapiens
  misc_RNA (1)...(19): siRNA sense strand
gcacuaacaucaagcuuua

SEQ ID NO: 1860534 - RNA, 19 nt, Homo sapiens
  misc_RNA (1)...(19): siRNA sense strand
gcacugagguggcuuaugu

SEQ ID NO: 1860535 - RNA, 19 nt, Homo sapiens
  misc_RNA (1)...(19): siRNA sense strand
gagaagaggcuaaugauga

SEQ ID NO: 1860536 - RNA, 19 nt, Homo sapiens
  misc_RNA (1)...(19): siRNA sense strand
aaacagaacuucgcuuuga

SEQ ID NO: 1860537 - RNA, 19 nt, Homo sapiens
  misc_RNA (1)...(19): siRNA sense strand
gcagauguguucaaccaaa

SEQ ID NO: 1860538 - RNA, 19 nt, Homo sapiens
  misc_RNA (1)...(19): siRNA sense strand
gaacuuccuucucaucaug

SEQ ID NO: 1860539 - RNA, 19 nt, Homo sapiens
  misc_RNA (1)...(19): siRNA sense strand
gugaguggcugugucauua

SEQ ID NO: 1860540 - RNA, 19 nt, Homo sapiens
  misc_RNA (1)...(19): siRNA sense strand
gaagccaaccacuaaauuu

SEQ ID NO: 1860541 - RNA, 19 nt, Homo sapiens
  misc_RNA (1)...(19): siRNA sense strand
aagaacgacuguacaauga

SEQ ID NO: 1860542 - RNA, 19 nt, Homo sapiens
  misc_RNA (1)...(19): siRNA sense strand
acaagaagccaaccacuaa

SEQ ID NO: 1860543 - RNA, 19 nt, Homo sapiens
  misc_RNA (1)...(19): siRNA sense strand
gagcugacccgaaacaaga

SEQ ID NO: 1860544 - RNA, 19 nt, Homo sapiens
  misc_RNA (1)...(19): siRNA sense strand
ccacuaaauuugaacuaga

SEQ ID NO: 1860545 - RNA, 19 nt, Homo sapiens
  misc_RNA (1)...(19): siRNA sense strand
gauuacaucucguuuagca

SEQ ID NO: 1860546 - RNA, 19 nt, Homo sapiens
  misc_RNA (1)...(19): siRNA sense strand
acaagaaauucaccuuuga

SEQ ID NO: 1860547 - RNA, 19 nt, Homo sapiens
  misc_RNA (1)...(19): siRNA sense strand
gggcaugucucaagaggau

SEQ ID NO: 1860548 - RNA, 19 nt, Homo sapiens
  misc_RNA (1)...(19): siRNA sense strand
ggaggcaucucagucaguu

SEQ ID NO: 1860549 - RNA, 19 nt, Homo sapiens
  misc_RNA (1)...(19): siRNA sense strand
caucagguguuuacuguuc

SEQ ID NO: 1860550 - RNA, 19 nt, Homo sapiens
  misc_RNA (1)...(19): siRNA sense strand
caagaacgacuguacaaug

SEQ ID NO: 1860551 - RNA, 19 nt, Homo sapiens
  misc_RNA (1)...(19): siRNA sense strand
acacuccuauguugcuuua

SEQ ID NO: 1860552 - RNA, 19 nt, Homo sapiens
  misc_RNA (1)...(19): siRNA sense strand
gggcaagucuacagugugu

SEQ ID NO: 1860553 - RNA, 19 nt, Homo sapiens
  misc_RNA (1)...(19): siRNA sense strand
gaacgacuguacaaugaac

SEQ ID NO: 1860554 - RNA, 19 nt, Homo sapiens
  misc_RNA (1)...(19): siRNA sense strand
gacaagaagccaaccacua

SEQ ID NO: 1860555 - RNA, 19 nt, Homo sapiens
  misc_RNA (1)...(19): siRNA sense strand
aaguguagcuggcuucauu

SEQ ID NO: 1860556 - RNA, 19 nt, Homo sapiens
  misc_RNA (1)...(19): siRNA sense strand
gaaacagaacuucgcuuug

SEQ ID NO: 1860557 - RNA, 19 nt, Homo sapiens
  misc_RNA (1)...(19): siRNA sense strand
gaaacaagaaauucaccuu

SEQ ID NO: 1860558 - RNA, 19 nt, Homo sapiens
  misc_RNA (1)...(19): siRNA sense strand
gaaauucaccuuugaugcu

SEQ ID NO: 1860559 - RNA, 19 nt, Homo sapiens
  misc_RNA (1)...(19): siRNA sense strand
aacaagaaauucaccuuug

SEQ ID NO: 1860560 - RNA, 19 nt, Homo sapiens
  misc_RNA (1)...(19): siRNA sense strand
ugagguggaugucguuguu

SEQ ID NO: 1860561 - RNA, 19 nt, Homo sapiens
  misc_RNA (1)...(19): siRNA sense strand
ugccuucaaugucaaauuu

SEQ ID NO: 1860562 - RNA, 19 nt, Homo sapiens
  misc_RNA (1)...(19): siRNA sense strand
gccaaccacuaaauuugaa

SEQ ID NO: 1860563 - RNA, 19 nt, Homo sapiens
  misc_RNA (1)...(19): siRNA sense strand
gagcguauccgugaguauu

SEQ ID NO: 1860564 - RNA, 19 nt, Homo sapiens
  misc_RNA (1)...(19): siRNA sense strand
gugaaaaucuacaaaguug

SEQ ID NO: 1860565 - RNA, 19 nt, Homo sapiens
  misc_RNA (1)...(19): siRNA sense strand
agaaacagaacuucgcuuu

SEQ ID NO: 1860566 - RNA, 19 nt, Homo sapiens
  misc_RNA (1)...(19): siRNA sense strand
uagcagauguguucaacca

SEQ ID NO: 1860567 - RNA, 19 nt, Homo sapiens
  misc_RNA (1)...(19): siRNA sense strand
ggagaagaggcuaaugaug

SEQ ID NO: 1860568 - RNA, 19 nt, Homo sapiens
  misc_RNA (1)...(19): siRNA sense strand
gcauggcuguucugugcaa

SEQ ID NO: 1860569 - RNA, 19 nt, Homo sapiens
  misc_RNA (1)...(19): siRNA sense strand
caucccagacuccuguuua

SEQ ID NO: 1860570 - RNA, 19 nt, Homo sapiens
  misc_RNA (1)...(19): siRNA sense strand
gcaugucucaagaggauaa

SEQ ID NO: 1860571 - RNA, 19 nt, Homo sapiens
  misc_RNA (1)...(19): siRNA sense strand
uggcuuaugucuccaagga

SEQ ID NO: 1860572 - RNA, 19 nt, Homo sapiens
  misc_RNA (1)...(19): siRNA sense strand
caagaagccaaccacuaaa

SEQ ID NO: 1860573 - RNA, 19 nt, Homo sapiens
  misc_RNA (1)...(19): siRNA sense strand
ggaugucguuguuguucug

SEQ ID NO: 1860574 - RNA, 19 nt, Homo sapiens
  misc_RNA (1)...(19): siRNA sense strand
caccaccuacugaguguua

SEQ ID NO: 1860575 - RNA, 19 nt, Homo sapiens
  misc_RNA (1)...(19): siRNA sense strand
gaucaagaacgacuguaca

SEQ ID NO: 1860576 - RNA, 19 nt, Homo sapiens
  misc_RNA (1)...(19): siRNA sense strand
guguggaccuggagcauca

SEQ ID NO: 1860577 - RNA, 19 nt, Homo sapiens
  misc_RNA (1)...(19): siRNA sense strand
ccagacuccuguuuaccuu

SEQ ID NO: 1860578 - RNA, 19 nt, Homo sapiens
  misc_RNA (1)...(19): siRNA sense strand
ggacacuccuauguugcuu

SEQ ID NO: 1860579 - RNA, 19 nt, Homo sapiens
  misc_RNA (1)...(19): siRNA sense strand
ugacuggcauggcagagau

SEQ ID NO: 1860580 - RNA, 19 nt, Homo sapiens
  misc_RNA (1)...(19): siRNA sense strand
agacuccuguuuaccuuug

SEQ ID NO: 1860581 - RNA, 19 nt, Homo sapiens
  misc_RNA (1)...(19): siRNA sense strand
ggcacuaacaucaagcuuu

SEQ ID NO: 1860582 - RNA, 19 nt, Homo sapiens
  misc_RNA (1)...(19): siRNA sense strand
gagcaucagguguuuacug

SEQ ID NO: 1860583 - RNA, 19 nt, Homo sapiens
  misc_RNA (1)...(19): siRNA sense strand
gguguuuacuguucugucu

SEQ ID NO: 1860584 - RNA, 19 nt, Homo sapiens
  misc_RNA (1)...(19): siRNA sense strand
caagaaauucaccuuugau

SEQ ID NO: 1860585 - RNA, 19 nt, Homo sapiens
  misc_RNA (1)...(19): siRNA sense strand
gggagaagaggcuaaugau

SEQ ID NO: 1860586 - RNA, 19 nt, Homo sapiens
  misc_RNA (1)...(19): siRNA sense strand
acuguacaaugaacugaaa

SEQ ID NO: 1860587 - RNA, 19 nt, Homo sapiens
  misc_RNA (1)...(19): siRNA sense strand
agaagaggcuaaugaugac

SEQ ID NO: 1860588 - RNA, 19 nt, Homo sapiens
  misc_RNA (1)...(19): siRNA sense strand
agaagccaaccacuaaauu

SEQ ID NO: 1860589 - RNA, 19 nt, Homo sapiens
  misc_RNA (1)...(19): siRNA sense strand
ugaacuagagcgagaaaca

SEQ ID NO: 1860590 - RNA, 19 nt, Homo sapiens
  misc_RNA (1)...(19): siRNA sense strand
ccaccacuccuggcacuaa

SEQ ID NO: 1860591 - RNA, 19 nt, Homo sapiens
  misc_RNA (1)...(19): siRNA sense strand
acacagccuuggaacagau

SEQ ID NO: 1860592 - RNA, 19 nt, Homo sapiens
  misc_RNA (1)...(19): siRNA sense strand
uggcauggcagagaucuuu

SEQ ID NO: 1860593 - RNA, 19 nt, Homo sapiens
  misc_RNA (1)...(19): siRNA sense strand
gguggaggcaucucaguca

SEQ ID NO: 1860594 - RNA, 19 nt, Homo sapiens
  misc_RNA (1)...(19): siRNA sense strand
caguucaguuggaguuguu

SEQ ID NO: 1860595 - RNA, 19 nt, Homo sapiens
  misc_RNA (1)...(19): siRNA sense strand
ccaaaggugugaggugaac

SEQ ID NO: 1860596 - RNA, 19 nt, Homo sapiens
  misc_RNA (1)...(19): siRNA sense strand
gggucaagggcucugguua

SEQ ID NO: 1860597 - RNA, 19 nt, Homo sapiens
  misc_RNA (1)...(19): siRNA sense strand
gaacuagagcgagaaacag

SEQ ID NO: 1860598 - RNA, 19 nt, Homo sapiens
  misc_RNA (1)...(19): siRNA sense strand
cuauguugcuuuaccucaa

SEQ ID NO: 1860599 - RNA, 19 nt, Homo sapiens
  misc_RNA (1)...(19): siRNA sense strand
aagccaaccacuaaauuug

SEQ ID NO: 1860600 - RNA, 19 nt, Homo sapiens
  misc_RNA (1)...(19): siRNA sense strand
ggucaagggcucugguuac

SEQ ID NO: 1860601 - RNA, 19 nt, Homo sapiens
  misc_RNA (1)...(19): siRNA sense strand
gugggcaagucuacagugu

SEQ ID NO: 1860602 - RNA, 19 nt, Homo sapiens
  misc_RNA (1)...(19): siRNA sense strand
caagguggcuguuuucacu

SEQ ID NO: 1860603 - RNA, 19 nt, Homo sapiens
  misc_RNA (1)...(19): siRNA sense strand
gcaugcagccucagcuuuu

SEQ ID NO: 1860604 - RNA, 19 nt, Homo sapiens
  misc_RNA (1)...(19): siRNA sense strand
cagauguguucaaccaaag

SEQ ID NO: 1860605 - RNA, 19 nt, Homo sapiens
  misc_RNA (1)...(19): siRNA sense strand
ugcuuuaccucaacacuca

SEQ ID NO: 1860606 - RNA, 19 nt, Homo sapiens
  misc_RNA (1)...(19): siRNA sense strand
gcccacugccuaagaacuu

SEQ ID NO: 1860607 - RNA, 19 nt, Homo sapiens
  misc_RNA (1)...(19): siRNA sense strand
cacuaaauuugaacuagag

SEQ ID NO: 1860608 - RNA, 19 nt, Homo sapiens
  misc_RNA (1)...(19): siRNA sense strand
gaguggcugugucauuaac

SEQ ID NO: 1860609 - RNA, 19 nt, Homo sapiens
  misc_RNA (1)...(19): siRNA sense strand
ucacuuggcauggcuguuc

SEQ ID NO: 1860610 - RNA, 19 nt, Homo sapiens
  misc_RNA (1)...(19): siRNA sense strand
agcaucagguguuuacugu

SEQ ID NO: 1860611 - RNA, 19 nt, Homo sapiens
  misc_RNA (1)...(19): siRNA sense strand
ggaucaagaacgacuguac

SEQ ID NO: 1860612 - RNA, 19 nt, Homo sapiens
  misc_RNA (1)...(19): siRNA sense strand
ucacacagccuuggaacag

SEQ ID NO: 1860613 - RNA, 19 nt, Homo sapiens
  misc_RNA (1)...(19): siRNA sense strand
ggcuaaugaugacaagaag

SEQ ID NO: 1860614 - RNA, 19 nt, Homo sapiens
  misc_RNA (1)...(19): siRNA sense strand
ccgaagggcaucugugagu

SEQ ID NO: 1860615 - RNA, 19 nt, Homo sapiens
  misc_RNA (1)...(19): siRNA sense strand
aagaaauucaccuuugaug

SEQ ID NO: 1860616 - RNA, 19 nt, Homo sapiens
  misc_RNA (1)...(19): siRNA sense strand
gcacugccgaggguacaga

SEQ ID NO: 1860617 - RNA, 19 nt, Homo sapiens
  misc_RNA (1)...(19): siRNA sense strand
ugaguggcugugucauuaa

SEQ ID NO: 1860618 - RNA, 19 nt, Homo sapiens
  misc_RNA (1)...(19): siRNA sense strand
aagaagccaaccacuaaau

SEQ ID NO: 1860619 - RNA, 19 nt, Homo sapiens
  misc_RNA (1)...(19): siRNA sense strand
cacacagccuuggaacaga

SEQ ID NO: 1860620 - RNA, 19 nt, Homo sapiens
  misc_RNA (1)...(19): siRNA sense strand
aaccgaagggcaucuguga

SEQ ID NO: 1860621 - RNA, 19 nt, Homo sapiens
  misc_RNA (1)...(19): siRNA sense strand
caucucagucaguucaguu

SEQ ID NO: 1860622 - RNA, 19 nt, Homo sapiens
  misc_RNA (1)...(19): siRNA sense strand
aggcuaaugaugacaagaa

SEQ ID NO: 1860623 - RNA, 19 nt, Homo sapiens
  misc_RNA (1)...(19): siRNA sense strand
ucaguucaguuggaguugu

SEQ ID NO: 1860624 - RNA, 19 nt, Homo sapiens
  misc_RNA (1)...(19): siRNA sense strand
gaugagcguauccgugagu

SEQ ID NO: 1860625 - RNA, 19 nt, Homo sapiens
  misc_RNA (1)...(19): siRNA sense strand
gaauagaaguggaucauuu

SEQ ID NO: 1860626 - RNA, 19 nt, Homo sapiens
  misc_RNA (1)...(19): siRNA sense strand
gguacaaggugaauaauua

SEQ ID NO: 1860627 - RNA, 19 nt, Homo sapiens
  misc_RNA (1)...(19): siRNA sense strand
caaauuaacuugcucuaug

SEQ ID NO: 1860628 - RNA, 19 nt, Homo sapiens
  misc_RNA (1)...(19): siRNA sense strand
gaaggugugugacauauau

SEQ ID NO: 1860629 - RNA, 19 nt, Homo sapiens
  misc_RNA (1)...(19): siRNA sense strand
ggaauucucucucaguuau

SEQ ID NO: 1860630 - RNA, 19 nt, Homo sapiens
  misc_RNA (1)...(19): siRNA sense strand
ugaaagagcuauugcagaa

SEQ ID NO: 1860631 - RNA, 19 nt, Homo sapiens
  misc_RNA (1)...(19): siRNA sense strand
ugagaaaggucccauuaaa

SEQ ID NO: 1860632 - RNA, 19 nt, Homo sapiens
  misc_RNA (1)...(19): siRNA sense strand
gaacauccauugcuuagag

SEQ ID NO: 1860633 - RNA, 19 nt, Homo sapiens
  misc_RNA (1)...(19): siRNA sense strand
cagcaagacuuaucaagaa

SEQ ID NO: 1860634 - RNA, 19 nt, Homo sapiens
  misc_RNA (1)...(19): siRNA sense strand
gaaguaguguucaucauuc

SEQ ID NO: 1860635 - RNA, 19 nt, Homo sapiens
  misc_RNA (1)...(19): siRNA sense strand
gaguuacgcuguuuccuuu

SEQ ID NO: 1860636 - RNA, 19 nt, Homo sapiens
  misc_RNA (1)...(19): siRNA sense strand
gagcaacaauacuuucuug

SEQ ID NO: 1860637 - RNA, 19 nt, Homo sapiens
  misc_RNA (1)...(19): siRNA sense strand
cauuaaagcuucacagaau

SEQ ID NO: 1860638 - RNA, 19 nt, Homo sapiens
  misc_RNA (1)...(19): siRNA sense strand
gcugguauuuggacuauuu

SEQ ID NO: 1860639 - RNA, 19 nt, Homo sapiens
  misc_RNA (1)...(19): siRNA sense strand
aaacuggaguggcugaaua

SEQ ID NO: 1860640 - RNA, 19 nt, Homo sapiens
  misc_RNA (1)...(19): siRNA sense strand
gaucgaaggagcaaauuaa

SEQ ID NO: 1860641 - RNA, 19 nt, Homo sapiens
  misc_RNA (1)...(19): siRNA sense strand
gaagaugcuuugcaaaugg

SEQ ID NO: 1860642 - RNA, 19 nt, Homo sapiens
  misc_RNA (1)...(19): siRNA sense strand
gcuuagagcugccuucuca

SEQ ID NO: 1860643 - RNA, 19 nt, Homo sapiens
  misc_RNA (1)...(19): siRNA sense strand
gcagagugcuucuuacaag

SEQ ID NO: 1860644 - RNA, 19 nt, Homo sapiens
  misc_RNA (1)...(19): siRNA sense strand
ugaagaagaugcuuugcaa

SEQ ID NO: 1860645 - RNA, 19 nt, Homo sapiens
  misc_RNA (1)...(19): siRNA sense strand
gugaagcauuccuguauaa

SEQ ID NO: 1860646 - RNA, 19 nt, Homo sapiens
  misc_RNA (1)...(19): siRNA sense strand
aaagagcuauugcagaauu

SEQ ID NO: 1860647 - RNA, 19 nt, Homo sapiens
  misc_RNA (1)...(19): siRNA sense strand
gagaugagucuuucugauu

SEQ ID NO: 1860648 - RNA, 19 nt, Homo sapiens
  misc_RNA (1)...(19): siRNA sense strand
aaacaggacuucacaaggu

SEQ ID NO: 1860649 - RNA, 19 nt, Homo sapiens
  misc_RNA (1)...(19): siRNA sense strand
uggaguggcugaauauaaa

SEQ ID NO: 1860650 - RNA, 19 nt, Homo sapiens
  misc_RNA (1)...(19): siRNA sense strand
caacaguccucuagagaca

SEQ ID NO: 1860651 - RNA, 19 nt, Homo sapiens
  misc_RNA (1)...(19): siRNA sense strand
guaaacacacggauauuga

SEQ ID NO: 1860652 - RNA, 19 nt, Homo sapiens
  misc_RNA (1)...(19): siRNA sense strand
ugucuaaacugauccacua

SEQ ID NO: 1860653 - RNA, 19 nt, Homo sapiens
  misc_RNA (1)...(19): siRNA sense strand
gcgcagcucuucuuuacau

SEQ ID NO: 1860654 - RNA, 19 nt, Homo sapiens
  misc_RNA (1)...(19): siRNA sense strand
gagaaggugugugacauau

SEQ ID NO: 1860655 - RNA, 19 nt, Homo sapiens
  misc_RNA (1)...(19): siRNA sense strand
gcaaauggcagugggauau

SEQ ID NO: 1860656 - RNA, 19 nt, Homo sapiens
  misc_RNA (1)...(19): siRNA sense strand
ggcauaaacugcaacaauc

SEQ ID NO: 1860657 - RNA, 19 nt, Homo sapiens
  misc_RNA (1)...(19): siRNA sense strand
gaggugaaaccacuucuuu

SEQ ID NO: 1860658 - RNA, 19 nt, Homo sapiens
  misc_RNA (1)...(19): siRNA sense strand
uagaacaacuucaaagcuu

SEQ ID NO: 1860659 - RNA, 19 nt, Homo sapiens
  misc_RNA (1)...(19): siRNA sense strand
caacaguaauaucagaaga

SEQ ID NO: 1860660 - RNA, 19 nt, Homo sapiens
  misc_RNA (1)...(19): siRNA sense strand
ccaagcaacucgaagaaca

SEQ ID NO: 1860661 - RNA, 19 nt, Homo sapiens
  misc_RNA (1)...(19): siRNA sense strand
gaucccagcaacaguaaua

SEQ ID NO: 1860662 - RNA, 19 nt, Homo sapiens
  misc_RNA (1)...(19): siRNA sense strand
cagaugggcucagugcuaa

SEQ ID NO: 1860663 - RNA, 19 nt, Homo sapiens
  misc_RNA (1)...(19): siRNA sense strand
gcagcaagacuuaucaaga

SEQ ID NO: 1860664 - RNA, 19 nt, Homo sapiens
  misc_RNA (1)...(19): siRNA sense strand
caagaagaauguauuuggu

SEQ ID NO: 1860665 - RNA, 19 nt, Homo sapiens
  misc_RNA (1)...(19): siRNA sense strand
gcccuuauguuugccauuu

SEQ ID NO: 1860666 - RNA, 19 nt, Homo sapiens
  misc_RNA (1)...(19): siRNA sense strand
gaagcauuccuguauaaga

SEQ ID NO: 1860667 - RNA, 19 nt, Homo sapiens
  misc_RNA (1)...(19): siRNA sense strand
ugaucaagcugaagaagau

SEQ ID NO: 1860668 - RNA, 19 nt, Homo sapiens
  misc_RNA (1)...(19): siRNA sense strand
gagcugguauuuggacuau

SEQ ID NO: 1860669 - RNA, 19 nt, Homo sapiens
  misc_RNA (1)...(19): siRNA sense strand
gaaagaaauggagcuggua

SEQ ID NO: 1860670 - RNA, 19 nt, Homo sapiens
  misc_RNA (1)...(19): siRNA sense strand
gaaaacugcuugaucuuca

SEQ ID NO: 1860671 - RNA, 19 nt, Homo sapiens
  misc_RNA (1)...(19): siRNA sense strand
cgaaggagcaaauuaacuu

SEQ ID NO: 1860672 - RNA, 19 nt, Homo sapiens
  misc_RNA (1)...(19): siRNA sense strand
uagcuacacuaaagaaugu

SEQ ID NO: 1860673 - RNA, 19 nt, Homo sapiens
  misc_RNA (1)...(19): siRNA sense strand
caucauccuucuuucuuga

SEQ ID NO: 1860674 - RNA, 19 nt, Homo sapiens
  misc_RNA (1)...(19): siRNA sense strand
aaacaacucucugcugcuu

SEQ ID NO: 1860675 - RNA, 19 nt, Homo sapiens
  misc_RNA (1)...(19): siRNA sense strand
cagcaacaguaauaucaga

SEQ ID NO: 1860676 - RNA, 19 nt, Homo sapiens
  misc_RNA (1)...(19): siRNA sense strand
gggcauaaacugcaacaau

SEQ ID NO: 1860677 - RNA, 19 nt, Homo sapiens
  misc_RNA (1)...(19): siRNA sense strand
gagcagagggcauaaacug

SEQ ID NO: 1860678 - RNA, 19 nt, Homo sapiens
  misc_RNA (1)...(19): siRNA sense strand
gucaaaccauuucguguga

SEQ ID NO: 1860679 - RNA, 19 nt, Homo sapiens
  misc_RNA (1)...(19): siRNA sense strand
gaagaagaugcuuugcaaa

SEQ ID NO: 1860680 - RNA, 19 nt, Homo sapiens
  misc_RNA (1)...(19): siRNA sense strand
caggaaagcccagaagaaa

SEQ ID NO: 1860681 - RNA, 19 nt, Homo sapiens
  misc_RNA (1)...(19): siRNA sense strand
gcuaauguucguccucuaa

SEQ ID NO: 1860682 - RNA, 19 nt, Homo sapiens
  misc_RNA (1)...(19): siRNA sense strand
agaagaugcuuugcaaaug

SEQ ID NO: 1860683 - RNA, 19 nt, Homo sapiens
  misc_RNA (1)...(19): siRNA sense strand
ggaaagcccagaagaaagg

SEQ ID NO: 1860684 - RNA, 19 nt, Homo sapiens
  misc_RNA (1)...(19): siRNA sense strand
gcaagacuuaucaagaauu

SEQ ID NO: 1860685 - RNA, 19 nt, Homo sapiens
  misc_RNA (1)...(19): siRNA sense strand
gcacuccucagccuggaua

SEQ ID NO: 1860686 - RNA, 19 nt, Homo sapiens
  misc_RNA (1)...(19): siRNA sense strand
cuaaacugauccacuaugu

SEQ ID NO: 1860687 - RNA, 19 nt, Homo sapiens
  misc_RNA (1)...(19): siRNA sense strand
agaugagucuuucugauug

SEQ ID NO: 1860688 - RNA, 19 nt, Homo sapiens
  misc_RNA (1)...(19): siRNA sense strand
caaaccauuucgugugaga

SEQ ID NO: 1860689 - RNA, 19 nt, Homo sapiens
  misc_RNA (1)...(19): siRNA sense strand
gagaaaggucccauuaaag

SEQ ID NO: 1860690 - RNA, 19 nt, Homo sapiens
  misc_RNA (1)...(19): siRNA sense strand
aaaguggaauucucucuca

SEQ ID NO: 1860691 - RNA, 19 nt, Homo sapiens
  misc_RNA (1)...(19): siRNA sense strand
guagugugcuucagagucu

SEQ ID NO: 1860692 - RNA, 19 nt, Homo sapiens
  misc_RNA (1)...(19): siRNA sense strand
uagcgcagcucuucuuuac

SEQ ID NO: 1860693 - RNA, 19 nt, Homo sapiens
  misc_RNA (1)...(19): siRNA sense strand
ugugaagcauuccuguaua

SEQ ID NO: 1860694 - RNA, 19 nt, Homo sapiens
  misc_RNA (1)...(19): siRNA sense strand
guucaucauucuuccauuc

SEQ ID NO: 1860695 - RNA, 19 nt, Homo sapiens
  misc_RNA (1)...(19): siRNA sense strand
gaaggagcaaauuaacuug

SEQ ID NO: 1860696 - RNA, 19 nt, Homo sapiens
  misc_RNA (1)...(19): siRNA sense strand
gcauaaacugcaacaauca

SEQ ID NO: 1860697 - RNA, 19 nt, Homo sapiens
  misc_RNA (1)...(19): siRNA sense strand
aaacugauccacuauguag

SEQ ID NO: 1860698 - RNA, 19 nt, Homo sapiens
  misc_RNA (1)...(19): siRNA sense strand
uagcuucucugaggugaaa

SEQ ID NO: 1860699 - RNA, 19 nt, Homo sapiens
  misc_RNA (1)...(19): siRNA sense strand
uggaaaugcuguaaacaca

SEQ ID NO: 1860700 - RNA, 19 nt, Homo sapiens
  misc_RNA (1)...(19): siRNA sense strand
ccagaagaaaggacaguaa

SEQ ID NO: 1860701 - RNA, 19 nt, Homo sapiens
  misc_RNA (1)...(19): siRNA sense strand
ccauuuauuucaaguguag

SEQ ID NO: 1860702 - RNA, 19 nt, Homo sapiens
  misc_RNA (1)...(19): siRNA sense strand
gcucagugcuaaacaacuc

SEQ ID NO: 1860703 - RNA, 19 nt, Homo sapiens
  misc_RNA (1)...(19): siRNA sense strand
guuggcaaguguucuggua

SEQ ID NO: 1860704 - RNA, 19 nt, Homo sapiens
  misc_RNA (1)...(19): siRNA sense strand
gcuguaaacacacggauau

SEQ ID NO: 1860705 - RNA, 19 nt, Homo sapiens
  misc_RNA (1)...(19): siRNA sense strand
gcuauccacuacugcaaug

SEQ ID NO: 1860706 - RNA, 19 nt, Homo sapiens
  misc_RNA (1)...(19): siRNA sense strand
guggaauucucucucaguu

SEQ ID NO: 1860707 - RNA, 19 nt, Homo sapiens
  misc_RNA (1)...(19): siRNA sense strand
gauccaagcaacucgaaga

SEQ ID NO: 1860708 - RNA, 19 nt, Homo sapiens
  misc_RNA (1)...(19): siRNA sense strand
acacacggauauugaagug

SEQ ID NO: 1860709 - RNA, 19 nt, Homo sapiens
  misc_RNA (1)...(19): siRNA sense strand
cagaagaaaggacaguaaa

SEQ ID NO: 1860710 - RNA, 19 nt, Homo sapiens
  misc_RNA (1)...(19): siRNA sense strand
gaugagucuuucugauugu

SEQ ID NO: 1860711 - RNA, 19 nt, Homo sapiens
  misc_RNA (1)...(19): siRNA sense strand
uauugacccugaaauccua

SEQ ID NO: 1860712 - RNA, 19 nt, Homo sapiens
  misc_RNA (1)...(19): siRNA sense strand
ugagaaggugugugacaua

SEQ ID NO: 1860713 - RNA, 19 nt, Homo sapiens
  misc_RNA (1)...(19): siRNA sense strand
cuugugagcuggauuccuu

SEQ ID NO: 1860714 - RNA, 19 nt, Homo sapiens
  misc_RNA (1)...(19): siRNA sense strand
agucaaacauuacaagaag

SEQ ID NO: 1860715 - RNA, 19 nt, Homo sapiens
  misc_RNA (1)...(19): siRNA sense strand
gagucaaacauuacaagaa

SEQ ID NO: 1860716 - RNA, 19 nt, Homo sapiens
  misc_RNA (1)...(19): siRNA sense strand
aaauguggcuuggaagaau

SEQ ID NO: 1860717 - RNA, 19 nt, Homo sapiens
  misc_RNA (1)...(19): siRNA sense strand
agaaguaguguucaucauu

SEQ ID NO: 1860718 - RNA, 19 nt, Homo sapiens
  misc_RNA (1)...(19): siRNA sense strand
ucacaagguaguaguaguu

SEQ ID NO: 1860719 - RNA, 19 nt, Homo sapiens
  misc_RNA (1)...(19): siRNA sense strand
cagggcagagugcuucuua

SEQ ID NO: 1860720 - RNA, 19 nt, Homo sapiens
  misc_RNA (1)...(19): siRNA sense strand
ccucugaaguugauguuag

SEQ ID NO: 1860721 - RNA, 19 nt, Homo sapiens
  misc_RNA (1)...(19): siRNA sense strand
cgaagaacaucucaaaaca

SEQ ID NO: 1860722 - RNA, 19 nt, Homo sapiens
  misc_RNA (1)...(19): siRNA sense strand
gaagaaaggacaguaaacg

SEQ ID NO: 1860723 - RNA, 19 nt, Homo sapiens
  misc_RNA (1)...(19): siRNA sense strand
guuuaaauguaguccauca

SEQ ID NO: 1860724 - RNA, 19 nt, Homo sapiens
  misc_RNA (1)...(19): siRNA sense strand
aaccagcuguguuuuauua

SEQ ID NO: 1860725 - RNA, 19 nt, Homo sapiens
  misc_RNA (1)...(19): siRNA sense strand
ggaauucccuucuaaauag

SEQ ID NO: 1860726 - RNA, 19 nt, Homo sapiens
  misc_RNA (1)...(19): siRNA sense strand
gaaucaagaugccucguua

SEQ ID NO: 1860727 - RNA, 19 nt, Homo sapiens
  misc_RNA (1)...(19): siRNA sense strand
gauaaggaguuucaggaua

SEQ ID NO: 1860728 - RNA, 19 nt, Homo sapiens
  misc_RNA (1)...(19): siRNA sense strand
ggacagggcugacagacuu

SEQ ID NO: 1860729 - RNA, 19 nt, Homo sapiens
  misc_RNA (1)...(19): siRNA sense strand
caagaucgaugaugacaaa

SEQ ID NO: 1860730 - RNA, 19 nt, Homo sapiens
  misc_RNA (1)...(19): siRNA sense strand
gcacaaugaugguaauuuc

SEQ ID NO: 1860731 - RNA, 19 nt, Homo sapiens
  misc_RNA (1)...(19): siRNA sense strand
ucaaagaucucaagcacaa

SEQ ID NO: 1860732 - RNA, 19 nt, Homo sapiens
  misc_RNA (1)...(19): siRNA sense strand
gaacgcuacuuucauguau

SEQ ID NO: 1860733 - RNA, 19 nt, Homo sapiens
  misc_RNA (1)...(19): siRNA sense strand
gaaaugagacuaccuacug

SEQ ID NO: 1860734 - RNA, 19 nt, Homo sapiens
  misc_RNA (1)...(19): siRNA sense strand
caagaugccucguuauugu

SEQ ID NO: 1860735 - RNA, 19 nt, Homo sapiens
  misc_RNA (1)...(19): siRNA sense strand
caacaucucucagaaagga

SEQ ID NO: 1860736 - RNA, 19 nt, Homo sapiens
  misc_RNA (1)...(19): siRNA sense strand
gagaggagaaacauacuua

SEQ ID NO: 1860737 - RNA, 19 nt, Homo sapiens
  misc_RNA (1)...(19): siRNA sense strand
caaauuugcucaugcuuuc

SEQ ID NO: 1860738 - RNA, 19 nt, Homo sapiens
  misc_RNA (1)...(19): siRNA sense strand
gcaaugugauuauuaugug

SEQ ID NO: 1860739 - RNA, 19 nt, Homo sapiens
  misc_RNA (1)...(19): siRNA sense strand
acucuaaacuuccuaauga

SEQ ID NO: 1860740 - RNA, 19 nt, Homo sapiens
  misc_RNA (1)...(19): siRNA sense strand
gaugggcuguguccucaua

SEQ ID NO: 1860741 - RNA, 19 nt, Homo sapiens
  misc_RNA (1)...(19): siRNA sense strand
ggagaaacauacuuaaagg

SEQ ID NO: 1860742 - RNA, 19 nt, Homo sapiens
  misc_RNA (1)...(19): siRNA sense strand
ucacuacuaucugcaaaua

SEQ ID NO: 1860743 - RNA, 19 nt, Homo sapiens
  misc_RNA (1)...(19): siRNA sense strand
cggauggucugauucauaa

SEQ ID NO: 1860744 - RNA, 19 nt, Homo sapiens
  misc_RNA (1)...(19): siRNA sense strand
gcugacagacuuaacuuua

SEQ ID NO: 1860745 - RNA, 19 nt, Homo sapiens
  misc_RNA (1)...(19): siRNA sense strand
gcucgucgcucuccugaug

SEQ ID NO: 1860746 - RNA, 19 nt, Homo sapiens
  misc_RNA (1)...(19): siRNA sense strand
ucagugacauuguagguuu

SEQ ID NO: 1860747 - RNA, 19 nt, Homo sapiens
  misc_RNA (1)...(19): siRNA sense strand
acaaguugcuucagauuga

SEQ ID NO: 1860748 - RNA, 19 nt, Homo sapiens
  misc_RNA (1)...(19): siRNA sense strand
gaacaaguugcuucagauu

SEQ ID NO: 1860749 - RNA, 19 nt, Homo sapiens
  misc_RNA (1)...(19): siRNA sense strand
gcaaaaugcuggccuaaau

SEQ ID NO: 1860750 - RNA, 19 nt, Homo sapiens
  misc_RNA (1)...(19): siRNA sense strand
gauccgacgucuacagcua

SEQ ID NO: 1860751 - RNA, 19 nt, Homo sapiens
  misc_RNA (1)...(19): siRNA sense strand
gaaaccuucuacacuuuga

SEQ ID NO: 1860752 - RNA, 19 nt, Homo sapiens
  misc_RNA (1)...(19): siRNA sense strand
cuacuucagugacauugua

SEQ ID NO: 1860753 - RNA, 19 nt, Homo sapiens
  misc_RNA (1)...(19): siRNA sense strand
gaucucagcuggaaguuuu

SEQ ID NO: 1860754 - RNA, 19 nt, Homo sapiens
  misc_RNA (1)...(19): siRNA sense strand
gcuagugguuugccuaaga

SEQ ID NO: 1860755 - RNA, 19 nt, Homo sapiens
  misc_RNA (1)...(19): siRNA sense strand
aaagagaccagauuucaaa

SEQ ID NO: 1860756 - RNA, 19 nt, Homo sapiens
  misc_RNA (1)...(19): siRNA sense strand
uaucugcacuccaguaaga

SEQ ID NO: 1860757 - RNA, 19 nt, Homo sapiens
  misc_RNA (1)...(19): siRNA sense strand
gaauugagcuaccccauga

SEQ ID NO: 1860758 - RNA, 19 nt, Homo sapiens
  misc_RNA (1)...(19): siRNA sense strand
ggaugaaggaccagaaauu

SEQ ID NO: 1860759 - RNA, 19 nt, Homo sapiens
  misc_RNA (1)...(19): siRNA sense strand
gauagaauacugugagaga

SEQ ID NO: 1860760 - RNA, 19 nt, Homo sapiens
  misc_RNA (1)...(19): siRNA sense strand
aaacgagacuuugcucuug

SEQ ID NO: 1860761 - RNA, 19 nt, Homo sapiens
  misc_RNA (1)...(19): siRNA sense strand
ccaacgaucugcccuucaa

SEQ ID NO: 1860762 - RNA, 19 nt, Homo sapiens
  misc_RNA (1)...(19): siRNA sense strand
acaaggagagcaccuauuu

SEQ ID NO: 1860763 - RNA, 19 nt, Homo sapiens
  misc_RNA (1)...(19): siRNA sense strand
gaggagaaacauacuuaaa

SEQ ID NO: 1860764 - RNA, 19 nt, Homo sapiens
  misc_RNA (1)...(19): siRNA sense strand
gcucuugccuauuugaaug

SEQ ID NO: 1860765 - RNA, 19 nt, Homo sapiens
  misc_RNA (1)...(19): siRNA sense strand
uuacaagaaugguacagaa

SEQ ID NO: 1860766 - RNA, 19 nt, Homo sapiens
  misc_RNA (1)...(19): siRNA sense strand
ggacaugcuuaaugacauc

SEQ ID NO: 1860767 - RNA, 19 nt, Homo sapiens
  misc_RNA (1)...(19): siRNA sense strand
ugacagacuuaacuuuaug

SEQ ID NO: 1860768 - RNA, 19 nt, Homo sapiens
  misc_RNA (1)...(19): siRNA sense strand
guagaaugguggugaagau

SEQ ID NO: 1860769 - RNA, 19 nt, Homo sapiens
  misc_RNA (1)...(19): siRNA sense strand
gauggcacauucauggauu

SEQ ID NO: 1860770 - RNA, 19 nt, Homo sapiens
  misc_RNA (1)...(19): siRNA sense strand
gaagauagaauugaacaag

SEQ ID NO: 1860771 - RNA, 19 nt, Homo sapiens
  misc_RNA (1)...(19): siRNA sense strand
gaaacuugauaccaugauc

SEQ ID NO: 1860772 - RNA, 19 nt, Homo sapiens
  misc_RNA (1)...(19): siRNA sense strand
auaaggaguuucaggauau

SEQ ID NO: 1860773 - RNA, 19 nt, Homo sapiens
  misc_RNA (1)...(19): siRNA sense strand
agucagaacugccacaaug

SEQ ID NO: 1860774 - RNA, 19 nt, Homo sapiens
  misc_RNA (1)...(19): siRNA sense strand
ccagauuuauucuuggaaa

SEQ ID NO: 1860775 - RNA, 19 nt, Homo sapiens
  misc_RNA (1)...(19): siRNA sense strand
ggagauguguacagcuaug

SEQ ID NO: 1860776 - RNA, 19 nt, Homo sapiens
  misc_RNA (1)...(19): siRNA sense strand
ggaguuucaggauaucuua

SEQ ID NO: 1860777 - RNA, 19 nt, Homo sapiens
  misc_RNA (1)...(19): siRNA sense strand
cuucguauguuuacaagaa

SEQ ID NO: 1860778 - RNA, 19 nt, Homo sapiens
  misc_RNA (1)...(19): siRNA sense strand
ugccaacucuuuacagaaa

SEQ ID NO: 1860779 - RNA, 19 nt, Homo sapiens
  misc_RNA (1)...(19): siRNA sense strand
gcaaucggcaugcaauaga

SEQ ID NO: 1860780 - RNA, 19 nt, Homo sapiens
  misc_RNA (1)...(19): siRNA sense strand
ggaccggaaugagaagauu

SEQ ID NO: 1860781 - RNA, 19 nt, Homo sapiens
  misc_RNA (1)...(19): siRNA sense strand
gacuguuucugguaccuua

SEQ ID NO: 1860782 - RNA, 19 nt, Homo sapiens
  misc_RNA (1)...(19): siRNA sense strand
gccaacaucucucagaaag

SEQ ID NO: 1860783 - RNA, 19 nt, Homo sapiens
  misc_RNA (1)...(19): siRNA sense strand
gaagugguggacaugcuua

SEQ ID NO: 1860784 - RNA, 19 nt, Homo sapiens
  misc_RNA (1)...(19): siRNA sense strand
agacuuugcucuugccuau

SEQ ID NO: 1860785 - RNA, 19 nt, Homo sapiens
  misc_RNA (1)...(19): siRNA sense strand
ugcuucagauugacuauua

SEQ ID NO: 1860786 - RNA, 19 nt, Homo sapiens
  misc_RNA (1)...(19): siRNA sense strand
guaccauggugcuucugua

SEQ ID NO: 1860787 - RNA, 19 nt, Homo sapiens
  misc_RNA (1)...(19): siRNA sense strand
guauucggauggucugauu

SEQ ID NO: 1860788 - RNA, 19 nt, Homo sapiens
  misc_RNA (1)...(19): siRNA sense strand
gaggaaaugagacuaccua

SEQ ID NO: 1860789 - RNA, 19 nt, Homo sapiens
  misc_RNA (1)...(19): siRNA sense strand
gaacaucugguagaggaaa

SEQ ID NO: 1860790 - RNA, 19 nt, Homo sapiens
  misc_RNA (1)...(19): siRNA sense strand
cuacagcuauauucucgaa

SEQ ID NO: 1860791 - RNA, 19 nt, Homo sapiens
  misc_RNA (1)...(19): siRNA sense strand
aaggagauguguacagcua

SEQ ID NO: 1860792 - RNA, 19 nt, Homo sapiens
  misc_RNA (1)...(19): siRNA sense strand
ucacuuggaagaacucuaa

SEQ ID NO: 1860793 - RNA, 19 nt, Homo sapiens
  misc_RNA (1)...(19): siRNA sense strand
agauguaccuugacacaga

SEQ ID NO: 1860794 - RNA, 19 nt, Homo sapiens
  misc_RNA (1)...(19): siRNA sense strand
gcacuucguauguuuacaa

SEQ ID NO: 1860795 - RNA, 19 nt, Homo sapiens
  misc_RNA (1)...(19): siRNA sense strand
ggagaucauucugcggaaa

SEQ ID NO: 1860796 - RNA, 19 nt, Homo sapiens
  misc_RNA (1)...(19): siRNA sense strand
uaugauacccacguaaaua

SEQ ID NO: 1860797 - RNA, 19 nt, Homo sapiens
  misc_RNA (1)...(19): siRNA sense strand
gaccuaugauacccacgua

SEQ ID NO: 1860798 - RNA, 19 nt, Homo sapiens
  misc_RNA (1)...(19): siRNA sense strand
gauguaccuugacacagaa

SEQ ID NO: 1860799 - RNA, 19 nt, Homo sapiens
  misc_RNA (1)...(19): siRNA sense strand
caugauugccaacucuuua

SEQ ID NO: 1860800 - RNA, 19 nt, Homo sapiens
  misc_RNA (1)...(19): siRNA sense strand
ggaggaagauccagaaaag

SEQ ID NO: 1860801 - RNA, 19 nt, Homo sapiens
  misc_RNA (1)...(19): siRNA sense strand
ugauguacuucuugguuaa

SEQ ID NO: 1860802 - RNA, 19 nt, Homo sapiens
  misc_RNA (1)...(19): siRNA sense strand
aggcuagcguuuccuauuu

SEQ ID NO: 1860803 - RNA, 19 nt, Homo sapiens
  misc_RNA (1)...(19): siRNA sense strand
guacagcuaugggaucauc

SEQ ID NO: 1860804 - RNA, 19 nt, Homo sapiens
  misc_RNA (1)...(19): siRNA sense strand
uugauguacuucuugguua

SEQ ID NO: 1860805 - RNA, 19 nt, Homo sapiens
  misc_RNA (1)...(19): siRNA sense strand
gcagggauaagaagccaaa

SEQ ID NO: 1860806 - RNA, 19 nt, Homo sapiens
  misc_RNA (1)...(19): siRNA sense strand
gaugaaggaccagaaauuc

SEQ ID NO: 1860807 - RNA, 19 nt, Homo sapiens
  misc_RNA (1)...(19): siRNA sense strand
cacaauggcagcuaugaaa

SEQ ID NO: 1860808 - RNA, 19 nt, Homo sapiens
  misc_RNA (1)...(19): siRNA sense strand
ccaaauuugcucaugcuuu

SEQ ID NO: 1860809 - RNA, 19 nt, Homo sapiens
  misc_RNA (1)...(19): siRNA sense strand
guacuucuugguuaacuuu

SEQ ID NO: 1860810 - RNA, 19 nt, Homo sapiens
  misc_RNA (1)...(19): siRNA sense strand
ggagcacuucguauguuua

SEQ ID NO: 1860811 - RNA, 19 nt, Homo sapiens
  misc_RNA (1)...(19): siRNA sense strand
caugguggcuagugguuug

SEQ ID NO: 1860812 - RNA, 19 nt, Homo sapiens
  misc_RNA (1)...(19): siRNA sense strand
gaaaggacacagcuguaca

SEQ ID NO: 1860813 - RNA, 19 nt, Homo sapiens
  misc_RNA (1)...(19): siRNA sense strand
aaagcuauauggauaccuu

SEQ ID NO: 1860814 - RNA, 19 nt, Homo sapiens
  misc_RNA (1)...(19): siRNA sense strand
cuaagggaaugucauaucu

SEQ ID NO: 1860815 - RNA, 19 nt, Homo sapiens
  misc_RNA (1)...(19): siRNA sense strand
gagauacaauccagagacu

SEQ ID NO: 1860816 - RNA, 19 nt, Homo sapiens
  misc_RNA (1)...(19): siRNA sense strand
ccacguaaauaagaccuau

SEQ ID NO: 1860817 - RNA, 19 nt, Homo sapiens
  misc_RNA (1)...(19): siRNA sense strand
ucaggaaucucacuuuuga

SEQ ID NO: 1860818 - RNA, 19 nt, Homo sapiens
  misc_RNA (1)...(19): siRNA sense strand
gcucaugcuuucaggaauc

SEQ ID NO: 1860819 - RNA, 19 nt, Homo sapiens
  misc_RNA (1)...(19): siRNA sense strand
gaauggaauccugcucuuu

SEQ ID NO: 1860820 - RNA, 19 nt, Homo sapiens
  misc_RNA (1)...(19): siRNA sense strand
gacaagauaaggaguuuca

SEQ ID NO: 1860821 - RNA, 19 nt, Homo sapiens
  misc_RNA (1)...(19): siRNA sense strand
gaggcuagcguuuccuauu

SEQ ID NO: 1860822 - RNA, 19 nt, Homo sapiens
  misc_RNA (1)...(19): siRNA sense strand
ccgcccagauuuauucuug

SEQ ID NO: 1860823 - RNA, 19 nt, Homo sapiens
  misc_RNA (1)...(19): siRNA sense strand
gaagaggaaaugagacuac

SEQ ID NO: 1860824 - RNA, 19 nt, Homo sapiens
  misc_RNA (1)...(19): siRNA sense strand
agacguugcuguuggacuu

SEQ ID NO: 1860825 - RNA, 19 nt, Homo sapiens
  misc_RNA (1)...(19): siRNA sense strand
ccaaggagcucgcccacau

SEQ ID NO: 1860826 - RNA, 19 nt, Homo sapiens
  misc_RNA (1)...(19): siRNA sense strand
gaggagaccgcaucugaau

SEQ ID NO: 1860827 - RNA, 19 nt, Homo sapiens
  misc_RNA (1)...(19): siRNA sense strand
gcgcgugucugcagugagu

SEQ ID NO: 1860828 - RNA, 19 nt, Homo sapiens
  misc_RNA (1)...(19): siRNA sense strand
caccaucucugaccucauc

SEQ ID NO: 1860829 - RNA, 19 nt, Homo sapiens
  misc_RNA (1)...(19): siRNA sense strand
ggagaccgcaucugaaucu

SEQ ID NO: 1860830 - RNA, 19 nt, Homo sapiens
  misc_RNA (1)...(19): siRNA sense strand
uaucagaguccaccagaga

SEQ ID NO: 1860831 - RNA, 19 nt, Homo sapiens
  misc_RNA (1)...(19): siRNA sense strand
ccaaccaccugcaccaucu

SEQ ID NO: 1860832 - RNA, 19 nt, Homo sapiens
  misc_RNA (1)...(19): siRNA sense strand
ggacuccauccucuucauu

SEQ ID NO: 1860833 - RNA, 19 nt, Homo sapiens
  misc_RNA (1)...(19): siRNA sense strand
gagaaguggcaguaucaga

SEQ ID NO: 1860834 - RNA, 19 nt, Homo sapiens
  misc_RNA (1)...(19): siRNA sense strand
gaaguggcaguaucagagu

SEQ ID NO: 1860835 - RNA, 19 nt, Homo sapiens
  misc_RNA (1)...(19): siRNA sense strand
gggcugcaaugcugcucuu

SEQ ID NO: 1860836 - RNA, 19 nt, Homo sapiens
  misc_RNA (1)...(19): siRNA sense strand
gaaaaccuguguggacuca

SEQ ID NO: 1860837 - RNA, 19 nt, Homo sapiens
  misc_RNA (1)...(19): siRNA sense strand
guucugcagugucgagcuu

SEQ ID NO: 1860838 - RNA, 19 nt, Homo sapiens
  misc_RNA (1)...(19): siRNA sense strand
gauauugcugccaaaccua

SEQ ID NO: 1860839 - RNA, 19 nt, Homo sapiens
  misc_RNA (1)...(19): siRNA sense strand
ccaccugcaccaucucuga

SEQ ID NO: 1860840 - RNA, 19 nt, Homo sapiens
  misc_RNA (1)...(19): siRNA sense strand
ccacauccgagagaacauu

SEQ ID NO: 1860841 - RNA, 19 nt, Homo sapiens
  misc_RNA (1)...(19): siRNA sense strand
cuacagcacccaguuguuc

SEQ ID NO: 1860842 - RNA, 19 nt, Homo sapiens
  misc_RNA (1)...(19): siRNA sense strand
ccggagaaguggcaguauc

SEQ ID NO: 1860843 - RNA, 19 nt, Homo sapiens
  misc_RNA (1)...(19): siRNA sense strand
ggaccagcccauccacauc

SEQ ID NO: 1860844 - RNA, 19 nt, Homo sapiens
  misc_RNA (1)...(19): siRNA sense strand
ucauugacauccuggugau

SEQ ID NO: 1860845 - RNA, 19 nt, Homo sapiens
  misc_RNA (1)...(19): siRNA sense strand
ggaggccaaggcagucauu

SEQ ID NO: 1860846 - RNA, 19 nt, Homo sapiens
  misc_RNA (1)...(19): siRNA sense strand
ucacugugcgcguggaaga

SEQ ID NO: 1860847 - RNA, 19 nt, Homo sapiens
  misc_RNA (1)...(19): siRNA sense strand
cggagaaguggcaguauca

SEQ ID NO: 1860848 - RNA, 19 nt, Homo sapiens
  misc_RNA (1)...(19): siRNA sense strand
ccugcaaggccauaaaugu

SEQ ID NO: 1860849 - RNA, 19 nt, Homo sapiens
  misc_RNA (1)...(19): siRNA sense strand
gagacggucaaccugcaaa

SEQ ID NO: 1860850 - RNA, 19 nt, Homo sapiens
  misc_RNA (1)...(19): siRNA sense strand
ccagaaggcagauauugcu

SEQ ID NO: 1860851 - RNA, 19 nt, Homo sapiens
  misc_RNA (1)...(19): siRNA sense strand
ugggcuacauggugcagaa

SEQ ID NO: 1860852 - RNA, 19 nt, Homo sapiens
  misc_RNA (1)...(19): siRNA sense strand
gcuacagcacccaguuguu

SEQ ID NO: 1860853 - RNA, 19 nt, Homo sapiens
  misc_RNA (1)...(19): siRNA sense strand
gaaacucuaugacaagauu

SEQ ID NO: 1860854 - RNA, 19 nt, Homo sapiens
  misc_RNA (1)...(19): siRNA sense strand
cagagaagcuuucaguaaa

SEQ ID NO: 1860855 - RNA, 19 nt, Homo sapiens
  misc_RNA (1)...(19): siRNA sense strand
gagaagcuuucaguaaauu

SEQ ID NO: 1860856 - RNA, 19 nt, Homo sapiens
  misc_RNA (1)...(19): siRNA sense strand
ccagagaagcuuucaguaa

SEQ ID NO: 1860857 - RNA, 19 nt, Homo sapiens
  misc_RNA (1)...(19): siRNA sense strand
ugaaagaccugggcuuaga

SEQ ID NO: 1860858 - RNA, 19 nt, Homo sapiens
  misc_RNA (1)...(19): siRNA sense strand
ggaagacgaauuuggguuu

SEQ ID NO: 1860859 - RNA, 19 nt, Homo sapiens
  misc_RNA (1)...(19): siRNA sense strand
ggaccguguucuuuacgua

SEQ ID NO: 1860860 - RNA, 19 nt, Homo sapiens
  misc_RNA (1)...(19): siRNA sense strand
gaagacgaauuuggguuug

SEQ ID NO: 1860861 - RNA, 19 nt, Homo sapiens
  misc_RNA (1)...(19): siRNA sense strand
gguuugaaauuccugauau

SEQ ID NO: 1860862 - RNA, 19 nt, Homo sapiens
  misc_RNA (1)...(19): siRNA sense strand
cagauaagaaggauguaua

SEQ ID NO: 1860863 - RNA, 19 nt, Homo sapiens
  misc_RNA (1)...(19): siRNA sense strand
gaccugggcuuagacaguu

SEQ ID NO: 1860864 - RNA, 19 nt, Homo sapiens
  misc_RNA (1)...(19): siRNA sense strand
ggccauggaagacgaauuu

SEQ ID NO: 1860865 - RNA, 19 nt, Homo sapiens
  misc_RNA (1)...(19): siRNA sense strand
uaugaaagaccugggcuua

SEQ ID NO: 1860866 - RNA, 19 nt, Homo sapiens
  misc_RNA (1)...(19): siRNA sense strand
agagaagcuuucaguaaau

SEQ ID NO: 1860867 - RNA, 19 nt, Homo sapiens
  misc_RNA (1)...(19): siRNA sense strand
guagauuacauugcagaua

SEQ ID NO: 1860868 - RNA, 19 nt, Homo sapiens
  misc_RNA (1)...(19): siRNA sense strand
gaaauuccugauauagaug

SEQ ID NO: 1860869 - RNA, 19 nt, Homo sapiens
  misc_RNA (1)...(19): siRNA sense strand
gcagauaagaaggauguau

SEQ ID NO: 1860870 - RNA, 19 nt, Homo sapiens
  misc_RNA (1)...(19): siRNA sense strand
agacgaauuuggguuugaa

SEQ ID NO: 1860871 - RNA, 19 nt, Homo sapiens
  misc_RNA (1)...(19): siRNA sense strand
gauaagaaggauguauaug

SEQ ID NO: 1860872 - RNA, 19 nt, Homo sapiens
  misc_RNA (1)...(19): siRNA sense strand
ccaggaccguguucuuuac

SEQ ID NO: 1860873 - RNA, 19 nt, Homo sapiens
  misc_RNA (1)...(19): siRNA sense strand
guauugaaacucuaugaca

SEQ ID NO: 1860874 - RNA, 19 nt, Homo sapiens
  misc_RNA (1)...(19): siRNA sense strand
ugauauagaugcugaaaag

SEQ ID NO: 1860875 - RNA, 19 nt, Homo sapiens
  misc_RNA (1)...(19): siRNA sense strand
uccaggaccguguucuuua

SEQ ID NO: 1860876 - RNA, 19 nt, Homo sapiens
  misc_RNA (1)...(19): siRNA sense strand
caagauugacccagagaag

SEQ ID NO: 1860877 - RNA, 19 nt, Homo sapiens
  misc_RNA (1)...(19): siRNA sense strand
auagcgacaugccuccuuu

SEQ ID NO: 1860878 - RNA, 19 nt, Homo sapiens
  misc_RNA (1)...(19): siRNA sense strand
ugguagaguuacacaguug

SEQ ID NO: 1860879 - RNA, 19 nt, Homo sapiens
  misc_RNA (1)...(19): siRNA sense strand
ccaaguggagauuaucaug

SEQ ID NO: 1860880 - RNA, 19 nt, Homo sapiens
  misc_RNA (1)...(19): siRNA sense strand
gaccaaguggagauuauca

SEQ ID NO: 1860881 - RNA, 19 nt, Homo sapiens
  misc_RNA (1)...(19): siRNA sense strand
ggguuugaaauuccugaua

SEQ ID NO: 1860882 - RNA, 19 nt, Homo sapiens
  misc_RNA (1)...(19): siRNA sense strand
gaagcuuucaguaaauucu

SEQ ID NO: 1860883 - RNA, 19 nt, Homo sapiens
  misc_RNA (1)...(19): siRNA sense strand
uggaccaaguggagauuau

SEQ ID NO: 1860884 - RNA, 19 nt, Homo sapiens
  misc_RNA (1)...(19): siRNA sense strand
uugaaacucuaugacaaga

SEQ ID NO: 1860885 - RNA, 19 nt, Homo sapiens
  misc_RNA (1)...(19): siRNA sense strand
uuacauugcagauaagaag

SEQ ID NO: 1860886 - RNA, 19 nt, Homo sapiens
  misc_RNA (1)...(19): siRNA sense strand
caguugugccgccaguaua

SEQ ID NO: 1860887 - RNA, 19 nt, Homo sapiens
  misc_RNA (1)...(19): siRNA sense strand
gacaagauugacccagaga

SEQ ID NO: 1860888 - RNA, 19 nt, Homo sapiens
  misc_RNA (1)...(19): siRNA sense strand
gaccguguucuuuacguau

SEQ ID NO: 1860889 - RNA, 19 nt, Homo sapiens
  misc_RNA (1)...(19): siRNA sense strand
aagacgaauuuggguuuga

SEQ ID NO: 1860890 - RNA, 19 nt, Homo sapiens
  misc_RNA (1)...(19): siRNA sense strand
gaaagaccugggcuuagac

SEQ ID NO: 1860891 - RNA, 19 nt, Homo sapiens
  misc_RNA (1)...(19): siRNA sense strand
ggaccaaguggagauuauc

SEQ ID NO: 1860892 - RNA, 19 nt, Homo sapiens
  misc_RNA (1)...(19): siRNA sense strand
cugguagaguuacacaguu

SEQ ID NO: 1860893 - RNA, 19 nt, Homo sapiens
  misc_RNA (1)...(19): siRNA sense strand
caugccuccuuugacguua

SEQ ID NO: 1860894 - RNA, 19 nt, Homo sapiens
  misc_RNA (1)...(19): siRNA sense strand
gaccaaagcaguauccuua

SEQ ID NO: 1860895 - RNA, 19 nt, Homo sapiens
  misc_RNA (1)...(19): siRNA sense strand
guaugcagcucuucgguuu

SEQ ID NO: 1860896 - RNA, 19 nt, Homo sapiens
  misc_RNA (1)...(19): siRNA sense strand
ugagagagauccaugguau

SEQ ID NO: 1860897 - RNA, 19 nt, Homo sapiens
  misc_RNA (1)...(19): siRNA sense strand
gcaguauccuuacaauaau

SEQ ID NO: 1860898 - RNA, 19 nt, Homo sapiens
  misc_RNA (1)...(19): siRNA sense strand
uuuccuggcuuucaugaua

SEQ ID NO: 1860899 - RNA, 19 nt, Homo sapiens
  misc_RNA (1)...(19): siRNA sense strand
ggaguccaguggcugcaaa

SEQ ID NO: 1860900 - RNA, 19 nt, Homo sapiens
  misc_RNA (1)...(19): siRNA sense strand
gcggugaucccuccaaaga

SEQ ID NO: 1860901 - RNA, 19 nt, Homo sapiens
  misc_RNA (1)...(19): siRNA sense strand
ccaaagcaguauccuuaca

SEQ ID NO: 1860902 - RNA, 19 nt, Homo sapiens
  misc_RNA (1)...(19): siRNA sense strand
gccaagaaguauaauaugc

SEQ ID NO: 1860903 - RNA, 19 nt, Homo sapiens
  misc_RNA (1)...(19): siRNA sense strand
gagagagauccaugguaua

SEQ ID NO: 1860904 - RNA, 19 nt, Homo sapiens
  misc_RNA (1)...(19): siRNA sense strand
agcaguauccuuacaauaa

SEQ ID NO: 1860905 - RNA, 19 nt, Homo sapiens
  misc_RNA (1)...(19): siRNA sense strand
gcacuggcaccuagacaug

SEQ ID NO: 1860906 - RNA, 19 nt, Homo sapiens
  misc_RNA (1)...(19): siRNA sense strand
ggugaucccuccaaagaac

SEQ ID NO: 1860907 - RNA, 19 nt, Homo sapiens
  misc_RNA (1)...(19): siRNA sense strand
cagagcgggugguucacua

SEQ ID NO: 1860908 - RNA, 19 nt, Homo sapiens
  misc_RNA (1)...(19): siRNA sense strand
caaagcaguauccuuacaa

SEQ ID NO: 1860909 - RNA, 19 nt, Homo sapiens
  misc_RNA (1)...(19): siRNA sense strand
ggaaccguguggauacauc

SEQ ID NO: 1860910 - RNA, 19 nt, Homo sapiens
  misc_RNA (1)...(19): siRNA sense strand
caacaggaaccguguggau

SEQ ID NO: 1860911 - RNA, 19 nt, Homo sapiens
  misc_RNA (1)...(19): siRNA sense strand
cggacagccucccacauga

SEQ ID NO: 1860912 - RNA, 19 nt, Homo sapiens
  misc_RNA (1)...(19): siRNA sense strand
aaagcaguauccuuacaau

SEQ ID NO: 1860913 - RNA, 19 nt, Homo sapiens
  misc_RNA (1)...(19): siRNA sense strand
ggacguguacccugucuac

SEQ ID NO: 1860914 - RNA, 19 nt, Homo sapiens
  misc_RNA (1)...(19): siRNA sense strand
ggaagacuacgaaccuuac

SEQ ID NO: 1860915 - RNA, 19 nt, Homo sapiens
  misc_RNA (1)...(19): siRNA sense strand
ggaccaaagcaguauccuu

SEQ ID NO: 1860916 - RNA, 19 nt, Homo sapiens
  misc_RNA (1)...(19): siRNA sense strand
ccgccaagaaguauaauau

SEQ ID NO: 1860917 - RNA, 19 nt, Homo sapiens
  misc_RNA (1)...(19): siRNA sense strand
uggaagacuacgaaccuua

SEQ ID NO: 1860918 - RNA, 19 nt, Homo sapiens
  misc_RNA (1)...(19): siRNA sense strand
gaaccuuacccggaugaug

SEQ ID NO: 1860919 - RNA, 19 nt, Homo sapiens
  misc_RNA (1)...(19): siRNA sense strand
acuggcaccuagacaugua

SEQ ID NO: 1860920 - RNA, 19 nt, Homo sapiens
  misc_RNA (1)...(19): siRNA sense strand
agagagauccaugguauag

SEQ ID NO: 1860921 - RNA, 19 nt, Homo sapiens
  misc_RNA (1)...(19): siRNA sense strand
aagcaguauccuuacaaua

SEQ ID NO: 1860922 - RNA, 19 nt, Homo sapiens
  misc_RNA (1)...(19): siRNA sense strand
agagauccaugguauagcu

SEQ ID NO: 1860923 - RNA, 19 nt, Homo sapiens
  misc_RNA (1)...(19): siRNA sense strand
caguauccuuacaauaauc

SEQ ID NO: 1860924 - RNA, 19 nt, Homo sapiens
  misc_RNA (1)...(19): siRNA sense strand
ccucccacaugaccaagga

SEQ ID NO: 1860925 - RNA, 19 nt, Homo sapiens
  misc_RNA (1)...(19): siRNA sense strand
aacaggaaccguguggaua

SEQ ID NO: 1860926 - RNA, 19 nt, Homo sapiens
  misc_RNA (1)...(19): siRNA sense strand
gguucacuaugagaucuga

SEQ ID NO: 1860927 - RNA, 19 nt, Homo sapiens
  misc_RNA (1)...(19): siRNA sense strand
guggaagacuacgaaccuu

SEQ ID NO: 1860928 - RNA, 19 nt, Homo sapiens
  misc_RNA (1)...(19): siRNA sense strand
gcgggugguucacuaugag

SEQ ID NO: 1860929 - RNA, 19 nt, Homo sapiens
  misc_RNA (1)...(19): siRNA sense strand
gagcgggugguucacuaug

SEQ ID NO: 1860930 - RNA, 19 nt, Homo sapiens
  misc_RNA (1)...(19): siRNA sense strand
gcaccuagacauguacaac

SEQ ID NO: 1860931 - RNA, 19 nt, Homo sapiens
  misc_RNA (1)...(19): siRNA sense strand
auaauaugcguguggaaga

SEQ ID NO: 1860932 - RNA, 19 nt, Homo sapiens
  misc_RNA (1)...(19): siRNA sense strand
ucauguguaugcagcucuu

SEQ ID NO: 1860933 - RNA, 19 nt, Homo sapiens
  misc_RNA (1)...(19): siRNA sense strand
caggaaccguguggauaca

SEQ ID NO: 1860934 - RNA, 19 nt, Homo sapiens
  misc_RNA (1)...(19): siRNA sense strand
agacaaauaccgauacuuu

SEQ ID NO: 1860935 - RNA, 19 nt, Homo sapiens
  misc_RNA (1)...(19): siRNA sense strand
gagauacgauugcuacaag

SEQ ID NO: 1860936 - RNA, 19 nt, Homo sapiens
  misc_RNA (1)...(19): siRNA sense strand
gaaggaggccgaggaagaa

SEQ ID NO: 1860937 - RNA, 19 nt, Homo sapiens
  misc_RNA (1)...(19): siRNA sense strand
gcuacaaggucccagaaug

SEQ ID NO: 1860938 - RNA, 19 nt, Homo sapiens
  misc_RNA (1)...(19): siRNA sense strand
caauguauccugauuacuu

SEQ ID NO: 1860939 - RNA, 19 nt, Homo sapiens
  misc_RNA (1)...(19): siRNA sense strand
gacccuaccugacccauca

SEQ ID NO: 1860940 - RNA, 19 nt, Homo sapiens
  misc_RNA (1)...(19): siRNA sense strand
gaugagagcccgguuugaa

SEQ ID NO: 1860941 - RNA, 19 nt, Homo sapiens
  misc_RNA (1)...(19): siRNA sense strand
ccagaauggugcuuagaug

SEQ ID NO: 1860942 - RNA, 19 nt, Homo sapiens
  misc_RNA (1)...(19): siRNA sense strand
auacuuugcuuguuugaug

SEQ ID NO: 1860943 - RNA, 19 nt, Homo sapiens
  misc_RNA (1)...(19): siRNA sense strand
ugaaggaggccgaggaaga

SEQ ID NO: 1860944 - RNA, 19 nt, Homo sapiens
  misc_RNA (1)...(19): siRNA sense strand
ggcaauguauccugauuac

SEQ ID NO: 1860945 - RNA, 19 nt, Homo sapiens
  misc_RNA (1)...(19): siRNA sense strand
gcaccuccuaugagagaua

SEQ ID NO: 1860946 - RNA, 19 nt, Homo sapiens
  misc_RNA (1)...(19): siRNA sense strand
gagagaacaguggaagaaa

SEQ ID NO: 1860947 - RNA, 19 nt, Homo sapiens
  misc_RNA (1)...(19): siRNA sense strand
gaauggugcuuagaugacu

SEQ ID NO: 1860948 - RNA, 19 nt, Homo sapiens
  misc_RNA (1)...(19): siRNA sense strand
ccauacaucuucccugacu

SEQ ID NO: 1860949 - RNA, 19 nt, Homo sapiens
  misc_RNA (1)...(19): siRNA sense strand
cagaauggugcuuagauga

SEQ ID NO: 1860950 - RNA, 19 nt, Homo sapiens
  misc_RNA (1)...(19): siRNA sense strand
gggcaccuccuaugagaga

SEQ ID NO: 1860951 - RNA, 19 nt, Homo sapiens
  misc_RNA (1)...(19): siRNA sense strand
accgauacuuugcuuguuu

SEQ ID NO: 1860952 - RNA, 19 nt, Homo sapiens
  misc_RNA (1)...(19): siRNA sense strand
ggaggccgaggaagaauuc

SEQ ID NO: 1860953 - RNA, 19 nt, Homo sapiens
  misc_RNA (1)...(19): siRNA sense strand
gcugggaacgagagguuaa

SEQ ID NO: 1860954 - RNA, 19 nt, Homo sapiens
  misc_RNA (1)...(19): siRNA sense strand
ccgaaaggaaggugauuug

SEQ ID NO: 1860955 - RNA, 19 nt, Homo sapiens
  misc_RNA (1)...(19): siRNA sense strand
ccgauacuuugcuuguuug

SEQ ID NO: 1860956 - RNA, 19 nt, Homo sapiens
  misc_RNA (1)...(19): siRNA sense strand
gagaacaguggaagaaacu

SEQ ID NO: 1860957 - RNA, 19 nt, Homo sapiens
  misc_RNA (1)...(19): siRNA sense strand
aaauaccgauacuuugcuu

SEQ ID NO: 1860958 - RNA, 19 nt, Homo sapiens
  misc_RNA (1)...(19): siRNA sense strand
agagagaacaguggaagaa

SEQ ID NO: 1860959 - RNA, 19 nt, Homo sapiens
  misc_RNA (1)...(19): siRNA sense strand
agagagacaaauaccgaua

SEQ ID NO: 1860960 - RNA, 19 nt, Homo sapiens
  misc_RNA (1)...(19): siRNA sense strand
ugagagcccgguuugaaga

SEQ ID NO: 1860961 - RNA, 19 nt, Homo sapiens
  misc_RNA (1)...(19): siRNA sense strand
gagcccgguuugaagaaca

SEQ ID NO: 1860962 - RNA, 19 nt, Homo sapiens
  misc_RNA (1)...(19): siRNA sense strand
uccuuuaacugaagcuuug

SEQ ID NO: 1860963 - RNA, 19 nt, Homo sapiens
  misc_RNA (1)...(19): siRNA sense strand
ccuaugagagauacgauug

SEQ ID NO: 1860964 - RNA, 19 nt, Homo sapiens
  misc_RNA (1)...(19): siRNA sense strand
ugauuacuuugccaagaga

SEQ ID NO: 1860965 - RNA, 19 nt, Homo sapiens
  misc_RNA (1)...(19): siRNA sense strand
agagaacaguggaagaaac

SEQ ID NO: 1860966 - RNA, 19 nt, Homo sapiens
  misc_RNA (1)...(19): siRNA sense strand
gagagcccgguuugaagaa

SEQ ID NO: 1860967 - RNA, 19 nt, Homo sapiens
  misc_RNA (1)...(19): siRNA sense strand
cuacaaggucccagaaugg

SEQ ID NO: 1860968 - RNA, 19 nt, Homo sapiens
  misc_RNA (1)...(19): siRNA sense strand
gcugaaggaggccgaggaa

SEQ ID NO: 1860969 - RNA, 19 nt, Homo sapiens
  misc_RNA (1)...(19): siRNA sense strand
ccugauuacuuugccaaga

SEQ ID NO: 1860970 - RNA, 19 nt, Homo sapiens
  misc_RNA (1)...(19): siRNA sense strand
aaggcaauguauccugauu

SEQ ID NO: 1860971 - RNA, 19 nt, Homo sapiens
  misc_RNA (1)...(19): siRNA sense strand
gagagacaaauaccgauac

SEQ ID NO: 1860972 - RNA, 19 nt, Homo sapiens
  misc_RNA (1)...(19): siRNA sense strand
ggugguccuuuaacugaag

SEQ ID NO: 1860973 - RNA, 19 nt, Homo sapiens
  misc_RNA (1)...(19): siRNA sense strand
ggucccagaauggugcuua

SEQ ID NO: 1860974 - RNA, 19 nt, Homo sapiens
  misc_RNA (1)...(19): siRNA sense strand
gguuugaagaacauaagaa

SEQ ID NO: 1860975 - RNA, 19 nt, Homo sapiens
  misc_RNA (1)...(19): siRNA sense strand
aagaaacugcggagggaaa

SEQ ID NO: 1860976 - RNA, 19 nt, Homo sapiens
  misc_RNA (1)...(19): siRNA sense strand
aggcaauguauccugauua

SEQ ID NO: 1860977 - RNA, 19 nt, Homo sapiens
  misc_RNA (1)...(19): siRNA sense strand
gucagcauccacagccaua

SEQ ID NO: 1860978 - RNA, 19 nt, Homo sapiens
  misc_RNA (1)...(19): siRNA sense strand
cguggugcguccagagaga

SEQ ID NO: 1860979 - RNA, 19 nt, Homo sapiens
  misc_RNA (1)...(19): siRNA sense strand
ccgaggaagaauucuggua

SEQ ID NO: 1860980 - RNA, 19 nt, Homo sapiens
  misc_RNA (1)...(19): siRNA sense strand
cugauuacuuugccaagag

SEQ ID NO: 1860981 - RNA, 19 nt, Homo sapiens
  misc_RNA (1)...(19): siRNA sense strand
gaaggcaauguauccugau

SEQ ID NO: 1860982 - RNA, 19 nt, Homo sapiens
  misc_RNA (1)...(19): siRNA sense strand
gcguccagagagacaaaua

SEQ ID NO: 1860983 - RNA, 19 nt, Homo sapiens
  misc_RNA (1)...(19): siRNA sense strand
gaaugugcccuacguguuu

SEQ ID NO: 1860984 - RNA, 19 nt, Homo sapiens
  misc_RNA (1)...(19): siRNA sense strand
cagcagucauguaacuaua

SEQ ID NO: 1860985 - RNA, 19 nt, Homo sapiens
  misc_RNA (1)...(19): siRNA sense strand
uugaaaggcucuuagucua

SEQ ID NO: 1860986 - RNA, 19 nt, Homo sapiens
  misc_RNA (1)...(19): siRNA sense strand
gacugaggcugaugugaau

SEQ ID NO: 1860987 - RNA, 19 nt, Homo sapiens
  misc_RNA (1)...(19): siRNA sense strand
gcagucauguaacuauaag

SEQ ID NO: 1860988 - RNA, 19 nt, Homo sapiens
  misc_RNA (1)...(19): siRNA sense strand
gggcaucucugaguucauc

SEQ ID NO: 1860989 - RNA, 19 nt, Homo sapiens
  misc_RNA (1)...(19): siRNA sense strand
cagcagauccaauccauuc

SEQ ID NO: 1860990 - RNA, 19 nt, Homo sapiens
  misc_RNA (1)...(19): siRNA sense strand
ugaaacagcagauccaauc

SEQ ID NO: 1860991 - RNA, 19 nt, Homo sapiens
  misc_RNA (1)...(19): siRNA sense strand
ggaccucguucagcaguca

SEQ ID NO: 1860992 - RNA, 19 nt, Homo sapiens
  misc_RNA (1)...(19): siRNA sense strand
guucagcagucauguaacu

SEQ ID NO: 1860993 - RNA, 19 nt, Homo sapiens
  misc_RNA (1)...(19): siRNA sense strand
aggcugaugugaauccaaa

SEQ ID NO: 1860994 - RNA, 19 nt, Homo sapiens
  misc_RNA (1)...(19): siRNA sense strand
ccauucagcaguccauuga

SEQ ID NO: 1860995 - RNA, 19 nt, Homo sapiens
  misc_RNA (1)...(19): siRNA sense strand
acaagaaugugcccuacgu

SEQ ID NO: 1860996 - RNA, 19 nt, Homo sapiens
  misc_RNA (1)...(19): siRNA sense strand
gaagcuacuggaccucguu

SEQ ID NO: 1860997 - RNA, 19 nt, Homo sapiens
  misc_RNA (1)...(19): siRNA sense strand
ucucugaguucaucgugau

SEQ ID NO: 1860998 - RNA, 19 nt, Homo sapiens
  misc_RNA (1)...(19): siRNA sense strand
agaaugugcccuacguguu

SEQ ID NO: 1860999 - RNA, 19 nt, Homo sapiens
  misc_RNA (1)...(19): siRNA sense strand
ucagcagucauguaacuau

SEQ ID NO: 1861000 - RNA, 19 nt, Homo sapiens
  misc_RNA (1)...(19): siRNA sense strand
ucguucagcagucauguaa

SEQ ID NO: 1861001 - RNA, 19 nt, Homo sapiens
  misc_RNA (1)...(19): siRNA sense strand
gcugcugugugaagacaag

SEQ ID NO: 1861002 - RNA, 19 nt, Homo sapiens
  misc_RNA (1)...(19): siRNA sense strand
guucugucaccaucaaaga

SEQ ID NO: 1861003 - RNA, 19 nt, Homo sapiens
  misc_RNA (1)...(19): siRNA sense strand
caaacaaucuggugaaaga

SEQ ID NO: 1861004 - RNA, 19 nt, Homo sapiens
  misc_RNA (1)...(19): siRNA sense strand
ugacaggccucucugauaa

SEQ ID NO: 1861005 - RNA, 19 nt, Homo sapiens
  misc_RNA (1)...(19): siRNA sense strand
gaacacaaguggacaugau

SEQ ID NO: 1861006 - RNA, 19 nt, Homo sapiens
  misc_RNA (1)...(19): siRNA sense strand
caggagaacugguacaauu

SEQ ID NO: 1861007 - RNA, 19 nt, Homo sapiens
  misc_RNA (1)...(19): siRNA sense strand
ccaaggaucuacccagaaa

SEQ ID NO: 1861008 - RNA, 19 nt, Homo sapiens
  misc_RNA (1)...(19): siRNA sense strand
ggaaugauugcaauuagua

SEQ ID NO: 1861009 - RNA, 19 nt, Homo sapiens
  misc_RNA (1)...(19): siRNA sense strand
auaaguggguggagaauaa

SEQ ID NO: 1861010 - RNA, 19 nt, Homo sapiens
  misc_RNA (1)...(19): siRNA sense strand
aaagagagccaauauguga

SEQ ID NO: 1861011 - RNA, 19 nt, Homo sapiens
  misc_RNA (1)...(19): siRNA sense strand
gagaauaacacaaacaauc

SEQ ID NO: 1861012 - RNA, 19 nt, Homo sapiens
  misc_RNA (1)...(19): siRNA sense strand
gaaagugaaguccaaauuc

SEQ ID NO: 1861013 - RNA, 19 nt, Homo sapiens
  misc_RNA (1)...(19): siRNA sense strand
uuugaaggcucuuggaaua

SEQ ID NO: 1861014 - RNA, 19 nt, Homo sapiens
  misc_RNA (1)...(19): siRNA sense strand
ccaacuacaucaauaagug

SEQ ID NO: 1861015 - RNA, 19 nt, Homo sapiens
  misc_RNA (1)...(19): siRNA sense strand
aagcacagcugguugaaga

SEQ ID NO: 1861016 - RNA, 19 nt, Homo sapiens
  misc_RNA (1)...(19): siRNA sense strand
caaugaagcuggugguauc

SEQ ID NO: 1861017 - RNA, 19 nt, Homo sapiens
  misc_RNA (1)...(19): siRNA sense strand
gaaagaaauccgccacuca

SEQ ID NO: 1861018 - RNA, 19 nt, Homo sapiens
  misc_RNA (1)...(19): siRNA sense strand
ccaaagcaauucacaaguc

SEQ ID NO: 1861019 - RNA, 19 nt, Homo sapiens
  misc_RNA (1)...(19): siRNA sense strand
gagccaauaugugaugaaa

SEQ ID NO: 1861020 - RNA, 19 nt, Homo sapiens
  misc_RNA (1)...(19): siRNA sense strand
gaacugguacaauucuauu

SEQ ID NO: 1861021 - RNA, 19 nt, Homo sapiens
  misc_RNA (1)...(19): siRNA sense strand
ugaaggagaugaaauaagc

SEQ ID NO: 1861022 - RNA, 19 nt, Homo sapiens
  misc_RNA (1)...(19): siRNA sense strand
ggagaugaaauaagcauga

SEQ ID NO: 1861023 - RNA, 19 nt, Homo sapiens
  misc_RNA (1)...(19): siRNA sense strand
ggaagccauugcugacuug

SEQ ID NO: 1861024 - RNA, 19 nt, Homo sapiens
  misc_RNA (1)...(19): siRNA sense strand
caaacaugguaacugcuaa

SEQ ID NO: 1861025 - RNA, 19 nt, Homo sapiens
  misc_RNA (1)...(19): siRNA sense strand
gcuguauccucaaguuauu

SEQ ID NO: 1861026 - RNA, 19 nt, Homo sapiens
  misc_RNA (1)...(19): siRNA sense strand
cuaccaaguccuagaaaua

SEQ ID NO: 1861027 - RNA, 19 nt, Homo sapiens
  misc_RNA (1)...(19): siRNA sense strand
gaaauccgccacucaaugg

SEQ ID NO: 1861028 - RNA, 19 nt, Homo sapiens
  misc_RNA (1)...(19): siRNA sense strand
agaaauaccauaugaagga

SEQ ID NO: 1861029 - RNA, 19 nt, Homo sapiens
  misc_RNA (1)...(19): siRNA sense strand
cuaaagagagccaauaugu

SEQ ID NO: 1861030 - RNA, 19 nt, Homo sapiens
  misc_RNA (1)...(19): siRNA sense strand
gaaguccaaauuccaauga

SEQ ID NO: 1861031 - RNA, 19 nt, Homo sapiens
  misc_RNA (1)...(19): siRNA sense strand
caugguaacugcuaaagag

SEQ ID NO: 1861032 - RNA, 19 nt, Homo sapiens
  misc_RNA (1)...(19): siRNA sense strand
cuaaagaugaugaaaguga

SEQ ID NO: 1861033 - RNA, 19 nt, Homo sapiens
  misc_RNA (1)...(19): siRNA sense strand
cauuaaugcugucuauuuc

SEQ ID NO: 1861034 - RNA, 19 nt, Homo sapiens
  misc_RNA (1)...(19): siRNA sense strand
ccacuuaucuggcccucau

SEQ ID NO: 1861035 - RNA, 19 nt, Homo sapiens
  misc_RNA (1)...(19): siRNA sense strand
gggcaaacucugugaagaa

SEQ ID NO: 1861036 - RNA, 19 nt, Homo sapiens
  misc_RNA (1)...(19): siRNA sense strand
cacuaaagaugaugaaagu

SEQ ID NO: 1861037 - RNA, 19 nt, Homo sapiens
  misc_RNA (1)...(19): siRNA sense strand
caaacucugugaagaagca

SEQ ID NO: 1861038 - RNA, 19 nt, Homo sapiens
  misc_RNA (1)...(19): siRNA sense strand
acaggccucucugauaaua

SEQ ID NO: 1861039 - RNA, 19 nt, Homo sapiens
  misc_RNA (1)...(19): siRNA sense strand
uaggauggcugugcuguau

SEQ ID NO: 1861040 - RNA, 19 nt, Homo sapiens
  misc_RNA (1)...(19): siRNA sense strand
ucaggaaugauugcaauua

SEQ ID NO: 1861041 - RNA, 19 nt, Homo sapiens
  misc_RNA (1)...(19): siRNA sense strand
ugaaagugaaguccaaauu

SEQ ID NO: 1861042 - RNA, 19 nt, Homo sapiens
  misc_RNA (1)...(19): siRNA sense strand
gaaacaaugaacacaagug

SEQ ID NO: 1861043 - RNA, 19 nt, Homo sapiens
  misc_RNA (1)...(19): siRNA sense strand
gcucuuggaauaacugaaa

SEQ ID NO: 1861044 - RNA, 19 nt, Homo sapiens
  misc_RNA (1)...(19): siRNA sense strand
gaucuacccagaaagaaau

SEQ ID NO: 1861045 - RNA, 19 nt, Homo sapiens
  misc_RNA (1)...(19): siRNA sense strand
agaaacaggagaacuggua

SEQ ID NO: 1861046 - RNA, 19 nt, Homo sapiens
  misc_RNA (1)...(19): siRNA sense strand
ggaucuacccagaaagaaa

SEQ ID NO: 1861047 - RNA, 19 nt, Homo sapiens
  misc_RNA (1)...(19): siRNA sense strand
caggaaugauugcaauuag

SEQ ID NO: 1861048 - RNA, 19 nt, Homo sapiens
  misc_RNA (1)...(19): siRNA sense strand
gagaugaaauaagcaugau

SEQ ID NO: 1861049 - RNA, 19 nt, Homo sapiens
  misc_RNA (1)...(19): siRNA sense strand
guggccaacuacaucaaua

SEQ ID NO: 1861050 - RNA, 19 nt, Homo sapiens
  misc_RNA (1)...(19): siRNA sense strand
aaagaaauccgccacucaa

SEQ ID NO: 1861051 - RNA, 19 nt, Homo sapiens
  misc_RNA (1)...(19): siRNA sense strand
gcugcugucucaggaauga

SEQ ID NO: 1861052 - RNA, 19 nt, Homo sapiens
  misc_RNA (1)...(19): siRNA sense strand
ccucauuaaugcugucuau

SEQ ID NO: 1861053 - RNA, 19 nt, Homo sapiens
  misc_RNA (1)...(19): siRNA sense strand
cacaaacaaucuggugaaa

SEQ ID NO: 1861054 - RNA, 19 nt, Homo sapiens
  misc_RNA (1)...(19): siRNA sense strand
gccaauaugugaugaaaau

SEQ ID NO: 1861055 - RNA, 19 nt, Homo sapiens
  misc_RNA (1)...(19): siRNA sense strand
ggacaugauuucgaagaac

SEQ ID NO: 1861056 - RNA, 19 nt, Homo sapiens
  misc_RNA (1)...(19): siRNA sense strand
ggugaaagauuugguaucc

SEQ ID NO: 1861057 - RNA, 19 nt, Homo sapiens
  misc_RNA (1)...(19): siRNA sense strand
ugaugaaagugaaguccaa

SEQ ID NO: 1861058 - RNA, 19 nt, Homo sapiens
  misc_RNA (1)...(19): siRNA sense strand
ccuagagguuaaugaagaa

SEQ ID NO: 1861059 - RNA, 19 nt, Homo sapiens
  misc_RNA (1)...(19): siRNA sense strand
ucaaacaugguaacugcua

SEQ ID NO: 1861060 - RNA, 19 nt, Homo sapiens
  misc_RNA (1)...(19): siRNA sense strand
uaucuggcccucauuaaug

SEQ ID NO: 1861061 - RNA, 19 nt, Homo sapiens
  misc_RNA (1)...(19): siRNA sense strand
uaaaucauguggacuucag

SEQ ID NO: 1861062 - RNA, 19 nt, Homo sapiens
  misc_RNA (1)...(19): siRNA sense strand
gacaugauuucgaagaacu

SEQ ID NO: 1861063 - RNA, 19 nt, Homo sapiens
  misc_RNA (1)...(19): siRNA sense strand
ucacaaguccuuccuagag

SEQ ID NO: 1861064 - RNA, 19 nt, Homo sapiens
  misc_RNA (1)...(19): siRNA sense strand
gagagccaauaugugauga

SEQ ID NO: 1861065 - RNA, 19 nt, Homo sapiens
  misc_RNA (1)...(19): siRNA sense strand
ggcaaacucugugaagaag

SEQ ID NO: 1861066 - RNA, 19 nt, Homo sapiens
  misc_RNA (1)...(19): siRNA sense strand
uaaagagagccaauaugug

SEQ ID NO: 1861067 - RNA, 19 nt, Homo sapiens
  misc_RNA (1)...(19): siRNA sense strand
agaagcugcugcugucuca

SEQ ID NO: 1861068 - RNA, 19 nt, Homo sapiens
  misc_RNA (1)...(19): siRNA sense strand
uaaugaagaaggcucagaa

SEQ ID NO: 1861069 - RNA, 19 nt, Homo sapiens
  misc_RNA (1)...(19): siRNA sense strand
uccuagagguuaaugaaga

SEQ ID NO: 1861070 - RNA, 19 nt, Homo sapiens
  misc_RNA (1)...(19): siRNA sense strand
gaauaacacaaacaaucug

SEQ ID NO: 1861071 - RNA, 19 nt, Homo sapiens
  misc_RNA (1)...(19): siRNA sense strand
ucaauaaguggguggagaa

SEQ ID NO: 1861072 - RNA, 19 nt, Homo sapiens
  misc_RNA (1)...(19): siRNA sense strand
uagagccacuggugaagau

SEQ ID NO: 1861073 - RNA, 19 nt, Homo sapiens
  misc_RNA (1)...(19): siRNA sense strand
aauauucucuucucuccau

SEQ ID NO: 1861074 - RNA, 19 nt, Homo sapiens
  misc_RNA (1)...(19): siRNA sense strand
ggguggagaauaacacaaa

SEQ ID NO: 1861075 - RNA, 19 nt, Homo sapiens
  misc_RNA (1)...(19): siRNA sense strand
gcuaaagagagccaauaug

SEQ ID NO: 1861076 - RNA, 19 nt, Homo sapiens
  misc_RNA (1)...(19): siRNA sense strand
ucucaggaaugauugcaau

SEQ ID NO: 1861077 - RNA, 19 nt, Homo sapiens
  misc_RNA (1)...(19): siRNA sense strand
cuagaaauaccauaugaag

SEQ ID NO: 1861078 - RNA, 19 nt, Homo sapiens
  misc_RNA (1)...(19): siRNA sense strand
agugauggcuccaaugaag

SEQ ID NO: 1861079 - RNA, 19 nt, Homo sapiens
  misc_RNA (1)...(19): siRNA sense strand
cagugaauauguauaaucg

SEQ ID NO: 1861080 - RNA, 19 nt, Homo sapiens
  misc_RNA (1)...(19): siRNA sense strand
ucucuucucuccauugagu

SEQ ID NO: 1861081 - RNA, 19 nt, Homo sapiens
  misc_RNA (1)...(19): siRNA sense strand
ggagaauaacacaaacaau

SEQ ID NO: 1861082 - RNA, 19 nt, Homo sapiens
  misc_RNA (1)...(19): siRNA sense strand
uccuagaaauaccauauga

SEQ ID NO: 1861083 - RNA, 19 nt, Homo sapiens
  misc_RNA (1)...(19): siRNA sense strand
agucaugcauccugaaaca

SEQ ID NO: 1861084 - RNA, 19 nt, Homo sapiens
  misc_RNA (1)...(19): siRNA sense strand
gcacagcugguugaagaau

SEQ ID NO: 1861085 - RNA, 19 nt, Homo sapiens
  misc_RNA (1)...(19): siRNA sense strand
gccacucaaugggauauga

SEQ ID NO: 1861086 - RNA, 19 nt, Homo sapiens
  misc_RNA (1)...(19): siRNA sense strand
acacaaguggacaugauuu

SEQ ID NO: 1861087 - RNA, 19 nt, Homo sapiens
  misc_RNA (1)...(19): siRNA sense strand
aaagugaaguccaaauucc

SEQ ID NO: 1861088 - RNA, 19 nt, Homo sapiens
  misc_RNA (1)...(19): siRNA sense strand
acacaaacaaucuggugaa

SEQ ID NO: 1861089 - RNA, 19 nt, Homo sapiens
  misc_RNA (1)...(19): siRNA sense strand
agaaauccgccacucaaug

SEQ ID NO: 1861090 - RNA, 19 nt, Homo sapiens
  misc_RNA (1)...(19): siRNA sense strand
aaguggacaugauuucgaa

SEQ ID NO: 1861091 - RNA, 19 nt, Homo sapiens
  misc_RNA (1)...(19): siRNA sense strand
caaauuccaaugauguauc

SEQ ID NO: 1861092 - RNA, 19 nt, Homo sapiens
  misc_RNA (1)...(19): siRNA sense strand
uggacaugauuucgaagaa

SEQ ID NO: 1861093 - RNA, 19 nt, Homo sapiens
  misc_RNA (1)...(19): siRNA sense strand
cugaaacaaugaacacaag

SEQ ID NO: 1861094 - RNA, 19 nt, Homo sapiens
  misc_RNA (1)...(19): siRNA sense strand
guaggauggcugugcugua

SEQ ID NO: 1861095 - RNA, 19 nt, Homo sapiens
  misc_RNA (1)...(19): siRNA sense strand
ugaaggcucuuggaauaac

SEQ ID NO: 1861096 - RNA, 19 nt, Homo sapiens
  misc_RNA (1)...(19): siRNA sense strand
caguggaacaggaaauuga

SEQ ID NO: 1861097 - RNA, 19 nt, Homo sapiens
  misc_RNA (1)...(19): siRNA sense strand
gaaugggcaaacucuguga

SEQ ID NO: 1861098 - RNA, 19 nt, Homo sapiens
  misc_RNA (1)...(19): siRNA sense strand
uugcuacucuggagccauu

SEQ ID NO: 1861099 - RNA, 19 nt, Homo sapiens
  misc_RNA (1)...(19): siRNA sense strand
aaacaugguaacugcuaaa

SEQ ID NO: 1861100 - RNA, 19 nt, Homo sapiens
  misc_RNA (1)...(19): siRNA sense strand
caugcauccugaaacaaug

SEQ ID NO: 1861101 - RNA, 19 nt, Homo sapiens
  misc_RNA (1)...(19): siRNA sense strand
uauugucgaccauccauuu

SEQ ID NO: 1861102 - RNA, 19 nt, Homo sapiens
  misc_RNA (1)...(19): siRNA sense strand
uccuuggacucuucucuuu

SEQ ID NO: 1861103 - RNA, 19 nt, Homo sapiens
  misc_RNA (1)...(19): siRNA sense strand
ggaaaggcgggaacaauaa

SEQ ID NO: 1861104 - RNA, 19 nt, Homo sapiens
  misc_RNA (1)...(19): siRNA sense strand
acaauaagcugaucaaggu

SEQ ID NO: 1861105 - RNA, 19 nt, Homo sapiens
  misc_RNA (1)...(19): siRNA sense strand
gggaggaggugaacgagaa

SEQ ID NO: 1861106 - RNA, 19 nt, Homo sapiens
  misc_RNA (1)...(19): siRNA sense strand
agaaagagaugcaaaggau

SEQ ID NO: 1861107 - RNA, 19 nt, Homo sapiens
  misc_RNA (1)...(19): siRNA sense strand
gaugaagcguacugcaauu

SEQ ID NO: 1861108 - RNA, 19 nt, Homo sapiens
  misc_RNA (1)...(19): siRNA sense strand
gggccagacucaagagaaa

SEQ ID NO: 1861109 - RNA, 19 nt, Homo sapiens
  misc_RNA (1)...(19): siRNA sense strand
ggacaagagccgcgaguau

SEQ ID NO: 1861110 - RNA, 19 nt, Homo sapiens
  misc_RNA (1)...(19): siRNA sense strand
ugacuucccuggcaccuau

SEQ ID NO: 1861111 - RNA, 19 nt, Homo sapiens
  misc_RNA (1)...(19): siRNA sense strand
ucaaugagacuaucaagau

SEQ ID NO: 1861112 - RNA, 19 nt, Homo sapiens
  misc_RNA (1)...(19): siRNA sense strand
gcgcccagcuuaaggucua

SEQ ID NO: 1861113 - RNA, 19 nt, Homo sapiens
  misc_RNA (1)...(19): siRNA sense strand
gcgaguaugaccagcuuua

SEQ ID NO: 1861114 - RNA, 19 nt, Homo sapiens
  misc_RNA (1)...(19): siRNA sense strand
cccaggagcugcagaugaa

SEQ ID NO: 1861115 - RNA, 19 nt, Homo sapiens
  misc_RNA (1)...(19): siRNA sense strand
ccacaguccuggccaaugg

SEQ ID NO: 1861116 - RNA, 19 nt, Homo sapiens
  misc_RNA (1)...(19): siRNA sense strand
ccaccgagaugggcacuau

SEQ ID NO: 1861117 - RNA, 19 nt, Homo sapiens
  misc_RNA (1)...(19): siRNA sense strand
ggacagcgaaucucacuac

SEQ ID NO: 1861118 - RNA, 19 nt, Homo sapiens
  misc_RNA (1)...(19): siRNA sense strand
caaaggauccugcugaacu

SEQ ID NO: 1861119 - RNA, 19 nt, Homo sapiens
  misc_RNA (1)...(19): siRNA sense strand
agaaaugcagcaaggaaua

SEQ ID NO: 1861120 - RNA, 19 nt, Homo sapiens
  misc_RNA (1)...(19): siRNA sense strand
caaugagacuaucaagauc

SEQ ID NO: 1861121 - RNA, 19 nt, Homo sapiens
  misc_RNA (1)...(19): siRNA sense strand
gagaaagagaugcaaagga

SEQ ID NO: 1861122 - RNA, 19 nt, Homo sapiens
  misc_RNA (1)...(19): siRNA sense strand
caacagagagaucgacaag

SEQ ID NO: 1861123 - RNA, 19 nt, Homo sapiens
  misc_RNA (1)...(19): siRNA sense strand
aggaaaggcgggaacaaua

SEQ ID NO: 1861124 - RNA, 19 nt, Homo sapiens
  misc_RNA (1)...(19): siRNA sense strand
gaagcguacugcaauugag

SEQ ID NO: 1861125 - RNA, 19 nt, Homo sapiens
  misc_RNA (1)...(19): siRNA sense strand
gacaagagccgcgaguaug

SEQ ID NO: 1861126 - RNA, 19 nt, Homo sapiens
  misc_RNA (1)...(19): siRNA sense strand
ggaacaauaagcugaucaa

SEQ ID NO: 1861127 - RNA, 19 nt, Homo sapiens
  misc_RNA (1)...(19): siRNA sense strand
gagaaaugcagcaaggaau

SEQ ID NO: 1861128 - RNA, 19 nt, Homo sapiens
  misc_RNA (1)...(19): siRNA sense strand
gagcagggccagacucaag

SEQ ID NO: 1861129 - RNA, 19 nt, Homo sapiens
  misc_RNA (1)...(19): siRNA sense strand
gcaagauccgagaccagua

SEQ ID NO: 1861130 - RNA, 19 nt, Homo sapiens
  misc_RNA (1)...(19): siRNA sense strand
gaaaggcgggaacaauaag

SEQ ID NO: 1861131 - RNA, 19 nt, Homo sapiens
  misc_RNA (1)...(19): siRNA sense strand
gagacuaucaagaucuuug

SEQ ID NO: 1861132 - RNA, 19 nt, Homo sapiens
  misc_RNA (1)...(19): siRNA sense strand
acaagagccgcgaguauga

SEQ ID NO: 1861133 - RNA, 19 nt, Homo sapiens
  misc_RNA (1)...(19): siRNA sense strand
aguaugaccagcuuuauga

SEQ ID NO: 1861134 - RNA, 19 nt, Homo sapiens
  misc_RNA (1)...(19): siRNA sense strand
ucuacccuguguccaaaua

SEQ ID NO: 1861135 - RNA, 19 nt, Homo sapiens
  misc_RNA (1)...(19): siRNA sense strand
cggcucaagucccgcauug

SEQ ID NO: 1861136 - RNA, 19 nt, Homo sapiens
  misc_RNA (1)...(19): siRNA sense strand
ggaccaguacgcacucaug

SEQ ID NO: 1861137 - RNA, 19 nt, Homo sapiens
  misc_RNA (1)...(19): siRNA sense strand
caagggaggaggugaacga

SEQ ID NO: 1861138 - RNA, 19 nt, Homo sapiens
  misc_RNA (1)...(19): siRNA sense strand
gcaccuauguggaguuccu

SEQ ID NO: 1861139 - RNA, 19 nt, Homo sapiens
  misc_RNA (1)...(19): siRNA sense strand
gaaaugcagcaaggaauac

SEQ ID NO: 1861140 - RNA, 19 nt, Homo sapiens
  misc_RNA (1)...(19): siRNA sense strand
gaguaugaccagcuuuaug

SEQ ID NO: 1861141 - RNA, 19 nt, Homo sapiens
  misc_RNA (1)...(19): siRNA sense strand
gcaagauccagggcgagua

SEQ ID NO: 1861142 - RNA, 19 nt, Homo sapiens
  misc_RNA (1)...(19): siRNA sense strand
ccucuacccuguguccaaa

SEQ ID NO: 1861143 - RNA, 19 nt, Homo sapiens
  misc_RNA (1)...(19): siRNA sense strand
ggacacacggcuccucuac

SEQ ID NO: 1861144 - RNA, 19 nt, Homo sapiens
  misc_RNA (1)...(19): siRNA sense strand
cagcaggaccagauuguca

SEQ ID NO: 1861145 - RNA, 19 nt, Homo sapiens
  misc_RNA (1)...(19): siRNA sense strand
gcacgcaggcagaggagau

SEQ ID NO: 1861146 - RNA, 19 nt, Homo sapiens
  misc_RNA (1)...(19): siRNA sense strand
ugcaaaggauccugcugaa

SEQ ID NO: 1861147 - RNA, 19 nt, Homo sapiens
  misc_RNA (1)...(19): siRNA sense strand
uuguggaccucaucaauca

SEQ ID NO: 1861148 - RNA, 19 nt, Homo sapiens
  misc_RNA (1)...(19): siRNA sense strand
cagaugaagcguacugcaa

SEQ ID NO: 1861149 - RNA, 19 nt, Homo sapiens
  misc_RNA (1)...(19): siRNA sense strand
augaccagcuuuaugaaga

SEQ ID NO: 1861150 - RNA, 19 nt, Homo sapiens
  misc_RNA (1)...(19): siRNA sense strand
ggaggaggugaacgagaaa

SEQ ID NO: 1861151 - RNA, 19 nt, Homo sapiens
  misc_RNA (1)...(19): siRNA sense strand
ucaugcagcugcgcaagau

SEQ ID NO: 1861152 - RNA, 19 nt, Homo sapiens
  misc_RNA (1)...(19): siRNA sense strand
gcauugccgagauccauga

SEQ ID NO: 1861153 - RNA, 19 nt, Homo sapiens
  misc_RNA (1)...(19): siRNA sense strand
gggcaacgagaaagagaug

SEQ ID NO: 1861154 - RNA, 19 nt, Homo sapiens
  misc_RNA (1)...(19): siRNA sense strand
ugaagcguacugcaauuga

SEQ ID NO: 1861155 - RNA, 19 nt, Homo sapiens
  misc_RNA (1)...(19): siRNA sense strand
ucucagagccacucaccuu

SEQ ID NO: 1861156 - RNA, 19 nt, Homo sapiens
  misc_RNA (1)...(19): siRNA sense strand
gaacaauaagcugaucaag

SEQ ID NO: 1861157 - RNA, 19 nt, Homo sapiens
  misc_RNA (1)...(19): siRNA sense strand
gagaucgacaagcgcauga

SEQ ID NO: 1861158 - RNA, 19 nt, Homo sapiens
  misc_RNA (1)...(19): siRNA sense strand
agagaaaugcagcaaggaa

SEQ ID NO: 1861159 - RNA, 19 nt, Homo sapiens
  misc_RNA (1)...(19): siRNA sense strand
ucguguggcucacccagaa

SEQ ID NO: 1861160 - RNA, 19 nt, Homo sapiens
  misc_RNA (1)...(19): siRNA sense strand
aaaggauccugcugaacuc

SEQ ID NO: 1861161 - RNA, 19 nt, Homo sapiens
  misc_RNA (1)...(19): siRNA sense strand
gcaacgagaaagagaugca

SEQ ID NO: 1861162 - RNA, 19 nt, Homo sapiens
  misc_RNA (1)...(19): siRNA sense strand
gcacaacgacgcgcucacu

SEQ ID NO: 1861163 - RNA, 19 nt, Homo sapiens
  misc_RNA (1)...(19): siRNA sense strand
acgaggaacgcacuuggua

SEQ ID NO: 1861164 - RNA, 19 nt, Homo sapiens
  misc_RNA (1)...(19): siRNA sense strand
caggaaaggcgggaacaau

SEQ ID NO: 1861165 - RNA, 19 nt, Homo sapiens
  misc_RNA (1)...(19): siRNA sense strand
cgacuugcccgagcaguuc

SEQ ID NO: 1861166 - RNA, 19 nt, Homo sapiens
  misc_RNA (1)...(19): siRNA sense strand
gagggcaacgagaaagaga

SEQ ID NO: 1861167 - RNA, 19 nt, Homo sapiens
  misc_RNA (1)...(19): siRNA sense strand
ccgcgaguaugaccagcuu

SEQ ID NO: 1861168 - RNA, 19 nt, Homo sapiens
  misc_RNA (1)...(19): siRNA sense strand
aggaccagauugucaagga

SEQ ID NO: 1861169 - RNA, 19 nt, Homo sapiens
  misc_RNA (1)...(19): siRNA sense strand
ugaccagcuuuaugaagag

SEQ ID NO: 1861170 - RNA, 19 nt, Homo sapiens
  misc_RNA (1)...(19): siRNA sense strand
caagauccgagaccaguac

SEQ ID NO: 1861171 - RNA, 19 nt, Homo sapiens
  misc_RNA (1)...(19): siRNA sense strand
gccagacucaagagaaaug

SEQ ID NO: 1861172 - RNA, 19 nt, Homo sapiens
  misc_RNA (1)...(19): siRNA sense strand
caagauccagggcgaguac

SEQ ID NO: 1861173 - RNA, 19 nt, Homo sapiens
  misc_RNA (1)...(19): siRNA sense strand
ccucaagccggaccucaug

SEQ ID NO: 1861174 - RNA, 19 nt, Homo sapiens
  misc_RNA (1)...(19): siRNA sense strand
agaugaagcguacugcaau

SEQ ID NO: 1861175 - RNA, 19 nt, Homo sapiens
  misc_RNA (1)...(19): siRNA sense strand
guaugaccagcuuuaugaa

SEQ ID NO: 1861176 - RNA, 19 nt, Homo sapiens
  misc_RNA (1)...(19): siRNA sense strand
ugcaggaugcugaguggua

SEQ ID NO: 1861177 - RNA, 19 nt, Homo sapiens
  misc_RNA (1)...(19): siRNA sense strand
ccaagcacugcgucaucua

SEQ ID NO: 1861178 - RNA, 19 nt, Homo sapiens
  misc_RNA (1)...(19): siRNA sense strand
gaggaccaguacgcacuca

SEQ ID NO: 1861179 - RNA, 19 nt, Homo sapiens
  misc_RNA (1)...(19): siRNA sense strand
gcaccugccuggacuaugu

SEQ ID NO: 1861180 - RNA, 19 nt, Homo sapiens
  misc_RNA (1)...(19): siRNA sense strand
gaagaagaagcacaagaug

SEQ ID NO: 1861181 - RNA, 19 nt, Homo sapiens
  misc_RNA (1)...(19): siRNA sense strand
ggccaucacaccuccauua

SEQ ID NO: 1861182 - RNA, 19 nt, Homo sapiens
  misc_RNA (1)...(19): siRNA sense strand
gagugccgcuucuacaguu

SEQ ID NO: 1861183 - RNA, 19 nt, Homo sapiens
  misc_RNA (1)...(19): siRNA sense strand
ggucagugcggcuggauuu

SEQ ID NO: 1861184 - RNA, 19 nt, Homo sapiens
  misc_RNA (1)...(19): siRNA sense strand
gcaaugugcaugugucugu

SEQ ID NO: 1861185 - RNA, 19 nt, Homo sapiens
  misc_RNA (1)...(19): siRNA sense strand
uggaagggcucacggacaa

SEQ ID NO: 1861186 - RNA, 19 nt, Homo sapiens
  misc_RNA (1)...(19): siRNA sense strand
caucacaccuccauuaacg

SEQ ID NO: 1861187 - RNA, 19 nt, Homo sapiens
  misc_RNA (1)...(19): siRNA sense strand
gugaggagaagaagaagaa

SEQ ID NO: 1861188 - RNA, 19 nt, Homo sapiens
  misc_RNA (1)...(19): siRNA sense strand
gcaccugcacccucuguga

SEQ ID NO: 1861189 - RNA, 19 nt, Homo sapiens
  misc_RNA (1)...(19): siRNA sense strand
gcaccgugugggacaauaa

SEQ ID NO: 1861190 - RNA, 19 nt, Homo sapiens
  misc_RNA (1)...(19): siRNA sense strand
caacuacggcacccacuuc

SEQ ID NO: 1861191 - RNA, 19 nt, Homo sapiens
  misc_RNA (1)...(19): siRNA sense strand
ccacggaugccuaugugaa

SEQ ID NO: 1861192 - RNA, 19 nt, Homo sapiens
  misc_RNA (1)...(19): siRNA sense strand
ggcuggacgugacuccuaa

SEQ ID NO: 1861193 - RNA, 19 nt, Homo sapiens
  misc_RNA (1)...(19): siRNA sense strand
gccaucacaccuccauuaa

SEQ ID NO: 1861194 - RNA, 19 nt, Homo sapiens
  misc_RNA (1)...(19): siRNA sense strand
agaagaagaagcacaagau

SEQ ID NO: 1861195 - RNA, 19 nt, Homo sapiens
  misc_RNA (1)...(19): siRNA sense strand
aagaagaagcacaagauga

SEQ ID NO: 1861196 - RNA, 19 nt, Homo sapiens
  misc_RNA (1)...(19): siRNA sense strand
gcaagcgcagccacaaguu

SEQ ID NO: 1861197 - RNA, 19 nt, Homo sapiens
  misc_RNA (1)...(19): siRNA sense strand
ccaagucugguucccauga

SEQ ID NO: 1861198 - RNA, 19 nt, Homo sapiens
  misc_RNA (1)...(19): siRNA sense strand
cagggacgaugaccuccuu

SEQ ID NO: 1861199 - RNA, 19 nt, Homo sapiens
  misc_RNA (1)...(19): siRNA sense strand
agaagaagaagaagcacaa

SEQ ID NO: 1861200 - RNA, 19 nt, Homo sapiens
  misc_RNA (1)...(19): siRNA sense strand
guacucagccuggguaaac

SEQ ID NO: 1861201 - RNA, 19 nt, Homo sapiens
  misc_RNA (1)...(19): siRNA sense strand
gggcuggacgugacuccua

SEQ ID NO: 1861202 - RNA, 19 nt, Homo sapiens
  misc_RNA (1)...(19): siRNA sense strand
ucaggcuuaucuccaacua

SEQ ID NO: 1861203 - RNA, 19 nt, Homo sapiens
  misc_RNA (1)...(19): siRNA sense strand
caacuuugcagcccagaag

SEQ ID NO: 1861204 - RNA, 19 nt, Homo sapiens
  misc_RNA (1)...(19): siRNA sense strand
gcugcacccugacuucaag

SEQ ID NO: 1861205 - RNA, 19 nt, Homo sapiens
  misc_RNA (1)...(19): siRNA sense strand
ggugagaugcaaccugaau

SEQ ID NO: 1861206 - RNA, 19 nt, Homo sapiens
  misc_RNA (1)...(19): siRNA sense strand
ggucugggaucaggacucu

SEQ ID NO: 1861207 - RNA, 19 nt, Homo sapiens
  misc_RNA (1)...(19): siRNA sense strand
ggagcgccauucggaagug

SEQ ID NO: 1861208 - RNA, 19 nt, Homo sapiens
  misc_RNA (1)...(19): siRNA sense strand
ugagaugcaaccugaauca

SEQ ID NO: 1861209 - RNA, 19 nt, Homo sapiens
  misc_RNA (1)...(19): siRNA sense strand
guaaccagggccaaaguca

SEQ ID NO: 1861210 - RNA, 19 nt, Homo sapiens
  misc_RNA (1)...(19): siRNA sense strand
ccugugaggagaagaagaa

SEQ ID NO: 1861211 - RNA, 19 nt, Homo sapiens
  misc_RNA (1)...(19): siRNA sense strand
gagcuggguggccgcauau

SEQ ID NO: 1861212 - RNA, 19 nt, Homo sapiens
  misc_RNA (1)...(19): siRNA sense strand
ggagugccgcuucuacagu

SEQ ID NO: 1861213 - RNA, 19 nt, Homo sapiens
  misc_RNA (1)...(19): siRNA sense strand
ucacaggcagccaacuuug

SEQ ID NO: 1861214 - RNA, 19 nt, Homo sapiens
  misc_RNA (1)...(19): siRNA sense strand
ccugaaucauggccaccua

SEQ ID NO: 1861215 - RNA, 19 nt, Homo sapiens
  misc_RNA (1)...(19): siRNA sense strand
cuacaguuuccauguggua

SEQ ID NO: 1861216 - RNA, 19 nt, Homo sapiens
  misc_RNA (1)...(19): siRNA sense strand
ugaucaggcucccaagucu

SEQ ID NO: 1861217 - RNA, 19 nt, Homo sapiens
  misc_RNA (1)...(19): siRNA sense strand
ugaaucauggccaccuaaa

SEQ ID NO: 1861218 - RNA, 19 nt, Homo sapiens
  misc_RNA (1)...(19): siRNA sense strand
cuacggcacccacuucauc

SEQ ID NO: 1861219 - RNA, 19 nt, Homo sapiens
  misc_RNA (1)...(19): siRNA sense strand
cccaugaggugagaugcaa

SEQ ID NO: 1861220 - RNA, 19 nt, Homo sapiens
  misc_RNA (1)...(19): siRNA sense strand
agaagaagcacaagaugac

SEQ ID NO: 1861221 - RNA, 19 nt, Homo sapiens
  misc_RNA (1)...(19): siRNA sense strand
ccuaagcccaccagcaaug

SEQ ID NO: 1861222 - RNA, 19 nt, Homo sapiens
  misc_RNA (1)...(19): siRNA sense strand
caagucugguucccaugag

SEQ ID NO: 1861223 - RNA, 19 nt, Homo sapiens
  misc_RNA (1)...(19): siRNA sense strand
gguugcaggucugggauca

SEQ ID NO: 1861224 - RNA, 19 nt, Homo sapiens
  misc_RNA (1)...(19): siRNA sense strand
cuucuacaguuuccaugug

SEQ ID NO: 1861225 - RNA, 19 nt, Homo sapiens
  misc_RNA (1)...(19): siRNA sense strand
cgaggcccaggucaacaua

SEQ ID NO: 1861226 - RNA, 19 nt, Homo sapiens
  misc_RNA (1)...(19): siRNA sense strand
agacccaccaggaccagua

SEQ ID NO: 1861227 - RNA, 19 nt, Homo sapiens
  misc_RNA (1)...(19): siRNA sense strand
caagcgcagccacaaguuc

SEQ ID NO: 1861228 - RNA, 19 nt, Homo sapiens
  misc_RNA (1)...(19): siRNA sense strand
ugaggagggcccugaguca

SEQ ID NO: 1861229 - RNA, 19 nt, Homo sapiens
  misc_RNA (1)...(19): siRNA sense strand
gaagaagaagaagcacaag

SEQ ID NO: 1861230 - RNA, 19 nt, Homo sapiens
  misc_RNA (1)...(19): siRNA sense strand
caccagcaaugugcaugug

SEQ ID NO: 1861231 - RNA, 19 nt, Homo sapiens
  misc_RNA (1)...(19): siRNA sense strand
agaugcaaccugaaucaug

SEQ ID NO: 1861232 - RNA, 19 nt, Homo sapiens
  misc_RNA (1)...(19): siRNA sense strand
aagaagaagaagcacaaga

SEQ ID NO: 1861233 - RNA, 19 nt, Homo sapiens
  misc_RNA (1)...(19): siRNA sense strand
gaagacaucugaaaccuua

SEQ ID NO: 1861234 - RNA, 19 nt, Homo sapiens
  misc_RNA (1)...(19): siRNA sense strand
gaagagaacuugcaaaggu

SEQ ID NO: 1861235 - RNA, 19 nt, Homo sapiens
  misc_RNA (1)...(19): siRNA sense strand
caacaucugcuuacaagaa

SEQ ID NO: 1861236 - RNA, 19 nt, Homo sapiens
  misc_RNA (1)...(19): siRNA sense strand
gacucugucucaaguguua

SEQ ID NO: 1861237 - RNA, 19 nt, Homo sapiens
  misc_RNA (1)...(19): siRNA sense strand
gcaggaagagcuaagaaga

SEQ ID NO: 1861238 - RNA, 19 nt, Homo sapiens
  misc_RNA (1)...(19): siRNA sense strand
gcggaaacuuggaaucaau

SEQ ID NO: 1861239 - RNA, 19 nt, Homo sapiens
  misc_RNA (1)...(19): siRNA sense strand
aagagaacuugcaaaggua

SEQ ID NO: 1861240 - RNA, 19 nt, Homo sapiens
  misc_RNA (1)...(19): siRNA sense strand
aaucaauucucuacaggaa

SEQ ID NO: 1861241 - RNA, 19 nt, Homo sapiens
  misc_RNA (1)...(19): siRNA sense strand
gagcuaagaagagaacuug

SEQ ID NO: 1861242 - RNA, 19 nt, Homo sapiens
  misc_RNA (1)...(19): siRNA sense strand
gaaaaggucgaaaacuuaa

SEQ ID NO: 1861243 - RNA, 19 nt, Homo sapiens
  misc_RNA (1)...(19): siRNA sense strand
gaacuaaaacagaacauug

SEQ ID NO: 1861244 - RNA, 19 nt, Homo sapiens
  misc_RNA (1)...(19): siRNA sense strand
aagaagaaauccagacucu

SEQ ID NO: 1861245 - RNA, 19 nt, Homo sapiens
  misc_RNA (1)...(19): siRNA sense strand
gaauucggcugcaaaugcu

SEQ ID NO: 1861246 - RNA, 19 nt, Homo sapiens
  misc_RNA (1)...(19): siRNA sense strand
uugcaaagguagaagaaga

SEQ ID NO: 1861247 - RNA, 19 nt, Homo sapiens
  misc_RNA (1)...(19): siRNA sense strand
aggaagagcuaagaagaga

SEQ ID NO: 1861248 - RNA, 19 nt, Homo sapiens
  misc_RNA (1)...(19): siRNA sense strand
aaagguagaagaagaaauc

SEQ ID NO: 1861249 - RNA, 19 nt, Homo sapiens
  misc_RNA (1)...(19): siRNA sense strand
uuggagaagucuugaauuc

SEQ ID NO: 1861250 - RNA, 19 nt, Homo sapiens
  misc_RNA (1)...(19): siRNA sense strand
gcaaagguagaagaagaaa

SEQ ID NO: 1861251 - RNA, 19 nt, Homo sapiens
  misc_RNA (1)...(19): siRNA sense strand
gagcaggaagagcuaagaa

SEQ ID NO: 1861252 - RNA, 19 nt, Homo sapiens
  misc_RNA (1)...(19): siRNA sense strand
cagaaggccucagcugcuu

SEQ ID NO: 1861253 - RNA, 19 nt, Homo sapiens
  misc_RNA (1)...(19): siRNA sense strand
aagaaaaggucgaaaacuu

SEQ ID NO: 1861254 - RNA, 19 nt, Homo sapiens
  misc_RNA (1)...(19): siRNA sense strand
gaagagcuaagaagagaac

SEQ ID NO: 1861255 - RNA, 19 nt, Homo sapiens
  misc_RNA (1)...(19): siRNA sense strand
ucaauucucuacaggaacu

SEQ ID NO: 1861256 - RNA, 19 nt, Homo sapiens
  misc_RNA (1)...(19): siRNA sense strand
ggaaggagaagauguugcu

SEQ ID NO: 1861257 - RNA, 19 nt, Homo sapiens
  misc_RNA (1)...(19): siRNA sense strand
uacaagaagacaucugaaa

SEQ ID NO: 1861258 - RNA, 19 nt, Homo sapiens
  misc_RNA (1)...(19): siRNA sense strand
agaaaaggucgaaaacuua

SEQ ID NO: 1861259 - RNA, 19 nt, Homo sapiens
  misc_RNA (1)...(19): siRNA sense strand
gcagagaucaagcggaaac

SEQ ID NO: 1861260 - RNA, 19 nt, Homo sapiens
  misc_RNA (1)...(19): siRNA sense strand
cacggagccucuuccagaa

SEQ ID NO: 1861261 - RNA, 19 nt, Homo sapiens
  misc_RNA (1)...(19): siRNA sense strand
aaacagaacauugccaaag

SEQ ID NO: 1861262 - RNA, 19 nt, Homo sapiens
  misc_RNA (1)...(19): siRNA sense strand
ugaggaaggagaagauguu

SEQ ID NO: 1861263 - RNA, 19 nt, Homo sapiens
  misc_RNA (1)...(19): siRNA sense strand
cggaagaggagcaggaaga

SEQ ID NO: 1861264 - RNA, 19 nt, Homo sapiens
  misc_RNA (1)...(19): siRNA sense strand
gcuaagaagagaacuugca

SEQ ID NO: 1861265 - RNA, 19 nt, Homo sapiens
  misc_RNA (1)...(19): siRNA sense strand
uaagaagagaacuugcaaa

SEQ ID NO: 1861266 - RNA, 19 nt, Homo sapiens
  misc_RNA (1)...(19): siRNA sense strand
ugaauucggcugcaaaugc

SEQ ID NO: 1861267 - RNA, 19 nt, Homo sapiens
  misc_RNA (1)...(19): siRNA sense strand
ggaagagcuaagaagagaa

SEQ ID NO: 1861268 - RNA, 19 nt, Homo sapiens
  misc_RNA (1)...(19): siRNA sense strand
ucuguuggcucagucauca

SEQ ID NO: 1861269 - RNA, 19 nt, Homo sapiens
  misc_RNA (1)...(19): siRNA sense strand
gagaagcaucuagcagaga

SEQ ID NO: 1861270 - RNA, 19 nt, Homo sapiens
  misc_RNA (1)...(19): siRNA sense strand
aagaagagaacuugcaaag

SEQ ID NO: 1861271 - RNA, 19 nt, Homo sapiens
  misc_RNA (1)...(19): siRNA sense strand
cuaagaagagaacuugcaa

SEQ ID NO: 1861272 - RNA, 19 nt, Homo sapiens
  misc_RNA (1)...(19): siRNA sense strand
aacagaacauugccaaagg

SEQ ID NO: 1861273 - RNA, 19 nt, Homo sapiens
  misc_RNA (1)...(19): siRNA sense strand
gaggaaggagaagauguug

SEQ ID NO: 1861274 - RNA, 19 nt, Homo sapiens
  misc_RNA (1)...(19): siRNA sense strand
ggagcaggaagagcuaaga

SEQ ID NO: 1861275 - RNA, 19 nt, Homo sapiens
  misc_RNA (1)...(19): siRNA sense strand
caagaagacaucugaaacc

SEQ ID NO: 1861276 - RNA, 19 nt, Homo sapiens
  misc_RNA (1)...(19): siRNA sense strand
ggaagaggagcaggaagag

SEQ ID NO: 1861277 - RNA, 19 nt, Homo sapiens
  misc_RNA (1)...(19): siRNA sense strand
gcaagacgugacagcaaca

SEQ ID NO: 1861278 - RNA, 19 nt, Homo sapiens
  misc_RNA (1)...(19): siRNA sense strand
ucucaaguguuagcagcaa

SEQ ID NO: 1861279 - RNA, 19 nt, Homo sapiens
  misc_RNA (1)...(19): siRNA sense strand
acaagaagacaucugaaac

SEQ ID NO: 1861280 - RNA, 19 nt, Homo sapiens
  misc_RNA (1)...(19): siRNA sense strand
cuuacaagaagacaucuga

SEQ ID NO: 1861281 - RNA, 19 nt, Homo sapiens
  misc_RNA (1)...(19): siRNA sense strand
cggaaacuuggaaucaauu

SEQ ID NO: 1861282 - RNA, 19 nt, Homo sapiens
  misc_RNA (1)...(19): siRNA sense strand
caagccugcugguggugau

SEQ ID NO: 1861283 - RNA, 19 nt, Homo sapiens
  misc_RNA (1)...(19): siRNA sense strand
uacaggaacuaaaacagaa

SEQ ID NO: 1861284 - RNA, 19 nt, Homo sapiens
  misc_RNA (1)...(19): siRNA sense strand
gaacuugcaaagguagaag

SEQ ID NO: 1861285 - RNA, 19 nt, Homo sapiens
  misc_RNA (1)...(19): siRNA sense strand
gaagcaaguucacaaagaa

SEQ ID NO: 1861286 - RNA, 19 nt, Homo sapiens
  misc_RNA (1)...(19): siRNA sense strand
cgucagggauguacuauaa

SEQ ID NO: 1861287 - RNA, 19 nt, Homo sapiens
  misc_RNA (1)...(19): siRNA sense strand
ccagacagauaucaguuua

SEQ ID NO: 1861288 - RNA, 19 nt, Homo sapiens
  misc_RNA (1)...(19): siRNA sense strand
ccacugaaauagaaacuuu

SEQ ID NO: 1861289 - RNA, 19 nt, Homo sapiens
  misc_RNA (1)...(19): siRNA sense strand
ggucaugaauguccauaaa

SEQ ID NO: 1861290 - RNA, 19 nt, Homo sapiens
  misc_RNA (1)...(19): siRNA sense strand
ugacaccacugaaauagaa

SEQ ID NO: 1861291 - RNA, 19 nt, Homo sapiens
  misc_RNA (1)...(19): siRNA sense strand
ugaggaaacuggugcaauu

SEQ ID NO: 1861292 - RNA, 19 nt, Homo sapiens
  misc_RNA (1)...(19): siRNA sense strand
caacuggugugucguuuau

SEQ ID NO: 1861293 - RNA, 19 nt, Homo sapiens
  misc_RNA (1)...(19): siRNA sense strand
guagaucuaugacuucuca

SEQ ID NO: 1861294 - RNA, 19 nt, Homo sapiens
  misc_RNA (1)...(19): siRNA sense strand
uuacuaaaguggaugauug

SEQ ID NO: 1861295 - RNA, 19 nt, Homo sapiens
  misc_RNA (1)...(19): siRNA sense strand
ucaauucagucaagucuau

SEQ ID NO: 1861296 - RNA, 19 nt, Homo sapiens
  misc_RNA (1)...(19): siRNA sense strand
guauuaaacugugguauag

SEQ ID NO: 1861297 - RNA, 19 nt, Homo sapiens
  misc_RNA (1)...(19): siRNA sense strand
cuacagagccaaaugauuc

SEQ ID NO: 1861298 - RNA, 19 nt, Homo sapiens
  misc_RNA (1)...(19): siRNA sense strand
cuguguggcuuaugucuua

SEQ ID NO: 1861299 - RNA, 19 nt, Homo sapiens
  misc_RNA (1)...(19): siRNA sense strand
gaauuaaggauaaccuaga

SEQ ID NO: 1861300 - RNA, 19 nt, Homo sapiens
  misc_RNA (1)...(19): siRNA sense strand
uauguggccuugcuuacua

SEQ ID NO: 1861301 - RNA, 19 nt, Homo sapiens
  misc_RNA (1)...(19): siRNA sense strand
gagcaggacugugcaugga

SEQ ID NO: 1861302 - RNA, 19 nt, Homo sapiens
  misc_RNA (1)...(19): siRNA sense strand
uugacaaucucuacucuaa

SEQ ID NO: 1861303 - RNA, 19 nt, Homo sapiens
  misc_RNA (1)...(19): siRNA sense strand
caccugagcauucuacuuu

SEQ ID NO: 1861304 - RNA, 19 nt, Homo sapiens
  misc_RNA (1)...(19): siRNA sense strand
gauuguagccuuuaugcuu

SEQ ID NO: 1861305 - RNA, 19 nt, Homo sapiens
  misc_RNA (1)...(19): siRNA sense strand
gcaaguucacaaagaagua

SEQ ID NO: 1861306 - RNA, 19 nt, Homo sapiens
  misc_RNA (1)...(19): siRNA sense strand
gcagacaucagagacuaua

SEQ ID NO: 1861307 - RNA, 19 nt, Homo sapiens
  misc_RNA (1)...(19): siRNA sense strand
ccuuuaugcuuggaaauua

SEQ ID NO: 1861308 - RNA, 19 nt, Homo sapiens
  misc_RNA (1)...(19): siRNA sense strand
caaaugauucccuaugguu

SEQ ID NO: 1861309 - RNA, 19 nt, Homo sapiens
  misc_RNA (1)...(19): siRNA sense strand
gcauauguggccuugcuua

SEQ ID NO: 1861310 - RNA, 19 nt, Homo sapiens
  misc_RNA (1)...(19): siRNA sense strand
gacaaucucuacucuaaaa

SEQ ID NO: 1861311 - RNA, 19 nt, Homo sapiens
  misc_RNA (1)...(19): siRNA sense strand
gcaacuggugugucguuua

SEQ ID NO: 1861312 - RNA, 19 nt, Homo sapiens
  misc_RNA (1)...(19): siRNA sense strand
aaacaugaguagaucuaug

SEQ ID NO: 1861313 - RNA, 19 nt, Homo sapiens
  misc_RNA (1)...(19): siRNA sense strand
uagcagacaucagagacua

SEQ ID NO: 1861314 - RNA, 19 nt, Homo sapiens
  misc_RNA (1)...(19): siRNA sense strand
aaacugugguauagcauau

SEQ ID NO: 1861315 - RNA, 19 nt, Homo sapiens
  misc_RNA (1)...(19): siRNA sense strand
uggcuuacauugauuacaa

SEQ ID NO: 1861316 - RNA, 19 nt, Homo sapiens
  misc_RNA (1)...(19): siRNA sense strand
uaaccuagacgacauaaag

SEQ ID NO: 1861317 - RNA, 19 nt, Homo sapiens
  misc_RNA (1)...(19): siRNA sense strand
ggaaacuggugcaauugag

SEQ ID NO: 1861318 - RNA, 19 nt, Homo sapiens
  misc_RNA (1)...(19): siRNA sense strand
gggauguacuauaacaaug

SEQ ID NO: 1861319 - RNA, 19 nt, Homo sapiens
  misc_RNA (1)...(19): siRNA sense strand
aaaugacaccacugaaaua

SEQ ID NO: 1861320 - RNA, 19 nt, Homo sapiens
  misc_RNA (1)...(19): siRNA sense strand
ccagagagcacagaaauag

SEQ ID NO: 1861321 - RNA, 19 nt, Homo sapiens
  misc_RNA (1)...(19): siRNA sense strand
gucaguauuuggaauguga

SEQ ID NO: 1861322 - RNA, 19 nt, Homo sapiens
  misc_RNA (1)...(19): siRNA sense strand
ccauuuauguugugugaca

SEQ ID NO: 1861323 - RNA, 19 nt, Homo sapiens
  misc_RNA (1)...(19): siRNA sense strand
gaaacuggugcaauugaga

SEQ ID NO: 1861324 - RNA, 19 nt, Homo sapiens
  misc_RNA (1)...(19): siRNA sense strand
ggaaauuaugcuucagauu

SEQ ID NO: 1861325 - RNA, 19 nt, Homo sapiens
  misc_RNA (1)...(19): siRNA sense strand
guacuauaacaauggcuua

SEQ ID NO: 1861326 - RNA, 19 nt, Homo sapiens
  misc_RNA (1)...(19): siRNA sense strand
gccaaaugauucccuaugg

SEQ ID NO: 1861327 - RNA, 19 nt, Homo sapiens
  misc_RNA (1)...(19): siRNA sense strand
ucagggauguacuauaaca

SEQ ID NO: 1861328 - RNA, 19 nt, Homo sapiens
  misc_RNA (1)...(19): siRNA sense strand
ggauaaccuagacgacaua

SEQ ID NO: 1861329 - RNA, 19 nt, Homo sapiens
  misc_RNA (1)...(19): siRNA sense strand
cgacauaaagaggauaauu

SEQ ID NO: 1861330 - RNA, 19 nt, Homo sapiens
  misc_RNA (1)...(19): siRNA sense strand
guugaaggaauuaaggaua

SEQ ID NO: 1861331 - RNA, 19 nt, Homo sapiens
  misc_RNA (1)...(19): siRNA sense strand
gguuggaaauuaugcuuca

SEQ ID NO: 1861332 - RNA, 19 nt, Homo sapiens
  misc_RNA (1)...(19): siRNA sense strand
ucugauaccaccagcauaa

SEQ ID NO: 1861333 - RNA, 19 nt, Homo sapiens
  misc_RNA (1)...(19): siRNA sense strand
ccaaaugauucccuauggu

SEQ ID NO: 1861334 - RNA, 19 nt, Homo sapiens
  misc_RNA (1)...(19): siRNA sense strand
ucucaaagccgggucauga

SEQ ID NO: 1861335 - RNA, 19 nt, Homo sapiens
  misc_RNA (1)...(19): siRNA sense strand
gaaguauuaaacuguggua

SEQ ID NO: 1861336 - RNA, 19 nt, Homo sapiens
  misc_RNA (1)...(19): siRNA sense strand
caauuacaccugagcauuc

SEQ ID NO: 1861337 - RNA, 19 nt, Homo sapiens
  misc_RNA (1)...(19): siRNA sense strand
uaaacugugguauagcaua

SEQ ID NO: 1861338 - RNA, 19 nt, Homo sapiens
  misc_RNA (1)...(19): siRNA sense strand
gagcaacuggugugucguu

SEQ ID NO: 1861339 - RNA, 19 nt, Homo sapiens
  misc_RNA (1)...(19): siRNA sense strand
guauuuggaaugugaaguu

SEQ ID NO: 1861340 - RNA, 19 nt, Homo sapiens
  misc_RNA (1)...(19): siRNA sense strand
ggugugucguuuaucgaaa

SEQ ID NO: 1861341 - RNA, 19 nt, Homo sapiens
  misc_RNA (1)...(19): siRNA sense strand
gccagagagcacagaaaua

SEQ ID NO: 1861342 - RNA, 19 nt, Homo sapiens
  misc_RNA (1)...(19): siRNA sense strand
gaaacuugaaacuaagguu

SEQ ID NO: 1861343 - RNA, 19 nt, Homo sapiens
  misc_RNA (1)...(19): siRNA sense strand
ccaauuacaccugagcauu

SEQ ID NO: 1861344 - RNA, 19 nt, Homo sapiens
  misc_RNA (1)...(19): siRNA sense strand
ggauucacuguguggcuua

SEQ ID NO: 1861345 - RNA, 19 nt, Homo sapiens
  misc_RNA (1)...(19): siRNA sense strand
aaagccgggucaugaaugu

SEQ ID NO: 1861346 - RNA, 19 nt, Homo sapiens
  misc_RNA (1)...(19): siRNA sense strand
gaucuaugacuucucaaag

SEQ ID NO: 1861347 - RNA, 19 nt, Homo sapiens
  misc_RNA (1)...(19): siRNA sense strand
gaguagaucuaugacuucu

SEQ ID NO: 1861348 - RNA, 19 nt, Homo sapiens
  misc_RNA (1)...(19): siRNA sense strand
augaguagaucuaugacuu

SEQ ID NO: 1861349 - RNA, 19 nt, Homo sapiens
  misc_RNA (1)...(19): siRNA sense strand
gaauguccauaaaaugcua

SEQ ID NO: 1861350 - RNA, 19 nt, Homo sapiens
  misc_RNA (1)...(19): siRNA sense strand
gaggaaacuggugcaauug

SEQ ID NO: 1861351 - RNA, 19 nt, Homo sapiens
  misc_RNA (1)...(19): siRNA sense strand
gacgacauaaagaggauaa

SEQ ID NO: 1861352 - RNA, 19 nt, Homo sapiens
  misc_RNA (1)...(19): siRNA sense strand
caaagccgggucaugaaug

SEQ ID NO: 1861353 - RNA, 19 nt, Homo sapiens
  misc_RNA (1)...(19): siRNA sense strand
cuauaacaauggcuuacau

SEQ ID NO: 1861354 - RNA, 19 nt, Homo sapiens
  misc_RNA (1)...(19): siRNA sense strand
guuguaugccagacagaua

SEQ ID NO: 1861355 - RNA, 19 nt, Homo sapiens
  misc_RNA (1)...(19): siRNA sense strand
ugccauuuauguuguguga

SEQ ID NO: 1861356 - RNA, 19 nt, Homo sapiens
  misc_RNA (1)...(19): siRNA sense strand
guuacagcccugcauuuga

SEQ ID NO: 1861357 - RNA, 19 nt, Homo sapiens
  misc_RNA (1)...(19): siRNA sense strand
guucuacagagccaaauga

SEQ ID NO: 1861358 - RNA, 19 nt, Homo sapiens
  misc_RNA (1)...(19): siRNA sense strand
gccagacagauaucaguuu

SEQ ID NO: 1861359 - RNA, 19 nt, Homo sapiens
  misc_RNA (1)...(19): siRNA sense strand
gcagaaggagcaggacugu

SEQ ID NO: 1861360 - RNA, 19 nt, Homo sapiens
  misc_RNA (1)...(19): siRNA sense strand
ggauguacuauaacaaugg

SEQ ID NO: 1861361 - RNA, 19 nt, Homo sapiens
  misc_RNA (1)...(19): siRNA sense strand
aaaugauucccuaugguuu

SEQ ID NO: 1861362 - RNA, 19 nt, Homo sapiens
  misc_RNA (1)...(19): siRNA sense strand
gauaaccuagacgacauaa

SEQ ID NO: 1861363 - RNA, 19 nt, Homo sapiens
  misc_RNA (1)...(19): siRNA sense strand
aacaugaguagaucuauga

SEQ ID NO: 1861364 - RNA, 19 nt, Homo sapiens
  misc_RNA (1)...(19): siRNA sense strand
uggccuugcuuacuaaagu

SEQ ID NO: 1861365 - RNA, 19 nt, Homo sapiens
  misc_RNA (1)...(19): siRNA sense strand
ccugagcauucuacuuuua

SEQ ID NO: 1861366 - RNA, 19 nt, Homo sapiens
  misc_RNA (1)...(19): siRNA sense strand
gcuucuagcagacaucaga

SEQ ID NO: 1861367 - RNA, 19 nt, Homo sapiens
  misc_RNA (1)...(19): siRNA sense strand
augcagacuugguuucaga

SEQ ID NO: 1861368 - RNA, 19 nt, Homo sapiens
  misc_RNA (1)...(19): siRNA sense strand
caaguucacaaagaaguau

SEQ ID NO: 1861369 - RNA, 19 nt, Homo sapiens
  misc_RNA (1)...(19): siRNA sense strand
ucucugccauuuauguugu

SEQ ID NO: 1861370 - RNA, 19 nt, Homo sapiens
  misc_RNA (1)...(19): siRNA sense strand
ggacugugcauggaugaca

SEQ ID NO: 1861371 - RNA, 19 nt, Homo sapiens
  misc_RNA (1)...(19): siRNA sense strand
gcguuacagcccugcauuu

SEQ ID NO: 1861372 - RNA, 19 nt, Homo sapiens
  misc_RNA (1)...(19): siRNA sense strand
uggaaauuaugcuucagau

SEQ ID NO: 1861373 - RNA, 19 nt, Homo sapiens
  misc_RNA (1)...(19): siRNA sense strand
ucaaagccgggucaugaau

SEQ ID NO: 1861374 - RNA, 19 nt, Homo sapiens
  misc_RNA (1)...(19): siRNA sense strand
ugacaaucucuacucuaaa

SEQ ID NO: 1861375 - RNA, 19 nt, Homo sapiens
  misc_RNA (1)...(19): siRNA sense strand
uagacgacauaaagaggau

SEQ ID NO: 1861376 - RNA, 19 nt, Homo sapiens
  misc_RNA (1)...(19): siRNA sense strand
ggucugauaccaccagcau

SEQ ID NO: 1861377 - RNA, 19 nt, Homo sapiens
  misc_RNA (1)...(19): siRNA sense strand
uagccuuuaugcuuggaaa

SEQ ID NO: 1861378 - RNA, 19 nt, Homo sapiens
  misc_RNA (1)...(19): siRNA sense strand
ggccuugcuuacuaaagug

SEQ ID NO: 1861379 - RNA, 19 nt, Homo sapiens
  misc_RNA (1)...(19): siRNA sense strand
gaguugaaggaauuaagga

SEQ ID NO: 1861380 - RNA, 19 nt, Homo sapiens
  misc_RNA (1)...(19): siRNA sense strand
auuaaacugugguauagca

SEQ ID NO: 1861381 - RNA, 19 nt, Homo sapiens
  misc_RNA (1)...(19): siRNA sense strand
aggauaaccuagacgacau

SEQ ID NO: 1861382 - RNA, 19 nt, Homo sapiens
  misc_RNA (1)...(19): siRNA sense strand
caauugagagagcguuaca

SEQ ID NO: 1861383 - RNA, 19 nt, Homo sapiens
  misc_RNA (1)...(19): siRNA sense strand
cagacagauaucaguuuaa

SEQ ID NO: 1861384 - RNA, 19 nt, Homo sapiens
  misc_RNA (1)...(19): siRNA sense strand
uuaauucccguaaaccaau

SEQ ID NO: 1861385 - RNA, 19 nt, Homo sapiens
  misc_RNA (1)...(19): siRNA sense strand
gggaagagcuggccagaga

SEQ ID NO: 1861386 - RNA, 19 nt, Homo sapiens
  misc_RNA (1)...(19): siRNA sense strand
gcaagcauccggugcaaug

SEQ ID NO: 1861387 - RNA, 19 nt, Homo sapiens
  misc_RNA (1)...(19): siRNA sense strand
gagagaucaugccaguuga

SEQ ID NO: 1861388 - RNA, 19 nt, Homo sapiens
  misc_RNA (1)...(19): siRNA sense strand
cagauuugguuucagaaug

SEQ ID NO: 1861389 - RNA, 19 nt, Homo sapiens
  misc_RNA (1)...(19): siRNA sense strand
ggauucagaucugguuuca

SEQ ID NO: 1861390 - RNA, 19 nt, Homo sapiens
  misc_RNA (1)...(19): siRNA sense strand
ugagagaucaugccaguug

SEQ ID NO: 1861391 - RNA, 19 nt, Homo sapiens
  misc_RNA (1)...(19): siRNA sense strand
agauuugguuucagaauga

SEQ ID NO: 1861392 - RNA, 19 nt, Homo sapiens
  misc_RNA (1)...(19): siRNA sense strand
ggaccgggaaggcgaauga

SEQ ID NO: 1861393 - RNA, 19 nt, Homo sapiens
  misc_RNA (1)...(19): siRNA sense strand
gaagagcuggccagagaga

SEQ ID NO: 1861394 - RNA, 19 nt, Homo sapiens
  misc_RNA (1)...(19): siRNA sense strand
guccagauuugguuucaga

SEQ ID NO: 1861395 - RNA, 19 nt, Homo sapiens
  misc_RNA (1)...(19): siRNA sense strand
gagcccaggguccagauuu

SEQ ID NO: 1861396 - RNA, 19 nt, Homo sapiens
  misc_RNA (1)...(19): siRNA sense strand
gcuuugagcggaaccugua

SEQ ID NO: 1861397 - RNA, 19 nt, Homo sapiens
  misc_RNA (1)...(19): siRNA sense strand
ugagaaggaucgcuuucca

SEQ ID NO: 1861398 - RNA, 19 nt, Homo sapiens
  misc_RNA (1)...(19): siRNA sense strand
gcauugccaccaaagaaga

SEQ ID NO: 1861399 - RNA, 19 nt, Homo sapiens
  misc_RNA (1)...(19): siRNA sense strand
ggaucgcuuuccaggcauu

SEQ ID NO: 1861400 - RNA, 19 nt, Homo sapiens
  misc_RNA (1)...(19): siRNA sense strand
cgaaagcggacugccauca

SEQ ID NO: 1861401 - RNA, 19 nt, Homo sapiens
  misc_RNA (1)...(19): siRNA sense strand
ggcgaaugauacuccuuuc

SEQ ID NO: 1861402 - RNA, 19 nt, Homo sapiens
  misc_RNA (1)...(19): siRNA sense strand
ccuccgagccuuugagaag

SEQ ID NO: 1861403 - RNA, 19 nt, Homo sapiens
  misc_RNA (1)...(19): siRNA sense strand
gaaagcggacugccaucac

SEQ ID NO: 1861404 - RNA, 19 nt, Homo sapiens
  misc_RNA (1)...(19): siRNA sense strand
gccaucaccggaucccaaa

SEQ ID NO: 1861405 - RNA, 19 nt, Homo sapiens
  misc_RNA (1)...(19): siRNA sense strand
gcgcagaucacccagaaga

SEQ ID NO: 1861406 - RNA, 19 nt, Homo sapiens
  misc_RNA (1)...(19): siRNA sense strand
gcaccguguucaugaaucu

SEQ ID NO: 1861407 - RNA, 19 nt, Homo sapiens
  misc_RNA (1)...(19): siRNA sense strand
ggacaaaugcgacgaaccu

SEQ ID NO: 1861408 - RNA, 19 nt, Homo sapiens
  misc_RNA (1)...(19): siRNA sense strand
gagcugaaggcgcagauca

SEQ ID NO: 1861409 - RNA, 19 nt, Homo sapiens
  misc_RNA (1)...(19): siRNA sense strand
ugagcaccguguucaugaa

SEQ ID NO: 1861410 - RNA, 19 nt, Homo sapiens
  misc_RNA (1)...(19): siRNA sense strand
aggcgcagaucacccagaa

SEQ ID NO: 1861411 - RNA, 19 nt, Homo sapiens
  misc_RNA (1)...(19): siRNA sense strand
gagcaccguguucaugaau

SEQ ID NO: 1861412 - RNA, 19 nt, Homo sapiens
  misc_RNA (1)...(19): siRNA sense strand
caccugaagcagcaaguga

SEQ ID NO: 1861413 - RNA, 19 nt, Homo sapiens
  misc_RNA (1)...(19): siRNA sense strand
uagaagaacucaaagcuaa

SEQ ID NO: 1861414 - RNA, 19 nt, Homo sapiens
  misc_RNA (1)...(19): siRNA sense strand
caauuuggauucccuuuaa

SEQ ID NO: 1861415 - RNA, 19 nt, Homo sapiens
  misc_RNA (1)...(19): siRNA sense strand
ccuguaagcuccuggauuu

SEQ ID NO: 1861416 - RNA, 19 nt, Homo sapiens
  misc_RNA (1)...(19): siRNA sense strand
ggaacagaauagaaaugua

SEQ ID NO: 1861417 - RNA, 19 nt, Homo sapiens
  misc_RNA (1)...(19): siRNA sense strand
ugaaccagaugauuacuuu

SEQ ID NO: 1861418 - RNA, 19 nt, Homo sapiens
  misc_RNA (1)...(19): siRNA sense strand
caaugaagauuauguugga

SEQ ID NO: 1861419 - RNA, 19 nt, Homo sapiens
  misc_RNA (1)...(19): siRNA sense strand
gaagcuagaagaacucaaa

SEQ ID NO: 1861420 - RNA, 19 nt, Homo sapiens
  misc_RNA (1)...(19): siRNA sense strand
ccagaugauuacuuuauga

SEQ ID NO: 1861421 - RNA, 19 nt, Homo sapiens
  misc_RNA (1)...(19): siRNA sense strand
gaacauauuuccaaaagca

SEQ ID NO: 1861422 - RNA, 19 nt, Homo sapiens
  misc_RNA (1)...(19): siRNA sense strand
gaacagaauagaaauguac

SEQ ID NO: 1861423 - RNA, 19 nt, Homo sapiens
  misc_RNA (1)...(19): siRNA sense strand
uagaggcgauggaaagaaa

SEQ ID NO: 1861424 - RNA, 19 nt, Homo sapiens
  misc_RNA (1)...(19): siRNA sense strand
gaguucaccuuguacuuga

SEQ ID NO: 1861425 - RNA, 19 nt, Homo sapiens
  misc_RNA (1)...(19): siRNA sense strand
caaagcgggugccuagaug

SEQ ID NO: 1861426 - RNA, 19 nt, Homo sapiens
  misc_RNA (1)...(19): siRNA sense strand
cagaaagguuugaagaugu

SEQ ID NO: 1861427 - RNA, 19 nt, Homo sapiens
  misc_RNA (1)...(19): siRNA sense strand
gcugaaaccuuuuaccuuu

SEQ ID NO: 1861428 - RNA, 19 nt, Homo sapiens
  misc_RNA (1)...(19): siRNA sense strand
cuaaucacgcuuugucuua

SEQ ID NO: 1861429 - RNA, 19 nt, Homo sapiens
  misc_RNA (1)...(19): siRNA sense strand
gaagauguuugggugguau

SEQ ID NO: 1861430 - RNA, 19 nt, Homo sapiens
  misc_RNA (1)...(19): siRNA sense strand
gcagacagaaagcauugua

SEQ ID NO: 1861431 - RNA, 19 nt, Homo sapiens
  misc_RNA (1)...(19): siRNA sense strand
acagaaagguuugaagaug

SEQ ID NO: 1861432 - RNA, 19 nt, Homo sapiens
  misc_RNA (1)...(19): siRNA sense strand
gaccuuaccucagacuaga

SEQ ID NO: 1861433 - RNA, 19 nt, Homo sapiens
  misc_RNA (1)...(19): siRNA sense strand
gcaaagcgggugccuagau

SEQ ID NO: 1861434 - RNA, 19 nt, Homo sapiens
  misc_RNA (1)...(19): siRNA sense strand
gaagaaugcagagauugaa

SEQ ID NO: 1861435 - RNA, 19 nt, Homo sapiens
  misc_RNA (1)...(19): siRNA sense strand
agaaagguuugaagauguu

SEQ ID NO: 1861436 - RNA, 19 nt, Homo sapiens
  misc_RNA (1)...(19): siRNA sense strand
agaagaagcuagaagaacu

SEQ ID NO: 1861437 - RNA, 19 nt, Homo sapiens
  misc_RNA (1)...(19): siRNA sense strand
agauugaaccagaugauua

SEQ ID NO: 1861438 - RNA, 19 nt, Homo sapiens
  misc_RNA (1)...(19): siRNA sense strand
gucgagagcugacagaaag

SEQ ID NO: 1861439 - RNA, 19 nt, Homo sapiens
  misc_RNA (1)...(19): siRNA sense strand
gaaccagaugauuacuuua

SEQ ID NO: 1861440 - RNA, 19 nt, Homo sapiens
  misc_RNA (1)...(19): siRNA sense strand
ggaguucaccuuguacuug

SEQ ID NO: 1861441 - RNA, 19 nt, Homo sapiens
  misc_RNA (1)...(19): siRNA sense strand
gcagucaggaacccagaua

SEQ ID NO: 1861442 - RNA, 19 nt, Homo sapiens
  misc_RNA (1)...(19): siRNA sense strand
cagcaggaaauaacaaauu

SEQ ID NO: 1861443 - RNA, 19 nt, Homo sapiens
  misc_RNA (1)...(19): siRNA sense strand
cgcagaagcucaguaucua

SEQ ID NO: 1861444 - RNA, 19 nt, Homo sapiens
  misc_RNA (1)...(19): siRNA sense strand
ugacagaaagguuugaaga

SEQ ID NO: 1861445 - RNA, 19 nt, Homo sapiens
  misc_RNA (1)...(19): siRNA sense strand
ggugguaucugggccuuug

SEQ ID NO: 1861446 - RNA, 19 nt, Homo sapiens
  misc_RNA (1)...(19): siRNA sense strand
uuaacugaauuccaaguga

SEQ ID NO: 1861447 - RNA, 19 nt, Homo sapiens
  misc_RNA (1)...(19): siRNA sense strand
agaaaaggcugucuuggaa

SEQ ID NO: 1861448 - RNA, 19 nt, Homo sapiens
  misc_RNA (1)...(19): siRNA sense strand
uggaaaagaucauggaaaa

SEQ ID NO: 1861449 - RNA, 19 nt, Homo sapiens
  misc_RNA (1)...(19): siRNA sense strand
agacagaaagcauuguaaa

SEQ ID NO: 1861450 - RNA, 19 nt, Homo sapiens
  misc_RNA (1)...(19): siRNA sense strand
ucaggaacccagauaagaa

SEQ ID NO: 1861451 - RNA, 19 nt, Homo sapiens
  misc_RNA (1)...(19): siRNA sense strand
ugaagaaugcagagauuga

SEQ ID NO: 1861452 - RNA, 19 nt, Homo sapiens
  misc_RNA (1)...(19): siRNA sense strand
gacagaaagcauuguaaau

SEQ ID NO: 1861453 - RNA, 19 nt, Homo sapiens
  misc_RNA (1)...(19): siRNA sense strand
ccuuugaccuuaccucaga

SEQ ID NO: 1861454 - RNA, 19 nt, Homo sapiens
  misc_RNA (1)...(19): siRNA sense strand
gugccuagauggguucuug

SEQ ID NO: 1861455 - RNA, 19 nt, Homo sapiens
  misc_RNA (1)...(19): siRNA sense strand
gcuaugagaagaagcuaga

SEQ ID NO: 1861456 - RNA, 19 nt, Homo sapiens
  misc_RNA (1)...(19): siRNA sense strand
uccaggaguucaccuugua

SEQ ID NO: 1861457 - RNA, 19 nt, Homo sapiens
  misc_RNA (1)...(19): siRNA sense strand
ggauggaucugcagaaaag

SEQ ID NO: 1861458 - RNA, 19 nt, Homo sapiens
  misc_RNA (1)...(19): siRNA sense strand
gagauugaaccagaugauu

SEQ ID NO: 1861459 - RNA, 19 nt, Homo sapiens
  misc_RNA (1)...(19): siRNA sense strand
uaaucacgcuuugucuuau

SEQ ID NO: 1861460 - RNA, 19 nt, Homo sapiens
  misc_RNA (1)...(19): siRNA sense strand
cuugaagaaugcagagauu

SEQ ID NO: 1861461 - RNA, 19 nt, Homo sapiens
  misc_RNA (1)...(19): siRNA sense strand
caggaacccagauaagaaa

SEQ ID NO: 1861462 - RNA, 19 nt, Homo sapiens
  misc_RNA (1)...(19): siRNA sense strand
uccaggaccuagagaaguu

SEQ ID NO: 1861463 - RNA, 19 nt, Homo sapiens
  misc_RNA (1)...(19): siRNA sense strand
acaauuuggauucccuuua

SEQ ID NO: 1861464 - RNA, 19 nt, Homo sapiens
  misc_RNA (1)...(19): siRNA sense strand
ccggauggaucugcagaaa

SEQ ID NO: 1861465 - RNA, 19 nt, Homo sapiens
  misc_RNA (1)...(19): siRNA sense strand
uuggauagaacuagugaua

SEQ ID NO: 1861466 - RNA, 19 nt, Homo sapiens
  misc_RNA (1)...(19): siRNA sense strand
ugaagauguuuggguggua

SEQ ID NO: 1861467 - RNA, 19 nt, Homo sapiens
  misc_RNA (1)...(19): siRNA sense strand
ugaagauuauguuggaagu

SEQ ID NO: 1861468 - RNA, 19 nt, Homo sapiens
  misc_RNA (1)...(19): siRNA sense strand
cuagaagaacucaaagcua

SEQ ID NO: 1861469 - RNA, 19 nt, Homo sapiens
  misc_RNA (1)...(19): siRNA sense strand
gacagaaagguuugaagau

SEQ ID NO: 1861470 - RNA, 19 nt, Homo sapiens
  misc_RNA (1)...(19): siRNA sense strand
gcaguccccucacaccuuu

SEQ ID NO: 1861471 - RNA, 19 nt, Homo sapiens
  misc_RNA (1)...(19): siRNA sense strand
ugagaagaagcuagaagaa

SEQ ID NO: 1861472 - RNA, 19 nt, Homo sapiens
  misc_RNA (1)...(19): siRNA sense strand
gcagagauugaaccagaug

SEQ ID NO: 1861473 - RNA, 19 nt, Homo sapiens
  misc_RNA (1)...(19): siRNA sense strand
gagcugacagaaagguuug

SEQ ID NO: 1861474 - RNA, 19 nt, Homo sapiens
  misc_RNA (1)...(19): siRNA sense strand
uaucugggccuuugaccuu

SEQ ID NO: 1861475 - RNA, 19 nt, Homo sapiens
  misc_RNA (1)...(19): siRNA sense strand
gcucuguggacaccuguaa

SEQ ID NO: 1861476 - RNA, 19 nt, Homo sapiens
  misc_RNA (1)...(19): siRNA sense strand
gaaaagaucauggaaaacu

SEQ ID NO: 1861477 - RNA, 19 nt, Homo sapiens
  misc_RNA (1)...(19): siRNA sense strand
gagaagaagcuagaagaac

SEQ ID NO: 1861478 - RNA, 19 nt, Homo sapiens
  misc_RNA (1)...(19): siRNA sense strand
gauugaaccagaugauuac

SEQ ID NO: 1861479 - RNA, 19 nt, Homo sapiens
  misc_RNA (1)...(19): siRNA sense strand
gaagaacucaaagcuaagg

SEQ ID NO: 1861480 - RNA, 19 nt, Homo sapiens
  misc_RNA (1)...(19): siRNA sense strand
gaagaagcuagaagaacuc

SEQ ID NO: 1861481 - RNA, 19 nt, Homo sapiens
  misc_RNA (1)...(19): siRNA sense strand
acauugugccucaggauuu

SEQ ID NO: 1861482 - RNA, 19 nt, Homo sapiens
  misc_RNA (1)...(19): siRNA sense strand
gcuaaggagcagucaggaa

SEQ ID NO: 1861483 - RNA, 19 nt, Homo sapiens
  misc_RNA (1)...(19): siRNA sense strand
uuacacuaaucacgcuuug

SEQ ID NO: 1861484 - RNA, 19 nt, Homo sapiens
  misc_RNA (1)...(19): siRNA sense strand
gauugaaggagcccgauca

SEQ ID NO: 1861485 - RNA, 19 nt, Homo sapiens
  misc_RNA (1)...(19): siRNA sense strand
ccaauaucccuccaaccuu

SEQ ID NO: 1861486 - RNA, 19 nt, Homo sapiens
  misc_RNA (1)...(19): siRNA sense strand
gcuaggggccuuuguggua

SEQ ID NO: 1861487 - RNA, 19 nt, Homo sapiens
  misc_RNA (1)...(19): siRNA sense strand
gaaagguuugaagauguuu

SEQ ID NO: 1861488 - RNA, 19 nt, Homo sapiens
  misc_RNA (1)...(19): siRNA sense strand
cagacagaaagcauuguaa

SEQ ID NO: 1861489 - RNA, 19 nt, Homo sapiens
  misc_RNA (1)...(19): siRNA sense strand
gcuagaagaacucaaagcu

SEQ ID NO: 1861490 - RNA, 19 nt, Homo sapiens
  misc_RNA (1)...(19): siRNA sense strand
ggaccuagagaaguuguca

SEQ ID NO: 1861491 - RNA, 19 nt, Homo sapiens
  misc_RNA (1)...(19): siRNA sense strand
ccgcagaagcucaguaucu

SEQ ID NO: 1861492 - RNA, 19 nt, Homo sapiens
  misc_RNA (1)...(19): siRNA sense strand
gacuagaggcgauggaaag

SEQ ID NO: 1861493 - RNA, 19 nt, Homo sapiens
  misc_RNA (1)...(19): siRNA sense strand
cagaauagaaauguacugu

SEQ ID NO: 1861494 - RNA, 19 nt, Homo sapiens
  misc_RNA (1)...(19): siRNA sense strand
gucaggaacccagauaaga

SEQ ID NO: 1861495 - RNA, 19 nt, Homo sapiens
  misc_RNA (1)...(19): siRNA sense strand
aaucacgcuuugucuuaug

SEQ ID NO: 1861496 - RNA, 19 nt, Homo sapiens
  misc_RNA (1)...(19): siRNA sense strand
gaagcagccggauggaucu

SEQ ID NO: 1861497 - RNA, 19 nt, Homo sapiens
  misc_RNA (1)...(19): siRNA sense strand
caagauaaugggugaugca

SEQ ID NO: 1861498 - RNA, 19 nt, Homo sapiens
  misc_RNA (1)...(19): siRNA sense strand
ccucaggauuuugauaaua

SEQ ID NO: 1861499 - RNA, 19 nt, Homo sapiens
  misc_RNA (1)...(19): siRNA sense strand
acacuaaucacgcuuuguc

SEQ ID NO: 1861500 - RNA, 19 nt, Homo sapiens
  misc_RNA (1)...(19): siRNA sense strand
gaagauuauguuggaagug

SEQ ID NO: 1861501 - RNA, 19 nt, Homo sapiens
  misc_RNA (1)...(19): siRNA sense strand
aaugggugaugcagacaga

SEQ ID NO: 1861502 - RNA, 19 nt, Homo sapiens
  misc_RNA (1)...(19): siRNA sense strand
gcagaagcucaguaucuac

SEQ ID NO: 1861503 - RNA, 19 nt, Homo sapiens
  misc_RNA (1)...(19): siRNA sense strand
aaccuucagugccuucaau

SEQ ID NO: 1861504 - RNA, 19 nt, Homo sapiens
  misc_RNA (1)...(19): siRNA sense strand
ucauuuggauagaacuagu

SEQ ID NO: 1861505 - RNA, 19 nt, Homo sapiens
  misc_RNA (1)...(19): siRNA sense strand
uaagccugaucccaauauc

SEQ ID NO: 1861506 - RNA, 19 nt, Homo sapiens
  misc_RNA (1)...(19): siRNA sense strand
gaaugcagagauugaacca

SEQ ID NO: 1861507 - RNA, 19 nt, Homo sapiens
  misc_RNA (1)...(19): siRNA sense strand
ccuuugugguacccaauga

SEQ ID NO: 1861508 - RNA, 19 nt, Homo sapiens
  misc_RNA (1)...(19): siRNA sense strand
gcccgcagaagcucaguau

SEQ ID NO: 1861509 - RNA, 19 nt, Homo sapiens
  misc_RNA (1)...(19): siRNA sense strand
ugaguacaagaaagauuga

SEQ ID NO: 1861510 - RNA, 19 nt, Homo sapiens
  misc_RNA (1)...(19): siRNA sense strand
ugucuuaugaucaggcaaa

SEQ ID NO: 1861511 - RNA, 19 nt, Homo sapiens
  misc_RNA (1)...(19): siRNA sense strand
accagaugauuacuuuaug

SEQ ID NO: 1861512 - RNA, 19 nt, Homo sapiens
  misc_RNA (1)...(19): siRNA sense strand
uacaagaaagauugaagga

SEQ ID NO: 1861513 - RNA, 19 nt, Homo sapiens
  misc_RNA (1)...(19): siRNA sense strand
gaacaagcgcuucuacuga

SEQ ID NO: 1861514 - RNA, 19 nt, Homo sapiens
  misc_RNA (1)...(19): siRNA sense strand
acaccucucuuucuucuuu

SEQ ID NO: 1861515 - RNA, 19 nt, Homo sapiens
  misc_RNA (1)...(19): siRNA sense strand
ggaaaugcacguccacuuc

SEQ ID NO: 1861516 - RNA, 19 nt, Homo sapiens
  misc_RNA (1)...(19): siRNA sense strand
gaaaugcacguccacuuca

SEQ ID NO: 1861517 - RNA, 19 nt, Homo sapiens
  misc_RNA (1)...(19): siRNA sense strand
uggaagaacugcauugaca

SEQ ID NO: 1861518 - RNA, 19 nt, Homo sapiens
  misc_RNA (1)...(19): siRNA sense strand
gaagaagaaccuccaugga

SEQ ID NO: 1861519 - RNA, 19 nt, Homo sapiens
  misc_RNA (1)...(19): siRNA sense strand
ggaacaagcgcuucuacug

SEQ ID NO: 1861520 - RNA, 19 nt, Homo sapiens
  misc_RNA (1)...(19): siRNA sense strand
ugaccgaccuggaggacaa

SEQ ID NO: 1861521 - RNA, 19 nt, Homo sapiens
  misc_RNA (1)...(19): siRNA sense strand
ccaaugaugagaccacuga

SEQ ID NO: 1861522 - RNA, 19 nt, Homo sapiens
  misc_RNA (1)...(19): siRNA sense strand
gaagaacugcauugacauc

SEQ ID NO: 1861523 - RNA, 19 nt, Homo sapiens
  misc_RNA (1)...(19): siRNA sense strand
gacaagaacgaguggaaga

SEQ ID NO: 1861524 - RNA, 19 nt, Homo sapiens
  misc_RNA (1)...(19): siRNA sense strand
ucaagucgcccaaagacaa

SEQ ID NO: 1861525 - RNA, 19 nt, Homo sapiens
  misc_RNA (1)...(19): siRNA sense strand
ugacugcggauauaacuga

SEQ ID NO: 1861526 - RNA, 19 nt, Homo sapiens
  misc_RNA (1)...(19): siRNA sense strand
ccucaaagacugggaaaug

SEQ ID NO: 1861527 - RNA, 19 nt, Homo sapiens
  misc_RNA (1)...(19): siRNA sense strand
cuacaccucucuuucuucu

SEQ ID NO: 1861528 - RNA, 19 nt, Homo sapiens
  misc_RNA (1)...(19): siRNA sense strand
ccacuacaccucucuuucu

SEQ ID NO: 1861529 - RNA, 19 nt, Homo sapiens
  misc_RNA (1)...(19): siRNA sense strand
gagacggcaucgccuugug

SEQ ID NO: 1861530 - RNA, 19 nt, Homo sapiens
  misc_RNA (1)...(19): siRNA sense strand
caacagugaacaucucaag

SEQ ID NO: 1861531 - RNA, 19 nt, Homo sapiens
  misc_RNA (1)...(19): siRNA sense strand
cacuacaccucucuuucuu

SEQ ID NO: 1861532 - RNA, 19 nt, Homo sapiens
  misc_RNA (1)...(19): siRNA sense strand
gggccgugguguuccagaa

SEQ ID NO: 1861533 - RNA, 19 nt, Homo sapiens
  misc_RNA (1)...(19): siRNA sense strand
ggucugugacugcggauau

SEQ ID NO: 1861534 - RNA, 19 nt, Homo sapiens
  misc_RNA (1)...(19): siRNA sense strand
ggaagaacugcauugacau

SEQ ID NO: 1861535 - RNA, 19 nt, Homo sapiens
  misc_RNA (1)...(19): siRNA sense strand
gcacagggaagaagaaccu

SEQ ID NO: 1861536 - RNA, 19 nt, Homo sapiens
  misc_RNA (1)...(19): siRNA sense strand
gggaaaugcacguccacuu

SEQ ID NO: 1861537 - RNA, 19 nt, Homo sapiens
  misc_RNA (1)...(19): siRNA sense strand
aaaugcacguccacuucaa

SEQ ID NO: 1861538 - RNA, 19 nt, Homo sapiens
  misc_RNA (1)...(19): siRNA sense strand
ggaaccaccagccgugcuu

SEQ ID NO: 1861539 - RNA, 19 nt, Homo sapiens
  misc_RNA (1)...(19): siRNA sense strand
ucucggugauggugaacaa

SEQ ID NO: 1861540 - RNA, 19 nt, Homo sapiens
  misc_RNA (1)...(19): siRNA sense strand
ccaucuuccuggacaccua

SEQ ID NO: 1861541 - RNA, 19 nt, Homo sapiens
  misc_RNA (1)...(19): siRNA sense strand
cagccgugcuuccucaaag

SEQ ID NO: 1861542 - RNA, 19 nt, Homo sapiens
  misc_RNA (1)...(19): siRNA sense strand
gucugugacugcggauaua

SEQ ID NO: 1861543 - RNA, 19 nt, Homo sapiens
  misc_RNA (1)...(19): siRNA sense strand
gagcgcguguucccguaca

SEQ ID NO: 1861544 - RNA, 19 nt, Homo sapiens
  misc_RNA (1)...(19): siRNA sense strand
agauaacuuccacggcuua

SEQ ID NO: 1861545 - RNA, 19 nt, Homo sapiens
  misc_RNA (1)...(19): siRNA sense strand
ggcaucgccuugugguaca

SEQ ID NO: 1861546 - RNA, 19 nt, Homo sapiens
  misc_RNA (1)...(19): siRNA sense strand
cggcaacagugaacaucuc

SEQ ID NO: 1861547 - RNA, 19 nt, Homo sapiens
  misc_RNA (1)...(19): siRNA sense strand
gcccaccggcuacuacuuc

SEQ ID NO: 1861548 - RNA, 19 nt, Homo sapiens
  misc_RNA (1)...(19): siRNA sense strand
gaguggaagaacugcauug

SEQ ID NO: 1861549 - RNA, 19 nt, Homo sapiens
  misc_RNA (1)...(19): siRNA sense strand
acaagaacgaguggaagaa

SEQ ID NO: 1861550 - RNA, 19 nt, Homo sapiens
  misc_RNA (1)...(19): siRNA sense strand
ggagacggcaucgccuugu

SEQ ID NO: 1861551 - RNA, 19 nt, Homo sapiens
  misc_RNA (1)...(19): siRNA sense strand
gggaagagcuggccagaga

SEQ ID NO: 1861552 - RNA, 19 nt, Homo sapiens
  misc_RNA (1)...(19): siRNA sense strand
ggauucagcucugguuuca

SEQ ID NO: 1861553 - RNA, 19 nt, Homo sapiens
  misc_RNA (1)...(19): siRNA sense strand
gcaagcauccggugcaaug

SEQ ID NO: 1861554 - RNA, 19 nt, Homo sapiens
  misc_RNA (1)...(19): siRNA sense strand
gagagaucaugccaguuga

SEQ ID NO: 1861555 - RNA, 19 nt, Homo sapiens
  misc_RNA (1)...(19): siRNA sense strand
cagauuugguuucagaaug

SEQ ID NO: 1861556 - RNA, 19 nt, Homo sapiens
  misc_RNA (1)...(19): siRNA sense strand
ugagagaucaugccaguug

SEQ ID NO: 1861557 - RNA, 19 nt, Homo sapiens
  misc_RNA (1)...(19): siRNA sense strand
agauuugguuucagaauga

SEQ ID NO: 1861558 - RNA, 19 nt, Homo sapiens
  misc_RNA (1)...(19): siRNA sense strand
ggaccgggaaggcgaauga

SEQ ID NO: 1861559 - RNA, 19 nt, Homo sapiens
  misc_RNA (1)...(19): siRNA sense strand
gaagagcuggccagagaga

SEQ ID NO: 1861560 - RNA, 19 nt, Homo sapiens
  misc_RNA (1)...(19): siRNA sense strand
guccagauuugguuucaga

SEQ ID NO: 1861561 - RNA, 19 nt, Homo sapiens
  misc_RNA (1)...(19): siRNA sense strand
gagcccaggguccagauuu

SEQ ID NO: 1861562 - RNA, 19 nt, Homo sapiens
  misc_RNA (1)...(19): siRNA sense strand
gcuuugagcggaaccugua

SEQ ID NO: 1861563 - RNA, 19 nt, Homo sapiens
  misc_RNA (1)...(19): siRNA sense strand
ugagaaggaucgcuuucca

SEQ ID NO: 1861564 - RNA, 19 nt, Homo sapiens
  misc_RNA (1)...(19): siRNA sense strand
ggaucgcuuuccaggcauu

SEQ ID NO: 1861565 - RNA, 19 nt, Homo sapiens
  misc_RNA (1)...(19): siRNA sense strand
gcauugccaccaaagaaca

SEQ ID NO: 1861566 - RNA, 19 nt, Homo sapiens
  misc_RNA (1)...(19): siRNA sense strand
cgaaagcggacugccauca

SEQ ID NO: 1861567 - RNA, 19 nt, Homo sapiens
  misc_RNA (1)...(19): siRNA sense strand
ggcgaaugauacuccuuuc

SEQ ID NO: 1861568 - RNA, 19 nt, Homo sapiens
  misc_RNA (1)...(19): siRNA sense strand
ccuccgagccuuugagaag

SEQ ID NO: 1861569 - RNA, 19 nt, Homo sapiens
  misc_RNA (1)...(19): siRNA sense strand
gaaagcggacugccaucac

SEQ ID NO: 1861570 - RNA, 19 nt, Homo sapiens
  misc_RNA (1)...(19): siRNA sense strand
gccaucaccggaucccaaa

SEQ ID NO: 1861571 - RNA, 19 nt, Homo sapiens
  misc_RNA (1)...(19): siRNA sense strand
ucgccaagcugauuaaaua

SEQ ID NO: 1861572 - RNA, 19 nt, Homo sapiens
  misc_RNA (1)...(19): siRNA sense strand
acaaagaucugaggaaauu

SEQ ID NO: 1861573 - RNA, 19 nt, Homo sapiens
  misc_RNA (1)...(19): siRNA sense strand
guuccaaguuugcguauaa

SEQ ID NO: 1861574 - RNA, 19 nt, Homo sapiens
  misc_RNA (1)...(19): siRNA sense strand
gaucauccguggcuugaga

SEQ ID NO: 1861575 - RNA, 19 nt, Homo sapiens
  misc_RNA (1)...(19): siRNA sense strand
agacaaaggcaacgaauuu

SEQ ID NO: 1861576 - RNA, 19 nt, Homo sapiens
  misc_RNA (1)...(19): siRNA sense strand
gaaggagcccugaaaauua

SEQ ID NO: 1861577 - RNA, 19 nt, Homo sapiens
  misc_RNA (1)...(19): siRNA sense strand
gaacagccagaaucaguuu

SEQ ID NO: 1861578 - RNA, 19 nt, Homo sapiens
  misc_RNA (1)...(19): siRNA sense strand
acaaugggaucaucacaaa

SEQ ID NO: 1861579 - RNA, 19 nt, Homo sapiens
  misc_RNA (1)...(19): siRNA sense strand
gaccgaauuucacuacaaa

SEQ ID NO: 1861580 - RNA, 19 nt, Homo sapiens
  misc_RNA (1)...(19): siRNA sense strand
cagcaaaucaugaaaggua

SEQ ID NO: 1861581 - RNA, 19 nt, Homo sapiens
  misc_RNA (1)...(19): siRNA sense strand
cagagaaacugaggacauu

SEQ ID NO: 1861582 - RNA, 19 nt, Homo sapiens
  misc_RNA (1)...(19): siRNA sense strand
ugacugagcuuccugugau

SEQ ID NO: 1861583 - RNA, 19 nt, Homo sapiens
  misc_RNA (1)...(19): siRNA sense strand
ucaaggcucucgaugaaga

SEQ ID NO: 1861584 - RNA, 19 nt, Homo sapiens
  misc_RNA (1)...(19): siRNA sense strand
uaaccuacaugcacucaga

SEQ ID NO: 1861585 - RNA, 19 nt, Homo sapiens
  misc_RNA (1)...(19): siRNA sense strand
gaacugcagcaaaucauga

SEQ ID NO: 1861586 - RNA, 19 nt, Homo sapiens
  misc_RNA (1)...(19): siRNA sense strand
uuacaaagaucugaggaaa

SEQ ID NO: 1861587 - RNA, 19 nt, Homo sapiens
  misc_RNA (1)...(19): siRNA sense strand
uaccugagcugaucaagga

SEQ ID NO: 1861588 - RNA, 19 nt, Homo sapiens
  misc_RNA (1)...(19): siRNA sense strand
gaagaacuuuacaaacaag

SEQ ID NO: 1861589 - RNA, 19 nt, Homo sapiens
  misc_RNA (1)...(19): siRNA sense strand
uggagaaugugaagaauau

SEQ ID NO: 1861590 - RNA, 19 nt, Homo sapiens
  misc_RNA (1)...(19): siRNA sense strand
ggaauaaucacgaagucaa

SEQ ID NO: 1861591 - RNA, 19 nt, Homo sapiens
  misc_RNA (1)...(19): siRNA sense strand
aauacaagcucuccacaga

SEQ ID NO: 1861592 - RNA, 19 nt, Homo sapiens
  misc_RNA (1)...(19): siRNA sense strand
aagcaaaggcuacgaguuu

SEQ ID NO: 1861593 - RNA, 19 nt, Homo sapiens
  misc_RNA (1)...(19): siRNA sense strand
acauucagcuggucaagaa

SEQ ID NO: 1861594 - RNA, 19 nt, Homo sapiens
  misc_RNA (1)...(19): siRNA sense strand
ccaagcugauuaaauaugu

SEQ ID NO: 1861595 - RNA, 19 nt, Homo sapiens
  misc_RNA (1)...(19): siRNA sense strand
gaauaaucacgaagucaaa

SEQ ID NO: 1861596 - RNA, 19 nt, Homo sapiens
  misc_RNA (1)...(19): siRNA sense strand
caaggacgauacugaaagu

SEQ ID NO: 1861597 - RNA, 19 nt, Homo sapiens
  misc_RNA (1)...(19): siRNA sense strand
ccacagaacagaucccuau

SEQ ID NO: 1861598 - RNA, 19 nt, Homo sapiens
  misc_RNA (1)...(19): siRNA sense strand
gcuacgaguuugagucaga

SEQ ID NO: 1861599 - RNA, 19 nt, Homo sapiens
  misc_RNA (1)...(19): siRNA sense strand
agucaaggcucucgaugaa

SEQ ID NO: 1861600 - RNA, 19 nt, Homo sapiens
  misc_RNA (1)...(19): siRNA sense strand
caagacagcauggacuuaa

SEQ ID NO: 1861601 - RNA, 19 nt, Homo sapiens
  misc_RNA (1)...(19): siRNA sense strand
ugagaggucgggugaauuu

SEQ ID NO: 1861602 - RNA, 19 nt, Homo sapiens
  misc_RNA (1)...(19): siRNA sense strand
gagacacacuucggcauug

SEQ ID NO: 1861603 - RNA, 19 nt, Homo sapiens
  misc_RNA (1)...(19): siRNA sense strand
cgacaaggccguggaauuc

SEQ ID NO: 1861604 - RNA, 19 nt, Homo sapiens
  misc_RNA (1)...(19): siRNA sense strand
ggaaggagcccugaaaauu

SEQ ID NO: 1861605 - RNA, 19 nt, Homo sapiens
  misc_RNA (1)...(19): siRNA sense strand
aaacugaggacauuacguu

SEQ ID NO: 1861606 - RNA, 19 nt, Homo sapiens
  misc_RNA (1)...(19): siRNA sense strand
uaacuucagugcguuuaug

SEQ ID NO: 1861607 - RNA, 19 nt, Homo sapiens
  misc_RNA (1)...(19): siRNA sense strand
caacguuggucgagagagu

SEQ ID NO: 1861608 - RNA, 19 nt, Homo sapiens
  misc_RNA (1)...(19): siRNA sense strand
ggacgugcacucuggagaa

SEQ ID NO: 1861609 - RNA, 19 nt, Homo sapiens
  misc_RNA (1)...(19): siRNA sense strand
ggagaagauccacgacuug

SEQ ID NO: 1861610 - RNA, 19 nt, Homo sapiens
  misc_RNA (1)...(19): siRNA sense strand
ucaaggaagugcugucucu

SEQ ID NO: 1861611 - RNA, 19 nt, Homo sapiens
  misc_RNA (1)...(19): siRNA sense strand
ggugauguuugguuugaug

SEQ ID NO: 1861612 - RNA, 19 nt, Homo sapiens
  misc_RNA (1)...(19): siRNA sense strand
cgaugaagaacuuuacaaa

SEQ ID NO: 1861613 - RNA, 19 nt, Homo sapiens
  misc_RNA (1)...(19): siRNA sense strand
ugguugaacuugcuaguga

SEQ ID NO: 1861614 - RNA, 19 nt, Homo sapiens
  misc_RNA (1)...(19): siRNA sense strand
ucagugcguuuaugcagaa

SEQ ID NO: 1861615 - RNA, 19 nt, Homo sapiens
  misc_RNA (1)...(19): siRNA sense strand
agauggaacugcagcaaau

SEQ ID NO: 1861616 - RNA, 19 nt, Homo sapiens
  misc_RNA (1)...(19): siRNA sense strand
gagagucauucagcaguug

SEQ ID NO: 1861617 - RNA, 19 nt, Homo sapiens
  misc_RNA (1)...(19): siRNA sense strand
gaaaucuggccaagucugu

SEQ ID NO: 1861618 - RNA, 19 nt, Homo sapiens
  misc_RNA (1)...(19): siRNA sense strand
gcgacaaggccguggaauu

SEQ ID NO: 1861619 - RNA, 19 nt, Homo sapiens
  misc_RNA (1)...(19): siRNA sense strand
uacugaaaguuccaaguuu

SEQ ID NO: 1861620 - RNA, 19 nt, Homo sapiens
  misc_RNA (1)...(19): siRNA sense strand
agagaucgcugcuggugau

SEQ ID NO: 1861621 - RNA, 19 nt, Homo sapiens
  misc_RNA (1)...(19): siRNA sense strand
gaagaccgaauuucacuac

SEQ ID NO: 1861622 - RNA, 19 nt, Homo sapiens
  misc_RNA (1)...(19): siRNA sense strand
ugaaggaccacuugaagga

SEQ ID NO: 1861623 - RNA, 19 nt, Homo sapiens
  misc_RNA (1)...(19): siRNA sense strand
ucacgaagucaaagaaaga

SEQ ID NO: 1861624 - RNA, 19 nt, Homo sapiens
  misc_RNA (1)...(19): siRNA sense strand
cgcaguggcugaugggaaa

SEQ ID NO: 1861625 - RNA, 19 nt, Homo sapiens
  misc_RNA (1)...(19): siRNA sense strand
gaaagucaaggcucucgau

SEQ ID NO: 1861626 - RNA, 19 nt, Homo sapiens
  misc_RNA (1)...(19): siRNA sense strand
gauguuugguuugaugaug

SEQ ID NO: 1861627 - RNA, 19 nt, Homo sapiens
  misc_RNA (1)...(19): siRNA sense strand
gaacuuuacaaacaagaca

SEQ ID NO: 1861628 - RNA, 19 nt, Homo sapiens
  misc_RNA (1)...(19): siRNA sense strand
acugaaaguuccaaguuug

SEQ ID NO: 1861629 - RNA, 19 nt, Homo sapiens
  misc_RNA (1)...(19): siRNA sense strand
gauccuugcuucgccaaau

SEQ ID NO: 1861630 - RNA, 19 nt, Homo sapiens
  misc_RNA (1)...(19): siRNA sense strand
ggacgaggaaggagaucuu

SEQ ID NO: 1861631 - RNA, 19 nt, Homo sapiens
  misc_RNA (1)...(19): siRNA sense strand
gcaguuggaaggugcauuc

SEQ ID NO: 1861632 - RNA, 19 nt, Homo sapiens
  misc_RNA (1)...(19): siRNA sense strand
gaagaauaucuguaagaca

SEQ ID NO: 1861633 - RNA, 19 nt, Homo sapiens
  misc_RNA (1)...(19): siRNA sense strand
agaccgaauuucacuacaa

SEQ ID NO: 1861634 - RNA, 19 nt, Homo sapiens
  misc_RNA (1)...(19): siRNA sense strand
uaugagaggucgggugaau

SEQ ID NO: 1861635 - RNA, 19 nt, Homo sapiens
  misc_RNA (1)...(19): siRNA sense strand
guggaauucuucuuugcuu

SEQ ID NO: 1861636 - RNA, 19 nt, Homo sapiens
  misc_RNA (1)...(19): siRNA sense strand
aaugggaucaucacaaauu

SEQ ID NO: 1861637 - RNA, 19 nt, Homo sapiens
  misc_RNA (1)...(19): siRNA sense strand
gaggauaugacguugacuu

SEQ ID NO: 1861638 - RNA, 19 nt, Homo sapiens
  misc_RNA (1)...(19): siRNA sense strand
gcuccaaggacgauacuga

SEQ ID NO: 1861639 - RNA, 19 nt, Homo sapiens
  misc_RNA (1)...(19): siRNA sense strand
guucagggaugacguuugc

SEQ ID NO: 1861640 - RNA, 19 nt, Homo sapiens
  misc_RNA (1)...(19): siRNA sense strand
gugaagaauaucuguaaga

SEQ ID NO: 1861641 - RNA, 19 nt, Homo sapiens
  misc_RNA (1)...(19): siRNA sense strand
gaccaucgccaagcugauu

SEQ ID NO: 1861642 - RNA, 19 nt, Homo sapiens
  misc_RNA (1)...(19): siRNA sense strand
gucuguaacuguggaauga

SEQ ID NO: 1861643 - RNA, 19 nt, Homo sapiens
  misc_RNA (1)...(19): siRNA sense strand
ugaagaauaucuguaagac

SEQ ID NO: 1861644 - RNA, 19 nt, Homo sapiens
  misc_RNA (1)...(19): siRNA sense strand
cggaaucuuugccuacaug

SEQ ID NO: 1861645 - RNA, 19 nt, Homo sapiens
  misc_RNA (1)...(19): siRNA sense strand
aggagaagauccacgacuu

SEQ ID NO: 1861646 - RNA, 19 nt, Homo sapiens
  misc_RNA (1)...(19): siRNA sense strand
gagaucauccguggcuuga

SEQ ID NO: 1861647 - RNA, 19 nt, Homo sapiens
  misc_RNA (1)...(19): siRNA sense strand
ucaaagaaagacacauuca

SEQ ID NO: 1861648 - RNA, 19 nt, Homo sapiens
  misc_RNA (1)...(19): siRNA sense strand
ggccguggaauucuucuuu

SEQ ID NO: 1861649 - RNA, 19 nt, Homo sapiens
  misc_RNA (1)...(19): siRNA sense strand
ccucagcgcucagacaaag

SEQ ID NO: 1861650 - RNA, 19 nt, Homo sapiens
  misc_RNA (1)...(19): siRNA sense strand
ccagucaguucaucucucu

SEQ ID NO: 1861651 - RNA, 19 nt, Homo sapiens
  misc_RNA (1)...(19): siRNA sense strand
aagacagcauggacuuaaa

SEQ ID NO: 1861652 - RNA, 19 nt, Homo sapiens
  misc_RNA (1)...(19): siRNA sense strand
caaguuugcguauaagaca

SEQ ID NO: 1861653 - RNA, 19 nt, Homo sapiens
  misc_RNA (1)...(19): siRNA sense strand
gccguggaauucuucuuug

SEQ ID NO: 1861654 - RNA, 19 nt, Homo sapiens
  misc_RNA (1)...(19): siRNA sense strand
acaaggccguggaauucuu

SEQ ID NO: 1861655 - RNA, 19 nt, Homo sapiens
  misc_RNA (1)...(19): siRNA sense strand
agagagucauucagcaguu

SEQ ID NO: 1861656 - RNA, 19 nt, Homo sapiens
  misc_RNA (1)...(19): siRNA sense strand
gaugaagaacuuuacaaac

SEQ ID NO: 1861657 - RNA, 19 nt, Homo sapiens
  misc_RNA (1)...(19): siRNA sense strand
ggaacugcagcaaaucaug

SEQ ID NO: 1861658 - RNA, 19 nt, Homo sapiens
  misc_RNA (1)...(19): siRNA sense strand
guaagacacggaugaagag

SEQ ID NO: 1861659 - RNA, 19 nt, Homo sapiens
  misc_RNA (1)...(19): siRNA sense strand
uguaagacacggaugaaga

SEQ ID NO: 1861660 - RNA, 19 nt, Homo sapiens
  misc_RNA (1)...(19): siRNA sense strand
gagaaugugaagaauaucu

SEQ ID NO: 1861661 - RNA, 19 nt, Homo sapiens
  misc_RNA (1)...(19): siRNA sense strand
augggaucaucacaaauua

SEQ ID NO: 1861662 - RNA, 19 nt, Homo sapiens
  misc_RNA (1)...(19): siRNA sense strand
aaggagcccugaaaauuaa

SEQ ID NO: 1861663 - RNA, 19 nt, Homo sapiens
  misc_RNA (1)...(19): siRNA sense strand
gcuccuggguggcuugaag

SEQ ID NO: 1861664 - RNA, 19 nt, Homo sapiens
  misc_RNA (1)...(19): siRNA sense strand
gacgugcacucuggagaau

SEQ ID NO: 1861665 - RNA, 19 nt, Homo sapiens
  misc_RNA (1)...(19): siRNA sense strand
ggcgaucgaugggaauaau

SEQ ID NO: 1861666 - RNA, 19 nt, Homo sapiens
  misc_RNA (1)...(19): siRNA sense strand
gagaaacugaggacauuac

SEQ ID NO: 1861667 - RNA, 19 nt, Homo sapiens
  misc_RNA (1)...(19): siRNA sense strand
gggaucaucacaaauuaca

SEQ ID NO: 1861668 - RNA, 19 nt, Homo sapiens
  misc_RNA (1)...(19): siRNA sense strand
cgaugggaauaaucacgaa

SEQ ID NO: 1861669 - RNA, 19 nt, Homo sapiens
  misc_RNA (1)...(19): siRNA sense strand
gaagucaaagaaagacaca

SEQ ID NO: 1861670 - RNA, 19 nt, Homo sapiens
  misc_RNA (1)...(19): siRNA sense strand
gcuuauaccagucaguuca

SEQ ID NO: 1861671 - RNA, 19 nt, Homo sapiens
  misc_RNA (1)...(19): siRNA sense strand
ggagagagaucuuaaacga

SEQ ID NO: 1861672 - RNA, 19 nt, Homo sapiens
  misc_RNA (1)...(19): siRNA sense strand
ggacaaagcuaagggaaga

SEQ ID NO: 1861673 - RNA, 19 nt, Homo sapiens
  misc_RNA (1)...(19): siRNA sense strand
gagaagaauuuccgaguga

SEQ ID NO: 1861674 - RNA, 19 nt, Homo sapiens
  misc_RNA (1)...(19): siRNA sense strand
gaaacuaccgcucaaauug

SEQ ID NO: 1861675 - RNA, 19 nt, Homo sapiens
  misc_RNA (1)...(19): siRNA sense strand
ggagauggaugaucaagau

SEQ ID NO: 1861676 - RNA, 19 nt, Homo sapiens
  misc_RNA (1)...(19): siRNA sense strand
gguauaagcuccgagauga

SEQ ID NO: 1861677 - RNA, 19 nt, Homo sapiens
  misc_RNA (1)...(19): siRNA sense strand
gagaugacuuugagaagaa

SEQ ID NO: 1861678 - RNA, 19 nt, Homo sapiens
  misc_RNA (1)...(19): siRNA sense strand
gagaagagaaggacaauau

SEQ ID NO: 1861679 - RNA, 19 nt, Homo sapiens
  misc_RNA (1)...(19): siRNA sense strand
gaacccaaauuuaugucua

SEQ ID NO: 1861680 - RNA, 19 nt, Homo sapiens
  misc_RNA (1)...(19): siRNA sense strand
gaaaggaaucugaguuuga

SEQ ID NO: 1861681 - RNA, 19 nt, Homo sapiens
  misc_RNA (1)...(19): siRNA sense strand
gacauuacaugaacgcuuu

SEQ ID NO: 1861682 - RNA, 19 nt, Homo sapiens
  misc_RNA (1)...(19): siRNA sense strand
gaugaugaacccaaauuua

SEQ ID NO: 1861683 - RNA, 19 nt, Homo sapiens
  misc_RNA (1)...(19): siRNA sense strand
caacauauagugaccauug

SEQ ID NO: 1861684 - RNA, 19 nt, Homo sapiens
  misc_RNA (1)...(19): siRNA sense strand
gaagaaaggaaucugaguu

SEQ ID NO: 1861685 - RNA, 19 nt, Homo sapiens
  misc_RNA (1)...(19): siRNA sense strand
gaucaaagaaacagaagaa

SEQ ID NO: 1861686 - RNA, 19 nt, Homo sapiens
  misc_RNA (1)...(19): siRNA sense strand
aaagggagcuucucugaca

SEQ ID NO: 1861687 - RNA, 19 nt, Homo sapiens
  misc_RNA (1)...(19): siRNA sense strand
agucauaggugcaaacaaa

SEQ ID NO: 1861688 - RNA, 19 nt, Homo sapiens
  misc_RNA (1)...(19): siRNA sense strand
ggaaacuaccgcucaaauu

SEQ ID NO: 1861689 - RNA, 19 nt, Homo sapiens
  misc_RNA (1)...(19): siRNA sense strand
cgaggaaccuuucaguuuc

SEQ ID NO: 1861690 - RNA, 19 nt, Homo sapiens
  misc_RNA (1)...(19): siRNA sense strand
gaaagaaaccacccaagag

SEQ ID NO: 1861691 - RNA, 19 nt, Homo sapiens
  misc_RNA (1)...(19): siRNA sense strand
auacaaagaugauccuguu

SEQ ID NO: 1861692 - RNA, 19 nt, Homo sapiens
  misc_RNA (1)...(19): siRNA sense strand
ggagcagccuauacaaaga

SEQ ID NO: 1861693 - RNA, 19 nt, Homo sapiens
  misc_RNA (1)...(19): siRNA sense strand
aaucugaguuugaugauga

SEQ ID NO: 1861694 - RNA, 19 nt, Homo sapiens
  misc_RNA (1)...(19): siRNA sense strand
caacuacucugggaacaau

SEQ ID NO: 1861695 - RNA, 19 nt, Homo sapiens
  misc_RNA (1)...(19): siRNA sense strand
agaagaagauggcugacuu

SEQ ID NO: 1861696 - RNA, 19 nt, Homo sapiens
  misc_RNA (1)...(19): siRNA sense strand
ccgagugacugcuuauaaa

SEQ ID NO: 1861697 - RNA, 19 nt, Homo sapiens
  misc_RNA (1)...(19): siRNA sense strand
acauauggcucaucucaga

SEQ ID NO: 1861698 - RNA, 19 nt, Homo sapiens
  misc_RNA (1)...(19): siRNA sense strand
cgagguaaaucgagagaau

SEQ ID NO: 1861699 - RNA, 19 nt, Homo sapiens
  misc_RNA (1)...(19): siRNA sense strand
cgagaugacuuugagaaga

SEQ ID NO: 1861700 - RNA, 19 nt, Homo sapiens
  misc_RNA (1)...(19): siRNA sense strand
acaaagagguaucuagaag

SEQ ID NO: 1861701 - RNA, 19 nt, Homo sapiens
  misc_RNA (1)...(19): siRNA sense strand
caaagaugauccuguugau

SEQ ID NO: 1861702 - RNA, 19 nt, Homo sapiens
  misc_RNA (1)...(19): siRNA sense strand
gauaaggaacagaaacaaa

SEQ ID NO: 1861703 - RNA, 19 nt, Homo sapiens
  misc_RNA (1)...(19): siRNA sense strand
cauaaaggaucaaagaaac

SEQ ID NO: 1861704 - RNA, 19 nt, Homo sapiens
  misc_RNA (1)...(19): siRNA sense strand
caaagaaacagaagaagca

SEQ ID NO: 1861705 - RNA, 19 nt, Homo sapiens
  misc_RNA (1)...(19): siRNA sense strand
ggacagagaaccgagaaga

SEQ ID NO: 1861706 - RNA, 19 nt, Homo sapiens
  misc_RNA (1)...(19): siRNA sense strand
gaagagaaggacaauauac

SEQ ID NO: 1861707 - RNA, 19 nt, Homo sapiens
  misc_RNA (1)...(19): siRNA sense strand
gcucauaacagagaaagaa

SEQ ID NO: 1861708 - RNA, 19 nt, Homo sapiens
  misc_RNA (1)...(19): siRNA sense strand
gaggagaagucaggcaaau

SEQ ID NO: 1861709 - RNA, 19 nt, Homo sapiens
  misc_RNA (1)...(19): siRNA sense strand
uagaagagcagaagacaga

SEQ ID NO: 1861710 - RNA, 19 nt, Homo sapiens
  misc_RNA (1)...(19): siRNA sense strand
ucacgggccucagcaguuu

SEQ ID NO: 1861711 - RNA, 19 nt, Homo sapiens
  misc_RNA (1)...(19): siRNA sense strand
agaauuaccggcaagcaua

SEQ ID NO: 1861712 - RNA, 19 nt, Homo sapiens
  misc_RNA (1)...(19): siRNA sense strand
gcagaagaguacacugaag

SEQ ID NO: 1861713 - RNA, 19 nt, Homo sapiens
  misc_RNA (1)...(19): siRNA sense strand
gaucuccgccuugauauug

SEQ ID NO: 1861714 - RNA, 19 nt, Homo sapiens
  misc_RNA (1)...(19): siRNA sense strand
guugaucuccgccuugaua

SEQ ID NO: 1861715 - RNA, 19 nt, Homo sapiens
  misc_RNA (1)...(19): siRNA sense strand
caaaugggagggccuggua

SEQ ID NO: 1861716 - RNA, 19 nt, Homo sapiens
  misc_RNA (1)...(19): siRNA sense strand
gaaaccacccaagaguaua

SEQ ID NO: 1861717 - RNA, 19 nt, Homo sapiens
  misc_RNA (1)...(19): siRNA sense strand
gagauacacaggagaauag

SEQ ID NO: 1861718 - RNA, 19 nt, Homo sapiens
  misc_RNA (1)...(19): siRNA sense strand
cucaagaucugcaucaaga

SEQ ID NO: 1861719 - RNA, 19 nt, Homo sapiens
  misc_RNA (1)...(19): siRNA sense strand
ggaggagagugcugcuuca

SEQ ID NO: 1861720 - RNA, 19 nt, Homo sapiens
  misc_RNA (1)...(19): siRNA sense strand
ucgaggaaccuuucaguuu

SEQ ID NO: 1861721 - RNA, 19 nt, Homo sapiens
  misc_RNA (1)...(19): siRNA sense strand
gaucuuaaacgagguaaau

SEQ ID NO: 1861722 - RNA, 19 nt, Homo sapiens
  misc_RNA (1)...(19): siRNA sense strand
gaccauuguucaccauguu

SEQ ID NO: 1861723 - RNA, 19 nt, Homo sapiens
  misc_RNA (1)...(19): siRNA sense strand
gaaaagauaaggaacagaa

SEQ ID NO: 1861724 - RNA, 19 nt, Homo sapiens
  misc_RNA (1)...(19): siRNA sense strand
gaggagcagccuauacaaa

SEQ ID NO: 1861725 - RNA, 19 nt, Homo sapiens
  misc_RNA (1)...(19): siRNA sense strand
cauauucuccagcucauaa

SEQ ID NO: 1861726 - RNA, 19 nt, Homo sapiens
  misc_RNA (1)...(19): siRNA sense strand
cuacaaagcagaagaguac

SEQ ID NO: 1861727 - RNA, 19 nt, Homo sapiens
  misc_RNA (1)...(19): siRNA sense strand
gccgagaucuaguccauag

SEQ ID NO: 1861728 - RNA, 19 nt, Homo sapiens
  misc_RNA (1)...(19): siRNA sense strand
ggagaagucaggcaaaugg

SEQ ID NO: 1861729 - RNA, 19 nt, Homo sapiens
  misc_RNA (1)...(19): siRNA sense strand
aaaggaaucugaguuugau

SEQ ID NO: 1861730 - RNA, 19 nt, Homo sapiens
  misc_RNA (1)...(19): siRNA sense strand
aaaccuaguccuccacuuu

SEQ ID NO: 1861731 - RNA, 19 nt, Homo sapiens
  misc_RNA (1)...(19): siRNA sense strand
aaagagguaucuagaagag

SEQ ID NO: 1861732 - RNA, 19 nt, Homo sapiens
  misc_RNA (1)...(19): siRNA sense strand
caagauaaggacaaagcua

SEQ ID NO: 1861733 - RNA, 19 nt, Homo sapiens
  misc_RNA (1)...(19): siRNA sense strand
agaaagaaaccacccaaga

SEQ ID NO: 1861734 - RNA, 19 nt, Homo sapiens
  misc_RNA (1)...(19): siRNA sense strand
uacaugaacgcuuuacuaa

SEQ ID NO: 1861735 - RNA, 19 nt, Homo sapiens
  misc_RNA (1)...(19): siRNA sense strand
uuacaugaacgcuuuacua

SEQ ID NO: 1861736 - RNA, 19 nt, Homo sapiens
  misc_RNA (1)...(19): siRNA sense strand
gcucaggaacgcaagcuuu

SEQ ID NO: 1861737 - RNA, 19 nt, Homo sapiens
  misc_RNA (1)...(19): siRNA sense strand
gaugaacccaaauuuaugu

SEQ ID NO: 1861738 - RNA, 19 nt, Homo sapiens
  misc_RNA (1)...(19): siRNA sense strand
ccacauauggcucaucuca

SEQ ID NO: 1861739 - RNA, 19 nt, Homo sapiens
  misc_RNA (1)...(19): siRNA sense strand
ccaagaguauaucagaauc

SEQ ID NO: 1861740 - RNA, 19 nt, Homo sapiens
  misc_RNA (1)...(19): siRNA sense strand
ccaaaagcaagaaguauua

SEQ ID NO: 1861741 - RNA, 19 nt, Homo sapiens
  misc_RNA (1)...(19): siRNA sense strand
caagaaaagcccagagaua

SEQ ID NO: 1861742 - RNA, 19 nt, Homo sapiens
  misc_RNA (1)...(19): siRNA sense strand
gggagggccugguauaugc

SEQ ID NO: 1861743 - RNA, 19 nt, Homo sapiens
  misc_RNA (1)...(19): siRNA sense strand
gauggaugaucaagauaag

SEQ ID NO: 1861744 - RNA, 19 nt, Homo sapiens
  misc_RNA (1)...(19): siRNA sense strand
gcgaagcccagcucucaaa

SEQ ID NO: 1861745 - RNA, 19 nt, Homo sapiens
  misc_RNA (1)...(19): siRNA sense strand
uagaaggcccuauuauuuc

SEQ ID NO: 1861746 - RNA, 19 nt, Homo sapiens
  misc_RNA (1)...(19): siRNA sense strand
agagaaaacucauaaagga

SEQ ID NO: 1861747 - RNA, 19 nt, Homo sapiens
  misc_RNA (1)...(19): siRNA sense strand
gagaggcacaggucaaugu

SEQ ID NO: 1861748 - RNA, 19 nt, Homo sapiens
  misc_RNA (1)...(19): siRNA sense strand
auaaagcaguccaggagaa

SEQ ID NO: 1861749 - RNA, 19 nt, Homo sapiens
  misc_RNA (1)...(19): siRNA sense strand
aagaaaggaaucugaguuu

SEQ ID NO: 1861750 - RNA, 19 nt, Homo sapiens
  misc_RNA (1)...(19): siRNA sense strand
gcaccucucaagauacaaa

SEQ ID NO: 1861751 - RNA, 19 nt, Homo sapiens
  misc_RNA (1)...(19): siRNA sense strand
ucuagaaacucugauaagu

SEQ ID NO: 1861752 - RNA, 19 nt, Homo sapiens
  misc_RNA (1)...(19): siRNA sense strand
gaaucugaguuugaugaug

SEQ ID NO: 1861753 - RNA, 19 nt, Homo sapiens
  misc_RNA (1)...(19): siRNA sense strand
agaaaggaaucugaguuug

SEQ ID NO: 1861754 - RNA, 19 nt, Homo sapiens
  misc_RNA (1)...(19): siRNA sense strand
aggaggagauggaugauca

SEQ ID NO: 1861755 - RNA, 19 nt, Homo sapiens
  misc_RNA (1)...(19): siRNA sense strand
caaagagguaucuagaaga

SEQ ID NO: 1861756 - RNA, 19 nt, Homo sapiens
  misc_RNA (1)...(19): siRNA sense strand
gcaagucugcaaaggagaa

SEQ ID NO: 1861757 - RNA, 19 nt, Homo sapiens
  misc_RNA (1)...(19): siRNA sense strand
gaagagcagaagacagaga

SEQ ID NO: 1861758 - RNA, 19 nt, Homo sapiens
  misc_RNA (1)...(19): siRNA sense strand
acaaggaggagauggauga

SEQ ID NO: 1861759 - RNA, 19 nt, Homo sapiens
  misc_RNA (1)...(19): siRNA sense strand
gcuccgagaugacuuugag

SEQ ID NO: 1861760 - RNA, 19 nt, Homo sapiens
  misc_RNA (1)...(19): siRNA sense strand
gacacaggcuugggugaug

SEQ ID NO: 1861761 - RNA, 19 nt, Homo sapiens
  misc_RNA (1)...(19): siRNA sense strand
agaagagaaggacaauaua

SEQ ID NO: 1861762 - RNA, 19 nt, Homo sapiens
  misc_RNA (1)...(19): siRNA sense strand
caagugggcccaugacaag

SEQ ID NO: 1861763 - RNA, 19 nt, Homo sapiens
  misc_RNA (1)...(19): siRNA sense strand
agaguacacugaagagaca

SEQ ID NO: 1861764 - RNA, 19 nt, Homo sapiens
  misc_RNA (1)...(19): siRNA sense strand
gcaagagacagguccagau

SEQ ID NO: 1861765 - RNA, 19 nt, Homo sapiens
  misc_RNA (1)...(19): siRNA sense strand
gcuacaaggcugagggaaa

SEQ ID NO: 1861766 - RNA, 19 nt, Homo sapiens
  misc_RNA (1)...(19): siRNA sense strand
gcaucaagaucucguucuc

SEQ ID NO: 1861767 - RNA, 19 nt, Homo sapiens
  misc_RNA (1)...(19): siRNA sense strand
aagauaaggacaaagcuaa

SEQ ID NO: 1861768 - RNA, 19 nt, Homo sapiens
  misc_RNA (1)...(19): siRNA sense strand
acaaagaugauccuguuga

SEQ ID NO: 1861769 - RNA, 19 nt, Homo sapiens
  misc_RNA (1)...(19): siRNA sense strand
gaagaguacacugaagaga

SEQ ID NO: 1861770 - RNA, 19 nt, Homo sapiens
  misc_RNA (1)...(19): siRNA sense strand
cagaagaguacacugaaga

SEQ ID NO: 1861771 - RNA, 19 nt, Homo sapiens
  misc_RNA (1)...(19): siRNA sense strand
ggaaauaguucuaguauag

SEQ ID NO: 1861772 - RNA, 19 nt, Homo sapiens
  misc_RNA (1)...(19): siRNA sense strand
gaucaaagguggauucuug

SEQ ID NO: 1861773 - RNA, 19 nt, Homo sapiens
  misc_RNA (1)...(19): siRNA sense strand
gaaguaauauggaucaaga

SEQ ID NO: 1861774 - RNA, 19 nt, Homo sapiens
  misc_RNA (1)...(19): siRNA sense strand
gcacaagucugcagauaug

SEQ ID NO: 1861775 - RNA, 19 nt, Homo sapiens
  misc_RNA (1)...(19): siRNA sense strand
ggacagaaauauaauguuc

SEQ ID NO: 1861776 - RNA, 19 nt, Homo sapiens
  misc_RNA (1)...(19): siRNA sense strand
ggaagaagcacgacucuaa

SEQ ID NO: 1861777 - RNA, 19 nt, Homo sapiens
  misc_RNA (1)...(19): siRNA sense strand
caaauaaacuaccuucguu

SEQ ID NO: 1861778 - RNA, 19 nt, Homo sapiens
  misc_RNA (1)...(19): siRNA sense strand
ggaagaagaugaagccaau

SEQ ID NO: 1861779 - RNA, 19 nt, Homo sapiens
  misc_RNA (1)...(19): siRNA sense strand
ggaaguaccuaauauucuu

SEQ ID NO: 1861780 - RNA, 19 nt, Homo sapiens
  misc_RNA (1)...(19): siRNA sense strand
gaauggguaucuuugauuu

SEQ ID NO: 1861781 - RNA, 19 nt, Homo sapiens
  misc_RNA (1)...(19): siRNA sense strand
ucaaagaccuggaagaaga

SEQ ID NO: 1861782 - RNA, 19 nt, Homo sapiens
  misc_RNA (1)...(19): siRNA sense strand
caagaucagugcacuaauu

SEQ ID NO: 1861783 - RNA, 19 nt, Homo sapiens
  misc_RNA (1)...(19): siRNA sense strand
ggaaacaguucuauccuau

SEQ ID NO: 1861784 - RNA, 19 nt, Homo sapiens
  misc_RNA (1)...(19): siRNA sense strand
gaagagaauuguggauauu

SEQ ID NO: 1861785 - RNA, 19 nt, Homo sapiens
  misc_RNA (1)...(19): siRNA sense strand
gcacacagucuuuauguaa

SEQ ID NO: 1861786 - RNA, 19 nt, Homo sapiens
  misc_RNA (1)...(19): siRNA sense strand
gugcagcaauaucaaauua

SEQ ID NO: 1861787 - RNA, 19 nt, Homo sapiens
  misc_RNA (1)...(19): siRNA sense strand
gcaccgaaauggcaaauuc

SEQ ID NO: 1861788 - RNA, 19 nt, Homo sapiens
  misc_RNA (1)...(19): siRNA sense strand
ggacaggcauucaagaugu

SEQ ID NO: 1861789 - RNA, 19 nt, Homo sapiens
  misc_RNA (1)...(19): siRNA sense strand
acaagucagucuuugauua

SEQ ID NO: 1861790 - RNA, 19 nt, Homo sapiens
  misc_RNA (1)...(19): siRNA sense strand
gauaaucucuucaauucug

SEQ ID NO: 1861791 - RNA, 19 nt, Homo sapiens
  misc_RNA (1)...(19): siRNA sense strand
agaauggacuuuccuauga

SEQ ID NO: 1861792 - RNA, 19 nt, Homo sapiens
  misc_RNA (1)...(19): siRNA sense strand
ucaaauauccgaacuaaug

SEQ ID NO: 1861793 - RNA, 19 nt, Homo sapiens
  misc_RNA (1)...(19): siRNA sense strand
caaagcaguucacaaucua

SEQ ID NO: 1861794 - RNA, 19 nt, Homo sapiens
  misc_RNA (1)...(19): siRNA sense strand
gcagacaucucagcuaaau

SEQ ID NO: 1861795 - RNA, 19 nt, Homo sapiens
  misc_RNA (1)...(19): siRNA sense strand
caagaguacuguuucugua

SEQ ID NO: 1861796 - RNA, 19 nt, Homo sapiens
  misc_RNA (1)...(19): siRNA sense strand
ugaagaagaugcuauguca

SEQ ID NO: 1861797 - RNA, 19 nt, Homo sapiens
  misc_RNA (1)...(19): siRNA sense strand
ugaaggagaugucugaaga

SEQ ID NO: 1861798 - RNA, 19 nt, Homo sapiens
  misc_RNA (1)...(19): siRNA sense strand
uggaaacaauucaggauua

SEQ ID NO: 1861799 - RNA, 19 nt, Homo sapiens
  misc_RNA (1)...(19): siRNA sense strand
gaacuaaugauguagcaaa

SEQ ID NO: 1861800 - RNA, 19 nt, Homo sapiens
  misc_RNA (1)...(19): siRNA sense strand
caacuugaauaguggagua

SEQ ID NO: 1861801 - RNA, 19 nt, Homo sapiens
  misc_RNA (1)...(19): siRNA sense strand
gaccacagcuucaacuuca

SEQ ID NO: 1861802 - RNA, 19 nt, Homo sapiens
  misc_RNA (1)...(19): siRNA sense strand
gaaggaaauaguucuagua

SEQ ID NO: 1861803 - RNA, 19 nt, Homo sapiens
  misc_RNA (1)...(19): siRNA sense strand
gcucaugucucccaauuca

SEQ ID NO: 1861804 - RNA, 19 nt, Homo sapiens
  misc_RNA (1)...(19): siRNA sense strand
guaccaguguggaaauuaa

SEQ ID NO: 1861805 - RNA, 19 nt, Homo sapiens
  misc_RNA (1)...(19): siRNA sense strand
gagcgugacuguugcaaug

SEQ ID NO: 1861806 - RNA, 19 nt, Homo sapiens
  misc_RNA (1)...(19): siRNA sense strand
gaauauggcacugcuuaua

SEQ ID NO: 1861807 - RNA, 19 nt, Homo sapiens
  misc_RNA (1)...(19): siRNA sense strand
gaauggacuuuccuaugaa

SEQ ID NO: 1861808 - RNA, 19 nt, Homo sapiens
  misc_RNA (1)...(19): siRNA sense strand
uggagaagcuggacagaaa

SEQ ID NO: 1861809 - RNA, 19 nt, Homo sapiens
  misc_RNA (1)...(19): siRNA sense strand
uaaccaacaucaaccugua

SEQ ID NO: 1861810 - RNA, 19 nt, Homo sapiens
  misc_RNA (1)...(19): siRNA sense strand
ggguaucuuugauuuguua

SEQ ID NO: 1861811 - RNA, 19 nt, Homo sapiens
  misc_RNA (1)...(19): siRNA sense strand
gcaugaagauagagaaauc

SEQ ID NO: 1861812 - RNA, 19 nt, Homo sapiens
  misc_RNA (1)...(19): siRNA sense strand
ggaaacaauucaggauuau

SEQ ID NO: 1861813 - RNA, 19 nt, Homo sapiens
  misc_RNA (1)...(19): siRNA sense strand
ggauagaguuuggcaagaa

SEQ ID NO: 1861814 - RNA, 19 nt, Homo sapiens
  misc_RNA (1)...(19): siRNA sense strand
gcagugcaccuccuaguaa

SEQ ID NO: 1861815 - RNA, 19 nt, Homo sapiens
  misc_RNA (1)...(19): siRNA sense strand
gaagcacgacucuaaauau

SEQ ID NO: 1861816 - RNA, 19 nt, Homo sapiens
  misc_RNA (1)...(19): siRNA sense strand
gaucaaagaccuggaagaa

SEQ ID NO: 1861817 - RNA, 19 nt, Homo sapiens
  misc_RNA (1)...(19): siRNA sense strand
gaaccuacaguauauguug

SEQ ID NO: 1861818 - RNA, 19 nt, Homo sapiens
  misc_RNA (1)...(19): siRNA sense strand
gaacagagcacagaacaag

SEQ ID NO: 1861819 - RNA, 19 nt, Homo sapiens
  misc_RNA (1)...(19): siRNA sense strand
caaaucaugugguggauag

SEQ ID NO: 1861820 - RNA, 19 nt, Homo sapiens
  misc_RNA (1)...(19): siRNA sense strand
ugacaggaauuaaguggaa

SEQ ID NO: 1861821 - RNA, 19 nt, Homo sapiens
  misc_RNA (1)...(19): siRNA sense strand
gaaauuaaccaacaucaac

SEQ ID NO: 1861822 - RNA, 19 nt, Homo sapiens
  misc_RNA (1)...(19): siRNA sense strand
gaagaagcacgacucuaaa

SEQ ID NO: 1861823 - RNA, 19 nt, Homo sapiens
  misc_RNA (1)...(19): siRNA sense strand
gcaaggcucuuuuguuauu

SEQ ID NO: 1861824 - RNA, 19 nt, Homo sapiens
  misc_RNA (1)...(19): siRNA sense strand
gaagcuggacagaaauaua

SEQ ID NO: 1861825 - RNA, 19 nt, Homo sapiens
  misc_RNA (1)...(19): siRNA sense strand
gacaucagcucuacagaca

SEQ ID NO: 1861826 - RNA, 19 nt, Homo sapiens
  misc_RNA (1)...(19): siRNA sense strand
gcagcgagcagcacuauga

SEQ ID NO: 1861827 - RNA, 19 nt, Homo sapiens
  misc_RNA (1)...(19): siRNA sense strand
caaagagggugauggaagu

SEQ ID NO: 1861828 - RNA, 19 nt, Homo sapiens
  misc_RNA (1)...(19): siRNA sense strand
ugaaggagaugaggaauuc

SEQ ID NO: 1861829 - RNA, 19 nt, Homo sapiens
  misc_RNA (1)...(19): siRNA sense strand
gcaguaaacuuggaagaag

SEQ ID NO: 1861830 - RNA, 19 nt, Homo sapiens
  misc_RNA (1)...(19): siRNA sense strand
gaagauaggauagacaguu

SEQ ID NO: 1861831 - RNA, 19 nt, Homo sapiens
  misc_RNA (1)...(19): siRNA sense strand
caacaaugauggagcagau

SEQ ID NO: 1861832 - RNA, 19 nt, Homo sapiens
  misc_RNA (1)...(19): siRNA sense strand
aaauagggcucgucggaaa

SEQ ID NO: 1861833 - RNA, 19 nt, Homo sapiens
  misc_RNA (1)...(19): siRNA sense strand
ggagaaucaucuucacuuc

SEQ ID NO: 1861834 - RNA, 19 nt, Homo sapiens
  misc_RNA (1)...(19): siRNA sense strand
gaacuaacaccuggaucua

SEQ ID NO: 1861835 - RNA, 19 nt, Homo sapiens
  misc_RNA (1)...(19): siRNA sense strand
ccaaagcaguucacaaucu

SEQ ID NO: 1861836 - RNA, 19 nt, Homo sapiens
  misc_RNA (1)...(19): siRNA sense strand
gaaaugguccagacucuuc

SEQ ID NO: 1861837 - RNA, 19 nt, Homo sapiens
  misc_RNA (1)...(19): siRNA sense strand
ggacagcucucuacuuucc

SEQ ID NO: 1861838 - RNA, 19 nt, Homo sapiens
  misc_RNA (1)...(19): siRNA sense strand
gggcgucaguucauggaua

SEQ ID NO: 1861839 - RNA, 19 nt, Homo sapiens
  misc_RNA (1)...(19): siRNA sense strand
gaagcacaauauaggugua

SEQ ID NO: 1861840 - RNA, 19 nt, Homo sapiens
  misc_RNA (1)...(19): siRNA sense strand
gaauaugguaguauggaua

SEQ ID NO: 1861841 - RNA, 19 nt, Homo sapiens
  misc_RNA (1)...(19): siRNA sense strand
gaagaugaagccaauauag

SEQ ID NO: 1861842 - RNA, 19 nt, Homo sapiens
  misc_RNA (1)...(19): siRNA sense strand
gagcacagaacaagaagaa

SEQ ID NO: 1861843 - RNA, 19 nt, Homo sapiens
  misc_RNA (1)...(19): siRNA sense strand
gcacgacucuaaauaugca

SEQ ID NO: 1861844 - RNA, 19 nt, Homo sapiens
  misc_RNA (1)...(19): siRNA sense strand
ccgcaaggcucuuuuguua

SEQ ID NO: 1861845 - RNA, 19 nt, Homo sapiens
  misc_RNA (1)...(19): siRNA sense strand
ggagaaacauuuggagaag

SEQ ID NO: 1861846 - RNA, 19 nt, Homo sapiens
  misc_RNA (1)...(19): siRNA sense strand
gaucagugcacuaauuuau

SEQ ID NO: 1861847 - RNA, 19 nt, Homo sapiens
  misc_RNA (1)...(19): siRNA sense strand
gaagaugaacuagauauca

SEQ ID NO: 1861848 - RNA, 19 nt, Homo sapiens
  misc_RNA (1)...(19): siRNA sense strand
cgucagaguuggacuguug

SEQ ID NO: 1861849 - RNA, 19 nt, Homo sapiens
  misc_RNA (1)...(19): siRNA sense strand
gcacugcagaucuucauaa

SEQ ID NO: 1861850 - RNA, 19 nt, Homo sapiens
  misc_RNA (1)...(19): siRNA sense strand
cauaagcacugcagaucuu

SEQ ID NO: 1861851 - RNA, 19 nt, Homo sapiens
  misc_RNA (1)...(19): siRNA sense strand
agaagaugcuaugucauua

SEQ ID NO: 1861852 - RNA, 19 nt, Homo sapiens
  misc_RNA (1)...(19): siRNA sense strand
gaacaagaaccuaaaauug

SEQ ID NO: 1861853 - RNA, 19 nt, Homo sapiens
  misc_RNA (1)...(19): siRNA sense strand
gugauaaauucaaggauga

SEQ ID NO: 1861854 - RNA, 19 nt, Homo sapiens
  misc_RNA (1)...(19): siRNA sense strand
caauauagccuggaaguau

SEQ ID NO: 1861855 - RNA, 19 nt, Homo sapiens
  misc_RNA (1)...(19): siRNA sense strand
uggcaagaaugcaauauga

SEQ ID NO: 1861856 - RNA, 19 nt, Homo sapiens
  misc_RNA (1)...(19): siRNA sense strand
cauggaaacugcccuuaga

SEQ ID NO: 1861857 - RNA, 19 nt, Homo sapiens
  misc_RNA (1)...(19): siRNA sense strand
caccugcaauuguuguuua

SEQ ID NO: 1861858 - RNA, 19 nt, Homo sapiens
  misc_RNA (1)...(19): siRNA sense strand
aaugaagccuuguuaaaug

SEQ ID NO: 1861859 - RNA, 19 nt, Homo sapiens
  misc_RNA (1)...(19): siRNA sense strand
gauaacaugucaggaggaa

SEQ ID NO: 1861860 - RNA, 19 nt, Homo sapiens
  misc_RNA (1)...(19): siRNA sense strand
uauccgaacuaaugaugua

SEQ ID NO: 1861861 - RNA, 19 nt, Homo sapiens
  misc_RNA (1)...(19): siRNA sense strand
ugacuuaucagaagaagaa

SEQ ID NO: 1861862 - RNA, 19 nt, Homo sapiens
  misc_RNA (1)...(19): siRNA sense strand
ucaaagacauguguagaau

SEQ ID NO: 1861863 - RNA, 19 nt, Homo sapiens
  misc_RNA (1)...(19): siRNA sense strand
gagaagcuggacagaaaua

SEQ ID NO: 1861864 - RNA, 19 nt, Homo sapiens
  misc_RNA (1)...(19): siRNA sense strand
caacagacaucagcucuac

SEQ ID NO: 1861865 - RNA, 19 nt, Homo sapiens
  misc_RNA (1)...(19): siRNA sense strand
uuagagaucuuacugcaau

SEQ ID NO: 1861866 - RNA, 19 nt, Homo sapiens
  misc_RNA (1)...(19): siRNA sense strand
cauuugcucuuccuuauug

SEQ ID NO: 1861867 - RNA, 19 nt, Homo sapiens
  misc_RNA (1)...(19): siRNA sense strand
ggccgaggcucuuauggaa

SEQ ID NO: 1861868 - RNA, 19 nt, Homo sapiens
  misc_RNA (1)...(19): siRNA sense strand
ugaacuagauaucauagga

SEQ ID NO: 1861869 - RNA, 19 nt, Homo sapiens
  misc_RNA (1)...(19): siRNA sense strand
ugacugcuaccuugcauua

SEQ ID NO: 1861870 - RNA, 19 nt, Homo sapiens
  misc_RNA (1)...(19): siRNA sense strand
caaaucagacuucagaugu

SEQ ID NO: 1861871 - RNA, 19 nt, Homo sapiens
  misc_RNA (1)...(19): siRNA sense strand
ggaaaucugucacaucgua

SEQ ID NO: 1861872 - RNA, 19 nt, Homo sapiens
  misc_RNA (1)...(19): siRNA sense strand
caucaacacuuucauggua

SEQ ID NO: 1861873 - RNA, 19 nt, Homo sapiens
  misc_RNA (1)...(19): siRNA sense strand
gaccagaucucccuucuca

SEQ ID NO: 1861874 - RNA, 19 nt, Homo sapiens
  misc_RNA (1)...(19): siRNA sense strand
uuaaugcgcugacuuguga

SEQ ID NO: 1861875 - RNA, 19 nt, Homo sapiens
  misc_RNA (1)...(19): siRNA sense strand
gcaaacaccugugcaacug

SEQ ID NO: 1861876 - RNA, 19 nt, Homo sapiens
  misc_RNA (1)...(19): siRNA sense strand
ucgcagacaucaacacuuu

SEQ ID NO: 1861877 - RNA, 19 nt, Homo sapiens
  misc_RNA (1)...(19): siRNA sense strand
gaacaguuugugcaguuua

SEQ ID NO: 1861878 - RNA, 19 nt, Homo sapiens
  misc_RNA (1)...(19): siRNA sense strand
ccucuucgcuacacaauug

SEQ ID NO: 1861879 - RNA, 19 nt, Homo sapiens
  misc_RNA (1)...(19): siRNA sense strand
gccacaggcuaccacuuua

SEQ ID NO: 1861880 - RNA, 19 nt, Homo sapiens
  misc_RNA (1)...(19): siRNA sense strand
gcuggaagcugugaaguca

SEQ ID NO: 1861881 - RNA, 19 nt, Homo sapiens
  misc_RNA (1)...(19): siRNA sense strand
caagggagcagcuguggaa

SEQ ID NO: 1861882 - RNA, 19 nt, Homo sapiens
  misc_RNA (1)...(19): siRNA sense strand
ccagagagaugagauugau

SEQ ID NO: 1861883 - RNA, 19 nt, Homo sapiens
  misc_RNA (1)...(19): siRNA sense strand
gggagcagcuguggaaauc

SEQ ID NO: 1861884 - RNA, 19 nt, Homo sapiens
  misc_RNA (1)...(19): siRNA sense strand
ggaguuacccagagagaug

SEQ ID NO: 1861885 - RNA, 19 nt, Homo sapiens
  misc_RNA (1)...(19): siRNA sense strand
gagcagcuguggaaaucug

SEQ ID NO: 1861886 - RNA, 19 nt, Homo sapiens
  misc_RNA (1)...(19): siRNA sense strand
gaggaacugugugguaugu

SEQ ID NO: 1861887 - RNA, 19 nt, Homo sapiens
  misc_RNA (1)...(19): siRNA sense strand
caagucaucaaguuuacua

SEQ ID NO: 1861888 - RNA, 19 nt, Homo sapiens
  misc_RNA (1)...(19): siRNA sense strand
cuaaggaccugcccgucuu

SEQ ID NO: 1861889 - RNA, 19 nt, Homo sapiens
  misc_RNA (1)...(19): siRNA sense strand
ugucacaucguacucaaua

SEQ ID NO: 1861890 - RNA, 19 nt, Homo sapiens
  misc_RNA (1)...(19): siRNA sense strand
gcagacaucaacacuuuca

SEQ ID NO: 1861891 - RNA, 19 nt, Homo sapiens
  misc_RNA (1)...(19): siRNA sense strand
gggccugucugccaugaug

SEQ ID NO: 1861892 - RNA, 19 nt, Homo sapiens
  misc_RNA (1)...(19): siRNA sense strand
cuacacaauugaagaugga

SEQ ID NO: 1861893 - RNA, 19 nt, Homo sapiens
  misc_RNA (1)...(19): siRNA sense strand
uccaagagccugaguaugu

SEQ ID NO: 1861894 - RNA, 19 nt, Homo sapiens
  misc_RNA (1)...(19): siRNA sense strand
ccaagagccugaguaugug

SEQ ID NO: 1861895 - RNA, 19 nt, Homo sapiens
  misc_RNA (1)...(19): siRNA sense strand
gcugaggaacuguguggua

SEQ ID NO: 1861896 - RNA, 19 nt, Homo sapiens
  misc_RNA (1)...(19): siRNA sense strand
aagaugagcugaggaacug

SEQ ID NO: 1861897 - RNA, 19 nt, Homo sapiens
  misc_RNA (1)...(19): siRNA sense strand
uugcagaagugcuuagaug

SEQ ID NO: 1861898 - RNA, 19 nt, Homo sapiens
  misc_RNA (1)...(19): siRNA sense strand
gaagaugagcugaggaacu

SEQ ID NO: 1861899 - RNA, 19 nt, Homo sapiens
  misc_RNA (1)...(19): siRNA sense strand
ucaucaaguuuacuaagga

SEQ ID NO: 1861900 - RNA, 19 nt, Homo sapiens
  misc_RNA (1)...(19): siRNA sense strand
cugcaagucaucaaguuua

SEQ ID NO: 1861901 - RNA, 19 nt, Homo sapiens
  misc_RNA (1)...(19): siRNA sense strand
gggaagaugagcugaggaa

SEQ ID NO: 1861902 - RNA, 19 nt, Homo sapiens
  misc_RNA (1)...(19): siRNA sense strand
caggagaacagucagcaaa

SEQ ID NO: 1861903 - RNA, 19 nt, Homo sapiens
  misc_RNA (1)...(19): siRNA sense strand
ccacaggcuaccacuuuaa

SEQ ID NO: 1861904 - RNA, 19 nt, Homo sapiens
  misc_RNA (1)...(19): siRNA sense strand
ggcagaagcccuggcauug

SEQ ID NO: 1861905 - RNA, 19 nt, Homo sapiens
  misc_RNA (1)...(19): siRNA sense strand
cgggaucgguuucuguaug

SEQ ID NO: 1861906 - RNA, 19 nt, Homo sapiens
  misc_RNA (1)...(19): siRNA sense strand
ugaguaaggagcaagaaga

SEQ ID NO: 1861907 - RNA, 19 nt, Homo sapiens
  misc_RNA (1)...(19): siRNA sense strand
ugaacaguuugugcaguuu

SEQ ID NO: 1861908 - RNA, 19 nt, Homo sapiens
  misc_RNA (1)...(19): siRNA sense strand
ggaguugcucuuucacuuc

SEQ ID NO: 1861909 - RNA, 19 nt, Homo sapiens
  misc_RNA (1)...(19): siRNA sense strand
uggaguugcucuuucacuu

SEQ ID NO: 1861910 - RNA, 19 nt, Homo sapiens
  misc_RNA (1)...(19): siRNA sense strand
ccagaucucccuucucaag

SEQ ID NO: 1861911 - RNA, 19 nt, Homo sapiens
  misc_RNA (1)...(19): siRNA sense strand
cagcucaucuguucaucca

SEQ ID NO: 1861912 - RNA, 19 nt, Homo sapiens
  misc_RNA (1)...(19): siRNA sense strand
uugaacaguuugugcaguu

SEQ ID NO: 1861913 - RNA, 19 nt, Homo sapiens
  misc_RNA (1)...(19): siRNA sense strand
gcagguugcagaagugcuu

SEQ ID NO: 1861914 - RNA, 19 nt, Homo sapiens
  misc_RNA (1)...(19): siRNA sense strand
cacugacucugcaaagcua

SEQ ID NO: 1861915 - RNA, 19 nt, Homo sapiens
  misc_RNA (1)...(19): siRNA sense strand
gaggaaagacaugauacug

SEQ ID NO: 1861916 - RNA, 19 nt, Homo sapiens
  misc_RNA (1)...(19): siRNA sense strand
gcaacugaguaaggagcaa

SEQ ID NO: 1861917 - RNA, 19 nt, Homo sapiens
  misc_RNA (1)...(19): siRNA sense strand
gcacugacucugcaaagcu

SEQ ID NO: 1861918 - RNA, 19 nt, Homo sapiens
  misc_RNA (1)...(19): siRNA sense strand
cugaggaacugugugguau

SEQ ID NO: 1861919 - RNA, 19 nt, Homo sapiens
  misc_RNA (1)...(19): siRNA sense strand
ucacacacuucgcagacau

SEQ ID NO: 1861920 - RNA, 19 nt, Homo sapiens
  misc_RNA (1)...(19): siRNA sense strand
agagagaugagauugauca

SEQ ID NO: 1861921 - RNA, 19 nt, Homo sapiens
  misc_RNA (1)...(19): siRNA sense strand
gggaucgguuucuguaugc

SEQ ID NO: 1861922 - RNA, 19 nt, Homo sapiens
  misc_RNA (1)...(19): siRNA sense strand
gccuccagcucaucuguuc

SEQ ID NO: 1861923 - RNA, 19 nt, Homo sapiens
  misc_RNA (1)...(19): siRNA sense strand
ugagauugaucagcugcaa

SEQ ID NO: 1861924 - RNA, 19 nt, Homo sapiens
  misc_RNA (1)...(19): siRNA sense strand
cggcagaagcccuggcauu

SEQ ID NO: 1861925 - RNA, 19 nt, Homo sapiens
  misc_RNA (1)...(19): siRNA sense strand
gaaaacugcagcuccaaga

SEQ ID NO: 1861926 - RNA, 19 nt, Homo sapiens
  misc_RNA (1)...(19): siRNA sense strand
gucaucaaguuuacuaagg

SEQ ID NO: 1861927 - RNA, 19 nt, Homo sapiens
  misc_RNA (1)...(19): siRNA sense strand
agacaucaacacuuucaug

SEQ ID NO: 1861928 - RNA, 19 nt, Homo sapiens
  misc_RNA (1)...(19): siRNA sense strand
caagaggagauggcacuga

SEQ ID NO: 1861929 - RNA, 19 nt, Homo sapiens
  misc_RNA (1)...(19): siRNA sense strand
caaacaccugugcaacuga

SEQ ID NO: 1861930 - RNA, 19 nt, Homo sapiens
  misc_RNA (1)...(19): siRNA sense strand
gguaccaaauccagcacau

SEQ ID NO: 1861931 - RNA, 19 nt, Homo sapiens
  misc_RNA (1)...(19): siRNA sense strand
gcagaagugcuuagaugcu

SEQ ID NO: 1861932 - RNA, 19 nt, Homo sapiens
  misc_RNA (1)...(19): siRNA sense strand
guacugcaagucaucaagu

SEQ ID NO: 1861933 - RNA, 19 nt, Homo sapiens
  misc_RNA (1)...(19): siRNA sense strand
uccguucccugcccauuga

SEQ ID NO: 1861934 - RNA, 19 nt, Homo sapiens
  misc_RNA (1)...(19): siRNA sense strand
ucaauaccacuuucugucu

SEQ ID NO: 1861935 - RNA, 19 nt, Homo sapiens
  misc_RNA (1)...(19): siRNA sense strand
ggagaacagucagcaaaag

SEQ ID NO: 1861936 - RNA, 19 nt, Homo sapiens
  misc_RNA (1)...(19): siRNA sense strand
uacugcaagucaucaaguu

SEQ ID NO: 1861937 - RNA, 19 nt, Homo sapiens
  misc_RNA (1)...(19): siRNA sense strand
gaguaaggagcaagaagag

SEQ ID NO: 1861938 - RNA, 19 nt, Homo sapiens
  misc_RNA (1)...(19): siRNA sense strand
gcagaagcccuggcauugc

SEQ ID NO: 1861939 - RNA, 19 nt, Homo sapiens
  misc_RNA (1)...(19): siRNA sense strand
agauugaucagcugcaaga

SEQ ID NO: 1861940 - RNA, 19 nt, Homo sapiens
  misc_RNA (1)...(19): siRNA sense strand
caccugugcaacugaguaa

SEQ ID NO: 1861941 - RNA, 19 nt, Homo sapiens
  misc_RNA (1)...(19): siRNA sense strand
gaguuacccagagagauga

SEQ ID NO: 1861942 - RNA, 19 nt, Homo sapiens
  misc_RNA (1)...(19): siRNA sense strand
gggcugcaaggguuucuuc

SEQ ID NO: 1861943 - RNA, 19 nt, Homo sapiens
  misc_RNA (1)...(19): siRNA sense strand
ggagcaagaagagcugauc

SEQ ID NO: 1861944 - RNA, 19 nt, Homo sapiens
  misc_RNA (1)...(19): siRNA sense strand
gcaaagagaugggaauguu

SEQ ID NO: 1861945 - RNA, 19 nt, Homo sapiens
  misc_RNA (1)...(19): siRNA sense strand
caagugaccucgacaacaa

SEQ ID NO: 1861946 - RNA, 19 nt, Homo sapiens
  misc_RNA (1)...(19): siRNA sense strand
gaaagggucugcgguugaa

SEQ ID NO: 1861947 - RNA, 19 nt, Homo sapiens
  misc_RNA (1)...(19): siRNA sense strand
cauugaacauucccauuua

SEQ ID NO: 1861948 - RNA, 19 nt, Homo sapiens
  misc_RNA (1)...(19): siRNA sense strand
gaaagaauucgaaauagug

SEQ ID NO: 1861949 - RNA, 19 nt, Homo sapiens
  misc_RNA (1)...(19): siRNA sense strand
ccagauagacaauacauaa

SEQ ID NO: 1861950 - RNA, 19 nt, Homo sapiens
  misc_RNA (1)...(19): siRNA sense strand
gaacauucccauuuaccua

SEQ ID NO: 1861951 - RNA, 19 nt, Homo sapiens
  misc_RNA (1)...(19): siRNA sense strand
gcaacugugugauggauau

SEQ ID NO: 1861952 - RNA, 19 nt, Homo sapiens
  misc_RNA (1)...(19): siRNA sense strand
caacagacucuucuacauu

SEQ ID NO: 1861953 - RNA, 19 nt, Homo sapiens
  misc_RNA (1)...(19): siRNA sense strand
gaaauagugguaucucuga

SEQ ID NO: 1861954 - RNA, 19 nt, Homo sapiens
  misc_RNA (1)...(19): siRNA sense strand
gacaauacauaaaggauag

SEQ ID NO: 1861955 - RNA, 19 nt, Homo sapiens
  misc_RNA (1)...(19): siRNA sense strand
guacucuccuggaauauau

SEQ ID NO: 1861956 - RNA, 19 nt, Homo sapiens
  misc_RNA (1)...(19): siRNA sense strand
cagcugagauuuucaauaa

SEQ ID NO: 1861957 - RNA, 19 nt, Homo sapiens
  misc_RNA (1)...(19): siRNA sense strand
gaugagcuguguguuguuu

SEQ ID NO: 1861958 - RNA, 19 nt, Homo sapiens
  misc_RNA (1)...(19): siRNA sense strand
gaaccauacucgcaauaca

SEQ ID NO: 1861959 - RNA, 19 nt, Homo sapiens
  misc_RNA (1)...(19): siRNA sense strand
cuaaggaaaugcaaagaga

SEQ ID NO: 1861960 - RNA, 19 nt, Homo sapiens
  misc_RNA (1)...(19): siRNA sense strand
gugguacucuccuggaaua

SEQ ID NO: 1861961 - RNA, 19 nt, Homo sapiens
  misc_RNA (1)...(19): siRNA sense strand
auacagcaauguucaguuu

SEQ ID NO: 1861962 - RNA, 19 nt, Homo sapiens
  misc_RNA (1)...(19): siRNA sense strand
ccagauugcuuugcugaaa

SEQ ID NO: 1861963 - RNA, 19 nt, Homo sapiens
  misc_RNA (1)...(19): siRNA sense strand
cgaagaaagugucaagagu

SEQ ID NO: 1861964 - RNA, 19 nt, Homo sapiens
  misc_RNA (1)...(19): siRNA sense strand
gcugaaugcuuguuaacug

SEQ ID NO: 1861965 - RNA, 19 nt, Homo sapiens
  misc_RNA (1)...(19): siRNA sense strand
caaguucaaccacagauuu

SEQ ID NO: 1861966 - RNA, 19 nt, Homo sapiens
  misc_RNA (1)...(19): siRNA sense strand
ggucugcgguugaagcuau

SEQ ID NO: 1861967 - RNA, 19 nt, Homo sapiens
  misc_RNA (1)...(19): siRNA sense strand
agaauucagugcagaagaa

SEQ ID NO: 1861968 - RNA, 19 nt, Homo sapiens
  misc_RNA (1)...(19): siRNA sense strand
aacagacucuucuacauuu

SEQ ID NO: 1861969 - RNA, 19 nt, Homo sapiens
  misc_RNA (1)...(19): siRNA sense strand
ugucaagagugucgacuaa

SEQ ID NO: 1861970 - RNA, 19 nt, Homo sapiens
  misc_RNA (1)...(19): siRNA sense strand
gggaugagcuguguguugu

SEQ ID NO: 1861971 - RNA, 19 nt, Homo sapiens
  misc_RNA (1)...(19): siRNA sense strand
gaaugcuuguuaacugaaa

SEQ ID NO: 1861972 - RNA, 19 nt, Homo sapiens
  misc_RNA (1)...(19): siRNA sense strand
auaaugcacugaccuguga

SEQ ID NO: 1861973 - RNA, 19 nt, Homo sapiens
  misc_RNA (1)...(19): siRNA sense strand
gaaauggcaaccaaucaug

SEQ ID NO: 1861974 - RNA, 19 nt, Homo sapiens
  misc_RNA (1)...(19): siRNA sense strand
aaacugagguagcagagau

SEQ ID NO: 1861975 - RNA, 19 nt, Homo sapiens
  misc_RNA (1)...(19): siRNA sense strand
ugacggaaauggcaaccaa

SEQ ID NO: 1861976 - RNA, 19 nt, Homo sapiens
  misc_RNA (1)...(19): siRNA sense strand
gaucagaccgugaaugaag

SEQ ID NO: 1861977 - RNA, 19 nt, Homo sapiens
  misc_RNA (1)...(19): siRNA sense strand
cagugaaggucgugacuug

SEQ ID NO: 1861978 - RNA, 19 nt, Homo sapiens
  misc_RNA (1)...(19): siRNA sense strand
cagaucagaccgugaauga

SEQ ID NO: 1861979 - RNA, 19 nt, Homo sapiens
  misc_RNA (1)...(19): siRNA sense strand
ccacuucucugugaaaucu

SEQ ID NO: 1861980 - RNA, 19 nt, Homo sapiens
  misc_RNA (1)...(19): siRNA sense strand
gauagacaauacauaaagg

SEQ ID NO: 1861981 - RNA, 19 nt, Homo sapiens
  misc_RNA (1)...(19): siRNA sense strand
ugguaucucugaugaauau

SEQ ID NO: 1861982 - RNA, 19 nt, Homo sapiens
  misc_RNA (1)...(19): siRNA sense strand
ccucaggaaauaacaaaua

SEQ ID NO: 1861983 - RNA, 19 nt, Homo sapiens
  misc_RNA (1)...(19): siRNA sense strand
uauaugaacucaggcguau

SEQ ID NO: 1861984 - RNA, 19 nt, Homo sapiens
  misc_RNA (1)...(19): siRNA sense strand
gggagaaacugagguagca

SEQ ID NO: 1861985 - RNA, 19 nt, Homo sapiens
  misc_RNA (1)...(19): siRNA sense strand
gcagagaugccuguaacaa

SEQ ID NO: 1861986 - RNA, 19 nt, Homo sapiens
  misc_RNA (1)...(19): siRNA sense strand
ugaaaauccucaacacuuu

SEQ ID NO: 1861987 - RNA, 19 nt, Homo sapiens
  misc_RNA (1)...(19): siRNA sense strand
ggaguaugcucugcuuaca

SEQ ID NO: 1861988 - RNA, 19 nt, Homo sapiens
  misc_RNA (1)...(19): siRNA sense strand
ggaagaaagaauucgaaau

SEQ ID NO: 1861989 - RNA, 19 nt, Homo sapiens
  misc_RNA (1)...(19): siRNA sense strand
agagaugccuguaacaaag

SEQ ID NO: 1861990 - RNA, 19 nt, Homo sapiens
  misc_RNA (1)...(19): siRNA sense strand
uuacggacauucaaucauc

SEQ ID NO: 1861991 - RNA, 19 nt, Homo sapiens
  misc_RNA (1)...(19): siRNA sense strand
uaccaggauuucagacuuu

SEQ ID NO: 1861992 - RNA, 19 nt, Homo sapiens
  misc_RNA (1)...(19): siRNA sense strand
ucauugaacauucccauuu

SEQ ID NO: 1861993 - RNA, 19 nt, Homo sapiens
  misc_RNA (1)...(19): siRNA sense strand
ggaaauggcaaccaaucau

SEQ ID NO: 1861994 - RNA, 19 nt, Homo sapiens
  misc_RNA (1)...(19): siRNA sense strand
cagagaugccuguaacaaa

SEQ ID NO: 1861995 - RNA, 19 nt, Homo sapiens
  misc_RNA (1)...(19): siRNA sense strand
ucaacagacucuucuacau

SEQ ID NO: 1861996 - RNA, 19 nt, Homo sapiens
  misc_RNA (1)...(19): siRNA sense strand
gauauguacaugcgaagaa

SEQ ID NO: 1861997 - RNA, 19 nt, Homo sapiens
  misc_RNA (1)...(19): siRNA sense strand
aagaaagugucaagagugu

SEQ ID NO: 1861998 - RNA, 19 nt, Homo sapiens
  misc_RNA (1)...(19): siRNA sense strand
gaaugaagacagugaaggu

SEQ ID NO: 1861999 - RNA, 19 nt, Homo sapiens
  misc_RNA (1)...(19): siRNA sense strand
uagcagagaugccuguaac

SEQ ID NO: 1862000 - RNA, 19 nt, Homo sapiens
  misc_RNA (1)...(19): siRNA sense strand
gaguaaacgaccacaaguu

SEQ ID NO: 1862001 - RNA, 19 nt, Homo sapiens
  misc_RNA (1)...(19): siRNA sense strand
gagaguaaacgaccacaag

SEQ ID NO: 1862002 - RNA, 19 nt, Homo sapiens
  misc_RNA (1)...(19): siRNA sense strand
ccauuuaccuaccacagau

SEQ ID NO: 1862003 - RNA, 19 nt, Homo sapiens
  misc_RNA (1)...(19): siRNA sense strand
ccacagauuuccucgucau

SEQ ID NO: 1862004 - RNA, 19 nt, Homo sapiens
  misc_RNA (1)...(19): siRNA sense strand
gaccgugaaugaagacagu

SEQ ID NO: 1862005 - RNA, 19 nt, Homo sapiens
  misc_RNA (1)...(19): siRNA sense strand
gguacucuccuggaauaua

SEQ ID NO: 1862006 - RNA, 19 nt, Homo sapiens
  misc_RNA (1)...(19): siRNA sense strand
ggauagagaggcaguagag

SEQ ID NO: 1862007 - RNA, 19 nt, Homo sapiens
  misc_RNA (1)...(19): siRNA sense strand
gcugagauuuucaauaaga

SEQ ID NO: 1862008 - RNA, 19 nt, Homo sapiens
  misc_RNA (1)...(19): siRNA sense strand
cuaccaggauuucagacuu

SEQ ID NO: 1862009 - RNA, 19 nt, Homo sapiens
  misc_RNA (1)...(19): siRNA sense strand
ugaagcagcaugcagauca

SEQ ID NO: 1862010 - RNA, 19 nt, Homo sapiens
  misc_RNA (1)...(19): siRNA sense strand
cugaaugcuuguuaacuga

SEQ ID NO: 1862011 - RNA, 19 nt, Homo sapiens
  misc_RNA (1)...(19): siRNA sense strand
ucaagagugucgacuaagg

SEQ ID NO: 1862012 - RNA, 19 nt, Homo sapiens
  misc_RNA (1)...(19): siRNA sense strand
caaaaguuguguaagauuc

SEQ ID NO: 1862013 - RNA, 19 nt, Homo sapiens
  misc_RNA (1)...(19): siRNA sense strand
aaucuaagcgacugagaaa

SEQ ID NO: 1862014 - RNA, 19 nt, Homo sapiens
  misc_RNA (1)...(19): siRNA sense strand
caaagagaugggaauguug

SEQ ID NO: 1862015 - RNA, 19 nt, Homo sapiens
  misc_RNA (1)...(19): siRNA sense strand
ugacugaauuacggacauu

SEQ ID NO: 1862016 - RNA, 19 nt, Homo sapiens
  misc_RNA (1)...(19): siRNA sense strand
auagugguaucucugauga

SEQ ID NO: 1862017 - RNA, 19 nt, Homo sapiens
  misc_RNA (1)...(19): siRNA sense strand
ccagggagaaacugaggua

SEQ ID NO: 1862018 - RNA, 19 nt, Homo sapiens
  misc_RNA (1)...(19): siRNA sense strand
aaacuuccgucugggcauu

SEQ ID NO: 1862019 - RNA, 19 nt, Homo sapiens
  misc_RNA (1)...(19): siRNA sense strand
gguugaagcuauguuccuu

SEQ ID NO: 1862020 - RNA, 19 nt, Homo sapiens
  misc_RNA (1)...(19): siRNA sense strand
ggaccaugaagaccagauu

SEQ ID NO: 1862021 - RNA, 19 nt, Homo sapiens
  misc_RNA (1)...(19): siRNA sense strand
ugaaagggucugcgguuga

SEQ ID NO: 1862022 - RNA, 19 nt, Homo sapiens
  misc_RNA (1)...(19): siRNA sense strand
gagaugccuguaacaaaga

SEQ ID NO: 1862023 - RNA, 19 nt, Homo sapiens
  misc_RNA (1)...(19): siRNA sense strand
cugagaugcugaugucaug

SEQ ID NO: 1862024 - RNA, 19 nt, Homo sapiens
  misc_RNA (1)...(19): siRNA sense strand
ggauucauauaacaaacag

SEQ ID NO: 1862025 - RNA, 19 nt, Homo sapiens
  misc_RNA (1)...(19): siRNA sense strand
gaauguuggcugaaugcuu

SEQ ID NO: 1862026 - RNA, 19 nt, Homo sapiens
  misc_RNA (1)...(19): siRNA sense strand
gggcaacugugugauggau

SEQ ID NO: 1862027 - RNA, 19 nt, Homo sapiens
  misc_RNA (1)...(19): siRNA sense strand
ggagccacuucuugaugug

SEQ ID NO: 1862028 - RNA, 19 nt, Homo sapiens
  misc_RNA (1)...(19): siRNA sense strand
agaauucgaaauaguggua

SEQ ID NO: 1862029 - RNA, 19 nt, Homo sapiens
  misc_RNA (1)...(19): siRNA sense strand
ccuauuggaagaaagaauu

SEQ ID NO: 1862030 - RNA, 19 nt, Homo sapiens
  misc_RNA (1)...(19): siRNA sense strand
gaucaacagacucuucuac

SEQ ID NO: 1862031 - RNA, 19 nt, Homo sapiens
  misc_RNA (1)...(19): siRNA sense strand
gaagcagcaugcagaucag

SEQ ID NO: 1862032 - RNA, 19 nt, Homo sapiens
  misc_RNA (1)...(19): siRNA sense strand
caagagugucgacuaagga

SEQ ID NO: 1862033 - RNA, 19 nt, Homo sapiens
  misc_RNA (1)...(19): siRNA sense strand
gcgaagaaagugucaagag

SEQ ID NO: 1862034 - RNA, 19 nt, Homo sapiens
  misc_RNA (1)...(19): siRNA sense strand
gaauucagugcagaagaaa

SEQ ID NO: 1862035 - RNA, 19 nt, Homo sapiens
  misc_RNA (1)...(19): siRNA sense strand
gcugaugucauggagagua

SEQ ID NO: 1862036 - RNA, 19 nt, Homo sapiens
  misc_RNA (1)...(19): siRNA sense strand
gagugucgacuaaggaaau

SEQ ID NO: 1862037 - RNA, 19 nt, Homo sapiens
  misc_RNA (1)...(19): siRNA sense strand
cugaugucauggagaguaa

SEQ ID NO: 1862038 - RNA, 19 nt, Homo sapiens
  misc_RNA (1)...(19): siRNA sense strand
auucugaccuauuggaaga

SEQ ID NO: 1862039 - RNA, 19 nt, Homo sapiens
  misc_RNA (1)...(19): siRNA sense strand
caggagaagcauuaccaaa

SEQ ID NO: 1862040 - RNA, 19 nt, Homo sapiens
  misc_RNA (1)...(19): siRNA sense strand
gaggaguaugcucugcuua

SEQ ID NO: 1862041 - RNA, 19 nt, Homo sapiens
  misc_RNA (1)...(19): siRNA sense strand
guacaugcgaagaaagugu

SEQ ID NO: 1862042 - RNA, 19 nt, Homo sapiens
  misc_RNA (1)...(19): siRNA sense strand
ccaaucauguacagguucu

SEQ ID NO: 1862043 - RNA, 19 nt, Homo sapiens
  misc_RNA (1)...(19): siRNA sense strand
cgacuaaggaaaugcaaag

SEQ ID NO: 1862044 - RNA, 19 nt, Homo sapiens
  misc_RNA (1)...(19): siRNA sense strand
ggagaaagcugugccguua

SEQ ID NO: 1862045 - RNA, 19 nt, Homo sapiens
  misc_RNA (1)...(19): siRNA sense strand
ggaaucagcugaacaaaga

SEQ ID NO: 1862046 - RNA, 19 nt, Homo sapiens
  misc_RNA (1)...(19): siRNA sense strand
gaaagagucuguacaguug

SEQ ID NO: 1862047 - RNA, 19 nt, Homo sapiens
  misc_RNA (1)...(19): siRNA sense strand
ggacagacauccauaguug

SEQ ID NO: 1862048 - RNA, 19 nt, Homo sapiens
  misc_RNA (1)...(19): siRNA sense strand
gcaaagaaauaaucuggaa

SEQ ID NO: 1862049 - RNA, 19 nt, Homo sapiens
  misc_RNA (1)...(19): siRNA sense strand
gcagaaaccuggaagugaa

SEQ ID NO: 1862050 - RNA, 19 nt, Homo sapiens
  misc_RNA (1)...(19): siRNA sense strand
guggagaacuugaucaaua

SEQ ID NO: 1862051 - RNA, 19 nt, Homo sapiens
  misc_RNA (1)...(19): siRNA sense strand
gaaauaaucuggaaaucgu

SEQ ID NO: 1862052 - RNA, 19 nt, Homo sapiens
  misc_RNA (1)...(19): siRNA sense strand
cacaaucgcuccuuugaua

SEQ ID NO: 1862053 - RNA, 19 nt, Homo sapiens
  misc_RNA (1)...(19): siRNA sense strand
gaaagucauugcagagaaa

SEQ ID NO: 1862054 - RNA, 19 nt, Homo sapiens
  misc_RNA (1)...(19): siRNA sense strand
gaauaucuccucaacauuu

SEQ ID NO: 1862055 - RNA, 19 nt, Homo sapiens
  misc_RNA (1)...(19): siRNA sense strand
gcagagcaguucuuugaaa

SEQ ID NO: 1862056 - RNA, 19 nt, Homo sapiens
  misc_RNA (1)...(19): siRNA sense strand
ucacacagcuugaagaaga

SEQ ID NO: 1862057 - RNA, 19 nt, Homo sapiens
  misc_RNA (1)...(19): siRNA sense strand
gcaagugcaucccagcuaa

SEQ ID NO: 1862058 - RNA, 19 nt, Homo sapiens
  misc_RNA (1)...(19): siRNA sense strand
gaucucauaucuucacuug

SEQ ID NO: 1862059 - RNA, 19 nt, Homo sapiens
  misc_RNA (1)...(19): siRNA sense strand
gcucuuaaaugauuacaga

SEQ ID NO: 1862060 - RNA, 19 nt, Homo sapiens
  misc_RNA (1)...(19): siRNA sense strand
gcacgagggucuccauuca

SEQ ID NO: 1862061 - RNA, 19 nt, Homo sapiens
  misc_RNA (1)...(19): siRNA sense strand
ggacaugguuuaucgaagu

SEQ ID NO: 1862062 - RNA, 19 nt, Homo sapiens
  misc_RNA (1)...(19): siRNA sense strand
gggcggaucucauaucuuc

SEQ ID NO: 1862063 - RNA, 19 nt, Homo sapiens
  misc_RNA (1)...(19): siRNA sense strand
gagaagcaccaacaaagua

SEQ ID NO: 1862064 - RNA, 19 nt, Homo sapiens
  misc_RNA (1)...(19): siRNA sense strand
gaacucggccgaugacuug

SEQ ID NO: 1862065 - RNA, 19 nt, Homo sapiens
  misc_RNA (1)...(19): siRNA sense strand
gcccuuggcucugaucuua

SEQ ID NO: 1862066 - RNA, 19 nt, Homo sapiens
  misc_RNA (1)...(19): siRNA sense strand
aggaagagcugcccuacua

SEQ ID NO: 1862067 - RNA, 19 nt, Homo sapiens
  misc_RNA (1)...(19): siRNA sense strand
gcucugaucuuaaacuuag

SEQ ID NO: 1862068 - RNA, 19 nt, Homo sapiens
  misc_RNA (1)...(19): siRNA sense strand
caggagcucuuaaaugauu

SEQ ID NO: 1862069 - RNA, 19 nt, Homo sapiens
  misc_RNA (1)...(19): siRNA sense strand
agaaggagcccgagaagua

SEQ ID NO: 1862070 - RNA, 19 nt, Homo sapiens
  misc_RNA (1)...(19): siRNA sense strand
gaagagggcuccgagaucu

SEQ ID NO: 1862071 - RNA, 19 nt, Homo sapiens
  misc_RNA (1)...(19): siRNA sense strand
ggaagaaugcaucgaauau

SEQ ID NO: 1862072 - RNA, 19 nt, Homo sapiens
  misc_RNA (1)...(19): siRNA sense strand
gagcaaaccagcuggcuaa

SEQ ID NO: 1862073 - RNA, 19 nt, Homo sapiens
  misc_RNA (1)...(19): siRNA sense strand
ggacucaaauguucuugug

SEQ ID NO: 1862074 - RNA, 19 nt, Homo sapiens
  misc_RNA (1)...(19): siRNA sense strand
caauaauggucucugaauu

SEQ ID NO: 1862075 - RNA, 19 nt, Homo sapiens
  misc_RNA (1)...(19): siRNA sense strand
cuacuacccuugcuauuug

SEQ ID NO: 1862076 - RNA, 19 nt, Homo sapiens
  misc_RNA (1)...(19): siRNA sense strand
uaacgaccauuagucauuu

SEQ ID NO: 1862077 - RNA, 19 nt, Homo sapiens
  misc_RNA (1)...(19): siRNA sense strand
uuacuaggcucagacauaa

SEQ ID NO: 1862078 - RNA, 19 nt, Homo sapiens
  misc_RNA (1)...(19): siRNA sense strand
aagaaugcaucgaauauga

SEQ ID NO: 1862079 - RNA, 19 nt, Homo sapiens
  misc_RNA (1)...(19): siRNA sense strand
caaaccagcuggcuaagca

SEQ ID NO: 1862080 - RNA, 19 nt, Homo sapiens
  misc_RNA (1)...(19): siRNA sense strand
agaaagccaugcuguuaaa

SEQ ID NO: 1862081 - RNA, 19 nt, Homo sapiens
  misc_RNA (1)...(19): siRNA sense strand
uggaagcucuguuuagauu

SEQ ID NO: 1862082 - RNA, 19 nt, Homo sapiens
  misc_RNA (1)...(19): siRNA sense strand
agcaggagcucuuaaauga

SEQ ID NO: 1862083 - RNA, 19 nt, Homo sapiens
  misc_RNA (1)...(19): siRNA sense strand
gcagagagcccugaacuuc

SEQ ID NO: 1862084 - RNA, 19 nt, Homo sapiens
  misc_RNA (1)...(19): siRNA sense strand
gugcaaaguucaggaguuu

SEQ ID NO: 1862085 - RNA, 19 nt, Homo sapiens
  misc_RNA (1)...(19): siRNA sense strand
ggaaacaaaggcagugauu

SEQ ID NO: 1862086 - RNA, 19 nt, Homo sapiens
  misc_RNA (1)...(19): siRNA sense strand
gaacuuuucuucacuguug

SEQ ID NO: 1862087 - RNA, 19 nt, Homo sapiens
  misc_RNA (1)...(19): siRNA sense strand
gcuggaagcucuguuuaga

SEQ ID NO: 1862088 - RNA, 19 nt, Homo sapiens
  misc_RNA (1)...(19): siRNA sense strand
gagaugcccuuggcucuga

SEQ ID NO: 1862089 - RNA, 19 nt, Homo sapiens
  misc_RNA (1)...(19): siRNA sense strand
aagaauaucuccucaacau

SEQ ID NO: 1862090 - RNA, 19 nt, Homo sapiens
  misc_RNA (1)...(19): siRNA sense strand
ccagggauauugaaaguca

SEQ ID NO: 1862091 - RNA, 19 nt, Homo sapiens
  misc_RNA (1)...(19): siRNA sense strand
gcugauaacuucucuaagc

SEQ ID NO: 1862092 - RNA, 19 nt, Homo sapiens
  misc_RNA (1)...(19): siRNA sense strand
caaauguucuugugcaaag

SEQ ID NO: 1862093 - RNA, 19 nt, Homo sapiens
  misc_RNA (1)...(19): siRNA sense strand
guaccagccuugcaagaga

SEQ ID NO: 1862094 - RNA, 19 nt, Homo sapiens
  misc_RNA (1)...(19): siRNA sense strand
ugaaugggcggaucucaua

SEQ ID NO: 1862095 - RNA, 19 nt, Homo sapiens
  misc_RNA (1)...(19): siRNA sense strand
cauggaggccuuaaguuua

SEQ ID NO: 1862096 - RNA, 19 nt, Homo sapiens
  misc_RNA (1)...(19): siRNA sense strand
gaguggaaauucgcugaua

SEQ ID NO: 1862097 - RNA, 19 nt, Homo sapiens
  misc_RNA (1)...(19): siRNA sense strand
agaaaugccucugagauug

SEQ ID NO: 1862098 - RNA, 19 nt, Homo sapiens
  misc_RNA (1)...(19): siRNA sense strand
gaugagaucaccaugaaga

SEQ ID NO: 1862099 - RNA, 19 nt, Homo sapiens
  misc_RNA (1)...(19): siRNA sense strand
uauaagagcucuggacaca

SEQ ID NO: 1862100 - RNA, 19 nt, Homo sapiens
  misc_RNA (1)...(19): siRNA sense strand
ccucuuccguuuacuuuaa

SEQ ID NO: 1862101 - RNA, 19 nt, Homo sapiens
  misc_RNA (1)...(19): siRNA sense strand
gaagugaugagaaggagaa

SEQ ID NO: 1862102 - RNA, 19 nt, Homo sapiens
  misc_RNA (1)...(19): siRNA sense strand
uaaaagcucuggaaaccua

SEQ ID NO: 1862103 - RNA, 19 nt, Homo sapiens
  misc_RNA (1)...(19): siRNA sense strand
gugaacucaucuuguauuu

SEQ ID NO: 1862104 - RNA, 19 nt, Homo sapiens
  misc_RNA (1)...(19): siRNA sense strand
gaccauggcugcaggugau

SEQ ID NO: 1862105 - RNA, 19 nt, Homo sapiens
  misc_RNA (1)...(19): siRNA sense strand
aagcuacucuucagugauu

SEQ ID NO: 1862106 - RNA, 19 nt, Homo sapiens
  misc_RNA (1)...(19): siRNA sense strand
aagauuagcucaguguuug

SEQ ID NO: 1862107 - RNA, 19 nt, Homo sapiens
  misc_RNA (1)...(19): siRNA sense strand
uaaaacaacuggaagaaug

SEQ ID NO: 1862108 - RNA, 19 nt, Homo sapiens
  misc_RNA (1)...(19): siRNA sense strand
gacaagaugccauuauuuc

SEQ ID NO: 1862109 - RNA, 19 nt, Homo sapiens
  misc_RNA (1)...(19): siRNA sense strand
caaaguaaacagaacgaaa

SEQ ID NO: 1862110 - RNA, 19 nt, Homo sapiens
  misc_RNA (1)...(19): siRNA sense strand
ugaaggagguggugaagag

SEQ ID NO: 1862111 - RNA, 19 nt, Homo sapiens
  misc_RNA (1)...(19): siRNA sense strand
aaaccaacccuaaggaauu

SEQ ID NO: 1862112 - RNA, 19 nt, Homo sapiens
  misc_RNA (1)...(19): siRNA sense strand
gagcuaaucgccaacuuug

SEQ ID NO: 1862113 - RNA, 19 nt, Homo sapiens
  misc_RNA (1)...(19): siRNA sense strand
ggaauuuguuucucgaagu

SEQ ID NO: 1862114 - RNA, 19 nt, Homo sapiens
  misc_RNA (1)...(19): siRNA sense strand
guacagcugcggguuauuu

SEQ ID NO: 1862115 - RNA, 19 nt, Homo sapiens
  misc_RNA (1)...(19): siRNA sense strand
cauaguugcugcucagaug

SEQ ID NO: 1862116 - RNA, 19 nt, Homo sapiens
  misc_RNA (1)...(19): siRNA sense strand
gacagacaaucucagaguu

SEQ ID NO: 1862117 - RNA, 19 nt, Homo sapiens
  misc_RNA (1)...(19): siRNA sense strand
caagaacgccugacagaca

SEQ ID NO: 1862118 - RNA, 19 nt, Homo sapiens
  misc_RNA (1)...(19): siRNA sense strand
ugaaagagucuguacaguu

SEQ ID NO: 1862119 - RNA, 19 nt, Homo sapiens
  misc_RNA (1)...(19): siRNA sense strand
gagcugccucgaacuguua

SEQ ID NO: 1862120 - RNA, 19 nt, Homo sapiens
  misc_RNA (1)...(19): siRNA sense strand
cgaguaacaucucacaauc

SEQ ID NO: 1862121 - RNA, 19 nt, Homo sapiens
  misc_RNA (1)...(19): siRNA sense strand
gagaaugggauguugagaa

SEQ ID NO: 1862122 - RNA, 19 nt, Homo sapiens
  misc_RNA (1)...(19): siRNA sense strand
ggacauggaggccuuaagu

SEQ ID NO: 1862123 - RNA, 19 nt, Homo sapiens
  misc_RNA (1)...(19): siRNA sense strand
ggguuuggcugagauauug

SEQ ID NO: 1862124 - RNA, 19 nt, Homo sapiens
  misc_RNA (1)...(19): siRNA sense strand
ccaaggaucuuuuaguuga

SEQ ID NO: 1862125 - RNA, 19 nt, Homo sapiens
  misc_RNA (1)...(19): siRNA sense strand
gauauugcaucagaaguuc

SEQ ID NO: 1862126 - RNA, 19 nt, Homo sapiens
  misc_RNA (1)...(19): siRNA sense strand
cccaggaacuccauucuug

SEQ ID NO: 1862127 - RNA, 19 nt, Homo sapiens
  misc_RNA (1)...(19): siRNA sense strand
ggaaagggacgacguuugg

SEQ ID NO: 1862128 - RNA, 19 nt, Homo sapiens
  misc_RNA (1)...(19): siRNA sense strand
augcauaccugaagccuuu

SEQ ID NO: 1862129 - RNA, 19 nt, Homo sapiens
  misc_RNA (1)...(19): siRNA sense strand
guuacuaggcucagacaua

SEQ ID NO: 1862130 - RNA, 19 nt, Homo sapiens
  misc_RNA (1)...(19): siRNA sense strand
gcuggaggcugugcucaaa

SEQ ID NO: 1862131 - RNA, 19 nt, Homo sapiens
  misc_RNA (1)...(19): siRNA sense strand
gaagcucuguuuagauuuu

SEQ ID NO: 1862132 - RNA, 19 nt, Homo sapiens
  misc_RNA (1)...(19): siRNA sense strand
ugaaagucauugcagagaa

SEQ ID NO: 1862133 - RNA, 19 nt, Homo sapiens
  misc_RNA (1)...(19): siRNA sense strand
gacuuucucugggauuaua

SEQ ID NO: 1862134 - RNA, 19 nt, Homo sapiens
  misc_RNA (1)...(19): siRNA sense strand
gaauuuguuucucgaaguc

SEQ ID NO: 1862135 - RNA, 19 nt, Homo sapiens
  misc_RNA (1)...(19): siRNA sense strand
aauggucucugaauugauu

SEQ ID NO: 1862136 - RNA, 19 nt, Homo sapiens
  misc_RNA (1)...(19): siRNA sense strand
ggaaaucacucagaaaauc

SEQ ID NO: 1862137 - RNA, 19 nt, Homo sapiens
  misc_RNA (1)...(19): siRNA sense strand
cacaguaagaugaagauua

SEQ ID NO: 1862138 - RNA, 19 nt, Homo sapiens
  misc_RNA (1)...(19): siRNA sense strand
gcccuucucuggaauguuc

SEQ ID NO: 1862139 - RNA, 19 nt, Homo sapiens
  misc_RNA (1)...(19): siRNA sense strand
ccaaggcagucgaguaaca

SEQ ID NO: 1862140 - RNA, 19 nt, Homo sapiens
  misc_RNA (1)...(19): siRNA sense strand
uaagagcucuggacacaac

SEQ ID NO: 1862141 - RNA, 19 nt, Homo sapiens
  misc_RNA (1)...(19): siRNA sense strand
gaaccucgaguccaguaaa

SEQ ID NO: 1862142 - RNA, 19 nt, Homo sapiens
  misc_RNA (1)...(19): siRNA sense strand
uaacuucucuaagcacaga

SEQ ID NO: 1862143 - RNA, 19 nt, Homo sapiens
  misc_RNA (1)...(19): siRNA sense strand
ggaaauucgcugauaagug

SEQ ID NO: 1862144 - RNA, 19 nt, Homo sapiens
  misc_RNA (1)...(19): siRNA sense strand
gccuaaagcucaaggauga

SEQ ID NO: 1862145 - RNA, 19 nt, Homo sapiens
  misc_RNA (1)...(19): siRNA sense strand
gcacucaauuggaccauga

SEQ ID NO: 1862146 - RNA, 19 nt, Homo sapiens
  misc_RNA (1)...(19): siRNA sense strand
gggcaucucucucaagguu

SEQ ID NO: 1862147 - RNA, 19 nt, Homo sapiens
  misc_RNA (1)...(19): siRNA sense strand
gaaacaaguugcccggaau

SEQ ID NO: 1862148 - RNA, 19 nt, Homo sapiens
  misc_RNA (1)...(19): siRNA sense strand
gcaaaguggucucagaaca

SEQ ID NO: 1862149 - RNA, 19 nt, Homo sapiens
  misc_RNA (1)...(19): siRNA sense strand
gaauggacuucacagcaaa

SEQ ID NO: 1862150 - RNA, 19 nt, Homo sapiens
  misc_RNA (1)...(19): siRNA sense strand
caccaaagcucccgagugu

SEQ ID NO: 1862151 - RNA, 19 nt, Homo sapiens
  misc_RNA (1)...(19): siRNA sense strand
cuagucagcuccacucuau

SEQ ID NO: 1862152 - RNA, 19 nt, Homo sapiens
  misc_RNA (1)...(19): siRNA sense strand
aauccaaccucaugccuaa

SEQ ID NO: 1862153 - RNA, 19 nt, Homo sapiens
  misc_RNA (1)...(19): siRNA sense strand
aaaguggucucagaacaaa

SEQ ID NO: 1862154 - RNA, 19 nt, Homo sapiens
  misc_RNA (1)...(19): siRNA sense strand
ggagcucucucugcacauu

SEQ ID NO: 1862155 - RNA, 19 nt, Homo sapiens
  misc_RNA (1)...(19): siRNA sense strand
gagagucuauuggaaacaa

SEQ ID NO: 1862156 - RNA, 19 nt, Homo sapiens
  misc_RNA (1)...(19): siRNA sense strand
gcaggacacgucaugcuaa

SEQ ID NO: 1862157 - RNA, 19 nt, Homo sapiens
  misc_RNA (1)...(19): siRNA sense strand
agaauggacuucacagcaa

SEQ ID NO: 1862158 - RNA, 19 nt, Homo sapiens
  misc_RNA (1)...(19): siRNA sense strand
gaugagagagucuauugga

SEQ ID NO: 1862159 - RNA, 19 nt, Homo sapiens
  misc_RNA (1)...(19): siRNA sense strand
gagagagucuauuggaaac

SEQ ID NO: 1862160 - RNA, 19 nt, Homo sapiens
  misc_RNA (1)...(19): siRNA sense strand
caaaguggucucagaacaa

SEQ ID NO: 1862161 - RNA, 19 nt, Homo sapiens
  misc_RNA (1)...(19): siRNA sense strand
ugagagagucuauuggaaa

SEQ ID NO: 1862162 - RNA, 19 nt, Homo sapiens
  misc_RNA (1)...(19): siRNA sense strand
ccaaagcucccgagugugu

SEQ ID NO: 1862163 - RNA, 19 nt, Homo sapiens
  misc_RNA (1)...(19): siRNA sense strand
acacccagauuaagcagaa

SEQ ID NO: 1862164 - RNA, 19 nt, Homo sapiens
  misc_RNA (1)...(19): siRNA sense strand
ggaagacugcccuggaguu

SEQ ID NO: 1862165 - RNA, 19 nt, Homo sapiens
  misc_RNA (1)...(19): siRNA sense strand
acacaaagcccaggaagga

SEQ ID NO: 1862166 - RNA, 19 nt, Homo sapiens
  misc_RNA (1)...(19): siRNA sense strand
gaggagggcaucucucuca

SEQ ID NO: 1862167 - RNA, 19 nt, Homo sapiens
  misc_RNA (1)...(19): siRNA sense strand
agaauccagucuuaagcua

SEQ ID NO: 1862168 - RNA, 19 nt, Homo sapiens
  misc_RNA (1)...(19): siRNA sense strand
ggaguucuguggagagacu

SEQ ID NO: 1862169 - RNA, 19 nt, Homo sapiens
  misc_RNA (1)...(19): siRNA sense strand
gcacauucuuccucagcau

SEQ ID NO: 1862170 - RNA, 19 nt, Homo sapiens
  misc_RNA (1)...(19): siRNA sense strand
uuuccagaauccagucuua

SEQ ID NO: 1862171 - RNA, 19 nt, Homo sapiens
  misc_RNA (1)...(19): siRNA sense strand
cagcaaaguggucucagaa

SEQ ID NO: 1862172 - RNA, 19 nt, Homo sapiens
  misc_RNA (1)...(19): siRNA sense strand
gaagacugcccuggaguuc

SEQ ID NO: 1862173 - RNA, 19 nt, Homo sapiens
  misc_RNA (1)...(19): siRNA sense strand
ccaaagaccaagccaacug

SEQ ID NO: 1862174 - RNA, 19 nt, Homo sapiens
  misc_RNA (1)...(19): siRNA sense strand
agucagcuccacucuauuu

SEQ ID NO: 1862175 - RNA, 19 nt, Homo sapiens
  misc_RNA (1)...(19): siRNA sense strand
aaaccagagugugcagaaa

SEQ ID NO: 1862176 - RNA, 19 nt, Homo sapiens
  misc_RNA (1)...(19): siRNA sense strand
gcaacacccagauuaagca

SEQ ID NO: 1862177 - RNA, 19 nt, Homo sapiens
  misc_RNA (1)...(19): siRNA sense strand
acagcaaaguggucucaga

SEQ ID NO: 1862178 - RNA, 19 nt, Homo sapiens
  misc_RNA (1)...(19): siRNA sense strand
ccucaugccuaaagcucaa

SEQ ID NO: 1862179 - RNA, 19 nt, Homo sapiens
  misc_RNA (1)...(19): siRNA sense strand
agacugcccuggaguucug

SEQ ID NO: 1862180 - RNA, 19 nt, Homo sapiens
  misc_RNA (1)...(19): siRNA sense strand
ggaacacaaagcccaggaa

SEQ ID NO: 1862181 - RNA, 19 nt, Homo sapiens
  misc_RNA (1)...(19): siRNA sense strand
gcuagucagcuccacucua

SEQ ID NO: 1862182 - RNA, 19 nt, Homo sapiens
  misc_RNA (1)...(19): siRNA sense strand
ggacccagauauggcaaac

SEQ ID NO: 1862183 - RNA, 19 nt, Homo sapiens
  misc_RNA (1)...(19): siRNA sense strand
cuguagauauuccaagaca

SEQ ID NO: 1862184 - RNA, 19 nt, Homo sapiens
  misc_RNA (1)...(19): siRNA sense strand
gaccauggccaccaaagcu

SEQ ID NO: 1862185 - RNA, 19 nt, Homo sapiens
  misc_RNA (1)...(19): siRNA sense strand
caaagcccaggaaggagaa

SEQ ID NO: 1862186 - RNA, 19 nt, Homo sapiens
  misc_RNA (1)...(19): siRNA sense strand
gggcaacacccagauuaag

SEQ ID NO: 1862187 - RNA, 19 nt, Homo sapiens
  misc_RNA (1)...(19): siRNA sense strand
gcaggaggagggcaucucu

SEQ ID NO: 1862188 - RNA, 19 nt, Homo sapiens
  misc_RNA (1)...(19): siRNA sense strand
aggaugagagagucuauug

SEQ ID NO: 1862189 - RNA, 19 nt, Homo sapiens
  misc_RNA (1)...(19): siRNA sense strand
cgggaacaaaggcaaguuu

SEQ ID NO: 1862190 - RNA, 19 nt, Homo sapiens
  misc_RNA (1)...(19): siRNA sense strand
aauccagucuuaagcuagu

SEQ ID NO: 1862191 - RNA, 19 nt, Homo sapiens
  misc_RNA (1)...(19): siRNA sense strand
gaauuuuccugugucuuug

SEQ ID NO: 1862192 - RNA, 19 nt, Homo sapiens
  misc_RNA (1)...(19): siRNA sense strand
cacauucuuccucagcaua

SEQ ID NO: 1862193 - RNA, 19 nt, Homo sapiens
  misc_RNA (1)...(19): siRNA sense strand
gagugugcagaaaggauuu

SEQ ID NO: 1862194 - RNA, 19 nt, Homo sapiens
  misc_RNA (1)...(19): siRNA sense strand
caaggaugagagagucuau

SEQ ID NO: 1862195 - RNA, 19 nt, Homo sapiens
  misc_RNA (1)...(19): siRNA sense strand
aaggcaaguuugucaccaa

SEQ ID NO: 1862196 - RNA, 19 nt, Homo sapiens
  misc_RNA (1)...(19): siRNA sense strand
ugaauuuuccugugucuuu

SEQ ID NO: 1862197 - RNA, 19 nt, Homo sapiens
  misc_RNA (1)...(19): siRNA sense strand
augagagagucuauuggaa

SEQ ID NO: 1862198 - RNA, 19 nt, Homo sapiens
  misc_RNA (1)...(19): siRNA sense strand
gaaaucaggucuuaacuug

SEQ ID NO: 1862199 - RNA, 19 nt, Homo sapiens
  misc_RNA (1)...(19): siRNA sense strand
gcaaugaucuccuaagaag

SEQ ID NO: 1862200 - RNA, 19 nt, Homo sapiens
  misc_RNA (1)...(19): siRNA sense strand
gaauaagucuggauuaagu

SEQ ID NO: 1862201 - RNA, 19 nt, Homo sapiens
  misc_RNA (1)...(19): siRNA sense strand
gaugguagagcauauauua

SEQ ID NO: 1862202 - RNA, 19 nt, Homo sapiens
  misc_RNA (1)...(19): siRNA sense strand
gaggagaacauguauauuu

SEQ ID NO: 1862203 - RNA, 19 nt, Homo sapiens
  misc_RNA (1)...(19): siRNA sense strand
ggagagcccugaaacuauu

SEQ ID NO: 1862204 - RNA, 19 nt, Homo sapiens
  misc_RNA (1)...(19): siRNA sense strand
cagaaagucuaacuaauga

SEQ ID NO: 1862205 - RNA, 19 nt, Homo sapiens
  misc_RNA (1)...(19): siRNA sense strand
gggaguaacugaagguauu

SEQ ID NO: 1862206 - RNA, 19 nt, Homo sapiens
  misc_RNA (1)...(19): siRNA sense strand
gaagcacacugaagauaga

SEQ ID NO: 1862207 - RNA, 19 nt, Homo sapiens
  misc_RNA (1)...(19): siRNA sense strand
uaauaaagcuagccaagga

SEQ ID NO: 1862208 - RNA, 19 nt, Homo sapiens
  misc_RNA (1)...(19): siRNA sense strand
gcagaaagucuaacuaaug

SEQ ID NO: 1862209 - RNA, 19 nt, Homo sapiens
  misc_RNA (1)...(19): siRNA sense strand
uaacaaggcuuuggaaucu

SEQ ID NO: 1862210 - RNA, 19 nt, Homo sapiens
  misc_RNA (1)...(19): siRNA sense strand
gggaacacaugcccacuuu

SEQ ID NO: 1862211 - RNA, 19 nt, Homo sapiens
  misc_RNA (1)...(19): siRNA sense strand
gcaaugcuaugagaagauu

SEQ ID NO: 1862212 - RNA, 19 nt, Homo sapiens
  misc_RNA (1)...(19): siRNA sense strand
gugaaaagcugauggauuu

SEQ ID NO: 1862213 - RNA, 19 nt, Homo sapiens
  misc_RNA (1)...(19): siRNA sense strand
gaaaugaaagacucagaaa

SEQ ID NO: 1862214 - RNA, 19 nt, Homo sapiens
  misc_RNA (1)...(19): siRNA sense strand
gcuauuauuucucuugcua

SEQ ID NO: 1862215 - RNA, 19 nt, Homo sapiens
  misc_RNA (1)...(19): siRNA sense strand
gaaagaacaucagauacca

SEQ ID NO: 1862216 - RNA, 19 nt, Homo sapiens
  misc_RNA (1)...(19): siRNA sense strand
gaaaugaggaguuaacaag

SEQ ID NO: 1862217 - RNA, 19 nt, Homo sapiens
  misc_RNA (1)...(19): siRNA sense strand
gaacagcacccgaggacuu

SEQ ID NO: 1862218 - RNA, 19 nt, Homo sapiens
  misc_RNA (1)...(19): siRNA sense strand
gaaauuaggcagauugagu

SEQ ID NO: 1862219 - RNA, 19 nt, Homo sapiens
  misc_RNA (1)...(19): siRNA sense strand
gacgggaaaugaggaguua

SEQ ID NO: 1862220 - RNA, 19 nt, Homo sapiens
  misc_RNA (1)...(19): siRNA sense strand
uaagugaccuugcagaaag

SEQ ID NO: 1862221 - RNA, 19 nt, Homo sapiens
  misc_RNA (1)...(19): siRNA sense strand
caaccaaccagcaguuuaa

SEQ ID NO: 1862222 - RNA, 19 nt, Homo sapiens
  misc_RNA (1)...(19): siRNA sense strand
ccaacaacgugcucuauuc

SEQ ID NO: 1862223 - RNA, 19 nt, Homo sapiens
  misc_RNA (1)...(19): siRNA sense strand
ggaagauaaugaugcucua

SEQ ID NO: 1862224 - RNA, 19 nt, Homo sapiens
  misc_RNA (1)...(19): siRNA sense strand
gaccaagcuuucagaggua

SEQ ID NO: 1862225 - RNA, 19 nt, Homo sapiens
  misc_RNA (1)...(19): siRNA sense strand
ucuggucacuucaggauua

SEQ ID NO: 1862226 - RNA, 19 nt, Homo sapiens
  misc_RNA (1)...(19): siRNA sense strand
caaagaugguagagcauau

SEQ ID NO: 1862227 - RNA, 19 nt, Homo sapiens
  misc_RNA (1)...(19): siRNA sense strand
gcugauggauuuacaacug

SEQ ID NO: 1862228 - RNA, 19 nt, Homo sapiens
  misc_RNA (1)...(19): siRNA sense strand
ggaaaugaaagacucagaa

SEQ ID NO: 1862229 - RNA, 19 nt, Homo sapiens
  misc_RNA (1)...(19): siRNA sense strand
gaugagcaaucacuuugga

SEQ ID NO: 1862230 - RNA, 19 nt, Homo sapiens
  misc_RNA (1)...(19): siRNA sense strand
gugcaaugaucuccuaaga

SEQ ID NO: 1862231 - RNA, 19 nt, Homo sapiens
  misc_RNA (1)...(19): siRNA sense strand
gauucuggcucccuacuug

SEQ ID NO: 1862232 - RNA, 19 nt, Homo sapiens
  misc_RNA (1)...(19): siRNA sense strand
ggaugaagaugaggaagau

SEQ ID NO: 1862233 - RNA, 19 nt, Homo sapiens
  misc_RNA (1)...(19): siRNA sense strand
uaccaaaccuacgagaaua

SEQ ID NO: 1862234 - RNA, 19 nt, Homo sapiens
  misc_RNA (1)...(19): siRNA sense strand
ucagagguauucuagaaga

SEQ ID NO: 1862235 - RNA, 19 nt, Homo sapiens
  misc_RNA (1)...(19): siRNA sense strand
ggugaacaauggaagauuc

SEQ ID NO: 1862236 - RNA, 19 nt, Homo sapiens
  misc_RNA (1)...(19): siRNA sense strand
aaagcuagccaaggaauua

SEQ ID NO: 1862237 - RNA, 19 nt, Homo sapiens
  misc_RNA (1)...(19): siRNA sense strand
gcucuauuccaauugauua

SEQ ID NO: 1862238 - RNA, 19 nt, Homo sapiens
  misc_RNA (1)...(19): siRNA sense strand
aggaauggauguagaagaa

SEQ ID NO: 1862239 - RNA, 19 nt, Homo sapiens
  misc_RNA (1)...(19): siRNA sense strand
gaacacaugcccacuuugg

SEQ ID NO: 1862240 - RNA, 19 nt, Homo sapiens
  misc_RNA (1)...(19): siRNA sense strand
gaagauagagaagaaggaa

SEQ ID NO: 1862241 - RNA, 19 nt, Homo sapiens
  misc_RNA (1)...(19): siRNA sense strand
uuucagagguauucuagaa

SEQ ID NO: 1862242 - RNA, 19 nt, Homo sapiens
  misc_RNA (1)...(19): siRNA sense strand
cugaauaagucuggauuaa

SEQ ID NO: 1862243 - RNA, 19 nt, Homo sapiens
  misc_RNA (1)...(19): siRNA sense strand
gaauauaaggcuaugaaca

SEQ ID NO: 1862244 - RNA, 19 nt, Homo sapiens
  misc_RNA (1)...(19): siRNA sense strand
ccagagaggccuugaacaa

SEQ ID NO: 1862245 - RNA, 19 nt, Homo sapiens
  misc_RNA (1)...(19): siRNA sense strand
uauggaagccuguaaauca

SEQ ID NO: 1862246 - RNA, 19 nt, Homo sapiens
  misc_RNA (1)...(19): siRNA sense strand
acaaggcuuuggaaucuuu

SEQ ID NO: 1862247 - RNA, 19 nt, Homo sapiens
  misc_RNA (1)...(19): siRNA sense strand
ggaacccugugcaaugcua

SEQ ID NO: 1862248 - RNA, 19 nt, Homo sapiens
  misc_RNA (1)...(19): siRNA sense strand
gaaagucuaacuaaugaca

SEQ ID NO: 1862249 - RNA, 19 nt, Homo sapiens
  misc_RNA (1)...(19): siRNA sense strand
uguaacaggagaacaaaua

SEQ ID NO: 1862250 - RNA, 19 nt, Homo sapiens
  misc_RNA (1)...(19): siRNA sense strand
gagaggccuugaacaacaa

SEQ ID NO: 1862251 - RNA, 19 nt, Homo sapiens
  misc_RNA (1)...(19): siRNA sense strand
cuacguaugugcaaugauc

SEQ ID NO: 1862252 - RNA, 19 nt, Homo sapiens
  misc_RNA (1)...(19): siRNA sense strand
uuaaugcacugaauaaguc

SEQ ID NO: 1862253 - RNA, 19 nt, Homo sapiens
  misc_RNA (1)...(19): siRNA sense strand
gaaagacucagaaauuagg

SEQ ID NO: 1862254 - RNA, 19 nt, Homo sapiens
  misc_RNA (1)...(19): siRNA sense strand
ccaacaagcugggugaaca

SEQ ID NO: 1862255 - RNA, 19 nt, Homo sapiens
  misc_RNA (1)...(19): siRNA sense strand
aaaugaaaguccugauguu

SEQ ID NO: 1862256 - RNA, 19 nt, Homo sapiens
  misc_RNA (1)...(19): siRNA sense strand
ggauugaagauacuacaaa

SEQ ID NO: 1862257 - RNA, 19 nt, Homo sapiens
  misc_RNA (1)...(19): siRNA sense strand
gacacauccuguugcagua

SEQ ID NO: 1862258 - RNA, 19 nt, Homo sapiens
  misc_RNA (1)...(19): siRNA sense strand
gaaagaaagaacaucagau

SEQ ID NO: 1862259 - RNA, 19 nt, Homo sapiens
  misc_RNA (1)...(19): siRNA sense strand
uuaggcagauugaguguga

SEQ ID NO: 1862260 - RNA, 19 nt, Homo sapiens
  misc_RNA (1)...(19): siRNA sense strand
uggaaucuuugcccugaua

SEQ ID NO: 1862261 - RNA, 19 nt, Homo sapiens
  misc_RNA (1)...(19): siRNA sense strand
caagcugggugaacaaugg

SEQ ID NO: 1862262 - RNA, 19 nt, Homo sapiens
  misc_RNA (1)...(19): siRNA sense strand
gaagaaguuuuagcuguuu

SEQ ID NO: 1862263 - RNA, 19 nt, Homo sapiens
  misc_RNA (1)...(19): siRNA sense strand
ggacgcgguuuacgaaguc

SEQ ID NO: 1862264 - RNA, 19 nt, Homo sapiens
  misc_RNA (1)...(19): siRNA sense strand
ggaaaugaggaguuaacaa

SEQ ID NO: 1862265 - RNA, 19 nt, Homo sapiens
  misc_RNA (1)...(19): siRNA sense strand
caauacaaaugagcaggaa

SEQ ID NO: 1862266 - RNA, 19 nt, Homo sapiens
  misc_RNA (1)...(19): siRNA sense strand
gauaaugaugcucuacuga

SEQ ID NO: 1862267 - RNA, 19 nt, Homo sapiens
  misc_RNA (1)...(19): siRNA sense strand
auaaggcuaugaacaauuc

SEQ ID NO: 1862268 - RNA, 19 nt, Homo sapiens
  misc_RNA (1)...(19): siRNA sense strand
gaagaaggaauggauguag

SEQ ID NO: 1862269 - RNA, 19 nt, Homo sapiens
  misc_RNA (1)...(19): siRNA sense strand
gacaaugagacaaauaguu

SEQ ID NO: 1862270 - RNA, 19 nt, Homo sapiens
  misc_RNA (1)...(19): siRNA sense strand
gugaagacaugaagaugag

SEQ ID NO: 1862271 - RNA, 19 nt, Homo sapiens
  misc_RNA (1)...(19): siRNA sense strand
agagaggccuugaacaaca

SEQ ID NO: 1862272 - RNA, 19 nt, Homo sapiens
  misc_RNA (1)...(19): siRNA sense strand
cgaaaugggagaugaggaa

SEQ ID NO: 1862273 - RNA, 19 nt, Homo sapiens
  misc_RNA (1)...(19): siRNA sense strand
aaaugaagguugcccaagu

SEQ ID NO: 1862274 - RNA, 19 nt, Homo sapiens
  misc_RNA (1)...(19): siRNA sense strand
ccaaccaaccagcaguuua

SEQ ID NO: 1862275 - RNA, 19 nt, Homo sapiens
  misc_RNA (1)...(19): siRNA sense strand
acaugaagaugagagcuaa

SEQ ID NO: 1862276 - RNA, 19 nt, Homo sapiens
  misc_RNA (1)...(19): siRNA sense strand
aaucaggucuuaacuugca

SEQ ID NO: 1862277 - RNA, 19 nt, Homo sapiens
  misc_RNA (1)...(19): siRNA sense strand
cuaaugacaaugagacaaa

SEQ ID NO: 1862278 - RNA, 19 nt, Homo sapiens
  misc_RNA (1)...(19): siRNA sense strand
uaaugaugcucuacugaag

SEQ ID NO: 1862279 - RNA, 19 nt, Homo sapiens
  misc_RNA (1)...(19): siRNA sense strand
ggaauuaccgccuccuucu

SEQ ID NO: 1862280 - RNA, 19 nt, Homo sapiens
  misc_RNA (1)...(19): siRNA sense strand
ucaaagaugguagagcaua

SEQ ID NO: 1862281 - RNA, 19 nt, Homo sapiens
  misc_RNA (1)...(19): siRNA sense strand
cagaagcacacugaagaua

SEQ ID NO: 1862282 - RNA, 19 nt, Homo sapiens
  misc_RNA (1)...(19): siRNA sense strand
gcacacugaagauagagaa

SEQ ID NO: 1862283 - RNA, 19 nt, Homo sapiens
  misc_RNA (1)...(19): siRNA sense strand
guaacugaagguauuugua

SEQ ID NO: 1862284 - RNA, 19 nt, Homo sapiens
  misc_RNA (1)...(19): siRNA sense strand
aaugaagguugcccaaguu

SEQ ID NO: 1862285 - RNA, 19 nt, Homo sapiens
  misc_RNA (1)...(19): siRNA sense strand
gagaagaaggaauggaugu

SEQ ID NO: 1862286 - RNA, 19 nt, Homo sapiens
  misc_RNA (1)...(19): siRNA sense strand
aaauguugcuacuuggaaa

SEQ ID NO: 1862287 - RNA, 19 nt, Homo sapiens
  misc_RNA (1)...(19): siRNA sense strand
gguagagcauauauuaaac

SEQ ID NO: 1862288 - RNA, 19 nt, Homo sapiens
  misc_RNA (1)...(19): siRNA sense strand
uaacuuucgucgacacauc

SEQ ID NO: 1862289 - RNA, 19 nt, Homo sapiens
  misc_RNA (1)...(19): siRNA sense strand
aagaaggaauggauguaga

SEQ ID NO: 1862290 - RNA, 19 nt, Homo sapiens
  misc_RNA (1)...(19): siRNA sense strand
uaugugcaaugaucuccua

SEQ ID NO: 1862291 - RNA, 19 nt, Homo sapiens
  misc_RNA (1)...(19): siRNA sense strand
cacugaagauagagaagaa

SEQ ID NO: 1862292 - RNA, 19 nt, Homo sapiens
  misc_RNA (1)...(19): siRNA sense strand
caagagggaguucaugcaa

SEQ ID NO: 1862293 - RNA, 19 nt, Homo sapiens
  misc_RNA (1)...(19): siRNA sense strand
gacaugaagaugagagcua

SEQ ID NO: 1862294 - RNA, 19 nt, Homo sapiens
  misc_RNA (1)...(19): siRNA sense strand
gauugagugugacagugaa

SEQ ID NO: 1862295 - RNA, 19 nt, Homo sapiens
  misc_RNA (1)...(19): siRNA sense strand
gaagaugaggaagauaaug

SEQ ID NO: 1862296 - RNA, 19 nt, Homo sapiens
  misc_RNA (1)...(19): siRNA sense strand
aaucuuugcccugauaaua

SEQ ID NO: 1862297 - RNA, 19 nt, Homo sapiens
  misc_RNA (1)...(19): siRNA sense strand
ugaaagaaagaacaucaga

SEQ ID NO: 1862298 - RNA, 19 nt, Homo sapiens
  misc_RNA (1)...(19): siRNA sense strand
gcaaagacauuaagacaaa

SEQ ID NO: 1862299 - RNA, 19 nt, Homo sapiens
  misc_RNA (1)...(19): siRNA sense strand
gaaaggaacuggaagaaau

SEQ ID NO: 1862300 - RNA, 19 nt, Homo sapiens
  misc_RNA (1)...(19): siRNA sense strand
uaaaugagcuaccaaauug

SEQ ID NO: 1862301 - RNA, 19 nt, Homo sapiens
  misc_RNA (1)...(19): siRNA sense strand
ggacagcucuuuacuuugu

SEQ ID NO: 1862302 - RNA, 19 nt, Homo sapiens
  misc_RNA (1)...(19): siRNA sense strand
gaagagaugucaguagaaa

SEQ ID NO: 1862303 - RNA, 19 nt, Homo sapiens
  misc_RNA (1)...(19): siRNA sense strand
gaagugauuugcaagauga

SEQ ID NO: 1862304 - RNA, 19 nt, Homo sapiens
  misc_RNA (1)...(19): siRNA sense strand
gaacuaaaguacaagaugu

SEQ ID NO: 1862305 - RNA, 19 nt, Homo sapiens
  misc_RNA (1)...(19): siRNA sense strand
ggaaagaauuagcagauug

SEQ ID NO: 1862306 - RNA, 19 nt, Homo sapiens
  misc_RNA (1)...(19): siRNA sense strand
ucaaugagcuuguggagaa

SEQ ID NO: 1862307 - RNA, 19 nt, Homo sapiens
  misc_RNA (1)...(19): siRNA sense strand
gaagagaccaucaguauag

SEQ ID NO: 1862308 - RNA, 19 nt, Homo sapiens
  misc_RNA (1)...(19): siRNA sense strand
gagcggagcugauggaaca

SEQ ID NO: 1862309 - RNA, 19 nt, Homo sapiens
  misc_RNA (1)...(19): siRNA sense strand
caggauagguguucuuaaa

SEQ ID NO: 1862310 - RNA, 19 nt, Homo sapiens
  misc_RNA (1)...(19): siRNA sense strand
ccagagauguuuaugacua

SEQ ID NO: 1862311 - RNA, 19 nt, Homo sapiens
  misc_RNA (1)...(19): siRNA sense strand
ggacuccacucuucacuau

SEQ ID NO: 1862312 - RNA, 19 nt, Homo sapiens
  misc_RNA (1)...(19): siRNA sense strand
ucacagcgauucagacuug

SEQ ID NO: 1862313 - RNA, 19 nt, Homo sapiens
  misc_RNA (1)...(19): siRNA sense strand
ggagauauuugcaguguag

SEQ ID NO: 1862314 - RNA, 19 nt, Homo sapiens
  misc_RNA (1)...(19): siRNA sense strand
gagcugaacuggcugaaca

SEQ ID NO: 1862315 - RNA, 19 nt, Homo sapiens
  misc_RNA (1)...(19): siRNA sense strand
cagaagagaugucaguaga

SEQ ID NO: 1862316 - RNA, 19 nt, Homo sapiens
  misc_RNA (1)...(19): siRNA sense strand
ggacaaguaugcugcaagu

SEQ ID NO: 1862317 - RNA, 19 nt, Homo sapiens
  misc_RNA (1)...(19): siRNA sense strand
gcaagcuacugaagaaaug

SEQ ID NO: 1862318 - RNA, 19 nt, Homo sapiens
  misc_RNA (1)...(19): siRNA sense strand
ggacuccucuuccugaaau

SEQ ID NO: 1862319 - RNA, 19 nt, Homo sapiens
  misc_RNA (1)...(19): siRNA sense strand
gaaaggagaacuaaaguac

SEQ ID NO: 1862320 - RNA, 19 nt, Homo sapiens
  misc_RNA (1)...(19): siRNA sense strand
gcagaucugguuccaauuu

SEQ ID NO: 1862321 - RNA, 19 nt, Homo sapiens
  misc_RNA (1)...(19): siRNA sense strand
gcaagugagaacauauuua

SEQ ID NO: 1862322 - RNA, 19 nt, Homo sapiens
  misc_RNA (1)...(19): siRNA sense strand
gcgaugcuguugagaauau

SEQ ID NO: 1862323 - RNA, 19 nt, Homo sapiens
  misc_RNA (1)...(19): siRNA sense strand
ggaacuggaagaaaugaua

SEQ ID NO: 1862324 - RNA, 19 nt, Homo sapiens
  misc_RNA (1)...(19): siRNA sense strand
gaucaggaauuguauaacu

SEQ ID NO: 1862325 - RNA, 19 nt, Homo sapiens
  misc_RNA (1)...(19): siRNA sense strand
ccagcaagcuacugaagaa

SEQ ID NO: 1862326 - RNA, 19 nt, Homo sapiens
  misc_RNA (1)...(19): siRNA sense strand
gaugaaagagauuguauug

SEQ ID NO: 1862327 - RNA, 19 nt, Homo sapiens
  misc_RNA (1)...(19): siRNA sense strand
ggaguuugcucgauaccuu

SEQ ID NO: 1862328 - RNA, 19 nt, Homo sapiens
  misc_RNA (1)...(19): siRNA sense strand
ggaaaggagaacuaaagua

SEQ ID NO: 1862329 - RNA, 19 nt, Homo sapiens
  misc_RNA (1)...(19): siRNA sense strand
aaagagaagugauuugcaa

SEQ ID NO: 1862330 - RNA, 19 nt, Homo sapiens
  misc_RNA (1)...(19): siRNA sense strand
ggaagcagcuaguaaugag

SEQ ID NO: 1862331 - RNA, 19 nt, Homo sapiens
  misc_RNA (1)...(19): siRNA sense strand
gauauuacagagcgucuua

SEQ ID NO: 1862332 - RNA, 19 nt, Homo sapiens
  misc_RNA (1)...(19): siRNA sense strand
uuagauaccuugcagauca

SEQ ID NO: 1862333 - RNA, 19 nt, Homo sapiens
  misc_RNA (1)...(19): siRNA sense strand
cuggacagcucuuuacuuu

SEQ ID NO: 1862334 - RNA, 19 nt, Homo sapiens
  misc_RNA (1)...(19): siRNA sense strand
agacaaaguuucuucuguu

SEQ ID NO: 1862335 - RNA, 19 nt, Homo sapiens
  misc_RNA (1)...(19): siRNA sense strand
cuuaaacacuugcaugauu

SEQ ID NO: 1862336 - RNA, 19 nt, Homo sapiens
  misc_RNA (1)...(19): siRNA sense strand
ggagcucauugaacgauuu

SEQ ID NO: 1862337 - RNA, 19 nt, Homo sapiens
  misc_RNA (1)...(19): siRNA sense strand
acagcgaugucaaguauuu

SEQ ID NO: 1862338 - RNA, 19 nt, Homo sapiens
  misc_RNA (1)...(19): siRNA sense strand
caagaugaacuggauauaa

SEQ ID NO: 1862339 - RNA, 19 nt, Homo sapiens
  misc_RNA (1)...(19): siRNA sense strand
gcucuuuacuuuguacuuu

SEQ ID NO: 1862340 - RNA, 19 nt, Homo sapiens
  misc_RNA (1)...(19): siRNA sense strand
uagcaaugaugaugugaaa

SEQ ID NO: 1862341 - RNA, 19 nt, Homo sapiens
  misc_RNA (1)...(19): siRNA sense strand
ugaaagagauuguauugcu

SEQ ID NO: 1862342 - RNA, 19 nt, Homo sapiens
  misc_RNA (1)...(19): siRNA sense strand
ggagaacuuuggcagaugu

SEQ ID NO: 1862343 - RNA, 19 nt, Homo sapiens
  misc_RNA (1)...(19): siRNA sense strand
gcccggaguuugcucgaua

SEQ ID NO: 1862344 - RNA, 19 nt, Homo sapiens
  misc_RNA (1)...(19): siRNA sense strand
gcacagcguccucaaccua

SEQ ID NO: 1862345 - RNA, 19 nt, Homo sapiens
  misc_RNA (1)...(19): siRNA sense strand
caaaugacaggguuccuaa

SEQ ID NO: 1862346 - RNA, 19 nt, Homo sapiens
  misc_RNA (1)...(19): siRNA sense strand
ccgaaaggcuugugcugaa

SEQ ID NO: 1862347 - RNA, 19 nt, Homo sapiens
  misc_RNA (1)...(19): siRNA sense strand
ucagcgagauggugaagaa

SEQ ID NO: 1862348 - RNA, 19 nt, Homo sapiens
  misc_RNA (1)...(19): siRNA sense strand
gacaaaguuucuucuguuc

SEQ ID NO: 1862349 - RNA, 19 nt, Homo sapiens
  misc_RNA (1)...(19): siRNA sense strand
gaucucaguguuaguaauu

SEQ ID NO: 1862350 - RNA, 19 nt, Homo sapiens
  misc_RNA (1)...(19): siRNA sense strand
ucucuuagaucaggaauug

SEQ ID NO: 1862351 - RNA, 19 nt, Homo sapiens
  misc_RNA (1)...(19): siRNA sense strand
ccacauugaugauccagau

SEQ ID NO: 1862352 - RNA, 19 nt, Homo sapiens
  misc_RNA (1)...(19): siRNA sense strand
ccucagacaugcaguggaa

SEQ ID NO: 1862353 - RNA, 19 nt, Homo sapiens
  misc_RNA (1)...(19): siRNA sense strand
gagaagugauuugcaagau

SEQ ID NO: 1862354 - RNA, 19 nt, Homo sapiens
  misc_RNA (1)...(19): siRNA sense strand
gcuuuguucugauaaugua

SEQ ID NO: 1862355 - RNA, 19 nt, Homo sapiens
  misc_RNA (1)...(19): siRNA sense strand
aaggagaacuaaaguacaa

SEQ ID NO: 1862356 - RNA, 19 nt, Homo sapiens
  misc_RNA (1)...(19): siRNA sense strand
cuacaaaucuauguuacga

SEQ ID NO: 1862357 - RNA, 19 nt, Homo sapiens
  misc_RNA (1)...(19): siRNA sense strand
aaacaagucaggcagcuuu

SEQ ID NO: 1862358 - RNA, 19 nt, Homo sapiens
  misc_RNA (1)...(19): siRNA sense strand
gcaaaugacaggguuccua

SEQ ID NO: 1862359 - RNA, 19 nt, Homo sapiens
  misc_RNA (1)...(19): siRNA sense strand
ggaguggaccucaucaaug

SEQ ID NO: 1862360 - RNA, 19 nt, Homo sapiens
  misc_RNA (1)...(19): siRNA sense strand
ggugacagauaauaguaga

SEQ ID NO: 1862361 - RNA, 19 nt, Homo sapiens
  misc_RNA (1)...(19): siRNA sense strand
uaaaagaccucgaugaagu

SEQ ID NO: 1862362 - RNA, 19 nt, Homo sapiens
  misc_RNA (1)...(19): siRNA sense strand
ccacgagcuugcaguuauu

SEQ ID NO: 1862363 - RNA, 19 nt, Homo sapiens
  misc_RNA (1)...(19): siRNA sense strand
ggaagucugcgaugaugaa

SEQ ID NO: 1862364 - RNA, 19 nt, Homo sapiens
  misc_RNA (1)...(19): siRNA sense strand
cagaagcuguggcuauaau

SEQ ID NO: 1862365 - RNA, 19 nt, Homo sapiens
  misc_RNA (1)...(19): siRNA sense strand
gaccuuucauaucuacuuu

SEQ ID NO: 1862366 - RNA, 19 nt, Homo sapiens
  misc_RNA (1)...(19): siRNA sense strand
gacaugcaguggaaaguuc

SEQ ID NO: 1862367 - RNA, 19 nt, Homo sapiens
  misc_RNA (1)...(19): siRNA sense strand
gaggaaaggagaacuaaag

SEQ ID NO: 1862368 - RNA, 19 nt, Homo sapiens
  misc_RNA (1)...(19): siRNA sense strand
gauuugauguggagaccaa

SEQ ID NO: 1862369 - RNA, 19 nt, Homo sapiens
  misc_RNA (1)...(19): siRNA sense strand
cacagacgguugacacuga

SEQ ID NO: 1862370 - RNA, 19 nt, Homo sapiens
  misc_RNA (1)...(19): siRNA sense strand
gaagauucugugccuuuaa

SEQ ID NO: 1862371 - RNA, 19 nt, Homo sapiens
  misc_RNA (1)...(19): siRNA sense strand
ccugguaacuacaaaucua

SEQ ID NO: 1862372 - RNA, 19 nt, Homo sapiens
  misc_RNA (1)...(19): siRNA sense strand
aaauguugcugcccagauu

SEQ ID NO: 1862373 - RNA, 19 nt, Homo sapiens
  misc_RNA (1)...(19): siRNA sense strand
gaaagaauuagcagauugg

SEQ ID NO: 1862374 - RNA, 19 nt, Homo sapiens
  misc_RNA (1)...(19): siRNA sense strand
ggauauaaaugagcuacca

SEQ ID NO: 1862375 - RNA, 19 nt, Homo sapiens
  misc_RNA (1)...(19): siRNA sense strand
gcaagaugaacuggauaua

SEQ ID NO: 1862376 - RNA, 19 nt, Homo sapiens
  misc_RNA (1)...(19): siRNA sense strand
guuaguaauuccaguguca

SEQ ID NO: 1862377 - RNA, 19 nt, Homo sapiens
  misc_RNA (1)...(19): siRNA sense strand
agauucagcucucuuagau

SEQ ID NO: 1862378 - RNA, 19 nt, Homo sapiens
  misc_RNA (1)...(19): siRNA sense strand
gagaccaucaguauagaaa

SEQ ID NO: 1862379 - RNA, 19 nt, Homo sapiens
  misc_RNA (1)...(19): siRNA sense strand
ugaagagaccaucaguaua

SEQ ID NO: 1862380 - RNA, 19 nt, Homo sapiens
  misc_RNA (1)...(19): siRNA sense strand
guauaacuccuuccauuuc

SEQ ID NO: 1862381 - RNA, 19 nt, Homo sapiens
  misc_RNA (1)...(19): siRNA sense strand
gcagauuggccgaugauuc

SEQ ID NO: 1862382 - RNA, 19 nt, Homo sapiens
  misc_RNA (1)...(19): siRNA sense strand
cagagauguuuaugacuau

SEQ ID NO: 1862383 - RNA, 19 nt, Homo sapiens
  misc_RNA (1)...(19): siRNA sense strand
cugcagaucugguuccaau

SEQ ID NO: 1862384 - RNA, 19 nt, Homo sapiens
  misc_RNA (1)...(19): siRNA sense strand
gaugaggaaaggagaacua

SEQ ID NO: 1862385 - RNA, 19 nt, Homo sapiens
  misc_RNA (1)...(19): siRNA sense strand
gagauuguauugcuguuuu

SEQ ID NO: 1862386 - RNA, 19 nt, Homo sapiens
  misc_RNA (1)...(19): siRNA sense strand
cagauuggccgaugauuca

SEQ ID NO: 1862387 - RNA, 19 nt, Homo sapiens
  misc_RNA (1)...(19): siRNA sense strand
caaaguuucuucuguucgu

SEQ ID NO: 1862388 - RNA, 19 nt, Homo sapiens
  misc_RNA (1)...(19): siRNA sense strand
acaaguaugcugcaaguga

SEQ ID NO: 1862389 - RNA, 19 nt, Homo sapiens
  misc_RNA (1)...(19): siRNA sense strand
gaacuggaagaaaugauag

SEQ ID NO: 1862390 - RNA, 19 nt, Homo sapiens
  misc_RNA (1)...(19): siRNA sense strand
guaguuggccagcaagcua

SEQ ID NO: 1862391 - RNA, 19 nt, Homo sapiens
  misc_RNA (1)...(19): siRNA sense strand
gagcuugcaguuauucuug

SEQ ID NO: 1862392 - RNA, 19 nt, Homo sapiens
  misc_RNA (1)...(19): siRNA sense strand
agucugcgaugaugaaaga

SEQ ID NO: 1862393 - RNA, 19 nt, Homo sapiens
  misc_RNA (1)...(19): siRNA sense strand
ggaagccucuaggugaaau

SEQ ID NO: 1862394 - RNA, 19 nt, Homo sapiens
  misc_RNA (1)...(19): siRNA sense strand
agaauaaucaggugaggaa

SEQ ID NO: 1862395 - RNA, 19 nt, Homo sapiens
  misc_RNA (1)...(19): siRNA sense strand
gcuaguaaugagaaugaua

SEQ ID NO: 1862396 - RNA, 19 nt, Homo sapiens
  misc_RNA (1)...(19): siRNA sense strand
gaaaggcuugugcugaaug

SEQ ID NO: 1862397 - RNA, 19 nt, Homo sapiens
  misc_RNA (1)...(19): siRNA sense strand
ggucugugcugccaauuuu

SEQ ID NO: 1862398 - RNA, 19 nt, Homo sapiens
  misc_RNA (1)...(19): siRNA sense strand
gaaacuagaugaagacuua

SEQ ID NO: 1862399 - RNA, 19 nt, Homo sapiens
  misc_RNA (1)...(19): siRNA sense strand
gaacuacggugaagcuuua

SEQ ID NO: 1862400 - RNA, 19 nt, Homo sapiens
  misc_RNA (1)...(19): siRNA sense strand
gguaauagcugguaugauc

SEQ ID NO: 1862401 - RNA, 19 nt, Homo sapiens
  misc_RNA (1)...(19): siRNA sense strand
caaaucuucugaugucuua

SEQ ID NO: 1862402 - RNA, 19 nt, Homo sapiens
  misc_RNA (1)...(19): siRNA sense strand
gagaaucuuuggaguaauu

SEQ ID NO: 1862403 - RNA, 19 nt, Homo sapiens
  misc_RNA (1)...(19): siRNA sense strand
ccaaggagcugagaaagaa

SEQ ID NO: 1862404 - RNA, 19 nt, Homo sapiens
  misc_RNA (1)...(19): siRNA sense strand
gaagugaucaccauuuauu

SEQ ID NO: 1862405 - RNA, 19 nt, Homo sapiens
  misc_RNA (1)...(19): siRNA sense strand
aaacaucacugaagggaaa

SEQ ID NO: 1862406 - RNA, 19 nt, Homo sapiens
  misc_RNA (1)...(19): siRNA sense strand
gaugaagacuuacauguca

SEQ ID NO: 1862407 - RNA, 19 nt, Homo sapiens
  misc_RNA (1)...(19): siRNA sense strand
gaaacucaaugcuacgauu

SEQ ID NO: 1862408 - RNA, 19 nt, Homo sapiens
  misc_RNA (1)...(19): siRNA sense strand
ucaacgagguuauaguuaa

SEQ ID NO: 1862409 - RNA, 19 nt, Homo sapiens
  misc_RNA (1)...(19): siRNA sense strand
cagagaaucuuuggaguaa

SEQ ID NO: 1862410 - RNA, 19 nt, Homo sapiens
  misc_RNA (1)...(19): siRNA sense strand
cgaaaugcuuaucucaaua

SEQ ID NO: 1862411 - RNA, 19 nt, Homo sapiens
  misc_RNA (1)...(19): siRNA sense strand
gaaagguaauuugguggua

SEQ ID NO: 1862412 - RNA, 19 nt, Homo sapiens
  misc_RNA (1)...(19): siRNA sense strand
ccuaauggcuggcgucaaa

SEQ ID NO: 1862413 - RNA, 19 nt, Homo sapiens
  misc_RNA (1)...(19): siRNA sense strand
gaaaaggucucacuauugu

SEQ ID NO: 1862414 - RNA, 19 nt, Homo sapiens
  misc_RNA (1)...(19): siRNA sense strand
gaagacaacaguauccaaa

SEQ ID NO: 1862415 - RNA, 19 nt, Homo sapiens
  misc_RNA (1)...(19): siRNA sense strand
uaagaaagcucgaaaugcu

SEQ ID NO: 1862416 - RNA, 19 nt, Homo sapiens
  misc_RNA (1)...(19): siRNA sense strand
ggaaggaccuccacacacu

SEQ ID NO: 1862417 - RNA, 19 nt, Homo sapiens
  misc_RNA (1)...(19): siRNA sense strand
caagacacauugacguuug

SEQ ID NO: 1862418 - RNA, 19 nt, Homo sapiens
  misc_RNA (1)...(19): siRNA sense strand
gggcacagcuggaguucuu

SEQ ID NO: 1862419 - RNA, 19 nt, Homo sapiens
  misc_RNA (1)...(19): siRNA sense strand
ccaaggaaauuaacaacau

SEQ ID NO: 1862420 - RNA, 19 nt, Homo sapiens
  misc_RNA (1)...(19): siRNA sense strand
gaaagaugcucagaagucu

SEQ ID NO: 1862421 - RNA, 19 nt, Homo sapiens
  misc_RNA (1)...(19): siRNA sense strand
ccaaauggguaccuucaug

SEQ ID NO: 1862422 - RNA, 19 nt, Homo sapiens
  misc_RNA (1)...(19): siRNA sense strand
gcacuuugaugauggaaca

SEQ ID NO: 1862423 - RNA, 19 nt, Homo sapiens
  misc_RNA (1)...(19): siRNA sense strand
ccaccuccuuuguuuauuu

SEQ ID NO: 1862424 - RNA, 19 nt, Homo sapiens
  misc_RNA (1)...(19): siRNA sense strand
gugaugggcuggccuaaug

SEQ ID NO: 1862425 - RNA, 19 nt, Homo sapiens
  misc_RNA (1)...(19): siRNA sense strand
gaaccuaccugggcuuuac

SEQ ID NO: 1862426 - RNA, 19 nt, Homo sapiens
  misc_RNA (1)...(19): siRNA sense strand
gacagucccaucaaaguua

SEQ ID NO: 1862427 - RNA, 19 nt, Homo sapiens
  misc_RNA (1)...(19): siRNA sense strand
gcucugauguucauuucuu

SEQ ID NO: 1862428 - RNA, 19 nt, Homo sapiens
  misc_RNA (1)...(19): siRNA sense strand
ggaccuagccaccuuccua

SEQ ID NO: 1862429 - RNA, 19 nt, Homo sapiens
  misc_RNA (1)...(19): siRNA sense strand
ucaaccgcauggccaauua

SEQ ID NO: 1862430 - RNA, 19 nt, Homo sapiens
  misc_RNA (1)...(19): siRNA sense strand
cgaagucaauggaaggauu

SEQ ID NO: 1862431 - RNA, 19 nt, Homo sapiens
  misc_RNA (1)...(19): siRNA sense strand
cuauaucacuuacgcauug

SEQ ID NO: 1862432 - RNA, 19 nt, Homo sapiens
  misc_RNA (1)...(19): siRNA sense strand
uaaauaacaugcgugucua

SEQ ID NO: 1862433 - RNA, 19 nt, Homo sapiens
  misc_RNA (1)...(19): siRNA sense strand
guacauccuuggugccauu

SEQ ID NO: 1862434 - RNA, 19 nt, Homo sapiens
  misc_RNA (1)...(19): siRNA sense strand
guacaauguugacugcuau

SEQ ID NO: 1862435 - RNA, 19 nt, Homo sapiens
  misc_RNA (1)...(19): siRNA sense strand
ugaagaaggagaugaauau

SEQ ID NO: 1862436 - RNA, 19 nt, Homo sapiens
  misc_RNA (1)...(19): siRNA sense strand
gaaacucaacgagguuaua

SEQ ID NO: 1862437 - RNA, 19 nt, Homo sapiens
  misc_RNA (1)...(19): siRNA sense strand
ucucauguguuaccucuuu

SEQ ID NO: 1862438 - RNA, 19 nt, Homo sapiens
  misc_RNA (1)...(19): siRNA sense strand
acaauaacgucacuucaau

SEQ ID NO: 1862439 - RNA, 19 nt, Homo sapiens
  misc_RNA (1)...(19): siRNA sense strand
cacaguagcccaauuagaa

SEQ ID NO: 1862440 - RNA, 19 nt, Homo sapiens
  misc_RNA (1)...(19): siRNA sense strand
caaggaaauuaacaacaug

SEQ ID NO: 1862441 - RNA, 19 nt, Homo sapiens
  misc_RNA (1)...(19): siRNA sense strand
gcacaugacuuggacaaaa

SEQ ID NO: 1862442 - RNA, 19 nt, Homo sapiens
  misc_RNA (1)...(19): siRNA sense strand
agacagagaggcacaauug

SEQ ID NO: 1862443 - RNA, 19 nt, Homo sapiens
  misc_RNA (1)...(19): siRNA sense strand
cuacuaccauuccuacuga

SEQ ID NO: 1862444 - RNA, 19 nt, Homo sapiens
  misc_RNA (1)...(19): siRNA sense strand
ucagaagucuauuccgauu

SEQ ID NO: 1862445 - RNA, 19 nt, Homo sapiens
  misc_RNA (1)...(19): siRNA sense strand
ccaugaauauguucuuguu

SEQ ID NO: 1862446 - RNA, 19 nt, Homo sapiens
  misc_RNA (1)...(19): siRNA sense strand
cagcuuaaaccaugaauau

SEQ ID NO: 1862447 - RNA, 19 nt, Homo sapiens
  misc_RNA (1)...(19): siRNA sense strand
aagcaaagcugguuuuauu

SEQ ID NO: 1862448 - RNA, 19 nt, Homo sapiens
  misc_RNA (1)...(19): siRNA sense strand
gguaugaucuacaaguaca

SEQ ID NO: 1862449 - RNA, 19 nt, Homo sapiens
  misc_RNA (1)...(19): siRNA sense strand
uaccugggcuuuacuucua

SEQ ID NO: 1862450 - RNA, 19 nt, Homo sapiens
  misc_RNA (1)...(19): siRNA sense strand
gagcaaaggaacaugaaga

SEQ ID NO: 1862451 - RNA, 19 nt, Homo sapiens
  misc_RNA (1)...(19): siRNA sense strand
ggagaugcaugacagugau

SEQ ID NO: 1862452 - RNA, 19 nt, Homo sapiens
  misc_RNA (1)...(19): siRNA sense strand
ccagcaauguggagcaauu

SEQ ID NO: 1862453 - RNA, 19 nt, Homo sapiens
  misc_RNA (1)...(19): siRNA sense strand
uggauuggcuagugguaua

SEQ ID NO: 1862454 - RNA, 19 nt, Homo sapiens
  misc_RNA (1)...(19): siRNA sense strand
caacaugacagucccauca

SEQ ID NO: 1862455 - RNA, 19 nt, Homo sapiens
  misc_RNA (1)...(19): siRNA sense strand
uaucauggcuggaucaaac

SEQ ID NO: 1862456 - RNA, 19 nt, Homo sapiens
  misc_RNA (1)...(19): siRNA sense strand
aaacagagcgagacagaga

SEQ ID NO: 1862457 - RNA, 19 nt, Homo sapiens
  misc_RNA (1)...(19): siRNA sense strand
agacaacaguauccaaaug

SEQ ID NO: 1862458 - RNA, 19 nt, Homo sapiens
  misc_RNA (1)...(19): siRNA sense strand
auacggaucuucacaguag

SEQ ID NO: 1862459 - RNA, 19 nt, Homo sapiens
  misc_RNA (1)...(19): siRNA sense strand
gugaugcugugaaagguaa

SEQ ID NO: 1862460 - RNA, 19 nt, Homo sapiens
  misc_RNA (1)...(19): siRNA sense strand
gcucuaagaccaaggaaau

SEQ ID NO: 1862461 - RNA, 19 nt, Homo sapiens
  misc_RNA (1)...(19): siRNA sense strand
uaacaagucccaugaagca

SEQ ID NO: 1862462 - RNA, 19 nt, Homo sapiens
  misc_RNA (1)...(19): siRNA sense strand
ggugaaagaccgaaacuca

SEQ ID NO: 1862463 - RNA, 19 nt, Homo sapiens
  misc_RNA (1)...(19): siRNA sense strand
ucgaaaugcuuaucucaau

SEQ ID NO: 1862464 - RNA, 19 nt, Homo sapiens
  misc_RNA (1)...(19): siRNA sense strand
guucauuucuuccugguau

SEQ ID NO: 1862465 - RNA, 19 nt, Homo sapiens
  misc_RNA (1)...(19): siRNA sense strand
gagcuuggaauacucauug

SEQ ID NO: 1862466 - RNA, 19 nt, Homo sapiens
  misc_RNA (1)...(19): siRNA sense strand
caccugugaugaauacuuu

SEQ ID NO: 1862467 - RNA, 19 nt, Homo sapiens
  misc_RNA (1)...(19): siRNA sense strand
gaagaaggagaugaauauu

SEQ ID NO: 1862468 - RNA, 19 nt, Homo sapiens
  misc_RNA (1)...(19): siRNA sense strand
gacaacaguauccaaauga

SEQ ID NO: 1862469 - RNA, 19 nt, Homo sapiens
  misc_RNA (1)...(19): siRNA sense strand
gaccauaaagcaccuaaug

SEQ ID NO: 1862470 - RNA, 19 nt, Homo sapiens
  misc_RNA (1)...(19): siRNA sense strand
gauaacaucauaccguuuc

SEQ ID NO: 1862471 - RNA, 19 nt, Homo sapiens
  misc_RNA (1)...(19): siRNA sense strand
ugccaaggauaacaucaua

SEQ ID NO: 1862472 - RNA, 19 nt, Homo sapiens
  misc_RNA (1)...(19): siRNA sense strand
caaguacauugaauaccaa

SEQ ID NO: 1862473 - RNA, 19 nt, Homo sapiens
  misc_RNA (1)...(19): siRNA sense strand
gcacaugcggcuauccaaa

SEQ ID NO: 1862474 - RNA, 19 nt, Homo sapiens
  misc_RNA (1)...(19): siRNA sense strand
gcauacggaucuucacagu

SEQ ID NO: 1862475 - RNA, 19 nt, Homo sapiens
  misc_RNA (1)...(19): siRNA sense strand
cauaagaaagcucgaaaug

SEQ ID NO: 1862476 - RNA, 19 nt, Homo sapiens
  misc_RNA (1)...(19): siRNA sense strand
caccuccuuuguuuauuua

SEQ ID NO: 1862477 - RNA, 19 nt, Homo sapiens
  misc_RNA (1)...(19): siRNA sense strand
gcuuaaaccaugaauaugu

SEQ ID NO: 1862478 - RNA, 19 nt, Homo sapiens
  misc_RNA (1)...(19): siRNA sense strand
uugcaaacauuacuucgaa

SEQ ID NO: 1862479 - RNA, 19 nt, Homo sapiens
  misc_RNA (1)...(19): siRNA sense strand
ucuaagaccaaggaaauua

SEQ ID NO: 1862480 - RNA, 19 nt, Homo sapiens
  misc_RNA (1)...(19): siRNA sense strand
acaaguacauugaauacca

SEQ ID NO: 1862481 - RNA, 19 nt, Homo sapiens
  misc_RNA (1)...(19): siRNA sense strand
gaacaugaagaggcagaaa

SEQ ID NO: 1862482 - RNA, 19 nt, Homo sapiens
  misc_RNA (1)...(19): siRNA sense strand
gacaacugcugcccaucuu

SEQ ID NO: 1862483 - RNA, 19 nt, Homo sapiens
  misc_RNA (1)...(19): siRNA sense strand
ggaaaaggucucacuauug

SEQ ID NO: 1862484 - RNA, 19 nt, Homo sapiens
  misc_RNA (1)...(19): siRNA sense strand
guucggugaugcugugaaa

SEQ ID NO: 1862485 - RNA, 19 nt, Homo sapiens
  misc_RNA (1)...(19): siRNA sense strand
gaccaccuccuuuguuuau

SEQ ID NO: 1862486 - RNA, 19 nt, Homo sapiens
  misc_RNA (1)...(19): siRNA sense strand
cgaaaagccuucagccaaa

SEQ ID NO: 1862487 - RNA, 19 nt, Homo sapiens
  misc_RNA (1)...(19): siRNA sense strand
uagcugguaugaucuacaa

SEQ ID NO: 1862488 - RNA, 19 nt, Homo sapiens
  misc_RNA (1)...(19): siRNA sense strand
cggcuucgaucucucaaga

SEQ ID NO: 1862489 - RNA, 19 nt, Homo sapiens
  misc_RNA (1)...(19): siRNA sense strand
ggauucaggauucagauga

SEQ ID NO: 1862490 - RNA, 19 nt, Homo sapiens
  misc_RNA (1)...(19): siRNA sense strand
ucaagagccuaguuuagca

SEQ ID NO: 1862491 - RNA, 19 nt, Homo sapiens
  misc_RNA (1)...(19): siRNA sense strand
ugaaagaugcucagaaguc

SEQ ID NO: 1862492 - RNA, 19 nt, Homo sapiens
  misc_RNA (1)...(19): siRNA sense strand
gaaagaccgaaacucaaug

SEQ ID NO: 1862493 - RNA, 19 nt, Homo sapiens
  misc_RNA (1)...(19): siRNA sense strand
gaaggaccuccacacacua

SEQ ID NO: 1862494 - RNA, 19 nt, Homo sapiens
  misc_RNA (1)...(19): siRNA sense strand
guacauugaauaccaagga

SEQ ID NO: 1862495 - RNA, 19 nt, Homo sapiens
  misc_RNA (1)...(19): siRNA sense strand
cauuguagccaugguaaua

SEQ ID NO: 1862496 - RNA, 19 nt, Homo sapiens
  misc_RNA (1)...(19): siRNA sense strand
guuauuggcuccuucuuuu

SEQ ID NO: 1862497 - RNA, 19 nt, Homo sapiens
  misc_RNA (1)...(19): siRNA sense strand
guuaacaagucccaugaag

SEQ ID NO: 1862498 - RNA, 19 nt, Homo sapiens
  misc_RNA (1)...(19): siRNA sense strand
ucacagauaucuccauuug

SEQ ID NO: 1862499 - RNA, 19 nt, Homo sapiens
  misc_RNA (1)...(19): siRNA sense strand
gcagccgccucacagauau

SEQ ID NO: 1862500 - RNA, 19 nt, Homo sapiens
  misc_RNA (1)...(19): siRNA sense strand
aagcuaugcugcacacuga

SEQ ID NO: 1862501 - RNA, 19 nt, Homo sapiens
  misc_RNA (1)...(19): siRNA sense strand
ccucacagauaucuccauu

SEQ ID NO: 1862502 - RNA, 19 nt, Homo sapiens
  misc_RNA (1)...(19): siRNA sense strand
ggaugaacguggccugaag

SEQ ID NO: 1862503 - RNA, 19 nt, Homo sapiens
  misc_RNA (1)...(19): siRNA sense strand
uacagaagcuggacaacca

SEQ ID NO: 1862504 - RNA, 19 nt, Homo sapiens
  misc_RNA (1)...(19): siRNA sense strand
ccaguuuccuucccucuca

SEQ ID NO: 1862505 - RNA, 19 nt, Homo sapiens
  misc_RNA (1)...(19): siRNA sense strand
ggcagccgccucacagaua

SEQ ID NO: 1862506 - RNA, 19 nt, Homo sapiens
  misc_RNA (1)...(19): siRNA sense strand
uggcugagcucuucuaccu

SEQ ID NO: 1862507 - RNA, 19 nt, Homo sapiens
  misc_RNA (1)...(19): siRNA sense strand
gagcugucccgugcacuga

SEQ ID NO: 1862508 - RNA, 19 nt, Homo sapiens
  misc_RNA (1)...(19): siRNA sense strand
gaagcugacgcggaagaug

SEQ ID NO: 1862509 - RNA, 19 nt, Homo sapiens
  misc_RNA (1)...(19): siRNA sense strand
ggaaaucacuccaaucaga

SEQ ID NO: 1862510 - RNA, 19 nt, Homo sapiens
  misc_RNA (1)...(19): siRNA sense strand
ggaauuggcugacuauuuu

SEQ ID NO: 1862511 - RNA, 19 nt, Homo sapiens
  misc_RNA (1)...(19): siRNA sense strand
gaacagcaacgacgucuuc

SEQ ID NO: 1862512 - RNA, 19 nt, Homo sapiens
  misc_RNA (1)...(19): siRNA sense strand
ucacgcuggucaaguauuu

SEQ ID NO: 1862513 - RNA, 19 nt, Homo sapiens
  misc_RNA (1)...(19): siRNA sense strand
uuggacaacuuacuguuua

SEQ ID NO: 1862514 - RNA, 19 nt, Homo sapiens
  misc_RNA (1)...(19): siRNA sense strand
aggauacgcuuucuuguga

SEQ ID NO: 1862515 - RNA, 19 nt, Homo sapiens
  misc_RNA (1)...(19): siRNA sense strand
gguaugaccagcugaacua

SEQ ID NO: 1862516 - RNA, 19 nt, Homo sapiens
  misc_RNA (1)...(19): siRNA sense strand
gcaacgugcuccuggacuu

SEQ ID NO: 1862517 - RNA, 19 nt, Homo sapiens
  misc_RNA (1)...(19): siRNA sense strand
caacccuggugaucacuuu

SEQ ID NO: 1862518 - RNA, 19 nt, Homo sapiens
  misc_RNA (1)...(19): siRNA sense strand
cagucacgcuggucaagua

SEQ ID NO: 1862519 - RNA, 19 nt, Homo sapiens
  misc_RNA (1)...(19): siRNA sense strand
guagagaaaugugagucaa

SEQ ID NO: 1862520 - RNA, 19 nt, Homo sapiens
  misc_RNA (1)...(19): siRNA sense strand
caagugacaucucaaaaug

SEQ ID NO: 1862521 - RNA, 19 nt, Homo sapiens
  misc_RNA (1)...(19): siRNA sense strand
acugagggcuggagcauug

SEQ ID NO: 1862522 - RNA, 19 nt, Homo sapiens
  misc_RNA (1)...(19): siRNA sense strand
gaggauacgcuuucuugug

SEQ ID NO: 1862523 - RNA, 19 nt, Homo sapiens
  misc_RNA (1)...(19): siRNA sense strand
ucgcguggcucuucgcauu

SEQ ID NO: 1862524 - RNA, 19 nt, Homo sapiens
  misc_RNA (1)...(19): siRNA sense strand
gcaacgacgucuucuucag

SEQ ID NO: 1862525 - RNA, 19 nt, Homo sapiens
  misc_RNA (1)...(19): siRNA sense strand
agcaguuucuccucaaaua

SEQ ID NO: 1862526 - RNA, 19 nt, Homo sapiens
  misc_RNA (1)...(19): siRNA sense strand
auaaggaauuggcugacua

SEQ ID NO: 1862527 - RNA, 19 nt, Homo sapiens
  misc_RNA (1)...(19): siRNA sense strand
ccacaggccuacaugaacu

SEQ ID NO: 1862528 - RNA, 19 nt, Homo sapiens
  misc_RNA (1)...(19): siRNA sense strand
aaucacauuucguuccaaa

SEQ ID NO: 1862529 - RNA, 19 nt, Homo sapiens
  misc_RNA (1)...(19): siRNA sense strand
cagcaacgacgucuucuuc

SEQ ID NO: 1862530 - RNA, 19 nt, Homo sapiens
  misc_RNA (1)...(19): siRNA sense strand
ggugaucacuuuugaaauc

SEQ ID NO: 1862531 - RNA, 19 nt, Homo sapiens
  misc_RNA (1)...(19): siRNA sense strand
gauaaggaauuggcugacu

SEQ ID NO: 1862532 - RNA, 19 nt, Homo sapiens
  misc_RNA (1)...(19): siRNA sense strand
cccugaagcucguagagaa

SEQ ID NO: 1862533 - RNA, 19 nt, Homo sapiens
  misc_RNA (1)...(19): siRNA sense strand
gaaagagaccgggguauga

SEQ ID NO: 1862534 - RNA, 19 nt, Homo sapiens
  misc_RNA (1)...(19): siRNA sense strand
gauacgcuuucuugugauc

SEQ ID NO: 1862535 - RNA, 19 nt, Homo sapiens
  misc_RNA (1)...(19): siRNA sense strand
caacuuacuguuuaucuac

SEQ ID NO: 1862536 - RNA, 19 nt, Homo sapiens
  misc_RNA (1)...(19): siRNA sense strand
aggaauuggcugacuauuu

SEQ ID NO: 1862537 - RNA, 19 nt, Homo sapiens
  misc_RNA (1)...(19): siRNA sense strand
gugauuggcuggaucuacu

SEQ ID NO: 1862538 - RNA, 19 nt, Homo sapiens
  misc_RNA (1)...(19): siRNA sense strand
cagcgccauuagcaucaua

SEQ ID NO: 1862539 - RNA, 19 nt, Homo sapiens
  misc_RNA (1)...(19): siRNA sense strand
ccgaggauacgcuuucuug

SEQ ID NO: 1862540 - RNA, 19 nt, Homo sapiens
  misc_RNA (1)...(19): siRNA sense strand
uaaggaauuggcugacuau

SEQ ID NO: 1862541 - RNA, 19 nt, Homo sapiens
  misc_RNA (1)...(19): siRNA sense strand
ggucuucuccaucgucuuc

SEQ ID NO: 1862542 - RNA, 19 nt, Homo sapiens
  misc_RNA (1)...(19): siRNA sense strand
gcguggcucuucgcauuug

SEQ ID NO: 1862543 - RNA, 19 nt, Homo sapiens
  misc_RNA (1)...(19): siRNA sense strand
cagcacuucuguuuguaca

SEQ ID NO: 1862544 - RNA, 19 nt, Homo sapiens
  misc_RNA (1)...(19): siRNA sense strand
cuguuuaucuacauggaaa

SEQ ID NO: 1862545 - RNA, 19 nt, Homo sapiens
  misc_RNA (1)...(19): siRNA sense strand
ggagacccaaccaaguuug

SEQ ID NO: 1862546 - RNA, 19 nt, Homo sapiens
  misc_RNA (1)...(19): siRNA sense strand
cucaggugaucaugaauug

SEQ ID NO: 1862547 - RNA, 19 nt, Homo sapiens
  misc_RNA (1)...(19): siRNA sense strand
ccugguccaucuccuucua

SEQ ID NO: 1862548 - RNA, 19 nt, Homo sapiens
  misc_RNA (1)...(19): siRNA sense strand
ccauuagcaucauaaacca

SEQ ID NO: 1862549 - RNA, 19 nt, Homo sapiens
  misc_RNA (1)...(19): siRNA sense strand
ucauccagcacuucuguuu

SEQ ID NO: 1862550 - RNA, 19 nt, Homo sapiens
  misc_RNA (1)...(19): siRNA sense strand
aaacuccucuuuucaagug

SEQ ID NO: 1862551 - RNA, 19 nt, Homo sapiens
  misc_RNA (1)...(19): siRNA sense strand
agauguuccuccaguccua

SEQ ID NO: 1862552 - RNA, 19 nt, Homo sapiens
  misc_RNA (1)...(19): siRNA sense strand
gagcaguuucuccucaaau

SEQ ID NO: 1862553 - RNA, 19 nt, Homo sapiens
  misc_RNA (1)...(19): siRNA sense strand
cuacaucaaggagcaguuu

SEQ ID NO: 1862554 - RNA, 19 nt, Homo sapiens
  misc_RNA (1)...(19): siRNA sense strand
caggugaucaugaauugga

SEQ ID NO: 1862555 - RNA, 19 nt, Homo sapiens
  misc_RNA (1)...(19): siRNA sense strand
ggauacgcuuucuugugau

SEQ ID NO: 1862556 - RNA, 19 nt, Homo sapiens
  misc_RNA (1)...(19): siRNA sense strand
ccucaggugaucaugaauu

SEQ ID NO: 1862557 - RNA, 19 nt, Homo sapiens
  misc_RNA (1)...(19): siRNA sense strand
ggacaacuuacuguuuauc

SEQ ID NO: 1862558 - RNA, 19 nt, Homo sapiens
  misc_RNA (1)...(19): siRNA sense strand
ucggagacccaaccaaguu

SEQ ID NO: 1862559 - RNA, 19 nt, Homo sapiens
  misc_RNA (1)...(19): siRNA sense strand
ugaagcucguagagaaaug

SEQ ID NO: 1862560 - RNA, 19 nt, Homo sapiens
  misc_RNA (1)...(19): siRNA sense strand
gugacaaacuccucuuuuc

SEQ ID NO: 1862561 - RNA, 19 nt, Homo sapiens
  misc_RNA (1)...(19): siRNA sense strand
ucauaaaccaggugauugg

SEQ ID NO: 1862562 - RNA, 19 nt, Homo sapiens
  misc_RNA (1)...(19): siRNA sense strand
gaagcucguagagaaaugu

SEQ ID NO: 1862563 - RNA, 19 nt, Homo sapiens
  misc_RNA (1)...(19): siRNA sense strand
cacuguuccuccugucgua

SEQ ID NO: 1862564 - RNA, 19 nt, Homo sapiens
  misc_RNA (1)...(19): siRNA sense strand
acccucaggugaucaugaa

SEQ ID NO: 1862565 - RNA, 19 nt, Homo sapiens
  misc_RNA (1)...(19): siRNA sense strand
uaaaugcaacccuggugau

SEQ ID NO: 1862566 - RNA, 19 nt, Homo sapiens
  misc_RNA (1)...(19): siRNA sense strand
aggccuacaugaacuuuua

SEQ ID NO: 1862567 - RNA, 19 nt, Homo sapiens
  misc_RNA (1)...(19): siRNA sense strand
uggacaacuuacuguuuau

SEQ ID NO: 1862568 - RNA, 19 nt, Homo sapiens
  misc_RNA (1)...(19): siRNA sense strand
gcacugagggcuggagcau

SEQ ID NO: 1862569 - RNA, 19 nt, Homo sapiens
  misc_RNA (1)...(19): siRNA sense strand
caguuucucuucugcuucu

SEQ ID NO: 1862570 - RNA, 19 nt, Homo sapiens
  misc_RNA (1)...(19): siRNA sense strand
gccauuagcaucauaaacc

SEQ ID NO: 1862571 - RNA, 19 nt, Homo sapiens
  misc_RNA (1)...(19): siRNA sense strand
auccagcacuucuguuugu

SEQ ID NO: 1862572 - RNA, 19 nt, Homo sapiens
  misc_RNA (1)...(19): siRNA sense strand
gcaguuucuccucaaauac

SEQ ID NO: 1862573 - RNA, 19 nt, Homo sapiens
  misc_RNA (1)...(19): siRNA sense strand
gauuggcuggaucuacuuu

SEQ ID NO: 1862574 - RNA, 19 nt, Homo sapiens
  misc_RNA (1)...(19): siRNA sense strand
gacaacuuacuguuuaucu

SEQ ID NO: 1862575 - RNA, 19 nt, Homo sapiens
  misc_RNA (1)...(19): siRNA sense strand
cggagacccaaccaaguuu

SEQ ID NO: 1862576 - RNA, 19 nt, Homo sapiens
  misc_RNA (1)...(19): siRNA sense strand
gacaaacuccucuuuucaa

SEQ ID NO: 1862577 - RNA, 19 nt, Homo sapiens
  misc_RNA (1)...(19): siRNA sense strand
gcuucagccuccugcagau

SEQ ID NO: 1862578 - RNA, 19 nt, Homo sapiens
  misc_RNA (1)...(19): siRNA sense strand
gcacgcagcugaacaagaa

SEQ ID NO: 1862579 - RNA, 19 nt, Homo sapiens
  misc_RNA (1)...(19): siRNA sense strand
gagaucagcuaugccauua

SEQ ID NO: 1862580 - RNA, 19 nt, Homo sapiens
  misc_RNA (1)...(19): siRNA sense strand
gaaagagcccugucugaaa

SEQ ID NO: 1862581 - RNA, 19 nt, Homo sapiens
  misc_RNA (1)...(19): siRNA sense strand
gagcuaaucaauacaguua

SEQ ID NO: 1862582 - RNA, 19 nt, Homo sapiens
  misc_RNA (1)...(19): siRNA sense strand
agaaggagguggaggagua

SEQ ID NO: 1862583 - RNA, 19 nt, Homo sapiens
  misc_RNA (1)...(19): siRNA sense strand
ccaguaagcucaguuccua

SEQ ID NO: 1862584 - RNA, 19 nt, Homo sapiens
  misc_RNA (1)...(19): siRNA sense strand
gcaaccugguggacucaua

SEQ ID NO: 1862585 - RNA, 19 nt, Homo sapiens
  misc_RNA (1)...(19): siRNA sense strand
gaucagcuaugccauuaag

SEQ ID NO: 1862586 - RNA, 19 nt, Homo sapiens
  misc_RNA (1)...(19): siRNA sense strand
aaagagcccugucugaaau

SEQ ID NO: 1862587 - RNA, 19 nt, Homo sapiens
  misc_RNA (1)...(19): siRNA sense strand
cauuugagcuggugaagau

SEQ ID NO: 1862588 - RNA, 19 nt, Homo sapiens
  misc_RNA (1)...(19): siRNA sense strand
agagaaacgucuacaagga

SEQ ID NO: 1862589 - RNA, 19 nt, Homo sapiens
  misc_RNA (1)...(19): siRNA sense strand
gaacgaaggaccagauucu

SEQ ID NO: 1862590 - RNA, 19 nt, Homo sapiens
  misc_RNA (1)...(19): siRNA sense strand
aaacagaacaugccgaguu

SEQ ID NO: 1862591 - RNA, 19 nt, Homo sapiens
  misc_RNA (1)...(19): siRNA sense strand
gagaucagguggacacucu

SEQ ID NO: 1862592 - RNA, 19 nt, Homo sapiens
  misc_RNA (1)...(19): siRNA sense strand
ccacacguguugaacuuga

SEQ ID NO: 1862593 - RNA, 19 nt, Homo sapiens
  misc_RNA (1)...(19): siRNA sense strand
gcucggugcuggagaacuu

SEQ ID NO: 1862594 - RNA, 19 nt, Homo sapiens
  misc_RNA (1)...(19): siRNA sense strand
ccgagucacuguccuggua

SEQ ID NO: 1862595 - RNA, 19 nt, Homo sapiens
  misc_RNA (1)...(19): siRNA sense strand
ccagggacgucuuggagaa

SEQ ID NO: 1862596 - RNA, 19 nt, Homo sapiens
  misc_RNA (1)...(19): siRNA sense strand
guuaggcaguguaccagua

SEQ ID NO: 1862597 - RNA, 19 nt, Homo sapiens
  misc_RNA (1)...(19): siRNA sense strand
ucaccaagcuugaccugau

SEQ ID NO: 1862598 - RNA, 19 nt, Homo sapiens
  misc_RNA (1)...(19): siRNA sense strand
gcagagaaacgucuacaag

SEQ ID NO: 1862599 - RNA, 19 nt, Homo sapiens
  misc_RNA (1)...(19): siRNA sense strand
ggagaucagcuaugccauu

SEQ ID NO: 1862600 - RNA, 19 nt, Homo sapiens
  misc_RNA (1)...(19): siRNA sense strand
gagcaguccuacaucaaca

SEQ ID NO: 1862601 - RNA, 19 nt, Homo sapiens
  misc_RNA (1)...(19): siRNA sense strand
aacagaacaugccgaguuu

SEQ ID NO: 1862602 - RNA, 19 nt, Homo sapiens
  misc_RNA (1)...(19): siRNA sense strand
gcagaugguccagcaguuu

SEQ ID NO: 1862603 - RNA, 19 nt, Homo sapiens
  misc_RNA (1)...(19): siRNA sense strand
gaaaugugucgaccugguu

SEQ ID NO: 1862604 - RNA, 19 nt, Homo sapiens
  misc_RNA (1)...(19): siRNA sense strand
ugaaagagcccugucugaa

SEQ ID NO: 1862605 - RNA, 19 nt, Homo sapiens
  misc_RNA (1)...(19): siRNA sense strand
gcuaugccauuaagaacau

SEQ ID NO: 1862606 - RNA, 19 nt, Homo sapiens
  misc_RNA (1)...(19): siRNA sense strand
agaucgagcuggccuguga

SEQ ID NO: 1862607 - RNA, 19 nt, Homo sapiens
  misc_RNA (1)...(19): siRNA sense strand
ccgaaucaaucgcaucuuc

SEQ ID NO: 1862608 - RNA, 19 nt, Homo sapiens
  misc_RNA (1)...(19): siRNA sense strand
gacaugauccugcaguuca

SEQ ID NO: 1862609 - RNA, 19 nt, Homo sapiens
  misc_RNA (1)...(19): siRNA sense strand
gagcgaaucgucaccacuu

SEQ ID NO: 1862610 - RNA, 19 nt, Homo sapiens
  misc_RNA (1)...(19): siRNA sense strand
cacgagcgguucccauuug

SEQ ID NO: 1862611 - RNA, 19 nt, Homo sapiens
  misc_RNA (1)...(19): siRNA sense strand
uggugaagauggaguuuga

SEQ ID NO: 1862612 - RNA, 19 nt, Homo sapiens
  misc_RNA (1)...(19): siRNA sense strand
gaucccaucucggccaguu

SEQ ID NO: 1862613 - RNA, 19 nt, Homo sapiens
  misc_RNA (1)...(19): siRNA sense strand
cgaccagccuccagacauc

SEQ ID NO: 1862614 - RNA, 19 nt, Homo sapiens
  misc_RNA (1)...(19): siRNA sense strand
gagaaggaccaggcagaaa

SEQ ID NO: 1862615 - RNA, 19 nt, Homo sapiens
  misc_RNA (1)...(19): siRNA sense strand
gcagccagaaggauauuga

SEQ ID NO: 1862616 - RNA, 19 nt, Homo sapiens
  misc_RNA (1)...(19): siRNA sense strand
ggcccuacguagcaaacua

SEQ ID NO: 1862617 - RNA, 19 nt, Homo sapiens
  misc_RNA (1)...(19): siRNA sense strand
agaaagagaagaaguacau

SEQ ID NO: 1862618 - RNA, 19 nt, Homo sapiens
  misc_RNA (1)...(19): siRNA sense strand
uccaggagcuaaucaauac

SEQ ID NO: 1862619 - RNA, 19 nt, Homo sapiens
  misc_RNA (1)...(19): siRNA sense strand
gcacgccacaucugcagaa

SEQ ID NO: 1862620 - RNA, 19 nt, Homo sapiens
  misc_RNA (1)...(19): siRNA sense strand
ggagcacgcagcugaacaa

SEQ ID NO: 1862621 - RNA, 19 nt, Homo sapiens
  misc_RNA (1)...(19): siRNA sense strand
ggagaacgaaggaccagau

SEQ ID NO: 1862622 - RNA, 19 nt, Homo sapiens
  misc_RNA (1)...(19): siRNA sense strand
agauggaguuugacgagaa

SEQ ID NO: 1862623 - RNA, 19 nt, Homo sapiens
  misc_RNA (1)...(19): siRNA sense strand
gagaggagacagagcgaau

SEQ ID NO: 1862624 - RNA, 19 nt, Homo sapiens
  misc_RNA (1)...(19): siRNA sense strand
gagaacgaaggaccagauu

SEQ ID NO: 1862625 - RNA, 19 nt, Homo sapiens
  misc_RNA (1)...(19): siRNA sense strand
gaagagagccauccccaau

SEQ ID NO: 1862626 - RNA, 19 nt, Homo sapiens
  misc_RNA (1)...(19): siRNA sense strand
caacaucaucggugacauc

SEQ ID NO: 1862627 - RNA, 19 nt, Homo sapiens
  misc_RNA (1)...(19): siRNA sense strand
gcacgucuucgccaucuuc

SEQ ID NO: 1862628 - RNA, 19 nt, Homo sapiens
  misc_RNA (1)...(19): siRNA sense strand
ggaggaguacaagaucuuu

SEQ ID NO: 1862629 - RNA, 19 nt, Homo sapiens
  misc_RNA (1)...(19): siRNA sense strand
caaggaggcgcucaacauc

SEQ ID NO: 1862630 - RNA, 19 nt, Homo sapiens
  misc_RNA (1)...(19): siRNA sense strand
ccacgagcgguucccauuu

SEQ ID NO: 1862631 - RNA, 19 nt, Homo sapiens
  misc_RNA (1)...(19): siRNA sense strand
caucaaccuucgagucuac

SEQ ID NO: 1862632 - RNA, 19 nt, Homo sapiens
  misc_RNA (1)...(19): siRNA sense strand
ucaaggaggcgcucaacau

SEQ ID NO: 1862633 - RNA, 19 nt, Homo sapiens
  misc_RNA (1)...(19): siRNA sense strand
ucagcuaugccauuaagaa

SEQ ID NO: 1862634 - RNA, 19 nt, Homo sapiens
  misc_RNA (1)...(19): siRNA sense strand
gaucgagggcucaggagau

SEQ ID NO: 1862635 - RNA, 19 nt, Homo sapiens
  misc_RNA (1)...(19): siRNA sense strand
ggacaugauccugcaguuc

SEQ ID NO: 1862636 - RNA, 19 nt, Homo sapiens
  misc_RNA (1)...(19): siRNA sense strand
gaaagagaagaaguacaug

SEQ ID NO: 1862637 - RNA, 19 nt, Homo sapiens
  misc_RNA (1)...(19): siRNA sense strand
gauggaguuugacgagaag

SEQ ID NO: 1862638 - RNA, 19 nt, Homo sapiens
  misc_RNA (1)...(19): siRNA sense strand
ucaucgaccucccggguau

SEQ ID NO: 1862639 - RNA, 19 nt, Homo sapiens
  misc_RNA (1)...(19): siRNA sense strand
gcaacugaccaaccacauc

SEQ ID NO: 1862640 - RNA, 19 nt, Homo sapiens
  misc_RNA (1)...(19): siRNA sense strand
guugagaagaggcuacauu

SEQ ID NO: 1862641 - RNA, 19 nt, Homo sapiens
  misc_RNA (1)...(19): siRNA sense strand
ggagagcagccucauucug

SEQ ID NO: 1862642 - RNA, 19 nt, Homo sapiens
  misc_RNA (1)...(19): siRNA sense strand
agccaucccugcucgacua

SEQ ID NO: 1862643 - RNA, 19 nt, Homo sapiens
  misc_RNA (1)...(19): siRNA sense strand
ccaucaaccuucgagucua

SEQ ID NO: 1862644 - RNA, 19 nt, Homo sapiens
  misc_RNA (1)...(19): siRNA sense strand
ggagaaagagaagaaguac

SEQ ID NO: 1862645 - RNA, 19 nt, Homo sapiens
  misc_RNA (1)...(19): siRNA sense strand
gacgggagaucagcuaugc

SEQ ID NO: 1862646 - RNA, 19 nt, Homo sapiens
  misc_RNA (1)...(19): siRNA sense strand
cgccacacguguugaacuu

SEQ ID NO: 1862647 - RNA, 19 nt, Homo sapiens
  misc_RNA (1)...(19): siRNA sense strand
caccaagcuugaccugaug

SEQ ID NO: 1862648 - RNA, 19 nt, Homo sapiens
  misc_RNA (1)...(19): siRNA sense strand
cgggagagcagccucauuc

SEQ ID NO: 1862649 - RNA, 19 nt, Homo sapiens
  misc_RNA (1)...(19): siRNA sense strand
caccucaugaucaacaaua

SEQ ID NO: 1862650 - RNA, 19 nt, Homo sapiens
  misc_RNA (1)...(19): siRNA sense strand
ggagcuaaucaauacaguu

SEQ ID NO: 1862651 - RNA, 19 nt, Homo sapiens
  misc_RNA (1)...(19): siRNA sense strand
guuuacagacuuugaugaa

SEQ ID NO: 1862652 - RNA, 19 nt, Homo sapiens
  misc_RNA (1)...(19): siRNA sense strand
cagcugagaggaaguucuu

SEQ ID NO: 1862653 - RNA, 19 nt, Homo sapiens
  misc_RNA (1)...(19): siRNA sense strand
aggagaaagagaagaagua

SEQ ID NO: 1862654 - RNA, 19 nt, Homo sapiens
  misc_RNA (1)...(19): siRNA sense strand
caauacaguuaggcagugu

SEQ ID NO: 1862655 - RNA, 19 nt, Homo sapiens
  misc_RNA (1)...(19): siRNA sense strand
aguccuacaucaacacgaa

SEQ ID NO: 1862656 - RNA, 19 nt, Homo sapiens
  misc_RNA (1)...(19): siRNA sense strand
agagcucggugcuggagaa

SEQ ID NO: 1862657 - RNA, 19 nt, Homo sapiens
  misc_RNA (1)...(19): siRNA sense strand
acacgaaccaugaggacuu

SEQ ID NO: 1862658 - RNA, 19 nt, Homo sapiens
  misc_RNA (1)...(19): siRNA sense strand
gaaguccggcaggagauug

SEQ ID NO: 1862659 - RNA, 19 nt, Homo sapiens
  misc_RNA (1)...(19): siRNA sense strand
ugaucccgcuggucaacaa

SEQ ID NO: 1862660 - RNA, 19 nt, Homo sapiens
  misc_RNA (1)...(19): siRNA sense strand
aaaugugucgaccugguua

SEQ ID NO: 1862661 - RNA, 19 nt, Homo sapiens
  misc_RNA (1)...(19): siRNA sense strand
ggagucaggaccgggcuuu

SEQ ID NO: 1862662 - RNA, 19 nt, Homo sapiens
  misc_RNA (1)...(19): siRNA sense strand
agcgaaucgucaccacuua

SEQ ID NO: 1862663 - RNA, 19 nt, Homo sapiens
  misc_RNA (1)...(19): siRNA sense strand
cgaccgguguccagcauac

SEQ ID NO: 1862664 - RNA, 19 nt, Homo sapiens
  misc_RNA (1)...(19): siRNA sense strand
gacaucgaguaccgaguca

SEQ ID NO: 1862665 - RNA, 19 nt, Homo sapiens
  misc_RNA (1)...(19): siRNA sense strand
cgagaaggaccaggcagaa

SEQ ID NO: 1862666 - RNA, 19 nt, Homo sapiens
  misc_RNA (1)...(19): siRNA sense strand
ucaacacggagcagagaaa

SEQ ID NO: 1862667 - RNA, 19 nt, Homo sapiens
  misc_RNA (1)...(19): siRNA sense strand
gaggagaaagagaagaagu

SEQ ID NO: 1862668 - RNA, 19 nt, Homo sapiens
  misc_RNA (1)...(19): siRNA sense strand
acauggaccuggccaacuc

SEQ ID NO: 1862669 - RNA, 19 nt, Homo sapiens
  misc_RNA (1)...(19): siRNA sense strand
ugccaacagugaccucuuc

SEQ ID NO: 1862670 - RNA, 19 nt, Homo sapiens
  misc_RNA (1)...(19): siRNA sense strand
gcugcuggccuaccuauac

SEQ ID NO: 1862671 - RNA, 19 nt, Homo sapiens
  misc_RNA (1)...(19): siRNA sense strand
acaaggaugaggaggagaa

SEQ ID NO: 1862672 - RNA, 19 nt, Homo sapiens
  misc_RNA (1)...(19): siRNA sense strand
ggacuuacgacgggagauc

SEQ ID NO: 1862673 - RNA, 19 nt, Homo sapiens
  misc_RNA (1)...(19): siRNA sense strand
gaaucaaucgcaucuucca

SEQ ID NO: 1862674 - RNA, 19 nt, Homo sapiens
  misc_RNA (1)...(19): siRNA sense strand
ugcagaagacgcugaauca

SEQ ID NO: 1862675 - RNA, 19 nt, Homo sapiens
  misc_RNA (1)...(19): siRNA sense strand
gaugaggaggagaaagaga

SEQ ID NO: 1862676 - RNA, 19 nt, Homo sapiens
  misc_RNA (1)...(19): siRNA sense strand
gagcugcuggccuaccuau

SEQ ID NO: 1862677 - RNA, 19 nt, Homo sapiens
  misc_RNA (1)...(19): siRNA sense strand
acucauacguggccaucau

SEQ ID NO: 1862678 - RNA, 19 nt, Homo sapiens
  misc_RNA (1)...(19): siRNA sense strand
ccacaaagcucacucagaa

SEQ ID NO: 1862679 - RNA, 19 nt, Homo sapiens
  misc_RNA (1)...(19): siRNA sense strand
ggaagaaggucaaucaguu

SEQ ID NO: 1862680 - RNA, 19 nt, Homo sapiens
  misc_RNA (1)...(19): siRNA sense strand
ugacagugcugaagacuua

SEQ ID NO: 1862681 - RNA, 19 nt, Homo sapiens
  misc_RNA (1)...(19): siRNA sense strand
ggucaucucuggaaucuaa

SEQ ID NO: 1862682 - RNA, 19 nt, Homo sapiens
  misc_RNA (1)...(19): siRNA sense strand
uaagaacgcugaaggcuuu

SEQ ID NO: 1862683 - RNA, 19 nt, Homo sapiens
  misc_RNA (1)...(19): siRNA sense strand
uggagaagcugcuggauua

SEQ ID NO: 1862684 - RNA, 19 nt, Homo sapiens
  misc_RNA (1)...(19): siRNA sense strand
gcaaggagcuggcggaaca

SEQ ID NO: 1862685 - RNA, 19 nt, Homo sapiens
  misc_RNA (1)...(19): siRNA sense strand
gaacaucauuccugcagaa

SEQ ID NO: 1862686 - RNA, 19 nt, Homo sapiens
  misc_RNA (1)...(19): siRNA sense strand
gagaagauccugaugauga

SEQ ID NO: 1862687 - RNA, 19 nt, Homo sapiens
  misc_RNA (1)...(19): siRNA sense strand
gagaggaaguggugaaguu

SEQ ID NO: 1862688 - RNA, 19 nt, Homo sapiens
  misc_RNA (1)...(19): siRNA sense strand
gagaaugacuuccuacaca

SEQ ID NO: 1862689 - RNA, 19 nt, Homo sapiens
  misc_RNA (1)...(19): siRNA sense strand
gcaaagaacagauggaguu

SEQ ID NO: 1862690 - RNA, 19 nt, Homo sapiens
  misc_RNA (1)...(19): siRNA sense strand
ugaaggaacugaagcagaa

SEQ ID NO: 1862691 - RNA, 19 nt, Homo sapiens
  misc_RNA (1)...(19): siRNA sense strand
ucaaggaccucauuggaaa

SEQ ID NO: 1862692 - RNA, 19 nt, Homo sapiens
  misc_RNA (1)...(19): siRNA sense strand
gcagaaggaugacaugcaa

SEQ ID NO: 1862693 - RNA, 19 nt, Homo sapiens
  misc_RNA (1)...(19): siRNA sense strand
caagguggcugucccuauu

SEQ ID NO: 1862694 - RNA, 19 nt, Homo sapiens
  misc_RNA (1)...(19): siRNA sense strand
gcacuacuccuucuacauu

SEQ ID NO: 1862695 - RNA, 19 nt, Homo sapiens
  misc_RNA (1)...(19): siRNA sense strand
caucauuccugcagaaauu

SEQ ID NO: 1862696 - RNA, 19 nt, Homo sapiens
  misc_RNA (1)...(19): siRNA sense strand
gaaggaauaugagcgaaga

SEQ ID NO: 1862697 - RNA, 19 nt, Homo sapiens
  misc_RNA (1)...(19): siRNA sense strand
ggaccuauauuagagauga

SEQ ID NO: 1862698 - RNA, 19 nt, Homo sapiens
  misc_RNA (1)...(19): siRNA sense strand
gcugaaggcuuuggaauau

SEQ ID NO: 1862699 - RNA, 19 nt, Homo sapiens
  misc_RNA (1)...(19): siRNA sense strand
ucacagagcguaucaaaga

SEQ ID NO: 1862700 - RNA, 19 nt, Homo sapiens
  misc_RNA (1)...(19): siRNA sense strand
ugaaauacaucccaucugu

SEQ ID NO: 1862701 - RNA, 19 nt, Homo sapiens
  misc_RNA (1)...(19): siRNA sense strand
gaauauguguucaaguuca

SEQ ID NO: 1862702 - RNA, 19 nt, Homo sapiens
  misc_RNA (1)...(19): siRNA sense strand
gaagaaauacugagaacau

SEQ ID NO: 1862703 - RNA, 19 nt, Homo sapiens
  misc_RNA (1)...(19): siRNA sense strand
gaaguacugcguugaauug

SEQ ID NO: 1862704 - RNA, 19 nt, Homo sapiens
  misc_RNA (1)...(19): siRNA sense strand
gaaaguacagucuaugaau

SEQ ID NO: 1862705 - RNA, 19 nt, Homo sapiens
  misc_RNA (1)...(19): siRNA sense strand
gcucugaacuuguggacuu

SEQ ID NO: 1862706 - RNA, 19 nt, Homo sapiens
  misc_RNA (1)...(19): siRNA sense strand
ggaagcaucuggaaacaac

SEQ ID NO: 1862707 - RNA, 19 nt, Homo sapiens
  misc_RNA (1)...(19): siRNA sense strand
gaauuagcaucacccaaga

SEQ ID NO: 1862708 - RNA, 19 nt, Homo sapiens
  misc_RNA (1)...(19): siRNA sense strand
caucccagguucaagaaua

SEQ ID NO: 1862709 - RNA, 19 nt, Homo sapiens
  misc_RNA (1)...(19): siRNA sense strand
gggacaagcccaugaauga

SEQ ID NO: 1862710 - RNA, 19 nt, Homo sapiens
  misc_RNA (1)...(19): siRNA sense strand
ggaagugacaguugagaaa

SEQ ID NO: 1862711 - RNA, 19 nt, Homo sapiens
  misc_RNA (1)...(19): siRNA sense strand
gagaugaugugaagaaugc

SEQ ID NO: 1862712 - RNA, 19 nt, Homo sapiens
  misc_RNA (1)...(19): siRNA sense strand
gcagagcacccaaccauug

SEQ ID NO: 1862713 - RNA, 19 nt, Homo sapiens
  misc_RNA (1)...(19): siRNA sense strand
gacaugagacggcuaauug

SEQ ID NO: 1862714 - RNA, 19 nt, Homo sapiens
  misc_RNA (1)...(19): siRNA sense strand
uggaauauguguucaaguu

SEQ ID NO: 1862715 - RNA, 19 nt, Homo sapiens
  misc_RNA (1)...(19): siRNA sense strand
gaccggaaauuucagcauu

SEQ ID NO: 1862716 - RNA, 19 nt, Homo sapiens
  misc_RNA (1)...(19): siRNA sense strand
ggaacgacaucuacauuac

SEQ ID NO: 1862717 - RNA, 19 nt, Homo sapiens
  misc_RNA (1)...(19): siRNA sense strand
ggucuuugaugcgaaguua

SEQ ID NO: 1862718 - RNA, 19 nt, Homo sapiens
  misc_RNA (1)...(19): siRNA sense strand
aagaacagauggaguuuga

SEQ ID NO: 1862719 - RNA, 19 nt, Homo sapiens
  misc_RNA (1)...(19): siRNA sense strand
gaacugaagcagaaaguca

SEQ ID NO: 1862720 - RNA, 19 nt, Homo sapiens
  misc_RNA (1)...(19): siRNA sense strand
caaaagaccagccagauua

SEQ ID NO: 1862721 - RNA, 19 nt, Homo sapiens
  misc_RNA (1)...(19): siRNA sense strand
caacgacacuuugggaaug

SEQ ID NO: 1862722 - RNA, 19 nt, Homo sapiens
  misc_RNA (1)...(19): siRNA sense strand
gggaggagauguacauaag

SEQ ID NO: 1862723 - RNA, 19 nt, Homo sapiens
  misc_RNA (1)...(19): siRNA sense strand
ugagagcuaucaacaaguu

SEQ ID NO: 1862724 - RNA, 19 nt, Homo sapiens
  misc_RNA (1)...(19): siRNA sense strand
gaaagaagaugggacuacu

SEQ ID NO: 1862725 - RNA, 19 nt, Homo sapiens
  misc_RNA (1)...(19): siRNA sense strand
cuacauuacucucuuacaa

SEQ ID NO: 1862726 - RNA, 19 nt, Homo sapiens
  misc_RNA (1)...(19): siRNA sense strand
caucuacauuacucucuua

SEQ ID NO: 1862727 - RNA, 19 nt, Homo sapiens
  misc_RNA (1)...(19): siRNA sense strand
cgcaugagcugcacuguga

SEQ ID NO: 1862728 - RNA, 19 nt, Homo sapiens
  misc_RNA (1)...(19): siRNA sense strand
gaugacagaugagagcaaa

SEQ ID NO: 1862729 - RNA, 19 nt, Homo sapiens
  misc_RNA (1)...(19): siRNA sense strand
gguacaagcuuggucagaa

SEQ ID NO: 1862730 - RNA, 19 nt, Homo sapiens
  misc_RNA (1)...(19): siRNA sense strand
gaccagcucugaacuugug

SEQ ID NO: 1862731 - RNA, 19 nt, Homo sapiens
  misc_RNA (1)...(19): siRNA sense strand
ucacggaucuuggaaacaa

SEQ ID NO: 1862732 - RNA, 19 nt, Homo sapiens
  misc_RNA (1)...(19): siRNA sense strand
ggaggaauguuucaagaac

SEQ ID NO: 1862733 - RNA, 19 nt, Homo sapiens
  misc_RNA (1)...(19): siRNA sense strand
gaagaggccauaagucugu

SEQ ID NO: 1862734 - RNA, 19 nt, Homo sapiens
  misc_RNA (1)...(19): siRNA sense strand
cagaaaccaugaaccagaa

SEQ ID NO: 1862735 - RNA, 19 nt, Homo sapiens
  misc_RNA (1)...(19): siRNA sense strand
gagcuuugaccuggaauua

SEQ ID NO: 1862736 - RNA, 19 nt, Homo sapiens
  misc_RNA (1)...(19): siRNA sense strand
gagaagauuuccagaugca

SEQ ID NO: 1862737 - RNA, 19 nt, Homo sapiens
  misc_RNA (1)...(19): siRNA sense strand
aagagaagauuuccagaug

SEQ ID NO: 1862738 - RNA, 19 nt, Homo sapiens
  misc_RNA (1)...(19): siRNA sense strand
gagcuugauuugauuguca

SEQ ID NO: 1862739 - RNA, 19 nt, Homo sapiens
  misc_RNA (1)...(19): siRNA sense strand
gagagaugccugacuuuga

SEQ ID NO: 1862740 - RNA, 19 nt, Homo sapiens
  misc_RNA (1)...(19): siRNA sense strand
gaagagaagauuuccagau

SEQ ID NO: 1862741 - RNA, 19 nt, Homo sapiens
  misc_RNA (1)...(19): siRNA sense strand
gcccaaaccagacuacuuu

SEQ ID NO: 1862742 - RNA, 19 nt, Homo sapiens
  misc_RNA (1)...(19): siRNA sense strand
gcagguggcggcuuugaaa

SEQ ID NO: 1862743 - RNA, 19 nt, Homo sapiens
  misc_RNA (1)...(19): siRNA sense strand
gcugaagacuuacuuggau

SEQ ID NO: 1862744 - RNA, 19 nt, Homo sapiens
  misc_RNA (1)...(19): siRNA sense strand
uaugaagccucaacugcua

SEQ ID NO: 1862745 - RNA, 19 nt, Homo sapiens
  misc_RNA (1)...(19): siRNA sense strand
gcuggugggugacaucauu

SEQ ID NO: 1862746 - RNA, 19 nt, Homo sapiens
  misc_RNA (1)...(19): siRNA sense strand
ggaagcaacugauaaaauc

SEQ ID NO: 1862747 - RNA, 19 nt, Homo sapiens
  misc_RNA (1)...(19): siRNA sense strand
gcaaaacgcugccuaaugc

SEQ ID NO: 1862748 - RNA, 19 nt, Homo sapiens
  misc_RNA (1)...(19): siRNA sense strand
aaaugaagguggagaagga

SEQ ID NO: 1862749 - RNA, 19 nt, Homo sapiens
  misc_RNA (1)...(19): siRNA sense strand
ccaacuacgugcaaagguu

SEQ ID NO: 1862750 - RNA, 19 nt, Homo sapiens
  misc_RNA (1)...(19): siRNA sense strand
gaagcuggaccacgaggua

SEQ ID NO: 1862751 - RNA, 19 nt, Homo sapiens
  misc_RNA (1)...(19): siRNA sense strand
ucagccaacuccuguauga

SEQ ID NO: 1862752 - RNA, 19 nt, Homo sapiens
  misc_RNA (1)...(19): siRNA sense strand
gaaagcagagagugaugaa

SEQ ID NO: 1862753 - RNA, 19 nt, Homo sapiens
  misc_RNA (1)...(19): siRNA sense strand
gccagugccugaccagauu

SEQ ID NO: 1862754 - RNA, 19 nt, Homo sapiens
  misc_RNA (1)...(19): siRNA sense strand
gaggagauguacauaaggu

SEQ ID NO: 1862755 - RNA, 19 nt, Homo sapiens
  misc_RNA (1)...(19): siRNA sense strand
ggaaguacugcguugaauu

SEQ ID NO: 1862756 - RNA, 19 nt, Homo sapiens
  misc_RNA (1)...(19): siRNA sense strand
gaagucaucaugugugugu

SEQ ID NO: 1862757 - RNA, 19 nt, Homo sapiens
  misc_RNA (1)...(19): siRNA sense strand
gauaauaccagugucauca

SEQ ID NO: 1862758 - RNA, 19 nt, Homo sapiens
  misc_RNA (1)...(19): siRNA sense strand
gaagaaggucaaucaguuc

SEQ ID NO: 1862759 - RNA, 19 nt, Homo sapiens
  misc_RNA (1)...(19): siRNA sense strand
gaacagauggaguuugaag

SEQ ID NO: 1862760 - RNA, 19 nt, Homo sapiens
  misc_RNA (1)...(19): siRNA sense strand
gauuguggauggagaggaa

SEQ ID NO: 1862761 - RNA, 19 nt, Homo sapiens
  misc_RNA (1)...(19): siRNA sense strand
ggauauaacagacaucauc

SEQ ID NO: 1862762 - RNA, 19 nt, Homo sapiens
  misc_RNA (1)...(19): siRNA sense strand
ggacugaggaggcccuuug

SEQ ID NO: 1862763 - RNA, 19 nt, Homo sapiens
  misc_RNA (1)...(19): siRNA sense strand
ugacuuaguuguccucaag

SEQ ID NO: 1862764 - RNA, 19 nt, Homo sapiens
  misc_RNA (1)...(19): siRNA sense strand
cugugaaccugcugaauuu

SEQ ID NO: 1862765 - RNA, 19 nt, Homo sapiens
  misc_RNA (1)...(19): siRNA sense strand
gaacaacuauuuucaucug

SEQ ID NO: 1862766 - RNA, 19 nt, Homo sapiens
  misc_RNA (1)...(19): siRNA sense strand
aaaguacagucuaugaaug

SEQ ID NO: 1862767 - RNA, 19 nt, Homo sapiens
  misc_RNA (1)...(19): siRNA sense strand
ugagacggcucuuugaauc

SEQ ID NO: 1862768 - RNA, 19 nt, Homo sapiens
  misc_RNA (1)...(19): siRNA sense strand
gauggagcauucucaaagu

SEQ ID NO: 1862769 - RNA, 19 nt, Homo sapiens
  misc_RNA (1)...(19): siRNA sense strand
gaaagucacguccaaaauu

SEQ ID NO: 1862770 - RNA, 19 nt, Homo sapiens
  misc_RNA (1)...(19): siRNA sense strand
gagaaaagggugucagaua

SEQ ID NO: 1862771 - RNA, 19 nt, Homo sapiens
  misc_RNA (1)...(19): siRNA sense strand
cgggauguguucuccauuu

SEQ ID NO: 1862772 - RNA, 19 nt, Homo sapiens
  misc_RNA (1)...(19): siRNA sense strand
caucugcgauucauguuuc

SEQ ID NO: 1862773 - RNA, 19 nt, Homo sapiens
  misc_RNA (1)...(19): siRNA sense strand
gaguaucgcuccguugugu

SEQ ID NO: 1862774 - RNA, 19 nt, Homo sapiens
  misc_RNA (1)...(19): siRNA sense strand
gcaaagucauagccuccaa

SEQ ID NO: 1862775 - RNA, 19 nt, Homo sapiens
  misc_RNA (1)...(19): siRNA sense strand
ggaaagccaccauaccaau

SEQ ID NO: 1862776 - RNA, 19 nt, Homo sapiens
  misc_RNA (1)...(19): siRNA sense strand
agaaaagggugucagauaa

SEQ ID NO: 1862777 - RNA, 19 nt, Homo sapiens
  misc_RNA (1)...(19): siRNA sense strand
acaccuggcuucucaagug

SEQ ID NO: 1862778 - RNA, 19 nt, Homo sapiens
  misc_RNA (1)...(19): siRNA sense strand
gaagaggaaugauuucaaa

SEQ ID NO: 1862779 - RNA, 19 nt, Homo sapiens
  misc_RNA (1)...(19): siRNA sense strand
gagagaagaggaaugauuu

SEQ ID NO: 1862780 - RNA, 19 nt, Homo sapiens
  misc_RNA (1)...(19): siRNA sense strand
gaagcagccuuuauguaug

SEQ ID NO: 1862781 - RNA, 19 nt, Homo sapiens
  misc_RNA (1)...(19): siRNA sense strand
ggaaugauuucaaagacau

SEQ ID NO: 1862782 - RNA, 19 nt, Homo sapiens
  misc_RNA (1)...(19): siRNA sense strand
cgaaaccacucgcaaguuc

SEQ ID NO: 1862783 - RNA, 19 nt, Homo sapiens
  misc_RNA (1)...(19): siRNA sense strand
ggagagaagaggaaugauu

SEQ ID NO: 1862784 - RNA, 19 nt, Homo sapiens
  misc_RNA (1)...(19): siRNA sense strand
ugaagcagccuuuauguau

SEQ ID NO: 1862785 - RNA, 19 nt, Homo sapiens
  misc_RNA (1)...(19): siRNA sense strand
agacauagaggacauuaaa

SEQ ID NO: 1862786 - RNA, 19 nt, Homo sapiens
  misc_RNA (1)...(19): siRNA sense strand
ugaaaugaaugagcugauu

SEQ ID NO: 1862787 - RNA, 19 nt, Homo sapiens
  misc_RNA (1)...(19): siRNA sense strand
cuuguugacugcuuuauuu

SEQ ID NO: 1862788 - RNA, 19 nt, Homo sapiens
  misc_RNA (1)...(19): siRNA sense strand
uaaaggagaguaagcagaa

SEQ ID NO: 1862789 - RNA, 19 nt, Homo sapiens
  misc_RNA (1)...(19): siRNA sense strand
gagaguaagcagaaugaaa

SEQ ID NO: 1862790 - RNA, 19 nt, Homo sapiens
  misc_RNA (1)...(19): siRNA sense strand
gaucacagucaucuuuauu

SEQ ID NO: 1862791 - RNA, 19 nt, Homo sapiens
  misc_RNA (1)...(19): siRNA sense strand
gaggagagaagaggaauga

SEQ ID NO: 1862792 - RNA, 19 nt, Homo sapiens
  misc_RNA (1)...(19): siRNA sense strand
ucacagguuucccaagcua

SEQ ID NO: 1862793 - RNA, 19 nt, Homo sapiens
  misc_RNA (1)...(19): siRNA sense strand
guugacugcuuuauuucua

SEQ ID NO: 1862794 - RNA, 19 nt, Homo sapiens
  misc_RNA (1)...(19): siRNA sense strand
ggaucacagucaucuuuau

SEQ ID NO: 1862795 - RNA, 19 nt, Homo sapiens
  misc_RNA (1)...(19): siRNA sense strand
guaagcagaaugaaaugaa

SEQ ID NO: 1862796 - RNA, 19 nt, Homo sapiens
  misc_RNA (1)...(19): siRNA sense strand
gagaagaccguguuuacca

SEQ ID NO: 1862797 - RNA, 19 nt, Homo sapiens
  misc_RNA (1)...(19): siRNA sense strand
gaggaaugauuucaaagac

SEQ ID NO: 1862798 - RNA, 19 nt, Homo sapiens
  misc_RNA (1)...(19): siRNA sense strand
ucaaagacauagaggacau

SEQ ID NO: 1862799 - RNA, 19 nt, Homo sapiens
  misc_RNA (1)...(19): siRNA sense strand
ccaugcauguggccuacua

SEQ ID NO: 1862800 - RNA, 19 nt, Homo sapiens
  misc_RNA (1)...(19): siRNA sense strand
gaagaccguguuuaccauu

SEQ ID NO: 1862801 - RNA, 19 nt, Homo sapiens
  misc_RNA (1)...(19): siRNA sense strand
gcagaagguucggauagag

SEQ ID NO: 1862802 - RNA, 19 nt, Homo sapiens
  misc_RNA (1)...(19): siRNA sense strand
ugauuugcaugcugcuuaa

SEQ ID NO: 1862803 - RNA, 19 nt, Homo sapiens
  misc_RNA (1)...(19): siRNA sense strand
gugauuugcaugcugcuua

SEQ ID NO: 1862804 - RNA, 19 nt, Homo sapiens
  misc_RNA (1)...(19): siRNA sense strand
guacaccagcagcaucuuu

SEQ ID NO: 1862805 - RNA, 19 nt, Homo sapiens
  misc_RNA (1)...(19): siRNA sense strand
agaguaagcagaaugaaau

SEQ ID NO: 1862806 - RNA, 19 nt, Homo sapiens
  misc_RNA (1)...(19): siRNA sense strand
ggacuucgucugcaacaca

SEQ ID NO: 1862807 - RNA, 19 nt, Homo sapiens
  misc_RNA (1)...(19): siRNA sense strand
aagcagccuuuauguaugu

SEQ ID NO: 1862808 - RNA, 19 nt, Homo sapiens
  misc_RNA (1)...(19): siRNA sense strand
guggaucacagucaucuuu

SEQ ID NO: 1862809 - RNA, 19 nt, Homo sapiens
  misc_RNA (1)...(19): siRNA sense strand
gagaagaggaaugauuuca

SEQ ID NO: 1862810 - RNA, 19 nt, Homo sapiens
  misc_RNA (1)...(19): siRNA sense strand
ugugugcuaugaccacuuu

SEQ ID NO: 1862811 - RNA, 19 nt, Homo sapiens
  misc_RNA (1)...(19): siRNA sense strand
ccaaucaugcccuaaagga

SEQ ID NO: 1862812 - RNA, 19 nt, Homo sapiens
  misc_RNA (1)...(19): siRNA sense strand
aaaaugcaaucacagguuu

SEQ ID NO: 1862813 - RNA, 19 nt, Homo sapiens
  misc_RNA (1)...(19): siRNA sense strand
cagagaagaccguguuuac

SEQ ID NO: 1862814 - RNA, 19 nt, Homo sapiens
  misc_RNA (1)...(19): siRNA sense strand
gauuucagauaguggucaa

SEQ ID NO: 1862815 - RNA, 19 nt, Homo sapiens
  misc_RNA (1)...(19): siRNA sense strand
gcuaccugcugcugaaagu

SEQ ID NO: 1862816 - RNA, 19 nt, Homo sapiens
  misc_RNA (1)...(19): siRNA sense strand
gaaaccacucgcaaguuca

SEQ ID NO: 1862817 - RNA, 19 nt, Homo sapiens
  misc_RNA (1)...(19): siRNA sense strand
aaagacauagaggacauua

SEQ ID NO: 1862818 - RNA, 19 nt, Homo sapiens
  misc_RNA (1)...(19): siRNA sense strand
agaggaaugauuucaaaga

SEQ ID NO: 1862819 - RNA, 19 nt, Homo sapiens
  misc_RNA (1)...(19): siRNA sense strand
aagaccguguuuaccauuu

SEQ ID NO: 1862820 - RNA, 19 nt, Homo sapiens
  misc_RNA (1)...(19): siRNA sense strand
acagagaagaccguguuua

SEQ ID NO: 1862821 - RNA, 19 nt, Homo sapiens
  misc_RNA (1)...(19): siRNA sense strand
guguugaaaugugggauug

SEQ ID NO: 1862822 - RNA, 19 nt, Homo sapiens
  misc_RNA (1)...(19): siRNA sense strand
agaagaccguguuuaccau

SEQ ID NO: 1862823 - RNA, 19 nt, Homo sapiens
  misc_RNA (1)...(19): siRNA sense strand
aagaggacuucgucugcaa

SEQ ID NO: 1862824 - RNA, 19 nt, Homo sapiens
  misc_RNA (1)...(19): siRNA sense strand
uggaucacagucaucuuua

SEQ ID NO: 1862825 - RNA, 19 nt, Homo sapiens
  misc_RNA (1)...(19): siRNA sense strand
agaagaggaaugauuucaa

SEQ ID NO: 1862826 - RNA, 19 nt, Homo sapiens
  misc_RNA (1)...(19): siRNA sense strand
gaguaagcagaaugaaaug

SEQ ID NO: 1862827 - RNA, 19 nt, Homo sapiens
  misc_RNA (1)...(19): siRNA sense strand
aggaaugauuucaaagaca

SEQ ID NO: 1862828 - RNA, 19 nt, Homo sapiens
  misc_RNA (1)...(19): siRNA sense strand
ugugcuaccugcugcugaa

SEQ ID NO: 1862829 - RNA, 19 nt, Homo sapiens
  misc_RNA (1)...(19): siRNA sense strand
uugaagcagccuuuaugua

SEQ ID NO: 1862830 - RNA, 19 nt, Homo sapiens
  misc_RNA (1)...(19): siRNA sense strand
caucuuugaagcagccuuu

SEQ ID NO: 1862831 - RNA, 19 nt, Homo sapiens
  misc_RNA (1)...(19): siRNA sense strand
ggacguacaccagcagcau

SEQ ID NO: 1862832 - RNA, 19 nt, Homo sapiens
  misc_RNA (1)...(19): siRNA sense strand
caaagacauagaggacauu

SEQ ID NO: 1862833 - RNA, 19 nt, Homo sapiens
  misc_RNA (1)...(19): siRNA sense strand
cagccuuuauguauguguu

SEQ ID NO: 1862834 - RNA, 19 nt, Homo sapiens
  misc_RNA (1)...(19): siRNA sense strand
gauuucugcgucugugauu

SEQ ID NO: 1862835 - RNA, 19 nt, Homo sapiens
  misc_RNA (1)...(19): siRNA sense strand
ugcccuggguguugaaaug

SEQ ID NO: 1862836 - RNA, 19 nt, Homo sapiens
  misc_RNA (1)...(19): siRNA sense strand
aagcagaagguucggauag

SEQ ID NO: 1862837 - RNA, 19 nt, Homo sapiens
  misc_RNA (1)...(19): siRNA sense strand
ggagaguaagcagaaugaa

SEQ ID NO: 1862838 - RNA, 19 nt, Homo sapiens
  misc_RNA (1)...(19): siRNA sense strand
aaaggagaguaagcagaau

SEQ ID NO: 1862839 - RNA, 19 nt, Homo sapiens
  misc_RNA (1)...(19): siRNA sense strand
aaagcagaagguucggaua

SEQ ID NO: 1862840 - RNA, 19 nt, Homo sapiens
  misc_RNA (1)...(19): siRNA sense strand
caaaaugcaaucacagguu

SEQ ID NO: 1862841 - RNA, 19 nt, Homo sapiens
  misc_RNA (1)...(19): siRNA sense strand
gcuuaacguggcagaguug

SEQ ID NO: 1862842 - RNA, 19 nt, Homo sapiens
  misc_RNA (1)...(19): siRNA sense strand
gguguugaaaugugggauu

SEQ ID NO: 1862843 - RNA, 19 nt, Homo sapiens
  misc_RNA (1)...(19): siRNA sense strand
ggacgcugcacacuuucau

SEQ ID NO: 1862844 - RNA, 19 nt, Homo sapiens
  misc_RNA (1)...(19): siRNA sense strand
agcagaagguucggauaga

SEQ ID NO: 1862845 - RNA, 19 nt, Homo sapiens
  misc_RNA (1)...(19): siRNA sense strand
gaaagccacucuaucaaag

SEQ ID NO: 1862846 - RNA, 19 nt, Homo sapiens
  misc_RNA (1)...(19): siRNA sense strand
gaacgcugcucccguggaa

SEQ ID NO: 1862847 - RNA, 19 nt, Homo sapiens
  misc_RNA (1)...(19): siRNA sense strand
ccucacagcuguauucaug

SEQ ID NO: 1862848 - RNA, 19 nt, Homo sapiens
  misc_RNA (1)...(19): siRNA sense strand
uaucaaagccauccugaaa

SEQ ID NO: 1862849 - RNA, 19 nt, Homo sapiens
  misc_RNA (1)...(19): siRNA sense strand
gcucugcccuucuuuguca

SEQ ID NO: 1862850 - RNA, 19 nt, Homo sapiens
  misc_RNA (1)...(19): siRNA sense strand
gccaugaucugcgcuauug

SEQ ID NO: 1862851 - RNA, 19 nt, Homo sapiens
  misc_RNA (1)...(19): siRNA sense strand
agaggaaucuggaguuuca

SEQ ID NO: 1862852 - RNA, 19 nt, Homo sapiens
  misc_RNA (1)...(19): siRNA sense strand
ucaagaucgugcucauuaa

SEQ ID NO: 1862853 - RNA, 19 nt, Homo sapiens
  misc_RNA (1)...(19): siRNA sense strand
aaagaggaaucuggaguuu

SEQ ID NO: 1862854 - RNA, 19 nt, Homo sapiens
  misc_RNA (1)...(19): siRNA sense strand
ucaccuaccucaacuccuu

SEQ ID NO: 1862855 - RNA, 19 nt, Homo sapiens
  misc_RNA (1)...(19): siRNA sense strand
caucuucacuaucaccauu

SEQ ID NO: 1862856 - RNA, 19 nt, Homo sapiens
  misc_RNA (1)...(19): siRNA sense strand
ugaaagccacucuaucaaa

SEQ ID NO: 1862857 - RNA, 19 nt, Homo sapiens
  misc_RNA (1)...(19): siRNA sense strand
cugcugcugugcaacauua

SEQ ID NO: 1862858 - RNA, 19 nt, Homo sapiens
  misc_RNA (1)...(19): siRNA sense strand
ugacggccacucaguauuu

SEQ ID NO: 1862859 - RNA, 19 nt, Homo sapiens
  misc_RNA (1)...(19): siRNA sense strand
caaagaggaaucuggaguu

SEQ ID NO: 1862860 - RNA, 19 nt, Homo sapiens
  misc_RNA (1)...(19): siRNA sense strand
gaaagugccuucggcuacu

SEQ ID NO: 1862861 - RNA, 19 nt, Homo sapiens
  misc_RNA (1)...(19): siRNA sense strand
ccaaugaaagccacucuau

SEQ ID NO: 1862862 - RNA, 19 nt, Homo sapiens
  misc_RNA (1)...(19): siRNA sense strand
aaugaaagccacucuauca

SEQ ID NO: 1862863 - RNA, 19 nt, Homo sapiens
  misc_RNA (1)...(19): siRNA sense strand
ucagugccaucuucaacaa

SEQ ID NO: 1862864 - RNA, 19 nt, Homo sapiens
  misc_RNA (1)...(19): siRNA sense strand
ggaccucauuagcaaagga

SEQ ID NO: 1862865 - RNA, 19 nt, Homo sapiens
  misc_RNA (1)...(19): siRNA sense strand
ggaauucuaccgcuacuac

SEQ ID NO: 1862866 - RNA, 19 nt, Homo sapiens
  misc_RNA (1)...(19): siRNA sense strand
ccacucaguauuucacaaa

SEQ ID NO: 1862867 - RNA, 19 nt, Homo sapiens
  misc_RNA (1)...(19): siRNA sense strand
gcucauuaauucauuuggu

SEQ ID NO: 1862868 - RNA, 19 nt, Homo sapiens
  misc_RNA (1)...(19): siRNA sense strand
caaaggagaggagccaaga

SEQ ID NO: 1862869 - RNA, 19 nt, Homo sapiens
  misc_RNA (1)...(19): siRNA sense strand
caagaucgugcucauuaau

SEQ ID NO: 1862870 - RNA, 19 nt, Homo sapiens
  misc_RNA (1)...(19): siRNA sense strand
cugggaacguuacuucauu

SEQ ID NO: 1862871 - RNA, 19 nt, Homo sapiens
  misc_RNA (1)...(19): siRNA sense strand
gccaagagcaggcaaagag

SEQ ID NO: 1862872 - RNA, 19 nt, Homo sapiens
  misc_RNA (1)...(19): siRNA sense strand
gagccucacagcuguauuc

SEQ ID NO: 1862873 - RNA, 19 nt, Homo sapiens
  misc_RNA (1)...(19): siRNA sense strand
ucauuccuguguccuguuu

SEQ ID NO: 1862874 - RNA, 19 nt, Homo sapiens
  misc_RNA (1)...(19): siRNA sense strand
acucucagcccaccaauga

SEQ ID NO: 1862875 - RNA, 19 nt, Homo sapiens
  misc_RNA (1)...(19): siRNA sense strand
aucaagaucgugcucauua

SEQ ID NO: 1862876 - RNA, 19 nt, Homo sapiens
  misc_RNA (1)...(19): siRNA sense strand
caaaccgccuggacauguc

SEQ ID NO: 1862877 - RNA, 19 nt, Homo sapiens
  misc_RNA (1)...(19): siRNA sense strand
agaucgugcucauuaauuc

SEQ ID NO: 1862878 - RNA, 19 nt, Homo sapiens
  misc_RNA (1)...(19): siRNA sense strand
gggagcaggagaccaaguu

SEQ ID NO: 1862879 - RNA, 19 nt, Homo sapiens
  misc_RNA (1)...(19): siRNA sense strand
uaucaccauugggauguuu

SEQ ID NO: 1862880 - RNA, 19 nt, Homo sapiens
  misc_RNA (1)...(19): siRNA sense strand
agccugugcuguuaucauu

SEQ ID NO: 1862881 - RNA, 19 nt, Homo sapiens
  misc_RNA (1)...(19): siRNA sense strand
uggaugcucugcccuucuu

SEQ ID NO: 1862882 - RNA, 19 nt, Homo sapiens
  misc_RNA (1)...(19): siRNA sense strand
uguccuguuucuugacuuu

SEQ ID NO: 1862883 - RNA, 19 nt, Homo sapiens
  misc_RNA (1)...(19): siRNA sense strand
ucaccagccucaggacaga

SEQ ID NO: 1862884 - RNA, 19 nt, Homo sapiens
  misc_RNA (1)...(19): siRNA sense strand
ucacaaaccgccuggacau

SEQ ID NO: 1862885 - RNA, 19 nt, Homo sapiens
  misc_RNA (1)...(19): siRNA sense strand
gccuucggcuacuuuauca

SEQ ID NO: 1862886 - RNA, 19 nt, Homo sapiens
  misc_RNA (1)...(19): siRNA sense strand
ccuguguccuguuucuuga

SEQ ID NO: 1862887 - RNA, 19 nt, Homo sapiens
  misc_RNA (1)...(19): siRNA sense strand
ucaacuccuuccugcauca

SEQ ID NO: 1862888 - RNA, 19 nt, Homo sapiens
  misc_RNA (1)...(19): siRNA sense strand
cuaccugacuguggucuuc

SEQ ID NO: 1862889 - RNA, 19 nt, Homo sapiens
  misc_RNA (1)...(19): siRNA sense strand
gcagcaccugggaacguua

SEQ ID NO: 1862890 - RNA, 19 nt, Homo sapiens
  misc_RNA (1)...(19): siRNA sense strand
ucucagcccaccaaugaaa

SEQ ID NO: 1862891 - RNA, 19 nt, Homo sapiens
  misc_RNA (1)...(19): siRNA sense strand
ucaugacggccacucagua

SEQ ID NO: 1862892 - RNA, 19 nt, Homo sapiens
  misc_RNA (1)...(19): siRNA sense strand
acaaugucaugacccuaug

SEQ ID NO: 1862893 - RNA, 19 nt, Homo sapiens
  misc_RNA (1)...(19): siRNA sense strand
caugacggccacucaguau

SEQ ID NO: 1862894 - RNA, 19 nt, Homo sapiens
  misc_RNA (1)...(19): siRNA sense strand
gaucgugcucauuaauuca

SEQ ID NO: 1862895 - RNA, 19 nt, Homo sapiens
  misc_RNA (1)...(19): siRNA sense strand
cugcugguguuucugauca

SEQ ID NO: 1862896 - RNA, 19 nt, Homo sapiens
  misc_RNA (1)...(19): siRNA sense strand
caaugaaagccacucuauc

SEQ ID NO: 1862897 - RNA, 19 nt, Homo sapiens
  misc_RNA (1)...(19): siRNA sense strand
gacggccacucaguauuuc

SEQ ID NO: 1862898 - RNA, 19 nt, Homo sapiens
  misc_RNA (1)...(19): siRNA sense strand
ggagcaggagaccaaguug

SEQ ID NO: 1862899 - RNA, 19 nt, Homo sapiens
  misc_RNA (1)...(19): siRNA sense strand
aagaucgugcucauuaauu

SEQ ID NO: 1862900 - RNA, 19 nt, Homo sapiens
  misc_RNA (1)...(19): siRNA sense strand
ugcuucaucuucacuauca

SEQ ID NO: 1862901 - RNA, 19 nt, Homo sapiens
  misc_RNA (1)...(19): siRNA sense strand
aguuggaccucauuagcaa

SEQ ID NO: 1862902 - RNA, 19 nt, Homo sapiens
  misc_RNA (1)...(19): siRNA sense strand
gaaucuggaguuucagucu

SEQ ID NO: 1862903 - RNA, 19 nt, Homo sapiens
  misc_RNA (1)...(19): siRNA sense strand
ugggaacguuacuucauuc

SEQ ID NO: 1862904 - RNA, 19 nt, Homo sapiens
  misc_RNA (1)...(19): siRNA sense strand
caucuucaacaaugucaug

SEQ ID NO: 1862905 - RNA, 19 nt, Homo sapiens
  misc_RNA (1)...(19): siRNA sense strand
gaccgcaggagccaucaug

SEQ ID NO: 1862906 - RNA, 19 nt, Homo sapiens
  misc_RNA (1)...(19): siRNA sense strand
cgugcucauuaauucauuu

SEQ ID NO: 1862907 - RNA, 19 nt, Homo sapiens
  misc_RNA (1)...(19): siRNA sense strand
acaaaccgccuggacaugu

SEQ ID NO: 1862908 - RNA, 19 nt, Homo sapiens
  misc_RNA (1)...(19): siRNA sense strand
caaguuggaccucauuagc

SEQ ID NO: 1862909 - RNA, 19 nt, Homo sapiens
  misc_RNA (1)...(19): siRNA sense strand
gaugcucugcccuucuuug

SEQ ID NO: 1862910 - RNA, 19 nt, Homo sapiens
  misc_RNA (1)...(19): siRNA sense strand
gagcaggcaaagaggaauc

SEQ ID NO: 1862911 - RNA, 19 nt, Homo sapiens
  misc_RNA (1)...(19): siRNA sense strand
agugccaucuucaacaaug

SEQ ID NO: 1862912 - RNA, 19 nt, Homo sapiens
  misc_RNA (1)...(19): siRNA sense strand
guuauucaccuaccucaac

SEQ ID NO: 1862913 - RNA, 19 nt, Homo sapiens
  misc_RNA (1)...(19): siRNA sense strand
cuuggucacugcugaacug

SEQ ID NO: 1862914 - RNA, 19 nt, Homo sapiens
  misc_RNA (1)...(19): siRNA sense strand
gaauguguccuuggucacu

SEQ ID NO: 1862915 - RNA, 19 nt, Homo sapiens
  misc_RNA (1)...(19): siRNA sense strand
ggagccaagagcaggcaaa

SEQ ID NO: 1862916 - RNA, 19 nt, Homo sapiens
  misc_RNA (1)...(19): siRNA sense strand
gccacucaguauuucacaa

SEQ ID NO: 1862917 - RNA, 19 nt, Homo sapiens
  misc_RNA (1)...(19): siRNA sense strand
gcuacuaccagcagcucaa

SEQ ID NO: 1862918 - RNA, 19 nt, Homo sapiens
  misc_RNA (1)...(19): siRNA sense strand
guugugagcuuccuaaauu

SEQ ID NO: 1862919 - RNA, 19 nt, Homo sapiens
  misc_RNA (1)...(19): siRNA sense strand
gaaaucaaaucgucaugug

SEQ ID NO: 1862920 - RNA, 19 nt, Homo sapiens
  misc_RNA (1)...(19): siRNA sense strand
ucaaagaccuaaaucagaa

SEQ ID NO: 1862921 - RNA, 19 nt, Homo sapiens
  misc_RNA (1)...(19): siRNA sense strand
caucaagguuucuuacuuu

SEQ ID NO: 1862922 - RNA, 19 nt, Homo sapiens
  misc_RNA (1)...(19): siRNA sense strand
caaagaauaucaacaaguc

SEQ ID NO: 1862923 - RNA, 19 nt, Homo sapiens
  misc_RNA (1)...(19): siRNA sense strand
cgacaaggaugaugaaauc

SEQ ID NO: 1862924 - RNA, 19 nt, Homo sapiens
  misc_RNA (1)...(19): siRNA sense strand
ccacagauaucaaugacaa

SEQ ID NO: 1862925 - RNA, 19 nt, Homo sapiens
  misc_RNA (1)...(19): siRNA sense strand
caacaaagccaacucauag

SEQ ID NO: 1862926 - RNA, 19 nt, Homo sapiens
  misc_RNA (1)...(19): siRNA sense strand
uuacaaagguucacaaaca

SEQ ID NO: 1862927 - RNA, 19 nt, Homo sapiens
  misc_RNA (1)...(19): siRNA sense strand
gggcaaagaccauuaagaa

SEQ ID NO: 1862928 - RNA, 19 nt, Homo sapiens
  misc_RNA (1)...(19): siRNA sense strand
gcaaagaccauuaagaaca

SEQ ID NO: 1862929 - RNA, 19 nt, Homo sapiens
  misc_RNA (1)...(19): siRNA sense strand
gccaagauccgcucgcuua

SEQ ID NO: 1862930 - RNA, 19 nt, Homo sapiens
  misc_RNA (1)...(19): siRNA sense strand
caagguuucuuacuuugaa

SEQ ID NO: 1862931 - RNA, 19 nt, Homo sapiens
  misc_RNA (1)...(19): siRNA sense strand
gcaaguuuaucaugcaugu

SEQ ID NO: 1862932 - RNA, 19 nt, Homo sapiens
  misc_RNA (1)...(19): siRNA sense strand
ggaagaagaaauaugagaa

SEQ ID NO: 1862933 - RNA, 19 nt, Homo sapiens
  misc_RNA (1)...(19): siRNA sense strand
gaugaaaucaaccaacaaa

SEQ ID NO: 1862934 - RNA, 19 nt, Homo sapiens
  misc_RNA (1)...(19): siRNA sense strand
gggacgagaucaacgagaa

SEQ ID NO: 1862935 - RNA, 19 nt, Homo sapiens
  misc_RNA (1)...(19): siRNA sense strand
gcacgacccucagcugaug

SEQ ID NO: 1862936 - RNA, 19 nt, Homo sapiens
  misc_RNA (1)...(19): siRNA sense strand
ggagcuggcugugaacuau

SEQ ID NO: 1862937 - RNA, 19 nt, Homo sapiens
  misc_RNA (1)...(19): siRNA sense strand
ccgaggagcggcagaaaua

SEQ ID NO: 1862938 - RNA, 19 nt, Homo sapiens
  misc_RNA (1)...(19): siRNA sense strand
gaaccaggcugagauucug

SEQ ID NO: 1862939 - RNA, 19 nt, Homo sapiens
  misc_RNA (1)...(19): siRNA sense strand
aaacacgacucaagagcaa

SEQ ID NO: 1862940 - RNA, 19 nt, Homo sapiens
  misc_RNA (1)...(19): siRNA sense strand
ugaacgggcugaugaagga

SEQ ID NO: 1862941 - RNA, 19 nt, Homo sapiens
  misc_RNA (1)...(19): siRNA sense strand
ccaacaaagccaacucaua

SEQ ID NO: 1862942 - RNA, 19 nt, Homo sapiens
  misc_RNA (1)...(19): siRNA sense strand
caacgaauguagcaucaag

SEQ ID NO: 1862943 - RNA, 19 nt, Homo sapiens
  misc_RNA (1)...(19): siRNA sense strand
ggacgacuauguucaucug

SEQ ID NO: 1862944 - RNA, 19 nt, Homo sapiens
  misc_RNA (1)...(19): siRNA sense strand
ccaugcagauugucaaaga

SEQ ID NO: 1862945 - RNA, 19 nt, Homo sapiens
  misc_RNA (1)...(19): siRNA sense strand
ggaaacugccggacgacua

SEQ ID NO: 1862946 - RNA, 19 nt, Homo sapiens
  misc_RNA (1)...(19): siRNA sense strand
ggaaaugccacagauauca

SEQ ID NO: 1862947 - RNA, 19 nt, Homo sapiens
  misc_RNA (1)...(19): siRNA sense strand
caagaaaagugcagaaaug

SEQ ID NO: 1862948 - RNA, 19 nt, Homo sapiens
  misc_RNA (1)...(19): siRNA sense strand
ugaaggaucugagcgaguu

SEQ ID NO: 1862949 - RNA, 19 nt, Homo sapiens
  misc_RNA (1)...(19): siRNA sense strand
gaacgaugccgcuaaggau

SEQ ID NO: 1862950 - RNA, 19 nt, Homo sapiens
  misc_RNA (1)...(19): siRNA sense strand
ccaacagccucuuccagaa

SEQ ID NO: 1862951 - RNA, 19 nt, Homo sapiens
  misc_RNA (1)...(19): siRNA sense strand
ccaggaaacugugcaugaa

SEQ ID NO: 1862952 - RNA, 19 nt, Homo sapiens
  misc_RNA (1)...(19): siRNA sense strand
cgacuauguucaucuguug

SEQ ID NO: 1862953 - RNA, 19 nt, Homo sapiens
  misc_RNA (1)...(19): siRNA sense strand
caacauggacaauggaaau

SEQ ID NO: 1862954 - RNA, 19 nt, Homo sapiens
  misc_RNA (1)...(19): siRNA sense strand
gaaacugccggacgacuau

SEQ ID NO: 1862955 - RNA, 19 nt, Homo sapiens
  misc_RNA (1)...(19): siRNA sense strand
ggaugcagaugaagugaag

SEQ ID NO: 1862956 - RNA, 19 nt, Homo sapiens
  misc_RNA (1)...(19): siRNA sense strand
ucagauauguacuuugcaa

SEQ ID NO: 1862957 - RNA, 19 nt, Homo sapiens
  misc_RNA (1)...(19): siRNA sense strand
uggaacagcuuacaaaggu

SEQ ID NO: 1862958 - RNA, 19 nt, Homo sapiens
  misc_RNA (1)...(19): siRNA sense strand
cggaggagauucuggaugu

SEQ ID NO: 1862959 - RNA, 19 nt, Homo sapiens
  misc_RNA (1)...(19): siRNA sense strand
aaagccaacucauagagaa

SEQ ID NO: 1862960 - RNA, 19 nt, Homo sapiens
  misc_RNA (1)...(19): siRNA sense strand
gcugagcaguggaagaaga

SEQ ID NO: 1862961 - RNA, 19 nt, Homo sapiens
  misc_RNA (1)...(19): siRNA sense strand
gcaaagaauaucaacaagu

SEQ ID NO: 1862962 - RNA, 19 nt, Homo sapiens
  misc_RNA (1)...(19): siRNA sense strand
gaagaagaaauaugagaag

SEQ ID NO: 1862963 - RNA, 19 nt, Homo sapiens
  misc_RNA (1)...(19): siRNA sense strand
gcaagcuguucguucaaga

SEQ ID NO: 1862964 - RNA, 19 nt, Homo sapiens
  misc_RNA (1)...(19): siRNA sense strand
acaaggagccugacacuca

SEQ ID NO: 1862965 - RNA, 19 nt, Homo sapiens
  misc_RNA (1)...(19): siRNA sense strand
agacaaaggcccagaagga

SEQ ID NO: 1862966 - RNA, 19 nt, Homo sapiens
  misc_RNA (1)...(19): siRNA sense strand
gaaaugccacagauaucaa

SEQ ID NO: 1862967 - RNA, 19 nt, Homo sapiens
  misc_RNA (1)...(19): siRNA sense strand
caauggaaaugccacagau

SEQ ID NO: 1862968 - RNA, 19 nt, Homo sapiens
  misc_RNA (1)...(19): siRNA sense strand
uggaggagcuggcugugaa

SEQ ID NO: 1862969 - RNA, 19 nt, Homo sapiens
  misc_RNA (1)...(19): siRNA sense strand
cgacucaagagcaaguuua

SEQ ID NO: 1862970 - RNA, 19 nt, Homo sapiens
  misc_RNA (1)...(19): siRNA sense strand
ucaccaacaugaaugaaca

SEQ ID NO: 1862971 - RNA, 19 nt, Homo sapiens
  misc_RNA (1)...(19): siRNA sense strand
ggacaaaauucgugaccuu

SEQ ID NO: 1862972 - RNA, 19 nt, Homo sapiens
  misc_RNA (1)...(19): siRNA sense strand
gagcugagccaccugcaau

SEQ ID NO: 1862973 - RNA, 19 nt, Homo sapiens
  misc_RNA (1)...(19): siRNA sense strand
caaagaccauuaagaacac

SEQ ID NO: 1862974 - RNA, 19 nt, Homo sapiens
  misc_RNA (1)...(19): siRNA sense strand
cacagcaucuuccucauca

SEQ ID NO: 1862975 - RNA, 19 nt, Homo sapiens
  misc_RNA (1)...(19): siRNA sense strand
ugucaaggguuguacugaa

SEQ ID NO: 1862976 - RNA, 19 nt, Homo sapiens
  misc_RNA (1)...(19): siRNA sense strand
ggaacagcuuacaaagguu

SEQ ID NO: 1862977 - RNA, 19 nt, Homo sapiens
  misc_RNA (1)...(19): siRNA sense strand
ggagugagaaggucagcaa

SEQ ID NO: 1862978 - RNA, 19 nt, Homo sapiens
  misc_RNA (1)...(19): siRNA sense strand
uaaaucagaagcuccaguu

SEQ ID NO: 1862979 - RNA, 19 nt, Homo sapiens
  misc_RNA (1)...(19): siRNA sense strand
gaacaaccuggaacagcuu

SEQ ID NO: 1862980 - RNA, 19 nt, Homo sapiens
  misc_RNA (1)...(19): siRNA sense strand
agaaauaugagaaggagaa

SEQ ID NO: 1862981 - RNA, 19 nt, Homo sapiens
  misc_RNA (1)...(19): siRNA sense strand
caagagcaaguuuaucaug

SEQ ID NO: 1862982 - RNA, 19 nt, Homo sapiens
  misc_RNA (1)...(19): siRNA sense strand
gagaagcucaagcagcaaa

SEQ ID NO: 1862983 - RNA, 19 nt, Homo sapiens
  misc_RNA (1)...(19): siRNA sense strand
ggagagaaugugccugaga

SEQ ID NO: 1862984 - RNA, 19 nt, Homo sapiens
  misc_RNA (1)...(19): siRNA sense strand
acaucaagguuucuuacuu

SEQ ID NO: 1862985 - RNA, 19 nt, Homo sapiens
  misc_RNA (1)...(19): siRNA sense strand
gauauguacuuugcaaacu

SEQ ID NO: 1862986 - RNA, 19 nt, Homo sapiens
  misc_RNA (1)...(19): siRNA sense strand
ccucagauauguacuuugc

SEQ ID NO: 1862987 - RNA, 19 nt, Homo sapiens
  misc_RNA (1)...(19): siRNA sense strand
gacaugagcaguccaagca

SEQ ID NO: 1862988 - RNA, 19 nt, Homo sapiens
  misc_RNA (1)...(19): siRNA sense strand
ggguuguacugaacgcuuu

SEQ ID NO: 1862989 - RNA, 19 nt, Homo sapiens
  misc_RNA (1)...(19): siRNA sense strand
gcgaagaacacgagaagag

SEQ ID NO: 1862990 - RNA, 19 nt, Homo sapiens
  misc_RNA (1)...(19): siRNA sense strand
cgaguucagugucauugug

SEQ ID NO: 1862991 - RNA, 19 nt, Homo sapiens
  misc_RNA (1)...(19): siRNA sense strand
ucaaggugcucugccgauu

SEQ ID NO: 1862992 - RNA, 19 nt, Homo sapiens
  misc_RNA (1)...(19): siRNA sense strand
agagacagcagccagcuaa

SEQ ID NO: 1862993 - RNA, 19 nt, Homo sapiens
  misc_RNA (1)...(19): siRNA sense strand
caccucagauauguacuuu

SEQ ID NO: 1862994 - RNA, 19 nt, Homo sapiens
  misc_RNA (1)...(19): siRNA sense strand
gcucaaagaccuaaaucag

SEQ ID NO: 1862995 - RNA, 19 nt, Homo sapiens
  misc_RNA (1)...(19): siRNA sense strand
ugagccaccugcaaucaga

SEQ ID NO: 1862996 - RNA, 19 nt, Homo sapiens
  misc_RNA (1)...(19): siRNA sense strand
gaaauacgaggaggagauc

SEQ ID NO: 1862997 - RNA, 19 nt, Homo sapiens
  misc_RNA (1)...(19): siRNA sense strand
ggaaaucaaaucgucaugu

SEQ ID NO: 1862998 - RNA, 19 nt, Homo sapiens
  misc_RNA (1)...(19): siRNA sense strand
gaagacaaaggcccagaag

SEQ ID NO: 1862999 - RNA, 19 nt, Homo sapiens
  misc_RNA (1)...(19): siRNA sense strand
gagcaaguuuaucaugcau

SEQ ID NO: 1863000 - RNA, 19 nt, Homo sapiens
  misc_RNA (1)...(19): siRNA sense strand
gagcgaagaacacgagaag

SEQ ID NO: 1863001 - RNA, 19 nt, Homo sapiens
  misc_RNA (1)...(19): siRNA sense strand
caaaucagaagucaagucu

SEQ ID NO: 1863002 - RNA, 19 nt, Homo sapiens
  misc_RNA (1)...(19): siRNA sense strand
cccaggagguggaggagaa

SEQ ID NO: 1863003 - RNA, 19 nt, Homo sapiens
  misc_RNA (1)...(19): siRNA sense strand
caaagccaacucauagaga

SEQ ID NO: 1863004 - RNA, 19 nt, Homo sapiens
  misc_RNA (1)...(19): siRNA sense strand
gaugugaccaagacaaauc

SEQ ID NO: 1863005 - RNA, 19 nt, Homo sapiens
  misc_RNA (1)...(19): siRNA sense strand
ugcaggagcugacauuucu

SEQ ID NO: 1863006 - RNA, 19 nt, Homo sapiens
  misc_RNA (1)...(19): siRNA sense strand
gagaagcagaagaccauug

SEQ ID NO: 1863007 - RNA, 19 nt, Homo sapiens
  misc_RNA (1)...(19): siRNA sense strand
gugcugaacgggcugauga

SEQ ID NO: 1863008 - RNA, 19 nt, Homo sapiens
  misc_RNA (1)...(19): siRNA sense strand
ucaguaaauuuggaguuga

SEQ ID NO: 1863009 - RNA, 19 nt, Homo sapiens
  misc_RNA (1)...(19): siRNA sense strand
gaggagauucuggauguga

SEQ ID NO: 1863010 - RNA, 19 nt, Homo sapiens
  misc_RNA (1)...(19): siRNA sense strand
gcugguacgugacaaugca

SEQ ID NO: 1863011 - RNA, 19 nt, Homo sapiens
  misc_RNA (1)...(19): siRNA sense strand
aucagaagcuccaguuaga

SEQ ID NO: 1863012 - RNA, 19 nt, Homo sapiens
  misc_RNA (1)...(19): siRNA sense strand
cacauaccauggagggaaa

SEQ ID NO: 1863013 - RNA, 19 nt, Homo sapiens
  misc_RNA (1)...(19): siRNA sense strand
gauccgccgucucuauaag

SEQ ID NO: 1863014 - RNA, 19 nt, Homo sapiens
  misc_RNA (1)...(19): siRNA sense strand
caaguccacccugauguuu

SEQ ID NO: 1863015 - RNA, 19 nt, Homo sapiens
  misc_RNA (1)...(19): siRNA sense strand
caccauccaguuauaauga

SEQ ID NO: 1863016 - RNA, 19 nt, Homo sapiens
  misc_RNA (1)...(19): siRNA sense strand
ggcaaagaauaucaacaag

SEQ ID NO: 1863017 - RNA, 19 nt, Homo sapiens
  misc_RNA (1)...(19): siRNA sense strand
gaugaagggaaaucaaauc

SEQ ID NO: 1863018 - RNA, 19 nt, Homo sapiens
  misc_RNA (1)...(19): siRNA sense strand
gaaagaagcugaugaaaug

SEQ ID NO: 1863019 - RNA, 19 nt, Homo sapiens
  misc_RNA (1)...(19): siRNA sense strand
ggagaagucugguguaaua

SEQ ID NO: 1863020 - RNA, 19 nt, Homo sapiens
  misc_RNA (1)...(19): siRNA sense strand
gaagguagcuggugauuug

SEQ ID NO: 1863021 - RNA, 19 nt, Homo sapiens
  misc_RNA (1)...(19): siRNA sense strand
gcaagcagcuacucaguug

SEQ ID NO: 1863022 - RNA, 19 nt, Homo sapiens
  misc_RNA (1)...(19): siRNA sense strand
agagagagguuauugauuu

SEQ ID NO: 1863023 - RNA, 19 nt, Homo sapiens
  misc_RNA (1)...(19): siRNA sense strand
gcuuaaaccugaccaagua

SEQ ID NO: 1863024 - RNA, 19 nt, Homo sapiens
  misc_RNA (1)...(19): siRNA sense strand
ugaaugagcugacugagaa

SEQ ID NO: 1863025 - RNA, 19 nt, Homo sapiens
  misc_RNA (1)...(19): siRNA sense strand
gaccgaaacugacaaagaa

SEQ ID NO: 1863026 - RNA, 19 nt, Homo sapiens
  misc_RNA (1)...(19): siRNA sense strand
gaagagaacgagaacauuu

SEQ ID NO: 1863027 - RNA, 19 nt, Homo sapiens
  misc_RNA (1)...(19): siRNA sense strand
gaaagaagcaaugugguua

SEQ ID NO: 1863028 - RNA, 19 nt, Homo sapiens
  misc_RNA (1)...(19): siRNA sense strand
gcaguuccauucccagaua

SEQ ID NO: 1863029 - RNA, 19 nt, Homo sapiens
  misc_RNA (1)...(19): siRNA sense strand
gcauaaggcucaacaguca

SEQ ID NO: 1863030 - RNA, 19 nt, Homo sapiens
  misc_RNA (1)...(19): siRNA sense strand
gguggaagcuguugaguug

SEQ ID NO: 1863031 - RNA, 19 nt, Homo sapiens
  misc_RNA (1)...(19): siRNA sense strand
gaguguaccucgagacuuu

SEQ ID NO: 1863032 - RNA, 19 nt, Homo sapiens
  misc_RNA (1)...(19): siRNA sense strand
gagauuguguugaaagaaa

SEQ ID NO: 1863033 - RNA, 19 nt, Homo sapiens
  misc_RNA (1)...(19): siRNA sense strand
ugaaaaggcucaacaguua

SEQ ID NO: 1863034 - RNA, 19 nt, Homo sapiens
  misc_RNA (1)...(19): siRNA sense strand
gaagaggaacuuaaggaua

SEQ ID NO: 1863035 - RNA, 19 nt, Homo sapiens
  misc_RNA (1)...(19): siRNA sense strand
gguggaaacucucauggua

SEQ ID NO: 1863036 - RNA, 19 nt, Homo sapiens
  misc_RNA (1)...(19): siRNA sense strand
caaagaaagugacgcauca

SEQ ID NO: 1863037 - RNA, 19 nt, Homo sapiens
  misc_RNA (1)...(19): siRNA sense strand
gcagaagaauuacauaaag

SEQ ID NO: 1863038 - RNA, 19 nt, Homo sapiens
  misc_RNA (1)...(19): siRNA sense strand
gaaaguggaucagggaaga

SEQ ID NO: 1863039 - RNA, 19 nt, Homo sapiens
  misc_RNA (1)...(19): siRNA sense strand
gggaagaaguucagagcua

SEQ ID NO: 1863040 - RNA, 19 nt, Homo sapiens
  misc_RNA (1)...(19): siRNA sense strand
caaaucaacuggaaagcaa

SEQ ID NO: 1863041 - RNA, 19 nt, Homo sapiens
  misc_RNA (1)...(19): siRNA sense strand
ugacuacgcuuauacauca

SEQ ID NO: 1863042 - RNA, 19 nt, Homo sapiens
  misc_RNA (1)...(19): siRNA sense strand
ggaacgaucuaccuauguu

SEQ ID NO: 1863043 - RNA, 19 nt, Homo sapiens
  misc_RNA (1)...(19): siRNA sense strand
gaaagugacgcaucaaaga

SEQ ID NO: 1863044 - RNA, 19 nt, Homo sapiens
  misc_RNA (1)...(19): siRNA sense strand
gaacagaugaauaccauga

SEQ ID NO: 1863045 - RNA, 19 nt, Homo sapiens
  misc_RNA (1)...(19): siRNA sense strand
gaucaagucuguagaagag

SEQ ID NO: 1863046 - RNA, 19 nt, Homo sapiens
  misc_RNA (1)...(19): siRNA sense strand
uaaagacuguggaagaauu

SEQ ID NO: 1863047 - RNA, 19 nt, Homo sapiens
  misc_RNA (1)...(19): siRNA sense strand
gcucaacaguuaucuauca

SEQ ID NO: 1863048 - RNA, 19 nt, Homo sapiens
  misc_RNA (1)...(19): siRNA sense strand
ggaaauguccagcuugaaa

SEQ ID NO: 1863049 - RNA, 19 nt, Homo sapiens
  misc_RNA (1)...(19): siRNA sense strand
ccaagagacuaaacaagaa

SEQ ID NO: 1863050 - RNA, 19 nt, Homo sapiens
  misc_RNA (1)...(19): siRNA sense strand
gaaacggagucuucugaga

SEQ ID NO: 1863051 - RNA, 19 nt, Homo sapiens
  misc_RNA (1)...(19): siRNA sense strand
gcacaugaauuggagaaga

SEQ ID NO: 1863052 - RNA, 19 nt, Homo sapiens
  misc_RNA (1)...(19): siRNA sense strand
gcagauggaggcagagaua

SEQ ID NO: 1863053 - RNA, 19 nt, Homo sapiens
  misc_RNA (1)...(19): siRNA sense strand
gagaaagaccuagccaaua

SEQ ID NO: 1863054 - RNA, 19 nt, Homo sapiens
  misc_RNA (1)...(19): siRNA sense strand
ugagaaagauggaaagauc

SEQ ID NO: 1863055 - RNA, 19 nt, Homo sapiens
  misc_RNA (1)...(19): siRNA sense strand
caggaaagcuacagcaaga

SEQ ID NO: 1863056 - RNA, 19 nt, Homo sapiens
  misc_RNA (1)...(19): siRNA sense strand
agagauagcucacuugaag

SEQ ID NO: 1863057 - RNA, 19 nt, Homo sapiens
  misc_RNA (1)...(19): siRNA sense strand
uaauaaggauguuguggaa

SEQ ID NO: 1863058 - RNA, 19 nt, Homo sapiens
  misc_RNA (1)...(19): siRNA sense strand
aagaggaacuuaaggauau

SEQ ID NO: 1863059 - RNA, 19 nt, Homo sapiens
  misc_RNA (1)...(19): siRNA sense strand
guaaagaagaggaacuuaa

SEQ ID NO: 1863060 - RNA, 19 nt, Homo sapiens
  misc_RNA (1)...(19): siRNA sense strand
uuaagaaagugauccauga

SEQ ID NO: 1863061 - RNA, 19 nt, Homo sapiens
  misc_RNA (1)...(19): siRNA sense strand
agaaagaaauccagaaugg

SEQ ID NO: 1863062 - RNA, 19 nt, Homo sapiens
  misc_RNA (1)...(19): siRNA sense strand
gaaagugauccaugagaaa

SEQ ID NO: 1863063 - RNA, 19 nt, Homo sapiens
  misc_RNA (1)...(19): siRNA sense strand
gcaacuacaacaugaaauu

SEQ ID NO: 1863064 - RNA, 19 nt, Homo sapiens
  misc_RNA (1)...(19): siRNA sense strand
gcaaugugguuauaacaag

SEQ ID NO: 1863065 - RNA, 19 nt, Homo sapiens
  misc_RNA (1)...(19): siRNA sense strand
caaguccugugguagauaa

SEQ ID NO: 1863066 - RNA, 19 nt, Homo sapiens
  misc_RNA (1)...(19): siRNA sense strand
gaaucacacaagacuauua

SEQ ID NO: 1863067 - RNA, 19 nt, Homo sapiens
  misc_RNA (1)...(19): siRNA sense strand
uaaguggucucuggaauga

SEQ ID NO: 1863068 - RNA, 19 nt, Homo sapiens
  misc_RNA (1)...(19): siRNA sense strand
ggagcugaaugcaauaaga

SEQ ID NO: 1863069 - RNA, 19 nt, Homo sapiens
  misc_RNA (1)...(19): siRNA sense strand
gaagagcaacuacaacaug

SEQ ID NO: 1863070 - RNA, 19 nt, Homo sapiens
  misc_RNA (1)...(19): siRNA sense strand
ucaagagacucaacagaug

SEQ ID NO: 1863071 - RNA, 19 nt, Homo sapiens
  misc_RNA (1)...(19): siRNA sense strand
gagagagguuauugauuug

SEQ ID NO: 1863072 - RNA, 19 nt, Homo sapiens
  misc_RNA (1)...(19): siRNA sense strand
gagcaggucaucaaagaaa

SEQ ID NO: 1863073 - RNA, 19 nt, Homo sapiens
  misc_RNA (1)...(19): siRNA sense strand
gagcacaaguugaaagaag

SEQ ID NO: 1863074 - RNA, 19 nt, Homo sapiens
  misc_RNA (1)...(19): siRNA sense strand
caacaguuaucuaucacuu

SEQ ID NO: 1863075 - RNA, 19 nt, Homo sapiens
  misc_RNA (1)...(19): siRNA sense strand
ggaaagaucaagucuguag

SEQ ID NO: 1863076 - RNA, 19 nt, Homo sapiens
  misc_RNA (1)...(19): siRNA sense strand
gaacuuaaggauauacaga

SEQ ID NO: 1863077 - RNA, 19 nt, Homo sapiens
  misc_RNA (1)...(19): siRNA sense strand
cagcaagauuuacagagua

SEQ ID NO: 1863078 - RNA, 19 nt, Homo sapiens
  misc_RNA (1)...(19): siRNA sense strand
ggauaaugcugacucaagu

SEQ ID NO: 1863079 - RNA, 19 nt, Homo sapiens
  misc_RNA (1)...(19): siRNA sense strand
ggaagaugcugcugcuaca

SEQ ID NO: 1863080 - RNA, 19 nt, Homo sapiens
  misc_RNA (1)...(19): siRNA sense strand
agaaagaccuagccaauac

SEQ ID NO: 1863081 - RNA, 19 nt, Homo sapiens
  misc_RNA (1)...(19): siRNA sense strand
aagcugaagugcagaaauu

SEQ ID NO: 1863082 - RNA, 19 nt, Homo sapiens
  misc_RNA (1)...(19): siRNA sense strand
cgugaucguuuaacaagua

SEQ ID NO: 1863083 - RNA, 19 nt, Homo sapiens
  misc_RNA (1)...(19): siRNA sense strand
gaccuccgcuucaguucua

SEQ ID NO: 1863084 - RNA, 19 nt, Homo sapiens
  misc_RNA (1)...(19): siRNA sense strand
gaacaaaagcuuauuccua

SEQ ID NO: 1863085 - RNA, 19 nt, Homo sapiens
  misc_RNA (1)...(19): siRNA sense strand
gaaaaugucuucguagaug

SEQ ID NO: 1863086 - RNA, 19 nt, Homo sapiens
  misc_RNA (1)...(19): siRNA sense strand
gaacgaucuaccuauguua

SEQ ID NO: 1863087 - RNA, 19 nt, Homo sapiens
  misc_RNA (1)...(19): siRNA sense strand
guuaaagacuguggaagaa

SEQ ID NO: 1863088 - RNA, 19 nt, Homo sapiens
  misc_RNA (1)...(19): siRNA sense strand
ccucgagacuuuaaauuau

SEQ ID NO: 1863089 - RNA, 19 nt, Homo sapiens
  misc_RNA (1)...(19): siRNA sense strand
aguagaagaugaucaaguu

SEQ ID NO: 1863090 - RNA, 19 nt, Homo sapiens
  misc_RNA (1)...(19): siRNA sense strand
ugaguuagauucuuugaag

SEQ ID NO: 1863091 - RNA, 19 nt, Homo sapiens
  misc_RNA (1)...(19): siRNA sense strand
gaagcaaugugguuauaac

SEQ ID NO: 1863092 - RNA, 19 nt, Homo sapiens
  misc_RNA (1)...(19): siRNA sense strand
gcagcugccucgaagaaga

SEQ ID NO: 1863093 - RNA, 19 nt, Homo sapiens
  misc_RNA (1)...(19): siRNA sense strand
uagaagggauccagaaauc

SEQ ID NO: 1863094 - RNA, 19 nt, Homo sapiens
  misc_RNA (1)...(19): siRNA sense strand
ggaaguagcacaacauaac

SEQ ID NO: 1863095 - RNA, 19 nt, Homo sapiens
  misc_RNA (1)...(19): siRNA sense strand
guggaagaauuacuugaaa

SEQ ID NO: 1863096 - RNA, 19 nt, Homo sapiens
  misc_RNA (1)...(19): siRNA sense strand
gcaaagacuaaugcaguua

SEQ ID NO: 1863097 - RNA, 19 nt, Homo sapiens
  misc_RNA (1)...(19): siRNA sense strand
gaaccugucccaguuacua

SEQ ID NO: 1863098 - RNA, 19 nt, Homo sapiens
  misc_RNA (1)...(19): siRNA sense strand
gaacgagaacauuuggaaa

SEQ ID NO: 1863099 - RNA, 19 nt, Homo sapiens
  misc_RNA (1)...(19): siRNA sense strand
gcaguuaacccaggaaaug

SEQ ID NO: 1863100 - RNA, 19 nt, Homo sapiens
  misc_RNA (1)...(19): siRNA sense strand
gaagcgaugaccaggauaa

SEQ ID NO: 1863101 - RNA, 19 nt, Homo sapiens
  misc_RNA (1)...(19): siRNA sense strand
gaaagcuucaucaaagaaa

SEQ ID NO: 1863102 - RNA, 19 nt, Homo sapiens
  misc_RNA (1)...(19): siRNA sense strand
agagugaucuuucuagcaa

SEQ ID NO: 1863103 - RNA, 19 nt, Homo sapiens
  misc_RNA (1)...(19): siRNA sense strand
aagaggagcugaaugcaau

SEQ ID NO: 1863104 - RNA, 19 nt, Homo sapiens
  misc_RNA (1)...(19): siRNA sense strand
uuaaagaagucaaguaagg

SEQ ID NO: 1863105 - RNA, 19 nt, Homo sapiens
  misc_RNA (1)...(19): siRNA sense strand
gaaacacucacaaaacuua

SEQ ID NO: 1863106 - RNA, 19 nt, Homo sapiens
  misc_RNA (1)...(19): siRNA sense strand
gcagaaacagaaggaauuu

SEQ ID NO: 1863107 - RNA, 19 nt, Homo sapiens
  misc_RNA (1)...(19): siRNA sense strand
ggagaaaacuguucaggau

SEQ ID NO: 1863108 - RNA, 19 nt, Homo sapiens
  misc_RNA (1)...(19): siRNA sense strand
agaaagugauccaugagaa

SEQ ID NO: 1863109 - RNA, 19 nt, Homo sapiens
  misc_RNA (1)...(19): siRNA sense strand
gcagagauagcucacuuga

SEQ ID NO: 1863110 - RNA, 19 nt, Homo sapiens
  misc_RNA (1)...(19): siRNA sense strand
agaauugacuacgcuuaua

SEQ ID NO: 1863111 - RNA, 19 nt, Homo sapiens
  misc_RNA (1)...(19): siRNA sense strand
gcaacuacuuauauuccuu

SEQ ID NO: 1863112 - RNA, 19 nt, Homo sapiens
  misc_RNA (1)...(19): siRNA sense strand
aacaagagcuagagcgauu

SEQ ID NO: 1863113 - RNA, 19 nt, Homo sapiens
  misc_RNA (1)...(19): siRNA sense strand
uugaagaacuugagauugu

SEQ ID NO: 1863114 - RNA, 19 nt, Homo sapiens
  misc_RNA (1)...(19): siRNA sense strand
ggaaauaaaggcucuaaaa

SEQ ID NO: 1863115 - RNA, 19 nt, Homo sapiens
  misc_RNA (1)...(19): siRNA sense strand
gaagaggagcugaaugcaa

SEQ ID NO: 1863116 - RNA, 19 nt, Homo sapiens
  misc_RNA (1)...(19): siRNA sense strand
cagcaacacuacaaaucaa

SEQ ID NO: 1863117 - RNA, 19 nt, Homo sapiens
  misc_RNA (1)...(19): siRNA sense strand
caagaugcuuuaaagaagu

SEQ ID NO: 1863118 - RNA, 19 nt, Homo sapiens
  misc_RNA (1)...(19): siRNA sense strand
gaaagaagcugaugaaaug

SEQ ID NO: 1863119 - RNA, 19 nt, Homo sapiens
  misc_RNA (1)...(19): siRNA sense strand
ggagaagucugguguaaua

SEQ ID NO: 1863120 - RNA, 19 nt, Homo sapiens
  misc_RNA (1)...(19): siRNA sense strand
gaagguagcuggugauuug

SEQ ID NO: 1863121 - RNA, 19 nt, Homo sapiens
  misc_RNA (1)...(19): siRNA sense strand
gcaagcagcuacucaguug

SEQ ID NO: 1863122 - RNA, 19 nt, Homo sapiens
  misc_RNA (1)...(19): siRNA sense strand
agagagagguuauugauuu

SEQ ID NO: 1863123 - RNA, 19 nt, Homo sapiens
  misc_RNA (1)...(19): siRNA sense strand
gcuuaaaccugaccaagua

SEQ ID NO: 1863124 - RNA, 19 nt, Homo sapiens
  misc_RNA (1)...(19): siRNA sense strand
ugaaugagcugacugagaa

SEQ ID NO: 1863125 - RNA, 19 nt, Homo sapiens
  misc_RNA (1)...(19): siRNA sense strand
gaccgaaacugacaaagaa

SEQ ID NO: 1863126 - RNA, 19 nt, Homo sapiens
  misc_RNA (1)...(19): siRNA sense strand
gaagagaacgagaacauuu

SEQ ID NO: 1863127 - RNA, 19 nt, Homo sapiens
  misc_RNA (1)...(19): siRNA sense strand
gaaagaagcaaugugguua

SEQ ID NO: 1863128 - RNA, 19 nt, Homo sapiens
  misc_RNA (1)...(19): siRNA sense strand
gcaguuccauucccagaua

SEQ ID NO: 1863129 - RNA, 19 nt, Homo sapiens
  misc_RNA (1)...(19): siRNA sense strand
gcauaaggcucaacaguca

SEQ ID NO: 1863130 - RNA, 19 nt, Homo sapiens
  misc_RNA (1)...(19): siRNA sense strand
gguggaagcuguugaguug

SEQ ID NO: 1863131 - RNA, 19 nt, Homo sapiens
  misc_RNA (1)...(19): siRNA sense strand
gaguguaccucgagacuuu

SEQ ID NO: 1863132 - RNA, 19 nt, Homo sapiens
  misc_RNA (1)...(19): siRNA sense strand
gagauuguguugaaagaaa

SEQ ID NO: 1863133 - RNA, 19 nt, Homo sapiens
  misc_RNA (1)...(19): siRNA sense strand
ugaaaaggcucaacaguua

SEQ ID NO: 1863134 - RNA, 19 nt, Homo sapiens
  misc_RNA (1)...(19): siRNA sense strand
gaagaggaacuuaaggaua

SEQ ID NO: 1863135 - RNA, 19 nt, Homo sapiens
  misc_RNA (1)...(19): siRNA sense strand
gguggaaacucucauggua

SEQ ID NO: 1863136 - RNA, 19 nt, Homo sapiens
  misc_RNA (1)...(19): siRNA sense strand
caaagaaagugacgcauca

SEQ ID NO: 1863137 - RNA, 19 nt, Homo sapiens
  misc_RNA (1)...(19): siRNA sense strand
gcagaagaauuacauaaag

SEQ ID NO: 1863138 - RNA, 19 nt, Homo sapiens
  misc_RNA (1)...(19): siRNA sense strand
gaaaguggaucagggaaga

SEQ ID NO: 1863139 - RNA, 19 nt, Homo sapiens
  misc_RNA (1)...(19): siRNA sense strand
gggaagaaguucagagcua

SEQ ID NO: 1863140 - RNA, 19 nt, Homo sapiens
  misc_RNA (1)...(19): siRNA sense strand
caaaucaacuggaaagcaa

SEQ ID NO: 1863141 - RNA, 19 nt, Homo sapiens
  misc_RNA (1)...(19): siRNA sense strand
ugacuacgcuuauacauca

SEQ ID NO: 1863142 - RNA, 19 nt, Homo sapiens
  misc_RNA (1)...(19): siRNA sense strand
ggaacgaucuaccuauguu

SEQ ID NO: 1863143 - RNA, 19 nt, Homo sapiens
  misc_RNA (1)...(19): siRNA sense strand
gaaagugacgcaucaaaga

SEQ ID NO: 1863144 - RNA, 19 nt, Homo sapiens
  misc_RNA (1)...(19): siRNA sense strand
gaacagaugaauaccauga

SEQ ID NO: 1863145 - RNA, 19 nt, Homo sapiens
  misc_RNA (1)...(19): siRNA sense strand
gaucaagucuguagaagag

SEQ ID NO: 1863146 - RNA, 19 nt, Homo sapiens
  misc_RNA (1)...(19): siRNA sense strand
uaaagacuguggaagaauu

SEQ ID NO: 1863147 - RNA, 19 nt, Homo sapiens
  misc_RNA (1)...(19): siRNA sense strand
gcucaacaguuaucuauca

SEQ ID NO: 1863148 - RNA, 19 nt, Homo sapiens
  misc_RNA (1)...(19): siRNA sense strand
ggaaauguccagcuugaaa

SEQ ID NO: 1863149 - RNA, 19 nt, Homo sapiens
  misc_RNA (1)...(19): siRNA sense strand
ccaagagacuaaacaagaa

SEQ ID NO: 1863150 - RNA, 19 nt, Homo sapiens
  misc_RNA (1)...(19): siRNA sense strand
gaaacggagucuucugaga

SEQ ID NO: 1863151 - RNA, 19 nt, Homo sapiens
  misc_RNA (1)...(19): siRNA sense strand
gcacaugaauuggagaaga

SEQ ID NO: 1863152 - RNA, 19 nt, Homo sapiens
  misc_RNA (1)...(19): siRNA sense strand
gcagauggaggcagagaua

SEQ ID NO: 1863153 - RNA, 19 nt, Homo sapiens
  misc_RNA (1)...(19): siRNA sense strand
gagaaagaccuagccaaua

SEQ ID NO: 1863154 - RNA, 19 nt, Homo sapiens
  misc_RNA (1)...(19): siRNA sense strand
ugagaaagauggaaagauc

SEQ ID NO: 1863155 - RNA, 19 nt, Homo sapiens
  misc_RNA (1)...(19): siRNA sense strand
caggaaagcuacagcaaga

SEQ ID NO: 1863156 - RNA, 19 nt, Homo sapiens
  misc_RNA (1)...(19): siRNA sense strand
agagauagcucacuugaag

SEQ ID NO: 1863157 - RNA, 19 nt, Homo sapiens
  misc_RNA (1)...(19): siRNA sense strand
uaauaaggauguuguggaa

SEQ ID NO: 1863158 - RNA, 19 nt, Homo sapiens
  misc_RNA (1)...(19): siRNA sense strand
aagaggaacuuaaggauau

SEQ ID NO: 1863159 - RNA, 19 nt, Homo sapiens
  misc_RNA (1)...(19): siRNA sense strand
guaaagaagaggaacuuaa

SEQ ID NO: 1863160 - RNA, 19 nt, Homo sapiens
  misc_RNA (1)...(19): siRNA sense strand
uuaagaaagugauccauga

SEQ ID NO: 1863161 - RNA, 19 nt, Homo sapiens
  misc_RNA (1)...(19): siRNA sense strand
agaaagaaauccagaaugg

SEQ ID NO: 1863162 - RNA, 19 nt, Homo sapiens
  misc_RNA (1)...(19): siRNA sense strand
gaaagugauccaugagaaa

SEQ ID NO: 1863163 - RNA, 19 nt, Homo sapiens
  misc_RNA (1)...(19): siRNA sense strand
gcaacuacaacaugaaauu

SEQ ID NO: 1863164 - RNA, 19 nt, Homo sapiens
  misc_RNA (1)...(19): siRNA sense strand
gcaaugugguuauaacaag

SEQ ID NO: 1863165 - RNA, 19 nt, Homo sapiens
  misc_RNA (1)...(19): siRNA sense strand
caaguccugugguagauaa

SEQ ID NO: 1863166 - RNA, 19 nt, Homo sapiens
  misc_RNA (1)...(19): siRNA sense strand
gaaucacacaagacuauua

SEQ ID NO: 1863167 - RNA, 19 nt, Homo sapiens
  misc_RNA (1)...(19): siRNA sense strand
uaaguggucucuggaauga

SEQ ID NO: 1863168 - RNA, 19 nt, Homo sapiens
  misc_RNA (1)...(19): siRNA sense strand
ggagcugaaugcaauaaga

SEQ ID NO: 1863169 - RNA, 19 nt, Homo sapiens
  misc_RNA (1)...(19): siRNA sense strand
gaagagcaacuacaacaug

SEQ ID NO: 1863170 - RNA, 19 nt, Homo sapiens
  misc_RNA (1)...(19): siRNA sense strand
ucaagagacucaacagaug

SEQ ID NO: 1863171 - RNA, 19 nt, Homo sapiens
  misc_RNA (1)...(19): siRNA sense strand
gagagagguuauugauuug

SEQ ID NO: 1863172 - RNA, 19 nt, Homo sapiens
  misc_RNA (1)...(19): siRNA sense strand
gagcaggucaucaaagaaa

SEQ ID NO: 1863173 - RNA, 19 nt, Homo sapiens
  misc_RNA (1)...(19): siRNA sense strand
gagcacaaguugaaagaag

SEQ ID NO: 1863174 - RNA, 19 nt, Homo sapiens
  misc_RNA (1)...(19): siRNA sense strand
caacaguuaucuaucacuu

SEQ ID NO: 1863175 - RNA, 19 nt, Homo sapiens
  misc_RNA (1)...(19): siRNA sense strand
ggaaagaucaagucuguag

SEQ ID NO: 1863176 - RNA, 19 nt, Homo sapiens
  misc_RNA (1)...(19): siRNA sense strand
gaacuuaaggauauacaga

SEQ ID NO: 1863177 - RNA, 19 nt, Homo sapiens
  misc_RNA (1)...(19): siRNA sense strand
cagcaagauuuacagagua

SEQ ID NO: 1863178 - RNA, 19 nt, Homo sapiens
  misc_RNA (1)...(19): siRNA sense strand
ggauaaugcugacucaagu

SEQ ID NO: 1863179 - RNA, 19 nt, Homo sapiens
  misc_RNA (1)...(19): siRNA sense strand
ggaagaugcugcugcuaca

SEQ ID NO: 1863180 - RNA, 19 nt, Homo sapiens
  misc_RNA (1)...(19): siRNA sense strand
agaaagaccuagccaauac

SEQ ID NO: 1863181 - RNA, 19 nt, Homo sapiens
  misc_RNA (1)...(19): siRNA sense strand
aagcugaagugcagaaauu

SEQ ID NO: 1863182 - RNA, 19 nt, Homo sapiens
  misc_RNA (1)...(19): siRNA sense strand
cgugaucguuuaacaagua

SEQ ID NO: 1863183 - RNA, 19 nt, Homo sapiens
  misc_RNA (1)...(19): siRNA sense strand
gaccuccgcuucaguucua

SEQ ID NO: 1863184 - RNA, 19 nt, Homo sapiens
  misc_RNA (1)...(19): siRNA sense strand
gaacaaaagcuuauuccua

SEQ ID NO: 1863185 - RNA, 19 nt, Homo sapiens
  misc_RNA (1)...(19): siRNA sense strand
gaaaaugucuucguagaug

SEQ ID NO: 1863186 - RNA, 19 nt, Homo sapiens
  misc_RNA (1)...(19): siRNA sense strand
gaacgaucuaccuauguua

SEQ ID NO: 1863187 - RNA, 19 nt, Homo sapiens
  misc_RNA (1)...(19): siRNA sense strand
guuaaagacuguggaagaa

SEQ ID NO: 1863188 - RNA, 19 nt, Homo sapiens
  misc_RNA (1)...(19): siRNA sense strand
ccucgagacuuuaaauuau

SEQ ID NO: 1863189 - RNA, 19 nt, Homo sapiens
  misc_RNA (1)...(19): siRNA sense strand
aguagaagaugaucaaguu

SEQ ID NO: 1863190 - RNA, 19 nt, Homo sapiens
  misc_RNA (1)...(19): siRNA sense strand
ugaguuagauucuuugaag

SEQ ID NO: 1863191 - RNA, 19 nt, Homo sapiens
  misc_RNA (1)...(19): siRNA sense strand
gaagcaaugugguuauaac

SEQ ID NO: 1863192 - RNA, 19 nt, Homo sapiens
  misc_RNA (1)...(19): siRNA sense strand
gcagcugccucgaagaaga

SEQ ID NO: 1863193 - RNA, 19 nt, Homo sapiens
  misc_RNA (1)...(19): siRNA sense strand
uagaagggauccagaaauc

SEQ ID NO: 1863194 - RNA, 19 nt, Homo sapiens
  misc_RNA (1)...(19): siRNA sense strand
ggaaguagcacaacauaac

SEQ ID NO: 1863195 - RNA, 19 nt, Homo sapiens
  misc_RNA (1)...(19): siRNA sense strand
guggaagaauuacuugaaa

SEQ ID NO: 1863196 - RNA, 19 nt, Homo sapiens
  misc_RNA (1)...(19): siRNA sense strand
gcaaagacuaaugcaguua

SEQ ID NO: 1863197 - RNA, 19 nt, Homo sapiens
  misc_RNA (1)...(19): siRNA sense strand
gaaccugucccaguuacua

SEQ ID NO: 1863198 - RNA, 19 nt, Homo sapiens
  misc_RNA (1)...(19): siRNA sense strand
gaacgagaacauuuggaaa

SEQ ID NO: 1863199 - RNA, 19 nt, Homo sapiens
  misc_RNA (1)...(19): siRNA sense strand
gcaguuaacccaggaaaug

SEQ ID NO: 1863200 - RNA, 19 nt, Homo sapiens
  misc_RNA (1)...(19): siRNA sense strand
gaagcgaugaccaggauaa

SEQ ID NO: 1863201 - RNA, 19 nt, Homo sapiens
  misc_RNA (1)...(19): siRNA sense strand
gaaagcuucaucaaagaaa

SEQ ID NO: 1863202 - RNA, 19 nt, Homo sapiens
  misc_RNA (1)...(19): siRNA sense strand
agagugaucuuucuagcaa

SEQ ID NO: 1863203 - RNA, 19 nt, Homo sapiens
  misc_RNA (1)...(19): siRNA sense strand
aagaggagcugaaugcaau

SEQ ID NO: 1863204 - RNA, 19 nt, Homo sapiens
  misc_RNA (1)...(19): siRNA sense strand
uuaaagaagucaaguaagg

SEQ ID NO: 1863205 - RNA, 19 nt, Homo sapiens
  misc_RNA (1)...(19): siRNA sense strand
gaaacacucacaaaacuua

SEQ ID NO: 1863206 - RNA, 19 nt, Homo sapiens
  misc_RNA (1)...(19): siRNA sense strand
gcagaaacagaaggaauuu

SEQ ID NO: 1863207 - RNA, 19 nt, Homo sapiens
  misc_RNA (1)...(19): siRNA sense strand
ggagaaaacuguucaggau

SEQ ID NO: 1863208 - RNA, 19 nt, Homo sapiens
  misc_RNA (1)...(19): siRNA sense strand
agaaagugauccaugagaa

SEQ ID NO: 1863209 - RNA, 19 nt, Homo sapiens
  misc_RNA (1)...(19): siRNA sense strand
gcagagauagcucacuuga

SEQ ID NO: 1863210 - RNA, 19 nt, Homo sapiens
  misc_RNA (1)...(19): siRNA sense strand
agaauugacuacgcuuaua

SEQ ID NO: 1863211 - RNA, 19 nt, Homo sapiens
  misc_RNA (1)...(19): siRNA sense strand
gcaacuacuuauauuccuu

SEQ ID NO: 1863212 - RNA, 19 nt, Homo sapiens
  misc_RNA (1)...(19): siRNA sense strand
aacaagagcuagagcgauu

SEQ ID NO: 1863213 - RNA, 19 nt, Homo sapiens
  misc_RNA (1)...(19): siRNA sense strand
uugaagaacuugagauugu

SEQ ID NO: 1863214 - RNA, 19 nt, Homo sapiens
  misc_RNA (1)...(19): siRNA sense strand
ggaaauaaaggcucuaaaa

SEQ ID NO: 1863215 - RNA, 19 nt, Homo sapiens
  misc_RNA (1)...(19): siRNA sense strand
gaagaggagcugaaugcaa

SEQ ID NO: 1863216 - RNA, 19 nt, Homo sapiens
  misc_RNA (1)...(19): siRNA sense strand
cagcaacacuacaaaucaa

SEQ ID NO: 1863217 - RNA, 19 nt, Homo sapiens
  misc_RNA (1)...(19): siRNA sense strand
caagaugcuuuaaagaagu

SEQ ID NO: 1863218 - RNA, 19 nt, Homo sapiens
  misc_RNA (1)...(19): siRNA sense strand
caaggaaacuggccacaaa

SEQ ID NO: 1863219 - RNA, 19 nt, Homo sapiens
  misc_RNA (1)...(19): siRNA sense strand
gaagagaagcucagacgua

SEQ ID NO: 1863220 - RNA, 19 nt, Homo sapiens
  misc_RNA (1)...(19): siRNA sense strand
ugaaauaccuuuggaagaa

SEQ ID NO: 1863221 - RNA, 19 nt, Homo sapiens
  misc_RNA (1)...(19): siRNA sense strand
gaacuucgagagucaaaua

SEQ ID NO: 1863222 - RNA, 19 nt, Homo sapiens
  misc_RNA (1)...(19): siRNA sense strand
gaaauaccuuuggaagaaa

SEQ ID NO: 1863223 - RNA, 19 nt, Homo sapiens
  misc_RNA (1)...(19): siRNA sense strand
ggaaacuggccacaaauaa

SEQ ID NO: 1863224 - RNA, 19 nt, Homo sapiens
  misc_RNA (1)...(19): siRNA sense strand
cgaaguaggugaaaaguuu

SEQ ID NO: 1863225 - RNA, 19 nt, Homo sapiens
  misc_RNA (1)...(19): siRNA sense strand
gaaacuggccacaaauaau

SEQ ID NO: 1863226 - RNA, 19 nt, Homo sapiens
  misc_RNA (1)...(19): siRNA sense strand
gaagaucgaaguaggugaa

SEQ ID NO: 1863227 - RNA, 19 nt, Homo sapiens
  misc_RNA (1)...(19): siRNA sense strand
caacuacccugaaauaccu

SEQ ID NO: 1863228 - RNA, 19 nt, Homo sapiens
  misc_RNA (1)...(19): siRNA sense strand
gagaagcucagacguagga

SEQ ID NO: 1863229 - RNA, 19 nt, Homo sapiens
  misc_RNA (1)...(19): siRNA sense strand
ggguaagcguucacucuug

SEQ ID NO: 1863230 - RNA, 19 nt, Homo sapiens
  misc_RNA (1)...(19): siRNA sense strand
aaacuggccacaaauaaug

SEQ ID NO: 1863231 - RNA, 19 nt, Homo sapiens
  misc_RNA (1)...(19): siRNA sense strand
uggcaacuacccugaaaua

SEQ ID NO: 1863232 - RNA, 19 nt, Homo sapiens
  misc_RNA (1)...(19): siRNA sense strand
gggcaggacuaggaauaug

SEQ ID NO: 1863233 - RNA, 19 nt, Homo sapiens
  misc_RNA (1)...(19): siRNA sense strand
aagcucagacguaggaaua

SEQ ID NO: 1863234 - RNA, 19 nt, Homo sapiens
  misc_RNA (1)...(19): siRNA sense strand
uauggcaacuacccugaaa

SEQ ID NO: 1863235 - RNA, 19 nt, Homo sapiens
  misc_RNA (1)...(19): siRNA sense strand
ggccacaaauaaugagugu

SEQ ID NO: 1863236 - RNA, 19 nt, Homo sapiens
  misc_RNA (1)...(19): siRNA sense strand
gcacucccucccucaauau

SEQ ID NO: 1863237 - RNA, 19 nt, Homo sapiens
  misc_RNA (1)...(19): siRNA sense strand
gcaaggaaacuggccacaa

SEQ ID NO: 1863238 - RNA, 19 nt, Homo sapiens
  misc_RNA (1)...(19): siRNA sense strand
ccacauccagugaagcauu

SEQ ID NO: 1863239 - RNA, 19 nt, Homo sapiens
  misc_RNA (1)...(19): siRNA sense strand
gugaaaaguuugggccuua

SEQ ID NO: 1863240 - RNA, 19 nt, Homo sapiens
  misc_RNA (1)...(19): siRNA sense strand
gaauauggaccaaaaggaa

SEQ ID NO: 1863241 - RNA, 19 nt, Homo sapiens
  misc_RNA (1)...(19): siRNA sense strand
caaaggcagggcaaggaaa

SEQ ID NO: 1863242 - RNA, 19 nt, Homo sapiens
  misc_RNA (1)...(19): siRNA sense strand
aggaaacuggccacaaaua

SEQ ID NO: 1863243 - RNA, 19 nt, Homo sapiens
  misc_RNA (1)...(19): siRNA sense strand
ccaaaggcagggcaaggaa

SEQ ID NO: 1863244 - RNA, 19 nt, Homo sapiens
  misc_RNA (1)...(19): siRNA sense strand
gccagaugcagauggagua

SEQ ID NO: 1863245 - RNA, 19 nt, Homo sapiens
  misc_RNA (1)...(19): siRNA sense strand
ggaagaaaugccagaugca

SEQ ID NO: 1863246 - RNA, 19 nt, Homo sapiens
  misc_RNA (1)...(19): siRNA sense strand
cuaggaauauggaccaaaa

SEQ ID NO: 1863247 - RNA, 19 nt, Homo sapiens
  misc_RNA (1)...(19): siRNA sense strand
gcaggacuaggaauaugga

SEQ ID NO: 1863248 - RNA, 19 nt, Homo sapiens
  misc_RNA (1)...(19): siRNA sense strand
agcacucccucccucaaua

SEQ ID NO: 1863249 - RNA, 19 nt, Homo sapiens
  misc_RNA (1)...(19): siRNA sense strand
gcaacuacccugaaauacc

SEQ ID NO: 1863250 - RNA, 19 nt, Homo sapiens
  misc_RNA (1)...(19): siRNA sense strand
gaggguaagcguucacucu

SEQ ID NO: 1863251 - RNA, 19 nt, Homo sapiens
  misc_RNA (1)...(19): siRNA sense strand
gaaaugccagaugcagaug

SEQ ID NO: 1863252 - RNA, 19 nt, Homo sapiens
  misc_RNA (1)...(19): siRNA sense strand
caaaaggaagaucgaagua

SEQ ID NO: 1863253 - RNA, 19 nt, Homo sapiens
  misc_RNA (1)...(19): siRNA sense strand
agaaaugccagaugcagau

SEQ ID NO: 1863254 - RNA, 19 nt, Homo sapiens
  misc_RNA (1)...(19): siRNA sense strand
guguguauauggcaacuac

SEQ ID NO: 1863255 - RNA, 19 nt, Homo sapiens
  misc_RNA (1)...(19): siRNA sense strand
guuugaacuucgagaguca

SEQ ID NO: 1863256 - RNA, 19 nt, Homo sapiens
  misc_RNA (1)...(19): siRNA sense strand
cacauccagugaagcauuc

SEQ ID NO: 1863257 - RNA, 19 nt, Homo sapiens
  misc_RNA (1)...(19): siRNA sense strand
gaaagaccccaguuaugga

SEQ ID NO: 1863258 - RNA, 19 nt, Homo sapiens
  misc_RNA (1)...(19): siRNA sense strand
guucacucuugguuguauu

SEQ ID NO: 1863259 - RNA, 19 nt, Homo sapiens
  misc_RNA (1)...(19): siRNA sense strand
ugggagagcagaggucaaa

SEQ ID NO: 1863260 - RNA, 19 nt, Homo sapiens
  misc_RNA (1)...(19): siRNA sense strand
gaagcucagacguaggaau

SEQ ID NO: 1863261 - RNA, 19 nt, Homo sapiens
  misc_RNA (1)...(19): siRNA sense strand
cugaaauaccuuuggaaga

SEQ ID NO: 1863262 - RNA, 19 nt, Homo sapiens
  misc_RNA (1)...(19): siRNA sense strand
gaagcauucacuccaaagg

SEQ ID NO: 1863263 - RNA, 19 nt, Homo sapiens
  misc_RNA (1)...(19): siRNA sense strand
auaaugaguguguauaugg

SEQ ID NO: 1863264 - RNA, 19 nt, Homo sapiens
  misc_RNA (1)...(19): siRNA sense strand
cuucgagagucaaauaugc

SEQ ID NO: 1863265 - RNA, 19 nt, Homo sapiens
  misc_RNA (1)...(19): siRNA sense strand
gcucagacguaggaauagc

SEQ ID NO: 1863266 - RNA, 19 nt, Homo sapiens
  misc_RNA (1)...(19): siRNA sense strand
gcaccuacauggagacgua

SEQ ID NO: 1863267 - RNA, 19 nt, Homo sapiens
  misc_RNA (1)...(19): siRNA sense strand
agacguauguguacuucua

SEQ ID NO: 1863268 - RNA, 19 nt, Homo sapiens
  misc_RNA (1)...(19): siRNA sense strand
cgaugaggaugacgucuuu

SEQ ID NO: 1863269 - RNA, 19 nt, Homo sapiens
  misc_RNA (1)...(19): siRNA sense strand
cagccucacuguucuguug

SEQ ID NO: 1863270 - RNA, 19 nt, Homo sapiens
  misc_RNA (1)...(19): siRNA sense strand
gcacacugcggcugccuuu

SEQ ID NO: 1863271 - RNA, 19 nt, Homo sapiens
  misc_RNA (1)...(19): siRNA sense strand
ggagacguauguguacuuc

SEQ ID NO: 1863272 - RNA, 19 nt, Homo sapiens
  misc_RNA (1)...(19): siRNA sense strand
ugaacgcccucuacgaugu

SEQ ID NO: 1863273 - RNA, 19 nt, Homo sapiens
  misc_RNA (1)...(19): siRNA sense strand
ggacaccuuaguucggaua

SEQ ID NO: 1863274 - RNA, 19 nt, Homo sapiens
  misc_RNA (1)...(19): siRNA sense strand
gcccaggccuuucgcaucu

SEQ ID NO: 1863275 - RNA, 19 nt, Homo sapiens
  misc_RNA (1)...(19): siRNA sense strand
guacaacgaugaggaugac

SEQ ID NO: 1863276 - RNA, 19 nt, Homo sapiens
  misc_RNA (1)...(19): siRNA sense strand
caacugcacuccucuuccu

SEQ ID NO: 1863277 - RNA, 19 nt, Homo sapiens
  misc_RNA (1)...(19): siRNA sense strand
cgagaacucaaucgauuug

SEQ ID NO: 1863278 - RNA, 19 nt, Homo sapiens
  misc_RNA (1)...(19): siRNA sense strand
gcugaacgcccucuacgau

SEQ ID NO: 1863279 - RNA, 19 nt, Homo sapiens
  misc_RNA (1)...(19): siRNA sense strand
guuccuacguguacaacga

SEQ ID NO: 1863280 - RNA, 19 nt, Homo sapiens
  misc_RNA (1)...(19): siRNA sense strand
ccagggagcaggugaugga

SEQ ID NO: 1863281 - RNA, 19 nt, Homo sapiens
  misc_RNA (1)...(19): siRNA sense strand
acacugcggcugccuuuga

SEQ ID NO: 1863282 - RNA, 19 nt, Homo sapiens
  misc_RNA (1)...(19): siRNA sense strand
cuaaggccguagagaagga

SEQ ID NO: 1863283 - RNA, 19 nt, Homo sapiens
  misc_RNA (1)...(19): siRNA sense strand
ccucucagccucacuguuc

SEQ ID NO: 1863284 - RNA, 19 nt, Homo sapiens
  misc_RNA (1)...(19): siRNA sense strand
gcacccacugcaccuauga

SEQ ID NO: 1863285 - RNA, 19 nt, Homo sapiens
  misc_RNA (1)...(19): siRNA sense strand
gcagagcaaggacgugauc

SEQ ID NO: 1863286 - RNA, 19 nt, Homo sapiens
  misc_RNA (1)...(19): siRNA sense strand
gaacgcccucuacgaugug

SEQ ID NO: 1863287 - RNA, 19 nt, Homo sapiens
  misc_RNA (1)...(19): siRNA sense strand
gcugacugcgcuucacuga

SEQ ID NO: 1863288 - RNA, 19 nt, Homo sapiens
  misc_RNA (1)...(19): siRNA sense strand
gugauggacaccuuaguuc

SEQ ID NO: 1863289 - RNA, 19 nt, Homo sapiens
  misc_RNA (1)...(19): siRNA sense strand
caccuuaguucggauacug

SEQ ID NO: 1863290 - RNA, 19 nt, Homo sapiens
  misc_RNA (1)...(19): siRNA sense strand
ccguggagguggagcugaa

SEQ ID NO: 1863291 - RNA, 19 nt, Homo sapiens
  misc_RNA (1)...(19): siRNA sense strand
gaacggaucuugucugugu

SEQ ID NO: 1863292 - RNA, 19 nt, Homo sapiens
  misc_RNA (1)...(19): siRNA sense strand
gcaaaggugucuaccagua

SEQ ID NO: 1863293 - RNA, 19 nt, Homo sapiens
  misc_RNA (1)...(19): siRNA sense strand
gaaauacguucaaaugaga

SEQ ID NO: 1863294 - RNA, 19 nt, Homo sapiens
  misc_RNA (1)...(19): siRNA sense strand
gcaauacgcuugaacugaa

SEQ ID NO: 1863295 - RNA, 19 nt, Homo sapiens
  misc_RNA (1)...(19): siRNA sense strand
ccaaauauaucaugagcua

SEQ ID NO: 1863296 - RNA, 19 nt, Homo sapiens
  misc_RNA (1)...(19): siRNA sense strand
gaagaaauacguucaaaug

SEQ ID NO: 1863297 - RNA, 19 nt, Homo sapiens
  misc_RNA (1)...(19): siRNA sense strand
ucaagcagaugccauauuu

SEQ ID NO: 1863298 - RNA, 19 nt, Homo sapiens
  misc_RNA (1)...(19): siRNA sense strand
ggagaaagaccaugaagaa

SEQ ID NO: 1863299 - RNA, 19 nt, Homo sapiens
  misc_RNA (1)...(19): siRNA sense strand
gaaagaccaugaagaauac

SEQ ID NO: 1863300 - RNA, 19 nt, Homo sapiens
  misc_RNA (1)...(19): siRNA sense strand
gaaacaguauuaacaggaa

SEQ ID NO: 1863301 - RNA, 19 nt, Homo sapiens
  misc_RNA (1)...(19): siRNA sense strand
gaaccaaggcuucaucauu

SEQ ID NO: 1863302 - RNA, 19 nt, Homo sapiens
  misc_RNA (1)...(19): siRNA sense strand
ggaagaauauguucaagag

SEQ ID NO: 1863303 - RNA, 19 nt, Homo sapiens
  misc_RNA (1)...(19): siRNA sense strand
gcaacuaccucugaaauuc

SEQ ID NO: 1863304 - RNA, 19 nt, Homo sapiens
  misc_RNA (1)...(19): siRNA sense strand
gaagguauccuaugacaug

SEQ ID NO: 1863305 - RNA, 19 nt, Homo sapiens
  misc_RNA (1)...(19): siRNA sense strand
gcaagaguaugacaguuug

SEQ ID NO: 1863306 - RNA, 19 nt, Homo sapiens
  misc_RNA (1)...(19): siRNA sense strand
ucaccagcauggacuauua

SEQ ID NO: 1863307 - RNA, 19 nt, Homo sapiens
  misc_RNA (1)...(19): siRNA sense strand
gagaaaguaugauggguau

SEQ ID NO: 1863308 - RNA, 19 nt, Homo sapiens
  misc_RNA (1)...(19): siRNA sense strand
ggaguaaaguguucaucaa

SEQ ID NO: 1863309 - RNA, 19 nt, Homo sapiens
  misc_RNA (1)...(19): siRNA sense strand
agaaagaccaugaagaaua

SEQ ID NO: 1863310 - RNA, 19 nt, Homo sapiens
  misc_RNA (1)...(19): siRNA sense strand
ccucagaccucuuauugaa

SEQ ID NO: 1863311 - RNA, 19 nt, Homo sapiens
  misc_RNA (1)...(19): siRNA sense strand
acagaaacaugaucauuga

SEQ ID NO: 1863312 - RNA, 19 nt, Homo sapiens
  misc_RNA (1)...(19): siRNA sense strand
gagaaccagugcgucauua

SEQ ID NO: 1863313 - RNA, 19 nt, Homo sapiens
  misc_RNA (1)...(19): siRNA sense strand
ggacacccauugaguacuu

SEQ ID NO: 1863314 - RNA, 19 nt, Homo sapiens
  misc_RNA (1)...(19): siRNA sense strand
caacaacuccagccgauuu

SEQ ID NO: 1863315 - RNA, 19 nt, Homo sapiens
  misc_RNA (1)...(19): siRNA sense strand
ggucuuugauuucuuggua

SEQ ID NO: 1863316 - RNA, 19 nt, Homo sapiens
  misc_RNA (1)...(19): siRNA sense strand
gaaacaagccaaugaccuu

SEQ ID NO: 1863317 - RNA, 19 nt, Homo sapiens
  misc_RNA (1)...(19): siRNA sense strand
gagagaaggagaaacagua

SEQ ID NO: 1863318 - RNA, 19 nt, Homo sapiens
  misc_RNA (1)...(19): siRNA sense strand
gguaaagcaucaagucgaa

SEQ ID NO: 1863319 - RNA, 19 nt, Homo sapiens
  misc_RNA (1)...(19): siRNA sense strand
auacauggaugacuacauu

SEQ ID NO: 1863320 - RNA, 19 nt, Homo sapiens
  misc_RNA (1)...(19): siRNA sense strand
agagauacauggaugacua

SEQ ID NO: 1863321 - RNA, 19 nt, Homo sapiens
  misc_RNA (1)...(19): siRNA sense strand
gaccuggacugcccaagaa

SEQ ID NO: 1863322 - RNA, 19 nt, Homo sapiens
  misc_RNA (1)...(19): siRNA sense strand
agaaggagaaacaguauua

SEQ ID NO: 1863323 - RNA, 19 nt, Homo sapiens
  misc_RNA (1)...(19): siRNA sense strand
uaaagaaacaagccaauga

SEQ ID NO: 1863324 - RNA, 19 nt, Homo sapiens
  misc_RNA (1)...(19): siRNA sense strand
caugagcacuucaacaguu

SEQ ID NO: 1863325 - RNA, 19 nt, Homo sapiens
  misc_RNA (1)...(19): siRNA sense strand
ucuaugcccuugcagauaa

SEQ ID NO: 1863326 - RNA, 19 nt, Homo sapiens
  misc_RNA (1)...(19): siRNA sense strand
cagacgaacucagcuuuaa

SEQ ID NO: 1863327 - RNA, 19 nt, Homo sapiens
  misc_RNA (1)...(19): siRNA sense strand
gcaagagggagaagauuga

SEQ ID NO: 1863328 - RNA, 19 nt, Homo sapiens
  misc_RNA (1)...(19): siRNA sense strand
aaagagaacauucgaguga

SEQ ID NO: 1863329 - RNA, 19 nt, Homo sapiens
  misc_RNA (1)...(19): siRNA sense strand
acaagggccuggugaaaga

SEQ ID NO: 1863330 - RNA, 19 nt, Homo sapiens
  misc_RNA (1)...(19): siRNA sense strand
gaaugugauugggaucuuu

SEQ ID NO: 1863331 - RNA, 19 nt, Homo sapiens
  misc_RNA (1)...(19): siRNA sense strand
agacaucuauggcuuugaa

SEQ ID NO: 1863332 - RNA, 19 nt, Homo sapiens
  misc_RNA (1)...(19): siRNA sense strand
ccaaggagcggcacaguau

SEQ ID NO: 1863333 - RNA, 19 nt, Homo sapiens
  misc_RNA (1)...(19): siRNA sense strand
uaaagcaucaagucgaaua

SEQ ID NO: 1863334 - RNA, 19 nt, Homo sapiens
  misc_RNA (1)...(19): siRNA sense strand
caucuauggcuuugaaaua

SEQ ID NO: 1863335 - RNA, 19 nt, Homo sapiens
  misc_RNA (1)...(19): siRNA sense strand
aaacaucagcuucaaagaa

SEQ ID NO: 1863336 - RNA, 19 nt, Homo sapiens
  misc_RNA (1)...(19): siRNA sense strand
auacaagguugaugacauu

SEQ ID NO: 1863337 - RNA, 19 nt, Homo sapiens
  misc_RNA (1)...(19): siRNA sense strand
cccaagaacucccguccua

SEQ ID NO: 1863338 - RNA, 19 nt, Homo sapiens
  misc_RNA (1)...(19): siRNA sense strand
ggaaacaucagcuucaaag

SEQ ID NO: 1863339 - RNA, 19 nt, Homo sapiens
  misc_RNA (1)...(19): siRNA sense strand
gcagauaauauguacagaa

SEQ ID NO: 1863340 - RNA, 19 nt, Homo sapiens
  misc_RNA (1)...(19): siRNA sense strand
aaccaaggcuucaucauuc

SEQ ID NO: 1863341 - RNA, 19 nt, Homo sapiens
  misc_RNA (1)...(19): siRNA sense strand
caauaaagccauggagaaa

SEQ ID NO: 1863342 - RNA, 19 nt, Homo sapiens
  misc_RNA (1)...(19): siRNA sense strand
auaaagccauggagaaaga

SEQ ID NO: 1863343 - RNA, 19 nt, Homo sapiens
  misc_RNA (1)...(19): siRNA sense strand
cagacacagucaccaagua

SEQ ID NO: 1863344 - RNA, 19 nt, Homo sapiens
  misc_RNA (1)...(19): siRNA sense strand
agaaauacguucaaaugag

SEQ ID NO: 1863345 - RNA, 19 nt, Homo sapiens
  misc_RNA (1)...(19): siRNA sense strand
gggaagguauccuaugaca

SEQ ID NO: 1863346 - RNA, 19 nt, Homo sapiens
  misc_RNA (1)...(19): siRNA sense strand
caggaccgguugaaagaaa

SEQ ID NO: 1863347 - RNA, 19 nt, Homo sapiens
  misc_RNA (1)...(19): siRNA sense strand
ucaguacuaugcaggauga

SEQ ID NO: 1863348 - RNA, 19 nt, Homo sapiens
  misc_RNA (1)...(19): siRNA sense strand
gaugagagagagaaaguau

SEQ ID NO: 1863349 - RNA, 19 nt, Homo sapiens
  misc_RNA (1)...(19): siRNA sense strand
gaacccuccuggcaucaug

SEQ ID NO: 1863350 - RNA, 19 nt, Homo sapiens
  misc_RNA (1)...(19): siRNA sense strand
caugaagaauacaacauug

SEQ ID NO: 1863351 - RNA, 19 nt, Homo sapiens
  misc_RNA (1)...(19): siRNA sense strand
gaagagaugagagagagaa

SEQ ID NO: 1863352 - RNA, 19 nt, Homo sapiens
  misc_RNA (1)...(19): siRNA sense strand
gaaggagaaacaguauuaa

SEQ ID NO: 1863353 - RNA, 19 nt, Homo sapiens
  misc_RNA (1)...(19): siRNA sense strand
ugagagagagaaaguauga

SEQ ID NO: 1863354 - RNA, 19 nt, Homo sapiens
  misc_RNA (1)...(19): siRNA sense strand
guacagaaacaugaucauu

SEQ ID NO: 1863355 - RNA, 19 nt, Homo sapiens
  misc_RNA (1)...(19): siRNA sense strand
gaguaaaguguucaucaaa

SEQ ID NO: 1863356 - RNA, 19 nt, Homo sapiens
  misc_RNA (1)...(19): siRNA sense strand
cccauugaguacuuuaaua

SEQ ID NO: 1863357 - RNA, 19 nt, Homo sapiens
  misc_RNA (1)...(19): siRNA sense strand
ggaagaaauacguucaaau

SEQ ID NO: 1863358 - RNA, 19 nt, Homo sapiens
  misc_RNA (1)...(19): siRNA sense strand
ugagcacccugaugaaaug

SEQ ID NO: 1863359 - RNA, 19 nt, Homo sapiens
  misc_RNA (1)...(19): siRNA sense strand
gcaguuccaccaaggguuu

SEQ ID NO: 1863360 - RNA, 19 nt, Homo sapiens
  misc_RNA (1)...(19): siRNA sense strand
gagcaagaguaugacaguu

SEQ ID NO: 1863361 - RNA, 19 nt, Homo sapiens
  misc_RNA (1)...(19): siRNA sense strand
ucagaccucuuauugaaca

SEQ ID NO: 1863362 - RNA, 19 nt, Homo sapiens
  misc_RNA (1)...(19): siRNA sense strand
uggguaugcucgagugaua

SEQ ID NO: 1863363 - RNA, 19 nt, Homo sapiens
  misc_RNA (1)...(19): siRNA sense strand
cuacagagguaugccauuc

SEQ ID NO: 1863364 - RNA, 19 nt, Homo sapiens
  misc_RNA (1)...(19): siRNA sense strand
gagcggaguuuucacauau

SEQ ID NO: 1863365 - RNA, 19 nt, Homo sapiens
  misc_RNA (1)...(19): siRNA sense strand
gagccuggauuuccucaag

SEQ ID NO: 1863366 - RNA, 19 nt, Homo sapiens
  misc_RNA (1)...(19): siRNA sense strand
gguaugccauucugaccaa

SEQ ID NO: 1863367 - RNA, 19 nt, Homo sapiens
  misc_RNA (1)...(19): siRNA sense strand
gaagaagagauacauggau

SEQ ID NO: 1863368 - RNA, 19 nt, Homo sapiens
  misc_RNA (1)...(19): siRNA sense strand
ucaauaaagccauggagaa

SEQ ID NO: 1863369 - RNA, 19 nt, Homo sapiens
  misc_RNA (1)...(19): siRNA sense strand
aaauggcuuugaacaguuu

SEQ ID NO: 1863370 - RNA, 19 nt, Homo sapiens
  misc_RNA (1)...(19): siRNA sense strand
uagaacggaucuugucugu

SEQ ID NO: 1863371 - RNA, 19 nt, Homo sapiens
  misc_RNA (1)...(19): siRNA sense strand
guacuuaaucggacgagaa

SEQ ID NO: 1863372 - RNA, 19 nt, Homo sapiens
  misc_RNA (1)...(19): siRNA sense strand
gggauuauauugggaugga

SEQ ID NO: 1863373 - RNA, 19 nt, Homo sapiens
  misc_RNA (1)...(19): siRNA sense strand
gcaucaagucgaauauuug

SEQ ID NO: 1863374 - RNA, 19 nt, Homo sapiens
  misc_RNA (1)...(19): siRNA sense strand
gcuucaucauucaucauua

SEQ ID NO: 1863375 - RNA, 19 nt, Homo sapiens
  misc_RNA (1)...(19): siRNA sense strand
aggcagaacaggaagaaua

SEQ ID NO: 1863376 - RNA, 19 nt, Homo sapiens
  misc_RNA (1)...(19): siRNA sense strand
aaacacagccuuggcauca

SEQ ID NO: 1863377 - RNA, 19 nt, Homo sapiens
  misc_RNA (1)...(19): siRNA sense strand
acaacuaugugaccaagau

SEQ ID NO: 1863378 - RNA, 19 nt, Homo sapiens
  misc_RNA (1)...(19): siRNA sense strand
ccagagguccauucagaaa

SEQ ID NO: 1863379 - RNA, 19 nt, Homo sapiens
  misc_RNA (1)...(19): siRNA sense strand
agagggagaagauugauuu

SEQ ID NO: 1863380 - RNA, 19 nt, Homo sapiens
  misc_RNA (1)...(19): siRNA sense strand
uggagaaucugaagaagag

SEQ ID NO: 1863381 - RNA, 19 nt, Homo sapiens
  misc_RNA (1)...(19): siRNA sense strand
cggaagaaauacguucaaa

SEQ ID NO: 1863382 - RNA, 19 nt, Homo sapiens
  misc_RNA (1)...(19): siRNA sense strand
guaaaguguucaucaaagc

SEQ ID NO: 1863383 - RNA, 19 nt, Homo sapiens
  misc_RNA (1)...(19): siRNA sense strand
gcuuugaaauauuccagaa

SEQ ID NO: 1863384 - RNA, 19 nt, Homo sapiens
  misc_RNA (1)...(19): siRNA sense strand
gcauggacuauuauuacua

SEQ ID NO: 1863385 - RNA, 19 nt, Homo sapiens
  misc_RNA (1)...(19): siRNA sense strand
cauacaagguugaugacau

SEQ ID NO: 1863386 - RNA, 19 nt, Homo sapiens
  misc_RNA (1)...(19): siRNA sense strand
gaagcaacuaccucugaaa

SEQ ID NO: 1863387 - RNA, 19 nt, Homo sapiens
  misc_RNA (1)...(19): siRNA sense strand
uaugacaguuugcuugaau

SEQ ID NO: 1863388 - RNA, 19 nt, Homo sapiens
  misc_RNA (1)...(19): siRNA sense strand
cagaaaucauggaggaaau

SEQ ID NO: 1863389 - RNA, 19 nt, Homo sapiens
  misc_RNA (1)...(19): siRNA sense strand
ccaugaagaauacaacauu

SEQ ID NO: 1863390 - RNA, 19 nt, Homo sapiens
  misc_RNA (1)...(19): siRNA sense strand
uguccaagaucacagagaa

SEQ ID NO: 1863391 - RNA, 19 nt, Homo sapiens
  misc_RNA (1)...(19): siRNA sense strand
gaagauaacuguucacuaa

SEQ ID NO: 1863392 - RNA, 19 nt, Homo sapiens
  misc_RNA (1)...(19): siRNA sense strand
ggaauauugugcugaauua

SEQ ID NO: 1863393 - RNA, 19 nt, Homo sapiens
  misc_RNA (1)...(19): siRNA sense strand
caaagucuguuacugauua

SEQ ID NO: 1863394 - RNA, 19 nt, Homo sapiens
  misc_RNA (1)...(19): siRNA sense strand
ccaaagaaaugucagaauu

SEQ ID NO: 1863395 - RNA, 19 nt, Homo sapiens
  misc_RNA (1)...(19): siRNA sense strand
ggagcaagcuuuauucguu

SEQ ID NO: 1863396 - RNA, 19 nt, Homo sapiens
  misc_RNA (1)...(19): siRNA sense strand
gaagagaaauacugaaaca

SEQ ID NO: 1863397 - RNA, 19 nt, Homo sapiens
  misc_RNA (1)...(19): siRNA sense strand
gcaaagaggaaagaaauua

SEQ ID NO: 1863398 - RNA, 19 nt, Homo sapiens
  misc_RNA (1)...(19): siRNA sense strand
gaauaaaucugcucagucu

SEQ ID NO: 1863399 - RNA, 19 nt, Homo sapiens
  misc_RNA (1)...(19): siRNA sense strand
gaacaaauccagaaagaau

SEQ ID NO: 1863400 - RNA, 19 nt, Homo sapiens
  misc_RNA (1)...(19): siRNA sense strand
gaacaagaacucuaucaaa

SEQ ID NO: 1863401 - RNA, 19 nt, Homo sapiens
  misc_RNA (1)...(19): siRNA sense strand
gaaaagagcucaguuguug

SEQ ID NO: 1863402 - RNA, 19 nt, Homo sapiens
  misc_RNA (1)...(19): siRNA sense strand
gaacaaauggccaaagaaa

SEQ ID NO: 1863403 - RNA, 19 nt, Homo sapiens
  misc_RNA (1)...(19): siRNA sense strand
gaggauuuguuucacauua

SEQ ID NO: 1863404 - RNA, 19 nt, Homo sapiens
  misc_RNA (1)...(19): siRNA sense strand
cagauaaacuugcaagauu

SEQ ID NO: 1863405 - RNA, 19 nt, Homo sapiens
  misc_RNA (1)...(19): siRNA sense strand
gcaauaaagucauaucaag

SEQ ID NO: 1863406 - RNA, 19 nt, Homo sapiens
  misc_RNA (1)...(19): siRNA sense strand
ucaagaaucuggaaauuuc

SEQ ID NO: 1863407 - RNA, 19 nt, Homo sapiens
  misc_RNA (1)...(19): siRNA sense strand
uaagauaccugacugaauc

SEQ ID NO: 1863408 - RNA, 19 nt, Homo sapiens
  misc_RNA (1)...(19): siRNA sense strand
gaucaagaaucuggaaauu

SEQ ID NO: 1863409 - RNA, 19 nt, Homo sapiens
  misc_RNA (1)...(19): siRNA sense strand
ccacacugcuccauaauau

SEQ ID NO: 1863410 - RNA, 19 nt, Homo sapiens
  misc_RNA (1)...(19): siRNA sense strand
caaagaaacugacaaacag

SEQ ID NO: 1863411 - RNA, 19 nt, Homo sapiens
  misc_RNA (1)...(19): siRNA sense strand
gagaaaugauggaacaaga

SEQ ID NO: 1863412 - RNA, 19 nt, Homo sapiens
  misc_RNA (1)...(19): siRNA sense strand
gaucaacacuuuacaucug

SEQ ID NO: 1863413 - RNA, 19 nt, Homo sapiens
  misc_RNA (1)...(19): siRNA sense strand
uaaggcagguucuaugaaa

SEQ ID NO: 1863414 - RNA, 19 nt, Homo sapiens
  misc_RNA (1)...(19): siRNA sense strand
gaguagagguccugcugua

SEQ ID NO: 1863415 - RNA, 19 nt, Homo sapiens
  misc_RNA (1)...(19): siRNA sense strand
ggaugaaacuugagaugga

SEQ ID NO: 1863416 - RNA, 19 nt, Homo sapiens
  misc_RNA (1)...(19): siRNA sense strand
cagaagcaauaaagucaua

SEQ ID NO: 1863417 - RNA, 19 nt, Homo sapiens
  misc_RNA (1)...(19): siRNA sense strand
acaaagacccucagaguaa

SEQ ID NO: 1863418 - RNA, 19 nt, Homo sapiens
  misc_RNA (1)...(19): siRNA sense strand
caucaaaccuaacuuaaag

SEQ ID NO: 1863419 - RNA, 19 nt, Homo sapiens
  misc_RNA (1)...(19): siRNA sense strand
aaagaagguuuagguguua

SEQ ID NO: 1863420 - RNA, 19 nt, Homo sapiens
  misc_RNA (1)...(19): siRNA sense strand
caagacaguuugaagaaau

SEQ ID NO: 1863421 - RNA, 19 nt, Homo sapiens
  misc_RNA (1)...(19): siRNA sense strand
uaugaaagauccucugcua

SEQ ID NO: 1863422 - RNA, 19 nt, Homo sapiens
  misc_RNA (1)...(19): siRNA sense strand
gcuuugggcuuaaaugaaa

SEQ ID NO: 1863423 - RNA, 19 nt, Homo sapiens
  misc_RNA (1)...(19): siRNA sense strand
gaaaaugacuacaaguuug

SEQ ID NO: 1863424 - RNA, 19 nt, Homo sapiens
  misc_RNA (1)...(19): siRNA sense strand
ggaaaucuaagaacaagaa

SEQ ID NO: 1863425 - RNA, 19 nt, Homo sapiens
  misc_RNA (1)...(19): siRNA sense strand
gaaaggcggaugaaacuug

SEQ ID NO: 1863426 - RNA, 19 nt, Homo sapiens
  misc_RNA (1)...(19): siRNA sense strand
gaaacugacaaacagauuu

SEQ ID NO: 1863427 - RNA, 19 nt, Homo sapiens
  misc_RNA (1)...(19): siRNA sense strand
acacaaaccucgcauugau

SEQ ID NO: 1863428 - RNA, 19 nt, Homo sapiens
  misc_RNA (1)...(19): siRNA sense strand
gaaagauccucugcuagau

SEQ ID NO: 1863429 - RNA, 19 nt, Homo sapiens
  misc_RNA (1)...(19): siRNA sense strand
ucaggacuguauagauuua

SEQ ID NO: 1863430 - RNA, 19 nt, Homo sapiens
  misc_RNA (1)...(19): siRNA sense strand
caucaacuauugcaaugaa

SEQ ID NO: 1863431 - RNA, 19 nt, Homo sapiens
  misc_RNA (1)...(19): siRNA sense strand
caaaggaacaguuauaaag

SEQ ID NO: 1863432 - RNA, 19 nt, Homo sapiens
  misc_RNA (1)...(19): siRNA sense strand
ccacaaauaacaacaaaga

SEQ ID NO: 1863433 - RNA, 19 nt, Homo sapiens
  misc_RNA (1)...(19): siRNA sense strand
cauuugaguucaccagaua

SEQ ID NO: 1863434 - RNA, 19 nt, Homo sapiens
  misc_RNA (1)...(19): siRNA sense strand
cccgacagcuuaacaauug

SEQ ID NO: 1863435 - RNA, 19 nt, Homo sapiens
  misc_RNA (1)...(19): siRNA sense strand
cauuguaucuggagaauca

SEQ ID NO: 1863436 - RNA, 19 nt, Homo sapiens
  misc_RNA (1)...(19): siRNA sense strand
gcaucaaaccuaacuuaaa

SEQ ID NO: 1863437 - RNA, 19 nt, Homo sapiens
  misc_RNA (1)...(19): siRNA sense strand
gauaacuguucacuaaugu

SEQ ID NO: 1863438 - RNA, 19 nt, Homo sapiens
  misc_RNA (1)...(19): siRNA sense strand
caauugaacccuugaauca

SEQ ID NO: 1863439 - RNA, 19 nt, Homo sapiens
  misc_RNA (1)...(19): siRNA sense strand
uggaacaggucaagauauu

SEQ ID NO: 1863440 - RNA, 19 nt, Homo sapiens
  misc_RNA (1)...(19): siRNA sense strand
ccucaugucuuugcaauug

SEQ ID NO: 1863441 - RNA, 19 nt, Homo sapiens
  misc_RNA (1)...(19): siRNA sense strand
gaauccauacuuugacaua

SEQ ID NO: 1863442 - RNA, 19 nt, Homo sapiens
  misc_RNA (1)...(19): siRNA sense strand
guacaaagacccucagagu

SEQ ID NO: 1863443 - RNA, 19 nt, Homo sapiens
  misc_RNA (1)...(19): siRNA sense strand
aagccgagcucaucaguga

SEQ ID NO: 1863444 - RNA, 19 nt, Homo sapiens
  misc_RNA (1)...(19): siRNA sense strand
aaucuaagcuggcaguuca

SEQ ID NO: 1863445 - RNA, 19 nt, Homo sapiens
  misc_RNA (1)...(19): siRNA sense strand
aauaauagcagucgauuug

SEQ ID NO: 1863446 - RNA, 19 nt, Homo sapiens
  misc_RNA (1)...(19): siRNA sense strand
gaauguggcuuugcaagag

SEQ ID NO: 1863447 - RNA, 19 nt, Homo sapiens
  misc_RNA (1)...(19): siRNA sense strand
ugugugagcugaaucuuga

SEQ ID NO: 1863448 - RNA, 19 nt, Homo sapiens
  misc_RNA (1)...(19): siRNA sense strand
gaauaugaugcacugguua

SEQ ID NO: 1863449 - RNA, 19 nt, Homo sapiens
  misc_RNA (1)...(19): siRNA sense strand
ugaaagauccucugcuaga

SEQ ID NO: 1863450 - RNA, 19 nt, Homo sapiens
  misc_RNA (1)...(19): siRNA sense strand
ggaggaaucccaacagcaa

SEQ ID NO: 1863451 - RNA, 19 nt, Homo sapiens
  misc_RNA (1)...(19): siRNA sense strand
gaucuucgaguaaguuuga

SEQ ID NO: 1863452 - RNA, 19 nt, Homo sapiens
  misc_RNA (1)...(19): siRNA sense strand
ggacaagaccaccucaugu

SEQ ID NO: 1863453 - RNA, 19 nt, Homo sapiens
  misc_RNA (1)...(19): siRNA sense strand
ccaagacaguuugaagaaa

SEQ ID NO: 1863454 - RNA, 19 nt, Homo sapiens
  misc_RNA (1)...(19): siRNA sense strand
gaacaauucaccucagcaa

SEQ ID NO: 1863455 - RNA, 19 nt, Homo sapiens
  misc_RNA (1)...(19): siRNA sense strand
gcggagaaaugauggaaca

SEQ ID NO: 1863456 - RNA, 19 nt, Homo sapiens
  misc_RNA (1)...(19): siRNA sense strand
gaagaagaagagagaaaga

SEQ ID NO: 1863457 - RNA, 19 nt, Homo sapiens
  misc_RNA (1)...(19): siRNA sense strand
gaugaaacuugagauggaa

SEQ ID NO: 1863458 - RNA, 19 nt, Homo sapiens
  misc_RNA (1)...(19): siRNA sense strand
gaugacaagccaccacuuu

SEQ ID NO: 1863459 - RNA, 19 nt, Homo sapiens
  misc_RNA (1)...(19): siRNA sense strand
caacccaguuuguggagaa

SEQ ID NO: 1863460 - RNA, 19 nt, Homo sapiens
  misc_RNA (1)...(19): siRNA sense strand
gaagugcauuauguggaua

SEQ ID NO: 1863461 - RNA, 19 nt, Homo sapiens
  misc_RNA (1)...(19): siRNA sense strand
cuagauacuuugcuaacaa

SEQ ID NO: 1863462 - RNA, 19 nt, Homo sapiens
  misc_RNA (1)...(19): siRNA sense strand
cagaaaggcugaggcguau

SEQ ID NO: 1863463 - RNA, 19 nt, Homo sapiens
  misc_RNA (1)...(19): siRNA sense strand
gcaacgugcuccaaagucu

SEQ ID NO: 1863464 - RNA, 19 nt, Homo sapiens
  misc_RNA (1)...(19): siRNA sense strand
acaaauggccaaagaaaug

SEQ ID NO: 1863465 - RNA, 19 nt, Homo sapiens
  misc_RNA (1)...(19): siRNA sense strand
gaaaggcugaggcguauuc

SEQ ID NO: 1863466 - RNA, 19 nt, Homo sapiens
  misc_RNA (1)...(19): siRNA sense strand
gaucuguguucaaggcaaa

SEQ ID NO: 1863467 - RNA, 19 nt, Homo sapiens
  misc_RNA (1)...(19): siRNA sense strand
ggagaugugugagcugaau

SEQ ID NO: 1863468 - RNA, 19 nt, Homo sapiens
  misc_RNA (1)...(19): siRNA sense strand
agagaagaauuucauagga

SEQ ID NO: 1863469 - RNA, 19 nt, Homo sapiens
  misc_RNA (1)...(19): siRNA sense strand
cggaacaaauggccaaaga

SEQ ID NO: 1863470 - RNA, 19 nt, Homo sapiens
  misc_RNA (1)...(19): siRNA sense strand
gcaggaagaggaagcagaa

SEQ ID NO: 1863471 - RNA, 19 nt, Homo sapiens
  misc_RNA (1)...(19): siRNA sense strand
gauuucagaugggcaauau

SEQ ID NO: 1863472 - RNA, 19 nt, Homo sapiens
  misc_RNA (1)...(19): siRNA sense strand
guucagggauggugucugu

SEQ ID NO: 1863473 - RNA, 19 nt, Homo sapiens
  misc_RNA (1)...(19): siRNA sense strand
aaagguaccucugaaagug

SEQ ID NO: 1863474 - RNA, 19 nt, Homo sapiens
  misc_RNA (1)...(19): siRNA sense strand
cuagaagccuuuggaaaug

SEQ ID NO: 1863475 - RNA, 19 nt, Homo sapiens
  misc_RNA (1)...(19): siRNA sense strand
gagcuggcccugaggauug

SEQ ID NO: 1863476 - RNA, 19 nt, Homo sapiens
  misc_RNA (1)...(19): siRNA sense strand
gaaaggaagaggaggaaag

SEQ ID NO: 1863477 - RNA, 19 nt, Homo sapiens
  misc_RNA (1)...(19): siRNA sense strand
gagcugaagccugcauuaa

SEQ ID NO: 1863478 - RNA, 19 nt, Homo sapiens
  misc_RNA (1)...(19): siRNA sense strand
ugucucagcuucaguguuc

SEQ ID NO: 1863479 - RNA, 19 nt, Homo sapiens
  misc_RNA (1)...(19): siRNA sense strand
ggaacaagaacucuaucaa

SEQ ID NO: 1863480 - RNA, 19 nt, Homo sapiens
  misc_RNA (1)...(19): siRNA sense strand
ggaggaacaagaacucuau

SEQ ID NO: 1863481 - RNA, 19 nt, Homo sapiens
  misc_RNA (1)...(19): siRNA sense strand
ugaguucaccagauaauuu

SEQ ID NO: 1863482 - RNA, 19 nt, Homo sapiens
  misc_RNA (1)...(19): siRNA sense strand
ggaagauaacuguucacua

SEQ ID NO: 1863483 - RNA, 19 nt, Homo sapiens
  misc_RNA (1)...(19): siRNA sense strand
gaagccacacugcuccaua

SEQ ID NO: 1863484 - RNA, 19 nt, Homo sapiens
  misc_RNA (1)...(19): siRNA sense strand
uaucaugcuuggaaaucua

SEQ ID NO: 1863485 - RNA, 19 nt, Homo sapiens
  misc_RNA (1)...(19): siRNA sense strand
gcugaggcguauucaagaa

SEQ ID NO: 1863486 - RNA, 19 nt, Homo sapiens
  misc_RNA (1)...(19): siRNA sense strand
uuaaugagguagucagugu

SEQ ID NO: 1863487 - RNA, 19 nt, Homo sapiens
  misc_RNA (1)...(19): siRNA sense strand
gcugaagccugcauuaaaa

SEQ ID NO: 1863488 - RNA, 19 nt, Homo sapiens
  misc_RNA (1)...(19): siRNA sense strand
agauaaacuugcaagauug

SEQ ID NO: 1863489 - RNA, 19 nt, Homo sapiens
  misc_RNA (1)...(19): siRNA sense strand
gcagugugcuaugaaacaa

SEQ ID NO: 1863490 - RNA, 19 nt, Homo sapiens
  misc_RNA (1)...(19): siRNA sense strand
ccaaaggaacaguuauaaa

SEQ ID NO: 1863491 - RNA, 19 nt, Homo sapiens
  misc_RNA (1)...(19): siRNA sense strand
gaaacaugaucacaccuua

SEQ ID NO: 1863492 - RNA, 19 nt, Homo sapiens
  misc_RNA (1)...(19): siRNA sense strand
gagcugcaguuucuaauaa

SEQ ID NO: 1863493 - RNA, 19 nt, Homo sapiens
  misc_RNA (1)...(19): siRNA sense strand
uaacagcacacaugaauua

SEQ ID NO: 1863494 - RNA, 19 nt, Homo sapiens
  misc_RNA (1)...(19): siRNA sense strand
aaacaagggugguaaauau

SEQ ID NO: 1863495 - RNA, 19 nt, Homo sapiens
  misc_RNA (1)...(19): siRNA sense strand
caggaacgcucauaauuaa

SEQ ID NO: 1863496 - RNA, 19 nt, Homo sapiens
  misc_RNA (1)...(19): siRNA sense strand
aaacaggccugcuuuacua

SEQ ID NO: 1863497 - RNA, 19 nt, Homo sapiens
  misc_RNA (1)...(19): siRNA sense strand
agaauuagcugguuaacaa

SEQ ID NO: 1863498 - RNA, 19 nt, Homo sapiens
  misc_RNA (1)...(19): siRNA sense strand
gaaagauggugaugaugaa

SEQ ID NO: 1863499 - RNA, 19 nt, Homo sapiens
  misc_RNA (1)...(19): siRNA sense strand
gaaggagucuaucagugua

SEQ ID NO: 1863500 - RNA, 19 nt, Homo sapiens
  misc_RNA (1)...(19): siRNA sense strand
cuacaaggcuaucggauuu

SEQ ID NO: 1863501 - RNA, 19 nt, Homo sapiens
  misc_RNA (1)...(19): siRNA sense strand
gaaacaagggugguaaaua

SEQ ID NO: 1863502 - RNA, 19 nt, Homo sapiens
  misc_RNA (1)...(19): siRNA sense strand
gaaccaaucacacuucaaa

SEQ ID NO: 1863503 - RNA, 19 nt, Homo sapiens
  misc_RNA (1)...(19): siRNA sense strand
ggugguaaauauccaguua

SEQ ID NO: 1863504 - RNA, 19 nt, Homo sapiens
  misc_RNA (1)...(19): siRNA sense strand
gacuauaucuguuaugcua

SEQ ID NO: 1863505 - RNA, 19 nt, Homo sapiens
  misc_RNA (1)...(19): siRNA sense strand
gaugcuacauggaucguua

SEQ ID NO: 1863506 - RNA, 19 nt, Homo sapiens
  misc_RNA (1)...(19): siRNA sense strand
uaaaggagcuaaaggaagu

SEQ ID NO: 1863507 - RNA, 19 nt, Homo sapiens
  misc_RNA (1)...(19): siRNA sense strand
aaaggaagauggaaugcua

SEQ ID NO: 1863508 - RNA, 19 nt, Homo sapiens
  misc_RNA (1)...(19): siRNA sense strand
uggcaaauguauccaaaua

SEQ ID NO: 1863509 - RNA, 19 nt, Homo sapiens
  misc_RNA (1)...(19): siRNA sense strand
gcuaucggauuuacuauug

SEQ ID NO: 1863510 - RNA, 19 nt, Homo sapiens
  misc_RNA (1)...(19): siRNA sense strand
ggaaguaccucuugaucca

SEQ ID NO: 1863511 - RNA, 19 nt, Homo sapiens
  misc_RNA (1)...(19): siRNA sense strand
ggaagaugaugggacauuu

SEQ ID NO: 1863512 - RNA, 19 nt, Homo sapiens
  misc_RNA (1)...(19): siRNA sense strand
gagaagaccucccaauggu

SEQ ID NO: 1863513 - RNA, 19 nt, Homo sapiens
  misc_RNA (1)...(19): siRNA sense strand
ugacaaggaucaucuagug

SEQ ID NO: 1863514 - RNA, 19 nt, Homo sapiens
  misc_RNA (1)...(19): siRNA sense strand
gaaggugauuucagcuaaa

SEQ ID NO: 1863515 - RNA, 19 nt, Homo sapiens
  misc_RNA (1)...(19): siRNA sense strand
gaucauucauguuucagaa

SEQ ID NO: 1863516 - RNA, 19 nt, Homo sapiens
  misc_RNA (1)...(19): siRNA sense strand
ccagaaagauggugaugau

SEQ ID NO: 1863517 - RNA, 19 nt, Homo sapiens
  misc_RNA (1)...(19): siRNA sense strand
caaauggagucccaauaga

SEQ ID NO: 1863518 - RNA, 19 nt, Homo sapiens
  misc_RNA (1)...(19): siRNA sense strand
caccauaccauuucuguua

SEQ ID NO: 1863519 - RNA, 19 nt, Homo sapiens
  misc_RNA (1)...(19): siRNA sense strand
gcagaucauucauguuuca

SEQ ID NO: 1863520 - RNA, 19 nt, Homo sapiens
  misc_RNA (1)...(19): siRNA sense strand
cuacauggaucguuaaaca

SEQ ID NO: 1863521 - RNA, 19 nt, Homo sapiens
  misc_RNA (1)...(19): siRNA sense strand
gcaaugccucuaaugaaua

SEQ ID NO: 1863522 - RNA, 19 nt, Homo sapiens
  misc_RNA (1)...(19): siRNA sense strand
ggaaagcugagaccuauga

SEQ ID NO: 1863523 - RNA, 19 nt, Homo sapiens
  misc_RNA (1)...(19): siRNA sense strand
gcacaaacaucagcaggau

SEQ ID NO: 1863524 - RNA, 19 nt, Homo sapiens
  misc_RNA (1)...(19): siRNA sense strand
gcgaagacuauaucuguua

SEQ ID NO: 1863525 - RNA, 19 nt, Homo sapiens
  misc_RNA (1)...(19): siRNA sense strand
ugaaugguuucgaaucuaa

SEQ ID NO: 1863526 - RNA, 19 nt, Homo sapiens
  misc_RNA (1)...(19): siRNA sense strand
gccaugaauuccuuuguuu

SEQ ID NO: 1863527 - RNA, 19 nt, Homo sapiens
  misc_RNA (1)...(19): siRNA sense strand
gaaacagacgucacauuga

SEQ ID NO: 1863528 - RNA, 19 nt, Homo sapiens
  misc_RNA (1)...(19): siRNA sense strand
acaggaacgcucauaauua

SEQ ID NO: 1863529 - RNA, 19 nt, Homo sapiens
  misc_RNA (1)...(19): siRNA sense strand
gaacugacagaucaacuug

SEQ ID NO: 1863530 - RNA, 19 nt, Homo sapiens
  misc_RNA (1)...(19): siRNA sense strand
gagaaaaccuugcagauca

SEQ ID NO: 1863531 - RNA, 19 nt, Homo sapiens
  misc_RNA (1)...(19): siRNA sense strand
gcucauaauuaacaucaug

SEQ ID NO: 1863532 - RNA, 19 nt, Homo sapiens
  misc_RNA (1)...(19): siRNA sense strand
ggaaauuaccaauguauag

SEQ ID NO: 1863533 - RNA, 19 nt, Homo sapiens
  misc_RNA (1)...(19): siRNA sense strand
aaagaggaauuaagaggaa

SEQ ID NO: 1863534 - RNA, 19 nt, Homo sapiens
  misc_RNA (1)...(19): siRNA sense strand
ggccuucaguacaaaguua

SEQ ID NO: 1863535 - RNA, 19 nt, Homo sapiens
  misc_RNA (1)...(19): siRNA sense strand
ggaucaggaagucaaauua

SEQ ID NO: 1863536 - RNA, 19 nt, Homo sapiens
  misc_RNA (1)...(19): siRNA sense strand
ugaauuaggcccucuggua

SEQ ID NO: 1863537 - RNA, 19 nt, Homo sapiens
  misc_RNA (1)...(19): siRNA sense strand
cagaguacaccuuaaagua

SEQ ID NO: 1863538 - RNA, 19 nt, Homo sapiens
  misc_RNA (1)...(19): siRNA sense strand
ggaagcccuugaaugguuu

SEQ ID NO: 1863539 - RNA, 19 nt, Homo sapiens
  misc_RNA (1)...(19): siRNA sense strand
acaauacagugguaagaaa

SEQ ID NO: 1863540 - RNA, 19 nt, Homo sapiens
  misc_RNA (1)...(19): siRNA sense strand
caaggaucaucuaguggua

SEQ ID NO: 1863541 - RNA, 19 nt, Homo sapiens
  misc_RNA (1)...(19): siRNA sense strand
gaaagagccggcugaagga

SEQ ID NO: 1863542 - RNA, 19 nt, Homo sapiens
  misc_RNA (1)...(19): siRNA sense strand
gaagaaacaagggugguaa

SEQ ID NO: 1863543 - RNA, 19 nt, Homo sapiens
  misc_RNA (1)...(19): siRNA sense strand
ggauuaccaccaccuauaa

SEQ ID NO: 1863544 - RNA, 19 nt, Homo sapiens
  misc_RNA (1)...(19): siRNA sense strand
acucagggcugguucauug

SEQ ID NO: 1863545 - RNA, 19 nt, Homo sapiens
  misc_RNA (1)...(19): siRNA sense strand
gcaaugcaaguaacaaaga

SEQ ID NO: 1863546 - RNA, 19 nt, Homo sapiens
  misc_RNA (1)...(19): siRNA sense strand
cagcagaagcaaccuauuu

SEQ ID NO: 1863547 - RNA, 19 nt, Homo sapiens
  misc_RNA (1)...(19): siRNA sense strand
gacaguacaggaacuuaua

SEQ ID NO: 1863548 - RNA, 19 nt, Homo sapiens
  misc_RNA (1)...(19): siRNA sense strand
gcacaggaacgcucauaau

SEQ ID NO: 1863549 - RNA, 19 nt, Homo sapiens
  misc_RNA (1)...(19): siRNA sense strand
aaacagacgucacauugag

SEQ ID NO: 1863550 - RNA, 19 nt, Homo sapiens
  misc_RNA (1)...(19): siRNA sense strand
gaacgugcgugugaaugug

SEQ ID NO: 1863551 - RNA, 19 nt, Homo sapiens
  misc_RNA (1)...(19): siRNA sense strand
caaugccucuaaugaauau

SEQ ID NO: 1863552 - RNA, 19 nt, Homo sapiens
  misc_RNA (1)...(19): siRNA sense strand
gagagaggccaccaacauu

SEQ ID NO: 1863553 - RNA, 19 nt, Homo sapiens
  misc_RNA (1)...(19): siRNA sense strand
ggagcaugguguccuuuga

SEQ ID NO: 1863554 - RNA, 19 nt, Homo sapiens
  misc_RNA (1)...(19): siRNA sense strand
cagaagaccacaagccuuu

SEQ ID NO: 1863555 - RNA, 19 nt, Homo sapiens
  misc_RNA (1)...(19): siRNA sense strand
gaguacaccuuaaaguauc

SEQ ID NO: 1863556 - RNA, 19 nt, Homo sapiens
  misc_RNA (1)...(19): siRNA sense strand
ccacaaagugagagaguuu

SEQ ID NO: 1863557 - RNA, 19 nt, Homo sapiens
  misc_RNA (1)...(19): siRNA sense strand
ggucugaugugugcuguug

SEQ ID NO: 1863558 - RNA, 19 nt, Homo sapiens
  misc_RNA (1)...(19): siRNA sense strand
gaugauuagugcacuggaa

SEQ ID NO: 1863559 - RNA, 19 nt, Homo sapiens
  misc_RNA (1)...(19): siRNA sense strand
ggagcugcaguuucuaaua

SEQ ID NO: 1863560 - RNA, 19 nt, Homo sapiens
  misc_RNA (1)...(19): siRNA sense strand
gaagaugaugggacauuug

SEQ ID NO: 1863561 - RNA, 19 nt, Homo sapiens
  misc_RNA (1)...(19): siRNA sense strand
ccaauuaacagcacacaug

SEQ ID NO: 1863562 - RNA, 19 nt, Homo sapiens
  misc_RNA (1)...(19): siRNA sense strand
cgagccagcuguagucaug

SEQ ID NO: 1863563 - RNA, 19 nt, Homo sapiens
  misc_RNA (1)...(19): siRNA sense strand
ggaauuaagaggaaaugug

SEQ ID NO: 1863564 - RNA, 19 nt, Homo sapiens
  misc_RNA (1)...(19): siRNA sense strand
cgaagacuauaucuguuau

SEQ ID NO: 1863565 - RNA, 19 nt, Homo sapiens
  misc_RNA (1)...(19): siRNA sense strand
ugacagaguacaccuuaaa

SEQ ID NO: 1863566 - RNA, 19 nt, Homo sapiens
  misc_RNA (1)...(19): siRNA sense strand
agaaacagacgucacauug

SEQ ID NO: 1863567 - RNA, 19 nt, Homo sapiens
  misc_RNA (1)...(19): siRNA sense strand
acaggacaguuuauaagaa

SEQ ID NO: 1863568 - RNA, 19 nt, Homo sapiens
  misc_RNA (1)...(19): siRNA sense strand
uggaagcccuugaaugguu

SEQ ID NO: 1863569 - RNA, 19 nt, Homo sapiens
  misc_RNA (1)...(19): siRNA sense strand
agaauacagugaugcagaa

SEQ ID NO: 1863570 - RNA, 19 nt, Homo sapiens
  misc_RNA (1)...(19): siRNA sense strand
ggacaguacaggaacuuau

SEQ ID NO: 1863571 - RNA, 19 nt, Homo sapiens
  misc_RNA (1)...(19): siRNA sense strand
gaagaccacaagccuuuga

SEQ ID NO: 1863572 - RNA, 19 nt, Homo sapiens
  misc_RNA (1)...(19): siRNA sense strand
gaaaauuccugccaacaag

SEQ ID NO: 1863573 - RNA, 19 nt, Homo sapiens
  misc_RNA (1)...(19): siRNA sense strand
ccugacagagucuuuaaua

SEQ ID NO: 1863574 - RNA, 19 nt, Homo sapiens
  misc_RNA (1)...(19): siRNA sense strand
caacuccagcucccguuua

SEQ ID NO: 1863575 - RNA, 19 nt, Homo sapiens
  misc_RNA (1)...(19): siRNA sense strand
ggaacgcucauaauuaaca

SEQ ID NO: 1863576 - RNA, 19 nt, Homo sapiens
  misc_RNA (1)...(19): siRNA sense strand
gaugggacauuuggagaau

SEQ ID NO: 1863577 - RNA, 19 nt, Homo sapiens
  misc_RNA (1)...(19): siRNA sense strand
aagacacgguggacuuuaa

SEQ ID NO: 1863578 - RNA, 19 nt, Homo sapiens
  misc_RNA (1)...(19): siRNA sense strand
agaaagauggugaugauga

SEQ ID NO: 1863579 - RNA, 19 nt, Homo sapiens
  misc_RNA (1)...(19): siRNA sense strand
gaaaauggaacuuuggaaa

SEQ ID NO: 1863580 - RNA, 19 nt, Homo sapiens
  misc_RNA (1)...(19): siRNA sense strand
gcacuggaaguaccucuug

SEQ ID NO: 1863581 - RNA, 19 nt, Homo sapiens
  misc_RNA (1)...(19): siRNA sense strand
ggacacccgcgaagacuau

SEQ ID NO: 1863582 - RNA, 19 nt, Homo sapiens
  misc_RNA (1)...(19): siRNA sense strand
gggagaauauuguaaucca

SEQ ID NO: 1863583 - RNA, 19 nt, Homo sapiens
  misc_RNA (1)...(19): siRNA sense strand
acacuggacucucucacuu

SEQ ID NO: 1863584 - RNA, 19 nt, Homo sapiens
  misc_RNA (1)...(19): siRNA sense strand
ccagugcucccucgucuuu

SEQ ID NO: 1863585 - RNA, 19 nt, Homo sapiens
  misc_RNA (1)...(19): siRNA sense strand
ccucacaccugcaaacaca

SEQ ID NO: 1863586 - RNA, 19 nt, Homo sapiens
  misc_RNA (1)...(19): siRNA sense strand
ccaugaauuccuuuguuua

SEQ ID NO: 1863587 - RNA, 19 nt, Homo sapiens
  misc_RNA (1)...(19): siRNA sense strand
ggacaauacagugguaaga

SEQ ID NO: 1863588 - RNA, 19 nt, Homo sapiens
  misc_RNA (1)...(19): siRNA sense strand
gaguuaaagcggcuccaua

SEQ ID NO: 1863589 - RNA, 19 nt, Homo sapiens
  misc_RNA (1)...(19): siRNA sense strand
aauuagggauggcaaagaa

SEQ ID NO: 1863590 - RNA, 19 nt, Homo sapiens
  misc_RNA (1)...(19): siRNA sense strand
cacaggaacgcucauaauu

SEQ ID NO: 1863591 - RNA, 19 nt, Homo sapiens
  misc_RNA (1)...(19): siRNA sense strand
caagacaucccauauaaua

SEQ ID NO: 1863592 - RNA, 19 nt, Homo sapiens
  misc_RNA (1)...(19): siRNA sense strand
gaacaccuauaccuacaaa

SEQ ID NO: 1863593 - RNA, 19 nt, Homo sapiens
  misc_RNA (1)...(19): siRNA sense strand
ccaauaagcucauacaucu

SEQ ID NO: 1863594 - RNA, 19 nt, Homo sapiens
  misc_RNA (1)...(19): siRNA sense strand
gaagcaagcauucuauauu

SEQ ID NO: 1863595 - RNA, 19 nt, Homo sapiens
  misc_RNA (1)...(19): siRNA sense strand
gaacaacgaagcacuaaug

SEQ ID NO: 1863596 - RNA, 19 nt, Homo sapiens
  misc_RNA (1)...(19): siRNA sense strand
uacaagacaucccauauaa

SEQ ID NO: 1863597 - RNA, 19 nt, Homo sapiens
  misc_RNA (1)...(19): siRNA sense strand
caaugcaacucaucuuaaa

SEQ ID NO: 1863598 - RNA, 19 nt, Homo sapiens
  misc_RNA (1)...(19): siRNA sense strand
caucaucaauguacuguga

SEQ ID NO: 1863599 - RNA, 19 nt, Homo sapiens
  misc_RNA (1)...(19): siRNA sense strand
ucaagacuaucccaaauau

SEQ ID NO: 1863600 - RNA, 19 nt, Homo sapiens
  misc_RNA (1)...(19): siRNA sense strand
gaauuuccauuuccucuuc

SEQ ID NO: 1863601 - RNA, 19 nt, Homo sapiens
  misc_RNA (1)...(19): siRNA sense strand
ggucaaacaauacaacuaa

SEQ ID NO: 1863602 - RNA, 19 nt, Homo sapiens
  misc_RNA (1)...(19): siRNA sense strand
caaacaggauucccauuuc

SEQ ID NO: 1863603 - RNA, 19 nt, Homo sapiens
  misc_RNA (1)...(19): siRNA sense strand
caacuaacuuuccaucauc

SEQ ID NO: 1863604 - RNA, 19 nt, Homo sapiens
  misc_RNA (1)...(19): siRNA sense strand
gcagacaaaugcuauggau

SEQ ID NO: 1863605 - RNA, 19 nt, Homo sapiens
  misc_RNA (1)...(19): siRNA sense strand
gaaugcuucuguccaacua

SEQ ID NO: 1863606 - RNA, 19 nt, Homo sapiens
  misc_RNA (1)...(19): siRNA sense strand
ccaaacaggauucccauuu

SEQ ID NO: 1863607 - RNA, 19 nt, Homo sapiens
  misc_RNA (1)...(19): siRNA sense strand
gcucauacaucuucuucug

SEQ ID NO: 1863608 - RNA, 19 nt, Homo sapiens
  misc_RNA (1)...(19): siRNA sense strand
gauaaucgcaaacucaaga

SEQ ID NO: 1863609 - RNA, 19 nt, Homo sapiens
  misc_RNA (1)...(19): siRNA sense strand
cuacaagacaucccauaua

SEQ ID NO: 1863610 - RNA, 19 nt, Homo sapiens
  misc_RNA (1)...(19): siRNA sense strand
gaaauuuggaacaccuaua

SEQ ID NO: 1863611 - RNA, 19 nt, Homo sapiens
  misc_RNA (1)...(19): siRNA sense strand
gcacuuugaccuucauuau

SEQ ID NO: 1863612 - RNA, 19 nt, Homo sapiens
  misc_RNA (1)...(19): siRNA sense strand
ucagugggaugaagacuau

SEQ ID NO: 1863613 - RNA, 19 nt, Homo sapiens
  misc_RNA (1)...(19): siRNA sense strand
gagcagaagggcacuuuga

SEQ ID NO: 1863614 - RNA, 19 nt, Homo sapiens
  misc_RNA (1)...(19): siRNA sense strand
caauacaacuaaagacaca

SEQ ID NO: 1863615 - RNA, 19 nt, Homo sapiens
  misc_RNA (1)...(19): siRNA sense strand
gcacuaauggucaaacaau

SEQ ID NO: 1863616 - RNA, 19 nt, Homo sapiens
  misc_RNA (1)...(19): siRNA sense strand
aagcaagcauucuauauuc

SEQ ID NO: 1863617 - RNA, 19 nt, Homo sapiens
  misc_RNA (1)...(19): siRNA sense strand
ccaacuaacuuuccaucau

SEQ ID NO: 1863618 - RNA, 19 nt, Homo sapiens
  misc_RNA (1)...(19): siRNA sense strand
ccucauauacacacuauuu

SEQ ID NO: 1863619 - RNA, 19 nt, Homo sapiens
  misc_RNA (1)...(19): siRNA sense strand
guacugugauaaucgcaaa

SEQ ID NO: 1863620 - RNA, 19 nt, Homo sapiens
  misc_RNA (1)...(19): siRNA sense strand
ggauucccauuucgucaaa

SEQ ID NO: 1863621 - RNA, 19 nt, Homo sapiens
  misc_RNA (1)...(19): siRNA sense strand
cuaagaaugucacacaaca

SEQ ID NO: 1863622 - RNA, 19 nt, Homo sapiens
  misc_RNA (1)...(19): siRNA sense strand
gguuugccuucuucacuua

SEQ ID NO: 1863623 - RNA, 19 nt, Homo sapiens
  misc_RNA (1)...(19): siRNA sense strand
gauugauuaugguguguuu

SEQ ID NO: 1863624 - RNA, 19 nt, Homo sapiens
  misc_RNA (1)...(19): siRNA sense strand
ucuccaaacugcagacaaa

SEQ ID NO: 1863625 - RNA, 19 nt, Homo sapiens
  misc_RNA (1)...(19): siRNA sense strand
ggagauuuccagaugauga

SEQ ID NO: 1863626 - RNA, 19 nt, Homo sapiens
  misc_RNA (1)...(19): siRNA sense strand
ccaaaucuacuacaacuuc

SEQ ID NO: 1863627 - RNA, 19 nt, Homo sapiens
  misc_RNA (1)...(19): siRNA sense strand
acagugauguguccuucua

SEQ ID NO: 1863628 - RNA, 19 nt, Homo sapiens
  misc_RNA (1)...(19): siRNA sense strand
cuaaaucucuggaaagacu

SEQ ID NO: 1863629 - RNA, 19 nt, Homo sapiens
  misc_RNA (1)...(19): siRNA sense strand
uugcuaagcuuccaaaucu

SEQ ID NO: 1863630 - RNA, 19 nt, Homo sapiens
  misc_RNA (1)...(19): siRNA sense strand
ggaugaagacuaugaccaa

SEQ ID NO: 1863631 - RNA, 19 nt, Homo sapiens
  misc_RNA (1)...(19): siRNA sense strand
acaaugaaaucuccaaacu

SEQ ID NO: 1863632 - RNA, 19 nt, Homo sapiens
  misc_RNA (1)...(19): siRNA sense strand
cacuaauggucaaacaaua

SEQ ID NO: 1863633 - RNA, 19 nt, Homo sapiens
  misc_RNA (1)...(19): siRNA sense strand
cuauugacccacuacauua

SEQ ID NO: 1863634 - RNA, 19 nt, Homo sapiens
  misc_RNA (1)...(19): siRNA sense strand
gaaccaauaagcucauaca

SEQ ID NO: 1863635 - RNA, 19 nt, Homo sapiens
  misc_RNA (1)...(19): siRNA sense strand
gaccaugcuugaucucugu

SEQ ID NO: 1863636 - RNA, 19 nt, Homo sapiens
  misc_RNA (1)...(19): siRNA sense strand
ucaaugcaacucaucuuaa

SEQ ID NO: 1863637 - RNA, 19 nt, Homo sapiens
  misc_RNA (1)...(19): siRNA sense strand
cagcucaaccucugcagua

SEQ ID NO: 1863638 - RNA, 19 nt, Homo sapiens
  misc_RNA (1)...(19): siRNA sense strand
cagcaacucuaccuucagu

SEQ ID NO: 1863639 - RNA, 19 nt, Homo sapiens
  misc_RNA (1)...(19): siRNA sense strand
ucacgaugauccugacaau

SEQ ID NO: 1863640 - RNA, 19 nt, Homo sapiens
  misc_RNA (1)...(19): siRNA sense strand
cuacauuaccaccauuuaa

SEQ ID NO: 1863641 - RNA, 19 nt, Homo sapiens
  misc_RNA (1)...(19): siRNA sense strand
caaaucuacuacaacuuca

SEQ ID NO: 1863642 - RNA, 19 nt, Homo sapiens
  misc_RNA (1)...(19): siRNA sense strand
aaacuuaucagugggauga

SEQ ID NO: 1863643 - RNA, 19 nt, Homo sapiens
  misc_RNA (1)...(19): siRNA sense strand
caacaaacuacaagacauc

SEQ ID NO: 1863644 - RNA, 19 nt, Homo sapiens
  misc_RNA (1)...(19): siRNA sense strand
ucacuuauguaucugucuu

SEQ ID NO: 1863645 - RNA, 19 nt, Homo sapiens
  misc_RNA (1)...(19): siRNA sense strand
uggaugggcuaguaaacuu

SEQ ID NO: 1863646 - RNA, 19 nt, Homo sapiens
  misc_RNA (1)...(19): siRNA sense strand
ucaggagauuuccagauga

SEQ ID NO: 1863647 - RNA, 19 nt, Homo sapiens
  misc_RNA (1)...(19): siRNA sense strand
caaauugaagcaagcauuc

SEQ ID NO: 1863648 - RNA, 19 nt, Homo sapiens
  misc_RNA (1)...(19): siRNA sense strand
ucaauguacugugauaauc

SEQ ID NO: 1863649 - RNA, 19 nt, Homo sapiens
  misc_RNA (1)...(19): siRNA sense strand
gaaucaaugccuccugguu

SEQ ID NO: 1863650 - RNA, 19 nt, Homo sapiens
  misc_RNA (1)...(19): siRNA sense strand
ugaagacuaugaccaagag

SEQ ID NO: 1863651 - RNA, 19 nt, Homo sapiens
  misc_RNA (1)...(19): siRNA sense strand
cuucuucacuuauguaucu

SEQ ID NO: 1863652 - RNA, 19 nt, Homo sapiens
  misc_RNA (1)...(19): siRNA sense strand
aagacuaucccaaauauuc

SEQ ID NO: 1863653 - RNA, 19 nt, Homo sapiens
  misc_RNA (1)...(19): siRNA sense strand
ccacuacauuaccaccauu

SEQ ID NO: 1863654 - RNA, 19 nt, Homo sapiens
  misc_RNA (1)...(19): siRNA sense strand
aagaaugucacacaacaaa

SEQ ID NO: 1863655 - RNA, 19 nt, Homo sapiens
  misc_RNA (1)...(19): siRNA sense strand
cgacaaacuuccaaaacuu

SEQ ID NO: 1863656 - RNA, 19 nt, Homo sapiens
  misc_RNA (1)...(19): siRNA sense strand
aaucaaugccuccugguuu

SEQ ID NO: 1863657 - RNA, 19 nt, Homo sapiens
  misc_RNA (1)...(19): siRNA sense strand
cuucaugauucucugcuaa

SEQ ID NO: 1863658 - RNA, 19 nt, Homo sapiens
  misc_RNA (1)...(19): siRNA sense strand
aaauuaaccucagccacaa

SEQ ID NO: 1863659 - RNA, 19 nt, Homo sapiens
  misc_RNA (1)...(19): siRNA sense strand
caacuucaucuagagcaua

SEQ ID NO: 1863660 - RNA, 19 nt, Homo sapiens
  misc_RNA (1)...(19): siRNA sense strand
ugagagcccagaacaagaa

SEQ ID NO: 1863661 - RNA, 19 nt, Homo sapiens
  misc_RNA (1)...(19): siRNA sense strand
caggagauuuccagaugau

SEQ ID NO: 1863662 - RNA, 19 nt, Homo sapiens
  misc_RNA (1)...(19): siRNA sense strand
ugcuugaucucuguuauaa

SEQ ID NO: 1863663 - RNA, 19 nt, Homo sapiens
  misc_RNA (1)...(19): siRNA sense strand
uaaccucagccacaacaaa

SEQ ID NO: 1863664 - RNA, 19 nt, Homo sapiens
  misc_RNA (1)...(19): siRNA sense strand
ggugaacaacgaagcacua

SEQ ID NO: 1863665 - RNA, 19 nt, Homo sapiens
  misc_RNA (1)...(19): siRNA sense strand
caagcauucuauauuccaa

SEQ ID NO: 1863666 - RNA, 19 nt, Homo sapiens
  misc_RNA (1)...(19): siRNA sense strand
ugaagcaagcauucuauau

SEQ ID NO: 1863667 - RNA, 19 nt, Homo sapiens
  misc_RNA (1)...(19): siRNA sense strand
uaacuuuccaucaucaaug

SEQ ID NO: 1863668 - RNA, 19 nt, Homo sapiens
  misc_RNA (1)...(19): siRNA sense strand
gccaauaugaaacuuauca

SEQ ID NO: 1863669 - RNA, 19 nt, Homo sapiens
  misc_RNA (1)...(19): siRNA sense strand
gaaugucacacaacaaacu

SEQ ID NO: 1863670 - RNA, 19 nt, Homo sapiens
  misc_RNA (1)...(19): siRNA sense strand
gccagaugaugauuaccaa

SEQ ID NO: 1863671 - RNA, 19 nt, Homo sapiens
  misc_RNA (1)...(19): siRNA sense strand
acucaagacuaucccaaau

SEQ ID NO: 1863672 - RNA, 19 nt, Homo sapiens
  misc_RNA (1)...(19): siRNA sense strand
gaacaagaaggagcagaag

SEQ ID NO: 1863673 - RNA, 19 nt, Homo sapiens
  misc_RNA (1)...(19): siRNA sense strand
ugauguguccuucuauuga

SEQ ID NO: 1863674 - RNA, 19 nt, Homo sapiens
  misc_RNA (1)...(19): siRNA sense strand
gaugaaucuuacagugaug

SEQ ID NO: 1863675 - RNA, 19 nt, Homo sapiens
  misc_RNA (1)...(19): siRNA sense strand
acaacaaacuacaagacau

SEQ ID NO: 1863676 - RNA, 19 nt, Homo sapiens
  misc_RNA (1)...(19): siRNA sense strand
ucuauugacccacuacauu

SEQ ID NO: 1863677 - RNA, 19 nt, Homo sapiens
  misc_RNA (1)...(19): siRNA sense strand
ggcugugacugcaaauuca

SEQ ID NO: 1863678 - RNA, 19 nt, Homo sapiens
  misc_RNA (1)...(19): siRNA sense strand
aaacaggauucccauuucg

SEQ ID NO: 1863679 - RNA, 19 nt, Homo sapiens
  misc_RNA (1)...(19): siRNA sense strand
gauuaugguguguuugcua

SEQ ID NO: 1863680 - RNA, 19 nt, Homo sapiens
  misc_RNA (1)...(19): siRNA sense strand
caaauauuccgaugcacau

SEQ ID NO: 1863681 - RNA, 19 nt, Homo sapiens
  misc_RNA (1)...(19): siRNA sense strand
aauaagcucauacaucuuc

SEQ ID NO: 1863682 - RNA, 19 nt, Homo sapiens
  misc_RNA (1)...(19): siRNA sense strand
aagaaccaauaagcucaua

SEQ ID NO: 1863683 - RNA, 19 nt, Homo sapiens
  misc_RNA (1)...(19): siRNA sense strand
aaacugcagacaaaugcua

SEQ ID NO: 1863684 - RNA, 19 nt, Homo sapiens
  misc_RNA (1)...(19): siRNA sense strand
cuucuugguuacaaugaaa

SEQ ID NO: 1863685 - RNA, 19 nt, Homo sapiens
  misc_RNA (1)...(19): siRNA sense strand
uacuacaacuucaucuaga

SEQ ID NO: 1863686 - RNA, 19 nt, Homo sapiens
  misc_RNA (1)...(19): siRNA sense strand
gacugcaaauucauucauc

SEQ ID NO: 1863687 - RNA, 19 nt, Homo sapiens
  misc_RNA (1)...(19): siRNA sense strand
uucaggagauuuccagaug

SEQ ID NO: 1863688 - RNA, 19 nt, Homo sapiens
  misc_RNA (1)...(19): siRNA sense strand
accaagagccagaugauga

SEQ ID NO: 1863689 - RNA, 19 nt, Homo sapiens
  misc_RNA (1)...(19): siRNA sense strand
uaaacuugaccaugcuuga

SEQ ID NO: 1863690 - RNA, 19 nt, Homo sapiens
  misc_RNA (1)...(19): siRNA sense strand
ugaugaugaugaaagugaa

SEQ ID NO: 1863691 - RNA, 19 nt, Homo sapiens
  misc_RNA (1)...(19): siRNA sense strand
ggaagaagauccuggaaua

SEQ ID NO: 1863692 - RNA, 19 nt, Homo sapiens
  misc_RNA (1)...(19): siRNA sense strand
gaagaacacacaauuauca

SEQ ID NO: 1863693 - RNA, 19 nt, Homo sapiens
  misc_RNA (1)...(19): siRNA sense strand
gcaaacaggauuauaaaga

SEQ ID NO: 1863694 - RNA, 19 nt, Homo sapiens
  misc_RNA (1)...(19): siRNA sense strand
gcaagaacauuugugaaga

SEQ ID NO: 1863695 - RNA, 19 nt, Homo sapiens
  misc_RNA (1)...(19): siRNA sense strand
gaacagauucuacuacaau

SEQ ID NO: 1863696 - RNA, 19 nt, Homo sapiens
  misc_RNA (1)...(19): siRNA sense strand
gaugaagaacacacaauua

SEQ ID NO: 1863697 - RNA, 19 nt, Homo sapiens
  misc_RNA (1)...(19): siRNA sense strand
gcgaagaauuuauauaugg

SEQ ID NO: 1863698 - RNA, 19 nt, Homo sapiens
  misc_RNA (1)...(19): siRNA sense strand
gaacauuugugaagauggu

SEQ ID NO: 1863699 - RNA, 19 nt, Homo sapiens
  misc_RNA (1)...(19): siRNA sense strand
gaaagaagcagagagugaa

SEQ ID NO: 1863700 - RNA, 19 nt, Homo sapiens
  misc_RNA (1)...(19): siRNA sense strand
caagaacauuugugaagau

SEQ ID NO: 1863701 - RNA, 19 nt, Homo sapiens
  misc_RNA (1)...(19): siRNA sense strand
cuacuacaauucagucauu

SEQ ID NO: 1863702 - RNA, 19 nt, Homo sapiens
  misc_RNA (1)...(19): siRNA sense strand
gaagaugguccgaaugguu

SEQ ID NO: 1863703 - RNA, 19 nt, Homo sapiens
  misc_RNA (1)...(19): siRNA sense strand
caaacaggauuauaaagac

SEQ ID NO: 1863704 - RNA, 19 nt, Homo sapiens
  misc_RNA (1)...(19): siRNA sense strand
ccacugaaacuuaugcauu

SEQ ID NO: 1863705 - RNA, 19 nt, Homo sapiens
  misc_RNA (1)...(19): siRNA sense strand
gaagaagauccuggaauau

SEQ ID NO: 1863706 - RNA, 19 nt, Homo sapiens
  misc_RNA (1)...(19): siRNA sense strand
agaagauccuggaauaugu

SEQ ID NO: 1863707 - RNA, 19 nt, Homo sapiens
  misc_RNA (1)...(19): siRNA sense strand
ugggcaauaugaacaauuu

SEQ ID NO: 1863708 - RNA, 19 nt, Homo sapiens
  misc_RNA (1)...(19): siRNA sense strand
uggaauaugucgagguuau

SEQ ID NO: 1863709 - RNA, 19 nt, Homo sapiens
  misc_RNA (1)...(19): siRNA sense strand
ggaguugccaccacugaaa

SEQ ID NO: 1863710 - RNA, 19 nt, Homo sapiens
  misc_RNA (1)...(19): siRNA sense strand
guacaagagauaaugcaaa

SEQ ID NO: 1863711 - RNA, 19 nt, Homo sapiens
  misc_RNA (1)...(19): siRNA sense strand
agacaacauugcaacaaga

SEQ ID NO: 1863712 - RNA, 19 nt, Homo sapiens
  misc_RNA (1)...(19): siRNA sense strand
cagaaucgauuugaaaguc

SEQ ID NO: 1863713 - RNA, 19 nt, Homo sapiens
  misc_RNA (1)...(19): siRNA sense strand
ggaauaugucgagguuaua

SEQ ID NO: 1863714 - RNA, 19 nt, Homo sapiens
  misc_RNA (1)...(19): siRNA sense strand
cgacagugcgaagaauuua

SEQ ID NO: 1863715 - RNA, 19 nt, Homo sapiens
  misc_RNA (1)...(19): siRNA sense strand
cacugaaacuuaugcauuc

SEQ ID NO: 1863716 - RNA, 19 nt, Homo sapiens
  misc_RNA (1)...(19): siRNA sense strand
ucaaaaggaggccuaauua

SEQ ID NO: 1863717 - RNA, 19 nt, Homo sapiens
  misc_RNA (1)...(19): siRNA sense strand
ccagguggauaauuaugga

SEQ ID NO: 1863718 - RNA, 19 nt, Homo sapiens
  misc_RNA (1)...(19): siRNA sense strand
gcacuuugggcuucuguau

SEQ ID NO: 1863719 - RNA, 19 nt, Homo sapiens
  misc_RNA (1)...(19): siRNA sense strand
guaaagcaaucaugaaaag

SEQ ID NO: 1863720 - RNA, 19 nt, Homo sapiens
  misc_RNA (1)...(19): siRNA sense strand
agaaagaagcagagaguga

SEQ ID NO: 1863721 - RNA, 19 nt, Homo sapiens
  misc_RNA (1)...(19): siRNA sense strand
gaagaugaagaacacacaa

SEQ ID NO: 1863722 - RNA, 19 nt, Homo sapiens
  misc_RNA (1)...(19): siRNA sense strand
acagugcgaagaauuuaua

SEQ ID NO: 1863723 - RNA, 19 nt, Homo sapiens
  misc_RNA (1)...(19): siRNA sense strand
ucaaugcugugaauaacuc

SEQ ID NO: 1863724 - RNA, 19 nt, Homo sapiens
  misc_RNA (1)...(19): siRNA sense strand
ccuggaauaugucgagguu

SEQ ID NO: 1863725 - RNA, 19 nt, Homo sapiens
  misc_RNA (1)...(19): siRNA sense strand
gcucaaugcugugaauaac

SEQ ID NO: 1863726 - RNA, 19 nt, Homo sapiens
  misc_RNA (1)...(19): siRNA sense strand
ugaggaagaugaagaacac

SEQ ID NO: 1863727 - RNA, 19 nt, Homo sapiens
  misc_RNA (1)...(19): siRNA sense strand
gaaggaaaucagaaucgau

SEQ ID NO: 1863728 - RNA, 19 nt, Homo sapiens
  misc_RNA (1)...(19): siRNA sense strand
ugaaggaaaucagaaucga

SEQ ID NO: 1863729 - RNA, 19 nt, Homo sapiens
  misc_RNA (1)...(19): siRNA sense strand
aaagaaagaagcagagagu

SEQ ID NO: 1863730 - RNA, 19 nt, Homo sapiens
  misc_RNA (1)...(19): siRNA sense strand
gagauaaugcaaacaggau

SEQ ID NO: 1863731 - RNA, 19 nt, Homo sapiens
  misc_RNA (1)...(19): siRNA sense strand
uacaagagauaaugcaaac

SEQ ID NO: 1863732 - RNA, 19 nt, Homo sapiens
  misc_RNA (1)...(19): siRNA sense strand
gacaacauugcaacaagaa

SEQ ID NO: 1863733 - RNA, 19 nt, Homo sapiens
  misc_RNA (1)...(19): siRNA sense strand
gagugaaaauagcauauga

SEQ ID NO: 1863734 - RNA, 19 nt, Homo sapiens
  misc_RNA (1)...(19): siRNA sense strand
aaaggaggccuaauuaaaa

SEQ ID NO: 1863735 - RNA, 19 nt, Homo sapiens
  misc_RNA (1)...(19): siRNA sense strand
aaaaggaggccuaauuaaa

SEQ ID NO: 1863736 - RNA, 19 nt, Homo sapiens
  misc_RNA (1)...(19): siRNA sense strand
caagagauaaugcaaacag

SEQ ID NO: 1863737 - RNA, 19 nt, Homo sapiens
  misc_RNA (1)...(19): siRNA sense strand
gguuucauccaaagaauau

SEQ ID NO: 1863738 - RNA, 19 nt, Homo sapiens
  misc_RNA (1)...(19): siRNA sense strand
ggaagaugaagaacacaca

SEQ ID NO: 1863739 - RNA, 19 nt, Homo sapiens
  misc_RNA (1)...(19): siRNA sense strand
aagaugguccgaaugguuu

SEQ ID NO: 1863740 - RNA, 19 nt, Homo sapiens
  misc_RNA (1)...(19): siRNA sense strand
cuguaugccugcugcuuaa

SEQ ID NO: 1863741 - RNA, 19 nt, Homo sapiens
  misc_RNA (1)...(19): siRNA sense strand
aagaagauccuggaauaug

SEQ ID NO: 1863742 - RNA, 19 nt, Homo sapiens
  misc_RNA (1)...(19): siRNA sense strand
caaaaggaggccuaauuaa

SEQ ID NO: 1863743 - RNA, 19 nt, Homo sapiens
  misc_RNA (1)...(19): siRNA sense strand
ccauuuaaguacaguggau

SEQ ID NO: 1863744 - RNA, 19 nt, Homo sapiens
  misc_RNA (1)...(19): siRNA sense strand
cagauucuacuacaauuca

SEQ ID NO: 1863745 - RNA, 19 nt, Homo sapiens
  misc_RNA (1)...(19): siRNA sense strand
uugagacacuggaagaaug

SEQ ID NO: 1863746 - RNA, 19 nt, Homo sapiens
  misc_RNA (1)...(19): siRNA sense strand
gaugugaaggaaaucagaa

SEQ ID NO: 1863747 - RNA, 19 nt, Homo sapiens
  misc_RNA (1)...(19): siRNA sense strand
uaaugcugauucugaggaa

SEQ ID NO: 1863748 - RNA, 19 nt, Homo sapiens
  misc_RNA (1)...(19): siRNA sense strand
gauuugaaagucuggaaga

SEQ ID NO: 1863749 - RNA, 19 nt, Homo sapiens
  misc_RNA (1)...(19): siRNA sense strand
gaagauccuggaauauguc

SEQ ID NO: 1863750 - RNA, 19 nt, Homo sapiens
  misc_RNA (1)...(19): siRNA sense strand
agaugaagaacacacaauu

SEQ ID NO: 1863751 - RNA, 19 nt, Homo sapiens
  misc_RNA (1)...(19): siRNA sense strand
ugaagaacacacaauuauc

SEQ ID NO: 1863752 - RNA, 19 nt, Homo sapiens
  misc_RNA (1)...(19): siRNA sense strand
acacacaauuaucacagau

SEQ ID NO: 1863753 - RNA, 19 nt, Homo sapiens
  misc_RNA (1)...(19): siRNA sense strand
ucuguaugccugcugcuua

SEQ ID NO: 1863754 - RNA, 19 nt, Homo sapiens
  misc_RNA (1)...(19): siRNA sense strand
aaagguuucauccaaagaa

SEQ ID NO: 1863755 - RNA, 19 nt, Homo sapiens
  misc_RNA (1)...(19): siRNA sense strand
ggaugugaaggaaaucaga

SEQ ID NO: 1863756 - RNA, 19 nt, Homo sapiens
  misc_RNA (1)...(19): siRNA sense strand
uaaagacaacauugcaaca

SEQ ID NO: 1863757 - RNA, 19 nt, Homo sapiens
  misc_RNA (1)...(19): siRNA sense strand
ugccaccacugaaacuuau

SEQ ID NO: 1863758 - RNA, 19 nt, Homo sapiens
  misc_RNA (1)...(19): siRNA sense strand
gaaugucugagggcaugua

SEQ ID NO: 1863759 - RNA, 19 nt, Homo sapiens
  misc_RNA (1)...(19): siRNA sense strand
aagacaacauugcaacaag

SEQ ID NO: 1863760 - RNA, 19 nt, Homo sapiens
  misc_RNA (1)...(19): siRNA sense strand
aaagacaacauugcaacaa

SEQ ID NO: 1863761 - RNA, 19 nt, Homo sapiens
  misc_RNA (1)...(19): siRNA sense strand
caacauugcaacaagaaaa

SEQ ID NO: 1863762 - RNA, 19 nt, Homo sapiens
  misc_RNA (1)...(19): siRNA sense strand
aagaacauuugugaagaug

SEQ ID NO: 1863763 - RNA, 19 nt, Homo sapiens
  misc_RNA (1)...(19): siRNA sense strand
aaagaagcagagagugaaa

SEQ ID NO: 1863764 - RNA, 19 nt, Homo sapiens
  misc_RNA (1)...(19): siRNA sense strand
gugaagaugguccgaaugg

SEQ ID NO: 1863765 - RNA, 19 nt, Homo sapiens
  misc_RNA (1)...(19): siRNA sense strand
ucgacagugcgaagaauuu

SEQ ID NO: 1863766 - RNA, 19 nt, Homo sapiens
  misc_RNA (1)...(19): siRNA sense strand
aacacacaauuaucacaga

SEQ ID NO: 1863767 - RNA, 19 nt, Homo sapiens
  misc_RNA (1)...(19): siRNA sense strand
gugccaaugagaacagauu

SEQ ID NO: 1863768 - RNA, 19 nt, Homo sapiens
  misc_RNA (1)...(19): siRNA sense strand
uauggaacccagcucaaug

SEQ ID NO: 1863769 - RNA, 19 nt, Homo sapiens
  misc_RNA (1)...(19): siRNA sense strand
cuggaagaaugcaagaaca

SEQ ID NO: 1863770 - RNA, 19 nt, Homo sapiens
  misc_RNA (1)...(19): siRNA sense strand
gacagugcgaagaauuuau

SEQ ID NO: 1863771 - RNA, 19 nt, Homo sapiens
  misc_RNA (1)...(19): siRNA sense strand
gaauuucacggucccucau

SEQ ID NO: 1863772 - RNA, 19 nt, Homo sapiens
  misc_RNA (1)...(19): siRNA sense strand
agaaucgauuugaaagucu

SEQ ID NO: 1863773 - RNA, 19 nt, Homo sapiens
  misc_RNA (1)...(19): siRNA sense strand
gcauucauuuugugcauuc

SEQ ID NO: 1863774 - RNA, 19 nt, Homo sapiens
  misc_RNA (1)...(19): siRNA sense strand
ccaaggagauugaagaauu

SEQ ID NO: 1863775 - RNA, 19 nt, Homo sapiens
  misc_RNA (1)...(19): siRNA sense strand
gaucaugcacugaaauuua

SEQ ID NO: 1863776 - RNA, 19 nt, Homo sapiens
  misc_RNA (1)...(19): siRNA sense strand
gaugaaaccucucaaacug

SEQ ID NO: 1863777 - RNA, 19 nt, Homo sapiens
  misc_RNA (1)...(19): siRNA sense strand
caucaucgcuggacaaugu

SEQ ID NO: 1863778 - RNA, 19 nt, Homo sapiens
  misc_RNA (1)...(19): siRNA sense strand
ccacagauaugucuuguca

SEQ ID NO: 1863779 - RNA, 19 nt, Homo sapiens
  misc_RNA (1)...(19): siRNA sense strand
caaggagauugaagaauuu

SEQ ID NO: 1863780 - RNA, 19 nt, Homo sapiens
  misc_RNA (1)...(19): siRNA sense strand
ggacagaggcguucgaguu

SEQ ID NO: 1863781 - RNA, 19 nt, Homo sapiens
  misc_RNA (1)...(19): siRNA sense strand
caaguagguuucauugauu

SEQ ID NO: 1863782 - RNA, 19 nt, Homo sapiens
  misc_RNA (1)...(19): siRNA sense strand
uaaaggauguggacaagug

SEQ ID NO: 1863783 - RNA, 19 nt, Homo sapiens
  misc_RNA (1)...(19): siRNA sense strand
gaaaacagaugauucacaa

SEQ ID NO: 1863784 - RNA, 19 nt, Homo sapiens
  misc_RNA (1)...(19): siRNA sense strand
ugcauuaccuccucuauaa

SEQ ID NO: 1863785 - RNA, 19 nt, Homo sapiens
  misc_RNA (1)...(19): siRNA sense strand
gaucaacaauucugucauc

SEQ ID NO: 1863786 - RNA, 19 nt, Homo sapiens
  misc_RNA (1)...(19): siRNA sense strand
gaucuguacuggagaauca

SEQ ID NO: 1863787 - RNA, 19 nt, Homo sapiens
  misc_RNA (1)...(19): siRNA sense strand
cagcuauucuguauaauga

SEQ ID NO: 1863788 - RNA, 19 nt, Homo sapiens
  misc_RNA (1)...(19): siRNA sense strand
gaucuuugcuauaaucuuc

SEQ ID NO: 1863789 - RNA, 19 nt, Homo sapiens
  misc_RNA (1)...(19): siRNA sense strand
ugacggagcuggagaucuu

SEQ ID NO: 1863790 - RNA, 19 nt, Homo sapiens
  misc_RNA (1)...(19): siRNA sense strand
ggagaucuuugcuauaauc

SEQ ID NO: 1863791 - RNA, 19 nt, Homo sapiens
  misc_RNA (1)...(19): siRNA sense strand
ccaaaagccuuaucccuua

SEQ ID NO: 1863792 - RNA, 19 nt, Homo sapiens
  misc_RNA (1)...(19): siRNA sense strand
ugacaacccucgugggaaa

SEQ ID NO: 1863793 - RNA, 19 nt, Homo sapiens
  misc_RNA (1)...(19): siRNA sense strand
gagcaacucucugaaauac

SEQ ID NO: 1863794 - RNA, 19 nt, Homo sapiens
  misc_RNA (1)...(19): siRNA sense strand
gaacuacucacacguuaug

SEQ ID NO: 1863795 - RNA, 19 nt, Homo sapiens
  misc_RNA (1)...(19): siRNA sense strand
caacaaaucaaagcaauga

SEQ ID NO: 1863796 - RNA, 19 nt, Homo sapiens
  misc_RNA (1)...(19): siRNA sense strand
ggacaugaccgagaagauu

SEQ ID NO: 1863797 - RNA, 19 nt, Homo sapiens
  misc_RNA (1)...(19): siRNA sense strand
gcacaucaaucgggagaga

SEQ ID NO: 1863798 - RNA, 19 nt, Homo sapiens
  misc_RNA (1)...(19): siRNA sense strand
gaaccuugguaauugaaau

SEQ ID NO: 1863799 - RNA, 19 nt, Homo sapiens
  misc_RNA (1)...(19): siRNA sense strand
gcaacagaauggugacuuc

SEQ ID NO: 1863800 - RNA, 19 nt, Homo sapiens
  misc_RNA (1)...(19): siRNA sense strand
cuggagaucuuugcuauaa

SEQ ID NO: 1863801 - RNA, 19 nt, Homo sapiens
  misc_RNA (1)...(19): siRNA sense strand
gaagauugugaguccauua

SEQ ID NO: 1863802 - RNA, 19 nt, Homo sapiens
  misc_RNA (1)...(19): siRNA sense strand
acaaguagguuucauugau

SEQ ID NO: 1863803 - RNA, 19 nt, Homo sapiens
  misc_RNA (1)...(19): siRNA sense strand
ugauuaaccucucaaagga

SEQ ID NO: 1863804 - RNA, 19 nt, Homo sapiens
  misc_RNA (1)...(19): siRNA sense strand
cggaaaugauucaaagaaa

SEQ ID NO: 1863805 - RNA, 19 nt, Homo sapiens
  misc_RNA (1)...(19): siRNA sense strand
gauauuagccauccagcaa

SEQ ID NO: 1863806 - RNA, 19 nt, Homo sapiens
  misc_RNA (1)...(19): siRNA sense strand
ggacggaaguggugcacau

SEQ ID NO: 1863807 - RNA, 19 nt, Homo sapiens
  misc_RNA (1)...(19): siRNA sense strand
gagaaucaccauuuaagug

SEQ ID NO: 1863808 - RNA, 19 nt, Homo sapiens
  misc_RNA (1)...(19): siRNA sense strand
gcuugaaucuguguauauu

SEQ ID NO: 1863809 - RNA, 19 nt, Homo sapiens
  misc_RNA (1)...(19): siRNA sense strand
caccaacaauuuccacauu

SEQ ID NO: 1863810 - RNA, 19 nt, Homo sapiens
  misc_RNA (1)...(19): siRNA sense strand
uuacacagacagugcauua

SEQ ID NO: 1863811 - RNA, 19 nt, Homo sapiens
  misc_RNA (1)...(19): siRNA sense strand
gaccgaaaguccacuaugg

SEQ ID NO: 1863812 - RNA, 19 nt, Homo sapiens
  misc_RNA (1)...(19): siRNA sense strand
gacagaggcguucgaguuu

SEQ ID NO: 1863813 - RNA, 19 nt, Homo sapiens
  misc_RNA (1)...(19): siRNA sense strand
acaagaaggaucacucuaa

SEQ ID NO: 1863814 - RNA, 19 nt, Homo sapiens
  misc_RNA (1)...(19): siRNA sense strand
gggccaagguacccaaaga

SEQ ID NO: 1863815 - RNA, 19 nt, Homo sapiens
  misc_RNA (1)...(19): siRNA sense strand
acagaauggugacuucaaa

SEQ ID NO: 1863816 - RNA, 19 nt, Homo sapiens
  misc_RNA (1)...(19): siRNA sense strand
caagaaggaucacucuaac

SEQ ID NO: 1863817 - RNA, 19 nt, Homo sapiens
  misc_RNA (1)...(19): siRNA sense strand
caucggaaaugauucaaag

SEQ ID NO: 1863818 - RNA, 19 nt, Homo sapiens
  misc_RNA (1)...(19): siRNA sense strand
gaaaacgucccagagauua

SEQ ID NO: 1863819 - RNA, 19 nt, Homo sapiens
  misc_RNA (1)...(19): siRNA sense strand
ggauauuuguggagagaau

SEQ ID NO: 1863820 - RNA, 19 nt, Homo sapiens
  misc_RNA (1)...(19): siRNA sense strand
aaacagaugauucacaaga

SEQ ID NO: 1863821 - RNA, 19 nt, Homo sapiens
  misc_RNA (1)...(19): siRNA sense strand
ccaacaauuuccacauuca

SEQ ID NO: 1863822 - RNA, 19 nt, Homo sapiens
  misc_RNA (1)...(19): siRNA sense strand
ggucaaacaauuagagaga

SEQ ID NO: 1863823 - RNA, 19 nt, Homo sapiens
  misc_RNA (1)...(19): siRNA sense strand
cagaggcguucgaguuuga

SEQ ID NO: 1863824 - RNA, 19 nt, Homo sapiens
  misc_RNA (1)...(19): siRNA sense strand
agauaugucuugucacuuc

SEQ ID NO: 1863825 - RNA, 19 nt, Homo sapiens
  misc_RNA (1)...(19): siRNA sense strand
gaaucuguguauauugaug

SEQ ID NO: 1863826 - RNA, 19 nt, Homo sapiens
  misc_RNA (1)...(19): siRNA sense strand
ggagggaguuucgaaccuu

SEQ ID NO: 1863827 - RNA, 19 nt, Homo sapiens
  misc_RNA (1)...(19): siRNA sense strand
gaaacuaagaaucaaguca

SEQ ID NO: 1863828 - RNA, 19 nt, Homo sapiens
  misc_RNA (1)...(19): siRNA sense strand
caaccaaggagauugaaga

SEQ ID NO: 1863829 - RNA, 19 nt, Homo sapiens
  misc_RNA (1)...(19): siRNA sense strand
uuacggacaugaccgagaa

SEQ ID NO: 1863830 - RNA, 19 nt, Homo sapiens
  misc_RNA (1)...(19): siRNA sense strand
gcaacucucugaaauaccu

SEQ ID NO: 1863831 - RNA, 19 nt, Homo sapiens
  misc_RNA (1)...(19): siRNA sense strand
gagaacagcaacagaaugg

SEQ ID NO: 1863832 - RNA, 19 nt, Homo sapiens
  misc_RNA (1)...(19): siRNA sense strand
cagcugccauccaugacua

SEQ ID NO: 1863833 - RNA, 19 nt, Homo sapiens
  misc_RNA (1)...(19): siRNA sense strand
ucaucuccguugacuauaa

SEQ ID NO: 1863834 - RNA, 19 nt, Homo sapiens
  misc_RNA (1)...(19): siRNA sense strand
caaaucaaagcaaugaaga

SEQ ID NO: 1863835 - RNA, 19 nt, Homo sapiens
  misc_RNA (1)...(19): siRNA sense strand
acuggagaaucaccauuua

SEQ ID NO: 1863836 - RNA, 19 nt, Homo sapiens
  misc_RNA (1)...(19): siRNA sense strand
caagaaggaagcagaggaa

SEQ ID NO: 1863837 - RNA, 19 nt, Homo sapiens
  misc_RNA (1)...(19): siRNA sense strand
ggagaaggccaagaaggaa

SEQ ID NO: 1863838 - RNA, 19 nt, Homo sapiens
  misc_RNA (1)...(19): siRNA sense strand
uuucgaaccuugguaauug

SEQ ID NO: 1863839 - RNA, 19 nt, Homo sapiens
  misc_RNA (1)...(19): siRNA sense strand
gugcuugaaucuguguaua

SEQ ID NO: 1863840 - RNA, 19 nt, Homo sapiens
  misc_RNA (1)...(19): siRNA sense strand
gcuauucuguauaaugaca

SEQ ID NO: 1863841 - RNA, 19 nt, Homo sapiens
  misc_RNA (1)...(19): siRNA sense strand
gggcugaggaaauauaaga

SEQ ID NO: 1863842 - RNA, 19 nt, Homo sapiens
  misc_RNA (1)...(19): siRNA sense strand
uuucugcacuugucucauu

SEQ ID NO: 1863843 - RNA, 19 nt, Homo sapiens
  misc_RNA (1)...(19): siRNA sense strand
uaacaucggaaaugauuca

SEQ ID NO: 1863844 - RNA, 19 nt, Homo sapiens
  misc_RNA (1)...(19): siRNA sense strand
ucacaaguagguuucauug

SEQ ID NO: 1863845 - RNA, 19 nt, Homo sapiens
  misc_RNA (1)...(19): siRNA sense strand
cagacagggugacagagaa

SEQ ID NO: 1863846 - RNA, 19 nt, Homo sapiens
  misc_RNA (1)...(19): siRNA sense strand
agaagaauuuggaauaugc

SEQ ID NO: 1863847 - RNA, 19 nt, Homo sapiens
  misc_RNA (1)...(19): siRNA sense strand
gugcauuaccuccucuaua

SEQ ID NO: 1863848 - RNA, 19 nt, Homo sapiens
  misc_RNA (1)...(19): siRNA sense strand
ggagaaucaccauuuaagu

SEQ ID NO: 1863849 - RNA, 19 nt, Homo sapiens
  misc_RNA (1)...(19): siRNA sense strand
aauggugacuucaaagaug

SEQ ID NO: 1863850 - RNA, 19 nt, Homo sapiens
  misc_RNA (1)...(19): siRNA sense strand
ggagaacagcaacagaaug

SEQ ID NO: 1863851 - RNA, 19 nt, Homo sapiens
  misc_RNA (1)...(19): siRNA sense strand
aaagacgucuggagaaacu

SEQ ID NO: 1863852 - RNA, 19 nt, Homo sapiens
  misc_RNA (1)...(19): siRNA sense strand
gacaugaccgagaagauug

SEQ ID NO: 1863853 - RNA, 19 nt, Homo sapiens
  misc_RNA (1)...(19): siRNA sense strand
auccagcuauucuguauaa

SEQ ID NO: 1863854 - RNA, 19 nt, Homo sapiens
  misc_RNA (1)...(19): siRNA sense strand
acucuaacaucggaaauga

SEQ ID NO: 1863855 - RNA, 19 nt, Homo sapiens
  misc_RNA (1)...(19): siRNA sense strand
gaauggugacuucaaagau

SEQ ID NO: 1863856 - RNA, 19 nt, Homo sapiens
  misc_RNA (1)...(19): siRNA sense strand
gcugaggaaauauaagaaa

SEQ ID NO: 1863857 - RNA, 19 nt, Homo sapiens
  misc_RNA (1)...(19): siRNA sense strand
caagaugacgaggaaauga

SEQ ID NO: 1863858 - RNA, 19 nt, Homo sapiens
  misc_RNA (1)...(19): siRNA sense strand
gcaagaugacgaggaaaug

SEQ ID NO: 1863859 - RNA, 19 nt, Homo sapiens
  misc_RNA (1)...(19): siRNA sense strand
ugauccagcuauucuguau

SEQ ID NO: 1863860 - RNA, 19 nt, Homo sapiens
  misc_RNA (1)...(19): siRNA sense strand
caggagaacagcaacagaa

SEQ ID NO: 1863861 - RNA, 19 nt, Homo sapiens
  misc_RNA (1)...(19): siRNA sense strand
cgagaagucaucaggagaa

SEQ ID NO: 1863862 - RNA, 19 nt, Homo sapiens
  misc_RNA (1)...(19): siRNA sense strand
gagaaacuaagaaucaagu

SEQ ID NO: 1863863 - RNA, 19 nt, Homo sapiens
  misc_RNA (1)...(19): siRNA sense strand
ggaaguggugcacaucaau

SEQ ID NO: 1863864 - RNA, 19 nt, Homo sapiens
  misc_RNA (1)...(19): siRNA sense strand
ucacugugcuuacggacau

SEQ ID NO: 1863865 - RNA, 19 nt, Homo sapiens
  misc_RNA (1)...(19): siRNA sense strand
acagauaugucuugucacu

SEQ ID NO: 1863866 - RNA, 19 nt, Homo sapiens
  misc_RNA (1)...(19): siRNA sense strand
ggugauggccacagauaug

SEQ ID NO: 1863867 - RNA, 19 nt, Homo sapiens
  misc_RNA (1)...(19): siRNA sense strand
gggaucaugcacugaaauu

SEQ ID NO: 1863868 - RNA, 19 nt, Homo sapiens
  misc_RNA (1)...(19): siRNA sense strand
gagauggagggccaaggua

SEQ ID NO: 1863869 - RNA, 19 nt, Homo sapiens
  misc_RNA (1)...(19): siRNA sense strand
gccaagcgaucagguguca

SEQ ID NO: 1863870 - RNA, 19 nt, Homo sapiens
  misc_RNA (1)...(19): siRNA sense strand
agacaggaguggcgaacug

SEQ ID NO: 1863871 - RNA, 19 nt, Homo sapiens
  misc_RNA (1)...(19): siRNA sense strand
ucuaacaucggaaaugauu

SEQ ID NO: 1863872 - RNA, 19 nt, Homo sapiens
  misc_RNA (1)...(19): siRNA sense strand
ccggaaccaccaacaauuu

SEQ ID NO: 1863873 - RNA, 19 nt, Homo sapiens
  misc_RNA (1)...(19): siRNA sense strand
gaagucaucaggagaacag

SEQ ID NO: 1863874 - RNA, 19 nt, Homo sapiens
  misc_RNA (1)...(19): siRNA sense strand
auaaagaggugguguauaa

SEQ ID NO: 1863875 - RNA, 19 nt, Homo sapiens
  misc_RNA (1)...(19): siRNA sense strand
ggaggaaaguggaauuugu

SEQ ID NO: 1863876 - RNA, 19 nt, Homo sapiens
  misc_RNA (1)...(19): siRNA sense strand
gagcuggacuugaaucuca

SEQ ID NO: 1863877 - RNA, 19 nt, Homo sapiens
  misc_RNA (1)...(19): siRNA sense strand
guacugugcuuccuguauu

SEQ ID NO: 1863878 - RNA, 19 nt, Homo sapiens
  misc_RNA (1)...(19): siRNA sense strand
gaauugaacaggauaaaga

SEQ ID NO: 1863879 - RNA, 19 nt, Homo sapiens
  misc_RNA (1)...(19): siRNA sense strand
guagacaccuguuauucuu

SEQ ID NO: 1863880 - RNA, 19 nt, Homo sapiens
  misc_RNA (1)...(19): siRNA sense strand
acaagcagguugacaauug

SEQ ID NO: 1863881 - RNA, 19 nt, Homo sapiens
  misc_RNA (1)...(19): siRNA sense strand
gaaaguggaauuuguaaag

SEQ ID NO: 1863882 - RNA, 19 nt, Homo sapiens
  misc_RNA (1)...(19): siRNA sense strand
acagggagcuggacuugaa

SEQ ID NO: 1863883 - RNA, 19 nt, Homo sapiens
  misc_RNA (1)...(19): siRNA sense strand
gagcaacucugaagcuucu

SEQ ID NO: 1863884 - RNA, 19 nt, Homo sapiens
  misc_RNA (1)...(19): siRNA sense strand
gcucagagaauguacauau

SEQ ID NO: 1863885 - RNA, 19 nt, Homo sapiens
  misc_RNA (1)...(19): siRNA sense strand
gagagcggcuggauuucuu

SEQ ID NO: 1863886 - RNA, 19 nt, Homo sapiens
  misc_RNA (1)...(19): siRNA sense strand
gaggaaaguggaauuugua

SEQ ID NO: 1863887 - RNA, 19 nt, Homo sapiens
  misc_RNA (1)...(19): siRNA sense strand
uaucauggaagaccuaaua

SEQ ID NO: 1863888 - RNA, 19 nt, Homo sapiens
  misc_RNA (1)...(19): siRNA sense strand
gacuuaagccgaguaaaua

SEQ ID NO: 1863889 - RNA, 19 nt, Homo sapiens
  misc_RNA (1)...(19): siRNA sense strand
aaacaaugcucagagaaug

SEQ ID NO: 1863890 - RNA, 19 nt, Homo sapiens
  misc_RNA (1)...(19): siRNA sense strand
uggaacagcucauccuuau

SEQ ID NO: 1863891 - RNA, 19 nt, Homo sapiens
  misc_RNA (1)...(19): siRNA sense strand
gcuauaugcucaacaacug

SEQ ID NO: 1863892 - RNA, 19 nt, Homo sapiens
  misc_RNA (1)...(19): siRNA sense strand
gccaucaccuauauuagaa

SEQ ID NO: 1863893 - RNA, 19 nt, Homo sapiens
  misc_RNA (1)...(19): siRNA sense strand
gaccuacacuggccucuca

SEQ ID NO: 1863894 - RNA, 19 nt, Homo sapiens
  misc_RNA (1)...(19): siRNA sense strand
aaagccaucaccuauauua

SEQ ID NO: 1863895 - RNA, 19 nt, Homo sapiens
  misc_RNA (1)...(19): siRNA sense strand
cgacuuaagccgaguaaau

SEQ ID NO: 1863896 - RNA, 19 nt, Homo sapiens
  misc_RNA (1)...(19): siRNA sense strand
ggugaacaaagaugauaua

SEQ ID NO: 1863897 - RNA, 19 nt, Homo sapiens
  misc_RNA (1)...(19): siRNA sense strand
caaggacucuaaacaaugc

SEQ ID NO: 1863898 - RNA, 19 nt, Homo sapiens
  misc_RNA (1)...(19): siRNA sense strand
aagaggugguguauaauga

SEQ ID NO: 1863899 - RNA, 19 nt, Homo sapiens
  misc_RNA (1)...(19): siRNA sense strand
ggauauguuggauuccuua

SEQ ID NO: 1863900 - RNA, 19 nt, Homo sapiens
  misc_RNA (1)...(19): siRNA sense strand
gcagguccuucccacagaa

SEQ ID NO: 1863901 - RNA, 19 nt, Homo sapiens
  misc_RNA (1)...(19): siRNA sense strand
uagauguggugaacaaaga

SEQ ID NO: 1863902 - RNA, 19 nt, Homo sapiens
  misc_RNA (1)...(19): siRNA sense strand
cacuaugucugauggguaa

SEQ ID NO: 1863903 - RNA, 19 nt, Homo sapiens
  misc_RNA (1)...(19): siRNA sense strand
gagacaagcagguugacaa

SEQ ID NO: 1863904 - RNA, 19 nt, Homo sapiens
  misc_RNA (1)...(19): siRNA sense strand
ggaaaguggaauuuguaaa

SEQ ID NO: 1863905 - RNA, 19 nt, Homo sapiens
  misc_RNA (1)...(19): siRNA sense strand
ccaauacacuaacuuugag

SEQ ID NO: 1863906 - RNA, 19 nt, Homo sapiens
  misc_RNA (1)...(19): siRNA sense strand
ucuaaacaaugcucagaga

SEQ ID NO: 1863907 - RNA, 19 nt, Homo sapiens
  misc_RNA (1)...(19): siRNA sense strand
uauguuggauuccuuagau

SEQ ID NO: 1863908 - RNA, 19 nt, Homo sapiens
  misc_RNA (1)...(19): siRNA sense strand
ggauaaagaggugguguau

SEQ ID NO: 1863909 - RNA, 19 nt, Homo sapiens
  misc_RNA (1)...(19): siRNA sense strand
gcacagggagcuggacuug

SEQ ID NO: 1863910 - RNA, 19 nt, Homo sapiens
  misc_RNA (1)...(19): siRNA sense strand
ggccucucaugcuuaguua

SEQ ID NO: 1863911 - RNA, 19 nt, Homo sapiens
  misc_RNA (1)...(19): siRNA sense strand
acacuggccucucaugcuu

SEQ ID NO: 1863912 - RNA, 19 nt, Homo sapiens
  misc_RNA (1)...(19): siRNA sense strand
gauaaagaggugguguaua

SEQ ID NO: 1863913 - RNA, 19 nt, Homo sapiens
  misc_RNA (1)...(19): siRNA sense strand
ucugauggguaaacuagaa

SEQ ID NO: 1863914 - RNA, 19 nt, Homo sapiens
  misc_RNA (1)...(19): siRNA sense strand
uaaacaaugcucagagaau

SEQ ID NO: 1863915 - RNA, 19 nt, Homo sapiens
  misc_RNA (1)...(19): siRNA sense strand
ccacagaagacagaucaaa

SEQ ID NO: 1863916 - RNA, 19 nt, Homo sapiens
  misc_RNA (1)...(19): siRNA sense strand
caucaaagcuggaaaacca

SEQ ID NO: 1863917 - RNA, 19 nt, Homo sapiens
  misc_RNA (1)...(19): siRNA sense strand
caaaaugguuaucauggaa

SEQ ID NO: 1863918 - RNA, 19 nt, Homo sapiens
  misc_RNA (1)...(19): siRNA sense strand
ccuuagauguggugaacaa

SEQ ID NO: 1863919 - RNA, 19 nt, Homo sapiens
  misc_RNA (1)...(19): siRNA sense strand
ccaaggacucuaaacaaug

SEQ ID NO: 1863920 - RNA, 19 nt, Homo sapiens
  misc_RNA (1)...(19): siRNA sense strand
gggagcaacucugaagcuu

SEQ ID NO: 1863921 - RNA, 19 nt, Homo sapiens
  misc_RNA (1)...(19): siRNA sense strand
ccaaguggccagacaguca

SEQ ID NO: 1863922 - RNA, 19 nt, Homo sapiens
  misc_RNA (1)...(19): siRNA sense strand
gcaacucugaagcuucuaa

SEQ ID NO: 1863923 - RNA, 19 nt, Homo sapiens
  misc_RNA (1)...(19): siRNA sense strand
gguauuccguucaauccau

SEQ ID NO: 1863924 - RNA, 19 nt, Homo sapiens
  misc_RNA (1)...(19): siRNA sense strand
ggaaaaccaaggacucuaa

SEQ ID NO: 1863925 - RNA, 19 nt, Homo sapiens
  misc_RNA (1)...(19): siRNA sense strand
ucuccgggcuggauauguu

SEQ ID NO: 1863926 - RNA, 19 nt, Homo sapiens
  misc_RNA (1)...(19): siRNA sense strand
aaagaggugguguauaaug

SEQ ID NO: 1863927 - RNA, 19 nt, Homo sapiens
  misc_RNA (1)...(19): siRNA sense strand
accaaggacucuaaacaau

SEQ ID NO: 1863928 - RNA, 19 nt, Homo sapiens
  misc_RNA (1)...(19): siRNA sense strand
aaaccaaggacucuaaaca

SEQ ID NO: 1863929 - RNA, 19 nt, Homo sapiens
  misc_RNA (1)...(19): siRNA sense strand
uccaauacacuaacuuuga

SEQ ID NO: 1863930 - RNA, 19 nt, Homo sapiens
  misc_RNA (1)...(19): siRNA sense strand
uaagccgaguaaauaaaga

SEQ ID NO: 1863931 - RNA, 19 nt, Homo sapiens
  misc_RNA (1)...(19): siRNA sense strand
gcacucuccgggcuggaua

SEQ ID NO: 1863932 - RNA, 19 nt, Homo sapiens
  misc_RNA (1)...(19): siRNA sense strand
ggcuggauauguuggauuc

SEQ ID NO: 1863933 - RNA, 19 nt, Homo sapiens
  misc_RNA (1)...(19): siRNA sense strand
agggagagcggcuggauuu

SEQ ID NO: 1863934 - RNA, 19 nt, Homo sapiens
  misc_RNA (1)...(19): siRNA sense strand
gcagguugacaauugcauu

SEQ ID NO: 1863935 - RNA, 19 nt, Homo sapiens
  misc_RNA (1)...(19): siRNA sense strand
cuaaaucgcugugguuucc

SEQ ID NO: 1863936 - RNA, 19 nt, Homo sapiens
  misc_RNA (1)...(19): siRNA sense strand
gcaacaaaaugguuaucau

SEQ ID NO: 1863937 - RNA, 19 nt, Homo sapiens
  misc_RNA (1)...(19): siRNA sense strand
acagaagacagaucaaauc

SEQ ID NO: 1863938 - RNA, 19 nt, Homo sapiens
  misc_RNA (1)...(19): siRNA sense strand
uaagcacacggacuucuga

SEQ ID NO: 1863939 - RNA, 19 nt, Homo sapiens
  misc_RNA (1)...(19): siRNA sense strand
aaaugguuaucauggaaga

SEQ ID NO: 1863940 - RNA, 19 nt, Homo sapiens
  misc_RNA (1)...(19): siRNA sense strand
ccucucaugcuuaguuauu

SEQ ID NO: 1863941 - RNA, 19 nt, Homo sapiens
  misc_RNA (1)...(19): siRNA sense strand
cagguugacaauugcauuu

SEQ ID NO: 1863942 - RNA, 19 nt, Homo sapiens
  misc_RNA (1)...(19): siRNA sense strand
gccagacagucauccagau

SEQ ID NO: 1863943 - RNA, 19 nt, Homo sapiens
  misc_RNA (1)...(19): siRNA sense strand
gaccuaauaagccuguaga

SEQ ID NO: 1863944 - RNA, 19 nt, Homo sapiens
  misc_RNA (1)...(19): siRNA sense strand
uggguaaacuagaagaagu

SEQ ID NO: 1863945 - RNA, 19 nt, Homo sapiens
  misc_RNA (1)...(19): siRNA sense strand
guaccugaaggcagugaaa

SEQ ID NO: 1863946 - RNA, 19 nt, Homo sapiens
  misc_RNA (1)...(19): siRNA sense strand
ugaaucucauggaggauca

SEQ ID NO: 1863947 - RNA, 19 nt, Homo sapiens
  misc_RNA (1)...(19): siRNA sense strand
caacucugaagcuucuaaa

SEQ ID NO: 1863948 - RNA, 19 nt, Homo sapiens
  misc_RNA (1)...(19): siRNA sense strand
uguauaaugaggcaacaaa

SEQ ID NO: 1863949 - RNA, 19 nt, Homo sapiens
  misc_RNA (1)...(19): siRNA sense strand
caagcagguugacaauugc

SEQ ID NO: 1863950 - RNA, 19 nt, Homo sapiens
  misc_RNA (1)...(19): siRNA sense strand
cacagaagacagaucaaau

SEQ ID NO: 1863951 - RNA, 19 nt, Homo sapiens
  misc_RNA (1)...(19): siRNA sense strand
acaaugcucagagaaugua

SEQ ID NO: 1863952 - RNA, 19 nt, Homo sapiens
  misc_RNA (1)...(19): siRNA sense strand
ggagagcggcuggauuucu

SEQ ID NO: 1863953 - RNA, 19 nt, Homo sapiens
  misc_RNA (1)...(19): siRNA sense strand
gacaagcagguugacaauu

SEQ ID NO: 1863954 - RNA, 19 nt, Homo sapiens
  misc_RNA (1)...(19): siRNA sense strand
aaccaaggacucuaaacaa

SEQ ID NO: 1863955 - RNA, 19 nt, Homo sapiens
  misc_RNA (1)...(19): siRNA sense strand
aguggaauuuguaaaguuc

SEQ ID NO: 1863956 - RNA, 19 nt, Homo sapiens
  misc_RNA (1)...(19): siRNA sense strand
uacugugcuuccuguauuu

SEQ ID NO: 1863957 - RNA, 19 nt, Homo sapiens
  misc_RNA (1)...(19): siRNA sense strand
cuggaacagcucauccuua

SEQ ID NO: 1863958 - RNA, 19 nt, Homo sapiens
  misc_RNA (1)...(19): siRNA sense strand
ucagagaauguacauaucu

SEQ ID NO: 1863959 - RNA, 19 nt, Homo sapiens
  misc_RNA (1)...(19): siRNA sense strand
gaaaaccaaggacucuaaa

SEQ ID NO: 1863960 - RNA, 19 nt, Homo sapiens
  misc_RNA (1)...(19): siRNA sense strand
gaucuguggccugucacua

SEQ ID NO: 1863961 - RNA, 19 nt, Homo sapiens
  misc_RNA (1)...(19): siRNA sense strand
agacaccuguuauucuuuu

SEQ ID NO: 1863962 - RNA, 19 nt, Homo sapiens
  misc_RNA (1)...(19): siRNA sense strand
gauggguaaacuagaagaa

SEQ ID NO: 1863963 - RNA, 19 nt, Homo sapiens
  misc_RNA (1)...(19): siRNA sense strand
guggugaacaaagaugaua

SEQ ID NO: 1863964 - RNA, 19 nt, Homo sapiens
  misc_RNA (1)...(19): siRNA sense strand
gcuggaagaugggaguuuu

SEQ ID NO: 1863965 - RNA, 19 nt, Homo sapiens
  misc_RNA (1)...(19): siRNA sense strand
ccgaguaaauaaagaagcu

SEQ ID NO: 1863966 - RNA, 19 nt, Homo sapiens
  misc_RNA (1)...(19): siRNA sense strand
ccuucuagaucuccaucaa

SEQ ID NO: 1863967 - RNA, 19 nt, Homo sapiens
  misc_RNA (1)...(19): siRNA sense strand
ucugaacgccuucuagauc

SEQ ID NO: 1863968 - RNA, 19 nt, Homo sapiens
  misc_RNA (1)...(19): siRNA sense strand
cauccugcucugaauguaa

SEQ ID NO: 1863969 - RNA, 19 nt, Homo sapiens
  misc_RNA (1)...(19): siRNA sense strand
caacaaaaugguuaucaug

SEQ ID NO: 1863970 - RNA, 19 nt, Homo sapiens
  misc_RNA (1)...(19): siRNA sense strand
gagggagagcggcuggauu

SEQ ID NO: 1863971 - RNA, 19 nt, Homo sapiens
  misc_RNA (1)...(19): siRNA sense strand
guaagcacacggacuucug

SEQ ID NO: 1863972 - RNA, 19 nt, Homo sapiens
  misc_RNA (1)...(19): siRNA sense strand
cuaaacaaugcucagagaa

SEQ ID NO: 1863973 - RNA, 19 nt, Homo sapiens
  misc_RNA (1)...(19): siRNA sense strand
cugaacgccuucuagaucu

SEQ ID NO: 1863974 - RNA, 19 nt, Homo sapiens
  misc_RNA (1)...(19): siRNA sense strand
gaaaggacaucaacucuug

SEQ ID NO: 1863975 - RNA, 19 nt, Homo sapiens
  misc_RNA (1)...(19): siRNA sense strand
ggaaauaaaugaacaaggu

SEQ ID NO: 1863976 - RNA, 19 nt, Homo sapiens
  misc_RNA (1)...(19): siRNA sense strand
gcccaacgaugacuacuua

SEQ ID NO: 1863977 - RNA, 19 nt, Homo sapiens
  misc_RNA (1)...(19): siRNA sense strand
gagcaacucggaagaaaua

SEQ ID NO: 1863978 - RNA, 19 nt, Homo sapiens
  misc_RNA (1)...(19): siRNA sense strand
caacaucaaucaaccaguu

SEQ ID NO: 1863979 - RNA, 19 nt, Homo sapiens
  misc_RNA (1)...(19): siRNA sense strand
aagcaaagcugauuucuca

SEQ ID NO: 1863980 - RNA, 19 nt, Homo sapiens
  misc_RNA (1)...(19): siRNA sense strand
gaagaaauacacucugauu

SEQ ID NO: 1863981 - RNA, 19 nt, Homo sapiens
  misc_RNA (1)...(19): siRNA sense strand
ggugaacgcccuauacuuu

SEQ ID NO: 1863982 - RNA, 19 nt, Homo sapiens
  misc_RNA (1)...(19): siRNA sense strand
ggaagcuucugaucaaauc

SEQ ID NO: 1863983 - RNA, 19 nt, Homo sapiens
  misc_RNA (1)...(19): siRNA sense strand
gcaaaccagugcaaaugau

SEQ ID NO: 1863984 - RNA, 19 nt, Homo sapiens
  misc_RNA (1)...(19): siRNA sense strand
gugcagacaugauggaguu

SEQ ID NO: 1863985 - RNA, 19 nt, Homo sapiens
  misc_RNA (1)...(19): siRNA sense strand
gaagacaguuaugaucuca

SEQ ID NO: 1863986 - RNA, 19 nt, Homo sapiens
  misc_RNA (1)...(19): siRNA sense strand
ugaacgcccuauacuuuaa

SEQ ID NO: 1863987 - RNA, 19 nt, Homo sapiens
  misc_RNA (1)...(19): siRNA sense strand
aaacgagacuacaagcaaa

SEQ ID NO: 1863988 - RNA, 19 nt, Homo sapiens
  misc_RNA (1)...(19): siRNA sense strand
cugggaacaucaauucuua

SEQ ID NO: 1863989 - RNA, 19 nt, Homo sapiens
  misc_RNA (1)...(19): siRNA sense strand
cguaugcauuucacaauaa

SEQ ID NO: 1863990 - RNA, 19 nt, Homo sapiens
  misc_RNA (1)...(19): siRNA sense strand
cggaagaaauacacucuga

SEQ ID NO: 1863991 - RNA, 19 nt, Homo sapiens
  misc_RNA (1)...(19): siRNA sense strand
aacgaugacuacuuacuua

SEQ ID NO: 1863992 - RNA, 19 nt, Homo sapiens
  misc_RNA (1)...(19): siRNA sense strand
gcccaggugcuucaauuua

SEQ ID NO: 1863993 - RNA, 19 nt, Homo sapiens
  misc_RNA (1)...(19): siRNA sense strand
gugcaaaugauguuuauga

SEQ ID NO: 1863994 - RNA, 19 nt, Homo sapiens
  misc_RNA (1)...(19): siRNA sense strand
gaaaauggaauucaacuug

SEQ ID NO: 1863995 - RNA, 19 nt, Homo sapiens
  misc_RNA (1)...(19): siRNA sense strand
gcagaaccucagccuguua

SEQ ID NO: 1863996 - RNA, 19 nt, Homo sapiens
  misc_RNA (1)...(19): siRNA sense strand
aaacagccaaugcgauaua

SEQ ID NO: 1863997 - RNA, 19 nt, Homo sapiens
  misc_RNA (1)...(19): siRNA sense strand
ggaagacaguuaugaucuc

SEQ ID NO: 1863998 - RNA, 19 nt, Homo sapiens
  misc_RNA (1)...(19): siRNA sense strand
cccaggugcuucaauuuaa

SEQ ID NO: 1863999 - RNA, 19 nt, Homo sapiens
  misc_RNA (1)...(19): siRNA sense strand
guuaugaucucaagucaac

SEQ ID NO: 1864000 - RNA, 19 nt, Homo sapiens
  misc_RNA (1)...(19): siRNA sense strand
gugaacgcccuauacuuua

SEQ ID NO: 1864001 - RNA, 19 nt, Homo sapiens
  misc_RNA (1)...(19): siRNA sense strand
ccaaacacuuaucucagaa

SEQ ID NO: 1864002 - RNA, 19 nt, Homo sapiens
  misc_RNA (1)...(19): siRNA sense strand
uguggaagcuucugaucaa

SEQ ID NO: 1864003 - RNA, 19 nt, Homo sapiens
  misc_RNA (1)...(19): siRNA sense strand
ggagugagauagauauacg

SEQ ID NO: 1864004 - RNA, 19 nt, Homo sapiens
  misc_RNA (1)...(19): siRNA sense strand
caucaauucuuagugcaaa

SEQ ID NO: 1864005 - RNA, 19 nt, Homo sapiens
  misc_RNA (1)...(19): siRNA sense strand
gcccuauacuuuaaaggaa

SEQ ID NO: 1864006 - RNA, 19 nt, Homo sapiens
  misc_RNA (1)...(19): siRNA sense strand
aaagacagaccgaggguaa

SEQ ID NO: 1864007 - RNA, 19 nt, Homo sapiens
  misc_RNA (1)...(19): siRNA sense strand
ucaggaaugucuucagcaa

SEQ ID NO: 1864008 - RNA, 19 nt, Homo sapiens
  misc_RNA (1)...(19): siRNA sense strand
uccaaacacuuaucucaga

SEQ ID NO: 1864009 - RNA, 19 nt, Homo sapiens
  misc_RNA (1)...(19): siRNA sense strand
gaauuagagucccauccau

SEQ ID NO: 1864010 - RNA, 19 nt, Homo sapiens
  misc_RNA (1)...(19): siRNA sense strand
uaaacgagacuacaagcaa

SEQ ID NO: 1864011 - RNA, 19 nt, Homo sapiens
  misc_RNA (1)...(19): siRNA sense strand
gaauaaacgagacuacaag

SEQ ID NO: 1864012 - RNA, 19 nt, Homo sapiens
  misc_RNA (1)...(19): siRNA sense strand
caacuuccuugaccauagu

SEQ ID NO: 1864013 - RNA, 19 nt, Homo sapiens
  misc_RNA (1)...(19): siRNA sense strand
caacgaugacuacuuacuu

SEQ ID NO: 1864014 - RNA, 19 nt, Homo sapiens
  misc_RNA (1)...(19): siRNA sense strand
aaaggaaucugggaacauc

SEQ ID NO: 1864015 - RNA, 19 nt, Homo sapiens
  misc_RNA (1)...(19): siRNA sense strand
cagacaugauggaguugua

SEQ ID NO: 1864016 - RNA, 19 nt, Homo sapiens
  misc_RNA (1)...(19): siRNA sense strand
ccuaugagaagcugaauga

SEQ ID NO: 1864017 - RNA, 19 nt, Homo sapiens
  misc_RNA (1)...(19): siRNA sense strand
gcagugggccuucaacucu

SEQ ID NO: 1864018 - RNA, 19 nt, Homo sapiens
  misc_RNA (1)...(19): siRNA sense strand
gaccucagccugcuuauac

SEQ ID NO: 1864019 - RNA, 19 nt, Homo sapiens
  misc_RNA (1)...(19): siRNA sense strand
ugcgauauauggagagaaa

SEQ ID NO: 1864020 - RNA, 19 nt, Homo sapiens
  misc_RNA (1)...(19): siRNA sense strand
gaacgcccuauacuuuaaa

SEQ ID NO: 1864021 - RNA, 19 nt, Homo sapiens
  misc_RNA (1)...(19): siRNA sense strand
uaaaacagccaaugcgaua

SEQ ID NO: 1864022 - RNA, 19 nt, Homo sapiens
  misc_RNA (1)...(19): siRNA sense strand
uaaaugaacaagguacuga

SEQ ID NO: 1864023 - RNA, 19 nt, Homo sapiens
  misc_RNA (1)...(19): siRNA sense strand
ccagugcaaaugauguuua

SEQ ID NO: 1864024 - RNA, 19 nt, Homo sapiens
  misc_RNA (1)...(19): siRNA sense strand
cagaaucuccugccugaug

SEQ ID NO: 1864025 - RNA, 19 nt, Homo sapiens
  misc_RNA (1)...(19): siRNA sense strand
gcaaaugauguuuaugaag

SEQ ID NO: 1864026 - RNA, 19 nt, Homo sapiens
  misc_RNA (1)...(19): siRNA sense strand
gcagugggagugagauaga

SEQ ID NO: 1864027 - RNA, 19 nt, Homo sapiens
  misc_RNA (1)...(19): siRNA sense strand
caaaugugacccugaaagu

SEQ ID NO: 1864028 - RNA, 19 nt, Homo sapiens
  misc_RNA (1)...(19): siRNA sense strand
ccauuccucuucuucauca

SEQ ID NO: 1864029 - RNA, 19 nt, Homo sapiens
  misc_RNA (1)...(19): siRNA sense strand
acguaugcauuucacaaua

SEQ ID NO: 1864030 - RNA, 19 nt, Homo sapiens
  misc_RNA (1)...(19): siRNA sense strand
agaaucuccugccugauga

SEQ ID NO: 1864031 - RNA, 19 nt, Homo sapiens
  misc_RNA (1)...(19): siRNA sense strand
ccauaaggcuuuuguggaa

SEQ ID NO: 1864032 - RNA, 19 nt, Homo sapiens
  misc_RNA (1)...(19): siRNA sense strand
cagugcaaaugauguuuau

SEQ ID NO: 1864033 - RNA, 19 nt, Homo sapiens
  misc_RNA (1)...(19): siRNA sense strand
gccuucaacucuacuacaa

SEQ ID NO: 1864034 - RNA, 19 nt, Homo sapiens
  misc_RNA (1)...(19): siRNA sense strand
aaugugacccugaaaguga

SEQ ID NO: 1864035 - RNA, 19 nt, Homo sapiens
  misc_RNA (1)...(19): siRNA sense strand
ccaaagcaaagcugauuuc

SEQ ID NO: 1864036 - RNA, 19 nt, Homo sapiens
  misc_RNA (1)...(19): siRNA sense strand
aaaaggccaucaccuauga

SEQ ID NO: 1864037 - RNA, 19 nt, Homo sapiens
  misc_RNA (1)...(19): siRNA sense strand
ccaaauggcccaggugcuu

SEQ ID NO: 1864038 - RNA, 19 nt, Homo sapiens
  misc_RNA (1)...(19): siRNA sense strand
aauacacucugauuuccaa

SEQ ID NO: 1864039 - RNA, 19 nt, Homo sapiens
  misc_RNA (1)...(19): siRNA sense strand
agugaugccuucagccaaa

SEQ ID NO: 1864040 - RNA, 19 nt, Homo sapiens
  misc_RNA (1)...(19): siRNA sense strand
ugauggaguuguaugaagu

SEQ ID NO: 1864041 - RNA, 19 nt, Homo sapiens
  misc_RNA (1)...(19): siRNA sense strand
ggaaaaggccaucaccuau

SEQ ID NO: 1864042 - RNA, 19 nt, Homo sapiens
  misc_RNA (1)...(19): siRNA sense strand
caagcaaaccagugcaaau

SEQ ID NO: 1864043 - RNA, 19 nt, Homo sapiens
  misc_RNA (1)...(19): siRNA sense strand
acacuuaucucagaaaucc

SEQ ID NO: 1864044 - RNA, 19 nt, Homo sapiens
  misc_RNA (1)...(19): siRNA sense strand
ugaaucugcucaggguaaa

SEQ ID NO: 1864045 - RNA, 19 nt, Homo sapiens
  misc_RNA (1)...(19): siRNA sense strand
gaccagugcagacaugaug

SEQ ID NO: 1864046 - RNA, 19 nt, Homo sapiens
  misc_RNA (1)...(19): siRNA sense strand
agaauaaacgagacuacaa

SEQ ID NO: 1864047 - RNA, 19 nt, Homo sapiens
  misc_RNA (1)...(19): siRNA sense strand
aaacguaugcauuucacaa

SEQ ID NO: 1864048 - RNA, 19 nt, Homo sapiens
  misc_RNA (1)...(19): siRNA sense strand
caaaucacccauuccucuu

SEQ ID NO: 1864049 - RNA, 19 nt, Homo sapiens
  misc_RNA (1)...(19): siRNA sense strand
agacaguuaugaucucaag

SEQ ID NO: 1864050 - RNA, 19 nt, Homo sapiens
  misc_RNA (1)...(19): siRNA sense strand
ccuugaccauaguguauuu

SEQ ID NO: 1864051 - RNA, 19 nt, Homo sapiens
  misc_RNA (1)...(19): siRNA sense strand
ccugaugacucuguggauu

SEQ ID NO: 1864052 - RNA, 19 nt, Homo sapiens
  misc_RNA (1)...(19): siRNA sense strand
acacucugauuuccaaaca

SEQ ID NO: 1864053 - RNA, 19 nt, Homo sapiens
  misc_RNA (1)...(19): siRNA sense strand
gaaucugggaacaucaauu

SEQ ID NO: 1864054 - RNA, 19 nt, Homo sapiens
  misc_RNA (1)...(19): siRNA sense strand
cagaaccucagccuguuaa

SEQ ID NO: 1864055 - RNA, 19 nt, Homo sapiens
  misc_RNA (1)...(19): siRNA sense strand
cgaugacuacuuacuuaaa

SEQ ID NO: 1864056 - RNA, 19 nt, Homo sapiens
  misc_RNA (1)...(19): siRNA sense strand
ucugauuuccaaacacuua

SEQ ID NO: 1864057 - RNA, 19 nt, Homo sapiens
  misc_RNA (1)...(19): siRNA sense strand
caaacacuuaucucagaaa

SEQ ID NO: 1864058 - RNA, 19 nt, Homo sapiens
  misc_RNA (1)...(19): siRNA sense strand
agucaacccugagcaguau

SEQ ID NO: 1864059 - RNA, 19 nt, Homo sapiens
  misc_RNA (1)...(19): siRNA sense strand
gaaaaggccaucaccuaug

SEQ ID NO: 1864060 - RNA, 19 nt, Homo sapiens
  misc_RNA (1)...(19): siRNA sense strand
cagugggccuucaacucua

SEQ ID NO: 1864061 - RNA, 19 nt, Homo sapiens
  misc_RNA (1)...(19): siRNA sense strand
ggaagaaauacacucugau

SEQ ID NO: 1864062 - RNA, 19 nt, Homo sapiens
  misc_RNA (1)...(19): siRNA sense strand
uggcccaggugcuucaauu

SEQ ID NO: 1864063 - RNA, 19 nt, Homo sapiens
  misc_RNA (1)...(19): siRNA sense strand
ugaacaagguacugaagcu

SEQ ID NO: 1864064 - RNA, 19 nt, Homo sapiens
  misc_RNA (1)...(19): siRNA sense strand
gaccagggagucaaaugug

SEQ ID NO: 1864065 - RNA, 19 nt, Homo sapiens
  misc_RNA (1)...(19): siRNA sense strand
gcuacaccuucccaaguuc

SEQ ID NO: 1864066 - RNA, 19 nt, Homo sapiens
  misc_RNA (1)...(19): siRNA sense strand
uuaaaggaaucugggaaca

SEQ ID NO: 1864067 - RNA, 19 nt, Homo sapiens
  misc_RNA (1)...(19): siRNA sense strand
caguuaugaucucaaguca

SEQ ID NO: 1864068 - RNA, 19 nt, Homo sapiens
  misc_RNA (1)...(19): siRNA sense strand
ggccaucaccuaugagaag

SEQ ID NO: 1864069 - RNA, 19 nt, Homo sapiens
  misc_RNA (1)...(19): siRNA sense strand
caaaccagugcaaaugaug

SEQ ID NO: 1864070 - RNA, 19 nt, Homo sapiens
  misc_RNA (1)...(19): siRNA sense strand
gcaaaacaccacagaaaag

SEQ ID NO: 1864071 - RNA, 19 nt, Homo sapiens
  misc_RNA (1)...(19): siRNA sense strand
aagcaaaccagugcaaaug

SEQ ID NO: 1864072 - RNA, 19 nt, Homo sapiens
  misc_RNA (1)...(19): siRNA sense strand
gccaaagcaaagcugauuu

SEQ ID NO: 1864073 - RNA, 19 nt, Homo sapiens
  misc_RNA (1)...(19): siRNA sense strand
agacauuaaugggcuggaa

SEQ ID NO: 1864074 - RNA, 19 nt, Homo sapiens
  misc_RNA (1)...(19): siRNA sense strand
gaagagagcugccaauuaa

SEQ ID NO: 1864075 - RNA, 19 nt, Homo sapiens
  misc_RNA (1)...(19): siRNA sense strand
gaaagaagguggaaaguuu

SEQ ID NO: 1864076 - RNA, 19 nt, Homo sapiens
  misc_RNA (1)...(19): siRNA sense strand
gaacaaacaucgagagauu

SEQ ID NO: 1864077 - RNA, 19 nt, Homo sapiens
  misc_RNA (1)...(19): siRNA sense strand
gcaaauacguguagaccua

SEQ ID NO: 1864078 - RNA, 19 nt, Homo sapiens
  misc_RNA (1)...(19): siRNA sense strand
ggaaagaugucuaagaaau

SEQ ID NO: 1864079 - RNA, 19 nt, Homo sapiens
  misc_RNA (1)...(19): siRNA sense strand
ccaagaugcucccauaaua

SEQ ID NO: 1864080 - RNA, 19 nt, Homo sapiens
  misc_RNA (1)...(19): siRNA sense strand
gcaaggaacauauuuauug

SEQ ID NO: 1864081 - RNA, 19 nt, Homo sapiens
  misc_RNA (1)...(19): siRNA sense strand
gaaaguagcagaaauuaca

SEQ ID NO: 1864082 - RNA, 19 nt, Homo sapiens
  misc_RNA (1)...(19): siRNA sense strand
ccaaggagaugaaguaaca

SEQ ID NO: 1864083 - RNA, 19 nt, Homo sapiens
  misc_RNA (1)...(19): siRNA sense strand
guagaagucucugauauug

SEQ ID NO: 1864084 - RNA, 19 nt, Homo sapiens
  misc_RNA (1)...(19): siRNA sense strand
gaaguugaaucgacucaug

SEQ ID NO: 1864085 - RNA, 19 nt, Homo sapiens
  misc_RNA (1)...(19): siRNA sense strand
caaaggaucacagcauuua

SEQ ID NO: 1864086 - RNA, 19 nt, Homo sapiens
  misc_RNA (1)...(19): siRNA sense strand
gagaugaaguaacacugua

SEQ ID NO: 1864087 - RNA, 19 nt, Homo sapiens
  misc_RNA (1)...(19): siRNA sense strand
gaguagaagucucugauau

SEQ ID NO: 1864088 - RNA, 19 nt, Homo sapiens
  misc_RNA (1)...(19): siRNA sense strand
gaaaaggccccuauugaua

SEQ ID NO: 1864089 - RNA, 19 nt, Homo sapiens
  misc_RNA (1)...(19): siRNA sense strand
uaaaaucgcuggugugaaa

SEQ ID NO: 1864090 - RNA, 19 nt, Homo sapiens
  misc_RNA (1)...(19): siRNA sense strand
ugaaagcuuuggagaauga

SEQ ID NO: 1864091 - RNA, 19 nt, Homo sapiens
  misc_RNA (1)...(19): siRNA sense strand
agacaagaauccaaagaaa

SEQ ID NO: 1864092 - RNA, 19 nt, Homo sapiens
  misc_RNA (1)...(19): siRNA sense strand
cuaagaaauucgaagugua

SEQ ID NO: 1864093 - RNA, 19 nt, Homo sapiens
  misc_RNA (1)...(19): siRNA sense strand
gcgugauccuguaccauua

SEQ ID NO: 1864094 - RNA, 19 nt, Homo sapiens
  misc_RNA (1)...(19): siRNA sense strand
gagaagaacgugugaugga

SEQ ID NO: 1864095 - RNA, 19 nt, Homo sapiens
  misc_RNA (1)...(19): siRNA sense strand
agaagagagcugccaauua

SEQ ID NO: 1864096 - RNA, 19 nt, Homo sapiens
  misc_RNA (1)...(19): siRNA sense strand
ggaaagaagguggaaaguu

SEQ ID NO: 1864097 - RNA, 19 nt, Homo sapiens
  misc_RNA (1)...(19): siRNA sense strand
ggaguagaagucucugaua

SEQ ID NO: 1864098 - RNA, 19 nt, Homo sapiens
  misc_RNA (1)...(19): siRNA sense strand
gaaauucgaaguguauaga

SEQ ID NO: 1864099 - RNA, 19 nt, Homo sapiens
  misc_RNA (1)...(19): siRNA sense strand
caaggaacauauuuauugg

SEQ ID NO: 1864100 - RNA, 19 nt, Homo sapiens
  misc_RNA (1)...(19): siRNA sense strand
gauccuguaccauuaagua

SEQ ID NO: 1864101 - RNA, 19 nt, Homo sapiens
  misc_RNA (1)...(19): siRNA sense strand
gaagaaaucauugcugaag

SEQ ID NO: 1864102 - RNA, 19 nt, Homo sapiens
  misc_RNA (1)...(19): siRNA sense strand
agaagucucugauauugga

SEQ ID NO: 1864103 - RNA, 19 nt, Homo sapiens
  misc_RNA (1)...(19): siRNA sense strand
ugaagagcgugauccugua

SEQ ID NO: 1864104 - RNA, 19 nt, Homo sapiens
  misc_RNA (1)...(19): siRNA sense strand
aagccaagaugcucccaua

SEQ ID NO: 1864105 - RNA, 19 nt, Homo sapiens
  misc_RNA (1)...(19): siRNA sense strand
gaugaaguaacacuguaua

SEQ ID NO: 1864106 - RNA, 19 nt, Homo sapiens
  misc_RNA (1)...(19): siRNA sense strand
agucagaucucuuggugaa

SEQ ID NO: 1864107 - RNA, 19 nt, Homo sapiens
  misc_RNA (1)...(19): siRNA sense strand
gaacgagaagaacguguga

SEQ ID NO: 1864108 - RNA, 19 nt, Homo sapiens
  misc_RNA (1)...(19): siRNA sense strand
gaagaagaagaaaugauca

SEQ ID NO: 1864109 - RNA, 19 nt, Homo sapiens
  misc_RNA (1)...(19): siRNA sense strand
ugaagacucugagaaggaa

SEQ ID NO: 1864110 - RNA, 19 nt, Homo sapiens
  misc_RNA (1)...(19): siRNA sense strand
guucugagaugcaguaaaa

SEQ ID NO: 1864111 - RNA, 19 nt, Homo sapiens
  misc_RNA (1)...(19): siRNA sense strand
aaacaucgagagauuugua

SEQ ID NO: 1864112 - RNA, 19 nt, Homo sapiens
  misc_RNA (1)...(19): siRNA sense strand
auggaaagaugucuaagaa

SEQ ID NO: 1864113 - RNA, 19 nt, Homo sapiens
  misc_RNA (1)...(19): siRNA sense strand
ccagcaaggaacauauuua

SEQ ID NO: 1864114 - RNA, 19 nt, Homo sapiens
  misc_RNA (1)...(19): siRNA sense strand
ccauaauacucucagauag

SEQ ID NO: 1864115 - RNA, 19 nt, Homo sapiens
  misc_RNA (1)...(19): siRNA sense strand
ugaaggcgguggugaucaa

SEQ ID NO: 1864116 - RNA, 19 nt, Homo sapiens
  misc_RNA (1)...(19): siRNA sense strand
gugaaaguagcagaaauua

SEQ ID NO: 1864117 - RNA, 19 nt, Homo sapiens
  misc_RNA (1)...(19): siRNA sense strand
cagagucuauagcaaauca

SEQ ID NO: 1864118 - RNA, 19 nt, Homo sapiens
  misc_RNA (1)...(19): siRNA sense strand
cagcaaggaacauauuuau

SEQ ID NO: 1864119 - RNA, 19 nt, Homo sapiens
  misc_RNA (1)...(19): siRNA sense strand
aauggacacuggaguagaa

SEQ ID NO: 1864120 - RNA, 19 nt, Homo sapiens
  misc_RNA (1)...(19): siRNA sense strand
ggauaaugcuacuaaaaga

SEQ ID NO: 1864121 - RNA, 19 nt, Homo sapiens
  misc_RNA (1)...(19): siRNA sense strand
gaagguggaaaguuugguu

SEQ ID NO: 1864122 - RNA, 19 nt, Homo sapiens
  misc_RNA (1)...(19): siRNA sense strand
ggagaugaaguaacacugu

SEQ ID NO: 1864123 - RNA, 19 nt, Homo sapiens
  misc_RNA (1)...(19): siRNA sense strand
aagcagaaccuccuucaga

SEQ ID NO: 1864124 - RNA, 19 nt, Homo sapiens
  misc_RNA (1)...(19): siRNA sense strand
gcagaaauuacagagcuaa

SEQ ID NO: 1864125 - RNA, 19 nt, Homo sapiens
  misc_RNA (1)...(19): siRNA sense strand
ggugggauaaugcuacuaa

SEQ ID NO: 1864126 - RNA, 19 nt, Homo sapiens
  misc_RNA (1)...(19): siRNA sense strand
gaaguaacacuguauacac

SEQ ID NO: 1864127 - RNA, 19 nt, Homo sapiens
  misc_RNA (1)...(19): siRNA sense strand
ugaugucucuguccaagga

SEQ ID NO: 1864128 - RNA, 19 nt, Homo sapiens
  misc_RNA (1)...(19): siRNA sense strand
ccaguccaguggugggaua

SEQ ID NO: 1864129 - RNA, 19 nt, Homo sapiens
  misc_RNA (1)...(19): siRNA sense strand
ugaaucgacucauggaaag

SEQ ID NO: 1864130 - RNA, 19 nt, Homo sapiens
  misc_RNA (1)...(19): siRNA sense strand
caaguucugagaugcagua

SEQ ID NO: 1864131 - RNA, 19 nt, Homo sapiens
  misc_RNA (1)...(19): siRNA sense strand
ugaagaagaagaaaugauc

SEQ ID NO: 1864132 - RNA, 19 nt, Homo sapiens
  misc_RNA (1)...(19): siRNA sense strand
cccauaauacucucagaua

SEQ ID NO: 1864133 - RNA, 19 nt, Homo sapiens
  misc_RNA (1)...(19): siRNA sense strand
gcuauggacuccuggaacu

SEQ ID NO: 1864134 - RNA, 19 nt, Homo sapiens
  misc_RNA (1)...(19): siRNA sense strand
cgagagauuuguacuaucc

SEQ ID NO: 1864135 - RNA, 19 nt, Homo sapiens
  misc_RNA (1)...(19): siRNA sense strand
ucuaagaaauucgaagugu

SEQ ID NO: 1864136 - RNA, 19 nt, Homo sapiens
  misc_RNA (1)...(19): siRNA sense strand
cagacaagaauccaaagaa

SEQ ID NO: 1864137 - RNA, 19 nt, Homo sapiens
  misc_RNA (1)...(19): siRNA sense strand
aagaucaaguucugagaug

SEQ ID NO: 1864138 - RNA, 19 nt, Homo sapiens
  misc_RNA (1)...(19): siRNA sense strand
gaaccagacaagaauccaa

SEQ ID NO: 1864139 - RNA, 19 nt, Homo sapiens
  misc_RNA (1)...(19): siRNA sense strand
ggaaaaggccccuauugau

SEQ ID NO: 1864140 - RNA, 19 nt, Homo sapiens
  misc_RNA (1)...(19): siRNA sense strand
ucagaucucuuggugaagu

SEQ ID NO: 1864141 - RNA, 19 nt, Homo sapiens
  misc_RNA (1)...(19): siRNA sense strand
ucaaaggaucacagcauuu

SEQ ID NO: 1864142 - RNA, 19 nt, Homo sapiens
  misc_RNA (1)...(19): siRNA sense strand
auaauacucucagauagug

SEQ ID NO: 1864143 - RNA, 19 nt, Homo sapiens
  misc_RNA (1)...(19): siRNA sense strand
uaccucggauguagaagaa

SEQ ID NO: 1864144 - RNA, 19 nt, Homo sapiens
  misc_RNA (1)...(19): siRNA sense strand
gagucucucuguguuguug

SEQ ID NO: 1864145 - RNA, 19 nt, Homo sapiens
  misc_RNA (1)...(19): siRNA sense strand
acucucagauagugaagaa

SEQ ID NO: 1864146 - RNA, 19 nt, Homo sapiens
  misc_RNA (1)...(19): siRNA sense strand
gccaagaugcucccauaau

SEQ ID NO: 1864147 - RNA, 19 nt, Homo sapiens
  misc_RNA (1)...(19): siRNA sense strand
agcagaaccuccuucagaa

SEQ ID NO: 1864148 - RNA, 19 nt, Homo sapiens
  misc_RNA (1)...(19): siRNA sense strand
uccuggaacugcccaaauu

SEQ ID NO: 1864149 - RNA, 19 nt, Homo sapiens
  misc_RNA (1)...(19): siRNA sense strand
ugagaaggaagaugaugaa

SEQ ID NO: 1864150 - RNA, 19 nt, Homo sapiens
  misc_RNA (1)...(19): siRNA sense strand
ugauugccaugaacaaaca

SEQ ID NO: 1864151 - RNA, 19 nt, Homo sapiens
  misc_RNA (1)...(19): siRNA sense strand
acacagaccaccagugcaa

SEQ ID NO: 1864152 - RNA, 19 nt, Homo sapiens
  misc_RNA (1)...(19): siRNA sense strand
caagaugcucccauaauac

SEQ ID NO: 1864153 - RNA, 19 nt, Homo sapiens
  misc_RNA (1)...(19): siRNA sense strand
auugaaagcuuuggagaau

SEQ ID NO: 1864154 - RNA, 19 nt, Homo sapiens
  misc_RNA (1)...(19): siRNA sense strand
ggaucccaaugaacgagaa

SEQ ID NO: 1864155 - RNA, 19 nt, Homo sapiens
  misc_RNA (1)...(19): siRNA sense strand
cauaauacucucagauagu

SEQ ID NO: 1864156 - RNA, 19 nt, Homo sapiens
  misc_RNA (1)...(19): siRNA sense strand
gcuaauauugaaagcuuug

SEQ ID NO: 1864157 - RNA, 19 nt, Homo sapiens
  misc_RNA (1)...(19): siRNA sense strand
ugugaaaguagcagaaauu

SEQ ID NO: 1864158 - RNA, 19 nt, Homo sapiens
  misc_RNA (1)...(19): siRNA sense strand
caucgagagauuuguacua

SEQ ID NO: 1864159 - RNA, 19 nt, Homo sapiens
  misc_RNA (1)...(19): siRNA sense strand
cauggaaagaugucuaaga

SEQ ID NO: 1864160 - RNA, 19 nt, Homo sapiens
  misc_RNA (1)...(19): siRNA sense strand
uguccaaggagaugaagua

SEQ ID NO: 1864161 - RNA, 19 nt, Homo sapiens
  misc_RNA (1)...(19): siRNA sense strand
gagucuauagcaaaucaaa

SEQ ID NO: 1864162 - RNA, 19 nt, Homo sapiens
  misc_RNA (1)...(19): siRNA sense strand
agaagaacgugugauggau

SEQ ID NO: 1864163 - RNA, 19 nt, Homo sapiens
  misc_RNA (1)...(19): siRNA sense strand
aaggaucacagcauuuaaa

SEQ ID NO: 1864164 - RNA, 19 nt, Homo sapiens
  misc_RNA (1)...(19): siRNA sense strand
aaagaagguggaaaguuug

SEQ ID NO: 1864165 - RNA, 19 nt, Homo sapiens
  misc_RNA (1)...(19): siRNA sense strand
aguagaagucucugauauu

SEQ ID NO: 1864166 - RNA, 19 nt, Homo sapiens
  misc_RNA (1)...(19): siRNA sense strand
gaagagcgugauccuguac

SEQ ID NO: 1864167 - RNA, 19 nt, Homo sapiens
  misc_RNA (1)...(19): siRNA sense strand
ucucagauagugaagaaga

SEQ ID NO: 1864168 - RNA, 19 nt, Homo sapiens
  misc_RNA (1)...(19): siRNA sense strand
gaucaaguucugagaugca

SEQ ID NO: 1864169 - RNA, 19 nt, Homo sapiens
  misc_RNA (1)...(19): siRNA sense strand
ggugauugccaugaacaaa

SEQ ID NO: 1864170 - RNA, 19 nt, Homo sapiens
  misc_RNA (1)...(19): siRNA sense strand
aagaagagagcugccaauu

SEQ ID NO: 1864171 - RNA, 19 nt, Homo sapiens
  misc_RNA (1)...(19): siRNA sense strand
ccagacaagaauccaaaga

SEQ ID NO: 1864172 - RNA, 19 nt, Homo sapiens
  misc_RNA (1)...(19): siRNA sense strand
ggacacuggaguagaaguc

SEQ ID NO: 1864173 - RNA, 19 nt, Homo sapiens
  misc_RNA (1)...(19): siRNA sense strand
gugggauaaugcuacuaaa

SEQ ID NO: 1864174 - RNA, 19 nt, Homo sapiens
  misc_RNA (1)...(19): siRNA sense strand
gagccaagcugcaaccuau

SEQ ID NO: 1864175 - RNA, 19 nt, Homo sapiens
  misc_RNA (1)...(19): siRNA sense strand
gaauauuggugcuuguaaa

SEQ ID NO: 1864176 - RNA, 19 nt, Homo sapiens
  misc_RNA (1)...(19): siRNA sense strand
ggaugcggauauagauuua

SEQ ID NO: 1864177 - RNA, 19 nt, Homo sapiens
  misc_RNA (1)...(19): siRNA sense strand
uaagauacguggacaguuc

SEQ ID NO: 1864178 - RNA, 19 nt, Homo sapiens
  misc_RNA (1)...(19): siRNA sense strand
ggagcgaguuggucgaauu

SEQ ID NO: 1864179 - RNA, 19 nt, Homo sapiens
  misc_RNA (1)...(19): siRNA sense strand
gcugcaaccuauagcuuua

SEQ ID NO: 1864180 - RNA, 19 nt, Homo sapiens
  misc_RNA (1)...(19): siRNA sense strand
uaaaggcacagaaagauaa

SEQ ID NO: 1864181 - RNA, 19 nt, Homo sapiens
  misc_RNA (1)...(19): siRNA sense strand
ggauagcaccagaagauaa

SEQ ID NO: 1864182 - RNA, 19 nt, Homo sapiens
  misc_RNA (1)...(19): siRNA sense strand
gaauaggaguggcaaggau

SEQ ID NO: 1864183 - RNA, 19 nt, Homo sapiens
  misc_RNA (1)...(19): siRNA sense strand
gcacagaaagauaaagaga

SEQ ID NO: 1864184 - RNA, 19 nt, Homo sapiens
  misc_RNA (1)...(19): siRNA sense strand
ucaaggauggcaaggauua

SEQ ID NO: 1864185 - RNA, 19 nt, Homo sapiens
  misc_RNA (1)...(19): siRNA sense strand
gcucaaggauggcaaggau

SEQ ID NO: 1864186 - RNA, 19 nt, Homo sapiens
  misc_RNA (1)...(19): siRNA sense strand
uaagaaagcucaggggaua

SEQ ID NO: 1864187 - RNA, 19 nt, Homo sapiens
  misc_RNA (1)...(19): siRNA sense strand
gcaauugacaguuguuuag

SEQ ID NO: 1864188 - RNA, 19 nt, Homo sapiens
  misc_RNA (1)...(19): siRNA sense strand
gauagcaccagaagauaaa

SEQ ID NO: 1864189 - RNA, 19 nt, Homo sapiens
  misc_RNA (1)...(19): siRNA sense strand
agaauaugaucaagcauug

SEQ ID NO: 1864190 - RNA, 19 nt, Homo sapiens
  misc_RNA (1)...(19): siRNA sense strand
cagaauugcugaaagucaa

SEQ ID NO: 1864191 - RNA, 19 nt, Homo sapiens
  misc_RNA (1)...(19): siRNA sense strand
gcuaaauugugcguuauug

SEQ ID NO: 1864192 - RNA, 19 nt, Homo sapiens
  misc_RNA (1)...(19): siRNA sense strand
caucaaauaccaaagcauu

SEQ ID NO: 1864193 - RNA, 19 nt, Homo sapiens
  misc_RNA (1)...(19): siRNA sense strand
acugggagauggcuauuaa

SEQ ID NO: 1864194 - RNA, 19 nt, Homo sapiens
  misc_RNA (1)...(19): siRNA sense strand
ccugcuaaauugugcguua

SEQ ID NO: 1864195 - RNA, 19 nt, Homo sapiens
  misc_RNA (1)...(19): siRNA sense strand
acagaaagauaaagagaag

SEQ ID NO: 1864196 - RNA, 19 nt, Homo sapiens
  misc_RNA (1)...(19): siRNA sense strand
cgacagucauccagauuuc

SEQ ID NO: 1864197 - RNA, 19 nt, Homo sapiens
  misc_RNA (1)...(19): siRNA sense strand
aaagauaaaggcacagaaa

SEQ ID NO: 1864198 - RNA, 19 nt, Homo sapiens
  misc_RNA (1)...(19): siRNA sense strand
auaaagagaaggcaguaua

SEQ ID NO: 1864199 - RNA, 19 nt, Homo sapiens
  misc_RNA (1)...(19): siRNA sense strand
gcaaggauauuggaaaaug

SEQ ID NO: 1864200 - RNA, 19 nt, Homo sapiens
  misc_RNA (1)...(19): siRNA sense strand
gauaaaggcacagaaagau

SEQ ID NO: 1864201 - RNA, 19 nt, Homo sapiens
  misc_RNA (1)...(19): siRNA sense strand
uaaagagaaggcaguauau

SEQ ID NO: 1864202 - RNA, 19 nt, Homo sapiens
  misc_RNA (1)...(19): siRNA sense strand
ugcagaauguggagaauug

SEQ ID NO: 1864203 - RNA, 19 nt, Homo sapiens
  misc_RNA (1)...(19): siRNA sense strand
uaagcuguguacugaauau

SEQ ID NO: 1864204 - RNA, 19 nt, Homo sapiens
  misc_RNA (1)...(19): siRNA sense strand
aacugaagaugucaaauug

SEQ ID NO: 1864205 - RNA, 19 nt, Homo sapiens
  misc_RNA (1)...(19): siRNA sense strand
gcagauaucguacccaaaa

SEQ ID NO: 1864206 - RNA, 19 nt, Homo sapiens
  misc_RNA (1)...(19): siRNA sense strand
caaauaccaaagcauugua

SEQ ID NO: 1864207 - RNA, 19 nt, Homo sapiens
  misc_RNA (1)...(19): siRNA sense strand
ggacagguggagaaaguau

SEQ ID NO: 1864208 - RNA, 19 nt, Homo sapiens
  misc_RNA (1)...(19): siRNA sense strand
caguaacccucgagucuuc

SEQ ID NO: 1864209 - RNA, 19 nt, Homo sapiens
  misc_RNA (1)...(19): siRNA sense strand
guaaacugaagaugucaaa

SEQ ID NO: 1864210 - RNA, 19 nt, Homo sapiens
  misc_RNA (1)...(19): siRNA sense strand
gaaugggacagguggagaa

SEQ ID NO: 1864211 - RNA, 19 nt, Homo sapiens
  misc_RNA (1)...(19): siRNA sense strand
gcagaauugcugaaaguca

SEQ ID NO: 1864212 - RNA, 19 nt, Homo sapiens
  misc_RNA (1)...(19): siRNA sense strand
gcagggagcaauugacagu

SEQ ID NO: 1864213 - RNA, 19 nt, Homo sapiens
  misc_RNA (1)...(19): siRNA sense strand
ccaaaacugcggaaaauuu

SEQ ID NO: 1864214 - RNA, 19 nt, Homo sapiens
  misc_RNA (1)...(19): siRNA sense strand
agaaggcaguauaugcaaa

SEQ ID NO: 1864215 - RNA, 19 nt, Homo sapiens
  misc_RNA (1)...(19): siRNA sense strand
gauucaggguggagacuuc

SEQ ID NO: 1864216 - RNA, 19 nt, Homo sapiens
  misc_RNA (1)...(19): siRNA sense strand
gagaaggcaguauaugcaa

SEQ ID NO: 1864217 - RNA, 19 nt, Homo sapiens
  misc_RNA (1)...(19): siRNA sense strand
gcgacagucauccagauuu

SEQ ID NO: 1864218 - RNA, 19 nt, Homo sapiens
  misc_RNA (1)...(19): siRNA sense strand
gaucgggaggguuuacuga

SEQ ID NO: 1864219 - RNA, 19 nt, Homo sapiens
  misc_RNA (1)...(19): siRNA sense strand
gcaaaugcaggccgcaaca

SEQ ID NO: 1864220 - RNA, 19 nt, Homo sapiens
  misc_RNA (1)...(19): siRNA sense strand
uggcugaucuuaagaaagc

SEQ ID NO: 1864221 - RNA, 19 nt, Homo sapiens
  misc_RNA (1)...(19): siRNA sense strand
gccaaguaauuaaaggaau

SEQ ID NO: 1864222 - RNA, 19 nt, Homo sapiens
  misc_RNA (1)...(19): siRNA sense strand
gguguuuggccaaguaauu

SEQ ID NO: 1864223 - RNA, 19 nt, Homo sapiens
  misc_RNA (1)...(19): siRNA sense strand
acacaaacgguucucaguu

SEQ ID NO: 1864224 - RNA, 19 nt, Homo sapiens
  misc_RNA (1)...(19): siRNA sense strand
auaaaggcacagaaagaua

SEQ ID NO: 1864225 - RNA, 19 nt, Homo sapiens
  misc_RNA (1)...(19): siRNA sense strand
gggauagcaccagaagaua

SEQ ID NO: 1864226 - RNA, 19 nt, Homo sapiens
  misc_RNA (1)...(19): siRNA sense strand
gcuguguacugaauauugg

SEQ ID NO: 1864227 - RNA, 19 nt, Homo sapiens
  misc_RNA (1)...(19): siRNA sense strand
ggaauaggaguggcaagga

SEQ ID NO: 1864228 - RNA, 19 nt, Homo sapiens
  misc_RNA (1)...(19): siRNA sense strand
guguuuggccaaguaauua

SEQ ID NO: 1864229 - RNA, 19 nt, Homo sapiens
  misc_RNA (1)...(19): siRNA sense strand
gaacugggagauggcuauu

SEQ ID NO: 1864230 - RNA, 19 nt, Homo sapiens
  misc_RNA (1)...(19): siRNA sense strand
agauaaaggcacagaaaga

SEQ ID NO: 1864231 - RNA, 19 nt, Homo sapiens
  misc_RNA (1)...(19): siRNA sense strand
uuacugagcauggcaaaug

SEQ ID NO: 1864232 - RNA, 19 nt, Homo sapiens
  misc_RNA (1)...(19): siRNA sense strand
agaauuguuugcagauauc

SEQ ID NO: 1864233 - RNA, 19 nt, Homo sapiens
  misc_RNA (1)...(19): siRNA sense strand
gagcgaguuggucgaauug

SEQ ID NO: 1864234 - RNA, 19 nt, Homo sapiens
  misc_RNA (1)...(19): siRNA sense strand
cugggaaaccucuccauuu

SEQ ID NO: 1864235 - RNA, 19 nt, Homo sapiens
  misc_RNA (1)...(19): siRNA sense strand
gagcaauugacaguuguuu

SEQ ID NO: 1864236 - RNA, 19 nt, Homo sapiens
  misc_RNA (1)...(19): siRNA sense strand
gggagcaauugacaguugu

SEQ ID NO: 1864237 - RNA, 19 nt, Homo sapiens
  misc_RNA (1)...(19): siRNA sense strand
ugggacagguggagaaagu

SEQ ID NO: 1864238 - RNA, 19 nt, Homo sapiens
  misc_RNA (1)...(19): siRNA sense strand
gcgaguuggucgaauuguc

SEQ ID NO: 1864239 - RNA, 19 nt, Homo sapiens
  misc_RNA (1)...(19): siRNA sense strand
aggcagaauugcugaaagu

SEQ ID NO: 1864240 - RNA, 19 nt, Homo sapiens
  misc_RNA (1)...(19): siRNA sense strand
ugaauauuggugcuuguaa

SEQ ID NO: 1864241 - RNA, 19 nt, Homo sapiens
  misc_RNA (1)...(19): siRNA sense strand
uuuaagcuguguacugaau

SEQ ID NO: 1864242 - RNA, 19 nt, Homo sapiens
  misc_RNA (1)...(19): siRNA sense strand
gaggaugcggauauagauu

SEQ ID NO: 1864243 - RNA, 19 nt, Homo sapiens
  misc_RNA (1)...(19): siRNA sense strand
acagguggagaaaguauuu

SEQ ID NO: 1864244 - RNA, 19 nt, Homo sapiens
  misc_RNA (1)...(19): siRNA sense strand
aagcauuggcugaucuuaa

SEQ ID NO: 1864245 - RNA, 19 nt, Homo sapiens
  misc_RNA (1)...(19): siRNA sense strand
agggagcaauugacaguug

SEQ ID NO: 1864246 - RNA, 19 nt, Homo sapiens
  misc_RNA (1)...(19): siRNA sense strand
cuuguaaacugaagauguc

SEQ ID NO: 1864247 - RNA, 19 nt, Homo sapiens
  misc_RNA (1)...(19): siRNA sense strand
uaaauugugcguuauugca

SEQ ID NO: 1864248 - RNA, 19 nt, Homo sapiens
  misc_RNA (1)...(19): siRNA sense strand
ugugguguuuggccaagua

SEQ ID NO: 1864249 - RNA, 19 nt, Homo sapiens
  misc_RNA (1)...(19): siRNA sense strand
gcaccagaagauaaagcua

SEQ ID NO: 1864250 - RNA, 19 nt, Homo sapiens
  misc_RNA (1)...(19): siRNA sense strand
ucaaauaccaaagcauugu

SEQ ID NO: 1864251 - RNA, 19 nt, Homo sapiens
  misc_RNA (1)...(19): siRNA sense strand
ggccaaguaauuaaaggaa

SEQ ID NO: 1864252 - RNA, 19 nt, Homo sapiens
  misc_RNA (1)...(19): siRNA sense strand
aauaggaguggcaaggaua

SEQ ID NO: 1864253 - RNA, 19 nt, Homo sapiens
  misc_RNA (1)...(19): siRNA sense strand
gcuuguaaacugaagaugu

SEQ ID NO: 1864254 - RNA, 19 nt, Homo sapiens
  misc_RNA (1)...(19): siRNA sense strand
caccagaagauaaagcuau

SEQ ID NO: 1864255 - RNA, 19 nt, Homo sapiens
  misc_RNA (1)...(19): siRNA sense strand
ggucgaauugucuuagaau

SEQ ID NO: 1864256 - RNA, 19 nt, Homo sapiens
  misc_RNA (1)...(19): siRNA sense strand
guggagaaaguauuuaugg

SEQ ID NO: 1864257 - RNA, 19 nt, Homo sapiens
  misc_RNA (1)...(19): siRNA sense strand
cacagaaagauaaagagaa

SEQ ID NO: 1864258 - RNA, 19 nt, Homo sapiens
  misc_RNA (1)...(19): siRNA sense strand
ggcaaggauuaaaagaaua

SEQ ID NO: 1864259 - RNA, 19 nt, Homo sapiens
  misc_RNA (1)...(19): siRNA sense strand
uauuggugcuuguaaacug

SEQ ID NO: 1864260 - RNA, 19 nt, Homo sapiens
  misc_RNA (1)...(19): siRNA sense strand
gcagaauguggagaauuga

SEQ ID NO: 1864261 - RNA, 19 nt, Homo sapiens
  misc_RNA (1)...(19): siRNA sense strand
gugcguuauugcagaaugu

SEQ ID NO: 1864262 - RNA, 19 nt, Homo sapiens
  misc_RNA (1)...(19): siRNA sense strand
agcauuggcugaucuuaag

SEQ ID NO: 1864263 - RNA, 19 nt, Homo sapiens
  misc_RNA (1)...(19): siRNA sense strand
caaggauggcaaggauuaa

SEQ ID NO: 1864264 - RNA, 19 nt, Homo sapiens
  misc_RNA (1)...(19): siRNA sense strand
gaaggcaguauaugcaaaa

SEQ ID NO: 1864265 - RNA, 19 nt, Homo sapiens
  misc_RNA (1)...(19): siRNA sense strand
gauaaagagaaggcaguau

SEQ ID NO: 1864266 - RNA, 19 nt, Homo sapiens
  misc_RNA (1)...(19): siRNA sense strand
aggaugcggauauagauuu

SEQ ID NO: 1864267 - RNA, 19 nt, Homo sapiens
  misc_RNA (1)...(19): siRNA sense strand
aaagagaaggcaguauaug

SEQ ID NO: 1864268 - RNA, 19 nt, Homo sapiens
  misc_RNA (1)...(19): siRNA sense strand
caauugacaguuguuuaga

SEQ ID NO: 1864269 - RNA, 19 nt, Homo sapiens
  misc_RNA (1)...(19): siRNA sense strand
gaauugaaggaaggagaug

SEQ ID NO: 1864270 - RNA, 19 nt, Homo sapiens
  misc_RNA (1)...(19): siRNA sense strand
agagaaggcaguauaugca

SEQ ID NO: 1864271 - RNA, 19 nt, Homo sapiens
  misc_RNA (1)...(19): siRNA sense strand
uggagaaaguauuuauggu

SEQ ID NO: 1864272 - RNA, 19 nt, Homo sapiens
  misc_RNA (1)...(19): siRNA sense strand
uggcaaggauuaaaagaau

SEQ ID NO: 1864273 - RNA, 19 nt, Homo sapiens
  misc_RNA (1)...(19): siRNA sense strand
guuauugagacagcagaua

SEQ ID NO: 1864274 - RNA, 19 nt, Homo sapiens
  misc_RNA (1)...(19): siRNA sense strand
gaacuuaaaugaagauguc

SEQ ID NO: 1864275 - RNA, 19 nt, Homo sapiens
  misc_RNA (1)...(19): siRNA sense strand
gcucagaacuuaaaugaag

SEQ ID NO: 1864276 - RNA, 19 nt, Homo sapiens
  misc_RNA (1)...(19): siRNA sense strand
gaaucucccucccuaauag

SEQ ID NO: 1864277 - RNA, 19 nt, Homo sapiens
  misc_RNA (1)...(19): siRNA sense strand
ggagacaagucccaaaguc

SEQ ID NO: 1864278 - RNA, 19 nt, Homo sapiens
  misc_RNA (1)...(19): siRNA sense strand
ggagacaagucccgaaguc

SEQ ID NO: 1864279 - RNA, 19 nt, Homo sapiens
  misc_RNA (1)...(19): siRNA sense strand
gcucagcucagaacuuaaa

SEQ ID NO: 1864280 - RNA, 19 nt, Homo sapiens
  misc_RNA (1)...(19): siRNA sense strand
cagcucagaacuuaaauga

SEQ ID NO: 1864281 - RNA, 19 nt, Homo sapiens
  misc_RNA (1)...(19): siRNA sense strand
gaagaaucucccucccuaa

SEQ ID NO: 1864282 - RNA, 19 nt, Homo sapiens
  misc_RNA (1)...(19): siRNA sense strand
gcacaaggaggcagcaagu

SEQ ID NO: 1864283 - RNA, 19 nt, Homo sapiens
  misc_RNA (1)...(19): siRNA sense strand
caacaagaaggcaacaauc

SEQ ID NO: 1864284 - RNA, 19 nt, Homo sapiens
  misc_RNA (1)...(19): siRNA sense strand
ggaggcagcaagucccaaa

SEQ ID NO: 1864285 - RNA, 19 nt, Homo sapiens
  misc_RNA (1)...(19): siRNA sense strand
agaaucucccucccuaaua

SEQ ID NO: 1864286 - RNA, 19 nt, Homo sapiens
  misc_RNA (1)...(19): siRNA sense strand
ggcagcaagucccaaagug

SEQ ID NO: 1864287 - RNA, 19 nt, Homo sapiens
  misc_RNA (1)...(19): siRNA sense strand
ccaacaagaaggcaacaau

SEQ ID NO: 1864288 - RNA, 19 nt, Homo sapiens
  misc_RNA (1)...(19): siRNA sense strand
ccaacaaggaggcaacaga

SEQ ID NO: 1864289 - RNA, 19 nt, Homo sapiens
  misc_RNA (1)...(19): siRNA sense strand
gaaggcaacaauccucaag

SEQ ID NO: 1864290 - RNA, 19 nt, Homo sapiens
  misc_RNA (1)...(19): siRNA sense strand
caaggagacaagucccaaa

SEQ ID NO: 1864291 - RNA, 19 nt, Homo sapiens
  misc_RNA (1)...(19): siRNA sense strand
ccuaauagcaggaaaucca

SEQ ID NO: 1864292 - RNA, 19 nt, Homo sapiens
  misc_RNA (1)...(19): siRNA sense strand
agcaggaaauccacaagga

SEQ ID NO: 1864293 - RNA, 19 nt, Homo sapiens
  misc_RNA (1)...(19): siRNA sense strand
gaugucagccaggaagaau

SEQ ID NO: 1864294 - RNA, 19 nt, Homo sapiens
  misc_RNA (1)...(19): siRNA sense strand
ccacaaggaggcaacaaac

SEQ ID NO: 1864295 - RNA, 19 nt, Homo sapiens
  misc_RNA (1)...(19): siRNA sense strand
ccacaaggaggcaacaaac

SEQ ID NO: 1864296 - RNA, 19 nt, Homo sapiens
  misc_RNA (1)...(19): siRNA sense strand
ccacaaggaggcaacaaac

SEQ ID NO: 1864297 - RNA, 19 nt, Homo sapiens
  misc_RNA (1)...(19): siRNA sense strand
aagaaucucccucccuaau

SEQ ID NO: 1864298 - RNA, 19 nt, Homo sapiens
  misc_RNA (1)...(19): siRNA sense strand
acaaggaccacccgcacaa

SEQ ID NO: 1864299 - RNA, 19 nt, Homo sapiens
  misc_RNA (1)...(19): siRNA sense strand
aggcaacaauccucaaggu

SEQ ID NO: 1864300 - RNA, 19 nt, Homo sapiens
  misc_RNA (1)...(19): siRNA sense strand
gcuguugauucugcuguca

SEQ ID NO: 1864301 - RNA, 19 nt, Homo sapiens
  misc_RNA (1)...(19): siRNA sense strand
ggaaggacuugaagaguug

SEQ ID NO: 1864302 - RNA, 19 nt, Homo sapiens
  misc_RNA (1)...(19): siRNA sense strand
caaggaaucucgggagcua

SEQ ID NO: 1864303 - RNA, 19 nt, Homo sapiens
  misc_RNA (1)...(19): siRNA sense strand
cgacaacgaugacuacgau

SEQ ID NO: 1864304 - RNA, 19 nt, Homo sapiens
  misc_RNA (1)...(19): siRNA sense strand
cgaagucccugcaaguguu

SEQ ID NO: 1864305 - RNA, 19 nt, Homo sapiens
  misc_RNA (1)...(19): siRNA sense strand
gaggauuacugcaauaguc

SEQ ID NO: 1864306 - RNA, 19 nt, Homo sapiens
  misc_RNA (1)...(19): siRNA sense strand
gcacuacugcggccacaaa

SEQ ID NO: 1864307 - RNA, 19 nt, Homo sapiens
  misc_RNA (1)...(19): siRNA sense strand
gacagucacuauagaaucu

SEQ ID NO: 1864308 - RNA, 19 nt, Homo sapiens
  misc_RNA (1)...(19): siRNA sense strand
uucauccucuugagaauua

SEQ ID NO: 1864309 - RNA, 19 nt, Homo sapiens
  misc_RNA (1)...(19): siRNA sense strand
gaaaauagagaacaaggaa

SEQ ID NO: 1864310 - RNA, 19 nt, Homo sapiens
  misc_RNA (1)...(19): siRNA sense strand
gcaaagcagguuccagaug

SEQ ID NO: 1864311 - RNA, 19 nt, Homo sapiens
  misc_RNA (1)...(19): siRNA sense strand
aggaaggacuugaagaguu

SEQ ID NO: 1864312 - RNA, 19 nt, Homo sapiens
  misc_RNA (1)...(19): siRNA sense strand
gcaagcugccuccauggaa

SEQ ID NO: 1864313 - RNA, 19 nt, Homo sapiens
  misc_RNA (1)...(19): siRNA sense strand
ggaggaaggacuugaagag

SEQ ID NO: 1864314 - RNA, 19 nt, Homo sapiens
  misc_RNA (1)...(19): siRNA sense strand
gcagguggagguacacuuc

SEQ ID NO: 1864315 - RNA, 19 nt, Homo sapiens
  misc_RNA (1)...(19): siRNA sense strand
ugaccaccuucuacaauuc

SEQ ID NO: 1864316 - RNA, 19 nt, Homo sapiens
  misc_RNA (1)...(19): siRNA sense strand
guucagacagucacuauag

SEQ ID NO: 1864317 - RNA, 19 nt, Homo sapiens
  misc_RNA (1)...(19): siRNA sense strand
gcagggagcaauagcuauc

SEQ ID NO: 1864318 - RNA, 19 nt, Homo sapiens
  misc_RNA (1)...(19): siRNA sense strand
cugaccaccuucuacaauu

SEQ ID NO: 1864319 - RNA, 19 nt, Homo sapiens
  misc_RNA (1)...(19): siRNA sense strand
gcucggacucagacuauga

SEQ ID NO: 1864320 - RNA, 19 nt, Homo sapiens
  misc_RNA (1)...(19): siRNA sense strand
cagacuaugagcacuauga

SEQ ID NO: 1864321 - RNA, 19 nt, Homo sapiens
  misc_RNA (1)...(19): siRNA sense strand
uuacugcaauagucccaaa

SEQ ID NO: 1864322 - RNA, 19 nt, Homo sapiens
  misc_RNA (1)...(19): siRNA sense strand
aaauagagaacaaggaauc

SEQ ID NO: 1864323 - RNA, 19 nt, Homo sapiens
  misc_RNA (1)...(19): siRNA sense strand
ucagacagucacuauagaa

SEQ ID NO: 1864324 - RNA, 19 nt, Homo sapiens
  misc_RNA (1)...(19): siRNA sense strand
gcaaguguucagacaguca

SEQ ID NO: 1864325 - RNA, 19 nt, Homo sapiens
  misc_RNA (1)...(19): siRNA sense strand
ccucucaggucauccaucu

SEQ ID NO: 1864326 - RNA, 19 nt, Homo sapiens
  misc_RNA (1)...(19): siRNA sense strand
gaugaggagguccagcaaa

SEQ ID NO: 1864327 - RNA, 19 nt, Homo sapiens
  misc_RNA (1)...(19): siRNA sense strand
gauguacuacucaugcaau

SEQ ID NO: 1864328 - RNA, 19 nt, Homo sapiens
  misc_RNA (1)...(19): siRNA sense strand
gcaauagucccaaaagcaa

SEQ ID NO: 1864329 - RNA, 19 nt, Homo sapiens
  misc_RNA (1)...(19): siRNA sense strand
gcuccuggcgguucaacaa

SEQ ID NO: 1864330 - RNA, 19 nt, Homo sapiens
  misc_RNA (1)...(19): siRNA sense strand
gaggagguccagcaaagca

SEQ ID NO: 1864331 - RNA, 19 nt, Homo sapiens
  misc_RNA (1)...(19): siRNA sense strand
ccaccgacaacgaugacua

SEQ ID NO: 1864332 - RNA, 19 nt, Homo sapiens
  misc_RNA (1)...(19): siRNA sense strand
gagcucacccucuccaacu

SEQ ID NO: 1864333 - RNA, 19 nt, Homo sapiens
  misc_RNA (1)...(19): siRNA sense strand
caccagcagugcagagagu

SEQ ID NO: 1864334 - RNA, 19 nt, Homo sapiens
  misc_RNA (1)...(19): siRNA sense strand
gaggaaggacuugaagagu

SEQ ID NO: 1864335 - RNA, 19 nt, Homo sapiens
  misc_RNA (1)...(19): siRNA sense strand
ggagugguaccagaacuuc

SEQ ID NO: 1864336 - RNA, 19 nt, Homo sapiens
  misc_RNA (1)...(19): siRNA sense strand
gcucagcuucccggaguuu

SEQ ID NO: 1864337 - RNA, 19 nt, Homo sapiens
  misc_RNA (1)...(19): siRNA sense strand
acaacgaugacuacgauga

SEQ ID NO: 1864338 - RNA, 19 nt, Homo sapiens
  misc_RNA (1)...(19): siRNA sense strand
acuaugagcacuaugacuu

SEQ ID NO: 1864339 - RNA, 19 nt, Homo sapiens
  misc_RNA (1)...(19): siRNA sense strand
cggcagggagcaauagcua

SEQ ID NO: 1864340 - RNA, 19 nt, Homo sapiens
  misc_RNA (1)...(19): siRNA sense strand
cugcaaguguucagacagu

SEQ ID NO: 1864341 - RNA, 19 nt, Homo sapiens
  misc_RNA (1)...(19): siRNA sense strand
gcagcccucucaggucauc

SEQ ID NO: 1864342 - RNA, 19 nt, Homo sapiens
  misc_RNA (1)...(19): siRNA sense strand
ggaggauuacugcaauagu

SEQ ID NO: 1864343 - RNA, 19 nt, Homo sapiens
  misc_RNA (1)...(19): siRNA sense strand
uaugagcacuaugacuuca

SEQ ID NO: 1864344 - RNA, 19 nt, Homo sapiens
  misc_RNA (1)...(19): siRNA sense strand
gcaggauguacuacucaug

SEQ ID NO: 1864345 - RNA, 19 nt, Homo sapiens
  misc_RNA (1)...(19): siRNA sense strand
ggauguacuacucaugcaa

SEQ ID NO: 1864346 - RNA, 19 nt, Homo sapiens
  misc_RNA (1)...(19): siRNA sense strand
cgugucaccugugcagaga

SEQ ID NO: 1864347 - RNA, 19 nt, Homo sapiens
  misc_RNA (1)...(19): siRNA sense strand
gaagucccugcaaguguuc

SEQ ID NO: 1864348 - RNA, 19 nt, Homo sapiens
  misc_RNA (1)...(19): siRNA sense strand
gcuguggaacugcgguuga

SEQ ID NO: 1864349 - RNA, 19 nt, Homo sapiens
  misc_RNA (1)...(19): siRNA sense strand
gggagugguaccagaacuu

SEQ ID NO: 1864350 - RNA, 19 nt, Homo sapiens
  misc_RNA (1)...(19): siRNA sense strand
ggggaggauuacugcaaua

SEQ ID NO: 1864351 - RNA, 19 nt, Homo sapiens
  misc_RNA (1)...(19): siRNA sense strand
ccuggacacugcauuacag

SEQ ID NO: 1864352 - RNA, 19 nt, Homo sapiens
  misc_RNA (1)...(19): siRNA sense strand
cagacagucacuauagaau

SEQ ID NO: 1864353 - RNA, 19 nt, Homo sapiens
  misc_RNA (1)...(19): siRNA sense strand
ucccggaguuugcacaauc

SEQ ID NO: 1864354 - RNA, 19 nt, Homo sapiens
  misc_RNA (1)...(19): siRNA sense strand
augaggagguccagcaaag

SEQ ID NO: 1864355 - RNA, 19 nt, Homo sapiens
  misc_RNA (1)...(19): siRNA sense strand
gaaguuagacauaugaaga

SEQ ID NO: 1864356 - RNA, 19 nt, Homo sapiens
  misc_RNA (1)...(19): siRNA sense strand
ccuaguagcugauaaauac

SEQ ID NO: 1864357 - RNA, 19 nt, Homo sapiens
  misc_RNA (1)...(19): siRNA sense strand
gaucagagauuucuaugac

SEQ ID NO: 1864358 - RNA, 19 nt, Homo sapiens
  misc_RNA (1)...(19): siRNA sense strand
aacagaagguugaucauuu

SEQ ID NO: 1864359 - RNA, 19 nt, Homo sapiens
  misc_RNA (1)...(19): siRNA sense strand
ggacauccaacauuugaaa

SEQ ID NO: 1864360 - RNA, 19 nt, Homo sapiens
  misc_RNA (1)...(19): siRNA sense strand
gaucguaacuacagauuuu

SEQ ID NO: 1864361 - RNA, 19 nt, Homo sapiens
  misc_RNA (1)...(19): siRNA sense strand
gaaaagcgguccacauugu

SEQ ID NO: 1864362 - RNA, 19 nt, Homo sapiens
  misc_RNA (1)...(19): siRNA sense strand
gacauuaucugguuuugua

SEQ ID NO: 1864363 - RNA, 19 nt, Homo sapiens
  misc_RNA (1)...(19): siRNA sense strand
gaaccucacucauggaacu

SEQ ID NO: 1864364 - RNA, 19 nt, Homo sapiens
  misc_RNA (1)...(19): siRNA sense strand
gcugauaaauacuggaaga

SEQ ID NO: 1864365 - RNA, 19 nt, Homo sapiens
  misc_RNA (1)...(19): siRNA sense strand
agaauuggaucagagauuu

SEQ ID NO: 1864366 - RNA, 19 nt, Homo sapiens
  misc_RNA (1)...(19): siRNA sense strand
ggaacuuucugaugacugu

SEQ ID NO: 1864367 - RNA, 19 nt, Homo sapiens
  misc_RNA (1)...(19): siRNA sense strand
aacaagcucuggcugauuu

SEQ ID NO: 1864368 - RNA, 19 nt, Homo sapiens
  misc_RNA (1)...(19): siRNA sense strand
uaacuaaggauaucacaga

SEQ ID NO: 1864369 - RNA, 19 nt, Homo sapiens
  misc_RNA (1)...(19): siRNA sense strand
ucacuuaugcagcccauua

SEQ ID NO: 1864370 - RNA, 19 nt, Homo sapiens
  misc_RNA (1)...(19): siRNA sense strand
ccaaggcccuccuggauca

SEQ ID NO: 1864371 - RNA, 19 nt, Homo sapiens
  misc_RNA (1)...(19): siRNA sense strand
aaugguggaucaauacuuu

SEQ ID NO: 1864372 - RNA, 19 nt, Homo sapiens
  misc_RNA (1)...(19): siRNA sense strand
uccaagcucugaauguaua

SEQ ID NO: 1864373 - RNA, 19 nt, Homo sapiens
  misc_RNA (1)...(19): siRNA sense strand
gcaguuugaggauuuagua

SEQ ID NO: 1864374 - RNA, 19 nt, Homo sapiens
  misc_RNA (1)...(19): siRNA sense strand
ugaaagcuauguugguguu

SEQ ID NO: 1864375 - RNA, 19 nt, Homo sapiens
  misc_RNA (1)...(19): siRNA sense strand
guacuaauggugucgauga

SEQ ID NO: 1864376 - RNA, 19 nt, Homo sapiens
  misc_RNA (1)...(19): siRNA sense strand
gaacaagcucuggcugauu

SEQ ID NO: 1864377 - RNA, 19 nt, Homo sapiens
  misc_RNA (1)...(19): siRNA sense strand
uuuaguaccuuguggugua

SEQ ID NO: 1864378 - RNA, 19 nt, Homo sapiens
  misc_RNA (1)...(19): siRNA sense strand
aaacauuaguucacacaca

SEQ ID NO: 1864379 - RNA, 19 nt, Homo sapiens
  misc_RNA (1)...(19): siRNA sense strand
uacuggagcccuucacuua

SEQ ID NO: 1864380 - RNA, 19 nt, Homo sapiens
  misc_RNA (1)...(19): siRNA sense strand
uaucaggccugcacagaag

SEQ ID NO: 1864381 - RNA, 19 nt, Homo sapiens
  misc_RNA (1)...(19): siRNA sense strand
aagaaugccuuggauccua

SEQ ID NO: 1864382 - RNA, 19 nt, Homo sapiens
  misc_RNA (1)...(19): siRNA sense strand
guaccuaguagcugauaaa

SEQ ID NO: 1864383 - RNA, 19 nt, Homo sapiens
  misc_RNA (1)...(19): siRNA sense strand
gagguggaguaacuaagga

SEQ ID NO: 1864384 - RNA, 19 nt, Homo sapiens
  misc_RNA (1)...(19): siRNA sense strand
uuaaucgacucucaaauac

SEQ ID NO: 1864385 - RNA, 19 nt, Homo sapiens
  misc_RNA (1)...(19): siRNA sense strand
gacaacucauucaaggauu

SEQ ID NO: 1864386 - RNA, 19 nt, Homo sapiens
  misc_RNA (1)...(19): siRNA sense strand
cucaggacauccaacauuu

SEQ ID NO: 1864387 - RNA, 19 nt, Homo sapiens
  misc_RNA (1)...(19): siRNA sense strand
aaucgacucucaaauacug

SEQ ID NO: 1864388 - RNA, 19 nt, Homo sapiens
  misc_RNA (1)...(19): siRNA sense strand
ugaaagacuggaucucuga

SEQ ID NO: 1864389 - RNA, 19 nt, Homo sapiens
  misc_RNA (1)...(19): siRNA sense strand
uuuccaagcucugaaugua

SEQ ID NO: 1864390 - RNA, 19 nt, Homo sapiens
  misc_RNA (1)...(19): siRNA sense strand
caagguagugugccaguau

SEQ ID NO: 1864391 - RNA, 19 nt, Homo sapiens
  misc_RNA (1)...(19): siRNA sense strand
acacuugaauuuccugaca

SEQ ID NO: 1864392 - RNA, 19 nt, Homo sapiens
  misc_RNA (1)...(19): siRNA sense strand
gaccaaggcccuccuggau

SEQ ID NO: 1864393 - RNA, 19 nt, Homo sapiens
  misc_RNA (1)...(19): siRNA sense strand
ggugaaaugccugaauauu

SEQ ID NO: 1864394 - RNA, 19 nt, Homo sapiens
  misc_RNA (1)...(19): siRNA sense strand
guagugugccaguauuuga

SEQ ID NO: 1864395 - RNA, 19 nt, Homo sapiens
  misc_RNA (1)...(19): siRNA sense strand
uuucuacacugguaaugaa

SEQ ID NO: 1864396 - RNA, 19 nt, Homo sapiens
  misc_RNA (1)...(19): siRNA sense strand
gaucuccgcaccaagaaug

SEQ ID NO: 1864397 - RNA, 19 nt, Homo sapiens
  misc_RNA (1)...(19): siRNA sense strand
ccuccuggaucacuacuau

SEQ ID NO: 1864398 - RNA, 19 nt, Homo sapiens
  misc_RNA (1)...(19): siRNA sense strand
ucuggcaguuugaggauuu

SEQ ID NO: 1864399 - RNA, 19 nt, Homo sapiens
  misc_RNA (1)...(19): siRNA sense strand
acuauucgguucucuacuu

SEQ ID NO: 1864400 - RNA, 19 nt, Homo sapiens
  misc_RNA (1)...(19): siRNA sense strand
gaaagacuggaucucugaa

SEQ ID NO: 1864401 - RNA, 19 nt, Homo sapiens
  misc_RNA (1)...(19): siRNA sense strand
uuaugaagaucguaacuac

SEQ ID NO: 1864402 - RNA, 19 nt, Homo sapiens
  misc_RNA (1)...(19): siRNA sense strand
gaagguugaucauuuugga

SEQ ID NO: 1864403 - RNA, 19 nt, Homo sapiens
  misc_RNA (1)...(19): siRNA sense strand
caggacauccaacauuuga

SEQ ID NO: 1864404 - RNA, 19 nt, Homo sapiens
  misc_RNA (1)...(19): siRNA sense strand
aaucagcgguaccuaguag

SEQ ID NO: 1864405 - RNA, 19 nt, Homo sapiens
  misc_RNA (1)...(19): siRNA sense strand
cuggaucacuacuauguau

SEQ ID NO: 1864406 - RNA, 19 nt, Homo sapiens
  misc_RNA (1)...(19): siRNA sense strand
gaagaucguaacuacagau

SEQ ID NO: 1864407 - RNA, 19 nt, Homo sapiens
  misc_RNA (1)...(19): siRNA sense strand
gaaaaucaaccugucauug

SEQ ID NO: 1864408 - RNA, 19 nt, Homo sapiens
  misc_RNA (1)...(19): siRNA sense strand
ugacaacucauucaaggau

SEQ ID NO: 1864409 - RNA, 19 nt, Homo sapiens
  misc_RNA (1)...(19): siRNA sense strand
gcccgcuccuuggaaguua

SEQ ID NO: 1864410 - RNA, 19 nt, Homo sapiens
  misc_RNA (1)...(19): siRNA sense strand
aacauuaguucacacacaa

SEQ ID NO: 1864411 - RNA, 19 nt, Homo sapiens
  misc_RNA (1)...(19): siRNA sense strand
caaugguggacuauccuua

SEQ ID NO: 1864412 - RNA, 19 nt, Homo sapiens
  misc_RNA (1)...(19): siRNA sense strand
gggugaaucuggcaauggu

SEQ ID NO: 1864413 - RNA, 19 nt, Homo sapiens
  misc_RNA (1)...(19): siRNA sense strand
guccugggaugccauuaau

SEQ ID NO: 1864414 - RNA, 19 nt, Homo sapiens
  misc_RNA (1)...(19): siRNA sense strand
cagaguuaaucaaacacuu

SEQ ID NO: 1864415 - RNA, 19 nt, Homo sapiens
  misc_RNA (1)...(19): siRNA sense strand
aaagcuauguugguguuug

SEQ ID NO: 1864416 - RNA, 19 nt, Homo sapiens
  misc_RNA (1)...(19): siRNA sense strand
ggaucagagauuucuauga

SEQ ID NO: 1864417 - RNA, 19 nt, Homo sapiens
  misc_RNA (1)...(19): siRNA sense strand
uaugaagaauuggaucaga

SEQ ID NO: 1864418 - RNA, 19 nt, Homo sapiens
  misc_RNA (1)...(19): siRNA sense strand
uccuaugucugugcuguua

SEQ ID NO: 1864419 - RNA, 19 nt, Homo sapiens
  misc_RNA (1)...(19): siRNA sense strand
gucaggagguggaguaacu

SEQ ID NO: 1864420 - RNA, 19 nt, Homo sapiens
  misc_RNA (1)...(19): siRNA sense strand
guucucuacuuccaacaga

SEQ ID NO: 1864421 - RNA, 19 nt, Homo sapiens
  misc_RNA (1)...(19): siRNA sense strand
ccauuaaucgacucucaaa

SEQ ID NO: 1864422 - RNA, 19 nt, Homo sapiens
  misc_RNA (1)...(19): siRNA sense strand
gguccacauuguucagaga

SEQ ID NO: 1864423 - RNA, 19 nt, Homo sapiens
  misc_RNA (1)...(19): siRNA sense strand
uugcagaguuaaucaaaca

SEQ ID NO: 1864424 - RNA, 19 nt, Homo sapiens
  misc_RNA (1)...(19): siRNA sense strand
ugaagaucguaacuacaga

SEQ ID NO: 1864425 - RNA, 19 nt, Homo sapiens
  misc_RNA (1)...(19): siRNA sense strand
agaaugccuuggauccuau

SEQ ID NO: 1864426 - RNA, 19 nt, Homo sapiens
  misc_RNA (1)...(19): siRNA sense strand
cagcaauggugaacuagac

SEQ ID NO: 1864427 - RNA, 19 nt, Homo sapiens
  misc_RNA (1)...(19): siRNA sense strand
gaucacuacuauguaugga

SEQ ID NO: 1864428 - RNA, 19 nt, Homo sapiens
  misc_RNA (1)...(19): siRNA sense strand
ccucacucauggaacuuaa

SEQ ID NO: 1864429 - RNA, 19 nt, Homo sapiens
  misc_RNA (1)...(19): siRNA sense strand
gaacacuggguuggagcua

SEQ ID NO: 1864430 - RNA, 19 nt, Homo sapiens
  misc_RNA (1)...(19): siRNA sense strand
ucaagguagugugccagua

SEQ ID NO: 1864431 - RNA, 19 nt, Homo sapiens
  misc_RNA (1)...(19): siRNA sense strand
cuggagcccuucacuuaug

SEQ ID NO: 1864432 - RNA, 19 nt, Homo sapiens
  misc_RNA (1)...(19): siRNA sense strand
acagaagguugaucauuuu

SEQ ID NO: 1864433 - RNA, 19 nt, Homo sapiens
  misc_RNA (1)...(19): siRNA sense strand
gguccugggaugccauuaa

SEQ ID NO: 1864434 - RNA, 19 nt, Homo sapiens
  misc_RNA (1)...(19): siRNA sense strand
ugugguguauuuaugaaga

SEQ ID NO: 1864435 - RNA, 19 nt, Homo sapiens
  misc_RNA (1)...(19): siRNA sense strand
gaaguagucaugcccuuuu

SEQ ID NO: 1864436 - RNA, 19 nt, Homo sapiens
  misc_RNA (1)...(19): siRNA sense strand
agaacaagcucuggcugau

SEQ ID NO: 1864437 - RNA, 19 nt, Homo sapiens
  misc_RNA (1)...(19): siRNA sense strand
ggagguggaguaacuaagg

SEQ ID NO: 1864438 - RNA, 19 nt, Homo sapiens
  misc_RNA (1)...(19): siRNA sense strand
ucucaggacauccaacauu

SEQ ID NO: 1864439 - RNA, 19 nt, Homo sapiens
  misc_RNA (1)...(19): siRNA sense strand
uuagaucuccgcaccaaga

SEQ ID NO: 1864440 - RNA, 19 nt, Homo sapiens
  misc_RNA (1)...(19): siRNA sense strand
gguggaguaacuaaggaua

SEQ ID NO: 1864441 - RNA, 19 nt, Homo sapiens
  misc_RNA (1)...(19): siRNA sense strand
ucugaaaccugggugaauc

SEQ ID NO: 1864442 - RNA, 19 nt, Homo sapiens
  misc_RNA (1)...(19): siRNA sense strand
acaacucauucaaggauuc

SEQ ID NO: 1864443 - RNA, 19 nt, Homo sapiens
  misc_RNA (1)...(19): siRNA sense strand
ugaagaauuggaucagaga

SEQ ID NO: 1864444 - RNA, 19 nt, Homo sapiens
  misc_RNA (1)...(19): siRNA sense strand
uuacagccuuugccugcuu

SEQ ID NO: 1864445 - RNA, 19 nt, Homo sapiens
  misc_RNA (1)...(19): siRNA sense strand
uaugguaguuggagcucuu

SEQ ID NO: 1864446 - RNA, 19 nt, Homo sapiens
  misc_RNA (1)...(19): siRNA sense strand
gguaccuaguagcugauaa

SEQ ID NO: 1864447 - RNA, 19 nt, Homo sapiens
  misc_RNA (1)...(19): siRNA sense strand
gaauuggaucagagauuuc

SEQ ID NO: 1864448 - RNA, 19 nt, Homo sapiens
  misc_RNA (1)...(19): siRNA sense strand
gcaaugguggacuauccuu

SEQ ID NO: 1864449 - RNA, 19 nt, Homo sapiens
  misc_RNA (1)...(19): siRNA sense strand
ggaaguuagacauaugaag

SEQ ID NO: 1864450 - RNA, 19 nt, Homo sapiens
  misc_RNA (1)...(19): siRNA sense strand
aagguagugugccaguauu

SEQ ID NO: 1864451 - RNA, 19 nt, Homo sapiens
  misc_RNA (1)...(19): siRNA sense strand
uggaguaacuaaggauauc

SEQ ID NO: 1864452 - RNA, 19 nt, Homo sapiens
  misc_RNA (1)...(19): siRNA sense strand
gaagaauuggaucagagau

SEQ ID NO: 1864453 - RNA, 19 nt, Homo sapiens
  misc_RNA (1)...(19): siRNA sense strand
cauaugaagaauuggauca

SEQ ID NO: 1864454 - RNA, 19 nt, Homo sapiens
  misc_RNA (1)...(19): siRNA sense strand
agacauaugaagaauugga

SEQ ID NO: 1864455 - RNA, 19 nt, Homo sapiens
  misc_RNA (1)...(19): siRNA sense strand
gaugggaaccagaaugaug

SEQ ID NO: 1864456 - RNA, 19 nt, Homo sapiens
  misc_RNA (1)...(19): siRNA sense strand
gaggagacucugagcaguu

SEQ ID NO: 1864457 - RNA, 19 nt, Homo sapiens
  misc_RNA (1)...(19): siRNA sense strand
gugaugggaaccagaauga

SEQ ID NO: 1864458 - RNA, 19 nt, Homo sapiens
  misc_RNA (1)...(19): siRNA sense strand
ucugagcaguucauagaug

SEQ ID NO: 1864459 - RNA, 19 nt, Homo sapiens
  misc_RNA (1)...(19): siRNA sense strand
acucugagcaguucauaga

SEQ ID NO: 1864460 - RNA, 19 nt, Homo sapiens
  misc_RNA (1)...(19): siRNA sense strand
ucaaggaaggccacaagga

SEQ ID NO: 1864461 - RNA, 19 nt, Homo sapiens
  misc_RNA (1)...(19): siRNA sense strand
ggggcagucuccucaguaa

SEQ ID NO: 1864462 - RNA, 19 nt, Homo sapiens
  misc_RNA (1)...(19): siRNA sense strand
acagggaggccaucagcaa

SEQ ID NO: 1864463 - RNA, 19 nt, Homo sapiens
  misc_RNA (1)...(19): siRNA sense strand
ucagggaaagccacaagga

SEQ ID NO: 1864464 - RNA, 19 nt, Homo sapiens
  misc_RNA (1)...(19): siRNA sense strand
ggugaugggaaccagaaug

SEQ ID NO: 1864465 - RNA, 19 nt, Homo sapiens
  misc_RNA (1)...(19): siRNA sense strand
caccaccuccucagggaaa

SEQ ID NO: 1864466 - RNA, 19 nt, Homo sapiens
  misc_RNA (1)...(19): siRNA sense strand
gggaggacagcaaucucaa

SEQ ID NO: 1864467 - RNA, 19 nt, Homo sapiens
  misc_RNA (1)...(19): siRNA sense strand
gggaggccaucagcaaggu

SEQ ID NO: 1864468 - RNA, 19 nt, Homo sapiens
  misc_RNA (1)...(19): siRNA sense strand
ucaacccucugcuggugau

SEQ ID NO: 1864469 - RNA, 19 nt, Homo sapiens
  misc_RNA (1)...(19): siRNA sense strand
ggaaagagguuuuaaaauc

SEQ ID NO: 1864470 - RNA, 19 nt, Homo sapiens
  misc_RNA (1)...(19): siRNA sense strand
ggagauggcccgugucuga

SEQ ID NO: 1864471 - RNA, 19 nt, Homo sapiens
  misc_RNA (1)...(19): siRNA sense strand
gcugauggcaguacacuua

SEQ ID NO: 1864472 - RNA, 19 nt, Homo sapiens
  misc_RNA (1)...(19): siRNA sense strand
gcaggauucuguuucaucu

SEQ ID NO: 1864473 - RNA, 19 nt, Homo sapiens
  misc_RNA (1)...(19): siRNA sense strand
cgaagaagcggcgaaagaa

SEQ ID NO: 1864474 - RNA, 19 nt, Homo sapiens
  misc_RNA (1)...(19): siRNA sense strand
gggaagcacuguugaaaau

SEQ ID NO: 1864475 - RNA, 19 nt, Homo sapiens
  misc_RNA (1)...(19): siRNA sense strand
gaagugagccaaaaggaaa

SEQ ID NO: 1864476 - RNA, 19 nt, Homo sapiens
  misc_RNA (1)...(19): siRNA sense strand
uaugagcaaccaaagauaa

SEQ ID NO: 1864477 - RNA, 19 nt, Homo sapiens
  misc_RNA (1)...(19): siRNA sense strand
gaagcacuguugaaaauuc

SEQ ID NO: 1864478 - RNA, 19 nt, Homo sapiens
  misc_RNA (1)...(19): siRNA sense strand
ccaaagauaaacagacaga

SEQ ID NO: 1864479 - RNA, 19 nt, Homo sapiens
  misc_RNA (1)...(19): siRNA sense strand
aaccaaagauaaacagaca

SEQ ID NO: 1864480 - RNA, 19 nt, Homo sapiens
  misc_RNA (1)...(19): siRNA sense strand
ccagcuuguucaugguaua

SEQ ID NO: 1864481 - RNA, 19 nt, Homo sapiens
  misc_RNA (1)...(19): siRNA sense strand
gauccaccuucuccuagug

SEQ ID NO: 1864482 - RNA, 19 nt, Homo sapiens
  misc_RNA (1)...(19): siRNA sense strand
cagcauuucuaacugaagu

SEQ ID NO: 1864483 - RNA, 19 nt, Homo sapiens
  misc_RNA (1)...(19): siRNA sense strand
aggauucuguuucaucuga

SEQ ID NO: 1864484 - RNA, 19 nt, Homo sapiens
  misc_RNA (1)...(19): siRNA sense strand
gaagaagcggcgaaagaag

SEQ ID NO: 1864485 - RNA, 19 nt, Homo sapiens
  misc_RNA (1)...(19): siRNA sense strand
ccgaagaagcggcgaaaga

SEQ ID NO: 1864486 - RNA, 19 nt, Homo sapiens
  misc_RNA (1)...(19): siRNA sense strand
guaugagcaaccaaagaua

SEQ ID NO: 1864487 - RNA, 19 nt, Homo sapiens
  misc_RNA (1)...(19): siRNA sense strand
caagaucaccucugcaaaa

SEQ ID NO: 1864488 - RNA, 19 nt, Homo sapiens
  misc_RNA (1)...(19): siRNA sense strand
uaacugaagugagccaaaa

SEQ ID NO: 1864489 - RNA, 19 nt, Homo sapiens
  misc_RNA (1)...(19): siRNA sense strand
gagcaaccaaagauaaaca

SEQ ID NO: 1864490 - RNA, 19 nt, Homo sapiens
  misc_RNA (1)...(19): siRNA sense strand
gaugggaagcacuguugaa

SEQ ID NO: 1864491 - RNA, 19 nt, Homo sapiens
  misc_RNA (1)...(19): siRNA sense strand
ugauggcaguacacuuaaa

SEQ ID NO: 1864492 - RNA, 19 nt, Homo sapiens
  misc_RNA (1)...(19): siRNA sense strand
caaauauaacuugccacua

SEQ ID NO: 1864493 - RNA, 19 nt, Homo sapiens
  misc_RNA (1)...(19): siRNA sense strand
aagaagcggcgaaagaaga

SEQ ID NO: 1864494 - RNA, 19 nt, Homo sapiens
  misc_RNA (1)...(19): siRNA sense strand
cuuccucccucauuuccua

SEQ ID NO: 1864495 - RNA, 19 nt, Homo sapiens
  misc_RNA (1)...(19): siRNA sense strand
gcaaccaaagauaaacaga

SEQ ID NO: 1864496 - RNA, 19 nt, Homo sapiens
  misc_RNA (1)...(19): siRNA sense strand
caggaaagagguuuuaaaa

SEQ ID NO: 1864497 - RNA, 19 nt, Homo sapiens
  misc_RNA (1)...(19): siRNA sense strand
gggaaaaucggagaaaauu

SEQ ID NO: 1864498 - RNA, 19 nt, Homo sapiens
  misc_RNA (1)...(19): siRNA sense strand
uuccaaagccuccuaguca

SEQ ID NO: 1864499 - RNA, 19 nt, Homo sapiens
  misc_RNA (1)...(19): siRNA sense strand
gaaaaucggagaaaauugc

SEQ ID NO: 1864500 - RNA, 19 nt, Homo sapiens
  misc_RNA (1)...(19): siRNA sense strand
ccaagaucaccucugcaaa

SEQ ID NO: 1864501 - RNA, 19 nt, Homo sapiens
  misc_RNA (1)...(19): siRNA sense strand
uguaugagcaaccaaagau

SEQ ID NO: 1864502 - RNA, 19 nt, Homo sapiens
  misc_RNA (1)...(19): siRNA sense strand
gaaaauuccaaccaaaaca

SEQ ID NO: 1864503 - RNA, 19 nt, Homo sapiens
  misc_RNA (1)...(19): siRNA sense strand
gcauuucuaacugaaguga

SEQ ID NO: 1864504 - RNA, 19 nt, Homo sapiens
  misc_RNA (1)...(19): siRNA sense strand
gaauucagaagcaggaaaa

SEQ ID NO: 1864505 - RNA, 19 nt, Homo sapiens
  misc_RNA (1)...(19): siRNA sense strand
ggaugggaagcacuguuga

SEQ ID NO: 1864506 - RNA, 19 nt, Homo sapiens
  misc_RNA (1)...(19): siRNA sense strand
aaucaaagaugggaaaauc

SEQ ID NO: 1864507 - RNA, 19 nt, Homo sapiens
  misc_RNA (1)...(19): siRNA sense strand
ggccagcuuguucauggua

SEQ ID NO: 1864508 - RNA, 19 nt, Homo sapiens
  misc_RNA (1)...(19): siRNA sense strand
agaagcggcgaaagaagaa

SEQ ID NO: 1864509 - RNA, 19 nt, Homo sapiens
  misc_RNA (1)...(19): siRNA sense strand
gauucuguuucaucugaca

SEQ ID NO: 1864510 - RNA, 19 nt, Homo sapiens
  misc_RNA (1)...(19): siRNA sense strand
ccagccgcuuccaccagua

SEQ ID NO: 1864511 - RNA, 19 nt, Homo sapiens
  misc_RNA (1)...(19): siRNA sense strand
cuccuaguguucuuccaaa

SEQ ID NO: 1864512 - RNA, 19 nt, Homo sapiens
  misc_RNA (1)...(19): siRNA sense strand
caaagauaaacagacagaa

SEQ ID NO: 1864513 - RNA, 19 nt, Homo sapiens
  misc_RNA (1)...(19): siRNA sense strand
gcagggagaugauauucua

SEQ ID NO: 1864514 - RNA, 19 nt, Homo sapiens
  misc_RNA (1)...(19): siRNA sense strand
gagcuggagucccuaauaa

SEQ ID NO: 1864515 - RNA, 19 nt, Homo sapiens
  misc_RNA (1)...(19): siRNA sense strand
caagauugcuguugugaug

SEQ ID NO: 1864516 - RNA, 19 nt, Homo sapiens
  misc_RNA (1)...(19): siRNA sense strand
gagaugauauucuaaugga

SEQ ID NO: 1864517 - RNA, 19 nt, Homo sapiens
  misc_RNA (1)...(19): siRNA sense strand
gagcccagcuggauucuga

SEQ ID NO: 1864518 - RNA, 19 nt, Homo sapiens
  misc_RNA (1)...(19): siRNA sense strand
ggacaaaucacaauauauc

SEQ ID NO: 1864519 - RNA, 19 nt, Homo sapiens
  misc_RNA (1)...(19): siRNA sense strand
gggauggacucauuuguug

SEQ ID NO: 1864520 - RNA, 19 nt, Homo sapiens
  misc_RNA (1)...(19): siRNA sense strand
guggacaaaucacaauaua

SEQ ID NO: 1864521 - RNA, 19 nt, Homo sapiens
  misc_RNA (1)...(19): siRNA sense strand
caacuucuguggacaaauc

SEQ ID NO: 1864522 - RNA, 19 nt, Homo sapiens
  misc_RNA (1)...(19): siRNA sense strand
gcgaggugcugggaacuua

SEQ ID NO: 1864523 - RNA, 19 nt, Homo sapiens
  misc_RNA (1)...(19): siRNA sense strand
gcagccagauaucagcaua

SEQ ID NO: 1864524 - RNA, 19 nt, Homo sapiens
  misc_RNA (1)...(19): siRNA sense strand
gaacgccucuauguaaugu

SEQ ID NO: 1864525 - RNA, 19 nt, Homo sapiens
  misc_RNA (1)...(19): siRNA sense strand
aaacaugggccaauuauuc

SEQ ID NO: 1864526 - RNA, 19 nt, Homo sapiens
  misc_RNA (1)...(19): siRNA sense strand
ggagacaucaaguggauuu

SEQ ID NO: 1864527 - RNA, 19 nt, Homo sapiens
  misc_RNA (1)...(19): siRNA sense strand
ggaacuauauccacaugca

SEQ ID NO: 1864528 - RNA, 19 nt, Homo sapiens
  misc_RNA (1)...(19): siRNA sense strand
gggagaagguaauuguuuc

SEQ ID NO: 1864529 - RNA, 19 nt, Homo sapiens
  misc_RNA (1)...(19): siRNA sense strand
caucauugguuacuucaga

SEQ ID NO: 1864530 - RNA, 19 nt, Homo sapiens
  misc_RNA (1)...(19): siRNA sense strand
guaauuguuucccugaaug

SEQ ID NO: 1864531 - RNA, 19 nt, Homo sapiens
  misc_RNA (1)...(19): siRNA sense strand
gcacuuauuugugucuuuc

SEQ ID NO: 1864532 - RNA, 19 nt, Homo sapiens
  misc_RNA (1)...(19): siRNA sense strand
ggagcuggagucccuaaua

SEQ ID NO: 1864533 - RNA, 19 nt, Homo sapiens
  misc_RNA (1)...(19): siRNA sense strand
acaggaaacuggccaaauc

SEQ ID NO: 1864534 - RNA, 19 nt, Homo sapiens
  misc_RNA (1)...(19): siRNA sense strand
gaaaguacaaugugaacuc

SEQ ID NO: 1864535 - RNA, 19 nt, Homo sapiens
  misc_RNA (1)...(19): siRNA sense strand
ccagauaucagcauaggaa

SEQ ID NO: 1864536 - RNA, 19 nt, Homo sapiens
  misc_RNA (1)...(19): siRNA sense strand
caauauaucgggugcaaga

SEQ ID NO: 1864537 - RNA, 19 nt, Homo sapiens
  misc_RNA (1)...(19): siRNA sense strand
ccaggccuauggaaucuaa

SEQ ID NO: 1864538 - RNA, 19 nt, Homo sapiens
  misc_RNA (1)...(19): siRNA sense strand
gggagaugauauucuaaug

SEQ ID NO: 1864539 - RNA, 19 nt, Homo sapiens
  misc_RNA (1)...(19): siRNA sense strand
caaggaagcaauacaggaa

SEQ ID NO: 1864540 - RNA, 19 nt, Homo sapiens
  misc_RNA (1)...(19): siRNA sense strand
gguaauuguuucccugaau

SEQ ID NO: 1864541 - RNA, 19 nt, Homo sapiens
  misc_RNA (1)...(19): siRNA sense strand
gaaagcgaaaguacaaugu

SEQ ID NO: 1864542 - RNA, 19 nt, Homo sapiens
  misc_RNA (1)...(19): siRNA sense strand
ggagggagaagguaauugu

SEQ ID NO: 1864543 - RNA, 19 nt, Homo sapiens
  misc_RNA (1)...(19): siRNA sense strand
gcugaaagcgaaaguacaa

SEQ ID NO: 1864544 - RNA, 19 nt, Homo sapiens
  misc_RNA (1)...(19): siRNA sense strand
gacaucaaguggauuuauc

SEQ ID NO: 1864545 - RNA, 19 nt, Homo sapiens
  misc_RNA (1)...(19): siRNA sense strand
uauaucgggugcaagauug

SEQ ID NO: 1864546 - RNA, 19 nt, Homo sapiens
  misc_RNA (1)...(19): siRNA sense strand
ugacagccacaucacuuua

SEQ ID NO: 1864547 - RNA, 19 nt, Homo sapiens
  misc_RNA (1)...(19): siRNA sense strand
aggcagaggugaagaagau

SEQ ID NO: 1864548 - RNA, 19 nt, Homo sapiens
  misc_RNA (1)...(19): siRNA sense strand
ugcauaaucucaucuuugu

SEQ ID NO: 1864549 - RNA, 19 nt, Homo sapiens
  misc_RNA (1)...(19): siRNA sense strand
gaggagaccaaggaagaua

SEQ ID NO: 1864550 - RNA, 19 nt, Homo sapiens
  misc_RNA (1)...(19): siRNA sense strand
aagcgaaaguacaauguga

SEQ ID NO: 1864551 - RNA, 19 nt, Homo sapiens
  misc_RNA (1)...(19): siRNA sense strand
gcauugcacuaggaacuau

SEQ ID NO: 1864552 - RNA, 19 nt, Homo sapiens
  misc_RNA (1)...(19): siRNA sense strand
gcauaggaaagcaagaauu

SEQ ID NO: 1864553 - RNA, 19 nt, Homo sapiens
  misc_RNA (1)...(19): siRNA sense strand
cuacugcaauggagagguu

SEQ ID NO: 1864554 - RNA, 19 nt, Homo sapiens
  misc_RNA (1)...(19): siRNA sense strand
caaguggauuuaucaagca

SEQ ID NO: 1864555 - RNA, 19 nt, Homo sapiens
  misc_RNA (1)...(19): siRNA sense strand
gcuguugugauguuuauuu

SEQ ID NO: 1864556 - RNA, 19 nt, Homo sapiens
  misc_RNA (1)...(19): siRNA sense strand
aguaguccaugcucacaua

SEQ ID NO: 1864557 - RNA, 19 nt, Homo sapiens
  misc_RNA (1)...(19): siRNA sense strand
gcuggagucccuaauaaug

SEQ ID NO: 1864558 - RNA, 19 nt, Homo sapiens
  misc_RNA (1)...(19): siRNA sense strand
gaaggaugccaaggagaaa

SEQ ID NO: 1864559 - RNA, 19 nt, Homo sapiens
  misc_RNA (1)...(19): siRNA sense strand
acugugagcucuucuucaa

SEQ ID NO: 1864560 - RNA, 19 nt, Homo sapiens
  misc_RNA (1)...(19): siRNA sense strand
gcuauucucaucauugguu

SEQ ID NO: 1864561 - RNA, 19 nt, Homo sapiens
  misc_RNA (1)...(19): siRNA sense strand
gcuauugggcugaauuuua

SEQ ID NO: 1864562 - RNA, 19 nt, Homo sapiens
  misc_RNA (1)...(19): siRNA sense strand
cauaggaaagcaagaauuc

SEQ ID NO: 1864563 - RNA, 19 nt, Homo sapiens
  misc_RNA (1)...(19): siRNA sense strand
caacaucacagcucaacuc

SEQ ID NO: 1864564 - RNA, 19 nt, Homo sapiens
  misc_RNA (1)...(19): siRNA sense strand
ugaaggaugccaaggagaa

SEQ ID NO: 1864565 - RNA, 19 nt, Homo sapiens
  misc_RNA (1)...(19): siRNA sense strand
uuugaacgccucuauguaa

SEQ ID NO: 1864566 - RNA, 19 nt, Homo sapiens
  misc_RNA (1)...(19): siRNA sense strand
uccaugcccuccuuauauu

SEQ ID NO: 1864567 - RNA, 19 nt, Homo sapiens
  misc_RNA (1)...(19): siRNA sense strand
ucaacuccuuucaggguuu

SEQ ID NO: 1864568 - RNA, 19 nt, Homo sapiens
  misc_RNA (1)...(19): siRNA sense strand
gaacuuagugcuggagaca

SEQ ID NO: 1864569 - RNA, 19 nt, Homo sapiens
  misc_RNA (1)...(19): siRNA sense strand
caugcccuccuuauauuua

SEQ ID NO: 1864570 - RNA, 19 nt, Homo sapiens
  misc_RNA (1)...(19): siRNA sense strand
gugcuuaucucuggcaaag

SEQ ID NO: 1864571 - RNA, 19 nt, Homo sapiens
  misc_RNA (1)...(19): siRNA sense strand
gcacugugagcucuucuuc

SEQ ID NO: 1864572 - RNA, 19 nt, Homo sapiens
  misc_RNA (1)...(19): siRNA sense strand
guuccaugcccuccuuaua

SEQ ID NO: 1864573 - RNA, 19 nt, Homo sapiens
  misc_RNA (1)...(19): siRNA sense strand
ggagaugauauucuaaugg

SEQ ID NO: 1864574 - RNA, 19 nt, Homo sapiens
  misc_RNA (1)...(19): siRNA sense strand
aaaguacaaugugaacuca

SEQ ID NO: 1864575 - RNA, 19 nt, Homo sapiens
  misc_RNA (1)...(19): siRNA sense strand
cacaauauaucgggugcaa

SEQ ID NO: 1864576 - RNA, 19 nt, Homo sapiens
  misc_RNA (1)...(19): siRNA sense strand
ugacuucaaccauaaagga

SEQ ID NO: 1864577 - RNA, 19 nt, Homo sapiens
  misc_RNA (1)...(19): siRNA sense strand
ucucaucauugguuacuuc

SEQ ID NO: 1864578 - RNA, 19 nt, Homo sapiens
  misc_RNA (1)...(19): siRNA sense strand
aaucuaacccagacacuga

SEQ ID NO: 1864579 - RNA, 19 nt, Homo sapiens
  misc_RNA (1)...(19): siRNA sense strand
uaggaacuauauccacaug

SEQ ID NO: 1864580 - RNA, 19 nt, Homo sapiens
  misc_RNA (1)...(19): siRNA sense strand
ggaggcagggagaugauau

SEQ ID NO: 1864581 - RNA, 19 nt, Homo sapiens
  misc_RNA (1)...(19): siRNA sense strand
cuuccuggcuacaaauuau

SEQ ID NO: 1864582 - RNA, 19 nt, Homo sapiens
  misc_RNA (1)...(19): siRNA sense strand
ggagcagauuguccuugug

SEQ ID NO: 1864583 - RNA, 19 nt, Homo sapiens
  misc_RNA (1)...(19): siRNA sense strand
aggagaaacugaggauguu

SEQ ID NO: 1864584 - RNA, 19 nt, Homo sapiens
  misc_RNA (1)...(19): siRNA sense strand
gguccugguccuagucuuu

SEQ ID NO: 1864585 - RNA, 19 nt, Homo sapiens
  misc_RNA (1)...(19): siRNA sense strand
ugaaagcgaaaguacaaug

SEQ ID NO: 1864586 - RNA, 19 nt, Homo sapiens
  misc_RNA (1)...(19): siRNA sense strand
gcacuaggaacuauaucca

SEQ ID NO: 1864587 - RNA, 19 nt, Homo sapiens
  misc_RNA (1)...(19): siRNA sense strand
ggcaacuucuguggacaaa

SEQ ID NO: 1864588 - RNA, 19 nt, Homo sapiens
  misc_RNA (1)...(19): siRNA sense strand
ggaguugcuuuccgacacu

SEQ ID NO: 1864589 - RNA, 19 nt, Homo sapiens
  misc_RNA (1)...(19): siRNA sense strand
ggcuacaaauuauuauugg

SEQ ID NO: 1864590 - RNA, 19 nt, Homo sapiens
  misc_RNA (1)...(19): siRNA sense strand
gaaaauaucggcuguucca

SEQ ID NO: 1864591 - RNA, 19 nt, Homo sapiens
  misc_RNA (1)...(19): siRNA sense strand
gcuguuccaugcccuccuu

SEQ ID NO: 1864592 - RNA, 19 nt, Homo sapiens
  misc_RNA (1)...(19): siRNA sense strand
cuauucucaucauugguua

SEQ ID NO: 1864593 - RNA, 19 nt, Homo sapiens
  misc_RNA (1)...(19): siRNA sense strand
cuucaaccauaaaggaguu

SEQ ID NO: 1864594 - RNA, 19 nt, Homo sapiens
  misc_RNA (1)...(19): siRNA sense strand
ggcuaugucuggaguaacu

SEQ ID NO: 1864595 - RNA, 19 nt, Homo sapiens
  misc_RNA (1)...(19): siRNA sense strand
uuucaggguuucuuugugu

SEQ ID NO: 1864596 - RNA, 19 nt, Homo sapiens
  misc_RNA (1)...(19): siRNA sense strand
ugaauacgguuagaguucu

SEQ ID NO: 1864597 - RNA, 19 nt, Homo sapiens
  misc_RNA (1)...(19): siRNA sense strand
cagcauaggaaagcaagaa

SEQ ID NO: 1864598 - RNA, 19 nt, Homo sapiens
  misc_RNA (1)...(19): siRNA sense strand
agauugcuguugugauguu

SEQ ID NO: 1864599 - RNA, 19 nt, Homo sapiens
  misc_RNA (1)...(19): siRNA sense strand
gauuguccuugugcugaaa

SEQ ID NO: 1864600 - RNA, 19 nt, Homo sapiens
  misc_RNA (1)...(19): siRNA sense strand
gcagaggugaagaagaugu

SEQ ID NO: 1864601 - RNA, 19 nt, Homo sapiens
  misc_RNA (1)...(19): siRNA sense strand
ccaauggaacaugggauuu

SEQ ID NO: 1864602 - RNA, 19 nt, Homo sapiens
  misc_RNA (1)...(19): siRNA sense strand
gaggcagggagaugauauu

SEQ ID NO: 1864603 - RNA, 19 nt, Homo sapiens
  misc_RNA (1)...(19): siRNA sense strand
ugucuaucaucuacugcua

SEQ ID NO: 1864604 - RNA, 19 nt, Homo sapiens
  misc_RNA (1)...(19): siRNA sense strand
gaacaugggauuuuaugca

SEQ ID NO: 1864605 - RNA, 19 nt, Homo sapiens
  misc_RNA (1)...(19): siRNA sense strand
gagagcuacaagcaucuuu

SEQ ID NO: 1864606 - RNA, 19 nt, Homo sapiens
  misc_RNA (1)...(19): siRNA sense strand
gagggagaagguaauuguu

SEQ ID NO: 1864607 - RNA, 19 nt, Homo sapiens
  misc_RNA (1)...(19): siRNA sense strand
uaacccagacacugaagga

SEQ ID NO: 1864608 - RNA, 19 nt, Homo sapiens
  misc_RNA (1)...(19): siRNA sense strand
cuauugggcugaauuuuau

SEQ ID NO: 1864609 - RNA, 19 nt, Homo sapiens
  misc_RNA (1)...(19): siRNA sense strand
uuaucaagcaccgaucuua

SEQ ID NO: 1864610 - RNA, 19 nt, Homo sapiens
  misc_RNA (1)...(19): siRNA sense strand
ccugcauaaucucaucuuu

SEQ ID NO: 1864611 - RNA, 19 nt, Homo sapiens
  misc_RNA (1)...(19): siRNA sense strand
ccaaggagaaacugaggau

SEQ ID NO: 1864612 - RNA, 19 nt, Homo sapiens
  misc_RNA (1)...(19): siRNA sense strand
cuggagacaucaaguggau

SEQ ID NO: 1864613 - RNA, 19 nt, Homo sapiens
  misc_RNA (1)...(19): siRNA sense strand
gaaguucgcuuaccgguuu

SEQ ID NO: 1864614 - RNA, 19 nt, Homo sapiens
  misc_RNA (1)...(19): siRNA sense strand
ggaaggagcuggacaagau

SEQ ID NO: 1864615 - RNA, 19 nt, Homo sapiens
  misc_RNA (1)...(19): siRNA sense strand
ccaaguacuucuucaauaa

SEQ ID NO: 1864616 - RNA, 19 nt, Homo sapiens
  misc_RNA (1)...(19): siRNA sense strand
gggacaaccucaucuacua

SEQ ID NO: 1864617 - RNA, 19 nt, Homo sapiens
  misc_RNA (1)...(19): siRNA sense strand
gccaaguacuucuucaaua

SEQ ID NO: 1864618 - RNA, 19 nt, Homo sapiens
  misc_RNA (1)...(19): siRNA sense strand
ccugacagcugcagcauuu

SEQ ID NO: 1864619 - RNA, 19 nt, Homo sapiens
  misc_RNA (1)...(19): siRNA sense strand
acacugaacucacagauca

SEQ ID NO: 1864620 - RNA, 19 nt, Homo sapiens
  misc_RNA (1)...(19): siRNA sense strand
ggaagaagcgggaguucaa

SEQ ID NO: 1864621 - RNA, 19 nt, Homo sapiens
  misc_RNA (1)...(19): siRNA sense strand
caauggaaauucaguuauc

SEQ ID NO: 1864622 - RNA, 19 nt, Homo sapiens
  misc_RNA (1)...(19): siRNA sense strand
caucguggccugcuucuuu

SEQ ID NO: 1864623 - RNA, 19 nt, Homo sapiens
  misc_RNA (1)...(19): siRNA sense strand
gagcagauucucaugaaga

SEQ ID NO: 1864624 - RNA, 19 nt, Homo sapiens
  misc_RNA (1)...(19): siRNA sense strand
caggaaaggugacaugagu

SEQ ID NO: 1864625 - RNA, 19 nt, Homo sapiens
  misc_RNA (1)...(19): siRNA sense strand
acucacggcuggccaagua

SEQ ID NO: 1864626 - RNA, 19 nt, Homo sapiens
  misc_RNA (1)...(19): siRNA sense strand
ggagaaagugcuggaguuu

SEQ ID NO: 1864627 - RNA, 19 nt, Homo sapiens
  misc_RNA (1)...(19): siRNA sense strand
gcaguacgcacuagcaguu

SEQ ID NO: 1864628 - RNA, 19 nt, Homo sapiens
  misc_RNA (1)...(19): siRNA sense strand
ggaaaggugacaugaguuc

SEQ ID NO: 1864629 - RNA, 19 nt, Homo sapiens
  misc_RNA (1)...(19): siRNA sense strand
ggcaauagagucacuguau

SEQ ID NO: 1864630 - RNA, 19 nt, Homo sapiens
  misc_RNA (1)...(19): siRNA sense strand
gcaauggaaauucaguuau

SEQ ID NO: 1864631 - RNA, 19 nt, Homo sapiens
  misc_RNA (1)...(19): siRNA sense strand
ggacaaccucaucuacuau

SEQ ID NO: 1864632 - RNA, 19 nt, Homo sapiens
  misc_RNA (1)...(19): siRNA sense strand
guagcuggaaccacuauaa

SEQ ID NO: 1864633 - RNA, 19 nt, Homo sapiens
  misc_RNA (1)...(19): siRNA sense strand
gcugcagcauuucauaaga

SEQ ID NO: 1864634 - RNA, 19 nt, Homo sapiens
  misc_RNA (1)...(19): siRNA sense strand
uaacaugcaguacgcacua

SEQ ID NO: 1864635 - RNA, 19 nt, Homo sapiens
  misc_RNA (1)...(19): siRNA sense strand
ucacuguauuugaccuuaa

SEQ ID NO: 1864636 - RNA, 19 nt, Homo sapiens
  misc_RNA (1)...(19): siRNA sense strand
gcagagacucagaagaaga

SEQ ID NO: 1864637 - RNA, 19 nt, Homo sapiens
  misc_RNA (1)...(19): siRNA sense strand
gcccaucaguggucugugu

SEQ ID NO: 1864638 - RNA, 19 nt, Homo sapiens
  misc_RNA (1)...(19): siRNA sense strand
gcaggaaggagcuggacaa

SEQ ID NO: 1864639 - RNA, 19 nt, Homo sapiens
  misc_RNA (1)...(19): siRNA sense strand
gggcaggcaugaccucaag

SEQ ID NO: 1864640 - RNA, 19 nt, Homo sapiens
  misc_RNA (1)...(19): siRNA sense strand
gaaggagcuggacaagauu

SEQ ID NO: 1864641 - RNA, 19 nt, Homo sapiens
  misc_RNA (1)...(19): siRNA sense strand
ucacaaacugcucauguug

SEQ ID NO: 1864642 - RNA, 19 nt, Homo sapiens
  misc_RNA (1)...(19): siRNA sense strand
uggagaaagugcuggaguu

SEQ ID NO: 1864643 - RNA, 19 nt, Homo sapiens
  misc_RNA (1)...(19): siRNA sense strand
uucaugagcugccagaguu

SEQ ID NO: 1864644 - RNA, 19 nt, Homo sapiens
  misc_RNA (1)...(19): siRNA sense strand
aggcagagacucagaagaa

SEQ ID NO: 1864645 - RNA, 19 nt, Homo sapiens
  misc_RNA (1)...(19): siRNA sense strand
ggacacccgcgugcucuuu

SEQ ID NO: 1864646 - RNA, 19 nt, Homo sapiens
  misc_RNA (1)...(19): siRNA sense strand
cugcagcauuucauaagaa

SEQ ID NO: 1864647 - RNA, 19 nt, Homo sapiens
  misc_RNA (1)...(19): siRNA sense strand
ccucuggacucacaaacug

SEQ ID NO: 1864648 - RNA, 19 nt, Homo sapiens
  misc_RNA (1)...(19): siRNA sense strand
caggcaggcuccuugaugu

SEQ ID NO: 1864649 - RNA, 19 nt, Homo sapiens
  misc_RNA (1)...(19): siRNA sense strand
ggugaccggugugaccuuu

SEQ ID NO: 1864650 - RNA, 19 nt, Homo sapiens
  misc_RNA (1)...(19): siRNA sense strand
ggcaggaaguuuguuguca

SEQ ID NO: 1864651 - RNA, 19 nt, Homo sapiens
  misc_RNA (1)...(19): siRNA sense strand
ugaacuguauguggagaaa

SEQ ID NO: 1864652 - RNA, 19 nt, Homo sapiens
  misc_RNA (1)...(19): siRNA sense strand
caaccuggcacuaauugau

SEQ ID NO: 1864653 - RNA, 19 nt, Homo sapiens
  misc_RNA (1)...(19): siRNA sense strand
gguucgagaucucuugcaa

SEQ ID NO: 1864654 - RNA, 19 nt, Homo sapiens
  misc_RNA (1)...(19): siRNA sense strand
cgggaggcauguccaaguu

SEQ ID NO: 1864655 - RNA, 19 nt, Homo sapiens
  misc_RNA (1)...(19): siRNA sense strand
ucacagguaccgaaacuuc

SEQ ID NO: 1864656 - RNA, 19 nt, Homo sapiens
  misc_RNA (1)...(19): siRNA sense strand
ccacccaguucuccugugu

SEQ ID NO: 1864657 - RNA, 19 nt, Homo sapiens
  misc_RNA (1)...(19): siRNA sense strand
ggaggaggcagaagcaucu

SEQ ID NO: 1864658 - RNA, 19 nt, Homo sapiens
  misc_RNA (1)...(19): siRNA sense strand
acaaacugcucauguugca

SEQ ID NO: 1864659 - RNA, 19 nt, Homo sapiens
  misc_RNA (1)...(19): siRNA sense strand
ggaggauggagucgcgaua

SEQ ID NO: 1864660 - RNA, 19 nt, Homo sapiens
  misc_RNA (1)...(19): siRNA sense strand
gaaucuuccaucuucauga

SEQ ID NO: 1864661 - RNA, 19 nt, Homo sapiens
  misc_RNA (1)...(19): siRNA sense strand
ggacgcugcugccugucau

SEQ ID NO: 1864662 - RNA, 19 nt, Homo sapiens
  misc_RNA (1)...(19): siRNA sense strand
gcacuucaaaccugagauc

SEQ ID NO: 1864663 - RNA, 19 nt, Homo sapiens
  misc_RNA (1)...(19): siRNA sense strand
gcgccuaugggacauguuu

SEQ ID NO: 1864664 - RNA, 19 nt, Homo sapiens
  misc_RNA (1)...(19): siRNA sense strand
ucacaaaggguaacauugc

SEQ ID NO: 1864665 - RNA, 19 nt, Homo sapiens
  misc_RNA (1)...(19): siRNA sense strand
ggcgugggaaccuaaauuu

SEQ ID NO: 1864666 - RNA, 19 nt, Homo sapiens
  misc_RNA (1)...(19): siRNA sense strand
ucauucaguuccuccagaa

SEQ ID NO: 1864667 - RNA, 19 nt, Homo sapiens
  misc_RNA (1)...(19): siRNA sense strand
cagcugcagcauuucauaa

SEQ ID NO: 1864668 - RNA, 19 nt, Homo sapiens
  misc_RNA (1)...(19): siRNA sense strand
gcacaaaacgcucccuaga

SEQ ID NO: 1864669 - RNA, 19 nt, Homo sapiens
  misc_RNA (1)...(19): siRNA sense strand
cacuguauuugaccuuaaa

SEQ ID NO: 1864670 - RNA, 19 nt, Homo sapiens
  misc_RNA (1)...(19): siRNA sense strand
cuggaaagcagaccuguug

SEQ ID NO: 1864671 - RNA, 19 nt, Homo sapiens
  misc_RNA (1)...(19): siRNA sense strand
uaccugcaauggaaauuca

SEQ ID NO: 1864672 - RNA, 19 nt, Homo sapiens
  misc_RNA (1)...(19): siRNA sense strand
ugcaauggaaauucaguua

SEQ ID NO: 1864673 - RNA, 19 nt, Homo sapiens
  misc_RNA (1)...(19): siRNA sense strand
ccaaguucgugugcaucua

SEQ ID NO: 1864674 - RNA, 19 nt, Homo sapiens
  misc_RNA (1)...(19): siRNA sense strand
gacaagacggugcgccuau

SEQ ID NO: 1864675 - RNA, 19 nt, Homo sapiens
  misc_RNA (1)...(19): siRNA sense strand
gagaagacaggaaaaguga

SEQ ID NO: 1864676 - RNA, 19 nt, Homo sapiens
  misc_RNA (1)...(19): siRNA sense strand
ggaaagcagaccuguugca

SEQ ID NO: 1864677 - RNA, 19 nt, Homo sapiens
  misc_RNA (1)...(19): siRNA sense strand
caggaaguuuguugucaca

SEQ ID NO: 1864678 - RNA, 19 nt, Homo sapiens
  misc_RNA (1)...(19): siRNA sense strand
ggacacgaagggcccauca

SEQ ID NO: 1864679 - RNA, 19 nt, Homo sapiens
  misc_RNA (1)...(19): siRNA sense strand
uggcuuugcuucuggaauc

SEQ ID NO: 1864680 - RNA, 19 nt, Homo sapiens
  misc_RNA (1)...(19): siRNA sense strand
ggguaacauugcccagaug

SEQ ID NO: 1864681 - RNA, 19 nt, Homo sapiens
  misc_RNA (1)...(19): siRNA sense strand
guaccggcgugggaaccua

SEQ ID NO: 1864682 - RNA, 19 nt, Homo sapiens
  misc_RNA (1)...(19): siRNA sense strand
gugcagacgggcuccauug

SEQ ID NO: 1864683 - RNA, 19 nt, Homo sapiens
  misc_RNA (1)...(19): siRNA sense strand
gauggcaggaaguuuguug

SEQ ID NO: 1864684 - RNA, 19 nt, Homo sapiens
  misc_RNA (1)...(19): siRNA sense strand
ggcaggcuccuugauguuu

SEQ ID NO: 1864685 - RNA, 19 nt, Homo sapiens
  misc_RNA (1)...(19): siRNA sense strand
cagcagggccacuucaaca

SEQ ID NO: 1864686 - RNA, 19 nt, Homo sapiens
  misc_RNA (1)...(19): siRNA sense strand
ggccaaguacuucuucaau

SEQ ID NO: 1864687 - RNA, 19 nt, Homo sapiens
  misc_RNA (1)...(19): siRNA sense strand
gcuuaccgguuuucaaauu

SEQ ID NO: 1864688 - RNA, 19 nt, Homo sapiens
  misc_RNA (1)...(19): siRNA sense strand
gcuggaaccacuauaacau

SEQ ID NO: 1864689 - RNA, 19 nt, Homo sapiens
  misc_RNA (1)...(19): siRNA sense strand
cucacaaacugcucauguu

SEQ ID NO: 1864690 - RNA, 19 nt, Homo sapiens
  misc_RNA (1)...(19): siRNA sense strand
ggaccgugcgagccuuuga

SEQ ID NO: 1864691 - RNA, 19 nt, Homo sapiens
  misc_RNA (1)...(19): siRNA sense strand
caugagcugccagaguuua

SEQ ID NO: 1864692 - RNA, 19 nt, Homo sapiens
  misc_RNA (1)...(19): siRNA sense strand
gcaaggucaagguguggaa

SEQ ID NO: 1864693 - RNA, 19 nt, Homo sapiens
  misc_RNA (1)...(19): siRNA sense strand
gcuucugcuucgucacuuu

SEQ ID NO: 1864694 - RNA, 19 nt, Homo sapiens
  misc_RNA (1)...(19): siRNA sense strand
gacaaccucaucuacuaug

SEQ ID NO: 1864695 - RNA, 19 nt, Homo sapiens
  misc_RNA (1)...(19): siRNA sense strand
caugaguucucggcacuuc

SEQ ID NO: 1864696 - RNA, 19 nt, Homo sapiens
  misc_RNA (1)...(19): siRNA sense strand
ugaagagguucgagaucuc

SEQ ID NO: 1864697 - RNA, 19 nt, Homo sapiens
  misc_RNA (1)...(19): siRNA sense strand
gcaggcuccuugauguuuu

SEQ ID NO: 1864698 - RNA, 19 nt, Homo sapiens
  misc_RNA (1)...(19): siRNA sense strand
gcugggacaaccucaucua

SEQ ID NO: 1864699 - RNA, 19 nt, Homo sapiens
  misc_RNA (1)...(19): siRNA sense strand
agacucagaagaagagaug

SEQ ID NO: 1864700 - RNA, 19 nt, Homo sapiens
  misc_RNA (1)...(19): siRNA sense strand
ggcagagacucagaagaag

SEQ ID NO: 1864701 - RNA, 19 nt, Homo sapiens
  misc_RNA (1)...(19): siRNA sense strand
uagacccgcugggaaguga

SEQ ID NO: 1864702 - RNA, 19 nt, Homo sapiens
  misc_RNA (1)...(19): siRNA sense strand
ggcacuaauugaucaggau

SEQ ID NO: 1864703 - RNA, 19 nt, Homo sapiens
  misc_RNA (1)...(19): siRNA sense strand
ugacagaguuuggcaaccu

SEQ ID NO: 1864704 - RNA, 19 nt, Homo sapiens
  misc_RNA (1)...(19): siRNA sense strand
ggacgccauggaggaauuu

SEQ ID NO: 1864705 - RNA, 19 nt, Homo sapiens
  misc_RNA (1)...(19): siRNA sense strand
ucaguggucuguguuuuaa

SEQ ID NO: 1864706 - RNA, 19 nt, Homo sapiens
  misc_RNA (1)...(19): siRNA sense strand
ugacagcugcagcauuuca

SEQ ID NO: 1864707 - RNA, 19 nt, Homo sapiens
  misc_RNA (1)...(19): siRNA sense strand
caccagggccauccucaug

SEQ ID NO: 1864708 - RNA, 19 nt, Homo sapiens
  misc_RNA (1)...(19): siRNA sense strand
gcaaccuggcacuaauuga

SEQ ID NO: 1864709 - RNA, 19 nt, Homo sapiens
  misc_RNA (1)...(19): siRNA sense strand
cugcaccacuuccacuuca

SEQ ID NO: 1864710 - RNA, 19 nt, Homo sapiens
  misc_RNA (1)...(19): siRNA sense strand
gggcaauagagucacugua

SEQ ID NO: 1864711 - RNA, 19 nt, Homo sapiens
  misc_RNA (1)...(19): siRNA sense strand
gcagacgggcuccauugag

SEQ ID NO: 1864712 - RNA, 19 nt, Homo sapiens
  misc_RNA (1)...(19): siRNA sense strand
acaagacggugcgccuaug

SEQ ID NO: 1864713 - RNA, 19 nt, Homo sapiens
  misc_RNA (1)...(19): siRNA sense strand
gagaugcacuucagagaua

SEQ ID NO: 1864714 - RNA, 19 nt, Homo sapiens
  misc_RNA (1)...(19): siRNA sense strand
ccaaagauaugaauggaaa

SEQ ID NO: 1864715 - RNA, 19 nt, Homo sapiens
  misc_RNA (1)...(19): siRNA sense strand
caacaagacaugaugguua

SEQ ID NO: 1864716 - RNA, 19 nt, Homo sapiens
  misc_RNA (1)...(19): siRNA sense strand
caaguuauguggcaucuau

SEQ ID NO: 1864717 - RNA, 19 nt, Homo sapiens
  misc_RNA (1)...(19): siRNA sense strand
gagaaaugaucgcauguca

SEQ ID NO: 1864718 - RNA, 19 nt, Homo sapiens
  misc_RNA (1)...(19): siRNA sense strand
uaagaaugcugccaaagau

SEQ ID NO: 1864719 - RNA, 19 nt, Homo sapiens
  misc_RNA (1)...(19): siRNA sense strand
ggaugaaaguuauucuaga

SEQ ID NO: 1864720 - RNA, 19 nt, Homo sapiens
  misc_RNA (1)...(19): siRNA sense strand
caucgaaguucccgagaaa

SEQ ID NO: 1864721 - RNA, 19 nt, Homo sapiens
  misc_RNA (1)...(19): siRNA sense strand
ccaaugagaagaugcuuaa

SEQ ID NO: 1864722 - RNA, 19 nt, Homo sapiens
  misc_RNA (1)...(19): siRNA sense strand
guaauacacgagauagaua

SEQ ID NO: 1864723 - RNA, 19 nt, Homo sapiens
  misc_RNA (1)...(19): siRNA sense strand
ggaugaacauuccucuaga

SEQ ID NO: 1864724 - RNA, 19 nt, Homo sapiens
  misc_RNA (1)...(19): siRNA sense strand
gaugaaaguuauucuagag

SEQ ID NO: 1864725 - RNA, 19 nt, Homo sapiens
  misc_RNA (1)...(19): siRNA sense strand
ggaugaacauuccucuaga

SEQ ID NO: 1864726 - RNA, 19 nt, Homo sapiens
  misc_RNA (1)...(19): siRNA sense strand
gcaagaagcaauaguugga

SEQ ID NO: 1864727 - RNA, 19 nt, Homo sapiens
  misc_RNA (1)...(19): siRNA sense strand
gaaaugaucgcaugucaac

SEQ ID NO: 1864728 - RNA, 19 nt, Homo sapiens
  misc_RNA (1)...(19): siRNA sense strand
gcagaaguugggagaguua

SEQ ID NO: 1864729 - RNA, 19 nt, Homo sapiens
  misc_RNA (1)...(19): siRNA sense strand
gaaaguuauucuagaggau

SEQ ID NO: 1864730 - RNA, 19 nt, Homo sapiens
  misc_RNA (1)...(19): siRNA sense strand
gaacaucuaaguggaaguu

SEQ ID NO: 1864731 - RNA, 19 nt, Homo sapiens
  misc_RNA (1)...(19): siRNA sense strand
gaaaguuauucuagaggau

SEQ ID NO: 1864732 - RNA, 19 nt, Homo sapiens
  misc_RNA (1)...(19): siRNA sense strand
cauccaaguugccaagaaa

SEQ ID NO: 1864733 - RNA, 19 nt, Homo sapiens
  misc_RNA (1)...(19): siRNA sense strand
cgagauagauauggcagaa

SEQ ID NO: 1864734 - RNA, 19 nt, Homo sapiens
  misc_RNA (1)...(19): siRNA sense strand
caaagaagagagaauuaug

SEQ ID NO: 1864735 - RNA, 19 nt, Homo sapiens
  misc_RNA (1)...(19): siRNA sense strand
cagcaaauccagaggcuuu

SEQ ID NO: 1864736 - RNA, 19 nt, Homo sapiens
  misc_RNA (1)...(19): siRNA sense strand
cauccaaguucccgagaaa

SEQ ID NO: 1864737 - RNA, 19 nt, Homo sapiens
  misc_RNA (1)...(19): siRNA sense strand
ggccauggauaccgugauu

SEQ ID NO: 1864738 - RNA, 19 nt, Homo sapiens
  misc_RNA (1)...(19): siRNA sense strand
uccagaggcuuugcauuua

SEQ ID NO: 1864739 - RNA, 19 nt, Homo sapiens
  misc_RNA (1)...(19): siRNA sense strand
ccagaggcuuugcauuuau

SEQ ID NO: 1864740 - RNA, 19 nt, Homo sapiens
  misc_RNA (1)...(19): siRNA sense strand
gagacucgagcagauauua

SEQ ID NO: 1864741 - RNA, 19 nt, Homo sapiens
  misc_RNA (1)...(19): siRNA sense strand
cgucgaaguucccgagaaa

SEQ ID NO: 1864742 - RNA, 19 nt, Homo sapiens
  misc_RNA (1)...(19): siRNA sense strand
ggauauagaaaucaucgaa

SEQ ID NO: 1864743 - RNA, 19 nt, Homo sapiens
  misc_RNA (1)...(19): siRNA sense strand
gccaagaaacgagggauua

SEQ ID NO: 1864744 - RNA, 19 nt, Homo sapiens
  misc_RNA (1)...(19): siRNA sense strand
gcagagcgacaauaucuuc

SEQ ID NO: 1864745 - RNA, 19 nt, Homo sapiens
  misc_RNA (1)...(19): siRNA sense strand
guagagaucauucugaaca

SEQ ID NO: 1864746 - RNA, 19 nt, Homo sapiens
  misc_RNA (1)...(19): siRNA sense strand
ggucccaugucacaaagaa

SEQ ID NO: 1864747 - RNA, 19 nt, Homo sapiens
  misc_RNA (1)...(19): siRNA sense strand
ucacaaagaagagagaauu

SEQ ID NO: 1864748 - RNA, 19 nt, Homo sapiens
  misc_RNA (1)...(19): siRNA sense strand
ggauuaugcuccaccaucu

SEQ ID NO: 1864749 - RNA, 19 nt, Homo sapiens
  misc_RNA (1)...(19): siRNA sense strand
ggauuaugcuccaccaucu

SEQ ID NO: 1864750 - RNA, 19 nt, Homo sapiens
  misc_RNA (1)...(19): siRNA sense strand
cagaggcuuugcauuuauu

SEQ ID NO: 1864751 - RNA, 19 nt, Homo sapiens
  misc_RNA (1)...(19): siRNA sense strand
cgacaugaaaguuauucua

SEQ ID NO: 1864752 - RNA, 19 nt, Homo sapiens
  misc_RNA (1)...(19): siRNA sense strand
cuaagaaugcugccaaaga

SEQ ID NO: 1864753 - RNA, 19 nt, Homo sapiens
  misc_RNA (1)...(19): siRNA sense strand
ggaaguucuuauagagaug

SEQ ID NO: 1864754 - RNA, 19 nt, Homo sapiens
  misc_RNA (1)...(19): siRNA sense strand
auacagaaaucgucgaagu

SEQ ID NO: 1864755 - RNA, 19 nt, Homo sapiens
  misc_RNA (1)...(19): siRNA sense strand
aacaagacaugaugguuau

SEQ ID NO: 1864756 - RNA, 19 nt, Homo sapiens
  misc_RNA (1)...(19): siRNA sense strand
cacaaagaagagagaauua

SEQ ID NO: 1864757 - RNA, 19 nt, Homo sapiens
  misc_RNA (1)...(19): siRNA sense strand
caaggucccaugucacaaa

SEQ ID NO: 1864758 - RNA, 19 nt, Homo sapiens
  misc_RNA (1)...(19): siRNA sense strand
gaacaagccaagaaaccau

SEQ ID NO: 1864759 - RNA, 19 nt, Homo sapiens
  misc_RNA (1)...(19): siRNA sense strand
gaugaacauuccucuagag

SEQ ID NO: 1864760 - RNA, 19 nt, Homo sapiens
  misc_RNA (1)...(19): siRNA sense strand
gaugaacauuccucuagag

SEQ ID NO: 1864761 - RNA, 19 nt, Homo sapiens
  misc_RNA (1)...(19): siRNA sense strand
caugaaaguuauucuagag

SEQ ID NO: 1864762 - RNA, 19 nt, Homo sapiens
  misc_RNA (1)...(19): siRNA sense strand
ccacgcagagcgacaauau

SEQ ID NO: 1864763 - RNA, 19 nt, Homo sapiens
  misc_RNA (1)...(19): siRNA sense strand
aaaggagacucgagcagau

SEQ ID NO: 1864764 - RNA, 19 nt, Homo sapiens
  misc_RNA (1)...(19): siRNA sense strand
ggauuaugcuccaccacau

SEQ ID NO: 1864765 - RNA, 19 nt, Homo sapiens
  misc_RNA (1)...(19): siRNA sense strand
ggccaugcauaccgugauu

SEQ ID NO: 1864766 - RNA, 19 nt, Homo sapiens
  misc_RNA (1)...(19): siRNA sense strand
gaucgcaugucaacaagac

SEQ ID NO: 1864767 - RNA, 19 nt, Homo sapiens
  misc_RNA (1)...(19): siRNA sense strand
gaagggcaccuggaugaug

SEQ ID NO: 1864768 - RNA, 19 nt, Homo sapiens
  misc_RNA (1)...(19): siRNA sense strand
ccacgcauauaguaauaca

SEQ ID NO: 1864769 - RNA, 19 nt, Homo sapiens
  misc_RNA (1)...(19): siRNA sense strand
gggaugaacauuccucuag

SEQ ID NO: 1864770 - RNA, 19 nt, Homo sapiens
  misc_RNA (1)...(19): siRNA sense strand
gagaaaccaaugagaagau

SEQ ID NO: 1864771 - RNA, 19 nt, Homo sapiens
  misc_RNA (1)...(19): siRNA sense strand
gggaugaacauuccucuag

SEQ ID NO: 1864772 - RNA, 19 nt, Homo sapiens
  misc_RNA (1)...(19): siRNA sense strand
caacuaacgauggaaauca

SEQ ID NO: 1864773 - RNA, 19 nt, Homo sapiens
  misc_RNA (1)...(19): siRNA sense strand
gggacucauuccaguuaaa

SEQ ID NO: 1864774 - RNA, 19 nt, Homo sapiens
  misc_RNA (1)...(19): siRNA sense strand
aagagagaauuauggaguu

SEQ ID NO: 1864775 - RNA, 19 nt, Homo sapiens
  misc_RNA (1)...(19): siRNA sense strand
gcaccugccacgcauauag

SEQ ID NO: 1864776 - RNA, 19 nt, Homo sapiens
  misc_RNA (1)...(19): siRNA sense strand
ggcuaugcauaccgugaua

SEQ ID NO: 1864777 - RNA, 19 nt, Homo sapiens
  misc_RNA (1)...(19): siRNA sense strand
gaucauccuggcaagcuuu

SEQ ID NO: 1864778 - RNA, 19 nt, Homo sapiens
  misc_RNA (1)...(19): siRNA sense strand
ugguagagaucauucugaa

SEQ ID NO: 1864779 - RNA, 19 nt, Homo sapiens
  misc_RNA (1)...(19): siRNA sense strand
gacuaugcauaccgugauu

SEQ ID NO: 1864780 - RNA, 19 nt, Homo sapiens
  misc_RNA (1)...(19): siRNA sense strand
gacaugaaaguuauucuag

SEQ ID NO: 1864781 - RNA, 19 nt, Homo sapiens
  misc_RNA (1)...(19): siRNA sense strand
ccgagaaacuagggauuau

SEQ ID NO: 1864782 - RNA, 19 nt, Homo sapiens
  misc_RNA (1)...(19): siRNA sense strand
uaaagcaguauuugggaaa

SEQ ID NO: 1864783 - RNA, 19 nt, Homo sapiens
  misc_RNA (1)...(19): siRNA sense strand
agauagauauggcagaagu

SEQ ID NO: 1864784 - RNA, 19 nt, Homo sapiens
  misc_RNA (1)...(19): siRNA sense strand
gggaugaaaguuauucuag

SEQ ID NO: 1864785 - RNA, 19 nt, Homo sapiens
  misc_RNA (1)...(19): siRNA sense strand
aagccaaggucccauguca

SEQ ID NO: 1864786 - RNA, 19 nt, Homo sapiens
  misc_RNA (1)...(19): siRNA sense strand
uuauguggcaucuauagua

SEQ ID NO: 1864787 - RNA, 19 nt, Homo sapiens
  misc_RNA (1)...(19): siRNA sense strand
gugagcauguuugcagaaa

SEQ ID NO: 1864788 - RNA, 19 nt, Homo sapiens
  misc_RNA (1)...(19): siRNA sense strand
ugccacgcauauaguaaua

SEQ ID NO: 1864789 - RNA, 19 nt, Homo sapiens
  misc_RNA (1)...(19): siRNA sense strand
ccgagaaacuagggaguau

SEQ ID NO: 1864790 - RNA, 19 nt, Homo sapiens
  misc_RNA (1)...(19): siRNA sense strand
uaaaggaucgaaccagcaa

SEQ ID NO: 1864791 - RNA, 19 nt, Homo sapiens
  misc_RNA (1)...(19): siRNA sense strand
caugaugguuaugcaacua

SEQ ID NO: 1864792 - RNA, 19 nt, Homo sapiens
  misc_RNA (1)...(19): siRNA sense strand
ggagaccaccagcuucuuc

SEQ ID NO: 1864793 - RNA, 19 nt, Homo sapiens
  misc_RNA (1)...(19): siRNA sense strand
uggaaguucuuauagagau

SEQ ID NO: 1864794 - RNA, 19 nt, Homo sapiens
  misc_RNA (1)...(19): siRNA sense strand
gauuauggucauucuaguu

SEQ ID NO: 1864795 - RNA, 19 nt, Homo sapiens
  misc_RNA (1)...(19): siRNA sense strand
ggaagucugagaucugcaa

SEQ ID NO: 1864796 - RNA, 19 nt, Homo sapiens
  misc_RNA (1)...(19): siRNA sense strand
ggauacagaaaucgucgaa

SEQ ID NO: 1864797 - RNA, 19 nt, Homo sapiens
  misc_RNA (1)...(19): siRNA sense strand
ggcagaaguugggagaguu

SEQ ID NO: 1864798 - RNA, 19 nt, Homo sapiens
  misc_RNA (1)...(19): siRNA sense strand
gagaaacuagggauuaugc

SEQ ID NO: 1864799 - RNA, 19 nt, Homo sapiens
  misc_RNA (1)...(19): siRNA sense strand
ucuagaggauacagaaauc

SEQ ID NO: 1864800 - RNA, 19 nt, Homo sapiens
  misc_RNA (1)...(19): siRNA sense strand
gcuguggcaagaagcaaua

SEQ ID NO: 1864801 - RNA, 19 nt, Homo sapiens
  misc_RNA (1)...(19): siRNA sense strand
uauguggcaucuauaguag

SEQ ID NO: 1864802 - RNA, 19 nt, Homo sapiens
  misc_RNA (1)...(19): siRNA sense strand
aaguggaaguucuuauaga

SEQ ID NO: 1864803 - RNA, 19 nt, Homo sapiens
  misc_RNA (1)...(19): siRNA sense strand
gaucauucugaacaucuaa

SEQ ID NO: 1864804 - RNA, 19 nt, Homo sapiens
  misc_RNA (1)...(19): siRNA sense strand
gugaggcccuugguagaga

SEQ ID NO: 1864805 - RNA, 19 nt, Homo sapiens
  misc_RNA (1)...(19): siRNA sense strand
cgagaaaccagggauuaug

SEQ ID NO: 1864806 - RNA, 19 nt, Homo sapiens
  misc_RNA (1)...(19): siRNA sense strand
ucaauagagaaaccaauga

SEQ ID NO: 1864807 - RNA, 19 nt, Homo sapiens
  misc_RNA (1)...(19): siRNA sense strand
auagaaaucauccaaguuc

SEQ ID NO: 1864808 - RNA, 19 nt, Homo sapiens
  misc_RNA (1)...(19): siRNA sense strand
ccauggauaccgugauuau

SEQ ID NO: 1864809 - RNA, 19 nt, Homo sapiens
  misc_RNA (1)...(19): siRNA sense strand
caagaaacgagggauuaug

SEQ ID NO: 1864810 - RNA, 19 nt, Homo sapiens
  misc_RNA (1)...(19): siRNA sense strand
caucuagaggcuaugcaua

SEQ ID NO: 1864811 - RNA, 19 nt, Homo sapiens
  misc_RNA (1)...(19): siRNA sense strand
ggccucggaugucuuaugg

SEQ ID NO: 1864812 - RNA, 19 nt, Homo sapiens
  misc_RNA (1)...(19): siRNA sense strand
auagagaaaccaaugagaa

SEQ ID NO: 1864813 - RNA, 19 nt, Homo sapiens
  misc_RNA (1)...(19): siRNA sense strand
ugaaagggcuguuguaaua

SEQ ID NO: 1864814 - RNA, 19 nt, Homo sapiens
  misc_RNA (1)...(19): siRNA sense strand
gaaaggcauuguugaauuu

SEQ ID NO: 1864815 - RNA, 19 nt, Homo sapiens
  misc_RNA (1)...(19): siRNA sense strand
ggaaaggcauuguugaauu

SEQ ID NO: 1864816 - RNA, 19 nt, Homo sapiens
  misc_RNA (1)...(19): siRNA sense strand
gaagaagccuuuagccaau

SEQ ID NO: 1864817 - RNA, 19 nt, Homo sapiens
  misc_RNA (1)...(19): siRNA sense strand
gcagaaacguaaagaaaug

SEQ ID NO: 1864818 - RNA, 19 nt, Homo sapiens
  misc_RNA (1)...(19): siRNA sense strand
gaacaucaggcaaaucuuu

SEQ ID NO: 1864819 - RNA, 19 nt, Homo sapiens
  misc_RNA (1)...(19): siRNA sense strand
gaagugacaugcguacuga

SEQ ID NO: 1864820 - RNA, 19 nt, Homo sapiens
  misc_RNA (1)...(19): siRNA sense strand
gaggaggccuggagagaaa

SEQ ID NO: 1864821 - RNA, 19 nt, Homo sapiens
  misc_RNA (1)...(19): siRNA sense strand
ggcaaaggauucggauuua

SEQ ID NO: 1864822 - RNA, 19 nt, Homo sapiens
  misc_RNA (1)...(19): siRNA sense strand
guaaagaaaugcaauugag

SEQ ID NO: 1864823 - RNA, 19 nt, Homo sapiens
  misc_RNA (1)...(19): siRNA sense strand
gaacaaaugaggcgccaaa

SEQ ID NO: 1864824 - RNA, 19 nt, Homo sapiens
  misc_RNA (1)...(19): siRNA sense strand
gaacuucacaaucaagaaa

SEQ ID NO: 1864825 - RNA, 19 nt, Homo sapiens
  misc_RNA (1)...(19): siRNA sense strand
gaaucuaccugcugauauc

SEQ ID NO: 1864826 - RNA, 19 nt, Homo sapiens
  misc_RNA (1)...(19): siRNA sense strand
guacgaaggcccaaacaaa

SEQ ID NO: 1864827 - RNA, 19 nt, Homo sapiens
  misc_RNA (1)...(19): siRNA sense strand
gagacgacaggaagaauua

SEQ ID NO: 1864828 - RNA, 19 nt, Homo sapiens
  misc_RNA (1)...(19): siRNA sense strand
caccuuauguuuccaauga

SEQ ID NO: 1864829 - RNA, 19 nt, Homo sapiens
  misc_RNA (1)...(19): siRNA sense strand
gaagaugccuaucaugaac

SEQ ID NO: 1864830 - RNA, 19 nt, Homo sapiens
  misc_RNA (1)...(19): siRNA sense strand
caacaaaggcaaaggauuc

SEQ ID NO: 1864831 - RNA, 19 nt, Homo sapiens
  misc_RNA (1)...(19): siRNA sense strand
ccagaagaauccaauguau

SEQ ID NO: 1864832 - RNA, 19 nt, Homo sapiens
  misc_RNA (1)...(19): siRNA sense strand
ggaaccacuugaacaacua

SEQ ID NO: 1864833 - RNA, 19 nt, Homo sapiens
  misc_RNA (1)...(19): siRNA sense strand
gcaaaggauucggauuuau

SEQ ID NO: 1864834 - RNA, 19 nt, Homo sapiens
  misc_RNA (1)...(19): siRNA sense strand
ggaagucuuuggaugaaau

SEQ ID NO: 1864835 - RNA, 19 nt, Homo sapiens
  misc_RNA (1)...(19): siRNA sense strand
gcaaagggaacaaguugaa

SEQ ID NO: 1864836 - RNA, 19 nt, Homo sapiens
  misc_RNA (1)...(19): siRNA sense strand
ggaagaugccuaucaugaa

SEQ ID NO: 1864837 - RNA, 19 nt, Homo sapiens
  misc_RNA (1)...(19): siRNA sense strand
gcaugggccucaaucagaa

SEQ ID NO: 1864838 - RNA, 19 nt, Homo sapiens
  misc_RNA (1)...(19): siRNA sense strand
caagaaaugcagaaacgua

SEQ ID NO: 1864839 - RNA, 19 nt, Homo sapiens
  misc_RNA (1)...(19): siRNA sense strand
caaaggauucggauuuauu

SEQ ID NO: 1864840 - RNA, 19 nt, Homo sapiens
  misc_RNA (1)...(19): siRNA sense strand
gaaagagacaugcgaaugg

SEQ ID NO: 1864841 - RNA, 19 nt, Homo sapiens
  misc_RNA (1)...(19): siRNA sense strand
acaacuagaugaugaagau

SEQ ID NO: 1864842 - RNA, 19 nt, Homo sapiens
  misc_RNA (1)...(19): siRNA sense strand
ccagaaauuuccaccucua

SEQ ID NO: 1864843 - RNA, 19 nt, Homo sapiens
  misc_RNA (1)...(19): siRNA sense strand
gauggaagucuuuggauga

SEQ ID NO: 1864844 - RNA, 19 nt, Homo sapiens
  misc_RNA (1)...(19): siRNA sense strand
ggaaagagacaugcgaaug

SEQ ID NO: 1864845 - RNA, 19 nt, Homo sapiens
  misc_RNA (1)...(19): siRNA sense strand
cgaugucgguuguuuguug

SEQ ID NO: 1864846 - RNA, 19 nt, Homo sapiens
  misc_RNA (1)...(19): siRNA sense strand
gaaauuuccaccucuagga

SEQ ID NO: 1864847 - RNA, 19 nt, Homo sapiens
  misc_RNA (1)...(19): siRNA sense strand
uggaagaucuacagggaaa

SEQ ID NO: 1864848 - RNA, 19 nt, Homo sapiens
  misc_RNA (1)...(19): siRNA sense strand
gaagagaggaagagaugau

SEQ ID NO: 1864849 - RNA, 19 nt, Homo sapiens
  misc_RNA (1)...(19): siRNA sense strand
gcacguuugaguacgaaua

SEQ ID NO: 1864850 - RNA, 19 nt, Homo sapiens
  misc_RNA (1)...(19): siRNA sense strand
caaaugaggcgccaaagag

SEQ ID NO: 1864851 - RNA, 19 nt, Homo sapiens
  misc_RNA (1)...(19): siRNA sense strand
uucguaaucuuucaccuua

SEQ ID NO: 1864852 - RNA, 19 nt, Homo sapiens
  misc_RNA (1)...(19): siRNA sense strand
gccaaagagaggaaaguua

SEQ ID NO: 1864853 - RNA, 19 nt, Homo sapiens
  misc_RNA (1)...(19): siRNA sense strand
caaauuggaaagugaaaug

SEQ ID NO: 1864854 - RNA, 19 nt, Homo sapiens
  misc_RNA (1)...(19): siRNA sense strand
gcuugaaucuagagcuuug

SEQ ID NO: 1864855 - RNA, 19 nt, Homo sapiens
  misc_RNA (1)...(19): siRNA sense strand
agaagaauccaauguauca

SEQ ID NO: 1864856 - RNA, 19 nt, Homo sapiens
  misc_RNA (1)...(19): siRNA sense strand
caugagagguagacagcuu

SEQ ID NO: 1864857 - RNA, 19 nt, Homo sapiens
  misc_RNA (1)...(19): siRNA sense strand
acacagcgaugucgguugu

SEQ ID NO: 1864858 - RNA, 19 nt, Homo sapiens
  misc_RNA (1)...(19): siRNA sense strand
gaaaguuacagccgaaugg

SEQ ID NO: 1864859 - RNA, 19 nt, Homo sapiens
  misc_RNA (1)...(19): siRNA sense strand
cagugaagguguuuucuua

SEQ ID NO: 1864860 - RNA, 19 nt, Homo sapiens
  misc_RNA (1)...(19): siRNA sense strand
cacggaggaugaauucaaa

SEQ ID NO: 1864861 - RNA, 19 nt, Homo sapiens
  misc_RNA (1)...(19): siRNA sense strand
ggaaucuaccugcugauau

SEQ ID NO: 1864862 - RNA, 19 nt, Homo sapiens
  misc_RNA (1)...(19): siRNA sense strand
gaagguguuuucuuacuga

SEQ ID NO: 1864863 - RNA, 19 nt, Homo sapiens
  misc_RNA (1)...(19): siRNA sense strand
gaggaggaacgacguagaa

SEQ ID NO: 1864864 - RNA, 19 nt, Homo sapiens
  misc_RNA (1)...(19): siRNA sense strand
gcgccaagaucugaugaga

SEQ ID NO: 1864865 - RNA, 19 nt, Homo sapiens
  misc_RNA (1)...(19): siRNA sense strand
aaagacaaauuggaaagug

SEQ ID NO: 1864866 - RNA, 19 nt, Homo sapiens
  misc_RNA (1)...(19): siRNA sense strand
uugaacaacuagaugauga

SEQ ID NO: 1864867 - RNA, 19 nt, Homo sapiens
  misc_RNA (1)...(19): siRNA sense strand
gggaaucuaccugcugaua

SEQ ID NO: 1864868 - RNA, 19 nt, Homo sapiens
  misc_RNA (1)...(19): siRNA sense strand
gauacacccaugagaggua

SEQ ID NO: 1864869 - RNA, 19 nt, Homo sapiens
  misc_RNA (1)...(19): siRNA sense strand
gagauggaagaacaaauga

SEQ ID NO: 1864870 - RNA, 19 nt, Homo sapiens
  misc_RNA (1)...(19): siRNA sense strand
ggaagugacaugcguacug

SEQ ID NO: 1864871 - RNA, 19 nt, Homo sapiens
  misc_RNA (1)...(19): siRNA sense strand
gccaauuugucucucuuga

SEQ ID NO: 1864872 - RNA, 19 nt, Homo sapiens
  misc_RNA (1)...(19): siRNA sense strand
guagagggagagaagagua

SEQ ID NO: 1864873 - RNA, 19 nt, Homo sapiens
  misc_RNA (1)...(19): siRNA sense strand
gcaaugaacaugggagauc

SEQ ID NO: 1864874 - RNA, 19 nt, Homo sapiens
  misc_RNA (1)...(19): siRNA sense strand
ggaggaacgacguagaaga

SEQ ID NO: 1864875 - RNA, 19 nt, Homo sapiens
  misc_RNA (1)...(19): siRNA sense strand
gaaaugcagaaacguaaag

SEQ ID NO: 1864876 - RNA, 19 nt, Homo sapiens
  misc_RNA (1)...(19): siRNA sense strand
gaaagugaaauggaagaug

SEQ ID NO: 1864877 - RNA, 19 nt, Homo sapiens
  misc_RNA (1)...(19): siRNA sense strand
cagcaaagggaacaaguug

SEQ ID NO: 1864878 - RNA, 19 nt, Homo sapiens
  misc_RNA (1)...(19): siRNA sense strand
ggagaaccaggagaaguuu

SEQ ID NO: 1864879 - RNA, 19 nt, Homo sapiens
  misc_RNA (1)...(19): siRNA sense strand
cguaaucuuucaccuuaug

SEQ ID NO: 1864880 - RNA, 19 nt, Homo sapiens
  misc_RNA (1)...(19): siRNA sense strand
ccaaagagaggaaaguuac

SEQ ID NO: 1864881 - RNA, 19 nt, Homo sapiens
  misc_RNA (1)...(19): siRNA sense strand
ugagauggaagaacaaaug

SEQ ID NO: 1864882 - RNA, 19 nt, Homo sapiens
  misc_RNA (1)...(19): siRNA sense strand
uagaagagaggaagagaug

SEQ ID NO: 1864883 - RNA, 19 nt, Homo sapiens
  misc_RNA (1)...(19): siRNA sense strand
ggauucggauuuauuaagc

SEQ ID NO: 1864884 - RNA, 19 nt, Homo sapiens
  misc_RNA (1)...(19): siRNA sense strand
uggaagaugccuaucauga

SEQ ID NO: 1864885 - RNA, 19 nt, Homo sapiens
  misc_RNA (1)...(19): siRNA sense strand
ugaaauggaagaugccuau

SEQ ID NO: 1864886 - RNA, 19 nt, Homo sapiens
  misc_RNA (1)...(19): siRNA sense strand
aagacaaauuggaaaguga

SEQ ID NO: 1864887 - RNA, 19 nt, Homo sapiens
  misc_RNA (1)...(19): siRNA sense strand
aggcaaaggauucggauuu

SEQ ID NO: 1864888 - RNA, 19 nt, Homo sapiens
  misc_RNA (1)...(19): siRNA sense strand
gcaagaaaggcauuugaac

SEQ ID NO: 1864889 - RNA, 19 nt, Homo sapiens
  misc_RNA (1)...(19): siRNA sense strand
ggcaugggccucaaucaga

SEQ ID NO: 1864890 - RNA, 19 nt, Homo sapiens
  misc_RNA (1)...(19): siRNA sense strand
agaagccuuuagccaauuu

SEQ ID NO: 1864891 - RNA, 19 nt, Homo sapiens
  misc_RNA (1)...(19): siRNA sense strand
aaagggcuguuguaauagu

SEQ ID NO: 1864892 - RNA, 19 nt, Homo sapiens
  misc_RNA (1)...(19): siRNA sense strand
ggaaaguuacagccgaaug

SEQ ID NO: 1864893 - RNA, 19 nt, Homo sapiens
  misc_RNA (1)...(19): siRNA sense strand
gaugaugauucgucaacgu

SEQ ID NO: 1864894 - RNA, 19 nt, Homo sapiens
  misc_RNA (1)...(19): siRNA sense strand
gaggaacgacguagaagag

SEQ ID NO: 1864895 - RNA, 19 nt, Homo sapiens
  misc_RNA (1)...(19): siRNA sense strand
aagaaaugcagaaacguaa

SEQ ID NO: 1864896 - RNA, 19 nt, Homo sapiens
  misc_RNA (1)...(19): siRNA sense strand
gggaaaggcauuguugaau

SEQ ID NO: 1864897 - RNA, 19 nt, Homo sapiens
  misc_RNA (1)...(19): siRNA sense strand
ucacggaggaugaauucaa

SEQ ID NO: 1864898 - RNA, 19 nt, Homo sapiens
  misc_RNA (1)...(19): siRNA sense strand
aggaagagaugaugauucg

SEQ ID NO: 1864899 - RNA, 19 nt, Homo sapiens
  misc_RNA (1)...(19): siRNA sense strand
gaggaagagaugaugauuc

SEQ ID NO: 1864900 - RNA, 19 nt, Homo sapiens
  misc_RNA (1)...(19): siRNA sense strand
gaugagacgacaggaagaa

SEQ ID NO: 1864901 - RNA, 19 nt, Homo sapiens
  misc_RNA (1)...(19): siRNA sense strand
cagcaagaaaggcauuuga

SEQ ID NO: 1864902 - RNA, 19 nt, Homo sapiens
  misc_RNA (1)...(19): siRNA sense strand
cuagagcuuuggcugaaau

SEQ ID NO: 1864903 - RNA, 19 nt, Homo sapiens
  misc_RNA (1)...(19): siRNA sense strand
guucaggaggccagaaauu

SEQ ID NO: 1864904 - RNA, 19 nt, Homo sapiens
  misc_RNA (1)...(19): siRNA sense strand
gagaggaagagaugaugau

SEQ ID NO: 1864905 - RNA, 19 nt, Homo sapiens
  misc_RNA (1)...(19): siRNA sense strand
caagaggaggaacgacgua

SEQ ID NO: 1864906 - RNA, 19 nt, Homo sapiens
  misc_RNA (1)...(19): siRNA sense strand
gaaagaugcaaaagacaaa

SEQ ID NO: 1864907 - RNA, 19 nt, Homo sapiens
  misc_RNA (1)...(19): siRNA sense strand
gaaagggcuguuguaauag

SEQ ID NO: 1864908 - RNA, 19 nt, Homo sapiens
  misc_RNA (1)...(19): siRNA sense strand
aagccgaacuggaugauac

SEQ ID NO: 1864909 - RNA, 19 nt, Homo sapiens
  misc_RNA (1)...(19): siRNA sense strand
acagcgaugucgguuguuu

SEQ ID NO: 1864910 - RNA, 19 nt, Homo sapiens
  misc_RNA (1)...(19): siRNA sense strand
cguaaagaaaugcaauuga

SEQ ID NO: 1864911 - RNA, 19 nt, Homo sapiens
  misc_RNA (1)...(19): siRNA sense strand
caaagggaacaaguugaaa

SEQ ID NO: 1864912 - RNA, 19 nt, Homo sapiens
  misc_RNA (1)...(19): siRNA sense strand
ucucagcgauggaagucuu

SEQ ID NO: 1864913 - RNA, 19 nt, Homo sapiens
  misc_RNA (1)...(19): siRNA sense strand
gauaagcgcucgugguuca

SEQ ID NO: 1864914 - RNA, 19 nt, Homo sapiens
  misc_RNA (1)...(19): siRNA sense strand
ucagugaccucucccgaua

SEQ ID NO: 1864915 - RNA, 19 nt, Homo sapiens
  misc_RNA (1)...(19): siRNA sense strand
caaggacaguggcuucuuu

SEQ ID NO: 1864916 - RNA, 19 nt, Homo sapiens
  misc_RNA (1)...(19): siRNA sense strand
ggagaaagaggaagaagga

SEQ ID NO: 1864917 - RNA, 19 nt, Homo sapiens
  misc_RNA (1)...(19): siRNA sense strand
gaagaucccugaagaugcu

SEQ ID NO: 1864918 - RNA, 19 nt, Homo sapiens
  misc_RNA (1)...(19): siRNA sense strand
gcaggaagaagaagaagaa

SEQ ID NO: 1864919 - RNA, 19 nt, Homo sapiens
  misc_RNA (1)...(19): siRNA sense strand
gaaagaggaagaaggagaa

SEQ ID NO: 1864920 - RNA, 19 nt, Homo sapiens
  misc_RNA (1)...(19): siRNA sense strand
gcacagccaucccaacgau

SEQ ID NO: 1864921 - RNA, 19 nt, Homo sapiens
  misc_RNA (1)...(19): siRNA sense strand
ggaagaugcugaaccaaac

SEQ ID NO: 1864922 - RNA, 19 nt, Homo sapiens
  misc_RNA (1)...(19): siRNA sense strand
ccaucgagcuccagcauga

SEQ ID NO: 1864923 - RNA, 19 nt, Homo sapiens
  misc_RNA (1)...(19): siRNA sense strand
gcucgggaccuucuucaua

SEQ ID NO: 1864924 - RNA, 19 nt, Homo sapiens
  misc_RNA (1)...(19): siRNA sense strand
cugacaagcuguuucauga

SEQ ID NO: 1864925 - RNA, 19 nt, Homo sapiens
  misc_RNA (1)...(19): siRNA sense strand
gagaagaucccugaagaug

SEQ ID NO: 1864926 - RNA, 19 nt, Homo sapiens
  misc_RNA (1)...(19): siRNA sense strand
ggaggaggacgaugacuug

SEQ ID NO: 1864927 - RNA, 19 nt, Homo sapiens
  misc_RNA (1)...(19): siRNA sense strand
ucacgucccugucugguau

SEQ ID NO: 1864928 - RNA, 19 nt, Homo sapiens
  misc_RNA (1)...(19): siRNA sense strand
ugaugguccugguggauua

SEQ ID NO: 1864929 - RNA, 19 nt, Homo sapiens
  misc_RNA (1)...(19): siRNA sense strand
ggaggaagaggaaggagaa

SEQ ID NO: 1864930 - RNA, 19 nt, Homo sapiens
  misc_RNA (1)...(19): siRNA sense strand
uuucucaucucacucauuu

SEQ ID NO: 1864931 - RNA, 19 nt, Homo sapiens
  misc_RNA (1)...(19): siRNA sense strand
cuacguacccugcuacuga

SEQ ID NO: 1864932 - RNA, 19 nt, Homo sapiens
  misc_RNA (1)...(19): siRNA sense strand
ggaagaggaggaagaggaa

SEQ ID NO: 1864933 - RNA, 19 nt, Homo sapiens
  misc_RNA (1)...(19): siRNA sense strand
uggagaagaucccugaaga

SEQ ID NO: 1864934 - RNA, 19 nt, Homo sapiens
  misc_RNA (1)...(19): siRNA sense strand
gccugaagcugcuggagaa

SEQ ID NO: 1864935 - RNA, 19 nt, Homo sapiens
  misc_RNA (1)...(19): siRNA sense strand
gagcgggacuuugaguuuc

SEQ ID NO: 1864936 - RNA, 19 nt, Homo sapiens
  misc_RNA (1)...(19): siRNA sense strand
gaaggcaaaguucuccauu

SEQ ID NO: 1864937 - RNA, 19 nt, Homo sapiens
  misc_RNA (1)...(19): siRNA sense strand
ggaagaggaaggagaaucu

SEQ ID NO: 1864938 - RNA, 19 nt, Homo sapiens
  misc_RNA (1)...(19): siRNA sense strand
gaucuuugccuuucucauc

SEQ ID NO: 1864939 - RNA, 19 nt, Homo sapiens
  misc_RNA (1)...(19): siRNA sense strand
caggagaucuuugccuuuc

SEQ ID NO: 1864940 - RNA, 19 nt, Homo sapiens
  misc_RNA (1)...(19): siRNA sense strand
ccgcugugcucuucaucua

SEQ ID NO: 1864941 - RNA, 19 nt, Homo sapiens
  misc_RNA (1)...(19): siRNA sense strand
acacagaucacggcgcuua

SEQ ID NO: 1864942 - RNA, 19 nt, Homo sapiens
  misc_RNA (1)...(19): siRNA sense strand
ucuacaagcucuacaaggu

SEQ ID NO: 1864943 - RNA, 19 nt, Homo sapiens
  misc_RNA (1)...(19): siRNA sense strand
cccauuggcugugcucuuu

SEQ ID NO: 1864944 - RNA, 19 nt, Homo sapiens
  misc_RNA (1)...(19): siRNA sense strand
ucuacaagguguucacaga

SEQ ID NO: 1864945 - RNA, 19 nt, Homo sapiens
  misc_RNA (1)...(19): siRNA sense strand
ugaagcugcuggagaagau

SEQ ID NO: 1864946 - RNA, 19 nt, Homo sapiens
  misc_RNA (1)...(19): siRNA sense strand
agcgagagcugcuuaggaa

SEQ ID NO: 1864947 - RNA, 19 nt, Homo sapiens
  misc_RNA (1)...(19): siRNA sense strand
ggccgcugcuuguguuuga

SEQ ID NO: 1864948 - RNA, 19 nt, Homo sapiens
  misc_RNA (1)...(19): siRNA sense strand
ccgaggaaccagcccaaua

SEQ ID NO: 1864949 - RNA, 19 nt, Homo sapiens
  misc_RNA (1)...(19): siRNA sense strand
gcgcuggacucggaagaug

SEQ ID NO: 1864950 - RNA, 19 nt, Homo sapiens
  misc_RNA (1)...(19): siRNA sense strand
ggagaagaucccugaagau

SEQ ID NO: 1864951 - RNA, 19 nt, Homo sapiens
  misc_RNA (1)...(19): siRNA sense strand
gccaggaugaguacaauga

SEQ ID NO: 1864952 - RNA, 19 nt, Homo sapiens
  misc_RNA (1)...(19): siRNA sense strand
cgagcgggacuuugaguuu

SEQ ID NO: 1864953 - RNA, 19 nt, Homo sapiens
  misc_RNA (1)...(19): siRNA sense strand
cggaagaugcugaaccaaa

SEQ ID NO: 1864954 - RNA, 19 nt, Homo sapiens
  misc_RNA (1)...(19): siRNA sense strand
guuccuggauggcagcauu

SEQ ID NO: 1864955 - RNA, 19 nt, Homo sapiens
  misc_RNA (1)...(19): siRNA sense strand
aaggcaaaguucuccauug

SEQ ID NO: 1864956 - RNA, 19 nt, Homo sapiens
  misc_RNA (1)...(19): siRNA sense strand
gagcugcacaugccagugu

SEQ ID NO: 1864957 - RNA, 19 nt, Homo sapiens
  misc_RNA (1)...(19): siRNA sense strand
gcucaagggcuccgguuuc

SEQ ID NO: 1864958 - RNA, 19 nt, Homo sapiens
  misc_RNA (1)...(19): siRNA sense strand
ccgauaagcgcucgugguu

SEQ ID NO: 1864959 - RNA, 19 nt, Homo sapiens
  misc_RNA (1)...(19): siRNA sense strand
uaagugccaucagcgaguu

SEQ ID NO: 1864960 - RNA, 19 nt, Homo sapiens
  misc_RNA (1)...(19): siRNA sense strand
gcccaucggccaguuauga

SEQ ID NO: 1864961 - RNA, 19 nt, Homo sapiens
  misc_RNA (1)...(19): siRNA sense strand
aggcaaaguucuccauugg

SEQ ID NO: 1864962 - RNA, 19 nt, Homo sapiens
  misc_RNA (1)...(19): siRNA sense strand
ggacucggaagaugcugaa

SEQ ID NO: 1864963 - RNA, 19 nt, Homo sapiens
  misc_RNA (1)...(19): siRNA sense strand
cugcagaccuggacgacau

SEQ ID NO: 1864964 - RNA, 19 nt, Homo sapiens
  misc_RNA (1)...(19): siRNA sense strand
guggagaccaugauugugu

SEQ ID NO: 1864965 - RNA, 19 nt, Homo sapiens
  misc_RNA (1)...(19): siRNA sense strand
cggcaagaccuccuaagug

SEQ ID NO: 1864966 - RNA, 19 nt, Homo sapiens
  misc_RNA (1)...(19): siRNA sense strand
cggacgggcucgguauuug

SEQ ID NO: 1864967 - RNA, 19 nt, Homo sapiens
  misc_RNA (1)...(19): siRNA sense strand
cgaugaggauggccaggau

SEQ ID NO: 1864968 - RNA, 19 nt, Homo sapiens
  misc_RNA (1)...(19): siRNA sense strand
cgaggaaccagcccaauac

SEQ ID NO: 1864969 - RNA, 19 nt, Homo sapiens
  misc_RNA (1)...(19): siRNA sense strand
ggagcccaucggccaguua

SEQ ID NO: 1864970 - RNA, 19 nt, Homo sapiens
  misc_RNA (1)...(19): siRNA sense strand
cggcacaccaggagaaaga

SEQ ID NO: 1864971 - RNA, 19 nt, Homo sapiens
  misc_RNA (1)...(19): siRNA sense strand
gcugugcucuucaucuacu

SEQ ID NO: 1864972 - RNA, 19 nt, Homo sapiens
  misc_RNA (1)...(19): siRNA sense strand
uggacgacaugaagaguca

SEQ ID NO: 1864973 - RNA, 19 nt, Homo sapiens
  misc_RNA (1)...(19): siRNA sense strand
ggagggcugcugucaccaa

SEQ ID NO: 1864974 - RNA, 19 nt, Homo sapiens
  misc_RNA (1)...(19): siRNA sense strand
ucuuugggaucuuccugua

SEQ ID NO: 1864975 - RNA, 19 nt, Homo sapiens
  misc_RNA (1)...(19): siRNA sense strand
acagcgagcgggacuuuga

SEQ ID NO: 1864976 - RNA, 19 nt, Homo sapiens
  misc_RNA (1)...(19): siRNA sense strand
gcggacgggcucgguauuu

SEQ ID NO: 1864977 - RNA, 19 nt, Homo sapiens
  misc_RNA (1)...(19): siRNA sense strand
uugccacccuuaugucuga

SEQ ID NO: 1864978 - RNA, 19 nt, Homo sapiens
  misc_RNA (1)...(19): siRNA sense strand
cauuggaagugacgaggau

SEQ ID NO: 1864979 - RNA, 19 nt, Homo sapiens
  misc_RNA (1)...(19): siRNA sense strand
caucgcgccuggugacaag

SEQ ID NO: 1864980 - RNA, 19 nt, Homo sapiens
  misc_RNA (1)...(19): siRNA sense strand
cuacagcgagcgggacuuu

SEQ ID NO: 1864981 - RNA, 19 nt, Homo sapiens
  misc_RNA (1)...(19): siRNA sense strand
ccaggagaucuuugccuuu

SEQ ID NO: 1864982 - RNA, 19 nt, Homo sapiens
  misc_RNA (1)...(19): siRNA sense strand
gcugugcucuuugggaucu

SEQ ID NO: 1864983 - RNA, 19 nt, Homo sapiens
  misc_RNA (1)...(19): siRNA sense strand
cuacgagaccuucuacaag

SEQ ID NO: 1864984 - RNA, 19 nt, Homo sapiens
  misc_RNA (1)...(19): siRNA sense strand
cagcaggugcccacagaug

SEQ ID NO: 1864985 - RNA, 19 nt, Homo sapiens
  misc_RNA (1)...(19): siRNA sense strand
ugccuaccauggcugauga

SEQ ID NO: 1864986 - RNA, 19 nt, Homo sapiens
  misc_RNA (1)...(19): siRNA sense strand
uacguacccugcuacugaa

SEQ ID NO: 1864987 - RNA, 19 nt, Homo sapiens
  misc_RNA (1)...(19): siRNA sense strand
cguccuacguacccugcua

SEQ ID NO: 1864988 - RNA, 19 nt, Homo sapiens
  misc_RNA (1)...(19): siRNA sense strand
gagcccaucggccaguuau

SEQ ID NO: 1864989 - RNA, 19 nt, Homo sapiens
  misc_RNA (1)...(19): siRNA sense strand
ggaggaagaggaggaagag

SEQ ID NO: 1864990 - RNA, 19 nt, Homo sapiens
  misc_RNA (1)...(19): siRNA sense strand
ccacaccagcacugacuau

SEQ ID NO: 1864991 - RNA, 19 nt, Homo sapiens
  misc_RNA (1)...(19): siRNA sense strand
cuggauggcagcauuguga

SEQ ID NO: 1864992 - RNA, 19 nt, Homo sapiens
  misc_RNA (1)...(19): siRNA sense strand
guacaaugagcugcacaug

SEQ ID NO: 1864993 - RNA, 19 nt, Homo sapiens
  misc_RNA (1)...(19): siRNA sense strand
uggaggaggaggacgauga

SEQ ID NO: 1864994 - RNA, 19 nt, Homo sapiens
  misc_RNA (1)...(19): siRNA sense strand
cucgggaccuucuucauag

SEQ ID NO: 1864995 - RNA, 19 nt, Homo sapiens
  misc_RNA (1)...(19): siRNA sense strand
ucuacgagaccuucuacaa

SEQ ID NO: 1864996 - RNA, 19 nt, Homo sapiens
  misc_RNA (1)...(19): siRNA sense strand
cgcuacaucucgccuuuca

SEQ ID NO: 1864997 - RNA, 19 nt, Homo sapiens
  misc_RNA (1)...(19): siRNA sense strand
gaagaggaaggagaaucug

SEQ ID NO: 1864998 - RNA, 19 nt, Homo sapiens
  misc_RNA (1)...(19): siRNA sense strand
ggacgggcucgguauuugg

SEQ ID NO: 1864999 - RNA, 19 nt, Homo sapiens
  misc_RNA (1)...(19): siRNA sense strand
gaccuggacgacaugaaga

SEQ ID NO: 1865000 - RNA, 19 nt, Homo sapiens
  misc_RNA (1)...(19): siRNA sense strand
gaagaugcugaaccaaacu

SEQ ID NO: 1865001 - RNA, 19 nt, Homo sapiens
  misc_RNA (1)...(19): siRNA sense strand
caucagcgaguuccuggau

SEQ ID NO: 1865002 - RNA, 19 nt, Homo sapiens
  misc_RNA (1)...(19): siRNA sense strand
gaggauggccaggaugagu

SEQ ID NO: 1865003 - RNA, 19 nt, Homo sapiens
  misc_RNA (1)...(19): siRNA sense strand
caccagcacugacuaucac

SEQ ID NO: 1865004 - RNA, 19 nt, Homo sapiens
  misc_RNA (1)...(19): siRNA sense strand
ccugagcagcccuauguga

SEQ ID NO: 1865005 - RNA, 19 nt, Homo sapiens
  misc_RNA (1)...(19): siRNA sense strand
uuugggaucuuccuguaca

SEQ ID NO: 1865006 - RNA, 19 nt, Homo sapiens
  misc_RNA (1)...(19): siRNA sense strand
ggucacuggugugcucauc

SEQ ID NO: 1865007 - RNA, 19 nt, Homo sapiens
  misc_RNA (1)...(19): siRNA sense strand
caaggcucgucgcaucauc

SEQ ID NO: 1865008 - RNA, 19 nt, Homo sapiens
  misc_RNA (1)...(19): siRNA sense strand
auacggcacugcucucacu

SEQ ID NO: 1865009 - RNA, 19 nt, Homo sapiens
  misc_RNA (1)...(19): siRNA sense strand
gcuugugguuggcuucucu

SEQ ID NO: 1865010 - RNA, 19 nt, Homo sapiens
  misc_RNA (1)...(19): siRNA sense strand
ccuacagggcucucaguga

SEQ ID NO: 1865011 - RNA, 19 nt, Homo sapiens
  misc_RNA (1)...(19): siRNA sense strand
ggaagugacgaggaugaca

SEQ ID NO: 1865012 - RNA, 19 nt, Homo sapiens
  misc_RNA (1)...(19): siRNA sense strand
ggaccuggaauaccucacu

SEQ ID NO: 1865013 - RNA, 19 nt, Homo sapiens
  misc_RNA (1)...(19): siRNA sense strand
caacgagagugcuauguga

SEQ ID NO: 1865014 - RNA, 19 nt, Homo sapiens
  misc_RNA (1)...(19): siRNA sense strand
ggaagauucuggagaugga

SEQ ID NO: 1865015 - RNA, 19 nt, Homo sapiens
  misc_RNA (1)...(19): siRNA sense strand
ucauggaccugaucagaaa

SEQ ID NO: 1865016 - RNA, 19 nt, Homo sapiens
  misc_RNA (1)...(19): siRNA sense strand
gaagacaucacgcucauca

SEQ ID NO: 1865017 - RNA, 19 nt, Homo sapiens
  misc_RNA (1)...(19): siRNA sense strand
ggucuucucuguggccuuu

SEQ ID NO: 1865018 - RNA, 19 nt, Homo sapiens
  misc_RNA (1)...(19): siRNA sense strand
gaccugaucagaaauaugu

SEQ ID NO: 1865019 - RNA, 19 nt, Homo sapiens
  misc_RNA (1)...(19): siRNA sense strand
ggucagaucacaaccauca

SEQ ID NO: 1865020 - RNA, 19 nt, Homo sapiens
  misc_RNA (1)...(19): siRNA sense strand
gguguuaccucucauuguc

SEQ ID NO: 1865021 - RNA, 19 nt, Homo sapiens
  misc_RNA (1)...(19): siRNA sense strand
caucuucauugcucaaguu

SEQ ID NO: 1865022 - RNA, 19 nt, Homo sapiens
  misc_RNA (1)...(19): siRNA sense strand
uggcaucccuggacaacaa

SEQ ID NO: 1865023 - RNA, 19 nt, Homo sapiens
  misc_RNA (1)...(19): siRNA sense strand
gcccauaucagcucaccua

SEQ ID NO: 1865024 - RNA, 19 nt, Homo sapiens
  misc_RNA (1)...(19): siRNA sense strand
ggucagcgccguggucauu

SEQ ID NO: 1865025 - RNA, 19 nt, Homo sapiens
  misc_RNA (1)...(19): siRNA sense strand
gcaacgagagugcuaugug

SEQ ID NO: 1865026 - RNA, 19 nt, Homo sapiens
  misc_RNA (1)...(19): siRNA sense strand
gggcaucauuaucugguau

SEQ ID NO: 1865027 - RNA, 19 nt, Homo sapiens
  misc_RNA (1)...(19): siRNA sense strand
gagagcuucugaugaggau

SEQ ID NO: 1865028 - RNA, 19 nt, Homo sapiens
  misc_RNA (1)...(19): siRNA sense strand
ggaccauggugaggacaga

SEQ ID NO: 1865029 - RNA, 19 nt, Homo sapiens
  misc_RNA (1)...(19): siRNA sense strand
ucaaugaggcuauuaugag

SEQ ID NO: 1865030 - RNA, 19 nt, Homo sapiens
  misc_RNA (1)...(19): siRNA sense strand
caaccugggucagaucaca

SEQ ID NO: 1865031 - RNA, 19 nt, Homo sapiens
  misc_RNA (1)...(19): siRNA sense strand
ccugauugcugggaagauu

SEQ ID NO: 1865032 - RNA, 19 nt, Homo sapiens
  misc_RNA (1)...(19): siRNA sense strand
cuggagagcuucugaugag

SEQ ID NO: 1865033 - RNA, 19 nt, Homo sapiens
  misc_RNA (1)...(19): siRNA sense strand
gcgccacggucaacaugga

SEQ ID NO: 1865034 - RNA, 19 nt, Homo sapiens
  misc_RNA (1)...(19): siRNA sense strand
ggcauccuguuccugauug

SEQ ID NO: 1865035 - RNA, 19 nt, Homo sapiens
  misc_RNA (1)...(19): siRNA sense strand
caucaucgcggucuucauc

SEQ ID NO: 1865036 - RNA, 19 nt, Homo sapiens
  misc_RNA (1)...(19): siRNA sense strand
gaucaaguacuucucuuuu

SEQ ID NO: 1865037 - RNA, 19 nt, Homo sapiens
  misc_RNA (1)...(19): siRNA sense strand
ggaggcaacgagagugcua

SEQ ID NO: 1865038 - RNA, 19 nt, Homo sapiens
  misc_RNA (1)...(19): siRNA sense strand
caggagaugcugagcuuug

SEQ ID NO: 1865039 - RNA, 19 nt, Homo sapiens
  misc_RNA (1)...(19): siRNA sense strand
gcgccgaaacgccuucauu

SEQ ID NO: 1865040 - RNA, 19 nt, Homo sapiens
  misc_RNA (1)...(19): siRNA sense strand
gagcucaaccugggucaga

SEQ ID NO: 1865041 - RNA, 19 nt, Homo sapiens
  misc_RNA (1)...(19): siRNA sense strand
guacagcacgaggguggua

SEQ ID NO: 1865042 - RNA, 19 nt, Homo sapiens
  misc_RNA (1)...(19): siRNA sense strand
gcgggcagcuguguacuac

SEQ ID NO: 1865043 - RNA, 19 nt, Homo sapiens
  misc_RNA (1)...(19): siRNA sense strand
cuucauugcucaaguuaac

SEQ ID NO: 1865044 - RNA, 19 nt, Homo sapiens
  misc_RNA (1)...(19): siRNA sense strand
gcacaaugaccaacguacu

SEQ ID NO: 1865045 - RNA, 19 nt, Homo sapiens
  misc_RNA (1)...(19): siRNA sense strand
gaccggcuucgcacaauga

SEQ ID NO: 1865046 - RNA, 19 nt, Homo sapiens
  misc_RNA (1)...(19): siRNA sense strand
ugaugaggaugcugcagau

SEQ ID NO: 1865047 - RNA, 19 nt, Homo sapiens
  misc_RNA (1)...(19): siRNA sense strand
caacgcugcccaucaccuu

SEQ ID NO: 1865048 - RNA, 19 nt, Homo sapiens
  misc_RNA (1)...(19): siRNA sense strand
ugcaggagaugcugagcuu

SEQ ID NO: 1865049 - RNA, 19 nt, Homo sapiens
  misc_RNA (1)...(19): siRNA sense strand
cuccaugccuccuccauuc

SEQ ID NO: 1865050 - RNA, 19 nt, Homo sapiens
  misc_RNA (1)...(19): siRNA sense strand
guggaggccugcuucaaac

SEQ ID NO: 1865051 - RNA, 19 nt, Homo sapiens
  misc_RNA (1)...(19): siRNA sense strand
ccgaaacgccuucauucug

SEQ ID NO: 1865052 - RNA, 19 nt, Homo sapiens
  misc_RNA (1)...(19): siRNA sense strand
cggaagacaucacgcucau

SEQ ID NO: 1865053 - RNA, 19 nt, Homo sapiens
  misc_RNA (1)...(19): siRNA sense strand
cagcugaugccuucaugga

SEQ ID NO: 1865054 - RNA, 19 nt, Homo sapiens
  misc_RNA (1)...(19): siRNA sense strand
cagaucaaguacuucucuu

SEQ ID NO: 1865055 - RNA, 19 nt, Homo sapiens
  misc_RNA (1)...(19): siRNA sense strand
cugggaagauucuggagau

SEQ ID NO: 1865056 - RNA, 19 nt, Homo sapiens
  misc_RNA (1)...(19): siRNA sense strand
gggcauccuguuccugauu

SEQ ID NO: 1865057 - RNA, 19 nt, Homo sapiens
  misc_RNA (1)...(19): siRNA sense strand
gaggccugcuucaaacagu

SEQ ID NO: 1865058 - RNA, 19 nt, Homo sapiens
  misc_RNA (1)...(19): siRNA sense strand
uguggaggccugcuucaaa

SEQ ID NO: 1865059 - RNA, 19 nt, Homo sapiens
  misc_RNA (1)...(19): siRNA sense strand
ggccacagcagccaguguu

SEQ ID NO: 1865060 - RNA, 19 nt, Homo sapiens
  misc_RNA (1)...(19): siRNA sense strand
aggagaugcugagcuuuga

SEQ ID NO: 1865061 - RNA, 19 nt, Homo sapiens
  misc_RNA (1)...(19): siRNA sense strand
ggaccugaucagaaauaug

SEQ ID NO: 1865062 - RNA, 19 nt, Homo sapiens
  misc_RNA (1)...(19): siRNA sense strand
ccuuugggcuggucauugg

SEQ ID NO: 1865063 - RNA, 19 nt, Homo sapiens
  misc_RNA (1)...(19): siRNA sense strand
ugaccggcuucgcacaaug

SEQ ID NO: 1865064 - RNA, 19 nt, Homo sapiens
  misc_RNA (1)...(19): siRNA sense strand
ucaccuaccgccagaucaa

SEQ ID NO: 1865065 - RNA, 19 nt, Homo sapiens
  misc_RNA (1)...(19): siRNA sense strand
ccugaucagaaauauguuu

SEQ ID NO: 1865066 - RNA, 19 nt, Homo sapiens
  misc_RNA (1)...(19): siRNA sense strand
ucaucgagcacuugucuca

SEQ ID NO: 1865067 - RNA, 19 nt, Homo sapiens
  misc_RNA (1)...(19): siRNA sense strand
ggggucagcugggcaugua

SEQ ID NO: 1865068 - RNA, 19 nt, Homo sapiens
  misc_RNA (1)...(19): siRNA sense strand
gagcuuugaggagacugua

SEQ ID NO: 1865069 - RNA, 19 nt, Homo sapiens
  misc_RNA (1)...(19): siRNA sense strand
gaagauucuggagauggaa

SEQ ID NO: 1865070 - RNA, 19 nt, Homo sapiens
  misc_RNA (1)...(19): siRNA sense strand
cacagcugaugccuucaug

SEQ ID NO: 1865071 - RNA, 19 nt, Homo sapiens
  misc_RNA (1)...(19): siRNA sense strand
ccagaucaaguacuucucu

SEQ ID NO: 1865072 - RNA, 19 nt, Homo sapiens
  misc_RNA (1)...(19): siRNA sense strand
ugaggaugcugcagaugcu

SEQ ID NO: 1865073 - RNA, 19 nt, Homo sapiens
  misc_RNA (1)...(19): siRNA sense strand
caaagaagcuccuggauaa

SEQ ID NO: 1865074 - RNA, 19 nt, Homo sapiens
  misc_RNA (1)...(19): siRNA sense strand
gcacagauccacaugguuu

SEQ ID NO: 1865075 - RNA, 19 nt, Homo sapiens
  misc_RNA (1)...(19): siRNA sense strand
gaacgaggccgacuuacuu

SEQ ID NO: 1865076 - RNA, 19 nt, Homo sapiens
  misc_RNA (1)...(19): siRNA sense strand
gcacuguuguaauguuaua

SEQ ID NO: 1865077 - RNA, 19 nt, Homo sapiens
  misc_RNA (1)...(19): siRNA sense strand
auaaauggcuuggauauug

SEQ ID NO: 1865078 - RNA, 19 nt, Homo sapiens
  misc_RNA (1)...(19): siRNA sense strand
uaaugugacuggccuaauu

SEQ ID NO: 1865079 - RNA, 19 nt, Homo sapiens
  misc_RNA (1)...(19): siRNA sense strand
gacaaucucugccuaucaa

SEQ ID NO: 1865080 - RNA, 19 nt, Homo sapiens
  misc_RNA (1)...(19): siRNA sense strand
cccauggucuucuauauuu

SEQ ID NO: 1865081 - RNA, 19 nt, Homo sapiens
  misc_RNA (1)...(19): siRNA sense strand
ugucuucccuucccuauuu

SEQ ID NO: 1865082 - RNA, 19 nt, Homo sapiens
  misc_RNA (1)...(19): siRNA sense strand
ugacuggaguuaucuguga

SEQ ID NO: 1865083 - RNA, 19 nt, Homo sapiens
  misc_RNA (1)...(19): siRNA sense strand
ccaaagaccacccauguau

SEQ ID NO: 1865084 - RNA, 19 nt, Homo sapiens
  misc_RNA (1)...(19): siRNA sense strand
aaagaccacccauguauaa

SEQ ID NO: 1865085 - RNA, 19 nt, Homo sapiens
  misc_RNA (1)...(19): siRNA sense strand
gugcacuguuguaauguua

SEQ ID NO: 1865086 - RNA, 19 nt, Homo sapiens
  misc_RNA (1)...(19): siRNA sense strand
acuauacacuccaauguuu

SEQ ID NO: 1865087 - RNA, 19 nt, Homo sapiens
  misc_RNA (1)...(19): siRNA sense strand
caaagaccacccauguaua

SEQ ID NO: 1865088 - RNA, 19 nt, Homo sapiens
  misc_RNA (1)...(19): siRNA sense strand
cagcccaguuugaaauaua

SEQ ID NO: 1865089 - RNA, 19 nt, Homo sapiens
  misc_RNA (1)...(19): siRNA sense strand
gcaggucaguucaaguaga

SEQ ID NO: 1865090 - RNA, 19 nt, Homo sapiens
  misc_RNA (1)...(19): siRNA sense strand
ggaaugauaggaggacuaa

SEQ ID NO: 1865091 - RNA, 19 nt, Homo sapiens
  misc_RNA (1)...(19): siRNA sense strand
gguggaguguuuauaaaug

SEQ ID NO: 1865092 - RNA, 19 nt, Homo sapiens
  misc_RNA (1)...(19): siRNA sense strand
acaaagaagcuccuggaua

SEQ ID NO: 1865093 - RNA, 19 nt, Homo sapiens
  misc_RNA (1)...(19): siRNA sense strand
uaucaaggcuauacuuaag

SEQ ID NO: 1865094 - RNA, 19 nt, Homo sapiens
  misc_RNA (1)...(19): siRNA sense strand
cguaauugcuguccggaaa

SEQ ID NO: 1865095 - RNA, 19 nt, Homo sapiens
  misc_RNA (1)...(19): siRNA sense strand
caacagcccaguuugaaau

SEQ ID NO: 1865096 - RNA, 19 nt, Homo sapiens
  misc_RNA (1)...(19): siRNA sense strand
ggaauccgccugguuuaaa

SEQ ID NO: 1865097 - RNA, 19 nt, Homo sapiens
  misc_RNA (1)...(19): siRNA sense strand
cagcaggucaguucaagua

SEQ ID NO: 1865098 - RNA, 19 nt, Homo sapiens
  misc_RNA (1)...(19): siRNA sense strand
ccacaugguuugcccaaca

SEQ ID NO: 1865099 - RNA, 19 nt, Homo sapiens
  misc_RNA (1)...(19): siRNA sense strand
ggaguuaucugugaaucuc

SEQ ID NO: 1865100 - RNA, 19 nt, Homo sapiens
  misc_RNA (1)...(19): siRNA sense strand
cccaacaccuccacaaaga

SEQ ID NO: 1865101 - RNA, 19 nt, Homo sapiens
  misc_RNA (1)...(19): siRNA sense strand
ggaauauucucagcguaau

SEQ ID NO: 1865102 - RNA, 19 nt, Homo sapiens
  misc_RNA (1)...(19): siRNA sense strand
ggauacuucucuggaauau

SEQ ID NO: 1865103 - RNA, 19 nt, Homo sapiens
  misc_RNA (1)...(19): siRNA sense strand
gcaacagcccaguuugaaa

SEQ ID NO: 1865104 - RNA, 19 nt, Homo sapiens
  misc_RNA (1)...(19): siRNA sense strand
uguauaagcaucagugaaa

SEQ ID NO: 1865105 - RNA, 19 nt, Homo sapiens
  misc_RNA (1)...(19): siRNA sense strand
cuaauugcuuccacuuuga

SEQ ID NO: 1865106 - RNA, 19 nt, Homo sapiens
  misc_RNA (1)...(19): siRNA sense strand
cauaacaucaugacacuau

SEQ ID NO: 1865107 - RNA, 19 nt, Homo sapiens
  misc_RNA (1)...(19): siRNA sense strand
aagaagcuccuggauaaua

SEQ ID NO: 1865108 - RNA, 19 nt, Homo sapiens
  misc_RNA (1)...(19): siRNA sense strand
gcccagauauccagggaau

SEQ ID NO: 1865109 - RNA, 19 nt, Homo sapiens
  misc_RNA (1)...(19): siRNA sense strand
agaagcuccuggauaauau

SEQ ID NO: 1865110 - RNA, 19 nt, Homo sapiens
  misc_RNA (1)...(19): siRNA sense strand
acuaauugcuuccacuuug

SEQ ID NO: 1865111 - RNA, 19 nt, Homo sapiens
  misc_RNA (1)...(19): siRNA sense strand
gaggccgacuuacuucuau

SEQ ID NO: 1865112 - RNA, 19 nt, Homo sapiens
  misc_RNA (1)...(19): siRNA sense strand
gaagcuccuggauaauaua

SEQ ID NO: 1865113 - RNA, 19 nt, Homo sapiens
  misc_RNA (1)...(19): siRNA sense strand
agaacccuauguauaauug

SEQ ID NO: 1865114 - RNA, 19 nt, Homo sapiens
  misc_RNA (1)...(19): siRNA sense strand
aaugauaggaggacuaauu

SEQ ID NO: 1865115 - RNA, 19 nt, Homo sapiens
  misc_RNA (1)...(19): siRNA sense strand
gcuccuggauaauauaaag

SEQ ID NO: 1865116 - RNA, 19 nt, Homo sapiens
  misc_RNA (1)...(19): siRNA sense strand
gcaggucaguuaucagacu

SEQ ID NO: 1865117 - RNA, 19 nt, Homo sapiens
  misc_RNA (1)...(19): siRNA sense strand
uggaguagcuugggucguu

SEQ ID NO: 1865118 - RNA, 19 nt, Homo sapiens
  misc_RNA (1)...(19): siRNA sense strand
uugcuuggguggaguguuu

SEQ ID NO: 1865119 - RNA, 19 nt, Homo sapiens
  misc_RNA (1)...(19): siRNA sense strand
uagcuugggucguuguaug

SEQ ID NO: 1865120 - RNA, 19 nt, Homo sapiens
  misc_RNA (1)...(19): siRNA sense strand
ggacuaauugcuuccacuu

SEQ ID NO: 1865121 - RNA, 19 nt, Homo sapiens
  misc_RNA (1)...(19): siRNA sense strand
guuuauaaauggcuuggau

SEQ ID NO: 1865122 - RNA, 19 nt, Homo sapiens
  misc_RNA (1)...(19): siRNA sense strand
ccuaucaaggcuauacuua

SEQ ID NO: 1865123 - RNA, 19 nt, Homo sapiens
  misc_RNA (1)...(19): siRNA sense strand
gaccacccauguauaagca

SEQ ID NO: 1865124 - RNA, 19 nt, Homo sapiens
  misc_RNA (1)...(19): siRNA sense strand
gcccauggucuucuauauu

SEQ ID NO: 1865125 - RNA, 19 nt, Homo sapiens
  misc_RNA (1)...(19): siRNA sense strand
cuucacagcagcaggauuu

SEQ ID NO: 1865126 - RNA, 19 nt, Homo sapiens
  misc_RNA (1)...(19): siRNA sense strand
gaauauucucagcguaauu

SEQ ID NO: 1865127 - RNA, 19 nt, Homo sapiens
  misc_RNA (1)...(19): siRNA sense strand
ucaguuaucagacuucuuc

SEQ ID NO: 1865128 - RNA, 19 nt, Homo sapiens
  misc_RNA (1)...(19): siRNA sense strand
gaucugugguaaccuagca

SEQ ID NO: 1865129 - RNA, 19 nt, Homo sapiens
  misc_RNA (1)...(19): siRNA sense strand
ccagguuucuguuccuuuc

SEQ ID NO: 1865130 - RNA, 19 nt, Homo sapiens
  misc_RNA (1)...(19): siRNA sense strand
uagcacagauccacauggu

SEQ ID NO: 1865131 - RNA, 19 nt, Homo sapiens
  misc_RNA (1)...(19): siRNA sense strand
ggauuucuccuuccugcaa

SEQ ID NO: 1865132 - RNA, 19 nt, Homo sapiens
  misc_RNA (1)...(19): siRNA sense strand
gaaaaggaauacaucacau

SEQ ID NO: 1865133 - RNA, 19 nt, Homo sapiens
  misc_RNA (1)...(19): siRNA sense strand
ccguaugucuucucugguu

SEQ ID NO: 1865134 - RNA, 19 nt, Homo sapiens
  misc_RNA (1)...(19): siRNA sense strand
ggcccauggucuucuauau

SEQ ID NO: 1865135 - RNA, 19 nt, Homo sapiens
  misc_RNA (1)...(19): siRNA sense strand
gaaaaugauuggcuuugca

SEQ ID NO: 1865136 - RNA, 19 nt, Homo sapiens
  misc_RNA (1)...(19): siRNA sense strand
ccagauauccagggaauca

SEQ ID NO: 1865137 - RNA, 19 nt, Homo sapiens
  misc_RNA (1)...(19): siRNA sense strand
uauaauuggagcccagaua

SEQ ID NO: 1865138 - RNA, 19 nt, Homo sapiens
  misc_RNA (1)...(19): siRNA sense strand
cuugugcacuguuguaaug

SEQ ID NO: 1865139 - RNA, 19 nt, Homo sapiens
  misc_RNA (1)...(19): siRNA sense strand
ucaaggcuauacuuaaguc

SEQ ID NO: 1865140 - RNA, 19 nt, Homo sapiens
  misc_RNA (1)...(19): siRNA sense strand
ggccuaauuuucuaccuua

SEQ ID NO: 1865141 - RNA, 19 nt, Homo sapiens
  misc_RNA (1)...(19): siRNA sense strand
gaauccgccugguuuaaaa

SEQ ID NO: 1865142 - RNA, 19 nt, Homo sapiens
  misc_RNA (1)...(19): siRNA sense strand
gaauagcacagauccacau

SEQ ID NO: 1865143 - RNA, 19 nt, Homo sapiens
  misc_RNA (1)...(19): siRNA sense strand
uggauugucuuuccuugug

SEQ ID NO: 1865144 - RNA, 19 nt, Homo sapiens
  misc_RNA (1)...(19): siRNA sense strand
ccuagcaggucaguuauca

SEQ ID NO: 1865145 - RNA, 19 nt, Homo sapiens
  misc_RNA (1)...(19): siRNA sense strand
agucugggcuauuuccauu

SEQ ID NO: 1865146 - RNA, 19 nt, Homo sapiens
  misc_RNA (1)...(19): siRNA sense strand
guuggauacuucucuggaa

SEQ ID NO: 1865147 - RNA, 19 nt, Homo sapiens
  misc_RNA (1)...(19): siRNA sense strand
uaaauggcuuggauauugc

SEQ ID NO: 1865148 - RNA, 19 nt, Homo sapiens
  misc_RNA (1)...(19): siRNA sense strand
ucuccuuccugcaaucuuu

SEQ ID NO: 1865149 - RNA, 19 nt, Homo sapiens
  misc_RNA (1)...(19): siRNA sense strand
ggaacgaggccgacuuacu

SEQ ID NO: 1865150 - RNA, 19 nt, Homo sapiens
  misc_RNA (1)...(19): siRNA sense strand
uggguggaguguuuauaaa

SEQ ID NO: 1865151 - RNA, 19 nt, Homo sapiens
  misc_RNA (1)...(19): siRNA sense strand
acacuccaauguuuaucaa

SEQ ID NO: 1865152 - RNA, 19 nt, Homo sapiens
  misc_RNA (1)...(19): siRNA sense strand
cuauuuccauugguaguuu

SEQ ID NO: 1865153 - RNA, 19 nt, Homo sapiens
  misc_RNA (1)...(19): siRNA sense strand
cagggaaucaucuugaguu

SEQ ID NO: 1865154 - RNA, 19 nt, Homo sapiens
  misc_RNA (1)...(19): siRNA sense strand
uagcaggucaguuaucaga

SEQ ID NO: 1865155 - RNA, 19 nt, Homo sapiens
  misc_RNA (1)...(19): siRNA sense strand
ugccucagcucuguguuaa

SEQ ID NO: 1865156 - RNA, 19 nt, Homo sapiens
  misc_RNA (1)...(19): siRNA sense strand
caacaccuccacaaagaag

SEQ ID NO: 1865157 - RNA, 19 nt, Homo sapiens
  misc_RNA (1)...(19): siRNA sense strand
cuaucaaggcuauacuuaa

SEQ ID NO: 1865158 - RNA, 19 nt, Homo sapiens
  misc_RNA (1)...(19): siRNA sense strand
aaacaacacacacgucucu

SEQ ID NO: 1865159 - RNA, 19 nt, Homo sapiens
  misc_RNA (1)...(19): siRNA sense strand
guggaguguuuauaaaugg

SEQ ID NO: 1865160 - RNA, 19 nt, Homo sapiens
  misc_RNA (1)...(19): siRNA sense strand
cuauacacuccaauguuua

SEQ ID NO: 1865161 - RNA, 19 nt, Homo sapiens
  misc_RNA (1)...(19): siRNA sense strand
cacauaacaucaugacacu

SEQ ID NO: 1865162 - RNA, 19 nt, Homo sapiens
  misc_RNA (1)...(19): siRNA sense strand
gcuggcccauggucuucua

SEQ ID NO: 1865163 - RNA, 19 nt, Homo sapiens
  misc_RNA (1)...(19): siRNA sense strand
guagacaaucucugccuau

SEQ ID NO: 1865164 - RNA, 19 nt, Homo sapiens
  misc_RNA (1)...(19): siRNA sense strand
gcuuguggcugugccguau

SEQ ID NO: 1865165 - RNA, 19 nt, Homo sapiens
  misc_RNA (1)...(19): siRNA sense strand
augauuggcuuugcauuau

SEQ ID NO: 1865166 - RNA, 19 nt, Homo sapiens
  misc_RNA (1)...(19): siRNA sense strand
ucccagauauuuuggauuu

SEQ ID NO: 1865167 - RNA, 19 nt, Homo sapiens
  misc_RNA (1)...(19): siRNA sense strand
caaugguagucauggugaa

SEQ ID NO: 1865168 - RNA, 19 nt, Homo sapiens
  misc_RNA (1)...(19): siRNA sense strand
cuggaucugugguaaccua

SEQ ID NO: 1865169 - RNA, 19 nt, Homo sapiens
  misc_RNA (1)...(19): siRNA sense strand
cuacuugugacuggaguua

SEQ ID NO: 1865170 - RNA, 19 nt, Homo sapiens
  misc_RNA (1)...(19): siRNA sense strand
guucaacuuuaacuggaau

SEQ ID NO: 1865171 - RNA, 19 nt, Homo sapiens
  misc_RNA (1)...(19): siRNA sense strand
ucacaaugguagucauggu

SEQ ID NO: 1865172 - RNA, 19 nt, Homo sapiens
  misc_RNA (1)...(19): siRNA sense strand
gacuggaguuaucugugaa

SEQ ID NO: 1865173 - RNA, 19 nt, Homo sapiens
  misc_RNA (1)...(19): siRNA sense strand
gaucaugccuuuccuguca

SEQ ID NO: 1865174 - RNA, 19 nt, Homo sapiens
  misc_RNA (1)...(19): siRNA sense strand
gcauagacaucucccauga

SEQ ID NO: 1865175 - RNA, 19 nt, Homo sapiens
  misc_RNA (1)...(19): siRNA sense strand
gaacagggacaauuacaug

SEQ ID NO: 1865176 - RNA, 19 nt, Homo sapiens
  misc_RNA (1)...(19): siRNA sense strand
gccauuaugugauguacua

SEQ ID NO: 1865177 - RNA, 19 nt, Homo sapiens
  misc_RNA (1)...(19): siRNA sense strand
cgaagagacugaacacaau

SEQ ID NO: 1865178 - RNA, 19 nt, Homo sapiens
  misc_RNA (1)...(19): siRNA sense strand
uagcacagaucaugccuuu

SEQ ID NO: 1865179 - RNA, 19 nt, Homo sapiens
  misc_RNA (1)...(19): siRNA sense strand
gagaauccagugcgaauaa

SEQ ID NO: 1865180 - RNA, 19 nt, Homo sapiens
  misc_RNA (1)...(19): siRNA sense strand
acaagaaggccacaguuua

SEQ ID NO: 1865181 - RNA, 19 nt, Homo sapiens
  misc_RNA (1)...(19): siRNA sense strand
agacagagauugcgaagag

SEQ ID NO: 1865182 - RNA, 19 nt, Homo sapiens
  misc_RNA (1)...(19): siRNA sense strand
caagaaggccacaguuuau

SEQ ID NO: 1865183 - RNA, 19 nt, Homo sapiens
  misc_RNA (1)...(19): siRNA sense strand
gaaccaccaugaacucgau

SEQ ID NO: 1865184 - RNA, 19 nt, Homo sapiens
  misc_RNA (1)...(19): siRNA sense strand
gugaagaucugggacauca

SEQ ID NO: 1865185 - RNA, 19 nt, Homo sapiens
  misc_RNA (1)...(19): siRNA sense strand
gcgaagagacugaacacaa

SEQ ID NO: 1865186 - RNA, 19 nt, Homo sapiens
  misc_RNA (1)...(19): siRNA sense strand
gacaagaaggccacaguuu

SEQ ID NO: 1865187 - RNA, 19 nt, Homo sapiens
  misc_RNA (1)...(19): siRNA sense strand
gaagagacugaacacaauu

SEQ ID NO: 1865188 - RNA, 19 nt, Homo sapiens
  misc_RNA (1)...(19): siRNA sense strand
ggaaagauaaccuucucaa

SEQ ID NO: 1865189 - RNA, 19 nt, Homo sapiens
  misc_RNA (1)...(19): siRNA sense strand
gcauaucccagucuaaaga

SEQ ID NO: 1865190 - RNA, 19 nt, Homo sapiens
  misc_RNA (1)...(19): siRNA sense strand
ugacuucacuucccagauc

SEQ ID NO: 1865191 - RNA, 19 nt, Homo sapiens
  misc_RNA (1)...(19): siRNA sense strand
ucaggucgaugccggguaa

SEQ ID NO: 1865192 - RNA, 19 nt, Homo sapiens
  misc_RNA (1)...(19): siRNA sense strand
gcagcgccauuaugugaug

SEQ ID NO: 1865193 - RNA, 19 nt, Homo sapiens
  misc_RNA (1)...(19): siRNA sense strand
gcagcacgcucaccaucug

SEQ ID NO: 1865194 - RNA, 19 nt, Homo sapiens
  misc_RNA (1)...(19): siRNA sense strand
gcauggacccgauagguau

SEQ ID NO: 1865195 - RNA, 19 nt, Homo sapiens
  misc_RNA (1)...(19): siRNA sense strand
ggcaagggcugcgugaaga

SEQ ID NO: 1865196 - RNA, 19 nt, Homo sapiens
  misc_RNA (1)...(19): siRNA sense strand
caaagacgaauuccaguuc

SEQ ID NO: 1865197 - RNA, 19 nt, Homo sapiens
  misc_RNA (1)...(19): siRNA sense strand
cgacagugauggagacaag

SEQ ID NO: 1865198 - RNA, 19 nt, Homo sapiens
  misc_RNA (1)...(19): siRNA sense strand
gcacaagcagacagagauu

SEQ ID NO: 1865199 - RNA, 19 nt, Homo sapiens
  misc_RNA (1)...(19): siRNA sense strand
cagccgggauuuaaauuca

SEQ ID NO: 1865200 - RNA, 19 nt, Homo sapiens
  misc_RNA (1)...(19): siRNA sense strand
guuaugcccuggccauuag

SEQ ID NO: 1865201 - RNA, 19 nt, Homo sapiens
  misc_RNA (1)...(19): siRNA sense strand
gaagaaccaccaugaacuc

SEQ ID NO: 1865202 - RNA, 19 nt, Homo sapiens
  misc_RNA (1)...(19): siRNA sense strand
cauuagcccugacgccaaa

SEQ ID NO: 1865203 - RNA, 19 nt, Homo sapiens
  misc_RNA (1)...(19): siRNA sense strand
guaacaggcucuggugaca

SEQ ID NO: 1865204 - RNA, 19 nt, Homo sapiens
  misc_RNA (1)...(19): siRNA sense strand
cagcauaucccagucuaaa

SEQ ID NO: 1865205 - RNA, 19 nt, Homo sapiens
  misc_RNA (1)...(19): siRNA sense strand
acuaugagauguccuaugg

SEQ ID NO: 1865206 - RNA, 19 nt, Homo sapiens
  misc_RNA (1)...(19): siRNA sense strand
gagaagaaccaccaugaac

SEQ ID NO: 1865207 - RNA, 19 nt, Homo sapiens
  misc_RNA (1)...(19): siRNA sense strand
ggagaugcagcgccauuau

SEQ ID NO: 1865208 - RNA, 19 nt, Homo sapiens
  misc_RNA (1)...(19): siRNA sense strand
cagcuggacugccugaaca

SEQ ID NO: 1865209 - RNA, 19 nt, Homo sapiens
  misc_RNA (1)...(19): siRNA sense strand
gagagaauccagugcgaau

SEQ ID NO: 1865210 - RNA, 19 nt, Homo sapiens
  misc_RNA (1)...(19): siRNA sense strand
gcacagaucaugccuuucc

SEQ ID NO: 1865211 - RNA, 19 nt, Homo sapiens
  misc_RNA (1)...(19): siRNA sense strand
ccucgucugucuugaguug

SEQ ID NO: 1865212 - RNA, 19 nt, Homo sapiens
  misc_RNA (1)...(19): siRNA sense strand
uaugugauguacuaugaga

SEQ ID NO: 1865213 - RNA, 19 nt, Homo sapiens
  misc_RNA (1)...(19): siRNA sense strand
aaagaauccucgucugucu

SEQ ID NO: 1865214 - RNA, 19 nt, Homo sapiens
  misc_RNA (1)...(19): siRNA sense strand
gaucgccaauggugagcuu

SEQ ID NO: 1865215 - RNA, 19 nt, Homo sapiens
  misc_RNA (1)...(19): siRNA sense strand
uccuauggcuugaacauug

SEQ ID NO: 1865216 - RNA, 19 nt, Homo sapiens
  misc_RNA (1)...(19): siRNA sense strand
gaucacagagagagagaau

SEQ ID NO: 1865217 - RNA, 19 nt, Homo sapiens
  misc_RNA (1)...(19): siRNA sense strand
ggcauggacccgauaggua

SEQ ID NO: 1865218 - RNA, 19 nt, Homo sapiens
  misc_RNA (1)...(19): siRNA sense strand
agacaagagugaugaucug

SEQ ID NO: 1865219 - RNA, 19 nt, Homo sapiens
  misc_RNA (1)...(19): siRNA sense strand
ccuauggcuugaacauuga

SEQ ID NO: 1865220 - RNA, 19 nt, Homo sapiens
  misc_RNA (1)...(19): siRNA sense strand
gaugagccaccaugagaug

SEQ ID NO: 1865221 - RNA, 19 nt, Homo sapiens
  misc_RNA (1)...(19): siRNA sense strand
ucgguggccucuuccagua

SEQ ID NO: 1865222 - RNA, 19 nt, Homo sapiens
  misc_RNA (1)...(19): siRNA sense strand
gagaugcagcgccauuaug

SEQ ID NO: 1865223 - RNA, 19 nt, Homo sapiens
  misc_RNA (1)...(19): siRNA sense strand
uuucagcggaugacaaaua

SEQ ID NO: 1865224 - RNA, 19 nt, Homo sapiens
  misc_RNA (1)...(19): siRNA sense strand
gagauguccuauggcuuga

SEQ ID NO: 1865225 - RNA, 19 nt, Homo sapiens
  misc_RNA (1)...(19): siRNA sense strand
gccagcauaucccagucua

SEQ ID NO: 1865226 - RNA, 19 nt, Homo sapiens
  misc_RNA (1)...(19): siRNA sense strand
gaaagauaaccuucucaac

SEQ ID NO: 1865227 - RNA, 19 nt, Homo sapiens
  misc_RNA (1)...(19): siRNA sense strand
gaaaaccagcguacucauu

SEQ ID NO: 1865228 - RNA, 19 nt, Homo sapiens
  misc_RNA (1)...(19): siRNA sense strand
acgacaagcuggcaaacga

SEQ ID NO: 1865229 - RNA, 19 nt, Homo sapiens
  misc_RNA (1)...(19): siRNA sense strand
gcggaugacaaauacauug

SEQ ID NO: 1865230 - RNA, 19 nt, Homo sapiens
  misc_RNA (1)...(19): siRNA sense strand
caaaguggaguacgacaag

SEQ ID NO: 1865231 - RNA, 19 nt, Homo sapiens
  misc_RNA (1)...(19): siRNA sense strand
caaacgagaagacggagau

SEQ ID NO: 1865232 - RNA, 19 nt, Homo sapiens
  misc_RNA (1)...(19): siRNA sense strand
cuaaagaauccucgucugu

SEQ ID NO: 1865233 - RNA, 19 nt, Homo sapiens
  misc_RNA (1)...(19): siRNA sense strand
caugauggcaccaaacugu

SEQ ID NO: 1865234 - RNA, 19 nt, Homo sapiens
  misc_RNA (1)...(19): siRNA sense strand
ucaaagacgaauuccaguu

SEQ ID NO: 1865235 - RNA, 19 nt, Homo sapiens
  misc_RNA (1)...(19): siRNA sense strand
gagacaagagugaugaucu

SEQ ID NO: 1865236 - RNA, 19 nt, Homo sapiens
  misc_RNA (1)...(19): siRNA sense strand
ugagaagaaccaccaugaa

SEQ ID NO: 1865237 - RNA, 19 nt, Homo sapiens
  misc_RNA (1)...(19): siRNA sense strand
cugcagcgaugggaacauu

SEQ ID NO: 1865238 - RNA, 19 nt, Homo sapiens
  misc_RNA (1)...(19): siRNA sense strand
gaucuggugguggauguuu

SEQ ID NO: 1865239 - RNA, 19 nt, Homo sapiens
  misc_RNA (1)...(19): siRNA sense strand
gggcagccgggauuuaaau

SEQ ID NO: 1865240 - RNA, 19 nt, Homo sapiens
  misc_RNA (1)...(19): siRNA sense strand
gaacucgaucacagagaga

SEQ ID NO: 1865241 - RNA, 19 nt, Homo sapiens
  misc_RNA (1)...(19): siRNA sense strand
gaggagaaggacagcuuga

SEQ ID NO: 1865242 - RNA, 19 nt, Homo sapiens
  misc_RNA (1)...(19): siRNA sense strand
gagauugcgaagagacuga

SEQ ID NO: 1865243 - RNA, 19 nt, Homo sapiens
  misc_RNA (1)...(19): siRNA sense strand
agaaggccacaguuuauga

SEQ ID NO: 1865244 - RNA, 19 nt, Homo sapiens
  misc_RNA (1)...(19): siRNA sense strand
cauuucagcggaugacaaa

SEQ ID NO: 1865245 - RNA, 19 nt, Homo sapiens
  misc_RNA (1)...(19): siRNA sense strand
ccucaagccuggccuccau

SEQ ID NO: 1865246 - RNA, 19 nt, Homo sapiens
  misc_RNA (1)...(19): siRNA sense strand
ggugaaggaugagaagaac

SEQ ID NO: 1865247 - RNA, 19 nt, Homo sapiens
  misc_RNA (1)...(19): siRNA sense strand
ugacaagaaggccacaguu

SEQ ID NO: 1865248 - RNA, 19 nt, Homo sapiens
  misc_RNA (1)...(19): siRNA sense strand
gcagccgggauuuaaauuc

SEQ ID NO: 1865249 - RNA, 19 nt, Homo sapiens
  misc_RNA (1)...(19): siRNA sense strand
gacagagauugcgaagaga

SEQ ID NO: 1865250 - RNA, 19 nt, Homo sapiens
  misc_RNA (1)...(19): siRNA sense strand
gucuugaguugugacauuu

SEQ ID NO: 1865251 - RNA, 19 nt, Homo sapiens
  misc_RNA (1)...(19): siRNA sense strand
gcguacucauuccauguga

SEQ ID NO: 1865252 - RNA, 19 nt, Homo sapiens
  misc_RNA (1)...(19): siRNA sense strand
ucacgguggcugagucuug

SEQ ID NO: 1865253 - RNA, 19 nt, Homo sapiens
  misc_RNA (1)...(19): siRNA sense strand
cgugagcacugggaaagau

SEQ ID NO: 1865254 - RNA, 19 nt, Homo sapiens
  misc_RNA (1)...(19): siRNA sense strand
caggaucaaagacgaauuc

SEQ ID NO: 1865255 - RNA, 19 nt, Homo sapiens
  misc_RNA (1)...(19): siRNA sense strand
gaaggccacaguuuaugag

SEQ ID NO: 1865256 - RNA, 19 nt, Homo sapiens
  misc_RNA (1)...(19): siRNA sense strand
gauguccuauggcuugaac

SEQ ID NO: 1865257 - RNA, 19 nt, Homo sapiens
  misc_RNA (1)...(19): siRNA sense strand
gauggagacaagagugaug

SEQ ID NO: 1865258 - RNA, 19 nt, Homo sapiens
  misc_RNA (1)...(19): siRNA sense strand
ccagugcgaauaacucugu

SEQ ID NO: 1865259 - RNA, 19 nt, Homo sapiens
  misc_RNA (1)...(19): siRNA sense strand
gccaagcaggucaccauga

SEQ ID NO: 1865260 - RNA, 19 nt, Homo sapiens
  misc_RNA (1)...(19): siRNA sense strand
guagcacaccuuccuccaa

SEQ ID NO: 1865261 - RNA, 19 nt, Homo sapiens
  misc_RNA (1)...(19): siRNA sense strand
gcaagggcugcgugaagau

SEQ ID NO: 1865262 - RNA, 19 nt, Homo sapiens
  misc_RNA (1)...(19): siRNA sense strand
cggcagaucaacacacuca

SEQ ID NO: 1865263 - RNA, 19 nt, Homo sapiens
  misc_RNA (1)...(19): siRNA sense strand
gagacugaacacaauuuua

SEQ ID NO: 1865264 - RNA, 19 nt, Homo sapiens
  misc_RNA (1)...(19): siRNA sense strand
agaauccucgucugucuug

SEQ ID NO: 1865265 - RNA, 19 nt, Homo sapiens
  misc_RNA (1)...(19): siRNA sense strand
guaaaccuccgggcaugga

SEQ ID NO: 1865266 - RNA, 19 nt, Homo sapiens
  misc_RNA (1)...(19): siRNA sense strand
cgaauuccaguuccugcaa

SEQ ID NO: 1865267 - RNA, 19 nt, Homo sapiens
  misc_RNA (1)...(19): siRNA sense strand
ucaaaguggaguacgacaa

SEQ ID NO: 1865268 - RNA, 19 nt, Homo sapiens
  misc_RNA (1)...(19): siRNA sense strand
gugagcacugggaaagaua

SEQ ID NO: 1865269 - RNA, 19 nt, Homo sapiens
  misc_RNA (1)...(19): siRNA sense strand
ucugggaccugcacaacca

SEQ ID NO: 1865270 - RNA, 19 nt, Homo sapiens
  misc_RNA (1)...(19): siRNA sense strand
ugacaggaucaaagacgaa

SEQ ID NO: 1865271 - RNA, 19 nt, Homo sapiens
  misc_RNA (1)...(19): siRNA sense strand
uguuaugcccuggccauua

SEQ ID NO: 1865272 - RNA, 19 nt, Homo sapiens
  misc_RNA (1)...(19): siRNA sense strand
gcuuuggagcuguugguuu

SEQ ID NO: 1865273 - RNA, 19 nt, Homo sapiens
  misc_RNA (1)...(19): siRNA sense strand
gcaagucucugauguguga

SEQ ID NO: 1865274 - RNA, 19 nt, Homo sapiens
  misc_RNA (1)...(19): siRNA sense strand
gagagaaccuucacaggaa

SEQ ID NO: 1865275 - RNA, 19 nt, Homo sapiens
  misc_RNA (1)...(19): siRNA sense strand
caugagaacugcaagcaua

SEQ ID NO: 1865276 - RNA, 19 nt, Homo sapiens
  misc_RNA (1)...(19): siRNA sense strand
gaguagagcuggagucugu

SEQ ID NO: 1865277 - RNA, 19 nt, Homo sapiens
  misc_RNA (1)...(19): siRNA sense strand
gcacccaccugcugaagaa

SEQ ID NO: 1865278 - RNA, 19 nt, Homo sapiens
  misc_RNA (1)...(19): siRNA sense strand
guaggaaccuucaagacaa

SEQ ID NO: 1865279 - RNA, 19 nt, Homo sapiens
  misc_RNA (1)...(19): siRNA sense strand
cagcaugcaugaagauauu

SEQ ID NO: 1865280 - RNA, 19 nt, Homo sapiens
  misc_RNA (1)...(19): siRNA sense strand
auacaggacugaagccaua

SEQ ID NO: 1865281 - RNA, 19 nt, Homo sapiens
  misc_RNA (1)...(19): siRNA sense strand
ccacagaggcccugaagaa

SEQ ID NO: 1865282 - RNA, 19 nt, Homo sapiens
  misc_RNA (1)...(19): siRNA sense strand
gaagugcccuguucuacuc

SEQ ID NO: 1865283 - RNA, 19 nt, Homo sapiens
  misc_RNA (1)...(19): siRNA sense strand
ugacuugggugcugaagaa

SEQ ID NO: 1865284 - RNA, 19 nt, Homo sapiens
  misc_RNA (1)...(19): siRNA sense strand
cgacacaugcuucuacaua

SEQ ID NO: 1865285 - RNA, 19 nt, Homo sapiens
  misc_RNA (1)...(19): siRNA sense strand
cacaaauccuccauccuua

SEQ ID NO: 1865286 - RNA, 19 nt, Homo sapiens
  misc_RNA (1)...(19): siRNA sense strand
ccacaaauccuccauccuu

SEQ ID NO: 1865287 - RNA, 19 nt, Homo sapiens
  misc_RNA (1)...(19): siRNA sense strand
ucccggcucuccucuauua

SEQ ID NO: 1865288 - RNA, 19 nt, Homo sapiens
  misc_RNA (1)...(19): siRNA sense strand
gaaacuccuugcccacaga

SEQ ID NO: 1865289 - RNA, 19 nt, Homo sapiens
  misc_RNA (1)...(19): siRNA sense strand
gcucagagacagcacuuaa

SEQ ID NO: 1865290 - RNA, 19 nt, Homo sapiens
  misc_RNA (1)...(19): siRNA sense strand
ggaaaagccuuaccacugu

SEQ ID NO: 1865291 - RNA, 19 nt, Homo sapiens
  misc_RNA (1)...(19): siRNA sense strand
cagcugaaauaccacauga

SEQ ID NO: 1865292 - RNA, 19 nt, Homo sapiens
  misc_RNA (1)...(19): siRNA sense strand
gcugaucccucucgucuca

SEQ ID NO: 1865293 - RNA, 19 nt, Homo sapiens
  misc_RNA (1)...(19): siRNA sense strand
gaacauggagaucauugug

SEQ ID NO: 1865294 - RNA, 19 nt, Homo sapiens
  misc_RNA (1)...(19): siRNA sense strand
gguacuagaucaccaugug

SEQ ID NO: 1865295 - RNA, 19 nt, Homo sapiens
  misc_RNA (1)...(19): siRNA sense strand
gcaccugcaucuccacuuc

SEQ ID NO: 1865296 - RNA, 19 nt, Homo sapiens
  misc_RNA (1)...(19): siRNA sense strand
gcaaggccuucauuaagca

SEQ ID NO: 1865297 - RNA, 19 nt, Homo sapiens
  misc_RNA (1)...(19): siRNA sense strand
gccaucagcugguacuaga

SEQ ID NO: 1865298 - RNA, 19 nt, Homo sapiens
  misc_RNA (1)...(19): siRNA sense strand
gacuguggcuucaccugua

SEQ ID NO: 1865299 - RNA, 19 nt, Homo sapiens
  misc_RNA (1)...(19): siRNA sense strand
gagggcagcugcacacuac

SEQ ID NO: 1865300 - RNA, 19 nt, Homo sapiens
  misc_RNA (1)...(19): siRNA sense strand
ggaaguaugagcugcagaa

SEQ ID NO: 1865301 - RNA, 19 nt, Homo sapiens
  misc_RNA (1)...(19): siRNA sense strand
gagcugcgcugcaccuucu

SEQ ID NO: 1865302 - RNA, 19 nt, Homo sapiens
  misc_RNA (1)...(19): siRNA sense strand
gaaaauccccuucuggaaa

SEQ ID NO: 1865303 - RNA, 19 nt, Homo sapiens
  misc_RNA (1)...(19): siRNA sense strand
caaggcccauggcuaugua

SEQ ID NO: 1865304 - RNA, 19 nt, Homo sapiens
  misc_RNA (1)...(19): siRNA sense strand
gauuacaugugcacugaau

SEQ ID NO: 1865305 - RNA, 19 nt, Homo sapiens
  misc_RNA (1)...(19): siRNA sense strand
gggcaagucucugaugugu

SEQ ID NO: 1865306 - RNA, 19 nt, Homo sapiens
  misc_RNA (1)...(19): siRNA sense strand
ccacuucuguccacuuugu

SEQ ID NO: 1865307 - RNA, 19 nt, Homo sapiens
  misc_RNA (1)...(19): siRNA sense strand
ggagaggaaugcacucaac

SEQ ID NO: 1865308 - RNA, 19 nt, Homo sapiens
  misc_RNA (1)...(19): siRNA sense strand
caggagggcugcagcuaug

SEQ ID NO: 1865309 - RNA, 19 nt, Homo sapiens
  misc_RNA (1)...(19): siRNA sense strand
ugaaauaccacaugaccaa

SEQ ID NO: 1865310 - RNA, 19 nt, Homo sapiens
  misc_RNA (1)...(19): siRNA sense strand
cuaucuagcuuugaaggua

SEQ ID NO: 1865311 - RNA, 19 nt, Homo sapiens
  misc_RNA (1)...(19): siRNA sense strand
ccacacucuuguuccauaa

SEQ ID NO: 1865312 - RNA, 19 nt, Homo sapiens
  misc_RNA (1)...(19): siRNA sense strand
ccaaaaggcuguggauaaa

SEQ ID NO: 1865313 - RNA, 19 nt, Homo sapiens
  misc_RNA (1)...(19): siRNA sense strand
uaaaggagcaccucaagag

SEQ ID NO: 1865314 - RNA, 19 nt, Homo sapiens
  misc_RNA (1)...(19): siRNA sense strand
agaggagaauguagagaaa

SEQ ID NO: 1865315 - RNA, 19 nt, Homo sapiens
  misc_RNA (1)...(19): siRNA sense strand
cuaagaagcaccaccuuga

SEQ ID NO: 1865316 - RNA, 19 nt, Homo sapiens
  misc_RNA (1)...(19): siRNA sense strand
gaagacaggagggcaguga

SEQ ID NO: 1865317 - RNA, 19 nt, Homo sapiens
  misc_RNA (1)...(19): siRNA sense strand
agaaagaagagaagaguga

SEQ ID NO: 1865318 - RNA, 19 nt, Homo sapiens
  misc_RNA (1)...(19): siRNA sense strand
ucaaccagcugaaauacca

SEQ ID NO: 1865319 - RNA, 19 nt, Homo sapiens
  misc_RNA (1)...(19): siRNA sense strand
gguaggaaccuucaagaca

SEQ ID NO: 1865320 - RNA, 19 nt, Homo sapiens
  misc_RNA (1)...(19): siRNA sense strand
aguaugagcugcagaagca

SEQ ID NO: 1865321 - RNA, 19 nt, Homo sapiens
  misc_RNA (1)...(19): siRNA sense strand
auaagcaccuauuccguaa

SEQ ID NO: 1865322 - RNA, 19 nt, Homo sapiens
  misc_RNA (1)...(19): siRNA sense strand
ugucugagcccuccacaaa

SEQ ID NO: 1865323 - RNA, 19 nt, Homo sapiens
  misc_RNA (1)...(19): siRNA sense strand
ccuuaaggcuccaccagaa

SEQ ID NO: 1865324 - RNA, 19 nt, Homo sapiens
  misc_RNA (1)...(19): siRNA sense strand
gaccgcaaggccuucauua

SEQ ID NO: 1865325 - RNA, 19 nt, Homo sapiens
  misc_RNA (1)...(19): siRNA sense strand
gggauacaguucugguuca

SEQ ID NO: 1865326 - RNA, 19 nt, Homo sapiens
  misc_RNA (1)...(19): siRNA sense strand
ggagacaggacaaagaaca

SEQ ID NO: 1865327 - RNA, 19 nt, Homo sapiens
  misc_RNA (1)...(19): siRNA sense strand
ccauauguguccagagugu

SEQ ID NO: 1865328 - RNA, 19 nt, Homo sapiens
  misc_RNA (1)...(19): siRNA sense strand
gcccugagcuauugcugau

SEQ ID NO: 1865329 - RNA, 19 nt, Homo sapiens
  misc_RNA (1)...(19): siRNA sense strand
caaaacaccuacccacuuc

SEQ ID NO: 1865330 - RNA, 19 nt, Homo sapiens
  misc_RNA (1)...(19): siRNA sense strand
ggauacaguucugguucaa

SEQ ID NO: 1865331 - RNA, 19 nt, Homo sapiens
  misc_RNA (1)...(19): siRNA sense strand
cagaggcccugaagaagca

SEQ ID NO: 1865332 - RNA, 19 nt, Homo sapiens
  misc_RNA (1)...(19): siRNA sense strand
gacacaugcuucuacauac

SEQ ID NO: 1865333 - RNA, 19 nt, Homo sapiens
  misc_RNA (1)...(19): siRNA sense strand
ccgggacccugcaccuaua

SEQ ID NO: 1865334 - RNA, 19 nt, Homo sapiens
  misc_RNA (1)...(19): siRNA sense strand
cugaagaagugcccuguuc

SEQ ID NO: 1865335 - RNA, 19 nt, Homo sapiens
  misc_RNA (1)...(19): siRNA sense strand
uaaggagacaggacaaaga

SEQ ID NO: 1865336 - RNA, 19 nt, Homo sapiens
  misc_RNA (1)...(19): siRNA sense strand
uauugggacuucugacuug

SEQ ID NO: 1865337 - RNA, 19 nt, Homo sapiens
  misc_RNA (1)...(19): siRNA sense strand
gaagagggaccagggaaca

SEQ ID NO: 1865338 - RNA, 19 nt, Homo sapiens
  misc_RNA (1)...(19): siRNA sense strand
gcacccaccuucgcaagca

SEQ ID NO: 1865339 - RNA, 19 nt, Homo sapiens
  misc_RNA (1)...(19): siRNA sense strand
gggucaaccagcugaaaua

SEQ ID NO: 1865340 - RNA, 19 nt, Homo sapiens
  misc_RNA (1)...(19): siRNA sense strand
gggagaaggcccugaaucu

SEQ ID NO: 1865341 - RNA, 19 nt, Homo sapiens
  misc_RNA (1)...(19): siRNA sense strand
ggaaggaccagagcuaucu

SEQ ID NO: 1865342 - RNA, 19 nt, Homo sapiens
  misc_RNA (1)...(19): siRNA sense strand
cagcaacaccacacucuug

SEQ ID NO: 1865343 - RNA, 19 nt, Homo sapiens
  misc_RNA (1)...(19): siRNA sense strand
ggagaucauuguggagaca

SEQ ID NO: 1865344 - RNA, 19 nt, Homo sapiens
  misc_RNA (1)...(19): siRNA sense strand
gaauguagagaaagaagag

SEQ ID NO: 1865345 - RNA, 19 nt, Homo sapiens
  misc_RNA (1)...(19): siRNA sense strand
gguuaaggguacaugacaa

SEQ ID NO: 1865346 - RNA, 19 nt, Homo sapiens
  misc_RNA (1)...(19): siRNA sense strand
caccagacgguaccgguua

SEQ ID NO: 1865347 - RNA, 19 nt, Homo sapiens
  misc_RNA (1)...(19): siRNA sense strand
guucccggcucuccucuau

SEQ ID NO: 1865348 - RNA, 19 nt, Homo sapiens
  misc_RNA (1)...(19): siRNA sense strand
caaauccuccauccuuaga

SEQ ID NO: 1865349 - RNA, 19 nt, Homo sapiens
  misc_RNA (1)...(19): siRNA sense strand
ggagggcagcugcacacua

SEQ ID NO: 1865350 - RNA, 19 nt, Homo sapiens
  misc_RNA (1)...(19): siRNA sense strand
gccacaagcugcggcauca

SEQ ID NO: 1865351 - RNA, 19 nt, Homo sapiens
  misc_RNA (1)...(19): siRNA sense strand
acagugcgguggagaggaa

SEQ ID NO: 1865352 - RNA, 19 nt, Homo sapiens
  misc_RNA (1)...(19): siRNA sense strand
gcaccgagucccucuucaa

SEQ ID NO: 1865353 - RNA, 19 nt, Homo sapiens
  misc_RNA (1)...(19): siRNA sense strand
aggagaauguagagaaaga

SEQ ID NO: 1865354 - RNA, 19 nt, Homo sapiens
  misc_RNA (1)...(19): siRNA sense strand
ugcccuacaugucccuuua

SEQ ID NO: 1865355 - RNA, 19 nt, Homo sapiens
  misc_RNA (1)...(19): siRNA sense strand
ggagaaggcccugaaucug

SEQ ID NO: 1865356 - RNA, 19 nt, Homo sapiens
  misc_RNA (1)...(19): siRNA sense strand
ucugagcccuccacaaauc

SEQ ID NO: 1865357 - RNA, 19 nt, Homo sapiens
  misc_RNA (1)...(19): siRNA sense strand
caacaccaaggauuacaug

SEQ ID NO: 1865358 - RNA, 19 nt, Homo sapiens
  misc_RNA (1)...(19): siRNA sense strand
gacgugagcuaccuaucca

SEQ ID NO: 1865359 - RNA, 19 nt, Homo sapiens
  misc_RNA (1)...(19): siRNA sense strand
ucauuaagcaccugaagga

SEQ ID NO: 1865360 - RNA, 19 nt, Homo sapiens
  misc_RNA (1)...(19): siRNA sense strand
gaaggaccagagcuaucua

SEQ ID NO: 1865361 - RNA, 19 nt, Homo sapiens
  misc_RNA (1)...(19): siRNA sense strand
gcaaggcccauggcuaugu

SEQ ID NO: 1865362 - RNA, 19 nt, Homo sapiens
  misc_RNA (1)...(19): siRNA sense strand
ggacugugcccugagcuau

SEQ ID NO: 1865363 - RNA, 19 nt, Homo sapiens
  misc_RNA (1)...(19): siRNA sense strand
uaucuagcuuugaagguau

SEQ ID NO: 1865364 - RNA, 19 nt, Homo sapiens
  misc_RNA (1)...(19): siRNA sense strand
ccaagaaccgacagaagau

SEQ ID NO: 1865365 - RNA, 19 nt, Homo sapiens
  misc_RNA (1)...(19): siRNA sense strand
gcaccaagaaccgacagaa

SEQ ID NO: 1865366 - RNA, 19 nt, Homo sapiens
  misc_RNA (1)...(19): siRNA sense strand
cagagcuacugcuuccaaa

SEQ ID NO: 1865367 - RNA, 19 nt, Homo sapiens
  misc_RNA (1)...(19): siRNA sense strand
aaaauccccuucuggaaaa

SEQ ID NO: 1865368 - RNA, 19 nt, Homo sapiens
  misc_RNA (1)...(19): siRNA sense strand
guuaaggguacaugacaaa

SEQ ID NO: 1865369 - RNA, 19 nt, Homo sapiens
  misc_RNA (1)...(19): siRNA sense strand
ccacagaggccccuaagaa

SEQ ID NO: 1865370 - RNA, 19 nt, Homo sapiens
  misc_RNA (1)...(19): siRNA sense strand
ggagccagaagaaacagaa

SEQ ID NO: 1865371 - RNA, 19 nt, Homo sapiens
  misc_RNA (1)...(19): siRNA sense strand
gcucaccagucccgacaca

SEQ ID NO: 1865372 - RNA, 19 nt, Homo sapiens
  misc_RNA (1)...(19): siRNA sense strand
aaaccagggugugggcaaa

SEQ ID NO: 1865373 - RNA, 19 nt, Homo sapiens
  misc_RNA (1)...(19): siRNA sense strand
ggaaguccaucuccaacug

SEQ ID NO: 1865374 - RNA, 19 nt, Homo sapiens
  misc_RNA (1)...(19): siRNA sense strand
agaagcagcugcaggagaa

SEQ ID NO: 1865375 - RNA, 19 nt, Homo sapiens
  misc_RNA (1)...(19): siRNA sense strand
gcaagugguucgcccugaa

SEQ ID NO: 1865376 - RNA, 19 nt, Homo sapiens
  misc_RNA (1)...(19): siRNA sense strand
gaacuucgaggccuaugug

SEQ ID NO: 1865377 - RNA, 19 nt, Homo sapiens
  misc_RNA (1)...(19): siRNA sense strand
ggcagaagcuucaggaacu

SEQ ID NO: 1865378 - RNA, 19 nt, Homo sapiens
  misc_RNA (1)...(19): siRNA sense strand
agugaugccucaauuaaga

SEQ ID NO: 1865379 - RNA, 19 nt, Homo sapiens
  misc_RNA (1)...(19): siRNA sense strand
gaacaaaagcgcagagaga

SEQ ID NO: 1865380 - RNA, 19 nt, Homo sapiens
  misc_RNA (1)...(19): siRNA sense strand
ugaagggcauggugcagaa

SEQ ID NO: 1865381 - RNA, 19 nt, Homo sapiens
  misc_RNA (1)...(19): siRNA sense strand
cagcagagccaaguuguga

SEQ ID NO: 1865382 - RNA, 19 nt, Homo sapiens
  misc_RNA (1)...(19): siRNA sense strand
acaagagccuggucaaguc

SEQ ID NO: 1865383 - RNA, 19 nt, Homo sapiens
  misc_RNA (1)...(19): siRNA sense strand
cgaccaaacaccugaguga

SEQ ID NO: 1865384 - RNA, 19 nt, Homo sapiens
  misc_RNA (1)...(19): siRNA sense strand
gcaaagagaagaacaaaag

SEQ ID NO: 1865385 - RNA, 19 nt, Homo sapiens
  misc_RNA (1)...(19): siRNA sense strand
gaacaagagccuggucaag

SEQ ID NO: 1865386 - RNA, 19 nt, Homo sapiens
  misc_RNA (1)...(19): siRNA sense strand
cgacugggacuccuucuuc

SEQ ID NO: 1865387 - RNA, 19 nt, Homo sapiens
  misc_RNA (1)...(19): siRNA sense strand
gcaacaucaagguuucuuu

SEQ ID NO: 1865388 - RNA, 19 nt, Homo sapiens
  misc_RNA (1)...(19): siRNA sense strand
aagagaagcuucgcaagag

SEQ ID NO: 1865389 - RNA, 19 nt, Homo sapiens
  misc_RNA (1)...(19): siRNA sense strand
gcagaagcuucaggaacug

SEQ ID NO: 1865390 - RNA, 19 nt, Homo sapiens
  misc_RNA (1)...(19): siRNA sense strand
gcaagagggagcagaagca

SEQ ID NO: 1865391 - RNA, 19 nt, Homo sapiens
  misc_RNA (1)...(19): siRNA sense strand
gcagcaaagagaagaacaa

SEQ ID NO: 1865392 - RNA, 19 nt, Homo sapiens
  misc_RNA (1)...(19): siRNA sense strand
gaacuggagcagcaaagag

SEQ ID NO: 1865393 - RNA, 19 nt, Homo sapiens
  misc_RNA (1)...(19): siRNA sense strand
guggagcucugcccugcuu

SEQ ID NO: 1865394 - RNA, 19 nt, Homo sapiens
  misc_RNA (1)...(19): siRNA sense strand
gaagagcuggagcgagaga

SEQ ID NO: 1865395 - RNA, 19 nt, Homo sapiens
  misc_RNA (1)...(19): siRNA sense strand
caagguguuugagaaguuc

SEQ ID NO: 1865396 - RNA, 19 nt, Homo sapiens
  misc_RNA (1)...(19): siRNA sense strand
agaggaaccugcaguccau

SEQ ID NO: 1865397 - RNA, 19 nt, Homo sapiens
  misc_RNA (1)...(19): siRNA sense strand
gccguggccugcaacauca

SEQ ID NO: 1865398 - RNA, 19 nt, Homo sapiens
  misc_RNA (1)...(19): siRNA sense strand
ugaagcccaucaccaagau

SEQ ID NO: 1865399 - RNA, 19 nt, Homo sapiens
  misc_RNA (1)...(19): siRNA sense strand
cagcaaagagaagaacaaa

SEQ ID NO: 1865400 - RNA, 19 nt, Homo sapiens
  misc_RNA (1)...(19): siRNA sense strand
ggaacuggagcagcaaaga

SEQ ID NO: 1865401 - RNA, 19 nt, Homo sapiens
  misc_RNA (1)...(19): siRNA sense strand
gaaaagagaagagaagcuu

SEQ ID NO: 1865402 - RNA, 19 nt, Homo sapiens
  misc_RNA (1)...(19): siRNA sense strand
gcggaggaaaggaaacaaa

SEQ ID NO: 1865403 - RNA, 19 nt, Homo sapiens
  misc_RNA (1)...(19): siRNA sense strand
caacaucaagguuucuuuu

SEQ ID NO: 1865404 - RNA, 19 nt, Homo sapiens
  misc_RNA (1)...(19): siRNA sense strand
caagagcaccauggacuuc

SEQ ID NO: 1865405 - RNA, 19 nt, Homo sapiens
  misc_RNA (1)...(19): siRNA sense strand
ccaagagcaccauggacuu

SEQ ID NO: 1865406 - RNA, 19 nt, Homo sapiens
  misc_RNA (1)...(19): siRNA sense strand
agagccuggucaagucuuu

SEQ ID NO: 1865407 - RNA, 19 nt, Homo sapiens
  misc_RNA (1)...(19): siRNA sense strand
caacuuccacaccuucagu

SEQ ID NO: 1865408 - RNA, 19 nt, Homo sapiens
  misc_RNA (1)...(19): siRNA sense strand
gagugaugccucaauuaag

SEQ ID NO: 1865409 - RNA, 19 nt, Homo sapiens
  misc_RNA (1)...(19): siRNA sense strand
ccugcaacaucaagguuuc

SEQ ID NO: 1865410 - RNA, 19 nt, Homo sapiens
  misc_RNA (1)...(19): siRNA sense strand
gagcggaggaaaggaaaca

SEQ ID NO: 1865411 - RNA, 19 nt, Homo sapiens
  misc_RNA (1)...(19): siRNA sense strand
ggagcagcaaagagaagaa

SEQ ID NO: 1865412 - RNA, 19 nt, Homo sapiens
  misc_RNA (1)...(19): siRNA sense strand
gugaguacaugggcuucau

SEQ ID NO: 1865413 - RNA, 19 nt, Homo sapiens
  misc_RNA (1)...(19): siRNA sense strand
gcgagcggaggaaaggaaa

SEQ ID NO: 1865414 - RNA, 19 nt, Homo sapiens
  misc_RNA (1)...(19): siRNA sense strand
caacuccgcuccacuucua

SEQ ID NO: 1865415 - RNA, 19 nt, Homo sapiens
  misc_RNA (1)...(19): siRNA sense strand
gcucaagaaugucauggaa

SEQ ID NO: 1865416 - RNA, 19 nt, Homo sapiens
  misc_RNA (1)...(19): siRNA sense strand
gcaaugacuucccuguaug

SEQ ID NO: 1865417 - RNA, 19 nt, Homo sapiens
  misc_RNA (1)...(19): siRNA sense strand
ggcaaugacuucccuguau

SEQ ID NO: 1865418 - RNA, 19 nt, Homo sapiens
  misc_RNA (1)...(19): siRNA sense strand
ggcagagccugaccacuuu

SEQ ID NO: 1865419 - RNA, 19 nt, Homo sapiens
  misc_RNA (1)...(19): siRNA sense strand
gagagaagcauuuccuguu

SEQ ID NO: 1865420 - RNA, 19 nt, Homo sapiens
  misc_RNA (1)...(19): siRNA sense strand
acaggcagcucaagaaugu

SEQ ID NO: 1865421 - RNA, 19 nt, Homo sapiens
  misc_RNA (1)...(19): siRNA sense strand
aaccagagcuuucacuuca

SEQ ID NO: 1865422 - RNA, 19 nt, Homo sapiens
  misc_RNA (1)...(19): siRNA sense strand
gggcagagccugaccacuu

SEQ ID NO: 1865423 - RNA, 19 nt, Homo sapiens
  misc_RNA (1)...(19): siRNA sense strand
gagcugggccucuuggauu

SEQ ID NO: 1865424 - RNA, 19 nt, Homo sapiens
  misc_RNA (1)...(19): siRNA sense strand
caaccuaccagcuaacuga

SEQ ID NO: 1865425 - RNA, 19 nt, Homo sapiens
  misc_RNA (1)...(19): siRNA sense strand
gagcaggagcugaguauuc

SEQ ID NO: 1865426 - RNA, 19 nt, Homo sapiens
  misc_RNA (1)...(19): siRNA sense strand
caacuaaaggcgccacuga

SEQ ID NO: 1865427 - RNA, 19 nt, Homo sapiens
  misc_RNA (1)...(19): siRNA sense strand
gcaguagcccugucuggaa

SEQ ID NO: 1865428 - RNA, 19 nt, Homo sapiens
  misc_RNA (1)...(19): siRNA sense strand
gaaccagagcuuucacuuc

SEQ ID NO: 1865429 - RNA, 19 nt, Homo sapiens
  misc_RNA (1)...(19): siRNA sense strand
gcacaaggaccacuaugag

SEQ ID NO: 1865430 - RNA, 19 nt, Homo sapiens
  misc_RNA (1)...(19): siRNA sense strand
cggcugcagugacuucuuu

SEQ ID NO: 1865431 - RNA, 19 nt, Homo sapiens
  misc_RNA (1)...(19): siRNA sense strand
agagaagcauuuccuguuc

SEQ ID NO: 1865432 - RNA, 19 nt, Homo sapiens
  misc_RNA (1)...(19): siRNA sense strand
agacccaggugaccaagaa

SEQ ID NO: 1865433 - RNA, 19 nt, Homo sapiens
  misc_RNA (1)...(19): siRNA sense strand
ccacugaguugcugaagac

SEQ ID NO: 1865434 - RNA, 19 nt, Homo sapiens
  misc_RNA (1)...(19): siRNA sense strand
gagaugacccuguguuguc

SEQ ID NO: 1865435 - RNA, 19 nt, Homo sapiens
  misc_RNA (1)...(19): siRNA sense strand
ucaagaaugucauggaacu

SEQ ID NO: 1865436 - RNA, 19 nt, Homo sapiens
  misc_RNA (1)...(19): siRNA sense strand
caacaggccgugcauuauc

SEQ ID NO: 1865437 - RNA, 19 nt, Homo sapiens
  misc_RNA (1)...(19): siRNA sense strand
ugaaggagcugggccucuu

SEQ ID NO: 1865438 - RNA, 19 nt, Homo sapiens
  misc_RNA (1)...(19): siRNA sense strand
ggagcgaguuacgagaauu

SEQ ID NO: 1865439 - RNA, 19 nt, Homo sapiens
  misc_RNA (1)...(19): siRNA sense strand
ugacuucuuugcacaagga

SEQ ID NO: 1865440 - RNA, 19 nt, Homo sapiens
  misc_RNA (1)...(19): siRNA sense strand
acgaggcgcugcugcauga

SEQ ID NO: 1865441 - RNA, 19 nt, Homo sapiens
  misc_RNA (1)...(19): siRNA sense strand
cccaacaggccgugcauua

SEQ ID NO: 1865442 - RNA, 19 nt, Homo sapiens
  misc_RNA (1)...(19): siRNA sense strand
ucauggaacugaaagucuu

SEQ ID NO: 1865443 - RNA, 19 nt, Homo sapiens
  misc_RNA (1)...(19): siRNA sense strand
gcgccuggaaguugaauuu

SEQ ID NO: 1865444 - RNA, 19 nt, Homo sapiens
  misc_RNA (1)...(19): siRNA sense strand
gcaccugacacauuacaau

SEQ ID NO: 1865445 - RNA, 19 nt, Homo sapiens
  misc_RNA (1)...(19): siRNA sense strand
gcccaggccacacauaauu

SEQ ID NO: 1865446 - RNA, 19 nt, Homo sapiens
  misc_RNA (1)...(19): siRNA sense strand
gauugcgucuccuacauca

SEQ ID NO: 1865447 - RNA, 19 nt, Homo sapiens
  misc_RNA (1)...(19): siRNA sense strand
caaccuccaggacagcuua

SEQ ID NO: 1865448 - RNA, 19 nt, Homo sapiens
  misc_RNA (1)...(19): siRNA sense strand
gcugcugccugaucuggaa

SEQ ID NO: 1865449 - RNA, 19 nt, Homo sapiens
  misc_RNA (1)...(19): siRNA sense strand
acaaggaccacuaugagaa

SEQ ID NO: 1865450 - RNA, 19 nt, Homo sapiens
  misc_RNA (1)...(19): siRNA sense strand
gaagaaccacccucaacag

SEQ ID NO: 1865451 - RNA, 19 nt, Homo sapiens
  misc_RNA (1)...(19): siRNA sense strand
gggcaaugacuucccugua

SEQ ID NO: 1865452 - RNA, 19 nt, Homo sapiens
  misc_RNA (1)...(19): siRNA sense strand
gcccaucgccuacccucua

SEQ ID NO: 1865453 - RNA, 19 nt, Homo sapiens
  misc_RNA (1)...(19): siRNA sense strand
cugaagagggcaccuuuaa

SEQ ID NO: 1865454 - RNA, 19 nt, Homo sapiens
  misc_RNA (1)...(19): siRNA sense strand
ccuaccagcuaacugaaga

SEQ ID NO: 1865455 - RNA, 19 nt, Homo sapiens
  misc_RNA (1)...(19): siRNA sense strand
uuaaggugguggaugaaga

SEQ ID NO: 1865456 - RNA, 19 nt, Homo sapiens
  misc_RNA (1)...(19): siRNA sense strand
gaaugucauggaacugaaa

SEQ ID NO: 1865457 - RNA, 19 nt, Homo sapiens
  misc_RNA (1)...(19): siRNA sense strand
ugcugcaccugacacauua

SEQ ID NO: 1865458 - RNA, 19 nt, Homo sapiens
  misc_RNA (1)...(19): siRNA sense strand
ggugggauccgggcaauga

SEQ ID NO: 1865459 - RNA, 19 nt, Homo sapiens
  misc_RNA (1)...(19): siRNA sense strand
gaugagaguggagcugaaa

SEQ ID NO: 1865460 - RNA, 19 nt, Homo sapiens
  misc_RNA (1)...(19): siRNA sense strand
ggaaccagagcuuucacuu

SEQ ID NO: 1865461 - RNA, 19 nt, Homo sapiens
  misc_RNA (1)...(19): siRNA sense strand
ggagacaggagaccagaag

SEQ ID NO: 1865462 - RNA, 19 nt, Homo sapiens
  misc_RNA (1)...(19): siRNA sense strand
ggagaugacccuguguugu

SEQ ID NO: 1865463 - RNA, 19 nt, Homo sapiens
  misc_RNA (1)...(19): siRNA sense strand
gagaggggaucgcuucaug

SEQ ID NO: 1865464 - RNA, 19 nt, Homo sapiens
  misc_RNA (1)...(19): siRNA sense strand
ccucagagcccagccaguu

SEQ ID NO: 1865465 - RNA, 19 nt, Homo sapiens
  misc_RNA (1)...(19): siRNA sense strand
ccugaccacuuuugaauuu

SEQ ID NO: 1865466 - RNA, 19 nt, Homo sapiens
  misc_RNA (1)...(19): siRNA sense strand
agaacccucugcccaucua

SEQ ID NO: 1865467 - RNA, 19 nt, Homo sapiens
  misc_RNA (1)...(19): siRNA sense strand
ccgaagcccugggaaagau

SEQ ID NO: 1865468 - RNA, 19 nt, Homo sapiens
  misc_RNA (1)...(19): siRNA sense strand
gaaggagcugggccucuug

SEQ ID NO: 1865469 - RNA, 19 nt, Homo sapiens
  misc_RNA (1)...(19): siRNA sense strand
ccggcaaccuaccagcuaa

SEQ ID NO: 1865470 - RNA, 19 nt, Homo sapiens
  misc_RNA (1)...(19): siRNA sense strand
ccaacaggccgugcauuau

SEQ ID NO: 1865471 - RNA, 19 nt, Homo sapiens
  misc_RNA (1)...(19): siRNA sense strand
uuacgcggaugccgugaga

SEQ ID NO: 1865472 - RNA, 19 nt, Homo sapiens
  misc_RNA (1)...(19): siRNA sense strand
gcccgaugcugugaacuuc

SEQ ID NO: 1865473 - RNA, 19 nt, Homo sapiens
  misc_RNA (1)...(19): siRNA sense strand
aggccaaccuggacaagga

SEQ ID NO: 1865474 - RNA, 19 nt, Homo sapiens
  misc_RNA (1)...(19): siRNA sense strand
uggcagggcccacugaguu

SEQ ID NO: 1865475 - RNA, 19 nt, Homo sapiens
  misc_RNA (1)...(19): siRNA sense strand
gggagcaggagcugaguau

SEQ ID NO: 1865476 - RNA, 19 nt, Homo sapiens
  misc_RNA (1)...(19): siRNA sense strand
agaaugucauggaacugaa

SEQ ID NO: 1865477 - RNA, 19 nt, Homo sapiens
  misc_RNA (1)...(19): siRNA sense strand
gagcucugcgugccucuug

SEQ ID NO: 1865478 - RNA, 19 nt, Homo sapiens
  misc_RNA (1)...(19): siRNA sense strand
gaccucauccugucauugg

SEQ ID NO: 1865479 - RNA, 19 nt, Homo sapiens
  misc_RNA (1)...(19): siRNA sense strand
cauccucacuucuccacau

SEQ ID NO: 1865480 - RNA, 19 nt, Homo sapiens
  misc_RNA (1)...(19): siRNA sense strand
uagaagguaucuggagcaa

SEQ ID NO: 1865481 - RNA, 19 nt, Homo sapiens
  misc_RNA (1)...(19): siRNA sense strand
gagaccagaaguccucaga

SEQ ID NO: 1865482 - RNA, 19 nt, Homo sapiens
  misc_RNA (1)...(19): siRNA sense strand
gcggagcgaguuacgagaa

SEQ ID NO: 1865483 - RNA, 19 nt, Homo sapiens
  misc_RNA (1)...(19): siRNA sense strand
gagcgaguuacgagaauuc

SEQ ID NO: 1865484 - RNA, 19 nt, Homo sapiens
  misc_RNA (1)...(19): siRNA sense strand
ccacaggcagcucaagaau

SEQ ID NO: 1865485 - RNA, 19 nt, Homo sapiens
  misc_RNA (1)...(19): siRNA sense strand
gaaagcuaccacucuggau

SEQ ID NO: 1865486 - RNA, 19 nt, Homo sapiens
  misc_RNA (1)...(19): siRNA sense strand
gacccuguguugucaguac

SEQ ID NO: 1865487 - RNA, 19 nt, Homo sapiens
  misc_RNA (1)...(19): siRNA sense strand
uggccuccauuuccacaaa

SEQ ID NO: 1865488 - RNA, 19 nt, Homo sapiens
  misc_RNA (1)...(19): siRNA sense strand
gccggcagauagcugaguu

SEQ ID NO: 1865489 - RNA, 19 nt, Homo sapiens
  misc_RNA (1)...(19): siRNA sense strand
agaagaaccacccucaaca

SEQ ID NO: 1865490 - RNA, 19 nt, Homo sapiens
  misc_RNA (1)...(19): siRNA sense strand
gaaguccucagagcacaga

SEQ ID NO: 1865491 - RNA, 19 nt, Homo sapiens
  misc_RNA (1)...(19): siRNA sense strand
cacaaggaccacuaugaga

SEQ ID NO: 1865492 - RNA, 19 nt, Homo sapiens
  misc_RNA (1)...(19): siRNA sense strand
cccaucgccuacccucuaa

SEQ ID NO: 1865493 - RNA, 19 nt, Homo sapiens
  misc_RNA (1)...(19): siRNA sense strand
agacacgcacggucaagaa

SEQ ID NO: 1865494 - RNA, 19 nt, Homo sapiens
  misc_RNA (1)...(19): siRNA sense strand
caucuacugugcccucaac

SEQ ID NO: 1865495 - RNA, 19 nt, Homo sapiens
  misc_RNA (1)...(19): siRNA sense strand
aucacaagcucucagauca

SEQ ID NO: 1865496 - RNA, 19 nt, Homo sapiens
  misc_RNA (1)...(19): siRNA sense strand
cgucagcaauggcguucug

SEQ ID NO: 1865497 - RNA, 19 nt, Homo sapiens
  misc_RNA (1)...(19): siRNA sense strand
uguguugucaguacuguuu

SEQ ID NO: 1865498 - RNA, 19 nt, Homo sapiens
  misc_RNA (1)...(19): siRNA sense strand
ggacucucccuaccacuac

SEQ ID NO: 1865499 - RNA, 19 nt, Homo sapiens
  misc_RNA (1)...(19): siRNA sense strand
gcucuuuggcuccgaguuc

SEQ ID NO: 1865500 - RNA, 19 nt, Homo sapiens
  misc_RNA (1)...(19): siRNA sense strand
ucacaagcucucagaucaa

SEQ ID NO: 1865501 - RNA, 19 nt, Homo sapiens
  misc_RNA (1)...(19): siRNA sense strand
aggcgcugcugcaugauga

SEQ ID NO: 1865502 - RNA, 19 nt, Homo sapiens
  misc_RNA (1)...(19): siRNA sense strand
cagaguggucucagaagga

SEQ ID NO: 1865503 - RNA, 19 nt, Homo sapiens
  misc_RNA (1)...(19): siRNA sense strand
ugaugagaguggagcugaa

SEQ ID NO: 1865504 - RNA, 19 nt, Homo sapiens
  misc_RNA (1)...(19): siRNA sense strand
aagaaugucauggaacuga

SEQ ID NO: 1865505 - RNA, 19 nt, Homo sapiens
  misc_RNA (1)...(19): siRNA sense strand
guuggcuaccucaucaaua

SEQ ID NO: 1865506 - RNA, 19 nt, Homo sapiens
  misc_RNA (1)...(19): siRNA sense strand
ccucaacagccggcagaua

SEQ ID NO: 1865507 - RNA, 19 nt, Homo sapiens
  misc_RNA (1)...(19): siRNA sense strand
cacaagcucucagaucaac

SEQ ID NO: 1865508 - RNA, 19 nt, Homo sapiens
  misc_RNA (1)...(19): siRNA sense strand
ggauugcgucuccuacauc

SEQ ID NO: 1865509 - RNA, 19 nt, Homo sapiens
  misc_RNA (1)...(19): siRNA sense strand
ggagcugggccucuuggau

SEQ ID NO: 1865510 - RNA, 19 nt, Homo sapiens
  misc_RNA (1)...(19): siRNA sense strand
gaaguggucccuccccuau

SEQ ID NO: 1865511 - RNA, 19 nt, Homo sapiens
  misc_RNA (1)...(19): siRNA sense strand
gaucccagugguagcuauu

SEQ ID NO: 1865512 - RNA, 19 nt, Homo sapiens
  misc_RNA (1)...(19): siRNA sense strand
ggaccucauccugucauug

SEQ ID NO: 1865513 - RNA, 19 nt, Homo sapiens
  misc_RNA (1)...(19): siRNA sense strand
ugaagacccaggugaccaa

SEQ ID NO: 1865514 - RNA, 19 nt, Homo sapiens
  misc_RNA (1)...(19): siRNA sense strand
ggaaggcccuggcaucaga

SEQ ID NO: 1865515 - RNA, 19 nt, Homo sapiens
  misc_RNA (1)...(19): siRNA sense strand
gagaagacgggcucguaua

SEQ ID NO: 1865516 - RNA, 19 nt, Homo sapiens
  misc_RNA (1)...(19): siRNA sense strand
ccacucaggucacuuaugg

SEQ ID NO: 1865517 - RNA, 19 nt, Homo sapiens
  misc_RNA (1)...(19): siRNA sense strand
ggcuacaacuuccugauug

SEQ ID NO: 1865518 - RNA, 19 nt, Homo sapiens
  misc_RNA (1)...(19): siRNA sense strand
gcccugagguccaacuaug

SEQ ID NO: 1865519 - RNA, 19 nt, Homo sapiens
  misc_RNA (1)...(19): siRNA sense strand
ggagaagacgggcucguau

SEQ ID NO: 1865520 - RNA, 19 nt, Homo sapiens
  misc_RNA (1)...(19): siRNA sense strand
ccaacuaugugcucaaagg

SEQ ID NO: 1865521 - RNA, 19 nt, Homo sapiens
  misc_RNA (1)...(19): siRNA sense strand
ggccguggcuggaacuuca

SEQ ID NO: 1865522 - RNA, 19 nt, Homo sapiens
  misc_RNA (1)...(19): siRNA sense strand
cgacgugggcuacaacuuc

SEQ ID NO: 1865523 - RNA, 19 nt, Homo sapiens
  misc_RNA (1)...(19): siRNA sense strand
gggcuacaacuuccugauu

SEQ ID NO: 1865524 - RNA, 19 nt, Homo sapiens
  misc_RNA (1)...(19): siRNA sense strand
gcaccugagccugcccuua

SEQ ID NO: 1865525 - RNA, 19 nt, Homo sapiens
  misc_RNA (1)...(19): siRNA sense strand
guccaacuaugugcucaaa

SEQ ID NO: 1865526 - RNA, 19 nt, Homo sapiens
  misc_RNA (1)...(19): siRNA sense strand
gagccugcccuuacgcuau

SEQ ID NO: 1865527 - RNA, 19 nt, Homo sapiens
  misc_RNA (1)...(19): siRNA sense strand
gcuacaacuuccugauugg

SEQ ID NO: 1865528 - RNA, 19 nt, Homo sapiens
  misc_RNA (1)...(19): siRNA sense strand
ucuaccaccucauccagaa

SEQ ID NO: 1865529 - RNA, 19 nt, Homo sapiens
  misc_RNA (1)...(19): siRNA sense strand
caacuaugugcucaaagga

SEQ ID NO: 1865530 - RNA, 19 nt, Homo sapiens
  misc_RNA (1)...(19): siRNA sense strand
caaaggacaccgggaugug

SEQ ID NO: 1865531 - RNA, 19 nt, Homo sapiens
  misc_RNA (1)...(19): siRNA sense strand
cuucacgggugcccacuca

SEQ ID NO: 1865532 - RNA, 19 nt, Homo sapiens
  misc_RNA (1)...(19): siRNA sense strand
ggugcgacgugggcuacaa

SEQ ID NO: 1865533 - RNA, 19 nt, Homo sapiens
  misc_RNA (1)...(19): siRNA sense strand
uggagaagacgggcucgua

SEQ ID NO: 1865534 - RNA, 19 nt, Homo sapiens
  misc_RNA (1)...(19): siRNA sense strand
caacuuccugauuggagaa

SEQ ID NO: 1865535 - RNA, 19 nt, Homo sapiens
  misc_RNA (1)...(19): siRNA sense strand
gcagcacuaccacaugaag

SEQ ID NO: 1865536 - RNA, 19 nt, Homo sapiens
  misc_RNA (1)...(19): siRNA sense strand
caccugagccugcccuuac

SEQ ID NO: 1865537 - RNA, 19 nt, Homo sapiens
  misc_RNA (1)...(19): siRNA sense strand
gcacuaccacaugaagaca

SEQ ID NO: 1865538 - RNA, 19 nt, Homo sapiens
  misc_RNA (1)...(19): siRNA sense strand
ucaaaggacaccgggaugu

SEQ ID NO: 1865539 - RNA, 19 nt, Homo sapiens
  misc_RNA (1)...(19): siRNA sense strand
acucaggucacuuauggaa

SEQ ID NO: 1865540 - RNA, 19 nt, Homo sapiens
  misc_RNA (1)...(19): siRNA sense strand
gaacaaagcuuuauuaugc

SEQ ID NO: 1865541 - RNA, 19 nt, Homo sapiens
  misc_RNA (1)...(19): siRNA sense strand
gcaaaggaaugauguguuu

SEQ ID NO: 1865542 - RNA, 19 nt, Homo sapiens
  misc_RNA (1)...(19): siRNA sense strand
gcaaacagcugggcgcuua

SEQ ID NO: 1865543 - RNA, 19 nt, Homo sapiens
  misc_RNA (1)...(19): siRNA sense strand
gaaugcauguccaaauaua

SEQ ID NO: 1865544 - RNA, 19 nt, Homo sapiens
  misc_RNA (1)...(19): siRNA sense strand
gaaagggucuacucagcua

SEQ ID NO: 1865545 - RNA, 19 nt, Homo sapiens
  misc_RNA (1)...(19): siRNA sense strand
gaaacgaaaugaagaugau

SEQ ID NO: 1865546 - RNA, 19 nt, Homo sapiens
  misc_RNA (1)...(19): siRNA sense strand
ucaaacagaugcccugaaa

SEQ ID NO: 1865547 - RNA, 19 nt, Homo sapiens
  misc_RNA (1)...(19): siRNA sense strand
ggagguacaugaagaacuu

SEQ ID NO: 1865548 - RNA, 19 nt, Homo sapiens
  misc_RNA (1)...(19): siRNA sense strand
ccaaauacuuccaacuaaa

SEQ ID NO: 1865549 - RNA, 19 nt, Homo sapiens
  misc_RNA (1)...(19): siRNA sense strand
aagaaugcauguccaaaua

SEQ ID NO: 1865550 - RNA, 19 nt, Homo sapiens
  misc_RNA (1)...(19): siRNA sense strand
ggaaaucacuguaaaaugu

SEQ ID NO: 1865551 - RNA, 19 nt, Homo sapiens
  misc_RNA (1)...(19): siRNA sense strand
gaaguuaauuaccagaaug

SEQ ID NO: 1865552 - RNA, 19 nt, Homo sapiens
  misc_RNA (1)...(19): siRNA sense strand
gaagaguucuguugugaag

SEQ ID NO: 1865553 - RNA, 19 nt, Homo sapiens
  misc_RNA (1)...(19): siRNA sense strand
acagacaucucccaaauug

SEQ ID NO: 1865554 - RNA, 19 nt, Homo sapiens
  misc_RNA (1)...(19): siRNA sense strand
aggaagagcugaaucacua

SEQ ID NO: 1865555 - RNA, 19 nt, Homo sapiens
  misc_RNA (1)...(19): siRNA sense strand
gaagauaaagucacagaga

SEQ ID NO: 1865556 - RNA, 19 nt, Homo sapiens
  misc_RNA (1)...(19): siRNA sense strand
agacucugauguugaauua

SEQ ID NO: 1865557 - RNA, 19 nt, Homo sapiens
  misc_RNA (1)...(19): siRNA sense strand
gaacuuaccaaacucuuga

SEQ ID NO: 1865558 - RNA, 19 nt, Homo sapiens
  misc_RNA (1)...(19): siRNA sense strand
caaaccaacuggaaugaau

SEQ ID NO: 1865559 - RNA, 19 nt, Homo sapiens
  misc_RNA (1)...(19): siRNA sense strand
ccauaccucuucaccuuua

SEQ ID NO: 1865560 - RNA, 19 nt, Homo sapiens
  misc_RNA (1)...(19): siRNA sense strand
ugaagacucugauguugaa

SEQ ID NO: 1865561 - RNA, 19 nt, Homo sapiens
  misc_RNA (1)...(19): siRNA sense strand
ggaccaggacucugaagua

SEQ ID NO: 1865562 - RNA, 19 nt, Homo sapiens
  misc_RNA (1)...(19): siRNA sense strand
ucagaagaaugcuguuauu

SEQ ID NO: 1865563 - RNA, 19 nt, Homo sapiens
  misc_RNA (1)...(19): siRNA sense strand
gagggaaaguggaagaguu

SEQ ID NO: 1865564 - RNA, 19 nt, Homo sapiens
  misc_RNA (1)...(19): siRNA sense strand
caugucagauggaaguaua

SEQ ID NO: 1865565 - RNA, 19 nt, Homo sapiens
  misc_RNA (1)...(19): siRNA sense strand
caaguucaguguaacaguu

SEQ ID NO: 1865566 - RNA, 19 nt, Homo sapiens
  misc_RNA (1)...(19): siRNA sense strand
ugacauaucugagguucuu

SEQ ID NO: 1865567 - RNA, 19 nt, Homo sapiens
  misc_RNA (1)...(19): siRNA sense strand
gcuaacaaccucaccauga

SEQ ID NO: 1865568 - RNA, 19 nt, Homo sapiens
  misc_RNA (1)...(19): siRNA sense strand
aaaugaagaugaugagguu

SEQ ID NO: 1865569 - RNA, 19 nt, Homo sapiens
  misc_RNA (1)...(19): siRNA sense strand
gaaccuacaauacuuccua

SEQ ID NO: 1865570 - RNA, 19 nt, Homo sapiens
  misc_RNA (1)...(19): siRNA sense strand
gaagaaugcauguccaaau

SEQ ID NO: 1865571 - RNA, 19 nt, Homo sapiens
  misc_RNA (1)...(19): siRNA sense strand
gaaaacaccaccacuagua

SEQ ID NO: 1865572 - RNA, 19 nt, Homo sapiens
  misc_RNA (1)...(19): siRNA sense strand
caucuucaauggauaguga

SEQ ID NO: 1865573 - RNA, 19 nt, Homo sapiens
  misc_RNA (1)...(19): siRNA sense strand
guuaauugcuuaucugcuu

SEQ ID NO: 1865574 - RNA, 19 nt, Homo sapiens
  misc_RNA (1)...(19): siRNA sense strand
gagcuuuucuguucuguua

SEQ ID NO: 1865575 - RNA, 19 nt, Homo sapiens
  misc_RNA (1)...(19): siRNA sense strand
cuaacaaccucaccaugaa

SEQ ID NO: 1865576 - RNA, 19 nt, Homo sapiens
  misc_RNA (1)...(19): siRNA sense strand
ggaugacacugaaauacau

SEQ ID NO: 1865577 - RNA, 19 nt, Homo sapiens
  misc_RNA (1)...(19): siRNA sense strand
uagugaagguugcaaauug

SEQ ID NO: 1865578 - RNA, 19 nt, Homo sapiens
  misc_RNA (1)...(19): siRNA sense strand
caacaaaccaacuggaaug

SEQ ID NO: 1865579 - RNA, 19 nt, Homo sapiens
  misc_RNA (1)...(19): siRNA sense strand
gaacacgaacucuuucuag

SEQ ID NO: 1865580 - RNA, 19 nt, Homo sapiens
  misc_RNA (1)...(19): siRNA sense strand
cagaaaugauugcagaaga

SEQ ID NO: 1865581 - RNA, 19 nt, Homo sapiens
  misc_RNA (1)...(19): siRNA sense strand
uuacagacaucucccaaau

SEQ ID NO: 1865582 - RNA, 19 nt, Homo sapiens
  misc_RNA (1)...(19): siRNA sense strand
ccucagcaauuccucagua

SEQ ID NO: 1865583 - RNA, 19 nt, Homo sapiens
  misc_RNA (1)...(19): siRNA sense strand
ccagauaaacugacuguug

SEQ ID NO: 1865584 - RNA, 19 nt, Homo sapiens
  misc_RNA (1)...(19): siRNA sense strand
ccaaacuucugaacacgaa

SEQ ID NO: 1865585 - RNA, 19 nt, Homo sapiens
  misc_RNA (1)...(19): siRNA sense strand
gucaacauaugaacugaaa

SEQ ID NO: 1865586 - RNA, 19 nt, Homo sapiens
  misc_RNA (1)...(19): siRNA sense strand
gaauguuacugagcacuug

SEQ ID NO: 1865587 - RNA, 19 nt, Homo sapiens
  misc_RNA (1)...(19): siRNA sense strand
ucacagagaguauugaaga

SEQ ID NO: 1865588 - RNA, 19 nt, Homo sapiens
  misc_RNA (1)...(19): siRNA sense strand
ccaaaugugaugcuuguaa

SEQ ID NO: 1865589 - RNA, 19 nt, Homo sapiens
  misc_RNA (1)...(19): siRNA sense strand
gacaugaaguuaauuacca

SEQ ID NO: 1865590 - RNA, 19 nt, Homo sapiens
  misc_RNA (1)...(19): siRNA sense strand
gacaccauguuaacacgua

SEQ ID NO: 1865591 - RNA, 19 nt, Homo sapiens
  misc_RNA (1)...(19): siRNA sense strand
ggaaacgaaaugaagauga

SEQ ID NO: 1865592 - RNA, 19 nt, Homo sapiens
  misc_RNA (1)...(19): siRNA sense strand
cuacaauacuuccuaaugg

SEQ ID NO: 1865593 - RNA, 19 nt, Homo sapiens
  misc_RNA (1)...(19): siRNA sense strand
gauaaagucacagagagua

SEQ ID NO: 1865594 - RNA, 19 nt, Homo sapiens
  misc_RNA (1)...(19): siRNA sense strand
gcacuugaagcuuuccuuu

SEQ ID NO: 1865595 - RNA, 19 nt, Homo sapiens
  misc_RNA (1)...(19): siRNA sense strand
gaacuguugugagaacugu

SEQ ID NO: 1865596 - RNA, 19 nt, Homo sapiens
  misc_RNA (1)...(19): siRNA sense strand
ggagucagaaccagauaaa

SEQ ID NO: 1865597 - RNA, 19 nt, Homo sapiens
  misc_RNA (1)...(19): siRNA sense strand
gaagaggacggaagaaguc

SEQ ID NO: 1865598 - RNA, 19 nt, Homo sapiens
  misc_RNA (1)...(19): siRNA sense strand
gaaucacuaugccuuaaag

SEQ ID NO: 1865599 - RNA, 19 nt, Homo sapiens
  misc_RNA (1)...(19): siRNA sense strand
ugagauggcagaaaugauu

SEQ ID NO: 1865600 - RNA, 19 nt, Homo sapiens
  misc_RNA (1)...(19): siRNA sense strand
cagcaaauauuuccauggu

SEQ ID NO: 1865601 - RNA, 19 nt, Homo sapiens
  misc_RNA (1)...(19): siRNA sense strand
ucuguaaccugcuuuguau

SEQ ID NO: 1865602 - RNA, 19 nt, Homo sapiens
  misc_RNA (1)...(19): siRNA sense strand
ucaaaugucaacacuguaa

SEQ ID NO: 1865603 - RNA, 19 nt, Homo sapiens
  misc_RNA (1)...(19): siRNA sense strand
gcagaaaucagccaaaauu

SEQ ID NO: 1865604 - RNA, 19 nt, Homo sapiens
  misc_RNA (1)...(19): siRNA sense strand
caauggauagugaagauaa

SEQ ID NO: 1865605 - RNA, 19 nt, Homo sapiens
  misc_RNA (1)...(19): siRNA sense strand
guaucuugauguucuguaa

SEQ ID NO: 1865606 - RNA, 19 nt, Homo sapiens
  misc_RNA (1)...(19): siRNA sense strand
gaaguguugugaaacucaa

SEQ ID NO: 1865607 - RNA, 19 nt, Homo sapiens
  misc_RNA (1)...(19): siRNA sense strand
ugugguagcuuuccagaau

SEQ ID NO: 1865608 - RNA, 19 nt, Homo sapiens
  misc_RNA (1)...(19): siRNA sense strand
cauaaacuuugcagugaug

SEQ ID NO: 1865609 - RNA, 19 nt, Homo sapiens
  misc_RNA (1)...(19): siRNA sense strand
ugagggagguacaugaaga

SEQ ID NO: 1865610 - RNA, 19 nt, Homo sapiens
  misc_RNA (1)...(19): siRNA sense strand
caauacuuccuaaugguua

SEQ ID NO: 1865611 - RNA, 19 nt, Homo sapiens
  misc_RNA (1)...(19): siRNA sense strand
cuaucaagcugaaggaaga

SEQ ID NO: 1865612 - RNA, 19 nt, Homo sapiens
  misc_RNA (1)...(19): siRNA sense strand
uaaccugcuuuguaucuug

SEQ ID NO: 1865613 - RNA, 19 nt, Homo sapiens
  misc_RNA (1)...(19): siRNA sense strand
ggccaaaugugaugcuugu

SEQ ID NO: 1865614 - RNA, 19 nt, Homo sapiens
  misc_RNA (1)...(19): siRNA sense strand
gcaaaacgcuggggaaauc

SEQ ID NO: 1865615 - RNA, 19 nt, Homo sapiens
  misc_RNA (1)...(19): siRNA sense strand
uaauggcaaugugugaaua

SEQ ID NO: 1865616 - RNA, 19 nt, Homo sapiens
  misc_RNA (1)...(19): siRNA sense strand
cagcagaaaugauugaaaa

SEQ ID NO: 1865617 - RNA, 19 nt, Homo sapiens
  misc_RNA (1)...(19): siRNA sense strand
gcauugaggaagagcauuu

SEQ ID NO: 1865618 - RNA, 19 nt, Homo sapiens
  misc_RNA (1)...(19): siRNA sense strand
caaaugugaugcuuguaag

SEQ ID NO: 1865619 - RNA, 19 nt, Homo sapiens
  misc_RNA (1)...(19): siRNA sense strand
gacaagucauucuguagug

SEQ ID NO: 1865620 - RNA, 19 nt, Homo sapiens
  misc_RNA (1)...(19): siRNA sense strand
ucuaucagauggccaaaug

SEQ ID NO: 1865621 - RNA, 19 nt, Homo sapiens
  misc_RNA (1)...(19): siRNA sense strand
ggguggagauggcagagaa

SEQ ID NO: 1865622 - RNA, 19 nt, Homo sapiens
  misc_RNA (1)...(19): siRNA sense strand
ccaaggaaguacauacagu

SEQ ID NO: 1865623 - RNA, 19 nt, Homo sapiens
  misc_RNA (1)...(19): siRNA sense strand
gaagaugaagagaagaaga

SEQ ID NO: 1865624 - RNA, 19 nt, Homo sapiens
  misc_RNA (1)...(19): siRNA sense strand
agauucgacuccaguuaua

SEQ ID NO: 1865625 - RNA, 19 nt, Homo sapiens
  misc_RNA (1)...(19): siRNA sense strand
ugauugaacuuaccaaacu

SEQ ID NO: 1865626 - RNA, 19 nt, Homo sapiens
  misc_RNA (1)...(19): siRNA sense strand
ugaguugaguuugggcuua

SEQ ID NO: 1865627 - RNA, 19 nt, Homo sapiens
  misc_RNA (1)...(19): siRNA sense strand
agaagaagacucuaucuca

SEQ ID NO: 1865628 - RNA, 19 nt, Homo sapiens
  misc_RNA (1)...(19): siRNA sense strand
aaacaaagaaugccagaca

SEQ ID NO: 1865629 - RNA, 19 nt, Homo sapiens
  misc_RNA (1)...(19): siRNA sense strand
gaaugugguccauaaacuu

SEQ ID NO: 1865630 - RNA, 19 nt, Homo sapiens
  misc_RNA (1)...(19): siRNA sense strand
cgaguuuccuguucugguu

SEQ ID NO: 1865631 - RNA, 19 nt, Homo sapiens
  misc_RNA (1)...(19): siRNA sense strand
uaccaaauacuuccaacua

SEQ ID NO: 1865632 - RNA, 19 nt, Homo sapiens
  misc_RNA (1)...(19): siRNA sense strand
agaaaugauugcagaagau

SEQ ID NO: 1865633 - RNA, 19 nt, Homo sapiens
  misc_RNA (1)...(19): siRNA sense strand
uggaagaguucuguuguga

SEQ ID NO: 1865634 - RNA, 19 nt, Homo sapiens
  misc_RNA (1)...(19): siRNA sense strand
guuaacacguauucucaug

SEQ ID NO: 1865635 - RNA, 19 nt, Homo sapiens
  misc_RNA (1)...(19): siRNA sense strand
acugagcacuugaagcuuu

SEQ ID NO: 1865636 - RNA, 19 nt, Homo sapiens
  misc_RNA (1)...(19): siRNA sense strand
gagcccuauuccagauuua

SEQ ID NO: 1865637 - RNA, 19 nt, Homo sapiens
  misc_RNA (1)...(19): siRNA sense strand
guaaaugcuuggaagaacu

SEQ ID NO: 1865638 - RNA, 19 nt, Homo sapiens
  misc_RNA (1)...(19): siRNA sense strand
ggacggaagaagucuauag

SEQ ID NO: 1865639 - RNA, 19 nt, Homo sapiens
  misc_RNA (1)...(19): siRNA sense strand
gcaaguacucaaacagaug

SEQ ID NO: 1865640 - RNA, 19 nt, Homo sapiens
  misc_RNA (1)...(19): siRNA sense strand
gagaaacucuugcaugaga

SEQ ID NO: 1865641 - RNA, 19 nt, Homo sapiens
  misc_RNA (1)...(19): siRNA sense strand
ggaagacugugaccuguuu

SEQ ID NO: 1865642 - RNA, 19 nt, Homo sapiens
  misc_RNA (1)...(19): siRNA sense strand
aaacaggacuucacuaaga

SEQ ID NO: 1865643 - RNA, 19 nt, Homo sapiens
  misc_RNA (1)...(19): siRNA sense strand
caaaggaagucaaacagaa

SEQ ID NO: 1865644 - RNA, 19 nt, Homo sapiens
  misc_RNA (1)...(19): siRNA sense strand
aaacaaggcugccaugugu

SEQ ID NO: 1865645 - RNA, 19 nt, Homo sapiens
  misc_RNA (1)...(19): siRNA sense strand
gcaagacccuguguaagaa

SEQ ID NO: 1865646 - RNA, 19 nt, Homo sapiens
  misc_RNA (1)...(19): siRNA sense strand
gagaugaaguccaaaggaa

SEQ ID NO: 1865647 - RNA, 19 nt, Homo sapiens
  misc_RNA (1)...(19): siRNA sense strand
ggacauuaaucccagugua

SEQ ID NO: 1865648 - RNA, 19 nt, Homo sapiens
  misc_RNA (1)...(19): siRNA sense strand
guaccgggcucaacuauuc

SEQ ID NO: 1865649 - RNA, 19 nt, Homo sapiens
  misc_RNA (1)...(19): siRNA sense strand
gauaugaaccugacaguau

SEQ ID NO: 1865650 - RNA, 19 nt, Homo sapiens
  misc_RNA (1)...(19): siRNA sense strand
gagaggaucuacuggaauc

SEQ ID NO: 1865651 - RNA, 19 nt, Homo sapiens
  misc_RNA (1)...(19): siRNA sense strand
gagaccaccuccauagcua

SEQ ID NO: 1865652 - RNA, 19 nt, Homo sapiens
  misc_RNA (1)...(19): siRNA sense strand
gaacucaacaagucucuga

SEQ ID NO: 1865653 - RNA, 19 nt, Homo sapiens
  misc_RNA (1)...(19): siRNA sense strand
agaauccucuggacauuaa

SEQ ID NO: 1865654 - RNA, 19 nt, Homo sapiens
  misc_RNA (1)...(19): siRNA sense strand
gcuacucgcugcagcauau

SEQ ID NO: 1865655 - RNA, 19 nt, Homo sapiens
  misc_RNA (1)...(19): siRNA sense strand
gcaagaaggagaucuggaa

SEQ ID NO: 1865656 - RNA, 19 nt, Homo sapiens
  misc_RNA (1)...(19): siRNA sense strand
guaagccacugaugcagaa

SEQ ID NO: 1865657 - RNA, 19 nt, Homo sapiens
  misc_RNA (1)...(19): siRNA sense strand
caacaguucucagaccaaa

SEQ ID NO: 1865658 - RNA, 19 nt, Homo sapiens
  misc_RNA (1)...(19): siRNA sense strand
uaucacauguggaucguaa

SEQ ID NO: 1865659 - RNA, 19 nt, Homo sapiens
  misc_RNA (1)...(19): siRNA sense strand
ggagagcacagacaagauu

SEQ ID NO: 1865660 - RNA, 19 nt, Homo sapiens
  misc_RNA (1)...(19): siRNA sense strand
gagaacagcaacacaguga

SEQ ID NO: 1865661 - RNA, 19 nt, Homo sapiens
  misc_RNA (1)...(19): siRNA sense strand
ggaaucaacaguucucaga

SEQ ID NO: 1865662 - RNA, 19 nt, Homo sapiens
  misc_RNA (1)...(19): siRNA sense strand
gaggcagacuucccuaaga

SEQ ID NO: 1865663 - RNA, 19 nt, Homo sapiens
  misc_RNA (1)...(19): siRNA sense strand
gcuccagauucuccaauaa

SEQ ID NO: 1865664 - RNA, 19 nt, Homo sapiens
  misc_RNA (1)...(19): siRNA sense strand
ggaugugucuacugaacaa

SEQ ID NO: 1865665 - RNA, 19 nt, Homo sapiens
  misc_RNA (1)...(19): siRNA sense strand
aggagaaacucuugcauga

SEQ ID NO: 1865666 - RNA, 19 nt, Homo sapiens
  misc_RNA (1)...(19): siRNA sense strand
gggcuuacaucuacaccaa

SEQ ID NO: 1865667 - RNA, 19 nt, Homo sapiens
  misc_RNA (1)...(19): siRNA sense strand
cauccugccucaccacuuu

SEQ ID NO: 1865668 - RNA, 19 nt, Homo sapiens
  misc_RNA (1)...(19): siRNA sense strand
gcagugggcaccaagauga

SEQ ID NO: 1865669 - RNA, 19 nt, Homo sapiens
  misc_RNA (1)...(19): siRNA sense strand
gggcucaacuauucauaug

SEQ ID NO: 1865670 - RNA, 19 nt, Homo sapiens
  misc_RNA (1)...(19): siRNA sense strand
ggauggagccacugaguug

SEQ ID NO: 1865671 - RNA, 19 nt, Homo sapiens
  misc_RNA (1)...(19): siRNA sense strand
uaagaauccucuggacauu

SEQ ID NO: 1865672 - RNA, 19 nt, Homo sapiens
  misc_RNA (1)...(19): siRNA sense strand
gagcaccucugggagugua

SEQ ID NO: 1865673 - RNA, 19 nt, Homo sapiens
  misc_RNA (1)...(19): siRNA sense strand
gggauggaaucaacaguuc

SEQ ID NO: 1865674 - RNA, 19 nt, Homo sapiens
  misc_RNA (1)...(19): siRNA sense strand
cgagucaccucucugguau

SEQ ID NO: 1865675 - RNA, 19 nt, Homo sapiens
  misc_RNA (1)...(19): siRNA sense strand
caacucuccuucaccaaug

SEQ ID NO: 1865676 - RNA, 19 nt, Homo sapiens
  misc_RNA (1)...(19): siRNA sense strand
acaaacaggacuucacuaa

SEQ ID NO: 1865677 - RNA, 19 nt, Homo sapiens
  misc_RNA (1)...(19): siRNA sense strand
cagagggacuccuggaaga

SEQ ID NO: 1865678 - RNA, 19 nt, Homo sapiens
  misc_RNA (1)...(19): siRNA sense strand
gcauuccagugucagauga

SEQ ID NO: 1865679 - RNA, 19 nt, Homo sapiens
  misc_RNA (1)...(19): siRNA sense strand
ggaggaagaccuggacuga

SEQ ID NO: 1865680 - RNA, 19 nt, Homo sapiens
  misc_RNA (1)...(19): siRNA sense strand
gcccaauggugaacgauau

SEQ ID NO: 1865681 - RNA, 19 nt, Homo sapiens
  misc_RNA (1)...(19): siRNA sense strand
ggauucugaugccauggua

SEQ ID NO: 1865682 - RNA, 19 nt, Homo sapiens
  misc_RNA (1)...(19): siRNA sense strand
gcugugugcugcuguacaa

SEQ ID NO: 1865683 - RNA, 19 nt, Homo sapiens
  misc_RNA (1)...(19): siRNA sense strand
gcucaacuauucauauggu

SEQ ID NO: 1865684 - RNA, 19 nt, Homo sapiens
  misc_RNA (1)...(19): siRNA sense strand
gcuuacaucuacaccaaga

SEQ ID NO: 1865685 - RNA, 19 nt, Homo sapiens
  misc_RNA (1)...(19): siRNA sense strand
gaaaucacucggcccaaug

SEQ ID NO: 1865686 - RNA, 19 nt, Homo sapiens
  misc_RNA (1)...(19): siRNA sense strand
ugcagaggcugaggaguua

SEQ ID NO: 1865687 - RNA, 19 nt, Homo sapiens
  misc_RNA (1)...(19): siRNA sense strand
gaaccaacccaaccuggau

SEQ ID NO: 1865688 - RNA, 19 nt, Homo sapiens
  misc_RNA (1)...(19): siRNA sense strand
ccaugugucuggugcaaga

SEQ ID NO: 1865689 - RNA, 19 nt, Homo sapiens
  misc_RNA (1)...(19): siRNA sense strand
gcagacagcugaggaacac

SEQ ID NO: 1865690 - RNA, 19 nt, Homo sapiens
  misc_RNA (1)...(19): siRNA sense strand
ggccucaucugaccuuugu

SEQ ID NO: 1865691 - RNA, 19 nt, Homo sapiens
  misc_RNA (1)...(19): siRNA sense strand
gggcagauccgucauuucu

SEQ ID NO: 1865692 - RNA, 19 nt, Homo sapiens
  misc_RNA (1)...(19): siRNA sense strand
uaagaacuuugagaugcua

SEQ ID NO: 1865693 - RNA, 19 nt, Homo sapiens
  misc_RNA (1)...(19): siRNA sense strand
cuccauagcuacugcaaga

SEQ ID NO: 1865694 - RNA, 19 nt, Homo sapiens
  misc_RNA (1)...(19): siRNA sense strand
gcccuggaccugcuugaua

SEQ ID NO: 1865695 - RNA, 19 nt, Homo sapiens
  misc_RNA (1)...(19): siRNA sense strand
ggaagcugcuggagaccau

SEQ ID NO: 1865696 - RNA, 19 nt, Homo sapiens
  misc_RNA (1)...(19): siRNA sense strand
gaaacucuugcaugagaaa

SEQ ID NO: 1865697 - RNA, 19 nt, Homo sapiens
  misc_RNA (1)...(19): siRNA sense strand
gcauucaccugagcuguca

SEQ ID NO: 1865698 - RNA, 19 nt, Homo sapiens
  misc_RNA (1)...(19): siRNA sense strand
ggugcaagacccuguguaa

SEQ ID NO: 1865699 - RNA, 19 nt, Homo sapiens
  misc_RNA (1)...(19): siRNA sense strand
ggagaugaaguccaaagga

SEQ ID NO: 1865700 - RNA, 19 nt, Homo sapiens
  misc_RNA (1)...(19): siRNA sense strand
gcgcgagauuuaugaggaa

SEQ ID NO: 1865701 - RNA, 19 nt, Homo sapiens
  misc_RNA (1)...(19): siRNA sense strand
gcaacgauguguucuaccu

SEQ ID NO: 1865702 - RNA, 19 nt, Homo sapiens
  misc_RNA (1)...(19): siRNA sense strand
cugaggaugugucuacuga

SEQ ID NO: 1865703 - RNA, 19 nt, Homo sapiens
  misc_RNA (1)...(19): siRNA sense strand
uugaggagcugaaggugaa

SEQ ID NO: 1865704 - RNA, 19 nt, Homo sapiens
  misc_RNA (1)...(19): siRNA sense strand
ucacggaccuuuacuaccu

SEQ ID NO: 1865705 - RNA, 19 nt, Homo sapiens
  misc_RNA (1)...(19): siRNA sense strand
gaggaugugucuacugaac

SEQ ID NO: 1865706 - RNA, 19 nt, Homo sapiens
  misc_RNA (1)...(19): siRNA sense strand
caguguagacuuccucuuu

SEQ ID NO: 1865707 - RNA, 19 nt, Homo sapiens
  misc_RNA (1)...(19): siRNA sense strand
caucugaccuuugugaucu

SEQ ID NO: 1865708 - RNA, 19 nt, Homo sapiens
  misc_RNA (1)...(19): siRNA sense strand
gauucuugcuucuccaaau

SEQ ID NO: 1865709 - RNA, 19 nt, Homo sapiens
  misc_RNA (1)...(19): siRNA sense strand
gcaacucuccuucaccaau

SEQ ID NO: 1865710 - RNA, 19 nt, Homo sapiens
  misc_RNA (1)...(19): siRNA sense strand
guguagacuuccucuuuga

SEQ ID NO: 1865711 - RNA, 19 nt, Homo sapiens
  misc_RNA (1)...(19): siRNA sense strand
gacacccucucaaaccaaa

SEQ ID NO: 1865712 - RNA, 19 nt, Homo sapiens
  misc_RNA (1)...(19): siRNA sense strand
caaaagcgguucugcaaca

SEQ ID NO: 1865713 - RNA, 19 nt, Homo sapiens
  misc_RNA (1)...(19): siRNA sense strand
gcccugagcuccucuucca

SEQ ID NO: 1865714 - RNA, 19 nt, Homo sapiens
  misc_RNA (1)...(19): siRNA sense strand
gugaugagcugcgcuuugg

SEQ ID NO: 1865715 - RNA, 19 nt, Homo sapiens
  misc_RNA (1)...(19): siRNA sense strand
guagacuuccucuuugauu

SEQ ID NO: 1865716 - RNA, 19 nt, Homo sapiens
  misc_RNA (1)...(19): siRNA sense strand
aagagaagcgagcgcguua

SEQ ID NO: 1865717 - RNA, 19 nt, Homo sapiens
  misc_RNA (1)...(19): siRNA sense strand
uagacuuccucuuugauug

SEQ ID NO: 1865718 - RNA, 19 nt, Homo sapiens
  misc_RNA (1)...(19): siRNA sense strand
ggcuccagauucuccaaua

SEQ ID NO: 1865719 - RNA, 19 nt, Homo sapiens
  misc_RNA (1)...(19): siRNA sense strand
aggcagacuucccuaagaa

SEQ ID NO: 1865720 - RNA, 19 nt, Homo sapiens
  misc_RNA (1)...(19): siRNA sense strand
ccaaaggaagucaaacaga

SEQ ID NO: 1865721 - RNA, 19 nt, Homo sapiens
  misc_RNA (1)...(19): siRNA sense strand
ggaccaaguguuccaguuc

SEQ ID NO: 1865722 - RNA, 19 nt, Homo sapiens
  misc_RNA (1)...(19): siRNA sense strand
guaagaacuuugagaugcu

SEQ ID NO: 1865723 - RNA, 19 nt, Homo sapiens
  misc_RNA (1)...(19): siRNA sense strand
uggagaggaucuacuggaa

SEQ ID NO: 1865724 - RNA, 19 nt, Homo sapiens
  misc_RNA (1)...(19): siRNA sense strand
gaccaaguguuccaguucu

SEQ ID NO: 1865725 - RNA, 19 nt, Homo sapiens
  misc_RNA (1)...(19): siRNA sense strand
ccgcugcccugucaaguuc

SEQ ID NO: 1865726 - RNA, 19 nt, Homo sapiens
  misc_RNA (1)...(19): siRNA sense strand
cagucaagauggccaaugu

SEQ ID NO: 1865727 - RNA, 19 nt, Homo sapiens
  misc_RNA (1)...(19): siRNA sense strand
ugagagcauuccaguguca

SEQ ID NO: 1865728 - RNA, 19 nt, Homo sapiens
  misc_RNA (1)...(19): siRNA sense strand
gugggcagauccgucauuu

SEQ ID NO: 1865729 - RNA, 19 nt, Homo sapiens
  misc_RNA (1)...(19): siRNA sense strand
aagaccagcuuguucuguu

SEQ ID NO: 1865730 - RNA, 19 nt, Homo sapiens
  misc_RNA (1)...(19): siRNA sense strand
caguagacauggaauuugg

SEQ ID NO: 1865731 - RNA, 19 nt, Homo sapiens
  misc_RNA (1)...(19): siRNA sense strand
caccggcucugcagcgauu

SEQ ID NO: 1865732 - RNA, 19 nt, Homo sapiens
  misc_RNA (1)...(19): siRNA sense strand
uucaagaacucaacaaguc

SEQ ID NO: 1865733 - RNA, 19 nt, Homo sapiens
  misc_RNA (1)...(19): siRNA sense strand
agaaaucacucggcccaau

SEQ ID NO: 1865734 - RNA, 19 nt, Homo sapiens
  misc_RNA (1)...(19): siRNA sense strand
acaaggcugccauguguaa

SEQ ID NO: 1865735 - RNA, 19 nt, Homo sapiens
  misc_RNA (1)...(19): siRNA sense strand
caugagaaacuccgauuca

SEQ ID NO: 1865736 - RNA, 19 nt, Homo sapiens
  misc_RNA (1)...(19): siRNA sense strand
ugcaagacccuguguaaga

SEQ ID NO: 1865737 - RNA, 19 nt, Homo sapiens
  misc_RNA (1)...(19): siRNA sense strand
ggccauggcagucaagaug

SEQ ID NO: 1865738 - RNA, 19 nt, Homo sapiens
  misc_RNA (1)...(19): siRNA sense strand
cauugacccugccagagaa

SEQ ID NO: 1865739 - RNA, 19 nt, Homo sapiens
  misc_RNA (1)...(19): siRNA sense strand
gcagucagccuaguuguac

SEQ ID NO: 1865740 - RNA, 19 nt, Homo sapiens
  misc_RNA (1)...(19): siRNA sense strand
gacaagggcuucacagaua

SEQ ID NO: 1865741 - RNA, 19 nt, Homo sapiens
  misc_RNA (1)...(19): siRNA sense strand
ccaagcaccuucccaguug

SEQ ID NO: 1865742 - RNA, 19 nt, Homo sapiens
  misc_RNA (1)...(19): siRNA sense strand
gauaaacuguucuacaucu

SEQ ID NO: 1865743 - RNA, 19 nt, Homo sapiens
  misc_RNA (1)...(19): siRNA sense strand
acaagaagauugccaagga

SEQ ID NO: 1865744 - RNA, 19 nt, Homo sapiens
  misc_RNA (1)...(19): siRNA sense strand
cagauaaacuguucuacau

SEQ ID NO: 1865745 - RNA, 19 nt, Homo sapiens
  misc_RNA (1)...(19): siRNA sense strand
agacagagcuacggaagga

SEQ ID NO: 1865746 - RNA, 19 nt, Homo sapiens
  misc_RNA (1)...(19): siRNA sense strand
aaacaggaaccuacaaguu

SEQ ID NO: 1865747 - RNA, 19 nt, Homo sapiens
  misc_RNA (1)...(19): siRNA sense strand
gugaagacccgcuguucua

SEQ ID NO: 1865748 - RNA, 19 nt, Homo sapiens
  misc_RNA (1)...(19): siRNA sense strand
acaagggcuucacagauaa

SEQ ID NO: 1865749 - RNA, 19 nt, Homo sapiens
  misc_RNA (1)...(19): siRNA sense strand
caucaggcgcgauaucuuu

SEQ ID NO: 1865750 - RNA, 19 nt, Homo sapiens
  misc_RNA (1)...(19): siRNA sense strand
gcgcuuugcucaggucuug

SEQ ID NO: 1865751 - RNA, 19 nt, Homo sapiens
  misc_RNA (1)...(19): siRNA sense strand
caagaagauugccaaggau

SEQ ID NO: 1865752 - RNA, 19 nt, Homo sapiens
  misc_RNA (1)...(19): siRNA sense strand
gaccaggccuaccuuacug

SEQ ID NO: 1865753 - RNA, 19 nt, Homo sapiens
  misc_RNA (1)...(19): siRNA sense strand
uggcugcccugguguacua

SEQ ID NO: 1865754 - RNA, 19 nt, Homo sapiens
  misc_RNA (1)...(19): siRNA sense strand
caggaaacaucgugggaau

SEQ ID NO: 1865755 - RNA, 19 nt, Homo sapiens
  misc_RNA (1)...(19): siRNA sense strand
aaguacaacugcacgauug

SEQ ID NO: 1865756 - RNA, 19 nt, Homo sapiens
  misc_RNA (1)...(19): siRNA sense strand
ggacgauuguaucaaguac

SEQ ID NO: 1865757 - RNA, 19 nt, Homo sapiens
  misc_RNA (1)...(19): siRNA sense strand
ucuccaagcuggugcugaa

SEQ ID NO: 1865758 - RNA, 19 nt, Homo sapiens
  misc_RNA (1)...(19): siRNA sense strand
gggccagagugcaacugua

SEQ ID NO: 1865759 - RNA, 19 nt, Homo sapiens
  misc_RNA (1)...(19): siRNA sense strand
gugaugugcuggugaugga

SEQ ID NO: 1865760 - RNA, 19 nt, Homo sapiens
  misc_RNA (1)...(19): siRNA sense strand
caaguacaacugcacgauu

SEQ ID NO: 1865761 - RNA, 19 nt, Homo sapiens
  misc_RNA (1)...(19): siRNA sense strand
gagcugggcuaccuguacu

SEQ ID NO: 1865762 - RNA, 19 nt, Homo sapiens
  misc_RNA (1)...(19): siRNA sense strand
ccacucagcaggaaacauc

SEQ ID NO: 1865763 - RNA, 19 nt, Homo sapiens
  misc_RNA (1)...(19): siRNA sense strand
ccagguggcugaguucuac

SEQ ID NO: 1865764 - RNA, 19 nt, Homo sapiens
  misc_RNA (1)...(19): siRNA sense strand
ggacagugcccauuuuguu

SEQ ID NO: 1865765 - RNA, 19 nt, Homo sapiens
  misc_RNA (1)...(19): siRNA sense strand
gggacgauuguaucaagua

SEQ ID NO: 1865766 - RNA, 19 nt, Homo sapiens
  misc_RNA (1)...(19): siRNA sense strand
gcaugacgguggugauucg

SEQ ID NO: 1865767 - RNA, 19 nt, Homo sapiens
  misc_RNA (1)...(19): siRNA sense strand
ugacaagggcuucacagau

SEQ ID NO: 1865768 - RNA, 19 nt, Homo sapiens
  misc_RNA (1)...(19): siRNA sense strand
ggaccaggccuaccuuacu

SEQ ID NO: 1865769 - RNA, 19 nt, Homo sapiens
  misc_RNA (1)...(19): siRNA sense strand
uggcugacguggccgugua

SEQ ID NO: 1865770 - RNA, 19 nt, Homo sapiens
  misc_RNA (1)...(19): siRNA sense strand
agacggcccugaucuucga

SEQ ID NO: 1865771 - RNA, 19 nt, Homo sapiens
  misc_RNA (1)...(19): siRNA sense strand
gcuguucuaucuacaucga

SEQ ID NO: 1865772 - RNA, 19 nt, Homo sapiens
  misc_RNA (1)...(19): siRNA sense strand
caagcaguguagccaacuu

SEQ ID NO: 1865773 - RNA, 19 nt, Homo sapiens
  misc_RNA (1)...(19): siRNA sense strand
aaacuguucuacaucuaca

SEQ ID NO: 1865774 - RNA, 19 nt, Homo sapiens
  misc_RNA (1)...(19): siRNA sense strand
gccaacaacaagaagauug

SEQ ID NO: 1865775 - RNA, 19 nt, Homo sapiens
  misc_RNA (1)...(19): siRNA sense strand
ggaaacaucgugggaaucg

SEQ ID NO: 1865776 - RNA, 19 nt, Homo sapiens
  misc_RNA (1)...(19): siRNA sense strand
gaagacccgcuguucuauc

SEQ ID NO: 1865777 - RNA, 19 nt, Homo sapiens
  misc_RNA (1)...(19): siRNA sense strand
cgacaagacggcccugauc

SEQ ID NO: 1865778 - RNA, 19 nt, Homo sapiens
  misc_RNA (1)...(19): siRNA sense strand
gaagauugccaaggauguc

SEQ ID NO: 1865779 - RNA, 19 nt, Homo sapiens
  misc_RNA (1)...(19): siRNA sense strand
uugcucaggucuuggagaa

SEQ ID NO: 1865780 - RNA, 19 nt, Homo sapiens
  misc_RNA (1)...(19): siRNA sense strand
gggcuucacagauaaacug

SEQ ID NO: 1865781 - RNA, 19 nt, Homo sapiens
  misc_RNA (1)...(19): siRNA sense strand
gcauggcugcccuggugua

SEQ ID NO: 1865782 - RNA, 19 nt, Homo sapiens
  misc_RNA (1)...(19): siRNA sense strand
uccgccagcuggaugagua

SEQ ID NO: 1865783 - RNA, 19 nt, Homo sapiens
  misc_RNA (1)...(19): siRNA sense strand
gacccgcuguucuaucuac

SEQ ID NO: 1865784 - RNA, 19 nt, Homo sapiens
  misc_RNA (1)...(19): siRNA sense strand
ugccaaggaugucuucaag

SEQ ID NO: 1865785 - RNA, 19 nt, Homo sapiens
  misc_RNA (1)...(19): siRNA sense strand
ccuggacccucugcugaaa

SEQ ID NO: 1865786 - RNA, 19 nt, Homo sapiens
  misc_RNA (1)...(19): siRNA sense strand
caagggcuucacagauaaa

SEQ ID NO: 1865787 - RNA, 19 nt, Homo sapiens
  misc_RNA (1)...(19): siRNA sense strand
aagacccgcuguucuaucu

SEQ ID NO: 1865788 - RNA, 19 nt, Homo sapiens
  misc_RNA (1)...(19): siRNA sense strand
ccaagcuggugcugaaacu

SEQ ID NO: 1865789 - RNA, 19 nt, Homo sapiens
  misc_RNA (1)...(19): siRNA sense strand
cuaccuuacuggugaugug

SEQ ID NO: 1865790 - RNA, 19 nt, Homo sapiens
  misc_RNA (1)...(19): siRNA sense strand
uggacccucugcugaaaga

SEQ ID NO: 1865791 - RNA, 19 nt, Homo sapiens
  misc_RNA (1)...(19): siRNA sense strand
ugacccggcuauugugaag

SEQ ID NO: 1865792 - RNA, 19 nt, Homo sapiens
  misc_RNA (1)...(19): siRNA sense strand
uggagaaccgcaaugaguu

SEQ ID NO: 1865793 - RNA, 19 nt, Homo sapiens
  misc_RNA (1)...(19): siRNA sense strand
cggcggacagugcccauuu

SEQ ID NO: 1865794 - RNA, 19 nt, Homo sapiens
  misc_RNA (1)...(19): siRNA sense strand
ggccagagugcaacuguag

SEQ ID NO: 1865795 - RNA, 19 nt, Homo sapiens
  misc_RNA (1)...(19): siRNA sense strand
gacaagacggcccugaucu

SEQ ID NO: 1865796 - RNA, 19 nt, Homo sapiens
  misc_RNA (1)...(19): siRNA sense strand
caagcaccuucccaguugu

SEQ ID NO: 1865797 - RNA, 19 nt, Homo sapiens
  misc_RNA (1)...(19): siRNA sense strand
uccugaaggugaaggcaaa

SEQ ID NO: 1865798 - RNA, 19 nt, Homo sapiens
  misc_RNA (1)...(19): siRNA sense strand
cccaagcaccuucccaguu

SEQ ID NO: 1865799 - RNA, 19 nt, Homo sapiens
  misc_RNA (1)...(19): siRNA sense strand
ugaagacccgcuguucuau

SEQ ID NO: 1865800 - RNA, 19 nt, Homo sapiens
  misc_RNA (1)...(19): siRNA sense strand
gccgcuaccuccugaacca

SEQ ID NO: 1865801 - RNA, 19 nt, Homo sapiens
  misc_RNA (1)...(19): siRNA sense strand
gggugcugcuguucuccaa

SEQ ID NO: 1865802 - RNA, 19 nt, Homo sapiens
  misc_RNA (1)...(19): siRNA sense strand
ccuacaaguuccagaagac

SEQ ID NO: 1865803 - RNA, 19 nt, Homo sapiens
  misc_RNA (1)...(19): siRNA sense strand
gcgccaacaacaagaagau

SEQ ID NO: 1865804 - RNA, 19 nt, Homo sapiens
  misc_RNA (1)...(19): siRNA sense strand
ucaacgaggacaccaugga

SEQ ID NO: 1865805 - RNA, 19 nt, Homo sapiens
  misc_RNA (1)...(19): siRNA sense strand
gcccugguguacuauggau

SEQ ID NO: 1865806 - RNA, 19 nt, Homo sapiens
  misc_RNA (1)...(19): siRNA sense strand
cuaucuacaucgagaaagg

SEQ ID NO: 1865807 - RNA, 19 nt, Homo sapiens
  misc_RNA (1)...(19): siRNA sense strand
ccgcuguucuaucuacauc

SEQ ID NO: 1865808 - RNA, 19 nt, Homo sapiens
  misc_RNA (1)...(19): siRNA sense strand
guacaacuauucuucagua

SEQ ID NO: 1865809 - RNA, 19 nt, Homo sapiens
  misc_RNA (1)...(19): siRNA sense strand
gcagaaagaagaaagaaua

SEQ ID NO: 1865810 - RNA, 19 nt, Homo sapiens
  misc_RNA (1)...(19): siRNA sense strand
caacagguaucaucuuuau

SEQ ID NO: 1865811 - RNA, 19 nt, Homo sapiens
  misc_RNA (1)...(19): siRNA sense strand
gguaucaucuuuaucagaa

SEQ ID NO: 1865812 - RNA, 19 nt, Homo sapiens
  misc_RNA (1)...(19): siRNA sense strand
gaaagaauaugugaaaugc

SEQ ID NO: 1865813 - RNA, 19 nt, Homo sapiens
  misc_RNA (1)...(19): siRNA sense strand
cagagaagcugcucgagaa

SEQ ID NO: 1865814 - RNA, 19 nt, Homo sapiens
  misc_RNA (1)...(19): siRNA sense strand
ugaaggaucuuuauuccaa

SEQ ID NO: 1865815 - RNA, 19 nt, Homo sapiens
  misc_RNA (1)...(19): siRNA sense strand
gcucacauuucucauauug

SEQ ID NO: 1865816 - RNA, 19 nt, Homo sapiens
  misc_RNA (1)...(19): siRNA sense strand
ggacucauccgacagcaua

SEQ ID NO: 1865817 - RNA, 19 nt, Homo sapiens
  misc_RNA (1)...(19): siRNA sense strand
gagcucacauuucucauau

SEQ ID NO: 1865818 - RNA, 19 nt, Homo sapiens
  misc_RNA (1)...(19): siRNA sense strand
ucauauugcucaacaggua

SEQ ID NO: 1865819 - RNA, 19 nt, Homo sapiens
  misc_RNA (1)...(19): siRNA sense strand
gaagauucccacaagagua

SEQ ID NO: 1865820 - RNA, 19 nt, Homo sapiens
  misc_RNA (1)...(19): siRNA sense strand
gcaaucagguggucguaca

SEQ ID NO: 1865821 - RNA, 19 nt, Homo sapiens
  misc_RNA (1)...(19): siRNA sense strand
caaacugcaucaggagaua

SEQ ID NO: 1865822 - RNA, 19 nt, Homo sapiens
  misc_RNA (1)...(19): siRNA sense strand
cuucagacauuaaccauga

SEQ ID NO: 1865823 - RNA, 19 nt, Homo sapiens
  misc_RNA (1)...(19): siRNA sense strand
caacuauucuucaguaugc

SEQ ID NO: 1865824 - RNA, 19 nt, Homo sapiens
  misc_RNA (1)...(19): siRNA sense strand
ucagggagcucacauuucu

SEQ ID NO: 1865825 - RNA, 19 nt, Homo sapiens
  misc_RNA (1)...(19): siRNA sense strand
gaaugucgcagaaagaaga

SEQ ID NO: 1865826 - RNA, 19 nt, Homo sapiens
  misc_RNA (1)...(19): siRNA sense strand
ggagcucacauuucucaua

SEQ ID NO: 1865827 - RNA, 19 nt, Homo sapiens
  misc_RNA (1)...(19): siRNA sense strand
aaauggagccuuacaguug

SEQ ID NO: 1865828 - RNA, 19 nt, Homo sapiens
  misc_RNA (1)...(19): siRNA sense strand
gauccgaacuacaccuuca

SEQ ID NO: 1865829 - RNA, 19 nt, Homo sapiens
  misc_RNA (1)...(19): siRNA sense strand
cauuaaccaugacaaauuc

SEQ ID NO: 1865830 - RNA, 19 nt, Homo sapiens
  misc_RNA (1)...(19): siRNA sense strand
gcucgagaaugucgcagaa

SEQ ID NO: 1865831 - RNA, 19 nt, Homo sapiens
  misc_RNA (1)...(19): siRNA sense strand
uacagggacuucagacauu

SEQ ID NO: 1865832 - RNA, 19 nt, Homo sapiens
  misc_RNA (1)...(19): siRNA sense strand
gaaggaucuuuauuccaau

SEQ ID NO: 1865833 - RNA, 19 nt, Homo sapiens
  misc_RNA (1)...(19): siRNA sense strand
gagaaugucgcagaaagaa

SEQ ID NO: 1865834 - RNA, 19 nt, Homo sapiens
  misc_RNA (1)...(19): siRNA sense strand
acagggacuucagacauua

SEQ ID NO: 1865835 - RNA, 19 nt, Homo sapiens
  misc_RNA (1)...(19): siRNA sense strand
caaauggagccuuacaguu

SEQ ID NO: 1865836 - RNA, 19 nt, Homo sapiens
  misc_RNA (1)...(19): siRNA sense strand
uaugugaaaugccuggaaa

SEQ ID NO: 1865837 - RNA, 19 nt, Homo sapiens
  misc_RNA (1)...(19): siRNA sense strand
cauaggcuccucacagaaa

SEQ ID NO: 1865838 - RNA, 19 nt, Homo sapiens
  misc_RNA (1)...(19): siRNA sense strand
guucagggagcucacauuu

SEQ ID NO: 1865839 - RNA, 19 nt, Homo sapiens
  misc_RNA (1)...(19): siRNA sense strand
ucagcaagguacaacuauu

SEQ ID NO: 1865840 - RNA, 19 nt, Homo sapiens
  misc_RNA (1)...(19): siRNA sense strand
gacaguacauugccauugc

SEQ ID NO: 1865841 - RNA, 19 nt, Homo sapiens
  misc_RNA (1)...(19): siRNA sense strand
agaagcugcucgagaaugu

SEQ ID NO: 1865842 - RNA, 19 nt, Homo sapiens
  misc_RNA (1)...(19): siRNA sense strand
caagguacaacuauucuuc

SEQ ID NO: 1865843 - RNA, 19 nt, Homo sapiens
  misc_RNA (1)...(19): siRNA sense strand
cucaacagguaucaucuuu

SEQ ID NO: 1865844 - RNA, 19 nt, Homo sapiens
  misc_RNA (1)...(19): siRNA sense strand
ggacaguacauugccauug

SEQ ID NO: 1865845 - RNA, 19 nt, Homo sapiens
  misc_RNA (1)...(19): siRNA sense strand
acagguaucaucuuuauca

SEQ ID NO: 1865846 - RNA, 19 nt, Homo sapiens
  misc_RNA (1)...(19): siRNA sense strand
guacagggacuucagacau

SEQ ID NO: 1865847 - RNA, 19 nt, Homo sapiens
  misc_RNA (1)...(19): siRNA sense strand
cgaacuacaccuucagcua

SEQ ID NO: 1865848 - RNA, 19 nt, Homo sapiens
  misc_RNA (1)...(19): siRNA sense strand
cuacuucucugccacaaac

SEQ ID NO: 1865849 - RNA, 19 nt, Homo sapiens
  misc_RNA (1)...(19): siRNA sense strand
ucacauuucucauauugcu

SEQ ID NO: 1865850 - RNA, 19 nt, Homo sapiens
  misc_RNA (1)...(19): siRNA sense strand
ucaccucucagacaacuaa

SEQ ID NO: 1865851 - RNA, 19 nt, Homo sapiens
  misc_RNA (1)...(19): siRNA sense strand
gcaaguccaggcacagaug

SEQ ID NO: 1865852 - RNA, 19 nt, Homo sapiens
  misc_RNA (1)...(19): siRNA sense strand
ucaacagguaucaucuuua

SEQ ID NO: 1865853 - RNA, 19 nt, Homo sapiens
  misc_RNA (1)...(19): siRNA sense strand
agacaacuaagacagauga

SEQ ID NO: 1865854 - RNA, 19 nt, Homo sapiens
  misc_RNA (1)...(19): siRNA sense strand
ugacaucuccugugacucu

SEQ ID NO: 1865855 - RNA, 19 nt, Homo sapiens
  misc_RNA (1)...(19): siRNA sense strand
ccaaauggagccuuacagu

SEQ ID NO: 1865856 - RNA, 19 nt, Homo sapiens
  misc_RNA (1)...(19): siRNA sense strand
agacauuaaccaugacaaa

SEQ ID NO: 1865857 - RNA, 19 nt, Homo sapiens
  misc_RNA (1)...(19): siRNA sense strand
cagcaagguacaacuauuc

SEQ ID NO: 1865858 - RNA, 19 nt, Homo sapiens
  misc_RNA (1)...(19): siRNA sense strand
gaaagcccacgggauccua

SEQ ID NO: 1865859 - RNA, 19 nt, Homo sapiens
  misc_RNA (1)...(19): siRNA sense strand
cauaucagauccgaacuac

SEQ ID NO: 1865860 - RNA, 19 nt, Homo sapiens
  misc_RNA (1)...(19): siRNA sense strand
gacauuaaccaugacaaau

SEQ ID NO: 1865861 - RNA, 19 nt, Homo sapiens
  misc_RNA (1)...(19): siRNA sense strand
ggaguacagggacuucaga

SEQ ID NO: 1865862 - RNA, 19 nt, Homo sapiens
  misc_RNA (1)...(19): siRNA sense strand
agcauaggcuccucacaga

SEQ ID NO: 1865863 - RNA, 19 nt, Homo sapiens
  misc_RNA (1)...(19): siRNA sense strand
gagaagcugcucgagaaug

SEQ ID NO: 1865864 - RNA, 19 nt, Homo sapiens
  misc_RNA (1)...(19): siRNA sense strand
ucagacaacuaagacagau

SEQ ID NO: 1865865 - RNA, 19 nt, Homo sapiens
  misc_RNA (1)...(19): siRNA sense strand
cgagaaugucgcagaaaga

SEQ ID NO: 1865866 - RNA, 19 nt, Homo sapiens
  misc_RNA (1)...(19): siRNA sense strand
ggacuucagacauuaacca

SEQ ID NO: 1865867 - RNA, 19 nt, Homo sapiens
  misc_RNA (1)...(19): siRNA sense strand
ucgagaaugucgcagaaag

SEQ ID NO: 1865868 - RNA, 19 nt, Homo sapiens
  misc_RNA (1)...(19): siRNA sense strand
gcgcccaucuuacagaaaa

SEQ ID NO: 1865869 - RNA, 19 nt, Homo sapiens
  misc_RNA (1)...(19): siRNA sense strand
gauggacagcagauacuug

SEQ ID NO: 1865870 - RNA, 19 nt, Homo sapiens
  misc_RNA (1)...(19): siRNA sense strand
gcauaggcuccucacagaa

SEQ ID NO: 1865871 - RNA, 19 nt, Homo sapiens
  misc_RNA (1)...(19): siRNA sense strand
cugcugcugucacuucuau

SEQ ID NO: 1865872 - RNA, 19 nt, Homo sapiens
  misc_RNA (1)...(19): siRNA sense strand
acucucaccucucagacaa

SEQ ID NO: 1865873 - RNA, 19 nt, Homo sapiens
  misc_RNA (1)...(19): siRNA sense strand
gcaagguacaacuauucuu

SEQ ID NO: 1865874 - RNA, 19 nt, Homo sapiens
  misc_RNA (1)...(19): siRNA sense strand
ccaacucccaucuaucaga

SEQ ID NO: 1865875 - RNA, 19 nt, Homo sapiens
  misc_RNA (1)...(19): siRNA sense strand
aaaaggagacggagaaaau

SEQ ID NO: 1865876 - RNA, 19 nt, Homo sapiens
  misc_RNA (1)...(19): siRNA sense strand
gcucaacagguaucaucuu

SEQ ID NO: 1865877 - RNA, 19 nt, Homo sapiens
  misc_RNA (1)...(19): siRNA sense strand
uaucagauccgaacuacac

SEQ ID NO: 1865878 - RNA, 19 nt, Homo sapiens
  misc_RNA (1)...(19): siRNA sense strand
aagaguaccacgucagaga

SEQ ID NO: 1865879 - RNA, 19 nt, Homo sapiens
  misc_RNA (1)...(19): siRNA sense strand
caaauucaggcaguacuca

SEQ ID NO: 1865880 - RNA, 19 nt, Homo sapiens
  misc_RNA (1)...(19): siRNA sense strand
acaagaguaccacgucaga

SEQ ID NO: 1865881 - RNA, 19 nt, Homo sapiens
  misc_RNA (1)...(19): siRNA sense strand
gaaaaggagacggagaaaa

SEQ ID NO: 1865882 - RNA, 19 nt, Homo sapiens
  misc_RNA (1)...(19): siRNA sense strand
ggucguacaaacugcauca

SEQ ID NO: 1865883 - RNA, 19 nt, Homo sapiens
  misc_RNA (1)...(19): siRNA sense strand
gaagauacacggggcagaa

SEQ ID NO: 1865884 - RNA, 19 nt, Homo sapiens
  misc_RNA (1)...(19): siRNA sense strand
acucccaucuaucagacua

SEQ ID NO: 1865885 - RNA, 19 nt, Homo sapiens
  misc_RNA (1)...(19): siRNA sense strand
ggcaguacucagcaaggua

SEQ ID NO: 1865886 - RNA, 19 nt, Homo sapiens
  misc_RNA (1)...(19): siRNA sense strand
aggcacagauggaguacag

SEQ ID NO: 1865887 - RNA, 19 nt, Homo sapiens
  misc_RNA (1)...(19): siRNA sense strand
acauaucagauccgaacua

SEQ ID NO: 1865888 - RNA, 19 nt, Homo sapiens
  misc_RNA (1)...(19): siRNA sense strand
uuucucauauugcucaaca

SEQ ID NO: 1865889 - RNA, 19 nt, Homo sapiens
  misc_RNA (1)...(19): siRNA sense strand
gcugcugucacuucuaugu

SEQ ID NO: 1865890 - RNA, 19 nt, Homo sapiens
  misc_RNA (1)...(19): siRNA sense strand
uguuccaacucccaucuau

SEQ ID NO: 1865891 - RNA, 19 nt, Homo sapiens
  misc_RNA (1)...(19): siRNA sense strand
gaguugcaguccuggaaaa

SEQ ID NO: 1865892 - RNA, 19 nt, Homo sapiens
  misc_RNA (1)...(19): siRNA sense strand
uagcagcggacaguacauu

SEQ ID NO: 1865893 - RNA, 19 nt, Homo sapiens
  misc_RNA (1)...(19): siRNA sense strand
gaaagccuguaauaacuua

SEQ ID NO: 1865894 - RNA, 19 nt, Homo sapiens
  misc_RNA (1)...(19): siRNA sense strand
ggacagaccuuugguaaau

SEQ ID NO: 1865895 - RNA, 19 nt, Homo sapiens
  misc_RNA (1)...(19): siRNA sense strand
gaagucauaccucacaaua

SEQ ID NO: 1865896 - RNA, 19 nt, Homo sapiens
  misc_RNA (1)...(19): siRNA sense strand
caucagagaacucacauua

SEQ ID NO: 1865897 - RNA, 19 nt, Homo sapiens
  misc_RNA (1)...(19): siRNA sense strand
gagaaagccuguaauaacu

SEQ ID NO: 1865898 - RNA, 19 nt, Homo sapiens
  misc_RNA (1)...(19): siRNA sense strand
gagaaacccuccauuagca

SEQ ID NO: 1865899 - RNA, 19 nt, Homo sapiens
  misc_RNA (1)...(19): siRNA sense strand
gggauaagcccuacaaaug

SEQ ID NO: 1865900 - RNA, 19 nt, Homo sapiens
  misc_RNA (1)...(19): siRNA sense strand
gaaaagcccuaugaauaua

SEQ ID NO: 1865901 - RNA, 19 nt, Homo sapiens
  misc_RNA (1)...(19): siRNA sense strand
uaagaagguucauauagga

SEQ ID NO: 1865902 - RNA, 19 nt, Homo sapiens
  misc_RNA (1)...(19): siRNA sense strand
caagaugccuacugaggaa

SEQ ID NO: 1865903 - RNA, 19 nt, Homo sapiens
  misc_RNA (1)...(19): siRNA sense strand
gaaaagcccuaucagugua

SEQ ID NO: 1865904 - RNA, 19 nt, Homo sapiens
  misc_RNA (1)...(19): siRNA sense strand
gggaaaagcccuaugaaua

SEQ ID NO: 1865905 - RNA, 19 nt, Homo sapiens
  misc_RNA (1)...(19): siRNA sense strand
ggauaagcccuacaaaugu

SEQ ID NO: 1865906 - RNA, 19 nt, Homo sapiens
  misc_RNA (1)...(19): siRNA sense strand
gacagaccuuugguaaaua

SEQ ID NO: 1865907 - RNA, 19 nt, Homo sapiens
  misc_RNA (1)...(19): siRNA sense strand
ggaaaagcccuaugaauau

SEQ ID NO: 1865908 - RNA, 19 nt, Homo sapiens
  misc_RNA (1)...(19): siRNA sense strand
ucagagaacucacauuagg

SEQ ID NO: 1865909 - RNA, 19 nt, Homo sapiens
  misc_RNA (1)...(19): siRNA sense strand
uaugagaaagccuguaaua

SEQ ID NO: 1865910 - RNA, 19 nt, Homo sapiens
  misc_RNA (1)...(19): siRNA sense strand
gccuguaacugcugugaaa

SEQ ID NO: 1865911 - RNA, 19 nt, Homo sapiens
  misc_RNA (1)...(19): siRNA sense strand
cauauagccacaagucaua

SEQ ID NO: 1865912 - RNA, 19 nt, Homo sapiens
  misc_RNA (1)...(19): siRNA sense strand
guaaaucaacuucucacuu

SEQ ID NO: 1865913 - RNA, 19 nt, Homo sapiens
  misc_RNA (1)...(19): siRNA sense strand
ccauaugcauguaacaaau

SEQ ID NO: 1865914 - RNA, 19 nt, Homo sapiens
  misc_RNA (1)...(19): siRNA sense strand
guaagucauuccucacugu

SEQ ID NO: 1865915 - RNA, 19 nt, Homo sapiens
  misc_RNA (1)...(19): siRNA sense strand
agucauaccucacaauaca

SEQ ID NO: 1865916 - RNA, 19 nt, Homo sapiens
  misc_RNA (1)...(19): siRNA sense strand
cauaagaagguucauauag

SEQ ID NO: 1865917 - RNA, 19 nt, Homo sapiens
  misc_RNA (1)...(19): siRNA sense strand
ugugagaaacccuccauua

SEQ ID NO: 1865918 - RNA, 19 nt, Homo sapiens
  misc_RNA (1)...(19): siRNA sense strand
caagggauaacucagguaa

SEQ ID NO: 1865919 - RNA, 19 nt, Homo sapiens
  misc_RNA (1)...(19): siRNA sense strand
ugagaaagccuguaauaac

SEQ ID NO: 1865920 - RNA, 19 nt, Homo sapiens
  misc_RNA (1)...(19): siRNA sense strand
gaacucacauuagggaaaa

SEQ ID NO: 1865921 - RNA, 19 nt, Homo sapiens
  misc_RNA (1)...(19): siRNA sense strand
gcauuuagccauaagucaa

SEQ ID NO: 1865922 - RNA, 19 nt, Homo sapiens
  misc_RNA (1)...(19): siRNA sense strand
uaagucaaaccucaggaua

SEQ ID NO: 1865923 - RNA, 19 nt, Homo sapiens
  misc_RNA (1)...(19): siRNA sense strand
caacuucucacuuuacauc

SEQ ID NO: 1865924 - RNA, 19 nt, Homo sapiens
  misc_RNA (1)...(19): siRNA sense strand
gaaacccuccauuagcaaa

SEQ ID NO: 1865925 - RNA, 19 nt, Homo sapiens
  misc_RNA (1)...(19): siRNA sense strand
gcaugugaccauugugaaa

SEQ ID NO: 1865926 - RNA, 19 nt, Homo sapiens
  misc_RNA (1)...(19): siRNA sense strand
cacaauacaucauagaacu

SEQ ID NO: 1865927 - RNA, 19 nt, Homo sapiens
  misc_RNA (1)...(19): siRNA sense strand
uagcaaaucagaccucaug

SEQ ID NO: 1865928 - RNA, 19 nt, Homo sapiens
  misc_RNA (1)...(19): siRNA sense strand
gcauguaacaaauguggaa

SEQ ID NO: 1865929 - RNA, 19 nt, Homo sapiens
  misc_RNA (1)...(19): siRNA sense strand
auaagaagguucauauagg

SEQ ID NO: 1865930 - RNA, 19 nt, Homo sapiens
  misc_RNA (1)...(19): siRNA sense strand
agggauaacucagguaaga

SEQ ID NO: 1865931 - RNA, 19 nt, Homo sapiens
  misc_RNA (1)...(19): siRNA sense strand
acagaccuuugguaaauau

SEQ ID NO: 1865932 - RNA, 19 nt, Homo sapiens
  misc_RNA (1)...(19): siRNA sense strand
aaacauauagccacaaguc

SEQ ID NO: 1865933 - RNA, 19 nt, Homo sapiens
  misc_RNA (1)...(19): siRNA sense strand
gugagaaacccuccauuag

SEQ ID NO: 1865934 - RNA, 19 nt, Homo sapiens
  misc_RNA (1)...(19): siRNA sense strand
uaggacagaccuuugguaa

SEQ ID NO: 1865935 - RNA, 19 nt, Homo sapiens
  misc_RNA (1)...(19): siRNA sense strand
augaauguguugaauguga

SEQ ID NO: 1865936 - RNA, 19 nt, Homo sapiens
  misc_RNA (1)...(19): siRNA sense strand
ggauaacucagguaagaca

SEQ ID NO: 1865937 - RNA, 19 nt, Homo sapiens
  misc_RNA (1)...(19): siRNA sense strand
ggaaaagcccuaucagugu

SEQ ID NO: 1865938 - RNA, 19 nt, Homo sapiens
  misc_RNA (1)...(19): siRNA sense strand
gcaaaagcccuaugcaugu

SEQ ID NO: 1865939 - RNA, 19 nt, Homo sapiens
  misc_RNA (1)...(19): siRNA sense strand
aauaugagaaagccuguaa

SEQ ID NO: 1865940 - RNA, 19 nt, Homo sapiens
  misc_RNA (1)...(19): siRNA sense strand
gcaaugaacuggggaaaac

SEQ ID NO: 1865941 - RNA, 19 nt, Homo sapiens
  misc_RNA (1)...(19): siRNA sense strand
aaccuucacuguaaaucaa

SEQ ID NO: 1865942 - RNA, 19 nt, Homo sapiens
  misc_RNA (1)...(19): siRNA sense strand
guuccucacuguccaucaa

SEQ ID NO: 1865943 - RNA, 19 nt, Homo sapiens
  misc_RNA (1)...(19): siRNA sense strand
guagaaaacccuuuaucaa

SEQ ID NO: 1865944 - RNA, 19 nt, Homo sapiens
  misc_RNA (1)...(19): siRNA sense strand
agucaaaccucaggauaca

SEQ ID NO: 1865945 - RNA, 19 nt, Homo sapiens
  misc_RNA (1)...(19): siRNA sense strand
ggauacaucagagaacuca

SEQ ID NO: 1865946 - RNA, 19 nt, Homo sapiens
  misc_RNA (1)...(19): siRNA sense strand
caauacaucauagaacuca

SEQ ID NO: 1865947 - RNA, 19 nt, Homo sapiens
  misc_RNA (1)...(19): siRNA sense strand
gaacucacacuggggauaa

SEQ ID NO: 1865948 - RNA, 19 nt, Homo sapiens
  misc_RNA (1)...(19): siRNA sense strand
ucauauaggacagaccuuu

SEQ ID NO: 1865949 - RNA, 19 nt, Homo sapiens
  misc_RNA (1)...(19): siRNA sense strand
cagaagucauaccucacaa

SEQ ID NO: 1865950 - RNA, 19 nt, Homo sapiens
  misc_RNA (1)...(19): siRNA sense strand
cauauaggacagaccuuug

SEQ ID NO: 1865951 - RNA, 19 nt, Homo sapiens
  misc_RNA (1)...(19): siRNA sense strand
agucauuccucacuuuaca

SEQ ID NO: 1865952 - RNA, 19 nt, Homo sapiens
  misc_RNA (1)...(19): siRNA sense strand
gaaaagcccuauggaugca

SEQ ID NO: 1865953 - RNA, 19 nt, Homo sapiens
  misc_RNA (1)...(19): siRNA sense strand
cagguaagacagccaacuu

SEQ ID NO: 1865954 - RNA, 19 nt, Homo sapiens
  misc_RNA (1)...(19): siRNA sense strand
gaauaugagaaagccugua

SEQ ID NO: 1865955 - RNA, 19 nt, Homo sapiens
  misc_RNA (1)...(19): siRNA sense strand
ugagaaacccuccauuagc

SEQ ID NO: 1865956 - RNA, 19 nt, Homo sapiens
  misc_RNA (1)...(19): siRNA sense strand
cauuuagccauaagucaaa

SEQ ID NO: 1865957 - RNA, 19 nt, Homo sapiens
  misc_RNA (1)...(19): siRNA sense strand
uaccucacaauacaucaua

SEQ ID NO: 1865958 - RNA, 19 nt, Homo sapiens
  misc_RNA (1)...(19): siRNA sense strand
ucagaagucauaccucaca

SEQ ID NO: 1865959 - RNA, 19 nt, Homo sapiens
  misc_RNA (1)...(19): siRNA sense strand
cccuauggaugcaaugaau

SEQ ID NO: 1865960 - RNA, 19 nt, Homo sapiens
  misc_RNA (1)...(19): siRNA sense strand
caggauacaucagagaacu

SEQ ID NO: 1865961 - RNA, 19 nt, Homo sapiens
  misc_RNA (1)...(19): siRNA sense strand
ucaaaccucaggauacauc

SEQ ID NO: 1865962 - RNA, 19 nt, Homo sapiens
  misc_RNA (1)...(19): siRNA sense strand
cuaugcaugugaccauugu

SEQ ID NO: 1865963 - RNA, 19 nt, Homo sapiens
  misc_RNA (1)...(19): siRNA sense strand
ccuuuagucagaagucaua

SEQ ID NO: 1865964 - RNA, 19 nt, Homo sapiens
  misc_RNA (1)...(19): siRNA sense strand
uauaaguccagccucacua

SEQ ID NO: 1865965 - RNA, 19 nt, Homo sapiens
  misc_RNA (1)...(19): siRNA sense strand
cauaugcauguaacaaaug

SEQ ID NO: 1865966 - RNA, 19 nt, Homo sapiens
  misc_RNA (1)...(19): siRNA sense strand
caaagcuuacuguccauca

SEQ ID NO: 1865967 - RNA, 19 nt, Homo sapiens
  misc_RNA (1)...(19): siRNA sense strand
cacuauccaucagagaauu

SEQ ID NO: 1865968 - RNA, 19 nt, Homo sapiens
  misc_RNA (1)...(19): siRNA sense strand
aaaccuucacuguaaauca

SEQ ID NO: 1865969 - RNA, 19 nt, Homo sapiens
  misc_RNA (1)...(19): siRNA sense strand
agaaagccuguaauaacuu

SEQ ID NO: 1865970 - RNA, 19 nt, Homo sapiens
  misc_RNA (1)...(19): siRNA sense strand
agaacucacauuagggaaa

SEQ ID NO: 1865971 - RNA, 19 nt, Homo sapiens
  misc_RNA (1)...(19): siRNA sense strand
gaacucacaccuggcaaaa

SEQ ID NO: 1865972 - RNA, 19 nt, Homo sapiens
  misc_RNA (1)...(19): siRNA sense strand
ucacuauccaucagagaau

SEQ ID NO: 1865973 - RNA, 19 nt, Homo sapiens
  misc_RNA (1)...(19): siRNA sense strand
cuacgaaugcaaugaacug

SEQ ID NO: 1865974 - RNA, 19 nt, Homo sapiens
  misc_RNA (1)...(19): siRNA sense strand
gaauguguugaaugugaga

SEQ ID NO: 1865975 - RNA, 19 nt, Homo sapiens
  misc_RNA (1)...(19): siRNA sense strand
caaaagcccuaugcaugug

SEQ ID NO: 1865976 - RNA, 19 nt, Homo sapiens
  misc_RNA (1)...(19): siRNA sense strand
gaacacacacaggggaaaa

SEQ ID NO: 1865977 - RNA, 19 nt, Homo sapiens
  misc_RNA (1)...(19): siRNA sense strand
aaaagucguuccucacugu

SEQ ID NO: 1865978 - RNA, 19 nt, Homo sapiens
  misc_RNA (1)...(19): siRNA sense strand
ccaagggauaacucaggua

SEQ ID NO: 1865979 - RNA, 19 nt, Homo sapiens
  misc_RNA (1)...(19): siRNA sense strand
augagaaagccuguaauaa

SEQ ID NO: 1865980 - RNA, 19 nt, Homo sapiens
  misc_RNA (1)...(19): siRNA sense strand
cuaugaaugcaaugaaugu

SEQ ID NO: 1865981 - RNA, 19 nt, Homo sapiens
  misc_RNA (1)...(19): siRNA sense strand
cccuaugaaugcaaugaau

SEQ ID NO: 1865982 - RNA, 19 nt, Homo sapiens
  misc_RNA (1)...(19): siRNA sense strand
ucacaauacaucauagaac

SEQ ID NO: 1865983 - RNA, 19 nt, Homo sapiens
  misc_RNA (1)...(19): siRNA sense strand
gcucugauccgcuguugua

SEQ ID NO: 1865984 - RNA, 19 nt, Homo sapiens
  misc_RNA (1)...(19): siRNA sense strand
ugacacagcagccaaguuu

SEQ ID NO: 1865985 - RNA, 19 nt, Homo sapiens
  misc_RNA (1)...(19): siRNA sense strand
cagcagcucuucuccuaug

SEQ ID NO: 1865986 - RNA, 19 nt, Homo sapiens
  misc_RNA (1)...(19): siRNA sense strand
caucuaaacagccuuccua

SEQ ID NO: 1865987 - RNA, 19 nt, Homo sapiens
  misc_RNA (1)...(19): siRNA sense strand
gcucuucuccuaugccauu

SEQ ID NO: 1865988 - RNA, 19 nt, Homo sapiens
  misc_RNA (1)...(19): siRNA sense strand
ccagugaauucaucuaaac

SEQ ID NO: 1865989 - RNA, 19 nt, Homo sapiens
  misc_RNA (1)...(19): siRNA sense strand
uuuggcagcuugaucauug

SEQ ID NO: 1865990 - RNA, 19 nt, Homo sapiens
  misc_RNA (1)...(19): siRNA sense strand
ccauggggcuuuucuguuu

SEQ ID NO: 1865991 - RNA, 19 nt, Homo sapiens
  misc_RNA (1)...(19): siRNA sense strand
ggucuaaucaggccugugu

SEQ ID NO: 1865992 - RNA, 19 nt, Homo sapiens
  misc_RNA (1)...(19): siRNA sense strand
uugaauagcccagugaauu

SEQ ID NO: 1865993 - RNA, 19 nt, Homo sapiens
  misc_RNA (1)...(19): siRNA sense strand
acacagcagccaaguuuau

SEQ ID NO: 1865994 - RNA, 19 nt, Homo sapiens
  misc_RNA (1)...(19): siRNA sense strand
cuaaacagccuuccuacag

SEQ ID NO: 1865995 - RNA, 19 nt, Homo sapiens
  misc_RNA (1)...(19): siRNA sense strand
gcccagugaauucaucuaa

SEQ ID NO: 1865996 - RNA, 19 nt, Homo sapiens
  misc_RNA (1)...(19): siRNA sense strand
agcagcagcucuucuccua

SEQ ID NO: 1865997 - RNA, 19 nt, Homo sapiens
  misc_RNA (1)...(19): siRNA sense strand
gccaggaacccgucucuca

SEQ ID NO: 1865998 - RNA, 19 nt, Homo sapiens
  misc_RNA (1)...(19): siRNA sense strand
cccagugaauucaucuaaa

SEQ ID NO: 1865999 - RNA, 19 nt, Homo sapiens
  misc_RNA (1)...(19): siRNA sense strand
gaaccguguuuggcagcuu

SEQ ID NO: 1866000 - RNA, 19 nt, Homo sapiens
  misc_RNA (1)...(19): siRNA sense strand
gacacagcagccaaguuua

SEQ ID NO: 1866001 - RNA, 19 nt, Homo sapiens
  misc_RNA (1)...(19): siRNA sense strand
ccaggaacccgucucucaa

SEQ ID NO: 1866002 - RNA, 19 nt, Homo sapiens
  misc_RNA (1)...(19): siRNA sense strand
cacagcagccaaguuuauu

SEQ ID NO: 1866003 - RNA, 19 nt, Homo sapiens
  misc_RNA (1)...(19): siRNA sense strand
gcauuggaaccguguuugg

SEQ ID NO: 1866004 - RNA, 19 nt, Homo sapiens
  misc_RNA (1)...(19): siRNA sense strand
gaccggagauacugacaga

SEQ ID NO: 1866005 - RNA, 19 nt, Homo sapiens
  misc_RNA (1)...(19): siRNA sense strand
cgacacagcagccaaguuc

SEQ ID NO: 1866006 - RNA, 19 nt, Homo sapiens
  misc_RNA (1)...(19): siRNA sense strand
ggagccucaucauugguua

SEQ ID NO: 1866007 - RNA, 19 nt, Homo sapiens
  misc_RNA (1)...(19): siRNA sense strand
gccaggaacccuucucuga

SEQ ID NO: 1866008 - RNA, 19 nt, Homo sapiens
  misc_RNA (1)...(19): siRNA sense strand
agcaacagcucuucuccua

SEQ ID NO: 1866009 - RNA, 19 nt, Homo sapiens
  misc_RNA (1)...(19): siRNA sense strand
cggagauacugacagauga

SEQ ID NO: 1866010 - RNA, 19 nt, Homo sapiens
  misc_RNA (1)...(19): siRNA sense strand
gcucuucuccuacgccauu

SEQ ID NO: 1866011 - RNA, 19 nt, Homo sapiens
  misc_RNA (1)...(19): siRNA sense strand
ccaggaacccuucucugaa

SEQ ID NO: 1866012 - RNA, 19 nt, Homo sapiens
  misc_RNA (1)...(19): siRNA sense strand
caaaccagcgccauuucaa

SEQ ID NO: 1866013 - RNA, 19 nt, Homo sapiens
  misc_RNA (1)...(19): siRNA sense strand
gaaacgaccggagauacug

SEQ ID NO: 1866014 - RNA, 19 nt, Homo sapiens
  misc_RNA (1)...(19): siRNA sense strand
gggcugggauuggaacugu

SEQ ID NO: 1866015 - RNA, 19 nt, Homo sapiens
  misc_RNA (1)...(19): siRNA sense strand
uuaccucacuugucucuag

SEQ ID NO: 1866016 - RNA, 19 nt, Homo sapiens
  misc_RNA (1)...(19): siRNA sense strand
gcugaaacgaccggagaua

SEQ ID NO: 1866017 - RNA, 19 nt, Homo sapiens
  misc_RNA (1)...(19): siRNA sense strand
uaucugcaguggugcugaa

SEQ ID NO: 1866018 - RNA, 19 nt, Homo sapiens
  misc_RNA (1)...(19): siRNA sense strand
cagcuuggcagucucaugu

SEQ ID NO: 1866019 - RNA, 19 nt, Homo sapiens
  misc_RNA (1)...(19): siRNA sense strand
ccaaaccagcgccauuuca

SEQ ID NO: 1866020 - RNA, 19 nt, Homo sapiens
  misc_RNA (1)...(19): siRNA sense strand
uuugggagccucaucauug

SEQ ID NO: 1866021 - RNA, 19 nt, Homo sapiens
  misc_RNA (1)...(19): siRNA sense strand
ccggagauacugacagaug

SEQ ID NO: 1866022 - RNA, 19 nt, Homo sapiens
  misc_RNA (1)...(19): siRNA sense strand
cugcugagccguccgcuau

SEQ ID NO: 1866023 - RNA, 19 nt, Homo sapiens
  misc_RNA (1)...(19): siRNA sense strand
gcagucucauguccccuua

SEQ ID NO: 1866024 - RNA, 19 nt, Homo sapiens
  misc_RNA (1)...(19): siRNA sense strand
gcugagccguccgcuaucu

SEQ ID NO: 1866025 - RNA, 19 nt, Homo sapiens
  misc_RNA (1)...(19): siRNA sense strand
ggauuggaacuguguuugg

SEQ ID NO: 1866026 - RNA, 19 nt, Homo sapiens
  misc_RNA (1)...(19): siRNA sense strand
guucgccugcuccaaguuu

SEQ ID NO: 1866027 - RNA, 19 nt, Homo sapiens
  misc_RNA (1)...(19): siRNA sense strand
gggagccucaucauugguu

SEQ ID NO: 1866028 - RNA, 19 nt, Homo sapiens
  misc_RNA (1)...(19): siRNA sense strand
gagauacugacagaugaga

SEQ ID NO: 1866029 - RNA, 19 nt, Homo sapiens
  misc_RNA (1)...(19): siRNA sense strand
aaacgaccggagauacuga

SEQ ID NO: 1866030 - RNA, 19 nt, Homo sapiens
  misc_RNA (1)...(19): siRNA sense strand
gggauuggaacuguguuug

SEQ ID NO: 1866031 - RNA, 19 nt, Homo sapiens
  misc_RNA (1)...(19): siRNA sense strand
gcaagaagcuaccggaugu

SEQ ID NO: 1866032 - RNA, 19 nt, Homo sapiens
  misc_RNA (1)...(19): siRNA sense strand
gaaauagccuggcacaaca

SEQ ID NO: 1866033 - RNA, 19 nt, Homo sapiens
  misc_RNA (1)...(19): siRNA sense strand
gaacuuggaauuccuuuga

SEQ ID NO: 1866034 - RNA, 19 nt, Homo sapiens
  misc_RNA (1)...(19): siRNA sense strand
cagaagaaauucagucaga

SEQ ID NO: 1866035 - RNA, 19 nt, Homo sapiens
  misc_RNA (1)...(19): siRNA sense strand
ugagaaagaugaacuugga

SEQ ID NO: 1866036 - RNA, 19 nt, Homo sapiens
  misc_RNA (1)...(19): siRNA sense strand
gaaggugaaugauaacaag

SEQ ID NO: 1866037 - RNA, 19 nt, Homo sapiens
  misc_RNA (1)...(19): siRNA sense strand
gaaaagccaucguggaauu

SEQ ID NO: 1866038 - RNA, 19 nt, Homo sapiens
  misc_RNA (1)...(19): siRNA sense strand
ggauaacacagccaucaua

SEQ ID NO: 1866039 - RNA, 19 nt, Homo sapiens
  misc_RNA (1)...(19): siRNA sense strand
gaagaugcugucuggaaua

SEQ ID NO: 1866040 - RNA, 19 nt, Homo sapiens
  misc_RNA (1)...(19): siRNA sense strand
gaaagaugaacuuggaauu

SEQ ID NO: 1866041 - RNA, 19 nt, Homo sapiens
  misc_RNA (1)...(19): siRNA sense strand
uguggaaggugaaugauaa

SEQ ID NO: 1866042 - RNA, 19 nt, Homo sapiens
  misc_RNA (1)...(19): siRNA sense strand
gcucauuugugacauuuga

SEQ ID NO: 1866043 - RNA, 19 nt, Homo sapiens
  misc_RNA (1)...(19): siRNA sense strand
caugagaacuccugauaca

SEQ ID NO: 1866044 - RNA, 19 nt, Homo sapiens
  misc_RNA (1)...(19): siRNA sense strand
cauaugggaugucagcaaa

SEQ ID NO: 1866045 - RNA, 19 nt, Homo sapiens
  misc_RNA (1)...(19): siRNA sense strand
gaagaaauucagucagaga

SEQ ID NO: 1866046 - RNA, 19 nt, Homo sapiens
  misc_RNA (1)...(19): siRNA sense strand
ccacuuagaagauguguau

SEQ ID NO: 1866047 - RNA, 19 nt, Homo sapiens
  misc_RNA (1)...(19): siRNA sense strand
ccaaagccgucaauguugu

SEQ ID NO: 1866048 - RNA, 19 nt, Homo sapiens
  misc_RNA (1)...(19): siRNA sense strand
cgaagaugcugucuggaau

SEQ ID NO: 1866049 - RNA, 19 nt, Homo sapiens
  misc_RNA (1)...(19): siRNA sense strand
gcguguggcuuucaauguu

SEQ ID NO: 1866050 - RNA, 19 nt, Homo sapiens
  misc_RNA (1)...(19): siRNA sense strand
gaagcuaccggauguuuca

SEQ ID NO: 1866051 - RNA, 19 nt, Homo sapiens
  misc_RNA (1)...(19): siRNA sense strand
ggacgguuacugcucauuu

SEQ ID NO: 1866052 - RNA, 19 nt, Homo sapiens
  misc_RNA (1)...(19): siRNA sense strand
gguuacugcucauuuguga

SEQ ID NO: 1866053 - RNA, 19 nt, Homo sapiens
  misc_RNA (1)...(19): siRNA sense strand
gcagaucgcuuuucaggau

SEQ ID NO: 1866054 - RNA, 19 nt, Homo sapiens
  misc_RNA (1)...(19): siRNA sense strand
gauaacacagccaucauau

SEQ ID NO: 1866055 - RNA, 19 nt, Homo sapiens
  misc_RNA (1)...(19): siRNA sense strand
caacugaugggaauuuaau

SEQ ID NO: 1866056 - RNA, 19 nt, Homo sapiens
  misc_RNA (1)...(19): siRNA sense strand
uaccaaagccgucaauguu

SEQ ID NO: 1866057 - RNA, 19 nt, Homo sapiens
  misc_RNA (1)...(19): siRNA sense strand
caucacuccugcugucaaa

SEQ ID NO: 1866058 - RNA, 19 nt, Homo sapiens
  misc_RNA (1)...(19): siRNA sense strand
ggcaacugaugggaauuua

SEQ ID NO: 1866059 - RNA, 19 nt, Homo sapiens
  misc_RNA (1)...(19): siRNA sense strand
gaacuggacgguugugaag

SEQ ID NO: 1866060 - RNA, 19 nt, Homo sapiens
  misc_RNA (1)...(19): siRNA sense strand
gaauaccacuuauguuuuc

SEQ ID NO: 1866061 - RNA, 19 nt, Homo sapiens
  misc_RNA (1)...(19): siRNA sense strand
gacgguuacugcucauuug

SEQ ID NO: 1866062 - RNA, 19 nt, Homo sapiens
  misc_RNA (1)...(19): siRNA sense strand
gcuguccggucuacuuuga

SEQ ID NO: 1866063 - RNA, 19 nt, Homo sapiens
  misc_RNA (1)...(19): siRNA sense strand
ggaaggugaaugauaacaa

SEQ ID NO: 1866064 - RNA, 19 nt, Homo sapiens
  misc_RNA (1)...(19): siRNA sense strand
gaacuccugauacagcaaa

SEQ ID NO: 1866065 - RNA, 19 nt, Homo sapiens
  misc_RNA (1)...(19): siRNA sense strand
guaccaaccagugugauuu

SEQ ID NO: 1866066 - RNA, 19 nt, Homo sapiens
  misc_RNA (1)...(19): siRNA sense strand
ggacgguugugaagacucu

SEQ ID NO: 1866067 - RNA, 19 nt, Homo sapiens
  misc_RNA (1)...(19): siRNA sense strand
ggaaucuggugaaaaugua

SEQ ID NO: 1866068 - RNA, 19 nt, Homo sapiens
  misc_RNA (1)...(19): siRNA sense strand
gucaauauguugcuacucu

SEQ ID NO: 1866069 - RNA, 19 nt, Homo sapiens
  misc_RNA (1)...(19): siRNA sense strand
gcaacugaugggaauuuaa

SEQ ID NO: 1866070 - RNA, 19 nt, Homo sapiens
  misc_RNA (1)...(19): siRNA sense strand
gcccaucgcucaucuucca

SEQ ID NO: 1866071 - RNA, 19 nt, Homo sapiens
  misc_RNA (1)...(19): siRNA sense strand
aaacagguguggagcugau

SEQ ID NO: 1866072 - RNA, 19 nt, Homo sapiens
  misc_RNA (1)...(19): siRNA sense strand
guaaugaauaccacuuaug

SEQ ID NO: 1866073 - RNA, 19 nt, Homo sapiens
  misc_RNA (1)...(19): siRNA sense strand
cugcaagccuggagcaaga

SEQ ID NO: 1866074 - RNA, 19 nt, Homo sapiens
  misc_RNA (1)...(19): siRNA sense strand
uugguuacgugucuaauau

SEQ ID NO: 1866075 - RNA, 19 nt, Homo sapiens
  misc_RNA (1)...(19): siRNA sense strand
cgacggaucuuugcuucuc

SEQ ID NO: 1866076 - RNA, 19 nt, Homo sapiens
  misc_RNA (1)...(19): siRNA sense strand
gagggucacucugaacaca

SEQ ID NO: 1866077 - RNA, 19 nt, Homo sapiens
  misc_RNA (1)...(19): siRNA sense strand
guguggagcugaugagucu

SEQ ID NO: 1866078 - RNA, 19 nt, Homo sapiens
  misc_RNA (1)...(19): siRNA sense strand
acaaggagccggagcagau

SEQ ID NO: 1866079 - RNA, 19 nt, Homo sapiens
  misc_RNA (1)...(19): siRNA sense strand
gacggacacuccaccaagu

SEQ ID NO: 1866080 - RNA, 19 nt, Homo sapiens
  misc_RNA (1)...(19): siRNA sense strand
cagcaaaggacaaaagaua

SEQ ID NO: 1866081 - RNA, 19 nt, Homo sapiens
  misc_RNA (1)...(19): siRNA sense strand
caacaaggagcccguguac

SEQ ID NO: 1866082 - RNA, 19 nt, Homo sapiens
  misc_RNA (1)...(19): siRNA sense strand
gggcaacugaugggaauuu

SEQ ID NO: 1866083 - RNA, 19 nt, Homo sapiens
  misc_RNA (1)...(19): siRNA sense strand
cguguggcuuucaauguuu

SEQ ID NO: 1866084 - RNA, 19 nt, Homo sapiens
  misc_RNA (1)...(19): siRNA sense strand
aacaugagaacuccugaua

SEQ ID NO: 1866085 - RNA, 19 nt, Homo sapiens
  misc_RNA (1)...(19): siRNA sense strand
ugaaauagccuggcacaac

SEQ ID NO: 1866086 - RNA, 19 nt, Homo sapiens
  misc_RNA (1)...(19): siRNA sense strand
acagggugcugcgaguaua

SEQ ID NO: 1866087 - RNA, 19 nt, Homo sapiens
  misc_RNA (1)...(19): siRNA sense strand
ccaccaaguucuguaccaa

SEQ ID NO: 1866088 - RNA, 19 nt, Homo sapiens
  misc_RNA (1)...(19): siRNA sense strand
gugcugcgaguauacagua

SEQ ID NO: 1866089 - RNA, 19 nt, Homo sapiens
  misc_RNA (1)...(19): siRNA sense strand
gaacaugagaacuccugau

SEQ ID NO: 1866090 - RNA, 19 nt, Homo sapiens
  misc_RNA (1)...(19): siRNA sense strand
gguuacgugucuaauauac

SEQ ID NO: 1866091 - RNA, 19 nt, Homo sapiens
  misc_RNA (1)...(19): siRNA sense strand
gaaaagggaccagauggaa

SEQ ID NO: 1866092 - RNA, 19 nt, Homo sapiens
  misc_RNA (1)...(19): siRNA sense strand
ugacauuugagaaagauga

SEQ ID NO: 1866093 - RNA, 19 nt, Homo sapiens
  misc_RNA (1)...(19): siRNA sense strand
uaaaaguuauguccaagga

SEQ ID NO: 1866094 - RNA, 19 nt, Homo sapiens
  misc_RNA (1)...(19): siRNA sense strand
caaaggaggcacggaaagu

SEQ ID NO: 1866095 - RNA, 19 nt, Homo sapiens
  misc_RNA (1)...(19): siRNA sense strand
aaagaugaacuuggaauuc

SEQ ID NO: 1866096 - RNA, 19 nt, Homo sapiens
  misc_RNA (1)...(19): siRNA sense strand
caauauguugcuacucuga

SEQ ID NO: 1866097 - RNA, 19 nt, Homo sapiens
  misc_RNA (1)...(19): siRNA sense strand
ucgaagaugcugucuggaa

SEQ ID NO: 1866098 - RNA, 19 nt, Homo sapiens
  misc_RNA (1)...(19): siRNA sense strand
gaaagagaagccaguuuug

SEQ ID NO: 1866099 - RNA, 19 nt, Homo sapiens
  misc_RNA (1)...(19): siRNA sense strand
acgacagcaugaagucuuu

SEQ ID NO: 1866100 - RNA, 19 nt, Homo sapiens
  misc_RNA (1)...(19): siRNA sense strand
acaaggagcccguguacag

SEQ ID NO: 1866101 - RNA, 19 nt, Homo sapiens
  misc_RNA (1)...(19): siRNA sense strand
aggcccagcugaacaagga

SEQ ID NO: 1866102 - RNA, 19 nt, Homo sapiens
  misc_RNA (1)...(19): siRNA sense strand
caaagaaaaccaagaguca

SEQ ID NO: 1866103 - RNA, 19 nt, Homo sapiens
  misc_RNA (1)...(19): siRNA sense strand
ugaaagagaagccaguuuu

SEQ ID NO: 1866104 - RNA, 19 nt, Homo sapiens
  misc_RNA (1)...(19): siRNA sense strand
gagaaagaugaacuuggaa

SEQ ID NO: 1866105 - RNA, 19 nt, Homo sapiens
  misc_RNA (1)...(19): siRNA sense strand
gcuucugccucuguggaua

SEQ ID NO: 1866106 - RNA, 19 nt, Homo sapiens
  misc_RNA (1)...(19): siRNA sense strand
cuuagaagauguguaugau

SEQ ID NO: 1866107 - RNA, 19 nt, Homo sapiens
  misc_RNA (1)...(19): siRNA sense strand
gacagggugcugcgaguau

SEQ ID NO: 1866108 - RNA, 19 nt, Homo sapiens
  misc_RNA (1)...(19): siRNA sense strand
ggaaagucuggacccuuga

SEQ ID NO: 1866109 - RNA, 19 nt, Homo sapiens
  misc_RNA (1)...(19): siRNA sense strand
auuccgugcuucuguauga

SEQ ID NO: 1866110 - RNA, 19 nt, Homo sapiens
  misc_RNA (1)...(19): siRNA sense strand
aggauuccgugcuucugua

SEQ ID NO: 1866111 - RNA, 19 nt, Homo sapiens
  misc_RNA (1)...(19): siRNA sense strand
gacgacagcaugaagucuu

SEQ ID NO: 1866112 - RNA, 19 nt, Homo sapiens
  misc_RNA (1)...(19): siRNA sense strand
aaaccaagagucagacaca

SEQ ID NO: 1866113 - RNA, 19 nt, Homo sapiens
  misc_RNA (1)...(19): siRNA sense strand
cagacucgaugaaaacaaa

SEQ ID NO: 1866114 - RNA, 19 nt, Homo sapiens
  misc_RNA (1)...(19): siRNA sense strand
ccgucaauguugugcguuu

SEQ ID NO: 1866115 - RNA, 19 nt, Homo sapiens
  misc_RNA (1)...(19): siRNA sense strand
gaggauuccgugcuucugu

SEQ ID NO: 1866116 - RNA, 19 nt, Homo sapiens
  misc_RNA (1)...(19): siRNA sense strand
cagcaguccuucccuuuug

SEQ ID NO: 1866117 - RNA, 19 nt, Homo sapiens
  misc_RNA (1)...(19): siRNA sense strand
acaacaaggagcccgugua

SEQ ID NO: 1866118 - RNA, 19 nt, Homo sapiens
  misc_RNA (1)...(19): siRNA sense strand
aagaugcugucuggaauag

SEQ ID NO: 1866119 - RNA, 19 nt, Homo sapiens
  misc_RNA (1)...(19): siRNA sense strand
uugcuacucugagcuguga

SEQ ID NO: 1866120 - RNA, 19 nt, Homo sapiens
  misc_RNA (1)...(19): siRNA sense strand
aagaagcuaccggauguuu

SEQ ID NO: 1866121 - RNA, 19 nt, Homo sapiens
  misc_RNA (1)...(19): siRNA sense strand
acuuggaauuccuuugaaa

SEQ ID NO: 1866122 - RNA, 19 nt, Homo sapiens
  misc_RNA (1)...(19): siRNA sense strand
gaugaacuuggaauuccuu

SEQ ID NO: 1866123 - RNA, 19 nt, Homo sapiens
  misc_RNA (1)...(19): siRNA sense strand
gugccuuccuggccauuuc

SEQ ID NO: 1866124 - RNA, 19 nt, Homo sapiens
  misc_RNA (1)...(19): siRNA sense strand
cacccucagugacauuuca

SEQ ID NO: 1866125 - RNA, 19 nt, Homo sapiens
  misc_RNA (1)...(19): siRNA sense strand
cugcucauuugugacauuu

SEQ ID NO: 1866126 - RNA, 19 nt, Homo sapiens
  misc_RNA (1)...(19): siRNA sense strand
uauuguggaaggugaauga

SEQ ID NO: 1866127 - RNA, 19 nt, Homo sapiens
  misc_RNA (1)...(19): siRNA sense strand
cugcagcccaguagucaaa

SEQ ID NO: 1866128 - RNA, 19 nt, Homo sapiens
  misc_RNA (1)...(19): siRNA sense strand
agaaagaugaacuuggaau

SEQ ID NO: 1866129 - RNA, 19 nt, Homo sapiens
  misc_RNA (1)...(19): siRNA sense strand
uguggaaucuggugaaaau

SEQ ID NO: 1866130 - RNA, 19 nt, Homo sapiens
  misc_RNA (1)...(19): siRNA sense strand
gaaggagaggcaagaagcu

SEQ ID NO: 1866131 - RNA, 19 nt, Homo sapiens
  misc_RNA (1)...(19): siRNA sense strand
gaaaggagcaggacaguug

SEQ ID NO: 1866132 - RNA, 19 nt, Homo sapiens
  misc_RNA (1)...(19): siRNA sense strand
ggaugaagcuccugcaguu

SEQ ID NO: 1866133 - RNA, 19 nt, Homo sapiens
  misc_RNA (1)...(19): siRNA sense strand
gaagaagacucuguacuca

SEQ ID NO: 1866134 - RNA, 19 nt, Homo sapiens
  misc_RNA (1)...(19): siRNA sense strand
ggaagaagagaaacgguua

SEQ ID NO: 1866135 - RNA, 19 nt, Homo sapiens
  misc_RNA (1)...(19): siRNA sense strand
acacgaagcuccuggacua

SEQ ID NO: 1866136 - RNA, 19 nt, Homo sapiens
  misc_RNA (1)...(19): siRNA sense strand
gagaaacgguuaagagaag

SEQ ID NO: 1866137 - RNA, 19 nt, Homo sapiens
  misc_RNA (1)...(19): siRNA sense strand
gaagagaagcgcauuaaag

SEQ ID NO: 1866138 - RNA, 19 nt, Homo sapiens
  misc_RNA (1)...(19): siRNA sense strand
gaagaagagaagcgcauua

SEQ ID NO: 1866139 - RNA, 19 nt, Homo sapiens
  misc_RNA (1)...(19): siRNA sense strand
ugaggacgaugguuucuuu

SEQ ID NO: 1866140 - RNA, 19 nt, Homo sapiens
  misc_RNA (1)...(19): siRNA sense strand
gugaggugcuggaaucuuu

SEQ ID NO: 1866141 - RNA, 19 nt, Homo sapiens
  misc_RNA (1)...(19): siRNA sense strand
gaagagaaacgguuaagag

SEQ ID NO: 1866142 - RNA, 19 nt, Homo sapiens
  misc_RNA (1)...(19): siRNA sense strand
ugacagaggacucgaauga

SEQ ID NO: 1866143 - RNA, 19 nt, Homo sapiens
  misc_RNA (1)...(19): siRNA sense strand
gcaagcagcucaaguuacg

SEQ ID NO: 1866144 - RNA, 19 nt, Homo sapiens
  misc_RNA (1)...(19): siRNA sense strand
ggagagacccuuucagaca

SEQ ID NO: 1866145 - RNA, 19 nt, Homo sapiens
  misc_RNA (1)...(19): siRNA sense strand
ggaccacaauaaacuaaau

SEQ ID NO: 1866146 - RNA, 19 nt, Homo sapiens
  misc_RNA (1)...(19): siRNA sense strand
ggacgaugguuucuuugug

SEQ ID NO: 1866147 - RNA, 19 nt, Homo sapiens
  misc_RNA (1)...(19): siRNA sense strand
gcaugugcaucacccaauu

SEQ ID NO: 1866148 - RNA, 19 nt, Homo sapiens
  misc_RNA (1)...(19): siRNA sense strand
caaguuacgugcagaaagg

SEQ ID NO: 1866149 - RNA, 19 nt, Homo sapiens
  misc_RNA (1)...(19): siRNA sense strand
cgaagcuccuggacuauga

SEQ ID NO: 1866150 - RNA, 19 nt, Homo sapiens
  misc_RNA (1)...(19): siRNA sense strand
agaaggagcuuaaggaaaa

SEQ ID NO: 1866151 - RNA, 19 nt, Homo sapiens
  misc_RNA (1)...(19): siRNA sense strand
gagagacccuuucagacau

SEQ ID NO: 1866152 - RNA, 19 nt, Homo sapiens
  misc_RNA (1)...(19): siRNA sense strand
gggacgaguuccuggcuaa

SEQ ID NO: 1866153 - RNA, 19 nt, Homo sapiens
  misc_RNA (1)...(19): siRNA sense strand
gggcaagcagcucaaguua

SEQ ID NO: 1866154 - RNA, 19 nt, Homo sapiens
  misc_RNA (1)...(19): siRNA sense strand
gaacgacaaguuggcauuu

SEQ ID NO: 1866155 - RNA, 19 nt, Homo sapiens
  misc_RNA (1)...(19): siRNA sense strand
gaagaagagaaacgguuaa

SEQ ID NO: 1866156 - RNA, 19 nt, Homo sapiens
  misc_RNA (1)...(19): siRNA sense strand
gagaaggagcuuaaggaaa

SEQ ID NO: 1866157 - RNA, 19 nt, Homo sapiens
  misc_RNA (1)...(19): siRNA sense strand
acuaugagguggacaguga

SEQ ID NO: 1866158 - RNA, 19 nt, Homo sapiens
  misc_RNA (1)...(19): siRNA sense strand
gaggagggcgacuguauga

SEQ ID NO: 1866159 - RNA, 19 nt, Homo sapiens
  misc_RNA (1)...(19): siRNA sense strand
gaagaaggaggaagagaag

SEQ ID NO: 1866160 - RNA, 19 nt, Homo sapiens
  misc_RNA (1)...(19): siRNA sense strand
gauuggugcugaagacaug

SEQ ID NO: 1866161 - RNA, 19 nt, Homo sapiens
  misc_RNA (1)...(19): siRNA sense strand
cgaguucuccuucuugaaa

SEQ ID NO: 1866162 - RNA, 19 nt, Homo sapiens
  misc_RNA (1)...(19): siRNA sense strand
ggaugaugaugacgacaug

SEQ ID NO: 1866163 - RNA, 19 nt, Homo sapiens
  misc_RNA (1)...(19): siRNA sense strand
gcacucccaucucgcugaa

SEQ ID NO: 1866164 - RNA, 19 nt, Homo sapiens
  misc_RNA (1)...(19): siRNA sense strand
caggacaucuuggcuguga

SEQ ID NO: 1866165 - RNA, 19 nt, Homo sapiens
  misc_RNA (1)...(19): siRNA sense strand
ggaugaagaugaggacgau

SEQ ID NO: 1866166 - RNA, 19 nt, Homo sapiens
  misc_RNA (1)...(19): siRNA sense strand
gggagaagcgggagaagga

SEQ ID NO: 1866167 - RNA, 19 nt, Homo sapiens
  misc_RNA (1)...(19): siRNA sense strand
ccaaggaggaggccaagaa

SEQ ID NO: 1866168 - RNA, 19 nt, Homo sapiens
  misc_RNA (1)...(19): siRNA sense strand
gccugaaucuugucccaaa

SEQ ID NO: 1866169 - RNA, 19 nt, Homo sapiens
  misc_RNA (1)...(19): siRNA sense strand
ggaggaaguuuggcaggau

SEQ ID NO: 1866170 - RNA, 19 nt, Homo sapiens
  misc_RNA (1)...(19): siRNA sense strand
ccaucucgcugaagaggaa

SEQ ID NO: 1866171 - RNA, 19 nt, Homo sapiens
  misc_RNA (1)...(19): siRNA sense strand
ccagagcacagucaucauu

SEQ ID NO: 1866172 - RNA, 19 nt, Homo sapiens
  misc_RNA (1)...(19): siRNA sense strand
guaccugucugaggacgaa

SEQ ID NO: 1866173 - RNA, 19 nt, Homo sapiens
  misc_RNA (1)...(19): siRNA sense strand
guucugacauagacuuuag

SEQ ID NO: 1866174 - RNA, 19 nt, Homo sapiens
  misc_RNA (1)...(19): siRNA sense strand
agagugaggugcuggaauc

SEQ ID NO: 1866175 - RNA, 19 nt, Homo sapiens
  misc_RNA (1)...(19): siRNA sense strand
gacuuuagaccgaaacuug

SEQ ID NO: 1866176 - RNA, 19 nt, Homo sapiens
  misc_RNA (1)...(19): siRNA sense strand
ucacccaauucaugaagaa

SEQ ID NO: 1866177 - RNA, 19 nt, Homo sapiens
  misc_RNA (1)...(19): siRNA sense strand
gaacaagcucagacugcaa

SEQ ID NO: 1866178 - RNA, 19 nt, Homo sapiens
  misc_RNA (1)...(19): siRNA sense strand
ccaaagcagcacagcagua

SEQ ID NO: 1866179 - RNA, 19 nt, Homo sapiens
  misc_RNA (1)...(19): siRNA sense strand
gagaggcgacucccaggaa

SEQ ID NO: 1866180 - RNA, 19 nt, Homo sapiens
  misc_RNA (1)...(19): siRNA sense strand
cgaagaagacucuguacuc

SEQ ID NO: 1866181 - RNA, 19 nt, Homo sapiens
  misc_RNA (1)...(19): siRNA sense strand
gugcaucacccaauucaug

SEQ ID NO: 1866182 - RNA, 19 nt, Homo sapiens
  misc_RNA (1)...(19): siRNA sense strand
gggagaggaugaagaugag

SEQ ID NO: 1866183 - RNA, 19 nt, Homo sapiens
  misc_RNA (1)...(19): siRNA sense strand
gcagagaaggccgaaauca

SEQ ID NO: 1866184 - RNA, 19 nt, Homo sapiens
  misc_RNA (1)...(19): siRNA sense strand
gggagaaggaugagaagga

SEQ ID NO: 1866185 - RNA, 19 nt, Homo sapiens
  misc_RNA (1)...(19): siRNA sense strand
gaagagaaggagcuuaagg

SEQ ID NO: 1866186 - RNA, 19 nt, Homo sapiens
  misc_RNA (1)...(19): siRNA sense strand
cuaagaaauucgucaaagg

SEQ ID NO: 1866187 - RNA, 19 nt, Homo sapiens
  misc_RNA (1)...(19): siRNA sense strand
ggacaucuuggcugugaga

SEQ ID NO: 1866188 - RNA, 19 nt, Homo sapiens
  misc_RNA (1)...(19): siRNA sense strand
gcaggacaguuggagugaa

SEQ ID NO: 1866189 - RNA, 19 nt, Homo sapiens
  misc_RNA (1)...(19): siRNA sense strand
ggagggcgacuguaugauc

SEQ ID NO: 1866190 - RNA, 19 nt, Homo sapiens
  misc_RNA (1)...(19): siRNA sense strand
ggcgaguucuccuucuuga

SEQ ID NO: 1866191 - RNA, 19 nt, Homo sapiens
  misc_RNA (1)...(19): siRNA sense strand
gcugugagaccaccgcaaa

SEQ ID NO: 1866192 - RNA, 19 nt, Homo sapiens
  misc_RNA (1)...(19): siRNA sense strand
uuuaagcgccugaaucuug

SEQ ID NO: 1866193 - RNA, 19 nt, Homo sapiens
  misc_RNA (1)...(19): siRNA sense strand
uuucagacauuccuugcaa

SEQ ID NO: 1866194 - RNA, 19 nt, Homo sapiens
  misc_RNA (1)...(19): siRNA sense strand
agaagaaggaggaagagaa

SEQ ID NO: 1866195 - RNA, 19 nt, Homo sapiens
  misc_RNA (1)...(19): siRNA sense strand
agaagaagaaggaggaaga

SEQ ID NO: 1866196 - RNA, 19 nt, Homo sapiens
  misc_RNA (1)...(19): siRNA sense strand
aauagaaucgaaaccagua

SEQ ID NO: 1866197 - RNA, 19 nt, Homo sapiens
  misc_RNA (1)...(19): siRNA sense strand
ggaggagggcgacuguaug

SEQ ID NO: 1866198 - RNA, 19 nt, Homo sapiens
  misc_RNA (1)...(19): siRNA sense strand
aagaagagaagcgcauuaa

SEQ ID NO: 1866199 - RNA, 19 nt, Homo sapiens
  misc_RNA (1)...(19): siRNA sense strand
guuaagagaagaagagaag

SEQ ID NO: 1866200 - RNA, 19 nt, Homo sapiens
  misc_RNA (1)...(19): siRNA sense strand
gaacaugaccccugagagu

SEQ ID NO: 1866201 - RNA, 19 nt, Homo sapiens
  misc_RNA (1)...(19): siRNA sense strand
agagcacagucaucauuga

SEQ ID NO: 1866202 - RNA, 19 nt, Homo sapiens
  misc_RNA (1)...(19): siRNA sense strand
gaaacgguuaagagaagaa

SEQ ID NO: 1866203 - RNA, 19 nt, Homo sapiens
  misc_RNA (1)...(19): siRNA sense strand
ucaggguacuucugugcaa

SEQ ID NO: 1866204 - RNA, 19 nt, Homo sapiens
  misc_RNA (1)...(19): siRNA sense strand
gaggagagacgagcagauc

SEQ ID NO: 1866205 - RNA, 19 nt, Homo sapiens
  misc_RNA (1)...(19): siRNA sense strand
aagaugaggacgaugguuu

SEQ ID NO: 1866206 - RNA, 19 nt, Homo sapiens
  misc_RNA (1)...(19): siRNA sense strand
cauagacuuuagaccgaaa

SEQ ID NO: 1866207 - RNA, 19 nt, Homo sapiens
  misc_RNA (1)...(19): siRNA sense strand
gaugaggagugggaagaag

SEQ ID NO: 1866208 - RNA, 19 nt, Homo sapiens
  misc_RNA (1)...(19): siRNA sense strand
uaagaagacggcacucauc

SEQ ID NO: 1866209 - RNA, 19 nt, Homo sapiens
  misc_RNA (1)...(19): siRNA sense strand
aagagaaacgguuaagaga

SEQ ID NO: 1866210 - RNA, 19 nt, Homo sapiens
  misc_RNA (1)...(19): siRNA sense strand
ggaaagccgaugacauguc

SEQ ID NO: 1866211 - RNA, 19 nt, Homo sapiens
  misc_RNA (1)...(19): siRNA sense strand
aggaagagaaggagcuuaa

SEQ ID NO: 1866212 - RNA, 19 nt, Homo sapiens
  misc_RNA (1)...(19): siRNA sense strand
aagcccgucugccguuuaa

SEQ ID NO: 1866213 - RNA, 19 nt, Homo sapiens
  misc_RNA (1)...(19): siRNA sense strand
agagacccuuucagacauu

SEQ ID NO: 1866214 - RNA, 19 nt, Homo sapiens
  misc_RNA (1)...(19): siRNA sense strand
ccagauuggugcugaagac

SEQ ID NO: 1866215 - RNA, 19 nt, Homo sapiens
  misc_RNA (1)...(19): siRNA sense strand
ccaaggagugggacgaguu

SEQ ID NO: 1866216 - RNA, 19 nt, Homo sapiens
  misc_RNA (1)...(19): siRNA sense strand
agagaaacgguuaagagaa

SEQ ID NO: 1866217 - RNA, 19 nt, Homo sapiens
  misc_RNA (1)...(19): siRNA sense strand
caggacaguuggagugaag

SEQ ID NO: 1866218 - RNA, 19 nt, Homo sapiens
  misc_RNA (1)...(19): siRNA sense strand
ggccagagcacagucauca

SEQ ID NO: 1866219 - RNA, 19 nt, Homo sapiens
  misc_RNA (1)...(19): siRNA sense strand
uuaagcgccugaaucuugu

SEQ ID NO: 1866220 - RNA, 19 nt, Homo sapiens
  misc_RNA (1)...(19): siRNA sense strand
agaaggagaaggcggagaa

SEQ ID NO: 1866221 - RNA, 19 nt, Homo sapiens
  misc_RNA (1)...(19): siRNA sense strand
gaggaggccaagaagaaga

SEQ ID NO: 1866222 - RNA, 19 nt, Homo sapiens
  misc_RNA (1)...(19): siRNA sense strand
ccagggaggcaauaaaugg

SEQ ID NO: 1866223 - RNA, 19 nt, Homo sapiens
  misc_RNA (1)...(19): siRNA sense strand
ucccugagcucucccucuu

SEQ ID NO: 1866224 - RNA, 19 nt, Homo sapiens
  misc_RNA (1)...(19): siRNA sense strand
ccauaagguccgccagaaa

SEQ ID NO: 1866225 - RNA, 19 nt, Homo sapiens
  misc_RNA (1)...(19): siRNA sense strand
cacccggaaugcagauauu

SEQ ID NO: 1866226 - RNA, 19 nt, Homo sapiens
  misc_RNA (1)...(19): siRNA sense strand
gcggcgaguucuccuucuu

SEQ ID NO: 1866227 - RNA, 19 nt, Homo sapiens
  misc_RNA (1)...(19): siRNA sense strand
agaagcagcggcucaagga

SEQ ID NO: 1866228 - RNA, 19 nt, Homo sapiens
  misc_RNA (1)...(19): siRNA sense strand
gcaaaucaagucccuucca

SEQ ID NO: 1866229 - RNA, 19 nt, Homo sapiens
  misc_RNA (1)...(19): siRNA sense strand
ugggagaggaugaagauga

SEQ ID NO: 1866230 - RNA, 19 nt, Homo sapiens
  misc_RNA (1)...(19): siRNA sense strand
gaccagcuuuuccaguuaa

SEQ ID NO: 1866231 - RNA, 19 nt, Homo sapiens
  misc_RNA (1)...(19): siRNA sense strand
gggagaagcugaccgauga

SEQ ID NO: 1866232 - RNA, 19 nt, Homo sapiens
  misc_RNA (1)...(19): siRNA sense strand
gaugaugacugcaaaguga

SEQ ID NO: 1866233 - RNA, 19 nt, Homo sapiens
  misc_RNA (1)...(19): siRNA sense strand
gagauggccaggucaauua

SEQ ID NO: 1866234 - RNA, 19 nt, Homo sapiens
  misc_RNA (1)...(19): siRNA sense strand
ggucaauuaugaagaguuu

SEQ ID NO: 1866235 - RNA, 19 nt, Homo sapiens
  misc_RNA (1)...(19): siRNA sense strand
gaacgggaccauugacuuc

SEQ ID NO: 1866236 - RNA, 19 nt, Homo sapiens
  misc_RNA (1)...(19): siRNA sense strand
ggauggagauggcacuauc

SEQ ID NO: 1866237 - RNA, 19 nt, Homo sapiens
  misc_RNA (1)...(19): siRNA sense strand
gaaagaugaaggacacaga

SEQ ID NO: 1866238 - RNA, 19 nt, Homo sapiens
  misc_RNA (1)...(19): siRNA sense strand
ugcaggauaugaucaauga

SEQ ID NO: 1866239 - RNA, 19 nt, Homo sapiens
  misc_RNA (1)...(19): siRNA sense strand
ggagauggccaggucaauu

SEQ ID NO: 1866240 - RNA, 19 nt, Homo sapiens
  misc_RNA (1)...(19): siRNA sense strand
ggagguggaugagaugauc

SEQ ID NO: 1866241 - RNA, 19 nt, Homo sapiens
  misc_RNA (1)...(19): siRNA sense strand
guacagaugaugacugcaa

SEQ ID NO: 1866242 - RNA, 19 nt, Homo sapiens
  misc_RNA (1)...(19): siRNA sense strand
ugaagaguuuguacagaug

SEQ ID NO: 1866243 - RNA, 19 nt, Homo sapiens
  misc_RNA (1)...(19): siRNA sense strand
gaagaguuuguacagauga

SEQ ID NO: 1866244 - RNA, 19 nt, Homo sapiens
  misc_RNA (1)...(19): siRNA sense strand
cagggaggcugacaucgau

SEQ ID NO: 1866245 - RNA, 19 nt, Homo sapiens
  misc_RNA (1)...(19): siRNA sense strand
ggaacgggaccauugacuu

SEQ ID NO: 1866246 - RNA, 19 nt, Homo sapiens
  misc_RNA (1)...(19): siRNA sense strand
ccaggucaauuaugaagag

SEQ ID NO: 1866247 - RNA, 19 nt, Homo sapiens
  misc_RNA (1)...(19): siRNA sense strand
ggagcagauugcagaguuc

SEQ ID NO: 1866248 - RNA, 19 nt, Homo sapiens
  misc_RNA (1)...(19): siRNA sense strand
ccagggaacgggaccauug

SEQ ID NO: 1866249 - RNA, 19 nt, Homo sapiens
  misc_RNA (1)...(19): siRNA sense strand
gcacuaucaccaccaagga

SEQ ID NO: 1866250 - RNA, 19 nt, Homo sapiens
  misc_RNA (1)...(19): siRNA sense strand
ugaaggacacagacaguga

SEQ ID NO: 1866251 - RNA, 19 nt, Homo sapiens
  misc_RNA (1)...(19): siRNA sense strand
ggaugcagaugaccuucca

SEQ ID NO: 1866252 - RNA, 19 nt, Homo sapiens
  misc_RNA (1)...(19): siRNA sense strand
caugauggccagaaagaug

SEQ ID NO: 1866253 - RNA, 19 nt, Homo sapiens
  misc_RNA (1)...(19): siRNA sense strand
ccauugacuucccggaguu

SEQ ID NO: 1866254 - RNA, 19 nt, Homo sapiens
  misc_RNA (1)...(19): siRNA sense strand
ggacagaaccccacugaag

SEQ ID NO: 1866255 - RNA, 19 nt, Homo sapiens
  misc_RNA (1)...(19): siRNA sense strand
uaugaagaguuuguacaga

SEQ ID NO: 1866256 - RNA, 19 nt, Homo sapiens
  misc_RNA (1)...(19): siRNA sense strand
cgagaggcguuccgugucu

SEQ ID NO: 1866257 - RNA, 19 nt, Homo sapiens
  misc_RNA (1)...(19): siRNA sense strand
aggagcagauugcagaguu

SEQ ID NO: 1866258 - RNA, 19 nt, Homo sapiens
  misc_RNA (1)...(19): siRNA sense strand
uacagaugaugacugcaaa

SEQ ID NO: 1866259 - RNA, 19 nt, Homo sapiens
  misc_RNA (1)...(19): siRNA sense strand
gaugaaggacacagacagu

SEQ ID NO: 1866260 - RNA, 19 nt, Homo sapiens
  misc_RNA (1)...(19): siRNA sense strand
augaagaguuuguacagau

SEQ ID NO: 1866261 - RNA, 19 nt, Homo sapiens
  misc_RNA (1)...(19): siRNA sense strand
ccgaugaggagguggauga

SEQ ID NO: 1866262 - RNA, 19 nt, Homo sapiens
  misc_RNA (1)...(19): siRNA sense strand
gagcugcgucacguaauga

SEQ ID NO: 1866263 - RNA, 19 nt, Homo sapiens
  misc_RNA (1)...(19): siRNA sense strand
agagcugcgucacguaaug

SEQ ID NO: 1866264 - RNA, 19 nt, Homo sapiens
  misc_RNA (1)...(19): siRNA sense strand
gaguuuguacagaugauga

SEQ ID NO: 1866265 - RNA, 19 nt, Homo sapiens
  misc_RNA (1)...(19): siRNA sense strand
gagaggcguuccgugucuu

SEQ ID NO: 1866266 - RNA, 19 nt, Homo sapiens
  misc_RNA (1)...(19): siRNA sense strand
gcagauugcagaguucaag

SEQ ID NO: 1866267 - RNA, 19 nt, Homo sapiens
  misc_RNA (1)...(19): siRNA sense strand
gagcugcaggauaugauca

SEQ ID NO: 1866268 - RNA, 19 nt, Homo sapiens
  misc_RNA (1)...(19): siRNA sense strand
augaggagguggaugagau

SEQ ID NO: 1866269 - RNA, 19 nt, Homo sapiens
  misc_RNA (1)...(19): siRNA sense strand
cggaguuccugaccaugau

SEQ ID NO: 1866270 - RNA, 19 nt, Homo sapiens
  misc_RNA (1)...(19): siRNA sense strand
ugagguggaugcagaugac

SEQ ID NO: 1866271 - RNA, 19 nt, Homo sapiens
  misc_RNA (1)...(19): siRNA sense strand
cagggaacgggaccauuga

SEQ ID NO: 1866272 - RNA, 19 nt, Homo sapiens
  misc_RNA (1)...(19): siRNA sense strand
auggccaggucaauuauga

SEQ ID NO: 1866273 - RNA, 19 nt, Homo sapiens
  misc_RNA (1)...(19): siRNA sense strand
gauggagauggcacuauca

SEQ ID NO: 1866274 - RNA, 19 nt, Homo sapiens
  misc_RNA (1)...(19): siRNA sense strand
gagcagauugcagaguuca

SEQ ID NO: 1866275 - RNA, 19 nt, Homo sapiens
  misc_RNA (1)...(19): siRNA sense strand
uaugaucaaugagguggau

SEQ ID NO: 1866276 - RNA, 19 nt, Homo sapiens
  misc_RNA (1)...(19): siRNA sense strand
ccggaguuccugaccauga

SEQ ID NO: 1866277 - RNA, 19 nt, Homo sapiens
  misc_RNA (1)...(19): siRNA sense strand
ugacugaggagcagauugc

SEQ ID NO: 1866278 - RNA, 19 nt, Homo sapiens
  misc_RNA (1)...(19): siRNA sense strand
aaucagagcuggcaguuaa

SEQ ID NO: 1866279 - RNA, 19 nt, Homo sapiens
  misc_RNA (1)...(19): siRNA sense strand
ggaauuccauugcaauaga

SEQ ID NO: 1866280 - RNA, 19 nt, Homo sapiens
  misc_RNA (1)...(19): siRNA sense strand
gaaagaagcaggcauguac

SEQ ID NO: 1866281 - RNA, 19 nt, Homo sapiens
  misc_RNA (1)...(19): siRNA sense strand
guucguggauuucaaccua

SEQ ID NO: 1866282 - RNA, 19 nt, Homo sapiens
  misc_RNA (1)...(19): siRNA sense strand
gcaguuaaccugggccuuu

SEQ ID NO: 1866283 - RNA, 19 nt, Homo sapiens
  misc_RNA (1)...(19): siRNA sense strand
gaggcucggugcaaaguga

SEQ ID NO: 1866284 - RNA, 19 nt, Homo sapiens
  misc_RNA (1)...(19): siRNA sense strand
ggaacuaccuaacacuuuu

SEQ ID NO: 1866285 - RNA, 19 nt, Homo sapiens
  misc_RNA (1)...(19): siRNA sense strand
gguuauagucuccgaauga

SEQ ID NO: 1866286 - RNA, 19 nt, Homo sapiens
  misc_RNA (1)...(19): siRNA sense strand
gaaaaggaauuccauugca

SEQ ID NO: 1866287 - RNA, 19 nt, Homo sapiens
  misc_RNA (1)...(19): siRNA sense strand
gaauuccauugcaauagau

SEQ ID NO: 1866288 - RNA, 19 nt, Homo sapiens
  misc_RNA (1)...(19): siRNA sense strand
gggaacuaccuaacacuuu

SEQ ID NO: 1866289 - RNA, 19 nt, Homo sapiens
  misc_RNA (1)...(19): siRNA sense strand
gcagagccaaggagagaaa

SEQ ID NO: 1866290 - RNA, 19 nt, Homo sapiens
  misc_RNA (1)...(19): siRNA sense strand
gaagcugucuuuuggagaa

SEQ ID NO: 1866291 - RNA, 19 nt, Homo sapiens
  misc_RNA (1)...(19): siRNA sense strand
gauuggagcuggaaaagga

SEQ ID NO: 1866292 - RNA, 19 nt, Homo sapiens
  misc_RNA (1)...(19): siRNA sense strand
ugaacgacgugaccucuag

SEQ ID NO: 1866293 - RNA, 19 nt, Homo sapiens
  misc_RNA (1)...(19): siRNA sense strand
ggagagaaagaugaucaaa

SEQ ID NO: 1866294 - RNA, 19 nt, Homo sapiens
  misc_RNA (1)...(19): siRNA sense strand
aaaagaaaaucucccaguu

SEQ ID NO: 1866295 - RNA, 19 nt, Homo sapiens
  misc_RNA (1)...(19): siRNA sense strand
ugagauacagcagguuaua

SEQ ID NO: 1866296 - RNA, 19 nt, Homo sapiens
  misc_RNA (1)...(19): siRNA sense strand
gaugccagccuccaauuuc

SEQ ID NO: 1866297 - RNA, 19 nt, Homo sapiens
  misc_RNA (1)...(19): siRNA sense strand
aagaaaaucucccaguuug

SEQ ID NO: 1866298 - RNA, 19 nt, Homo sapiens
  misc_RNA (1)...(19): siRNA sense strand
agaaaaguaucguguaguu

SEQ ID NO: 1866299 - RNA, 19 nt, Homo sapiens
  misc_RNA (1)...(19): siRNA sense strand
uauccugggccgucuagua

SEQ ID NO: 1866300 - RNA, 19 nt, Homo sapiens
  misc_RNA (1)...(19): siRNA sense strand
ggaaaaccaggacaaaaga

SEQ ID NO: 1866301 - RNA, 19 nt, Homo sapiens
  misc_RNA (1)...(19): siRNA sense strand
caucugcuguucguggauu

SEQ ID NO: 1866302 - RNA, 19 nt, Homo sapiens
  misc_RNA (1)...(19): siRNA sense strand
gccaaggagagaaagauga

SEQ ID NO: 1866303 - RNA, 19 nt, Homo sapiens
  misc_RNA (1)...(19): siRNA sense strand
agaaagaagcaggcaugua

SEQ ID NO: 1866304 - RNA, 19 nt, Homo sapiens
  misc_RNA (1)...(19): siRNA sense strand
gagaagacuggagcgugua

SEQ ID NO: 1866305 - RNA, 19 nt, Homo sapiens
  misc_RNA (1)...(19): siRNA sense strand
ccaaggagagaaagaugau

SEQ ID NO: 1866306 - RNA, 19 nt, Homo sapiens
  misc_RNA (1)...(19): siRNA sense strand
aaaguaucguguaguuuac

SEQ ID NO: 1866307 - RNA, 19 nt, Homo sapiens
  misc_RNA (1)...(19): siRNA sense strand
gagagaaagaugaucaaaa

SEQ ID NO: 1866308 - RNA, 19 nt, Homo sapiens
  misc_RNA (1)...(19): siRNA sense strand
uauaucaccauccagagaa

SEQ ID NO: 1866309 - RNA, 19 nt, Homo sapiens
  misc_RNA (1)...(19): siRNA sense strand
auagauauaucaccaucca

SEQ ID NO: 1866310 - RNA, 19 nt, Homo sapiens
  misc_RNA (1)...(19): siRNA sense strand
ccauugcaauagauauauc

SEQ ID NO: 1866311 - RNA, 19 nt, Homo sapiens
  misc_RNA (1)...(19): siRNA sense strand
aaggaauuccauugcaaua

SEQ ID NO: 1866312 - RNA, 19 nt, Homo sapiens
  misc_RNA (1)...(19): siRNA sense strand
aaagaaaaguaucguguag

SEQ ID NO: 1866313 - RNA, 19 nt, Homo sapiens
  misc_RNA (1)...(19): siRNA sense strand
guacggaagcugucuuuug

SEQ ID NO: 1866314 - RNA, 19 nt, Homo sapiens
  misc_RNA (1)...(19): siRNA sense strand
gaccgacuacagcaacuug

SEQ ID NO: 1866315 - RNA, 19 nt, Homo sapiens
  misc_RNA (1)...(19): siRNA sense strand
ccggcuuucucgcacuaua

SEQ ID NO: 1866316 - RNA, 19 nt, Homo sapiens
  misc_RNA (1)...(19): siRNA sense strand
gcaauagauauaucaccau

SEQ ID NO: 1866317 - RNA, 19 nt, Homo sapiens
  misc_RNA (1)...(19): siRNA sense strand
gaaaaguaucguguaguuu

SEQ ID NO: 1866318 - RNA, 19 nt, Homo sapiens
  misc_RNA (1)...(19): siRNA sense strand
gagaaagaagcaggcaugu

SEQ ID NO: 1866319 - RNA, 19 nt, Homo sapiens
  misc_RNA (1)...(19): siRNA sense strand
caucagcccuggggaacua

SEQ ID NO: 1866320 - RNA, 19 nt, Homo sapiens
  misc_RNA (1)...(19): siRNA sense strand
aaagaaaaucucccaguuu

SEQ ID NO: 1866321 - RNA, 19 nt, Homo sapiens
  misc_RNA (1)...(19): siRNA sense strand
caccggcuuucucgcacua

SEQ ID NO: 1866322 - RNA, 19 nt, Homo sapiens
  misc_RNA (1)...(19): siRNA sense strand
caguuaaccugggccuuuc

SEQ ID NO: 1866323 - RNA, 19 nt, Homo sapiens
  misc_RNA (1)...(19): siRNA sense strand
cgaugccagccuccaauuu

SEQ ID NO: 1866324 - RNA, 19 nt, Homo sapiens
  misc_RNA (1)...(19): siRNA sense strand
aaaaggaauuccauugcaa

SEQ ID NO: 1866325 - RNA, 19 nt, Homo sapiens
  misc_RNA (1)...(19): siRNA sense strand
aaaggaauuccauugcaau

SEQ ID NO: 1866326 - RNA, 19 nt, Homo sapiens
  misc_RNA (1)...(19): siRNA sense strand
gagauacagcagguuauag

SEQ ID NO: 1866327 - RNA, 19 nt, Homo sapiens
  misc_RNA (1)...(19): siRNA sense strand
gagccaaggagagaaagau

SEQ ID NO: 1866328 - RNA, 19 nt, Homo sapiens
  misc_RNA (1)...(19): siRNA sense strand
ccugggccgucuaguacaa

SEQ ID NO: 1866329 - RNA, 19 nt, Homo sapiens
  misc_RNA (1)...(19): siRNA sense strand
gaaaaccaggacaaaagaa
